United States Patent Application Publication US 2005/0244851 A1 - sequence listing, part 100

SEQ ID NO: 3898118 - DNA, 25 bp, Homo sapien
tatttggaaaccactctgaccctga

SEQ ID NO: 3898119 - DNA, 25 bp, Homo sapien
tggtggcctcaaattgcaaaagttc

SEQ ID NO: 3898120 - DNA, 25 bp, Homo sapien
cactctgctaagattaataatgtgg

SEQ ID NO: 3898121 - DNA, 25 bp, Homo sapien
gcaaaagttcctgcgtcctaattac

SEQ ID NO: 3898122 - DNA, 25 bp, Homo sapien
gaagaggtcagtatccactctgcta

SEQ ID NO: 3898123 - DNA, 25 bp, Homo sapien
gctccagtccacaagtaaacccagt

SEQ ID NO: 3898124 - DNA, 25 bp, Homo sapien
cactgagtgtgggtcactccacaga

SEQ ID NO: 3898125 - DNA, 25 bp, Homo sapien
cagaaaacaagccacgttcctgtgg

SEQ ID NO: 3898126 - DNA, 25 bp, Homo sapien
caaataagcaattctggtctgggaa

SEQ ID NO: 3898127 - DNA, 25 bp, Homo sapien
tgtaggtgtcaatctatcttcaaac

SEQ ID NO: 3898128 - DNA, 25 bp, Homo sapien
cagaagactgatagatagcacaccc

SEQ ID NO: 3898129 - DNA, 25 bp, Homo sapien
tagcacacccaagatgttccattgt

SEQ ID NO: 3898130 - DNA, 25 bp, Homo sapien
tgtccatccctaaatccaacttctg

SEQ ID NO: 3898131 - DNA, 25 bp, Homo sapien
tattggcataatcaggttcttctgg

SEQ ID NO: 3898132 - DNA, 25 bp, Homo sapien
tgtccttattggcataatcaggttc

SEQ ID NO: 3898133 - DNA, 25 bp, Homo sapien
tttcgaaatcgagacctcattgtct

SEQ ID NO: 3898134 - DNA, 25 bp, Homo sapien
cgaaatcgagacctcattgtctgtg

SEQ ID NO: 3898135 - DNA, 25 bp, Homo sapien
aatatgggagagcatttgtgaaaac

SEQ ID NO: 3898136 - DNA, 25 bp, Homo sapien
tatgggagagcatttgtgaaaactg

SEQ ID NO: 3898137 - DNA, 25 bp, Homo sapien
atatgggagagcatttgtgaaaact

SEQ ID NO: 3898138 - DNA, 25 bp, Homo sapien
ttgtcagaagataattaagtttgtc

SEQ ID NO: 3898139 - DNA, 25 bp, Homo sapien
tcagtaattgtcagaagataattaa

SEQ ID NO: 3898140 - DNA, 25 bp, Homo sapien
tcagaagataattaagtttgtccat

SEQ ID NO: 3898141 - DNA, 25 bp, Homo sapien
cagtaattgtcagaagataattaag

SEQ ID NO: 3898142 - DNA, 25 bp, Homo sapien
cacgtttcagtagctgcatggaaga

SEQ ID NO: 3898143 - DNA, 25 bp, Homo sapien
tattttccacgtttcagtagctgca

SEQ ID NO: 3898144 - DNA, 25 bp, Homo sapien
gctgcatggaagacgtcagctgatg

SEQ ID NO: 3898145 - DNA, 25 bp, Homo sapien
gacgtcagctgatgtgtgaccacca

SEQ ID NO: 3898146 - DNA, 25 bp, Homo sapien
taggctggtgtagacatgtacacgc

SEQ ID NO: 3898147 - DNA, 25 bp, Homo sapien
tgtagacatgtacacgccccagtgg

SEQ ID NO: 3898148 - DNA, 25 bp, Homo sapien
ccccaatacataggctggtgtagac

SEQ ID NO: 3898149 - DNA, 25 bp, Homo sapien
tacacgccccagtggttagcagttt

SEQ ID NO: 3898150 - DNA, 25 bp, Homo sapien
ctactttagcagacagcacatcagc

SEQ ID NO: 3898151 - DNA, 25 bp, Homo sapien
ttcttgccagtaacaaatcttgtaa

SEQ ID NO: 3898152 - DNA, 25 bp, Homo sapien
tctttctggactgatctcatttatg

SEQ ID NO: 3898153 - DNA, 25 bp, Homo sapien
cagcaagtttgcagggtaatctttc

SEQ ID NO: 3898154 - DNA, 25 bp, Homo sapien
ccttccaccaatttgtcaacagcat

SEQ ID NO: 3898155 - DNA, 25 bp, Homo sapien
tcagctgaaaagtgccatgaaatgc

SEQ ID NO: 3898156 - DNA, 25 bp, Homo sapien
aatgcttgccgaagacagactcagc

SEQ ID NO: 3898157 - DNA, 25 bp, Homo sapien
gcttttgcataaagtccttccacca

SEQ ID NO: 3898158 - DNA, 25 bp, Homo sapien
aaaggacacgatctcttctttgtta

SEQ ID NO: 3898159 - DNA, 25 bp, Homo sapien
aggacacgatctcttctttgttatg

SEQ ID NO: 3898160 - DNA, 25 bp, Homo sapien
gacacgatctcttctttgttatggc

SEQ ID NO: 3898161 - DNA, 25 bp, Homo sapien
ggacacgatctcttctttgttatgg

SEQ ID NO: 3898162 - DNA, 25 bp, Homo sapien
attggctacaatgccgccactgggc

SEQ ID NO: 3898163 - DNA, 25 bp, Homo sapien
ggctacaatgccgccactgggcaaa

SEQ ID NO: 3898164 - DNA, 25 bp, Homo sapien
tcattggctacaatgccgccactgg

SEQ ID NO: 3898165 - DNA, 25 bp, Homo sapien
ctacaatgccgccactgggcaaagc

SEQ ID NO: 3898166 - DNA, 25 bp, Homo sapien
ggtggtgatgcatgagtcacaaggg

SEQ ID NO: 3898167 - DNA, 25 bp, Homo sapien
gatgcatgagtcacaagggtaataa

SEQ ID NO: 3898168 - DNA, 25 bp, Homo sapien
tggtgatgcatgagtcacaagggta

SEQ ID NO: 3898169 - DNA, 25 bp, Homo sapien
tgatgcatgagtcacaagggtaata

SEQ ID NO: 3898170 - DNA, 25 bp, Homo sapien
ctggggacactagcaagaagatcat

SEQ ID NO: 3898171 - DNA, 25 bp, Homo sapien
tctggggacactagcaagaagatca

SEQ ID NO: 3898172 - DNA, 25 bp, Homo sapien
ctctggggacactagcaagaagatc

SEQ ID NO: 3898173 - DNA, 25 bp, Homo sapien
tgctctggggacactagcaagaaga

SEQ ID NO: 3898174 - DNA, 25 bp, Homo sapien
tctcctttccttctccttcctccat

SEQ ID NO: 3898175 - DNA, 25 bp, Homo sapien
cctctccatctcctttccttctcct

SEQ ID NO: 3898176 - DNA, 25 bp, Homo sapien
gaacttcctccaaatcctctccatc

SEQ ID NO: 3898177 - DNA, 25 bp, Homo sapien
ctgaacttcctccaaatcctctcca

SEQ ID NO: 3898178 - DNA, 25 bp, Homo sapien
tctctccatactttttatcaggttt

SEQ ID NO: 3898179 - DNA, 25 bp, Homo sapien
ctatgattgttcgtagggcttctct

SEQ ID NO: 3898180 - DNA, 25 bp, Homo sapien
tccatactttttatcaggtttcttc

SEQ ID NO: 3898181 - DNA, 25 bp, Homo sapien
gcttctctccatactttttatcagg

SEQ ID NO: 3898182 - DNA, 25 bp, Homo sapien
gctttttctttgttctcaggtctta

SEQ ID NO: 3898183 - DNA, 25 bp, Homo sapien
cttggagattttgtccctggctttt

SEQ ID NO: 3898184 - DNA, 25 bp, Homo sapien
tggctttttctttgttctcaggtct

SEQ ID NO: 3898185 - DNA, 25 bp, Homo sapien
tttctttgttctcaggtcttatcat

SEQ ID NO: 3898186 - DNA, 25 bp, Homo sapien
caggtcatgttcatggagctggact

SEQ ID NO: 3898187 - DNA, 25 bp, Homo sapien
tggagacaaaagaggtgggaatctt

SEQ ID NO: 3898188 - DNA, 25 bp, Homo sapien
gcaggtcatgttcatggagctggac

SEQ ID NO: 3898189 - DNA, 25 bp, Homo sapien
gtgggaatcttccttgttccaactc

SEQ ID NO: 3898190 - DNA, 25 bp, Homo sapien
cacccttccctatcctccatactga

SEQ ID NO: 3898191 - DNA, 25 bp, Homo sapien
ttgagtcccattccgtagttaagta

SEQ ID NO: 3898192 - DNA, 25 bp, Homo sapien
gtggcattgagtcccattccgtagt

SEQ ID NO: 3898193 - DNA, 25 bp, Homo sapien
tcccattccgtagttaagtaaagca

SEQ ID NO: 3898194 - DNA, 25 bp, Homo sapien
gagatcagaagagatcggcgcgttc

SEQ ID NO: 3898195 - DNA, 25 bp, Homo sapien
tgagatcagaagagatcggcgcgtt

SEQ ID NO: 3898196 - DNA, 25 bp, Homo sapien
tctgagatcagaagagatcggcgcg

SEQ ID NO: 3898197 - DNA, 25 bp, Homo sapien
gatcagaagagatcggcgcgttcag

SEQ ID NO: 3898198 - DNA, 25 bp, Homo sapien
aaaactcgtttccttcagattgcca

SEQ ID NO: 3898199 - DNA, 25 bp, Homo sapien
gattgccaagaaggtgtacagaaat

SEQ ID NO: 3898200 - DNA, 25 bp, Homo sapien
tgggcccacaaattggttgacttat

SEQ ID NO: 3898201 - DNA, 25 bp, Homo sapien
tggttgacttatatgaaaactcgtt

SEQ ID NO: 3898202 - DNA, 25 bp, Homo sapien
tcactgagaacaattttcaggagca

SEQ ID NO: 3898203 - DNA, 25 bp, Homo sapien
tgagaacaattttcaggagcataag

SEQ ID NO: 3898204 - DNA, 25 bp, Homo sapien
catcactgagaacaattttcaggag

SEQ ID NO: 3898205 - DNA, 25 bp, Homo sapien
tcagttcacatttgcaagttctcca

SEQ ID NO: 3898206 - DNA, 25 bp, Homo sapien
gaattatcattgtacagaattgaaa

SEQ ID NO: 3898207 - DNA, 25 bp, Homo sapien
cattgtacagaattgaaattattat

SEQ ID NO: 3898208 - DNA, 25 bp, Homo sapien
gagaattatcattgtacagaattga

SEQ ID NO: 3898209 - DNA, 25 bp, Homo sapien
tagagaattatcattgtacagaatt

SEQ ID NO: 3898210 - DNA, 25 bp, Homo sapien
ctgttcagcattatggtcactgagg

SEQ ID NO: 3898211 - DNA, 25 bp, Homo sapien
ccacagagttgtgaggtgaaggata

SEQ ID NO: 3898212 - DNA, 25 bp, Homo sapien
gagactctgtgccatgttacttaca

SEQ ID NO: 3898213 - DNA, 25 bp, Homo sapien
taatattcagtgcaccctgcagctg

SEQ ID NO: 3898214 - DNA, 25 bp, Homo sapien
taagtagaaaactccatgatctgcc

SEQ ID NO: 3898215 - DNA, 25 bp, Homo sapien
gtagaaaactccatgatctgcccat

SEQ ID NO: 3898216 - DNA, 25 bp, Homo sapien
tggaactaagtagaaaactccatga

SEQ ID NO: 3898217 - DNA, 25 bp, Homo sapien
ctggaactaagtagaaaactccatg

SEQ ID NO: 3898218 - DNA, 25 bp, Homo sapien
tcaaggtaattcagaagggtccgtg

SEQ ID NO: 3898219 - DNA, 25 bp, Homo sapien
tgcagcaccgaaaaaggactcacct

SEQ ID NO: 3898220 - DNA, 25 bp, Homo sapien
gactcacctcccaaaacttccgtga

SEQ ID NO: 3898221 - DNA, 25 bp, Homo sapien
cagccagccggagcttgttcacctt

SEQ ID NO: 3898222 - DNA, 25 bp, Homo sapien
actacgttctgctttattagtttct

SEQ ID NO: 3898223 - DNA, 25 bp, Homo sapien
taatctctttgctaattcccatatg

SEQ ID NO: 3898224 - DNA, 25 bp, Homo sapien
tgctaattcccatatgttgcagcat

SEQ ID NO: 3898225 - DNA, 25 bp, Homo sapien
atcaacattactacgttctgcttta

SEQ ID NO: 3898226 - DNA, 25 bp, Homo sapien
cagggcagtgaactgggtagttgtt

SEQ ID NO: 3898227 - DNA, 25 bp, Homo sapien
tgggtagttgttggagggcaattta

SEQ ID NO: 3898228 - DNA, 25 bp, Homo sapien
tttgcatagtgcagggcagtgaact

SEQ ID NO: 3898229 - DNA, 25 bp, Homo sapien
taatatcaaatttgcatagtgcagg

SEQ ID NO: 3898230 - DNA, 25 bp, Homo sapien
ctcctggacttcctttatctggcaa

SEQ ID NO: 3898231 - DNA, 25 bp, Homo sapien
tacccatcattgaaggccctgctct

SEQ ID NO: 3898232 - DNA, 25 bp, Homo sapien
taaagtctggaagaactaatccttc

SEQ ID NO: 3898233 - DNA, 25 bp, Homo sapien
atcatcatcataactccatttctgc

SEQ ID NO: 3898234 - DNA, 25 bp, Homo sapien
aagtctccatgaaaggccgtgcata

SEQ ID NO: 3898235 - DNA, 25 bp, Homo sapien
aaaggccgtgcatagaaggcacaca

SEQ ID NO: 3898236 - DNA, 25 bp, Homo sapien
gccgtgcatagaaggcacacataca

SEQ ID NO: 3898237 - DNA, 25 bp, Homo sapien
catgaaaggccgtgcatagaaggca

SEQ ID NO: 3898238 - DNA, 25 bp, Homo sapien
tcaggacctttatttagcacgaaag

SEQ ID NO: 3898239 - DNA, 25 bp, Homo sapien
gtgcagtatgcaaagtgtcctttct

SEQ ID NO: 3898240 - DNA, 25 bp, Homo sapien
tgtcctttctaatatcaggaccttt

SEQ ID NO: 3898241 - DNA, 25 bp, Homo sapien
tcagagcagtagcattccgtaagtg

SEQ ID NO: 3898242 - DNA, 25 bp, Homo sapien
ctaggagacacagatagatgtgaaa

SEQ ID NO: 3898243 - DNA, 25 bp, Homo sapien
agatgtgaaaatcattgaggagcca

SEQ ID NO: 3898244 - DNA, 25 bp, Homo sapien
aaaatcattgaggagccatgtgaaa

SEQ ID NO: 3898245 - DNA, 25 bp, Homo sapien
ggagacacagatagatgtgaaaatc

SEQ ID NO: 3898246 - DNA, 25 bp, Homo sapien
gagatgccaataaacacgcaatgca

SEQ ID NO: 3898247 - DNA, 25 bp, Homo sapien
ctgagatgccaataaacacgcaatg

SEQ ID NO: 3898248 - DNA, 25 bp, Homo sapien
tgagatgccaataaacacgcaatgc

SEQ ID NO: 3898249 - DNA, 25 bp, Homo sapien
agatgccaataaacacgcaatgcac

SEQ ID NO: 3898250 - DNA, 25 bp, Homo sapien
catataatttacctttccagagaac

SEQ ID NO: 3898251 - DNA, 25 bp, Homo sapien
cagacaaataagtggcctaattctt

SEQ ID NO: 3898252 - DNA, 25 bp, Homo sapien
ccagagaacatgttagacatttgat

SEQ ID NO: 3898253 - DNA, 25 bp, Homo sapien
ttccttacaagcttattacctctag

SEQ ID NO: 3898254 - DNA, 25 bp, Homo sapien
aaagcccaacttgaagctgagctga

SEQ ID NO: 3898255 - DNA, 25 bp, Homo sapien
gtttaatactcattccaggattctc

SEQ ID NO: 3898256 - DNA, 25 bp, Homo sapien
ggataatcaaccacaaagcccaact

SEQ ID NO: 3898257 - DNA, 25 bp, Homo sapien
tccaagcctaaacattgaatgtgct

SEQ ID NO: 3898258 - DNA, 25 bp, Homo sapien
tcaataggagagtgcatccccgagt

SEQ ID NO: 3898259 - DNA, 25 bp, Homo sapien
tccccgagtgcgcagatgacaatag

SEQ ID NO: 3898260 - DNA, 25 bp, Homo sapien
tcatgaggtcccatctgttggcaag

SEQ ID NO: 3898261 - DNA, 25 bp, Homo sapien
ttttgttctccaaacagctgtgtct

SEQ ID NO: 3898262 - DNA, 25 bp, Homo sapien
tatctgacagttaaacactacgacc

SEQ ID NO: 3898263 - DNA, 25 bp, Homo sapien
gctgcccatctatcttgcccttaag

SEQ ID NO: 3898264 - DNA, 25 bp, Homo sapien
gatcaatgggttctaggcctaagca

SEQ ID NO: 3898265 - DNA, 25 bp, Homo sapien
aagatatagccttgttagctgccca

SEQ ID NO: 3898266 - DNA, 25 bp, Homo sapien
caacaggatagtagccaaatgtcat

SEQ ID NO: 3898267 - DNA, 25 bp, Homo sapien
ggttccaacaggatagtagccaaat

SEQ ID NO: 3898268 - DNA, 25 bp, Homo sapien
ggccagagtgcacaacctttggttc

SEQ ID NO: 3898269 - DNA, 25 bp, Homo sapien
ttaaatccaagagggttggccagag

SEQ ID NO: 3898270 - DNA, 25 bp, Homo sapien
tacacaaagcaaagagagtttaaca

SEQ ID NO: 3898271 - DNA, 25 bp, Homo sapien
ctcatgcaggtttcaacagtgtttc

SEQ ID NO: 3898272 - DNA, 25 bp, Homo sapien
catttggcctttctagtcgttgctc

SEQ ID NO: 3898273 - DNA, 25 bp, Homo sapien
ttgtccttggaaataatcctctcag

SEQ ID NO: 3898274 - DNA, 25 bp, Homo sapien
aaatatgattgtgagaaacgcaaca

SEQ ID NO: 3898275 - DNA, 25 bp, Homo sapien
caacaacggtctgatgtgcataatt

SEQ ID NO: 3898276 - DNA, 25 bp, Homo sapien
gtgagaaacgcaacaacggtctgat

SEQ ID NO: 3898277 - DNA, 25 bp, Homo sapien
tgaaaatatgattgtgagaaacgca

SEQ ID NO: 3898278 - DNA, 25 bp, Homo sapien
ttcagcttgaagaaacacttgcacc

SEQ ID NO: 3898279 - DNA, 25 bp, Homo sapien
tacccaattctccattgggaagcac

SEQ ID NO: 3898280 - DNA, 25 bp, Homo sapien
aagaaacacttgcaccttcagggag

SEQ ID NO: 3898281 - DNA, 25 bp, Homo sapien
tcaactgatttgagatacccaattc

SEQ ID NO: 3898282 - DNA, 25 bp, Homo sapien
agacatacagctaaagcatgtagcc

SEQ ID NO: 3898283 - DNA, 25 bp, Homo sapien
gacatacagctaaagcatgtagccc

SEQ ID NO: 3898284 - DNA, 25 bp, Homo sapien
atacagctaaagcatgtagccccat

SEQ ID NO: 3898285 - DNA, 25 bp, Homo sapien
catacagctaaagcatgtagcccca

SEQ ID NO: 3898286 - DNA, 25 bp, Homo sapien
agtcgaagtcttcactagtccagcg

SEQ ID NO: 3898287 - DNA, 25 bp, Homo sapien
cgtatcttccctgatttaaagcccg

SEQ ID NO: 3898288 - DNA, 25 bp, Homo sapien
ccgataacttctattacaaggtcta

SEQ ID NO: 3898289 - DNA, 25 bp, Homo sapien
tcccgcttggtagtcgaagtcttca

SEQ ID NO: 3898290 - DNA, 25 bp, Homo sapien
ttctggtgactccacacctccaacc

SEQ ID NO: 3898291 - DNA, 25 bp, Homo sapien
ttatgattcttctggtgactccaca

SEQ ID NO: 3898292 - DNA, 25 bp, Homo sapien
ggtgactccacacctccaacctgtt

SEQ ID NO: 3898293 - DNA, 25 bp, Homo sapien
ctggtgactccacacctccaacctg

SEQ ID NO: 3898294 - DNA, 25 bp, Homo sapien
attcacgctgctgccagagggtcac

SEQ ID NO: 3898295 - DNA, 25 bp, Homo sapien
ttcacgctgctgccagagggtcaca

SEQ ID NO: 3898296 - DNA, 25 bp, Homo sapien
tcacgctgctgccagagggtcacag

SEQ ID NO: 3898297 - DNA, 25 bp, Homo sapien
tatgaaatgttatcgtgggaatgta

SEQ ID NO: 3898298 - DNA, 25 bp, Homo sapien
tctgaccgaatatgaaatgttatcg

SEQ ID NO: 3898299 - DNA, 25 bp, Homo sapien
gttatcgtgggaatgtacttgaatc

SEQ ID NO: 3898300 - DNA, 25 bp, Homo sapien
ctgtatatttctgaccgaatatgaa

SEQ ID NO: 3898301 - DNA, 25 bp, Homo sapien
gcttaagctgaaagccccaataaac

SEQ ID NO: 3898302 - DNA, 25 bp, Homo sapien
tacccgatgactaagaactatagga

SEQ ID NO: 3898303 - DNA, 25 bp, Homo sapien
gatatcttcaattttacccgatgac

SEQ ID NO: 3898304 - DNA, 25 bp, Homo sapien
atttctcattctcagatctattttg

SEQ ID NO: 3898305 - DNA, 25 bp, Homo sapien
ctcattctcagatctattttgtgag

SEQ ID NO: 3898306 - DNA, 25 bp, Homo sapien
taggatgaggattgtgtcttctgaa

SEQ ID NO: 3898307 - DNA, 25 bp, Homo sapien
gaaagaaagccatggatctctcatt

SEQ ID NO: 3898308 - DNA, 25 bp, Homo sapien
tgaaagaaagccatggatctctcat

SEQ ID NO: 3898309 - DNA, 25 bp, Homo sapien
gatgaggattgtgtcttctgaaaga

SEQ ID NO: 3898310 - DNA, 25 bp, Homo sapien
gtcacaattccaatattaagagtgc

SEQ ID NO: 3898311 - DNA, 25 bp, Homo sapien
ggtcacaattccaatattaagagtg

SEQ ID NO: 3898312 - DNA, 25 bp, Homo sapien
ctttggtcacaattccaatattaag

SEQ ID NO: 3898313 - DNA, 25 bp, Homo sapien
ttggtcacaattccaatattaagag

SEQ ID NO: 3898314 - DNA, 25 bp, Homo sapien
tccctcctttcgcatcctatagagg

SEQ ID NO: 3898315 - DNA, 25 bp, Homo sapien
ttaacagcccacaaagcattctgta

SEQ ID NO: 3898316 - DNA, 25 bp, Homo sapien
cctcctttcgcatcctatagaggaa

SEQ ID NO: 3898317 - DNA, 25 bp, Homo sapien
tctgtaattgtcaatccaatttctc

SEQ ID NO: 3898318 - DNA, 25 bp, Homo sapien
ctacattgtcaaaaatacaggatgc

SEQ ID NO: 3898319 - DNA, 25 bp, Homo sapien
tgaagctaagttgttatcaattcaa

SEQ ID NO: 3898320 - DNA, 25 bp, Homo sapien
tgtagcaataacaatataaagaggg

SEQ ID NO: 3898321 - DNA, 25 bp, Homo sapien
gagcacagctgtataggagcagaga

SEQ ID NO: 3898322 - DNA, 25 bp, Homo sapien
ccttgtgctcagcaaatgtcacctc

SEQ ID NO: 3898323 - DNA, 25 bp, Homo sapien
tccttgtgctcagcaaatgtcacct

SEQ ID NO: 3898324 - DNA, 25 bp, Homo sapien
tcaggcaggtaacaccaactggatg

SEQ ID NO: 3898325 - DNA, 25 bp, Homo sapien
ggatggcaggcacggttttatttct

SEQ ID NO: 3898326 - DNA, 25 bp, Homo sapien
tccatggacactaatgatgcatctg

SEQ ID NO: 3898327 - DNA, 25 bp, Homo sapien
cttccatggacactaatgatgcatc

SEQ ID NO: 3898328 - DNA, 25 bp, Homo sapien
accagaacccactgctgcgtggcgg

SEQ ID NO: 3898329 - DNA, 25 bp, Homo sapien
ttgtaaagcgcctgtaccatctcca

SEQ ID NO: 3898330 - DNA, 25 bp, Homo sapien
agaacccactgctgcgtggcggtcg

SEQ ID NO: 3898331 - DNA, 25 bp, Homo sapien
cttgtaaagcgcctgtaccatctcc

SEQ ID NO: 3898332 - DNA, 25 bp, Homo sapien
tgtaagtcttagagaaaagaagtct

SEQ ID NO: 3898333 - DNA, 25 bp, Homo sapien
atttgtaagtcttagagaaaagaag

SEQ ID NO: 3898334 - DNA, 25 bp, Homo sapien
gatggtcttttgggacaggaggaac

SEQ ID NO: 3898335 - DNA, 25 bp, Homo sapien
gagcaatgtgggatggtgctgtgct

SEQ ID NO: 3898336 - DNA, 25 bp, Homo sapien
tgacaactggtagttcctgccctac

SEQ ID NO: 3898337 - DNA, 25 bp, Homo sapien
tagaagagcaatgtgggatggtgct

SEQ ID NO: 3898338 - DNA, 25 bp, Homo sapien
ctgtgctgacaactggtagttcctg

SEQ ID NO: 3898339 - DNA, 25 bp, Homo sapien
taaatgctgtttcccctacttcact

SEQ ID NO: 3898340 - DNA, 25 bp, Homo sapien
tgtaagcgttaaatgctgtttcccc

SEQ ID NO: 3898341 - DNA, 25 bp, Homo sapien
ttggtggacttctttgagcctcaat

SEQ ID NO: 3898342 - DNA, 25 bp, Homo sapien
cactctcaatttggtggacttcttt

SEQ ID NO: 3898343 - DNA, 25 bp, Homo sapien
atggcttgagatatcccctctgttt

SEQ ID NO: 3898344 - DNA, 25 bp, Homo sapien
tcatggcttgagatatcccctctgt

SEQ ID NO: 3898345 - DNA, 25 bp, Homo sapien
gtcatggcttgagatatcccctctg

SEQ ID NO: 3898346 - DNA, 25 bp, Homo sapien
gagtcatggcttgagatatcccctc

SEQ ID NO: 3898347 - DNA, 25 bp, Homo sapien
taaacagctcctgtgcacatcatag

SEQ ID NO: 3898348 - DNA, 25 bp, Homo sapien
caagagagtgcttggcacccacaag

SEQ ID NO: 3898349 - DNA, 25 bp, Homo sapien
cattgctatattaagtcaggtcctg

SEQ ID NO: 3898350 - DNA, 25 bp, Homo sapien
gacaaaacgttggtgtatccagaag

SEQ ID NO: 3898351 - DNA, 25 bp, Homo sapien
taccactgctggtttattgacacaa

SEQ ID NO: 3898352 - DNA, 25 bp, Homo sapien
gaatgactccacaaccagatttgaa

SEQ ID NO: 3898353 - DNA, 25 bp, Homo sapien
caagcatacgcctttaggattcaag

SEQ ID NO: 3898354 - DNA, 25 bp, Homo sapien
caagctgttaatgtttgcaaaccag

SEQ ID NO: 3898355 - DNA, 25 bp, Homo sapien
cagttcttctgtcccagtccaccat

SEQ ID NO: 3898356 - DNA, 25 bp, Homo sapien
tgacatgggatcaaaatacatgaag

SEQ ID NO: 3898357 - DNA, 25 bp, Homo sapien
ctgacatgggatcaaaatacatgaa

SEQ ID NO: 3898358 - DNA, 25 bp, Homo sapien
acatgggatcaaaatacatgaaggc

SEQ ID NO: 3898359 - DNA, 25 bp, Homo sapien
tgcgaatagattaccgctggacctg

SEQ ID NO: 3898360 - DNA, 25 bp, Homo sapien
tgttccactacatctgcgaatagat

SEQ ID NO: 3898361 - DNA, 25 bp, Homo sapien
gattaccgctggacctggtactcga

SEQ ID NO: 3898362 - DNA, 25 bp, Homo sapien
gctggacctggtactcgattggatc

SEQ ID NO: 3898363 - DNA, 25 bp, Homo sapien
ttccaaatatcttaggaaagcttac

SEQ ID NO: 3898364 - DNA, 25 bp, Homo sapien
taggaaagcttacagagaccttcat

SEQ ID NO: 3898365 - DNA, 25 bp, Homo sapien
aaatatcttaggaaagcttacagag

SEQ ID NO: 3898366 - DNA, 25 bp, Homo sapien
tatcttaggaaagcttacagagacc

SEQ ID NO: 3898367 - DNA, 25 bp, Homo sapien
tagcttcacatatggaggttttcct

SEQ ID NO: 3898368 - DNA, 25 bp, Homo sapien
tttatctccagactctgttggagcg

SEQ ID NO: 3898369 - DNA, 25 bp, Homo sapien
tctccagactctgttggagcgcggg

SEQ ID NO: 3898370 - DNA, 25 bp, Homo sapien
cttgccatagcttcacatatggagg

SEQ ID NO: 3898371 - DNA, 25 bp, Homo sapien
cttaacacagtgttcaggcttccat

SEQ ID NO: 3898372 - DNA, 25 bp, Homo sapien
cttaaaggcaatccatatggttgaa

SEQ ID NO: 3898373 - DNA, 25 bp, Homo sapien
cagaagtagtcattagcttaacaca

SEQ ID NO: 3898374 - DNA, 25 bp, Homo sapien
catatggttgaatggcagaagtagt

SEQ ID NO: 3898375 - DNA, 25 bp, Homo sapien
ttagtcacagtataaactatggggg

SEQ ID NO: 3898376 - DNA, 25 bp, Homo sapien
ggcatactatatacaggaattctat

SEQ ID NO: 3898377 - DNA, 25 bp, Homo sapien
tctttgattcttaaatctgagttta

SEQ ID NO: 3898378 - DNA, 25 bp, Homo sapien
actatgggggatgcattaggcatac

SEQ ID NO: 3898379 - DNA, 25 bp, Homo sapien
tcaattgaaattttctgcatcttca

SEQ ID NO: 3898380 - DNA, 25 bp, Homo sapien
tttctgcatcttcagttaaacacct

SEQ ID NO: 3898381 - DNA, 25 bp, Homo sapien
aaattttctgcatcttcagttaaac

SEQ ID NO: 3898382 - DNA, 25 bp, Homo sapien
ttttctgcatcttcagttaaacacc

SEQ ID NO: 3898383 - DNA, 25 bp, Homo sapien
tggctaaagtcttgggtcctggaac

SEQ ID NO: 3898384 - DNA, 25 bp, Homo sapien
gctttggctaaagtcttgggtcctg

SEQ ID NO: 3898385 - DNA, 25 bp, Homo sapien
tgcaacagaattatcaggggctttg

SEQ ID NO: 3898386 - DNA, 25 bp, Homo sapien
tttctgcaacagaattatcaggggc

SEQ ID NO: 3898387 - DNA, 25 bp, Homo sapien
tgtgcctctcgcataaaatgctgaa

SEQ ID NO: 3898388 - DNA, 25 bp, Homo sapien
tgaagtcaaagtggtcaacgaggga

SEQ ID NO: 3898389 - DNA, 25 bp, Homo sapien
agtggtcaacgagggaggtagcagc

SEQ ID NO: 3898390 - DNA, 25 bp, Homo sapien
ggtagcagcagaatatggactggta

SEQ ID NO: 3898391 - DNA, 25 bp, Homo sapien
attccatattcagtgaagatgctaa

SEQ ID NO: 3898392 - DNA, 25 bp, Homo sapien
tctattccatattcagtgaagatgc

SEQ ID NO: 3898393 - DNA, 25 bp, Homo sapien
tattcagtgaagatgctaaagacag

SEQ ID NO: 3898394 - DNA, 25 bp, Homo sapien
cttttgcttgatcctgccttctatt

SEQ ID NO: 3898395 - DNA, 25 bp, Homo sapien
gagagaggctataagcaatttccag

SEQ ID NO: 3898396 - DNA, 25 bp, Homo sapien
tttgtgctgacaagtccttctgaga

SEQ ID NO: 3898397 - DNA, 25 bp, Homo sapien
tttgcaatctgcattgtttgtgctg

SEQ ID NO: 3898398 - DNA, 25 bp, Homo sapien
tctgagagaggctataagcaatttc

SEQ ID NO: 3898399 - DNA, 25 bp, Homo sapien
aatcttgtgattgactttcctaatc

SEQ ID NO: 3898400 - DNA, 25 bp, Homo sapien
atgcttctgaatcttgtgattgact

SEQ ID NO: 3898401 - DNA, 25 bp, Homo sapien
tatgcttctgaatcttgtgattgac

SEQ ID NO: 3898402 - DNA, 25 bp, Homo sapien
ctgaatcttgtgattgactttccta

SEQ ID NO: 3898403 - DNA, 25 bp, Homo sapien
attgtgtcgttcactaagccacagg

SEQ ID NO: 3898404 - DNA, 25 bp, Homo sapien
ttcttgccccaattgtgtcgttcac

SEQ ID NO: 3898405 - DNA, 25 bp, Homo sapien
gccccaattgtgtcgttcactaagc

SEQ ID NO: 3898406 - DNA, 25 bp, Homo sapien
tatttttcttgccccaattgtgtcg

SEQ ID NO: 3898407 - DNA, 25 bp, Homo sapien
tgagagtatctgagctggtgagggt

SEQ ID NO: 3898408 - DNA, 25 bp, Homo sapien
ccatgttagacaccctgagagtatc

SEQ ID NO: 3898409 - DNA, 25 bp, Homo sapien
ctgcttatctccatgttagacaccc

SEQ ID NO: 3898410 - DNA, 25 bp, Homo sapien
ttatctccatgttagacaccctgag

SEQ ID NO: 3898411 - DNA, 25 bp, Homo sapien
tttggctgtaagcaacactctggtt

SEQ ID NO: 3898412 - DNA, 25 bp, Homo sapien
ctgtaagcaacactctggttattgg

SEQ ID NO: 3898413 - DNA, 25 bp, Homo sapien
ggctgtaagcaacactctggttatt

SEQ ID NO: 3898414 - DNA, 25 bp, Homo sapien
ccttgaagtacatctgagaagttgt

SEQ ID NO: 3898415 - DNA, 25 bp, Homo sapien
tgtccacactggaaatcaactgttc

SEQ ID NO: 3898416 - DNA, 25 bp, Homo sapien
aaatgtccacactggaaatcaactg

SEQ ID NO: 3898417 - DNA, 25 bp, Homo sapien
tttatattcccggagtcctccaagc

SEQ ID NO: 3898418 - DNA, 25 bp, Homo sapien
tcaactgttcgtactttatattccc

SEQ ID NO: 3898419 - DNA, 25 bp, Homo sapien
tgactggagacaatgaatgtgactt

SEQ ID NO: 3898420 - DNA, 25 bp, Homo sapien
cactcacaacgattgtgactggaga

SEQ ID NO: 3898421 - DNA, 25 bp, Homo sapien
tcaacggtctctgagcataacactc

SEQ ID NO: 3898422 - DNA, 25 bp, Homo sapien
caatgaatgtgacttcttgccacaa

SEQ ID NO: 3898423 - DNA, 25 bp, Homo sapien
cacactaatataacctgaagtattg

SEQ ID NO: 3898424 - DNA, 25 bp, Homo sapien
cacacactaatataacctgaagtat

SEQ ID NO: 3898425 - DNA, 25 bp, Homo sapien
tcacacactaatataacctgaagta

SEQ ID NO: 3898426 - DNA, 25 bp, Homo sapien
cactaatataacctgaagtattgct

SEQ ID NO: 3898427 - DNA, 25 bp, Homo sapien
tcctaactctgctgattcatcttca

SEQ ID NO: 3898428 - DNA, 25 bp, Homo sapien
cttcctaactctgctgattcatctt

SEQ ID NO: 3898429 - DNA, 25 bp, Homo sapien
ttcctaactctgctgattcatcttc

SEQ ID NO: 3898430 - DNA, 25 bp, Homo sapien
cctaactctgctgattcatcttcat

SEQ ID NO: 3898431 - DNA, 25 bp, Homo sapien
gaatttgctttatcaaacgccgaat

SEQ ID NO: 3898432 - DNA, 25 bp, Homo sapien
gaatgataacattagccgaagcaat

SEQ ID NO: 3898433 - DNA, 25 bp, Homo sapien
gaccatggtgctacttttctcataa

SEQ ID NO: 3898434 - DNA, 25 bp, Homo sapien
tttctcataaggtgtcctcactgct

SEQ ID NO: 3898435 - DNA, 25 bp, Homo sapien
caagcagtcctgtaactttgcagct

SEQ ID NO: 3898436 - DNA, 25 bp, Homo sapien
catcaagctatgattgctggaaggg

SEQ ID NO: 3898437 - DNA, 25 bp, Homo sapien
cagattatgttcacccatcaagcta

SEQ ID NO: 3898438 - DNA, 25 bp, Homo sapien
ggtgggccttctaatctcagattat

SEQ ID NO: 3898439 - DNA, 25 bp, Homo sapien
aagtgagacacactctcataagcac

SEQ ID NO: 3898440 - DNA, 25 bp, Homo sapien
tatttatataactgaagtgagacac

SEQ ID NO: 3898441 - DNA, 25 bp, Homo sapien
gacctttttactcagatctctgaaa

SEQ ID NO: 3898442 - DNA, 25 bp, Homo sapien
taacattgacctttttactcagatc

SEQ ID NO: 3898443 - DNA, 25 bp, Homo sapien
ctaattctctaaaggcgggatcctc

SEQ ID NO: 3898444 - DNA, 25 bp, Homo sapien
tttctaattctctaaaggcgggatc

SEQ ID NO: 3898445 - DNA, 25 bp, Homo sapien
ttctaattctctaaaggcgggatcc

SEQ ID NO: 3898446 - DNA, 25 bp, Homo sapien
tctaattctctaaaggcgggatcct

SEQ ID NO: 3898447 - DNA, 25 bp, Homo sapien
aatgccaatctgggtgaaggtctgg

SEQ ID NO: 3898448 - DNA, 25 bp, Homo sapien
ggcagtgacattccccaggcaaagg

SEQ ID NO: 3898449 - DNA, 25 bp, Homo sapien
atctgggtgaaggtctgggacactc

SEQ ID NO: 3898450 - DNA, 25 bp, Homo sapien
tcaaactcggcagtgacattcccca

SEQ ID NO: 3898451 - DNA, 25 bp, Homo sapien
ctgagtgaagagatataggtgaaga

SEQ ID NO: 3898452 - DNA, 25 bp, Homo sapien
ccaagttcaggtgagtaagaaagca

SEQ ID NO: 3898453 - DNA, 25 bp, Homo sapien
gaccccaagttcaggtgagtaagaa

SEQ ID NO: 3898454 - DNA, 25 bp, Homo sapien
tcaaatgaccccaagttcaggtgag

SEQ ID NO: 3898455 - DNA, 25 bp, Homo sapien
cagatagctccttaataatcacaac

SEQ ID NO: 3898456 - DNA, 25 bp, Homo sapien
cttaataatcacaactctagcaaag

SEQ ID NO: 3898457 - DNA, 25 bp, Homo sapien
gatagctccttaataatcacaactc

SEQ ID NO: 3898458 - DNA, 25 bp, Homo sapien
agctccttaataatcacaactctag

SEQ ID NO: 3898459 - DNA, 25 bp, Homo sapien
ggattatttgagctccccctgcagg

SEQ ID NO: 3898460 - DNA, 25 bp, Homo sapien
tcactgtgcccctactatccttgag

SEQ ID NO: 3898461 - DNA, 25 bp, Homo sapien
ccctgcaggataaattgcacatcca

SEQ ID NO: 3898462 - DNA, 25 bp, Homo sapien
tcaggggagtcagaggattatttga

SEQ ID NO: 3898463 - DNA, 25 bp, Homo sapien
acagccctgaagagggaagactgag

SEQ ID NO: 3898464 - DNA, 25 bp, Homo sapien
gggagcaatcatcagtgtaggagct

SEQ ID NO: 3898465 - DNA, 25 bp, Homo sapien
gcaatcatcagtgtaggagctgcca

SEQ ID NO: 3898466 - DNA, 25 bp, Homo sapien
ctcaatagagtctccggagacaaca

SEQ ID NO: 3898467 - DNA, 25 bp, Homo sapien
gaatcccctctatacatggatgaag

SEQ ID NO: 3898468 - DNA, 25 bp, Homo sapien
cttgaatcccctctatacatggatg

SEQ ID NO: 3898469 - DNA, 25 bp, Homo sapien
tgaatcccctctatacatggatgaa

SEQ ID NO: 3898470 - DNA, 25 bp, Homo sapien
atcccctctatacatggatgaagta

SEQ ID NO: 3898471 - DNA, 25 bp, Homo sapien
tagttgcagctgtactacgtgggaa

SEQ ID NO: 3898472 - DNA, 25 bp, Homo sapien
ttgtcagaagtcgtggagcaaggaa

SEQ ID NO: 3898473 - DNA, 25 bp, Homo sapien
ttcctttgtcagaagtcgtggagca

SEQ ID NO: 3898474 - DNA, 25 bp, Homo sapien
tgggaagagtaagcgagaatgttct

SEQ ID NO: 3898475 - DNA, 25 bp, Homo sapien
gcttcccaaaatacgtctcaccaca

SEQ ID NO: 3898476 - DNA, 25 bp, Homo sapien
gttgctttgagggaattaccgccat

SEQ ID NO: 3898477 - DNA, 25 bp, Homo sapien
tttgagggaattaccgccatgcttc

SEQ ID NO: 3898478 - DNA, 25 bp, Homo sapien
ttaccgccatgcttcccaaaatacg

SEQ ID NO: 3898479 - DNA, 25 bp, Homo sapien
tcgaagctcagcaatacatcttcct

SEQ ID NO: 3898480 - DNA, 25 bp, Homo sapien
tgtgggagcagcagcacagattgca

SEQ ID NO: 3898481 - DNA, 25 bp, Homo sapien
cccagtgttaatatcctctctcctt

SEQ ID NO: 3898482 - DNA, 25 bp, Homo sapien
cagattgcagggcaaggcttcggaa

SEQ ID NO: 3898483 - DNA, 25 bp, Homo sapien
ccaccatggttcacattatcattct

SEQ ID NO: 3898484 - DNA, 25 bp, Homo sapien
accatggttcacattatcattctta

SEQ ID NO: 3898485 - DNA, 25 bp, Homo sapien
caccatggttcacattatcattctt

SEQ ID NO: 3898486 - DNA, 25 bp, Homo sapien
tcaccatcatcaatacctccaccac

SEQ ID NO: 3898487 - DNA, 25 bp, Homo sapien
tcttccattatttgctattgcatat

SEQ ID NO: 3898488 - DNA, 25 bp, Homo sapien
gcccaagatcatggctttcttgaaa

SEQ ID NO: 3898489 - DNA, 25 bp, Homo sapien
tggcccaagatcatggctttcttga

SEQ ID NO: 3898490 - DNA, 25 bp, Homo sapien
tccattatttgctattgcatatcta

SEQ ID NO: 3898491 - DNA, 25 bp, Homo sapien
ctgggaaaccattagtgaccactgc

SEQ ID NO: 3898492 - DNA, 25 bp, Homo sapien
gggaaaccattagtgaccactgcca

SEQ ID NO: 3898493 - DNA, 25 bp, Homo sapien
agtgaccactgccattagtgatctc

SEQ ID NO: 3898494 - DNA, 25 bp, Homo sapien
gaccactgccattagtgatctcttc

SEQ ID NO: 3898495 - DNA, 25 bp, Homo sapien
atataagcattgacaaccactttct

SEQ ID NO: 3898496 - DNA, 25 bp, Homo sapien
aaatataagcattgacaaccacttt

SEQ ID NO: 3898497 - DNA, 25 bp, Homo sapien
ctttgtccttgcctgctccaatttc

SEQ ID NO: 3898498 - DNA, 25 bp, Homo sapien
tgtccttgcctgctccaatttcaaa

SEQ ID NO: 3898499 - DNA, 25 bp, Homo sapien
tttatacccattaccaaacctcaca

SEQ ID NO: 3898500 - DNA, 25 bp, Homo sapien
gaaaaaggtatccataccctcaagc

SEQ ID NO: 3898501 - DNA, 25 bp, Homo sapien
ccccaagtacccttccaagcttctg

SEQ ID NO: 3898502 - DNA, 25 bp, Homo sapien
ccaaccatccaactatactcttagt

SEQ ID NO: 3898503 - DNA, 25 bp, Homo sapien
gagaatcctgtacagagatgctcag

SEQ ID NO: 3898504 - DNA, 25 bp, Homo sapien
caccttcttttgctacaatattgcc

SEQ ID NO: 3898505 - DNA, 25 bp, Homo sapien
cttcagctgccttgtaggtaaagca

SEQ ID NO: 3898506 - DNA, 25 bp, Homo sapien
tgctacaatattgcccacttcagct

SEQ ID NO: 3898507 - DNA, 25 bp, Homo sapien
aagactgggaattagaacacgtgca

SEQ ID NO: 3898508 - DNA, 25 bp, Homo sapien
actgggaattagaacacgtgcatct

SEQ ID NO: 3898509 - DNA, 25 bp, Homo sapien
gactgggaattagaacacgtgcatc

SEQ ID NO: 3898510 - DNA, 25 bp, Homo sapien
agaagactgggaattagaacacgtg

SEQ ID NO: 3898511 - DNA, 25 bp, Homo sapien
tcatcacttgtaatctggccctgaa

SEQ ID NO: 3898512 - DNA, 25 bp, Homo sapien
taattccctgttgcctataaagtga

SEQ ID NO: 3898513 - DNA, 25 bp, Homo sapien
cacttctcgcttaggacttctttca

SEQ ID NO: 3898514 - DNA, 25 bp, Homo sapien
caatgattgatataaggcattcatc

SEQ ID NO: 3898515 - DNA, 25 bp, Homo sapien
tcctctctgtgatcttagacttgct

SEQ ID NO: 3898516 - DNA, 25 bp, Homo sapien
ctcctctctgtgatcttagacttgc

SEQ ID NO: 3898517 - DNA, 25 bp, Homo sapien
aatgcagattccttcggcattcttc

SEQ ID NO: 3898518 - DNA, 25 bp, Homo sapien
caaatagggcccacacttgtgtcaa

SEQ ID NO: 3898519 - DNA, 25 bp, Homo sapien
tgagtttcagttgcctgctgcctct

SEQ ID NO: 3898520 - DNA, 25 bp, Homo sapien
tcttcaggccacagggcctttttgc

SEQ ID NO: 3898521 - DNA, 25 bp, Homo sapien
gccctcaacttaacttctcttgtca

SEQ ID NO: 3898522 - DNA, 25 bp, Homo sapien
tggccctcaacttaacttctcttgt

SEQ ID NO: 3898523 - DNA, 25 bp, Homo sapien
cctcaacttaacttctcttgtcatc

SEQ ID NO: 3898524 - DNA, 25 bp, Homo sapien
ggccctcaacttaacttctcttgtc

SEQ ID NO: 3898525 - DNA, 25 bp, Homo sapien
gagcttccagtctctccctaggcag

SEQ ID NO: 3898526 - DNA, 25 bp, Homo sapien
tgtcagcaggagcttccagtctctc

SEQ ID NO: 3898527 - DNA, 25 bp, Homo sapien
tgacacatttttagagggtcttaac

SEQ ID NO: 3898528 - DNA, 25 bp, Homo sapien
gtagcaagtgttgcaagcatgccct

SEQ ID NO: 3898529 - DNA, 25 bp, Homo sapien
tctagagtattctagcagcacccaa

SEQ ID NO: 3898530 - DNA, 25 bp, Homo sapien
taggttcattgggaaggtgactcac

SEQ ID NO: 3898531 - DNA, 25 bp, Homo sapien
cagcagtcagtctttgcagagtctc

SEQ ID NO: 3898532 - DNA, 25 bp, Homo sapien
gaagatagagccaggaaactttggg

SEQ ID NO: 3898533 - DNA, 25 bp, Homo sapien
tgtgcccttttggacacatctgggt

SEQ ID NO: 3898534 - DNA, 25 bp, Homo sapien
gacatcaccctcaattgctcagtgg

SEQ ID NO: 3898535 - DNA, 25 bp, Homo sapien
cagagcatccaacttggagagaggc

SEQ ID NO: 3898536 - DNA, 25 bp, Homo sapien
gcagttgctggttcactttgaggtg

SEQ ID NO: 3898537 - DNA, 25 bp, Homo sapien
ttggacagggaaacaattttgcact

SEQ ID NO: 3898538 - DNA, 25 bp, Homo sapien
tgtttggacagggaaacaattttgc

SEQ ID NO: 3898539 - DNA, 25 bp, Homo sapien
catcaaagtatgatcaaaactgata

SEQ ID NO: 3898540 - DNA, 25 bp, Homo sapien
ttcaacatcaaagtatgatcaaaac

SEQ ID NO: 3898541 - DNA, 25 bp, Homo sapien
gtaattttgatatattagtcctgac

SEQ ID NO: 3898542 - DNA, 25 bp, Homo sapien
tttttgatatgcagcactctttttg

SEQ ID NO: 3898543 - DNA, 25 bp, Homo sapien
ttagtcctgacttgcccttccttag

SEQ ID NO: 3898544 - DNA, 25 bp, Homo sapien
tttgatatattagtcctgacttgcc

SEQ ID NO: 3898545 - DNA, 25 bp, Homo sapien
ttgtaaaactctaagtactggcatt

SEQ ID NO: 3898546 - DNA, 25 bp, Homo sapien
tactggcattatttggctactcagc

SEQ ID NO: 3898547 - DNA, 25 bp, Homo sapien
actctaagtactggcattatttggc

SEQ ID NO: 3898548 - DNA, 25 bp, Homo sapien
atttggctactcagctgtgcactta

SEQ ID NO: 3898549 - DNA, 25 bp, Homo sapien
tgtaaaagcattctcacctagtcaa

SEQ ID NO: 3898550 - DNA, 25 bp, Homo sapien
tgattcttcaaggtctatcacctga

SEQ ID NO: 3898551 - DNA, 25 bp, Homo sapien
gaagttgggattcaatggacacata

SEQ ID NO: 3898552 - DNA, 25 bp, Homo sapien
gcacttaagctaaaattcctgacct

SEQ ID NO: 3898553 - DNA, 25 bp, Homo sapien
aaaatgctccttctcgttaatattt

SEQ ID NO: 3898554 - DNA, 25 bp, Homo sapien
aaatgctccttctcgttaatatttt

SEQ ID NO: 3898555 - DNA, 25 bp, Homo sapien
aatgctccttctcgttaatattttt

SEQ ID NO: 3898556 - DNA, 25 bp, Homo sapien
atgctccttctcgttaatatttttt

SEQ ID NO: 3898557 - DNA, 25 bp, Homo sapien
tgcatatgttatttcagctctaacc

SEQ ID NO: 3898558 - DNA, 25 bp, Homo sapien
gcatatgttatttcagctctaacca

SEQ ID NO: 3898559 - DNA, 25 bp, Homo sapien
ctgcatatgttatttcagctctaac

SEQ ID NO: 3898560 - DNA, 25 bp, Homo sapien
aggctgataataccttcttcagatg

SEQ ID NO: 3898561 - DNA, 25 bp, Homo sapien
gctgataataccttcttcagatgca

SEQ ID NO: 3898562 - DNA, 25 bp, Homo sapien
atgcattcatccctccacaaatttc

SEQ ID NO: 3898563 - DNA, 25 bp, Homo sapien
tgcattcatccctccacaaatttct

SEQ ID NO: 3898564 - DNA, 25 bp, Homo sapien
gcaagtaactatcatcatcatcatc

SEQ ID NO: 3898565 - DNA, 25 bp, Homo sapien
ctatagcaagtaactatcatcatca

SEQ ID NO: 3898566 - DNA, 25 bp, Homo sapien
tatagcaagtaactatcatcatcat

SEQ ID NO: 3898567 - DNA, 25 bp, Homo sapien
tagcaagtaactatcatcatcatca

SEQ ID NO: 3898568 - DNA, 25 bp, Homo sapien
gagatttgagatgggtgtcattcca

SEQ ID NO: 3898569 - DNA, 25 bp, Homo sapien
tgatgatcgggcacagtctgaagac

SEQ ID NO: 3898570 - DNA, 25 bp, Homo sapien
caaagctagagcttgtgcaaagtca

SEQ ID NO: 3898571 - DNA, 25 bp, Homo sapien
gacaggataagggttaacttcgtga

SEQ ID NO: 3898572 - DNA, 25 bp, Homo sapien
ttgctgagctctggtagcaggaatt

SEQ ID NO: 3898573 - DNA, 25 bp, Homo sapien
tggttctttgctattccacagactc

SEQ ID NO: 3898574 - DNA, 25 bp, Homo sapien
gctgagctctggtagcaggaattaa

SEQ ID NO: 3898575 - DNA, 25 bp, Homo sapien
gagctctggtagcaggaattaactt

SEQ ID NO: 3898576 - DNA, 25 bp, Homo sapien
tgatggtgctaccactgtgatagca

SEQ ID NO: 3898577 - DNA, 25 bp, Homo sapien
ctaagtggatgatggtgctaccact

SEQ ID NO: 3898578 - DNA, 25 bp, Homo sapien
taagtggatgatggtgctaccactg

SEQ ID NO: 3898579 - DNA, 25 bp, Homo sapien
tgctaccactgtgatagcagctgac

SEQ ID NO: 3898580 - DNA, 25 bp, Homo sapien
aataaattacatctctgaacctaag

SEQ ID NO: 3898581 - DNA, 25 bp, Homo sapien
tgaacctaagtaccctattggcatg

SEQ ID NO: 3898582 - DNA, 25 bp, Homo sapien
ggtagctgcaggatgcacattgagc

SEQ ID NO: 3898583 - DNA, 25 bp, Homo sapien
aaacaaaggctaaccacaacactgg

SEQ ID NO: 3898584 - DNA, 25 bp, Homo sapien
ccctcggatacgatagaaaatgtaa

SEQ ID NO: 3898585 - DNA, 25 bp, Homo sapien
caccctcgaggttgaaccctcggat

SEQ ID NO: 3898586 - DNA, 25 bp, Homo sapien
aaaccagaagacaagtaactgtatg

SEQ ID NO: 3898587 - DNA, 25 bp, Homo sapien
ggcaaaattagtcgccttcgtcgag

SEQ ID NO: 3898588 - DNA, 25 bp, Homo sapien
tcccattcttgctttccttctcctt

SEQ ID NO: 3898589 - DNA, 25 bp, Homo sapien
ctcccattcttgctttccttctcct

SEQ ID NO: 3898590 - DNA, 25 bp, Homo sapien
cattgctttgttcttttttctttca

SEQ ID NO: 3898591 - DNA, 25 bp, Homo sapien
aataagttctaacccgactctctgg

SEQ ID NO: 3898592 - DNA, 25 bp, Homo sapien
tccggtgtagtcttgtgtgaaaata

SEQ ID NO: 3898593 - DNA, 25 bp, Homo sapien
cagaaaagcagtacaggctccggtg

SEQ ID NO: 3898594 - DNA, 25 bp, Homo sapien
gataggcacccttgtaagggccaga

SEQ ID NO: 3898595 - DNA, 25 bp, Homo sapien
ctttgtcttttcgctcctgagggga

SEQ ID NO: 3898596 - DNA, 25 bp, Homo sapien
ttttcgctcctgaggggaatctgga

SEQ ID NO: 3898597 - DNA, 25 bp, Homo sapien
cgctcctgaggggaatctggaactg

SEQ ID NO: 3898598 - DNA, 25 bp, Homo sapien
gtcttttcgctcctgaggggaatct

SEQ ID NO: 3898599 - DNA, 25 bp, Homo sapien
gccatgatttcttccatgagaccca

SEQ ID NO: 3898600 - DNA, 25 bp, Homo sapien
tggtgatgttgaagagtcttcagcc

SEQ ID NO: 3898601 - DNA, 25 bp, Homo sapien
tgttgaagagtcttcagccatgatt

SEQ ID NO: 3898602 - DNA, 25 bp, Homo sapien
tgaagagtcttcagccatgatttct

SEQ ID NO: 3898603 - DNA, 25 bp, Homo sapien
tgtttcagagaggttttccctctcc

SEQ ID NO: 3898604 - DNA, 25 bp, Homo sapien
tcagagaggttttccctctcctcca

SEQ ID NO: 3898605 - DNA, 25 bp, Homo sapien
tttcagagaggttttccctctcctc

SEQ ID NO: 3898606 - DNA, 25 bp, Homo sapien
cttgtttcagagaggttttccctct

SEQ ID NO: 3898607 - DNA, 25 bp, Homo sapien
gaaatgtgtaaacatcttgcacagc

SEQ ID NO: 3898608 - DNA, 25 bp, Homo sapien
cacagctgataaactttccagagct

SEQ ID NO: 3898609 - DNA, 25 bp, Homo sapien
atgtgtaaacatcttgcacagctga

SEQ ID NO: 3898610 - DNA, 25 bp, Homo sapien
gagctcccatacagatatctcgcca

SEQ ID NO: 3898611 - DNA, 25 bp, Homo sapien
ggatgaagcttgatgttttgctaac

SEQ ID NO: 3898612 - DNA, 25 bp, Homo sapien
gcccaaggatgaagcttgatgtttt

SEQ ID NO: 3898613 - DNA, 25 bp, Homo sapien
gtaaacagggttgatttagattgga

SEQ ID NO: 3898614 - DNA, 25 bp, Homo sapien
ttttgctaacatgagtaaacagggt

SEQ ID NO: 3898615 - DNA, 25 bp, Homo sapien
tctctccactcaggctggtaaaaat

SEQ ID NO: 3898616 - DNA, 25 bp, Homo sapien
ttattgatcagcatcatctctccac

SEQ ID NO: 3898617 - DNA, 25 bp, Homo sapien
catctctccactcaggctggtaaaa

SEQ ID NO: 3898618 - DNA, 25 bp, Homo sapien
atcatctctccactcaggctggtaa

SEQ ID NO: 3898619 - DNA, 25 bp, Homo sapien
tccaggagagctggccactgatttg

SEQ ID NO: 3898620 - DNA, 25 bp, Homo sapien
aagaaatgtatcactggttgttggt

SEQ ID NO: 3898621 - DNA, 25 bp, Homo sapien
aaatcttattagcagttgagacaac

SEQ ID NO: 3898622 - DNA, 25 bp, Homo sapien
tgccctgcggaataacgtcccattg

SEQ ID NO: 3898623 - DNA, 25 bp, Homo sapien
catgtatctggcaataagaaatgta

SEQ ID NO: 3898624 - DNA, 25 bp, Homo sapien
tacattagtaaaagccttgttggca

SEQ ID NO: 3898625 - DNA, 25 bp, Homo sapien
tctaaaccactctaaacctgacatt

SEQ ID NO: 3898626 - DNA, 25 bp, Homo sapien
gtttgtgagacctgattcaattcca

SEQ ID NO: 3898627 - DNA, 25 bp, Homo sapien
tagttccatattgcattgattttcc

SEQ ID NO: 3898628 - DNA, 25 bp, Homo sapien
atctggccagggatttggatcttcc

SEQ ID NO: 3898629 - DNA, 25 bp, Homo sapien
ctggccagggatttggatcttcctg

SEQ ID NO: 3898630 - DNA, 25 bp, Homo sapien
aaatctggccagggatttggatctt

SEQ ID NO: 3898631 - DNA, 25 bp, Homo sapien
tctggccagggatttggatcttcct

SEQ ID NO: 3898632 - DNA, 25 bp, Homo sapien
tcacatatgaccgagaatatgcaat

SEQ ID NO: 3898633 - DNA, 25 bp, Homo sapien
gactatgtctttgtacctataaaca

SEQ ID NO: 3898634 - DNA, 25 bp, Homo sapien
agctctcacatatgaccgagaatat

SEQ ID NO: 3898635 - DNA, 25 bp, Homo sapien
aacactagaatgtactccttcaatg

SEQ ID NO: 3898636 - DNA, 25 bp, Homo sapien
cctgattccaattgaaaggcagagg

SEQ ID NO: 3898637 - DNA, 25 bp, Homo sapien
cagctgtgaagattggtgcctttgc

SEQ ID NO: 3898638 - DNA, 25 bp, Homo sapien
tctgctgccagtactctttacctga

SEQ ID NO: 3898639 - DNA, 25 bp, Homo sapien
tgttattggaactcctccaacaggc

SEQ ID NO: 3898640 - DNA, 25 bp, Homo sapien
aaatctataaggatagtgaagtatc

SEQ ID NO: 3898641 - DNA, 25 bp, Homo sapien
tggagtgccagtggagcacctttac

SEQ ID NO: 3898642 - DNA, 25 bp, Homo sapien
tatcttgggtaacagtggagtgcca

SEQ ID NO: 3898643 - DNA, 25 bp, Homo sapien
tgccagtggagcacctttacagccc

SEQ ID NO: 3898644 - DNA, 25 bp, Homo sapien
catgaatccgctctagaaaatctgc

SEQ ID NO: 3898645 - DNA, 25 bp, Homo sapien
aaatctgctttggaatttactggag

SEQ ID NO: 3898646 - DNA, 25 bp, Homo sapien
tccctctgcatgagccctcaagaag

SEQ ID NO: 3898647 - DNA, 25 bp, Homo sapien
ggagatttggtgatatgcaacccac

SEQ ID NO: 3898648 - DNA, 25 bp, Homo sapien
atcacctaagtgattaatatggcct

SEQ ID NO: 3898649 - DNA, 25 bp, Homo sapien
aaatcacctaagtgattaatatggc

SEQ ID NO: 3898650 - DNA, 25 bp, Homo sapien
ctcttctgatgcccctggaggccca

SEQ ID NO: 3898651 - DNA, 25 bp, Homo sapien
aatcacctaagtgattaatatggcc

SEQ ID NO: 3898652 - DNA, 25 bp, Homo sapien
atgattttaaggacacctatggttt

SEQ ID NO: 3898653 - DNA, 25 bp, Homo sapien
cctctctcactcagaatgattttaa

SEQ ID NO: 3898654 - DNA, 25 bp, Homo sapien
cagaatgattttaaggacacctatg

SEQ ID NO: 3898655 - DNA, 25 bp, Homo sapien
gaatgattttaaggacacctatggt

SEQ ID NO: 3898656 - DNA, 25 bp, Homo sapien
acattcagacggattgtgtaacagc

SEQ ID NO: 3898657 - DNA, 25 bp, Homo sapien
gctgactggtactcagacacattca

SEQ ID NO: 3898658 - DNA, 25 bp, Homo sapien
agagctgactggtactcagacacat

SEQ ID NO: 3898659 - DNA, 25 bp, Homo sapien
gacacattcagacggattgtgtaac

SEQ ID NO: 3898660 - DNA, 25 bp, Homo sapien
gcagacttgccatgaaagccggtgt

SEQ ID NO: 3898661 - DNA, 25 bp, Homo sapien
atgaaagccggtgttctcatccgtg

SEQ ID NO: 3898662 - DNA, 25 bp, Homo sapien
ccatgaaagccggtgttctcatccg

SEQ ID NO: 3898663 - DNA, 25 bp, Homo sapien
cttgccatgaaagccggtgttctca

SEQ ID NO: 3898664 - DNA, 25 bp, Homo sapien
ttctttctcagctaggtctgcatca

SEQ ID NO: 3898665 - DNA, 25 bp, Homo sapien
ctttctcagctaggtctgcatcaga

SEQ ID NO: 3898666 - DNA, 25 bp, Homo sapien
tcagctaggtctgcatcagaacatc

SEQ ID NO: 3898667 - DNA, 25 bp, Homo sapien
ctaggtctgcatcagaacatctttg

SEQ ID NO: 3898668 - DNA, 25 bp, Homo sapien
tacagggatttaatctactccaagt

SEQ ID NO: 3898669 - DNA, 25 bp, Homo sapien
acagggatttaatctactccaagtt

SEQ ID NO: 3898670 - DNA, 25 bp, Homo sapien
ctacagggatttaatctactccaag

SEQ ID NO: 3898671 - DNA, 25 bp, Homo sapien
cagggatttaatctactccaagttc

SEQ ID NO: 3898672 - DNA, 25 bp, Homo sapien
tattaaagtaatgggctcctggctc

SEQ ID NO: 3898673 - DNA, 25 bp, Homo sapien
ggctttgatgccgatcagtctggtt

SEQ ID NO: 3898674 - DNA, 25 bp, Homo sapien
cagctctgtcaaagtagctgccgct

SEQ ID NO: 3898675 - DNA, 25 bp, Homo sapien
tgtcaaagtagctgccgctcctctc

SEQ ID NO: 3898676 - DNA, 25 bp, Homo sapien
gggaccatgtcatcaatctacgcac

SEQ ID NO: 3898677 - DNA, 25 bp, Homo sapien
cacctgggaccatgtcatcaatcta

SEQ ID NO: 3898678 - DNA, 25 bp, Homo sapien
gtcacctgggaccatgtcatcaatc

SEQ ID NO: 3898679 - DNA, 25 bp, Homo sapien
cctgggaccatgtcatcaatctacg

SEQ ID NO: 3898680 - DNA, 25 bp, Homo sapien
gagcacatggacagattaaagagaa

SEQ ID NO: 3898681 - DNA, 25 bp, Homo sapien
ctcaaatgtaaccagaaggaaacgt

SEQ ID NO: 3898682 - DNA, 25 bp, Homo sapien
aactgcattctatgactttgacagc

SEQ ID NO: 3898683 - DNA, 25 bp, Homo sapien
taactaccaaatttgactagagaca

SEQ ID NO: 3898684 - DNA, 25 bp, Homo sapien
ttcagaaagacatccagctttgagg

SEQ ID NO: 3898685 - DNA, 25 bp, Homo sapien
cattcagaaagacatccagctttga

SEQ ID NO: 3898686 - DNA, 25 bp, Homo sapien
attcagaaagacatccagctttgag

SEQ ID NO: 3898687 - DNA, 25 bp, Homo sapien
tcattcagaaagacatccagctttg

SEQ ID NO: 3898688 - DNA, 25 bp, Homo sapien
tttctttgagatcctaggaaccagg

SEQ ID NO: 3898689 - DNA, 25 bp, Homo sapien
gcaaaacaaggccaaagcagccatt

SEQ ID NO: 3898690 - DNA, 25 bp, Homo sapien
cagattgggtgtgaagtgccataca

SEQ ID NO: 3898691 - DNA, 25 bp, Homo sapien
gagcctctgtgcatcctctcaagga

SEQ ID NO: 3898692 - DNA, 25 bp, Homo sapien
actgctccgatcatcaacaagccat

SEQ ID NO: 3898693 - DNA, 25 bp, Homo sapien
gactgctccgatcatcaacaagcca

SEQ ID NO: 3898694 - DNA, 25 bp, Homo sapien
gctccgatcatcaacaagccatcca

SEQ ID NO: 3898695 - DNA, 25 bp, Homo sapien
ccgactgctccgatcatcaacaagc

SEQ ID NO: 3898696 - DNA, 25 bp, Homo sapien
gacttgtaagtctcatgatcctggt

SEQ ID NO: 3898697 - DNA, 25 bp, Homo sapien
cggacttgtaagtctcatgatcctg

SEQ ID NO: 3898698 - DNA, 25 bp, Homo sapien
ctcggacttgtaagtctcatgatcc

SEQ ID NO: 3898699 - DNA, 25 bp, Homo sapien
cttgtaagtctcatgatcctggtac

SEQ ID NO: 3898700 - DNA, 25 bp, Homo sapien
gattggagtagggttatatgcagcc

SEQ ID NO: 3898701 - DNA, 25 bp, Homo sapien
aaatctggttttgatatcgcaatgc

SEQ ID NO: 3898702 - DNA, 25 bp, Homo sapien
gaataaaatacacttcgattggagt

SEQ ID NO: 3898703 - DNA, 25 bp, Homo sapien
tggttttgatatcgcaatgccagaa

SEQ ID NO: 3898704 - DNA, 25 bp, Homo sapien
caccaataggcttgtggataactct

SEQ ID NO: 3898705 - DNA, 25 bp, Homo sapien
gggttagatgcccttttatagattc

SEQ ID NO: 3898706 - DNA, 25 bp, Homo sapien
gattctcagggctaagggattccca

SEQ ID NO: 3898707 - DNA, 25 bp, Homo sapien
tctgcagctgaaatgggagttggag

SEQ ID NO: 3898708 - DNA, 25 bp, Homo sapien
gaatttctaagccagtaactcttgc

SEQ ID NO: 3898709 - DNA, 25 bp, Homo sapien
cgtcatagtaacctgctgagagggc

SEQ ID NO: 3898710 - DNA, 25 bp, Homo sapien
gggcaaagagaacagtccctggaaa

SEQ ID NO: 3898711 - DNA, 25 bp, Homo sapien
tcctgaggacaatcattgaagaggc

SEQ ID NO: 3898712 - DNA, 25 bp, Homo sapien
taatcaagtcgagagtaatttggat

SEQ ID NO: 3898713 - DNA, 25 bp, Homo sapien
tacaatgtggactataatgctgctg

SEQ ID NO: 3898714 - DNA, 25 bp, Homo sapien
ttggatagaacaagccctttaaaga

SEQ ID NO: 3898715 - DNA, 25 bp, Homo sapien
gctgctgtcatagttccaggtacaa

SEQ ID NO: 3898716 - DNA, 25 bp, Homo sapien
aatagaatccttacttggcctagag

SEQ ID NO: 3898717 - DNA, 25 bp, Homo sapien
tggcccagtctgctccatctataga

SEQ ID NO: 3898718 - DNA, 25 bp, Homo sapien
tctgcctgctaggaaagcactaaga

SEQ ID NO: 3898719 - DNA, 25 bp, Homo sapien
taacgttagggaacttcagccctga

SEQ ID NO: 3898720 - DNA, 25 bp, Homo sapien
taatgtgctctgtaatgacgataga

SEQ ID NO: 3898721 - DNA, 25 bp, Homo sapien
tgacgatagagctcatagccatcag

SEQ ID NO: 3898722 - DNA, 25 bp, Homo sapien
gatagagctcatagccatcagtcat

SEQ ID NO: 3898723 - DNA, 25 bp, Homo sapien
ctctgtaatgacgatagagctcata

SEQ ID NO: 3898724 - DNA, 25 bp, Homo sapien
tttcctggaagtttgctctttcatg

SEQ ID NO: 3898725 - DNA, 25 bp, Homo sapien
gaagtttgctctttcatgaggttca

SEQ ID NO: 3898726 - DNA, 25 bp, Homo sapien
cctggaagtttgctctttcatgagg

SEQ ID NO: 3898727 - DNA, 25 bp, Homo sapien
aattcaattagagagctttcctgga

SEQ ID NO: 3898728 - DNA, 25 bp, Homo sapien
ccttcagtacacgtgggtgggacct

SEQ ID NO: 3898729 - DNA, 25 bp, Homo sapien
gagtttcgtctatggcctcagggag

SEQ ID NO: 3898730 - DNA, 25 bp, Homo sapien
gttttgacctctattgcctctgcga

SEQ ID NO: 3898731 - DNA, 25 bp, Homo sapien
tagtccagaggaccgcactttgaga

SEQ ID NO: 3898732 - DNA, 25 bp, Homo sapien
cttcctcactcctgacagctttctg

SEQ ID NO: 3898733 - DNA, 25 bp, Homo sapien
agctttctgattttcagcatttaac

SEQ ID NO: 3898734 - DNA, 25 bp, Homo sapien
tgtttctcttcctcactcctgacag

SEQ ID NO: 3898735 - DNA, 25 bp, Homo sapien
tgattttcagcatttaactttttaa

SEQ ID NO: 3898736 - DNA, 25 bp, Homo sapien
tacgagtcagcagctttgtaactat

SEQ ID NO: 3898737 - DNA, 25 bp, Homo sapien
cagcagctttgtaactataaccatt

SEQ ID NO: 3898738 - DNA, 25 bp, Homo sapien
gtttttacgagtcagcagctttgta

SEQ ID NO: 3898739 - DNA, 25 bp, Homo sapien
tctgatatatgctagatttcctgtt

SEQ ID NO: 3898740 - DNA, 25 bp, Homo sapien
taagtgactcactgtttgacatctc

SEQ ID NO: 3898741 - DNA, 25 bp, Homo sapien
aaatctcagacatcaggtaagtgac

SEQ ID NO: 3898742 - DNA, 25 bp, Homo sapien
cctggaggtttaagcaaaggcaaat

SEQ ID NO: 3898743 - DNA, 25 bp, Homo sapien
gcaaattgatttgagtacctggcca

SEQ ID NO: 3898744 - DNA, 25 bp, Homo sapien
acttcactgttttgctcacgcaaag

SEQ ID NO: 3898745 - DNA, 25 bp, Homo sapien
ttaccatgagccttgaaggtaagta

SEQ ID NO: 3898746 - DNA, 25 bp, Homo sapien
catgagccttgaaggtaagtaggat

SEQ ID NO: 3898747 - DNA, 25 bp, Homo sapien
cttcactgttttgctcacgcaaagc

SEQ ID NO: 3898748 - DNA, 25 bp, Homo sapien
aatccaatggtccatccaaatataa

SEQ ID NO: 3898749 - DNA, 25 bp, Homo sapien
atgataaatccaatggtccatccaa

SEQ ID NO: 3898750 - DNA, 25 bp, Homo sapien
gggaaatgataaatccaatggtcca

SEQ ID NO: 3898751 - DNA, 25 bp, Homo sapien
aagggaaatgataaatccaatggtc

SEQ ID NO: 3898752 - DNA, 25 bp, Homo sapien
tttggctaaacaagccatccttcct

SEQ ID NO: 3898753 - DNA, 25 bp, Homo sapien
gatctggacactgcttaatttggct

SEQ ID NO: 3898754 - DNA, 25 bp, Homo sapien
catccttcctcaagaagcgtacaat

SEQ ID NO: 3898755 - DNA, 25 bp, Homo sapien
aatgttgattttgtgcatggaaggg

SEQ ID NO: 3898756 - DNA, 25 bp, Homo sapien
gatcaccccctctgtatctgaagtg

SEQ ID NO: 3898757 - DNA, 25 bp, Homo sapien
tggcatgatttgcactctctcggtg

SEQ ID NO: 3898758 - DNA, 25 bp, Homo sapien
tataccacatgctattaacaagagg

SEQ ID NO: 3898759 - DNA, 25 bp, Homo sapien
tccgcagaagcacccacagtgagaa

SEQ ID NO: 3898760 - DNA, 25 bp, Homo sapien
gctttttggtgcaccagattctgtc

SEQ ID NO: 3898761 - DNA, 25 bp, Homo sapien
ttgactcacgtggagcactgatgga

SEQ ID NO: 3898762 - DNA, 25 bp, Homo sapien
tgtcttgactcacgtggagcactga

SEQ ID NO: 3898763 - DNA, 25 bp, Homo sapien
attctgtcttgactcacgtggagca

SEQ ID NO: 3898764 - DNA, 25 bp, Homo sapien
tgttctaagttttggcattctgagc

SEQ ID NO: 3898765 - DNA, 25 bp, Homo sapien
taccgtttctcttgattgaggaact

SEQ ID NO: 3898766 - DNA, 25 bp, Homo sapien
taagccacacatacattaggtgttt

SEQ ID NO: 3898767 - DNA, 25 bp, Homo sapien
gaggaactatatcttgattcagtga

SEQ ID NO: 3898768 - DNA, 25 bp, Homo sapien
tcttcttgcattgccagttcagatc

SEQ ID NO: 3898769 - DNA, 25 bp, Homo sapien
cttcttgcattgccagttcagatct

SEQ ID NO: 3898770 - DNA, 25 bp, Homo sapien
ttgccttcccacgtggtctgacaca

SEQ ID NO: 3898771 - DNA, 25 bp, Homo sapien
ttcttttgccttcccacgtggtctg

SEQ ID NO: 3898772 - DNA, 25 bp, Homo sapien
tctcctttgtactcttcttttgcct

SEQ ID NO: 3898773 - DNA, 25 bp, Homo sapien
tctccatctcctttgtactcttctt

SEQ ID NO: 3898774 - DNA, 25 bp, Homo sapien
actattgtcagatcccagccacttg

SEQ ID NO: 3898775 - DNA, 25 bp, Homo sapien
gatcccagccacttggtataaatac

SEQ ID NO: 3898776 - DNA, 25 bp, Homo sapien
ttaaactattgtcagatcccagcca

SEQ ID NO: 3898777 - DNA, 25 bp, Homo sapien
aaactattgtcagatcccagccact

SEQ ID NO: 3898778 - DNA, 25 bp, Homo sapien
tctctgtggcacaccctactgtgta

SEQ ID NO: 3898779 - DNA, 25 bp, Homo sapien
cctctctgtggcacaccctactgtg

SEQ ID NO: 3898780 - DNA, 25 bp, Homo sapien
ctctctgtggcacaccctactgtgt

SEQ ID NO: 3898781 - DNA, 25 bp, Homo sapien
ctctgtggcacaccctactgtgtat

SEQ ID NO: 3898782 - DNA, 25 bp, Homo sapien
tgctgcccttacaaaggtatttatc

SEQ ID NO: 3898783 - DNA, 25 bp, Homo sapien
tttgtggataatttcgaatcacatg

SEQ ID NO: 3898784 - DNA, 25 bp, Homo sapien
tgcccttacaaaggtatttatcttc

SEQ ID NO: 3898785 - DNA, 25 bp, Homo sapien
gataatttcgaatcacatgagggct

SEQ ID NO: 3898786 - DNA, 25 bp, Homo sapien
cacttgtggcattgttgctgcttcc

SEQ ID NO: 3898787 - DNA, 25 bp, Homo sapien
tatctgactataacaatggacagga

SEQ ID NO: 3898788 - DNA, 25 bp, Homo sapien
ccgaagttctctcacatgcactggg

SEQ ID NO: 3898789 - DNA, 25 bp, Homo sapien
tcttgcatgtggtcaagacaccctt

SEQ ID NO: 3898790 - DNA, 25 bp, Homo sapien
cacttttctcttctatttttcatta

SEQ ID NO: 3898791 - DNA, 25 bp, Homo sapien
tcacttttctcttctatttttcatt

SEQ ID NO: 3898792 - DNA, 25 bp, Homo sapien
tggaatatggcagaacggacttcta

SEQ ID NO: 3898793 - DNA, 25 bp, Homo sapien
gattacaacaacatgaaagcattta

SEQ ID NO: 3898794 - DNA, 25 bp, Homo sapien
tttttgttgtaatcgcccaccttca

SEQ ID NO: 3898795 - DNA, 25 bp, Homo sapien
caaatcacctcaagatgtttaccct

SEQ ID NO: 3898796 - DNA, 25 bp, Homo sapien
ttcagtttctttcttatccacatac

SEQ ID NO: 3898797 - DNA, 25 bp, Homo sapien
tgcaacgttcagtttctttcttatc

SEQ ID NO: 3898798 - DNA, 25 bp, Homo sapien
cgttcagtttctttcttatccacat

SEQ ID NO: 3898799 - DNA, 25 bp, Homo sapien
ggtgcaacgttcagtttctttctta

SEQ ID NO: 3898800 - DNA, 25 bp, Homo sapien
cagatgctcctgaacatctctcaat

SEQ ID NO: 3898801 - DNA, 25 bp, Homo sapien
tcactatttccccaacatccacccc

SEQ ID NO: 3898802 - DNA, 25 bp, Homo sapien
tgctcctgaacatctctcaatgaag

SEQ ID NO: 3898803 - DNA, 25 bp, Homo sapien
catctctcaatgaaggttctccttg

SEQ ID NO: 3898804 - DNA, 25 bp, Homo sapien
aagtttaggtatgcactgttcgtgg

SEQ ID NO: 3898805 - DNA, 25 bp, Homo sapien
ctaagtttaggtatgcactgttcgt

SEQ ID NO: 3898806 - DNA, 25 bp, Homo sapien
taggtatgcactgttcgtggtgtgc

SEQ ID NO: 3898807 - DNA, 25 bp, Homo sapien
tgcactgttcgtggtgtgcacaggc

SEQ ID NO: 3898808 - DNA, 25 bp, Homo sapien
aaaataagcacctgtggaaacaaca

SEQ ID NO: 3898809 - DNA, 25 bp, Homo sapien
caaagcatcataaatcccttcctct

SEQ ID NO: 3898810 - DNA, 25 bp, Homo sapien
ccatgaaaataagcacctgtggaaa

SEQ ID NO: 3898811 - DNA, 25 bp, Homo sapien
tgaaaataagcacctgtggaaacaa

SEQ ID NO: 3898812 - DNA, 25 bp, Homo sapien
agcctctatgcattcttcagagcct

SEQ ID NO: 3898813 - DNA, 25 bp, Homo sapien
tgtaacagcctctatgcattcttca

SEQ ID NO: 3898814 - DNA, 25 bp, Homo sapien
ctatgtaacagcctctatgcattct

SEQ ID NO: 3898815 - DNA, 25 bp, Homo sapien
gcctctatgcattcttcagagcctt

SEQ ID NO: 3898816 - DNA, 25 bp, Homo sapien
agataagcagtgcagatgggtaaag

SEQ ID NO: 3898817 - DNA, 25 bp, Homo sapien
aagtggggttggagataagcagtgc

SEQ ID NO: 3898818 - DNA, 25 bp, Homo sapien
gagataagcagtgcagatgggtaaa

SEQ ID NO: 3898819 - DNA, 25 bp, Homo sapien
aaatacagaaagtggggttggagat

SEQ ID NO: 3898820 - DNA, 25 bp, Homo sapien
tttctatcaagaatatccatatggc

SEQ ID NO: 3898821 - DNA, 25 bp, Homo sapien
tatcaagaatatccatatggcacag

SEQ ID NO: 3898822 - DNA, 25 bp, Homo sapien
ttttctatcaagaatatccatatgg

SEQ ID NO: 3898823 - DNA, 25 bp, Homo sapien
tctatcaagaatatccatatggcac

SEQ ID NO: 3898824 - DNA, 25 bp, Homo sapien
catggcagcacatgtttctatacac

SEQ ID NO: 3898825 - DNA, 25 bp, Homo sapien
atggcagcacatgtttctatacacc

SEQ ID NO: 3898826 - DNA, 25 bp, Homo sapien
ttctatacaccttatccagccttca

SEQ ID NO: 3898827 - DNA, 25 bp, Homo sapien
tatacaccttatccagccttcatac

SEQ ID NO: 3898828 - DNA, 25 bp, Homo sapien
ttaggccgtagggtgatgtctagag

SEQ ID NO: 3898829 - DNA, 25 bp, Homo sapien
cagtcatattgttccgtttttctac

SEQ ID NO: 3898830 - DNA, 25 bp, Homo sapien
ccgtagggtgatgtctagagtcagt

SEQ ID NO: 3898831 - DNA, 25 bp, Homo sapien
gatgtctagagtcagtcatattgtt

SEQ ID NO: 3898832 - DNA, 25 bp, Homo sapien
tggaacccattcaatgtagcgttgt

SEQ ID NO: 3898833 - DNA, 25 bp, Homo sapien
tgacctggaacccattcaatgtagc

SEQ ID NO: 3898834 - DNA, 25 bp, Homo sapien
ccattcaatgtagcgttgttattca

SEQ ID NO: 3898835 - DNA, 25 bp, Homo sapien
ctggaggttgacctggaacccattc

SEQ ID NO: 3898836 - DNA, 25 bp, Homo sapien
tctagccttaactccagtcacagct

SEQ ID NO: 3898837 - DNA, 25 bp, Homo sapien
agttcccctctagccttaactccag

SEQ ID NO: 3898838 - DNA, 25 bp, Homo sapien
acttcagtaacaacgaaccccacat

SEQ ID NO: 3898839 - DNA, 25 bp, Homo sapien
gccttaactccagtcacagcttgtc

SEQ ID NO: 3898840 - DNA, 25 bp, Homo sapien
aagtaggaacagttttttgcaatgt

SEQ ID NO: 3898841 - DNA, 25 bp, Homo sapien
gtaggaacagttttttgcaatgttc

SEQ ID NO: 3898842 - DNA, 25 bp, Homo sapien
aaagtaggaacagttttttgcaatg

SEQ ID NO: 3898843 - DNA, 25 bp, Homo sapien
agtaggaacagttttttgcaatgtt

SEQ ID NO: 3898844 - DNA, 25 bp, Homo sapien
ttggttgctgttcggagagttggat

SEQ ID NO: 3898845 - DNA, 25 bp, Homo sapien
cttggttgctgttcggagagttgga

SEQ ID NO: 3898846 - DNA, 25 bp, Homo sapien
ccagtgttcttgatttccgccccta

SEQ ID NO: 3898847 - DNA, 25 bp, Homo sapien
ttatgtcggcatgcttagctgccag

SEQ ID NO: 3898848 - DNA, 25 bp, Homo sapien
cccatattgtagacattatgtcggc

SEQ ID NO: 3898849 - DNA, 25 bp, Homo sapien
cattgcaagcactgcctctctggac

SEQ ID NO: 3898850 - DNA, 25 bp, Homo sapien
tcctgtcacacccagaagcacaagg

SEQ ID NO: 3898851 - DNA, 25 bp, Homo sapien
tcctggaattaagataataataaga

SEQ ID NO: 3898852 - DNA, 25 bp, Homo sapien
tcacacatgctactcctggaattaa

SEQ ID NO: 3898853 - DNA, 25 bp, Homo sapien
tattctgctctccaactgggggtcc

SEQ ID NO: 3898854 - DNA, 25 bp, Homo sapien
tacctctatggctccacatatatgg

SEQ ID NO: 3898855 - DNA, 25 bp, Homo sapien
tatcttgaatatcctgataatacct

SEQ ID NO: 3898856 - DNA, 25 bp, Homo sapien
agttctttccatgtgaccccttggc

SEQ ID NO: 3898857 - DNA, 25 bp, Homo sapien
ctatggctccacatatatggttctc

SEQ ID NO: 3898858 - DNA, 25 bp, Homo sapien
gagtcttttgctatgctgtatatac

SEQ ID NO: 3898859 - DNA, 25 bp, Homo sapien
tcaggattgcagtaccgctctctct

SEQ ID NO: 3898860 - DNA, 25 bp, Homo sapien
agagtgacttgctatccagtctaag

SEQ ID NO: 3898861 - DNA, 25 bp, Homo sapien
tctgcagagaacttagagtcttttg

SEQ ID NO: 3898862 - DNA, 25 bp, Homo sapien
tggcttcttcttgggtgacccattg

SEQ ID NO: 3898863 - DNA, 25 bp, Homo sapien
gtagctcctctgtattgcactattg

SEQ ID NO: 3898864 - DNA, 25 bp, Homo sapien
cattggatatagaaattggtctttg

SEQ ID NO: 3898865 - DNA, 25 bp, Homo sapien
aatattcaattatcagtttctgcaa

SEQ ID NO: 3898866 - DNA, 25 bp, Homo sapien
ggctttgcagggaatctcacgaatg

SEQ ID NO: 3898867 - DNA, 25 bp, Homo sapien
tattatgcgatcactggctttgcag

SEQ ID NO: 3898868 - DNA, 25 bp, Homo sapien
caagtaggcccttccaacaagttgt

SEQ ID NO: 3898869 - DNA, 25 bp, Homo sapien
cataaggactgaaggcaagtaggcc

SEQ ID NO: 3898870 - DNA, 25 bp, Homo sapien
cccagtggagcctctgacggcttga

SEQ ID NO: 3898871 - DNA, 25 bp, Homo sapien
tgatccaagccattaaccactgcta

SEQ ID NO: 3898872 - DNA, 25 bp, Homo sapien
gagcataatagcttccccagtggag

SEQ ID NO: 3898873 - DNA, 25 bp, Homo sapien
tggaccacacaatccagagcataat

SEQ ID NO: 3898874 - DNA, 25 bp, Homo sapien
tgaaagagaaaaatcgaggaatgga

SEQ ID NO: 3898875 - DNA, 25 bp, Homo sapien
aaagagaaaaatcgaggaatggagc

SEQ ID NO: 3898876 - DNA, 25 bp, Homo sapien
agagaaaaatcgaggaatggagcga

SEQ ID NO: 3898877 - DNA, 25 bp, Homo sapien
aacataccccaattttccaggctat

SEQ ID NO: 3898878 - DNA, 25 bp, Homo sapien
aagacgatgaagagatcagaatcag

SEQ ID NO: 3898879 - DNA, 25 bp, Homo sapien
agatcagaatcagatacagcagata

SEQ ID NO: 3898880 - DNA, 25 bp, Homo sapien
cttgatccctgtgttttctgggaaa

SEQ ID NO: 3898881 - DNA, 25 bp, Homo sapien
aaagacgatgaagagatcagaatca

SEQ ID NO: 3898882 - DNA, 25 bp, Homo sapien
tcatagagaacaaagtagggacttc

SEQ ID NO: 3898883 - DNA, 25 bp, Homo sapien
cccatttgcgactgggatagatcac

SEQ ID NO: 3898884 - DNA, 25 bp, Homo sapien
tacatcacggtagtctagtgaccca

SEQ ID NO: 3898885 - DNA, 25 bp, Homo sapien
tcccagtggcctgaaatcacaacag

SEQ ID NO: 3898886 - DNA, 25 bp, Homo sapien
gcattcatttcttacgggtagcata

SEQ ID NO: 3898887 - DNA, 25 bp, Homo sapien
ttaaatccagaaatgttgggagtcc

SEQ ID NO: 3898888 - DNA, 25 bp, Homo sapien
gaaatgttgggagtcctgcattcat

SEQ ID NO: 3898889 - DNA, 25 bp, Homo sapien
catttcttacgggtagcatatgtag

SEQ ID NO: 3898890 - DNA, 25 bp, Homo sapien
agctttgaagagactgactacccag

SEQ ID NO: 3898891 - DNA, 25 bp, Homo sapien
catggcctggtatttgcattccaag

SEQ ID NO: 3898892 - DNA, 25 bp, Homo sapien
ttccaagggagagtttgggcttctc

SEQ ID NO: 3898893 - DNA, 25 bp, Homo sapien
gcattccaagatgaagtaccccaag

SEQ ID NO: 3898894 - DNA, 25 bp, Homo sapien
tgttttatccaaagcacgtacgtgg

SEQ ID NO: 3898895 - DNA, 25 bp, Homo sapien
gaaatcattttggtagacacctggg

SEQ ID NO: 3898896 - DNA, 25 bp, Homo sapien
tatgcttgcagctcaaaggttagtc

SEQ ID NO: 3898897 - DNA, 25 bp, Homo sapien
caagatgtctgatggcttgctgcat

SEQ ID NO: 3898898 - DNA, 25 bp, Homo sapien
tgcccttggttgaggcatggtagat

SEQ ID NO: 3898899 - DNA, 25 bp, Homo sapien
tgatcaatggctaagcaacggccct

SEQ ID NO: 3898900 - DNA, 25 bp, Homo sapien
taagcaacggccctcataatgaagc

SEQ ID NO: 3898901 - DNA, 25 bp, Homo sapien
gaggcatggtagattgatcaatggc

SEQ ID NO: 3898902 - DNA, 25 bp, Homo sapien
gagcagacaattggcatggcatttg

SEQ ID NO: 3898903 - DNA, 25 bp, Homo sapien
gacaattggcatggcatttgtagaa

SEQ ID NO: 3898904 - DNA, 25 bp, Homo sapien
ctgggagcagacaattggcatggca

SEQ ID NO: 3898905 - DNA, 25 bp, Homo sapien
caattggcatggcatttgtagaaag

SEQ ID NO: 3898906 - DNA, 25 bp, Homo sapien
gtgaacgaaacggtttttctgtgca

SEQ ID NO: 3898907 - DNA, 25 bp, Homo sapien
tgaacgaaacggtttttctgtgcaa

SEQ ID NO: 3898908 - DNA, 25 bp, Homo sapien
caatttgagcttctgatactgctac

SEQ ID NO: 3898909 - DNA, 25 bp, Homo sapien
ttgagcttctgatactgctacatca

SEQ ID NO: 3898910 - DNA, 25 bp, Homo sapien
ttatatgatattttgtggcaactgc

SEQ ID NO: 3898911 - DNA, 25 bp, Homo sapien
tatcataagctgtccaataaatgtg

SEQ ID NO: 3898912 - DNA, 25 bp, Homo sapien
gcaactgctaattatcataagctgt

SEQ ID NO: 3898913 - DNA, 25 bp, Homo sapien
tggattgtccaattaactcttcatc

SEQ ID NO: 3898914 - DNA, 25 bp, Homo sapien
atgccacttcccattgtgttaatga

SEQ ID NO: 3898915 - DNA, 25 bp, Homo sapien
gccacttcccattgtgttaatgaga

SEQ ID NO: 3898916 - DNA, 25 bp, Homo sapien
agaagtttcttcttactgtggcagg

SEQ ID NO: 3898917 - DNA, 25 bp, Homo sapien
gagaagtttcttcttactgtggcag

SEQ ID NO: 3898918 - DNA, 25 bp, Homo sapien
tggctgctgtgtacattccagactt

SEQ ID NO: 3898919 - DNA, 25 bp, Homo sapien
tgttcgtgttgtactggagtcacag

SEQ ID NO: 3898920 - DNA, 25 bp, Homo sapien
gaaagatccacgacattcaaaactt

SEQ ID NO: 3898921 - DNA, 25 bp, Homo sapien
gtgttctgcatgtatattgtcacag

SEQ ID NO: 3898922 - DNA, 25 bp, Homo sapien
tgtagattgcccctggcattgctgg

SEQ ID NO: 3898923 - DNA, 25 bp, Homo sapien
tagaaatcgattgggcttcttgtgt

SEQ ID NO: 3898924 - DNA, 25 bp, Homo sapien
caatgtggacctgtggacattcata

SEQ ID NO: 3898925 - DNA, 25 bp, Homo sapien
tcacttgtagattgcccctggcatt

SEQ ID NO: 3898926 - DNA, 25 bp, Homo sapien
tgcgacatgaggtacacagtgagcc

SEQ ID NO: 3898927 - DNA, 25 bp, Homo sapien
cacagagcatttgtaggatatcacc

SEQ ID NO: 3898928 - DNA, 25 bp, Homo sapien
tgctgattacgacaaatcacagagc

SEQ ID NO: 3898929 - DNA, 25 bp, Homo sapien
tgagccctacaaccatttttgatgc

SEQ ID NO: 3898930 - DNA, 25 bp, Homo sapien
cttgcatgctgtaactgtttcctgc

SEQ ID NO: 3898931 - DNA, 25 bp, Homo sapien
caagactaaggctccgttctcaggg

SEQ ID NO: 3898932 - DNA, 25 bp, Homo sapien
aacactgaggtatgctgcttttccc

SEQ ID NO: 3898933 - DNA, 25 bp, Homo sapien
ttttcccctagttgctgctgaacat

SEQ ID NO: 3898934 - DNA, 25 bp, Homo sapien
tgacagcccaacaccgatactccct

SEQ ID NO: 3898935 - DNA, 25 bp, Homo sapien
tcaagctgttcaacgctcacaccag

SEQ ID NO: 3898936 - DNA, 25 bp, Homo sapien
ccacagccaaaaacagcagttcatt

SEQ ID NO: 3898937 - DNA, 25 bp, Homo sapien
gttcaacgctcacaccagcagctga

SEQ ID NO: 3898938 - DNA, 25 bp, Homo sapien
ggccaggtcaagctgttcaacgctc

SEQ ID NO: 3898939 - DNA, 25 bp, Homo sapien
aggagaggcagatctatttgcatag

SEQ ID NO: 3898940 - DNA, 25 bp, Homo sapien
ggagaggcagatctatttgcatagc

SEQ ID NO: 3898941 - DNA, 25 bp, Homo sapien
gagaggcagatctatttgcatagcc

SEQ ID NO: 3898942 - DNA, 25 bp, Homo sapien
tgttttttgatcagtcttgaaattc

SEQ ID NO: 3898943 - DNA, 25 bp, Homo sapien
aattcttgggcttaggaagcagaga

SEQ ID NO: 3898944 - DNA, 25 bp, Homo sapien
tcaaactccttatactgacatctac

SEQ ID NO: 3898945 - DNA, 25 bp, Homo sapien
atgtttcaaactccttatactgaca

SEQ ID NO: 3898946 - DNA, 25 bp, Homo sapien
cttggctaggaacaagacagctagc

SEQ ID NO: 3898947 - DNA, 25 bp, Homo sapien
ccttggctaggaacaagacagctag

SEQ ID NO: 3898948 - DNA, 25 bp, Homo sapien
ttgggctacttgtctccatgaggta

SEQ ID NO: 3898949 - DNA, 25 bp, Homo sapien
gggctacttgtctccatgaggtagc

SEQ ID NO: 3898950 - DNA, 25 bp, Homo sapien
cttgggctacttgtctccatgaggt

SEQ ID NO: 3898951 - DNA, 25 bp, Homo sapien
tgggctacttgtctccatgaggtag

SEQ ID NO: 3898952 - DNA, 25 bp, Homo sapien
tataggaatacttcgctaggcttgg

SEQ ID NO: 3898953 - DNA, 25 bp, Homo sapien
cactcggctttgcaagtactgggac

SEQ ID NO: 3898954 - DNA, 25 bp, Homo sapien
tttgcagctgtcttcctataggaat

SEQ ID NO: 3898955 - DNA, 25 bp, Homo sapien
aaaagttagcacagttgagtgtcac

SEQ ID NO: 3898956 - DNA, 25 bp, Homo sapien
ttatgagcacacctgctctttgaaa

SEQ ID NO: 3898957 - DNA, 25 bp, Homo sapien
ctttgaaaggccctcctgcgagtca

SEQ ID NO: 3898958 - DNA, 25 bp, Homo sapien
tatgagcacacctgctctttgaaag

SEQ ID NO: 3898959 - DNA, 25 bp, Homo sapien
gaaaggccctcctgcgagtcaccat

SEQ ID NO: 3898960 - DNA, 25 bp, Homo sapien
gacctccctgtcacgcacaagagtg

SEQ ID NO: 3898961 - DNA, 25 bp, Homo sapien
cactcttgtgcgtgacagggaggtc

SEQ ID NO: 3898962 - DNA, 25 bp, Homo sapien
caagcagggtgattctactggccat

SEQ ID NO: 3898963 - DNA, 25 bp, Homo sapien
ttaaattatagagtcccggtgattg

SEQ ID NO: 3898964 - DNA, 25 bp, Homo sapien
agtcccggtgattgagctgagccca

SEQ ID NO: 3898965 - DNA, 25 bp, Homo sapien
ggcaaagaatgacaagcagggtgat

SEQ ID NO: 3898966 - DNA, 25 bp, Homo sapien
tcctctatactcatcaggttaagcc

SEQ ID NO: 3898967 - DNA, 25 bp, Homo sapien
tttgttctggactccgttttctctg

SEQ ID NO: 3898968 - DNA, 25 bp, Homo sapien
ttgttctggactccgttttctctgt

SEQ ID NO: 3898969 - DNA, 25 bp, Homo sapien
aaaggaggagactttgttctggact

SEQ ID NO: 3898970 - DNA, 25 bp, Homo sapien
gagtactgtcctctcgcatccggta

SEQ ID NO: 3898971 - DNA, 25 bp, Homo sapien
catccggtaccatcgcaaagcagat

SEQ ID NO: 3898972 - DNA, 25 bp, Homo sapien
ggaaggtaagcgagagtactgtcct

SEQ ID NO: 3898973 - DNA, 25 bp, Homo sapien
ggctggcttttgaagcgcctgttct

SEQ ID NO: 3898974 - DNA, 25 bp, Homo sapien
cttatcaccaagacagcgggaggga

SEQ ID NO: 3898975 - DNA, 25 bp, Homo sapien
aacgatagagcttatcaccaagaca

SEQ ID NO: 3898976 - DNA, 25 bp, Homo sapien
ttcagcaccaattaaacgatagagc

SEQ ID NO: 3898977 - DNA, 25 bp, Homo sapien
tgctcacttcagcaccaattaaacg

SEQ ID NO: 3898978 - DNA, 25 bp, Homo sapien
ccagtctggcagaatcctcaaagtt

SEQ ID NO: 3898979 - DNA, 25 bp, Homo sapien
tctggcagaatcctcaaagtttcct

SEQ ID NO: 3898980 - DNA, 25 bp, Homo sapien
agccggcggcatgtcaaggactagc

SEQ ID NO: 3898981 - DNA, 25 bp, Homo sapien
aggactagccgtttgcctccaccag

SEQ ID NO: 3898982 - DNA, 25 bp, Homo sapien
cgcttctcatccgggaacctttgag

SEQ ID NO: 3898983 - DNA, 25 bp, Homo sapien
cttctcatccgggaacctttgaggg

SEQ ID NO: 3898984 - DNA, 25 bp, Homo sapien
cctttgaggggctggtcgcgcccct

SEQ ID NO: 3898985 - DNA, 25 bp, Homo sapien
tcgcaggatcggagggaaaaaggct

SEQ ID NO: 3898986 - DNA, 25 bp, Homo sapien
agccgctctcctagggacagctgag

SEQ ID NO: 3898987 - DNA, 25 bp, Homo sapien
ggggactccgtagccgctctcctag

SEQ ID NO: 3898988 - DNA, 25 bp, Homo sapien
tccgtagccgctctcctagggacag

SEQ ID NO: 3898989 - DNA, 25 bp, Homo sapien
gtagccgctctcctagggacagctg

SEQ ID NO: 3898990 - DNA, 25 bp, Homo sapien
gagcgcagcccatcagaagacttga

SEQ ID NO: 3898991 - DNA, 25 bp, Homo sapien
ttctcaagatctgagcgcagcccat

SEQ ID NO: 3898992 - DNA, 25 bp, Homo sapien
cagaagacttgaagtgaccacagac

SEQ ID NO: 3898993 - DNA, 25 bp, Homo sapien
gatctgagcgcagcccatcagaaga

SEQ ID NO: 3898994 - DNA, 25 bp, Homo sapien
ttccaataccctgtaagcagacaca

SEQ ID NO: 3898995 - DNA, 25 bp, Homo sapien
agccaattccaataccctgtaagca

SEQ ID NO: 3898996 - DNA, 25 bp, Homo sapien
cagttataatttgattgagccttga

SEQ ID NO: 3898997 - DNA, 25 bp, Homo sapien
gttataatttgattgagccttgact

SEQ ID NO: 3898998 - DNA, 25 bp, Homo sapien
ttcagctccaaccaaggcatttcca

SEQ ID NO: 3898999 - DNA, 25 bp, Homo sapien
catgtataaggctggttaagaccca

SEQ ID NO: 3899000 - DNA, 25 bp, Homo sapien
tgctagttcttggacaagccagacc

SEQ ID NO: 3899001 - DNA, 25 bp, Homo sapien
aagacccagtctccaagatccacag

SEQ ID NO: 3899002 - DNA, 25 bp, Homo sapien
atgtttcaactgtgttatcactgtc

SEQ ID NO: 3899003 - DNA, 25 bp, Homo sapien
tgcagacatattgggagatgctctt

SEQ ID NO: 3899004 - DNA, 25 bp, Homo sapien
tgactgattatttaatccaccctga

SEQ ID NO: 3899005 - DNA, 25 bp, Homo sapien
tcttgaaatagaagtgtctttgcag

SEQ ID NO: 3899006 - DNA, 25 bp, Homo sapien
ttgggccgttggtacattggtacta

SEQ ID NO: 3899007 - DNA, 25 bp, Homo sapien
ggtgggcaaagatggcaactcttat

SEQ ID NO: 3899008 - DNA, 25 bp, Homo sapien
ttatgtaagacacctggcattaggg

SEQ ID NO: 3899009 - DNA, 25 bp, Homo sapien
cctggcaatgtacagttgaggctga

SEQ ID NO: 3899010 - DNA, 25 bp, Homo sapien
agttcacaaaataaacctgtgttca

SEQ ID NO: 3899011 - DNA, 25 bp, Homo sapien
cactgagaacctgtctacactgaac

SEQ ID NO: 3899012 - DNA, 25 bp, Homo sapien
tacactgaactgaagttcacaaaat

SEQ ID NO: 3899013 - DNA, 25 bp, Homo sapien
ctggatgccactgagaacctgtcta

SEQ ID NO: 3899014 - DNA, 25 bp, Homo sapien
caggacagctagtggagtggaggga

SEQ ID NO: 3899015 - DNA, 25 bp, Homo sapien
ctgaagttccttgaatgattccacc

SEQ ID NO: 3899016 - DNA, 25 bp, Homo sapien
caagaatgaggcaagtagacagcac

SEQ ID NO: 3899017 - DNA, 25 bp, Homo sapien
cttgaatgattccacccaagaggat

SEQ ID NO: 3899018 - DNA, 25 bp, Homo sapien
ttttttccagtcgtaagagctactg

SEQ ID NO: 3899019 - DNA, 25 bp, Homo sapien
taagagctactgaaactctgtgcat

SEQ ID NO: 3899020 - DNA, 25 bp, Homo sapien
cttcgtgcgataatgtttgtccaga

SEQ ID NO: 3899021 - DNA, 25 bp, Homo sapien
cgtgcgataatgtttgtccagaatt

SEQ ID NO: 3899022 - DNA, 25 bp, Homo sapien
gtcattcttagaaagactagcaagg

SEQ ID NO: 3899023 - DNA, 25 bp, Homo sapien
cgtcaattgtctgtcacactgctta

SEQ ID NO: 3899024 - DNA, 25 bp, Homo sapien
gaaatgtctgtcctcgtcaattgtc

SEQ ID NO: 3899025 - DNA, 25 bp, Homo sapien
ctagcaaggtttttgagtgacattg

SEQ ID NO: 3899026 - DNA, 25 bp, Homo sapien
gagtggcactaacccatacaaggga

SEQ ID NO: 3899027 - DNA, 25 bp, Homo sapien
gaagttgaccctgagtagcttgctt

SEQ ID NO: 3899028 - DNA, 25 bp, Homo sapien
tgtagccaatggaaagtccgactgt

SEQ ID NO: 3899029 - DNA, 25 bp, Homo sapien
tgcaatgatgggcatgacatgtcct

SEQ ID NO: 3899030 - DNA, 25 bp, Homo sapien
cattgggaaggaaatccaagtccac

SEQ ID NO: 3899031 - DNA, 25 bp, Homo sapien
gatgatgtccaaccacattgggaag

SEQ ID NO: 3899032 - DNA, 25 bp, Homo sapien
ggaaatgccctttcagacacgctca

SEQ ID NO: 3899033 - DNA, 25 bp, Homo sapien
atgtttaatctggacactgggtggc

SEQ ID NO: 3899034 - DNA, 25 bp, Homo sapien
tgtttttaaactgcaagaggtctga

SEQ ID NO: 3899035 - DNA, 25 bp, Homo sapien
tctataaacattgcttcaggttgat

SEQ ID NO: 3899036 - DNA, 25 bp, Homo sapien
tcaaatccaaaacgtatatttctat

SEQ ID NO: 3899037 - DNA, 25 bp, Homo sapien
gaggtctgaatacacccactcttca

SEQ ID NO: 3899038 - DNA, 25 bp, Homo sapien
tagtaacccattggaaaatcagtag

SEQ ID NO: 3899039 - DNA, 25 bp, Homo sapien
cagaactagtaacccattggaaaat

SEQ ID NO: 3899040 - DNA, 25 bp, Homo sapien
gaactagtaacccattggaaaatca

SEQ ID NO: 3899041 - DNA, 25 bp, Homo sapien
ctagtaacccattggaaaatcagta

SEQ ID NO: 3899042 - DNA, 25 bp, Homo sapien
ctgtgacaagaagtgctgatcattt

SEQ ID NO: 3899043 - DNA, 25 bp, Homo sapien
gacaagaagtgctgatcatttcaaa

SEQ ID NO: 3899044 - DNA, 25 bp, Homo sapien
tgctgatcatttcaaacgagctttg

SEQ ID NO: 3899045 - DNA, 25 bp, Homo sapien
catttcaaacgagctttgataaaag

SEQ ID NO: 3899046 - DNA, 25 bp, Homo sapien
ctgcaggttgacctttattaatgca

SEQ ID NO: 3899047 - DNA, 25 bp, Homo sapien
tctaccattctgagctactgcaggt

SEQ ID NO: 3899048 - DNA, 25 bp, Homo sapien
ctgagctactgcaggttgaccttta

SEQ ID NO: 3899049 - DNA, 25 bp, Homo sapien
accattctgagctactgcaggttga

SEQ ID NO: 3899050 - DNA, 25 bp, Homo sapien
catccactgtgaccctccaggggtt

SEQ ID NO: 3899051 - DNA, 25 bp, Homo sapien
tcatccactgtgaccctccaggggt

SEQ ID NO: 3899052 - DNA, 25 bp, Homo sapien
ctgtgaccctccaggggtttctctt

SEQ ID NO: 3899053 - DNA, 25 bp, Homo sapien
ccactgtgaccctccaggggtttct

SEQ ID NO: 3899054 - DNA, 25 bp, Homo sapien
cttctgcaggccgtattagaatctc

SEQ ID NO: 3899055 - DNA, 25 bp, Homo sapien
cgtattagaatctccaccacaacta

SEQ ID NO: 3899056 - DNA, 25 bp, Homo sapien
acaactaaaagacagctctcctctg

SEQ ID NO: 3899057 - DNA, 25 bp, Homo sapien
aactaaaagacagctctcctctgac

SEQ ID NO: 3899058 - DNA, 25 bp, Homo sapien
tacatgcatatctaagaagacagga

SEQ ID NO: 3899059 - DNA, 25 bp, Homo sapien
tgtctgctctacatgcatatctaag

SEQ ID NO: 3899060 - DNA, 25 bp, Homo sapien
tctgctgtctgctctacatgcatat

SEQ ID NO: 3899061 - DNA, 25 bp, Homo sapien
gctctacatgcatatctaagaagac

SEQ ID NO: 3899062 - DNA, 25 bp, Homo sapien
cttgtaatattcctatcaggcgtac

SEQ ID NO: 3899063 - DNA, 25 bp, Homo sapien
ctccttgtaatattcctatcaggcg

SEQ ID NO: 3899064 - DNA, 25 bp, Homo sapien
ccttgtaatattcctatcaggcgta

SEQ ID NO: 3899065 - DNA, 25 bp, Homo sapien
cactccttgtaatattcctatcagg

SEQ ID NO: 3899066 - DNA, 25 bp, Homo sapien
gtgtatgtgtccgataattcatcca

SEQ ID NO: 3899067 - DNA, 25 bp, Homo sapien
tgttttcatataaccatctcctgga

SEQ ID NO: 3899068 - DNA, 25 bp, Homo sapien
aattgtgtgtttgtatcttctcttc

SEQ ID NO: 3899069 - DNA, 25 bp, Homo sapien
tctagctagcatcctagctatctgc

SEQ ID NO: 3899070 - DNA, 25 bp, Homo sapien
aacactgcttttaaccttgccacca

SEQ ID NO: 3899071 - DNA, 25 bp, Homo sapien
gccaccatcatgtggtcataaccca

SEQ ID NO: 3899072 - DNA, 25 bp, Homo sapien
ctctgacaacactgcttttaacctt

SEQ ID NO: 3899073 - DNA, 25 bp, Homo sapien
cttgccaccatcatgtggtcataac

SEQ ID NO: 3899074 - DNA, 25 bp, Homo sapien
cacagcattagggtctgcttgctct

SEQ ID NO: 3899075 - DNA, 25 bp, Homo sapien
tctttggtctggaatttatgcattg

SEQ ID NO: 3899076 - DNA, 25 bp, Homo sapien
ggaatttatgcattgactcaatcac

SEQ ID NO: 3899077 - DNA, 25 bp, Homo sapien
tttgctgcagaactgttctatttct

SEQ ID NO: 3899078 - DNA, 25 bp, Homo sapien
tttgattccatgacacagtatttgt

SEQ ID NO: 3899079 - DNA, 25 bp, Homo sapien
tctttccaaaatctaactccttcat

SEQ ID NO: 3899080 - DNA, 25 bp, Homo sapien
ctttgattccatgacacagtatttg

SEQ ID NO: 3899081 - DNA, 25 bp, Homo sapien
ttctttccaaaatctaactccttca

SEQ ID NO: 3899082 - DNA, 25 bp, Homo sapien
ttgtgttttagacgacatctgtaac

SEQ ID NO: 3899083 - DNA, 25 bp, Homo sapien
ttgtgaatcccttgtgttttagacg

SEQ ID NO: 3899084 - DNA, 25 bp, Homo sapien
tgttttagacgacatctgtaacggg

SEQ ID NO: 3899085 - DNA, 25 bp, Homo sapien
ctgtttattgtgaatcccttgtgtt

SEQ ID NO: 3899086 - DNA, 25 bp, Homo sapien
gatttgcactgagagcttgcctgtg

SEQ ID NO: 3899087 - DNA, 25 bp, Homo sapien
gtgtagggtgccttacagctttcct

SEQ ID NO: 3899088 - DNA, 25 bp, Homo sapien
tcaggcaggatcaataggattggag

SEQ ID NO: 3899089 - DNA, 25 bp, Homo sapien
tgttaagggtgtagggtgccttaca

SEQ ID NO: 3899090 - DNA, 25 bp, Homo sapien
gtacaaataatcacaggcagcctgc

SEQ ID NO: 3899091 - DNA, 25 bp, Homo sapien
aacgggacgaaggatgatgagcaca

SEQ ID NO: 3899092 - DNA, 25 bp, Homo sapien
tgagcacagcatctagtctctttcc

SEQ ID NO: 3899093 - DNA, 25 bp, Homo sapien
gagaacacgtccttgggcaatgagg

SEQ ID NO: 3899094 - DNA, 25 bp, Homo sapien
ttgtgggccttatatctttcagtta

SEQ ID NO: 3899095 - DNA, 25 bp, Homo sapien
tgccaactgttggaaagaggccaaa

SEQ ID NO: 3899096 - DNA, 25 bp, Homo sapien
gaggccaaagcatttagaatataaa

SEQ ID NO: 3899097 - DNA, 25 bp, Homo sapien
ttgtgaatgatagcttttgtgggcc

SEQ ID NO: 3899098 - DNA, 25 bp, Homo sapien
tctttgtcttattcccctgaagttc

SEQ ID NO: 3899099 - DNA, 25 bp, Homo sapien
tctctttgtcttattcccctgaagt

SEQ ID NO: 3899100 - DNA, 25 bp, Homo sapien
tggcagcttcatttccactctttct

SEQ ID NO: 3899101 - DNA, 25 bp, Homo sapien
ctttctctttgtcttattcccctga

SEQ ID NO: 3899102 - DNA, 25 bp, Homo sapien
tcttgtcccagttcctgcgatgata

SEQ ID NO: 3899103 - DNA, 25 bp, Homo sapien
tgaaaaagtctgaattcttgtccca

SEQ ID NO: 3899104 - DNA, 25 bp, Homo sapien
ttcctgcgatgatattgtgagggcc

SEQ ID NO: 3899105 - DNA, 25 bp, Homo sapien
cgatgatattgtgagggccataggt

SEQ ID NO: 3899106 - DNA, 25 bp, Homo sapien
gggggcaggggcgacggtgcaaggc

SEQ ID NO: 3899107 - DNA, 25 bp, Homo sapien
gggcaggggcgacggtgcaaggctt

SEQ ID NO: 3899108 - DNA, 25 bp, Homo sapien
gcaggggcgacggtgcaaggcttac

SEQ ID NO: 3899109 - DNA, 25 bp, Homo sapien
gagggggcaggggcgacggtgcaag

SEQ ID NO: 3899110 - DNA, 25 bp, Homo sapien
gaagtcatctgaattgagtgttgga

SEQ ID NO: 3899111 - DNA, 25 bp, Homo sapien
cctttgcacaggtgtaggaatatta

SEQ ID NO: 3899112 - DNA, 25 bp, Homo sapien
caggcagttgccttgggagaagtca

SEQ ID NO: 3899113 - DNA, 25 bp, Homo sapien
caggtgtaggaatattatccaggag

SEQ ID NO: 3899114 - DNA, 25 bp, Homo sapien
tggctgctgaaacactttccgagag

SEQ ID NO: 3899115 - DNA, 25 bp, Homo sapien
ctcagattaactcttttgtaatgag

SEQ ID NO: 3899116 - DNA, 25 bp, Homo sapien
tctggattcacgaaggaaccaaggg

SEQ ID NO: 3899117 - DNA, 25 bp, Homo sapien
ccgagagacctctgaaatctggatt

SEQ ID NO: 3899118 - DNA, 25 bp, Homo sapien
tgactgcacagccaagtggaatcct

SEQ ID NO: 3899119 - DNA, 25 bp, Homo sapien
gtggaatcctgtggtcctggtccca

SEQ ID NO: 3899120 - DNA, 25 bp, Homo sapien
tctgactgcacagccaagtggaatc

SEQ ID NO: 3899121 - DNA, 25 bp, Homo sapien
tcctggtcccaaactggagatacat

SEQ ID NO: 3899122 - DNA, 25 bp, Homo sapien
gaatcactgggtccagtacttcatt

SEQ ID NO: 3899123 - DNA, 25 bp, Homo sapien
tcttgtcttaaccttcgctgtgaaa

SEQ ID NO: 3899124 - DNA, 25 bp, Homo sapien
tcaactgcactgacgcagaatcact

SEQ ID NO: 3899125 - DNA, 25 bp, Homo sapien
taattcatccaaaactgacacagtg

SEQ ID NO: 3899126 - DNA, 25 bp, Homo sapien
agtccaggacccaaaagggctgaag

SEQ ID NO: 3899127 - DNA, 25 bp, Homo sapien
cctgctgttttctaacaaggctata

SEQ ID NO: 3899128 - DNA, 25 bp, Homo sapien
tatttgccctatcaaaaaagtccag

SEQ ID NO: 3899129 - DNA, 25 bp, Homo sapien
gtctggaaacacatatcataaacct

SEQ ID NO: 3899130 - DNA, 25 bp, Homo sapien
ctaaaaaggagccacacggagactc

SEQ ID NO: 3899131 - DNA, 25 bp, Homo sapien
gaccacattggaggcatgagcactg

SEQ ID NO: 3899132 - DNA, 25 bp, Homo sapien
gaaagtcagtgtgatgaccacattg

SEQ ID NO: 3899133 - DNA, 25 bp, Homo sapien
cggagactcttcagcgttacctaag

SEQ ID NO: 3899134 - DNA, 25 bp, Homo sapien
cagctcagcttggtaggggtcctgt

SEQ ID NO: 3899135 - DNA, 25 bp, Homo sapien
gagaagtggccccatacccacagct

SEQ ID NO: 3899136 - DNA, 25 bp, Homo sapien
ccacagctcagcttggtaggggtcc

SEQ ID NO: 3899137 - DNA, 25 bp, Homo sapien
ccacactcactggagaagtggcccc

SEQ ID NO: 3899138 - DNA, 25 bp, Homo sapien
attgttcttgaagtccaccaaccat

SEQ ID NO: 3899139 - DNA, 25 bp, Homo sapien
ttttctccatacaattgttcttgaa

SEQ ID NO: 3899140 - DNA, 25 bp, Homo sapien
caattgttcttgaagtccaccaacc

SEQ ID NO: 3899141 - DNA, 25 bp, Homo sapien
atacaattgttcttgaagtccacca

SEQ ID NO: 3899142 - DNA, 25 bp, Homo sapien
atcttcctcttggaacaatgtttct

SEQ ID NO: 3899143 - DNA, 25 bp, Homo sapien
gttcctccgcgtagtctctttcctc

SEQ ID NO: 3899144 - DNA, 25 bp, Homo sapien
cattcatttctcttgaggtggtctt

SEQ ID NO: 3899145 - DNA, 25 bp, Homo sapien
tttctcttgaggtggtcttcctctg

SEQ ID NO: 3899146 - DNA, 25 bp, Homo sapien
tgagtttgaaatactaaatccatcc

SEQ ID NO: 3899147 - DNA, 25 bp, Homo sapien
cttgtaggataaagtttctgagtca

SEQ ID NO: 3899148 - DNA, 25 bp, Homo sapien
gtttgaaatactaaatccatccaca

SEQ ID NO: 3899149 - DNA, 25 bp, Homo sapien
ccacactgattcacttgtaggataa

SEQ ID NO: 3899150 - DNA, 25 bp, Homo sapien
aacctcctcggctcctttctcatgg

SEQ ID NO: 3899151 - DNA, 25 bp, Homo sapien
tgaatgctcagccaaaacctcctcg

SEQ ID NO: 3899152 - DNA, 25 bp, Homo sapien
aagcatgtaaagatgaatgctcagc

SEQ ID NO: 3899153 - DNA, 25 bp, Homo sapien
cggctcctttctcatgggtttcatg

SEQ ID NO: 3899154 - DNA, 25 bp, Homo sapien
ggagagatccttgtacccctgcatg

SEQ ID NO: 3899155 - DNA, 25 bp, Homo sapien
gctacaatcagcagtttggctctga

SEQ ID NO: 3899156 - DNA, 25 bp, Homo sapien
tcctttcctaattcagcacagacag

SEQ ID NO: 3899157 - DNA, 25 bp, Homo sapien
gcacagacaggtaaggctacaatca

SEQ ID NO: 3899158 - DNA, 25 bp, Homo sapien
aatctgaagttttatccagttgctt

SEQ ID NO: 3899159 - DNA, 25 bp, Homo sapien
ttaatctgaagttttatccagttgc

SEQ ID NO: 3899160 - DNA, 25 bp, Homo sapien
tctgaagttttatccagttgctttt

SEQ ID NO: 3899161 - DNA, 25 bp, Homo sapien
taatctgaagttttatccagttgct

SEQ ID NO: 3899162 - DNA, 25 bp, Homo sapien
gctgagaccctacttcacgtgaaga

SEQ ID NO: 3899163 - DNA, 25 bp, Homo sapien
cagatcacagacttcaatagtggga

SEQ ID NO: 3899164 - DNA, 25 bp, Homo sapien
ttagcaaccactagaggtgagccag

SEQ ID NO: 3899165 - DNA, 25 bp, Homo sapien
tcgtcacaccgagagagccttagaa

SEQ ID NO: 3899166 - DNA, 25 bp, Homo sapien
cctccgatacttgagcaccttcaag

SEQ ID NO: 3899167 - DNA, 25 bp, Homo sapien
cctttctccaaacaattgctgcctt

SEQ ID NO: 3899168 - DNA, 25 bp, Homo sapien
ttcgaacttcaaaggatcccacatg

SEQ ID NO: 3899169 - DNA, 25 bp, Homo sapien
tattgtcaatggaatcagaaatcct

SEQ ID NO: 3899170 - DNA, 25 bp, Homo sapien
ctataacagttgatgcgatcataga

SEQ ID NO: 3899171 - DNA, 25 bp, Homo sapien
taaactgagccatttagactggatg

SEQ ID NO: 3899172 - DNA, 25 bp, Homo sapien
actggatggtgcattgtattggatc

SEQ ID NO: 3899173 - DNA, 25 bp, Homo sapien
catagagggaacaataaactgagcc

SEQ ID NO: 3899174 - DNA, 25 bp, Homo sapien
gaaaaggatggctccttcggcaggc

SEQ ID NO: 3899175 - DNA, 25 bp, Homo sapien
ccatctgagctctgtgtggcataga

SEQ ID NO: 3899176 - DNA, 25 bp, Homo sapien
cttcggcaggcagacaattatgtaa

SEQ ID NO: 3899177 - DNA, 25 bp, Homo sapien
tagatctggactgctggaaaaggat

SEQ ID NO: 3899178 - DNA, 25 bp, Homo sapien
cattggttttacttgtttgtaacat

SEQ ID NO: 3899179 - DNA, 25 bp, Homo sapien
gctcccgtttctgcaaaattagcat

SEQ ID NO: 3899180 - DNA, 25 bp, Homo sapien
tccatagttagatcctattccactt

SEQ ID NO: 3899181 - DNA, 25 bp, Homo sapien
tctgcaaaattagcatatggcttgc

SEQ ID NO: 3899182 - DNA, 25 bp, Homo sapien
ttccacttggtattgccaacaacat

SEQ ID NO: 3899183 - DNA, 25 bp, Homo sapien
tgggggataggggatctattgtaac

SEQ ID NO: 3899184 - DNA, 25 bp, Homo sapien
ggataggggatctattgtaacaccc

SEQ ID NO: 3899185 - DNA, 25 bp, Homo sapien
ggggataggggatctattgtaacac

SEQ ID NO: 3899186 - DNA, 25 bp, Homo sapien
ataggggatctattgtaacacccac

SEQ ID NO: 3899187 - DNA, 25 bp, Homo sapien
cattgaagtaaggtctgcccagctc

SEQ ID NO: 3899188 - DNA, 25 bp, Homo sapien
gcaaatccttcattgaagtaaggtc

SEQ ID NO: 3899189 - DNA, 25 bp, Homo sapien
ggagctgagcatacaaccggctgct

SEQ ID NO: 3899190 - DNA, 25 bp, Homo sapien
accggctgctaagcagcaaatcctt

SEQ ID NO: 3899191 - DNA, 25 bp, Homo sapien
tggtgttcctggacatttgagactc

SEQ ID NO: 3899192 - DNA, 25 bp, Homo sapien
gggctggtgttcctggacatttgag

SEQ ID NO: 3899193 - DNA, 25 bp, Homo sapien
tggtgactatgggctggtgttcctg

SEQ ID NO: 3899194 - DNA, 25 bp, Homo sapien
gctggtgttcctggacatttgagac

SEQ ID NO: 3899195 - DNA, 25 bp, Homo sapien
tgccgtgactttttcccaatggttc

SEQ ID NO: 3899196 - DNA, 25 bp, Homo sapien
cgtgctatgcatcatgaccaaagtg

SEQ ID NO: 3899197 - DNA, 25 bp, Homo sapien
gggaggtctccttatggtccagcca

SEQ ID NO: 3899198 - DNA, 25 bp, Homo sapien
ctttgatccgatcacacagggaggt

SEQ ID NO: 3899199 - DNA, 25 bp, Homo sapien
taaacactggtatgatttgcgtgga

SEQ ID NO: 3899200 - DNA, 25 bp, Homo sapien
gacattgttgaaagagccttattgc

SEQ ID NO: 3899201 - DNA, 25 bp, Homo sapien
taccatacgtcaagcagataaacac

SEQ ID NO: 3899202 - DNA, 25 bp, Homo sapien
tgatttgcgtggaagttgtgtgaca

SEQ ID NO: 3899203 - DNA, 25 bp, Homo sapien
ctccagtctgcattgttgagtgagc

SEQ ID NO: 3899204 - DNA, 25 bp, Homo sapien
cagtctgcattgttgagtgagctca

SEQ ID NO: 3899205 - DNA, 25 bp, Homo sapien
tgtagttttcgactcatccccactc

SEQ ID NO: 3899206 - DNA, 25 bp, Homo sapien
tcagataaatgaagagttgtagttt

SEQ ID NO: 3899207 - DNA, 25 bp, Homo sapien
tttcactcccgccaccaacaaacca

SEQ ID NO: 3899208 - DNA, 25 bp, Homo sapien
caacaaaccactcttgcagggtgat

SEQ ID NO: 3899209 - DNA, 25 bp, Homo sapien
gaatttcactcccgccaccaacaaa

SEQ ID NO: 3899210 - DNA, 25 bp, Homo sapien
caccaacaaaccactcttgcagggt

SEQ ID NO: 3899211 - DNA, 25 bp, Homo sapien
ttttatacgttgagaattttgctgg

SEQ ID NO: 3899212 - DNA, 25 bp, Homo sapien
tacgttgagaattttgctggcaaca

SEQ ID NO: 3899213 - DNA, 25 bp, Homo sapien
ataggaattttatacgttgagaatt

SEQ ID NO: 3899214 - DNA, 25 bp, Homo sapien
gaattttatacgttgagaattttgc

SEQ ID NO: 3899215 - DNA, 25 bp, Homo sapien
ctttttgcgattttctgttacagac

SEQ ID NO: 3899216 - DNA, 25 bp, Homo sapien
tgacacttctttttgcgattttctg

SEQ ID NO: 3899217 - DNA, 25 bp, Homo sapien
agtgtgaaagctgacacttcttttt

SEQ ID NO: 3899218 - DNA, 25 bp, Homo sapien
cgattttctgttacagactgtctct

SEQ ID NO: 3899219 - DNA, 25 bp, Homo sapien
gaatcaagagattgctctaggcggt

SEQ ID NO: 3899220 - DNA, 25 bp, Homo sapien
ctgtcagttcagtaacaagagcaga

SEQ ID NO: 3899221 - DNA, 25 bp, Homo sapien
tgatcaatgtcagtcccaatagggc

SEQ ID NO: 3899222 - DNA, 25 bp, Homo sapien
caaatagagccctaacagggtgccc

SEQ ID NO: 3899223 - DNA, 25 bp, Homo sapien
aagtcttttgtgctcgagtatataa

SEQ ID NO: 3899224 - DNA, 25 bp, Homo sapien
cttttgtgctcgagtatataaattg

SEQ ID NO: 3899225 - DNA, 25 bp, Homo sapien
tgtgctcgagtatataaattgttaa

SEQ ID NO: 3899226 - DNA, 25 bp, Homo sapien
tataaagtcttttgtgctcgagtat

SEQ ID NO: 3899227 - DNA, 25 bp, Homo sapien
tcaatagcagcatgtctccgaacct

SEQ ID NO: 3899228 - DNA, 25 bp, Homo sapien
gaccccaactctatggcagccattg

SEQ ID NO: 3899229 - DNA, 25 bp, Homo sapien
aactctatggcagccattggcacca

SEQ ID NO: 3899230 - DNA, 25 bp, Homo sapien
ccattggcaccataaaagtcaatag

SEQ ID NO: 3899231 - DNA, 25 bp, Homo sapien
ctgtctccaaactactcttgtgatt

SEQ ID NO: 3899232 - DNA, 25 bp, Homo sapien
tgtctccaaactactcttgtgattt

SEQ ID NO: 3899233 - DNA, 25 bp, Homo sapien
cctgtctccaaactactcttgtgat

SEQ ID NO: 3899234 - DNA, 25 bp, Homo sapien
gagcatcagggtatgtacacgattc

SEQ ID NO: 3899235 - DNA, 25 bp, Homo sapien
ttcaccatcacagctagagtcacag

SEQ ID NO: 3899236 - DNA, 25 bp, Homo sapien
tatgggtatgttcgactgagtctga

SEQ ID NO: 3899237 - DNA, 25 bp, Homo sapien
cacgtgggtcatattgagcatcagg

SEQ ID NO: 3899238 - DNA, 25 bp, Homo sapien
gaaaccaagatcttcagtgatttta

SEQ ID NO: 3899239 - DNA, 25 bp, Homo sapien
tcggaaaccaagatcttcagtgatt

SEQ ID NO: 3899240 - DNA, 25 bp, Homo sapien
gggatgttcggaaaccaagatcttc

SEQ ID NO: 3899241 - DNA, 25 bp, Homo sapien
tgttcggaaaccaagatcttcagtg

SEQ ID NO: 3899242 - DNA, 25 bp, Homo sapien
acagggcactaactcatctatgttg

SEQ ID NO: 3899243 - DNA, 25 bp, Homo sapien
cacacagggcactaactcatctatg

SEQ ID NO: 3899244 - DNA, 25 bp, Homo sapien
cacagggcactaactcatctatgtt

SEQ ID NO: 3899245 - DNA, 25 bp, Homo sapien
tcacacagggcactaactcatctat

SEQ ID NO: 3899246 - DNA, 25 bp, Homo sapien
tgaaatcaggcccacataccactct

SEQ ID NO: 3899247 - DNA, 25 bp, Homo sapien
tgagaaggctactaattttactgca

SEQ ID NO: 3899248 - DNA, 25 bp, Homo sapien
taagaagtgaccgaatcagaaatcc

SEQ ID NO: 3899249 - DNA, 25 bp, Homo sapien
gggttagtcacatcattggaattca

SEQ ID NO: 3899250 - DNA, 25 bp, Homo sapien
gggtcccttaatgccagctggctgg

SEQ ID NO: 3899251 - DNA, 25 bp, Homo sapien
caagtgacccagctggaaagttcca

SEQ ID NO: 3899252 - DNA, 25 bp, Homo sapien
gttccatgctagatcctacttcctc

SEQ ID NO: 3899253 - DNA, 25 bp, Homo sapien
ccagtgacgggtcccttaatgccag

SEQ ID NO: 3899254 - DNA, 25 bp, Homo sapien
ctcttctctccacacatcagccaca

SEQ ID NO: 3899255 - DNA, 25 bp, Homo sapien
tcttctctccacacatcagccacat

SEQ ID NO: 3899256 - DNA, 25 bp, Homo sapien
ctctccacacatcagccacattcat

SEQ ID NO: 3899257 - DNA, 25 bp, Homo sapien
ttctctccacacatcagccacattc

SEQ ID NO: 3899258 - DNA, 25 bp, Homo sapien
agccaatggtcagaggacaggtcca

SEQ ID NO: 3899259 - DNA, 25 bp, Homo sapien
ctacccgccagtggggcaggccatg

SEQ ID NO: 3899260 - DNA, 25 bp, Homo sapien
ctccctacagccactgccctacccg

SEQ ID NO: 3899261 - DNA, 25 bp, Homo sapien
agaggaagccaatggtcagaggaca

SEQ ID NO: 3899262 - DNA, 25 bp, Homo sapien
gggcgagtgccacagcacgggcttc

SEQ ID NO: 3899263 - DNA, 25 bp, Homo sapien
ggcgagtgccacagcacgggcttca

SEQ ID NO: 3899264 - DNA, 25 bp, Homo sapien
ggggcgagtgccacagcacgggctt

SEQ ID NO: 3899265 - DNA, 25 bp, Homo sapien
ccttcaaccttgctgtataaatcaa

SEQ ID NO: 3899266 - DNA, 25 bp, Homo sapien
tctctcactggtaaaaagcctagct

SEQ ID NO: 3899267 - DNA, 25 bp, Homo sapien
tgctcagttagcttccccatgggac

SEQ ID NO: 3899268 - DNA, 25 bp, Homo sapien
cattggtatccaaattaactcccgt

SEQ ID NO: 3899269 - DNA, 25 bp, Homo sapien
caacaggacataagtattctcatgt

SEQ ID NO: 3899270 - DNA, 25 bp, Homo sapien
gaaaactcaacatcaagaatctgaa

SEQ ID NO: 3899271 - DNA, 25 bp, Homo sapien
tagaagcgtaaagtcagtgagagaa

SEQ ID NO: 3899272 - DNA, 25 bp, Homo sapien
aagcgtaaagtcagtgagagaaaac

SEQ ID NO: 3899273 - DNA, 25 bp, Homo sapien
tatatcctgcaccatacctctgact

SEQ ID NO: 3899274 - DNA, 25 bp, Homo sapien
taccttgtccgagtagtcttccctg

SEQ ID NO: 3899275 - DNA, 25 bp, Homo sapien
caaacatgttgatctctctcttgaa

SEQ ID NO: 3899276 - DNA, 25 bp, Homo sapien
tcttccctgaactcgcaaaagagtg

SEQ ID NO: 3899277 - DNA, 25 bp, Homo sapien
tgcctttaacgtcccttgccttgaa

SEQ ID NO: 3899278 - DNA, 25 bp, Homo sapien
gagcaccaccatctctctgctggca

SEQ ID NO: 3899279 - DNA, 25 bp, Homo sapien
ggatgagccatgagcaccaccatct

SEQ ID NO: 3899280 - DNA, 25 bp, Homo sapien
ctggatgagccatgagcaccaccat

SEQ ID NO: 3899281 - DNA, 25 bp, Homo sapien
atgagcaccaccatctctctgctgg

SEQ ID NO: 3899282 - DNA, 25 bp, Homo sapien
tctcagactatctgcaggcagtccc

SEQ ID NO: 3899283 - DNA, 25 bp, Homo sapien
ccacaaggttcgacatctctcagac

SEQ ID NO: 3899284 - DNA, 25 bp, Homo sapien
ggttcgacatctctcagactatctg

SEQ ID NO: 3899285 - DNA, 25 bp, Homo sapien
gacatctctcagactatctgcaggc

SEQ ID NO: 3899286 - DNA, 25 bp, Homo sapien
cctcctggagatgcaacatggtgga

SEQ ID NO: 3899287 - DNA, 25 bp, Homo sapien
tttgctgttggtgatctattttcgg

SEQ ID NO: 3899288 - DNA, 25 bp, Homo sapien
tctattttcggtttctgaatcccca

SEQ ID NO: 3899289 - DNA, 25 bp, Homo sapien
gatgcaacatggtggaattctgaaa

SEQ ID NO: 3899290 - DNA, 25 bp, Homo sapien
gcagaaatatggctccccgttagca

SEQ ID NO: 3899291 - DNA, 25 bp, Homo sapien
cagaaatatggctccccgttagcat

SEQ ID NO: 3899292 - DNA, 25 bp, Homo sapien
ggcagaaatatggctccccgttagc

SEQ ID NO: 3899293 - DNA, 25 bp, Homo sapien
aggcagaaatatggctccccgttag

SEQ ID NO: 3899294 - DNA, 25 bp, Homo sapien
ggagcttaccccctttactgacata

SEQ ID NO: 3899295 - DNA, 25 bp, Homo sapien
ctaattgtggaagaaggagcttacc

SEQ ID NO: 3899296 - DNA, 25 bp, Homo sapien
tttcctgttgatctcctcactctgc

SEQ ID NO: 3899297 - DNA, 25 bp, Homo sapien
ctcactctgctcttgtttgctttgt

SEQ ID NO: 3899298 - DNA, 25 bp, Homo sapien
tttctgccgcagtagaattgtccca

SEQ ID NO: 3899299 - DNA, 25 bp, Homo sapien
ttcttccggtaaggaacaaggcagc

SEQ ID NO: 3899300 - DNA, 25 bp, Homo sapien
gaatctggtccattgtcctgtgagt

SEQ ID NO: 3899301 - DNA, 25 bp, Homo sapien
caagcatcccgcctgaaaagggtcc

SEQ ID NO: 3899302 - DNA, 25 bp, Homo sapien
tcttcctcacacttaaataccttga

SEQ ID NO: 3899303 - DNA, 25 bp, Homo sapien
tgacccgttgttcttagcatatttc

SEQ ID NO: 3899304 - DNA, 25 bp, Homo sapien
ctctcaacctcatgcttacaagtta

SEQ ID NO: 3899305 - DNA, 25 bp, Homo sapien
tacaagttaactcttgtccatattc

SEQ ID NO: 3899306 - DNA, 25 bp, Homo sapien
aactgtgcagatgtacagctgtcca

SEQ ID NO: 3899307 - DNA, 25 bp, Homo sapien
caaagatctgtgctcctctttcatc

SEQ ID NO: 3899308 - DNA, 25 bp, Homo sapien
caacaaagatctgtgctcctctttc

SEQ ID NO: 3899309 - DNA, 25 bp, Homo sapien
agaaactgtgcagatgtacagctgt

SEQ ID NO: 3899310 - DNA, 25 bp, Homo sapien
gctgtaattgttcctcaaatagagc

SEQ ID NO: 3899311 - DNA, 25 bp, Homo sapien
tcgcagttttgtacaacccggttgc

SEQ ID NO: 3899312 - DNA, 25 bp, Homo sapien
caaatagagcattaagttttatggc

SEQ ID NO: 3899313 - DNA, 25 bp, Homo sapien
cttgactaaaaggctttattaccat

SEQ ID NO: 3899314 - DNA, 25 bp, Homo sapien
ttaataaccagactctccactattt

SEQ ID NO: 3899315 - DNA, 25 bp, Homo sapien
taataaccagactctccactatttt

SEQ ID NO: 3899316 - DNA, 25 bp, Homo sapien
aataaccagactctccactattttc

SEQ ID NO: 3899317 - DNA, 25 bp, Homo sapien
gaaatccatttctgtacatgagcta

SEQ ID NO: 3899318 - DNA, 25 bp, Homo sapien
tacatgagctactggtcatgtcttt

SEQ ID NO: 3899319 - DNA, 25 bp, Homo sapien
tctgaaatccatttctgtacatgag

SEQ ID NO: 3899320 - DNA, 25 bp, Homo sapien
catttctgtacatgagctactggtc

SEQ ID NO: 3899321 - DNA, 25 bp, Homo sapien
gtccttgcagagtcctaggtggaat

SEQ ID NO: 3899322 - DNA, 25 bp, Homo sapien
ttactgaagtcgcagtgtaagtcag

SEQ ID NO: 3899323 - DNA, 25 bp, Homo sapien
actgaagtcgcagtgtaagtcagca

SEQ ID NO: 3899324 - DNA, 25 bp, Homo sapien
taattactgaagtcgcagtgtaagt

SEQ ID NO: 3899325 - DNA, 25 bp, Homo sapien
ctctgggctacagaggatctctcaa

SEQ ID NO: 3899326 - DNA, 25 bp, Homo sapien
gcaaaggctccatgtaaaaagcaaa

SEQ ID NO: 3899327 - DNA, 25 bp, Homo sapien
gctgtgcagccaatgtgtttagata

SEQ ID NO: 3899328 - DNA, 25 bp, Homo sapien
tcatgagaaccccacaaagagaggt

SEQ ID NO: 3899329 - DNA, 25 bp, Homo sapien
tgttttgtactgacgcactgcttgc

SEQ ID NO: 3899330 - DNA, 25 bp, Homo sapien
taatgtcagtggaatggcctcacgc

SEQ ID NO: 3899331 - DNA, 25 bp, Homo sapien
tccaaagcagagtaaggctccccag

SEQ ID NO: 3899332 - DNA, 25 bp, Homo sapien
tcattactgtgtcaacgcgggtgcc

SEQ ID NO: 3899333 - DNA, 25 bp, Homo sapien
taaaggagtctgttgtgtttgggac

SEQ ID NO: 3899334 - DNA, 25 bp, Homo sapien
tgtgtttgggaccaaaagtgctgtc

SEQ ID NO: 3899335 - DNA, 25 bp, Homo sapien
ttgttatggcaaccaggatttgaaa

SEQ ID NO: 3899336 - DNA, 25 bp, Homo sapien
aaagtgctgtctggttgttatggca

SEQ ID NO: 3899337 - DNA, 25 bp, Homo sapien
tggtttttagcggttgccacatcac

SEQ ID NO: 3899338 - DNA, 25 bp, Homo sapien
gaaaccattacttctgtcaggtctc

SEQ ID NO: 3899339 - DNA, 25 bp, Homo sapien
cacatcaccttgctggaaaccatta

SEQ ID NO: 3899340 - DNA, 25 bp, Homo sapien
ggtttttagcggttgccacatcacc

SEQ ID NO: 3899341 - DNA, 25 bp, Homo sapien
tactctgacaggatctcagcatggg

SEQ ID NO: 3899342 - DNA, 25 bp, Homo sapien
gggcagtactctgacaggatctcag

SEQ ID NO: 3899343 - DNA, 25 bp, Homo sapien
aatgtcagattaaaggaaaatctct

SEQ ID NO: 3899344 - DNA, 25 bp, Homo sapien
caggatctcagcatgggttgccttt

SEQ ID NO: 3899345 - DNA, 25 bp, Homo sapien
tacagatgtacttcaggattctgga

SEQ ID NO: 3899346 - DNA, 25 bp, Homo sapien
gatacagatgtacttcaggattctg

SEQ ID NO: 3899347 - DNA, 25 bp, Homo sapien
ctgatacagatgtacttcaggattc

SEQ ID NO: 3899348 - DNA, 25 bp, Homo sapien
gatgtacttcaggattctggaattt

SEQ ID NO: 3899349 - DNA, 25 bp, Homo sapien
gagctgtatcattacaaatgcaaat

SEQ ID NO: 3899350 - DNA, 25 bp, Homo sapien
ggtaggagctgtatcattacaaatg

SEQ ID NO: 3899351 - DNA, 25 bp, Homo sapien
cagttgtctctatggctttggctcc

SEQ ID NO: 3899352 - DNA, 25 bp, Homo sapien
cagacagttgtctctatggctttgg

SEQ ID NO: 3899353 - DNA, 25 bp, Homo sapien
agatagttattacagcgctaaagat

SEQ ID NO: 3899354 - DNA, 25 bp, Homo sapien
cttatagatacagatagttattaca

SEQ ID NO: 3899355 - DNA, 25 bp, Homo sapien
atagttattacagcgctaaagatcc

SEQ ID NO: 3899356 - DNA, 25 bp, Homo sapien
ttattacagcgctaaagatcctcat

SEQ ID NO: 3899357 - DNA, 25 bp, Homo sapien
ttaggcttctctactagacttttct

SEQ ID NO: 3899358 - DNA, 25 bp, Homo sapien
tcactgtggaataattgtcagtgct

SEQ ID NO: 3899359 - DNA, 25 bp, Homo sapien
ctgtggaataattgtcagtgctctc

SEQ ID NO: 3899360 - DNA, 25 bp, Homo sapien
tcttaataagtttaggcttctctac

SEQ ID NO: 3899361 - DNA, 25 bp, Homo sapien
gactatgttgtactgcagaaggcca

SEQ ID NO: 3899362 - DNA, 25 bp, Homo sapien
tcagtgccgatgaatcgcctcagtc

SEQ ID NO: 3899363 - DNA, 25 bp, Homo sapien
cacttgcgggacaactaggacttcc

SEQ ID NO: 3899364 - DNA, 25 bp, Homo sapien
gaatattgaagctgcagaacatcac

SEQ ID NO: 3899365 - DNA, 25 bp, Homo sapien
tgcatatacagttcagacgcctaca

SEQ ID NO: 3899366 - DNA, 25 bp, Homo sapien
catcttctgcgtcaacagtggctta

SEQ ID NO: 3899367 - DNA, 25 bp, Homo sapien
cctaagtatgggatcctgggactct

SEQ ID NO: 3899368 - DNA, 25 bp, Homo sapien
cagtggcttatgaaaaccttggatc

SEQ ID NO: 3899369 - DNA, 25 bp, Homo sapien
caggcagaatgcgttctccttattc

SEQ ID NO: 3899370 - DNA, 25 bp, Homo sapien
gagcaaaacttgaatgtccatgctg

SEQ ID NO: 3899371 - DNA, 25 bp, Homo sapien
tggtgtttctatcccctaggatgct

SEQ ID NO: 3899372 - DNA, 25 bp, Homo sapien
gagctgggctaatttagaatatccc

SEQ ID NO: 3899373 - DNA, 25 bp, Homo sapien
ttgccaaatactgctccatcccaca

SEQ ID NO: 3899374 - DNA, 25 bp, Homo sapien
cactctgaaacataacaactggaag

SEQ ID NO: 3899375 - DNA, 25 bp, Homo sapien
cattatctccactctgaaacataac

SEQ ID NO: 3899376 - DNA, 25 bp, Homo sapien
tctccactctgaaacataacaactg

SEQ ID NO: 3899377 - DNA, 25 bp, Homo sapien
tatctccactctgaaacataacaac

SEQ ID NO: 3899378 - DNA, 25 bp, Homo sapien
tcttgcaaatcagtggctggtatgc

SEQ ID NO: 3899379 - DNA, 25 bp, Homo sapien
catgtcttcttgcaaatcagtggct

SEQ ID NO: 3899380 - DNA, 25 bp, Homo sapien
tggaacttaggcattctctaagtcc

SEQ ID NO: 3899381 - DNA, 25 bp, Homo sapien
gctggtatgcgtttggaacttaggc

SEQ ID NO: 3899382 - DNA, 25 bp, Homo sapien
agctctcacactaaacaagctatct

SEQ ID NO: 3899383 - DNA, 25 bp, Homo sapien
atagctctcacactaaacaagctat

SEQ ID NO: 3899384 - DNA, 25 bp, Homo sapien
tagctctcacactaaacaagctatc

SEQ ID NO: 3899385 - DNA, 25 bp, Homo sapien
gctctcacactaaacaagctatctt

SEQ ID NO: 3899386 - DNA, 25 bp, Homo sapien
ggtgccacatgtcatactttcccat

SEQ ID NO: 3899387 - DNA, 25 bp, Homo sapien
tccaggtgctgtcaggggaatatgc

SEQ ID NO: 3899388 - DNA, 25 bp, Homo sapien
ttcggtgttgtacaggaaccttctc

SEQ ID NO: 3899389 - DNA, 25 bp, Homo sapien
tcagatcttgccctggtgccacatg

SEQ ID NO: 3899390 - DNA, 25 bp, Homo sapien
gtagcaactcttgaactgtgtcatc

SEQ ID NO: 3899391 - DNA, 25 bp, Homo sapien
gccagggatccatgaccagataatg

SEQ ID NO: 3899392 - DNA, 25 bp, Homo sapien
gggatccatgaccagataatgggat

SEQ ID NO: 3899393 - DNA, 25 bp, Homo sapien
cagggatccatgaccagataatggg

SEQ ID NO: 3899394 - DNA, 25 bp, Homo sapien
atccatgaccagataatgggatcat

SEQ ID NO: 3899395 - DNA, 25 bp, Homo sapien
tcaaccaagcggctgagctgacagc

SEQ ID NO: 3899396 - DNA, 25 bp, Homo sapien
ataaacaaattccactctatagcct

SEQ ID NO: 3899397 - DNA, 25 bp, Homo sapien
taaacaaattccactctatagcctg

SEQ ID NO: 3899398 - DNA, 25 bp, Homo sapien
attccactctatagcctgtttttct

SEQ ID NO: 3899399 - DNA, 25 bp, Homo sapien
ctgaatacctaggatgatgctgtgt

SEQ ID NO: 3899400 - DNA, 25 bp, Homo sapien
ccagagcagccatggaacagtacat

SEQ ID NO: 3899401 - DNA, 25 bp, Homo sapien
tgaatacctaggatgatgctgtgtg

SEQ ID NO: 3899402 - DNA, 25 bp, Homo sapien
aggatggagcaggagatttctctat

SEQ ID NO: 3899403 - DNA, 25 bp, Homo sapien
gaagcatagcagtaatataaactcc

SEQ ID NO: 3899404 - DNA, 25 bp, Homo sapien
gaagtcccaatgttatcatcactga

SEQ ID NO: 3899405 - DNA, 25 bp, Homo sapien
gaaataaatctttgcattacaacca

SEQ ID NO: 3899406 - DNA, 25 bp, Homo sapien
ttataaacggatgatgtaaaagaaa

SEQ ID NO: 3899407 - DNA, 25 bp, Homo sapien
aatgctgtgatttataaacggatga

SEQ ID NO: 3899408 - DNA, 25 bp, Homo sapien
ttgttctccactgattagaatgctg

SEQ ID NO: 3899409 - DNA, 25 bp, Homo sapien
actgggcacaattgctcattgttct

SEQ ID NO: 3899410 - DNA, 25 bp, Homo sapien
tctgcagccctccagaggctattgg

SEQ ID NO: 3899411 - DNA, 25 bp, Homo sapien
ggttgcttgaattccaatttctgca

SEQ ID NO: 3899412 - DNA, 25 bp, Homo sapien
gaggctattggttgcttgaattcca

SEQ ID NO: 3899413 - DNA, 25 bp, Homo sapien
tctgcatacagcctaaattgagcat

SEQ ID NO: 3899414 - DNA, 25 bp, Homo sapien
tagtgtgatctttcttacacgcaca

SEQ ID NO: 3899415 - DNA, 25 bp, Homo sapien
ttggcccatcacatacagacttcag

SEQ ID NO: 3899416 - DNA, 25 bp, Homo sapien
tatgtcccgttttgtatgctatgcc

SEQ ID NO: 3899417 - DNA, 25 bp, Homo sapien
gccttccccatgtttaagatatgca

SEQ ID NO: 3899418 - DNA, 25 bp, Homo sapien
atgtgaggaatcttgccattcaact

SEQ ID NO: 3899419 - DNA, 25 bp, Homo sapien
tcagcctctataataacagaatgtg

SEQ ID NO: 3899420 - DNA, 25 bp, Homo sapien
ccttcagcctctataataacagaat

SEQ ID NO: 3899421 - DNA, 25 bp, Homo sapien
gcccttcagcctctataataacaga

SEQ ID NO: 3899422 - DNA, 25 bp, Homo sapien
ctttatcatgcttcatttcccttaa

SEQ ID NO: 3899423 - DNA, 25 bp, Homo sapien
tcatttcccttaaatttgtaagcat

SEQ ID NO: 3899424 - DNA, 25 bp, Homo sapien
tatcagttacttctttatcatgctt

SEQ ID NO: 3899425 - DNA, 25 bp, Homo sapien
attatcagttacttctttatcatgc

SEQ ID NO: 3899426 - DNA, 25 bp, Homo sapien
agcttttgacttcctatccccaggc

SEQ ID NO: 3899427 - DNA, 25 bp, Homo sapien
tccaattggaacattgcagtcagca

SEQ ID NO: 3899428 - DNA, 25 bp, Homo sapien
gcagataagctgttccaattggaac

SEQ ID NO: 3899429 - DNA, 25 bp, Homo sapien
ctggaggagcagataagctgttcca

SEQ ID NO: 3899430 - DNA, 25 bp, Homo sapien
tgtatatacgcctcatcagaatggg

SEQ ID NO: 3899431 - DNA, 25 bp, Homo sapien
cctcttgtcaaggcttctgtgacca

SEQ ID NO: 3899432 - DNA, 25 bp, Homo sapien
gggatctcgagaagtgttactggta

SEQ ID NO: 3899433 - DNA, 25 bp, Homo sapien
caggttgtactcttgagtgggctct

SEQ ID NO: 3899434 - DNA, 25 bp, Homo sapien
aaagcaacagccccctaatatcaat

SEQ ID NO: 3899435 - DNA, 25 bp, Homo sapien
agcaacagccccctaatatcaattt

SEQ ID NO: 3899436 - DNA, 25 bp, Homo sapien
aagcaacagccccctaatatcaatt

SEQ ID NO: 3899437 - DNA, 25 bp, Homo sapien
agagacatcacaatattgaacatga

SEQ ID NO: 3899438 - DNA, 25 bp, Homo sapien
caactgtcactttgctaagccagga

SEQ ID NO: 3899439 - DNA, 25 bp, Homo sapien
tattttgttgtagtgcaactgtcac

SEQ ID NO: 3899440 - DNA, 25 bp, Homo sapien
tggtactccccgttatgcaggcttt

SEQ ID NO: 3899441 - DNA, 25 bp, Homo sapien
aagtttggcatgcaaagagtcaggt

SEQ ID NO: 3899442 - DNA, 25 bp, Homo sapien
gggcagggaagtttggcatgcaaag

SEQ ID NO: 3899443 - DNA, 25 bp, Homo sapien
agggaagtttggcatgcaaagagtc

SEQ ID NO: 3899444 - DNA, 25 bp, Homo sapien
ggaagtttggcatgcaaagagtcag

SEQ ID NO: 3899445 - DNA, 25 bp, Homo sapien
ttatattgaggaccacgtgaaaggt

SEQ ID NO: 3899446 - DNA, 25 bp, Homo sapien
agttatatgctcgttcattaaagct

SEQ ID NO: 3899447 - DNA, 25 bp, Homo sapien
aagttatatgctcgttcattaaagc

SEQ ID NO: 3899448 - DNA, 25 bp, Homo sapien
taagttatatgctcgttcattaaag

SEQ ID NO: 3899449 - DNA, 25 bp, Homo sapien
ctaagttatatgctcgttcattaaa

SEQ ID NO: 3899450 - DNA, 25 bp, Homo sapien
cattgctcccacaacgtttcttcac

SEQ ID NO: 3899451 - DNA, 25 bp, Homo sapien
tcattgctcccacaacgtttcttca

SEQ ID NO: 3899452 - DNA, 25 bp, Homo sapien
atgaaacatggcactccacatagtt

SEQ ID NO: 3899453 - DNA, 25 bp, Homo sapien
catagttgttagaaacatatcccat

SEQ ID NO: 3899454 - DNA, 25 bp, Homo sapien
catggcactccacatagttgttaga

SEQ ID NO: 3899455 - DNA, 25 bp, Homo sapien
gaaacatggcactccacatagttgt

SEQ ID NO: 3899456 - DNA, 25 bp, Homo sapien
ttggctatggtctgttcttctcttc

SEQ ID NO: 3899457 - DNA, 25 bp, Homo sapien
tctcttcttcggtaagcaaaatcag

SEQ ID NO: 3899458 - DNA, 25 bp, Homo sapien
ctctgaacttacaaacaccataatg

SEQ ID NO: 3899459 - DNA, 25 bp, Homo sapien
ttatgctctgatcagacgattggct

SEQ ID NO: 3899460 - DNA, 25 bp, Homo sapien
gatctctagatgctccaaaattttg

SEQ ID NO: 3899461 - DNA, 25 bp, Homo sapien
gagagtggctctgatcgtatccgaa

SEQ ID NO: 3899462 - DNA, 25 bp, Homo sapien
ccacttgaggagcaataactgctga

SEQ ID NO: 3899463 - DNA, 25 bp, Homo sapien
cccactgagccatatattgaaagtt

SEQ ID NO: 3899464 - DNA, 25 bp, Homo sapien
ggaacagagccacactagttgatct

SEQ ID NO: 3899465 - DNA, 25 bp, Homo sapien
tgatcttcaggtctataactcagta

SEQ ID NO: 3899466 - DNA, 25 bp, Homo sapien
agagccacactagttgatcttcagg

SEQ ID NO: 3899467 - DNA, 25 bp, Homo sapien
cttcaggtctataactcagtaataa

SEQ ID NO: 3899468 - DNA, 25 bp, Homo sapien
aaatatgtcatgagtagctgctgct

SEQ ID NO: 3899469 - DNA, 25 bp, Homo sapien
ctgctgctcctccaatctaatcctc

SEQ ID NO: 3899470 - DNA, 25 bp, Homo sapien
cttaaaatatgtcatgagtagctgc

SEQ ID NO: 3899471 - DNA, 25 bp, Homo sapien
tatgtcatgagtagctgctgctcct

SEQ ID NO: 3899472 - DNA, 25 bp, Homo sapien
ttccagcagaaagattttgtgatgt

SEQ ID NO: 3899473 - DNA, 25 bp, Homo sapien
taaagcaaatgacagcccaggtatc

SEQ ID NO: 3899474 - DNA, 25 bp, Homo sapien
cagtgaccagaactagctcttccag

SEQ ID NO: 3899475 - DNA, 25 bp, Homo sapien
cagcccaggtatcacagtgaccaga

SEQ ID NO: 3899476 - DNA, 25 bp, Homo sapien
tttcatcggcaaagacaaatctatt

SEQ ID NO: 3899477 - DNA, 25 bp, Homo sapien
gaagcagaacctgagtcagagcttt

SEQ ID NO: 3899478 - DNA, 25 bp, Homo sapien
aggaagcagaacctgagtcagagct

SEQ ID NO: 3899479 - DNA, 25 bp, Homo sapien
ggaagcagaacctgagtcagagctt

SEQ ID NO: 3899480 - DNA, 25 bp, Homo sapien
agcagaacctgagtcagagctttca

SEQ ID NO: 3899481 - DNA, 25 bp, Homo sapien
tgtagcaggatctgagtaattttta

SEQ ID NO: 3899482 - DNA, 25 bp, Homo sapien
tctttttagcttctggcattagatg

SEQ ID NO: 3899483 - DNA, 25 bp, Homo sapien
ttagatgactattgcttgttctggg

SEQ ID NO: 3899484 - DNA, 25 bp, Homo sapien
cagacttcgattttatgtagcagga

SEQ ID NO: 3899485 - DNA, 25 bp, Homo sapien
gtgatagaggaagtataaactacct

SEQ ID NO: 3899486 - DNA, 25 bp, Homo sapien
gatagaggaagtataaactacctta

SEQ ID NO: 3899487 - DNA, 25 bp, Homo sapien
agtgatagaggaagtataaactacc

SEQ ID NO: 3899488 - DNA, 25 bp, Homo sapien
tgatagaggaagtataaactacctt

SEQ ID NO: 3899489 - DNA, 25 bp, Homo sapien
tgcactagtcttaaactcttaaatg

SEQ ID NO: 3899490 - DNA, 25 bp, Homo sapien
catctgttacatgctttctgcacta

SEQ ID NO: 3899491 - DNA, 25 bp, Homo sapien
catttgcgtaggagattctgtgcgg

SEQ ID NO: 3899492 - DNA, 25 bp, Homo sapien
aaatgttgcttgcatttgcgtagga

SEQ ID NO: 3899493 - DNA, 25 bp, Homo sapien
agaaatagcatatttccatgtttat

SEQ ID NO: 3899494 - DNA, 25 bp, Homo sapien
tccatgtttattgctttcaccaagt

SEQ ID NO: 3899495 - DNA, 25 bp, Homo sapien
tccctttgctggactcgtataaaga

SEQ ID NO: 3899496 - DNA, 25 bp, Homo sapien
ggtaacacttcagaaaccaccttca

SEQ ID NO: 3899497 - DNA, 25 bp, Homo sapien
tttgctgcaggcctgaatttttgaa

SEQ ID NO: 3899498 - DNA, 25 bp, Homo sapien
tttttgaacaatcagggtaataata

SEQ ID NO: 3899499 - DNA, 25 bp, Homo sapien
gctgcaggcctgaatttttgaacaa

SEQ ID NO: 3899500 - DNA, 25 bp, Homo sapien
ctttttgctgcaggcctgaattttt

SEQ ID NO: 3899501 - DNA, 25 bp, Homo sapien
aatgagtgggaaatgccaagaatga

SEQ ID NO: 3899502 - DNA, 25 bp, Homo sapien
ccaaggacagaaaatgcccctaaat

SEQ ID NO: 3899503 - DNA, 25 bp, Homo sapien
taaattaatccatctaatgagtggg

SEQ ID NO: 3899504 - DNA, 25 bp, Homo sapien
cagaaaatgcccctaaattaatcca

SEQ ID NO: 3899505 - DNA, 25 bp, Homo sapien
agttctggaccctgtgctgtaattc

SEQ ID NO: 3899506 - DNA, 25 bp, Homo sapien
catctaagttctggaccctgtgctg

SEQ ID NO: 3899507 - DNA, 25 bp, Homo sapien
ctaagttctggaccctgtgctgtaa

SEQ ID NO: 3899508 - DNA, 25 bp, Homo sapien
cacatctaagttctggaccctgtgc

SEQ ID NO: 3899509 - DNA, 25 bp, Homo sapien
aatgactgcgtgcagggcttgcttc

SEQ ID NO: 3899510 - DNA, 25 bp, Homo sapien
gcagggcttgcttcgaaatcttctc

SEQ ID NO: 3899511 - DNA, 25 bp, Homo sapien
tgcgtgcagggcttgcttcgaaatc

SEQ ID NO: 3899512 - DNA, 25 bp, Homo sapien
gggcttgcttcgaaatcttctcaca

SEQ ID NO: 3899513 - DNA, 25 bp, Homo sapien
tcccctaggacctctgtagaccatg

SEQ ID NO: 3899514 - DNA, 25 bp, Homo sapien
tttcccctaggacctctgtagacca

SEQ ID NO: 3899515 - DNA, 25 bp, Homo sapien
ctctgtagaccatgaatctagtggg

SEQ ID NO: 3899516 - DNA, 25 bp, Homo sapien
cctaggacctctgtagaccatgaat

SEQ ID NO: 3899517 - DNA, 25 bp, Homo sapien
ttgttgctgctccgagatagcttca

SEQ ID NO: 3899518 - DNA, 25 bp, Homo sapien
ccttgttgctgctccgagatagctt

SEQ ID NO: 3899519 - DNA, 25 bp, Homo sapien
tccttgttgctgctccgagatagct

SEQ ID NO: 3899520 - DNA, 25 bp, Homo sapien
cttgttgctgctccgagatagcttc

SEQ ID NO: 3899521 - DNA, 25 bp, Homo sapien
ctccatccttcagagtgggctgact

SEQ ID NO: 3899522 - DNA, 25 bp, Homo sapien
acaaaataatgaccagctcattttc

SEQ ID NO: 3899523 - DNA, 25 bp, Homo sapien
aataatgaccagctcattttcttgt

SEQ ID NO: 3899524 - DNA, 25 bp, Homo sapien
ccatccttcagagtgggctgactga

SEQ ID NO: 3899525 - DNA, 25 bp, Homo sapien
aaatcttcctctggtacttggccta

SEQ ID NO: 3899526 - DNA, 25 bp, Homo sapien
tcaaatcttcctctggtacttggcc

SEQ ID NO: 3899527 - DNA, 25 bp, Homo sapien
cagagatcctggctgtagcctgatt

SEQ ID NO: 3899528 - DNA, 25 bp, Homo sapien
ctgtcagagatcctggctgtagcct

SEQ ID NO: 3899529 - DNA, 25 bp, Homo sapien
cctggctgtagcctgattcagatga

SEQ ID NO: 3899530 - DNA, 25 bp, Homo sapien
gcctgattcagatgaatcagtgtca

SEQ ID NO: 3899531 - DNA, 25 bp, Homo sapien
cataagttcacaatcttggtaacgg

SEQ ID NO: 3899532 - DNA, 25 bp, Homo sapien
tcataagttcacaatcttggtaacg

SEQ ID NO: 3899533 - DNA, 25 bp, Homo sapien
ataagttcacaatcttggtaacggg

SEQ ID NO: 3899534 - DNA, 25 bp, Homo sapien
ggaaagcaggaagatcccaaaagat

SEQ ID NO: 3899535 - DNA, 25 bp, Homo sapien
gggaaagcaggaagatcccaaaaga

SEQ ID NO: 3899536 - DNA, 25 bp, Homo sapien
gtaagagtatgaggaaataatcagg

SEQ ID NO: 3899537 - DNA, 25 bp, Homo sapien
aaagcaggaagatcccaaaagatca

SEQ ID NO: 3899538 - DNA, 25 bp, Homo sapien
tttgaacatagaagctagagctgac

SEQ ID NO: 3899539 - DNA, 25 bp, Homo sapien
tcaggtgtagggcaaaaataaggca

SEQ ID NO: 3899540 - DNA, 25 bp, Homo sapien
tatgtattgttcacactagactctg

SEQ ID NO: 3899541 - DNA, 25 bp, Homo sapien
cattataatcgctcatttgctaccc

SEQ ID NO: 3899542 - DNA, 25 bp, Homo sapien
cagggtaaacgggatatctggcacc

SEQ ID NO: 3899543 - DNA, 25 bp, Homo sapien
cagttttgtaccaataaaccatcct

SEQ ID NO: 3899544 - DNA, 25 bp, Homo sapien
aatcatcattttactatctccagcc

SEQ ID NO: 3899545 - DNA, 25 bp, Homo sapien
gctagctagctagctgttcatctat

SEQ ID NO: 3899546 - DNA, 25 bp, Homo sapien
tgctctcggtgaagtagccacaaag

SEQ ID NO: 3899547 - DNA, 25 bp, Homo sapien
tgtgacaagcataaaataagcccct

SEQ ID NO: 3899548 - DNA, 25 bp, Homo sapien
gttgatgtctggacccttaataaca

SEQ ID NO: 3899549 - DNA, 25 bp, Homo sapien
aagactcttcctacgtgattgctgg

SEQ ID NO: 3899550 - DNA, 25 bp, Homo sapien
tatcacatggtgtacacattgtctg

SEQ ID NO: 3899551 - DNA, 25 bp, Homo sapien
cacggtggtgcctgaatgttctgta

SEQ ID NO: 3899552 - DNA, 25 bp, Homo sapien
gatcctgtactttctcggttatagt

SEQ ID NO: 3899553 - DNA, 25 bp, Homo sapien
cataagtgtcttcaagattgtggtg

SEQ ID NO: 3899554 - DNA, 25 bp, Homo sapien
tattcagggatttaagcacagcttg

SEQ ID NO: 3899555 - DNA, 25 bp, Homo sapien
cacagcttgattcatggtccaaatg

SEQ ID NO: 3899556 - DNA, 25 bp, Homo sapien
ctttcaattgttgggttattcaggg

SEQ ID NO: 3899557 - DNA, 25 bp, Homo sapien
gtccaaatggtagcatcaagtctca

SEQ ID NO: 3899558 - DNA, 25 bp, Homo sapien
aaccaggtagaatttcctgttgatg

SEQ ID NO: 3899559 - DNA, 25 bp, Homo sapien
ttgctttttctttatcttcctcctc

SEQ ID NO: 3899560 - DNA, 25 bp, Homo sapien
tgctttttctttatcttcctcctcc

SEQ ID NO: 3899561 - DNA, 25 bp, Homo sapien
ttaagataacctgaagctagcaaaa

SEQ ID NO: 3899562 - DNA, 25 bp, Homo sapien
gctactgtgatgaagatccagactt

SEQ ID NO: 3899563 - DNA, 25 bp, Homo sapien
gggaatctccctaccattgctttcc

SEQ ID NO: 3899564 - DNA, 25 bp, Homo sapien
agcttcattctaaaaactctttcat

SEQ ID NO: 3899565 - DNA, 25 bp, Homo sapien
cagggaggggaatctccctaccatt

SEQ ID NO: 3899566 - DNA, 25 bp, Homo sapien
caaggatcaataagcttcattctaa

SEQ ID NO: 3899567 - DNA, 25 bp, Homo sapien
cagggatacccaaagatgactgagg

SEQ ID NO: 3899568 - DNA, 25 bp, Homo sapien
gggatacccaaagatgactgaggca

SEQ ID NO: 3899569 - DNA, 25 bp, Homo sapien
ggatacccaaagatgactgaggcat

SEQ ID NO: 3899570 - DNA, 25 bp, Homo sapien
agggatacccaaagatgactgaggc

SEQ ID NO: 3899571 - DNA, 25 bp, Homo sapien
atggtgaaccctgggggttcctcag

SEQ ID NO: 3899572 - DNA, 25 bp, Homo sapien
ggtttcctctgtggcgcagctcttt

SEQ ID NO: 3899573 - DNA, 25 bp, Homo sapien
tttcctctgtggcgcagctctttgt

SEQ ID NO: 3899574 - DNA, 25 bp, Homo sapien
gtttcctctgtggcgcagctctttg

SEQ ID NO: 3899575 - DNA, 25 bp, Homo sapien
tcctctgtggcgcagctctttgtgg

SEQ ID NO: 3899576 - DNA, 25 bp, Homo sapien
gttagtgctactggttgtggagact

SEQ ID NO: 3899577 - DNA, 25 bp, Homo sapien
tggggacagtagtgtatacagtctc

SEQ ID NO: 3899578 - DNA, 25 bp, Homo sapien
cagtaatgaggggttagtgctactg

SEQ ID NO: 3899579 - DNA, 25 bp, Homo sapien
gagactggggacagtagtgtataca

SEQ ID NO: 3899580 - DNA, 25 bp, Homo sapien
gctgaccacatatacagaccacagg

SEQ ID NO: 3899581 - DNA, 25 bp, Homo sapien
ttccaacctcttgatggctctcctt

SEQ ID NO: 3899582 - DNA, 25 bp, Homo sapien
ccacatatacagaccacaggaatgt

SEQ ID NO: 3899583 - DNA, 25 bp, Homo sapien
gccaggctgaccacatatacagacc

SEQ ID NO: 3899584 - DNA, 25 bp, Homo sapien
tgaataagaattgtaatgtctcttc

SEQ ID NO: 3899585 - DNA, 25 bp, Homo sapien
taacgtgaggactaacaccagatga

SEQ ID NO: 3899586 - DNA, 25 bp, Homo sapien
tccctcttctatgtcgtctccgtga

SEQ ID NO: 3899587 - DNA, 25 bp, Homo sapien
tctccgtgagtcttatgttgagaaa

SEQ ID NO: 3899588 - DNA, 25 bp, Homo sapien
gctcgccgtggaacaatatcgtatg

SEQ ID NO: 3899589 - DNA, 25 bp, Homo sapien
atatcgtatgggcttcctctgtatc

SEQ ID NO: 3899590 - DNA, 25 bp, Homo sapien
tggactgaatgtctacagaagcctt

SEQ ID NO: 3899591 - DNA, 25 bp, Homo sapien
tacagaagcctttttcgtttcttca

SEQ ID NO: 3899592 - DNA, 25 bp, Homo sapien
gctcgtggtgccggcccacagagca

SEQ ID NO: 3899593 - DNA, 25 bp, Homo sapien
gtagtagacaatgacctgctggccc

SEQ ID NO: 3899594 - DNA, 25 bp, Homo sapien
tcctcgtagtagacaatgacctgct

SEQ ID NO: 3899595 - DNA, 25 bp, Homo sapien
gagcactggtcctcgtagtagacaa

SEQ ID NO: 3899596 - DNA, 25 bp, Homo sapien
gaataaaaacggcagctggcgtcca

SEQ ID NO: 3899597 - DNA, 25 bp, Homo sapien
tccaggtagcagcagatgagcgcat

SEQ ID NO: 3899598 - DNA, 25 bp, Homo sapien
cattatctggctgagaacttgaacc

SEQ ID NO: 3899599 - DNA, 25 bp, Homo sapien
tgaaccatcggctctaacaagtgac

SEQ ID NO: 3899600 - DNA, 25 bp, Homo sapien
aatttcttgtggaatcaaagaagac

SEQ ID NO: 3899601 - DNA, 25 bp, Homo sapien
tttaaatttcttgtggaatcaaaga

SEQ ID NO: 3899602 - DNA, 25 bp, Homo sapien
tattttaaatttcttgtggaatcaa

SEQ ID NO: 3899603 - DNA, 25 bp, Homo sapien
caaagaagaccccatatagccaaga

SEQ ID NO: 3899604 - DNA, 25 bp, Homo sapien
tctccaaagattatcttctaacgtc

SEQ ID NO: 3899605 - DNA, 25 bp, Homo sapien
gttctctctccgcatacactgaaga

SEQ ID NO: 3899606 - DNA, 25 bp, Homo sapien
agattatcttctaacgtctttggtt

SEQ ID NO: 3899607 - DNA, 25 bp, Homo sapien
cactgaagagatttgttctagagcc

SEQ ID NO: 3899608 - DNA, 25 bp, Homo sapien
ctgtatacagtagtactgccttatc

SEQ ID NO: 3899609 - DNA, 25 bp, Homo sapien
tgtatacagtagtactgccttatcc

SEQ ID NO: 3899610 - DNA, 25 bp, Homo sapien
catttttttatccatggctgattga

SEQ ID NO: 3899611 - DNA, 25 bp, Homo sapien
ttttttatccatggctgattgaatc

SEQ ID NO: 3899612 - DNA, 25 bp, Homo sapien
tgaccacataaacatcagggatgtg

SEQ ID NO: 3899613 - DNA, 25 bp, Homo sapien
gggcacatatcctgaccacataaac

SEQ ID NO: 3899614 - DNA, 25 bp, Homo sapien
gatttaacacagcttgaacacctaa

SEQ ID NO: 3899615 - DNA, 25 bp, Homo sapien
tgcttggtcactcaagggcacatat

SEQ ID NO: 3899616 - DNA, 25 bp, Homo sapien
tgctatcttgctatggtcagtgact

SEQ ID NO: 3899617 - DNA, 25 bp, Homo sapien
gaagcgctagttatatattccagtc

SEQ ID NO: 3899618 - DNA, 25 bp, Homo sapien
agcctgtgtttaagcgccctgattc

SEQ ID NO: 3899619 - DNA, 25 bp, Homo sapien
tctgtgtctttgcactgaagcgcta

SEQ ID NO: 3899620 - DNA, 25 bp, Homo sapien
ttttactccctcctggcccatagga

SEQ ID NO: 3899621 - DNA, 25 bp, Homo sapien
tcaggtggtggtgaattgtcactgt

SEQ ID NO: 3899622 - DNA, 25 bp, Homo sapien
tgttataattggattgcacaccaca

SEQ ID NO: 3899623 - DNA, 25 bp, Homo sapien
actgagaagtctgttggcagaggaa

SEQ ID NO: 3899624 - DNA, 25 bp, Homo sapien
ggttatgtgaacactcagcactcat

SEQ ID NO: 3899625 - DNA, 25 bp, Homo sapien
ctgggttatgtgaacactcagcact

SEQ ID NO: 3899626 - DNA, 25 bp, Homo sapien
tgggttatgtgaacactcagcactc

SEQ ID NO: 3899627 - DNA, 25 bp, Homo sapien
gggttatgtgaacactcagcactca

SEQ ID NO: 3899628 - DNA, 25 bp, Homo sapien
gtttccagaagacctatgcttagca

SEQ ID NO: 3899629 - DNA, 25 bp, Homo sapien
ccagaagacctatgcttagcaaagg

SEQ ID NO: 3899630 - DNA, 25 bp, Homo sapien
ttttgcatttcataaagtcctgcca

SEQ ID NO: 3899631 - DNA, 25 bp, Homo sapien
aaagtcctgccacagctgtgtttcc

SEQ ID NO: 3899632 - DNA, 25 bp, Homo sapien
tcaggcatatgttatgtgaaactcc

SEQ ID NO: 3899633 - DNA, 25 bp, Homo sapien
tccagagatatagggtttgtcttgg

SEQ ID NO: 3899634 - DNA, 25 bp, Homo sapien
aagggaaatccagagatatagggtt

SEQ ID NO: 3899635 - DNA, 25 bp, Homo sapien
gttatgtgaaactccacactggcca

SEQ ID NO: 3899636 - DNA, 25 bp, Homo sapien
ttgaccggatagtagcataggattc

SEQ ID NO: 3899637 - DNA, 25 bp, Homo sapien
taaagcattgctagcgtgggcacat

SEQ ID NO: 3899638 - DNA, 25 bp, Homo sapien
gatattcagctgtatcagagtctgc

SEQ ID NO: 3899639 - DNA, 25 bp, Homo sapien
ccctttgcagttcaacacagataaa

SEQ ID NO: 3899640 - DNA, 25 bp, Homo sapien
ttatggtttagcatccgaaaaacca

SEQ ID NO: 3899641 - DNA, 25 bp, Homo sapien
tttagcatccgaaaaaccacggata

SEQ ID NO: 3899642 - DNA, 25 bp, Homo sapien
gcatccgaaaaaccacggatagtaa

SEQ ID NO: 3899643 - DNA, 25 bp, Homo sapien
aaaaccacggatagtaacatggata

SEQ ID NO: 3899644 - DNA, 25 bp, Homo sapien
gcagaagatcacggcccccaactaa

SEQ ID NO: 3899645 - DNA, 25 bp, Homo sapien
caactaatgaatattgtagcaggga

SEQ ID NO: 3899646 - DNA, 25 bp, Homo sapien
ccccaactaatgaatattgtagcag

SEQ ID NO: 3899647 - DNA, 25 bp, Homo sapien
gatcacggcccccaactaatgaata

SEQ ID NO: 3899648 - DNA, 25 bp, Homo sapien
acagcaggtagccgggttttggatt

SEQ ID NO: 3899649 - DNA, 25 bp, Homo sapien
caggtagccgggttttggattctgt

SEQ ID NO: 3899650 - DNA, 25 bp, Homo sapien
ctgtcccatgtctagtttttacttc

SEQ ID NO: 3899651 - DNA, 25 bp, Homo sapien
tggattctgtcccatgtctagtttt

SEQ ID NO: 3899652 - DNA, 25 bp, Homo sapien
catgtgctaagcctagcactgagat

SEQ ID NO: 3899653 - DNA, 25 bp, Homo sapien
cacccatgtgctaagcctagcactg

SEQ ID NO: 3899654 - DNA, 25 bp, Homo sapien
tttctaccacccatgtgctaagcct

SEQ ID NO: 3899655 - DNA, 25 bp, Homo sapien
taccacccatgtgctaagcctagca

SEQ ID NO: 3899656 - DNA, 25 bp, Homo sapien
ctagattctgcaatgccttgagcct

SEQ ID NO: 3899657 - DNA, 25 bp, Homo sapien
ttctcagatgaaaggagggtgtcag

SEQ ID NO: 3899658 - DNA, 25 bp, Homo sapien
gcaatgccttgagcctttgactctt

SEQ ID NO: 3899659 - DNA, 25 bp, Homo sapien
tttcatctgtgaaggttctcagatg

SEQ ID NO: 3899660 - DNA, 25 bp, Homo sapien
gattatatagctcaactggagtgga

SEQ ID NO: 3899661 - DNA, 25 bp, Homo sapien
tatatagctcaactggagtggagga

SEQ ID NO: 3899662 - DNA, 25 bp, Homo sapien
agaacagtgttttgaccacgtctga

SEQ ID NO: 3899663 - DNA, 25 bp, Homo sapien
tgaccacgtctgattatatagctca

SEQ ID NO: 3899664 - DNA, 25 bp, Homo sapien
gctgaattcgttttctattacactt

SEQ ID NO: 3899665 - DNA, 25 bp, Homo sapien
ggtccacgaagtcatgattctgctg

SEQ ID NO: 3899666 - DNA, 25 bp, Homo sapien
ttctgctgaattcgttttctattac

SEQ ID NO: 3899667 - DNA, 25 bp, Homo sapien
tgcagatgtgggtccacgaagtcat

SEQ ID NO: 3899668 - DNA, 25 bp, Homo sapien
gaacacagatgacatagagaacagg

SEQ ID NO: 3899669 - DNA, 25 bp, Homo sapien
aacacagatgacatagagaacaggg

SEQ ID NO: 3899670 - DNA, 25 bp, Homo sapien
tgaacacagatgacatagagaacag

SEQ ID NO: 3899671 - DNA, 25 bp, Homo sapien
agaagcaaccctggcatgggccctt

SEQ ID NO: 3899672 - DNA, 25 bp, Homo sapien
cacactggtaatgagcttggaagct

SEQ ID NO: 3899673 - DNA, 25 bp, Homo sapien
tgttgtacttcccagtgcacagcat

SEQ ID NO: 3899674 - DNA, 25 bp, Homo sapien
tgtaggtatgtttgggtgtgcacac

SEQ ID NO: 3899675 - DNA, 25 bp, Homo sapien
agagcacagacctatacccatggat

SEQ ID NO: 3899676 - DNA, 25 bp, Homo sapien
tccacggtccaagccagagtgagga

SEQ ID NO: 3899677 - DNA, 25 bp, Homo sapien
tagagatactggcattagcctggcc

SEQ ID NO: 3899678 - DNA, 25 bp, Homo sapien
gatccaaagccactctagttgccag

SEQ ID NO: 3899679 - DNA, 25 bp, Homo sapien
tcccaagtttgacctctcacagtgt

SEQ ID NO: 3899680 - DNA, 25 bp, Homo sapien
cgtcactggcaattatgcagtcttc

SEQ ID NO: 3899681 - DNA, 25 bp, Homo sapien
agtgttctttttcacgtcactggca

SEQ ID NO: 3899682 - DNA, 25 bp, Homo sapien
tagagtcaacccgacatagatagta

SEQ ID NO: 3899683 - DNA, 25 bp, Homo sapien
catcatatttcccagcacgtgaagc

SEQ ID NO: 3899684 - DNA, 25 bp, Homo sapien
tatttcccagcacgtgaagcagtat

SEQ ID NO: 3899685 - DNA, 25 bp, Homo sapien
caatcatcatatttcccagcacgtg

SEQ ID NO: 3899686 - DNA, 25 bp, Homo sapien
tcatatttcccagcacgtgaagcag

SEQ ID NO: 3899687 - DNA, 25 bp, Homo sapien
cagtgcagtgcacctaaatgcctga

SEQ ID NO: 3899688 - DNA, 25 bp, Homo sapien
taatcagctgggctagtccatggct

SEQ ID NO: 3899689 - DNA, 25 bp, Homo sapien
aaatgcctgacacaactgtctggtg

SEQ ID NO: 3899690 - DNA, 25 bp, Homo sapien
gaggtcctataaatctccttgtggg

SEQ ID NO: 3899691 - DNA, 25 bp, Homo sapien
aatagattcccgtgacagaggcctg

SEQ ID NO: 3899692 - DNA, 25 bp, Homo sapien
agaggcctgccagcatacggatgct

SEQ ID NO: 3899693 - DNA, 25 bp, Homo sapien
tggaatgtaataaaagtgtcaacaa

SEQ ID NO: 3899694 - DNA, 25 bp, Homo sapien
aaataggtgtttcatagtaactgac

SEQ ID NO: 3899695 - DNA, 25 bp, Homo sapien
gctggttctgattgctggcctcaag

SEQ ID NO: 3899696 - DNA, 25 bp, Homo sapien
gctctagtgaaagactattgttgca

SEQ ID NO: 3899697 - DNA, 25 bp, Homo sapien
aaaggcacgtatctttgacaattgt

SEQ ID NO: 3899698 - DNA, 25 bp, Homo sapien
tggaggttacagtgacgtcgagcca

SEQ ID NO: 3899699 - DNA, 25 bp, Homo sapien
tatacacacaagaaatgcaatttat

SEQ ID NO: 3899700 - DNA, 25 bp, Homo sapien
ataaatatacacacaagaaatgcaa

SEQ ID NO: 3899701 - DNA, 25 bp, Homo sapien
caagaaatgcaatttattcaacagt

SEQ ID NO: 3899702 - DNA, 25 bp, Homo sapien
gaaatgcaatttattcaacagtaac

SEQ ID NO: 3899703 - DNA, 25 bp, Homo sapien
tatggctagagctgaataggagagc

SEQ ID NO: 3899704 - DNA, 25 bp, Homo sapien
tatattatacttgacctagtcggcc

SEQ ID NO: 3899705 - DNA, 25 bp, Homo sapien
tggattagacgaggataccgacttg

SEQ ID NO: 3899706 - DNA, 25 bp, Homo sapien
taaattgtcatcactacgggcaagc

SEQ ID NO: 3899707 - DNA, 25 bp, Homo sapien
ttctgggccactgtgacactgctgt

SEQ ID NO: 3899708 - DNA, 25 bp, Homo sapien
tgtgacactgctgtacaccctattc

SEQ ID NO: 3899709 - DNA, 25 bp, Homo sapien
gctgtacaccctattcttcttcccc

SEQ ID NO: 3899710 - DNA, 25 bp, Homo sapien
ttctcttgttctgggccactgtgac

SEQ ID NO: 3899711 - DNA, 25 bp, Homo sapien
tggaaataggcgagcacagaaatgt

SEQ ID NO: 3899712 - DNA, 25 bp, Homo sapien
ttaacaccttcacaatgccaatggg

SEQ ID NO: 3899713 - DNA, 25 bp, Homo sapien
gagtgtggcacaggaatatagcttg

SEQ ID NO: 3899714 - DNA, 25 bp, Homo sapien
tactagttgccctgaaatggaatga

SEQ ID NO: 3899715 - DNA, 25 bp, Homo sapien
tttacaatcttgatagtcactagcg

SEQ ID NO: 3899716 - DNA, 25 bp, Homo sapien
tcactagcggcacataagggtgagt

SEQ ID NO: 3899717 - DNA, 25 bp, Homo sapien
cataagggtgagtggaagcacagta

SEQ ID NO: 3899718 - DNA, 25 bp, Homo sapien
aaacccagaacagcactaacaattt

SEQ ID NO: 3899719 - DNA, 25 bp, Homo sapien
tcatgaaaggcagcaatgaactcct

SEQ ID NO: 3899720 - DNA, 25 bp, Homo sapien
cagaatccagaaatttttttgtggc

SEQ ID NO: 3899721 - DNA, 25 bp, Homo sapien
tgtaagataaaccttccaaatcatg

SEQ ID NO: 3899722 - DNA, 25 bp, Homo sapien
ccttagacgatttggattccaaggc

SEQ ID NO: 3899723 - DNA, 25 bp, Homo sapien
ctaacatggcttataacagggacta

SEQ ID NO: 3899724 - DNA, 25 bp, Homo sapien
agggactaaagccaaggctctctcc

SEQ ID NO: 3899725 - DNA, 25 bp, Homo sapien
tataacagggactaaagccaaggct

SEQ ID NO: 3899726 - DNA, 25 bp, Homo sapien
taactaacatggcttataacaggga

SEQ ID NO: 3899727 - DNA, 25 bp, Homo sapien
tgctcatccgctagaagtgactctt

SEQ ID NO: 3899728 - DNA, 25 bp, Homo sapien
taagcgtgtgtactattctaaatcc

SEQ ID NO: 3899729 - DNA, 25 bp, Homo sapien
gaagacaaagcgttactctgtcgcc

SEQ ID NO: 3899730 - DNA, 25 bp, Homo sapien
tgcacccggctataatttcctaaaa

SEQ ID NO: 3899731 - DNA, 25 bp, Homo sapien
caggtctatcaaaatgtggtcatgc

SEQ ID NO: 3899732 - DNA, 25 bp, Homo sapien
tgcagccttgtcgactaagagacat

SEQ ID NO: 3899733 - DNA, 25 bp, Homo sapien
tcagtaggtcaatcccaacagtgtt

SEQ ID NO: 3899734 - DNA, 25 bp, Homo sapien
tcatgctcaaaatctggtggtctgc

SEQ ID NO: 3899735 - DNA, 25 bp, Homo sapien
cttcactgcaccgacaccgccattt

SEQ ID NO: 3899736 - DNA, 25 bp, Homo sapien
accgacaccgccatttctctgggat

SEQ ID NO: 3899737 - DNA, 25 bp, Homo sapien
tctcctcttcactgcaccgacaccg

SEQ ID NO: 3899738 - DNA, 25 bp, Homo sapien
tttctctgggatccttatttggaac

SEQ ID NO: 3899739 - DNA, 25 bp, Homo sapien
agagctgaaattgccttcccccatc

SEQ ID NO: 3899740 - DNA, 25 bp, Homo sapien
aaagagctgaaattgccttccccca

SEQ ID NO: 3899741 - DNA, 25 bp, Homo sapien
aagagctgaaattgccttcccccat

SEQ ID NO: 3899742 - DNA, 25 bp, Homo sapien
ttgtcctcagtcccacatgtcagat

SEQ ID NO: 3899743 - DNA, 25 bp, Homo sapien
tttgtcctcagtcccacatgtcaga

SEQ ID NO: 3899744 - DNA, 25 bp, Homo sapien
tgtcctcagtcccacatgtcagatc

SEQ ID NO: 3899745 - DNA, 25 bp, Homo sapien
ctttgtcctcagtcccacatgtcag

SEQ ID NO: 3899746 - DNA, 25 bp, Homo sapien
gatttgtcattagtctgcaacccaa

SEQ ID NO: 3899747 - DNA, 25 bp, Homo sapien
gattgcacacttatcctagggacta

SEQ ID NO: 3899748 - DNA, 25 bp, Homo sapien
cagtcttcatagagccgagaccagg

SEQ ID NO: 3899749 - DNA, 25 bp, Homo sapien
caggcacctcaggaattggaagagt

SEQ ID NO: 3899750 - DNA, 25 bp, Homo sapien
taaggctaaggttctttcagggaca

SEQ ID NO: 3899751 - DNA, 25 bp, Homo sapien
acaataaggctaaggttctttcagg

SEQ ID NO: 3899752 - DNA, 25 bp, Homo sapien
caataaggctaaggttctttcaggg

SEQ ID NO: 3899753 - DNA, 25 bp, Homo sapien
ttacaataaggctaaggttctttca

SEQ ID NO: 3899754 - DNA, 25 bp, Homo sapien
gggactttggcagtggtatgcaggt

SEQ ID NO: 3899755 - DNA, 25 bp, Homo sapien
taaggcaagattcgactttcctcat

SEQ ID NO: 3899756 - DNA, 25 bp, Homo sapien
gtggataaggcaagattcgactttc

SEQ ID NO: 3899757 - DNA, 25 bp, Homo sapien
tttggcagtggtatgcaggtgtgga

SEQ ID NO: 3899758 - DNA, 25 bp, Homo sapien
cacagcaatcaatatcacacttctc

SEQ ID NO: 3899759 - DNA, 25 bp, Homo sapien
tcctgtgctgccgactgcggcgtat

SEQ ID NO: 3899760 - DNA, 25 bp, Homo sapien
taacgtcaagagaaagctttgtcgg

SEQ ID NO: 3899761 - DNA, 25 bp, Homo sapien
tgcggcgtattctccggaggatgca

SEQ ID NO: 3899762 - DNA, 25 bp, Homo sapien
cagatgtgttcctgttcatatgttc

SEQ ID NO: 3899763 - DNA, 25 bp, Homo sapien
tcagatgtgttcctgttcatatgtt

SEQ ID NO: 3899764 - DNA, 25 bp, Homo sapien
tcccaagcaactctggaccagggta

SEQ ID NO: 3899765 - DNA, 25 bp, Homo sapien
ccaagcaactctggaccagggtagc

SEQ ID NO: 3899766 - DNA, 25 bp, Homo sapien
cccaagcaactctggaccagggtag

SEQ ID NO: 3899767 - DNA, 25 bp, Homo sapien
ccagtcatcagttgtacgtaatttg

SEQ ID NO: 3899768 - DNA, 25 bp, Homo sapien
acacaaatactcaatagcgacttat

SEQ ID NO: 3899769 - DNA, 25 bp, Homo sapien
aaatactcaatagcgacttataaag

SEQ ID NO: 3899770 - DNA, 25 bp, Homo sapien
taatttgatcccataagaaccaaca

SEQ ID NO: 3899771 - DNA, 25 bp, Homo sapien
caaaagtgactaggcgatgtatgcc

SEQ ID NO: 3899772 - DNA, 25 bp, Homo sapien
ctgagcccatagagattttgcaggg

SEQ ID NO: 3899773 - DNA, 25 bp, Homo sapien
tgttagcagggctgagagtagctct

SEQ ID NO: 3899774 - DNA, 25 bp, Homo sapien
gagtaagtgctgttaaactgcaaac

SEQ ID NO: 3899775 - DNA, 25 bp, Homo sapien
cttcagtcctatagcttgtctgaaa

SEQ ID NO: 3899776 - DNA, 25 bp, Homo sapien
tatagcttgtctgaaattgatctca

SEQ ID NO: 3899777 - DNA, 25 bp, Homo sapien
gaaattgatctcatacttacttctc

SEQ ID NO: 3899778 - DNA, 25 bp, Homo sapien
gtctgaaattgatctcatacttact

SEQ ID NO: 3899779 - DNA, 25 bp, Homo sapien
tcaaccatgcacaaacatagccaac

SEQ ID NO: 3899780 - DNA, 25 bp, Homo sapien
actgtcaattgcgtcagacaaagcc

SEQ ID NO: 3899781 - DNA, 25 bp, Homo sapien
tagccaactcataaggcacaatgtg

SEQ ID NO: 3899782 - DNA, 25 bp, Homo sapien
cacaatgtggcaggtactgtcaatt

SEQ ID NO: 3899783 - DNA, 25 bp, Homo sapien
ttagaattaactgtcaccatcgcca

SEQ ID NO: 3899784 - DNA, 25 bp, Homo sapien
tagaattaactgtcaccatcgccat

SEQ ID NO: 3899785 - DNA, 25 bp, Homo sapien
tttagaattaactgtcaccatcgcc

SEQ ID NO: 3899786 - DNA, 25 bp, Homo sapien
ccacagcagcactcgagtttgctaa

SEQ ID NO: 3899787 - DNA, 25 bp, Homo sapien
gctaaagtgactgacgttggcttca

SEQ ID NO: 3899788 - DNA, 25 bp, Homo sapien
tcagtttggaatccaaaggcgacaa

SEQ ID NO: 3899789 - DNA, 25 bp, Homo sapien
catgagcttgctggaaggggttcaa

SEQ ID NO: 3899790 - DNA, 25 bp, Homo sapien
gggcttggcatatatagccttcctg

SEQ ID NO: 3899791 - DNA, 25 bp, Homo sapien
tgttctgttagctcactcctactca

SEQ ID NO: 3899792 - DNA, 25 bp, Homo sapien
tcctgggcttggcatatatagcctt

SEQ ID NO: 3899793 - DNA, 25 bp, Homo sapien
gtgttctgttagctcactcctactc

SEQ ID NO: 3899794 - DNA, 25 bp, Homo sapien
agcagaacaaatggccaagagctgt

SEQ ID NO: 3899795 - DNA, 25 bp, Homo sapien
caggtacagcagaacaaatggccaa

SEQ ID NO: 3899796 - DNA, 25 bp, Homo sapien
aatggccaagagctgttgagagccc

SEQ ID NO: 3899797 - DNA, 25 bp, Homo sapien
ccaagagctgttgagagccccaggg

SEQ ID NO: 3899798 - DNA, 25 bp, Homo sapien
tcagggttattcttaaacagtctac

SEQ ID NO: 3899799 - DNA, 25 bp, Homo sapien
cagtctaccatatcacgttctttca

SEQ ID NO: 3899800 - DNA, 25 bp, Homo sapien
tcttaaacagtctaccatatcacgt

SEQ ID NO: 3899801 - DNA, 25 bp, Homo sapien
tatcacgttctttcaaaaacacaaa

SEQ ID NO: 3899802 - DNA, 25 bp, Homo sapien
catctttcgatacctggctccaggg

SEQ ID NO: 3899803 - DNA, 25 bp, Homo sapien
gaaatcatgttaaaagaacagctct

SEQ ID NO: 3899804 - DNA, 25 bp, Homo sapien
gaacagctcttttgattgcaagatt

SEQ ID NO: 3899805 - DNA, 25 bp, Homo sapien
gatgagtaccaaatagacatttcag

SEQ ID NO: 3899806 - DNA, 25 bp, Homo sapien
gttcccctggtcatatcaattgtct

SEQ ID NO: 3899807 - DNA, 25 bp, Homo sapien
gggtgcaactttctggcttccatct

SEQ ID NO: 3899808 - DNA, 25 bp, Homo sapien
gcttccatctttcataaggctcatg

SEQ ID NO: 3899809 - DNA, 25 bp, Homo sapien
aattgtcttttcttgggtgcaactt

SEQ ID NO: 3899810 - DNA, 25 bp, Homo sapien
acatcttttatctgggccatgacat

SEQ ID NO: 3899811 - DNA, 25 bp, Homo sapien
ttttcagtgatgcttcattcacatc

SEQ ID NO: 3899812 - DNA, 25 bp, Homo sapien
gttttcagtgatgcttcattcacat

SEQ ID NO: 3899813 - DNA, 25 bp, Homo sapien
ttcacatcttttatctgggccatga

SEQ ID NO: 3899814 - DNA, 25 bp, Homo sapien
gatttgatagaagtgataggccccc

SEQ ID NO: 3899815 - DNA, 25 bp, Homo sapien
tttgatagaagtgataggcccccaa

SEQ ID NO: 3899816 - DNA, 25 bp, Homo sapien
atagaagtgataggcccccaatgtc

SEQ ID NO: 3899817 - DNA, 25 bp, Homo sapien
tgatagaagtgataggcccccaatg

SEQ ID NO: 3899818 - DNA, 25 bp, Homo sapien
atttagtaataaatgtcacaggatc

SEQ ID NO: 3899819 - DNA, 25 bp, Homo sapien
tggatccgacatccaccaagggtgg

SEQ ID NO: 3899820 - DNA, 25 bp, Homo sapien
tgcctgagtattgcttgcacctgtt

SEQ ID NO: 3899821 - DNA, 25 bp, Homo sapien
gctggaccagatgtactgcacggca

SEQ ID NO: 3899822 - DNA, 25 bp, Homo sapien
gtttcatgacaatcaaattccaaat

SEQ ID NO: 3899823 - DNA, 25 bp, Homo sapien
ttcatgacaatcaaattccaaattt

SEQ ID NO: 3899824 - DNA, 25 bp, Homo sapien
ttgtttcatgacaatcaaattccaa

SEQ ID NO: 3899825 - DNA, 25 bp, Homo sapien
tcaaattccaaatttttcttgccat

SEQ ID NO: 3899826 - DNA, 25 bp, Homo sapien
ctgtggcagcttttaggctttctcc

SEQ ID NO: 3899827 - DNA, 25 bp, Homo sapien
taggctttctccaatgtcgagtgac

SEQ ID NO: 3899828 - DNA, 25 bp, Homo sapien
tgctcatctggtcgcataggcacag

SEQ ID NO: 3899829 - DNA, 25 bp, Homo sapien
caatgtcgagtgactgctcatctgg

SEQ ID NO: 3899830 - DNA, 25 bp, Homo sapien
ttctcaagagataaggcaagagctt

SEQ ID NO: 3899831 - DNA, 25 bp, Homo sapien
cagtgtctttcttggccatcgtatc

SEQ ID NO: 3899832 - DNA, 25 bp, Homo sapien
gcttggtccatgaaaattgtctgtg

SEQ ID NO: 3899833 - DNA, 25 bp, Homo sapien
agatccagcgtgattcttcaaaagg

SEQ ID NO: 3899834 - DNA, 25 bp, Homo sapien
atccatcagtgattgactggactaa

SEQ ID NO: 3899835 - DNA, 25 bp, Homo sapien
aatatccatcagtgattgactggac

SEQ ID NO: 3899836 - DNA, 25 bp, Homo sapien
acacaaatatccatcagtgattgac

SEQ ID NO: 3899837 - DNA, 25 bp, Homo sapien
ccaacacaaatatccatcagtgatt

SEQ ID NO: 3899838 - DNA, 25 bp, Homo sapien
aattggctttgcctcacaaataacc

SEQ ID NO: 3899839 - DNA, 25 bp, Homo sapien
tattgtcacggttggagaagagcct

SEQ ID NO: 3899840 - DNA, 25 bp, Homo sapien
tcactgcaaaatcagcgtaaatgca

SEQ ID NO: 3899841 - DNA, 25 bp, Homo sapien
cctttaggtctattaacaatattca

SEQ ID NO: 3899842 - DNA, 25 bp, Homo sapien
cttcctctgtccctcttcctcgtcc

SEQ ID NO: 3899843 - DNA, 25 bp, Homo sapien
ttcctctgtccctcttcctcgtcct

SEQ ID NO: 3899844 - DNA, 25 bp, Homo sapien
cttcttcctctgtccctcttcctcg

SEQ ID NO: 3899845 - DNA, 25 bp, Homo sapien
ttcttcctctgtccctcttcctcgt

SEQ ID NO: 3899846 - DNA, 25 bp, Homo sapien
accagtatcctacaatcaagagatg

SEQ ID NO: 3899847 - DNA, 25 bp, Homo sapien
gaccagtatcctacaatcaagagat

SEQ ID NO: 3899848 - DNA, 25 bp, Homo sapien
tagaccagtatcctacaatcaagag

SEQ ID NO: 3899849 - DNA, 25 bp, Homo sapien
ctagaccagtatcctacaatcaaga

SEQ ID NO: 3899850 - DNA, 25 bp, Homo sapien
caaccagagatcaatcagatgcaaa

SEQ ID NO: 3899851 - DNA, 25 bp, Homo sapien
tcttgaaacaactctgaacacccag

SEQ ID NO: 3899852 - DNA, 25 bp, Homo sapien
ggcaaaacatcccatcttgaaacaa

SEQ ID NO: 3899853 - DNA, 25 bp, Homo sapien
cacccagaggcaatatagttatgtt

SEQ ID NO: 3899854 - DNA, 25 bp, Homo sapien
tcagcaggattcttaatcacaaata

SEQ ID NO: 3899855 - DNA, 25 bp, Homo sapien
cagcaggattcttaatcacaaatat

SEQ ID NO: 3899856 - DNA, 25 bp, Homo sapien
ctcagcaggattcttaatcacaaat

SEQ ID NO: 3899857 - DNA, 25 bp, Homo sapien
agcaggattcttaatcacaaatatg

SEQ ID NO: 3899858 - DNA, 25 bp, Homo sapien
ggaaatgcagaaacacttggctttt

SEQ ID NO: 3899859 - DNA, 25 bp, Homo sapien
ctgcggaaatgcagaaacacttggc

SEQ ID NO: 3899860 - DNA, 25 bp, Homo sapien
tgcggaaatgcagaaacacttggct

SEQ ID NO: 3899861 - DNA, 25 bp, Homo sapien
gcggaaatgcagaaacacttggctt

SEQ ID NO: 3899862 - DNA, 25 bp, Homo sapien
tgcacgcagtaggttcacaatgcag

SEQ ID NO: 3899863 - DNA, 25 bp, Homo sapien
actgtcctgcaagactcctgtttgc

SEQ ID NO: 3899864 - DNA, 25 bp, Homo sapien
ccggagaaaccatgaggagacctta

SEQ ID NO: 3899865 - DNA, 25 bp, Homo sapien
aagtttccgggcactttgcacgcag

SEQ ID NO: 3899866 - DNA, 25 bp, Homo sapien
tagccaagatgttgcagatggagat

SEQ ID NO: 3899867 - DNA, 25 bp, Homo sapien
gagacatcatcattgagctggaagg

SEQ ID NO: 3899868 - DNA, 25 bp, Homo sapien
ggccagttggagacaattatactac

SEQ ID NO: 3899869 - DNA, 25 bp, Homo sapien
gggtcatgccaagtaagaatgtgta

SEQ ID NO: 3899870 - DNA, 25 bp, Homo sapien
gatgtgatcaatccacacctggcct

SEQ ID NO: 3899871 - DNA, 25 bp, Homo sapien
cttctggtctgggatgtgatcaatc

SEQ ID NO: 3899872 - DNA, 25 bp, Homo sapien
tgggatgtgatcaatccacacctgg

SEQ ID NO: 3899873 - DNA, 25 bp, Homo sapien
tggtctgggatgtgatcaatccaca

SEQ ID NO: 3899874 - DNA, 25 bp, Homo sapien
tgaatgtagatacctgatttcacag

SEQ ID NO: 3899875 - DNA, 25 bp, Homo sapien
tcctttctgtgaatgtagatacctg

SEQ ID NO: 3899876 - DNA, 25 bp, Homo sapien
ccttaggcctgaactcagattctgc

SEQ ID NO: 3899877 - DNA, 25 bp, Homo sapien
tggtgaggaaagtaaccggaagcaa

SEQ ID NO: 3899878 - DNA, 25 bp, Homo sapien
agaagaatcaaaacagataacttta

SEQ ID NO: 3899879 - DNA, 25 bp, Homo sapien
tcaaaacagataactttagagacat

SEQ ID NO: 3899880 - DNA, 25 bp, Homo sapien
gaatcaaaacagataactttagaga

SEQ ID NO: 3899881 - DNA, 25 bp, Homo sapien
gaagaatcaaaacagataactttag

SEQ ID NO: 3899882 - DNA, 25 bp, Homo sapien
ctccctggcacattgtttgatatca

SEQ ID NO: 3899883 - DNA, 25 bp, Homo sapien
tccctggcacattgtttgatatcac

SEQ ID NO: 3899884 - DNA, 25 bp, Homo sapien
catttaccaaaacatccaggtcctc

SEQ ID NO: 3899885 - DNA, 25 bp, Homo sapien
gactcagacgagttttaattatgta

SEQ ID NO: 3899886 - DNA, 25 bp, Homo sapien
gttagctgtgaaagtcgtctttcca

SEQ ID NO: 3899887 - DNA, 25 bp, Homo sapien
gacattacactgtaggttagctgtg

SEQ ID NO: 3899888 - DNA, 25 bp, Homo sapien
caagttcttgacgtataaccctgct

SEQ ID NO: 3899889 - DNA, 25 bp, Homo sapien
aaccctgctcttcctagaatccaaa

SEQ ID NO: 3899890 - DNA, 25 bp, Homo sapien
ttctgttaaggctaccaagttcttg

SEQ ID NO: 3899891 - DNA, 25 bp, Homo sapien
tccaaaacccgatatctggtcaaat

SEQ ID NO: 3899892 - DNA, 25 bp, Homo sapien
tagatgccgtctttctagttcaacg

SEQ ID NO: 3899893 - DNA, 25 bp, Homo sapien
gagctcagacatagaatggctccat

SEQ ID NO: 3899894 - DNA, 25 bp, Homo sapien
gatgctatctaatcaggtggtggtg

SEQ ID NO: 3899895 - DNA, 25 bp, Homo sapien
tgctcttatgagatcacttgccctg

SEQ ID NO: 3899896 - DNA, 25 bp, Homo sapien
tgcagacacactgaagatcgcacac

SEQ ID NO: 3899897 - DNA, 25 bp, Homo sapien
ttaagttagcttatgcagacacact

SEQ ID NO: 3899898 - DNA, 25 bp, Homo sapien
acactgaagatcgcacactcacatt

SEQ ID NO: 3899899 - DNA, 25 bp, Homo sapien
actgaagatcgcacactcacatttg

SEQ ID NO: 3899900 - DNA, 25 bp, Homo sapien
atttttctcaaacgatactgccatg

SEQ ID NO: 3899901 - DNA, 25 bp, Homo sapien
aatgtcatttttctcaaacgatact

SEQ ID NO: 3899902 - DNA, 25 bp, Homo sapien
catgagagtgaatttctcaaatgca

SEQ ID NO: 3899903 - DNA, 25 bp, Homo sapien
gtcatttttctcaaacgatactgcc

SEQ ID NO: 3899904 - DNA, 25 bp, Homo sapien
gcaatcgctgtgtaccacggacaac

SEQ ID NO: 3899905 - DNA, 25 bp, Homo sapien
cactcagcttctaagtgcaatcgct

SEQ ID NO: 3899906 - DNA, 25 bp, Homo sapien
cacggacaaccacagcactaaaggg

SEQ ID NO: 3899907 - DNA, 25 bp, Homo sapien
cactaaaggggatctctgacaaatc

SEQ ID NO: 3899908 - DNA, 25 bp, Homo sapien
cacaaaggcttccagaatagtgcat

SEQ ID NO: 3899909 - DNA, 25 bp, Homo sapien
ggcacgtggtacacaaaggcttcca

SEQ ID NO: 3899910 - DNA, 25 bp, Homo sapien
ggtacacaaaggcttccagaatagt

SEQ ID NO: 3899911 - DNA, 25 bp, Homo sapien
acgtggtacacaaaggcttccagaa

SEQ ID NO: 3899912 - DNA, 25 bp, Homo sapien
tagtgccaatgtcactcatttttag

SEQ ID NO: 3899913 - DNA, 25 bp, Homo sapien
tacctattgacgcaataactccttg

SEQ ID NO: 3899914 - DNA, 25 bp, Homo sapien
tttagagatttacctattgacgcaa

SEQ ID NO: 3899915 - DNA, 25 bp, Homo sapien
taactccttggtaatcattgtccat

SEQ ID NO: 3899916 - DNA, 25 bp, Homo sapien
caggtgctacttttggagtatttga

SEQ ID NO: 3899917 - DNA, 25 bp, Homo sapien
ttgattttagatccatattgccatt

SEQ ID NO: 3899918 - DNA, 25 bp, Homo sapien
catttatcacaggtgctacttttgg

SEQ ID NO: 3899919 - DNA, 25 bp, Homo sapien
gattttagatccatattgccatttc

SEQ ID NO: 3899920 - DNA, 25 bp, Homo sapien
cattgaacaccgtataatttattcc

SEQ ID NO: 3899921 - DNA, 25 bp, Homo sapien
atggaatctcattgaacaccgtata

SEQ ID NO: 3899922 - DNA, 25 bp, Homo sapien
taatttattccaccctgcttttcca

SEQ ID NO: 3899923 - DNA, 25 bp, Homo sapien
ccgtataatttattccaccctgctt

SEQ ID NO: 3899924 - DNA, 25 bp, Homo sapien
ctcatcatacctatcagtccatttt

SEQ ID NO: 3899925 - DNA, 25 bp, Homo sapien
gtcctcatcatacctatcagtccat

SEQ ID NO: 3899926 - DNA, 25 bp, Homo sapien
tcctcatcatacctatcagtccatt

SEQ ID NO: 3899927 - DNA, 25 bp, Homo sapien
cctcatcatacctatcagtccattt

SEQ ID NO: 3899928 - DNA, 25 bp, Homo sapien
ctaggtaacttgatgaataaccatt

SEQ ID NO: 3899929 - DNA, 25 bp, Homo sapien
aggtaacttgatgaataaccatttc

SEQ ID NO: 3899930 - DNA, 25 bp, Homo sapien
agtgcaagatcagagttatttattc

SEQ ID NO: 3899931 - DNA, 25 bp, Homo sapien
catgggccttggagagtgcaagatc

SEQ ID NO: 3899932 - DNA, 25 bp, Homo sapien
gcttcatcatccatggcagtcttca

SEQ ID NO: 3899933 - DNA, 25 bp, Homo sapien
taggttactggctcaaggatggcaa

SEQ ID NO: 3899934 - DNA, 25 bp, Homo sapien
gatggcaatttcagaaggggtacca

SEQ ID NO: 3899935 - DNA, 25 bp, Homo sapien
taccatagagaacgttgtcagggtc

SEQ ID NO: 3899936 - DNA, 25 bp, Homo sapien
cacatctggtccatcatttttagag

SEQ ID NO: 3899937 - DNA, 25 bp, Homo sapien
gggaagaagtctaagtcctctgtaa

SEQ ID NO: 3899938 - DNA, 25 bp, Homo sapien
ggaagaagtctaagtcctctgtaaa

SEQ ID NO: 3899939 - DNA, 25 bp, Homo sapien
tgggaagaagtctaagtcctctgta

SEQ ID NO: 3899940 - DNA, 25 bp, Homo sapien
gccctggcactctggtgatcaccta

SEQ ID NO: 3899941 - DNA, 25 bp, Homo sapien
tggtctcctcacaagtacaaacgcc

SEQ ID NO: 3899942 - DNA, 25 bp, Homo sapien
gactcaagttgacgctgtagggccc

SEQ ID NO: 3899943 - DNA, 25 bp, Homo sapien
tacaaacgccaaggcaaggcttctt

SEQ ID NO: 3899944 - DNA, 25 bp, Homo sapien
gacttgcacggcctttgataagcta

SEQ ID NO: 3899945 - DNA, 25 bp, Homo sapien
aattctatgactttgggccgatcac

SEQ ID NO: 3899946 - DNA, 25 bp, Homo sapien
tcagctggccatgatatgagccttg

SEQ ID NO: 3899947 - DNA, 25 bp, Homo sapien
tagagattcctatgagacagatcac

SEQ ID NO: 3899948 - DNA, 25 bp, Homo sapien
atgctctgtcctttcctaaattcat

SEQ ID NO: 3899949 - DNA, 25 bp, Homo sapien
ttctacaaacctcagagtatccact

SEQ ID NO: 3899950 - DNA, 25 bp, Homo sapien
ctttcacattaggaacatttgaacc

SEQ ID NO: 3899951 - DNA, 25 bp, Homo sapien
gagtatccacttaaacccaactgct

SEQ ID NO: 3899952 - DNA, 25 bp, Homo sapien
tatcttacactgagagaaagccttc

SEQ ID NO: 3899953 - DNA, 25 bp, Homo sapien
agcttttgagggtgttataagttgg

SEQ ID NO: 3899954 - DNA, 25 bp, Homo sapien
tgcaagcttttgagggtgttataag

SEQ ID NO: 3899955 - DNA, 25 bp, Homo sapien
gcaagcttttgagggtgttataagt

SEQ ID NO: 3899956 - DNA, 25 bp, Homo sapien
cttgcaagcttttgagggtgttata

SEQ ID NO: 3899957 - DNA, 25 bp, Homo sapien
cacagttgtcaatcgtggtcttctt

SEQ ID NO: 3899958 - DNA, 25 bp, Homo sapien
cagaaagcaaagtgcgccatggctt

SEQ ID NO: 3899959 - DNA, 25 bp, Homo sapien
ggaaaccatttgtgtagcgtccagt

SEQ ID NO: 3899960 - DNA, 25 bp, Homo sapien
tctcccagtagttggacttgtgcca

SEQ ID NO: 3899961 - DNA, 25 bp, Homo sapien
gctgtagtttggatgctcaatggcc

SEQ ID NO: 3899962 - DNA, 25 bp, Homo sapien
tacacaattgaagagttcaagtctg

SEQ ID NO: 3899963 - DNA, 25 bp, Homo sapien
caatggcctcatatgggtaatagct

SEQ ID NO: 3899964 - DNA, 25 bp, Homo sapien
tgaaatttggtattcacagctcaat

SEQ ID NO: 3899965 - DNA, 25 bp, Homo sapien
caaaggttggaaatggtctcttaag

SEQ ID NO: 3899966 - DNA, 25 bp, Homo sapien
gaaatggtctcttaagggtttctgc

SEQ ID NO: 3899967 - DNA, 25 bp, Homo sapien
tggcaaaggttggaaatggtctctt

SEQ ID NO: 3899968 - DNA, 25 bp, Homo sapien
ccttggcaaaggttggaaatggtct

SEQ ID NO: 3899969 - DNA, 25 bp, Homo sapien
cgagtagagtctccgttggccatgt

SEQ ID NO: 3899970 - DNA, 25 bp, Homo sapien
tggaattgaccacatcaccagatgg

SEQ ID NO: 3899971 - DNA, 25 bp, Homo sapien
ttcagtgggaatttgaacgctgagc

SEQ ID NO: 3899972 - DNA, 25 bp, Homo sapien
caccagatggtgtccgagtagagtc

SEQ ID NO: 3899973 - DNA, 25 bp, Homo sapien
taaaactcccttcagagatattgtc

SEQ ID NO: 3899974 - DNA, 25 bp, Homo sapien
tgtgctgattgtttggcagctgaca

SEQ ID NO: 3899975 - DNA, 25 bp, Homo sapien
taccctggcagacatcaatttacaa

SEQ ID NO: 3899976 - DNA, 25 bp, Homo sapien
agatattgtcttttgagtgggccag

SEQ ID NO: 3899977 - DNA, 25 bp, Homo sapien
attcagctgctggtttataatggct

SEQ ID NO: 3899978 - DNA, 25 bp, Homo sapien
cagctgctggtttataatggctttc

SEQ ID NO: 3899979 - DNA, 25 bp, Homo sapien
atcacttggattgacattcagctgc

SEQ ID NO: 3899980 - DNA, 25 bp, Homo sapien
tatcacttggattgacattcagctg

SEQ ID NO: 3899981 - DNA, 25 bp, Homo sapien
accagctttacatgccatgccatag

SEQ ID NO: 3899982 - DNA, 25 bp, Homo sapien
ttggctatatacatcctttttggca

SEQ ID NO: 3899983 - DNA, 25 bp, Homo sapien
tttagcttcaattctccatgttacc

SEQ ID NO: 3899984 - DNA, 25 bp, Homo sapien
tcgtctggctccattctacatttag

SEQ ID NO: 3899985 - DNA, 25 bp, Homo sapien
gaaactcagtcctccatttaatgaa

SEQ ID NO: 3899986 - DNA, 25 bp, Homo sapien
tagaacactaaagcttcaagcccat

SEQ ID NO: 3899987 - DNA, 25 bp, Homo sapien
gagatgtttgaatgcccaaatggaa

SEQ ID NO: 3899988 - DNA, 25 bp, Homo sapien
agtacatggttagctggactcagaa

SEQ ID NO: 3899989 - DNA, 25 bp, Homo sapien
atcatgcctggccaactactgtgtt

SEQ ID NO: 3899990 - DNA, 25 bp, Homo sapien
tatttccttcatgtccccagtcaag

SEQ ID NO: 3899991 - DNA, 25 bp, Homo sapien
gctgtggtacaatcgcggttcaccg

SEQ ID NO: 3899992 - DNA, 25 bp, Homo sapien
tagtctcgtgctcctaggttcaagt

SEQ ID NO: 3899993 - DNA, 25 bp, Homo sapien
taatttcgccttaaactctggacac

SEQ ID NO: 3899994 - DNA, 25 bp, Homo sapien
ggagaagtctaacgctgaactgaca

SEQ ID NO: 3899995 - DNA, 25 bp, Homo sapien
taaaactgcgaggacatcaaagtgg

SEQ ID NO: 3899996 - DNA, 25 bp, Homo sapien
tgagagacgccctatttctatgtca

SEQ ID NO: 3899997 - DNA, 25 bp, Homo sapien
ggctaatgcagggttgtcaccaagt

SEQ ID NO: 3899998 - DNA, 25 bp, Homo sapien
gcagcatgcaattaggagtccaggt

SEQ ID NO: 3899999 - DNA, 25 bp, Homo sapien
caagtgcagtctatctatcaaggtc

SEQ ID NO: 3900000 - DNA, 25 bp, Homo sapien
ccaactggtaccatggagatcatca

SEQ ID NO: 3900001 - DNA, 25 bp, Homo sapien
acattcatgccaccaagacgttgga

SEQ ID NO: 3900002 - DNA, 25 bp, Homo sapien
agggacaccaatcggccactggagc

SEQ ID NO: 3900003 - DNA, 25 bp, Homo sapien
acgttggatcgagaagagagagccc

SEQ ID NO: 3900004 - DNA, 25 bp, Homo sapien
ctggtgatgggaacattaaatacat

SEQ ID NO: 3900005 - DNA, 25 bp, Homo sapien
tgtccatccagtaaagtcctgattc

SEQ ID NO: 3900006 - DNA, 25 bp, Homo sapien
tgtcaaccccgactagaaattccga

SEQ ID NO: 3900007 - DNA, 25 bp, Homo sapien
cctaatactggaatctaaagacctg

SEQ ID NO: 3900008 - DNA, 25 bp, Homo sapien
aattccgagtggattcccattgtcc

SEQ ID NO: 3900009 - DNA, 25 bp, Homo sapien
tacttttgataaacgacactaatac

SEQ ID NO: 3900010 - DNA, 25 bp, Homo sapien
cttttgataaacgacactaatacat

SEQ ID NO: 3900011 - DNA, 25 bp, Homo sapien
acttttgataaacgacactaataca

SEQ ID NO: 3900012 - DNA, 25 bp, Homo sapien
ttacttttgataaacgacactaata

SEQ ID NO: 3900013 - DNA, 25 bp, Homo sapien
tatgttaaattgctgtgtaccacag

SEQ ID NO: 3900014 - DNA, 25 bp, Homo sapien
caattgcatctttgactgcggctgc

SEQ ID NO: 3900015 - DNA, 25 bp, Homo sapien
tcctccacagacaatggtgtgttgc

SEQ ID NO: 3900016 - DNA, 25 bp, Homo sapien
gcacgtctctgataatttgggaaag

SEQ ID NO: 3900017 - DNA, 25 bp, Homo sapien
tctgtgtagtgtaaagtaggattta

SEQ ID NO: 3900018 - DNA, 25 bp, Homo sapien
tgtaagcactcagccgtaggacagg

SEQ ID NO: 3900019 - DNA, 25 bp, Homo sapien
ccgtaggacaggctgggatatctca

SEQ ID NO: 3900020 - DNA, 25 bp, Homo sapien
ttagctgcgtcttgtaagcactcag

SEQ ID NO: 3900021 - DNA, 25 bp, Homo sapien
aagtgctcagcaagcgcttcttggg

SEQ ID NO: 3900022 - DNA, 25 bp, Homo sapien
tccagggtggtaacaggcaatccaa

SEQ ID NO: 3900023 - DNA, 25 bp, Homo sapien
gatgtcagttacctggagaccagag

SEQ ID NO: 3900024 - DNA, 25 bp, Homo sapien
tcatttccgacaaccagccatatag

SEQ ID NO: 3900025 - DNA, 25 bp, Homo sapien
cctgtagggctttagactctgctcc

SEQ ID NO: 3900026 - DNA, 25 bp, Homo sapien
tgtagggctttagactctgctccct

SEQ ID NO: 3900027 - DNA, 25 bp, Homo sapien
tttcctgtagggctttagactctgc

SEQ ID NO: 3900028 - DNA, 25 bp, Homo sapien
tcctgtagggctttagactctgctc

SEQ ID NO: 3900029 - DNA, 25 bp, Homo sapien
tctgatgtcaaactttaagtccagg

SEQ ID NO: 3900030 - DNA, 25 bp, Homo sapien
tatggtttgcagcaaatgcagatga

SEQ ID NO: 3900031 - DNA, 25 bp, Homo sapien
ctgatgtcaaactttaagtccaggt

SEQ ID NO: 3900032 - DNA, 25 bp, Homo sapien
cacaagccatgtgggaggttggttt

SEQ ID NO: 3900033 - DNA, 25 bp, Homo sapien
gtgtgactgacctataccaggtgct

SEQ ID NO: 3900034 - DNA, 25 bp, Homo sapien
atcagagtttctaatcagtatgagt

SEQ ID NO: 3900035 - DNA, 25 bp, Homo sapien
ttttcagcgtctcccagagtctgtg

SEQ ID NO: 3900036 - DNA, 25 bp, Homo sapien
ttggtccctgcctcagaattgctgg

SEQ ID NO: 3900037 - DNA, 25 bp, Homo sapien
attggtccctgcctcagaattgctg

SEQ ID NO: 3900038 - DNA, 25 bp, Homo sapien
tctgattggtccctgcctcagaatt

SEQ ID NO: 3900039 - DNA, 25 bp, Homo sapien
tgattggtccctgcctcagaattgc

SEQ ID NO: 3900040 - DNA, 25 bp, Homo sapien
ggacagtgacgaggacagcacatac

SEQ ID NO: 3900041 - DNA, 25 bp, Homo sapien
cactgggaccactttctcttgagca

SEQ ID NO: 3900042 - DNA, 25 bp, Homo sapien
tcattttccactgggaccactttct

SEQ ID NO: 3900043 - DNA, 25 bp, Homo sapien
acattttctgctcgaggtgtcagct

SEQ ID NO: 3900044 - DNA, 25 bp, Homo sapien
tgccaaagggcaccagggagttcct

SEQ ID NO: 3900045 - DNA, 25 bp, Homo sapien
ggcttgctggtttccctgccttgac

SEQ ID NO: 3900046 - DNA, 25 bp, Homo sapien
aacgggcttgctggtttccctgcct

SEQ ID NO: 3900047 - DNA, 25 bp, Homo sapien
cgggcttgctggtttccctgccttg

SEQ ID NO: 3900048 - DNA, 25 bp, Homo sapien
ttaacgggcttgctggtttccctgc

SEQ ID NO: 3900049 - DNA, 25 bp, Homo sapien
tgtctacgctggctgtgcaatagca

SEQ ID NO: 3900050 - DNA, 25 bp, Homo sapien
tgcttgttagcaatagagtctcctg

SEQ ID NO: 3900051 - DNA, 25 bp, Homo sapien
tgcaatagcacattgtctagggatg

SEQ ID NO: 3900052 - DNA, 25 bp, Homo sapien
cctgggagcattaggatttgcctgc

SEQ ID NO: 3900053 - DNA, 25 bp, Homo sapien
ggatcaaagggagcccacacttgtt

SEQ ID NO: 3900054 - DNA, 25 bp, Homo sapien
ccatgagacatctatgaggttattg

SEQ ID NO: 3900055 - DNA, 25 bp, Homo sapien
gatcaaagggagcccacacttgttt

SEQ ID NO: 3900056 - DNA, 25 bp, Homo sapien
tcaaagggagcccacacttgtttcc

SEQ ID NO: 3900057 - DNA, 25 bp, Homo sapien
gggatatcacatatgcctgatgcca

SEQ ID NO: 3900058 - DNA, 25 bp, Homo sapien
tcacatgtctcaagcaaaaggcaga

SEQ ID NO: 3900059 - DNA, 25 bp, Homo sapien
cagaagcacgaatgtatcacatgtc

SEQ ID NO: 3900060 - DNA, 25 bp, Homo sapien
gaacgtttgagctcggtaaacacac

SEQ ID NO: 3900061 - DNA, 25 bp, Homo sapien
tgctcagtttcagtgtttttgctgc

SEQ ID NO: 3900062 - DNA, 25 bp, Homo sapien
atgctcagtttcagtgtttttgctg

SEQ ID NO: 3900063 - DNA, 25 bp, Homo sapien
gctcagtttcagtgtttttgctgca

SEQ ID NO: 3900064 - DNA, 25 bp, Homo sapien
gaaatggactccttcgcggaagatt

SEQ ID NO: 3900065 - DNA, 25 bp, Homo sapien
gagagccttgtacaactctggaaat

SEQ ID NO: 3900066 - DNA, 25 bp, Homo sapien
aatggcacccttctccaactgtctg

SEQ ID NO: 3900067 - DNA, 25 bp, Homo sapien
ttcgcggaagattgcacttctggcc

SEQ ID NO: 3900068 - DNA, 25 bp, Homo sapien
cctcatcacttgggcttgcagcaga

SEQ ID NO: 3900069 - DNA, 25 bp, Homo sapien
tctggctagaggacggatcaatttc

SEQ ID NO: 3900070 - DNA, 25 bp, Homo sapien
tgcagcagacgtcgatggttttgcg

SEQ ID NO: 3900071 - DNA, 25 bp, Homo sapien
gggaggctaccataattaatctggc

SEQ ID NO: 3900072 - DNA, 25 bp, Homo sapien
cggtcatatctctggggaaagtcgc

SEQ ID NO: 3900073 - DNA, 25 bp, Homo sapien
gccctgcgccgcttccccaaagcgg

SEQ ID NO: 3900074 - DNA, 25 bp, Homo sapien
acacgccgactgtccccggtcatat

SEQ ID NO: 3900075 - DNA, 25 bp, Homo sapien
gggaaagtcgcccacggcgcggtgc

SEQ ID NO: 3900076 - DNA, 25 bp, Homo sapien
gaggttgcgtccaccctcaagggcc

SEQ ID NO: 3900077 - DNA, 25 bp, Homo sapien
gccccaggtgaggtgcgccgccagt

SEQ ID NO: 3900078 - DNA, 25 bp, Homo sapien
agtcccttcctctcgcctggttggg

SEQ ID NO: 3900079 - DNA, 25 bp, Homo sapien
gcggctcggaggttgcgtccaccct

SEQ ID NO: 3900080 - DNA, 25 bp, Homo sapien
ggggccgggactgacaccgcagcgc

SEQ ID NO: 3900081 - DNA, 25 bp, Homo sapien
ttcctgccactagcgcgctcggcgg

SEQ ID NO: 3900082 - DNA, 25 bp, Homo sapien
cattcctgccactagcgcgctcggc

SEQ ID NO: 3900083 - DNA, 25 bp, Homo sapien
cctgccactagcgcgctcggcggct

SEQ ID NO: 3900084 - DNA, 25 bp, Homo sapien
attcctgccactagcgcgctcggcg

SEQ ID NO: 3900085 - DNA, 25 bp, Homo sapien
agcgccgcgccacggggcgggaggg

SEQ ID NO: 3900086 - DNA, 25 bp, Homo sapien
ggcggccacgaatccaggggttagc

SEQ ID NO: 3900087 - DNA, 25 bp, Homo sapien
ctgagggagtcggagcgccgcgcca

SEQ ID NO: 3900088 - DNA, 25 bp, Homo sapien
acgaatccaggggttagcatctctg

SEQ ID NO: 3900089 - DNA, 25 bp, Homo sapien
ccctgattggctgtgcgtccctgga

SEQ ID NO: 3900090 - DNA, 25 bp, Homo sapien
ggagcccaacttcagtcgctccaga

SEQ ID NO: 3900091 - DNA, 25 bp, Homo sapien
cagcctggccagctggagcggattt

SEQ ID NO: 3900092 - DNA, 25 bp, Homo sapien
ggcccgccaggcgagagcccagcct

SEQ ID NO: 3900093 - DNA, 25 bp, Homo sapien
ctctccgaggcgttgcgtggggggc

SEQ ID NO: 3900094 - DNA, 25 bp, Homo sapien
ccctctccgaggcgttgcgtggggg

SEQ ID NO: 3900095 - DNA, 25 bp, Homo sapien
cctctccgaggcgttgcgtgggggg

SEQ ID NO: 3900096 - DNA, 25 bp, Homo sapien
tctccgaggcgttgcgtggggggca

SEQ ID NO: 3900097 - DNA, 25 bp, Homo sapien
tcttcccccgcagtggaggaatgag

SEQ ID NO: 3900098 - DNA, 25 bp, Homo sapien
cctctccgcgcaggacgcggactgg

SEQ ID NO: 3900099 - DNA, 25 bp, Homo sapien
aggccacgtccacacagagggtgac

SEQ ID NO: 3900100 - DNA, 25 bp, Homo sapien
agagggtgacagaggcatcctctcc

SEQ ID NO: 3900101 - DNA, 25 bp, Homo sapien
tatctctctggattggaacccgcag

SEQ ID NO: 3900102 - DNA, 25 bp, Homo sapien
gagcaaccgtgaaggctggcttcct

SEQ ID NO: 3900103 - DNA, 25 bp, Homo sapien
caggaaattaacagcctcgtgcagg

SEQ ID NO: 3900104 - DNA, 25 bp, Homo sapien
tcgtgcaggcaaggacaaagacaag

SEQ ID NO: 3900105 - DNA, 25 bp, Homo sapien
gtagagaaaccgtcacagttcttag

SEQ ID NO: 3900106 - DNA, 25 bp, Homo sapien
gttgtagagaaaccgtcacagttct

SEQ ID NO: 3900107 - DNA, 25 bp, Homo sapien
catgttgtagagaaaccgtcacagt

SEQ ID NO: 3900108 - DNA, 25 bp, Homo sapien
ctcatgttgtagagaaaccgtcaca

SEQ ID NO: 3900109 - DNA, 25 bp, Homo sapien
tggggtgagacgacagcatagggaa

SEQ ID NO: 3900110 - DNA, 25 bp, Homo sapien
gtgagacgacagcatagggaagaat

SEQ ID NO: 3900111 - DNA, 25 bp, Homo sapien
agagatggggtgagacgacagcata

SEQ ID NO: 3900112 - DNA, 25 bp, Homo sapien
agacgacagcatagggaagaataca

SEQ ID NO: 3900113 - DNA, 25 bp, Homo sapien
tacctgctgtatgccgtttgcttgg

SEQ ID NO: 3900114 - DNA, 25 bp, Homo sapien
taatgaagtgtctataatgattggc

SEQ ID NO: 3900115 - DNA, 25 bp, Homo sapien
tgcttgggacacattaatgaagtgt

SEQ ID NO: 3900116 - DNA, 25 bp, Homo sapien
tcaacatgccctttggcagtaaagg

SEQ ID NO: 3900117 - DNA, 25 bp, Homo sapien
cagcttctcatctagcataggaatt

SEQ ID NO: 3900118 - DNA, 25 bp, Homo sapien
ctagcataggaatttctccacttgc

SEQ ID NO: 3900119 - DNA, 25 bp, Homo sapien
tgtgaacgtggccatacagcttctc

SEQ ID NO: 3900120 - DNA, 25 bp, Homo sapien
ttggtgtaatgatacggaccgtcac

SEQ ID NO: 3900121 - DNA, 25 bp, Homo sapien
gcacccaccttcatgcctggctaat

SEQ ID NO: 3900122 - DNA, 25 bp, Homo sapien
cgggttcgaatgattcttccacctc

SEQ ID NO: 3900123 - DNA, 25 bp, Homo sapien
ttcccgggttcgaatgattcttcca

SEQ ID NO: 3900124 - DNA, 25 bp, Homo sapien
ttccacctcagcctctcaagtagct

SEQ ID NO: 3900125 - DNA, 25 bp, Homo sapien
tggctttaatgccagtgacggcacc

SEQ ID NO: 3900126 - DNA, 25 bp, Homo sapien
taaaattactgaaagcgtatgccag

SEQ ID NO: 3900127 - DNA, 25 bp, Homo sapien
cagtttagctctaccttgactctga

SEQ ID NO: 3900128 - DNA, 25 bp, Homo sapien
cctggagttgtgcactgtaacggcc

SEQ ID NO: 3900129 - DNA, 25 bp, Homo sapien
gctgatactgtcattaatgttcaat

SEQ ID NO: 3900130 - DNA, 25 bp, Homo sapien
aaatccctcatttttgctgatactg

SEQ ID NO: 3900131 - DNA, 25 bp, Homo sapien
tccacattggtctgcattcagctgg

SEQ ID NO: 3900132 - DNA, 25 bp, Homo sapien
ggtgagtcccttatatcaaagccct

SEQ ID NO: 3900133 - DNA, 25 bp, Homo sapien
cttgttgctccagagtttttcttac

SEQ ID NO: 3900134 - DNA, 25 bp, Homo sapien
tcttgttgctccagagtttttctta

SEQ ID NO: 3900135 - DNA, 25 bp, Homo sapien
tgttgctccagagtttttcttactc

SEQ ID NO: 3900136 - DNA, 25 bp, Homo sapien
ttgttgctccagagtttttcttact

SEQ ID NO: 3900137 - DNA, 25 bp, Homo sapien
gcagctgacccggtgctgtagttac

SEQ ID NO: 3900138 - DNA, 25 bp, Homo sapien
gctgacccggtgctgtagttaccat

SEQ ID NO: 3900139 - DNA, 25 bp, Homo sapien
ttctgccctggagcccttagaagac

SEQ ID NO: 3900140 - DNA, 25 bp, Homo sapien
gcccttagaagaccactgcagctga

SEQ ID NO: 3900141 - DNA, 25 bp, Homo sapien
gagctggcaagccattgatgtgtgt

SEQ ID NO: 3900142 - DNA, 25 bp, Homo sapien
gacggcaattcaatagcttctgttg

SEQ ID NO: 3900143 - DNA, 25 bp, Homo sapien
ctgagcatttcaggctgcgagctgg

SEQ ID NO: 3900144 - DNA, 25 bp, Homo sapien
gtgtgtgctcactgacggcaattca

SEQ ID NO: 3900145 - DNA, 25 bp, Homo sapien
tctgccaacatcaactcccctaaga

SEQ ID NO: 3900146 - DNA, 25 bp, Homo sapien
gccaacatcaactcccctaagaacc

SEQ ID NO: 3900147 - DNA, 25 bp, Homo sapien
ctgccaacatcaactcccctaagaa

SEQ ID NO: 3900148 - DNA, 25 bp, Homo sapien
tgccaacatcaactcccctaagaac

SEQ ID NO: 3900149 - DNA, 25 bp, Homo sapien
gtgcttccccagtaaacaccagcgg

SEQ ID NO: 3900150 - DNA, 25 bp, Homo sapien
gcattgtgtggtgtatttcactcca

SEQ ID NO: 3900151 - DNA, 25 bp, Homo sapien
tcagtgtgtgattgaacattccatc

SEQ ID NO: 3900152 - DNA, 25 bp, Homo sapien
acaccagcggggaaacagttaagca

SEQ ID NO: 3900153 - DNA, 25 bp, Homo sapien
tctttccactacaacagctggctga

SEQ ID NO: 3900154 - DNA, 25 bp, Homo sapien
tttccactacaacagctggctgatt

SEQ ID NO: 3900155 - DNA, 25 bp, Homo sapien
ctttctttccactacaacagctggc

SEQ ID NO: 3900156 - DNA, 25 bp, Homo sapien
tccactacaacagctggctgattgc

SEQ ID NO: 3900157 - DNA, 25 bp, Homo sapien
agtctggacaacacacttcaagagt

SEQ ID NO: 3900158 - DNA, 25 bp, Homo sapien
tcttcaacattagaagctctaatgg

SEQ ID NO: 3900159 - DNA, 25 bp, Homo sapien
aagctctaatgggttctgccctggt

SEQ ID NO: 3900160 - DNA, 25 bp, Homo sapien
ctggtgatggcccttccccagtctg

SEQ ID NO: 3900161 - DNA, 25 bp, Homo sapien
tctggatctgaatatcaaagccaac

SEQ ID NO: 3900162 - DNA, 25 bp, Homo sapien
tacagacagcctaggtatctggatc

SEQ ID NO: 3900163 - DNA, 25 bp, Homo sapien
gccacttgctacagaccctgcactg

SEQ ID NO: 3900164 - DNA, 25 bp, Homo sapien
tggggtctgattcccaattgtctga

SEQ ID NO: 3900165 - DNA, 25 bp, Homo sapien
cccatccggactgagcccagatcca

SEQ ID NO: 3900166 - DNA, 25 bp, Homo sapien
tcttcccatccggactgagcccaga

SEQ ID NO: 3900167 - DNA, 25 bp, Homo sapien
ttcccatccggactgagcccagatc

SEQ ID NO: 3900168 - DNA, 25 bp, Homo sapien
catccggactgagcccagatccacc

SEQ ID NO: 3900169 - DNA, 25 bp, Homo sapien
ctgtgagtcttccatgctccataaa

SEQ ID NO: 3900170 - DNA, 25 bp, Homo sapien
cacttgccacgttgttgaaaggaaa

SEQ ID NO: 3900171 - DNA, 25 bp, Homo sapien
gaaattacaacatcacttgccacgt

SEQ ID NO: 3900172 - DNA, 25 bp, Homo sapien
tccatgctccataaagaaattacaa

SEQ ID NO: 3900173 - DNA, 25 bp, Homo sapien
ttgctttcaatctttgcaggtgtag

SEQ ID NO: 3900174 - DNA, 25 bp, Homo sapien
ttggtgtataatctcaatgtgcttg

SEQ ID NO: 3900175 - DNA, 25 bp, Homo sapien
caatctttgcaggtgtagaatacac

SEQ ID NO: 3900176 - DNA, 25 bp, Homo sapien
aatacacctgtatataattggtgta

SEQ ID NO: 3900177 - DNA, 25 bp, Homo sapien
cttgactgtgctgtgcaaactatct

SEQ ID NO: 3900178 - DNA, 25 bp, Homo sapien
gactgtgctgtgcaaactatcttta

SEQ ID NO: 3900179 - DNA, 25 bp, Homo sapien
acttccagaaagtatctctccaaaa

SEQ ID NO: 3900180 - DNA, 25 bp, Homo sapien
agtctaagttatagcccacaaactc

SEQ ID NO: 3900181 - DNA, 25 bp, Homo sapien
cacaaaagtctaagttatagcccac

SEQ ID NO: 3900182 - DNA, 25 bp, Homo sapien
gtttcacaaaagtctaagttatagc

SEQ ID NO: 3900183 - DNA, 25 bp, Homo sapien
ttactgatagtgtttcacaaaagtc

SEQ ID NO: 3900184 - DNA, 25 bp, Homo sapien
gttccccatgggaagtcatagacat

SEQ ID NO: 3900185 - DNA, 25 bp, Homo sapien
ttccgtggagatgcttgggttgtcc

SEQ ID NO: 3900186 - DNA, 25 bp, Homo sapien
taactgcagagtctcttccgtggag

SEQ ID NO: 3900187 - DNA, 25 bp, Homo sapien
tgggttgtcctttacgtaatgtgca

SEQ ID NO: 3900188 - DNA, 25 bp, Homo sapien
gcttcaacacgacgtagctctttgc

SEQ ID NO: 3900189 - DNA, 25 bp, Homo sapien
ctgcttcaacacgacgtagctcttt

SEQ ID NO: 3900190 - DNA, 25 bp, Homo sapien
tttactgcttcaacacgacgtagct

SEQ ID NO: 3900191 - DNA, 25 bp, Homo sapien
tactgcttcaacacgacgtagctct

SEQ ID NO: 3900192 - DNA, 25 bp, Homo sapien
tgtagtcactcagatgcaaacctcc

SEQ ID NO: 3900193 - DNA, 25 bp, Homo sapien
atcaatttcaacacccactgaacaa

SEQ ID NO: 3900194 - DNA, 25 bp, Homo sapien
aaacctccctgaagctcattctctt

SEQ ID NO: 3900195 - DNA, 25 bp, Homo sapien
atttcaacacccactgaacaatcca

SEQ ID NO: 3900196 - DNA, 25 bp, Homo sapien
ctgatttcaaagaatattccaccta

SEQ ID NO: 3900197 - DNA, 25 bp, Homo sapien
gacttcctctggacacttttggcag

SEQ ID NO: 3900198 - DNA, 25 bp, Homo sapien
gaatattccacctaggagagaccca

SEQ ID NO: 3900199 - DNA, 25 bp, Homo sapien
tcaaagaatattccacctaggagag

SEQ ID NO: 3900200 - DNA, 25 bp, Homo sapien
caagttcaggggatctttggtcaac

SEQ ID NO: 3900201 - DNA, 25 bp, Homo sapien
tgagacctctgtccaattgactgac

SEQ ID NO: 3900202 - DNA, 25 bp, Homo sapien
ctgaccatgtacacccatgggcttg

SEQ ID NO: 3900203 - DNA, 25 bp, Homo sapien
gcttggttctcctgtggtccagaaa

SEQ ID NO: 3900204 - DNA, 25 bp, Homo sapien
taatgattgccggtcctcctctccc

SEQ ID NO: 3900205 - DNA, 25 bp, Homo sapien
atgattgccggtcctcctctccctg

SEQ ID NO: 3900206 - DNA, 25 bp, Homo sapien
ctaatgattgccggtcctcctctcc

SEQ ID NO: 3900207 - DNA, 25 bp, Homo sapien
gattgccggtcctcctctccctgat

SEQ ID NO: 3900208 - DNA, 25 bp, Homo sapien
tttgtgctggattaaggttatcctc

SEQ ID NO: 3900209 - DNA, 25 bp, Homo sapien
ttgtgctggattaaggttatcctca

SEQ ID NO: 3900210 - DNA, 25 bp, Homo sapien
cttttgtgctggattaaggttatcc

SEQ ID NO: 3900211 - DNA, 25 bp, Homo sapien
tgtgctggattaaggttatcctcat

SEQ ID NO: 3900212 - DNA, 25 bp, Homo sapien
acaaggatagatctgattcctggca

SEQ ID NO: 3900213 - DNA, 25 bp, Homo sapien
ggtttgcaacaaggatagatctgat

SEQ ID NO: 3900214 - DNA, 25 bp, Homo sapien
gcaacaaggatagatctgattcctg

SEQ ID NO: 3900215 - DNA, 25 bp, Homo sapien
tgtggtttgcaacaaggatagatct

SEQ ID NO: 3900216 - DNA, 25 bp, Homo sapien
gtgtctccttctgcgcaaattcctg

SEQ ID NO: 3900217 - DNA, 25 bp, Homo sapien
ggcctcttgtgtgtcggagcactgc

SEQ ID NO: 3900218 - DNA, 25 bp, Homo sapien
tgcgcaaattcctgagtccaggatg

SEQ ID NO: 3900219 - DNA, 25 bp, Homo sapien
cttgtgtgtcggagcactgcttgga

SEQ ID NO: 3900220 - DNA, 25 bp, Homo sapien
tggagagtatcctttgtgcttggac

SEQ ID NO: 3900221 - DNA, 25 bp, Homo sapien
ctgatatgagttgtttagttttgcc

SEQ ID NO: 3900222 - DNA, 25 bp, Homo sapien
tccatgtccatgatccttggagagt

SEQ ID NO: 3900223 - DNA, 25 bp, Homo sapien
tcaatccaaacctccatgtccatga

SEQ ID NO: 3900224 - DNA, 25 bp, Homo sapien
gccagacttccagcaactttaccaa

SEQ ID NO: 3900225 - DNA, 25 bp, Homo sapien
cagacttccagcaactttaccaaaa

SEQ ID NO: 3900226 - DNA, 25 bp, Homo sapien
aggccagacttccagcaactttacc

SEQ ID NO: 3900227 - DNA, 25 bp, Homo sapien
gacttccagcaactttaccaaaatg

SEQ ID NO: 3900228 - DNA, 25 bp, Homo sapien
taacaatggccatgacaatgtcatt

SEQ ID NO: 3900229 - DNA, 25 bp, Homo sapien
gctgctaacaatggccatgacaatg

SEQ ID NO: 3900230 - DNA, 25 bp, Homo sapien
ctttgctgctaacaatggccatgac

SEQ ID NO: 3900231 - DNA, 25 bp, Homo sapien
ttttagagttgtgaagattgtgtac

SEQ ID NO: 3900232 - DNA, 25 bp, Homo sapien
cagcacctgtgttcttagcaggccc

SEQ ID NO: 3900233 - DNA, 25 bp, Homo sapien
ctgtgttcttagcaggcccagtgga

SEQ ID NO: 3900234 - DNA, 25 bp, Homo sapien
ggctgctatcaattccagtgtgagg

SEQ ID NO: 3900235 - DNA, 25 bp, Homo sapien
cacagcatggctgctatcaattcca

SEQ ID NO: 3900236 - DNA, 25 bp, Homo sapien
caaatcctgggtccaaatgccatct

SEQ ID NO: 3900237 - DNA, 25 bp, Homo sapien
aatcctgggtccaaatgccatctta

SEQ ID NO: 3900238 - DNA, 25 bp, Homo sapien
cctgggtccaaatgccatcttaaca

SEQ ID NO: 3900239 - DNA, 25 bp, Homo sapien
tctctctctaaaccaatgcctgcag

SEQ ID NO: 3900240 - DNA, 25 bp, Homo sapien
gatgagaaggttcgaaagctgggtt

SEQ ID NO: 3900241 - DNA, 25 bp, Homo sapien
ttgggacttggtggaataggcagct

SEQ ID NO: 3900242 - DNA, 25 bp, Homo sapien
gatggcactcgttcaagggtatggc

SEQ ID NO: 3900243 - DNA, 25 bp, Homo sapien
gtcttctcaggggtctgaatgcagg

SEQ ID NO: 3900244 - DNA, 25 bp, Homo sapien
attttgtcaaggcttaggtcaaatt

SEQ ID NO: 3900245 - DNA, 25 bp, Homo sapien
tagaatctcttacattgctgaattg

SEQ ID NO: 3900246 - DNA, 25 bp, Homo sapien
caaggcttaggtcaaatttagaatc

SEQ ID NO: 3900247 - DNA, 25 bp, Homo sapien
ttagttagctagggcacatttaatt

SEQ ID NO: 3900248 - DNA, 25 bp, Homo sapien
gaatcatcagaagtcacaggagccc

SEQ ID NO: 3900249 - DNA, 25 bp, Homo sapien
tctggtttacaagccagcagagtcc

SEQ ID NO: 3900250 - DNA, 25 bp, Homo sapien
tcatggccgagacacaatgtccctg

SEQ ID NO: 3900251 - DNA, 25 bp, Homo sapien
aatgtccctggtgcctccactgtgg

SEQ ID NO: 3900252 - DNA, 25 bp, Homo sapien
gaatatggcatcttgacacagctta

SEQ ID NO: 3900253 - DNA, 25 bp, Homo sapien
cctggaagacatatgcagttgagtc

SEQ ID NO: 3900254 - DNA, 25 bp, Homo sapien
tcattatggccagggaacaactgca

SEQ ID NO: 3900255 - DNA, 25 bp, Homo sapien
tttttaggcaaacagctggtagctc

SEQ ID NO: 3900256 - DNA, 25 bp, Homo sapien
gttgcctgaaccacccttccctcaa

SEQ ID NO: 3900257 - DNA, 25 bp, Homo sapien
tctgttgcctgaaccacccttccct

SEQ ID NO: 3900258 - DNA, 25 bp, Homo sapien
tcctctagcagcctattttcatcct

SEQ ID NO: 3900259 - DNA, 25 bp, Homo sapien
ctggctcctctagcagcctattttc

SEQ ID NO: 3900260 - DNA, 25 bp, Homo sapien
tggtatcctcctccactaccctcat

SEQ ID NO: 3900261 - DNA, 25 bp, Homo sapien
gaacttggtacggcattcacaaaat

SEQ ID NO: 3900262 - DNA, 25 bp, Homo sapien
aacttggtacggcattcacaaaatg

SEQ ID NO: 3900263 - DNA, 25 bp, Homo sapien
cttggtacggcattcacaaaatgtt

SEQ ID NO: 3900264 - DNA, 25 bp, Homo sapien
tcctccactcaatgctttcagccac

SEQ ID NO: 3900265 - DNA, 25 bp, Homo sapien
attcctccactcaatgctttcagcc

SEQ ID NO: 3900266 - DNA, 25 bp, Homo sapien
cattcctccactcaatgctttcagc

SEQ ID NO: 3900267 - DNA, 25 bp, Homo sapien
ttcctccactcaatgctttcagcca

SEQ ID NO: 3900268 - DNA, 25 bp, Homo sapien
caaaaggcaactgtgtgaacagcgc

SEQ ID NO: 3900269 - DNA, 25 bp, Homo sapien
tgcagacctcaagattcccataatg

SEQ ID NO: 3900270 - DNA, 25 bp, Homo sapien
taatcgatgagcaaacttgatcctg

SEQ ID NO: 3900271 - DNA, 25 bp, Homo sapien
gaacagcgcctttgaatttgtggta

SEQ ID NO: 3900272 - DNA, 25 bp, Homo sapien
tctcagtctgtttttcaaaaattgt

SEQ ID NO: 3900273 - DNA, 25 bp, Homo sapien
ctcagtctgtttttcaaaaattgtt

SEQ ID NO: 3900274 - DNA, 25 bp, Homo sapien
gtacagataaagaggtgacaaccaa

SEQ ID NO: 3900275 - DNA, 25 bp, Homo sapien
ggttgtatgggcacaagggcacata

SEQ ID NO: 3900276 - DNA, 25 bp, Homo sapien
gtatgggcacaagggcacatactga

SEQ ID NO: 3900277 - DNA, 25 bp, Homo sapien
gacaaccaaagcagccaggttgtat

SEQ ID NO: 3900278 - DNA, 25 bp, Homo sapien
aacaatggtgttattgcttctgctg

SEQ ID NO: 3900279 - DNA, 25 bp, Homo sapien
ttaacaatggtgttattgcttctgc

SEQ ID NO: 3900280 - DNA, 25 bp, Homo sapien
tgttaacaatggtgttattgcttct

SEQ ID NO: 3900281 - DNA, 25 bp, Homo sapien
taacaatggtgttattgcttctgct

SEQ ID NO: 3900282 - DNA, 25 bp, Homo sapien
tgtggattctaaagatgcatcaggg

SEQ ID NO: 3900283 - DNA, 25 bp, Homo sapien
caccggcgttgggtgaccactcagg

SEQ ID NO: 3900284 - DNA, 25 bp, Homo sapien
gcatcaggggtatgaacatcaaatt

SEQ ID NO: 3900285 - DNA, 25 bp, Homo sapien
acatcaaattgggcaccggcgttgg

SEQ ID NO: 3900286 - DNA, 25 bp, Homo sapien
tcagtggagaaaaatatttttgaaa

SEQ ID NO: 3900287 - DNA, 25 bp, Homo sapien
gaatgatgcttgtacaagcctgctg

SEQ ID NO: 3900288 - DNA, 25 bp, Homo sapien
gcaaggtggatgacaggatgcttat

SEQ ID NO: 3900289 - DNA, 25 bp, Homo sapien
tgagaagacaatgcagtgaatgatg

SEQ ID NO: 3900290 - DNA, 25 bp, Homo sapien
taatgggatcagagcactttctctg

SEQ ID NO: 3900291 - DNA, 25 bp, Homo sapien
tttccagggaatgtctaactgaggg

SEQ ID NO: 3900292 - DNA, 25 bp, Homo sapien
cccacagtgctgctcgtcctgctgc

SEQ ID NO: 3900293 - DNA, 25 bp, Homo sapien
cgtgtgacacattcagctcctgtag

SEQ ID NO: 3900294 - DNA, 25 bp, Homo sapien
tgtgtaggaaggtcagggtgttcca

SEQ ID NO: 3900295 - DNA, 25 bp, Homo sapien
gttctttctccatcgcttcctgtcc

SEQ ID NO: 3900296 - DNA, 25 bp, Homo sapien
aggtatctcagcccagcggaggacc

SEQ ID NO: 3900297 - DNA, 25 bp, Homo sapien
tagtgaggtttcctggatggcagcc

SEQ ID NO: 3900298 - DNA, 25 bp, Homo sapien
cctctgaccatcaggtatctcagcc

SEQ ID NO: 3900299 - DNA, 25 bp, Homo sapien
tcccatagtgaggtttcctggatgg

SEQ ID NO: 3900300 - DNA, 25 bp, Homo sapien
gaggacacaggtccattttcctcac

SEQ ID NO: 3900301 - DNA, 25 bp, Homo sapien
aggacacaggtccattttcctcaca

SEQ ID NO: 3900302 - DNA, 25 bp, Homo sapien
ggacacaggtccattttcctcacac

SEQ ID NO: 3900303 - DNA, 25 bp, Homo sapien
ctgaggacacaggtccattttcctc

SEQ ID NO: 3900304 - DNA, 25 bp, Homo sapien
aggcagggatctagctcctgtgaag

SEQ ID NO: 3900305 - DNA, 25 bp, Homo sapien
cagggatctagctcctgtgaagcag

SEQ ID NO: 3900306 - DNA, 25 bp, Homo sapien
gcagggatctagctcctgtgaagca

SEQ ID NO: 3900307 - DNA, 25 bp, Homo sapien
caggcagggatctagctcctgtgaa

SEQ ID NO: 3900308 - DNA, 25 bp, Homo sapien
gccacaagtagcctgtaccagctgt

SEQ ID NO: 3900309 - DNA, 25 bp, Homo sapien
ccacaagtagcctgtaccagctgtg

SEQ ID NO: 3900310 - DNA, 25 bp, Homo sapien
ggccacaagtagcctgtaccagctg

SEQ ID NO: 3900311 - DNA, 25 bp, Homo sapien
cctgagcattcacagggccctgaag

SEQ ID NO: 3900312 - DNA, 25 bp, Homo sapien
cacactcctcctcataaccctttgg

SEQ ID NO: 3900313 - DNA, 25 bp, Homo sapien
ggccctgaagatcagagcagccatc

SEQ ID NO: 3900314 - DNA, 25 bp, Homo sapien
gcatctcagcctgagcattcacagg

SEQ ID NO: 3900315 - DNA, 25 bp, Homo sapien
taggaatgtgctcggtcatgggtgg

SEQ ID NO: 3900316 - DNA, 25 bp, Homo sapien
ctctcctctcggcatcccagtgccc

SEQ ID NO: 3900317 - DNA, 25 bp, Homo sapien
ggccagttctatccccagggtaata

SEQ ID NO: 3900318 - DNA, 25 bp, Homo sapien
aaagtggggctgtactttgagctac

SEQ ID NO: 3900319 - DNA, 25 bp, Homo sapien
ggctgtactttgagctacacagcca

SEQ ID NO: 3900320 - DNA, 25 bp, Homo sapien
tctatccccagggtaataataagaa

SEQ ID NO: 3900321 - DNA, 25 bp, Homo sapien
aaataaacttggcccagatctctcc

SEQ ID NO: 3900322 - DNA, 25 bp, Homo sapien
taaacttggcccagatctctcctgt

SEQ ID NO: 3900323 - DNA, 25 bp, Homo sapien
aacttggcccagatctctcctgtct

SEQ ID NO: 3900324 - DNA, 25 bp, Homo sapien
gaaaaataaacttggcccagatctc

SEQ ID NO: 3900325 - DNA, 25 bp, Homo sapien
gtttcttgatggactgtgaacccca

SEQ ID NO: 3900326 - DNA, 25 bp, Homo sapien
gatgacgcgtcaagcctggctggtt

SEQ ID NO: 3900327 - DNA, 25 bp, Homo sapien
gggcccacatgtgtctgcattactt

SEQ ID NO: 3900328 - DNA, 25 bp, Homo sapien
gtctgcattacttcctgtgcagtct

SEQ ID NO: 3900329 - DNA, 25 bp, Homo sapien
tgacaatttggacaaacctcaacct

SEQ ID NO: 3900330 - DNA, 25 bp, Homo sapien
tcttttccgagtccattctctgttc

SEQ ID NO: 3900331 - DNA, 25 bp, Homo sapien
tagcatctttcctggccacgttttt

SEQ ID NO: 3900332 - DNA, 25 bp, Homo sapien
tctctgttctctaagaccagtggga

SEQ ID NO: 3900333 - DNA, 25 bp, Homo sapien
cagggagagtggcagcatgcaaagg

SEQ ID NO: 3900334 - DNA, 25 bp, Homo sapien
ctaggcacacatggcagggagagtg

SEQ ID NO: 3900335 - DNA, 25 bp, Homo sapien
gggagagtggcagcatgcaaaggcc

SEQ ID NO: 3900336 - DNA, 25 bp, Homo sapien
ggcagggagagtggcagcatgcaaa

SEQ ID NO: 3900337 - DNA, 25 bp, Homo sapien
tggcaaaacaaatgattctttcacc

SEQ ID NO: 3900338 - DNA, 25 bp, Homo sapien
tagcatccatcaccgtcggctcaga

SEQ ID NO: 3900339 - DNA, 25 bp, Homo sapien
tttcaccacatgaagagctgcccct

SEQ ID NO: 3900340 - DNA, 25 bp, Homo sapien
ccctcctctctctaaattggtagca

SEQ ID NO: 3900341 - DNA, 25 bp, Homo sapien
aggagcacttccctgtcagagccac

SEQ ID NO: 3900342 - DNA, 25 bp, Homo sapien
agggtgaaggcagatacagcattct

SEQ ID NO: 3900343 - DNA, 25 bp, Homo sapien
cattcttgcaaagggacctaggagg

SEQ ID NO: 3900344 - DNA, 25 bp, Homo sapien
ggtgaaggcagatacagcattcttg

SEQ ID NO: 3900345 - DNA, 25 bp, Homo sapien
tacagcattcttgcaaagggaccta

SEQ ID NO: 3900346 - DNA, 25 bp, Homo sapien
gcacagtgcaggccatcttgaatat

SEQ ID NO: 3900347 - DNA, 25 bp, Homo sapien
tcttgaatatcctcagttaaagctt

SEQ ID NO: 3900348 - DNA, 25 bp, Homo sapien
ctggccagcctaagggtcctgtggg

SEQ ID NO: 3900349 - DNA, 25 bp, Homo sapien
ctatccatgatagctaggccagcac

SEQ ID NO: 3900350 - DNA, 25 bp, Homo sapien
tacatattcttctagcttagcccag

SEQ ID NO: 3900351 - DNA, 25 bp, Homo sapien
taaaagctcagtggaaaggcctgtg

SEQ ID NO: 3900352 - DNA, 25 bp, Homo sapien
gagctctttggcaagctactctctc

SEQ ID NO: 3900353 - DNA, 25 bp, Homo sapien
cgagtttgcagataagcacttttct

SEQ ID NO: 3900354 - DNA, 25 bp, Homo sapien
gccccatggattggctgtagaagag

SEQ ID NO: 3900355 - DNA, 25 bp, Homo sapien
atggcaaaacctctaccccaggcct

SEQ ID NO: 3900356 - DNA, 25 bp, Homo sapien
gcctctgcaggttgccccatggatt

SEQ ID NO: 3900357 - DNA, 25 bp, Homo sapien
ctttaactttgttgaatgttggaat

SEQ ID NO: 3900358 - DNA, 25 bp, Homo sapien
tgaaaatagaattgctgtatacatg

SEQ ID NO: 3900359 - DNA, 25 bp, Homo sapien
catgtcagcttgatctgggaaggct

SEQ ID NO: 3900360 - DNA, 25 bp, Homo sapien
tagatgtagaatggcctgagttaaa

SEQ ID NO: 3900361 - DNA, 25 bp, Homo sapien
tgcaggtagatgtagaatggcctga

SEQ ID NO: 3900362 - DNA, 25 bp, Homo sapien
atctggtataaggacccagaggcca

SEQ ID NO: 3900363 - DNA, 25 bp, Homo sapien
gcatctggtataaggacccagaggc

SEQ ID NO: 3900364 - DNA, 25 bp, Homo sapien
tgagcatctggtataaggacccaga

SEQ ID NO: 3900365 - DNA, 25 bp, Homo sapien
ctttgagcatctggtataaggaccc

SEQ ID NO: 3900366 - DNA, 25 bp, Homo sapien
cttgacttgccatcaaatttactca

SEQ ID NO: 3900367 - DNA, 25 bp, Homo sapien
ttgacttgccatcaaatttactcat

SEQ ID NO: 3900368 - DNA, 25 bp, Homo sapien
taaggttgcactttcataaagatct

SEQ ID NO: 3900369 - DNA, 25 bp, Homo sapien
ctgcctttgaatcacttaaggttgc

SEQ ID NO: 3900370 - DNA, 25 bp, Homo sapien
ctcactacttcctcgcctaccctca

SEQ ID NO: 3900371 - DNA, 25 bp, Homo sapien
tcacttaaggttgcactttcataaa

SEQ ID NO: 3900372 - DNA, 25 bp, Homo sapien
ccagggtcagggatatcggaagcac

SEQ ID NO: 3900373 - DNA, 25 bp, Homo sapien
ccccattgaatgtgacactcagagc

SEQ ID NO: 3900374 - DNA, 25 bp, Homo sapien
ggatatcggaagcaccatcattaaa

SEQ ID NO: 3900375 - DNA, 25 bp, Homo sapien
tttccccattgaatgtgacactcag

SEQ ID NO: 3900376 - DNA, 25 bp, Homo sapien
aatctggcttgaagcgctggagctg

SEQ ID NO: 3900377 - DNA, 25 bp, Homo sapien
gaaaatctggcttgaagcgctggag

SEQ ID NO: 3900378 - DNA, 25 bp, Homo sapien
ctgaaaatctggcttgaagcgctgg

SEQ ID NO: 3900379 - DNA, 25 bp, Homo sapien
aaaatctggcttgaagcgctggagc

SEQ ID NO: 3900380 - DNA, 25 bp, Homo sapien
tcttcaggcttatcaaggtgctctg

SEQ ID NO: 3900381 - DNA, 25 bp, Homo sapien
tcagtgtgcagagtcatgaaccagg

SEQ ID NO: 3900382 - DNA, 25 bp, Homo sapien
ccaaattgttgacgaaatggttgaa

SEQ ID NO: 3900383 - DNA, 25 bp, Homo sapien
aagaacacaatctcctcttcaggct

SEQ ID NO: 3900384 - DNA, 25 bp, Homo sapien
tcacatttggtctggttggagcccc

SEQ ID NO: 3900385 - DNA, 25 bp, Homo sapien
tcatatcacatttggtctggttgga

SEQ ID NO: 3900386 - DNA, 25 bp, Homo sapien
tatcacatttggtctggttggagcc

SEQ ID NO: 3900387 - DNA, 25 bp, Homo sapien
catatcacatttggtctggttggag

SEQ ID NO: 3900388 - DNA, 25 bp, Homo sapien
tgtggcttctgttgtccttgccggc

SEQ ID NO: 3900389 - DNA, 25 bp, Homo sapien
cacaggcttggccacagttggctgg

SEQ ID NO: 3900390 - DNA, 25 bp, Homo sapien
ctagggaccagcatgtgccacagat

SEQ ID NO: 3900391 - DNA, 25 bp, Homo sapien
ccttgccggctggccacaggcttgg

SEQ ID NO: 3900392 - DNA, 25 bp, Homo sapien
tgtgctgatctggagccctcgtgcc

SEQ ID NO: 3900393 - DNA, 25 bp, Homo sapien
tgatctggagccctcgtgcccaatg

SEQ ID NO: 3900394 - DNA, 25 bp, Homo sapien
tgctgatctggagccctcgtgccca

SEQ ID NO: 3900395 - DNA, 25 bp, Homo sapien
ctgtgctgatctggagccctcgtgc

SEQ ID NO: 3900396 - DNA, 25 bp, Homo sapien
tcccggagggatacatgatggtgat

SEQ ID NO: 3900397 - DNA, 25 bp, Homo sapien
ttcagagacttctgaatggttatgt

SEQ ID NO: 3900398 - DNA, 25 bp, Homo sapien
tgatctgcggatattttcagagtca

SEQ ID NO: 3900399 - DNA, 25 bp, Homo sapien
ttttcagagtcactccatttgattt

SEQ ID NO: 3900400 - DNA, 25 bp, Homo sapien
ctctggaagataagtagggtcaggt

SEQ ID NO: 3900401 - DNA, 25 bp, Homo sapien
gcctctggaagataagtagggtcag

SEQ ID NO: 3900402 - DNA, 25 bp, Homo sapien
gaatccagaacagtgattgcctctg

SEQ ID NO: 3900403 - DNA, 25 bp, Homo sapien
ctcgtggtgagagaatccagaacag

SEQ ID NO: 3900404 - DNA, 25 bp, Homo sapien
gagccacagattcccctggtaaggc

SEQ ID NO: 3900405 - DNA, 25 bp, Homo sapien
tcatcagtttcaggacccatgaaga

SEQ ID NO: 3900406 - DNA, 25 bp, Homo sapien
aggaggattcccctgacacaaggct

SEQ ID NO: 3900407 - DNA, 25 bp, Homo sapien
ggctcacaagcactgacaattcact

SEQ ID NO: 3900408 - DNA, 25 bp, Homo sapien
accgcatcactgagggaatgaccct

SEQ ID NO: 3900409 - DNA, 25 bp, Homo sapien
atcactgagggaatgaccctcatgg

SEQ ID NO: 3900410 - DNA, 25 bp, Homo sapien
gcatcactgagggaatgaccctcat

SEQ ID NO: 3900411 - DNA, 25 bp, Homo sapien
ctttaccgcatcactgagggaatga

SEQ ID NO: 3900412 - DNA, 25 bp, Homo sapien
tctccacgaccttctgctactacta

SEQ ID NO: 3900413 - DNA, 25 bp, Homo sapien
cctggctgtctttccggagctttcc

SEQ ID NO: 3900414 - DNA, 25 bp, Homo sapien
ggctgtctttccggagctttcccag

SEQ ID NO: 3900415 - DNA, 25 bp, Homo sapien
ctctccacgaccttctgctactact

SEQ ID NO: 3900416 - DNA, 25 bp, Homo sapien
gctttgtggagcagtctctcatgaa

SEQ ID NO: 3900417 - DNA, 25 bp, Homo sapien
tcctgaatctgttcgcttcttctct

SEQ ID NO: 3900418 - DNA, 25 bp, Homo sapien
gagcagtctctcatgaattgacttc

SEQ ID NO: 3900419 - DNA, 25 bp, Homo sapien
agcaagctttgtggagcagtctctc

SEQ ID NO: 3900420 - DNA, 25 bp, Homo sapien
ttcagcattgggtcttccctggatg

SEQ ID NO: 3900421 - DNA, 25 bp, Homo sapien
cgtgctaagaattttgacattggga

SEQ ID NO: 3900422 - DNA, 25 bp, Homo sapien
cctgggagcgtgctaagaattttga

SEQ ID NO: 3900423 - DNA, 25 bp, Homo sapien
gagcgtgctaagaattttgacattg

SEQ ID NO: 3900424 - DNA, 25 bp, Homo sapien
tgggagcgtgctaagaattttgaca

SEQ ID NO: 3900425 - DNA, 25 bp, Homo sapien
cagatgtagtctgctctggtgcctc

SEQ ID NO: 3900426 - DNA, 25 bp, Homo sapien
tagtcccatattcctgtagtgtttg

SEQ ID NO: 3900427 - DNA, 25 bp, Homo sapien
cattaaacgccagatttcagggaag

SEQ ID NO: 3900428 - DNA, 25 bp, Homo sapien
tctggtccaatctggtcccttggaa

SEQ ID NO: 3900429 - DNA, 25 bp, Homo sapien
gaacacagggtaggtgggaatacta

SEQ ID NO: 3900430 - DNA, 25 bp, Homo sapien
tagaaggcttgatgagagggcaccc

SEQ ID NO: 3900431 - DNA, 25 bp, Homo sapien
gcaagcaggcataggatttgaggaa

SEQ ID NO: 3900432 - DNA, 25 bp, Homo sapien
tgataagtccaaggaagtgggctgc

SEQ ID NO: 3900433 - DNA, 25 bp, Homo sapien
tgagagtgcagggagtctagccact

SEQ ID NO: 3900434 - DNA, 25 bp, Homo sapien
tctacccgttgagagaatgcttcga

SEQ ID NO: 3900435 - DNA, 25 bp, Homo sapien
tctagccacttttctacccgttgag

SEQ ID NO: 3900436 - DNA, 25 bp, Homo sapien
gagaatgcttcgattttcatgcaac

SEQ ID NO: 3900437 - DNA, 25 bp, Homo sapien
tatggttgctcgtggcaggtcatcc

SEQ ID NO: 3900438 - DNA, 25 bp, Homo sapien
ttacagtaaggtgctctttgcggtg

SEQ ID NO: 3900439 - DNA, 25 bp, Homo sapien
gctctttgcggtgtatggttgctcg

SEQ ID NO: 3900440 - DNA, 25 bp, Homo sapien
gtcatccacttatcttctctgtaga

SEQ ID NO: 3900441 - DNA, 25 bp, Homo sapien
gcgggccagcttggacatatttaca

SEQ ID NO: 3900442 - DNA, 25 bp, Homo sapien
catctcgcagttggcaggatgtcct

SEQ ID NO: 3900443 - DNA, 25 bp, Homo sapien
gcatggcctaccatccttcaagcgg

SEQ ID NO: 3900444 - DNA, 25 bp, Homo sapien
tctctggagcctatgcatgcatctg

SEQ ID NO: 3900445 - DNA, 25 bp, Homo sapien
tctatcactcgtacctccttgacat

SEQ ID NO: 3900446 - DNA, 25 bp, Homo sapien
tgggctctatcactcgtacctcctt

SEQ ID NO: 3900447 - DNA, 25 bp, Homo sapien
ggctctatcactcgtacctccttga

SEQ ID NO: 3900448 - DNA, 25 bp, Homo sapien
tgtgggctctatcactcgtacctcc

SEQ ID NO: 3900449 - DNA, 25 bp, Homo sapien
agatggactctacatggctttctgg

SEQ ID NO: 3900450 - DNA, 25 bp, Homo sapien
tctgccaattatgacacatctctat

SEQ ID NO: 3900451 - DNA, 25 bp, Homo sapien
ggcttctgccaattatgacacatct

SEQ ID NO: 3900452 - DNA, 25 bp, Homo sapien
agatgctggcttctgccaattatga

SEQ ID NO: 3900453 - DNA, 25 bp, Homo sapien
tgaatctgaataacccgagggttcc

SEQ ID NO: 3900454 - DNA, 25 bp, Homo sapien
ctgaatctgaataacccgagggttc

SEQ ID NO: 3900455 - DNA, 25 bp, Homo sapien
tctgaatctgaataacccgagggtt

SEQ ID NO: 3900456 - DNA, 25 bp, Homo sapien
cagtgttaaggggactgttagcttc

SEQ ID NO: 3900457 - DNA, 25 bp, Homo sapien
ctctactactctgggactcagacgc

SEQ ID NO: 3900458 - DNA, 25 bp, Homo sapien
ggactcagacgctcttggatatcat

SEQ ID NO: 3900459 - DNA, 25 bp, Homo sapien
tatcattgtcttgatgtggctttct

SEQ ID NO: 3900460 - DNA, 25 bp, Homo sapien
cgtaaacgagatcaaatagactctg

SEQ ID NO: 3900461 - DNA, 25 bp, Homo sapien
tttgcagagtgcttaaaaaagtctc

SEQ ID NO: 3900462 - DNA, 25 bp, Homo sapien
catgggcgagccttggaaatttcag

SEQ ID NO: 3900463 - DNA, 25 bp, Homo sapien
tactgcaccaagttctgctaagaga

SEQ ID NO: 3900464 - DNA, 25 bp, Homo sapien
acacagtagtgttggcgtcaggctc

SEQ ID NO: 3900465 - DNA, 25 bp, Homo sapien
caacactaatcagcaggcaggaagc

SEQ ID NO: 3900466 - DNA, 25 bp, Homo sapien
agccaaggattcagccaacacgtgc

SEQ ID NO: 3900467 - DNA, 25 bp, Homo sapien
acgtgcagggcattttggacatcca

SEQ ID NO: 3900468 - DNA, 25 bp, Homo sapien
tggagcggtctcttgtcaaacaatt

SEQ ID NO: 3900469 - DNA, 25 bp, Homo sapien
tgtcctgttctgatcatgaggctgc

SEQ ID NO: 3900470 - DNA, 25 bp, Homo sapien
aagaagagtgcaccctggagcggtc

SEQ ID NO: 3900471 - DNA, 25 bp, Homo sapien
ctgctattgggataagtggacctaa

SEQ ID NO: 3900472 - DNA, 25 bp, Homo sapien
ggttcacgccattcagtccattgct

SEQ ID NO: 3900473 - DNA, 25 bp, Homo sapien
tcatgtggttcacgccattcagtcc

SEQ ID NO: 3900474 - DNA, 25 bp, Homo sapien
tgtggttcacgccattcagtccatt

SEQ ID NO: 3900475 - DNA, 25 bp, Homo sapien
gcatcatgtggttcacgccattcag

SEQ ID NO: 3900476 - DNA, 25 bp, Homo sapien
tcttttctcactggtagggacactc

SEQ ID NO: 3900477 - DNA, 25 bp, Homo sapien
ggacaagtctatctggtgcaacccg

SEQ ID NO: 3900478 - DNA, 25 bp, Homo sapien
cggactccaggctaaagctctgact

SEQ ID NO: 3900479 - DNA, 25 bp, Homo sapien
gctctgacttctttggtctggacaa

SEQ ID NO: 3900480 - DNA, 25 bp, Homo sapien
gtgttaaaaggagaatatgggaaga

SEQ ID NO: 3900481 - DNA, 25 bp, Homo sapien
aaagatggtgttaaaaggagaatat

SEQ ID NO: 3900482 - DNA, 25 bp, Homo sapien
gttaaaaggagaatatgggaagagc

SEQ ID NO: 3900483 - DNA, 25 bp, Homo sapien
tgggaaagatggtgttaaaaggaga

SEQ ID NO: 3900484 - DNA, 25 bp, Homo sapien
tagaaacactgctgttgggatgctt

SEQ ID NO: 3900485 - DNA, 25 bp, Homo sapien
agaaacactgctgttgggatgcttt

SEQ ID NO: 3900486 - DNA, 25 bp, Homo sapien
ttagaaacactgctgttgggatgct

SEQ ID NO: 3900487 - DNA, 25 bp, Homo sapien
aggctggcagagatattgataaaac

SEQ ID NO: 3900488 - DNA, 25 bp, Homo sapien
tcagcgatctcagctcttgtgcctg

SEQ ID NO: 3900489 - DNA, 25 bp, Homo sapien
taaaacagctttgagaaagcacagc

SEQ ID NO: 3900490 - DNA, 25 bp, Homo sapien
ggccttgtcagcgatctcagctctt

SEQ ID NO: 3900491 - DNA, 25 bp, Homo sapien
acagcacactgtggtgcctcaagac

SEQ ID NO: 3900492 - DNA, 25 bp, Homo sapien
gggaaatatcattcccttaaatgca

SEQ ID NO: 3900493 - DNA, 25 bp, Homo sapien
taactctgagagtgatctatttgcc

SEQ ID NO: 3900494 - DNA, 25 bp, Homo sapien
tctatttgccaatagcaatactaca

SEQ ID NO: 3900495 - DNA, 25 bp, Homo sapien
tggatataaaagttggcgggctcga

SEQ ID NO: 3900496 - DNA, 25 bp, Homo sapien
tgcaggaatttacttaggcgatggc

SEQ ID NO: 3900497 - DNA, 25 bp, Homo sapien
ggcaacttgttactcctcacagaca

SEQ ID NO: 3900498 - DNA, 25 bp, Homo sapien
tgaaaacaacaaccgctgaaggctg

SEQ ID NO: 3900499 - DNA, 25 bp, Homo sapien
tgaaggctgattaagatgaggcaac

SEQ ID NO: 3900500 - DNA, 25 bp, Homo sapien
gcctggagctctccagctgtagcac

SEQ ID NO: 3900501 - DNA, 25 bp, Homo sapien
ggtgcctggagctctccagctgtag

SEQ ID NO: 3900502 - DNA, 25 bp, Homo sapien
tgcctggagctctccagctgtagca

SEQ ID NO: 3900503 - DNA, 25 bp, Homo sapien
ctggtgcctggagctctccagctgt

SEQ ID NO: 3900504 - DNA, 25 bp, Homo sapien
gggacagttcctgccagagccaaat

SEQ ID NO: 3900505 - DNA, 25 bp, Homo sapien
cagttgtcaggacttctgactccca

SEQ ID NO: 3900506 - DNA, 25 bp, Homo sapien
gagccaaatgtcactggaatgccag

SEQ ID NO: 3900507 - DNA, 25 bp, Homo sapien
ggttttctggccatgccgtcagttg

SEQ ID NO: 3900508 - DNA, 25 bp, Homo sapien
cattccattcgcactgagcaggtgt

SEQ ID NO: 3900509 - DNA, 25 bp, Homo sapien
gacagataccgatcatcagatgcag

SEQ ID NO: 3900510 - DNA, 25 bp, Homo sapien
gacacagaaattccgtgcaccatta

SEQ ID NO: 3900511 - DNA, 25 bp, Homo sapien
gtgcaccattaagcttcaaaaccca

SEQ ID NO: 3900512 - DNA, 25 bp, Homo sapien
catccacacaatgggtcctccacaa

SEQ ID NO: 3900513 - DNA, 25 bp, Homo sapien
ctgcatagtgtgtgtgaggagcctt

SEQ ID NO: 3900514 - DNA, 25 bp, Homo sapien
cacacaatgggtcctccacaaatgc

SEQ ID NO: 3900515 - DNA, 25 bp, Homo sapien
cctgcatagtgtgtgtgaggagcct

SEQ ID NO: 3900516 - DNA, 25 bp, Homo sapien
attttgcccacagtcgtgaaagcta

SEQ ID NO: 3900517 - DNA, 25 bp, Homo sapien
tgcccacagtcgtgaaagctaatgg

SEQ ID NO: 3900518 - DNA, 25 bp, Homo sapien
gtcgtgaaagctaatggcatcattt

SEQ ID NO: 3900519 - DNA, 25 bp, Homo sapien
cacagtcgtgaaagctaatggcatc

SEQ ID NO: 3900520 - DNA, 25 bp, Homo sapien
aaatcaaagaggctgttttcagctg

SEQ ID NO: 3900521 - DNA, 25 bp, Homo sapien
ggcatcagctgcattatcttttact

SEQ ID NO: 3900522 - DNA, 25 bp, Homo sapien
gggctgggacttccataagcttttc

SEQ ID NO: 3900523 - DNA, 25 bp, Homo sapien
cttttactctgttggactctgctag

SEQ ID NO: 3900524 - DNA, 25 bp, Homo sapien
gataacgagattaacagctctgtct

SEQ ID NO: 3900525 - DNA, 25 bp, Homo sapien
gcaatccggttgctaatgtttgttt

SEQ ID NO: 3900526 - DNA, 25 bp, Homo sapien
taagaaaagccagtgggctcccaga

SEQ ID NO: 3900527 - DNA, 25 bp, Homo sapien
tgcatattgttagctgcaatccggt

SEQ ID NO: 3900528 - DNA, 25 bp, Homo sapien
tttctgttcacacttcaagacaacc

SEQ ID NO: 3900529 - DNA, 25 bp, Homo sapien
gggagctacccccagtgctgcctgg

SEQ ID NO: 3900530 - DNA, 25 bp, Homo sapien
tgaccctatttgcttttgccagagc

SEQ ID NO: 3900531 - DNA, 25 bp, Homo sapien
tttgcagcttctccgggatacgggg

SEQ ID NO: 3900532 - DNA, 25 bp, Homo sapien
tcttgtcttcctgtaacctttgaac

SEQ ID NO: 3900533 - DNA, 25 bp, Homo sapien
cctgtaacctttgaactgagatctg

SEQ ID NO: 3900534 - DNA, 25 bp, Homo sapien
gccatactggaaaatgagctaaatg

SEQ ID NO: 3900535 - DNA, 25 bp, Homo sapien
cagcatcccgccatactggaaaatg

SEQ ID NO: 3900536 - DNA, 25 bp, Homo sapien
ccttcaggagctcaaggtcaagtga

SEQ ID NO: 3900537 - DNA, 25 bp, Homo sapien
caagtgagagagacccatcatggac

SEQ ID NO: 3900538 - DNA, 25 bp, Homo sapien
aattgagatggaatcatccttcagg

SEQ ID NO: 3900539 - DNA, 25 bp, Homo sapien
taccggttgacatgaaatgaccaag

SEQ ID NO: 3900540 - DNA, 25 bp, Homo sapien
tcatcggttcacagatgtctgatcg

SEQ ID NO: 3900541 - DNA, 25 bp, Homo sapien
cacagatgtctgatcgtctttgttg

SEQ ID NO: 3900542 - DNA, 25 bp, Homo sapien
tcggttcacagatgtctgatcgtct

SEQ ID NO: 3900543 - DNA, 25 bp, Homo sapien
tgtctgatcgtctttgttgagctgt

SEQ ID NO: 3900544 - DNA, 25 bp, Homo sapien
ctggttgaggtcgaggctctgcctt

SEQ ID NO: 3900545 - DNA, 25 bp, Homo sapien
ctagcaaatggtataaacaaagtga

SEQ ID NO: 3900546 - DNA, 25 bp, Homo sapien
tcctggttgaggtcgaggctctgcc

SEQ ID NO: 3900547 - DNA, 25 bp, Homo sapien
caaatggtataaacaaagtgaccca

SEQ ID NO: 3900548 - DNA, 25 bp, Homo sapien
aggtcccaccttttgcacagatgtt

SEQ ID NO: 3900549 - DNA, 25 bp, Homo sapien
tgttctccttaactgcatggaaacc

SEQ ID NO: 3900550 - DNA, 25 bp, Homo sapien
tggcttttctgttacaaaggtccca

SEQ ID NO: 3900551 - DNA, 25 bp, Homo sapien
acagtggctctgtggtttgagttct

SEQ ID NO: 3900552 - DNA, 25 bp, Homo sapien
gctataggatgcagaacccactggc

SEQ ID NO: 3900553 - DNA, 25 bp, Homo sapien
ccagcagggcagttacatgcaccaa

SEQ ID NO: 3900554 - DNA, 25 bp, Homo sapien
ggatacagctataggatgcagaacc

SEQ ID NO: 3900555 - DNA, 25 bp, Homo sapien
catgcaccaaggatacagctatagg

SEQ ID NO: 3900556 - DNA, 25 bp, Homo sapien
gcagttacttcccacacgcatgaat

SEQ ID NO: 3900557 - DNA, 25 bp, Homo sapien
gagatgcagttacttcccacacgca

SEQ ID NO: 3900558 - DNA, 25 bp, Homo sapien
gatgcagttacttcccacacgcatg

SEQ ID NO: 3900559 - DNA, 25 bp, Homo sapien
ttacttcccacacgcatgaatggca

SEQ ID NO: 3900560 - DNA, 25 bp, Homo sapien
cagaagagggaccatctgattgtgt

SEQ ID NO: 3900561 - DNA, 25 bp, Homo sapien
agaagagggaccatctgattgtgtt

SEQ ID NO: 3900562 - DNA, 25 bp, Homo sapien
acagaagagggaccatctgattgtg

SEQ ID NO: 3900563 - DNA, 25 bp, Homo sapien
cacagaagagggaccatctgattgt

SEQ ID NO: 3900564 - DNA, 25 bp, Homo sapien
catgccagacaccacctaggtgctg

SEQ ID NO: 3900565 - DNA, 25 bp, Homo sapien
cttccctggtcataacagttcctgt

SEQ ID NO: 3900566 - DNA, 25 bp, Homo sapien
actgaatgcaccagtgagtcctgaa

SEQ ID NO: 3900567 - DNA, 25 bp, Homo sapien
gaagactcgaaatctgactccattc

SEQ ID NO: 3900568 - DNA, 25 bp, Homo sapien
caaaccagctcaattcggaaaacat

SEQ ID NO: 3900569 - DNA, 25 bp, Homo sapien
tgctcagaacgctgtttaatctcct

SEQ ID NO: 3900570 - DNA, 25 bp, Homo sapien
agagtcggactctaaaatttggtgc

SEQ ID NO: 3900571 - DNA, 25 bp, Homo sapien
tatacgtgtccagtctgatggagag

SEQ ID NO: 3900572 - DNA, 25 bp, Homo sapien
gaattcccatgtgagagaaagtcgc

SEQ ID NO: 3900573 - DNA, 25 bp, Homo sapien
gagaattcccatgtgagagaaagtc

SEQ ID NO: 3900574 - DNA, 25 bp, Homo sapien
agtgagaattcccatgtgagagaaa

SEQ ID NO: 3900575 - DNA, 25 bp, Homo sapien
tcccatgtgagagaaagtcgctttt

SEQ ID NO: 3900576 - DNA, 25 bp, Homo sapien
ccaagtaagatcttgctacattcat

SEQ ID NO: 3900577 - DNA, 25 bp, Homo sapien
gctctggattttataaccaagtaag

SEQ ID NO: 3900578 - DNA, 25 bp, Homo sapien
ccatgcctggaccttcaggattgaa

SEQ ID NO: 3900579 - DNA, 25 bp, Homo sapien
gcgagtgatgttccatcacccatgc

SEQ ID NO: 3900580 - DNA, 25 bp, Homo sapien
atggctgcaaagcactgttctcttc

SEQ ID NO: 3900581 - DNA, 25 bp, Homo sapien
catggctgcaaagcactgttctctt

SEQ ID NO: 3900582 - DNA, 25 bp, Homo sapien
tggctgcaaagcactgttctcttcc

SEQ ID NO: 3900583 - DNA, 25 bp, Homo sapien
tcatggctgcaaagcactgttctct

SEQ ID NO: 3900584 - DNA, 25 bp, Homo sapien
ccctgaaagtatatgaaaagctgcc

SEQ ID NO: 3900585 - DNA, 25 bp, Homo sapien
gcatgcgtgggatgtgcaagaccca

SEQ ID NO: 3900586 - DNA, 25 bp, Homo sapien
gatgggaactacatggaattcgcag

SEQ ID NO: 3900587 - DNA, 25 bp, Homo sapien
gaaggcagtatgcacgatgggaact

SEQ ID NO: 3900588 - DNA, 25 bp, Homo sapien
agagctctggtggccgttttgtgta

SEQ ID NO: 3900589 - DNA, 25 bp, Homo sapien
ggtggccgttttgtgtatgagtaaa

SEQ ID NO: 3900590 - DNA, 25 bp, Homo sapien
gtaaatgggagcgatggaagcagtt

SEQ ID NO: 3900591 - DNA, 25 bp, Homo sapien
tgagtaaatgggagcgatggaagca

SEQ ID NO: 3900592 - DNA, 25 bp, Homo sapien
tgagctcctcttctcgtgccaagcc

SEQ ID NO: 3900593 - DNA, 25 bp, Homo sapien
tctgagctcctcttctcgtgccaag

SEQ ID NO: 3900594 - DNA, 25 bp, Homo sapien
ctctgagctcctcttctcgtgccaa

SEQ ID NO: 3900595 - DNA, 25 bp, Homo sapien
gctcctcttctcgtgccaagcccat

SEQ ID NO: 3900596 - DNA, 25 bp, Homo sapien
ttcaaactcagtgtacaacacagcc

SEQ ID NO: 3900597 - DNA, 25 bp, Homo sapien
gacccttcaaactcagtgtacaaca

SEQ ID NO: 3900598 - DNA, 25 bp, Homo sapien
actcagtgtacaacacagcctcttg

SEQ ID NO: 3900599 - DNA, 25 bp, Homo sapien
gggacccttcaaactcagtgtacaa

SEQ ID NO: 3900600 - DNA, 25 bp, Homo sapien
aagaaagtcgcatctggacctccgg

SEQ ID NO: 3900601 - DNA, 25 bp, Homo sapien
gcaatgttgatgctgccctgcagcc

SEQ ID NO: 3900602 - DNA, 25 bp, Homo sapien
gaagtcatccctactgatggagcct

SEQ ID NO: 3900603 - DNA, 25 bp, Homo sapien
aagctgcccgtggagtcaggaagtc

SEQ ID NO: 3900604 - DNA, 25 bp, Homo sapien
gaacagtccatttcctaggaatcaa

SEQ ID NO: 3900605 - DNA, 25 bp, Homo sapien
acttctggctcaagttctgcatatc

SEQ ID NO: 3900606 - DNA, 25 bp, Homo sapien
ctatctattgacttaggccagaaac

SEQ ID NO: 3900607 - DNA, 25 bp, Homo sapien
gggaaaacaccagccttgcatgcct

SEQ ID NO: 3900608 - DNA, 25 bp, Homo sapien
aatatgggatgaaagttgattaacc

SEQ ID NO: 3900609 - DNA, 25 bp, Homo sapien
ggctggctttcacagaacaccgggc

SEQ ID NO: 3900610 - DNA, 25 bp, Homo sapien
tatctgagccttcaatccatttgca

SEQ ID NO: 3900611 - DNA, 25 bp, Homo sapien
tctccccgttgcaatataaatatgg

SEQ ID NO: 3900612 - DNA, 25 bp, Homo sapien
cataactacagtctatgtcaagaca

SEQ ID NO: 3900613 - DNA, 25 bp, Homo sapien
cctttgatgtagttgtgcattgtac

SEQ ID NO: 3900614 - DNA, 25 bp, Homo sapien
tctgtcctgagaccatacatagagt

SEQ ID NO: 3900615 - DNA, 25 bp, Homo sapien
taatgcaagcgaactgaagtggtcc

SEQ ID NO: 3900616 - DNA, 25 bp, Homo sapien
tgggtctgtgggagccctccaacct

SEQ ID NO: 3900617 - DNA, 25 bp, Homo sapien
ctgggtctgtgggagccctccaacc

SEQ ID NO: 3900618 - DNA, 25 bp, Homo sapien
tctgtgggagccctccaacctggat

SEQ ID NO: 3900619 - DNA, 25 bp, Homo sapien
ggtctgtgggagccctccaacctgg

SEQ ID NO: 3900620 - DNA, 25 bp, Homo sapien
ccacctcccacctgggaagtagcgg

SEQ ID NO: 3900621 - DNA, 25 bp, Homo sapien
gcacagccagtgagatattttacaa

SEQ ID NO: 3900622 - DNA, 25 bp, Homo sapien
cacctcccacctgggaagtagcggg

SEQ ID NO: 3900623 - DNA, 25 bp, Homo sapien
tttacaaatgcaaatgccccacctc

SEQ ID NO: 3900624 - DNA, 25 bp, Homo sapien
tctttcaccatccttactggcttga

SEQ ID NO: 3900625 - DNA, 25 bp, Homo sapien
ttcaccatccttactggcttgacag

SEQ ID NO: 3900626 - DNA, 25 bp, Homo sapien
ccatattctttcaccatccttactg

SEQ ID NO: 3900627 - DNA, 25 bp, Homo sapien
accatccttactggcttgacagctg

SEQ ID NO: 3900628 - DNA, 25 bp, Homo sapien
tgcagccaccaagtccatcattaca

SEQ ID NO: 3900629 - DNA, 25 bp, Homo sapien
tcgtatgccccaggtccaattctga

SEQ ID NO: 3900630 - DNA, 25 bp, Homo sapien
cctggcaaccagtcaccaagggctt

SEQ ID NO: 3900631 - DNA, 25 bp, Homo sapien
ggtccaattctgaatgcagccacca

SEQ ID NO: 3900632 - DNA, 25 bp, Homo sapien
cctctcctgtgctgacaccttctct

SEQ ID NO: 3900633 - DNA, 25 bp, Homo sapien
ctctcctgtgctgacaccttctctc

SEQ ID NO: 3900634 - DNA, 25 bp, Homo sapien
tcctctcctgtgctgacaccttctc

SEQ ID NO: 3900635 - DNA, 25 bp, Homo sapien
gagaaaccctcaaagctcagaccat

SEQ ID NO: 3900636 - DNA, 25 bp, Homo sapien
ccatacggtaaaagatgagggcact

SEQ ID NO: 3900637 - DNA, 25 bp, Homo sapien
catacaagtacgagggacggatggc

SEQ ID NO: 3900638 - DNA, 25 bp, Homo sapien
tgagttgaggtaggaccatacggta

SEQ ID NO: 3900639 - DNA, 25 bp, Homo sapien
ttgtttgctgaaaagagcaattccc

SEQ ID NO: 3900640 - DNA, 25 bp, Homo sapien
aattttcctccaactaattgcaaat

SEQ ID NO: 3900641 - DNA, 25 bp, Homo sapien
caattttcctccaactaattgcaaa

SEQ ID NO: 3900642 - DNA, 25 bp, Homo sapien
aattcttcattagttaacgtcatcc

SEQ ID NO: 3900643 - DNA, 25 bp, Homo sapien
ttgggcacagcacaatgatcttggt

SEQ ID NO: 3900644 - DNA, 25 bp, Homo sapien
tgccaacagccagcaccgttctgga

SEQ ID NO: 3900645 - DNA, 25 bp, Homo sapien
agttaacgtcatccatcctaatggg

SEQ ID NO: 3900646 - DNA, 25 bp, Homo sapien
taggagagcactctccgaggaggcc

SEQ ID NO: 3900647 - DNA, 25 bp, Homo sapien
cttcctttatcgaggtactttcatg

SEQ ID NO: 3900648 - DNA, 25 bp, Homo sapien
ccagagctgtgctgataggggttat

SEQ ID NO: 3900649 - DNA, 25 bp, Homo sapien
cgaggtactttcatgtttatggcac

SEQ ID NO: 3900650 - DNA, 25 bp, Homo sapien
acactgagctgcctgatattccatg

SEQ ID NO: 3900651 - DNA, 25 bp, Homo sapien
cactgagctgcctgatattccatgc

SEQ ID NO: 3900652 - DNA, 25 bp, Homo sapien
gtcacactgagctgcctgatattcc

SEQ ID NO: 3900653 - DNA, 25 bp, Homo sapien
ctgagctgcctgatattccatgccc

SEQ ID NO: 3900654 - DNA, 25 bp, Homo sapien
tcctctttacttggcccattattct

SEQ ID NO: 3900655 - DNA, 25 bp, Homo sapien
tctgatctggcatcgcaggtggttt

SEQ ID NO: 3900656 - DNA, 25 bp, Homo sapien
attctgatctggcatcgcaggtggt

SEQ ID NO: 3900657 - DNA, 25 bp, Homo sapien
ttacttggcccattattctgagatg

SEQ ID NO: 3900658 - DNA, 25 bp, Homo sapien
gtgattctccgtggaaaatgaaatg

SEQ ID NO: 3900659 - DNA, 25 bp, Homo sapien
gaggctgactttcccgccgcttctg

SEQ ID NO: 3900660 - DNA, 25 bp, Homo sapien
agaggctgactttcccgccgcttct

SEQ ID NO: 3900661 - DNA, 25 bp, Homo sapien
ggactggctgtgattctccgtggaa

SEQ ID NO: 3900662 - DNA, 25 bp, Homo sapien
gaataactttgtgttctaacccagc

SEQ ID NO: 3900663 - DNA, 25 bp, Homo sapien
ggcacttaataacggccagggagtg

SEQ ID NO: 3900664 - DNA, 25 bp, Homo sapien
agggagtgcggccataaatattgca

SEQ ID NO: 3900665 - DNA, 25 bp, Homo sapien
tccacgcggcacactggcacttaat

SEQ ID NO: 3900666 - DNA, 25 bp, Homo sapien
agattctatcgtgcccattttacag

SEQ ID NO: 3900667 - DNA, 25 bp, Homo sapien
catatggtctgtgaatgctgtctca

SEQ ID NO: 3900668 - DNA, 25 bp, Homo sapien
tgggtgttcattggagccagtttcc

SEQ ID NO: 3900669 - DNA, 25 bp, Homo sapien
acaaagaggatcagtgtttatcact

SEQ ID NO: 3900670 - DNA, 25 bp, Homo sapien
aacagcctattttcattggatattt

SEQ ID NO: 3900671 - DNA, 25 bp, Homo sapien
tatcttaagcttgggactgaaaaaa

SEQ ID NO: 3900672 - DNA, 25 bp, Homo sapien
cattggatattttgcttagattagt

SEQ ID NO: 3900673 - DNA, 25 bp, Homo sapien
acatactcatgtgtttatcttaagc

SEQ ID NO: 3900674 - DNA, 25 bp, Homo sapien
cactcttgcatgctggttttgcaca

SEQ ID NO: 3900675 - DNA, 25 bp, Homo sapien
caaacgcttggtttctgtcccatgg

SEQ ID NO: 3900676 - DNA, 25 bp, Homo sapien
tgtcccatgggacccattccaggtt

SEQ ID NO: 3900677 - DNA, 25 bp, Homo sapien
tctggctagcagaccttgctcttgc

SEQ ID NO: 3900678 - DNA, 25 bp, Homo sapien
gataggtggccttcagagtggctct

SEQ ID NO: 3900679 - DNA, 25 bp, Homo sapien
gagtggctctcgtctttattctgat

SEQ ID NO: 3900680 - DNA, 25 bp, Homo sapien
ggctctcgtctttattctgatccct

SEQ ID NO: 3900681 - DNA, 25 bp, Homo sapien
tcagagtggctctcgtctttattct

SEQ ID NO: 3900682 - DNA, 25 bp, Homo sapien
caaccagacacatcaacagggagca

SEQ ID NO: 3900683 - DNA, 25 bp, Homo sapien
tcagagttcccaccatgacagttcc

SEQ ID NO: 3900684 - DNA, 25 bp, Homo sapien
caccagagtctggatggcaaaggga

SEQ ID NO: 3900685 - DNA, 25 bp, Homo sapien
gcatccctgaccactcggaaaaagg

SEQ ID NO: 3900686 - DNA, 25 bp, Homo sapien
tgccccttaagttcgtacatactca

SEQ ID NO: 3900687 - DNA, 25 bp, Homo sapien
tgtcctacatagaacagagaagagc

SEQ ID NO: 3900688 - DNA, 25 bp, Homo sapien
ttcgtacatactcacagccagttgg

SEQ ID NO: 3900689 - DNA, 25 bp, Homo sapien
tatactttattcagtgccagtctca

SEQ ID NO: 3900690 - DNA, 25 bp, Homo sapien
tccagtagagtgctgccatcgtggc

SEQ ID NO: 3900691 - DNA, 25 bp, Homo sapien
ccttctttgacatgattctcttagt

SEQ ID NO: 3900692 - DNA, 25 bp, Homo sapien
gctttccaaagtctgtctggtgtcc

SEQ ID NO: 3900693 - DNA, 25 bp, Homo sapien
ttttgtaagattagcatccctgagg

SEQ ID NO: 3900694 - DNA, 25 bp, Homo sapien
gctagacagaatcaatttcccattg

SEQ ID NO: 3900695 - DNA, 25 bp, Homo sapien
tcgtctgagggtttataaaggccat

SEQ ID NO: 3900696 - DNA, 25 bp, Homo sapien
gacactgtaattctcgtctgagggt

SEQ ID NO: 3900697 - DNA, 25 bp, Homo sapien
ctttttgaaacagcaccagctagac

SEQ ID NO: 3900698 - DNA, 25 bp, Homo sapien
taattttaggtgtgccctgccgatg

SEQ ID NO: 3900699 - DNA, 25 bp, Homo sapien
taatggcgtcattagcaaaggagag

SEQ ID NO: 3900700 - DNA, 25 bp, Homo sapien
gcatcccctggcagatggtatggat

SEQ ID NO: 3900701 - DNA, 25 bp, Homo sapien
gtttgatccaatggctaatggcgtc

SEQ ID NO: 3900702 - DNA, 25 bp, Homo sapien
tacttaaccaaaagcggtatgctgg

SEQ ID NO: 3900703 - DNA, 25 bp, Homo sapien
tggttctccttgtaggccatgcaaa

SEQ ID NO: 3900704 - DNA, 25 bp, Homo sapien
cacccctttagctgatctgataaga

SEQ ID NO: 3900705 - DNA, 25 bp, Homo sapien
tatttctgagcagtgcacagagacc

SEQ ID NO: 3900706 - DNA, 25 bp, Homo sapien
tacttgcttttcttcgccaagcctg

SEQ ID NO: 3900707 - DNA, 25 bp, Homo sapien
tcataacagccagtgatacttgctt

SEQ ID NO: 3900708 - DNA, 25 bp, Homo sapien
tctgtctgacaacagggaagttcgc

SEQ ID NO: 3900709 - DNA, 25 bp, Homo sapien
cgccaagcctgccttgggtagacag

SEQ ID NO: 3900710 - DNA, 25 bp, Homo sapien
tttcattaagcgcttcagtcaatgc

SEQ ID NO: 3900711 - DNA, 25 bp, Homo sapien
tcaagagatgattcatggcatgtat

SEQ ID NO: 3900712 - DNA, 25 bp, Homo sapien
aatgccaaccgattaattatcacag

SEQ ID NO: 3900713 - DNA, 25 bp, Homo sapien
tcaaagttatgaattccgatttaat

SEQ ID NO: 3900714 - DNA, 25 bp, Homo sapien
caagagggctgcctataagggttcc

SEQ ID NO: 3900715 - DNA, 25 bp, Homo sapien
ctgcctataagggttccaggtctgc

SEQ ID NO: 3900716 - DNA, 25 bp, Homo sapien
tcatattgtgtcaaagcagttaaaa

SEQ ID NO: 3900717 - DNA, 25 bp, Homo sapien
catattgtgtcaaagcagttaaaag

SEQ ID NO: 3900718 - DNA, 25 bp, Homo sapien
tctctgtagaataccttgttgtcca

SEQ ID NO: 3900719 - DNA, 25 bp, Homo sapien
tcccaattgagtacaaggagttgac

SEQ ID NO: 3900720 - DNA, 25 bp, Homo sapien
tgtagaataccttgttgtccagttt

SEQ ID NO: 3900721 - DNA, 25 bp, Homo sapien
gagttgaccttaattgcaaactttg

SEQ ID NO: 3900722 - DNA, 25 bp, Homo sapien
aaggggccacttcctttcttgcagt

SEQ ID NO: 3900723 - DNA, 25 bp, Homo sapien
gagctgtgtacctctccagctttct

SEQ ID NO: 3900724 - DNA, 25 bp, Homo sapien
cacacttaaacctgtccttttctca

SEQ ID NO: 3900725 - DNA, 25 bp, Homo sapien
tttcttgcagtttggcgagctgtgt

SEQ ID NO: 3900726 - DNA, 25 bp, Homo sapien
ctgcatggacatgagggtgagggag

SEQ ID NO: 3900727 - DNA, 25 bp, Homo sapien
tggacatgagggtgagggagcaaga

SEQ ID NO: 3900728 - DNA, 25 bp, Homo sapien
gcatggacatgagggtgagggagca

SEQ ID NO: 3900729 - DNA, 25 bp, Homo sapien
atggacatgagggtgagggagcaag

SEQ ID NO: 3900730 - DNA, 25 bp, Homo sapien
cttcatggggattggcctttggaaa

SEQ ID NO: 3900731 - DNA, 25 bp, Homo sapien
tactgtctcctcttgtcgccttgat

SEQ ID NO: 3900732 - DNA, 25 bp, Homo sapien
ggcaggtaggacattgtctcttcat

SEQ ID NO: 3900733 - DNA, 25 bp, Homo sapien
gtccctattccaagtccttgagctg

SEQ ID NO: 3900734 - DNA, 25 bp, Homo sapien
tcacctagacaagggtggatgcctc

SEQ ID NO: 3900735 - DNA, 25 bp, Homo sapien
ggtcaatggcgagtacaggagttca

SEQ ID NO: 3900736 - DNA, 25 bp, Homo sapien
ggatgctgatctttctggcgtcgca

SEQ ID NO: 3900737 - DNA, 25 bp, Homo sapien
cacgagctggctgcacctattggca

SEQ ID NO: 3900738 - DNA, 25 bp, Homo sapien
taaaggagtgatggacaacatgtcc

SEQ ID NO: 3900739 - DNA, 25 bp, Homo sapien
tctccaggcttacatagtctccagt

SEQ ID NO: 3900740 - DNA, 25 bp, Homo sapien
agcagtaaagggtcaaattctccag

SEQ ID NO: 3900741 - DNA, 25 bp, Homo sapien
caggagcctgcctttgagaattcaa

SEQ ID NO: 3900742 - DNA, 25 bp, Homo sapien
aaatgctgccatggattcaccaaaa

SEQ ID NO: 3900743 - DNA, 25 bp, Homo sapien
tgggattccactgacgcttatttta

SEQ ID NO: 3900744 - DNA, 25 bp, Homo sapien
gagcccttcaagagacatatcagga

SEQ ID NO: 3900745 - DNA, 25 bp, Homo sapien
tggattcaccaaaaggagcccttca

SEQ ID NO: 3900746 - DNA, 25 bp, Homo sapien
tgtccctttaaggttgacaggctgg

SEQ ID NO: 3900747 - DNA, 25 bp, Homo sapien
gctctgtccctttaaggttgacagg

SEQ ID NO: 3900748 - DNA, 25 bp, Homo sapien
ctttaaggttgacaggctggtccct

SEQ ID NO: 3900749 - DNA, 25 bp, Homo sapien
tccctttaaggttgacaggctggtc

SEQ ID NO: 3900750 - DNA, 25 bp, Homo sapien
gaggtaggcaatggacttggggaga

SEQ ID NO: 3900751 - DNA, 25 bp, Homo sapien
aggactgtcctggggtctcatgatg

SEQ ID NO: 3900752 - DNA, 25 bp, Homo sapien
ttaggggccaatgaggtaggcaatg

SEQ ID NO: 3900753 - DNA, 25 bp, Homo sapien
tgtcctggggtctcatgatgagtaa

SEQ ID NO: 3900754 - DNA, 25 bp, Homo sapien
gtcatcatcatgagagcagtcacac

SEQ ID NO: 3900755 - DNA, 25 bp, Homo sapien
tgtcatcatcatgagagcagtcaca

SEQ ID NO: 3900756 - DNA, 25 bp, Homo sapien
tgtgtcatcatcatgagagcagtca

SEQ ID NO: 3900757 - DNA, 25 bp, Homo sapien
gtgtcatcatcatgagagcagtcac

SEQ ID NO: 3900758 - DNA, 25 bp, Homo sapien
cactctgggcctttgactccctcac

SEQ ID NO: 3900759 - DNA, 25 bp, Homo sapien
ctgggcctttgactccctcacccct

SEQ ID NO: 3900760 - DNA, 25 bp, Homo sapien
ctctgggcctttgactccctcaccc

SEQ ID NO: 3900761 - DNA, 25 bp, Homo sapien
ccactctgggcctttgactccctca

SEQ ID NO: 3900762 - DNA, 25 bp, Homo sapien
ctgtagggcaaactgacccaacggg

SEQ ID NO: 3900763 - DNA, 25 bp, Homo sapien
tgtagggcaaactgacccaacgggc

SEQ ID NO: 3900764 - DNA, 25 bp, Homo sapien
acacagtgtgcgctgagacgctgga

SEQ ID NO: 3900765 - DNA, 25 bp, Homo sapien
gagtgtctctgggaaaatcttggtc

SEQ ID NO: 3900766 - DNA, 25 bp, Homo sapien
tcttggtctcatgagagccttccca

SEQ ID NO: 3900767 - DNA, 25 bp, Homo sapien
cattcgagctccttgggcgacctaa

SEQ ID NO: 3900768 - DNA, 25 bp, Homo sapien
gcgggcatccacgttacttctgctg

SEQ ID NO: 3900769 - DNA, 25 bp, Homo sapien
tgtctcggggtttgtgatgtccaga

SEQ ID NO: 3900770 - DNA, 25 bp, Homo sapien
tgctgtctgctctcgatttgcctgt

SEQ ID NO: 3900771 - DNA, 25 bp, Homo sapien
ctgctttggacttgggcgccctttg

SEQ ID NO: 3900772 - DNA, 25 bp, Homo sapien
ctgccctgattctgtaacaaagagc

SEQ ID NO: 3900773 - DNA, 25 bp, Homo sapien
cctctcctctcggtcaggttggagt

SEQ ID NO: 3900774 - DNA, 25 bp, Homo sapien
tgattctgtaacaaagagctcagaa

SEQ ID NO: 3900775 - DNA, 25 bp, Homo sapien
agccctggcgaggtgtgtcctctcc

SEQ ID NO: 3900776 - DNA, 25 bp, Homo sapien
gggtgtgctgtccccaacattctct

SEQ ID NO: 3900777 - DNA, 25 bp, Homo sapien
ccttgcactgtagcaagcgtgtgtg

SEQ ID NO: 3900778 - DNA, 25 bp, Homo sapien
tgctggaggatgaagagccacatgt

SEQ ID NO: 3900779 - DNA, 25 bp, Homo sapien
tggctggatgtgagccttgcactgt

SEQ ID NO: 3900780 - DNA, 25 bp, Homo sapien
attggcatgaacccaaaccgaaata

SEQ ID NO: 3900781 - DNA, 25 bp, Homo sapien
gtgattggcatgaacccaaaccgaa

SEQ ID NO: 3900782 - DNA, 25 bp, Homo sapien
tgattggcatgaacccaaaccgaaa

SEQ ID NO: 3900783 - DNA, 25 bp, Homo sapien
gattggcatgaacccaaaccgaaat

SEQ ID NO: 3900784 - DNA, 25 bp, Homo sapien
cttggtctctggtagtaagaggagc

SEQ ID NO: 3900785 - DNA, 25 bp, Homo sapien
ggagctggctctttgacgtttgaca

SEQ ID NO: 3900786 - DNA, 25 bp, Homo sapien
ggcttgggattgagtcctctgtttg

SEQ ID NO: 3900787 - DNA, 25 bp, Homo sapien
aagcacaattagtgagaactgcctc

SEQ ID NO: 3900788 - DNA, 25 bp, Homo sapien
tcaagcagaatctggtctggctggc

SEQ ID NO: 3900789 - DNA, 25 bp, Homo sapien
agaatctggtctggctggctgccca

SEQ ID NO: 3900790 - DNA, 25 bp, Homo sapien
ctccaaggccctggcctgaaggctg

SEQ ID NO: 3900791 - DNA, 25 bp, Homo sapien
gcccagtgctcagcctgcctccaag

SEQ ID NO: 3900792 - DNA, 25 bp, Homo sapien
agtaagttggcaagggcccatacag

SEQ ID NO: 3900793 - DNA, 25 bp, Homo sapien
tgagcttttggttaaggacttggac

SEQ ID NO: 3900794 - DNA, 25 bp, Homo sapien
ggcccatacagtggttcttgtttca

SEQ ID NO: 3900795 - DNA, 25 bp, Homo sapien
ctagaatacggttgtggaatgaggt

SEQ ID NO: 3900796 - DNA, 25 bp, Homo sapien
tggctaggcctgataaaggcttcag

SEQ ID NO: 3900797 - DNA, 25 bp, Homo sapien
gagagatttgcccatcgctgctgta

SEQ ID NO: 3900798 - DNA, 25 bp, Homo sapien
ttagtcctaggtaacatcgctactc

SEQ ID NO: 3900799 - DNA, 25 bp, Homo sapien
ggtaacatcgctactcttcgtgaga

SEQ ID NO: 3900800 - DNA, 25 bp, Homo sapien
tcagcccatcttgaagtcatcagct

SEQ ID NO: 3900801 - DNA, 25 bp, Homo sapien
gcttccatcaagggttcaggaacat

SEQ ID NO: 3900802 - DNA, 25 bp, Homo sapien
ttccatcaagggttcaggaacatct

SEQ ID NO: 3900803 - DNA, 25 bp, Homo sapien
atcttgaagtcatcagcttccatca

SEQ ID NO: 3900804 - DNA, 25 bp, Homo sapien
gggctgatgcaagggtctttttgct

SEQ ID NO: 3900805 - DNA, 25 bp, Homo sapien
tgctgatttcttccccttaaagatt

SEQ ID NO: 3900806 - DNA, 25 bp, Homo sapien
tgtcttcaggtttcctgcagtaatc

SEQ ID NO: 3900807 - DNA, 25 bp, Homo sapien
caaaaggcctcatcttctctggagg

SEQ ID NO: 3900808 - DNA, 25 bp, Homo sapien
ccatcaacacgctggcgtctggccc

SEQ ID NO: 3900809 - DNA, 25 bp, Homo sapien
gggccaaagctgtttcggtcacagg

SEQ ID NO: 3900810 - DNA, 25 bp, Homo sapien
cagggccaaagctgtttcggtcaca

SEQ ID NO: 3900811 - DNA, 25 bp, Homo sapien
caacacgctggcgtctggcccacac

SEQ ID NO: 3900812 - DNA, 25 bp, Homo sapien
aacataagctaacgcgatgttgctg

SEQ ID NO: 3900813 - DNA, 25 bp, Homo sapien
gctaacgcgatgttgctgttcgtga

SEQ ID NO: 3900814 - DNA, 25 bp, Homo sapien
cgcgatgttgctgttcgtgaaaaga

SEQ ID NO: 3900815 - DNA, 25 bp, Homo sapien
ggcaaaacataagctaacgcgatgt

SEQ ID NO: 3900816 - DNA, 25 bp, Homo sapien
ctgaggacaggtgagtagtgaacca

SEQ ID NO: 3900817 - DNA, 25 bp, Homo sapien
ttctacactgttgggagaccctgaa

SEQ ID NO: 3900818 - DNA, 25 bp, Homo sapien
tgaaatctgaataactgggggggct

SEQ ID NO: 3900819 - DNA, 25 bp, Homo sapien
tagtgaaccaggacaggtgtacgag

SEQ ID NO: 3900820 - DNA, 25 bp, Homo sapien
ttgcaggtcctgatgatagctcccg

SEQ ID NO: 3900821 - DNA, 25 bp, Homo sapien
gatagctcccgaggaaggctgcact

SEQ ID NO: 3900822 - DNA, 25 bp, Homo sapien
ctgatgatagctcccgaggaaggct

SEQ ID NO: 3900823 - DNA, 25 bp, Homo sapien
caggtcctgatgatagctcccgagg

SEQ ID NO: 3900824 - DNA, 25 bp, Homo sapien
gagatgggcagatgttccacagagc

SEQ ID NO: 3900825 - DNA, 25 bp, Homo sapien
agatgggcagatgttccacagagct

SEQ ID NO: 3900826 - DNA, 25 bp, Homo sapien
agtctggatgactgacagatttagc

SEQ ID NO: 3900827 - DNA, 25 bp, Homo sapien
ggctgtctctggaggaaccatattt

SEQ ID NO: 3900828 - DNA, 25 bp, Homo sapien
taggaggatccaaattccaacgttg

SEQ ID NO: 3900829 - DNA, 25 bp, Homo sapien
aattccaacgttgttctggcagggc

SEQ ID NO: 3900830 - DNA, 25 bp, Homo sapien
tctggaggaaccatatttagctcat

SEQ ID NO: 3900831 - DNA, 25 bp, Homo sapien
ggaggtggtctttgagggcccatta

SEQ ID NO: 3900832 - DNA, 25 bp, Homo sapien
agcacctctgggtcaacttgtggct

SEQ ID NO: 3900833 - DNA, 25 bp, Homo sapien
tttgagggcccattaggctttgata

SEQ ID NO: 3900834 - DNA, 25 bp, Homo sapien
tttgataatgccgtgggcatgtggc

SEQ ID NO: 3900835 - DNA, 25 bp, Homo sapien
ttcttcactgggccttcaagtctcc

SEQ ID NO: 3900836 - DNA, 25 bp, Homo sapien
tttcttcactgggccttcaagtctc

SEQ ID NO: 3900837 - DNA, 25 bp, Homo sapien
gctgatgggtccaggtacgactgcc

SEQ ID NO: 3900838 - DNA, 25 bp, Homo sapien
ggtccaggtacgactgcccatcttc

SEQ ID NO: 3900839 - DNA, 25 bp, Homo sapien
tgatgggtccaggtacgactgccca

SEQ ID NO: 3900840 - DNA, 25 bp, Homo sapien
gtacgactgcccatcttccttgtgc

SEQ ID NO: 3900841 - DNA, 25 bp, Homo sapien
cagaggttgacacgatgagctgaac

SEQ ID NO: 3900842 - DNA, 25 bp, Homo sapien
ggacaggtgttgtgtgccgtccaca

SEQ ID NO: 3900843 - DNA, 25 bp, Homo sapien
gagctgaacttggatgactggacag

SEQ ID NO: 3900844 - DNA, 25 bp, Homo sapien
ccaggacatcttgagggtaggacaa

SEQ ID NO: 3900845 - DNA, 25 bp, Homo sapien
tttgaacacctgaggctgttgaggg

SEQ ID NO: 3900846 - DNA, 25 bp, Homo sapien
cccctcacagtgctggaatttgctg

SEQ ID NO: 3900847 - DNA, 25 bp, Homo sapien
gaatttgctgtcctttgactgctga

SEQ ID NO: 3900848 - DNA, 25 bp, Homo sapien
cctttgactgctgacacttgtcatt

SEQ ID NO: 3900849 - DNA, 25 bp, Homo sapien
tctctttgcctagagggaatggccg

SEQ ID NO: 3900850 - DNA, 25 bp, Homo sapien
ggatcctccgtgcaacaccatttta

SEQ ID NO: 3900851 - DNA, 25 bp, Homo sapien
gcagaaacatggtcgccgtgggatc

SEQ ID NO: 3900852 - DNA, 25 bp, Homo sapien
agggaatggccgtgtcttgtgtata

SEQ ID NO: 3900853 - DNA, 25 bp, Homo sapien
gagacgctcctgaagccgacgggca

SEQ ID NO: 3900854 - DNA, 25 bp, Homo sapien
tcaggaggggcgatggagacgctcc

SEQ ID NO: 3900855 - DNA, 25 bp, Homo sapien
ggaggggcgatggagacgctcctga

SEQ ID NO: 3900856 - DNA, 25 bp, Homo sapien
agacgctcctgaagccgacgggcag

SEQ ID NO: 3900857 - DNA, 25 bp, Homo sapien
cagtagaggtgggatcctggtgcac

SEQ ID NO: 3900858 - DNA, 25 bp, Homo sapien
aatgttcagggtgtaagctggcagt

SEQ ID NO: 3900859 - DNA, 25 bp, Homo sapien
tctgcacatactgcttctgtcctgc

SEQ ID NO: 3900860 - DNA, 25 bp, Homo sapien
caaattaatggacgattgtctgcac

SEQ ID NO: 3900861 - DNA, 25 bp, Homo sapien
gtatttcagtaggggatatggaggc

SEQ ID NO: 3900862 - DNA, 25 bp, Homo sapien
agtatttcagtaggggatatggagg

SEQ ID NO: 3900863 - DNA, 25 bp, Homo sapien
cagtatttcagtaggggatatggag

SEQ ID NO: 3900864 - DNA, 25 bp, Homo sapien
aggactttgcaaggctgctttgcca

SEQ ID NO: 3900865 - DNA, 25 bp, Homo sapien
cctgtttgaatctcgcttcttcctg

SEQ ID NO: 3900866 - DNA, 25 bp, Homo sapien
tcctggttagtacggcagatgctgt

SEQ ID NO: 3900867 - DNA, 25 bp, Homo sapien
gtccttggaatcaataccttccctc

SEQ ID NO: 3900868 - DNA, 25 bp, Homo sapien
tcgtacccttgagatgactgctggg

SEQ ID NO: 3900869 - DNA, 25 bp, Homo sapien
gaagagatgtgggtggtagcctcac

SEQ ID NO: 3900870 - DNA, 25 bp, Homo sapien
gttccacaaagcacattagtcgtac

SEQ ID NO: 3900871 - DNA, 25 bp, Homo sapien
tcctgcaggaggtctctcgctttcc

SEQ ID NO: 3900872 - DNA, 25 bp, Homo sapien
gtcaaggcataagatctctttccca

SEQ ID NO: 3900873 - DNA, 25 bp, Homo sapien
aaggaagcaggcagtcaaggcataa

SEQ ID NO: 3900874 - DNA, 25 bp, Homo sapien
ggcagtcaaggcataagatctcttt

SEQ ID NO: 3900875 - DNA, 25 bp, Homo sapien
gcaggcagtcaaggcataagatctc

SEQ ID NO: 3900876 - DNA, 25 bp, Homo sapien
gcccgatgaaaggaccattctggcc

SEQ ID NO: 3900877 - DNA, 25 bp, Homo sapien
ccattctggccagagtggttcatga

SEQ ID NO: 3900878 - DNA, 25 bp, Homo sapien
agcccgatgaaaggaccattctggc

SEQ ID NO: 3900879 - DNA, 25 bp, Homo sapien
agtggttcatgagctcagtgcagtg

SEQ ID NO: 3900880 - DNA, 25 bp, Homo sapien
tgagggcttagacgattttgccttt

SEQ ID NO: 3900881 - DNA, 25 bp, Homo sapien
tagatggctttacattcagaacaca

SEQ ID NO: 3900882 - DNA, 25 bp, Homo sapien
gccttttgaaggcacggaaatagat

SEQ ID NO: 3900883 - DNA, 25 bp, Homo sapien
cttttcttccgcttgtgagggctta

SEQ ID NO: 3900884 - DNA, 25 bp, Homo sapien
acatgctggcggtgcatccgcggta

SEQ ID NO: 3900885 - DNA, 25 bp, Homo sapien
aacatgctggcggtgcatccgcggt

SEQ ID NO: 3900886 - DNA, 25 bp, Homo sapien
catgctggcggtgcatccgcggtac

SEQ ID NO: 3900887 - DNA, 25 bp, Homo sapien
ttaacatgctggcggtgcatccgcg

SEQ ID NO: 3900888 - DNA, 25 bp, Homo sapien
taacatctgcttcaccgttgactgc

SEQ ID NO: 3900889 - DNA, 25 bp, Homo sapien
catctgtgcatgcagtaacatctgc

SEQ ID NO: 3900890 - DNA, 25 bp, Homo sapien
caccgttgactgcttgaacctgtgg

SEQ ID NO: 3900891 - DNA, 25 bp, Homo sapien
gcttcaccgttgactgcttgaacct

SEQ ID NO: 3900892 - DNA, 25 bp, Homo sapien
ccagatgtgggtgtcggttaaaggt

SEQ ID NO: 3900893 - DNA, 25 bp, Homo sapien
ctgtggactccagtcgctggtgatg

SEQ ID NO: 3900894 - DNA, 25 bp, Homo sapien
ggtgatgaaggtagccagatgtggg

SEQ ID NO: 3900895 - DNA, 25 bp, Homo sapien
aggtgggagaacaacccaccgtcat

SEQ ID NO: 3900896 - DNA, 25 bp, Homo sapien
cctggattgggaaagacgtgtttat

SEQ ID NO: 3900897 - DNA, 25 bp, Homo sapien
cgtgtttatgatgcagaccagttgg

SEQ ID NO: 3900898 - DNA, 25 bp, Homo sapien
cttgggaatagctgacctggtgaga

SEQ ID NO: 3900899 - DNA, 25 bp, Homo sapien
tcttgaggtctggactaagccctgg

SEQ ID NO: 3900900 - DNA, 25 bp, Homo sapien
caacatccattactactggaaccca

SEQ ID NO: 3900901 - DNA, 25 bp, Homo sapien
cagcggaagcaggtatcggagggat

SEQ ID NO: 3900902 - DNA, 25 bp, Homo sapien
ctgcacagcggaagcaggtatcgga

SEQ ID NO: 3900903 - DNA, 25 bp, Homo sapien
ggaagcaggtatcggagggatgcac

SEQ ID NO: 3900904 - DNA, 25 bp, Homo sapien
aagcaggtatcggagggatgcacat

SEQ ID NO: 3900905 - DNA, 25 bp, Homo sapien
tggcagagagcctagtgccagtggc

SEQ ID NO: 3900906 - DNA, 25 bp, Homo sapien
agatggcagagagcctagtgccagt

SEQ ID NO: 3900907 - DNA, 25 bp, Homo sapien
atggcagagagcctagtgccagtgg

SEQ ID NO: 3900908 - DNA, 25 bp, Homo sapien
gcagcatcaccagatggcagagagc

SEQ ID NO: 3900909 - DNA, 25 bp, Homo sapien
catcaagctctttaatggcgggggg

SEQ ID NO: 3900910 - DNA, 25 bp, Homo sapien
ctggatcccaggcttttgggagctg

SEQ ID NO: 3900911 - DNA, 25 bp, Homo sapien
ttgggagctgtacccagcagtctgg

SEQ ID NO: 3900912 - DNA, 25 bp, Homo sapien
cccagcagtctggagatcctggtgg

SEQ ID NO: 3900913 - DNA, 25 bp, Homo sapien
ggcagcgagcatactggtagcgtct

SEQ ID NO: 3900914 - DNA, 25 bp, Homo sapien
agcttaggcagggaggtcacatgac

SEQ ID NO: 3900915 - DNA, 25 bp, Homo sapien
ggtcacatgacaggaaccaggcagc

SEQ ID NO: 3900916 - DNA, 25 bp, Homo sapien
tactggtagcgtctgtagcttaggc

SEQ ID NO: 3900917 - DNA, 25 bp, Homo sapien
ccaagcttaggttcagcagcaggct

SEQ ID NO: 3900918 - DNA, 25 bp, Homo sapien
tggacccaagcttaggttcagcagc

SEQ ID NO: 3900919 - DNA, 25 bp, Homo sapien
ctccagttccgacacagcacagggc

SEQ ID NO: 3900920 - DNA, 25 bp, Homo sapien
ggcagggctggacccaagcttaggt

SEQ ID NO: 3900921 - DNA, 25 bp, Homo sapien
tctaaatgtagcctggtcagatgga

SEQ ID NO: 3900922 - DNA, 25 bp, Homo sapien
cctcatggctgggtcatgcgtgcct

SEQ ID NO: 3900923 - DNA, 25 bp, Homo sapien
ccaaaatcctgttggtccaccaaat

SEQ ID NO: 3900924 - DNA, 25 bp, Homo sapien
ggaagccatgcaggcaaatagtttg

SEQ ID NO: 3900925 - DNA, 25 bp, Homo sapien
tgggtgcagcaatagcaagtcctct

SEQ ID NO: 3900926 - DNA, 25 bp, Homo sapien
ccttcccttgcggttcatctctgtt

SEQ ID NO: 3900927 - DNA, 25 bp, Homo sapien
cttaaatggaaacatcaccagggcc

SEQ ID NO: 3900928 - DNA, 25 bp, Homo sapien
tcttcatcttactaggagccccagg

SEQ ID NO: 3900929 - DNA, 25 bp, Homo sapien
cataagggtggagaatttcccgagc

SEQ ID NO: 3900930 - DNA, 25 bp, Homo sapien
gactgtgagcattccagcgccttgg

SEQ ID NO: 3900931 - DNA, 25 bp, Homo sapien
ggctctagcctagctgcataagggt

SEQ ID NO: 3900932 - DNA, 25 bp, Homo sapien
tttcccgagcctttgcaacaggtgt

SEQ ID NO: 3900933 - DNA, 25 bp, Homo sapien
gctcgagtcacacagcatccaagtg

SEQ ID NO: 3900934 - DNA, 25 bp, Homo sapien
gaggtctcctagaggtcttcccatg

SEQ ID NO: 3900935 - DNA, 25 bp, Homo sapien
gatgatgatatctgcactgagccct

SEQ ID NO: 3900936 - DNA, 25 bp, Homo sapien
caggtgtaggatccactccatctga

SEQ ID NO: 3900937 - DNA, 25 bp, Homo sapien
cacacttggtgtgtgggtcctttgg

SEQ ID NO: 3900938 - DNA, 25 bp, Homo sapien
ggtcgcgatgagcatctctgtctgg

SEQ ID NO: 3900939 - DNA, 25 bp, Homo sapien
ctctctaccactctgggtggagcca

SEQ ID NO: 3900940 - DNA, 25 bp, Homo sapien
caatgtaggcagtgttcgtaaagct

SEQ ID NO: 3900941 - DNA, 25 bp, Homo sapien
cattctagtaactattgatcgagca

SEQ ID NO: 3900942 - DNA, 25 bp, Homo sapien
attctagtaactattgatcgagcac

SEQ ID NO: 3900943 - DNA, 25 bp, Homo sapien
ggccattctagtaactattgatcga

SEQ ID NO: 3900944 - DNA, 25 bp, Homo sapien
tcaggccattctagtaactattgat

SEQ ID NO: 3900945 - DNA, 25 bp, Homo sapien
tgagtcctcatttgggtaatgccct

SEQ ID NO: 3900946 - DNA, 25 bp, Homo sapien
cttgagtcctcatttgggtaatgcc

SEQ ID NO: 3900947 - DNA, 25 bp, Homo sapien
gtcctcatttgggtaatgccctcct

SEQ ID NO: 3900948 - DNA, 25 bp, Homo sapien
ctcatttgggtaatgccctccttcc

SEQ ID NO: 3900949 - DNA, 25 bp, Homo sapien
ctgtgtgtgccccatggaaaaggga

SEQ ID NO: 3900950 - DNA, 25 bp, Homo sapien
ggttgcctggacgactttgtctcaa

SEQ ID NO: 3900951 - DNA, 25 bp, Homo sapien
tggagaggcatattcctcgcggttg

SEQ ID NO: 3900952 - DNA, 25 bp, Homo sapien
gaggtgcacctgtgttagtgatatg

SEQ ID NO: 3900953 - DNA, 25 bp, Homo sapien
tgacccgggcatgcggatggattaa

SEQ ID NO: 3900954 - DNA, 25 bp, Homo sapien
gggctcctatgtgacccgggcatgc

SEQ ID NO: 3900955 - DNA, 25 bp, Homo sapien
catgaccagggctcctatgtgaccc

SEQ ID NO: 3900956 - DNA, 25 bp, Homo sapien
gggcatgcggatggattaataacac

SEQ ID NO: 3900957 - DNA, 25 bp, Homo sapien
catctccctcatctcatgtataggg

SEQ ID NO: 3900958 - DNA, 25 bp, Homo sapien
catctcatgtatagggcttgtcttc

SEQ ID NO: 3900959 - DNA, 25 bp, Homo sapien
tcaggcctgatgaatcgtccatctc

SEQ ID NO: 3900960 - DNA, 25 bp, Homo sapien
gatttccctgtaatggagcctctgt

SEQ ID NO: 3900961 - DNA, 25 bp, Homo sapien
ccactggaatactgatcaggaggtg

SEQ ID NO: 3900962 - DNA, 25 bp, Homo sapien
tagacctctgcctttaccggtgccc

SEQ ID NO: 3900963 - DNA, 25 bp, Homo sapien
aggtgaaagatgcaggagtcatctc

SEQ ID NO: 3900964 - DNA, 25 bp, Homo sapien
cattcccactggaatactgatcagg

SEQ ID NO: 3900965 - DNA, 25 bp, Homo sapien
cctgaaccttgttgaggatgtgggt

SEQ ID NO: 3900966 - DNA, 25 bp, Homo sapien
ctgggaacaccagcatggtgtgaag

SEQ ID NO: 3900967 - DNA, 25 bp, Homo sapien
gtgtgaaggccacaaggacgcgctc

SEQ ID NO: 3900968 - DNA, 25 bp, Homo sapien
cttgctgaaccctgaaccttgttga

SEQ ID NO: 3900969 - DNA, 25 bp, Homo sapien
tgcccagtaaaaggcacccttcaca

SEQ ID NO: 3900970 - DNA, 25 bp, Homo sapien
cagtaaaaggcacccttcacagata

SEQ ID NO: 3900971 - DNA, 25 bp, Homo sapien
cccagtaaaaggcacccttcacaga

SEQ ID NO: 3900972 - DNA, 25 bp, Homo sapien
cctgcccagtaaaaggcacccttca

SEQ ID NO: 3900973 - DNA, 25 bp, Homo sapien
ggagagccaagccattattgccaag

SEQ ID NO: 3900974 - DNA, 25 bp, Homo sapien
cctggtgttcggcacacaaataacc

SEQ ID NO: 3900975 - DNA, 25 bp, Homo sapien
cagtactgggtttgcaacagtctgc

SEQ ID NO: 3900976 - DNA, 25 bp, Homo sapien
cgtgaccataaaacagcctgcagag

SEQ ID NO: 3900977 - DNA, 25 bp, Homo sapien
caagacagtgaaatacggggaccca

SEQ ID NO: 3900978 - DNA, 25 bp, Homo sapien
ttcaacattaggtatcaagacagtg

SEQ ID NO: 3900979 - DNA, 25 bp, Homo sapien
cagggcacggtgctctttgctgata

SEQ ID NO: 3900980 - DNA, 25 bp, Homo sapien
tacggggacccatcttgatctggca

SEQ ID NO: 3900981 - DNA, 25 bp, Homo sapien
cataggattttcctttgaaggttgg

SEQ ID NO: 3900982 - DNA, 25 bp, Homo sapien
tcataggattttcctttgaaggttg

SEQ ID NO: 3900983 - DNA, 25 bp, Homo sapien
cacgagggtttgctggcttggttaa

SEQ ID NO: 3900984 - DNA, 25 bp, Homo sapien
gaccagaaatcaaaaaggcctgtgg

SEQ ID NO: 3900985 - DNA, 25 bp, Homo sapien
acctctgtttgggaaagatgccgca

SEQ ID NO: 3900986 - DNA, 25 bp, Homo sapien
taacaaagggcctctagaccagaaa

SEQ ID NO: 3900987 - DNA, 25 bp, Homo sapien
gatgtcggagggtcttttagcccaa

SEQ ID NO: 3900988 - DNA, 25 bp, Homo sapien
tgggagctgccaagattgagacgta

SEQ ID NO: 3900989 - DNA, 25 bp, Homo sapien
atcctggatgatctagcgccttctg

SEQ ID NO: 3900990 - DNA, 25 bp, Homo sapien
gaaaaatctgggatcctggatgatc

SEQ ID NO: 3900991 - DNA, 25 bp, Homo sapien
tttttgacttatgtggctactggcc

SEQ ID NO: 3900992 - DNA, 25 bp, Homo sapien
tggtgtgtgggaatacaatgtatca

SEQ ID NO: 3900993 - DNA, 25 bp, Homo sapien
tatcatcgtgtattgagccttgcag

SEQ ID NO: 3900994 - DNA, 25 bp, Homo sapien
aatttgccgtgtttacgatactgag

SEQ ID NO: 3900995 - DNA, 25 bp, Homo sapien
cgcagatccagacgatctccagcat

SEQ ID NO: 3900996 - DNA, 25 bp, Homo sapien
cacaatagggatgagcttggatcgg

SEQ ID NO: 3900997 - DNA, 25 bp, Homo sapien
aacccatgggcagcacaatagggat

SEQ ID NO: 3900998 - DNA, 25 bp, Homo sapien
tgggaacgggctgttccaaccgcag

SEQ ID NO: 3900999 - DNA, 25 bp, Homo sapien
tgctatgtcctgaaggagtaagaca

SEQ ID NO: 3901000 - DNA, 25 bp, Homo sapien
tgcaccagaagacctttctgttaaa

SEQ ID NO: 3901001 - DNA, 25 bp, Homo sapien
ctgcaccagaagacctttctgttaa

SEQ ID NO: 3901002 - DNA, 25 bp, Homo sapien
aagacctttctgttaaatctaccat

SEQ ID NO: 3901003 - DNA, 25 bp, Homo sapien
ccagaagacctttctgttaaatcta

SEQ ID NO: 3901004 - DNA, 25 bp, Homo sapien
tcattcacggtcaagtcgtggtttt

SEQ ID NO: 3901005 - DNA, 25 bp, Homo sapien
ttagaaatgccagccgtgattgtct

SEQ ID NO: 3901006 - DNA, 25 bp, Homo sapien
cattcacggtcaagtcgtggttttt

SEQ ID NO: 3901007 - DNA, 25 bp, Homo sapien
gaaatgccagccgtgattgtctgca

SEQ ID NO: 3901008 - DNA, 25 bp, Homo sapien
tgaggttactgcctagaccacaccc

SEQ ID NO: 3901009 - DNA, 25 bp, Homo sapien
tctctctgttgaggttactgcctag

SEQ ID NO: 3901010 - DNA, 25 bp, Homo sapien
tctgttgaggttactgcctagacca

SEQ ID NO: 3901011 - DNA, 25 bp, Homo sapien
tgttgaggttactgcctagaccaca

SEQ ID NO: 3901012 - DNA, 25 bp, Homo sapien
ctttgcacccctttgcctccctggg

SEQ ID NO: 3901013 - DNA, 25 bp, Homo sapien
agctttgcacccctttgcctccctg

SEQ ID NO: 3901014 - DNA, 25 bp, Homo sapien
tttgcacccctttgcctccctggga

SEQ ID NO: 3901015 - DNA, 25 bp, Homo sapien
ggcagctttgcacccctttgcctcc

SEQ ID NO: 3901016 - DNA, 25 bp, Homo sapien
ccgagggtgatgtcgccaggaatcc

SEQ ID NO: 3901017 - DNA, 25 bp, Homo sapien
cgagggtgatgtcgccaggaatccc

SEQ ID NO: 3901018 - DNA, 25 bp, Homo sapien
agggtgatgtcgccaggaatcccat

SEQ ID NO: 3901019 - DNA, 25 bp, Homo sapien
ggccgagggtgatgtcgccaggaat

SEQ ID NO: 3901020 - DNA, 25 bp, Homo sapien
tgtctttgggagagcagtacagaag

SEQ ID NO: 3901021 - DNA, 25 bp, Homo sapien
acagaagccctcagctgtggtggga

SEQ ID NO: 3901022 - DNA, 25 bp, Homo sapien
ctttcacatgtctttgggagagcag

SEQ ID NO: 3901023 - DNA, 25 bp, Homo sapien
gagcagtacagaagccctcagctgt

SEQ ID NO: 3901024 - DNA, 25 bp, Homo sapien
ctctgcagttttaacaggttccccg

SEQ ID NO: 3901025 - DNA, 25 bp, Homo sapien
gggtgtgctccctgtcacaaaagca

SEQ ID NO: 3901026 - DNA, 25 bp, Homo sapien
gatccaggtttgacaaaggctgcct

SEQ ID NO: 3901027 - DNA, 25 bp, Homo sapien
cagagcactgtcttaacaaggcacg

SEQ ID NO: 3901028 - DNA, 25 bp, Homo sapien
tctctggcagaaccgctccaaaatg

SEQ ID NO: 3901029 - DNA, 25 bp, Homo sapien
gtgaaacaggcgacttccttcactg

SEQ ID NO: 3901030 - DNA, 25 bp, Homo sapien
gcagaaccgctccaaaatgtgtgga

SEQ ID NO: 3901031 - DNA, 25 bp, Homo sapien
ctccttctttgcttcaaggtgaaac

SEQ ID NO: 3901032 - DNA, 25 bp, Homo sapien
tcagatgtcctttggtgctttagcc

SEQ ID NO: 3901033 - DNA, 25 bp, Homo sapien
ggtccttcggctgcagtacaagtgg

SEQ ID NO: 3901034 - DNA, 25 bp, Homo sapien
tgagactccatctaccctgggaagc

SEQ ID NO: 3901035 - DNA, 25 bp, Homo sapien
gctttagcccagtgactcatcgatc

SEQ ID NO: 3901036 - DNA, 25 bp, Homo sapien
ttttctctgatctagagtctggacc

SEQ ID NO: 3901037 - DNA, 25 bp, Homo sapien
ctctgatctagagtctggaccacct

SEQ ID NO: 3901038 - DNA, 25 bp, Homo sapien
ccaggatcacttttctctgatctag

SEQ ID NO: 3901039 - DNA, 25 bp, Homo sapien
cacttttctctgatctagagtctgg

SEQ ID NO: 3901040 - DNA, 25 bp, Homo sapien
tcttcctgaataagcaagcaggtgg

SEQ ID NO: 3901041 - DNA, 25 bp, Homo sapien
tgtgaacacttatgcgtgtgctgtg

SEQ ID NO: 3901042 - DNA, 25 bp, Homo sapien
taagtctgtgtaaaggtgtgtgcaa

SEQ ID NO: 3901043 - DNA, 25 bp, Homo sapien
cagccacggcccaactgtgagtgtg

SEQ ID NO: 3901044 - DNA, 25 bp, Homo sapien
tgtccacgacattccggacaacaag

SEQ ID NO: 3901045 - DNA, 25 bp, Homo sapien
caaggacatcgtctctgggctggct

SEQ ID NO: 3901046 - DNA, 25 bp, Homo sapien
cattccggacaacaaggacatcgtc

SEQ ID NO: 3901047 - DNA, 25 bp, Homo sapien
cccccatactgggagtagctggagg

SEQ ID NO: 3901048 - DNA, 25 bp, Homo sapien
ccaaggcagaattaggatgcgtagc

SEQ ID NO: 3901049 - DNA, 25 bp, Homo sapien
caaccgctcatgtctctgccaaggc

SEQ ID NO: 3901050 - DNA, 25 bp, Homo sapien
cagagagggcggatttaaccaaggc

SEQ ID NO: 3901051 - DNA, 25 bp, Homo sapien
ttaggatgcgtagctcctgcagaga

SEQ ID NO: 3901052 - DNA, 25 bp, Homo sapien
tgttcagacccacggtccatgcctg

SEQ ID NO: 3901053 - DNA, 25 bp, Homo sapien
ggctgcaacgtggacacatacgctc

SEQ ID NO: 3901054 - DNA, 25 bp, Homo sapien
ggtccctaagctgggcgagttcttc

SEQ ID NO: 3901055 - DNA, 25 bp, Homo sapien
tgcctgttcagacccacggtccatg

SEQ ID NO: 3901056 - DNA, 25 bp, Homo sapien
tctgctcaacaggacccttgcaggg

SEQ ID NO: 3901057 - DNA, 25 bp, Homo sapien
ttgaagatttctgagctcgttgggc

SEQ ID NO: 3901058 - DNA, 25 bp, Homo sapien
ctcgttgggcttatccagaagtggg

SEQ ID NO: 3901059 - DNA, 25 bp, Homo sapien
gaagtgggctggtaacatctgctca

SEQ ID NO: 3901060 - DNA, 25 bp, Homo sapien
cagcaacatgatgggccctgggaag

SEQ ID NO: 3901061 - DNA, 25 bp, Homo sapien
acaagcctcagcaacatgatgggcc

SEQ ID NO: 3901062 - DNA, 25 bp, Homo sapien
agcctcagcaacatgatgggccctg

SEQ ID NO: 3901063 - DNA, 25 bp, Homo sapien
cccagagaagacacaagcctcagca

SEQ ID NO: 3901064 - DNA, 25 bp, Homo sapien
cagcctgagcgggaaggagctttga

SEQ ID NO: 3901065 - DNA, 25 bp, Homo sapien
tgcctctaagggtagttcagaggag

SEQ ID NO: 3901066 - DNA, 25 bp, Homo sapien
gtggtgaagcacagcaaggtgtatc

SEQ ID NO: 3901067 - DNA, 25 bp, Homo sapien
ctttgagggcgttcaaggtgaagaa

SEQ ID NO: 3901068 - DNA, 25 bp, Homo sapien
taggcaatgtcagtgaggtgacaag

SEQ ID NO: 3901069 - DNA, 25 bp, Homo sapien
aagccactctccgtccaatccactg

SEQ ID NO: 3901070 - DNA, 25 bp, Homo sapien
agtccaagccactctccgtccaatc

SEQ ID NO: 3901071 - DNA, 25 bp, Homo sapien
ctccagggacaactggtaggcaatg

SEQ ID NO: 3901072 - DNA, 25 bp, Homo sapien
cccgaccctgcttagcttctgagat

SEQ ID NO: 3901073 - DNA, 25 bp, Homo sapien
agacgagatcgggcacattcagggt

SEQ ID NO: 3901074 - DNA, 25 bp, Homo sapien
cgaccctgcttagcttctgagatca

SEQ ID NO: 3901075 - DNA, 25 bp, Homo sapien
cattcagggtggtatggctgtagac

SEQ ID NO: 3901076 - DNA, 25 bp, Homo sapien
ataaggaaaccattttgatagccat

SEQ ID NO: 3901077 - DNA, 25 bp, Homo sapien
cagcaggctccggttctcagacata

SEQ ID NO: 3901078 - DNA, 25 bp, Homo sapien
agcaggctccggttctcagacataa

SEQ ID NO: 3901079 - DNA, 25 bp, Homo sapien
cagacataaggaaaccattttgata

SEQ ID NO: 3901080 - DNA, 25 bp, Homo sapien
tcttgatcagccttcttatgctgcc

SEQ ID NO: 3901081 - DNA, 25 bp, Homo sapien
gctgccctcttgtcataacccggtg

SEQ ID NO: 3901082 - DNA, 25 bp, Homo sapien
caggtcactgtcagcttgctctggt

SEQ ID NO: 3901083 - DNA, 25 bp, Homo sapien
ccctcttgtcataacccggtgcttt

SEQ ID NO: 3901084 - DNA, 25 bp, Homo sapien
ctccacatgtcttggatggacccat

SEQ ID NO: 3901085 - DNA, 25 bp, Homo sapien
cgctgtgccattctgtttgcagatc

SEQ ID NO: 3901086 - DNA, 25 bp, Homo sapien
ttctgtttgcagatcatttttctct

SEQ ID NO: 3901087 - DNA, 25 bp, Homo sapien
gccattctgtttgcagatcattttt

SEQ ID NO: 3901088 - DNA, 25 bp, Homo sapien
cattctgtttgcagatcatttttct

SEQ ID NO: 3901089 - DNA, 25 bp, Homo sapien
cacagccgtgtggtaggcagaggca

SEQ ID NO: 3901090 - DNA, 25 bp, Homo sapien
ctggtggctgcctttggtgatggga

SEQ ID NO: 3901091 - DNA, 25 bp, Homo sapien
ggatgagggccacatccgcctggct

SEQ ID NO: 3901092 - DNA, 25 bp, Homo sapien
aggcctttgctcctgatgaggtctt

SEQ ID NO: 3901093 - DNA, 25 bp, Homo sapien
tcacagttcagaggtggtaccaacc

SEQ ID NO: 3901094 - DNA, 25 bp, Homo sapien
gctgctctcttgtcgctcacttttg

SEQ ID NO: 3901095 - DNA, 25 bp, Homo sapien
caaccctgggctgatcaaagtcagt

SEQ ID NO: 3901096 - DNA, 25 bp, Homo sapien
tgtgcttgagctgtcgctgctctct

SEQ ID NO: 3901097 - DNA, 25 bp, Homo sapien
taatttggatactgttgcggccacc

SEQ ID NO: 3901098 - DNA, 25 bp, Homo sapien
gcgtgtacaccacagctgcttcgga

SEQ ID NO: 3901099 - DNA, 25 bp, Homo sapien
aacatctgggcccttttatggctga

SEQ ID NO: 3901100 - DNA, 25 bp, Homo sapien
tagaaaaacgggctctccagctgtg

SEQ ID NO: 3901101 - DNA, 25 bp, Homo sapien
gaatgttctactctgtttgacccag

SEQ ID NO: 3901102 - DNA, 25 bp, Homo sapien
tgggagctacaaactcctcccagag

SEQ ID NO: 3901103 - DNA, 25 bp, Homo sapien
cagtgacttaggtcatgggagctac

SEQ ID NO: 3901104 - DNA, 25 bp, Homo sapien
gactatctatgctggagaatccgag

SEQ ID NO: 3901105 - DNA, 25 bp, Homo sapien
gatttacctggatcaaaaagctggt

SEQ ID NO: 3901106 - DNA, 25 bp, Homo sapien
tgcttgcctgctatgggatctcggg

SEQ ID NO: 3901107 - DNA, 25 bp, Homo sapien
ttttacagggacactagaaggcagc

SEQ ID NO: 3901108 - DNA, 25 bp, Homo sapien
aatgatgccatctctactgacccgg

SEQ ID NO: 3901109 - DNA, 25 bp, Homo sapien
caccgaagcgtcctggaaaacaata

SEQ ID NO: 3901110 - DNA, 25 bp, Homo sapien
ccaccgaagcgtcctggaaaacaat

SEQ ID NO: 3901111 - DNA, 25 bp, Homo sapien
ggttggtgcccagttctgcgccagc

SEQ ID NO: 3901112 - DNA, 25 bp, Homo sapien
gatccaacacattcaacagccgatt

SEQ ID NO: 3901113 - DNA, 25 bp, Homo sapien
tccagcagacgggaagacagatgat

SEQ ID NO: 3901114 - DNA, 25 bp, Homo sapien
ttttaactatggcagcacgctcatg

SEQ ID NO: 3901115 - DNA, 25 bp, Homo sapien
gaatgaacaaacaacagctcagcgc

SEQ ID NO: 3901116 - DNA, 25 bp, Homo sapien
tctgttccgttggactgcctgtccg

SEQ ID NO: 3901117 - DNA, 25 bp, Homo sapien
gatgtttctgttccgttggactgcc

SEQ ID NO: 3901118 - DNA, 25 bp, Homo sapien
gggatgtttctgttccgttggactg

SEQ ID NO: 3901119 - DNA, 25 bp, Homo sapien
gttggactgcctgtccgtccagggc

SEQ ID NO: 3901120 - DNA, 25 bp, Homo sapien
tcagccccacaaggaggtatgtgcc

SEQ ID NO: 3901121 - DNA, 25 bp, Homo sapien
ttgtatcttgtctgtatttagatat

SEQ ID NO: 3901122 - DNA, 25 bp, Homo sapien
ttttgaagagatagttggggtggag

SEQ ID NO: 3901123 - DNA, 25 bp, Homo sapien
ggtggaggggtttgactatatcgcc

SEQ ID NO: 3901124 - DNA, 25 bp, Homo sapien
ccatctctaatacagtgagcgggaa

SEQ ID NO: 3901125 - DNA, 25 bp, Homo sapien
aaatctcttcaattggcctcccagg

SEQ ID NO: 3901126 - DNA, 25 bp, Homo sapien
gcctattgggatgggttagtgatcc

SEQ ID NO: 3901127 - DNA, 25 bp, Homo sapien
ttagtgatccctagggctgaccgca

SEQ ID NO: 3901128 - DNA, 25 bp, Homo sapien
gacacattcagactctggccagtga

SEQ ID NO: 3901129 - DNA, 25 bp, Homo sapien
acattcagactctggccagtgacga

SEQ ID NO: 3901130 - DNA, 25 bp, Homo sapien
ggagacacattcagactctggccag

SEQ ID NO: 3901131 - DNA, 25 bp, Homo sapien
aggagacacattcagactctggcca

SEQ ID NO: 3901132 - DNA, 25 bp, Homo sapien
cccgatgtggcgaggagcatcatga

SEQ ID NO: 3901133 - DNA, 25 bp, Homo sapien
aggcaggcgcccgatgtggcgagga

SEQ ID NO: 3901134 - DNA, 25 bp, Homo sapien
cgaggagcatcatgagcctctgcat

SEQ ID NO: 3901135 - DNA, 25 bp, Homo sapien
atgtggcgaggagcatcatgagcct

SEQ ID NO: 3901136 - DNA, 25 bp, Homo sapien
tcccgttgggcagggttagcacctg

SEQ ID NO: 3901137 - DNA, 25 bp, Homo sapien
tccaatctctcttttggcgccggtg

SEQ ID NO: 3901138 - DNA, 25 bp, Homo sapien
tgtcccgttgggcagggttagcacc

SEQ ID NO: 3901139 - DNA, 25 bp, Homo sapien
ttttggcgccggtgggtgggcagca

SEQ ID NO: 3901140 - DNA, 25 bp, Homo sapien
aaggatgcaggtggattgacgacat

SEQ ID NO: 3901141 - DNA, 25 bp, Homo sapien
atgcaggtggattgacgacattttc

SEQ ID NO: 3901142 - DNA, 25 bp, Homo sapien
ggatgcaggtggattgacgacattt

SEQ ID NO: 3901143 - DNA, 25 bp, Homo sapien
gatgcaggtggattgacgacatttt

SEQ ID NO: 3901144 - DNA, 25 bp, Homo sapien
gaaggagtctccaggttttcgccag

SEQ ID NO: 3901145 - DNA, 25 bp, Homo sapien
tgaacaaccgatgcgtgaacacagg

SEQ ID NO: 3901146 - DNA, 25 bp, Homo sapien
cacaggccagttgtcgttcacgtca

SEQ ID NO: 3901147 - DNA, 25 bp, Homo sapien
acgactcaggcacggacgcattgaa

SEQ ID NO: 3901148 - DNA, 25 bp, Homo sapien
aagtggctgatgtgagaggtgcccc

SEQ ID NO: 3901149 - DNA, 25 bp, Homo sapien
gaagtggctgatgtgagaggtgccc

SEQ ID NO: 3901150 - DNA, 25 bp, Homo sapien
agtggctgatgtgagaggtgccccc

SEQ ID NO: 3901151 - DNA, 25 bp, Homo sapien
gtggctgatgtgagaggtgccccca

SEQ ID NO: 3901152 - DNA, 25 bp, Homo sapien
acttgtgactgctaggccccttacc

SEQ ID NO: 3901153 - DNA, 25 bp, Homo sapien
gagaatcctggggttgctgacttgt

SEQ ID NO: 3901154 - DNA, 25 bp, Homo sapien
tgacttgtgactgctaggcccctta

SEQ ID NO: 3901155 - DNA, 25 bp, Homo sapien
ttgctgacttgtgactgctaggccc

SEQ ID NO: 3901156 - DNA, 25 bp, Homo sapien
tgcatccactgctgtcacagagatg

SEQ ID NO: 3901157 - DNA, 25 bp, Homo sapien
cacagtggggtcgtctgcatccact

SEQ ID NO: 3901158 - DNA, 25 bp, Homo sapien
cagaattatcgatggcaaaatactc

SEQ ID NO: 3901159 - DNA, 25 bp, Homo sapien
tttggtacatgacagaggcgtggtc

SEQ ID NO: 3901160 - DNA, 25 bp, Homo sapien
gggcatctcgcgcttccaccacgat

SEQ ID NO: 3901161 - DNA, 25 bp, Homo sapien
agcacggtggccgtgcccgagtccc

SEQ ID NO: 3901162 - DNA, 25 bp, Homo sapien
tcggtccaagcttttcgttattgtg

SEQ ID NO: 3901163 - DNA, 25 bp, Homo sapien
gcttccaccacgatctcatacctgg

SEQ ID NO: 3901164 - DNA, 25 bp, Homo sapien
gatgcaaacagagcaccccaaaggg

SEQ ID NO: 3901165 - DNA, 25 bp, Homo sapien
tagtcgccccgcaagatgctgtact

SEQ ID NO: 3901166 - DNA, 25 bp, Homo sapien
tgtcttcaggcacgacaaatgtgta

SEQ ID NO: 3901167 - DNA, 25 bp, Homo sapien
tgtctcaatggtgaaagcgtcctgg

SEQ ID NO: 3901168 - DNA, 25 bp, Homo sapien
acagaggtgcccacacgggtgtctt

SEQ ID NO: 3901169 - DNA, 25 bp, Homo sapien
acattgttgccattggcctacaaac

SEQ ID NO: 3901170 - DNA, 25 bp, Homo sapien
tctgcacagcaactatgcaaggtag

SEQ ID NO: 3901171 - DNA, 25 bp, Homo sapien
caaggtagtaccaggatgacaccca

SEQ ID NO: 3901172 - DNA, 25 bp, Homo sapien
tctgaggtcatcaagacagcggctg

SEQ ID NO: 3901173 - DNA, 25 bp, Homo sapien
ggcccatggcctcgacaagtgatat

SEQ ID NO: 3901174 - DNA, 25 bp, Homo sapien
tgatgttgataatgacctgggctct

SEQ ID NO: 3901175 - DNA, 25 bp, Homo sapien
tggcctcgacgatgaagctgtattg

SEQ ID NO: 3901176 - DNA, 25 bp, Homo sapien
tgtttcccgcgggagggctcatgta

SEQ ID NO: 3901177 - DNA, 25 bp, Homo sapien
aatgctatgcctagccgcatcaggg

SEQ ID NO: 3901178 - DNA, 25 bp, Homo sapien
tgcagagaataagccttcaaggccg

SEQ ID NO: 3901179 - DNA, 25 bp, Homo sapien
ttcaaggccggacagaggacaagta

SEQ ID NO: 3901180 - DNA, 25 bp, Homo sapien
tccctgtaagtgctaggagaagcca

SEQ ID NO: 3901181 - DNA, 25 bp, Homo sapien
gaccagcaggcataggaacatccag

SEQ ID NO: 3901182 - DNA, 25 bp, Homo sapien
caaatatcgatgaaaccagcatggc

SEQ ID NO: 3901183 - DNA, 25 bp, Homo sapien
gaatgggttagctccatcccctagg

SEQ ID NO: 3901184 - DNA, 25 bp, Homo sapien
taggaccaggttaggccacgaacat

SEQ ID NO: 3901185 - DNA, 25 bp, Homo sapien
cctgttctggccgtgtaagacgtgc

SEQ ID NO: 3901186 - DNA, 25 bp, Homo sapien
gcctccacagtcaggttataccagg

SEQ ID NO: 3901187 - DNA, 25 bp, Homo sapien
cccttgtcactggtcctgcggatgg

SEQ ID NO: 3901188 - DNA, 25 bp, Homo sapien
gtcactggtcctgcggatggagtat

SEQ ID NO: 3901189 - DNA, 25 bp, Homo sapien
tttgtgactcggaagaactggccct

SEQ ID NO: 3901190 - DNA, 25 bp, Homo sapien
ctcacacactttgggctggtagggc

SEQ ID NO: 3901191 - DNA, 25 bp, Homo sapien
tggccatggacagcgttctcacaca

SEQ ID NO: 3901192 - DNA, 25 bp, Homo sapien
ccaaaacttcaatgtggacttgcac

SEQ ID NO: 3901193 - DNA, 25 bp, Homo sapien
ggacttgcacaatggattcttttcc

SEQ ID NO: 3901194 - DNA, 25 bp, Homo sapien
tgaatttgaacttcacgtttcgtgg

SEQ ID NO: 3901195 - DNA, 25 bp, Homo sapien
cacgtttcgtggtgttatgtccttg

SEQ ID NO: 3901196 - DNA, 25 bp, Homo sapien
tatccgtgagggtaaagttgttctc

SEQ ID NO: 3901197 - DNA, 25 bp, Homo sapien
tgtctattgcggagatctgcaggac

SEQ ID NO: 3901198 - DNA, 25 bp, Homo sapien
cctccagtatgggaggggactcctt

SEQ ID NO: 3901199 - DNA, 25 bp, Homo sapien
tctgttctgtactcctcgctggctc

SEQ ID NO: 3901200 - DNA, 25 bp, Homo sapien
gggactccttggctagttcttgaac

SEQ ID NO: 3901201 - DNA, 25 bp, Homo sapien
ggctagttcttgaactgagctgact

SEQ ID NO: 3901202 - DNA, 25 bp, Homo sapien
aaacaccaaggcctcggagtcaggc

SEQ ID NO: 3901203 - DNA, 25 bp, Homo sapien
ctggaaacaccaaggcctcggagtc

SEQ ID NO: 3901204 - DNA, 25 bp, Homo sapien
aggcctcggagtcaggctttgccat

SEQ ID NO: 3901205 - DNA, 25 bp, Homo sapien
caaggcctcggagtcaggctttgcc

SEQ ID NO: 3901206 - DNA, 25 bp, Homo sapien
gaactcgccctgctcgttgcacttg

SEQ ID NO: 3901207 - DNA, 25 bp, Homo sapien
cattgtctgagatgaccacgggtag

SEQ ID NO: 3901208 - DNA, 25 bp, Homo sapien
gaagtggaccttggtatgctcccgg

SEQ ID NO: 3901209 - DNA, 25 bp, Homo sapien
ggatgcagagtaagatggctaccac

SEQ ID NO: 3901210 - DNA, 25 bp, Homo sapien
cggagccgccgccgcaggaagatga

SEQ ID NO: 3901211 - DNA, 25 bp, Homo sapien
agccgccgccgcaggaagatgagca

SEQ ID NO: 3901212 - DNA, 25 bp, Homo sapien
gagccgccgccgcaggaagatgagc

SEQ ID NO: 3901213 - DNA, 25 bp, Homo sapien
ttccggagccgccgccgcaggaaga

SEQ ID NO: 3901214 - DNA, 25 bp, Homo sapien
ggatctccggcacgctcttgccgtg

SEQ ID NO: 3901215 - DNA, 25 bp, Homo sapien
gctcgtggatctccggcacgctctt

SEQ ID NO: 3901216 - DNA, 25 bp, Homo sapien
acgctcttgccgtgcgcgcgggcct

SEQ ID NO: 3901217 - DNA, 25 bp, Homo sapien
cacgctcttgccgtgcgcgcgggcc

SEQ ID NO: 3901218 - DNA, 25 bp, Homo sapien
accgacacatcgtagctggtggtgt

SEQ ID NO: 3901219 - DNA, 25 bp, Homo sapien
tgagcaccgacacatcgtagctggt

SEQ ID NO: 3901220 - DNA, 25 bp, Homo sapien
gagttgagcaccgacacatcgtagc

SEQ ID NO: 3901221 - DNA, 25 bp, Homo sapien
gcaccgacacatcgtagctggtggt

SEQ ID NO: 3901222 - DNA, 25 bp, Homo sapien
aggccgggcgtccagcgcgggccgc

SEQ ID NO: 3901223 - DNA, 25 bp, Homo sapien
gaaggccgggcgtccagcgcgggcc

SEQ ID NO: 3901224 - DNA, 25 bp, Homo sapien
ctgcgcatagagggaaggccgggcg

SEQ ID NO: 3901225 - DNA, 25 bp, Homo sapien
ggaaggccgggcgtccagcgcgggc

SEQ ID NO: 3901226 - DNA, 25 bp, Homo sapien
gactcggctatggactcggagccct

SEQ ID NO: 3901227 - DNA, 25 bp, Homo sapien
aagtcgtaatccacgtcagagtcgg

SEQ ID NO: 3901228 - DNA, 25 bp, Homo sapien
cagccagcatcttaaacctgggtcc

SEQ ID NO: 3901229 - DNA, 25 bp, Homo sapien
tagccgtagatgtgcagcgtgtcgt

SEQ ID NO: 3901230 - DNA, 25 bp, Homo sapien
taccagggcgttcagggaccctaga

SEQ ID NO: 3901231 - DNA, 25 bp, Homo sapien
gcatgatggtcagtctcccttggga

SEQ ID NO: 3901232 - DNA, 25 bp, Homo sapien
ggagtttgctatcccaaggctgatg

SEQ ID NO: 3901233 - DNA, 25 bp, Homo sapien
caagtcaagctgtccaggcctttgc

SEQ ID NO: 3901234 - DNA, 25 bp, Homo sapien
tttccctgaatgtggttcagtgctc

SEQ ID NO: 3901235 - DNA, 25 bp, Homo sapien
catttccctgaatgtggttcagtgc

SEQ ID NO: 3901236 - DNA, 25 bp, Homo sapien
atttccctgaatgtggttcagtgct

SEQ ID NO: 3901237 - DNA, 25 bp, Homo sapien
ttccctgaatgtggttcagtgctca

SEQ ID NO: 3901238 - DNA, 25 bp, Homo sapien
cctcggtccatgacgaagggtgagc

SEQ ID NO: 3901239 - DNA, 25 bp, Homo sapien
gtaaagacacatggctcggctccgt

SEQ ID NO: 3901240 - DNA, 25 bp, Homo sapien
ccagtggaagatgcatgggtgacca

SEQ ID NO: 3901241 - DNA, 25 bp, Homo sapien
tacttgtcatgcaccagtttggcca

SEQ ID NO: 3901242 - DNA, 25 bp, Homo sapien
gccttgaaaccagggcgctcaggga

SEQ ID NO: 3901243 - DNA, 25 bp, Homo sapien
tcggagagccgagattcttggtgct

SEQ ID NO: 3901244 - DNA, 25 bp, Homo sapien
tctaccccatcagagcctggtgcga

SEQ ID NO: 3901245 - DNA, 25 bp, Homo sapien
aaatccaaagatccggcggccaagg

SEQ ID NO: 3901246 - DNA, 25 bp, Homo sapien
aaatgccccggatgactttcactct

SEQ ID NO: 3901247 - DNA, 25 bp, Homo sapien
caagttcttagtgctgtgtctgcaa

SEQ ID NO: 3901248 - DNA, 25 bp, Homo sapien
tagtgctctagggagggctgttcta

SEQ ID NO: 3901249 - DNA, 25 bp, Homo sapien
aagccctgcccagtacatgctgctg

SEQ ID NO: 3901250 - DNA, 25 bp, Homo sapien
cttcacatggcagagcgggagagca

SEQ ID NO: 3901251 - DNA, 25 bp, Homo sapien
gatccagtcgcctcctatcaggtcc

SEQ ID NO: 3901252 - DNA, 25 bp, Homo sapien
agggtgaagtggaagcaagcacctt

SEQ ID NO: 3901253 - DNA, 25 bp, Homo sapien
catggcggaagggtgaagtggaagc

SEQ ID NO: 3901254 - DNA, 25 bp, Homo sapien
tgagctgagaattcccgtgtgatgg

SEQ ID NO: 3901255 - DNA, 25 bp, Homo sapien
gcctttgggaaaactaatgagcctg

SEQ ID NO: 3901256 - DNA, 25 bp, Homo sapien
caacgggctgcaaggactgaattca

SEQ ID NO: 3901257 - DNA, 25 bp, Homo sapien
gaatggccagatgcggaatcccaga

SEQ ID NO: 3901258 - DNA, 25 bp, Homo sapien
gcctaattgtaggtcacgaagattt

SEQ ID NO: 3901259 - DNA, 25 bp, Homo sapien
tcaaagctgtttggctcttctacat

SEQ ID NO: 3901260 - DNA, 25 bp, Homo sapien
catatggatgtctaattgtttcagc

SEQ ID NO: 3901261 - DNA, 25 bp, Homo sapien
taccatactgactcaatgactgtag

SEQ ID NO: 3901262 - DNA, 25 bp, Homo sapien
aggggatgtgccaagccattaatga

SEQ ID NO: 3901263 - DNA, 25 bp, Homo sapien
tattctaaccatatcaggcactgac

SEQ ID NO: 3901264 - DNA, 25 bp, Homo sapien
cttccagcactggagactatatttc

SEQ ID NO: 3901265 - DNA, 25 bp, Homo sapien
gaccccgttcatgagcggtctgact

SEQ ID NO: 3901266 - DNA, 25 bp, Homo sapien
cctccttccgtttgagatatccaag

SEQ ID NO: 3901267 - DNA, 25 bp, Homo sapien
ttgagatatccaagcttcacggaag

SEQ ID NO: 3901268 - DNA, 25 bp, Homo sapien
ctcctccttccgtttgagatatcca

SEQ ID NO: 3901269 - DNA, 25 bp, Homo sapien
caagcttcacggaagaactgaagtt

SEQ ID NO: 3901270 - DNA, 25 bp, Homo sapien
gccgctacgcttcggcctgctgggc

SEQ ID NO: 3901271 - DNA, 25 bp, Homo sapien
cgaggaggccgggaaatgcgggagg

SEQ ID NO: 3901272 - DNA, 25 bp, Homo sapien
tcggaggccactgcgctcgggctcg

SEQ ID NO: 3901273 - DNA, 25 bp, Homo sapien
ggcccgggtcactccgagatgcggg

SEQ ID NO: 3901274 - DNA, 25 bp, Homo sapien
ctccgtgcgccgcagtgccggctcc

SEQ ID NO: 3901275 - DNA, 25 bp, Homo sapien
gctccgctccgtgcgccgcagtgcc

SEQ ID NO: 3901276 - DNA, 25 bp, Homo sapien
cgctccgctccgtgcgccgcagtgc

SEQ ID NO: 3901277 - DNA, 25 bp, Homo sapien
gtgcgccgcagtgccggctccagct

SEQ ID NO: 3901278 - DNA, 25 bp, Homo sapien
atcccgctccgttccgagcgcgctg

SEQ ID NO: 3901279 - DNA, 25 bp, Homo sapien
tgcggttccgttccggaccgcgcat

SEQ ID NO: 3901280 - DNA, 25 bp, Homo sapien
cggctcgcgcagatcccagtggcca

SEQ ID NO: 3901281 - DNA, 25 bp, Homo sapien
gcccgagggcgcgatcagggtcagc

SEQ ID NO: 3901282 - DNA, 25 bp, Homo sapien
cctctgacagcgcaagggaaagtct

SEQ ID NO: 3901283 - DNA, 25 bp, Homo sapien
cagttatgtttgaggagtgagtcca

SEQ ID NO: 3901284 - DNA, 25 bp, Homo sapien
ggtgaagtctctcgttccagcagag

SEQ ID NO: 3901285 - DNA, 25 bp, Homo sapien
catcggaaatcgtggctcaagagca

SEQ ID NO: 3901286 - DNA, 25 bp, Homo sapien
taaaggaatctatgaatttaggagt

SEQ ID NO: 3901287 - DNA, 25 bp, Homo sapien
aaaggaatctatgaatttaggagtg

SEQ ID NO: 3901288 - DNA, 25 bp, Homo sapien
ataaaggaatctatgaatttaggag

SEQ ID NO: 3901289 - DNA, 25 bp, Homo sapien
aaggaatctatgaatttaggagtgg

SEQ ID NO: 3901290 - DNA, 25 bp, Homo sapien
cggagacacaaacaggcaggtgttg

SEQ ID NO: 3901291 - DNA, 25 bp, Homo sapien
gagacacaaacaggcaggtgttggg

SEQ ID NO: 3901292 - DNA, 25 bp, Homo sapien
tgcggagacacaaacaggcaggtgt

SEQ ID NO: 3901293 - DNA, 25 bp, Homo sapien
ctgcggagacacaaacaggcaggtg

SEQ ID NO: 3901294 - DNA, 25 bp, Homo sapien
gacttctcgcagggaaggcccctcc

SEQ ID NO: 3901295 - DNA, 25 bp, Homo sapien
acttctcgcagggaaggcccctcca

SEQ ID NO: 3901296 - DNA, 25 bp, Homo sapien
tgacttctcgcagggaaggcccctc

SEQ ID NO: 3901297 - DNA, 25 bp, Homo sapien
ggcagggacgtttgaaggacatgta

SEQ ID NO: 3901298 - DNA, 25 bp, Homo sapien
atccttggagcagaacagcggagcc

SEQ ID NO: 3901299 - DNA, 25 bp, Homo sapien
ttgaaggacatgtaatccttggagc

SEQ ID NO: 3901300 - DNA, 25 bp, Homo sapien
ggacatgtaatccttggagcagaac

SEQ ID NO: 3901301 - DNA, 25 bp, Homo sapien
caaagtgcgattttcagttctcagg

SEQ ID NO: 3901302 - DNA, 25 bp, Homo sapien
acacttcgggaagggctgatacaga

SEQ ID NO: 3901303 - DNA, 25 bp, Homo sapien
cacattagcctctggttggacccct

SEQ ID NO: 3901304 - DNA, 25 bp, Homo sapien
gaggaactccgatccacacttcggg

SEQ ID NO: 3901305 - DNA, 25 bp, Homo sapien
ttgagcgccccaaaccaatacagca

SEQ ID NO: 3901306 - DNA, 25 bp, Homo sapien
tgagcgccccaaaccaatacagcaa

SEQ ID NO: 3901307 - DNA, 25 bp, Homo sapien
gagcgccccaaaccaatacagcaaa

SEQ ID NO: 3901308 - DNA, 25 bp, Homo sapien
tgtgctagaccagagaactgtgagg

SEQ ID NO: 3901309 - DNA, 25 bp, Homo sapien
tagggtcagactttgtgctagacca

SEQ ID NO: 3901310 - DNA, 25 bp, Homo sapien
ctaggatgttcaggggccatgaagt

SEQ ID NO: 3901311 - DNA, 25 bp, Homo sapien
tggcagagtggattcctcacccctg

SEQ ID NO: 3901312 - DNA, 25 bp, Homo sapien
gcctctcaatgccaacctggggctg

SEQ ID NO: 3901313 - DNA, 25 bp, Homo sapien
gcagggaagactgagttagttctgc

SEQ ID NO: 3901314 - DNA, 25 bp, Homo sapien
tgcaacagtcactgtaggataaaca

SEQ ID NO: 3901315 - DNA, 25 bp, Homo sapien
gttctgcaacagtcactgtaggata

SEQ ID NO: 3901316 - DNA, 25 bp, Homo sapien
gttggtgatggggtcaggcacaagg

SEQ ID NO: 3901317 - DNA, 25 bp, Homo sapien
ttggtgatggggtcaggcacaaggc

SEQ ID NO: 3901318 - DNA, 25 bp, Homo sapien
gtgttggtgatggggtcaggcacaa

SEQ ID NO: 3901319 - DNA, 25 bp, Homo sapien
tggtgatggggtcaggcacaaggct

SEQ ID NO: 3901320 - DNA, 25 bp, Homo sapien
tgttcagagattctcctagtgtctt

SEQ ID NO: 3901321 - DNA, 25 bp, Homo sapien
ttcagagattctcctagtgtcttgg

SEQ ID NO: 3901322 - DNA, 25 bp, Homo sapien
taggaaaggaattctcggttcttgc

SEQ ID NO: 3901323 - DNA, 25 bp, Homo sapien
cggttcttgctgtagatgttcagag

SEQ ID NO: 3901324 - DNA, 25 bp, Homo sapien
tctggtgggacagcaattatggctc

SEQ ID NO: 3901325 - DNA, 25 bp, Homo sapien
gtcacactggatgggcatgcttttg

SEQ ID NO: 3901326 - DNA, 25 bp, Homo sapien
aattatggctccttcactgttcacc

SEQ ID NO: 3901327 - DNA, 25 bp, Homo sapien
ctctgtaaatgtcacactggatggg

SEQ ID NO: 3901328 - DNA, 25 bp, Homo sapien
agatcccttcgccaaacacccatga

SEQ ID NO: 3901329 - DNA, 25 bp, Homo sapien
ccaaacacccatgagggattctggt

SEQ ID NO: 3901330 - DNA, 25 bp, Homo sapien
tcgccaaacacccatgagggattct

SEQ ID NO: 3901331 - DNA, 25 bp, Homo sapien
ccttcgccaaacacccatgagggat

SEQ ID NO: 3901332 - DNA, 25 bp, Homo sapien
tcaccaggagactgatagagggatg

SEQ ID NO: 3901333 - DNA, 25 bp, Homo sapien
accaggagactgatagagggatgtt

SEQ ID NO: 3901334 - DNA, 25 bp, Homo sapien
aggagactgatagagggatgttgga

SEQ ID NO: 3901335 - DNA, 25 bp, Homo sapien
ggtcaccaggagactgatagaggga

SEQ ID NO: 3901336 - DNA, 25 bp, Homo sapien
aggtccacttcccgggcaagtctgg

SEQ ID NO: 3901337 - DNA, 25 bp, Homo sapien
tctggcctcatcagtacactcttcc

SEQ ID NO: 3901338 - DNA, 25 bp, Homo sapien
ccaggctcattaccagatgggcggg

SEQ ID NO: 3901339 - DNA, 25 bp, Homo sapien
gctcattaccagatgggcgggagat

SEQ ID NO: 3901340 - DNA, 25 bp, Homo sapien
ttgcccttgtctagcagcaccaggc

SEQ ID NO: 3901341 - DNA, 25 bp, Homo sapien
cagcagatgagagccttgcccttgt

SEQ ID NO: 3901342 - DNA, 25 bp, Homo sapien
gaaaaggtggcaaggtgaggctctc

SEQ ID NO: 3901343 - DNA, 25 bp, Homo sapien
aaggtggcaaggtgaggctctcctc

SEQ ID NO: 3901344 - DNA, 25 bp, Homo sapien
ggtggcaaggtgaggctctcctcca

SEQ ID NO: 3901345 - DNA, 25 bp, Homo sapien
aaaaggtggcaaggtgaggctctcc

SEQ ID NO: 3901346 - DNA, 25 bp, Homo sapien
gaactaatacagatgctaatctgcc

SEQ ID NO: 3901347 - DNA, 25 bp, Homo sapien
tgattagccctggtcctgtgaaaac

SEQ ID NO: 3901348 - DNA, 25 bp, Homo sapien
gatctacctgttttgctgctctcca

SEQ ID NO: 3901349 - DNA, 25 bp, Homo sapien
gcatgtataccctttccctgtgata

SEQ ID NO: 3901350 - DNA, 25 bp, Homo sapien
ttctagcactgaccccaaaagcctc

SEQ ID NO: 3901351 - DNA, 25 bp, Homo sapien
tctagcactgaccccaaaagcctca

SEQ ID NO: 3901352 - DNA, 25 bp, Homo sapien
cccaaaagcctcaatcacactcaac

SEQ ID NO: 3901353 - DNA, 25 bp, Homo sapien
ctagcactgaccccaaaagcctcaa

SEQ ID NO: 3901354 - DNA, 25 bp, Homo sapien
cggaaaagatgctggggccttggga

SEQ ID NO: 3901355 - DNA, 25 bp, Homo sapien
aagatgctggggccttgggagctgg

SEQ ID NO: 3901356 - DNA, 25 bp, Homo sapien
gatgctggggccttgggagctgggg

SEQ ID NO: 3901357 - DNA, 25 bp, Homo sapien
tgctggggccttgggagctggggtc

SEQ ID NO: 3901358 - DNA, 25 bp, Homo sapien
ccttccttctctgcccgtgctgccc

SEQ ID NO: 3901359 - DNA, 25 bp, Homo sapien
gtgctgccctgtgagctgttgctcc

SEQ ID NO: 3901360 - DNA, 25 bp, Homo sapien
ttccttctctgcccgtgctgccctg

SEQ ID NO: 3901361 - DNA, 25 bp, Homo sapien
ccgtgctgccctgtgagctgttgct

SEQ ID NO: 3901362 - DNA, 25 bp, Homo sapien
ctgtggacagagagagaggacactg

SEQ ID NO: 3901363 - DNA, 25 bp, Homo sapien
tgtggacagagagagaggacactga

SEQ ID NO: 3901364 - DNA, 25 bp, Homo sapien
gtggacagagagagaggacactgag

SEQ ID NO: 3901365 - DNA, 25 bp, Homo sapien
tgctccgagctctctgagaatgtgg

SEQ ID NO: 3901366 - DNA, 25 bp, Homo sapien
tagaagtagctggtgcggttgtatc

SEQ ID NO: 3901367 - DNA, 25 bp, Homo sapien
accagcacgggggacacgagcagat

SEQ ID NO: 3901368 - DNA, 25 bp, Homo sapien
tatgacggcactcgccaccagcacg

SEQ ID NO: 3901369 - DNA, 25 bp, Homo sapien
tgatggtgatgcaggagaggatgat

SEQ ID NO: 3901370 - DNA, 25 bp, Homo sapien
aatgatggtgatgcaggagaggatg

SEQ ID NO: 3901371 - DNA, 25 bp, Homo sapien
gtgatgcaggagaggatgatgacca

SEQ ID NO: 3901372 - DNA, 25 bp, Homo sapien
tggtgatgcaggagaggatgatgac

SEQ ID NO: 3901373 - DNA, 25 bp, Homo sapien
tgaagccgggcctgcctgtccctgc

SEQ ID NO: 3901374 - DNA, 25 bp, Homo sapien
gccgggcctgcctgtccctgcggat

SEQ ID NO: 3901375 - DNA, 25 bp, Homo sapien
gggcctgcctgtccctgcggatgct

SEQ ID NO: 3901376 - DNA, 25 bp, Homo sapien
tgccgctgaagccgggcctgcctgt

SEQ ID NO: 3901377 - DNA, 25 bp, Homo sapien
tactctcggtgtcgacgccggcggt

SEQ ID NO: 3901378 - DNA, 25 bp, Homo sapien
cgtagccgtgctcgtactctcggtg

SEQ ID NO: 3901379 - DNA, 25 bp, Homo sapien
cgacgccggcggtggtgatgatggt

SEQ ID NO: 3901380 - DNA, 25 bp, Homo sapien
tgctcgtactctcggtgtcgacgcc

SEQ ID NO: 3901381 - DNA, 25 bp, Homo sapien
tcctaccttgcccatggagcgcttc

SEQ ID NO: 3901382 - DNA, 25 bp, Homo sapien
ggacgagtcacctgtgggccctgct

SEQ ID NO: 3901383 - DNA, 25 bp, Homo sapien
ctctcatggatgcagcacaatcacc

SEQ ID NO: 3901384 - DNA, 25 bp, Homo sapien
ctgtctggggacgagtcacctgtgg

SEQ ID NO: 3901385 - DNA, 25 bp, Homo sapien
tgtgcctgtcacacagggatccctg

SEQ ID NO: 3901386 - DNA, 25 bp, Homo sapien
gccagcattgccagggaagggtttt

SEQ ID NO: 3901387 - DNA, 25 bp, Homo sapien
cctggggaaagtcagggctgcttcc

SEQ ID NO: 3901388 - DNA, 25 bp, Homo sapien
ggttcagggagggttccacctgcag

SEQ ID NO: 3901389 - DNA, 25 bp, Homo sapien
gcctcagaccaggatccagggatgg

SEQ ID NO: 3901390 - DNA, 25 bp, Homo sapien
ggatccagggatggtccttatgggt

SEQ ID NO: 3901391 - DNA, 25 bp, Homo sapien
agaccaccggcctgggcctcagacc

SEQ ID NO: 3901392 - DNA, 25 bp, Homo sapien
ctgcagggaacagaccaccggcctg

SEQ ID NO: 3901393 - DNA, 25 bp, Homo sapien
cttgagcggctgtatgtgtgctcgt

SEQ ID NO: 3901394 - DNA, 25 bp, Homo sapien
agcggctgtatgtgtgctcgtccga

SEQ ID NO: 3901395 - DNA, 25 bp, Homo sapien
ctgcggcttgagcggctgtatgtgt

SEQ ID NO: 3901396 - DNA, 25 bp, Homo sapien
cggctgtatgtgtgctcgtccgaca

SEQ ID NO: 3901397 - DNA, 25 bp, Homo sapien
accgtggcatccacgtccccgtcag

SEQ ID NO: 3901398 - DNA, 25 bp, Homo sapien
tgaggagctgcaggcatagcgcatc

SEQ ID NO: 3901399 - DNA, 25 bp, Homo sapien
ccgtcagagctgatgtccaagggtg

SEQ ID NO: 3901400 - DNA, 25 bp, Homo sapien
cctggtggagaatctgggtacagct

SEQ ID NO: 3901401 - DNA, 25 bp, Homo sapien
cgagtagggtggtggtgcgtccgtg

SEQ ID NO: 3901402 - DNA, 25 bp, Homo sapien
gcaggaatcagtcagcgagtagggt

SEQ ID NO: 3901403 - DNA, 25 bp, Homo sapien
gggacatacagctgagtggcccctg

SEQ ID NO: 3901404 - DNA, 25 bp, Homo sapien
catggagaccgtgtgaaggccacct

SEQ ID NO: 3901405 - DNA, 25 bp, Homo sapien
cctgggtctgggcccggcagtggca

SEQ ID NO: 3901406 - DNA, 25 bp, Homo sapien
tgggagccccttggccctgggtctg

SEQ ID NO: 3901407 - DNA, 25 bp, Homo sapien
tggcagcaggcctgatggggggcca

SEQ ID NO: 3901408 - DNA, 25 bp, Homo sapien
tgggcccggcagtggcagcaggcct

SEQ ID NO: 3901409 - DNA, 25 bp, Homo sapien
tgtgcacgcctttgtgtgcctaaag

SEQ ID NO: 3901410 - DNA, 25 bp, Homo sapien
gaatgtggttcagcctgtagggacc

SEQ ID NO: 3901411 - DNA, 25 bp, Homo sapien
tcacacatatgtggagcacgtctag

SEQ ID NO: 3901412 - DNA, 25 bp, Homo sapien
tgagtcacgtgtgcatctctgtgtg

SEQ ID NO: 3901413 - DNA, 25 bp, Homo sapien
acgttccgtgaaacctttgcaggtg

SEQ ID NO: 3901414 - DNA, 25 bp, Homo sapien
ccacgttccgtgaaacctttgcagg

SEQ ID NO: 3901415 - DNA, 25 bp, Homo sapien
cacgttccgtgaaacctttgcaggt

SEQ ID NO: 3901416 - DNA, 25 bp, Homo sapien
gcagtttccagaggcagaatagaat

SEQ ID NO: 3901417 - DNA, 25 bp, Homo sapien
cagaggcagaatagaatttgggcgc

SEQ ID NO: 3901418 - DNA, 25 bp, Homo sapien
ttcgcctctctctccgaagcgctct

SEQ ID NO: 3901419 - DNA, 25 bp, Homo sapien
gtccagcagtttccagaggcagaat

SEQ ID NO: 3901420 - DNA, 25 bp, Homo sapien
cctggggtaggggtcagggcaggca

SEQ ID NO: 3901421 - DNA, 25 bp, Homo sapien
cccaggaggacaagctggccctggg

SEQ ID NO: 3901422 - DNA, 25 bp, Homo sapien
ccgcctcccaggaggacaagctggc

SEQ ID NO: 3901423 - DNA, 25 bp, Homo sapien
ctgtcccgcctcccaggaggacaag

SEQ ID NO: 3901424 - DNA, 25 bp, Homo sapien
aatcgagagataggcacagcgcaca

SEQ ID NO: 3901425 - DNA, 25 bp, Homo sapien
cagcgcacaacggaacctcactggg

SEQ ID NO: 3901426 - DNA, 25 bp, Homo sapien
ctggaatcgagagataggcacagcg

SEQ ID NO: 3901427 - DNA, 25 bp, Homo sapien
ataggcacagcgcacaacggaacct

SEQ ID NO: 3901428 - DNA, 25 bp, Homo sapien
taagtggcagggtggtgatgttgtg

SEQ ID NO: 3901429 - DNA, 25 bp, Homo sapien
aagtggcagggtggtgatgttgtgg

SEQ ID NO: 3901430 - DNA, 25 bp, Homo sapien
agtggcagggtggtgatgttgtggc

SEQ ID NO: 3901431 - DNA, 25 bp, Homo sapien
gcactgtggtgaagccacctggaga

SEQ ID NO: 3901432 - DNA, 25 bp, Homo sapien
ctggactgatgagggaaccgccgct

SEQ ID NO: 3901433 - DNA, 25 bp, Homo sapien
gctctactagcaccacctgactgag

SEQ ID NO: 3901434 - DNA, 25 bp, Homo sapien
gcctgcagcgtcagagatagctcta

SEQ ID NO: 3901435 - DNA, 25 bp, Homo sapien
ctggctctgacccattcgcgtgcag

SEQ ID NO: 3901436 - DNA, 25 bp, Homo sapien
tgacccattcgcgtgcaggccacag

SEQ ID NO: 3901437 - DNA, 25 bp, Homo sapien
ggctctgacccattcgcgtgcaggc

SEQ ID NO: 3901438 - DNA, 25 bp, Homo sapien
ccattcgcgtgcaggccacagtggt

SEQ ID NO: 3901439 - DNA, 25 bp, Homo sapien
ttcagctccgcaccagaagaaatgc

SEQ ID NO: 3901440 - DNA, 25 bp, Homo sapien
tcttagcccttcattggaggaacag

SEQ ID NO: 3901441 - DNA, 25 bp, Homo sapien
ggaatcacctctgttacctgcgtgg

SEQ ID NO: 3901442 - DNA, 25 bp, Homo sapien
tgcacgcaggatgctacagaacttc

SEQ ID NO: 3901443 - DNA, 25 bp, Homo sapien
cagctcattgtctatctgtggcttg

SEQ ID NO: 3901444 - DNA, 25 bp, Homo sapien
tggggtcatcgctcagactgagatc

SEQ ID NO: 3901445 - DNA, 25 bp, Homo sapien
tgtggcttggggtcatcgctcagac

SEQ ID NO: 3901446 - DNA, 25 bp, Homo sapien
gcttggggtcatcgctcagactgag

SEQ ID NO: 3901447 - DNA, 25 bp, Homo sapien
gaagagtatagtcaccaggccaagg

SEQ ID NO: 3901448 - DNA, 25 bp, Homo sapien
ggcctccctgagttgtgttgaagag

SEQ ID NO: 3901449 - DNA, 25 bp, Homo sapien
gcctccctgagttgtgttgaagagt

SEQ ID NO: 3901450 - DNA, 25 bp, Homo sapien
tgaagagtatagtcaccaggccaag

SEQ ID NO: 3901451 - DNA, 25 bp, Homo sapien
agtagctgatgatgttgcccaggag

SEQ ID NO: 3901452 - DNA, 25 bp, Homo sapien
ggtagtagctgatgatgttgcccag

SEQ ID NO: 3901453 - DNA, 25 bp, Homo sapien
tgcagacatcgagccggccctcccc

SEQ ID NO: 3901454 - DNA, 25 bp, Homo sapien
gcttgcctgcagacatcgagccggc

SEQ ID NO: 3901455 - DNA, 25 bp, Homo sapien
gacagagccatggaggggccctcct

SEQ ID NO: 3901456 - DNA, 25 bp, Homo sapien
ctggcagacagagccatggaggggc

SEQ ID NO: 3901457 - DNA, 25 bp, Homo sapien
cagacagagccatggaggggccctc

SEQ ID NO: 3901458 - DNA, 25 bp, Homo sapien
ggcagacagagccatggaggggccc

SEQ ID NO: 3901459 - DNA, 25 bp, Homo sapien
cagcagccacccagagcaagggcca

SEQ ID NO: 3901460 - DNA, 25 bp, Homo sapien
agccacccagagcaagggccacttc

SEQ ID NO: 3901461 - DNA, 25 bp, Homo sapien
ctgggatccccacaacagcagccac

SEQ ID NO: 3901462 - DNA, 25 bp, Homo sapien
gcagccacccagagcaagggccact

SEQ ID NO: 3901463 - DNA, 25 bp, Homo sapien
ctctagtgcatgcaccagctcaggg

SEQ ID NO: 3901464 - DNA, 25 bp, Homo sapien
ccaggaactctagtgcatgcaccag

SEQ ID NO: 3901465 - DNA, 25 bp, Homo sapien
aggttgacagagatcagctccagga

SEQ ID NO: 3901466 - DNA, 25 bp, Homo sapien
cagctccaggaactctagtgcatgc

SEQ ID NO: 3901467 - DNA, 25 bp, Homo sapien
tttgtgtctggaaagcatagatcgc

SEQ ID NO: 3901468 - DNA, 25 bp, Homo sapien
ggaagatcttgaacaccatctgctt

SEQ ID NO: 3901469 - DNA, 25 bp, Homo sapien
gaaagcatagatcgcacccagtagg

SEQ ID NO: 3901470 - DNA, 25 bp, Homo sapien
cagtaggtaaagctcccagtgtaca

SEQ ID NO: 3901471 - DNA, 25 bp, Homo sapien
gggcatccagtgtaagacagggtca

SEQ ID NO: 3901472 - DNA, 25 bp, Homo sapien
tcactgaagcaaggcaggacctcct

SEQ ID NO: 3901473 - DNA, 25 bp, Homo sapien
accagggcatccagtgtaagacagg

SEQ ID NO: 3901474 - DNA, 25 bp, Homo sapien
taagacagggtcactgaagcaaggc

SEQ ID NO: 3901475 - DNA, 25 bp, Homo sapien
tatgcttctggcttccggtctaagg

SEQ ID NO: 3901476 - DNA, 25 bp, Homo sapien
agaatggtgacttttctgctctcag

SEQ ID NO: 3901477 - DNA, 25 bp, Homo sapien
cacctcacccgatgaagggccaggg

SEQ ID NO: 3901478 - DNA, 25 bp, Homo sapien
tcaggaactgcatccgagaccaggg

SEQ ID NO: 3901479 - DNA, 25 bp, Homo sapien
ccacctcagggcgtgggatgcctct

SEQ ID NO: 3901480 - DNA, 25 bp, Homo sapien
acctcagggcgtgggatgcctctag

SEQ ID NO: 3901481 - DNA, 25 bp, Homo sapien
ctccacctcagggcgtgggatgcct

SEQ ID NO: 3901482 - DNA, 25 bp, Homo sapien
ttcctccacctcagggcgtgggatg

SEQ ID NO: 3901483 - DNA, 25 bp, Homo sapien
catgaagtcagtacaccgcagagct

SEQ ID NO: 3901484 - DNA, 25 bp, Homo sapien
ggtcgcaaaatctcccagcctagag

SEQ ID NO: 3901485 - DNA, 25 bp, Homo sapien
tttgaagtgcttcctaggccagtga

SEQ ID NO: 3901486 - DNA, 25 bp, Homo sapien
tagagaccacacctgaaacggctga

SEQ ID NO: 3901487 - DNA, 25 bp, Homo sapien
gggttctggtgtccgccatatggct

SEQ ID NO: 3901488 - DNA, 25 bp, Homo sapien
tgggcctagaggaacacctgggtcc

SEQ ID NO: 3901489 - DNA, 25 bp, Homo sapien
ccatatggctgttgagagacgcctc

SEQ ID NO: 3901490 - DNA, 25 bp, Homo sapien
tgggagctgccttaagccgattctg

SEQ ID NO: 3901491 - DNA, 25 bp, Homo sapien
caagttatgggtgcgttctgccagc

SEQ ID NO: 3901492 - DNA, 25 bp, Homo sapien
cctttaaagagcaggacggacacgc

SEQ ID NO: 3901493 - DNA, 25 bp, Homo sapien
cttgctgagatgaaatgcgaccggg

SEQ ID NO: 3901494 - DNA, 25 bp, Homo sapien
tgcgaccgggtctctttaagggcca

SEQ ID NO: 3901495 - DNA, 25 bp, Homo sapien
cagttatctatttgcagggttgttg

SEQ ID NO: 3901496 - DNA, 25 bp, Homo sapien
gaggaataagtgacatcatgagtgt

SEQ ID NO: 3901497 - DNA, 25 bp, Homo sapien
agacagttatctatttgcagggttg

SEQ ID NO: 3901498 - DNA, 25 bp, Homo sapien
tgggaggaataagtgacatcatgag

SEQ ID NO: 3901499 - DNA, 25 bp, Homo sapien
gttgcttctgaccattttgaacaag

SEQ ID NO: 3901500 - DNA, 25 bp, Homo sapien
atctgttgcttctgaccattttgaa

SEQ ID NO: 3901501 - DNA, 25 bp, Homo sapien
gagcaaggagttatatctgttgctt

SEQ ID NO: 3901502 - DNA, 25 bp, Homo sapien
aagttacctaattctctgaggacaa

SEQ ID NO: 3901503 - DNA, 25 bp, Homo sapien
gggaacgaagtgtccctctgttgct

SEQ ID NO: 3901504 - DNA, 25 bp, Homo sapien
ggaacgaagtgtccctctgttgctc

SEQ ID NO: 3901505 - DNA, 25 bp, Homo sapien
ccagccgcttctgatcattaaaaaa

SEQ ID NO: 3901506 - DNA, 25 bp, Homo sapien
cgcgcccagccgcttctgatcatta

SEQ ID NO: 3901507 - DNA, 25 bp, Homo sapien
gcggacctagagctgggcacatatt

SEQ ID NO: 3901508 - DNA, 25 bp, Homo sapien
tgttagcccgccgtgttctggcctg

SEQ ID NO: 3901509 - DNA, 25 bp, Homo sapien
tcgcgtagcacattagcggacctag

SEQ ID NO: 3901510 - DNA, 25 bp, Homo sapien
ttctggcctggcgttaatgacggca

SEQ ID NO: 3901511 - DNA, 25 bp, Homo sapien
ttctgcgaagcgatagcaaccgcca

SEQ ID NO: 3901512 - DNA, 25 bp, Homo sapien
tgcctgagtaggttctgcgaagcga

SEQ ID NO: 3901513 - DNA, 25 bp, Homo sapien
gcactttccctcaactcttctcagc

SEQ ID NO: 3901514 - DNA, 25 bp, Homo sapien
gatagcaaccgccaccgcggcggag

SEQ ID NO: 3901515 - DNA, 25 bp, Homo sapien
gggcgatgttttattttcggctgca

SEQ ID NO: 3901516 - DNA, 25 bp, Homo sapien
ttattttcggctgcacgttatccat

SEQ ID NO: 3901517 - DNA, 25 bp, Homo sapien
gatgttttattttcggctgcacgtt

SEQ ID NO: 3901518 - DNA, 25 bp, Homo sapien
gcagaaggggcgatgttttattttc

SEQ ID NO: 3901519 - DNA, 25 bp, Homo sapien
gccgcagcatcttcacgtggccttt

SEQ ID NO: 3901520 - DNA, 25 bp, Homo sapien
cgcagcatcttcacgtggcctttca

SEQ ID NO: 3901521 - DNA, 25 bp, Homo sapien
gcagcatcttcacgtggcctttcac

SEQ ID NO: 3901522 - DNA, 25 bp, Homo sapien
cagccgcagcatcttcacgtggcct

SEQ ID NO: 3901523 - DNA, 25 bp, Homo sapien
tgagtgtgtccctaaaccctcctaa

SEQ ID NO: 3901524 - DNA, 25 bp, Homo sapien
cgaggttgaaaagcaaacaggcgtt

SEQ ID NO: 3901525 - DNA, 25 bp, Homo sapien
cagttgtctcgcctggtaacctggg

SEQ ID NO: 3901526 - DNA, 25 bp, Homo sapien
gcttctgagaggtataactgcagtt

SEQ ID NO: 3901527 - DNA, 25 bp, Homo sapien
tgctcccggtaggaagtctgctccc

SEQ ID NO: 3901528 - DNA, 25 bp, Homo sapien
agtctgctcccggaaacgagcagtt

SEQ ID NO: 3901529 - DNA, 25 bp, Homo sapien
gcagtgctcccggtaggaagtctgc

SEQ ID NO: 3901530 - DNA, 25 bp, Homo sapien
tgctcccggaaacgagcagttctct

SEQ ID NO: 3901531 - DNA, 25 bp, Homo sapien
ttctcacaggaccattctcacatgg

SEQ ID NO: 3901532 - DNA, 25 bp, Homo sapien
tggttcgtctttgctgttccagctc

SEQ ID NO: 3901533 - DNA, 25 bp, Homo sapien
ggtggctcttagatccaaccctaga

SEQ ID NO: 3901534 - DNA, 25 bp, Homo sapien
tgacaggcattacacagattatttg

SEQ ID NO: 3901535 - DNA, 25 bp, Homo sapien
ttggctcccgtgtcagttctccgag

SEQ ID NO: 3901536 - DNA, 25 bp, Homo sapien
cgagattttaaacctccgcgactgt

SEQ ID NO: 3901537 - DNA, 25 bp, Homo sapien
cactcaatgagtctgggtctctaac

SEQ ID NO: 3901538 - DNA, 25 bp, Homo sapien
tagtggacccctatgacgttattgc

SEQ ID NO: 3901539 - DNA, 25 bp, Homo sapien
gttcaggggcttgtgcgatgataaa

SEQ ID NO: 3901540 - DNA, 25 bp, Homo sapien
agtgataacaatatatggttcaggg

SEQ ID NO: 3901541 - DNA, 25 bp, Homo sapien
aggtcatagatgtcacagttagtgc

SEQ ID NO: 3901542 - DNA, 25 bp, Homo sapien
tgataaaaaaggtcatagatgtcac

SEQ ID NO: 3901543 - DNA, 25 bp, Homo sapien
cattaatcgatcaagtctgagtaca

SEQ ID NO: 3901544 - DNA, 25 bp, Homo sapien
tcattaatcgatcaagtctgagtac

SEQ ID NO: 3901545 - DNA, 25 bp, Homo sapien
aaaataaccacttcattaatcgatc

SEQ ID NO: 3901546 - DNA, 25 bp, Homo sapien
taaccacttcattaatcgatcaagt

SEQ ID NO: 3901547 - DNA, 25 bp, Homo sapien
agttcattagaatatctcactatgg

SEQ ID NO: 3901548 - DNA, 25 bp, Homo sapien
tctcactatggtaggaaaaagtaaa

SEQ ID NO: 3901549 - DNA, 25 bp, Homo sapien
aacagagttcattagaatatctcac

SEQ ID NO: 3901550 - DNA, 25 bp, Homo sapien
tagaatatctcactatggtaggaaa

SEQ ID NO: 3901551 - DNA, 25 bp, Homo sapien
tggctgccctgcatccttgagaccc

SEQ ID NO: 3901552 - DNA, 25 bp, Homo sapien
tagatggtgcagagaacttatgctc

SEQ ID NO: 3901553 - DNA, 25 bp, Homo sapien
ttgagaccctctcccaaagcaatac

SEQ ID NO: 3901554 - DNA, 25 bp, Homo sapien
agcaatacagggcacattagcaatg

SEQ ID NO: 3901555 - DNA, 25 bp, Homo sapien
cgccatcctaggtgtatatctctca

SEQ ID NO: 3901556 - DNA, 25 bp, Homo sapien
gattctgggtttcgtaatggagcaa

SEQ ID NO: 3901557 - DNA, 25 bp, Homo sapien
cttgctgggttgcatccacgccatc

SEQ ID NO: 3901558 - DNA, 25 bp, Homo sapien
acctagaccctcacatatgctgctg

SEQ ID NO: 3901559 - DNA, 25 bp, Homo sapien
ttatcagggacaacaactttgggac

SEQ ID NO: 3901560 - DNA, 25 bp, Homo sapien
ggtgatgattcctaaaacggcagct

SEQ ID NO: 3901561 - DNA, 25 bp, Homo sapien
tattgtggccagtccgagctcagtt

SEQ ID NO: 3901562 - DNA, 25 bp, Homo sapien
caaactcctctggaaaaggtcacca

SEQ ID NO: 3901563 - DNA, 25 bp, Homo sapien
tctggtctataatgacacctagtgg

SEQ ID NO: 3901564 - DNA, 25 bp, Homo sapien
tgagactctgttgcaacaaaaggag

SEQ ID NO: 3901565 - DNA, 25 bp, Homo sapien
cttttacctgtgatatgccaatcat

SEQ ID NO: 3901566 - DNA, 25 bp, Homo sapien
gcatctatctttcaggaaaccaaaa

SEQ ID NO: 3901567 - DNA, 25 bp, Homo sapien
caatgttgtggtttctggtatcagt

SEQ ID NO: 3901568 - DNA, 25 bp, Homo sapien
ttgttaccagtgagttgataatatc

SEQ ID NO: 3901569 - DNA, 25 bp, Homo sapien
cagtgccaacacagatacgatgagc

SEQ ID NO: 3901570 - DNA, 25 bp, Homo sapien
gatgagcatgaatactgttgttacc

SEQ ID NO: 3901571 - DNA, 25 bp, Homo sapien
gtatagctttctattcttacatctg

SEQ ID NO: 3901572 - DNA, 25 bp, Homo sapien
ggcctaggaatctcaaggatgaata

SEQ ID NO: 3901573 - DNA, 25 bp, Homo sapien
taggcattgtatattggcctaggaa

SEQ ID NO: 3901574 - DNA, 25 bp, Homo sapien
caaggatgaatatagtatagctttc

SEQ ID NO: 3901575 - DNA, 25 bp, Homo sapien
tgaacaagaaataactgagctcaaa

SEQ ID NO: 3901576 - DNA, 25 bp, Homo sapien
catctattatattctatctgaagga

SEQ ID NO: 3901577 - DNA, 25 bp, Homo sapien
tcatctattatattctatctgaagg

SEQ ID NO: 3901578 - DNA, 25 bp, Homo sapien
atctattatattctatctgaaggat

SEQ ID NO: 3901579 - DNA, 25 bp, Homo sapien
gaaagtaaatcctatgcctggtcct

SEQ ID NO: 3901580 - DNA, 25 bp, Homo sapien
gcttgctttctaggatgaggtctga

SEQ ID NO: 3901581 - DNA, 25 bp, Homo sapien
gatcctttagttgcaaggtgccctg

SEQ ID NO: 3901582 - DNA, 25 bp, Homo sapien
ttcaagccgggttcaaaatgatcct

SEQ ID NO: 3901583 - DNA, 25 bp, Homo sapien
tttctggtaaggaccgctgggattg

SEQ ID NO: 3901584 - DNA, 25 bp, Homo sapien
catactgctgtcacaagtgcaaaca

SEQ ID NO: 3901585 - DNA, 25 bp, Homo sapien
gggattgaacagaagcttccggtaa

SEQ ID NO: 3901586 - DNA, 25 bp, Homo sapien
ccgtcggcaagacagcatactgctg

SEQ ID NO: 3901587 - DNA, 25 bp, Homo sapien
tacaaaacttcttttttttcatgca

SEQ ID NO: 3901588 - DNA, 25 bp, Homo sapien
atatgtttaatacttagtatcaaac

SEQ ID NO: 3901589 - DNA, 25 bp, Homo sapien
ccagcgctcccttggaagttacagt

SEQ ID NO: 3901590 - DNA, 25 bp, Homo sapien
aagttacagtagtgctctgcgcggg

SEQ ID NO: 3901591 - DNA, 25 bp, Homo sapien
aaagatccctgaggcggatcccggc

SEQ ID NO: 3901592 - DNA, 25 bp, Homo sapien
gggtgcagacttcggaaatctcttc

SEQ ID NO: 3901593 - DNA, 25 bp, Homo sapien
tgggaaccagcgtcgcgtcccaacg

SEQ ID NO: 3901594 - DNA, 25 bp, Homo sapien
gcgtcccaacggctgttggctacct

SEQ ID NO: 3901595 - DNA, 25 bp, Homo sapien
cgtctgaaccagtgccgcggcagcg

SEQ ID NO: 3901596 - DNA, 25 bp, Homo sapien
tgttggctacctccccggcgcgtgc

SEQ ID NO: 3901597 - DNA, 25 bp, Homo sapien
ggcagtctccggttgtttcaagttc

SEQ ID NO: 3901598 - DNA, 25 bp, Homo sapien
ccctgaaggtgcctcggatgactca

SEQ ID NO: 3901599 - DNA, 25 bp, Homo sapien
ggctgcggcagtctccggttgtttc

SEQ ID NO: 3901600 - DNA, 25 bp, Homo sapien
ctgaaggtgcctcggatgactcagg

SEQ ID NO: 3901601 - DNA, 25 bp, Homo sapien
gctgtgccttgggtacagaactcac

SEQ ID NO: 3901602 - DNA, 25 bp, Homo sapien
gggtgcggtcttcgctgagatgttg

SEQ ID NO: 3901603 - DNA, 25 bp, Homo sapien
gatgttgcgctgtgccttgggtaca

SEQ ID NO: 3901604 - DNA, 25 bp, Homo sapien
tgcgctgtgccttgggtacagaact

SEQ ID NO: 3901605 - DNA, 25 bp, Homo sapien
cggctgcggactgcgcactgcgaat

SEQ ID NO: 3901606 - DNA, 25 bp, Homo sapien
ggactgcgcactgcgaattgagact

SEQ ID NO: 3901607 - DNA, 25 bp, Homo sapien
tgcgcactgcgaattgagactgcgg

SEQ ID NO: 3901608 - DNA, 25 bp, Homo sapien
cctcactgccttggggacgtgcggc

SEQ ID NO: 3901609 - DNA, 25 bp, Homo sapien
gagtttggattcagtgtgtgcagag

SEQ ID NO: 3901610 - DNA, 25 bp, Homo sapien
agagtttggattcagtgtgtgcaga

SEQ ID NO: 3901611 - DNA, 25 bp, Homo sapien
taagagtttggattcagtgtgtgca

SEQ ID NO: 3901612 - DNA, 25 bp, Homo sapien
aagagtttggattcagtgtgtgcag

SEQ ID NO: 3901613 - DNA, 25 bp, Homo sapien
gctgtccctgaatttgtacgggact

SEQ ID NO: 3901614 - DNA, 25 bp, Homo sapien
cagtgggcgagaaggagaaacgttt

SEQ ID NO: 3901615 - DNA, 25 bp, Homo sapien
tgaggctgtccctgaatttgtacgg

SEQ ID NO: 3901616 - DNA, 25 bp, Homo sapien
cctccacgcgctctttgatcgccat

SEQ ID NO: 3901617 - DNA, 25 bp, Homo sapien
tgtgagaggaaactgaaccaaccca

SEQ ID NO: 3901618 - DNA, 25 bp, Homo sapien
taataggactttcaaacgacagctc

SEQ ID NO: 3901619 - DNA, 25 bp, Homo sapien
cccatgaaggcttgaaagagttaac

SEQ ID NO: 3901620 - DNA, 25 bp, Homo sapien
tcctgactgaggttatctgcctacc

SEQ ID NO: 3901621 - DNA, 25 bp, Homo sapien
ggtagaaacagtgaggaagagcctc

SEQ ID NO: 3901622 - DNA, 25 bp, Homo sapien
gttccccagactaagcctgttggca

SEQ ID NO: 3901623 - DNA, 25 bp, Homo sapien
aacagctgctgattatctcaacatc

SEQ ID NO: 3901624 - DNA, 25 bp, Homo sapien
tcagatgtagttcggtctcttgaga

SEQ ID NO: 3901625 - DNA, 25 bp, Homo sapien
cttgggtgatgatgaaacaagctaa

SEQ ID NO: 3901626 - DNA, 25 bp, Homo sapien
caagctaatgctcctaagataagac

SEQ ID NO: 3901627 - DNA, 25 bp, Homo sapien
taaatgactcattggcttgggtgat

SEQ ID NO: 3901628 - DNA, 25 bp, Homo sapien
caatgcagatttccagacttgtgat

SEQ ID NO: 3901629 - DNA, 25 bp, Homo sapien
taagggccaatgtaaataggtcagc

SEQ ID NO: 3901630 - DNA, 25 bp, Homo sapien
agtaagggccaatgtaaataggtca

SEQ ID NO: 3901631 - DNA, 25 bp, Homo sapien
caatgtaaataggtcagcaagtggt

SEQ ID NO: 3901632 - DNA, 25 bp, Homo sapien
gggccaatgtaaataggtcagcaag

SEQ ID NO: 3901633 - DNA, 25 bp, Homo sapien
tggagcagcggtgtgttggctgtcc

SEQ ID NO: 3901634 - DNA, 25 bp, Homo sapien
gagatagctccgttgttttcactta

SEQ ID NO: 3901635 - DNA, 25 bp, Homo sapien
tcagctatgtccttgtctagagaga

SEQ ID NO: 3901636 - DNA, 25 bp, Homo sapien
tggaccagggcaacaccctaactgt

SEQ ID NO: 3901637 - DNA, 25 bp, Homo sapien
ctgtgggacagagagagctcagcag

SEQ ID NO: 3901638 - DNA, 25 bp, Homo sapien
tgtgggacagagagagctcagcagc

SEQ ID NO: 3901639 - DNA, 25 bp, Homo sapien
ataactaaaagggtcttccacatgt

SEQ ID NO: 3901640 - DNA, 25 bp, Homo sapien
tctccataactaaaagggtcttcca

SEQ ID NO: 3901641 - DNA, 25 bp, Homo sapien
tcttgaaaatttccacggacagaga

SEQ ID NO: 3901642 - DNA, 25 bp, Homo sapien
ccacggacagagatttgagtttccc

SEQ ID NO: 3901643 - DNA, 25 bp, Homo sapien
tttaagaaaagcatgaggaaacaag

SEQ ID NO: 3901644 - DNA, 25 bp, Homo sapien
ccaccaggataaccaattcaccttt

SEQ ID NO: 3901645 - DNA, 25 bp, Homo sapien
taagaaaagcatgaggaaacaagat

SEQ ID NO: 3901646 - DNA, 25 bp, Homo sapien
tgtacacccaccaggataaccaatt

SEQ ID NO: 3901647 - DNA, 25 bp, Homo sapien
tccatttctcagagggctctgatcc

SEQ ID NO: 3901648 - DNA, 25 bp, Homo sapien
catgagtccatttctcagagggctc

SEQ ID NO: 3901649 - DNA, 25 bp, Homo sapien
ctgcatgagtccatttctcagaggg

SEQ ID NO: 3901650 - DNA, 25 bp, Homo sapien
ccatttctcagagggctctgatcct

SEQ ID NO: 3901651 - DNA, 25 bp, Homo sapien
ctttgtctgggatacttcttgggca

SEQ ID NO: 3901652 - DNA, 25 bp, Homo sapien
tctccagctttatgtgtggacccag

SEQ ID NO: 3901653 - DNA, 25 bp, Homo sapien
cagcaaagtatgatgtctcctggcc

SEQ ID NO: 3901654 - DNA, 25 bp, Homo sapien
tgggcattaccactgaaccctacag

SEQ ID NO: 3901655 - DNA, 25 bp, Homo sapien
tcgaggacagtagcaggaaaggaca

SEQ ID NO: 3901656 - DNA, 25 bp, Homo sapien
tgtgaccactgtgagaacaggttct

SEQ ID NO: 3901657 - DNA, 25 bp, Homo sapien
caaaggcctgtaaccctgcaagagc

SEQ ID NO: 3901658 - DNA, 25 bp, Homo sapien
ggttctctcataggacactcacggt

SEQ ID NO: 3901659 - DNA, 25 bp, Homo sapien
catgaatcaagaacgccaagagccc

SEQ ID NO: 3901660 - DNA, 25 bp, Homo sapien
tctttcccatggtgtcagggtccct

SEQ ID NO: 3901661 - DNA, 25 bp, Homo sapien
tacgatcttggtacctgacactagg

SEQ ID NO: 3901662 - DNA, 25 bp, Homo sapien
tcaagtctgcaggtaaaaccagtgc

SEQ ID NO: 3901663 - DNA, 25 bp, Homo sapien
taatgcctactgttttggtgcctgg

SEQ ID NO: 3901664 - DNA, 25 bp, Homo sapien
gcctcttggaaaggcactaatgcct

SEQ ID NO: 3901665 - DNA, 25 bp, Homo sapien
gctgagcgagaggtctgcccatagt

SEQ ID NO: 3901666 - DNA, 25 bp, Homo sapien
ttggaagtaagtcccagctgggttc

SEQ ID NO: 3901667 - DNA, 25 bp, Homo sapien
ctgtaatgatactgttggtaagatc

SEQ ID NO: 3901668 - DNA, 25 bp, Homo sapien
ttttcttgcatggccaagatggcaa

SEQ ID NO: 3901669 - DNA, 25 bp, Homo sapien
ccccccgacatagagtaaatgcctt

SEQ ID NO: 3901670 - DNA, 25 bp, Homo sapien
cccccgacatagagtaaatgccttc

SEQ ID NO: 3901671 - DNA, 25 bp, Homo sapien
ttcttttcttgcatggccaagatgg

SEQ ID NO: 3901672 - DNA, 25 bp, Homo sapien
tcaacttcgactcccaggaatcttt

SEQ ID NO: 3901673 - DNA, 25 bp, Homo sapien
cacaaacgcatcgatgcaacacacg

SEQ ID NO: 3901674 - DNA, 25 bp, Homo sapien
ttcctttcaacttcgactcccagga

SEQ ID NO: 3901675 - DNA, 25 bp, Homo sapien
tcttcgtggtgaccacaaacgcatc

SEQ ID NO: 3901676 - DNA, 25 bp, Homo sapien
tcaggcgggcctctgcggggcgtcg

SEQ ID NO: 3901677 - DNA, 25 bp, Homo sapien
gcgggcctctgcggggcgtcggggc

SEQ ID NO: 3901678 - DNA, 25 bp, Homo sapien
aggcgggcctctgcggggcgtcggg

SEQ ID NO: 3901679 - DNA, 25 bp, Homo sapien
caggcgggcctctgcggggcgtcgg

SEQ ID NO: 3901680 - DNA, 25 bp, Homo sapien
gaatgggtgacagcatgcgagctcg

SEQ ID NO: 3901681 - DNA, 25 bp, Homo sapien
gggtgggctcggaggcagcgattcg

SEQ ID NO: 3901682 - DNA, 25 bp, Homo sapien
cagcgattcgacagacacgtgcatc

SEQ ID NO: 3901683 - DNA, 25 bp, Homo sapien
acacgtgcatctgctagggcgccgg

SEQ ID NO: 3901684 - DNA, 25 bp, Homo sapien
tcacacaaggcaacgagaggaagca

SEQ ID NO: 3901685 - DNA, 25 bp, Homo sapien
aatacaacgcgactttcacacaagg

SEQ ID NO: 3901686 - DNA, 25 bp, Homo sapien
caggtgttctcgataaaagcagcag

SEQ ID NO: 3901687 - DNA, 25 bp, Homo sapien
gcgccaagcgcaggaaaatacaacg

SEQ ID NO: 3901688 - DNA, 25 bp, Homo sapien
gggcgtgctcagctaactgccagga

SEQ ID NO: 3901689 - DNA, 25 bp, Homo sapien
caggcctactagagtgcctggtgtc

SEQ ID NO: 3901690 - DNA, 25 bp, Homo sapien
taactgccaggaccaccgaatgcca

SEQ ID NO: 3901691 - DNA, 25 bp, Homo sapien
ggtgtccaccgagcggctcagaggg

SEQ ID NO: 3901692 - DNA, 25 bp, Homo sapien
cgaatcttgatctcagcgtgcccca

SEQ ID NO: 3901693 - DNA, 25 bp, Homo sapien
taattcccaccggtagcggcgacac

SEQ ID NO: 3901694 - DNA, 25 bp, Homo sapien
gatggctccttatggtcctgcaccg

SEQ ID NO: 3901695 - DNA, 25 bp, Homo sapien
tgaggtttgtccgatggctccttac

SEQ ID NO: 3901696 - DNA, 25 bp, Homo sapien
ctgaagaaggatatctccatggtga

SEQ ID NO: 3901697 - DNA, 25 bp, Homo sapien
gcaaagctgtacagtaagatgaaga

SEQ ID NO: 3901698 - DNA, 25 bp, Homo sapien
gatgaagggtatgtatctatgaatg

SEQ ID NO: 3901699 - DNA, 25 bp, Homo sapien
gggtgcacggtgagtgaggacaaca

SEQ ID NO: 3901700 - DNA, 25 bp, Homo sapien
acaaggaacgcacaagcaatcaggt

SEQ ID NO: 3901701 - DNA, 25 bp, Homo sapien
gccgacttctcacagcaaagaccac

SEQ ID NO: 3901702 - DNA, 25 bp, Homo sapien
agattcatggatcgccgacttctca

SEQ ID NO: 3901703 - DNA, 25 bp, Homo sapien
agtagtggagattcatggatcgccg

SEQ ID NO: 3901704 - DNA, 25 bp, Homo sapien
gcatatgctttttggccttcttgcc

SEQ ID NO: 3901705 - DNA, 25 bp, Homo sapien
ctttgctggccctggtggcttgcca

SEQ ID NO: 3901706 - DNA, 25 bp, Homo sapien
gcttggcgggttctggtcccttgcc

SEQ ID NO: 3901707 - DNA, 25 bp, Homo sapien
acacatcgataaaagcaaaaactcc

SEQ ID NO: 3901708 - DNA, 25 bp, Homo sapien
ttgctgtaaaatacactgccgtttc

SEQ ID NO: 3901709 - DNA, 25 bp, Homo sapien
ttccaagcaaaggtggtaatgaaaa

SEQ ID NO: 3901710 - DNA, 25 bp, Homo sapien
actgccgtttcagacaccaggagcc

SEQ ID NO: 3901711 - DNA, 25 bp, Homo sapien
caagcaaaggtggtaatgaaaatgg

SEQ ID NO: 3901712 - DNA, 25 bp, Homo sapien
ttcaggctcattatatcctgggatt

SEQ ID NO: 3901713 - DNA, 25 bp, Homo sapien
acacctgaagtctcgctcagcccca

SEQ ID NO: 3901714 - DNA, 25 bp, Homo sapien
tatcctgggattcgcagaaaccctg

SEQ ID NO: 3901715 - DNA, 25 bp, Homo sapien
tcattatatcctgggattcgcagaa

SEQ ID NO: 3901716 - DNA, 25 bp, Homo sapien
cgctgtcctggggtcctcttcttag

SEQ ID NO: 3901717 - DNA, 25 bp, Homo sapien
gtcgctgtcctggggtcctcttctt

SEQ ID NO: 3901718 - DNA, 25 bp, Homo sapien
tgtcctggggtcctcttcttagcat

SEQ ID NO: 3901719 - DNA, 25 bp, Homo sapien
gctgtcctggggtcctcttcttagc

SEQ ID NO: 3901720 - DNA, 25 bp, Homo sapien
ctgaaggggcatcttcctacagccc

SEQ ID NO: 3901721 - DNA, 25 bp, Homo sapien
gaaggggcatcttcctacagcccat

SEQ ID NO: 3901722 - DNA, 25 bp, Homo sapien
gatgtagttctgttctgaaggggca

SEQ ID NO: 3901723 - DNA, 25 bp, Homo sapien
ctgatgtagttctgttctgaagggg

SEQ ID NO: 3901724 - DNA, 25 bp, Homo sapien
ggaacccaggcgtctaaacagcaaa

SEQ ID NO: 3901725 - DNA, 25 bp, Homo sapien
ctgcccgtgcgcgtgtctgggatcc

SEQ ID NO: 3901726 - DNA, 25 bp, Homo sapien
tcgctgtctccggtctaacttcctg

SEQ ID NO: 3901727 - DNA, 25 bp, Homo sapien
agttttcttgcgactttcttggcca

SEQ ID NO: 3901728 - DNA, 25 bp, Homo sapien
gtctgcccctatccagaagggctgt

SEQ ID NO: 3901729 - DNA, 25 bp, Homo sapien
tctgcccctatccagaagggctgtc

SEQ ID NO: 3901730 - DNA, 25 bp, Homo sapien
tggttcgggccgctggagacctccc

SEQ ID NO: 3901731 - DNA, 25 bp, Homo sapien
ttcgggccgctggagacctcccgat

SEQ ID NO: 3901732 - DNA, 25 bp, Homo sapien
tcttcttcaccctggttcgggccgc

SEQ ID NO: 3901733 - DNA, 25 bp, Homo sapien
ttcaccctggttcgggccgctggag

SEQ ID NO: 3901734 - DNA, 25 bp, Homo sapien
acactggctcgcgcaggggcgcatc

SEQ ID NO: 3901735 - DNA, 25 bp, Homo sapien
gcgacactggctcgcgcaggggcgc

SEQ ID NO: 3901736 - DNA, 25 bp, Homo sapien
actggctcgcgcaggggcgcatccc

SEQ ID NO: 3901737 - DNA, 25 bp, Homo sapien
aggcgacactggctcgcgcaggggc

SEQ ID NO: 3901738 - DNA, 25 bp, Homo sapien
ctggctcccctcttctcgcgcccgg

SEQ ID NO: 3901739 - DNA, 25 bp, Homo sapien
ctcttctcgcgcccggagggaagcg

SEQ ID NO: 3901740 - DNA, 25 bp, Homo sapien
ggctcccctcttctcgcgcccggag

SEQ ID NO: 3901741 - DNA, 25 bp, Homo sapien
ctcccctcttctcgcgcccggaggg

SEQ ID NO: 3901742 - DNA, 25 bp, Homo sapien
aggaaagcccgcgccggcagcaggg

SEQ ID NO: 3901743 - DNA, 25 bp, Homo sapien
cagaggaaagcccgcgccggcagca

SEQ ID NO: 3901744 - DNA, 25 bp, Homo sapien
gaggaaagcccgcgccggcagcagg

SEQ ID NO: 3901745 - DNA, 25 bp, Homo sapien
gcactacccgctcgcaggaaagcgg

SEQ ID NO: 3901746 - DNA, 25 bp, Homo sapien
aggcgcccgagagaagtcggccgag

SEQ ID NO: 3901747 - DNA, 25 bp, Homo sapien
gggtatcggagcacggcggccgccc

SEQ ID NO: 3901748 - DNA, 25 bp, Homo sapien
cgacgtcctcctccgaaaggagccg

SEQ ID NO: 3901749 - DNA, 25 bp, Homo sapien
gaggagggcgatgaagtcaccgcgg

SEQ ID NO: 3901750 - DNA, 25 bp, Homo sapien
ggcgagggcggagtaggaaggagcc

SEQ ID NO: 3901751 - DNA, 25 bp, Homo sapien
gagtaggaaggagcccggccgcgga

SEQ ID NO: 3901752 - DNA, 25 bp, Homo sapien
gcgcctccggtgtccagaggacaaa

SEQ ID NO: 3901753 - DNA, 25 bp, Homo sapien
aagaggaagtacaaggccagcagga

SEQ ID NO: 3901754 - DNA, 25 bp, Homo sapien
tgaggacgccacatagcagataaaa

SEQ ID NO: 3901755 - DNA, 25 bp, Homo sapien
atcagcaaagaggaagtacaaggcc

SEQ ID NO: 3901756 - DNA, 25 bp, Homo sapien
agatgctgaggacgccacatagcag

SEQ ID NO: 3901757 - DNA, 25 bp, Homo sapien
catcatgggccagcacaagccctgc

SEQ ID NO: 3901758 - DNA, 25 bp, Homo sapien
ccctgccacttgtcattcagctgca

SEQ ID NO: 3901759 - DNA, 25 bp, Homo sapien
gggagagaggggcatgctgccctga

SEQ ID NO: 3901760 - DNA, 25 bp, Homo sapien
gctgccctgagcccctggagctgag

SEQ ID NO: 3901761 - DNA, 25 bp, Homo sapien
ggagagaggggcatgctgccctgag

SEQ ID NO: 3901762 - DNA, 25 bp, Homo sapien
ctggggagagaggggcatgctgccc

SEQ ID NO: 3901763 - DNA, 25 bp, Homo sapien
cgatggccgtgatggagatagcaaa

SEQ ID NO: 3901764 - DNA, 25 bp, Homo sapien
catccgagtacttggcgatggccgt

SEQ ID NO: 3901765 - DNA, 25 bp, Homo sapien
agggccgcggtgacacagcgcagga

SEQ ID NO: 3901766 - DNA, 25 bp, Homo sapien
agcggctttggaagccccatccgag

SEQ ID NO: 3901767 - DNA, 25 bp, Homo sapien
ctgtgagtaacggaagtgggaaaat

SEQ ID NO: 3901768 - DNA, 25 bp, Homo sapien
ccccgggtagagtcagtctttaatg

SEQ ID NO: 3901769 - DNA, 25 bp, Homo sapien
tgagctgtgaacttggtttgacaaa

SEQ ID NO: 3901770 - DNA, 25 bp, Homo sapien
tcagtctttaatgagaggactttgg

SEQ ID NO: 3901771 - DNA, 25 bp, Homo sapien
ttggacaaacagcccgagtgtcagg

SEQ ID NO: 3901772 - DNA, 25 bp, Homo sapien
gatgggatgcatcacagggctgact

SEQ ID NO: 3901773 - DNA, 25 bp, Homo sapien
aaacagcccgagtgtcaggcacaga

SEQ ID NO: 3901774 - DNA, 25 bp, Homo sapien
ggatgcatcacagggctgactccct

SEQ ID NO: 3901775 - DNA, 25 bp, Homo sapien
aatttggccacgtcgttaaagatca

SEQ ID NO: 3901776 - DNA, 25 bp, Homo sapien
tttggccacgtcgttaaagatcagg

SEQ ID NO: 3901777 - DNA, 25 bp, Homo sapien
tggccacgtcgttaaagatcaggta

SEQ ID NO: 3901778 - DNA, 25 bp, Homo sapien
gaatttggccacgtcgttaaagatc

SEQ ID NO: 3901779 - DNA, 25 bp, Homo sapien
aactagctggcatccccgagggagg

SEQ ID NO: 3901780 - DNA, 25 bp, Homo sapien
cccctggtacgggacacatcatctg

SEQ ID NO: 3901781 - DNA, 25 bp, Homo sapien
tctgtcccttgccacggtttctggg

SEQ ID NO: 3901782 - DNA, 25 bp, Homo sapien
tcgtccagggagacttgccggcctg

SEQ ID NO: 3901783 - DNA, 25 bp, Homo sapien
gaaggacggtttctgggattcacaa

SEQ ID NO: 3901784 - DNA, 25 bp, Homo sapien
aaccgcctgggagctctaacctaat

SEQ ID NO: 3901785 - DNA, 25 bp, Homo sapien
cctaatatttgccaagggacgggat

SEQ ID NO: 3901786 - DNA, 25 bp, Homo sapien
tctgggatcacttgctgcgggcaac

SEQ ID NO: 3901787 - DNA, 25 bp, Homo sapien
tcagtcagagtccgagtcggaattc

SEQ ID NO: 3901788 - DNA, 25 bp, Homo sapien
cagtcagagtccgagtcggaattct

SEQ ID NO: 3901789 - DNA, 25 bp, Homo sapien
ggctcaggcagaacctgaggctgta

SEQ ID NO: 3901790 - DNA, 25 bp, Homo sapien
aaggagtgggatacccaagatgccc

SEQ ID NO: 3901791 - DNA, 25 bp, Homo sapien
agcgtggtcaacagtgctgagctga

SEQ ID NO: 3901792 - DNA, 25 bp, Homo sapien
aagatgccctcatacgcagcgtggt

SEQ ID NO: 3901793 - DNA, 25 bp, Homo sapien
ttggcagagacgttaaagggctgaa

SEQ ID NO: 3901794 - DNA, 25 bp, Homo sapien
gtctttgttcctgttagtgaaacag

SEQ ID NO: 3901795 - DNA, 25 bp, Homo sapien
caggagcaccaagtgcagacaaacc

SEQ ID NO: 3901796 - DNA, 25 bp, Homo sapien
aggagcaccaagtgcagacaaaccc

SEQ ID NO: 3901797 - DNA, 25 bp, Homo sapien
ttttcagggtaagagattcacacgc

SEQ ID NO: 3901798 - DNA, 25 bp, Homo sapien
tacaaatgctccaaacatgggtcca

SEQ ID NO: 3901799 - DNA, 25 bp, Homo sapien
cacacgcaagagaataaggctacaa

SEQ ID NO: 3901800 - DNA, 25 bp, Homo sapien
caagaatgaagagggaactggtgct

SEQ ID NO: 3901801 - DNA, 25 bp, Homo sapien
tctggtgccttccatgcgtcgcata

SEQ ID NO: 3901802 - DNA, 25 bp, Homo sapien
tccagaatcagtgcgagcgtcctgc

SEQ ID NO: 3901803 - DNA, 25 bp, Homo sapien
tcagattggttcgttgtggatgctc

SEQ ID NO: 3901804 - DNA, 25 bp, Homo sapien
gcgtcgcataagcactcttgtcaat

SEQ ID NO: 3901805 - DNA, 25 bp, Homo sapien
gtttttgaatcttgcctcaaattga

SEQ ID NO: 3901806 - DNA, 25 bp, Homo sapien
ttgtttgacgtggttccctctaaga

SEQ ID NO: 3901807 - DNA, 25 bp, Homo sapien
aattgacctacttggataaaatcag

SEQ ID NO: 3901808 - DNA, 25 bp, Homo sapien
cctcaaattgacctacttggataaa

SEQ ID NO: 3901809 - DNA, 25 bp, Homo sapien
tcaggaaagtcagtcacgcgtaggg

SEQ ID NO: 3901810 - DNA, 25 bp, Homo sapien
taggatgacagtgctgacacccagt

SEQ ID NO: 3901811 - DNA, 25 bp, Homo sapien
gacacccagtaggaagtatcccatt

SEQ ID NO: 3901812 - DNA, 25 bp, Homo sapien
tagggccaggtcagagtttcttttc

SEQ ID NO: 3901813 - DNA, 25 bp, Homo sapien
ctttagcttgaagcggagtgggtcc

SEQ ID NO: 3901814 - DNA, 25 bp, Homo sapien
ccgtcaatatctgttaggtctagaa

SEQ ID NO: 3901815 - DNA, 25 bp, Homo sapien
tcagatgatgggtccttgaactgtg

SEQ ID NO: 3901816 - DNA, 25 bp, Homo sapien
tactccacaaacgtaacagtaagga

SEQ ID NO: 3901817 - DNA, 25 bp, Homo sapien
attttatcagcacccacgtccaggc

SEQ ID NO: 3901818 - DNA, 25 bp, Homo sapien
ttattttatcagcacccacgtccag

SEQ ID NO: 3901819 - DNA, 25 bp, Homo sapien
gctggtgaggtccacacacggccag

SEQ ID NO: 3901820 - DNA, 25 bp, Homo sapien
ccaggcccaacagcttggtaggctg

SEQ ID NO: 3901821 - DNA, 25 bp, Homo sapien
tgtctgacctccaccctatgtcggg

SEQ ID NO: 3901822 - DNA, 25 bp, Homo sapien
tggagatacttgttggccccacata

SEQ ID NO: 3901823 - DNA, 25 bp, Homo sapien
aagtaaacagccatccgagggaggt

SEQ ID NO: 3901824 - DNA, 25 bp, Homo sapien
tgggacagcttcgtgactcagttga

SEQ ID NO: 3901825 - DNA, 25 bp, Homo sapien
tcacttcagtaaaaccacttgatca

SEQ ID NO: 3901826 - DNA, 25 bp, Homo sapien
cacttcagtaaaaccacttgatcat

SEQ ID NO: 3901827 - DNA, 25 bp, Homo sapien
gaaaaatttgccctggcttacgcag

SEQ ID NO: 3901828 - DNA, 25 bp, Homo sapien
cccagagctgagtgtaactaaacgc

SEQ ID NO: 3901829 - DNA, 25 bp, Homo sapien
gagcagagctttccatgagccagga

SEQ ID NO: 3901830 - DNA, 25 bp, Homo sapien
gactcagcactgttatgatgccagc

SEQ ID NO: 3901831 - DNA, 25 bp, Homo sapien
gagaaatcttgtcctagagcccaat

SEQ ID NO: 3901832 - DNA, 25 bp, Homo sapien
ccaagtatatgagccactggcatag

SEQ ID NO: 3901833 - DNA, 25 bp, Homo sapien
tccggtctgagatgccaatagtgct

SEQ ID NO: 3901834 - DNA, 25 bp, Homo sapien
cacaatgaaaagtgatccggtctga

SEQ ID NO: 3901835 - DNA, 25 bp, Homo sapien
gagagaggcttgtatctgtcaagca

SEQ ID NO: 3901836 - DNA, 25 bp, Homo sapien
tagactatctactgctactaggaaa

SEQ ID NO: 3901837 - DNA, 25 bp, Homo sapien
gaaaccataagaggctttgccaatc

SEQ ID NO: 3901838 - DNA, 25 bp, Homo sapien
gaaaaagtcacaactggcattgaag

SEQ ID NO: 3901839 - DNA, 25 bp, Homo sapien
tgcctggccacccattatcagttct

SEQ ID NO: 3901840 - DNA, 25 bp, Homo sapien
cctggccacccattatcagttcttt

SEQ ID NO: 3901841 - DNA, 25 bp, Homo sapien
gccacccattatcagttcttttggg

SEQ ID NO: 3901842 - DNA, 25 bp, Homo sapien
tggccacccattatcagttcttttg

SEQ ID NO: 3901843 - DNA, 25 bp, Homo sapien
ctgtctgtttctgtgtcgtcttcat

SEQ ID NO: 3901844 - DNA, 25 bp, Homo sapien
ggccaagggctgtctgtttctgtgt

SEQ ID NO: 3901845 - DNA, 25 bp, Homo sapien
ctggccaagggctgtctgtttctgt

SEQ ID NO: 3901846 - DNA, 25 bp, Homo sapien
agggctgtctgtttctgtgtcgtct

SEQ ID NO: 3901847 - DNA, 25 bp, Homo sapien
tcacatggctagtttagccaggccc

SEQ ID NO: 3901848 - DNA, 25 bp, Homo sapien
ggccttcttccccagaaacccatgc

SEQ ID NO: 3901849 - DNA, 25 bp, Homo sapien
agcatggacaccagtcctggagggt

SEQ ID NO: 3901850 - DNA, 25 bp, Homo sapien
acactctcggccttcttccccagaa

SEQ ID NO: 3901851 - DNA, 25 bp, Homo sapien
tacgtggctgaagataacagccaag

SEQ ID NO: 3901852 - DNA, 25 bp, Homo sapien
ctgtccgggtgcagtatgcagtcat

SEQ ID NO: 3901853 - DNA, 25 bp, Homo sapien
aagcccacctttgaatacgtggctg

SEQ ID NO: 3901854 - DNA, 25 bp, Homo sapien
agatgtctctaattactggcttcaa

SEQ ID NO: 3901855 - DNA, 25 bp, Homo sapien
tagtccccgggagtaaaatgagtga

SEQ ID NO: 3901856 - DNA, 25 bp, Homo sapien
gtttttactatcacaggctggccta

SEQ ID NO: 3901857 - DNA, 25 bp, Homo sapien
ggagttccactgatgcaaaagggtc

SEQ ID NO: 3901858 - DNA, 25 bp, Homo sapien
tagtgaccaatagatgccaaacagc

SEQ ID NO: 3901859 - DNA, 25 bp, Homo sapien
gactctatggtaacaaactcttcaa

SEQ ID NO: 3901860 - DNA, 25 bp, Homo sapien
gaatgactcgaaagccagactctat

SEQ ID NO: 3901861 - DNA, 25 bp, Homo sapien
caggaagaactggatagaatgactc

SEQ ID NO: 3901862 - DNA, 25 bp, Homo sapien
tgtcgaatgaccaaataactatgta

SEQ ID NO: 3901863 - DNA, 25 bp, Homo sapien
tcttgtatttggcacaaaggcaccc

SEQ ID NO: 3901864 - DNA, 25 bp, Homo sapien
ccactgcagtagaaaagggctttcc

SEQ ID NO: 3901865 - DNA, 25 bp, Homo sapien
caggctatccatttgagtcagtcta

SEQ ID NO: 3901866 - DNA, 25 bp, Homo sapien
gagagcagtcaagtcactcccttgg

SEQ ID NO: 3901867 - DNA, 25 bp, Homo sapien
ccttccatgtaagcaggtagggcgg

SEQ ID NO: 3901868 - DNA, 25 bp, Homo sapien
gctgggattagtgcacctggcctac

SEQ ID NO: 3901869 - DNA, 25 bp, Homo sapien
tactaaagccttagttgttctgaac

SEQ ID NO: 3901870 - DNA, 25 bp, Homo sapien
gaagctccctacttgtcacatacac

SEQ ID NO: 3901871 - DNA, 25 bp, Homo sapien
cattttgggagccaccgggattgat

SEQ ID NO: 3901872 - DNA, 25 bp, Homo sapien
cactaggtgctcaggttctctgcaa

SEQ ID NO: 3901873 - DNA, 25 bp, Homo sapien
tcttcctcgagagcaagttgccaaa

SEQ ID NO: 3901874 - DNA, 25 bp, Homo sapien
ctttccggattatgaggcatctgcc

SEQ ID NO: 3901875 - DNA, 25 bp, Homo sapien
taaagacccttcaacaaccacatgg

SEQ ID NO: 3901876 - DNA, 25 bp, Homo sapien
tgagtgcctcacgagatcttcgggc

SEQ ID NO: 3901877 - DNA, 25 bp, Homo sapien
gatcttgcccagttaagccattgta

SEQ ID NO: 3901878 - DNA, 25 bp, Homo sapien
tctgggaagccctagttgagtgcct

SEQ ID NO: 3901879 - DNA, 25 bp, Homo sapien
tcacagtctttagtcttcggaggag

SEQ ID NO: 3901880 - DNA, 25 bp, Homo sapien
tttatcccgtaattcatgccgccag

SEQ ID NO: 3901881 - DNA, 25 bp, Homo sapien
tatgcactgcggtcaagagcactac

SEQ ID NO: 3901882 - DNA, 25 bp, Homo sapien
taaggctagtctttcaatgcagggc

SEQ ID NO: 3901883 - DNA, 25 bp, Homo sapien
tgtcatgcagtagataaggcaaccc

SEQ ID NO: 3901884 - DNA, 25 bp, Homo sapien
actgatggcaccctgaattggctgg

SEQ ID NO: 3901885 - DNA, 25 bp, Homo sapien
aaatgtcaccctaagaaatccagcc

SEQ ID NO: 3901886 - DNA, 25 bp, Homo sapien
gaacgatgtcttgtccccttatgag

SEQ ID NO: 3901887 - DNA, 25 bp, Homo sapien
tcaaatgcagcagtagggtgtcctt

SEQ ID NO: 3901888 - DNA, 25 bp, Homo sapien
gagtaagcaagcaccttaagtagtg

SEQ ID NO: 3901889 - DNA, 25 bp, Homo sapien
tgagtaaatatagcggtctggcgat

SEQ ID NO: 3901890 - DNA, 25 bp, Homo sapien
aactgtaattgccttcgggttgtgc

SEQ ID NO: 3901891 - DNA, 25 bp, Homo sapien
aattctatccagtcggctgagcgcg

SEQ ID NO: 3901892 - DNA, 25 bp, Homo sapien
cagtatttggtgcacagtagtctca

SEQ ID NO: 3901893 - DNA, 25 bp, Homo sapien
ccttagcacctatggtcagttgaca

SEQ ID NO: 3901894 - DNA, 25 bp, Homo sapien
tactgtatccctactgcctagaaca

SEQ ID NO: 3901895 - DNA, 25 bp, Homo sapien
tacagccagatggatggactggatg

SEQ ID NO: 3901896 - DNA, 25 bp, Homo sapien
aaatgcatcatacagacctaagaaa

SEQ ID NO: 3901897 - DNA, 25 bp, Homo sapien
ccaagtagtctcttgtgccaaagta

SEQ ID NO: 3901898 - DNA, 25 bp, Homo sapien
gaatctaagaagaggtacagccaga

SEQ ID NO: 3901899 - DNA, 25 bp, Homo sapien
tcaaaggtaaacagtatcatcccca

SEQ ID NO: 3901900 - DNA, 25 bp, Homo sapien
cacaagtttgatgctgggtatttga

SEQ ID NO: 3901901 - DNA, 25 bp, Homo sapien
tgccactactaatcttgcaccttgt

SEQ ID NO: 3901902 - DNA, 25 bp, Homo sapien
gcattgtgctagagatgcactttat

SEQ ID NO: 3901903 - DNA, 25 bp, Homo sapien
tgagtgaagtgacacgcagaggtct

SEQ ID NO: 3901904 - DNA, 25 bp, Homo sapien
tgttcaagcatcagtaagcaagtca

SEQ ID NO: 3901905 - DNA, 25 bp, Homo sapien
gaacaaagggtcagagagcatgctg

SEQ ID NO: 3901906 - DNA, 25 bp, Homo sapien
agacaattgtacatagggagccagg

SEQ ID NO: 3901907 - DNA, 25 bp, Homo sapien
taaatgtcattatgaaactggcagg

SEQ ID NO: 3901908 - DNA, 25 bp, Homo sapien
ccttatggagttgtatggtagggca

SEQ ID NO: 3901909 - DNA, 25 bp, Homo sapien
gaatgaatgtagataaatggtcaca

SEQ ID NO: 3901910 - DNA, 25 bp, Homo sapien
tctagcagttcctcttttgatcctg

SEQ ID NO: 3901911 - DNA, 25 bp, Homo sapien
catacttatgcatgaaatttggata

SEQ ID NO: 3901912 - DNA, 25 bp, Homo sapien
gatagttttacagtatgtttgcctg

SEQ ID NO: 3901913 - DNA, 25 bp, Homo sapien
ggaaacagagttgtcatacttatgc

SEQ ID NO: 3901914 - DNA, 25 bp, Homo sapien
tatgatcaggccactatgctacaaa

SEQ ID NO: 3901915 - DNA, 25 bp, Homo sapien
tctcagaggatcttgtgaaattcac

SEQ ID NO: 3901916 - DNA, 25 bp, Homo sapien
acattgatttattagcctatctttc

SEQ ID NO: 3901917 - DNA, 25 bp, Homo sapien
cagaggatcttgtgaaattcacatg

SEQ ID NO: 3901918 - DNA, 25 bp, Homo sapien
atgctgtggtacacaatttgggaaa

SEQ ID NO: 3901919 - DNA, 25 bp, Homo sapien
cccccaattactgcatggacagagg

SEQ ID NO: 3901920 - DNA, 25 bp, Homo sapien
atgccccagtcgcccccaattactg

SEQ ID NO: 3901921 - DNA, 25 bp, Homo sapien
attccaatgccccagtcgcccccaa

SEQ ID NO: 3901922 - DNA, 25 bp, Homo sapien
ccccaattactgcatggacagaggg

SEQ ID NO: 3901923 - DNA, 25 bp, Homo sapien
caaaataggcttgtgggcttttcat

SEQ ID NO: 3901924 - DNA, 25 bp, Homo sapien
gcttgtgggcttttcatgagaggaa

SEQ ID NO: 3901925 - DNA, 25 bp, Homo sapien
taggcttgtgggcttttcatgagag

SEQ ID NO: 3901926 - DNA, 25 bp, Homo sapien
aatgggtgaaaaataatgatcatca

SEQ ID NO: 3901927 - DNA, 25 bp, Homo sapien
catgagactaaactctccaagaaca

SEQ ID NO: 3901928 - DNA, 25 bp, Homo sapien
cacatgaaacattcttggagagggg

SEQ ID NO: 3901929 - DNA, 25 bp, Homo sapien
ggttcttctgtgcacccctgagcac

SEQ ID NO: 3901930 - DNA, 25 bp, Homo sapien
ccctctatctagaggaaggccacat

SEQ ID NO: 3901931 - DNA, 25 bp, Homo sapien
tctttgcttcctagagatggcacct

SEQ ID NO: 3901932 - DNA, 25 bp, Homo sapien
cttctttgcttcctagagatggcac

SEQ ID NO: 3901933 - DNA, 25 bp, Homo sapien
tttgcttcctagagatggcacctgc

SEQ ID NO: 3901934 - DNA, 25 bp, Homo sapien
gcttcctagagatggcacctgctgt

SEQ ID NO: 3901935 - DNA, 25 bp, Homo sapien
cttggatctatgttcacagtcttca

SEQ ID NO: 3901936 - DNA, 25 bp, Homo sapien
ccccacaggacagccgttctcttcc

SEQ ID NO: 3901937 - DNA, 25 bp, Homo sapien
tcaaaccttctcaaccactccctat

SEQ ID NO: 3901938 - DNA, 25 bp, Homo sapien
tcctgaaaggagggtcttttcagga

SEQ ID NO: 3901939 - DNA, 25 bp, Homo sapien
atcttgtctgcctggctccccttca

SEQ ID NO: 3901940 - DNA, 25 bp, Homo sapien
tcttgtctgcctggctccccttcat

SEQ ID NO: 3901941 - DNA, 25 bp, Homo sapien
gtacaggaatctgccatcttgtctg

SEQ ID NO: 3901942 - DNA, 25 bp, Homo sapien
cttgtacaggaatctgccatcttgt

SEQ ID NO: 3901943 - DNA, 25 bp, Homo sapien
gtgccctccacctggtgcgtcctct

SEQ ID NO: 3901944 - DNA, 25 bp, Homo sapien
tggctccagccggcccaatctgatt

SEQ ID NO: 3901945 - DNA, 25 bp, Homo sapien
gagccctggtcgttgttgtgccctc

SEQ ID NO: 3901946 - DNA, 25 bp, Homo sapien
acctggtgcgtcctctgtcttccac

SEQ ID NO: 3901947 - DNA, 25 bp, Homo sapien
tgctgtgagtgtgggggtccgggaa

SEQ ID NO: 3901948 - DNA, 25 bp, Homo sapien
tgctgggtacaagggtgtgctgtga

SEQ ID NO: 3901949 - DNA, 25 bp, Homo sapien
cttggtgctgggtacaagggtgtgc

SEQ ID NO: 3901950 - DNA, 25 bp, Homo sapien
gtacaagggtgtgctgtgagtgtgg

SEQ ID NO: 3901951 - DNA, 25 bp, Homo sapien
gccccgctcgctaccgcggagcagc

SEQ ID NO: 3901952 - DNA, 25 bp, Homo sapien
ctgccgtccccgcagccgtgcacct

SEQ ID NO: 3901953 - DNA, 25 bp, Homo sapien
tcggtccgctcgttcgggctgcggc

SEQ ID NO: 3901954 - DNA, 25 bp, Homo sapien
tgcccggtcggctcggtccgctcgt

SEQ ID NO: 3901955 - DNA, 25 bp, Homo sapien
gtagccccagccgtggtggccggtc

SEQ ID NO: 3901956 - DNA, 25 bp, Homo sapien
agccccagccgtggtggccggtcat

SEQ ID NO: 3901957 - DNA, 25 bp, Homo sapien
gtcgtcctggccgtagccccagccg

SEQ ID NO: 3901958 - DNA, 25 bp, Homo sapien
tggccgtagccccagccgtggtggc

SEQ ID NO: 3901959 - DNA, 25 bp, Homo sapien
ttctctgagtcctaaggaaactgag

SEQ ID NO: 3901960 - DNA, 25 bp, Homo sapien
gatgaaggagctctcttccgcgtca

SEQ ID NO: 3901961 - DNA, 25 bp, Homo sapien
tagacacccagacacatgcttgcgc

SEQ ID NO: 3901962 - DNA, 25 bp, Homo sapien
acgtgcgcaaacaccctgctcggtg

SEQ ID NO: 3901963 - DNA, 25 bp, Homo sapien
gcaggcctcataggaaagctccagt

SEQ ID NO: 3901964 - DNA, 25 bp, Homo sapien
gatacagcttgtgccaatgcgaggg

SEQ ID NO: 3901965 - DNA, 25 bp, Homo sapien
tattgatgggtgattggcgatctcc

SEQ ID NO: 3901966 - DNA, 25 bp, Homo sapien
gatctccctgggcaatgggatacag

SEQ ID NO: 3901967 - DNA, 25 bp, Homo sapien
acctggacagagtggccattgttgg

SEQ ID NO: 3901968 - DNA, 25 bp, Homo sapien
catcgctgtcattgaagtctacctg

SEQ ID NO: 3901969 - DNA, 25 bp, Homo sapien
cctggacagagtggccattgttggt

SEQ ID NO: 3901970 - DNA, 25 bp, Homo sapien
ggacagagtggccattgttggtgat

SEQ ID NO: 3901971 - DNA, 25 bp, Homo sapien
gcctcctgggactgatagaatttcc

SEQ ID NO: 3901972 - DNA, 25 bp, Homo sapien
gctggggccatgcacgaggcctcct

SEQ ID NO: 3901973 - DNA, 25 bp, Homo sapien
cctgggactgatagaatttccagct

SEQ ID NO: 3901974 - DNA, 25 bp, Homo sapien
ggccatgcacgaggcctcctgggac

SEQ ID NO: 3901975 - DNA, 25 bp, Homo sapien
acttgccgtccaccgtgtgctcaga

SEQ ID NO: 3901976 - DNA, 25 bp, Homo sapien
tgctcagaacccacatcgtgcttct

SEQ ID NO: 3901977 - DNA, 25 bp, Homo sapien
ccagtggaagtgaaactgcttgagg

SEQ ID NO: 3901978 - DNA, 25 bp, Homo sapien
ctggggaaggacttgccgtccaccg

SEQ ID NO: 3901979 - DNA, 25 bp, Homo sapien
gcctccccaaaagtgctgtacttct

SEQ ID NO: 3901980 - DNA, 25 bp, Homo sapien
tacttcttggcattccagtgaacca

SEQ ID NO: 3901981 - DNA, 25 bp, Homo sapien
tggcattccagtgaaccagatgcag

SEQ ID NO: 3901982 - DNA, 25 bp, Homo sapien
ccaggccatcaggtgctgaggccgc

SEQ ID NO: 3901983 - DNA, 25 bp, Homo sapien
gagcgcatctgtcagacgattcatg

SEQ ID NO: 3901984 - DNA, 25 bp, Homo sapien
catgtagagcgcatctgtcagacga

SEQ ID NO: 3901985 - DNA, 25 bp, Homo sapien
catctgtcagacgattcatgctggg

SEQ ID NO: 3901986 - DNA, 25 bp, Homo sapien
cggaccatgtagagcgcatctgtca

SEQ ID NO: 3901987 - DNA, 25 bp, Homo sapien
agtcgtcagagagcccgggtaggtc

SEQ ID NO: 3901988 - DNA, 25 bp, Homo sapien
ccaggtgacactctcactgagtggg

SEQ ID NO: 3901989 - DNA, 25 bp, Homo sapien
cgggtaggtccagtagtgccggctg

SEQ ID NO: 3901990 - DNA, 25 bp, Homo sapien
gatgggctcccggagcacaatccag

SEQ ID NO: 3901991 - DNA, 25 bp, Homo sapien
atgtggatcctctcatcgtcctccg

SEQ ID NO: 3901992 - DNA, 25 bp, Homo sapien
aagttgttcaccatgtggatcctct

SEQ ID NO: 3901993 - DNA, 25 bp, Homo sapien
atcgtcctccgaggtaaaaagcagg

SEQ ID NO: 3901994 - DNA, 25 bp, Homo sapien
ctgtggtggccggaagttgttcacc

SEQ ID NO: 3901995 - DNA, 25 bp, Homo sapien
tctctctggtagtgtcagctgcccg

SEQ ID NO: 3901996 - DNA, 25 bp, Homo sapien
ggtgaccaaggagcaaactggctga

SEQ ID NO: 3901997 - DNA, 25 bp, Homo sapien
gctgattttaatggcctggcagtga

SEQ ID NO: 3901998 - DNA, 25 bp, Homo sapien
tctgctgacatggaagcccttgaga

SEQ ID NO: 3901999 - DNA, 25 bp, Homo sapien
tggactgtcatgtaggtggctttgg

SEQ ID NO: 3902000 - DNA, 25 bp, Homo sapien
tttattaattcaacagggatggact

SEQ ID NO: 3902001 - DNA, 25 bp, Homo sapien
gatactgtataagctatagccaggg

SEQ ID NO: 3902002 - DNA, 25 bp, Homo sapien
ggacaaggggagatactgtataagc

SEQ ID NO: 3902003 - DNA, 25 bp, Homo sapien
cacagatgagcacgccagtgggtat

SEQ ID NO: 3902004 - DNA, 25 bp, Homo sapien
tgagcacgccagtgggtatgtgtcc

SEQ ID NO: 3902005 - DNA, 25 bp, Homo sapien
agatgagcacgccagtgggtatgtg

SEQ ID NO: 3902006 - DNA, 25 bp, Homo sapien
ccacagatgagcacgccagtgggta

SEQ ID NO: 3902007 - DNA, 25 bp, Homo sapien
aagacaaaagcacttgagttgcagc

SEQ ID NO: 3902008 - DNA, 25 bp, Homo sapien
atagactgccaaactggaaactgcc

SEQ ID NO: 3902009 - DNA, 25 bp, Homo sapien
aatgtaggttacactcatagactgc

SEQ ID NO: 3902010 - DNA, 25 bp, Homo sapien
cccagaagacaaaagcacttgagtt

SEQ ID NO: 3902011 - DNA, 25 bp, Homo sapien
aagggcctatgctccaggtccctgg

SEQ ID NO: 3902012 - DNA, 25 bp, Homo sapien
gccctctggtatctcctgtgtctgg

SEQ ID NO: 3902013 - DNA, 25 bp, Homo sapien
aacactcaagatcagcagtagcaag

SEQ ID NO: 3902014 - DNA, 25 bp, Homo sapien
gtgtgccctctggtatctcctgtgt

SEQ ID NO: 3902015 - DNA, 25 bp, Homo sapien
tgtgcacagtgcacatccaatggca

SEQ ID NO: 3902016 - DNA, 25 bp, Homo sapien
gtgcacagtgcacatccaatggcag

SEQ ID NO: 3902017 - DNA, 25 bp, Homo sapien
tctgctccgtccagtgccggagctt

SEQ ID NO: 3902018 - DNA, 25 bp, Homo sapien
tcggggagaagtgcacgtcctttcc

SEQ ID NO: 3902019 - DNA, 25 bp, Homo sapien
ctatccttcatagtttcggggagaa

SEQ ID NO: 3902020 - DNA, 25 bp, Homo sapien
gctgtctgctccgtccagtgccgga

SEQ ID NO: 3902021 - DNA, 25 bp, Homo sapien
ggctgtgccagtgaaaaatgcttga

SEQ ID NO: 3902022 - DNA, 25 bp, Homo sapien
gactgcagtgatctgtgccctaggg

SEQ ID NO: 3902023 - DNA, 25 bp, Homo sapien
caatcaggccttattcaggagtggg

SEQ ID NO: 3902024 - DNA, 25 bp, Homo sapien
gaataaagccagaagagctacccct

SEQ ID NO: 3902025 - DNA, 25 bp, Homo sapien
cgcccgctccgtccggtcagttcag

SEQ ID NO: 3902026 - DNA, 25 bp, Homo sapien
ggtcagttcagcgcctgcgcacagt

SEQ ID NO: 3902027 - DNA, 25 bp, Homo sapien
cccgctccgtccggtcagttcagcg

SEQ ID NO: 3902028 - DNA, 25 bp, Homo sapien
cggtcagttcagcgcctgcgcacag

SEQ ID NO: 3902029 - DNA, 25 bp, Homo sapien
gcccgccaccacacctggccaattt

SEQ ID NO: 3902030 - DNA, 25 bp, Homo sapien
tcagactctggagtagctgggacta

SEQ ID NO: 3902031 - DNA, 25 bp, Homo sapien
cgccaccacacctggccaatttttt

SEQ ID NO: 3902032 - DNA, 25 bp, Homo sapien
tgccattctcctacctcagactctg

SEQ ID NO: 3902033 - DNA, 25 bp, Homo sapien
ctgaaactataccagcaaatgtgtt

SEQ ID NO: 3902034 - DNA, 25 bp, Homo sapien
tgaaactataccagcaaatgtgttc

SEQ ID NO: 3902035 - DNA, 25 bp, Homo sapien
tctgaaactataccagcaaatgtgt

SEQ ID NO: 3902036 - DNA, 25 bp, Homo sapien
aatgtggcaatgctgttccttgtag

SEQ ID NO: 3902037 - DNA, 25 bp, Homo sapien
tggcaatgctgttccttgtagaatt

SEQ ID NO: 3902038 - DNA, 25 bp, Homo sapien
gagtataagcgtctacccccttgca

SEQ ID NO: 3902039 - DNA, 25 bp, Homo sapien
tggagtataagcgtctacccccttg

SEQ ID NO: 3902040 - DNA, 25 bp, Homo sapien
taaagccaccacatggggaactgtt

SEQ ID NO: 3902041 - DNA, 25 bp, Homo sapien
tgcacagagtaaagccaccacatgg

SEQ ID NO: 3902042 - DNA, 25 bp, Homo sapien
gtaaagccaccacatggggaactgt

SEQ ID NO: 3902043 - DNA, 25 bp, Homo sapien
ctttgcacagagtaaagccaccaca

SEQ ID NO: 3902044 - DNA, 25 bp, Homo sapien
agtagcctgtcctccatgatgatcg

SEQ ID NO: 3902045 - DNA, 25 bp, Homo sapien
tgccacatagtagaagagcctctcg

SEQ ID NO: 3902046 - DNA, 25 bp, Homo sapien
tcttggacaccaaggatggctcggc

SEQ ID NO: 3902047 - DNA, 25 bp, Homo sapien
tcccctgggtgcttgagccaatgca

SEQ ID NO: 3902048 - DNA, 25 bp, Homo sapien
tttgtggcaagacctaagaagctcc

SEQ ID NO: 3902049 - DNA, 25 bp, Homo sapien
cctagcatggctcaaagtttctgga

SEQ ID NO: 3902050 - DNA, 25 bp, Homo sapien
ggcaagcgtcccatctgataagtct

SEQ ID NO: 3902051 - DNA, 25 bp, Homo sapien
tccaagcatgcttacagtaggcgtg

SEQ ID NO: 3902052 - DNA, 25 bp, Homo sapien
tgttgtttaaatgccacagcaactc

SEQ ID NO: 3902053 - DNA, 25 bp, Homo sapien
aattgaagaattctgcctgacgtag

SEQ ID NO: 3902054 - DNA, 25 bp, Homo sapien
tgaaaacacatgactaaacagttgc

SEQ ID NO: 3902055 - DNA, 25 bp, Homo sapien
gaagtatcccaacatttgactgaat

SEQ ID NO: 3902056 - DNA, 25 bp, Homo sapien
tggctacagggagaccctgtcaaga

SEQ ID NO: 3902057 - DNA, 25 bp, Homo sapien
ctggctacagggagaccctgtcaag

SEQ ID NO: 3902058 - DNA, 25 bp, Homo sapien
gggagaccctgtcaagaaggaaaga

SEQ ID NO: 3902059 - DNA, 25 bp, Homo sapien
acagggagaccctgtcaagaaggaa

SEQ ID NO: 3902060 - DNA, 25 bp, Homo sapien
caagatcatgccattgcactccagc

SEQ ID NO: 3902061 - DNA, 25 bp, Homo sapien
ggatcgtttgagcctgggctgcaga

SEQ ID NO: 3902062 - DNA, 25 bp, Homo sapien
ggttgcagtgagccaagatcatgcc

SEQ ID NO: 3902063 - DNA, 25 bp, Homo sapien
aggatcgtttgagcctgggctgcag

SEQ ID NO: 3902064 - DNA, 25 bp, Homo sapien
cagtagcccatgtgcttcaagaagt

SEQ ID NO: 3902065 - DNA, 25 bp, Homo sapien
tgatagctgcatggctgtcccaatg

SEQ ID NO: 3902066 - DNA, 25 bp, Homo sapien
caagttaagcatcaggtgcctgagg

SEQ ID NO: 3902067 - DNA, 25 bp, Homo sapien
tatttatgacccatgctaggctcca

SEQ ID NO: 3902068 - DNA, 25 bp, Homo sapien
ctctatgctgatgaagagccagcca

SEQ ID NO: 3902069 - DNA, 25 bp, Homo sapien
gagccagccatgcctccagcccttc

SEQ ID NO: 3902070 - DNA, 25 bp, Homo sapien
agccatgcctccagcccttcctgag

SEQ ID NO: 3902071 - DNA, 25 bp, Homo sapien
gccagccatgcctccagcccttcct

SEQ ID NO: 3902072 - DNA, 25 bp, Homo sapien
gagcatgctggctggttgacaacct

SEQ ID NO: 3902073 - DNA, 25 bp, Homo sapien
cccaggaggctttccaaaggtgctc

SEQ ID NO: 3902074 - DNA, 25 bp, Homo sapien
tccttccctacaagacagggctggg

SEQ ID NO: 3902075 - DNA, 25 bp, Homo sapien
gatggcgacatctagaggcaacttc

SEQ ID NO: 3902076 - DNA, 25 bp, Homo sapien
gatgaacatagacaagctgacatga

SEQ ID NO: 3902077 - DNA, 25 bp, Homo sapien
cccagatgaacatagacaagctgac

SEQ ID NO: 3902078 - DNA, 25 bp, Homo sapien
aagctgacatgatggacgctgactt

SEQ ID NO: 3902079 - DNA, 25 bp, Homo sapien
caagctgacatgatggacgctgact

SEQ ID NO: 3902080 - DNA, 25 bp, Homo sapien
tagctgctacgtgggagagagtcat

SEQ ID NO: 3902081 - DNA, 25 bp, Homo sapien
gagcaccagccctttatctgacaca

SEQ ID NO: 3902082 - DNA, 25 bp, Homo sapien
agtggcagtagggtcagagatagct

SEQ ID NO: 3902083 - DNA, 25 bp, Homo sapien
ggagagagtcatgagcaccagccct

SEQ ID NO: 3902084 - DNA, 25 bp, Homo sapien
tggggctgttgctattcttatccac

SEQ ID NO: 3902085 - DNA, 25 bp, Homo sapien
gcactcagaagccagactagactgt

SEQ ID NO: 3902086 - DNA, 25 bp, Homo sapien
agccagactagactgtggtcaccag

SEQ ID NO: 3902087 - DNA, 25 bp, Homo sapien
ctcggctggctatctcattctccag

SEQ ID NO: 3902088 - DNA, 25 bp, Homo sapien
cggctggctatctcattctccaggg

SEQ ID NO: 3902089 - DNA, 25 bp, Homo sapien
caagccccttctccacagacaaggg

SEQ ID NO: 3902090 - DNA, 25 bp, Homo sapien
ggagctgaccgccaggtccacaagc

SEQ ID NO: 3902091 - DNA, 25 bp, Homo sapien
aatgaaggcatctgctctagtttga

SEQ ID NO: 3902092 - DNA, 25 bp, Homo sapien
caggccccggaccactcttggttgt

SEQ ID NO: 3902093 - DNA, 25 bp, Homo sapien
tcacacacaggctggtgagtgcatg

SEQ ID NO: 3902094 - DNA, 25 bp, Homo sapien
ggccccatgggtcaggagcatgtga

SEQ ID NO: 3902095 - DNA, 25 bp, Homo sapien
tggggatgcgtccttctgccccagt

SEQ ID NO: 3902096 - DNA, 25 bp, Homo sapien
tgagtcacctacacccagggatggg

SEQ ID NO: 3902097 - DNA, 25 bp, Homo sapien
ccactatggtgggagacgaacggaa

SEQ ID NO: 3902098 - DNA, 25 bp, Homo sapien
cacagagatgcatgcgcaggctcat

SEQ ID NO: 3902099 - DNA, 25 bp, Homo sapien
tgggccgcatcgtagctcgtaacag

SEQ ID NO: 3902100 - DNA, 25 bp, Homo sapien
catggacagatagacagtgctgccc

SEQ ID NO: 3902101 - DNA, 25 bp, Homo sapien
atgatcgctccattgtagtggacgg

SEQ ID NO: 3902102 - DNA, 25 bp, Homo sapien
tcgctccattgtagtggacggagaa

SEQ ID NO: 3902103 - DNA, 25 bp, Homo sapien
gatcgctccattgtagtggacggag

SEQ ID NO: 3902104 - DNA, 25 bp, Homo sapien
ctccattgtagtggacggagaagag

SEQ ID NO: 3902105 - DNA, 25 bp, Homo sapien
actccgaggactcgctcagctcagg

SEQ ID NO: 3902106 - DNA, 25 bp, Homo sapien
ggcagcgactcagacgagagcgttt

SEQ ID NO: 3902107 - DNA, 25 bp, Homo sapien
ggcaagagcgccctggcgcgcatct

SEQ ID NO: 3902108 - DNA, 25 bp, Homo sapien
gagagcgtttacaaggtgctgctgc

SEQ ID NO: 3902109 - DNA, 25 bp, Homo sapien
gccagggccgcggtcaccgcttctc

SEQ ID NO: 3902110 - DNA, 25 bp, Homo sapien
aggccgagaacccacaacgcggcgt

SEQ ID NO: 3902111 - DNA, 25 bp, Homo sapien
tgtccctcgcgcgactccgtcgcca

SEQ ID NO: 3902112 - DNA, 25 bp, Homo sapien
gcttctctcgcacctcaggccgaga

SEQ ID NO: 3902113 - DNA, 25 bp, Homo sapien
ctttagtgccccctgagacctggtt

SEQ ID NO: 3902114 - DNA, 25 bp, Homo sapien
gcgccgccgtggtcccttctcagcg

SEQ ID NO: 3902115 - DNA, 25 bp, Homo sapien
gttctggcctctacgtttcagcccg

SEQ ID NO: 3902116 - DNA, 25 bp, Homo sapien
tttcagcccgctactggctcgcacg

SEQ ID NO: 3902117 - DNA, 25 bp, Homo sapien
agaggcgaccaaccgtcctggatac

SEQ ID NO: 3902118 - DNA, 25 bp, Homo sapien
tcctggatacgggagctcccggcca

SEQ ID NO: 3902119 - DNA, 25 bp, Homo sapien
cgcgtcaccgggaggtcccgagaca

SEQ ID NO: 3902120 - DNA, 25 bp, Homo sapien
acactaggatccctgccaggccaga

SEQ ID NO: 3902121 - DNA, 25 bp, Homo sapien
cacggccatggtcatttatccactt

SEQ ID NO: 3902122 - DNA, 25 bp, Homo sapien
tgacaaacatttcacgagcccctgc

SEQ ID NO: 3902123 - DNA, 25 bp, Homo sapien
aagctgtggggacgccgtactcccg

SEQ ID NO: 3902124 - DNA, 25 bp, Homo sapien
gagcccctgccggtccaagctgtgg

SEQ ID NO: 3902125 - DNA, 25 bp, Homo sapien
taaactagaattggagaccccagga

SEQ ID NO: 3902126 - DNA, 25 bp, Homo sapien
tgaccgcggcacttcttaaggagcg

SEQ ID NO: 3902127 - DNA, 25 bp, Homo sapien
gaaggaaccgcttgagcaaaggcag

SEQ ID NO: 3902128 - DNA, 25 bp, Homo sapien
tttgaaacgtacacgtgaccgcggc

SEQ ID NO: 3902129 - DNA, 25 bp, Homo sapien
ggtgtggtaggagagcgggactgag

SEQ ID NO: 3902130 - DNA, 25 bp, Homo sapien
tgtggtaggagagcgggactgagca

SEQ ID NO: 3902131 - DNA, 25 bp, Homo sapien
gtgtggtaggagagcgggactgagc

SEQ ID NO: 3902132 - DNA, 25 bp, Homo sapien
gtggtaggagagcgggactgagcag

SEQ ID NO: 3902133 - DNA, 25 bp, Homo sapien
ggacacgctgctgttcacccagagg

SEQ ID NO: 3902134 - DNA, 25 bp, Homo sapien
gtcggctcgctggtctcggttcgct

SEQ ID NO: 3902135 - DNA, 25 bp, Homo sapien
agcagtggatcagtgccttgcccag

SEQ ID NO: 3902136 - DNA, 25 bp, Homo sapien
agaggctgccccgggtctgtccagc

SEQ ID NO: 3902137 - DNA, 25 bp, Homo sapien
agccgcgcacgaagtctgtgcagcc

SEQ ID NO: 3902138 - DNA, 25 bp, Homo sapien
tcagccgcgcacgaagtctgtgcag

SEQ ID NO: 3902139 - DNA, 25 bp, Homo sapien
ctcagccgcgcacgaagtctgtgca

SEQ ID NO: 3902140 - DNA, 25 bp, Homo sapien
cgctcagccgcgcacgaagtctgtg

SEQ ID NO: 3902141 - DNA, 25 bp, Homo sapien
gggctcacgagttccacgctgtcat

SEQ ID NO: 3902142 - DNA, 25 bp, Homo sapien
cgttgcgtggggctcacgagttcca

SEQ ID NO: 3902143 - DNA, 25 bp, Homo sapien
ctgcctccgcagcatttggcagatc

SEQ ID NO: 3902144 - DNA, 25 bp, Homo sapien
tttggcagatctgagcccggtccct

SEQ ID NO: 3902145 - DNA, 25 bp, Homo sapien
cgctggttccttgccgtggtgtccc

SEQ ID NO: 3902146 - DNA, 25 bp, Homo sapien
ctggggcccctgtactccgctggtt

SEQ ID NO: 3902147 - DNA, 25 bp, Homo sapien
ggcctggcatgtcccggcgctcctg

SEQ ID NO: 3902148 - DNA, 25 bp, Homo sapien
cagcccgaccctttctgtgcttcta

SEQ ID NO: 3902149 - DNA, 25 bp, Homo sapien
gagggaaatggactgaatccccaca

SEQ ID NO: 3902150 - DNA, 25 bp, Homo sapien
tgggcacaagcgatactctcccttg

SEQ ID NO: 3902151 - DNA, 25 bp, Homo sapien
gccactgtggcctcttagatctgct

SEQ ID NO: 3902152 - DNA, 25 bp, Homo sapien
tctgctttaggatttggcgcctggg

SEQ ID NO: 3902153 - DNA, 25 bp, Homo sapien
ggcattggcgcccttcacatggaca

SEQ ID NO: 3902154 - DNA, 25 bp, Homo sapien
ttcacatggacaagactccccagca

SEQ ID NO: 3902155 - DNA, 25 bp, Homo sapien
caggaaggtttggaccccggcattg

SEQ ID NO: 3902156 - DNA, 25 bp, Homo sapien
ccccgtgtgtgtggtccggatggga

SEQ ID NO: 3902157 - DNA, 25 bp, Homo sapien
cctcacaccactccaagattcaggg

SEQ ID NO: 3902158 - DNA, 25 bp, Homo sapien
gatgggtggttccatccctcacacc

SEQ ID NO: 3902159 - DNA, 25 bp, Homo sapien
gggtgcaaatcgcagcggacctaga

SEQ ID NO: 3902160 - DNA, 25 bp, Homo sapien
actccaagattcagggggctcaggg

SEQ ID NO: 3902161 - DNA, 25 bp, Homo sapien
tggctaagaaactctgactccactg

SEQ ID NO: 3902162 - DNA, 25 bp, Homo sapien
tctgactccactgcggtgaggtcct

SEQ ID NO: 3902163 - DNA, 25 bp, Homo sapien
tccactgcggtgaggtcctgtagac

SEQ ID NO: 3902164 - DNA, 25 bp, Homo sapien
tcatgttgaactggctaagaaactc

SEQ ID NO: 3902165 - DNA, 25 bp, Homo sapien
tagagccttcatggctatgggccgg

SEQ ID NO: 3902166 - DNA, 25 bp, Homo sapien
caggttagagccttcatggctatgg

SEQ ID NO: 3902167 - DNA, 25 bp, Homo sapien
ccttcatggctatgggccggcgtgt

SEQ ID NO: 3902168 - DNA, 25 bp, Homo sapien
atgggccggcgtgtagatgctgagg

SEQ ID NO: 3902169 - DNA, 25 bp, Homo sapien
gccagcatggaaccatcatacaagg

SEQ ID NO: 3902170 - DNA, 25 bp, Homo sapien
ccatcatacaaggaagccatgccaa

SEQ ID NO: 3902171 - DNA, 25 bp, Homo sapien
aaaaacaagcgcaccaccgtggatc

SEQ ID NO: 3902172 - DNA, 25 bp, Homo sapien
gacacccaggcggtactggatgatg

SEQ ID NO: 3902173 - DNA, 25 bp, Homo sapien
gactcgccaaaaatggtgacacggt

SEQ ID NO: 3902174 - DNA, 25 bp, Homo sapien
tcagggttgcctccaaagtgggcga

SEQ ID NO: 3902175 - DNA, 25 bp, Homo sapien
atcagctgagctggcaatgaggccg

SEQ ID NO: 3902176 - DNA, 25 bp, Homo sapien
aggtagccccagttgccggttgcgt

SEQ ID NO: 3902177 - DNA, 25 bp, Homo sapien
ctcctctttactcttgccccgcagg

SEQ ID NO: 3902178 - DNA, 25 bp, Homo sapien
tcaacttggtcacaggcagacaggt

SEQ ID NO: 3902179 - DNA, 25 bp, Homo sapien
caccagggcctcagagtcaacttgg

SEQ ID NO: 3902180 - DNA, 25 bp, Homo sapien
tgttaattgcaagaatctcctcttt

SEQ ID NO: 3902181 - DNA, 25 bp, Homo sapien
gctgaaagtcggcagaggccagcag

SEQ ID NO: 3902182 - DNA, 25 bp, Homo sapien
ccactccggggatcatcttgaaagg

SEQ ID NO: 3902183 - DNA, 25 bp, Homo sapien
ccaacaatgctagggacaggctgaa

SEQ ID NO: 3902184 - DNA, 25 bp, Homo sapien
tgagccagccgaattcattgttgtt

SEQ ID NO: 3902185 - DNA, 25 bp, Homo sapien
gggatgggatgagcctggagctatg

SEQ ID NO: 3902186 - DNA, 25 bp, Homo sapien
gcctggagctatgaagccctgaaca

SEQ ID NO: 3902187 - DNA, 25 bp, Homo sapien
gagcctggagctatgaagccctgaa

SEQ ID NO: 3902188 - DNA, 25 bp, Homo sapien
ggatgagcctggagctatgaagccc

SEQ ID NO: 3902189 - DNA, 25 bp, Homo sapien
tctgggtatcatagatcctcatgac

SEQ ID NO: 3902190 - DNA, 25 bp, Homo sapien
ttctgggtatcatagatcctcatga

SEQ ID NO: 3902191 - DNA, 25 bp, Homo sapien
aaaggcgaggctctgaggtgacccc

SEQ ID NO: 3902192 - DNA, 25 bp, Homo sapien
aagaggcaggttagactggatgcca

SEQ ID NO: 3902193 - DNA, 25 bp, Homo sapien
gcctttgctcatgggggtcactaca

SEQ ID NO: 3902194 - DNA, 25 bp, Homo sapien
cagggaggaggtggtctcgggcttg

SEQ ID NO: 3902195 - DNA, 25 bp, Homo sapien
caggtcaccaaatgtaggaggcaac

SEQ ID NO: 3902196 - DNA, 25 bp, Homo sapien
tgtgctacttggagtgcagggatca

SEQ ID NO: 3902197 - DNA, 25 bp, Homo sapien
cagggatcacaaacatggagtccgc

SEQ ID NO: 3902198 - DNA, 25 bp, Homo sapien
tcctggaactgcgcttggagggtct

SEQ ID NO: 3902199 - DNA, 25 bp, Homo sapien
caggctttggtccaaatatactcac

SEQ ID NO: 3902200 - DNA, 25 bp, Homo sapien
ctgcccgccaggctttggtccaaat

SEQ ID NO: 3902201 - DNA, 25 bp, Homo sapien
gcccgccaggctttggtccaaatat

SEQ ID NO: 3902202 - DNA, 25 bp, Homo sapien
cgccaggctttggtccaaatatact

SEQ ID NO: 3902203 - DNA, 25 bp, Homo sapien
cagcccatgacacggtggcccctcc

SEQ ID NO: 3902204 - DNA, 25 bp, Homo sapien
gtggacagcccatgacacggtggcc

SEQ ID NO: 3902205 - DNA, 25 bp, Homo sapien
tggacagcccatgacacggtggccc

SEQ ID NO: 3902206 - DNA, 25 bp, Homo sapien
ggggtggacagcccatgacacggtg

SEQ ID NO: 3902207 - DNA, 25 bp, Homo sapien
ttcatgtgcggtggcctgatgttct

SEQ ID NO: 3902208 - DNA, 25 bp, Homo sapien
atggtctgccttcatgtgcggtggc

SEQ ID NO: 3902209 - DNA, 25 bp, Homo sapien
gctggaactcgtagaagtacacagg

SEQ ID NO: 3902210 - DNA, 25 bp, Homo sapien
tgggctgatgctggaactcgtagaa

SEQ ID NO: 3902211 - DNA, 25 bp, Homo sapien
ctgaaaacaaaaggaagctcatcac

SEQ ID NO: 3902212 - DNA, 25 bp, Homo sapien
tagttgcccccaaagaaacttctga

SEQ ID NO: 3902213 - DNA, 25 bp, Homo sapien
ttctgaaaacaaaaggaagctcatc

SEQ ID NO: 3902214 - DNA, 25 bp, Homo sapien
acttctgaaaacaaaaggaagctca

SEQ ID NO: 3902215 - DNA, 25 bp, Homo sapien
tgctcctcttcctcagtgaatttaa

SEQ ID NO: 3902216 - DNA, 25 bp, Homo sapien
catcttcctgcttagctgctcctct

SEQ ID NO: 3902217 - DNA, 25 bp, Homo sapien
gctgctcctcttcctcagtgaattt

SEQ ID NO: 3902218 - DNA, 25 bp, Homo sapien
tagctgctcctcttcctcagtgaat

SEQ ID NO: 3902219 - DNA, 25 bp, Homo sapien
catttctcgcaaagttggcccagta

SEQ ID NO: 3902220 - DNA, 25 bp, Homo sapien
ccatttctcgcaaagttggcccagt

SEQ ID NO: 3902221 - DNA, 25 bp, Homo sapien
tctcgcaaagttggcccagtacttc

SEQ ID NO: 3902222 - DNA, 25 bp, Homo sapien
tttctcgcaaagttggcccagtact

SEQ ID NO: 3902223 - DNA, 25 bp, Homo sapien
agagcactggatgggcacaagtccc

SEQ ID NO: 3902224 - DNA, 25 bp, Homo sapien
ctgtagacatgccatcccagcaggg

SEQ ID NO: 3902225 - DNA, 25 bp, Homo sapien
gagagatagagcgtgtccactgccc

SEQ ID NO: 3902226 - DNA, 25 bp, Homo sapien
agcagggcagtatgagggtcactct

SEQ ID NO: 3902227 - DNA, 25 bp, Homo sapien
cgcaggctgtaggttcagctgcagg

SEQ ID NO: 3902228 - DNA, 25 bp, Homo sapien
ttcagctgcaggtattgctcctcct

SEQ ID NO: 3902229 - DNA, 25 bp, Homo sapien
tcctggtcgaacagcggccagtgtg

SEQ ID NO: 3902230 - DNA, 25 bp, Homo sapien
cagtgtggcagaccctcgccattgg

SEQ ID NO: 3902231 - DNA, 25 bp, Homo sapien
tggatcttttggggcagcgccttct

SEQ ID NO: 3902232 - DNA, 25 bp, Homo sapien
ctggatcttttggggcagcgccttc

SEQ ID NO: 3902233 - DNA, 25 bp, Homo sapien
gtctctcttcaggctcctcgagctc

SEQ ID NO: 3902234 - DNA, 25 bp, Homo sapien
ctctcttcaggctcctcgagctcct

SEQ ID NO: 3902235 - DNA, 25 bp, Homo sapien
agtgtgtctagcaagagaggaccca

SEQ ID NO: 3902236 - DNA, 25 bp, Homo sapien
gcttctaacacttaggtgtgggcaa

SEQ ID NO: 3902237 - DNA, 25 bp, Homo sapien
aagcacctccctcaaagtggaaaag

SEQ ID NO: 3902238 - DNA, 25 bp, Homo sapien
tgtgggcaacattcttcgaagcacc

SEQ ID NO: 3902239 - DNA, 25 bp, Homo sapien
ttattctttcagacctctcagggat

SEQ ID NO: 3902240 - DNA, 25 bp, Homo sapien
tctttcagacctctcagggatgaac

SEQ ID NO: 3902241 - DNA, 25 bp, Homo sapien
ttctttcagacctctcagggatgaa

SEQ ID NO: 3902242 - DNA, 25 bp, Homo sapien
atttttattctttcagacctctcag

SEQ ID NO: 3902243 - DNA, 25 bp, Homo sapien
ggtcatttatcctcttgacgaacat

SEQ ID NO: 3902244 - DNA, 25 bp, Homo sapien
ggccatggtcatttatcctcttgac

SEQ ID NO: 3902245 - DNA, 25 bp, Homo sapien
gaccagggccatggtcatttatcct

SEQ ID NO: 3902246 - DNA, 25 bp, Homo sapien
ctcccgcggagaccagggccatggt

SEQ ID NO: 3902247 - DNA, 25 bp, Homo sapien
cctcagaaggggctgcgcggcttct

SEQ ID NO: 3902248 - DNA, 25 bp, Homo sapien
gggctgcgcggcttctgtagtcctc

SEQ ID NO: 3902249 - DNA, 25 bp, Homo sapien
gagaatcctctcctcaaacctgtcg

SEQ ID NO: 3902250 - DNA, 25 bp, Homo sapien
tagtcctccgcgatccagagaatcc

SEQ ID NO: 3902251 - DNA, 25 bp, Homo sapien
ccgggtcggtccagccgtggatcca

SEQ ID NO: 3902252 - DNA, 25 bp, Homo sapien
cagaggctgccccgggtcggtccag

SEQ ID NO: 3902253 - DNA, 25 bp, Homo sapien
ggtccagccgtggatccagtgcctt

SEQ ID NO: 3902254 - DNA, 25 bp, Homo sapien
gtcggtccagccgtggatccagtgc

SEQ ID NO: 3902255 - DNA, 25 bp, Homo sapien
gcgctcggccgcgcgtgaagtctgt

SEQ ID NO: 3902256 - DNA, 25 bp, Homo sapien
caccgcgctcggccgcgcgtgaagt

SEQ ID NO: 3902257 - DNA, 25 bp, Homo sapien
ctcggccgcgcgtgaagtctgtgca

SEQ ID NO: 3902258 - DNA, 25 bp, Homo sapien
ccgcgctcggccgcgcgtgaagtct

SEQ ID NO: 3902259 - DNA, 25 bp, Homo sapien
actgttattaccggccggcagcaca

SEQ ID NO: 3902260 - DNA, 25 bp, Homo sapien
tggccaaggacgccacacattgaga

SEQ ID NO: 3902261 - DNA, 25 bp, Homo sapien
gaggcccctttggagggctcagcgc

SEQ ID NO: 3902262 - DNA, 25 bp, Homo sapien
gccaaggacgccacacattgagagc

SEQ ID NO: 3902263 - DNA, 25 bp, Homo sapien
gcttctgttccccaaggaccactaa

SEQ ID NO: 3902264 - DNA, 25 bp, Homo sapien
tatggactccacctgggcagattaa

SEQ ID NO: 3902265 - DNA, 25 bp, Homo sapien
caaaaggtagccatctgtgaggcca

SEQ ID NO: 3902266 - DNA, 25 bp, Homo sapien
tgtgtctggcccaaaatatttcaaa

SEQ ID NO: 3902267 - DNA, 25 bp, Homo sapien
gaattctagaatgtgatcaagggca

SEQ ID NO: 3902268 - DNA, 25 bp, Homo sapien
cttcagaaggtggaataagatccct

SEQ ID NO: 3902269 - DNA, 25 bp, Homo sapien
tccttacaactggttcgacagaagc

SEQ ID NO: 3902270 - DNA, 25 bp, Homo sapien
agcttcagaaggtggaataagatcc

SEQ ID NO: 3902271 - DNA, 25 bp, Homo sapien
cttacaactggttcgacagaagctt

SEQ ID NO: 3902272 - DNA, 25 bp, Homo sapien
gggcatgccaggagcagacagacca

SEQ ID NO: 3902273 - DNA, 25 bp, Homo sapien
aggaccccggactccactctcactg

SEQ ID NO: 3902274 - DNA, 25 bp, Homo sapien
agcagacagaccaccccgaccagga

SEQ ID NO: 3902275 - DNA, 25 bp, Homo sapien
cagtggctgtggcagggcatgccag

SEQ ID NO: 3902276 - DNA, 25 bp, Homo sapien
tacttcaggctgagcaacttcgggc

SEQ ID NO: 3902277 - DNA, 25 bp, Homo sapien
cggctgggcaaatggaatgcccaga

SEQ ID NO: 3902278 - DNA, 25 bp, Homo sapien
ctgagaaccggtcagggcccagtgg

SEQ ID NO: 3902279 - DNA, 25 bp, Homo sapien
aagacattcacaaggcggtctgtgc

SEQ ID NO: 3902280 - DNA, 25 bp, Homo sapien
ctgctgttcatgctctccacgtctt

SEQ ID NO: 3902281 - DNA, 25 bp, Homo sapien
gctgctgttcatgctctccacgtct

SEQ ID NO: 3902282 - DNA, 25 bp, Homo sapien
agtcctctgaaacggagaagatctg

SEQ ID NO: 3902283 - DNA, 25 bp, Homo sapien
ctcagctgggctatagacgttgagg

SEQ ID NO: 3902284 - DNA, 25 bp, Homo sapien
gatctgctgttttccgttgaggaca

SEQ ID NO: 3902285 - DNA, 25 bp, Homo sapien
gctgggctatagacgttgaggacca

SEQ ID NO: 3902286 - DNA, 25 bp, Homo sapien
gcatagtggagctggatcaggtgga

SEQ ID NO: 3902287 - DNA, 25 bp, Homo sapien
gaccgctagggtgctttggaaacag

SEQ ID NO: 3902288 - DNA, 25 bp, Homo sapien
gcagtctcaggaccgctagggtgct

SEQ ID NO: 3902289 - DNA, 25 bp, Homo sapien
aggtaggcatagtggagctggatca

SEQ ID NO: 3902290 - DNA, 25 bp, Homo sapien
ccagttatcagagcgcctccatgga

SEQ ID NO: 3902291 - DNA, 25 bp, Homo sapien
taggaggtggcagcgccagttatca

SEQ ID NO: 3902292 - DNA, 25 bp, Homo sapien
gaccccaaggcggtactggactgta

SEQ ID NO: 3902293 - DNA, 25 bp, Homo sapien
gcagccagagctgatccatcgtagg

SEQ ID NO: 3902294 - DNA, 25 bp, Homo sapien
gccaggtgcatgctcatctccagtg

SEQ ID NO: 3902295 - DNA, 25 bp, Homo sapien
cacatctaggaagccctggttgcca

SEQ ID NO: 3902296 - DNA, 25 bp, Homo sapien
agagatgatgctcccaccggcagat

SEQ ID NO: 3902297 - DNA, 25 bp, Homo sapien
tgttttcttgcacccagcgcaaagc

SEQ ID NO: 3902298 - DNA, 25 bp, Homo sapien
tgatgaccccactctgtgtgatggc

SEQ ID NO: 3902299 - DNA, 25 bp, Homo sapien
gaccccactctgtgtgatggctctg

SEQ ID NO: 3902300 - DNA, 25 bp, Homo sapien
caagggtgagagtcgatgatccctg

SEQ ID NO: 3902301 - DNA, 25 bp, Homo sapien
gggccaagggtgagagtcgatgatc

SEQ ID NO: 3902302 - DNA, 25 bp, Homo sapien
cactgcaccatctcagccggggagc

SEQ ID NO: 3902303 - DNA, 25 bp, Homo sapien
tgcaccatctcagccggggagctgg

SEQ ID NO: 3902304 - DNA, 25 bp, Homo sapien
cagcttcttgctaaggaccagctct

SEQ ID NO: 3902305 - DNA, 25 bp, Homo sapien
agcttcttgctaaggaccagctctt

SEQ ID NO: 3902306 - DNA, 25 bp, Homo sapien
tagggccaagcctcaaaggctagga

SEQ ID NO: 3902307 - DNA, 25 bp, Homo sapien
ggatagaaccccctctgtgccattg

SEQ ID NO: 3902308 - DNA, 25 bp, Homo sapien
ggatgaagatcaccagggttaaggg

SEQ ID NO: 3902309 - DNA, 25 bp, Homo sapien
caacagatgcgtccagtttctttcc

SEQ ID NO: 3902310 - DNA, 25 bp, Homo sapien
gaagacagtgccatcaacggtgaga

SEQ ID NO: 3902311 - DNA, 25 bp, Homo sapien
caacggtgagaggatagatagtatt

SEQ ID NO: 3902312 - DNA, 25 bp, Homo sapien
tgaactcatggttgttgacacccat

SEQ ID NO: 3902313 - DNA, 25 bp, Homo sapien
cagtgccatcaacggtgagaggata

SEQ ID NO: 3902314 - DNA, 25 bp, Homo sapien
tctatgcacctggaaaggaatggaa

SEQ ID NO: 3902315 - DNA, 25 bp, Homo sapien
gacttggctcatgaagtccccggtg

SEQ ID NO: 3902316 - DNA, 25 bp, Homo sapien
cagtgctgacactcttgtgggaagt

SEQ ID NO: 3902317 - DNA, 25 bp, Homo sapien
gatgctcgggatgaaagcacagtgc

SEQ ID NO: 3902318 - DNA, 25 bp, Homo sapien
cagactggtcaagacgggtgttgag

SEQ ID NO: 3902319 - DNA, 25 bp, Homo sapien
atctgctccattgtatccaggagac

SEQ ID NO: 3902320 - DNA, 25 bp, Homo sapien
tccattgtatccaggagaccccagc

SEQ ID NO: 3902321 - DNA, 25 bp, Homo sapien
cgggtgttgagatggccagcatgtc

SEQ ID NO: 3902322 - DNA, 25 bp, Homo sapien
cctggcatttggcttgtgcgtccga

SEQ ID NO: 3902323 - DNA, 25 bp, Homo sapien
tattcatctatgacggtgggcatca

SEQ ID NO: 3902324 - DNA, 25 bp, Homo sapien
tcttgaaaaactgacggtgggaaca

SEQ ID NO: 3902325 - DNA, 25 bp, Homo sapien
aatacgtcacccatgaattcctgga

SEQ ID NO: 3902326 - DNA, 25 bp, Homo sapien
tgatcttcgcaaaagaactgggtcg

SEQ ID NO: 3902327 - DNA, 25 bp, Homo sapien
catgatcagccttcacccaggcagg

SEQ ID NO: 3902328 - DNA, 25 bp, Homo sapien
actgggtcgatgctggaactcatag

SEQ ID NO: 3902329 - DNA, 25 bp, Homo sapien
ccaggcgggagctctcgtccatgag

SEQ ID NO: 3902330 - DNA, 25 bp, Homo sapien
gccatcatggtgaggcttagctgct

SEQ ID NO: 3902331 - DNA, 25 bp, Homo sapien
aagtgggtccactgggccatcatgg

SEQ ID NO: 3902332 - DNA, 25 bp, Homo sapien
cctgtccgggcaaagtgggtccact

SEQ ID NO: 3902333 - DNA, 25 bp, Homo sapien
tgggccatcatggtgaggcttagct

SEQ ID NO: 3902334 - DNA, 25 bp, Homo sapien
ctgaacttctgtccggcccgtggca

SEQ ID NO: 3902335 - DNA, 25 bp, Homo sapien
tgatctccagatattgttccgcctg

SEQ ID NO: 3902336 - DNA, 25 bp, Homo sapien
gcccgtggcactgggttgatctcca

SEQ ID NO: 3902337 - DNA, 25 bp, Homo sapien
gggagcgtctctgaccagaactgca

SEQ ID NO: 3902338 - DNA, 25 bp, Homo sapien
tagcctcgggtggactgtgctctaa

SEQ ID NO: 3902339 - DNA, 25 bp, Homo sapien
tgtgctctaatggacgcagactcgg

SEQ ID NO: 3902340 - DNA, 25 bp, Homo sapien
cctgagtatggctttggcacctgaa

SEQ ID NO: 3902341 - DNA, 25 bp, Homo sapien
ggaggcggccttgtgacatttcaaa

SEQ ID NO: 3902342 - DNA, 25 bp, Homo sapien
gaggaattgtaaccagcttctgacc

SEQ ID NO: 3902343 - DNA, 25 bp, Homo sapien
tggatggcatggtagccgtgtctac

SEQ ID NO: 3902344 - DNA, 25 bp, Homo sapien
tgagcacacttttatctgctcttaa

SEQ ID NO: 3902345 - DNA, 25 bp, Homo sapien
ttaatccctgccagcaagtactggg

SEQ ID NO: 3902346 - DNA, 25 bp, Homo sapien
ccaaggccgtctgcgccatcaggca

SEQ ID NO: 3902347 - DNA, 25 bp, Homo sapien
caaggccgtctgcgccatcaggcag

SEQ ID NO: 3902348 - DNA, 25 bp, Homo sapien
aaggccgtctgcgccatcaggcaga

SEQ ID NO: 3902349 - DNA, 25 bp, Homo sapien
tttccttgcagggttccatatttgg

SEQ ID NO: 3902350 - DNA, 25 bp, Homo sapien
tgaggcctcttggtgtgcaaggcac

SEQ ID NO: 3902351 - DNA, 25 bp, Homo sapien
ttgaggcctcttggtgtgcaaggca

SEQ ID NO: 3902352 - DNA, 25 bp, Homo sapien
gcagggttccatatttggtgaccac

SEQ ID NO: 3902353 - DNA, 25 bp, Homo sapien
agacttggatgggtgtcttccccac

SEQ ID NO: 3902354 - DNA, 25 bp, Homo sapien
ggtgcaaacctgaggatacctagag

SEQ ID NO: 3902355 - DNA, 25 bp, Homo sapien
cgggtaggtggtagcatctctgatt

SEQ ID NO: 3902356 - DNA, 25 bp, Homo sapien
cctgaggatacctagaggaggtctg

SEQ ID NO: 3902357 - DNA, 25 bp, Homo sapien
tgtagccccagatactcagaggctg

SEQ ID NO: 3902358 - DNA, 25 bp, Homo sapien
tgagccgagatcgtgccactgcact

SEQ ID NO: 3902359 - DNA, 25 bp, Homo sapien
aggcaggagactcgcttgaacccgg

SEQ ID NO: 3902360 - DNA, 25 bp, Homo sapien
cccgggaggcggaggttgcagtgag

SEQ ID NO: 3902361 - DNA, 25 bp, Homo sapien
tcagtccgtggagagattcctgctc

SEQ ID NO: 3902362 - DNA, 25 bp, Homo sapien
caaacagctctggaatatggtccct

SEQ ID NO: 3902363 - DNA, 25 bp, Homo sapien
aaaatccaggcagcgtctgtgcgcg

SEQ ID NO: 3902364 - DNA, 25 bp, Homo sapien
tcaatccagggtccgcagtgagaag

SEQ ID NO: 3902365 - DNA, 25 bp, Homo sapien
gttcaggtacagacagtcctcgctg

SEQ ID NO: 3902366 - DNA, 25 bp, Homo sapien
caggtacagacagtcctcgctgaag

SEQ ID NO: 3902367 - DNA, 25 bp, Homo sapien
tgctgacgtacatcgaggccagctg

SEQ ID NO: 3902368 - DNA, 25 bp, Homo sapien
cacttgtaccgttcccgcgtgctga

SEQ ID NO: 3902369 - DNA, 25 bp, Homo sapien
cgggcgcgcgcgccggcgcgtacac

SEQ ID NO: 3902370 - DNA, 25 bp, Homo sapien
gcagctggggatccccgggcgcgcg

SEQ ID NO: 3902371 - DNA, 25 bp, Homo sapien
tggcagctggggatccccgggcgcg

SEQ ID NO: 3902372 - DNA, 25 bp, Homo sapien
cccgggcgcgcgcgccggcgcgtac

SEQ ID NO: 3902373 - DNA, 25 bp, Homo sapien
ccgaagatgccgagcctgtgctgca

SEQ ID NO: 3902374 - DNA, 25 bp, Homo sapien
tacgaagaagcagcgcccacgatga

SEQ ID NO: 3902375 - DNA, 25 bp, Homo sapien
tcgcgggcggccaagtcagagccct

SEQ ID NO: 3902376 - DNA, 25 bp, Homo sapien
tcaggaagccgaagatgccgagcct

SEQ ID NO: 3902377 - DNA, 25 bp, Homo sapien
ggccacagctgcggtcccaaagggt

SEQ ID NO: 3902378 - DNA, 25 bp, Homo sapien
gccacagctgcggtcccaaagggta

SEQ ID NO: 3902379 - DNA, 25 bp, Homo sapien
tggccacagctgcggtcccaaaggg

SEQ ID NO: 3902380 - DNA, 25 bp, Homo sapien
ccacagctgcggtcccaaagggtac

SEQ ID NO: 3902381 - DNA, 25 bp, Homo sapien
tgagatgctcatggcccccgccgac

SEQ ID NO: 3902382 - DNA, 25 bp, Homo sapien
gtctcccccgaaggctgcgatgttc

SEQ ID NO: 3902383 - DNA, 25 bp, Homo sapien
cgccgactggccgaacagggtcaca

SEQ ID NO: 3902384 - DNA, 25 bp, Homo sapien
gactggccgaacagggtcacatttc

SEQ ID NO: 3902385 - DNA, 25 bp, Homo sapien
aagtctgaataacgcggtgccactc

SEQ ID NO: 3902386 - DNA, 25 bp, Homo sapien
cactctgggaaatggcccgatggaa

SEQ ID NO: 3902387 - DNA, 25 bp, Homo sapien
cccgatggaagagacccgaggctag

SEQ ID NO: 3902388 - DNA, 25 bp, Homo sapien
gggttactagtgatgaaaagtctga

SEQ ID NO: 3902389 - DNA, 25 bp, Homo sapien
tgcatccagccaggtgggcaacctt

SEQ ID NO: 3902390 - DNA, 25 bp, Homo sapien
gtgctgttgtggttgcatccagcca

SEQ ID NO: 3902391 - DNA, 25 bp, Homo sapien
tctgtgtgctgttgtggttgcatcc

SEQ ID NO: 3902392 - DNA, 25 bp, Homo sapien
caggatctgtgtgctgttgtggttg

SEQ ID NO: 3902393 - DNA, 25 bp, Homo sapien
cacgcatcaccttggtccctgatag

SEQ ID NO: 3902394 - DNA, 25 bp, Homo sapien
atcttgttggacacacgcatcacct

SEQ ID NO: 3902395 - DNA, 25 bp, Homo sapien
ttgttggacacacgcatcaccttgg

SEQ ID NO: 3902396 - DNA, 25 bp, Homo sapien
cttggtccctgatagtgccctcagg

SEQ ID NO: 3902397 - DNA, 25 bp, Homo sapien
ctctctggaagttcagttggaggaa

SEQ ID NO: 3902398 - DNA, 25 bp, Homo sapien
gtctctctggaagttcagttggagg

SEQ ID NO: 3902399 - DNA, 25 bp, Homo sapien
cgggtctctctggaagttcagttgg

SEQ ID NO: 3902400 - DNA, 25 bp, Homo sapien
cttccgggtctctctggaagttcag

SEQ ID NO: 3902401 - DNA, 25 bp, Homo sapien
tccaggttgttgacacctagaaggt

SEQ ID NO: 3902402 - DNA, 25 bp, Homo sapien
caccacagggctcatggaccagata

SEQ ID NO: 3902403 - DNA, 25 bp, Homo sapien
gacacctagaaggtagggcacagat

SEQ ID NO: 3902404 - DNA, 25 bp, Homo sapien
caaagggtcatctgggatcaccaca

SEQ ID NO: 3902405 - DNA, 25 bp, Homo sapien
gcctgccggtttagcgggaacttca

SEQ ID NO: 3902406 - DNA, 25 bp, Homo sapien
aacagggtgcgggtactccagagca

SEQ ID NO: 3902407 - DNA, 25 bp, Homo sapien
ttctcatcgcctgccggtttagcgg

SEQ ID NO: 3902408 - DNA, 25 bp, Homo sapien
catcttagtgatggtttcctttctc

SEQ ID NO: 3902409 - DNA, 25 bp, Homo sapien
tgaccctgagcaccttacctgtaag

SEQ ID NO: 3902410 - DNA, 25 bp, Homo sapien
ttttgctgcataactgcccctgtga

SEQ ID NO: 3902411 - DNA, 25 bp, Homo sapien
tgggagcccctttgcaaagagcagc

SEQ ID NO: 3902412 - DNA, 25 bp, Homo sapien
aagaaagatccttaccctggctggg

SEQ ID NO: 3902413 - DNA, 25 bp, Homo sapien
gctcagccccccaggagtttttggc

SEQ ID NO: 3902414 - DNA, 25 bp, Homo sapien
tgggcccaccagtgacttggatcca

SEQ ID NO: 3902415 - DNA, 25 bp, Homo sapien
aggtgggcccaccagtgacttggat

SEQ ID NO: 3902416 - DNA, 25 bp, Homo sapien
caccagtgacttggatccatgctca

SEQ ID NO: 3902417 - DNA, 25 bp, Homo sapien
tacggtttcgtagcatcttccagtc

SEQ ID NO: 3902418 - DNA, 25 bp, Homo sapien
agtggcatcttgaactatgtccatc

SEQ ID NO: 3902419 - DNA, 25 bp, Homo sapien
cattgacattgtccaggtactcctc

SEQ ID NO: 3902420 - DNA, 25 bp, Homo sapien
cagtgtggcatacacgaaagtggca

SEQ ID NO: 3902421 - DNA, 25 bp, Homo sapien
tatactagcccagaagtacagagag

SEQ ID NO: 3902422 - DNA, 25 bp, Homo sapien
gagcagtcgataagcccagttggta

SEQ ID NO: 3902423 - DNA, 25 bp, Homo sapien
ttcaaggtgcccctaagcctgtcct

SEQ ID NO: 3902424 - DNA, 25 bp, Homo sapien
tcttgtagttgatagcatgctgcct

SEQ ID NO: 3902425 - DNA, 25 bp, Homo sapien
aaagaggaagtacatctcatcccca

SEQ ID NO: 3902426 - DNA, 25 bp, Homo sapien
gggtttgacgattattccacgagcg

SEQ ID NO: 3902427 - DNA, 25 bp, Homo sapien
caaattcatacaggtagacagggag

SEQ ID NO: 3902428 - DNA, 25 bp, Homo sapien
tccacgagcgtggtgctcaaattca

SEQ ID NO: 3902429 - DNA, 25 bp, Homo sapien
ggtctgcatccagaggtgggagact

SEQ ID NO: 3902430 - DNA, 25 bp, Homo sapien
cataacagattaggaactggtgagc

SEQ ID NO: 3902431 - DNA, 25 bp, Homo sapien
gctgcttccggagcagaagactttc

SEQ ID NO: 3902432 - DNA, 25 bp, Homo sapien
agactttcatttgggagagcataac

SEQ ID NO: 3902433 - DNA, 25 bp, Homo sapien
agaatgggatgtgggatttcggaca

SEQ ID NO: 3902434 - DNA, 25 bp, Homo sapien
tgggatgtgggatttcggacagagc

SEQ ID NO: 3902435 - DNA, 25 bp, Homo sapien
gatgtgggatttcggacagagcagg

SEQ ID NO: 3902436 - DNA, 25 bp, Homo sapien
aatgggatgtgggatttcggacaga

SEQ ID NO: 3902437 - DNA, 25 bp, Homo sapien
ctaagtgccttctccttacccatgg

SEQ ID NO: 3902438 - DNA, 25 bp, Homo sapien
gccttctccttacccatggaaaggc

SEQ ID NO: 3902439 - DNA, 25 bp, Homo sapien
gtgccttctccttacccatggaaag

SEQ ID NO: 3902440 - DNA, 25 bp, Homo sapien
aagtgccttctccttacccatggaa

SEQ ID NO: 3902441 - DNA, 25 bp, Homo sapien
ggcccagtatttcatcatctggagg

SEQ ID NO: 3902442 - DNA, 25 bp, Homo sapien
tgtgcgggcaaagttggcccagtat

SEQ ID NO: 3902443 - DNA, 25 bp, Homo sapien
gtgcgggcaaagttggcccagtatt

SEQ ID NO: 3902444 - DNA, 25 bp, Homo sapien
agttggcccagtatttcatcatctg

SEQ ID NO: 3902445 - DNA, 25 bp, Homo sapien
ttgttgtagcgtggccagcagggca

SEQ ID NO: 3902446 - DNA, 25 bp, Homo sapien
cgtggccagcagggcagattcccat

SEQ ID NO: 3902447 - DNA, 25 bp, Homo sapien
ccagcagggcagattcccatcattg

SEQ ID NO: 3902448 - DNA, 25 bp, Homo sapien
tggccagcagggcagattcccatca

SEQ ID NO: 3902449 - DNA, 25 bp, Homo sapien
cccactcttgtggtaaaatccagct

SEQ ID NO: 3902450 - DNA, 25 bp, Homo sapien
catgcccactcttgtggtaaaatcc

SEQ ID NO: 3902451 - DNA, 25 bp, Homo sapien
tgcccactcttgtggtaaaatccag

SEQ ID NO: 3902452 - DNA, 25 bp, Homo sapien
cactcttgtggtaaaatccagctgc

SEQ ID NO: 3902453 - DNA, 25 bp, Homo sapien
aaaaagccatcttcttctccttgag

SEQ ID NO: 3902454 - DNA, 25 bp, Homo sapien
aaaagccatcttcttctccttgagc

SEQ ID NO: 3902455 - DNA, 25 bp, Homo sapien
aaagccatcttcttctccttgagct

SEQ ID NO: 3902456 - DNA, 25 bp, Homo sapien
ccaaaaagccatcttcttctccttg

SEQ ID NO: 3902457 - DNA, 25 bp, Homo sapien
ggcctccaggccaatgtgaacagac

SEQ ID NO: 3902458 - DNA, 25 bp, Homo sapien
ttattgaagagaccacccctgtgta

SEQ ID NO: 3902459 - DNA, 25 bp, Homo sapien
tctgggtcgacctcccataagaagg

SEQ ID NO: 3902460 - DNA, 25 bp, Homo sapien
tatgtccatggctagtctccccagg

SEQ ID NO: 3902461 - DNA, 25 bp, Homo sapien
ccagaggaatctagatgtggcacta

SEQ ID NO: 3902462 - DNA, 25 bp, Homo sapien
ggcaagtgttttgtaccccaggcaa

SEQ ID NO: 3902463 - DNA, 25 bp, Homo sapien
gactgagtgtagcatccaggcacag

SEQ ID NO: 3902464 - DNA, 25 bp, Homo sapien
taaactgatggacaagtgagcgtgg

SEQ ID NO: 3902465 - DNA, 25 bp, Homo sapien
cagaaagcagaataggggttaccgg

SEQ ID NO: 3902466 - DNA, 25 bp, Homo sapien
caagtcattgttgaatgggtacaga

SEQ ID NO: 3902467 - DNA, 25 bp, Homo sapien
ggaagagtcaagttcatagagacag

SEQ ID NO: 3902468 - DNA, 25 bp, Homo sapien
cttatatcaggcacctggaagagtc

SEQ ID NO: 3902469 - DNA, 25 bp, Homo sapien
caggagcatcgaaataggcataggg

SEQ ID NO: 3902470 - DNA, 25 bp, Homo sapien
aggccaaggcggtagagagggtctc

SEQ ID NO: 3902471 - DNA, 25 bp, Homo sapien
ctttattcaggagcatcgaaatagg

SEQ ID NO: 3902472 - DNA, 25 bp, Homo sapien
gccgagcagttagcttgtgcctgta

SEQ ID NO: 3902473 - DNA, 25 bp, Homo sapien
taggagatcaccatatcgatgccac

SEQ ID NO: 3902474 - DNA, 25 bp, Homo sapien
tcgttcctaggagatcaccatatcg

SEQ ID NO: 3902475 - DNA, 25 bp, Homo sapien
agtgcaacagctactcacaggcacg

SEQ ID NO: 3902476 - DNA, 25 bp, Homo sapien
ctggtggtccctcgttcctaggaga

SEQ ID NO: 3902477 - DNA, 25 bp, Homo sapien
accatcaaaacaggcaggctttctc

SEQ ID NO: 3902478 - DNA, 25 bp, Homo sapien
tccaagcttggaaccatcaaaacag

SEQ ID NO: 3902479 - DNA, 25 bp, Homo sapien
tctccttttgtgtcccagctgataa

SEQ ID NO: 3902480 - DNA, 25 bp, Homo sapien
gataacgccttgataacctgccatg

SEQ ID NO: 3902481 - DNA, 25 bp, Homo sapien
atgccaaccaagaataaaccaagag

SEQ ID NO: 3902482 - DNA, 25 bp, Homo sapien
ttccatttctcttatcagtgtctga

SEQ ID NO: 3902483 - DNA, 25 bp, Homo sapien
gacacaggaaatgccaaccaagaat

SEQ ID NO: 3902484 - DNA, 25 bp, Homo sapien
agtgtctgagacacaggaaatgcca

SEQ ID NO: 3902485 - DNA, 25 bp, Homo sapien
tgacgtttgcaaatcttgcccgggc

SEQ ID NO: 3902486 - DNA, 25 bp, Homo sapien
ttgcccgggctccaaatgagcctct

SEQ ID NO: 3902487 - DNA, 25 bp, Homo sapien
taaaaggaaccagatgatttcatcc

SEQ ID NO: 3902488 - DNA, 25 bp, Homo sapien
catccttgtaattataagtttgacg

SEQ ID NO: 3902489 - DNA, 25 bp, Homo sapien
acgccgcgcatgcgccacccgcccg

SEQ ID NO: 3902490 - DNA, 25 bp, Homo sapien
cgcggcccacgccgcgcatgcgcca

SEQ ID NO: 3902491 - DNA, 25 bp, Homo sapien
cacgccgcgcatgcgccacccgccc

SEQ ID NO: 3902492 - DNA, 25 bp, Homo sapien
gcttgcgcgggcacccgctggctgg

SEQ ID NO: 3902493 - DNA, 25 bp, Homo sapien
tggctggctccgcgctgaccgactg

SEQ ID NO: 3902494 - DNA, 25 bp, Homo sapien
gcttccctttgtttcaggcgcccgc

SEQ ID NO: 3902495 - DNA, 25 bp, Homo sapien
ttccggggagtctgaggcgccgccg

SEQ ID NO: 3902496 - DNA, 25 bp, Homo sapien
tcctcgttctcgaacttgcttctct

SEQ ID NO: 3902497 - DNA, 25 bp, Homo sapien
ctcagcttcctaaaaaactcctcgt

SEQ ID NO: 3902498 - DNA, 25 bp, Homo sapien
ttgcttctctggtcgggcacgacgc

SEQ ID NO: 3902499 - DNA, 25 bp, Homo sapien
tgcttctctggtcgggcacgacgcg

SEQ ID NO: 3902500 - DNA, 25 bp, Homo sapien
cgcgctgcggcctcctagccgcccg

SEQ ID NO: 3902501 - DNA, 25 bp, Homo sapien
tcctcgtggggccggtccctgaagc

SEQ ID NO: 3902502 - DNA, 25 bp, Homo sapien
tggaagcgtgcctggcgttcctcgt

SEQ ID NO: 3902503 - DNA, 25 bp, Homo sapien
ggcgttctggaagcgtgcctggcgt

SEQ ID NO: 3902504 - DNA, 25 bp, Homo sapien
ggccgtcgcggcaggcgttctggaa

SEQ ID NO: 3902505 - DNA, 25 bp, Homo sapien
ggtttgcttgctacaaataccctga

SEQ ID NO: 3902506 - DNA, 25 bp, Homo sapien
gtgtcgccgcctaaacaatgccctt

SEQ ID NO: 3902507 - DNA, 25 bp, Homo sapien
tatcgccgaccttgaatgaagctcc

SEQ ID NO: 3902508 - DNA, 25 bp, Homo sapien
tcgcattttgaatcccgagtaggaa

SEQ ID NO: 3902509 - DNA, 25 bp, Homo sapien
tgtcttgatgccaacctcagaagag

SEQ ID NO: 3902510 - DNA, 25 bp, Homo sapien
cttgatgccaacctcagaagagatt

SEQ ID NO: 3902511 - DNA, 25 bp, Homo sapien
tcatctcctgtcttgatgccaacct

SEQ ID NO: 3902512 - DNA, 25 bp, Homo sapien
tctcctgtcttgatgccaacctcag

SEQ ID NO: 3902513 - DNA, 25 bp, Homo sapien
aagttacaaacatctgattccattt

SEQ ID NO: 3902514 - DNA, 25 bp, Homo sapien
tttacatcagtttatgtcttaagcc

SEQ ID NO: 3902515 - DNA, 25 bp, Homo sapien
aaaacatgcactcatcatttttctt

SEQ ID NO: 3902516 - DNA, 25 bp, Homo sapien
cataaattatgcaagcagtcattta

SEQ ID NO: 3902517 - DNA, 25 bp, Homo sapien
taagtcgacatactctcggctaggt

SEQ ID NO: 3902518 - DNA, 25 bp, Homo sapien
cagctggccggaaaaaactggagag

SEQ ID NO: 3902519 - DNA, 25 bp, Homo sapien
ggtgtttgtcgctgttctccctgcc

SEQ ID NO: 3902520 - DNA, 25 bp, Homo sapien
cctgcttctctttctaagtcgacat

SEQ ID NO: 3902521 - DNA, 25 bp, Homo sapien
ggcagaaccacccagtgcagtcagt

SEQ ID NO: 3902522 - DNA, 25 bp, Homo sapien
gcagtcagtcccaggttcctgcaaa

SEQ ID NO: 3902523 - DNA, 25 bp, Homo sapien
ggtagcatctacatgggtgcataca

SEQ ID NO: 3902524 - DNA, 25 bp, Homo sapien
gcatgactaggaagtgaagccacct

SEQ ID NO: 3902525 - DNA, 25 bp, Homo sapien
gccaatgtagacagctcaccaggta

SEQ ID NO: 3902526 - DNA, 25 bp, Homo sapien
gtattattgtagctggcctccaaga

SEQ ID NO: 3902527 - DNA, 25 bp, Homo sapien
tataatcagtcacccgttaacagac

SEQ ID NO: 3902528 - DNA, 25 bp, Homo sapien
tcaaattgcctaactgtagacaggg

SEQ ID NO: 3902529 - DNA, 25 bp, Homo sapien
tcatgatgacacttagaaaactaat

SEQ ID NO: 3902530 - DNA, 25 bp, Homo sapien
cctatatatgttggtcatttagaca

SEQ ID NO: 3902531 - DNA, 25 bp, Homo sapien
ggcaggttatgctattcatgatgac

SEQ ID NO: 3902532 - DNA, 25 bp, Homo sapien
gaattcacactagcgacattataag

SEQ ID NO: 3902533 - DNA, 25 bp, Homo sapien
aagcaatatcttgggtcaggcacag

SEQ ID NO: 3902534 - DNA, 25 bp, Homo sapien
tcaacatggtatcaagcaagcaata

SEQ ID NO: 3902535 - DNA, 25 bp, Homo sapien
tgttacttaactcaaaacatctaaa

SEQ ID NO: 3902536 - DNA, 25 bp, Homo sapien
catgagtaactgcactcggcctagt

SEQ ID NO: 3902537 - DNA, 25 bp, Homo sapien
tctctcatgaagatttccatccaga

SEQ ID NO: 3902538 - DNA, 25 bp, Homo sapien
caatgtgcatcaaatcaaacaagtg

SEQ ID NO: 3902539 - DNA, 25 bp, Homo sapien
taagggctgcaataaaccacaatga

SEQ ID NO: 3902540 - DNA, 25 bp, Homo sapien
aacaagtgactatgccgacctctgc

SEQ ID NO: 3902541 - DNA, 25 bp, Homo sapien
taataacaataactgactgccaata

SEQ ID NO: 3902542 - DNA, 25 bp, Homo sapien
gtttctgaataaaccagcataggtt

SEQ ID NO: 3902543 - DNA, 25 bp, Homo sapien
tcagtagtctcttcagactcttgga

SEQ ID NO: 3902544 - DNA, 25 bp, Homo sapien
ggaagtgggaattcttcagtgagtt

SEQ ID NO: 3902545 - DNA, 25 bp, Homo sapien
cacagggtttgactacatgtatcaa

SEQ ID NO: 3902546 - DNA, 25 bp, Homo sapien
tacacataatacctttagatgacaa

SEQ ID NO: 3902547 - DNA, 25 bp, Homo sapien
atctacttatttcaactccctgttg

SEQ ID NO: 3902548 - DNA, 25 bp, Homo sapien
aaggctaggcaccagtggctaatgc

SEQ ID NO: 3902549 - DNA, 25 bp, Homo sapien
cacattaagtagtatgtggttatct

SEQ ID NO: 3902550 - DNA, 25 bp, Homo sapien
aggtgtccataaataattcggaaca

SEQ ID NO: 3902551 - DNA, 25 bp, Homo sapien
caaaacactgctatcctttatatgg

SEQ ID NO: 3902552 - DNA, 25 bp, Homo sapien
caaagaactttaactggtataatat

SEQ ID NO: 3902553 - DNA, 25 bp, Homo sapien
cagacagcccataccatccagtctt

SEQ ID NO: 3902554 - DNA, 25 bp, Homo sapien
agactccattcagaatcatgggagc

SEQ ID NO: 3902555 - DNA, 25 bp, Homo sapien
cattcagaatcatgggagccttcaa

SEQ ID NO: 3902556 - DNA, 25 bp, Homo sapien
agtctttggagatcaatccagcctt

SEQ ID NO: 3902557 - DNA, 25 bp, Homo sapien
gcattccaaaagcacggctcctaca

SEQ ID NO: 3902558 - DNA, 25 bp, Homo sapien
tgagcagatacgaataacccatgaa

SEQ ID NO: 3902559 - DNA, 25 bp, Homo sapien
gattagggactaaagggaccatgct

SEQ ID NO: 3902560 - DNA, 25 bp, Homo sapien
ggactttgaagcacccactgagcag

SEQ ID NO: 3902561 - DNA, 25 bp, Homo sapien
atggcttaccctgcccgcccaggga

SEQ ID NO: 3902562 - DNA, 25 bp, Homo sapien
catggcttaccctgcccgcccaggg

SEQ ID NO: 3902563 - DNA, 25 bp, Homo sapien
aacagatctaccagtgctcatggct

SEQ ID NO: 3902564 - DNA, 25 bp, Homo sapien
agatctaccagtgctcatggcttac

SEQ ID NO: 3902565 - DNA, 25 bp, Homo sapien
gaatgctgttcccaatttcccacgg

SEQ ID NO: 3902566 - DNA, 25 bp, Homo sapien
gacataatataagccagaggtagcc

SEQ ID NO: 3902567 - DNA, 25 bp, Homo sapien
tttgggagttgaagagaccagccct

SEQ ID NO: 3902568 - DNA, 25 bp, Homo sapien
tatgcacttaggtatcaactgggac

SEQ ID NO: 3902569 - DNA, 25 bp, Homo sapien
ctgtcagaatacatgaaatacctat

SEQ ID NO: 3902570 - DNA, 25 bp, Homo sapien
catgaaatacctattttaattttga

SEQ ID NO: 3902571 - DNA, 25 bp, Homo sapien
tttcctgaaacagtggccgggcgca

SEQ ID NO: 3902572 - DNA, 25 bp, Homo sapien
ttttcctgaaacagtggccgggcgc

SEQ ID NO: 3902573 - DNA, 25 bp, Homo sapien
aaattcgcgtgtccttctccgagcc

SEQ ID NO: 3902574 - DNA, 25 bp, Homo sapien
tctatcttcaaattcgcgtgtcctt

SEQ ID NO: 3902575 - DNA, 25 bp, Homo sapien
cctgttgtgctaatgcatcctcctg

SEQ ID NO: 3902576 - DNA, 25 bp, Homo sapien
catttcctcccgatgagacctgtct

SEQ ID NO: 3902577 - DNA, 25 bp, Homo sapien
gttactgccagcagctgtgaaactc

SEQ ID NO: 3902578 - DNA, 25 bp, Homo sapien
tactgccagcagctgtgaaactctc

SEQ ID NO: 3902579 - DNA, 25 bp, Homo sapien
cagttactgccagcagctgtgaaac

SEQ ID NO: 3902580 - DNA, 25 bp, Homo sapien
ctgccagcagctgtgaaactctcac

SEQ ID NO: 3902581 - DNA, 25 bp, Homo sapien
aagcagagtacaattttgtgtaaaa

SEQ ID NO: 3902582 - DNA, 25 bp, Homo sapien
gaggtctgtttaaagcagagtacaa

SEQ ID NO: 3902583 - DNA, 25 bp, Homo sapien
aagactaaacttcaatgggtgctaa

SEQ ID NO: 3902584 - DNA, 25 bp, Homo sapien
tgcccaagatggtctaaaattccca

SEQ ID NO: 3902585 - DNA, 25 bp, Homo sapien
aacaaggcaaatagagttgctagga

SEQ ID NO: 3902586 - DNA, 25 bp, Homo sapien
tgctaggaggcagtcatgagatgac

SEQ ID NO: 3902587 - DNA, 25 bp, Homo sapien
tcttactaccagttgctctcctgtt

SEQ ID NO: 3902588 - DNA, 25 bp, Homo sapien
atgagacgaaagaacacacaccagc

SEQ ID NO: 3902589 - DNA, 25 bp, Homo sapien
gctgcacagaaatagccatggattt

SEQ ID NO: 3902590 - DNA, 25 bp, Homo sapien
ttccctactggtcacagctgcacag

SEQ ID NO: 3902591 - DNA, 25 bp, Homo sapien
tgagtagccggcatgcgcttccatg

SEQ ID NO: 3902592 - DNA, 25 bp, Homo sapien
gctaaatgcagtgtaaggacagatc

SEQ ID NO: 3902593 - DNA, 25 bp, Homo sapien
tcaccaccacctaaattggaaccag

SEQ ID NO: 3902594 - DNA, 25 bp, Homo sapien
ttaacgaagtttgaggtcatcacca

SEQ ID NO: 3902595 - DNA, 25 bp, Homo sapien
gaggtcatcaccaccacctaaattg

SEQ ID NO: 3902596 - DNA, 25 bp, Homo sapien
gaagtttgaggtcatcaccaccacc

SEQ ID NO: 3902597 - DNA, 25 bp, Homo sapien
taatcatagtgcaaaaccatggcag

SEQ ID NO: 3902598 - DNA, 25 bp, Homo sapien
gaagctaaaacaatctagggcagag

SEQ ID NO: 3902599 - DNA, 25 bp, Homo sapien
gagaaatagaccgtagtacctccag

SEQ ID NO: 3902600 - DNA, 25 bp, Homo sapien
tgtatgtaaagatgggcagcacaca

SEQ ID NO: 3902601 - DNA, 25 bp, Homo sapien
gcaatgaccttattcagacttcagt

SEQ ID NO: 3902602 - DNA, 25 bp, Homo sapien
tccctcatcagtcaagtacagttat

SEQ ID NO: 3902603 - DNA, 25 bp, Homo sapien
gaagaaaatgcatcctctgcacaga

SEQ ID NO: 3902604 - DNA, 25 bp, Homo sapien
tatttgtaaggaggtgccaaatgac

SEQ ID NO: 3902605 - DNA, 25 bp, Homo sapien
ttaatgacgcattattgtttgtaac

SEQ ID NO: 3902606 - DNA, 25 bp, Homo sapien
catggcctttaatgacgcattattg

SEQ ID NO: 3902607 - DNA, 25 bp, Homo sapien
aatgacgcattattgtttgtaacaa

SEQ ID NO: 3902608 - DNA, 25 bp, Homo sapien
ggcctttaatgacgcattattgttt

SEQ ID NO: 3902609 - DNA, 25 bp, Homo sapien
aaagggctcatgatcttaatgccag

SEQ ID NO: 3902610 - DNA, 25 bp, Homo sapien
tggtggaccgaaagcccttagctag

SEQ ID NO: 3902611 - DNA, 25 bp, Homo sapien
taaacatgtgagctgtacaacacca

SEQ ID NO: 3902612 - DNA, 25 bp, Homo sapien
cacttaaaaagcgattccctcaggg

SEQ ID NO: 3902613 - DNA, 25 bp, Homo sapien
gcctgactagcaggcacttttaggt

SEQ ID NO: 3902614 - DNA, 25 bp, Homo sapien
ttgcctgactagcaggcacttttag

SEQ ID NO: 3902615 - DNA, 25 bp, Homo sapien
tgcctgactagcaggcacttttagg

SEQ ID NO: 3902616 - DNA, 25 bp, Homo sapien
attgcctgactagcaggcactttta

SEQ ID NO: 3902617 - DNA, 25 bp, Homo sapien
ccaactcaggagaatgtcagctaca

SEQ ID NO: 3902618 - DNA, 25 bp, Homo sapien
caggccaactcaggagaatgtcagc

SEQ ID NO: 3902619 - DNA, 25 bp, Homo sapien
caggagcaggccaactcaggagaat

SEQ ID NO: 3902620 - DNA, 25 bp, Homo sapien
tcaggagaatgtcagctacagccat

SEQ ID NO: 3902621 - DNA, 25 bp, Homo sapien
ggaccaggatccgaagccgccggca

SEQ ID NO: 3902622 - DNA, 25 bp, Homo sapien
gatcaaccccttggcgctttctgtg

SEQ ID NO: 3902623 - DNA, 25 bp, Homo sapien
tccaaatgtgcgcagtcccccggga

SEQ ID NO: 3902624 - DNA, 25 bp, Homo sapien
aaagctgtgggggtcttgatcaacc

SEQ ID NO: 3902625 - DNA, 25 bp, Homo sapien
agttgttcaggaatgacggccccac

SEQ ID NO: 3902626 - DNA, 25 bp, Homo sapien
gggccggaggtgacgctggccgcag

SEQ ID NO: 3902627 - DNA, 25 bp, Homo sapien
gttcaggaatgacggccccacccag

SEQ ID NO: 3902628 - DNA, 25 bp, Homo sapien
ttgttcaggaatgacggccccaccc

SEQ ID NO: 3902629 - DNA, 25 bp, Homo sapien
ctgcagcagccgcggcagcgggggc

SEQ ID NO: 3902630 - DNA, 25 bp, Homo sapien
cgccacagccccgctttccacctcc

SEQ ID NO: 3902631 - DNA, 25 bp, Homo sapien
gccacagccccgctttccacctcct

SEQ ID NO: 3902632 - DNA, 25 bp, Homo sapien
ccgccggcccgccacagccccgctt

SEQ ID NO: 3902633 - DNA, 25 bp, Homo sapien
cggcccgccacagccccgctttcca

SEQ ID NO: 3902634 - DNA, 25 bp, Homo sapien
ctgcggcagcgcagaagggacccga

SEQ ID NO: 3902635 - DNA, 25 bp, Homo sapien
gttcggctcgcctggcccgggcggc

SEQ ID NO: 3902636 - DNA, 25 bp, Homo sapien
tggttcggctcgcctggcccgggcg

SEQ ID NO: 3902637 - DNA, 25 bp, Homo sapien
tcggctcgcctggcccgggcggcct

SEQ ID NO: 3902638 - DNA, 25 bp, Homo sapien
ggctcgcctggcccgggcggcctcc

SEQ ID NO: 3902639 - DNA, 25 bp, Homo sapien
cccagagagcgttcgggcactacct

SEQ ID NO: 3902640 - DNA, 25 bp, Homo sapien
ttgctcgttccccagagagcgttcg

SEQ ID NO: 3902641 - DNA, 25 bp, Homo sapien
gaattcccattgctcgttccccaga

SEQ ID NO: 3902642 - DNA, 25 bp, Homo sapien
gagcgttcgggcactacctccaggt

SEQ ID NO: 3902643 - DNA, 25 bp, Homo sapien
gatttagtccagtagctcacactag

SEQ ID NO: 3902644 - DNA, 25 bp, Homo sapien
gcagggccttaccagcaatctgtac

SEQ ID NO: 3902645 - DNA, 25 bp, Homo sapien
tagagtgactaaagttcaggcctgc

SEQ ID NO: 3902646 - DNA, 25 bp, Homo sapien
tatgtagccactaagcatcagcagg

SEQ ID NO: 3902647 - DNA, 25 bp, Homo sapien
tggtttttatccagccgtgggagga

SEQ ID NO: 3902648 - DNA, 25 bp, Homo sapien
tgtggtttttatccagccgtgggag

SEQ ID NO: 3902649 - DNA, 25 bp, Homo sapien
gtttttatccagccgtgggaggatc

SEQ ID NO: 3902650 - DNA, 25 bp, Homo sapien
ttttatccagccgtgggaggatctt

SEQ ID NO: 3902651 - DNA, 25 bp, Homo sapien
tctgaacccctaggtcaggtcaagt

SEQ ID NO: 3902652 - DNA, 25 bp, Homo sapien
gagttcacagaggtagatgatgcct

SEQ ID NO: 3902653 - DNA, 25 bp, Homo sapien
ctctgtggaacaaggtaatctcgga

SEQ ID NO: 3902654 - DNA, 25 bp, Homo sapien
tagactaagctcttcagggaataag

SEQ ID NO: 3902655 - DNA, 25 bp, Homo sapien
agtgcttctgaagaatggctactgc

SEQ ID NO: 3902656 - DNA, 25 bp, Homo sapien
gttcactgtagagaacctggacgtt

SEQ ID NO: 3902657 - DNA, 25 bp, Homo sapien
tgatgatgcgacagtgcttctgaag

SEQ ID NO: 3902658 - DNA, 25 bp, Homo sapien
cctggacgtttttgatgatgcgaca

SEQ ID NO: 3902659 - DNA, 25 bp, Homo sapien
tctgaagcgacctaccactgaaaag

SEQ ID NO: 3902660 - DNA, 25 bp, Homo sapien
caaatctggtatgccgtgctagcta

SEQ ID NO: 3902661 - DNA, 25 bp, Homo sapien
gaaggtaagcactctaaaagaccag

SEQ ID NO: 3902662 - DNA, 25 bp, Homo sapien
taatctctgggtataggtaacaggc

SEQ ID NO: 3902663 - DNA, 25 bp, Homo sapien
atacctcactgctcatgatcctccc

SEQ ID NO: 3902664 - DNA, 25 bp, Homo sapien
catacctcactgctcatgatcctcc

SEQ ID NO: 3902665 - DNA, 25 bp, Homo sapien
gaatgaggtcatggcttagaggaga

SEQ ID NO: 3902666 - DNA, 25 bp, Homo sapien
aagaatgaggtcatggcttagagga

SEQ ID NO: 3902667 - DNA, 25 bp, Homo sapien
tgagtcaggttaagaatgaggtcat

SEQ ID NO: 3902668 - DNA, 25 bp, Homo sapien
ctgagtcaggttaagaatgaggtca

SEQ ID NO: 3902669 - DNA, 25 bp, Homo sapien
catcaaacattagtttgatcccgtc

SEQ ID NO: 3902670 - DNA, 25 bp, Homo sapien
ttaactttactttagtcaaatcaca

SEQ ID NO: 3902671 - DNA, 25 bp, Homo sapien
tactttagtcaaatcacatacttcg

SEQ ID NO: 3902672 - DNA, 25 bp, Homo sapien
tagtcaaatcacatacttcgatcac

SEQ ID NO: 3902673 - DNA, 25 bp, Homo sapien
actttactttagtcaaatcacatac

SEQ ID NO: 3902674 - DNA, 25 bp, Homo sapien
gagggcagctatgacccaggagact

SEQ ID NO: 3902675 - DNA, 25 bp, Homo sapien
ctgaggtctggctttgtcaagtgga

SEQ ID NO: 3902676 - DNA, 25 bp, Homo sapien
gactgtgcatgtcatccccgctgta

SEQ ID NO: 3902677 - DNA, 25 bp, Homo sapien
gggcgcaacaactttggactgtgca

SEQ ID NO: 3902678 - DNA, 25 bp, Homo sapien
gacaccagtgactcttaagaaaagg

SEQ ID NO: 3902679 - DNA, 25 bp, Homo sapien
gggccagtggtaccacacatttgct

SEQ ID NO: 3902680 - DNA, 25 bp, Homo sapien
gacacaggcaggtgagtctctaatt

SEQ ID NO: 3902681 - DNA, 25 bp, Homo sapien
taaaagacaactagaacctgcaggg

SEQ ID NO: 3902682 - DNA, 25 bp, Homo sapien
ctccaggatgggttgcgccaaaaga

SEQ ID NO: 3902683 - DNA, 25 bp, Homo sapien
tggtcaatctgttcaatggtaggag

SEQ ID NO: 3902684 - DNA, 25 bp, Homo sapien
tctgttcaatggtaggagctatggc

SEQ ID NO: 3902685 - DNA, 25 bp, Homo sapien
gatgggttgcgccaaaagactggtc

SEQ ID NO: 3902686 - DNA, 25 bp, Homo sapien
ggaggatgtttccttcacacccaag

SEQ ID NO: 3902687 - DNA, 25 bp, Homo sapien
caatcctatgggagcctgactccag

SEQ ID NO: 3902688 - DNA, 25 bp, Homo sapien
tggctaacataaaccagcctggcag

SEQ ID NO: 3902689 - DNA, 25 bp, Homo sapien
cctggcagggagtaatgactgacaa

SEQ ID NO: 3902690 - DNA, 25 bp, Homo sapien
gcctcagtccatgagtctaactgaa

SEQ ID NO: 3902691 - DNA, 25 bp, Homo sapien
agatggaagagctgctcagcggagt

SEQ ID NO: 3902692 - DNA, 25 bp, Homo sapien
aagagctgctcagcggagttgtaca

SEQ ID NO: 3902693 - DNA, 25 bp, Homo sapien
tcatactttggagcctcagtccatg

SEQ ID NO: 3902694 - DNA, 25 bp, Homo sapien
aatctccaaattctaggccaccagg

SEQ ID NO: 3902695 - DNA, 25 bp, Homo sapien
tcactccattgtgggaagtatcctc

SEQ ID NO: 3902696 - DNA, 25 bp, Homo sapien
tatctctgaaaagtgagcctgacct

SEQ ID NO: 3902697 - DNA, 25 bp, Homo sapien
gaaagtctgcctatctaatacccac

SEQ ID NO: 3902698 - DNA, 25 bp, Homo sapien
gagaagccaggccatgggcaaaatt

SEQ ID NO: 3902699 - DNA, 25 bp, Homo sapien
tggagagaagccaggccatgggcaa

SEQ ID NO: 3902700 - DNA, 25 bp, Homo sapien
ctggagagaagccaggccatgggca

SEQ ID NO: 3902701 - DNA, 25 bp, Homo sapien
aagccaggccatgggcaaaattggg

SEQ ID NO: 3902702 - DNA, 25 bp, Homo sapien
tgttgccactgtagatgtacattcg

SEQ ID NO: 3902703 - DNA, 25 bp, Homo sapien
gatgtacattcgttttacagttgct

SEQ ID NO: 3902704 - DNA, 25 bp, Homo sapien
tacattcgttttacagttgctccat

SEQ ID NO: 3902705 - DNA, 25 bp, Homo sapien
attcgttttacagttgctccatggg

SEQ ID NO: 3902706 - DNA, 25 bp, Homo sapien
gcccaggccttagcaagaaactcat

SEQ ID NO: 3902707 - DNA, 25 bp, Homo sapien
agcccaggccttagcaagaaactca

SEQ ID NO: 3902708 - DNA, 25 bp, Homo sapien
gcaggtccagttccatctcgaagaa

SEQ ID NO: 3902709 - DNA, 25 bp, Homo sapien
gaagtcgtaaacctgcaggtccagt

SEQ ID NO: 3902710 - DNA, 25 bp, Homo sapien
caagtaggcgaagtcgtaaacctgc

SEQ ID NO: 3902711 - DNA, 25 bp, Homo sapien
catctcgaagaacatctacactctc

SEQ ID NO: 3902712 - DNA, 25 bp, Homo sapien
gactgcaggcgcatccagatactga

SEQ ID NO: 3902713 - DNA, 25 bp, Homo sapien
cacaccggcctggataatataggga

SEQ ID NO: 3902714 - DNA, 25 bp, Homo sapien
tgcggaatgtaccaacctcaaagcc

SEQ ID NO: 3902715 - DNA, 25 bp, Homo sapien
tgagacacaccctaagcacgtggga

SEQ ID NO: 3902716 - DNA, 25 bp, Homo sapien
tcttcaggcaccagatacgtgtgga

SEQ ID NO: 3902717 - DNA, 25 bp, Homo sapien
gactctgggcccaaagtatccagtg

SEQ ID NO: 3902718 - DNA, 25 bp, Homo sapien
tgaagacgataaccctttgaggccc

SEQ ID NO: 3902719 - DNA, 25 bp, Homo sapien
tatagaacccaccaaaagtcctgtc

SEQ ID NO: 3902720 - DNA, 25 bp, Homo sapien
tttgtgtggagagccaagcatgcta

SEQ ID NO: 3902721 - DNA, 25 bp, Homo sapien
tcaaatacccgcatcttggcatctg

SEQ ID NO: 3902722 - DNA, 25 bp, Homo sapien
aatacactgaacgttcaaatacccg

SEQ ID NO: 3902723 - DNA, 25 bp, Homo sapien
catctgctaataggccaggtccaca

SEQ ID NO: 3902724 - DNA, 25 bp, Homo sapien
cttcgatggaacttgtttatgaggg

SEQ ID NO: 3902725 - DNA, 25 bp, Homo sapien
tagtcattacacttcgatggaactt

SEQ ID NO: 3902726 - DNA, 25 bp, Homo sapien
cattacacttcgatggaacttgttt

SEQ ID NO: 3902727 - DNA, 25 bp, Homo sapien
tacacttcgatggaacttgtttatg

SEQ ID NO: 3902728 - DNA, 25 bp, Homo sapien
tctgtgggagtcagcaaccccagga

SEQ ID NO: 3902729 - DNA, 25 bp, Homo sapien
gatttgatgccacccagtgaacact

SEQ ID NO: 3902730 - DNA, 25 bp, Homo sapien
gctgaaggccacttgactattctga

SEQ ID NO: 3902731 - DNA, 25 bp, Homo sapien
gcttgggcccgtgacctcagggtaa

SEQ ID NO: 3902732 - DNA, 25 bp, Homo sapien
cgtggtgcccagatggtaagcagca

SEQ ID NO: 3902733 - DNA, 25 bp, Homo sapien
tgctgtatcccgaactcctagagta

SEQ ID NO: 3902734 - DNA, 25 bp, Homo sapien
cagtaagtcacctagcgtggtgccc

SEQ ID NO: 3902735 - DNA, 25 bp, Homo sapien
caagagaatccgaggatgcagactc

SEQ ID NO: 3902736 - DNA, 25 bp, Homo sapien
ggtgtgtagaacaaacttcttcact

SEQ ID NO: 3902737 - DNA, 25 bp, Homo sapien
gtgtattcgcatcaaagaggatgtc

SEQ ID NO: 3902738 - DNA, 25 bp, Homo sapien
cttcactttgtgtgtattcgcatca

SEQ ID NO: 3902739 - DNA, 25 bp, Homo sapien
ttgaaattataatgcccagggtaat

SEQ ID NO: 3902740 - DNA, 25 bp, Homo sapien
tatggctagtgggatcttgaactca

SEQ ID NO: 3902741 - DNA, 25 bp, Homo sapien
tttctttatggctagtgggatcttg

SEQ ID NO: 3902742 - DNA, 25 bp, Homo sapien
tggctagtgggatcttgaactcaca

SEQ ID NO: 3902743 - DNA, 25 bp, Homo sapien
ctttatggctagtgggatcttgaac

SEQ ID NO: 3902744 - DNA, 25 bp, Homo sapien
tgctgtaggtcgtgcatgtttctgt

SEQ ID NO: 3902745 - DNA, 25 bp, Homo sapien
cttgctgtaggtcgtgcatgtttct

SEQ ID NO: 3902746 - DNA, 25 bp, Homo sapien
ttgctgtaggtcgtgcatgtttctg

SEQ ID NO: 3902747 - DNA, 25 bp, Homo sapien
ccaggagctcctggatgttgtccca

SEQ ID NO: 3902748 - DNA, 25 bp, Homo sapien
tgcaggacaacaggcttctccacag

SEQ ID NO: 3902749 - DNA, 25 bp, Homo sapien
gacaacaggcttctccacagggtgg

SEQ ID NO: 3902750 - DNA, 25 bp, Homo sapien
ctgtgcaggacaacaggcttctcca

SEQ ID NO: 3902751 - DNA, 25 bp, Homo sapien
agaatgtggaaccaaatgggttggt

SEQ ID NO: 3902752 - DNA, 25 bp, Homo sapien
gaccaaagcagaatgtggaaccaaa

SEQ ID NO: 3902753 - DNA, 25 bp, Homo sapien
tgaagaccaaagcagaatgtggaac

SEQ ID NO: 3902754 - DNA, 25 bp, Homo sapien
tcaaagatcattcgctgaagaccaa

SEQ ID NO: 3902755 - DNA, 25 bp, Homo sapien
gggccatacagggtcaccgaggcaa

SEQ ID NO: 3902756 - DNA, 25 bp, Homo sapien
gaggcaatgtggttgttctgcatga

SEQ ID NO: 3902757 - DNA, 25 bp, Homo sapien
tacagggtcaccgaggcaatgtggt

SEQ ID NO: 3902758 - DNA, 25 bp, Homo sapien
tcaccgaggcaatgtggttgttctg

SEQ ID NO: 3902759 - DNA, 25 bp, Homo sapien
ctaggggagttccgctgttctcagg

SEQ ID NO: 3902760 - DNA, 25 bp, Homo sapien
ccgctgttctcaggtggctaccagg

SEQ ID NO: 3902761 - DNA, 25 bp, Homo sapien
cgctgttctcaggtggctaccaggc

SEQ ID NO: 3902762 - DNA, 25 bp, Homo sapien
cacagggtggtacagaggcccactg

SEQ ID NO: 3902763 - DNA, 25 bp, Homo sapien
tcagaacatcacaacagcccttcag

SEQ ID NO: 3902764 - DNA, 25 bp, Homo sapien
tcagcactggccaggtgtccaagaa

SEQ ID NO: 3902765 - DNA, 25 bp, Homo sapien
caggatgtgatgcacagttccacgg

SEQ ID NO: 3902766 - DNA, 25 bp, Homo sapien
taaggcccaggaaccatataggagc

SEQ ID NO: 3902767 - DNA, 25 bp, Homo sapien
cagtcagtcacaaaagtcgggagcg

SEQ ID NO: 3902768 - DNA, 25 bp, Homo sapien
tgtgcatgggacaagggttgacctc

SEQ ID NO: 3902769 - DNA, 25 bp, Homo sapien
gacacgctacctgcttgccttaagg

SEQ ID NO: 3902770 - DNA, 25 bp, Homo sapien
accttaatacaaacatcccagcaac

SEQ ID NO: 3902771 - DNA, 25 bp, Homo sapien
caatacccacacttaccttaataca

SEQ ID NO: 3902772 - DNA, 25 bp, Homo sapien
gttaagcttggctcctggcggtcca

SEQ ID NO: 3902773 - DNA, 25 bp, Homo sapien
taatggtgaccctttgagcgagcca

SEQ ID NO: 3902774 - DNA, 25 bp, Homo sapien
acgcggacgtatgcagaggctctca

SEQ ID NO: 3902775 - DNA, 25 bp, Homo sapien
tagggaatcctaccactctgctgga

SEQ ID NO: 3902776 - DNA, 25 bp, Homo sapien
tgagcctgaaggaccaacagacgtt

SEQ ID NO: 3902777 - DNA, 25 bp, Homo sapien
cgagggactgtacgagcaggccttc

SEQ ID NO: 3902778 - DNA, 25 bp, Homo sapien
gatggccttagggttccttctgcgg

SEQ ID NO: 3902779 - DNA, 25 bp, Homo sapien
gctctgtgggtctcaaatggcgcaa

SEQ ID NO: 3902780 - DNA, 25 bp, Homo sapien
tgccctctctgtcggaggtgaagcc

SEQ ID NO: 3902781 - DNA, 25 bp, Homo sapien
tcggtgccgctgcaactggagctgc

SEQ ID NO: 3902782 - DNA, 25 bp, Homo sapien
gctgcgaaatctgaagtgcggctcg

SEQ ID NO: 3902783 - DNA, 25 bp, Homo sapien
gagcgctgtttgagttgcatcctag

SEQ ID NO: 3902784 - DNA, 25 bp, Homo sapien
catacctgtttgtggagtcctcgct

SEQ ID NO: 3902785 - DNA, 25 bp, Homo sapien
tgtcccaagtatgccaaccagtggt

SEQ ID NO: 3902786 - DNA, 25 bp, Homo sapien
gaaccatgtgggacttgaggctact

SEQ ID NO: 3902787 - DNA, 25 bp, Homo sapien
gatgaactggatacctgactgtctg

SEQ ID NO: 3902788 - DNA, 25 bp, Homo sapien
ctccagcctggttcaccttccccat

SEQ ID NO: 3902789 - DNA, 25 bp, Homo sapien
cctgttaactcgacctccagcctgg

SEQ ID NO: 3902790 - DNA, 25 bp, Homo sapien
tgttaactcgacctccagcctggtt

SEQ ID NO: 3902791 - DNA, 25 bp, Homo sapien
gacctccagcctggttcaccttccc

SEQ ID NO: 3902792 - DNA, 25 bp, Homo sapien
tccctgccagcactttcgaggtgca

SEQ ID NO: 3902793 - DNA, 25 bp, Homo sapien
ctggtggcggcggtctactgagctg

SEQ ID NO: 3902794 - DNA, 25 bp, Homo sapien
cagcactttcgaggtgcagtagggc

SEQ ID NO: 3902795 - DNA, 25 bp, Homo sapien
tactgagctgttcgaacaccgtggg

SEQ ID NO: 3902796 - DNA, 25 bp, Homo sapien
gcagaggacagcggacgggaagcag

SEQ ID NO: 3902797 - DNA, 25 bp, Homo sapien
cagaggacagcggacgggaagcagc

SEQ ID NO: 3902798 - DNA, 25 bp, Homo sapien
tcggcggaccagatgggctttgccc

SEQ ID NO: 3902799 - DNA, 25 bp, Homo sapien
ctcggcggaccagatgggctttgcc

SEQ ID NO: 3902800 - DNA, 25 bp, Homo sapien
ctgctcggcggaccagatgggcttt

SEQ ID NO: 3902801 - DNA, 25 bp, Homo sapien
tgctcggcggaccagatgggctttg

SEQ ID NO: 3902802 - DNA, 25 bp, Homo sapien
gcttcagatacgttcggccgggctt

SEQ ID NO: 3902803 - DNA, 25 bp, Homo sapien
tggtagcagcgatcttgaagccgga

SEQ ID NO: 3902804 - DNA, 25 bp, Homo sapien
tgatttaccgaagtctggcagctgt

SEQ ID NO: 3902805 - DNA, 25 bp, Homo sapien
tatcttccgggctaacagtttctcc

SEQ ID NO: 3902806 - DNA, 25 bp, Homo sapien
gagacggacgtctctgaggtcggga

SEQ ID NO: 3902807 - DNA, 25 bp, Homo sapien
caggaagaccgagcttaggtgtaca

SEQ ID NO: 3902808 - DNA, 25 bp, Homo sapien
gaccgagcttaggtgtacaaatgct

SEQ ID NO: 3902809 - DNA, 25 bp, Homo sapien
tcgggaaggcgcaaagtgttgcagg

SEQ ID NO: 3902810 - DNA, 25 bp, Homo sapien
gtgggaggatccgccactcccaata

SEQ ID NO: 3902811 - DNA, 25 bp, Homo sapien
gggaggatccgccactcccaatagc

SEQ ID NO: 3902812 - DNA, 25 bp, Homo sapien
ggaggatccgccactcccaatagct

SEQ ID NO: 3902813 - DNA, 25 bp, Homo sapien
ggggtgggaggatccgccactccca

SEQ ID NO: 3902814 - DNA, 25 bp, Homo sapien
ggcggcagcacggtctctcagggac

SEQ ID NO: 3902815 - DNA, 25 bp, Homo sapien
ccacacggcgctgcaggtagcagcg

SEQ ID NO: 3902816 - DNA, 25 bp, Homo sapien
gacaggtggcggaagatgagtgcca

SEQ ID NO: 3902817 - DNA, 25 bp, Homo sapien
cggcagcacggtctctcagggacag

SEQ ID NO: 3902818 - DNA, 25 bp, Homo sapien
cctagctgagtgacccgtgggaagt

SEQ ID NO: 3902819 - DNA, 25 bp, Homo sapien
catggcctccggactgctaggttcg

SEQ ID NO: 3902820 - DNA, 25 bp, Homo sapien
tgttgccccaaaggagggaactcgc

SEQ ID NO: 3902821 - DNA, 25 bp, Homo sapien
tagaagatttcagtggcgtctgcca

SEQ ID NO: 3902822 - DNA, 25 bp, Homo sapien
ggttagagccgtgcagaaaaggcct

SEQ ID NO: 3902823 - DNA, 25 bp, Homo sapien
gcccactagggtactgttgtccaga

SEQ ID NO: 3902824 - DNA, 25 bp, Homo sapien
ccagcgcgtcgtccagtgtgaagga

SEQ ID NO: 3902825 - DNA, 25 bp, Homo sapien
aagagcggtttttctccgcggcact

SEQ ID NO: 3902826 - DNA, 25 bp, Homo sapien
tgcttcgaggatggcgtgcgacaaa

SEQ ID NO: 3902827 - DNA, 25 bp, Homo sapien
tcacagttcccaactcggtaaagac

SEQ ID NO: 3902828 - DNA, 25 bp, Homo sapien
agagcagcgagtggtctcagggcgc

SEQ ID NO: 3902829 - DNA, 25 bp, Homo sapien
aggactggtcccgatgccatcacag

SEQ ID NO: 3902830 - DNA, 25 bp, Homo sapien
aagaaggcactagcactcggggcgc

SEQ ID NO: 3902831 - DNA, 25 bp, Homo sapien
tggaggcaagagaggggggcagtgt

SEQ ID NO: 3902832 - DNA, 25 bp, Homo sapien
cactgcaggatttgtttatttcaca

SEQ ID NO: 3902833 - DNA, 25 bp, Homo sapien
caggatttgtttatttcacactcac

SEQ ID NO: 3902834 - DNA, 25 bp, Homo sapien
tgcaggatttgtttatttcacactc

SEQ ID NO: 3902835 - DNA, 25 bp, Homo sapien
actgcaggatttgtttatttcacac

SEQ ID NO: 3902836 - DNA, 25 bp, Homo sapien
ccggtgcgcgacctggtgtgggctg

SEQ ID NO: 3902837 - DNA, 25 bp, Homo sapien
cagcaggcagaaaaggctggctgga

SEQ ID NO: 3902838 - DNA, 25 bp, Homo sapien
gcagaaaaggctggctggatgggat

SEQ ID NO: 3902839 - DNA, 25 bp, Homo sapien
ttctacaggagaaatcgccggtgcg

SEQ ID NO: 3902840 - DNA, 25 bp, Homo sapien
ctgcgggctcgtcaaagccgcggaa

SEQ ID NO: 3902841 - DNA, 25 bp, Homo sapien
gaaagtgctgcgtttgccgcccgct

SEQ ID NO: 3902842 - DNA, 25 bp, Homo sapien
gtcaaagccgcggaaagtgctgcgt

SEQ ID NO: 3902843 - DNA, 25 bp, Homo sapien
aagccgcggaaagtgctgcgtttgc

SEQ ID NO: 3902844 - DNA, 25 bp, Homo sapien
accagcgcccatagcttgccgagga

SEQ ID NO: 3902845 - DNA, 25 bp, Homo sapien
cgcccatagcttgccgaggaaggca

SEQ ID NO: 3902846 - DNA, 25 bp, Homo sapien
gctccagcggatcaggtggtctgtg

SEQ ID NO: 3902847 - DNA, 25 bp, Homo sapien
cgggctccagcggatcaggtggtct

SEQ ID NO: 3902848 - DNA, 25 bp, Homo sapien
gttgggcgggcatgggtgttcactg

SEQ ID NO: 3902849 - DNA, 25 bp, Homo sapien
ttgggcgggcatgggtgttcactga

SEQ ID NO: 3902850 - DNA, 25 bp, Homo sapien
ccggggatccacggcccagtctcag

SEQ ID NO: 3902851 - DNA, 25 bp, Homo sapien
tccggggatccacggcccagtctca

SEQ ID NO: 3902852 - DNA, 25 bp, Homo sapien
tgagcggtgcccgctcacggccagt

SEQ ID NO: 3902853 - DNA, 25 bp, Homo sapien
atatgggtcgaggccaggccagaac

SEQ ID NO: 3902854 - DNA, 25 bp, Homo sapien
ccaggcctgccgcttacggggatat

SEQ ID NO: 3902855 - DNA, 25 bp, Homo sapien
gccagaacgggctccgaggcctagc

SEQ ID NO: 3902856 - DNA, 25 bp, Homo sapien
gggcagcacttccttggcgaaacgg

SEQ ID NO: 3902857 - DNA, 25 bp, Homo sapien
gctcgccatgttgctatgcttgaaa

SEQ ID NO: 3902858 - DNA, 25 bp, Homo sapien
tgagttggcgcacgaagctcgccat

SEQ ID NO: 3902859 - DNA, 25 bp, Homo sapien
aaacggctctggtcgcttacgagga

SEQ ID NO: 3902860 - DNA, 25 bp, Homo sapien
gcgtgggggcgtgggtcgccccatc

SEQ ID NO: 3902861 - DNA, 25 bp, Homo sapien
catccccggcaccgagtcccccatc

SEQ ID NO: 3902862 - DNA, 25 bp, Homo sapien
gcgtgggtcgccccatccccggcac

SEQ ID NO: 3902863 - DNA, 25 bp, Homo sapien
ccatccccggcaccgagtcccccat

SEQ ID NO: 3902864 - DNA, 25 bp, Homo sapien
tgctggaactcgacgtggtcgcgct

SEQ ID NO: 3902865 - DNA, 25 bp, Homo sapien
ggccgcgcacgaagctcgggtgctg

SEQ ID NO: 3902866 - DNA, 25 bp, Homo sapien
cgctccagtagctgctcgcggccgc

SEQ ID NO: 3902867 - DNA, 25 bp, Homo sapien
cgtggtcgcgctccggcctaagcag

SEQ ID NO: 3902868 - DNA, 25 bp, Homo sapien
agcggccgtcgtcgccgcgcagcgc

SEQ ID NO: 3902869 - DNA, 25 bp, Homo sapien
gcggccgtcgtcgccgcgcagcgcg

SEQ ID NO: 3902870 - DNA, 25 bp, Homo sapien
cgcagccgcgcctcggtgctctcct

SEQ ID NO: 3902871 - DNA, 25 bp, Homo sapien
ccgcagccgcgcctcggtgctctcc

SEQ ID NO: 3902872 - DNA, 25 bp, Homo sapien
ggccagttatggtctcatcccgaac

SEQ ID NO: 3902873 - DNA, 25 bp, Homo sapien
gatcgcccataagtctagatggagg

SEQ ID NO: 3902874 - DNA, 25 bp, Homo sapien
cgctgactggccatcccagagatcg

SEQ ID NO: 3902875 - DNA, 25 bp, Homo sapien
ggcatctgagagttcgcccagtcac

SEQ ID NO: 3902876 - DNA, 25 bp, Homo sapien
cctcccgccacaagatctcgttctg

SEQ ID NO: 3902877 - DNA, 25 bp, Homo sapien
cacctcccgccacaagatctcgttc

SEQ ID NO: 3902878 - DNA, 25 bp, Homo sapien
ctcccgccacaagatctcgttctgc

SEQ ID NO: 3902879 - DNA, 25 bp, Homo sapien
acctcccgccacaagatctcgttct

SEQ ID NO: 3902880 - DNA, 25 bp, Homo sapien
gaccgtggctctgccgaagtgtcac

SEQ ID NO: 3902881 - DNA, 25 bp, Homo sapien
tgaccgtggctctgccgaagtgtca

SEQ ID NO: 3902882 - DNA, 25 bp, Homo sapien
cggtggaatggggtgtcgaggagtg

SEQ ID NO: 3902883 - DNA, 25 bp, Homo sapien
actgggcggtggaatggggtgtcga

SEQ ID NO: 3902884 - DNA, 25 bp, Homo sapien
aatggggtgtcgaggagtgggaggg

SEQ ID NO: 3902885 - DNA, 25 bp, Homo sapien
gactgggcggtggaatggggtgtcg

SEQ ID NO: 3902886 - DNA, 25 bp, Homo sapien
gtggcccaaagagacactggatcag

SEQ ID NO: 3902887 - DNA, 25 bp, Homo sapien
tgaagtggcccaaagagacactgga

SEQ ID NO: 3902888 - DNA, 25 bp, Homo sapien
aagtggcccaaagagacactggatc

SEQ ID NO: 3902889 - DNA, 25 bp, Homo sapien
ctgaagtggcccaaagagacactgg

SEQ ID NO: 3902890 - DNA, 25 bp, Homo sapien
cttgcctcctgcattgctcggcccc

SEQ ID NO: 3902891 - DNA, 25 bp, Homo sapien
tgcctcctgcattgctcggccccgc

SEQ ID NO: 3902892 - DNA, 25 bp, Homo sapien
ttgcctcctgcattgctcggccccg

SEQ ID NO: 3902893 - DNA, 25 bp, Homo sapien
atgagctcccctcatccagcatcag

SEQ ID NO: 3902894 - DNA, 25 bp, Homo sapien
ttgggcatgagctcccctcatccag

SEQ ID NO: 3902895 - DNA, 25 bp, Homo sapien
gcatgagctcccctcatccagcatc

SEQ ID NO: 3902896 - DNA, 25 bp, Homo sapien
gagctcccctcatccagcatcaggg

SEQ ID NO: 3902897 - DNA, 25 bp, Homo sapien
cccagccatgcccttgggaaggggg

SEQ ID NO: 3902898 - DNA, 25 bp, Homo sapien
gcccagccatgcccttgggaagggg

SEQ ID NO: 3902899 - DNA, 25 bp, Homo sapien
ccagccatgcccttgggaaggggga

SEQ ID NO: 3902900 - DNA, 25 bp, Homo sapien
cagccatgcccttgggaagggggaa

SEQ ID NO: 3902901 - DNA, 25 bp, Homo sapien
caggtctaagggagaaggtttgagg

SEQ ID NO: 3902902 - DNA, 25 bp, Homo sapien
aggcccaaatttgtctctgggagag

SEQ ID NO: 3902903 - DNA, 25 bp, Homo sapien
aaggcccaaatttgtctctgggaga

SEQ ID NO: 3902904 - DNA, 25 bp, Homo sapien
ggcccaaatttgtctctgggagagg

SEQ ID NO: 3902905 - DNA, 25 bp, Homo sapien
ggatggagagtcttctgggatgtca

SEQ ID NO: 3902906 - DNA, 25 bp, Homo sapien
gccatcactggagggagaaagcctg

SEQ ID NO: 3902907 - DNA, 25 bp, Homo sapien
atgtcagagatgatggggcccctgg

SEQ ID NO: 3902908 - DNA, 25 bp, Homo sapien
aagcctggtcccctcaggggatgga

SEQ ID NO: 3902909 - DNA, 25 bp, Homo sapien
ggactggccggctcttctttgagca

SEQ ID NO: 3902910 - DNA, 25 bp, Homo sapien
cacgcagaagtcacactcgtttggg

SEQ ID NO: 3902911 - DNA, 25 bp, Homo sapien
ccctggactggccggctcttctttg

SEQ ID NO: 3902912 - DNA, 25 bp, Homo sapien
ctgtcacgcagaagtcacactcgtt

SEQ ID NO: 3902913 - DNA, 25 bp, Homo sapien
tggttcaggctgttgggcattcctg

SEQ ID NO: 3902914 - DNA, 25 bp, Homo sapien
tatctccctgggatcccctggttca

SEQ ID NO: 3902915 - DNA, 25 bp, Homo sapien
ctgtcaggtatctccctgggatccc

SEQ ID NO: 3902916 - DNA, 25 bp, Homo sapien
ctgggatcccctggttcaggctgtt

SEQ ID NO: 3902917 - DNA, 25 bp, Homo sapien
ggctgaagcagcatcggaggcagca

SEQ ID NO: 3902918 - DNA, 25 bp, Homo sapien
ggggctgaagcagcatcggaggcag

SEQ ID NO: 3902919 - DNA, 25 bp, Homo sapien
ttccacactttcttgagggggctga

SEQ ID NO: 3902920 - DNA, 25 bp, Homo sapien
ggctcctgtccccgctttccaggcc

SEQ ID NO: 3902921 - DNA, 25 bp, Homo sapien
ctctgggtcagtggtgccctcccca

SEQ ID NO: 3902922 - DNA, 25 bp, Homo sapien
gctctgggtcagtggtgccctcccc

SEQ ID NO: 3902923 - DNA, 25 bp, Homo sapien
agctctgggtcagtggtgccctccc

SEQ ID NO: 3902924 - DNA, 25 bp, Homo sapien
gagctctgggtcagtggtgccctcc

SEQ ID NO: 3902925 - DNA, 25 bp, Homo sapien
tcagggtccattctcgcccttggag

SEQ ID NO: 3902926 - DNA, 25 bp, Homo sapien
catcagggtccattctcgcccttgg

SEQ ID NO: 3902927 - DNA, 25 bp, Homo sapien
cagggtccattctcgcccttggaga

SEQ ID NO: 3902928 - DNA, 25 bp, Homo sapien
atcagggtccattctcgcccttgga

SEQ ID NO: 3902929 - DNA, 25 bp, Homo sapien
tggggaggggacctagcagctgagg

SEQ ID NO: 3902930 - DNA, 25 bp, Homo sapien
ggggaggggacctagcagctgaggg

SEQ ID NO: 3902931 - DNA, 25 bp, Homo sapien
gggacctagcagctgagggggacag

SEQ ID NO: 3902932 - DNA, 25 bp, Homo sapien
acctagcagctgagggggacagctg

SEQ ID NO: 3902933 - DNA, 25 bp, Homo sapien
ccccgctctggaaccaagggctgca

SEQ ID NO: 3902934 - DNA, 25 bp, Homo sapien
tcaccccgctctggaaccaagggct

SEQ ID NO: 3902935 - DNA, 25 bp, Homo sapien
accccgctctggaaccaagggctgc

SEQ ID NO: 3902936 - DNA, 25 bp, Homo sapien
cccgctctggaaccaagggctgcat

SEQ ID NO: 3902937 - DNA, 25 bp, Homo sapien
tcaaggaacgctctgcagtgcagcc

SEQ ID NO: 3902938 - DNA, 25 bp, Homo sapien
tctgctcagttaggataaaacatcc

SEQ ID NO: 3902939 - DNA, 25 bp, Homo sapien
cactcaatcaaggtagctcagccca

SEQ ID NO: 3902940 - DNA, 25 bp, Homo sapien
cactctcgcccaatggtgagggcat

SEQ ID NO: 3902941 - DNA, 25 bp, Homo sapien
gctctcaggagtgctataaatggtt

SEQ ID NO: 3902942 - DNA, 25 bp, Homo sapien
aagtaggaggcagtccggctctcag

SEQ ID NO: 3902943 - DNA, 25 bp, Homo sapien
cttccgggcccaagtaggaggcagt

SEQ ID NO: 3902944 - DNA, 25 bp, Homo sapien
taaatggttaaagccccaggcaggc

SEQ ID NO: 3902945 - DNA, 25 bp, Homo sapien
ttccaagccccttcagaggcgcggg

SEQ ID NO: 3902946 - DNA, 25 bp, Homo sapien
ggactggttccaagccccttcagag

SEQ ID NO: 3902947 - DNA, 25 bp, Homo sapien
tgcagcggcggactggttccaagcc

SEQ ID NO: 3902948 - DNA, 25 bp, Homo sapien
aagccaagaaggatgtgcagcggcg

SEQ ID NO: 3902949 - DNA, 25 bp, Homo sapien
aaacggagtttatgtgcagggatag

SEQ ID NO: 3902950 - DNA, 25 bp, Homo sapien
acggagtttatgtgcagggatagtc

SEQ ID NO: 3902951 - DNA, 25 bp, Homo sapien
aaaaacggagtttatgtgcagggat

SEQ ID NO: 3902952 - DNA, 25 bp, Homo sapien
agggatagtcggggtagtggagaga

SEQ ID NO: 3902953 - DNA, 25 bp, Homo sapien
ggagatgacggtgcagaaagggccg

SEQ ID NO: 3902954 - DNA, 25 bp, Homo sapien
gagatgacggtgcagaaagggccgg

SEQ ID NO: 3902955 - DNA, 25 bp, Homo sapien
cgggtggtggggcgctgattctgcc

SEQ ID NO: 3902956 - DNA, 25 bp, Homo sapien
cgagcgccgcagcgggtggtggggc

SEQ ID NO: 3902957 - DNA, 25 bp, Homo sapien
tgattctgcccaatctcggtttccc

SEQ ID NO: 3902958 - DNA, 25 bp, Homo sapien
cgctgattctgcccaatctcggttt

SEQ ID NO: 3902959 - DNA, 25 bp, Homo sapien
ccacccagtcccagagcttgagagt

SEQ ID NO: 3902960 - DNA, 25 bp, Homo sapien
cacccagtcccagagcttgagagtc

SEQ ID NO: 3902961 - DNA, 25 bp, Homo sapien
ggtgcagattggattggcccctcct

SEQ ID NO: 3902962 - DNA, 25 bp, Homo sapien
tatttagcggccagtccttcgaggg

SEQ ID NO: 3902963 - DNA, 25 bp, Homo sapien
gacaggtccgattcttcccagagag

SEQ ID NO: 3902964 - DNA, 25 bp, Homo sapien
tcttgggacagtgaagagcctttgc

SEQ ID NO: 3902965 - DNA, 25 bp, Homo sapien
ctgagttttccagagtgtccctcca

SEQ ID NO: 3902966 - DNA, 25 bp, Homo sapien
tcattgcactgtgtacacgcagact

SEQ ID NO: 3902967 - DNA, 25 bp, Homo sapien
tccgctttcttcaactgagttttcc

SEQ ID NO: 3902968 - DNA, 25 bp, Homo sapien
tgtccctccaatcggtgggcaaagg

SEQ ID NO: 3902969 - DNA, 25 bp, Homo sapien
tgccaggcccgatagcacagtgact

SEQ ID NO: 3902970 - DNA, 25 bp, Homo sapien
gtgactttgacaaccctctgggcta

SEQ ID NO: 3902971 - DNA, 25 bp, Homo sapien
gctgatgctgatcgctaagactgga

SEQ ID NO: 3902972 - DNA, 25 bp, Homo sapien
tgctccagcctgaactatgaggaac

SEQ ID NO: 3902973 - DNA, 25 bp, Homo sapien
tattgtcaaccaaggattatggccc

SEQ ID NO: 3902974 - DNA, 25 bp, Homo sapien
gagaggatttagtcctagccgccat

SEQ ID NO: 3902975 - DNA, 25 bp, Homo sapien
gacatcaggccttgaaccatgccct

SEQ ID NO: 3902976 - DNA, 25 bp, Homo sapien
ccggcattaggaggcaaagacatca

SEQ ID NO: 3902977 - DNA, 25 bp, Homo sapien
gagagactatctctaccaacagcgg

SEQ ID NO: 3902978 - DNA, 25 bp, Homo sapien
gactatctctaccaacagcggctat

SEQ ID NO: 3902979 - DNA, 25 bp, Homo sapien
tgcctggctcttgagagactatctc

SEQ ID NO: 3902980 - DNA, 25 bp, Homo sapien
cagcggctattagggagagtcaatc

SEQ ID NO: 3902981 - DNA, 25 bp, Homo sapien
tgtcctggtcttgctatattgatca

SEQ ID NO: 3902982 - DNA, 25 bp, Homo sapien
accgcgcctgtcctggtcttgctat

SEQ ID NO: 3902983 - DNA, 25 bp, Homo sapien
caccgcgcctgtcctggtcttgcta

SEQ ID NO: 3902984 - DNA, 25 bp, Homo sapien
cctggtcttgctatattgatcaggc

SEQ ID NO: 3902985 - DNA, 25 bp, Homo sapien
ttctgtccccaagcgtcagccgtgg

SEQ ID NO: 3902986 - DNA, 25 bp, Homo sapien
cttctgtccccaagcgtcagccgtg

SEQ ID NO: 3902987 - DNA, 25 bp, Homo sapien
ctggaggccaacacggggaactcgg

SEQ ID NO: 3902988 - DNA, 25 bp, Homo sapien
gggaactcggtgtcctcctgcctct

SEQ ID NO: 3902989 - DNA, 25 bp, Homo sapien
cagccgccggacggctccgcaagca

SEQ ID NO: 3902990 - DNA, 25 bp, Homo sapien
ctcgatcccagccgccggacggctc

SEQ ID NO: 3902991 - DNA, 25 bp, Homo sapien
ccgccggacggctccgcaagcacag

SEQ ID NO: 3902992 - DNA, 25 bp, Homo sapien
tcgatcccagccgccggacggctcc

SEQ ID NO: 3902993 - DNA, 25 bp, Homo sapien
catggggaaaggggagagaagtaat

SEQ ID NO: 3902994 - DNA, 25 bp, Homo sapien
gcatggggaaaggggagagaagtaa

SEQ ID NO: 3902995 - DNA, 25 bp, Homo sapien
ctgcatggggaaaggggagagaagt

SEQ ID NO: 3902996 - DNA, 25 bp, Homo sapien
tgcatggggaaaggggagagaagta

SEQ ID NO: 3902997 - DNA, 25 bp, Homo sapien
aatgcctcgtactctggcccggtga

SEQ ID NO: 3902998 - DNA, 25 bp, Homo sapien
ggtcgatagtctctgacggccgctc

SEQ ID NO: 3902999 - DNA, 25 bp, Homo sapien
ctgcagcgtctcgaccaggcgtttc

SEQ ID NO: 3903000 - DNA, 25 bp, Homo sapien
caggcgtttccgctcgcggtcgata

SEQ ID NO: 3903001 - DNA, 25 bp, Homo sapien
ggcgcgcccgcggtacgctgggcac

SEQ ID NO: 3903002 - DNA, 25 bp, Homo sapien
gtacgctgggcacagcgtagcagct

SEQ ID NO: 3903003 - DNA, 25 bp, Homo sapien
cccgcggtacgctgggcacagcgta

SEQ ID NO: 3903004 - DNA, 25 bp, Homo sapien
ggcggcctcgcccttgccctgcacc

SEQ ID NO: 3903005 - DNA, 25 bp, Homo sapien
tgtgcggtttcacactcgcctactt

SEQ ID NO: 3903006 - DNA, 25 bp, Homo sapien
tcacactcgcctacttctagcggag

SEQ ID NO: 3903007 - DNA, 25 bp, Homo sapien
ctacttctagcggagacgacaaccc

SEQ ID NO: 3903008 - DNA, 25 bp, Homo sapien
ctcaatttacccctgtgcggtttca

SEQ ID NO: 3903009 - DNA, 25 bp, Homo sapien
gggtgcctccggcgtccagtggcct

SEQ ID NO: 3903010 - DNA, 25 bp, Homo sapien
tgcctccggcgtccagtggcctggg

SEQ ID NO: 3903011 - DNA, 25 bp, Homo sapien
gagggtcatagctgcggtcccggta

SEQ ID NO: 3903012 - DNA, 25 bp, Homo sapien
agggtcatagctgcggtcccggtag

SEQ ID NO: 3903013 - DNA, 25 bp, Homo sapien
ggcccccggcctcgtcagggtctga

SEQ ID NO: 3903014 - DNA, 25 bp, Homo sapien
cccccggcctcgtcagggtctgaag

SEQ ID NO: 3903015 - DNA, 25 bp, Homo sapien
cccggcctcgtcagggtctgaagct

SEQ ID NO: 3903016 - DNA, 25 bp, Homo sapien
ccccggcctcgtcagggtctgaagc

SEQ ID NO: 3903017 - DNA, 25 bp, Homo sapien
tttcctcgaagtcgggctcgggctc

SEQ ID NO: 3903018 - DNA, 25 bp, Homo sapien
tctggctccagttccggctctggtt

SEQ ID NO: 3903019 - DNA, 25 bp, Homo sapien
tccggctccggttcagcctctttag

SEQ ID NO: 3903020 - DNA, 25 bp, Homo sapien
ggctccggttcagcctctttagagg

SEQ ID NO: 3903021 - DNA, 25 bp, Homo sapien
tagagatgacgggaacagtggtcaa

SEQ ID NO: 3903022 - DNA, 25 bp, Homo sapien
ccggctcagggtttgggcggactca

SEQ ID NO: 3903023 - DNA, 25 bp, Homo sapien
gcatccgcttcccaggccatgccct

SEQ ID NO: 3903024 - DNA, 25 bp, Homo sapien
ggtggggtccggcatccgcttccca

SEQ ID NO: 3903025 - DNA, 25 bp, Homo sapien
atgggcggggcaccgcctgtcagag

SEQ ID NO: 3903026 - DNA, 25 bp, Homo sapien
cagcatgggcggggcaccgcctgtc

SEQ ID NO: 3903027 - DNA, 25 bp, Homo sapien
cggggcaccgcctgtcagagctctg

SEQ ID NO: 3903028 - DNA, 25 bp, Homo sapien
gcggggcaccgcctgtcagagctct

SEQ ID NO: 3903029 - DNA, 25 bp, Homo sapien
ggtggcatccgattcagctccagca

SEQ ID NO: 3903030 - DNA, 25 bp, Homo sapien
gctggaccgagccttggtggcatcc

SEQ ID NO: 3903031 - DNA, 25 bp, Homo sapien
tcacttccagcggtactgggctgga

SEQ ID NO: 3903032 - DNA, 25 bp, Homo sapien
ttccagcggtactgggctggaccga

SEQ ID NO: 3903033 - DNA, 25 bp, Homo sapien
tgggactcagaggtacccaccctaa

SEQ ID NO: 3903034 - DNA, 25 bp, Homo sapien
tgatgctcgtggtgggcttgggcct

SEQ ID NO: 3903035 - DNA, 25 bp, Homo sapien
tagggctgaggactggatgatgctc

SEQ ID NO: 3903036 - DNA, 25 bp, Homo sapien
ccaccctaagttcctgggcaaacag

SEQ ID NO: 3903037 - DNA, 25 bp, Homo sapien
aatgggttgtgtatgcgggcaggag

SEQ ID NO: 3903038 - DNA, 25 bp, Homo sapien
gcaggagggtcaggtccttgtccca

SEQ ID NO: 3903039 - DNA, 25 bp, Homo sapien
tcaggtccttgtcccactagggggc

SEQ ID NO: 3903040 - DNA, 25 bp, Homo sapien
ctaggtttgggatctccagggtgca

SEQ ID NO: 3903041 - DNA, 25 bp, Homo sapien
gatgtgtgtggcctttgtctactca

SEQ ID NO: 3903042 - DNA, 25 bp, Homo sapien
gagcgccttttgtgtaagtcactgg

SEQ ID NO: 3903043 - DNA, 25 bp, Homo sapien
gggttgagctggtacctacatatgc

SEQ ID NO: 3903044 - DNA, 25 bp, Homo sapien
tgttcagctcaggaacttgcgtggg

SEQ ID NO: 3903045 - DNA, 25 bp, Homo sapien
cactcctatcctttggccttagttt

SEQ ID NO: 3903046 - DNA, 25 bp, Homo sapien
tgtgaaccccactcctatcctttgg

SEQ ID NO: 3903047 - DNA, 25 bp, Homo sapien
tttcccttcagacttagctgtgtga

SEQ ID NO: 3903048 - DNA, 25 bp, Homo sapien
tcagacttagctgtgtgaaccccac

SEQ ID NO: 3903049 - DNA, 25 bp, Homo sapien
cagctgctctctggcagaggttggc

SEQ ID NO: 3903050 - DNA, 25 bp, Homo sapien
cagaggttggcatagcctaggagca

SEQ ID NO: 3903051 - DNA, 25 bp, Homo sapien
tctctggcagaggttggcatagcct

SEQ ID NO: 3903052 - DNA, 25 bp, Homo sapien
agcctaggagcagctgcaattgcac

SEQ ID NO: 3903053 - DNA, 25 bp, Homo sapien
tctgtgcagactgcgttcccgaggc

SEQ ID NO: 3903054 - DNA, 25 bp, Homo sapien
gaattcttgcagagtgacacgctta

SEQ ID NO: 3903055 - DNA, 25 bp, Homo sapien
cagcaactcgctgtggccttgggaa

SEQ ID NO: 3903056 - DNA, 25 bp, Homo sapien
tgctgctcgcagaataaaccacggc

SEQ ID NO: 3903057 - DNA, 25 bp, Homo sapien
gaatgttttcctcaaggacgcaccg

SEQ ID NO: 3903058 - DNA, 25 bp, Homo sapien
aatttgaggcaggtctcgctgggct

SEQ ID NO: 3903059 - DNA, 25 bp, Homo sapien
cttggtcctgaagccgtagttttgc

SEQ ID NO: 3903060 - DNA, 25 bp, Homo sapien
gaccagaagtgcagagagccgctgt

SEQ ID NO: 3903061 - DNA, 25 bp, Homo sapien
tagagaaggggacgccatcggaact

SEQ ID NO: 3903062 - DNA, 25 bp, Homo sapien
aatgagaagggcgtcagtgggccgc

SEQ ID NO: 3903063 - DNA, 25 bp, Homo sapien
caacatcactaactctgcctagtcc

SEQ ID NO: 3903064 - DNA, 25 bp, Homo sapien
gggccgccctggcagtagagaaggg

SEQ ID NO: 3903065 - DNA, 25 bp, Homo sapien
cccgcccgccgcctcccctcagcca

SEQ ID NO: 3903066 - DNA, 25 bp, Homo sapien
cgcccgccgcctcccctcagccagg

SEQ ID NO: 3903067 - DNA, 25 bp, Homo sapien
aggccaggccaggccggcgccgccg

SEQ ID NO: 3903068 - DNA, 25 bp, Homo sapien
ggcgccgccgccacttccgcttccg

SEQ ID NO: 3903069 - DNA, 25 bp, Homo sapien
ggctcttttcgtgccggcttggagt

SEQ ID NO: 3903070 - DNA, 25 bp, Homo sapien
ttttcgtgccggcttggagtgcccg

SEQ ID NO: 3903071 - DNA, 25 bp, Homo sapien
gcagtcccaggctcttttcgtgccg

SEQ ID NO: 3903072 - DNA, 25 bp, Homo sapien
aagggacacgaacttggtggtgagc

SEQ ID NO: 3903073 - DNA, 25 bp, Homo sapien
gaggtcaagcacgccgtccttggcc

SEQ ID NO: 3903074 - DNA, 25 bp, Homo sapien
gcttgaggtcaagcacgccgtcctt

SEQ ID NO: 3903075 - DNA, 25 bp, Homo sapien
cagcttgaggtcaagcacgccgtcc

SEQ ID NO: 3903076 - DNA, 25 bp, Homo sapien
ttgaggtcaagcacgccgtccttgg

SEQ ID NO: 3903077 - DNA, 25 bp, Homo sapien
aaagcacacgatggcggccggctct

SEQ ID NO: 3903078 - DNA, 25 bp, Homo sapien
agcacacgatggcggccggctctcg

SEQ ID NO: 3903079 - DNA, 25 bp, Homo sapien
agaaagcacacgatggcggccggct

SEQ ID NO: 3903080 - DNA, 25 bp, Homo sapien
cacacgatggcggccggctctcgga

SEQ ID NO: 3903081 - DNA, 25 bp, Homo sapien
agctctgtcccataggcagctcttc

SEQ ID NO: 3903082 - DNA, 25 bp, Homo sapien
tggcccatagctgtagctcgatggc

SEQ ID NO: 3903083 - DNA, 25 bp, Homo sapien
gggccacgaggacgaacacctgcag

SEQ ID NO: 3903084 - DNA, 25 bp, Homo sapien
ggcctcggccgaatgaatgaaacat

SEQ ID NO: 3903085 - DNA, 25 bp, Homo sapien
cagccaccctgagacgtggtctggg

SEQ ID NO: 3903086 - DNA, 25 bp, Homo sapien
gtagtgcctcccaggcgctactgca

SEQ ID NO: 3903087 - DNA, 25 bp, Homo sapien
tggattccaaccctgtagtgcctcc

SEQ ID NO: 3903088 - DNA, 25 bp, Homo sapien
agccaccctgagacgtggtctggga

SEQ ID NO: 3903089 - DNA, 25 bp, Homo sapien
taaatccgccgcttctggcgtacag

SEQ ID NO: 3903090 - DNA, 25 bp, Homo sapien
gattagcccgataccttccaaaaca

SEQ ID NO: 3903091 - DNA, 25 bp, Homo sapien
ggactttttctcgattagcccgata

SEQ ID NO: 3903092 - DNA, 25 bp, Homo sapien
tccaaaacattggtaatgtcgtaaa

SEQ ID NO: 3903093 - DNA, 25 bp, Homo sapien
ctgggtgggagactctactaccctc

SEQ ID NO: 3903094 - DNA, 25 bp, Homo sapien
ggtgggagactctactaccctccca

SEQ ID NO: 3903095 - DNA, 25 bp, Homo sapien
ccacgcccgacacttctgggtggga

SEQ ID NO: 3903096 - DNA, 25 bp, Homo sapien
cgcccgacacttctgggtgggagac

SEQ ID NO: 3903097 - DNA, 25 bp, Homo sapien
aatctcccgggtattgcagccaggc

SEQ ID NO: 3903098 - DNA, 25 bp, Homo sapien
caatcagtttgtcagcaatctcccg

SEQ ID NO: 3903099 - DNA, 25 bp, Homo sapien
gtttgtcagcaatctcccgggtatt

SEQ ID NO: 3903100 - DNA, 25 bp, Homo sapien
tgccttgagctcaatcagtttgtca

SEQ ID NO: 3903101 - DNA, 25 bp, Homo sapien
tcctctgtgacgttccggatgctct

SEQ ID NO: 3903102 - DNA, 25 bp, Homo sapien
gtcctctgtgacgttccggatgctc

SEQ ID NO: 3903103 - DNA, 25 bp, Homo sapien
cctctgtgacgttccggatgctctg

SEQ ID NO: 3903104 - DNA, 25 bp, Homo sapien
caggactcagggcaagttgaaccag

SEQ ID NO: 3903105 - DNA, 25 bp, Homo sapien
agacaaactcccaagaggaacagga

SEQ ID NO: 3903106 - DNA, 25 bp, Homo sapien
ctataagacaaactcccaagaggaa

SEQ ID NO: 3903107 - DNA, 25 bp, Homo sapien
tcagggcaagttgaaccagagggcc

SEQ ID NO: 3903108 - DNA, 25 bp, Homo sapien
gatgtcctcatgagtgacgtaggcc

SEQ ID NO: 3903109 - DNA, 25 bp, Homo sapien
gcagatgtcctcatgagtgacgtag

SEQ ID NO: 3903110 - DNA, 25 bp, Homo sapien
cagatgtcctcatgagtgacgtagg

SEQ ID NO: 3903111 - DNA, 25 bp, Homo sapien
ctgcagatgtcctcatgagtgacgt

SEQ ID NO: 3903112 - DNA, 25 bp, Homo sapien
gacatggagaatgggtcagagccca

SEQ ID NO: 3903113 - DNA, 25 bp, Homo sapien
aggcacctcattcctctaccgatgg

SEQ ID NO: 3903114 - DNA, 25 bp, Homo sapien
ggagatcacggtccctgaggaacta

SEQ ID NO: 3903115 - DNA, 25 bp, Homo sapien
atccctaggtgagggtgttctagcc

SEQ ID NO: 3903116 - DNA, 25 bp, Homo sapien
tgcctgatggggcccggatggccaa

SEQ ID NO: 3903117 - DNA, 25 bp, Homo sapien
cctgatggggcccggatggccaaga

SEQ ID NO: 3903118 - DNA, 25 bp, Homo sapien
gtgcctgatggggcccggatggcca

SEQ ID NO: 3903119 - DNA, 25 bp, Homo sapien
tgatggggcccggatggccaagagg

SEQ ID NO: 3903120 - DNA, 25 bp, Homo sapien
agatgggtggtaagggatgggagat

SEQ ID NO: 3903121 - DNA, 25 bp, Homo sapien
ctagagatgggtggtaagggatggg

SEQ ID NO: 3903122 - DNA, 25 bp, Homo sapien
gagatgggtagaattgtaagcaggc

SEQ ID NO: 3903123 - DNA, 25 bp, Homo sapien
gatgggagatgggtagaattgtaag

SEQ ID NO: 3903124 - DNA, 25 bp, Homo sapien
gactatttggacgtgaggcttcctg

SEQ ID NO: 3903125 - DNA, 25 bp, Homo sapien
aatgggaccactcacactcttcagg

SEQ ID NO: 3903126 - DNA, 25 bp, Homo sapien
ctggacttctgcactgccagggaca

SEQ ID NO: 3903127 - DNA, 25 bp, Homo sapien
ggtgtagaaacagcagatgggctct

SEQ ID NO: 3903128 - DNA, 25 bp, Homo sapien
ctgtgctggaacccagacacaggag

SEQ ID NO: 3903129 - DNA, 25 bp, Homo sapien
aagaggtcgttgaaactggctgtgc

SEQ ID NO: 3903130 - DNA, 25 bp, Homo sapien
gacacaggaggaccacaagcctggt

SEQ ID NO: 3903131 - DNA, 25 bp, Homo sapien
tcaggaagaggtcgttgaaactggc

SEQ ID NO: 3903132 - DNA, 25 bp, Homo sapien
gtccttgctatcagtcccagggccg

SEQ ID NO: 3903133 - DNA, 25 bp, Homo sapien
ctatcagtcccagggccgccactca

SEQ ID NO: 3903134 - DNA, 25 bp, Homo sapien
tgtccttgctatcagtcccagggcc

SEQ ID NO: 3903135 - DNA, 25 bp, Homo sapien
cactgtccttgctatcagtcccagg

SEQ ID NO: 3903136 - DNA, 25 bp, Homo sapien
gtccggacgaactgctgctgttact

SEQ ID NO: 3903137 - DNA, 25 bp, Homo sapien
ttgggtccggacgaactgctgctgt

SEQ ID NO: 3903138 - DNA, 25 bp, Homo sapien
cgggtgtccagtgttgttgggccca

SEQ ID NO: 3903139 - DNA, 25 bp, Homo sapien
gggttgggtccggacgaactgctgc

SEQ ID NO: 3903140 - DNA, 25 bp, Homo sapien
cacacagctaaggagatgtaggtcc

SEQ ID NO: 3903141 - DNA, 25 bp, Homo sapien
gcttttctaactcggaaaggccaca

SEQ ID NO: 3903142 - DNA, 25 bp, Homo sapien
tgttggcctcacttgctaaacctga

SEQ ID NO: 3903143 - DNA, 25 bp, Homo sapien
tgtaggtcctgcctaggccaagctg

SEQ ID NO: 3903144 - DNA, 25 bp, Homo sapien
tcgtgtgggatcaaagatttctgac

SEQ ID NO: 3903145 - DNA, 25 bp, Homo sapien
ctcgtgtgggatcaaagatttctga

SEQ ID NO: 3903146 - DNA, 25 bp, Homo sapien
cttctgaggacatcaactcctccag

SEQ ID NO: 3903147 - DNA, 25 bp, Homo sapien
cctccagcagctccgagctcatgca

SEQ ID NO: 3903148 - DNA, 25 bp, Homo sapien
ctcctccagcagctccgagctcatg

SEQ ID NO: 3903149 - DNA, 25 bp, Homo sapien
tccagcagctccgagctcatgcact

SEQ ID NO: 3903150 - DNA, 25 bp, Homo sapien
ggctcccctagcagcagcccaaccc

SEQ ID NO: 3903151 - DNA, 25 bp, Homo sapien
agagagcactagtctcaggccctgg

SEQ ID NO: 3903152 - DNA, 25 bp, Homo sapien
tgcagagagcactagtctcaggccc

SEQ ID NO: 3903153 - DNA, 25 bp, Homo sapien
gagagcactagtctcaggccctggg

SEQ ID NO: 3903154 - DNA, 25 bp, Homo sapien
gtagatataatcgtggtctcccggg

SEQ ID NO: 3903155 - DNA, 25 bp, Homo sapien
cgtccaggttgtagatataatcgtg

SEQ ID NO: 3903156 - DNA, 25 bp, Homo sapien
agacaccttcactctcgtccaggtt

SEQ ID NO: 3903157 - DNA, 25 bp, Homo sapien
gaggttgagaacaggcacatcaaag

SEQ ID NO: 3903158 - DNA, 25 bp, Homo sapien
ccaggcgtctgtggctctcaagctc

SEQ ID NO: 3903159 - DNA, 25 bp, Homo sapien
ggttctagggctaaaggcccagcag

SEQ ID NO: 3903160 - DNA, 25 bp, Homo sapien
ggccaatcatcagggctggaccacc

SEQ ID NO: 3903161 - DNA, 25 bp, Homo sapien
gggtaatggcagctcctcggttctg

SEQ ID NO: 3903162 - DNA, 25 bp, Homo sapien
ctgcggccaagggtgcacctggcct

SEQ ID NO: 3903163 - DNA, 25 bp, Homo sapien
tttccgagacctgacctcggtgtcc

SEQ ID NO: 3903164 - DNA, 25 bp, Homo sapien
gcactttccggagaccgtgcacctg

SEQ ID NO: 3903165 - DNA, 25 bp, Homo sapien
gctcctggccatgcaacgcggcctt

SEQ ID NO: 3903166 - DNA, 25 bp, Homo sapien
atcttcaccacgttccgcggaggcg

SEQ ID NO: 3903167 - DNA, 25 bp, Homo sapien
tggcgtcacgcatcttgatggcaat

SEQ ID NO: 3903168 - DNA, 25 bp, Homo sapien
atggcaatcttcaccacgttccgcg

SEQ ID NO: 3903169 - DNA, 25 bp, Homo sapien
gatggcgtcacgcatcttgatggca

SEQ ID NO: 3903170 - DNA, 25 bp, Homo sapien
gatggaggcgggaccagccgggtga

SEQ ID NO: 3903171 - DNA, 25 bp, Homo sapien
atggaggcgggaccagccgggtgac

SEQ ID NO: 3903172 - DNA, 25 bp, Homo sapien
tggagtggtcattctcgcggcctgg

SEQ ID NO: 3903173 - DNA, 25 bp, Homo sapien
agtggagtggtcattctcgcggcct

SEQ ID NO: 3903174 - DNA, 25 bp, Homo sapien
caagtggagtggtcattctcgcggc

SEQ ID NO: 3903175 - DNA, 25 bp, Homo sapien
ctgcaagtggagtggtcattctcgc

SEQ ID NO: 3903176 - DNA, 25 bp, Homo sapien
cttcagcacagcggccaggggcttc

SEQ ID NO: 3903177 - DNA, 25 bp, Homo sapien
tccttcagcacagcggccaggggct

SEQ ID NO: 3903178 - DNA, 25 bp, Homo sapien
tcagcacagcggccaggggcttcgc

SEQ ID NO: 3903179 - DNA, 25 bp, Homo sapien
gcgtcgcacacctccttcagcacag

SEQ ID NO: 3903180 - DNA, 25 bp, Homo sapien
tgaggggcacgaggctcagcgaggc

SEQ ID NO: 3903181 - DNA, 25 bp, Homo sapien
ggcacgaggctcagcgaggccggca

SEQ ID NO: 3903182 - DNA, 25 bp, Homo sapien
ggggcacgaggctcagcgaggccgg

SEQ ID NO: 3903183 - DNA, 25 bp, Homo sapien
acgaggctcagcgaggccggcaggg

SEQ ID NO: 3903184 - DNA, 25 bp, Homo sapien
tccgcaaactgcagggcgtaacgct

SEQ ID NO: 3903185 - DNA, 25 bp, Homo sapien
ttctcggtgatgtatctccggtgcc

SEQ ID NO: 3903186 - DNA, 25 bp, Homo sapien
ggtgcccatccgcaaactgcagggc

SEQ ID NO: 3903187 - DNA, 25 bp, Homo sapien
cagggcgtaacgctcagagtgcgtc

SEQ ID NO: 3903188 - DNA, 25 bp, Homo sapien
ctggagaagacagcagaaaaggcag

SEQ ID NO: 3903189 - DNA, 25 bp, Homo sapien
tgccattcttgatctccgcgcggtt

SEQ ID NO: 3903190 - DNA, 25 bp, Homo sapien
caaaggggcagggatggggaaggcg

SEQ ID NO: 3903191 - DNA, 25 bp, Homo sapien
gacctggagcaaaggggcagggatg

SEQ ID NO: 3903192 - DNA, 25 bp, Homo sapien
ggacctggagcaaaggggcagggat

SEQ ID NO: 3903193 - DNA, 25 bp, Homo sapien
acctggagcaaaggggcagggatgg

SEQ ID NO: 3903194 - DNA, 25 bp, Homo sapien
tgcggccccgggcgtcaactaggtg

SEQ ID NO: 3903195 - DNA, 25 bp, Homo sapien
cccgggcgtcaactaggtggcgcaa

SEQ ID NO: 3903196 - DNA, 25 bp, Homo sapien
ggcatggtaagggtgggacctggaa

SEQ ID NO: 3903197 - DNA, 25 bp, Homo sapien
actaggtggcgcaaggcagggctgg

SEQ ID NO: 3903198 - DNA, 25 bp, Homo sapien
aggactgttactctgcagcccaccc

SEQ ID NO: 3903199 - DNA, 25 bp, Homo sapien
cggcgcccttcaggactgttactct

SEQ ID NO: 3903200 - DNA, 25 bp, Homo sapien
aacaaggcgcctcagggcttcccgg

SEQ ID NO: 3903201 - DNA, 25 bp, Homo sapien
ccgaggccagcggaacaaggcgcct

SEQ ID NO: 3903202 - DNA, 25 bp, Homo sapien
tctggagcccattacggctgatgac

SEQ ID NO: 3903203 - DNA, 25 bp, Homo sapien
gtatctggagcccattacggctgat

SEQ ID NO: 3903204 - DNA, 25 bp, Homo sapien
tggagcccattacggctgatgacct

SEQ ID NO: 3903205 - DNA, 25 bp, Homo sapien
ttcaatgatggtgcctagtatctgg

SEQ ID NO: 3903206 - DNA, 25 bp, Homo sapien
ggaccagaaagacccaccatctccc

SEQ ID NO: 3903207 - DNA, 25 bp, Homo sapien
gaggggggacatctggggctgagca

SEQ ID NO: 3903208 - DNA, 25 bp, Homo sapien
caggaccaccccaggaccagaaaga

SEQ ID NO: 3903209 - DNA, 25 bp, Homo sapien
acatctggggctgagcaggaccacc

SEQ ID NO: 3903210 - DNA, 25 bp, Homo sapien
gggatgctcagagtctcccaggaca

SEQ ID NO: 3903211 - DNA, 25 bp, Homo sapien
gctgagggccagcacctctcctagg

SEQ ID NO: 3903212 - DNA, 25 bp, Homo sapien
acgccgtgctccatgagctctgaga

SEQ ID NO: 3903213 - DNA, 25 bp, Homo sapien
tgagctctgagaaggccctcaggct

SEQ ID NO: 3903214 - DNA, 25 bp, Homo sapien
gtaggtgcaccagcagcctatccag

SEQ ID NO: 3903215 - DNA, 25 bp, Homo sapien
catgaggttcatgttcacgtagcac

SEQ ID NO: 3903216 - DNA, 25 bp, Homo sapien
gggcacctcgctcttgaccagctgg

SEQ ID NO: 3903217 - DNA, 25 bp, Homo sapien
aggcacggaggcatccatgaggttc

SEQ ID NO: 3903218 - DNA, 25 bp, Homo sapien
ggccttggtttgcagctgctggttc

SEQ ID NO: 3903219 - DNA, 25 bp, Homo sapien
tatagatgaactggcgaaggttcct

SEQ ID NO: 3903220 - DNA, 25 bp, Homo sapien
ttatagatgaactggcgaaggttcc

SEQ ID NO: 3903221 - DNA, 25 bp, Homo sapien
cttatagatgaactggcgaaggttc

SEQ ID NO: 3903222 - DNA, 25 bp, Homo sapien
cccagcatgagagcctgcagtacgt

SEQ ID NO: 3903223 - DNA, 25 bp, Homo sapien
gcatgagagcctgcagtacgtacag

SEQ ID NO: 3903224 - DNA, 25 bp, Homo sapien
acaggtgatgagccatctcgtcgcc

SEQ ID NO: 3903225 - DNA, 25 bp, Homo sapien
ctgcagtacgtacaggtgatgagcc

SEQ ID NO: 3903226 - DNA, 25 bp, Homo sapien
agggaacggcgacggtcagcactta

SEQ ID NO: 3903227 - DNA, 25 bp, Homo sapien
gaaaagcccagtttgcggaactctc

SEQ ID NO: 3903228 - DNA, 25 bp, Homo sapien
tcgaaggcagcctggcgtaggacct

SEQ ID NO: 3903229 - DNA, 25 bp, Homo sapien
gcgacggtcagcacttagcccggca

SEQ ID NO: 3903230 - DNA, 25 bp, Homo sapien
cagggccagcagaccggggggcacg

SEQ ID NO: 3903231 - DNA, 25 bp, Homo sapien
gaccggggggcacgcgctccaggtc

SEQ ID NO: 3903232 - DNA, 25 bp, Homo sapien
cgctgggcgcgtttctggagaagta

SEQ ID NO: 3903233 - DNA, 25 bp, Homo sapien
cggctgtacgcgctgggcgcgtttc

SEQ ID NO: 3903234 - DNA, 25 bp, Homo sapien
gggcgcagagaatggggcaaggagt

SEQ ID NO: 3903235 - DNA, 25 bp, Homo sapien
gggcaaggagtcacagctaagccca

SEQ ID NO: 3903236 - DNA, 25 bp, Homo sapien
caaggagtcacagctaagcccatgg

SEQ ID NO: 3903237 - DNA, 25 bp, Homo sapien
gaatggggcaaggagtcacagctaa

SEQ ID NO: 3903238 - DNA, 25 bp, Homo sapien
aaaggggcactcgtgcttgtcctcg

SEQ ID NO: 3903239 - DNA, 25 bp, Homo sapien
ggctccccaacacggagcagctcac

SEQ ID NO: 3903240 - DNA, 25 bp, Homo sapien
gggcactcgtgcttgtcctcgcggc

SEQ ID NO: 3903241 - DNA, 25 bp, Homo sapien
aggggcactcgtgcttgtcctcgcg

SEQ ID NO: 3903242 - DNA, 25 bp, Homo sapien
agaaagtgcatacagcccctggccc

SEQ ID NO: 3903243 - DNA, 25 bp, Homo sapien
gagaaagtgcatacagcccctggcc

SEQ ID NO: 3903244 - DNA, 25 bp, Homo sapien
gaaagtgcatacagcccctggccct

SEQ ID NO: 3903245 - DNA, 25 bp, Homo sapien
ggagaaagtgcatacagcccctggc

SEQ ID NO: 3903246 - DNA, 25 bp, Homo sapien
gtgtagcccgcatctccttccaggt

SEQ ID NO: 3903247 - DNA, 25 bp, Homo sapien
catgggtgagaagtcctgggctgtc

SEQ ID NO: 3903248 - DNA, 25 bp, Homo sapien
tgtgtagcccgcatctccttccagg

SEQ ID NO: 3903249 - DNA, 25 bp, Homo sapien
gctctggtcttggccgaagaacatg

SEQ ID NO: 3903250 - DNA, 25 bp, Homo sapien
tcagggcctaagctctgtacccaga

SEQ ID NO: 3903251 - DNA, 25 bp, Homo sapien
gctcagggcctaagctctgtaccca

SEQ ID NO: 3903252 - DNA, 25 bp, Homo sapien
tcagctcagggcctaagctctgtac

SEQ ID NO: 3903253 - DNA, 25 bp, Homo sapien
cagctcagggcctaagctctgtacc

SEQ ID NO: 3903254 - DNA, 25 bp, Homo sapien
ggagccagtgtgccctcctggtgca

SEQ ID NO: 3903255 - DNA, 25 bp, Homo sapien
gcacctccccataagtgagcgcatt

SEQ ID NO: 3903256 - DNA, 25 bp, Homo sapien
ggtgcagccgttcagtctgccgcag

SEQ ID NO: 3903257 - DNA, 25 bp, Homo sapien
caccttggttcggaagagctccagg

SEQ ID NO: 3903258 - DNA, 25 bp, Homo sapien
taggactgaggatccatccccccag

SEQ ID NO: 3903259 - DNA, 25 bp, Homo sapien
caccaaggaaggtagggctaggact

SEQ ID NO: 3903260 - DNA, 25 bp, Homo sapien
gactgaggatccatccccccagact

SEQ ID NO: 3903261 - DNA, 25 bp, Homo sapien
ggcaccaaggaaggtagggctagga

SEQ ID NO: 3903262 - DNA, 25 bp, Homo sapien
aagcgctgctggcggatcaggccca

SEQ ID NO: 3903263 - DNA, 25 bp, Homo sapien
tcacagaggcggagcaagcgctgct

SEQ ID NO: 3903264 - DNA, 25 bp, Homo sapien
atcttgcggaagagcgtcccctcac

SEQ ID NO: 3903265 - DNA, 25 bp, Homo sapien
gtcccctcacagaggcggagcaagc

SEQ ID NO: 3903266 - DNA, 25 bp, Homo sapien
agagggccagagtgctgagaggtcc

SEQ ID NO: 3903267 - DNA, 25 bp, Homo sapien
gacaccaagccagccgccctctgcc

SEQ ID NO: 3903268 - DNA, 25 bp, Homo sapien
gagtgctgagaggtcctgacaccaa

SEQ ID NO: 3903269 - DNA, 25 bp, Homo sapien
gccagagtgctgagaggtcctgaca

SEQ ID NO: 3903270 - DNA, 25 bp, Homo sapien
ggacaggcagcagaaccacagctta

SEQ ID NO: 3903271 - DNA, 25 bp, Homo sapien
gcagactctccagggtaggcgggct

SEQ ID NO: 3903272 - DNA, 25 bp, Homo sapien
agactctccagggtaggcgggctgg

SEQ ID NO: 3903273 - DNA, 25 bp, Homo sapien
gacaggcagcagaaccacagcttat

SEQ ID NO: 3903274 - DNA, 25 bp, Homo sapien
gctgggctgagcactgcagccctgg

SEQ ID NO: 3903275 - DNA, 25 bp, Homo sapien
ggctgagcactgcagccctggcagc

SEQ ID NO: 3903276 - DNA, 25 bp, Homo sapien
caggaagaaggctgggctgagcact

SEQ ID NO: 3903277 - DNA, 25 bp, Homo sapien
tgggctgagcactgcagccctggca

SEQ ID NO: 3903278 - DNA, 25 bp, Homo sapien
ttctcccggacatgggggcagtcct

SEQ ID NO: 3903279 - DNA, 25 bp, Homo sapien
cttgcctgtcaggagtgccctcatg

SEQ ID NO: 3903280 - DNA, 25 bp, Homo sapien
agtgccctcatgtcggccacaggga

SEQ ID NO: 3903281 - DNA, 25 bp, Homo sapien
ggcagtccttgcctgtcaggagtgc

SEQ ID NO: 3903282 - DNA, 25 bp, Homo sapien
gattgagaaggccaactcatagagg

SEQ ID NO: 3903283 - DNA, 25 bp, Homo sapien
gggcaatgaagttgaggtacgcttc

SEQ ID NO: 3903284 - DNA, 25 bp, Homo sapien
ccccacggtcatagctgattgagaa

SEQ ID NO: 3903285 - DNA, 25 bp, Homo sapien
gaagttgaggtacgcttcctcctcc

SEQ ID NO: 3903286 - DNA, 25 bp, Homo sapien
acagagccgtgagggtctgcccatc

SEQ ID NO: 3903287 - DNA, 25 bp, Homo sapien
cgacctcagcctggcggacactcac

SEQ ID NO: 3903288 - DNA, 25 bp, Homo sapien
gcacagagccgtgagggtctgccca

SEQ ID NO: 3903289 - DNA, 25 bp, Homo sapien
gtggcacagagccgtgagggtctgc

SEQ ID NO: 3903290 - DNA, 25 bp, Homo sapien
gtgtctgctcgctgcccatgggact

SEQ ID NO: 3903291 - DNA, 25 bp, Homo sapien
tgctgcagtcatagcagaagttgaa

SEQ ID NO: 3903292 - DNA, 25 bp, Homo sapien
tcaaggttcagcgatgctgcagtca

SEQ ID NO: 3903293 - DNA, 25 bp, Homo sapien
ccagcagacgcagcttggtctccat

SEQ ID NO: 3903294 - DNA, 25 bp, Homo sapien
ctttatttctgcagcaatctctgct

SEQ ID NO: 3903295 - DNA, 25 bp, Homo sapien
tctgctggtcagggtgcctgcactc

SEQ ID NO: 3903296 - DNA, 25 bp, Homo sapien
tatccaccagctaagtttgaaggca

SEQ ID NO: 3903297 - DNA, 25 bp, Homo sapien
cagattgtcaggagccttctggaga

SEQ ID NO: 3903298 - DNA, 25 bp, Homo sapien
caaccgtagctgtcaaagtttgtgg

SEQ ID NO: 3903299 - DNA, 25 bp, Homo sapien
ggactcaccttggagaaaggctgca

SEQ ID NO: 3903300 - DNA, 25 bp, Homo sapien
accctacccatggttctgagttaga

SEQ ID NO: 3903301 - DNA, 25 bp, Homo sapien
ggctctggcctgtctatggccccca

SEQ ID NO: 3903302 - DNA, 25 bp, Homo sapien
gggcccaatactcctcgatgcttct

SEQ ID NO: 3903303 - DNA, 25 bp, Homo sapien
gtctatggcccccaccctacccatg

SEQ ID NO: 3903304 - DNA, 25 bp, Homo sapien
tgtgagctccacagacttataggct

SEQ ID NO: 3903305 - DNA, 25 bp, Homo sapien
agtggcttcagcctatcctgtgagc

SEQ ID NO: 3903306 - DNA, 25 bp, Homo sapien
gctcttctttcctcacgggcttggg

SEQ ID NO: 3903307 - DNA, 25 bp, Homo sapien
cacgggcttggggtctgtgatcaca

SEQ ID NO: 3903308 - DNA, 25 bp, Homo sapien
gccaggttgatggttaacagttaaa

SEQ ID NO: 3903309 - DNA, 25 bp, Homo sapien
gatgaaactgagtttcatcagttct

SEQ ID NO: 3903310 - DNA, 25 bp, Homo sapien
tcagccaggttgatggttaacagtt

SEQ ID NO: 3903311 - DNA, 25 bp, Homo sapien
aggtcagccaggttgatggttaaca

SEQ ID NO: 3903312 - DNA, 25 bp, Homo sapien
ccgaggagaggttgtcacagggcaa

SEQ ID NO: 3903313 - DNA, 25 bp, Homo sapien
cagggcaacaaggaccccgaggaga

SEQ ID NO: 3903314 - DNA, 25 bp, Homo sapien
gggcaaagcctcatggaacccagca

SEQ ID NO: 3903315 - DNA, 25 bp, Homo sapien
gcagcacgactgaggcagggcaaca

SEQ ID NO: 3903316 - DNA, 25 bp, Homo sapien
gggatttcacgtgtgagtcaccaaa

SEQ ID NO: 3903317 - DNA, 25 bp, Homo sapien
gatttcacgtgtgagtcaccaaacc

SEQ ID NO: 3903318 - DNA, 25 bp, Homo sapien
tttcacgtgtgagtcaccaaacctg

SEQ ID NO: 3903319 - DNA, 25 bp, Homo sapien
ttcacgtgtgagtcaccaaacctgg

SEQ ID NO: 3903320 - DNA, 25 bp, Homo sapien
cagtaatagcataagtgaaggcacc

SEQ ID NO: 3903321 - DNA, 25 bp, Homo sapien
tccagaggagactggtggtgtcagg

SEQ ID NO: 3903322 - DNA, 25 bp, Homo sapien
cggaacatgaagaaggacatccaga

SEQ ID NO: 3903323 - DNA, 25 bp, Homo sapien
aaaagagtttgacggaacatgaaga

SEQ ID NO: 3903324 - DNA, 25 bp, Homo sapien
ccgcaatcactaagcaccacatcgg

SEQ ID NO: 3903325 - DNA, 25 bp, Homo sapien
accacatcggcagctcatgcacttc

SEQ ID NO: 3903326 - DNA, 25 bp, Homo sapien
acgggagagcgaccgaaaccgcaat

SEQ ID NO: 3903327 - DNA, 25 bp, Homo sapien
tgcgaggcaaatacccagcccggga

SEQ ID NO: 3903328 - DNA, 25 bp, Homo sapien
cagcacccgcagctaggatcaatcg

SEQ ID NO: 3903329 - DNA, 25 bp, Homo sapien
gctaggatcaatcgcctcttgctcg

SEQ ID NO: 3903330 - DNA, 25 bp, Homo sapien
tctgcctagggctgacgccatctct

SEQ ID NO: 3903331 - DNA, 25 bp, Homo sapien
tccagtccattctgcctagggctga

SEQ ID NO: 3903332 - DNA, 25 bp, Homo sapien
agccaggtccccgtagtgcagaaac

SEQ ID NO: 3903333 - DNA, 25 bp, Homo sapien
tggtgagctatagagctccatccgc

SEQ ID NO: 3903334 - DNA, 25 bp, Homo sapien
tatagagctccatccgcaactcagc

SEQ ID NO: 3903335 - DNA, 25 bp, Homo sapien
gagctatagagctccatccgcaact

SEQ ID NO: 3903336 - DNA, 25 bp, Homo sapien
gaatgatgagatgccgtcaggaggc

SEQ ID NO: 3903337 - DNA, 25 bp, Homo sapien
tgatgagatgccgtcaggaggccac

SEQ ID NO: 3903338 - DNA, 25 bp, Homo sapien
atgatgagatgccgtcaggaggcca

SEQ ID NO: 3903339 - DNA, 25 bp, Homo sapien
aatgatgagatgccgtcaggaggcc

SEQ ID NO: 3903340 - DNA, 25 bp, Homo sapien
ttggcccccagtatgatccgcaggt

SEQ ID NO: 3903341 - DNA, 25 bp, Homo sapien
tcttccctctcgtgcccactttgcc

SEQ ID NO: 3903342 - DNA, 25 bp, Homo sapien
atgatccgcaggtagaacttcagag

SEQ ID NO: 3903343 - DNA, 25 bp, Homo sapien
ccccagtatgatccgcaggtagaac

SEQ ID NO: 3903344 - DNA, 25 bp, Homo sapien
tgtacttggaggtaggaagagctct

SEQ ID NO: 3903345 - DNA, 25 bp, Homo sapien
tctcaaattcagctacgactcacgc

SEQ ID NO: 3903346 - DNA, 25 bp, Homo sapien
ctagggaactgactataagtgggca

SEQ ID NO: 3903347 - DNA, 25 bp, Homo sapien
gcatagaagcaaggaggtaggcact

SEQ ID NO: 3903348 - DNA, 25 bp, Homo sapien
ccaacgtcacaaggcagtaaatggc

SEQ ID NO: 3903349 - DNA, 25 bp, Homo sapien
cccaaaatgaggcagatgagtaaaa

SEQ ID NO: 3903350 - DNA, 25 bp, Homo sapien
tgagtaaaagaagaccaacgtcaca

SEQ ID NO: 3903351 - DNA, 25 bp, Homo sapien
gaagaccaacgtcacaaggcagtaa

SEQ ID NO: 3903352 - DNA, 25 bp, Homo sapien
gagcaagaatgagggtatcaaaggc

SEQ ID NO: 3903353 - DNA, 25 bp, Homo sapien
cagccactgaccctacgcactcatc

SEQ ID NO: 3903354 - DNA, 25 bp, Homo sapien
actgaccctacgcactcatccacct

SEQ ID NO: 3903355 - DNA, 25 bp, Homo sapien
agagcaagaatgagggtatcaaagg

SEQ ID NO: 3903356 - DNA, 25 bp, Homo sapien
ccatacactgccagactaaagccca

SEQ ID NO: 3903357 - DNA, 25 bp, Homo sapien
catagagtggtagctggccccatac

SEQ ID NO: 3903358 - DNA, 25 bp, Homo sapien
tcgtgccatcgagctcatagagtgg

SEQ ID NO: 3903359 - DNA, 25 bp, Homo sapien
ccatcctcagagaacgctgctcgtg

SEQ ID NO: 3903360 - DNA, 25 bp, Homo sapien
agcatatgggcccttccaccctttt

SEQ ID NO: 3903361 - DNA, 25 bp, Homo sapien
cacccttttcaagttacaagtagct

SEQ ID NO: 3903362 - DNA, 25 bp, Homo sapien
tcaagttacaagtagctgtgcttct

SEQ ID NO: 3903363 - DNA, 25 bp, Homo sapien
gctggaaagacagcatatgggccct

SEQ ID NO: 3903364 - DNA, 25 bp, Homo sapien
atggctgtcagtaggatcacatcct

SEQ ID NO: 3903365 - DNA, 25 bp, Homo sapien
tggctgtcagtaggatcacatcctt

SEQ ID NO: 3903366 - DNA, 25 bp, Homo sapien
ccagaaggaccagacatagagagag

SEQ ID NO: 3903367 - DNA, 25 bp, Homo sapien
gccagaaggaccagacatagagaga

SEQ ID NO: 3903368 - DNA, 25 bp, Homo sapien
ttagatgccccttcttgggagcgcc

SEQ ID NO: 3903369 - DNA, 25 bp, Homo sapien
tagatgccccttcttgggagcgccc

SEQ ID NO: 3903370 - DNA, 25 bp, Homo sapien
agcaagatgcagggaataaaagatg

SEQ ID NO: 3903371 - DNA, 25 bp, Homo sapien
tacaagagaaacggtaacttgaagc

SEQ ID NO: 3903372 - DNA, 25 bp, Homo sapien
cacaggaggtaaagggcccggcctg

SEQ ID NO: 3903373 - DNA, 25 bp, Homo sapien
ataaccgcttcatctgccgccgctc

SEQ ID NO: 3903374 - DNA, 25 bp, Homo sapien
tataaccgcttcatctgccgccgct

SEQ ID NO: 3903375 - DNA, 25 bp, Homo sapien
ctataaccgcttcatctgccgccgc

SEQ ID NO: 3903376 - DNA, 25 bp, Homo sapien
ctggactagaccctcattgctccag

SEQ ID NO: 3903377 - DNA, 25 bp, Homo sapien
tttggcccctggactagaccctcat

SEQ ID NO: 3903378 - DNA, 25 bp, Homo sapien
taagtatacccaatacctcagactg

SEQ ID NO: 3903379 - DNA, 25 bp, Homo sapien
cagtggcctgtggccacaatgtcaa

SEQ ID NO: 3903380 - DNA, 25 bp, Homo sapien
ggagggacagcctgatatgcccatt

SEQ ID NO: 3903381 - DNA, 25 bp, Homo sapien
taccagacatgccaagggagggaca

SEQ ID NO: 3903382 - DNA, 25 bp, Homo sapien
taagagtccttgtctagactcaaga

SEQ ID NO: 3903383 - DNA, 25 bp, Homo sapien
tatgcccattgggacagctatcccc

SEQ ID NO: 3903384 - DNA, 25 bp, Homo sapien
tgccagcggaagagctctaagcctg

SEQ ID NO: 3903385 - DNA, 25 bp, Homo sapien
acctcgtgccactgccagcggaaga

SEQ ID NO: 3903386 - DNA, 25 bp, Homo sapien
cttctgggtgggctcttcggccgcc

SEQ ID NO: 3903387 - DNA, 25 bp, Homo sapien
aggtagggcgcctccacctcgtgcc

SEQ ID NO: 3903388 - DNA, 25 bp, Homo sapien
cagagatgttactttccgagacagg

SEQ ID NO: 3903389 - DNA, 25 bp, Homo sapien
agttgtcaaagaacagcctgctagg

SEQ ID NO: 3903390 - DNA, 25 bp, Homo sapien
cagcgcctgttgtgaaggcattcca

SEQ ID NO: 3903391 - DNA, 25 bp, Homo sapien
tagcctgagtccaacacaataggag

SEQ ID NO: 3903392 - DNA, 25 bp, Homo sapien
gggtccaccgccgagatgaggctcc

SEQ ID NO: 3903393 - DNA, 25 bp, Homo sapien
agagtctcattgacgtgcacctcct

SEQ ID NO: 3903394 - DNA, 25 bp, Homo sapien
tcaaagacagctagcacggccacgg

SEQ ID NO: 3903395 - DNA, 25 bp, Homo sapien
gcagggactcgccaaagacgatgat

SEQ ID NO: 3903396 - DNA, 25 bp, Homo sapien
caaaggagttgcagaccttgtacag

SEQ ID NO: 3903397 - DNA, 25 bp, Homo sapien
aggagttgcagaccttgtacagcac

SEQ ID NO: 3903398 - DNA, 25 bp, Homo sapien
tccacaaaggagttgcagaccttgt

SEQ ID NO: 3903399 - DNA, 25 bp, Homo sapien
cacaaaggagttgcagaccttgtac

SEQ ID NO: 3903400 - DNA, 25 bp, Homo sapien
gcagacctccaatgccagctgggag

SEQ ID NO: 3903401 - DNA, 25 bp, Homo sapien
gggaggcagacctccaatgccagct

SEQ ID NO: 3903402 - DNA, 25 bp, Homo sapien
gaggcaacccgaatagcctcttctg

SEQ ID NO: 3903403 - DNA, 25 bp, Homo sapien
ttctctatagaggagatgaggcaac

SEQ ID NO: 3903404 - DNA, 25 bp, Homo sapien
aggcaaagactaagcccacggctgc

SEQ ID NO: 3903405 - DNA, 25 bp, Homo sapien
tggtgaagcgtgtggtcagggccag

SEQ ID NO: 3903406 - DNA, 25 bp, Homo sapien
cttggtgaagcgtgtggtcagggcc

SEQ ID NO: 3903407 - DNA, 25 bp, Homo sapien
gcccagactgaccacaaacagggag

SEQ ID NO: 3903408 - DNA, 25 bp, Homo sapien
accagcagcggctcgatgatgcgga

SEQ ID NO: 3903409 - DNA, 25 bp, Homo sapien
cagcagtgaggtaggctgcgtaggc

SEQ ID NO: 3903410 - DNA, 25 bp, Homo sapien
agcagcggctcgatgatgcggaccc

SEQ ID NO: 3903411 - DNA, 25 bp, Homo sapien
ctgcgtaggcgaggaggaagaccag

SEQ ID NO: 3903412 - DNA, 25 bp, Homo sapien
gatgttggcctccacgtacttctta

SEQ ID NO: 3903413 - DNA, 25 bp, Homo sapien
cccacttagaagagtccacggctga

SEQ ID NO: 3903414 - DNA, 25 bp, Homo sapien
tgccaagcagcatgaagatcacggt

SEQ ID NO: 3903415 - DNA, 25 bp, Homo sapien
tgtatatttgacagttgtgcgtgac

SEQ ID NO: 3903416 - DNA, 25 bp, Homo sapien
ggatgaagatgagggtgcccagcac

SEQ ID NO: 3903417 - DNA, 25 bp, Homo sapien
gagggctcggaagaacaggatgaag

SEQ ID NO: 3903418 - DNA, 25 bp, Homo sapien
cgagggctcggaagaacaggatgaa

SEQ ID NO: 3903419 - DNA, 25 bp, Homo sapien
aacaggatgaagatgagggtgccca

SEQ ID NO: 3903420 - DNA, 25 bp, Homo sapien
agatagggagatgagctgcagggag

SEQ ID NO: 3903421 - DNA, 25 bp, Homo sapien
caaagatgtggactcagatagggag

SEQ ID NO: 3903422 - DNA, 25 bp, Homo sapien
caggtgagcaacaagaggaggctta

SEQ ID NO: 3903423 - DNA, 25 bp, Homo sapien
tgacaaagatgtggactcagatagg

SEQ ID NO: 3903424 - DNA, 25 bp, Homo sapien
tgggagcaaagcgttgggagtggag

SEQ ID NO: 3903425 - DNA, 25 bp, Homo sapien
tggaggacgtgggaccggatgggac

SEQ ID NO: 3903426 - DNA, 25 bp, Homo sapien
gaccggatgggaccaagtatctggg

SEQ ID NO: 3903427 - DNA, 25 bp, Homo sapien
cgtgggaccggatgggaccaagtat

SEQ ID NO: 3903428 - DNA, 25 bp, Homo sapien
gggaccttggtcctatccagtagga

SEQ ID NO: 3903429 - DNA, 25 bp, Homo sapien
cagtaggatgacgagagcaaaggcc

SEQ ID NO: 3903430 - DNA, 25 bp, Homo sapien
ccagagggactagccggaactgatt

SEQ ID NO: 3903431 - DNA, 25 bp, Homo sapien
ggaactgattcagcacccaggtctg

SEQ ID NO: 3903432 - DNA, 25 bp, Homo sapien
gtgggtttgtgatgctcactcctct

SEQ ID NO: 3903433 - DNA, 25 bp, Homo sapien
tgggtttgtgatgctcactcctctt

SEQ ID NO: 3903434 - DNA, 25 bp, Homo sapien
cctccagtagtggtagccatggtgc

SEQ ID NO: 3903435 - DNA, 25 bp, Homo sapien
ctgtccctccagtagtggtagccat

SEQ ID NO: 3903436 - DNA, 25 bp, Homo sapien
gtccctccagtagtggtagccatgg

SEQ ID NO: 3903437 - DNA, 25 bp, Homo sapien
ccagtagtggtagccatggtgcccc

SEQ ID NO: 3903438 - DNA, 25 bp, Homo sapien
gcctgtagtacacatcccagatctg

SEQ ID NO: 3903439 - DNA, 25 bp, Homo sapien
tgcggtaggctgatcgtcgcatcag

SEQ ID NO: 3903440 - DNA, 25 bp, Homo sapien
gcatcccggatgttaagcctgtagt

SEQ ID NO: 3903441 - DNA, 25 bp, Homo sapien
cccagatctggtcccggatgcggta

SEQ ID NO: 3903442 - DNA, 25 bp, Homo sapien
ctgtggaagacaagacgtggcctcc

SEQ ID NO: 3903443 - DNA, 25 bp, Homo sapien
ctgggcatagaaggcagagtgagac

SEQ ID NO: 3903444 - DNA, 25 bp, Homo sapien
ttctgccacagaattgcggctgggc

SEQ ID NO: 3903445 - DNA, 25 bp, Homo sapien
acagaattgcggctgggcatagaag

SEQ ID NO: 3903446 - DNA, 25 bp, Homo sapien
tgccacagaattgcggctgggcata

SEQ ID NO: 3903447 - DNA, 25 bp, Homo sapien
ctgcaggaggcaggggacacatgtg

SEQ ID NO: 3903448 - DNA, 25 bp, Homo sapien
cgatcccggccgctgcgtactgtgt

SEQ ID NO: 3903449 - DNA, 25 bp, Homo sapien
ctacggcgcggcttgtagaggcctc

SEQ ID NO: 3903450 - DNA, 25 bp, Homo sapien
tactgtgtcaatcacctgcagatcc

SEQ ID NO: 3903451 - DNA, 25 bp, Homo sapien
gatccagacacgctccactgccact

SEQ ID NO: 3903452 - DNA, 25 bp, Homo sapien
gaaatatagggaacggaggaacatg

SEQ ID NO: 3903453 - DNA, 25 bp, Homo sapien
gaaccgattggactgaacccattga

SEQ ID NO: 3903454 - DNA, 25 bp, Homo sapien
gtaagagttcttgccacctagagag

SEQ ID NO: 3903455 - DNA, 25 bp, Homo sapien
aacaatgggatgatgggctaaagca

SEQ ID NO: 3903456 - DNA, 25 bp, Homo sapien
ttagtagcatgccacagggctctgt

SEQ ID NO: 3903457 - DNA, 25 bp, Homo sapien
ccatgtcagtctggaggaaagtctt

SEQ ID NO: 3903458 - DNA, 25 bp, Homo sapien
gcttgatccatgtcagtctggagga

SEQ ID NO: 3903459 - DNA, 25 bp, Homo sapien
cccaaaaatgcttgatccatgtcag

SEQ ID NO: 3903460 - DNA, 25 bp, Homo sapien
gattcagaactggttgagttaccat

SEQ ID NO: 3903461 - DNA, 25 bp, Homo sapien
tgtggtagccaggtgacaaaacctg

SEQ ID NO: 3903462 - DNA, 25 bp, Homo sapien
tgccccagctatcccagtgatacag

SEQ ID NO: 3903463 - DNA, 25 bp, Homo sapien
gcgcactcctcagtgttatccttag

SEQ ID NO: 3903464 - DNA, 25 bp, Homo sapien
agtctggtccctttatctcatattt

SEQ ID NO: 3903465 - DNA, 25 bp, Homo sapien
tcatctagtggtaatcccctgaaat

SEQ ID NO: 3903466 - DNA, 25 bp, Homo sapien
tctacctatgcaccaggaggtaccc

SEQ ID NO: 3903467 - DNA, 25 bp, Homo sapien
tgcttccctgaaccagttctaagag

SEQ ID NO: 3903468 - DNA, 25 bp, Homo sapien
acagccccgcctggctatgaggatg

SEQ ID NO: 3903469 - DNA, 25 bp, Homo sapien
tgacagccccgcctggctatgagga

SEQ ID NO: 3903470 - DNA, 25 bp, Homo sapien
aatgacagccccgcctggctatgag

SEQ ID NO: 3903471 - DNA, 25 bp, Homo sapien
gacagccccgcctggctatgaggat

SEQ ID NO: 3903472 - DNA, 25 bp, Homo sapien
tcttgcggggtcgtggcttgctctt

SEQ ID NO: 3903473 - DNA, 25 bp, Homo sapien
tgaagtggcgactgcagctggcttt

SEQ ID NO: 3903474 - DNA, 25 bp, Homo sapien
gctcctgcgcatcctctgagatgaa

SEQ ID NO: 3903475 - DNA, 25 bp, Homo sapien
ttcctgcggccagtcttgcggggtc

SEQ ID NO: 3903476 - DNA, 25 bp, Homo sapien
gctcccaagaggagtccctgaggga

SEQ ID NO: 3903477 - DNA, 25 bp, Homo sapien
tagggggctcaaaactgcttgctgt

SEQ ID NO: 3903478 - DNA, 25 bp, Homo sapien
gggctcaaaactgcttgctgtcagc

SEQ ID NO: 3903479 - DNA, 25 bp, Homo sapien
tccagctcccaagaggagtccctga

SEQ ID NO: 3903480 - DNA, 25 bp, Homo sapien
aactgctgtagtcatcaagcccctg

SEQ ID NO: 3903481 - DNA, 25 bp, Homo sapien
ctgtagtcatcaagcccctgaggac

SEQ ID NO: 3903482 - DNA, 25 bp, Homo sapien
gaacccaaactgctgtagtcatcaa

SEQ ID NO: 3903483 - DNA, 25 bp, Homo sapien
cccaaactgctgtagtcatcaagcc

SEQ ID NO: 3903484 - DNA, 25 bp, Homo sapien
tttcccatttgtagcctcagcattc

SEQ ID NO: 3903485 - DNA, 25 bp, Homo sapien
ttcccatttgtagcctcagcattcg

SEQ ID NO: 3903486 - DNA, 25 bp, Homo sapien
ccatttgtagcctcagcattcgcca

SEQ ID NO: 3903487 - DNA, 25 bp, Homo sapien
tttgtagcctcagcattcgccacac

SEQ ID NO: 3903488 - DNA, 25 bp, Homo sapien
ctggtggcacgagccacaaagatga

SEQ ID NO: 3903489 - DNA, 25 bp, Homo sapien
tcctcctcagactccacggttaata

SEQ ID NO: 3903490 - DNA, 25 bp, Homo sapien
gactccacggttaatatcacagcag

SEQ ID NO: 3903491 - DNA, 25 bp, Homo sapien
gccacaaagatgatcccctcatcgt

SEQ ID NO: 3903492 - DNA, 25 bp, Homo sapien
ctgagaccttgccctcttggagaac

SEQ ID NO: 3903493 - DNA, 25 bp, Homo sapien
gatgctctggttccaacccgtctgc

SEQ ID NO: 3903494 - DNA, 25 bp, Homo sapien
aagctagagcgtggatcagaaggta

SEQ ID NO: 3903495 - DNA, 25 bp, Homo sapien
tgcctctgttgaactggatgcacca

SEQ ID NO: 3903496 - DNA, 25 bp, Homo sapien
gtttccgaggacacgtacactgcca

SEQ ID NO: 3903497 - DNA, 25 bp, Homo sapien
agctgcctatagagtccccgggaaa

SEQ ID NO: 3903498 - DNA, 25 bp, Homo sapien
ttcaggtggtgacatggcagcccag

SEQ ID NO: 3903499 - DNA, 25 bp, Homo sapien
ggttcaaggtacaaaacacagggca

SEQ ID NO: 3903500 - DNA, 25 bp, Homo sapien
tctggccccatgtcaagtttcgagg

SEQ ID NO: 3903501 - DNA, 25 bp, Homo sapien
gacttttagttctgtgactcgatgc

SEQ ID NO: 3903502 - DNA, 25 bp, Homo sapien
gaatagtcctgcctaggattcccct

SEQ ID NO: 3903503 - DNA, 25 bp, Homo sapien
accactgcaggacccctgctaaggg

SEQ ID NO: 3903504 - DNA, 25 bp, Homo sapien
aaagtattggggaatgcatgacagg

SEQ ID NO: 3903505 - DNA, 25 bp, Homo sapien
gaaatgctcatctggtcctaggtgt

SEQ ID NO: 3903506 - DNA, 25 bp, Homo sapien
tcatgtgtcctgtacctgcatccag

SEQ ID NO: 3903507 - DNA, 25 bp, Homo sapien
gtctgtcatgtgcaaaaggccacct

SEQ ID NO: 3903508 - DNA, 25 bp, Homo sapien
aaaaggccacctctgttcatgtgtc

SEQ ID NO: 3903509 - DNA, 25 bp, Homo sapien
ccttcttcatgagcaggtctggctg

SEQ ID NO: 3903510 - DNA, 25 bp, Homo sapien
agccttggagttgtcctgctccatc

SEQ ID NO: 3903511 - DNA, 25 bp, Homo sapien
aggagccttcttcatgagcaggtct

SEQ ID NO: 3903512 - DNA, 25 bp, Homo sapien
gccttggagttgtcctgctccatcc

SEQ ID NO: 3903513 - DNA, 25 bp, Homo sapien
gcgctccaggaactctgctctttga

SEQ ID NO: 3903514 - DNA, 25 bp, Homo sapien
ctgggggcgctccaggaactctgct

SEQ ID NO: 3903515 - DNA, 25 bp, Homo sapien
gggcgctccaggaactctgctcttt

SEQ ID NO: 3903516 - DNA, 25 bp, Homo sapien
gggggcgctccaggaactctgctct

SEQ ID NO: 3903517 - DNA, 25 bp, Homo sapien
ctccacaaagtccggtgcaggaggc

SEQ ID NO: 3903518 - DNA, 25 bp, Homo sapien
ttctccacaaagtccggtgcaggag

SEQ ID NO: 3903519 - DNA, 25 bp, Homo sapien
tctccacaaagtccggtgcaggagg

SEQ ID NO: 3903520 - DNA, 25 bp, Homo sapien
tgggttggggcagcgaccaacggtc

SEQ ID NO: 3903521 - DNA, 25 bp, Homo sapien
ggcagcgaccaacggtcggcagctc

SEQ ID NO: 3903522 - DNA, 25 bp, Homo sapien
cagtgcgtgggttggggcagcgacc

SEQ ID NO: 3903523 - DNA, 25 bp, Homo sapien
ccgcggcgtcgcagtgcgtgggttg

SEQ ID NO: 3903524 - DNA, 25 bp, Homo sapien
tgaagtcggacagccttcgaacaga

SEQ ID NO: 3903525 - DNA, 25 bp, Homo sapien
ggcctcgacggccactacagcgcgg

SEQ ID NO: 3903526 - DNA, 25 bp, Homo sapien
ggacagccttcgaacagacggcggc

SEQ ID NO: 3903527 - DNA, 25 bp, Homo sapien
ggaaccgtgaagtcggacagccttc

SEQ ID NO: 3903528 - DNA, 25 bp, Homo sapien
tcagcgtcctcacggccacgctctg

SEQ ID NO: 3903529 - DNA, 25 bp, Homo sapien
tggccttgttgcagggcctaccgcg

SEQ ID NO: 3903530 - DNA, 25 bp, Homo sapien
ccatggcaccacgatgcctcgggtt

SEQ ID NO: 3903531 - DNA, 25 bp, Homo sapien
gtgggcctctgctccgtgcgcgccc

SEQ ID NO: 3903532 - DNA, 25 bp, Homo sapien
cacagcaaatctccagtcggtggca

SEQ ID NO: 3903533 - DNA, 25 bp, Homo sapien
aggtgccagtcttagtgccagggca

SEQ ID NO: 3903534 - DNA, 25 bp, Homo sapien
cctcctaaaggtgggcctgctcggg

SEQ ID NO: 3903535 - DNA, 25 bp, Homo sapien
tgtgaaccgcgctgaagacagtcga

SEQ ID NO: 3903536 - DNA, 25 bp, Homo sapien
gactgaggagctttctactgtgccc

SEQ ID NO: 3903537 - DNA, 25 bp, Homo sapien
gctttctactgtgcccctctgggca

SEQ ID NO: 3903538 - DNA, 25 bp, Homo sapien
ggacatggggcataggagactctcc

SEQ ID NO: 3903539 - DNA, 25 bp, Homo sapien
ggagctttctactgtgcccctctgg

SEQ ID NO: 3903540 - DNA, 25 bp, Homo sapien
tgataaagggtctccaaggcccaca

SEQ ID NO: 3903541 - DNA, 25 bp, Homo sapien
agatggcatcgccctgcttggacct

SEQ ID NO: 3903542 - DNA, 25 bp, Homo sapien
aagccagatggcatcgccctgcttg

SEQ ID NO: 3903543 - DNA, 25 bp, Homo sapien
gccagatggcatcgccctgcttgga

SEQ ID NO: 3903544 - DNA, 25 bp, Homo sapien
cagcaggcttagggaggccggatcc

SEQ ID NO: 3903545 - DNA, 25 bp, Homo sapien
agcaggcttagggaggccggatcca

SEQ ID NO: 3903546 - DNA, 25 bp, Homo sapien
ctggcaaggtggccataccactggc

SEQ ID NO: 3903547 - DNA, 25 bp, Homo sapien
ctggccagcagctcccaacagaggt

SEQ ID NO: 3903548 - DNA, 25 bp, Homo sapien
tggcaaggtggccataccactggcc

SEQ ID NO: 3903549 - DNA, 25 bp, Homo sapien
accactggccagcagctcccaacag

SEQ ID NO: 3903550 - DNA, 25 bp, Homo sapien
tacagcaggaggcggatgagttcct

SEQ ID NO: 3903551 - DNA, 25 bp, Homo sapien
ggatgcttcgcaggtacagcaggag

SEQ ID NO: 3903552 - DNA, 25 bp, Homo sapien
gctgcactcagactgaagccaggct

SEQ ID NO: 3903553 - DNA, 25 bp, Homo sapien
gctgctgcactcagactgaagccag

SEQ ID NO: 3903554 - DNA, 25 bp, Homo sapien
ctcaggctcagtctcccaaccccct

SEQ ID NO: 3903555 - DNA, 25 bp, Homo sapien
agctggctcaggctcagtctcccaa

SEQ ID NO: 3903556 - DNA, 25 bp, Homo sapien
ctggctcaggctcagtctcccaacc

SEQ ID NO: 3903557 - DNA, 25 bp, Homo sapien
ggctcaggctcagtctcccaacccc

SEQ ID NO: 3903558 - DNA, 25 bp, Homo sapien
gaagagggaagaacttggagcacaa

SEQ ID NO: 3903559 - DNA, 25 bp, Homo sapien
aacttggagcacaaattcgggcatc

SEQ ID NO: 3903560 - DNA, 25 bp, Homo sapien
cagtcccagtgcctgtacttcgggc

SEQ ID NO: 3903561 - DNA, 25 bp, Homo sapien
gcatcaactagcactgtcagtccca

SEQ ID NO: 3903562 - DNA, 25 bp, Homo sapien
ctgcaaggaacctgagctcagcact

SEQ ID NO: 3903563 - DNA, 25 bp, Homo sapien
ggtacacggcccctggggctgcttc

SEQ ID NO: 3903564 - DNA, 25 bp, Homo sapien
tgcagcccggaaggcacttccttca

SEQ ID NO: 3903565 - DNA, 25 bp, Homo sapien
gaaggcacttccttcagcagcgtgc

SEQ ID NO: 3903566 - DNA, 25 bp, Homo sapien
agcagcgtgcttcccactagcagca

SEQ ID NO: 3903567 - DNA, 25 bp, Homo sapien
ccgttgggatgtgggtcagcaggct

SEQ ID NO: 3903568 - DNA, 25 bp, Homo sapien
ggcctcctcctagcgaagtgggcag

SEQ ID NO: 3903569 - DNA, 25 bp, Homo sapien
ggcaggcctcctcctagcgaagtgg

SEQ ID NO: 3903570 - DNA, 25 bp, Homo sapien
ggcagccccgccgttgggatgtggg

SEQ ID NO: 3903571 - DNA, 25 bp, Homo sapien
caggcatgaccggagcagcatgcag

SEQ ID NO: 3903572 - DNA, 25 bp, Homo sapien
tctggttcaagccagccccagagag

SEQ ID NO: 3903573 - DNA, 25 bp, Homo sapien
tcccaagttgcctatatgactgccc

SEQ ID NO: 3903574 - DNA, 25 bp, Homo sapien
cagcatgcagtgttggtcctgggct

SEQ ID NO: 3903575 - DNA, 25 bp, Homo sapien
acagccttcacactttcgatggccc

SEQ ID NO: 3903576 - DNA, 25 bp, Homo sapien
agttctgtagtagagcttccagccg

SEQ ID NO: 3903577 - DNA, 25 bp, Homo sapien
gctgcctggcagttctgtagtagag

SEQ ID NO: 3903578 - DNA, 25 bp, Homo sapien
tcacactttcgatggccccctggag

SEQ ID NO: 3903579 - DNA, 25 bp, Homo sapien
ccatgccagccatggcgagtctagc

SEQ ID NO: 3903580 - DNA, 25 bp, Homo sapien
ggcccccctggcattgtagccatgc

SEQ ID NO: 3903581 - DNA, 25 bp, Homo sapien
gccagccatggcgagtctagcacct

SEQ ID NO: 3903582 - DNA, 25 bp, Homo sapien
agccatggcgagtctagcacctgct

SEQ ID NO: 3903583 - DNA, 25 bp, Homo sapien
cagggtcagttggtgcagcaatcca

SEQ ID NO: 3903584 - DNA, 25 bp, Homo sapien
tgtttggaccaactctagggcctgt

SEQ ID NO: 3903585 - DNA, 25 bp, Homo sapien
tagggcctgtattcgctggttgctc

SEQ ID NO: 3903586 - DNA, 25 bp, Homo sapien
tccacccggtcatatagctcgtcag

SEQ ID NO: 3903587 - DNA, 25 bp, Homo sapien
ggctcacgtctgagatcggggcagg

SEQ ID NO: 3903588 - DNA, 25 bp, Homo sapien
actgggggctcacgtctgagatcgg

SEQ ID NO: 3903589 - DNA, 25 bp, Homo sapien
aaagtgaagagagctgctatggact

SEQ ID NO: 3903590 - DNA, 25 bp, Homo sapien
cccactctgggcaagtagttccgac

SEQ ID NO: 3903591 - DNA, 25 bp, Homo sapien
ctggtacagctcctgaaaagagcct

SEQ ID NO: 3903592 - DNA, 25 bp, Homo sapien
tggagcagcatgtccagcgagggct

SEQ ID NO: 3903593 - DNA, 25 bp, Homo sapien
gagcagcatgtccagcgagggctcc

SEQ ID NO: 3903594 - DNA, 25 bp, Homo sapien
cagctcctgaaaagagccttgggcc

SEQ ID NO: 3903595 - DNA, 25 bp, Homo sapien
tcccaatacccgtggcatgaacaag

SEQ ID NO: 3903596 - DNA, 25 bp, Homo sapien
atacccgtggcatgaacaagtgacc

SEQ ID NO: 3903597 - DNA, 25 bp, Homo sapien
tgcatcccaatacccgtggcatgaa

SEQ ID NO: 3903598 - DNA, 25 bp, Homo sapien
ctggcattgcatcccaatacccgtg

SEQ ID NO: 3903599 - DNA, 25 bp, Homo sapien
ctaagaaagcaaaggattgaattgc

SEQ ID NO: 3903600 - DNA, 25 bp, Homo sapien
gactataaggtctaagaaagcaaag

SEQ ID NO: 3903601 - DNA, 25 bp, Homo sapien
ttctctccagagatcttgcctgggt

SEQ ID NO: 3903602 - DNA, 25 bp, Homo sapien
tacaactgatatcttctatgggact

SEQ ID NO: 3903603 - DNA, 25 bp, Homo sapien
cagactcagatacttcctgctgaca

SEQ ID NO: 3903604 - DNA, 25 bp, Homo sapien
ggtctagcccccagactcagatact

SEQ ID NO: 3903605 - DNA, 25 bp, Homo sapien
gagacagagactaggctcagccagc

SEQ ID NO: 3903606 - DNA, 25 bp, Homo sapien
cagcccaggcctggcggtctagccc

SEQ ID NO: 3903607 - DNA, 25 bp, Homo sapien
ctgggccaaagccctagagaattca

SEQ ID NO: 3903608 - DNA, 25 bp, Homo sapien
gctgaaacagcctctcagcatccgc

SEQ ID NO: 3903609 - DNA, 25 bp, Homo sapien
tcccagccagtcagcggctgcagaa

SEQ ID NO: 3903610 - DNA, 25 bp, Homo sapien
gctcgcagggccagaaagcgtgccc

SEQ ID NO: 3903611 - DNA, 25 bp, Homo sapien
gcccaccggtggtagcttcagtgaa

SEQ ID NO: 3903612 - DNA, 25 bp, Homo sapien
cacatctttcggaagtgggcaggag

SEQ ID NO: 3903613 - DNA, 25 bp, Homo sapien
aggctagctgtgctgcccaccggtg

SEQ ID NO: 3903614 - DNA, 25 bp, Homo sapien
actcctggcggatggcctctgagcc

SEQ ID NO: 3903615 - DNA, 25 bp, Homo sapien
gccccagattccgatcgaagctgta

SEQ ID NO: 3903616 - DNA, 25 bp, Homo sapien
cggcaggcagcaatagtggccgcat

SEQ ID NO: 3903617 - DNA, 25 bp, Homo sapien
tctggtctgcggcaggcagcaatag

SEQ ID NO: 3903618 - DNA, 25 bp, Homo sapien
gattccgatcgaagctgtaggcctt

SEQ ID NO: 3903619 - DNA, 25 bp, Homo sapien
gggaaatagttctccatagtgtact

SEQ ID NO: 3903620 - DNA, 25 bp, Homo sapien
gtgccgggtgcaagcctccagctca

SEQ ID NO: 3903621 - DNA, 25 bp, Homo sapien
tggcagtggaagtcccgcagcttct

SEQ ID NO: 3903622 - DNA, 25 bp, Homo sapien
caggaaggcataggccactcgtggt

SEQ ID NO: 3903623 - DNA, 25 bp, Homo sapien
caacttcgggagtgtggcagaacga

SEQ ID NO: 3903624 - DNA, 25 bp, Homo sapien
tactggactaagagcaccctcaggt

SEQ ID NO: 3903625 - DNA, 25 bp, Homo sapien
gctctaagagctcacctcacctggg

SEQ ID NO: 3903626 - DNA, 25 bp, Homo sapien
gctatactcatagcacagggactgg

SEQ ID NO: 3903627 - DNA, 25 bp, Homo sapien
tcttgctgtagagcgcgtacatccc

SEQ ID NO: 3903628 - DNA, 25 bp, Homo sapien
cttgaagaaggtgtgcccatagctt

SEQ ID NO: 3903629 - DNA, 25 bp, Homo sapien
acatcagggcatcggagcgaggctt

SEQ ID NO: 3903630 - DNA, 25 bp, Homo sapien
gtgtgcccatagcttgacatcaggg

SEQ ID NO: 3903631 - DNA, 25 bp, Homo sapien
cccatgcgctggatgggctttagca

SEQ ID NO: 3903632 - DNA, 25 bp, Homo sapien
cagctggaagtgcacaaggctctgg

SEQ ID NO: 3903633 - DNA, 25 bp, Homo sapien
tgcagcagcagtgcgtacttgccca

SEQ ID NO: 3903634 - DNA, 25 bp, Homo sapien
catggccagcaggtcgtttccgtgc

SEQ ID NO: 3903635 - DNA, 25 bp, Homo sapien
actgcccttgccctgggatgactca

SEQ ID NO: 3903636 - DNA, 25 bp, Homo sapien
tggtgggtggccagcctcttctgcc

SEQ ID NO: 3903637 - DNA, 25 bp, Homo sapien
ttcacacccactgcccttgccctgg

SEQ ID NO: 3903638 - DNA, 25 bp, Homo sapien
tgggtggccagcctcttctgccttc

SEQ ID NO: 3903639 - DNA, 25 bp, Homo sapien
tgtaggcaaatgtgtcaacccctgt

SEQ ID NO: 3903640 - DNA, 25 bp, Homo sapien
cccctgtgggcccatggcgaggctt

SEQ ID NO: 3903641 - DNA, 25 bp, Homo sapien
ctcaaaaaggaagatgcggcgcacg

SEQ ID NO: 3903642 - DNA, 25 bp, Homo sapien
cgcacggacttgtggcgcccagtgc

SEQ ID NO: 3903643 - DNA, 25 bp, Homo sapien
agagaggggcttggtaaggcatggg

SEQ ID NO: 3903644 - DNA, 25 bp, Homo sapien
aaggcatggggcgggaaaacaagtg

SEQ ID NO: 3903645 - DNA, 25 bp, Homo sapien
gagagaggggcttggtaaggcatgg

SEQ ID NO: 3903646 - DNA, 25 bp, Homo sapien
catggggcgggaaaacaagtggtgg

SEQ ID NO: 3903647 - DNA, 25 bp, Homo sapien
tggacggcctgcctccaaagcaggt

SEQ ID NO: 3903648 - DNA, 25 bp, Homo sapien
cggcggcggaaccagatctcgaagc

SEQ ID NO: 3903649 - DNA, 25 bp, Homo sapien
gtgtccctggccttgcggcggcgga

SEQ ID NO: 3903650 - DNA, 25 bp, Homo sapien
cgaagcgcaggttgctgttcccaca

SEQ ID NO: 3903651 - DNA, 25 bp, Homo sapien
tgggagcaatgtctcggaaggcctt

SEQ ID NO: 3903652 - DNA, 25 bp, Homo sapien
gacaccatctcagccatgcgcacct

SEQ ID NO: 3903653 - DNA, 25 bp, Homo sapien
cacttcaggacatagttgacggtgc

SEQ ID NO: 3903654 - DNA, 25 bp, Homo sapien
gccttgttccccacacccatggaca

SEQ ID NO: 3903655 - DNA, 25 bp, Homo sapien
gcaatggacgcccgagagcgaactt

SEQ ID NO: 3903656 - DNA, 25 bp, Homo sapien
tcaaacggggctacggcaatggacg

SEQ ID NO: 3903657 - DNA, 25 bp, Homo sapien
tgtcatggtcaaacggggctacggc

SEQ ID NO: 3903658 - DNA, 25 bp, Homo sapien
gcaggttgagggaccccagaacaga

SEQ ID NO: 3903659 - DNA, 25 bp, Homo sapien
ggaagctgggatacaggggacagcg

SEQ ID NO: 3903660 - DNA, 25 bp, Homo sapien
tgggaagctgggatacaggggacag

SEQ ID NO: 3903661 - DNA, 25 bp, Homo sapien
aagctgggatacaggggacagcgga

SEQ ID NO: 3903662 - DNA, 25 bp, Homo sapien
gaagctgggatacaggggacagcgg

SEQ ID NO: 3903663 - DNA, 25 bp, Homo sapien
tgggcattgggacgagatctctgag

SEQ ID NO: 3903664 - DNA, 25 bp, Homo sapien
gggacgagatctctgagtcctcagc

SEQ ID NO: 3903665 - DNA, 25 bp, Homo sapien
gacgagatctctgagtcctcagcag

SEQ ID NO: 3903666 - DNA, 25 bp, Homo sapien
cattgggacgagatctctgagtcct

SEQ ID NO: 3903667 - DNA, 25 bp, Homo sapien
caagctctacccaaagtaaaggcct

SEQ ID NO: 3903668 - DNA, 25 bp, Homo sapien
ggaagggctggtgggtatagggcaa

SEQ ID NO: 3903669 - DNA, 25 bp, Homo sapien
ctacccaaagtaaaggcctagcctg

SEQ ID NO: 3903670 - DNA, 25 bp, Homo sapien
tgggtatagggcaaatggcactcac

SEQ ID NO: 3903671 - DNA, 25 bp, Homo sapien
ggctgctggatctactgctcgtcca

SEQ ID NO: 3903672 - DNA, 25 bp, Homo sapien
gatctactgctcgtccagtcccggg

SEQ ID NO: 3903673 - DNA, 25 bp, Homo sapien
tgctggatctactgctcgtccagtc

SEQ ID NO: 3903674 - DNA, 25 bp, Homo sapien
gcaggctgctggatctactgctcgt

SEQ ID NO: 3903675 - DNA, 25 bp, Homo sapien
acaaccagacttccctagagaggcc

SEQ ID NO: 3903676 - DNA, 25 bp, Homo sapien
tgcacatgtaggttggaggtagccc

SEQ ID NO: 3903677 - DNA, 25 bp, Homo sapien
agagaggccccgtgccagttagtcc

SEQ ID NO: 3903678 - DNA, 25 bp, Homo sapien
catcagaaagggtagtcaacagcgt

SEQ ID NO: 3903679 - DNA, 25 bp, Homo sapien
cccaatgtctgctctagcctattct

SEQ ID NO: 3903680 - DNA, 25 bp, Homo sapien
acccaatgtctgctctagcctattc

SEQ ID NO: 3903681 - DNA, 25 bp, Homo sapien
atgtctgctctagcctattcttaac

SEQ ID NO: 3903682 - DNA, 25 bp, Homo sapien
caatgtctgctctagcctattctta

SEQ ID NO: 3903683 - DNA, 25 bp, Homo sapien
ggacctgtccctatggtaactgagc

SEQ ID NO: 3903684 - DNA, 25 bp, Homo sapien
ccaaaggcctaacaaccagtaagat

SEQ ID NO: 3903685 - DNA, 25 bp, Homo sapien
gactccttctctgagacaccaaagg

SEQ ID NO: 3903686 - DNA, 25 bp, Homo sapien
aactgagctcggctttaaggccagg

SEQ ID NO: 3903687 - DNA, 25 bp, Homo sapien
cctcccagggtacttcaggcagaga

SEQ ID NO: 3903688 - DNA, 25 bp, Homo sapien
ggtatgtgtgacaggcctcaggccc

SEQ ID NO: 3903689 - DNA, 25 bp, Homo sapien
taaggccctagctattgacagatgt

SEQ ID NO: 3903690 - DNA, 25 bp, Homo sapien
ggtctccctggccaatcggctgtgg

SEQ ID NO: 3903691 - DNA, 25 bp, Homo sapien
caaggctaagggaaacctggtcagg

SEQ ID NO: 3903692 - DNA, 25 bp, Homo sapien
tgtccctatgccgaaatgccaagag

SEQ ID NO: 3903693 - DNA, 25 bp, Homo sapien
tgacaggactccatggaacaaggct

SEQ ID NO: 3903694 - DNA, 25 bp, Homo sapien
cactgccgtggcttgtgtaccaatc

SEQ ID NO: 3903695 - DNA, 25 bp, Homo sapien
ggaagtgtattagcaaaccctcaga

SEQ ID NO: 3903696 - DNA, 25 bp, Homo sapien
taaaagcccagcctttacaggtgaa

SEQ ID NO: 3903697 - DNA, 25 bp, Homo sapien
agggaaacaccatctacgcgtacgg

SEQ ID NO: 3903698 - DNA, 25 bp, Homo sapien
gagcatctctgaactactggcgtac

SEQ ID NO: 3903699 - DNA, 25 bp, Homo sapien
agctcccattgctccgccatccccg

SEQ ID NO: 3903700 - DNA, 25 bp, Homo sapien
cccaggcggcgaatgccttcctcgt

SEQ ID NO: 3903701 - DNA, 25 bp, Homo sapien
cccccaggcggcgaatgccttcctc

SEQ ID NO: 3903702 - DNA, 25 bp, Homo sapien
caggcggcgaatgccttcctcgtcc

SEQ ID NO: 3903703 - DNA, 25 bp, Homo sapien
taaggctagtgatcaaattccttga

SEQ ID NO: 3903704 - DNA, 25 bp, Homo sapien
gatccctgcaatgaaagagactcca

SEQ ID NO: 3903705 - DNA, 25 bp, Homo sapien
tggaatggattttgccagcataaga

SEQ ID NO: 3903706 - DNA, 25 bp, Homo sapien
ccttgataaatctaaggatcggaga

SEQ ID NO: 3903707 - DNA, 25 bp, Homo sapien
ccagagtttgtagtgtatatacagc

SEQ ID NO: 3903708 - DNA, 25 bp, Homo sapien
ggttgtagacgggacacttccacta

SEQ ID NO: 3903709 - DNA, 25 bp, Homo sapien
tatacagcaaagagcctataatctg

SEQ ID NO: 3903710 - DNA, 25 bp, Homo sapien
tataaattcaggtcttggagtgaac

SEQ ID NO: 3903711 - DNA, 25 bp, Homo sapien
agaaaaccatattcgcagaggaaaa

SEQ ID NO: 3903712 - DNA, 25 bp, Homo sapien
ttggcatagacataactagtagtta

SEQ ID NO: 3903713 - DNA, 25 bp, Homo sapien
ccatattcgcagaggaaaaattagg

SEQ ID NO: 3903714 - DNA, 25 bp, Homo sapien
atattcgcagaggaaaaattaggac

SEQ ID NO: 3903715 - DNA, 25 bp, Homo sapien
gaggcaaaaaccgtggtctgagcat

SEQ ID NO: 3903716 - DNA, 25 bp, Homo sapien
ggaggcaaaaaccgtggtctgagca

SEQ ID NO: 3903717 - DNA, 25 bp, Homo sapien
ctggaggcaaaaaccgtggtctgag

SEQ ID NO: 3903718 - DNA, 25 bp, Homo sapien
tggaggcaaaaaccgtggtctgagc

SEQ ID NO: 3903719 - DNA, 25 bp, Homo sapien
ctctcaccttcacgtacagttcggt

SEQ ID NO: 3903720 - DNA, 25 bp, Homo sapien
tcaccttcacgtacagttcggtcat

SEQ ID NO: 3903721 - DNA, 25 bp, Homo sapien
ttcactgttgcccaactgactaaaa

SEQ ID NO: 3903722 - DNA, 25 bp, Homo sapien
tgactaaaatgcagcttggcagctt

SEQ ID NO: 3903723 - DNA, 25 bp, Homo sapien
agagctctcacctgttacacagttt

SEQ ID NO: 3903724 - DNA, 25 bp, Homo sapien
ccatttcaatcctgctgtcaacatt

SEQ ID NO: 3903725 - DNA, 25 bp, Homo sapien
caatcctgctgtcaacattagcact

SEQ ID NO: 3903726 - DNA, 25 bp, Homo sapien
atttcaatcctgctgtcaacattag

SEQ ID NO: 3903727 - DNA, 25 bp, Homo sapien
atcctgctgtcaacattagcactga

SEQ ID NO: 3903728 - DNA, 25 bp, Homo sapien
ccaggaggtagaggttgcagtgagc

SEQ ID NO: 3903729 - DNA, 25 bp, Homo sapien
cgagatcgcgccacagcactccagt

SEQ ID NO: 3903730 - DNA, 25 bp, Homo sapien
taatcccagctgctcgctaggctga

SEQ ID NO: 3903731 - DNA, 25 bp, Homo sapien
ggcaggagaactgcttgaacccagg

SEQ ID NO: 3903732 - DNA, 25 bp, Homo sapien
ttgcagaagtacttagggaatcctt

SEQ ID NO: 3903733 - DNA, 25 bp, Homo sapien
taccattgccctgagttgcagaagt

SEQ ID NO: 3903734 - DNA, 25 bp, Homo sapien
gggaaggtgtctaatttctgatcac

SEQ ID NO: 3903735 - DNA, 25 bp, Homo sapien
tctgatcacgtgtaccattgccctg

SEQ ID NO: 3903736 - DNA, 25 bp, Homo sapien
acttggcatctcccttcttgctact

SEQ ID NO: 3903737 - DNA, 25 bp, Homo sapien
ttcctggtgattgtcacttggcatc

SEQ ID NO: 3903738 - DNA, 25 bp, Homo sapien
ttggcatctcccttcttgctacttc

SEQ ID NO: 3903739 - DNA, 25 bp, Homo sapien
catcttcctggtgattgtcacttgg

SEQ ID NO: 3903740 - DNA, 25 bp, Homo sapien
ctgtggactgacgaggcgagtagtg

SEQ ID NO: 3903741 - DNA, 25 bp, Homo sapien
tgtggactgacgaggcgagtagtgt

SEQ ID NO: 3903742 - DNA, 25 bp, Homo sapien
gactgacgaggcgagtagtgtctga

SEQ ID NO: 3903743 - DNA, 25 bp, Homo sapien
tggactgacgaggcgagtagtgtct

SEQ ID NO: 3903744 - DNA, 25 bp, Homo sapien
aaagatacttggtacccttctctag

SEQ ID NO: 3903745 - DNA, 25 bp, Homo sapien
gaagttaataagtctccacaggaat

SEQ ID NO: 3903746 - DNA, 25 bp, Homo sapien
caggcatttactcaatgaggcatca

SEQ ID NO: 3903747 - DNA, 25 bp, Homo sapien
ccaagacttccatgcagggatagag

SEQ ID NO: 3903748 - DNA, 25 bp, Homo sapien
ggagacaacagcagtgtccgcagag

SEQ ID NO: 3903749 - DNA, 25 bp, Homo sapien
tacagcagggtcactgttgaaatgg

SEQ ID NO: 3903750 - DNA, 25 bp, Homo sapien
gatgggcttagtgacctcttggtaa

SEQ ID NO: 3903751 - DNA, 25 bp, Homo sapien
gacagcgttgtttgggacagaacca

SEQ ID NO: 3903752 - DNA, 25 bp, Homo sapien
ttcccaacagaaccctcattctggt

SEQ ID NO: 3903753 - DNA, 25 bp, Homo sapien
tcccaacagaaccctcattctggtc

SEQ ID NO: 3903754 - DNA, 25 bp, Homo sapien
cctggccactaggatattttataaa

SEQ ID NO: 3903755 - DNA, 25 bp, Homo sapien
ctaaaaatcccttggataatctaat

SEQ ID NO: 3903756 - DNA, 25 bp, Homo sapien
tatattgtttatgtgggaatggttc

SEQ ID NO: 3903757 - DNA, 25 bp, Homo sapien
tcccttggataatctaattcatctt

SEQ ID NO: 3903758 - DNA, 25 bp, Homo sapien
tggatggatcttcctcatgatggaa

SEQ ID NO: 3903759 - DNA, 25 bp, Homo sapien
caaatggttcctatggcaaaggttc

SEQ ID NO: 3903760 - DNA, 25 bp, Homo sapien
aagggaagagaagactctaagagct

SEQ ID NO: 3903761 - DNA, 25 bp, Homo sapien
tcttgtctggtaaaataggcatagg

SEQ ID NO: 3903762 - DNA, 25 bp, Homo sapien
tatattcaagcagctcttttaaagc

SEQ ID NO: 3903763 - DNA, 25 bp, Homo sapien
tttatattcaagcagctcttttaaa

SEQ ID NO: 3903764 - DNA, 25 bp, Homo sapien
atattcaagcagctcttttaaagct

SEQ ID NO: 3903765 - DNA, 25 bp, Homo sapien
ttatattcaagcagctcttttaaag

SEQ ID NO: 3903766 - DNA, 25 bp, Homo sapien
gtggtttccagccaaaccgtgcaaa

SEQ ID NO: 3903767 - DNA, 25 bp, Homo sapien
caaaccgtgcaaactacccaggtca

SEQ ID NO: 3903768 - DNA, 25 bp, Homo sapien
agccaaaccgtgcaaactacccagg

SEQ ID NO: 3903769 - DNA, 25 bp, Homo sapien
tttccagccaaaccgtgcaaactac

SEQ ID NO: 3903770 - DNA, 25 bp, Homo sapien
ccattccagtgcttatccacaagct

SEQ ID NO: 3903771 - DNA, 25 bp, Homo sapien
attccagtgcttatccacaagctcc

SEQ ID NO: 3903772 - DNA, 25 bp, Homo sapien
cattccagtgcttatccacaagctc

SEQ ID NO: 3903773 - DNA, 25 bp, Homo sapien
ggatgtgagcaacacctcggctgag

SEQ ID NO: 3903774 - DNA, 25 bp, Homo sapien
aggagccgggactaccaaagacaga

SEQ ID NO: 3903775 - DNA, 25 bp, Homo sapien
caacacctcggctgagaaggagccg

SEQ ID NO: 3903776 - DNA, 25 bp, Homo sapien
gaaggagccgggactaccaaagaca

SEQ ID NO: 3903777 - DNA, 25 bp, Homo sapien
tcattagggaccagctgcgcagcct

SEQ ID NO: 3903778 - DNA, 25 bp, Homo sapien
tgtcattagggaccagctgcgcagc

SEQ ID NO: 3903779 - DNA, 25 bp, Homo sapien
accagctgcgcagcctccttcagtt

SEQ ID NO: 3903780 - DNA, 25 bp, Homo sapien
catgtcattagggaccagctgcgca

SEQ ID NO: 3903781 - DNA, 25 bp, Homo sapien
gatcattaaggcagagatgttgtag

SEQ ID NO: 3903782 - DNA, 25 bp, Homo sapien
tcattaaggcagagatgttgtagtt

SEQ ID NO: 3903783 - DNA, 25 bp, Homo sapien
gctgatcattaaggcagagatgttg

SEQ ID NO: 3903784 - DNA, 25 bp, Homo sapien
tgctgatcattaaggcagagatgtt

SEQ ID NO: 3903785 - DNA, 25 bp, Homo sapien
gtatgtgactgttgcccactcacaa

SEQ ID NO: 3903786 - DNA, 25 bp, Homo sapien
tgttgcccactcacaattgagatgg

SEQ ID NO: 3903787 - DNA, 25 bp, Homo sapien
tttctgacaaaatgaggttttcctc

SEQ ID NO: 3903788 - DNA, 25 bp, Homo sapien
ccagcactctgaccagtttttgctt

SEQ ID NO: 3903789 - DNA, 25 bp, Homo sapien
cagctgttggtttttgtgcagaaga

SEQ ID NO: 3903790 - DNA, 25 bp, Homo sapien
tgttggtttttgtgcagaagatcat

SEQ ID NO: 3903791 - DNA, 25 bp, Homo sapien
ggtcagctgttggtttttgtgcaga

SEQ ID NO: 3903792 - DNA, 25 bp, Homo sapien
gctgttggtttttgtgcagaagatc

SEQ ID NO: 3903793 - DNA, 25 bp, Homo sapien
atggagaatggcaactgtcttctcc

SEQ ID NO: 3903794 - DNA, 25 bp, Homo sapien
tcatggagaatggcaactgtcttct

SEQ ID NO: 3903795 - DNA, 25 bp, Homo sapien
aagctcctggttcaggcaagccacc

SEQ ID NO: 3903796 - DNA, 25 bp, Homo sapien
catggagaatggcaactgtcttctc

SEQ ID NO: 3903797 - DNA, 25 bp, Homo sapien
aggaaacaacgcactttgagttctt

SEQ ID NO: 3903798 - DNA, 25 bp, Homo sapien
caggcacgcgccttaaactttaata

SEQ ID NO: 3903799 - DNA, 25 bp, Homo sapien
tgctgttctttaaggactgatgctg

SEQ ID NO: 3903800 - DNA, 25 bp, Homo sapien
tgaggccccacttgtttagcaagct

SEQ ID NO: 3903801 - DNA, 25 bp, Homo sapien
tgaggcccaagggaaaaaggcagtc

SEQ ID NO: 3903802 - DNA, 25 bp, Homo sapien
ctgaggcccaagggaaaaaggcagt

SEQ ID NO: 3903803 - DNA, 25 bp, Homo sapien
cagatactcattagttaccaccagg

SEQ ID NO: 3903804 - DNA, 25 bp, Homo sapien
gatactcattagttaccaccaggga

SEQ ID NO: 3903805 - DNA, 25 bp, Homo sapien
gctgcagcagatactcattagttac

SEQ ID NO: 3903806 - DNA, 25 bp, Homo sapien
cagcagatactcattagttaccacc

SEQ ID NO: 3903807 - DNA, 25 bp, Homo sapien
ttcccaaagggcgatgatctcccca

SEQ ID NO: 3903808 - DNA, 25 bp, Homo sapien
ggcaggagcgctttcccggaataac

SEQ ID NO: 3903809 - DNA, 25 bp, Homo sapien
agatgatgacccttctcaggaggca

SEQ ID NO: 3903810 - DNA, 25 bp, Homo sapien
ggaggaagacaacgtgcttttccca

SEQ ID NO: 3903811 - DNA, 25 bp, Homo sapien
gggcagcatccaagacgctctgtat

SEQ ID NO: 3903812 - DNA, 25 bp, Homo sapien
tccaagacgctctgtattagatact

SEQ ID NO: 3903813 - DNA, 25 bp, Homo sapien
aagacgctctgtattagatactgac

SEQ ID NO: 3903814 - DNA, 25 bp, Homo sapien
gcatccaagacgctctgtattagat

SEQ ID NO: 3903815 - DNA, 25 bp, Homo sapien
gggaagctgtggtgtgagttccatg

SEQ ID NO: 3903816 - DNA, 25 bp, Homo sapien
tggaccagggaagctgtggtgtgag

SEQ ID NO: 3903817 - DNA, 25 bp, Homo sapien
ctgtggaccagggaagctgtggtgt

SEQ ID NO: 3903818 - DNA, 25 bp, Homo sapien
ctgtggtgtgagttccatgctagct

SEQ ID NO: 3903819 - DNA, 25 bp, Homo sapien
caccatactggtggcaatggcggtg

SEQ ID NO: 3903820 - DNA, 25 bp, Homo sapien
catactggtggcaatggcggtgaga

SEQ ID NO: 3903821 - DNA, 25 bp, Homo sapien
atactggtggcaatggcggtgagag

SEQ ID NO: 3903822 - DNA, 25 bp, Homo sapien
ctggtggcaatggcggtgagagcct

SEQ ID NO: 3903823 - DNA, 25 bp, Homo sapien
ttctttcttaatctttgtgagtaca

SEQ ID NO: 3903824 - DNA, 25 bp, Homo sapien
acatttctttcttaatctttgtgag

SEQ ID NO: 3903825 - DNA, 25 bp, Homo sapien
tttcttaatctttgtgagtacatac

SEQ ID NO: 3903826 - DNA, 25 bp, Homo sapien
cagaatacatttctttcttaatctt

SEQ ID NO: 3903827 - DNA, 25 bp, Homo sapien
gggatgcaaggccactggctgatgc

SEQ ID NO: 3903828 - DNA, 25 bp, Homo sapien
cagggatgcaaggccactggctgat

SEQ ID NO: 3903829 - DNA, 25 bp, Homo sapien
tcagggatgcaaggccactggctga

SEQ ID NO: 3903830 - DNA, 25 bp, Homo sapien
gatgcaaggccactggctgatgctc

SEQ ID NO: 3903831 - DNA, 25 bp, Homo sapien
tgatccagtcgtcaaaggagcccct

SEQ ID NO: 3903832 - DNA, 25 bp, Homo sapien
ccagggctggacactacttgtgggc

SEQ ID NO: 3903833 - DNA, 25 bp, Homo sapien
gcagtgacttgagggaggcaaaccc

SEQ ID NO: 3903834 - DNA, 25 bp, Homo sapien
gacttcttgagctggctagggcctg

SEQ ID NO: 3903835 - DNA, 25 bp, Homo sapien
gatgcttcgaggacctgtgcccgtt

SEQ ID NO: 3903836 - DNA, 25 bp, Homo sapien
tctgctaacatggaggagtcactac

SEQ ID NO: 3903837 - DNA, 25 bp, Homo sapien
aacaagtgcgtgtgcggtttcgacc

SEQ ID NO: 3903838 - DNA, 25 bp, Homo sapien
tgtttcatggcgcatcagctaggcg

SEQ ID NO: 3903839 - DNA, 25 bp, Homo sapien
gcccagtggtgtgattgccccatcc

SEQ ID NO: 3903840 - DNA, 25 bp, Homo sapien
agtggtgtgattgccccatccctgg

SEQ ID NO: 3903841 - DNA, 25 bp, Homo sapien
tcgaatgcccctgggaatagtgaca

SEQ ID NO: 3903842 - DNA, 25 bp, Homo sapien
accgagactcgcctgagcccagtgg

SEQ ID NO: 3903843 - DNA, 25 bp, Homo sapien
agcacagtcaggagagtggagcagg

SEQ ID NO: 3903844 - DNA, 25 bp, Homo sapien
cagtcaggagagtggagcagggtgg

SEQ ID NO: 3903845 - DNA, 25 bp, Homo sapien
tgggcccagtcctggggacttgctg

SEQ ID NO: 3903846 - DNA, 25 bp, Homo sapien
gggagcacagtcaggagagtggagc

SEQ ID NO: 3903847 - DNA, 25 bp, Homo sapien
gcggaggcccaaagccgggttgaga

SEQ ID NO: 3903848 - DNA, 25 bp, Homo sapien
cttctttgctgtgatcggctttggg

SEQ ID NO: 3903849 - DNA, 25 bp, Homo sapien
tgtatccttgggaaagcgtagggct

SEQ ID NO: 3903850 - DNA, 25 bp, Homo sapien
tgggtgcccgctggctacgctgtat

SEQ ID NO: 3903851 - DNA, 25 bp, Homo sapien
gggccagcgatcccgccggaatggg

SEQ ID NO: 3903852 - DNA, 25 bp, Homo sapien
cagcgatcccgccggaatgggtgga

SEQ ID NO: 3903853 - DNA, 25 bp, Homo sapien
gcaacaagccctccaacaagacggc

SEQ ID NO: 3903854 - DNA, 25 bp, Homo sapien
cctccaacaagacggcccctgagaa

SEQ ID NO: 3903855 - DNA, 25 bp, Homo sapien
gaacctctggctgactttggcaggg

SEQ ID NO: 3903856 - DNA, 25 bp, Homo sapien
gctcccgggcgcgttgccgcccagt

SEQ ID NO: 3903857 - DNA, 25 bp, Homo sapien
tccctaccgcgagggtctgaggcgc

SEQ ID NO: 3903858 - DNA, 25 bp, Homo sapien
gggcccgaacctctggctgactttg

SEQ ID NO: 3903859 - DNA, 25 bp, Homo sapien
ccattcgttgatgatgcggacagca

SEQ ID NO: 3903860 - DNA, 25 bp, Homo sapien
ttccattcgttgatgatgcggacag

SEQ ID NO: 3903861 - DNA, 25 bp, Homo sapien
ttcgttgatgatgcggacagcatca

SEQ ID NO: 3903862 - DNA, 25 bp, Homo sapien
ttgatgatgcggacagcatcatttc

SEQ ID NO: 3903863 - DNA, 25 bp, Homo sapien
gcttgttcgggacacctgaggacac

SEQ ID NO: 3903864 - DNA, 25 bp, Homo sapien
tcccacgtggtcggctgcgccaggt

SEQ ID NO: 3903865 - DNA, 25 bp, Homo sapien
aagcctgcaggaacaccgcgaggaa

SEQ ID NO: 3903866 - DNA, 25 bp, Homo sapien
atcccggtgccctttgctgatcgca

SEQ ID NO: 3903867 - DNA, 25 bp, Homo sapien
cggcctggggcgcgagagggacact

SEQ ID NO: 3903868 - DNA, 25 bp, Homo sapien
agagagagcttctaggccggggcgc

SEQ ID NO: 3903869 - DNA, 25 bp, Homo sapien
ggggagagagagcttctaggccggg

SEQ ID NO: 3903870 - DNA, 25 bp, Homo sapien
accggcctggggcgcgagagggaca

SEQ ID NO: 3903871 - DNA, 25 bp, Homo sapien
caggcgctggcacagccagtcgagc

SEQ ID NO: 3903872 - DNA, 25 bp, Homo sapien
cggcccagacgcaggtctgagcgca

SEQ ID NO: 3903873 - DNA, 25 bp, Homo sapien
atgagcaccgcgcgagtggccaccg

SEQ ID NO: 3903874 - DNA, 25 bp, Homo sapien
caggcgggacaacgcgatccagccg

SEQ ID NO: 3903875 - DNA, 25 bp, Homo sapien
tccagccgggtgttgagagacaacc

SEQ ID NO: 3903876 - DNA, 25 bp, Homo sapien
tgagacctcaggaaagactacccag

SEQ ID NO: 3903877 - DNA, 25 bp, Homo sapien
gctggatgttctcacaacgggctca

SEQ ID NO: 3903878 - DNA, 25 bp, Homo sapien
gctaggccactagtacctgcagatg

SEQ ID NO: 3903879 - DNA, 25 bp, Homo sapien
ttaatctggactctgaagcagcccc

SEQ ID NO: 3903880 - DNA, 25 bp, Homo sapien
tgattgttcccatgctgatcctggc

SEQ ID NO: 3903881 - DNA, 25 bp, Homo sapien
atagtactgataagcccctgcctcc

SEQ ID NO: 3903882 - DNA, 25 bp, Homo sapien
gcatatgtgcacttgtccgggtccc

SEQ ID NO: 3903883 - DNA, 25 bp, Homo sapien
gggccttggtgaactctagcacgcg

SEQ ID NO: 3903884 - DNA, 25 bp, Homo sapien
gcagcaggtacgcagctcgatggca

SEQ ID NO: 3903885 - DNA, 25 bp, Homo sapien
gggctgttcaactccaatacggtgg

SEQ ID NO: 3903886 - DNA, 25 bp, Homo sapien
cggctaatgtctcctggtttggtca

SEQ ID NO: 3903887 - DNA, 25 bp, Homo sapien
catgcagctacggaaagtggccact

SEQ ID NO: 3903888 - DNA, 25 bp, Homo sapien
acgatgcggccccttgagctgcgca

SEQ ID NO: 3903889 - DNA, 25 bp, Homo sapien
gacagctccgcatcagcaactactt

SEQ ID NO: 3903890 - DNA, 25 bp, Homo sapien
tcgagcgcgccaaagaaattcacct

SEQ ID NO: 3903891 - DNA, 25 bp, Homo sapien
gcgccacggccgctttggaggttcc

SEQ ID NO: 3903892 - DNA, 25 bp, Homo sapien
gccgctttggaggttccataggccc

SEQ ID NO: 3903893 - DNA, 25 bp, Homo sapien
aatgtgtccatgagtagcgccacgg

SEQ ID NO: 3903894 - DNA, 25 bp, Homo sapien
cccaagcacggatatggcatgtccc

SEQ ID NO: 3903895 - DNA, 25 bp, Homo sapien
tgtcttgaagcagccaggctggatg

SEQ ID NO: 3903896 - DNA, 25 bp, Homo sapien
aagcagccaggctggatgatgctga

SEQ ID NO: 3903897 - DNA, 25 bp, Homo sapien
ttgaagcagccaggctggatgatgc

SEQ ID NO: 3903898 - DNA, 25 bp, Homo sapien
agcagccaggctggatgatgctgac

SEQ ID NO: 3903899 - DNA, 25 bp, Homo sapien
gaactgcccatgcaagtgctcgatg

SEQ ID NO: 3903900 - DNA, 25 bp, Homo sapien
agtccttgccgtaggcctgcagcag

SEQ ID NO: 3903901 - DNA, 25 bp, Homo sapien
gcagcaattgcttgcgcttttccca

SEQ ID NO: 3903902 - DNA, 25 bp, Homo sapien
cagcagctcttgaggcaggttggcc

SEQ ID NO: 3903903 - DNA, 25 bp, Homo sapien
caggctgcagtgctcgaggcagaca

SEQ ID NO: 3903904 - DNA, 25 bp, Homo sapien
ccttcaggcaggtagtagtggatga

SEQ ID NO: 3903905 - DNA, 25 bp, Homo sapien
tgcagtgctcgaggcagacagtgac

SEQ ID NO: 3903906 - DNA, 25 bp, Homo sapien
tgcgtcctgtggtggggtagtgcca

SEQ ID NO: 3903907 - DNA, 25 bp, Homo sapien
gatttagccctcaattgcagcactg

SEQ ID NO: 3903908 - DNA, 25 bp, Homo sapien
ctcatgaaacagtggagaggcgcag

SEQ ID NO: 3903909 - DNA, 25 bp, Homo sapien
cactggtgccgagaaacaatcctga

SEQ ID NO: 3903910 - DNA, 25 bp, Homo sapien
tagtcactccttagtttgcagaggc

SEQ ID NO: 3903911 - DNA, 25 bp, Homo sapien
ccatgggaaggacagagtgtgtgtg

SEQ ID NO: 3903912 - DNA, 25 bp, Homo sapien
ccatggcccatgggaaggacagagt

SEQ ID NO: 3903913 - DNA, 25 bp, Homo sapien
catggcccatgggaaggacagagtg

SEQ ID NO: 3903914 - DNA, 25 bp, Homo sapien
atggcccatgggaaggacagagtgt

SEQ ID NO: 3903915 - DNA, 25 bp, Homo sapien
tctcctgaccctcttagagactgtt

SEQ ID NO: 3903916 - DNA, 25 bp, Homo sapien
ggtgtagtacgctgtcctagcggct

SEQ ID NO: 3903917 - DNA, 25 bp, Homo sapien
ccctgtggttacagccgctgatgta

SEQ ID NO: 3903918 - DNA, 25 bp, Homo sapien
tgtatgtggtctgtgacaagcctgt

SEQ ID NO: 3903919 - DNA, 25 bp, Homo sapien
ctgaaaggccaaggtcttaggatag

SEQ ID NO: 3903920 - DNA, 25 bp, Homo sapien
taggcccattctctatctgctctga

SEQ ID NO: 3903921 - DNA, 25 bp, Homo sapien
tcagttctgacgcaagccctcagga

SEQ ID NO: 3903922 - DNA, 25 bp, Homo sapien
cgtctagctgcctttctcagttctg

SEQ ID NO: 3903923 - DNA, 25 bp, Homo sapien
atgttgctgatggtcggtgccgctg

SEQ ID NO: 3903924 - DNA, 25 bp, Homo sapien
tgatccctgtgtctgatgttgctga

SEQ ID NO: 3903925 - DNA, 25 bp, Homo sapien
ggaggtgactctcccatttgatccc

SEQ ID NO: 3903926 - DNA, 25 bp, Homo sapien
ctgatggtcggtgccgctggcccct

SEQ ID NO: 3903927 - DNA, 25 bp, Homo sapien
ctgcgagaatgaggccccagagcag

SEQ ID NO: 3903928 - DNA, 25 bp, Homo sapien
tgaggccccagagcaggaatggagg

SEQ ID NO: 3903929 - DNA, 25 bp, Homo sapien
agaatgaggccccagagcaggaatg

SEQ ID NO: 3903930 - DNA, 25 bp, Homo sapien
aatgaggccccagagcaggaatgga

SEQ ID NO: 3903931 - DNA, 25 bp, Homo sapien
tcagtggcggatgaactggcacagg

SEQ ID NO: 3903932 - DNA, 25 bp, Homo sapien
ggtggtgtctggcagcctgctgcac

SEQ ID NO: 3903933 - DNA, 25 bp, Homo sapien
cctgttgctcccctccagcttgctg

SEQ ID NO: 3903934 - DNA, 25 bp, Homo sapien
aactggcacaggttgttggtggtgt

SEQ ID NO: 3903935 - DNA, 25 bp, Homo sapien
agtcaaatccctgcggccacaggcg

SEQ ID NO: 3903936 - DNA, 25 bp, Homo sapien
tttccaagcttgagaagggctcgct

SEQ ID NO: 3903937 - DNA, 25 bp, Homo sapien
tgcagcgtcaagtgcagcaaaccgg

SEQ ID NO: 3903938 - DNA, 25 bp, Homo sapien
aaagctagagaaggcccagtcaaat

SEQ ID NO: 3903939 - DNA, 25 bp, Homo sapien
taagctcgccttagttggcctccgg

SEQ ID NO: 3903940 - DNA, 25 bp, Homo sapien
ccctttcaactgagacgtggtggaa

SEQ ID NO: 3903941 - DNA, 25 bp, Homo sapien
cagcttcagaattcagcacgtattg

SEQ ID NO: 3903942 - DNA, 25 bp, Homo sapien
gcacgtattggcctcaagttccccg

SEQ ID NO: 3903943 - DNA, 25 bp, Homo sapien
gaaaaatagagaagagccgcactcc

SEQ ID NO: 3903944 - DNA, 25 bp, Homo sapien
tatcataggaggcacatacacgggc

SEQ ID NO: 3903945 - DNA, 25 bp, Homo sapien
gggcctgggctaccctatcatagga

SEQ ID NO: 3903946 - DNA, 25 bp, Homo sapien
tgggagtgtcaccaagccaagaaac

SEQ ID NO: 3903947 - DNA, 25 bp, Homo sapien
cgctgcgtaaggctgcatgagtcct

SEQ ID NO: 3903948 - DNA, 25 bp, Homo sapien
actgccgcaagctgggtactgccat

SEQ ID NO: 3903949 - DNA, 25 bp, Homo sapien
gctactgccgcttcttcaatgcctt

SEQ ID NO: 3903950 - DNA, 25 bp, Homo sapien
tgtgacccatgtgccacgtgctact

SEQ ID NO: 3903951 - DNA, 25 bp, Homo sapien
ggcaggcggcctgaaagctttgtac

SEQ ID NO: 3903952 - DNA, 25 bp, Homo sapien
cttgtgctgatgagaccaggcatag

SEQ ID NO: 3903953 - DNA, 25 bp, Homo sapien
gaagggagcagccattagtgctaat

SEQ ID NO: 3903954 - DNA, 25 bp, Homo sapien
ggcatagacagtcctgacgacacag

SEQ ID NO: 3903955 - DNA, 25 bp, Homo sapien
tcctctcaaagctgattcagcctgc

SEQ ID NO: 3903956 - DNA, 25 bp, Homo sapien
gccttgtgccaacccagtttgtgca

SEQ ID NO: 3903957 - DNA, 25 bp, Homo sapien
tggggccttgcgatcctctcaaagc

SEQ ID NO: 3903958 - DNA, 25 bp, Homo sapien
tggacacgtgtgtgataaacagctc

SEQ ID NO: 3903959 - DNA, 25 bp, Homo sapien
gtagcaacggggtctcaccatgata

SEQ ID NO: 3903960 - DNA, 25 bp, Homo sapien
cggggtctcaccatgatacccaggc

SEQ ID NO: 3903961 - DNA, 25 bp, Homo sapien
caacggggtctcaccatgataccca

SEQ ID NO: 3903962 - DNA, 25 bp, Homo sapien
agcaacggggtctcaccatgatacc

SEQ ID NO: 3903963 - DNA, 25 bp, Homo sapien
acctcagcctctactacaggcatgc

SEQ ID NO: 3903964 - DNA, 25 bp, Homo sapien
cccacctcagcctctactacaggca

SEQ ID NO: 3903965 - DNA, 25 bp, Homo sapien
cacctcagcctctactacaggcatg

SEQ ID NO: 3903966 - DNA, 25 bp, Homo sapien
ctcccacctcagcctctactacagg

SEQ ID NO: 3903967 - DNA, 25 bp, Homo sapien
cctgggctcaagaaggtgtgaatca

SEQ ID NO: 3903968 - DNA, 25 bp, Homo sapien
cacactcaggtgaagacagctgctg

SEQ ID NO: 3903969 - DNA, 25 bp, Homo sapien
gcccgtaggtgaggtaagacactga

SEQ ID NO: 3903970 - DNA, 25 bp, Homo sapien
gtgaatcactacacctggccgtttt

SEQ ID NO: 3903971 - DNA, 25 bp, Homo sapien
ggctcaatacaccagcccgagagaa

SEQ ID NO: 3903972 - DNA, 25 bp, Homo sapien
ctgaatgactgaggagaccgtgcct

SEQ ID NO: 3903973 - DNA, 25 bp, Homo sapien
cacagatcctctctagctcagggct

SEQ ID NO: 3903974 - DNA, 25 bp, Homo sapien
gaaacacatggctgtgctctctggg

SEQ ID NO: 3903975 - DNA, 25 bp, Homo sapien
tgtccagatcagagtagctcactga

SEQ ID NO: 3903976 - DNA, 25 bp, Homo sapien
gactttctcctataggatgctgagg

SEQ ID NO: 3903977 - DNA, 25 bp, Homo sapien
caagtgaggaccatcagaccctgtc

SEQ ID NO: 3903978 - DNA, 25 bp, Homo sapien
tgggcagacagctatggctagtcct

SEQ ID NO: 3903979 - DNA, 25 bp, Homo sapien
tctacgactatggtcaggttcatgc

SEQ ID NO: 3903980 - DNA, 25 bp, Homo sapien
ccaagaaacgacaggttcatgccat

SEQ ID NO: 3903981 - DNA, 25 bp, Homo sapien
ggagagaagtccaccaacgttctca

SEQ ID NO: 3903982 - DNA, 25 bp, Homo sapien
catgccattgcacttgatcttagcc

SEQ ID NO: 3903983 - DNA, 25 bp, Homo sapien
caataacaggaggagcataggttgt

SEQ ID NO: 3903984 - DNA, 25 bp, Homo sapien
ataacaggaggagcataggttgtca

SEQ ID NO: 3903985 - DNA, 25 bp, Homo sapien
aataacaggaggagcataggttgtc

SEQ ID NO: 3903986 - DNA, 25 bp, Homo sapien
taacaggaggagcataggttgtcat

SEQ ID NO: 3903987 - DNA, 25 bp, Homo sapien
tatgtccgagctggaatctgaggac

SEQ ID NO: 3903988 - DNA, 25 bp, Homo sapien
gagcctggtgaagatatcaggtcca

SEQ ID NO: 3903989 - DNA, 25 bp, Homo sapien
tctgacccccaatgttatgtccgag

SEQ ID NO: 3903990 - DNA, 25 bp, Homo sapien
gctgctcagttgggttctcaggagc

SEQ ID NO: 3903991 - DNA, 25 bp, Homo sapien
tggactggatggactcttgttatca

SEQ ID NO: 3903992 - DNA, 25 bp, Homo sapien
cttgttatcatcatgaggactgcag

SEQ ID NO: 3903993 - DNA, 25 bp, Homo sapien
gaggactgcagagcacatgacatcc

SEQ ID NO: 3903994 - DNA, 25 bp, Homo sapien
tcatgccagcatcgaagcatggact

SEQ ID NO: 3903995 - DNA, 25 bp, Homo sapien
caagaacaaacctagtgccaggagt

SEQ ID NO: 3903996 - DNA, 25 bp, Homo sapien
gatgtggccgtagagcaatgacagt

SEQ ID NO: 3903997 - DNA, 25 bp, Homo sapien
ttgctgggcctagagtcgtgacgac

SEQ ID NO: 3903998 - DNA, 25 bp, Homo sapien
ctgtgaggacacataaccatggact

SEQ ID NO: 3903999 - DNA, 25 bp, Homo sapien
tttccaccggagcaagcggcttgac

SEQ ID NO: 3904000 - DNA, 25 bp, Homo sapien
gctatttcgctagtctttctcactg

SEQ ID NO: 3904001 - DNA, 25 bp, Homo sapien
cggaggcacagactctctcaggcaa

SEQ ID NO: 3904002 - DNA, 25 bp, Homo sapien
gcggcttgacagtttcacactaaaa

SEQ ID NO: 3904003 - DNA, 25 bp, Homo sapien
tcctcaaccagaagggacttggtgg

SEQ ID NO: 3904004 - DNA, 25 bp, Homo sapien
caagggtcctcaaccagaagggact

SEQ ID NO: 3904005 - DNA, 25 bp, Homo sapien
atcatgagcagagttgggatccttg

SEQ ID NO: 3904006 - DNA, 25 bp, Homo sapien
accagaagggacttggtgggctcct

SEQ ID NO: 3904007 - DNA, 25 bp, Homo sapien
taacgctaggtgaactgctctgaca

SEQ ID NO: 3904008 - DNA, 25 bp, Homo sapien
tctacactgcagttacggacttggc

SEQ ID NO: 3904009 - DNA, 25 bp, Homo sapien
gaagtaaagttggtctttggcgcca

SEQ ID NO: 3904010 - DNA, 25 bp, Homo sapien
ccgactctgctcctaagaagtaaag

SEQ ID NO: 3904011 - DNA, 25 bp, Homo sapien
ggtgcccggcctggtcgcgccgcag

SEQ ID NO: 3904012 - DNA, 25 bp, Homo sapien
ggaggtgcccggcctggtcgcgccg

SEQ ID NO: 3904013 - DNA, 25 bp, Homo sapien
tgggctgcgcggacctcgcgctgtc

SEQ ID NO: 3904014 - DNA, 25 bp, Homo sapien
cgctgtccttgcgctcggaggtgcc

SEQ ID NO: 3904015 - DNA, 25 bp, Homo sapien
tacgccaggtttgggcggagagccc

SEQ ID NO: 3904016 - DNA, 25 bp, Homo sapien
ttaggccggcccctagagctaggag

SEQ ID NO: 3904017 - DNA, 25 bp, Homo sapien
aggacgatcctctccggcttcggct

SEQ ID NO: 3904018 - DNA, 25 bp, Homo sapien
gggccggccacaaagccgcttaggc

SEQ ID NO: 3904019 - DNA, 25 bp, Homo sapien
aatccgacctctagccctggtgagc

SEQ ID NO: 3904020 - DNA, 25 bp, Homo sapien
ccaaaccagttctgcagagagccca

SEQ ID NO: 3904021 - DNA, 25 bp, Homo sapien
gctgttgcaggaaccttgcgccaac

SEQ ID NO: 3904022 - DNA, 25 bp, Homo sapien
gaatctggactgaatccgacctcta

SEQ ID NO: 3904023 - DNA, 25 bp, Homo sapien
ctggacacacgttagaactggctgg

SEQ ID NO: 3904024 - DNA, 25 bp, Homo sapien
tggacacacgttagaactggctggg

SEQ ID NO: 3904025 - DNA, 25 bp, Homo sapien
cacacgttagaactggctggggagg

SEQ ID NO: 3904026 - DNA, 25 bp, Homo sapien
gacacacgttagaactggctgggga

SEQ ID NO: 3904027 - DNA, 25 bp, Homo sapien
tgcagccagggcacaagtattgtta

SEQ ID NO: 3904028 - DNA, 25 bp, Homo sapien
cagatgctgtgcgttggccgaatgc

SEQ ID NO: 3904029 - DNA, 25 bp, Homo sapien
tgttacacgaggctgcgcacagtag

SEQ ID NO: 3904030 - DNA, 25 bp, Homo sapien
ggccgaatgcggcaggcccagggcg

SEQ ID NO: 3904031 - DNA, 25 bp, Homo sapien
cagactgaaccttgtgagacctggg

SEQ ID NO: 3904032 - DNA, 25 bp, Homo sapien
gattttaagtctatgtccaccccaa

SEQ ID NO: 3904033 - DNA, 25 bp, Homo sapien
gagaccacataacccagttgtcagt

SEQ ID NO: 3904034 - DNA, 25 bp, Homo sapien
ggcatatctgcttggctcaccacag

SEQ ID NO: 3904035 - DNA, 25 bp, Homo sapien
cacacaggttggcaggagttgccag

SEQ ID NO: 3904036 - DNA, 25 bp, Homo sapien
cacctggcaaatcctcaagtgtgac

SEQ ID NO: 3904037 - DNA, 25 bp, Homo sapien
tgcaagtatcctcagcactgcgcac

SEQ ID NO: 3904038 - DNA, 25 bp, Homo sapien
tcacagagcaatcctcaaccttggc

SEQ ID NO: 3904039 - DNA, 25 bp, Homo sapien
tggccacttcgagccgcccggctgg

SEQ ID NO: 3904040 - DNA, 25 bp, Homo sapien
cctggccacttcgagccgcccggct

SEQ ID NO: 3904041 - DNA, 25 bp, Homo sapien
ccacttcgagccgcccggctgggct

SEQ ID NO: 3904042 - DNA, 25 bp, Homo sapien
gccctggccacttcgagccgcccgg

SEQ ID NO: 3904043 - DNA, 25 bp, Homo sapien
gactcggcctcggactcagcgtggc

SEQ ID NO: 3904044 - DNA, 25 bp, Homo sapien
aggacagccgcaggcgactcggcct

SEQ ID NO: 3904045 - DNA, 25 bp, Homo sapien
cggcgcgcgcgaagaatgtgcggaa

SEQ ID NO: 3904046 - DNA, 25 bp, Homo sapien
gacccgggcactaatgacaggacag

SEQ ID NO: 3904047 - DNA, 25 bp, Homo sapien
cagcgggatccagggctggcgcagg

SEQ ID NO: 3904048 - DNA, 25 bp, Homo sapien
tgatcgggggggtgtccagtaccag

SEQ ID NO: 3904049 - DNA, 25 bp, Homo sapien
gaagccctctcccacgcagcgggat

SEQ ID NO: 3904050 - DNA, 25 bp, Homo sapien
ggtgtccagtaccagtcggatcccc

SEQ ID NO: 3904051 - DNA, 25 bp, Homo sapien
gcggccgcaccgacagggacatcat

SEQ ID NO: 3904052 - DNA, 25 bp, Homo sapien
ccgctcgtggctgccgaggacgcct

SEQ ID NO: 3904053 - DNA, 25 bp, Homo sapien
tgccgaggacgcctgcgaaggactg

SEQ ID NO: 3904054 - DNA, 25 bp, Homo sapien
aggactggctcctattgacccgggc

SEQ ID NO: 3904055 - DNA, 25 bp, Homo sapien
gggtgagccacggaaaacatcctgg

SEQ ID NO: 3904056 - DNA, 25 bp, Homo sapien
gagccacggaaaacatcctggacac

SEQ ID NO: 3904057 - DNA, 25 bp, Homo sapien
ctgggtgagccacggaaaacatcct

SEQ ID NO: 3904058 - DNA, 25 bp, Homo sapien
ggtgagccacggaaaacatcctgga

SEQ ID NO: 3904059 - DNA, 25 bp, Homo sapien
aggccccgcttcagcgccgtgtaca

SEQ ID NO: 3904060 - DNA, 25 bp, Homo sapien
tcagcgccgtgtacaccaggtccag

SEQ ID NO: 3904061 - DNA, 25 bp, Homo sapien
cgcttcagcgccgtgtacaccaggt

SEQ ID NO: 3904062 - DNA, 25 bp, Homo sapien
tcaggccccgcttcagcgccgtgta

SEQ ID NO: 3904063 - DNA, 25 bp, Homo sapien
tcttggactcccttatctgcccctg

SEQ ID NO: 3904064 - DNA, 25 bp, Homo sapien
cctgctggtgcacttccaagtaggc

SEQ ID NO: 3904065 - DNA, 25 bp, Homo sapien
aattcctcttggactcccttatctg

SEQ ID NO: 3904066 - DNA, 25 bp, Homo sapien
ctgctggtgcacttccaagtaggcc

SEQ ID NO: 3904067 - DNA, 25 bp, Homo sapien
gcatggaactccagtcgtcgcagga

SEQ ID NO: 3904068 - DNA, 25 bp, Homo sapien
gaactccagtcgtcgcaggaagcgt

SEQ ID NO: 3904069 - DNA, 25 bp, Homo sapien
ccagtcgtcgcaggaagcgttcaat

SEQ ID NO: 3904070 - DNA, 25 bp, Homo sapien
tggaactccagtcgtcgcaggaagc

SEQ ID NO: 3904071 - DNA, 25 bp, Homo sapien
cggagacgccgctggacacagtatg

SEQ ID NO: 3904072 - DNA, 25 bp, Homo sapien
gtgtactcgcgatgcccccgagtgg

SEQ ID NO: 3904073 - DNA, 25 bp, Homo sapien
agtatgcctcatacagctcatcgat

SEQ ID NO: 3904074 - DNA, 25 bp, Homo sapien
gcacggaccatgttgtaggcaccat

SEQ ID NO: 3904075 - DNA, 25 bp, Homo sapien
cattcggagatgaaactcgcccagc

SEQ ID NO: 3904076 - DNA, 25 bp, Homo sapien
ggagatgaaactcgcccagctgtgc

SEQ ID NO: 3904077 - DNA, 25 bp, Homo sapien
tcggagatgaaactcgcccagctgt

SEQ ID NO: 3904078 - DNA, 25 bp, Homo sapien
ctttcattcggagatgaaactcgcc

SEQ ID NO: 3904079 - DNA, 25 bp, Homo sapien
cgcctacacacagcctggcgaagcc

SEQ ID NO: 3904080 - DNA, 25 bp, Homo sapien
catactgatcgcctacacacagcct

SEQ ID NO: 3904081 - DNA, 25 bp, Homo sapien
tactgatcgcctacacacagcctgg

SEQ ID NO: 3904082 - DNA, 25 bp, Homo sapien
ctcatactgatcgcctacacacagc

SEQ ID NO: 3904083 - DNA, 25 bp, Homo sapien
cctaccgacccagcccttccctgca

SEQ ID NO: 3904084 - DNA, 25 bp, Homo sapien
acccagcccttccctgcacattctc

SEQ ID NO: 3904085 - DNA, 25 bp, Homo sapien
ccagcccttccctgcacattctcat

SEQ ID NO: 3904086 - DNA, 25 bp, Homo sapien
agcccttccctgcacattctcatac

SEQ ID NO: 3904087 - DNA, 25 bp, Homo sapien
tgggggaacaggtaggatgaggcag

SEQ ID NO: 3904088 - DNA, 25 bp, Homo sapien
ctgggggaacaggtaggatgaggca

SEQ ID NO: 3904089 - DNA, 25 bp, Homo sapien
gggggaacaggtaggatgaggcagc

SEQ ID NO: 3904090 - DNA, 25 bp, Homo sapien
attcggccccgtagtttccagcgct

SEQ ID NO: 3904091 - DNA, 25 bp, Homo sapien
gtttccagcgctgacgcccatattt

SEQ ID NO: 3904092 - DNA, 25 bp, Homo sapien
gctgacgcccatatttcatgcagat

SEQ ID NO: 3904093 - DNA, 25 bp, Homo sapien
cactaccctcaattcggccccgtag

SEQ ID NO: 3904094 - DNA, 25 bp, Homo sapien
cagaaattccgtgagtagagggaga

SEQ ID NO: 3904095 - DNA, 25 bp, Homo sapien
acagaaattccgtgagtagagggag

SEQ ID NO: 3904096 - DNA, 25 bp, Homo sapien
ggagaaagatggtttcttcactgtc

SEQ ID NO: 3904097 - DNA, 25 bp, Homo sapien
agatggtttcttcactgtcccacac

SEQ ID NO: 3904098 - DNA, 25 bp, Homo sapien
ctgtagccaagagtgcatggtaggg

SEQ ID NO: 3904099 - DNA, 25 bp, Homo sapien
caagagtgcatggtagggtcacaag

SEQ ID NO: 3904100 - DNA, 25 bp, Homo sapien
tagccaagagtgcatggtagggtca

SEQ ID NO: 3904101 - DNA, 25 bp, Homo sapien
gccaagagtgcatggtagggtcaca

SEQ ID NO: 3904102 - DNA, 25 bp, Homo sapien
cccacaaccacatggttggccaggc

SEQ ID NO: 3904103 - DNA, 25 bp, Homo sapien
tcattgatatccacagccacaacct

SEQ ID NO: 3904104 - DNA, 25 bp, Homo sapien
ggtcattgatatccacagccacaac

SEQ ID NO: 3904105 - DNA, 25 bp, Homo sapien
aaccacatggttggccaggcccttc

SEQ ID NO: 3904106 - DNA, 25 bp, Homo sapien
aagtgagggtgtgtccggtgggctc

SEQ ID NO: 3904107 - DNA, 25 bp, Homo sapien
tagaaagcctgttcccgaagtgagg

SEQ ID NO: 3904108 - DNA, 25 bp, Homo sapien
ggtgactgtggaggccttgttgaca

SEQ ID NO: 3904109 - DNA, 25 bp, Homo sapien
ctctggctataggtggagaagcgct

SEQ ID NO: 3904110 - DNA, 25 bp, Homo sapien
tgcatgcccatttgccaggactggg

SEQ ID NO: 3904111 - DNA, 25 bp, Homo sapien
agtccgactgtagggtgcatgccca

SEQ ID NO: 3904112 - DNA, 25 bp, Homo sapien
ggtctcaggcctgcggaaggcaact

SEQ ID NO: 3904113 - DNA, 25 bp, Homo sapien
ggctggatgagtcgtctgaagattc

SEQ ID NO: 3904114 - DNA, 25 bp, Homo sapien
gaagcctcagccaaggcagcatcta

SEQ ID NO: 3904115 - DNA, 25 bp, Homo sapien
agcctcagccaaggcagcatctaca

SEQ ID NO: 3904116 - DNA, 25 bp, Homo sapien
actgaagcctcagccaaggcagcat

SEQ ID NO: 3904117 - DNA, 25 bp, Homo sapien
tgaagcctcagccaaggcagcatct

SEQ ID NO: 3904118 - DNA, 25 bp, Homo sapien
taggtagagcctgtagtggtgtgag

SEQ ID NO: 3904119 - DNA, 25 bp, Homo sapien
tagagcttgtggcagagtggccagg

SEQ ID NO: 3904120 - DNA, 25 bp, Homo sapien
taggtccccaggctaggctttctgg

SEQ ID NO: 3904121 - DNA, 25 bp, Homo sapien
acagagcctgttgtaccgagggtag

SEQ ID NO: 3904122 - DNA, 25 bp, Homo sapien
taagggtagagattatgggcttgtg

SEQ ID NO: 3904123 - DNA, 25 bp, Homo sapien
tggtagtctggactgggcctatgat

SEQ ID NO: 3904124 - DNA, 25 bp, Homo sapien
cctatgatattgagggtagggcctg

SEQ ID NO: 3904125 - DNA, 25 bp, Homo sapien
tagggcttggcatagtgtgggtggg

SEQ ID NO: 3904126 - DNA, 25 bp, Homo sapien
ggtgggaggtgacatactggttttg

SEQ ID NO: 3904127 - DNA, 25 bp, Homo sapien
tggtgggaggtgacatactggtttt

SEQ ID NO: 3904128 - DNA, 25 bp, Homo sapien
gggaggtgacatactggttttgtgg

SEQ ID NO: 3904129 - DNA, 25 bp, Homo sapien
agtggtgggaggtgacatactggtt

SEQ ID NO: 3904130 - DNA, 25 bp, Homo sapien
cttgtggcagtctggactaggccca

SEQ ID NO: 3904131 - DNA, 25 bp, Homo sapien
tgggacttgtggcagtctggactag

SEQ ID NO: 3904132 - DNA, 25 bp, Homo sapien
gacttgtggcagtctggactaggcc

SEQ ID NO: 3904133 - DNA, 25 bp, Homo sapien
atttataaggatggggcttgtggtg

SEQ ID NO: 3904134 - DNA, 25 bp, Homo sapien
ggactacagggaagggagtcagtgc

SEQ ID NO: 3904135 - DNA, 25 bp, Homo sapien
ggtagcaagttctagagaagtggaa

SEQ ID NO: 3904136 - DNA, 25 bp, Homo sapien
tgcctgagtgtaggaattggagact

SEQ ID NO: 3904137 - DNA, 25 bp, Homo sapien
tctgggggccatagggtctgcctga

SEQ ID NO: 3904138 - DNA, 25 bp, Homo sapien
agactctgaaccgtagactctgagg

SEQ ID NO: 3904139 - DNA, 25 bp, Homo sapien
gagtggggcttagactctgaaccgt

SEQ ID NO: 3904140 - DNA, 25 bp, Homo sapien
gcttagactctgaaccgtagactct

SEQ ID NO: 3904141 - DNA, 25 bp, Homo sapien
gggcttagactctgaaccgtagact

SEQ ID NO: 3904142 - DNA, 25 bp, Homo sapien
tggggtctggacagccatggccagg

SEQ ID NO: 3904143 - DNA, 25 bp, Homo sapien
ctggacagccatggccaggcaaagg

SEQ ID NO: 3904144 - DNA, 25 bp, Homo sapien
ggtctggacagccatggccaggcaa

SEQ ID NO: 3904145 - DNA, 25 bp, Homo sapien
ctggggtctggacagccatggccag

SEQ ID NO: 3904146 - DNA, 25 bp, Homo sapien
tggccacggtagtcatccagggcag

SEQ ID NO: 3904147 - DNA, 25 bp, Homo sapien
gcagactttctaggcgggtcacctc

SEQ ID NO: 3904148 - DNA, 25 bp, Homo sapien
catgagcagactttctaggcgggtc

SEQ ID NO: 3904149 - DNA, 25 bp, Homo sapien
gctcaggaaactggccacggtagtc

SEQ ID NO: 3904150 - DNA, 25 bp, Homo sapien
ctgtccccaggaacatcattgtctt

SEQ ID NO: 3904151 - DNA, 25 bp, Homo sapien
gctgagactggaggcccggctgcga

SEQ ID NO: 3904152 - DNA, 25 bp, Homo sapien
atcttcgtcttcattgaggaagctg

SEQ ID NO: 3904153 - DNA, 25 bp, Homo sapien
gaagctctccaaggcatgctccaca

SEQ ID NO: 3904154 - DNA, 25 bp, Homo sapien
aggtgccggaccaaggcagcatcca

SEQ ID NO: 3904155 - DNA, 25 bp, Homo sapien
ggcactgggtgagtctatgctgtcc

SEQ ID NO: 3904156 - DNA, 25 bp, Homo sapien
gaggcgactgcagtggtacaggtgc

SEQ ID NO: 3904157 - DNA, 25 bp, Homo sapien
cactgggtgagtctatgctgtcctc

SEQ ID NO: 3904158 - DNA, 25 bp, Homo sapien
tgctgaactcgcatactgcctccag

SEQ ID NO: 3904159 - DNA, 25 bp, Homo sapien
ggcagagctggccgggatctcccac

SEQ ID NO: 3904160 - DNA, 25 bp, Homo sapien
caccgcctgctgaactcgcatactg

SEQ ID NO: 3904161 - DNA, 25 bp, Homo sapien
catactgcctccagtactcgggctt

SEQ ID NO: 3904162 - DNA, 25 bp, Homo sapien
agaggcgggcaccatactggttgca

SEQ ID NO: 3904163 - DNA, 25 bp, Homo sapien
gtctctctgtgcactggtcccagaa

SEQ ID NO: 3904164 - DNA, 25 bp, Homo sapien
aaggtgagaagcacccgctccaccg

SEQ ID NO: 3904165 - DNA, 25 bp, Homo sapien
ggccgagaggccgagaactgcacca

SEQ ID NO: 3904166 - DNA, 25 bp, Homo sapien
ctcagtcacgtaggcctccatggtg

SEQ ID NO: 3904167 - DNA, 25 bp, Homo sapien
gaactggaagactgtgagctgctct

SEQ ID NO: 3904168 - DNA, 25 bp, Homo sapien
tgtccaaggtttccacaaaactcca

SEQ ID NO: 3904169 - DNA, 25 bp, Homo sapien
ctcctcagcggtctcagtcacgtag

SEQ ID NO: 3904170 - DNA, 25 bp, Homo sapien
ttggggagggcttgtcctcatgtcc

SEQ ID NO: 3904171 - DNA, 25 bp, Homo sapien
agggcttgtcctcatgtcctcagac

SEQ ID NO: 3904172 - DNA, 25 bp, Homo sapien
gggatatggtgggtgggtgggcaag

SEQ ID NO: 3904173 - DNA, 25 bp, Homo sapien
gtcctcagaccccaagaggccacta

SEQ ID NO: 3904174 - DNA, 25 bp, Homo sapien
acagcctgatcatccgagttcagat

SEQ ID NO: 3904175 - DNA, 25 bp, Homo sapien
cgagttcagattccgcaccagtagc

SEQ ID NO: 3904176 - DNA, 25 bp, Homo sapien
tcgggcgccaatctcagggccttca

SEQ ID NO: 3904177 - DNA, 25 bp, Homo sapien
gaccttgttgttgccatggacgagc

SEQ ID NO: 3904178 - DNA, 25 bp, Homo sapien
ccagccactcgagtctgcacgtcct

SEQ ID NO: 3904179 - DNA, 25 bp, Homo sapien
gccactcgagtctgcacgtcctcat

SEQ ID NO: 3904180 - DNA, 25 bp, Homo sapien
cgagtctgcacgtcctcatcctcca

SEQ ID NO: 3904181 - DNA, 25 bp, Homo sapien
actcgagtctgcacgtcctcatcct

SEQ ID NO: 3904182 - DNA, 25 bp, Homo sapien
gagggagcattgaggtgggctcagg

SEQ ID NO: 3904183 - DNA, 25 bp, Homo sapien
ggagggagcattgaggtgggctcag

SEQ ID NO: 3904184 - DNA, 25 bp, Homo sapien
gggagggagcattgaggtgggctca

SEQ ID NO: 3904185 - DNA, 25 bp, Homo sapien
tcagtttggcagaggtacaccaggg

SEQ ID NO: 3904186 - DNA, 25 bp, Homo sapien
ttctgtgtcagtttggcagaggtac

SEQ ID NO: 3904187 - DNA, 25 bp, Homo sapien
gctgtaggctttgccgggcagcttc

SEQ ID NO: 3904188 - DNA, 25 bp, Homo sapien
tgctgtaggctttgccgggcagctt

SEQ ID NO: 3904189 - DNA, 25 bp, Homo sapien
ctgccaggcccaaagatgcggggca

SEQ ID NO: 3904190 - DNA, 25 bp, Homo sapien
tccagccgtcgatgggcagactgtc

SEQ ID NO: 3904191 - DNA, 25 bp, Homo sapien
gccgtcgatgggcagactgtccctc

SEQ ID NO: 3904192 - DNA, 25 bp, Homo sapien
actcctccagccgtcgatgggcaga

SEQ ID NO: 3904193 - DNA, 25 bp, Homo sapien
gggtatctggagccagcccttaccc

SEQ ID NO: 3904194 - DNA, 25 bp, Homo sapien
gaggggtatctggagccagccctta

SEQ ID NO: 3904195 - DNA, 25 bp, Homo sapien
attttcattgctaggaatctgtggg

SEQ ID NO: 3904196 - DNA, 25 bp, Homo sapien
attagattttcattgctaggaatct

SEQ ID NO: 3904197 - DNA, 25 bp, Homo sapien
actgatttgtggcaagggatgtgct

SEQ ID NO: 3904198 - DNA, 25 bp, Homo sapien
aaatacaaaaccaagggatgtggct

SEQ ID NO: 3904199 - DNA, 25 bp, Homo sapien
gcaagggatgtgctgagccgaggct

SEQ ID NO: 3904200 - DNA, 25 bp, Homo sapien
tatgccctgggtgtatctggagaca

SEQ ID NO: 3904201 - DNA, 25 bp, Homo sapien
gagtagtggccatcacccaattgcc

SEQ ID NO: 3904202 - DNA, 25 bp, Homo sapien
caagagccttctgtccatgggagat

SEQ ID NO: 3904203 - DNA, 25 bp, Homo sapien
gaaacctaggtgttgcgtatagcaa

SEQ ID NO: 3904204 - DNA, 25 bp, Homo sapien
cagctccgcgcacggtttaatcgct

SEQ ID NO: 3904205 - DNA, 25 bp, Homo sapien
ggccacccggcgtctccggcgagct

SEQ ID NO: 3904206 - DNA, 25 bp, Homo sapien
gctgccgccaaagaagcagctccgc

SEQ ID NO: 3904207 - DNA, 25 bp, Homo sapien
acggtttaatcgctccacaggctca

SEQ ID NO: 3904208 - DNA, 25 bp, Homo sapien
ctgcagccagcgccgaccggagcgg

SEQ ID NO: 3904209 - DNA, 25 bp, Homo sapien
gggctgcagccagcgccgaccggag

SEQ ID NO: 3904210 - DNA, 25 bp, Homo sapien
ccagcgccgaccggagcggccccat

SEQ ID NO: 3904211 - DNA, 25 bp, Homo sapien
cagccagcgccgaccggagcggccc

SEQ ID NO: 3904212 - DNA, 25 bp, Homo sapien
atacggcaccgggacctggcttagc

SEQ ID NO: 3904213 - DNA, 25 bp, Homo sapien
cagtcggtccgaacccttaagctag

SEQ ID NO: 3904214 - DNA, 25 bp, Homo sapien
cttaagctaggcgggcgccgaagcc

SEQ ID NO: 3904215 - DNA, 25 bp, Homo sapien
ccgggacgcggagatagtgtctcag

SEQ ID NO: 3904216 - DNA, 25 bp, Homo sapien
tctttggcttcaggtccgtaatcat

SEQ ID NO: 3904217 - DNA, 25 bp, Homo sapien
aagcccctggtcagcaatctgtcca

SEQ ID NO: 3904218 - DNA, 25 bp, Homo sapien
gctgcaaagtcagtttgaggaggga

SEQ ID NO: 3904219 - DNA, 25 bp, Homo sapien
tgtccactagcgcatcttgttcttt

SEQ ID NO: 3904220 - DNA, 25 bp, Homo sapien
tcctctatgactataactgaagttc

SEQ ID NO: 3904221 - DNA, 25 bp, Homo sapien
ctgaagttctaggaagatgggtcat

SEQ ID NO: 3904222 - DNA, 25 bp, Homo sapien
cacctcctctatgactataactgaa

SEQ ID NO: 3904223 - DNA, 25 bp, Homo sapien
gactataactgaagttctaggaaga

SEQ ID NO: 3904224 - DNA, 25 bp, Homo sapien
tagctattaagctgcatggccagga

SEQ ID NO: 3904225 - DNA, 25 bp, Homo sapien
tctaatagaactgccctgcccaagg

SEQ ID NO: 3904226 - DNA, 25 bp, Homo sapien
gcccaaggaagtcacctctaataga

SEQ ID NO: 3904227 - DNA, 25 bp, Homo sapien
tatatcccttgcaacatgcaacgag

SEQ ID NO: 3904228 - DNA, 25 bp, Homo sapien
caaaaggtggctgacgctgctgtag

SEQ ID NO: 3904229 - DNA, 25 bp, Homo sapien
gctttgaatctaggaaatacgtact

SEQ ID NO: 3904230 - DNA, 25 bp, Homo sapien
aaaatatttgtaatggcaacagtga

SEQ ID NO: 3904231 - DNA, 25 bp, Homo sapien
caataattctttcgccaaaaggtgg

SEQ ID NO: 3904232 - DNA, 25 bp, Homo sapien
actgaggaagaacaatccaggcaat

SEQ ID NO: 3904233 - DNA, 25 bp, Homo sapien
aggaagaacaatccaggcaatcggg

SEQ ID NO: 3904234 - DNA, 25 bp, Homo sapien
tagatgatgaacaggaggttcctcc

SEQ ID NO: 3904235 - DNA, 25 bp, Homo sapien
tcagtcaacttctgtgtagatgatg

SEQ ID NO: 3904236 - DNA, 25 bp, Homo sapien
tataatctgggtatcgtccacagca

SEQ ID NO: 3904237 - DNA, 25 bp, Homo sapien
aaagtttcggactcctccacaatgg

SEQ ID NO: 3904238 - DNA, 25 bp, Homo sapien
tgtacactgctgttgacatcctgga

SEQ ID NO: 3904239 - DNA, 25 bp, Homo sapien
taacctctgatagcagaccctcctg

SEQ ID NO: 3904240 - DNA, 25 bp, Homo sapien
tggacacgtgtaactgcaaagctca

SEQ ID NO: 3904241 - DNA, 25 bp, Homo sapien
caggagggtgactgttctgaatgcc

SEQ ID NO: 3904242 - DNA, 25 bp, Homo sapien
tccaaatttgaacgccgtggacacg

SEQ ID NO: 3904243 - DNA, 25 bp, Homo sapien
catcagtgtggcttttcatgtgacg

SEQ ID NO: 3904244 - DNA, 25 bp, Homo sapien
tcttccttgacgtgaaacaaccaga

SEQ ID NO: 3904245 - DNA, 25 bp, Homo sapien
cagggtttcactgggatttcacttc

SEQ ID NO: 3904246 - DNA, 25 bp, Homo sapien
acattcttcctcatagtaccaggca

SEQ ID NO: 3904247 - DNA, 25 bp, Homo sapien
tcccgctggagtcagcttgaatgaa

SEQ ID NO: 3904248 - DNA, 25 bp, Homo sapien
gaagaatgtgcccatgtgcagcata

SEQ ID NO: 3904249 - DNA, 25 bp, Homo sapien
catggtcatctgacaaccagcacaa

SEQ ID NO: 3904250 - DNA, 25 bp, Homo sapien
gccccatcctagtgtcttcaaagta

SEQ ID NO: 3904251 - DNA, 25 bp, Homo sapien
cacccatcttgggaagtcctgttat

SEQ ID NO: 3904252 - DNA, 25 bp, Homo sapien
tgggtgtgtttgtaacgacgatgcc

SEQ ID NO: 3904253 - DNA, 25 bp, Homo sapien
caattctccactggtcacaaaggcc

SEQ ID NO: 3904254 - DNA, 25 bp, Homo sapien
gatgccgaaccaattctccactggt

SEQ ID NO: 3904255 - DNA, 25 bp, Homo sapien
caaaggccatgtcgcagtctgggca

SEQ ID NO: 3904256 - DNA, 25 bp, Homo sapien
cacatggaacacttgaatggcttct

SEQ ID NO: 3904257 - DNA, 25 bp, Homo sapien
cactggcgtaatcgcacatggaaca

SEQ ID NO: 3904258 - DNA, 25 bp, Homo sapien
ttctacactggcgtaatcgcacatg

SEQ ID NO: 3904259 - DNA, 25 bp, Homo sapien
acatggaacacttgaatggcttctc

SEQ ID NO: 3904260 - DNA, 25 bp, Homo sapien
tattaacatgtgaaactggtactct

SEQ ID NO: 3904261 - DNA, 25 bp, Homo sapien
tactaaattaggttggctcattggc

SEQ ID NO: 3904262 - DNA, 25 bp, Homo sapien
cccaatgataaacaatctttgtgtt

SEQ ID NO: 3904263 - DNA, 25 bp, Homo sapien
tggtaacagtgtagcttcaaataat

SEQ ID NO: 3904264 - DNA, 25 bp, Homo sapien
agttttctcctatacgtaacttgct

SEQ ID NO: 3904265 - DNA, 25 bp, Homo sapien
tttctcctatacgtaacttgctagg

SEQ ID NO: 3904266 - DNA, 25 bp, Homo sapien
tcctatacgtaacttgctaggacat

SEQ ID NO: 3904267 - DNA, 25 bp, Homo sapien
tatattaaagaagttttctcctata

SEQ ID NO: 3904268 - DNA, 25 bp, Homo sapien
tccagtatgagagcgaatgtgacgt

SEQ ID NO: 3904269 - DNA, 25 bp, Homo sapien
caaactgcactgaaacggacgctct

SEQ ID NO: 3904270 - DNA, 25 bp, Homo sapien
ccttttcagcttgtatgtgtccctg

SEQ ID NO: 3904271 - DNA, 25 bp, Homo sapien
gaatgtgacgttttaatttgctgac

SEQ ID NO: 3904272 - DNA, 25 bp, Homo sapien
tcattaatacagtaaggagtggaga

SEQ ID NO: 3904273 - DNA, 25 bp, Homo sapien
gggacacacagtggtccacagggtc

SEQ ID NO: 3904274 - DNA, 25 bp, Homo sapien
tcactgaaaagaagctcattaatac

SEQ ID NO: 3904275 - DNA, 25 bp, Homo sapien
ggacacacagtggtccacagggtcc

SEQ ID NO: 3904276 - DNA, 25 bp, Homo sapien
aatttggccacattttctgtgtgct

SEQ ID NO: 3904277 - DNA, 25 bp, Homo sapien
cactttgggtaaaccgagcatgaca

SEQ ID NO: 3904278 - DNA, 25 bp, Homo sapien
ccgagcatgacaaatataacattca

SEQ ID NO: 3904279 - DNA, 25 bp, Homo sapien
ccaaatcactttttcgggctatgac

SEQ ID NO: 3904280 - DNA, 25 bp, Homo sapien
ggaatgctgctttcgcaagtggaca

SEQ ID NO: 3904281 - DNA, 25 bp, Homo sapien
aaagcgcttctcattcttgtgtgac

SEQ ID NO: 3904282 - DNA, 25 bp, Homo sapien
tacaagcgtaatcacactggtcaca

SEQ ID NO: 3904283 - DNA, 25 bp, Homo sapien
gagggcatagcgctcatgaaacaca

SEQ ID NO: 3904284 - DNA, 25 bp, Homo sapien
ccaagctaggtctagactccacacg

SEQ ID NO: 3904285 - DNA, 25 bp, Homo sapien
ccacacggcttgttgagatgataaa

SEQ ID NO: 3904286 - DNA, 25 bp, Homo sapien
tactgcagcttcaaaatgggaccat

SEQ ID NO: 3904287 - DNA, 25 bp, Homo sapien
ctctgttgcaaagtctggagagcag

SEQ ID NO: 3904288 - DNA, 25 bp, Homo sapien
ggtgtgggtgcgcttgtgcatgatc

SEQ ID NO: 3904289 - DNA, 25 bp, Homo sapien
tgtgggtgcgcttgtgcatgatcat

SEQ ID NO: 3904290 - DNA, 25 bp, Homo sapien
gtgtgggtgcgcttgtgcatgatca

SEQ ID NO: 3904291 - DNA, 25 bp, Homo sapien
catgtcgagaagctgcttctggcgg

SEQ ID NO: 3904292 - DNA, 25 bp, Homo sapien
acaaaagccgcagggacgaagttgg

SEQ ID NO: 3904293 - DNA, 25 bp, Homo sapien
ggaaggtcttatcgcagtggctgca

SEQ ID NO: 3904294 - DNA, 25 bp, Homo sapien
gtcgtgatagcgcttgaagtgcatg

SEQ ID NO: 3904295 - DNA, 25 bp, Homo sapien
tctacgccatctgggccagcacaat

SEQ ID NO: 3904296 - DNA, 25 bp, Homo sapien
cgccatctgggccagcacaattatc

SEQ ID NO: 3904297 - DNA, 25 bp, Homo sapien
cagcacaattatcagcatgtcttgc

SEQ ID NO: 3904298 - DNA, 25 bp, Homo sapien
caattatcagcatgtcttgccatgg

SEQ ID NO: 3904299 - DNA, 25 bp, Homo sapien
caaaccataagtgaagatgcttaaa

SEQ ID NO: 3904300 - DNA, 25 bp, Homo sapien
gattcactgctcttatctagaccag

SEQ ID NO: 3904301 - DNA, 25 bp, Homo sapien
gatcagcacctctcaaggttaggct

SEQ ID NO: 3904302 - DNA, 25 bp, Homo sapien
gcttaaacaaccttcttcatgtcca

SEQ ID NO: 3904303 - DNA, 25 bp, Homo sapien
caaacataaacagcttagtgctttc

SEQ ID NO: 3904304 - DNA, 25 bp, Homo sapien
gcttagtgctttcatgagaaagttt

SEQ ID NO: 3904305 - DNA, 25 bp, Homo sapien
acagcttagtgctttcatgagaaag

SEQ ID NO: 3904306 - DNA, 25 bp, Homo sapien
cataaacagcttagtgctttcatga

SEQ ID NO: 3904307 - DNA, 25 bp, Homo sapien
ctaagccggaaatggacccttggag

SEQ ID NO: 3904308 - DNA, 25 bp, Homo sapien
tactataccaggataaagcaggaca

SEQ ID NO: 3904309 - DNA, 25 bp, Homo sapien
gcaggacactaagccggaaatggac

SEQ ID NO: 3904310 - DNA, 25 bp, Homo sapien
ggataaagcaggacactaagccgga

SEQ ID NO: 3904311 - DNA, 25 bp, Homo sapien
agcatgctcagccaattattaagaa

SEQ ID NO: 3904312 - DNA, 25 bp, Homo sapien
cagcatgctcagccaattattaaga

SEQ ID NO: 3904313 - DNA, 25 bp, Homo sapien
catgctcagccaattattaagaaaa

SEQ ID NO: 3904314 - DNA, 25 bp, Homo sapien
gcatgctcagccaattattaagaaa

SEQ ID NO: 3904315 - DNA, 25 bp, Homo sapien
tctggctcaggttcaatttctacgg

SEQ ID NO: 3904316 - DNA, 25 bp, Homo sapien
aatttctacggcaggctcctcctca

SEQ ID NO: 3904317 - DNA, 25 bp, Homo sapien
gtcgtccagatctggttcagcattt

SEQ ID NO: 3904318 - DNA, 25 bp, Homo sapien
cctcattgtcgtccagatctggttc

SEQ ID NO: 3904319 - DNA, 25 bp, Homo sapien
ctgtttgggctggttggttctgcca

SEQ ID NO: 3904320 - DNA, 25 bp, Homo sapien
ttggttctgccagggggtcgtcctc

SEQ ID NO: 3904321 - DNA, 25 bp, Homo sapien
cctctccgcttcttggcgggtggtg

SEQ ID NO: 3904322 - DNA, 25 bp, Homo sapien
gggtcgtcctctccgcttcttggcg

SEQ ID NO: 3904323 - DNA, 25 bp, Homo sapien
ggtcttttagactgacagcgaacgg

SEQ ID NO: 3904324 - DNA, 25 bp, Homo sapien
cattaaagccccaagaatcacaagg

SEQ ID NO: 3904325 - DNA, 25 bp, Homo sapien
cagcgaacgggatgtcagcaatgca

SEQ ID NO: 3904326 - DNA, 25 bp, Homo sapien
gacagccttattagatagcggtcca

SEQ ID NO: 3904327 - DNA, 25 bp, Homo sapien
tcaactataatgttctcaattgcac

SEQ ID NO: 3904328 - DNA, 25 bp, Homo sapien
tgtattctggtcttcaacctgaatg

SEQ ID NO: 3904329 - DNA, 25 bp, Homo sapien
catcatgctgaggatcatctcgggc

SEQ ID NO: 3904330 - DNA, 25 bp, Homo sapien
catctcgggcgtgaggtctccgttg

SEQ ID NO: 3904331 - DNA, 25 bp, Homo sapien
caggtctcatgttggcgtcctaaaa

SEQ ID NO: 3904332 - DNA, 25 bp, Homo sapien
ggacagaacctgatcgtagcatgcc

SEQ ID NO: 3904333 - DNA, 25 bp, Homo sapien
aagatgcgggccgtttaaacacagc

SEQ ID NO: 3904334 - DNA, 25 bp, Homo sapien
tatacaaggttcaaatgctggctcc

SEQ ID NO: 3904335 - DNA, 25 bp, Homo sapien
cgttatgatttattagctgtacagc

SEQ ID NO: 3904336 - DNA, 25 bp, Homo sapien
atccgttatgatttattagctgtac

SEQ ID NO: 3904337 - DNA, 25 bp, Homo sapien
ttatgatttattagctgtacagcag

SEQ ID NO: 3904338 - DNA, 25 bp, Homo sapien
ttaatccgttatgatttattagctg

SEQ ID NO: 3904339 - DNA, 25 bp, Homo sapien
tgacaagtcagagaagggttcaggt

SEQ ID NO: 3904340 - DNA, 25 bp, Homo sapien
gaccaggtcctgacaagtcagagaa

SEQ ID NO: 3904341 - DNA, 25 bp, Homo sapien
ggtcctgacaagtcagagaagggtt

SEQ ID NO: 3904342 - DNA, 25 bp, Homo sapien
tcagagaagggttcaggtacttgct

SEQ ID NO: 3904343 - DNA, 25 bp, Homo sapien
cctgcccatagctcagcaaggtgga

SEQ ID NO: 3904344 - DNA, 25 bp, Homo sapien
tgcccatagctcagcaaggtggagg

SEQ ID NO: 3904345 - DNA, 25 bp, Homo sapien
ctgcccatagctcagcaaggtggag

SEQ ID NO: 3904346 - DNA, 25 bp, Homo sapien
ggactgttcagcaaggagcgcccga

SEQ ID NO: 3904347 - DNA, 25 bp, Homo sapien
aacaccggaggtcctgcccgttgct

SEQ ID NO: 3904348 - DNA, 25 bp, Homo sapien
gttgctccgaacctggagtccgtga

SEQ ID NO: 3904349 - DNA, 25 bp, Homo sapien
aaggagcgcccgaattctgccaaca

SEQ ID NO: 3904350 - DNA, 25 bp, Homo sapien
gccccgtcgcccaggagcttctccg

SEQ ID NO: 3904351 - DNA, 25 bp, Homo sapien
gcttctccgccagggtagacgtcgg

SEQ ID NO: 3904352 - DNA, 25 bp, Homo sapien
cggcctcgcggctcgagagcttgcc

SEQ ID NO: 3904353 - DNA, 25 bp, Homo sapien
aggagcttctccgccagggtagacg

SEQ ID NO: 3904354 - DNA, 25 bp, Homo sapien
ggcccagacccgcacggcagccacc

SEQ ID NO: 3904355 - DNA, 25 bp, Homo sapien
cccagacccgcacggcagccacctg

SEQ ID NO: 3904356 - DNA, 25 bp, Homo sapien
gcccagacccgcacggcagccacct

SEQ ID NO: 3904357 - DNA, 25 bp, Homo sapien
gcccaacgagctccggcgggaaaca

SEQ ID NO: 3904358 - DNA, 25 bp, Homo sapien
aacgagctccggcgggaaacagcag

SEQ ID NO: 3904359 - DNA, 25 bp, Homo sapien
ggaggcccaacgagctccggcggga

SEQ ID NO: 3904360 - DNA, 25 bp, Homo sapien
agctccggcgggaaacagcagagga

SEQ ID NO: 3904361 - DNA, 25 bp, Homo sapien
acaggagatgccgtcgggggtctgg

SEQ ID NO: 3904362 - DNA, 25 bp, Homo sapien
aggagatgccgtcgggggtctgggc

SEQ ID NO: 3904363 - DNA, 25 bp, Homo sapien
caggagatgccgtcgggggtctggg

SEQ ID NO: 3904364 - DNA, 25 bp, Homo sapien
caggacatggttttgcacagcaccc

SEQ ID NO: 3904365 - DNA, 25 bp, Homo sapien
cctctttgggccacaggaacctggt

SEQ ID NO: 3904366 - DNA, 25 bp, Homo sapien
ttgcacagcaccctccccgggtagc

SEQ ID NO: 3904367 - DNA, 25 bp, Homo sapien
ccgggtagccaggttttcagcagca

SEQ ID NO: 3904368 - DNA, 25 bp, Homo sapien
aggtaggctctccatcgtagcagtg

SEQ ID NO: 3904369 - DNA, 25 bp, Homo sapien
ggtaggctctccatcgtagcagtgc

SEQ ID NO: 3904370 - DNA, 25 bp, Homo sapien
gacctccaggtagctgaacgtgcag

SEQ ID NO: 3904371 - DNA, 25 bp, Homo sapien
ccaggtagctgaacgtgcagtccac

SEQ ID NO: 3904372 - DNA, 25 bp, Homo sapien
gtgtctcctgcagcgccatggcctg

SEQ ID NO: 3904373 - DNA, 25 bp, Homo sapien
cctggacctccaggtagctgaacgt

SEQ ID NO: 3904374 - DNA, 25 bp, Homo sapien
gcccaggtagggtactaggtgtctc

SEQ ID NO: 3904375 - DNA, 25 bp, Homo sapien
ccaggtagggtactaggtgtctcac

SEQ ID NO: 3904376 - DNA, 25 bp, Homo sapien
caggcccaggtagggtactaggtgt

SEQ ID NO: 3904377 - DNA, 25 bp, Homo sapien
tgcaggcccaggtagggtactaggt

SEQ ID NO: 3904378 - DNA, 25 bp, Homo sapien
gaccttcttgatggctgcagccacg

SEQ ID NO: 3904379 - DNA, 25 bp, Homo sapien
caagggtcgagcgagggaagacctt

SEQ ID NO: 3904380 - DNA, 25 bp, Homo sapien
gagggaagaccttcttgatggctgc

SEQ ID NO: 3904381 - DNA, 25 bp, Homo sapien
aggaccagctcacgcagggactcca

SEQ ID NO: 3904382 - DNA, 25 bp, Homo sapien
aggggctgcaggggtcagtggactc

SEQ ID NO: 3904383 - DNA, 25 bp, Homo sapien
tggtgtgggcctccggaatagcttc

SEQ ID NO: 3904384 - DNA, 25 bp, Homo sapien
gctggtgtgggcctccggaatagct

SEQ ID NO: 3904385 - DNA, 25 bp, Homo sapien
tgcttctctccagccgagccagcat

SEQ ID NO: 3904386 - DNA, 25 bp, Homo sapien
cagagcctcgtatgtctccaagaag

SEQ ID NO: 3904387 - DNA, 25 bp, Homo sapien
tcctctcggaaagggaagccattgt

SEQ ID NO: 3904388 - DNA, 25 bp, Homo sapien
tctcctctcggaaagggaagccatt

SEQ ID NO: 3904389 - DNA, 25 bp, Homo sapien
ctcggaaagggaagccattgtagtc

SEQ ID NO: 3904390 - DNA, 25 bp, Homo sapien
ctgggtgagaaggagatgcttacag

SEQ ID NO: 3904391 - DNA, 25 bp, Homo sapien
tgggtgagaaggagatgcttacagt

SEQ ID NO: 3904392 - DNA, 25 bp, Homo sapien
tgagaaggagatgcttacagttcgc

SEQ ID NO: 3904393 - DNA, 25 bp, Homo sapien
ggtgagaaggagatgcttacagttc

SEQ ID NO: 3904394 - DNA, 25 bp, Homo sapien
cgactgccgaggtggctgaagtctc

SEQ ID NO: 3904395 - DNA, 25 bp, Homo sapien
ggcgatggtaaatggtgtccacgtc

SEQ ID NO: 3904396 - DNA, 25 bp, Homo sapien
cagccctggcgatggtaaatggtgt

SEQ ID NO: 3904397 - DNA, 25 bp, Homo sapien
gactgccgaggtggctgaagtctcc

SEQ ID NO: 3904398 - DNA, 25 bp, Homo sapien
ggagaggcaccggaaccacaggttg

SEQ ID NO: 3904399 - DNA, 25 bp, Homo sapien
cacacaggagaggcaccggaaccac

SEQ ID NO: 3904400 - DNA, 25 bp, Homo sapien
acaggagaggcaccggaaccacagg

SEQ ID NO: 3904401 - DNA, 25 bp, Homo sapien
gagaggcaccggaaccacaggttgt

SEQ ID NO: 3904402 - DNA, 25 bp, Homo sapien
actgactcatcatgtgcagaatctg

SEQ ID NO: 3904403 - DNA, 25 bp, Homo sapien
atgtgcagaatctgttctgagacct

SEQ ID NO: 3904404 - DNA, 25 bp, Homo sapien
ctgggccagtcgtcggacaaagtct

SEQ ID NO: 3904405 - DNA, 25 bp, Homo sapien
gcgcctgggccagtcgtcggacaaa

SEQ ID NO: 3904406 - DNA, 25 bp, Homo sapien
agcaggttccccgcgaggctgagct

SEQ ID NO: 3904407 - DNA, 25 bp, Homo sapien
agagcttgagtgtcccgccagcgcc

SEQ ID NO: 3904408 - DNA, 25 bp, Homo sapien
ccctgcggtccccaggctcagtcat

SEQ ID NO: 3904409 - DNA, 25 bp, Homo sapien
cctgcggtccccaggctcagtcata

SEQ ID NO: 3904410 - DNA, 25 bp, Homo sapien
ctgcggtccccaggctcagtcatac

SEQ ID NO: 3904411 - DNA, 25 bp, Homo sapien
ggtgtcaaccctgtctgggccaggc

SEQ ID NO: 3904412 - DNA, 25 bp, Homo sapien
ggacaacgctcgaggtgtctgctga

SEQ ID NO: 3904413 - DNA, 25 bp, Homo sapien
agggctcctggacaacgctcgaggt

SEQ ID NO: 3904414 - DNA, 25 bp, Homo sapien
ctcgcggtgtcaaccctgtctgggc

SEQ ID NO: 3904415 - DNA, 25 bp, Homo sapien
cgaaggcggcattggtggccagtgc

SEQ ID NO: 3904416 - DNA, 25 bp, Homo sapien
tggagtcgaaggcggcattggtggc

SEQ ID NO: 3904417 - DNA, 25 bp, Homo sapien
cattggtggccagtgcccggcccag

SEQ ID NO: 3904418 - DNA, 25 bp, Homo sapien
actgtcctcggaggcccccagcgcc

SEQ ID NO: 3904419 - DNA, 25 bp, Homo sapien
gacggctcaggaagctatagaggcc

SEQ ID NO: 3904420 - DNA, 25 bp, Homo sapien
tgcgagattcaggaacgacagtacg

SEQ ID NO: 3904421 - DNA, 25 bp, Homo sapien
cagtgtcggtgcctgcgagattcag

SEQ ID NO: 3904422 - DNA, 25 bp, Homo sapien
gaacgacagtacgttaggacggctc

SEQ ID NO: 3904423 - DNA, 25 bp, Homo sapien
ccgtcccgccctccagtccgccctg

SEQ ID NO: 3904424 - DNA, 25 bp, Homo sapien
aggctgttggctacacccgcggggg

SEQ ID NO: 3904425 - DNA, 25 bp, Homo sapien
gccggtcatccatccccccacggag

SEQ ID NO: 3904426 - DNA, 25 bp, Homo sapien
gctgttggctacacccgcgggggga

SEQ ID NO: 3904427 - DNA, 25 bp, Homo sapien
tgcgggagaagacgttcctcgaagc

SEQ ID NO: 3904428 - DNA, 25 bp, Homo sapien
tggtgcagcagcctcgggataccgc

SEQ ID NO: 3904429 - DNA, 25 bp, Homo sapien
agcctcgggataccgctgcgaagag

SEQ ID NO: 3904430 - DNA, 25 bp, Homo sapien
cgtcgaggtgggtaaggctggtgca

SEQ ID NO: 3904431 - DNA, 25 bp, Homo sapien
gccgcaaggaggcggcttccagcag

SEQ ID NO: 3904432 - DNA, 25 bp, Homo sapien
ggccgcaaggaggcggcttccagca

SEQ ID NO: 3904433 - DNA, 25 bp, Homo sapien
ccgcaaggaggcggcttccagcagc

SEQ ID NO: 3904434 - DNA, 25 bp, Homo sapien
ctgcagcgcggccggcgcggcgcgg

SEQ ID NO: 3904435 - DNA, 25 bp, Homo sapien
gcagcgcggccggcgcggcgcggga

SEQ ID NO: 3904436 - DNA, 25 bp, Homo sapien
cgcggccggcgcggcgcgggacttc

SEQ ID NO: 3904437 - DNA, 25 bp, Homo sapien
agcgcggccggcgcggcgcgggact

SEQ ID NO: 3904438 - DNA, 25 bp, Homo sapien
cgtcgggcggcagcttgcagcccgc

SEQ ID NO: 3904439 - DNA, 25 bp, Homo sapien
gagcgcgtcgggcggcagcttgcag

SEQ ID NO: 3904440 - DNA, 25 bp, Homo sapien
gcgcgtcgggcggcagcttgcagcc

SEQ ID NO: 3904441 - DNA, 25 bp, Homo sapien
gcgtcgggcggcagcttgcagcccg

SEQ ID NO: 3904442 - DNA, 25 bp, Homo sapien
ggcgtggccggggtccgacactgac

SEQ ID NO: 3904443 - DNA, 25 bp, Homo sapien
ttgtgggagcgacagaagcaggagc

SEQ ID NO: 3904444 - DNA, 25 bp, Homo sapien
acgttacacggggtggcgggagctg

SEQ ID NO: 3904445 - DNA, 25 bp, Homo sapien
agggtgcgaacgaaggaggcagggc

SEQ ID NO: 3904446 - DNA, 25 bp, Homo sapien
tgttgagcgcgaggccatccaaaag

SEQ ID NO: 3904447 - DNA, 25 bp, Homo sapien
gaggtgcgtgttgagcgcgaggcca

SEQ ID NO: 3904448 - DNA, 25 bp, Homo sapien
caggtcgcggaggtgcgtgttgagc

SEQ ID NO: 3904449 - DNA, 25 bp, Homo sapien
ggtccaggtgcaggtcgcggaggtg

SEQ ID NO: 3904450 - DNA, 25 bp, Homo sapien
tctcccaatgtgtggtctcttctgg

SEQ ID NO: 3904451 - DNA, 25 bp, Homo sapien
cctcccagcgcctctcccaatgtgt

SEQ ID NO: 3904452 - DNA, 25 bp, Homo sapien
gaagtgggacccacttaggccgcga

SEQ ID NO: 3904453 - DNA, 25 bp, Homo sapien
agtgggacccacttaggccgcgagt

SEQ ID NO: 3904454 - DNA, 25 bp, Homo sapien
ctgcgtcgcacactaagtcttgtat

SEQ ID NO: 3904455 - DNA, 25 bp, Homo sapien
gcgtcgcacactaagtcttgtatca

SEQ ID NO: 3904456 - DNA, 25 bp, Homo sapien
gcctgcgtcgcacactaagtcttgt

SEQ ID NO: 3904457 - DNA, 25 bp, Homo sapien
cgcctgcgtcgcacactaagtcttg

SEQ ID NO: 3904458 - DNA, 25 bp, Homo sapien
atgatgcgaggatgggctctcctgc

SEQ ID NO: 3904459 - DNA, 25 bp, Homo sapien
gattgggaatcgagtggatgatgcg

SEQ ID NO: 3904460 - DNA, 25 bp, Homo sapien
ggtcacgcacgaggcgaagttgcaa

SEQ ID NO: 3904461 - DNA, 25 bp, Homo sapien
tgactcgggtcacgcacgaggcgaa

SEQ ID NO: 3904462 - DNA, 25 bp, Homo sapien
gcaccggacgttgaagttccttcca

SEQ ID NO: 3904463 - DNA, 25 bp, Homo sapien
aagcgccacatgtctcagggaccgg

SEQ ID NO: 3904464 - DNA, 25 bp, Homo sapien
gatggccagcaccagagtcaccatg

SEQ ID NO: 3904465 - DNA, 25 bp, Homo sapien
ggaccggcttctcccgatggccagc

SEQ ID NO: 3904466 - DNA, 25 bp, Homo sapien
gcccaggagtagggtgggggctcac

SEQ ID NO: 3904467 - DNA, 25 bp, Homo sapien
ctgggaggcccaggagtagggtggg

SEQ ID NO: 3904468 - DNA, 25 bp, Homo sapien
ggcccaggagtagggtgggggctca

SEQ ID NO: 3904469 - DNA, 25 bp, Homo sapien
ctgtgggcaggggccgcagttgtgg

SEQ ID NO: 3904470 - DNA, 25 bp, Homo sapien
caggggccgcagttgtgggggacag

SEQ ID NO: 3904471 - DNA, 25 bp, Homo sapien
tgtgggcaggggccgcagttgtggg

SEQ ID NO: 3904472 - DNA, 25 bp, Homo sapien
gggcaggggccgcagttgtggggga

SEQ ID NO: 3904473 - DNA, 25 bp, Homo sapien
acaatccggtgcaggacgtcgtcca

SEQ ID NO: 3904474 - DNA, 25 bp, Homo sapien
atgagctggacaatccggtgcagga

SEQ ID NO: 3904475 - DNA, 25 bp, Homo sapien
ctggacaatccggtgcaggacgtcg

SEQ ID NO: 3904476 - DNA, 25 bp, Homo sapien
aatccggtgcaggacgtcgtccagg

SEQ ID NO: 3904477 - DNA, 25 bp, Homo sapien
ttaagagaaagccattgatggctgg

SEQ ID NO: 3904478 - DNA, 25 bp, Homo sapien
aaagccattgatggctggagtcagg

SEQ ID NO: 3904479 - DNA, 25 bp, Homo sapien
agtggtctaattgcccgaggccctg

SEQ ID NO: 3904480 - DNA, 25 bp, Homo sapien
accaaagtggtctaattgcccgagg

SEQ ID NO: 3904481 - DNA, 25 bp, Homo sapien
ggagtaggacgctggcacccagctt

SEQ ID NO: 3904482 - DNA, 25 bp, Homo sapien
tcagccaccgacagagactgaagag

SEQ ID NO: 3904483 - DNA, 25 bp, Homo sapien
atggcgttgccgctgatatccagcg

SEQ ID NO: 3904484 - DNA, 25 bp, Homo sapien
tatccagcgcggtcaggttaggatt

SEQ ID NO: 3904485 - DNA, 25 bp, Homo sapien
aaccctcggcctagtccattcgcct

SEQ ID NO: 3904486 - DNA, 25 bp, Homo sapien
tgctccatttgctccgcctcattca

SEQ ID NO: 3904487 - DNA, 25 bp, Homo sapien
gcctcgtcagcctgctccatttgct

SEQ ID NO: 3904488 - DNA, 25 bp, Homo sapien
cttcagtcggggacggagcttccca

SEQ ID NO: 3904489 - DNA, 25 bp, Homo sapien
gatggactgcacgtgctgtcagttc

SEQ ID NO: 3904490 - DNA, 25 bp, Homo sapien
ccacgtcgttcagtggcagaggcat

SEQ ID NO: 3904491 - DNA, 25 bp, Homo sapien
aaagcagatgtgtggttccggtccc

SEQ ID NO: 3904492 - DNA, 25 bp, Homo sapien
tgcgcctgggccacgtcgttcagtg

SEQ ID NO: 3904493 - DNA, 25 bp, Homo sapien
gggtattgagaaatgccgagggacg

SEQ ID NO: 3904494 - DNA, 25 bp, Homo sapien
gagaaatgccgagggacggagttac

SEQ ID NO: 3904495 - DNA, 25 bp, Homo sapien
gggacggagttaccgtgcagagaag

SEQ ID NO: 3904496 - DNA, 25 bp, Homo sapien
aatgccgagggacggagttaccgtg

SEQ ID NO: 3904497 - DNA, 25 bp, Homo sapien
tgttcctcaagagacaggcttggat

SEQ ID NO: 3904498 - DNA, 25 bp, Homo sapien
agggtctgcgcggttgttcctcaag

SEQ ID NO: 3904499 - DNA, 25 bp, Homo sapien
tctgagaccagaccaagtggctgaa

SEQ ID NO: 3904500 - DNA, 25 bp, Homo sapien
gaaggcgggtcgtgtggtcagaaga

SEQ ID NO: 3904501 - DNA, 25 bp, Homo sapien
gtgtttagccgcctccagatcaagg

SEQ ID NO: 3904502 - DNA, 25 bp, Homo sapien
gacacccttagaccagccactttgg

SEQ ID NO: 3904503 - DNA, 25 bp, Homo sapien
aacagggtttgtgagcgacgatgac

SEQ ID NO: 3904504 - DNA, 25 bp, Homo sapien
gattgggctccagggtagacaacag

SEQ ID NO: 3904505 - DNA, 25 bp, Homo sapien
ctgagagagaagttggcattttgga

SEQ ID NO: 3904506 - DNA, 25 bp, Homo sapien
tttggatggcatcctcggcctggcg

SEQ ID NO: 3904507 - DNA, 25 bp, Homo sapien
cattttggatggcatcctcggcctg

SEQ ID NO: 3904508 - DNA, 25 bp, Homo sapien
gcgcacagcggcttcaccctggggc

SEQ ID NO: 3904509 - DNA, 25 bp, Homo sapien
agggtccttgtagcaggagggggag

SEQ ID NO: 3904510 - DNA, 25 bp, Homo sapien
aaagcagttgcgagctgacacctga

SEQ ID NO: 3904511 - DNA, 25 bp, Homo sapien
gaaaagcagttgcgagctgacacct

SEQ ID NO: 3904512 - DNA, 25 bp, Homo sapien
aaaagcagttgcgagctgacacctg

SEQ ID NO: 3904513 - DNA, 25 bp, Homo sapien
agacctcgcccacctgtctcagaag

SEQ ID NO: 3904514 - DNA, 25 bp, Homo sapien
ctggatgtcctggcggcagacctcg

SEQ ID NO: 3904515 - DNA, 25 bp, Homo sapien
tgtctcagaaggccctccagcttct

SEQ ID NO: 3904516 - DNA, 25 bp, Homo sapien
gcttccagcttcatatagaatgggg

SEQ ID NO: 3904517 - DNA, 25 bp, Homo sapien
ggagtcaaacctgcaaacggaggtg

SEQ ID NO: 3904518 - DNA, 25 bp, Homo sapien
aatattgagtcaggggatatcacag

SEQ ID NO: 3904519 - DNA, 25 bp, Homo sapien
actaaaggatgggagtcaaacctgc

SEQ ID NO: 3904520 - DNA, 25 bp, Homo sapien
ggcttgaggctccaactccaacaga

SEQ ID NO: 3904521 - DNA, 25 bp, Homo sapien
agaggctccttgctgtgtccagtgt

SEQ ID NO: 3904522 - DNA, 25 bp, Homo sapien
agctggatccctgcagcatctgtgg

SEQ ID NO: 3904523 - DNA, 25 bp, Homo sapien
tccagctggatccctgcagcatctg

SEQ ID NO: 3904524 - DNA, 25 bp, Homo sapien
cagctggatccctgcagcatctgtg

SEQ ID NO: 3904525 - DNA, 25 bp, Homo sapien
ctgagcctagtgaaggcatcttgca

SEQ ID NO: 3904526 - DNA, 25 bp, Homo sapien
acaggggttaatgggctggctttgc

SEQ ID NO: 3904527 - DNA, 25 bp, Homo sapien
aggacaggggttaatgggctggctt

SEQ ID NO: 3904528 - DNA, 25 bp, Homo sapien
gagaggacaggggttaatgggctgg

SEQ ID NO: 3904529 - DNA, 25 bp, Homo sapien
gggttaatgggctggctttgctcag

SEQ ID NO: 3904530 - DNA, 25 bp, Homo sapien
ccccgtgattgatagccgcatgtcc

SEQ ID NO: 3904531 - DNA, 25 bp, Homo sapien
tgatcccgggctgcactcaggcctg

SEQ ID NO: 3904532 - DNA, 25 bp, Homo sapien
gccaaggtccccgtgattgatagcc

SEQ ID NO: 3904533 - DNA, 25 bp, Homo sapien
gggctgcactcaggcctgccaaagc

SEQ ID NO: 3904534 - DNA, 25 bp, Homo sapien
agggagatggccaagtcactgcatg

SEQ ID NO: 3904535 - DNA, 25 bp, Homo sapien
gtgtgtgtttgcacgaaagtgtgtg

SEQ ID NO: 3904536 - DNA, 25 bp, Homo sapien
gtgtgtttgcacgaaagtgtgtgca

SEQ ID NO: 3904537 - DNA, 25 bp, Homo sapien
ggagatggccaagtcactgcatgtg

SEQ ID NO: 3904538 - DNA, 25 bp, Homo sapien
ctaaggggaccctgaaatagccctg

SEQ ID NO: 3904539 - DNA, 25 bp, Homo sapien
ctgggctacatgaccccagaagaca

SEQ ID NO: 3904540 - DNA, 25 bp, Homo sapien
ggcctcagccatgatcccattgatg

SEQ ID NO: 3904541 - DNA, 25 bp, Homo sapien
tgatcccattgatgctaactaaggg

SEQ ID NO: 3904542 - DNA, 25 bp, Homo sapien
ctccatccggtgctggtagggcagg

SEQ ID NO: 3904543 - DNA, 25 bp, Homo sapien
attgtcactgttgcctgctgagcca

SEQ ID NO: 3904544 - DNA, 25 bp, Homo sapien
ttgtcactgttgcctgctgagccag

SEQ ID NO: 3904545 - DNA, 25 bp, Homo sapien
aagaccttccaattccccaggctca

SEQ ID NO: 3904546 - DNA, 25 bp, Homo sapien
ggccatttctgtggaggactgtcat

SEQ ID NO: 3904547 - DNA, 25 bp, Homo sapien
tgaagaccgtggctgagctcaggcc

SEQ ID NO: 3904548 - DNA, 25 bp, Homo sapien
gccatttctgtggaggactgtcatc

SEQ ID NO: 3904549 - DNA, 25 bp, Homo sapien
gggaccaggtgaagaccgtggctga

SEQ ID NO: 3904550 - DNA, 25 bp, Homo sapien
gaggggacagcaccagaagagcacc

SEQ ID NO: 3904551 - DNA, 25 bp, Homo sapien
tgaggggacagcaccagaagagcac

SEQ ID NO: 3904552 - DNA, 25 bp, Homo sapien
aggggacagcaccagaagagcaccg

SEQ ID NO: 3904553 - DNA, 25 bp, Homo sapien
gccgggcccgggtcggatggcgcag

SEQ ID NO: 3904554 - DNA, 25 bp, Homo sapien
tggcaggtccatgcggggcagcggg

SEQ ID NO: 3904555 - DNA, 25 bp, Homo sapien
gtggtggtgctggcggcgcggccgc

SEQ ID NO: 3904556 - DNA, 25 bp, Homo sapien
cggcagggctcggagagccgcgcgc

SEQ ID NO: 3904557 - DNA, 25 bp, Homo sapien
tcgtccacgcgggcactgagcccat

SEQ ID NO: 3904558 - DNA, 25 bp, Homo sapien
tggagaagaattcctccacgccctc

SEQ ID NO: 3904559 - DNA, 25 bp, Homo sapien
ttggagaagaattcctccacgccct

SEQ ID NO: 3904560 - DNA, 25 bp, Homo sapien
ccctcgtccacgcgggcactgagcc

SEQ ID NO: 3904561 - DNA, 25 bp, Homo sapien
gcccagcttctttcgcagtgtacgg

SEQ ID NO: 3904562 - DNA, 25 bp, Homo sapien
gccgcagtaggtcgccaaatgtagt

SEQ ID NO: 3904563 - DNA, 25 bp, Homo sapien
gcagcagtatcatcgagtaggcctt

SEQ ID NO: 3904564 - DNA, 25 bp, Homo sapien
tatctcttgtgtagcgaggtcggct

SEQ ID NO: 3904565 - DNA, 25 bp, Homo sapien
gcagcattacttgtacccgctgttc

SEQ ID NO: 3904566 - DNA, 25 bp, Homo sapien
tcggctgacgcctatcctctgcagc

SEQ ID NO: 3904567 - DNA, 25 bp, Homo sapien
tgtacccgctgttcaaaggatggag

SEQ ID NO: 3904568 - DNA, 25 bp, Homo sapien
tacttgtacccgctgttcaaaggat

SEQ ID NO: 3904569 - DNA, 25 bp, Homo sapien
gctttcttgatctcgccatctttgc

SEQ ID NO: 3904570 - DNA, 25 bp, Homo sapien
ctttcttgatctcgccatctttgct

SEQ ID NO: 3904571 - DNA, 25 bp, Homo sapien
ggcggagctggggactcaggtacca

SEQ ID NO: 3904572 - DNA, 25 bp, Homo sapien
gcaaggcggagctggggactcaggt

SEQ ID NO: 3904573 - DNA, 25 bp, Homo sapien
ctgcaaggcggagctggggactcag

SEQ ID NO: 3904574 - DNA, 25 bp, Homo sapien
aaggcggagctggggactcaggtac

SEQ ID NO: 3904575 - DNA, 25 bp, Homo sapien
ggggcctccgtggaactgtccataa

SEQ ID NO: 3904576 - DNA, 25 bp, Homo sapien
gggcctccgtggaactgtccataat

SEQ ID NO: 3904577 - DNA, 25 bp, Homo sapien
gacacagagtgggtgcgggacttga

SEQ ID NO: 3904578 - DNA, 25 bp, Homo sapien
tgcgggacttgatcgagatgggagg

SEQ ID NO: 3904579 - DNA, 25 bp, Homo sapien
ggctcctgagctccgcattcaactg

SEQ ID NO: 3904580 - DNA, 25 bp, Homo sapien
agggcctggaccatcctgttggccc

SEQ ID NO: 3904581 - DNA, 25 bp, Homo sapien
aagcaagggtcctctgggaggccca

SEQ ID NO: 3904582 - DNA, 25 bp, Homo sapien
ctggggcccaagcaagggtcctctg

SEQ ID NO: 3904583 - DNA, 25 bp, Homo sapien
ctgcagggacttgggctttgaccag

SEQ ID NO: 3904584 - DNA, 25 bp, Homo sapien
cgagagaggcctcggcctcagctgg

SEQ ID NO: 3904585 - DNA, 25 bp, Homo sapien
ctgccgagagaggcctcggcctcag

SEQ ID NO: 3904586 - DNA, 25 bp, Homo sapien
agaggcctcggcctcagctggccat

SEQ ID NO: 3904587 - DNA, 25 bp, Homo sapien
agagaggcctcggcctcagctggcc

SEQ ID NO: 3904588 - DNA, 25 bp, Homo sapien
tcatgcacagacactgctcgccgcc

SEQ ID NO: 3904589 - DNA, 25 bp, Homo sapien
tcctcatgcacagacactgctcgcc

SEQ ID NO: 3904590 - DNA, 25 bp, Homo sapien
ggtcctcatgcacagacactgctcg

SEQ ID NO: 3904591 - DNA, 25 bp, Homo sapien
ggcctggagctggtcctcatgcaca

SEQ ID NO: 3904592 - DNA, 25 bp, Homo sapien
caagcacacgtggaggtgtctcccc

SEQ ID NO: 3904593 - DNA, 25 bp, Homo sapien
cattcaagcacacgtggaggtgtct

SEQ ID NO: 3904594 - DNA, 25 bp, Homo sapien
tcctgcattcaagcacacgtggagg

SEQ ID NO: 3904595 - DNA, 25 bp, Homo sapien
gcacacgtggaggtgtctcccctca

SEQ ID NO: 3904596 - DNA, 25 bp, Homo sapien
cagaggctgctcttcgggaagtgga

SEQ ID NO: 3904597 - DNA, 25 bp, Homo sapien
gctgctcttcgggaagtggagccag

SEQ ID NO: 3904598 - DNA, 25 bp, Homo sapien
ctccagtgcacataagcatgcactc

SEQ ID NO: 3904599 - DNA, 25 bp, Homo sapien
tgccttcagagcatcccccgtccct

SEQ ID NO: 3904600 - DNA, 25 bp, Homo sapien
aggtgcctcgagttttggcctgcgt

SEQ ID NO: 3904601 - DNA, 25 bp, Homo sapien
gcctcgagttttggcctgcgtttga

SEQ ID NO: 3904602 - DNA, 25 bp, Homo sapien
atggaggtgcctcgagttttggcct

SEQ ID NO: 3904603 - DNA, 25 bp, Homo sapien
cgagttttggcctgcgtttgaggac

SEQ ID NO: 3904604 - DNA, 25 bp, Homo sapien
ggccgccgcctctttggtctgtggc

SEQ ID NO: 3904605 - DNA, 25 bp, Homo sapien
cgccgcctctttggtctgtggctgg

SEQ ID NO: 3904606 - DNA, 25 bp, Homo sapien
gcagaggctcggttccaaggccaga

SEQ ID NO: 3904607 - DNA, 25 bp, Homo sapien
agaggctcggttccaaggccagatc

SEQ ID NO: 3904608 - DNA, 25 bp, Homo sapien
taatctcatgcggcaggagaggaga

SEQ ID NO: 3904609 - DNA, 25 bp, Homo sapien
ataatctcatgcggcaggagaggag

SEQ ID NO: 3904610 - DNA, 25 bp, Homo sapien
aataaaataatctcatgcggcagga

SEQ ID NO: 3904611 - DNA, 25 bp, Homo sapien
aaaataatctcatgcggcaggagag

SEQ ID NO: 3904612 - DNA, 25 bp, Homo sapien
acacaggcccccgagcaggacgccc

SEQ ID NO: 3904613 - DNA, 25 bp, Homo sapien
ctgcacacaggcccccgagcaggac

SEQ ID NO: 3904614 - DNA, 25 bp, Homo sapien
cacaggcccccgagcaggacgccct

SEQ ID NO: 3904615 - DNA, 25 bp, Homo sapien
gcacacaggcccccgagcaggacgc

SEQ ID NO: 3904616 - DNA, 25 bp, Homo sapien
cgcgatgagagtaaacgggccagca

SEQ ID NO: 3904617 - DNA, 25 bp, Homo sapien
ggaatcttgacgaacggcccaaatg

SEQ ID NO: 3904618 - DNA, 25 bp, Homo sapien
ctgtcagagtgacgccgcgatgaga

SEQ ID NO: 3904619 - DNA, 25 bp, Homo sapien
aatgcctggccgctgtcagagtgac

SEQ ID NO: 3904620 - DNA, 25 bp, Homo sapien
gtcacacggtgctgaaatggtttcg

SEQ ID NO: 3904621 - DNA, 25 bp, Homo sapien
agtcaactcgctcggacggcactcg

SEQ ID NO: 3904622 - DNA, 25 bp, Homo sapien
gctgaaatggtttcgagtcaactcg

SEQ ID NO: 3904623 - DNA, 25 bp, Homo sapien
taaatatgtgctgaaccgttcgggg

SEQ ID NO: 3904624 - DNA, 25 bp, Homo sapien
tgtgtgtgctcttatttccactggc

SEQ ID NO: 3904625 - DNA, 25 bp, Homo sapien
catttatttagcgctgtgtgtgtgc

SEQ ID NO: 3904626 - DNA, 25 bp, Homo sapien
gtgtgtgtgctcttatttccactgg

SEQ ID NO: 3904627 - DNA, 25 bp, Homo sapien
tgtgtgtgtgctcttatttccactg

SEQ ID NO: 3904628 - DNA, 25 bp, Homo sapien
gccccaggcggcccgccgaggcgca

SEQ ID NO: 3904629 - DNA, 25 bp, Homo sapien
tgccccaggcggcccgccgaggcgc

SEQ ID NO: 3904630 - DNA, 25 bp, Homo sapien
gtgccccaggcggcccgccgaggcg

SEQ ID NO: 3904631 - DNA, 25 bp, Homo sapien
ggtgccccaggcggcccgccgaggc

SEQ ID NO: 3904632 - DNA, 25 bp, Homo sapien
cgcgccggagtcctctgcggccggg

SEQ ID NO: 3904633 - DNA, 25 bp, Homo sapien
cgacgatgctatcgggactgcgcgc

SEQ ID NO: 3904634 - DNA, 25 bp, Homo sapien
ctcgacgatgctatcgggactgcgc

SEQ ID NO: 3904635 - DNA, 25 bp, Homo sapien
tgctatcgggactgcgcgccggagt

SEQ ID NO: 3904636 - DNA, 25 bp, Homo sapien
gccctccaggtactcaggccacaga

SEQ ID NO: 3904637 - DNA, 25 bp, Homo sapien
gcagaaaagcagaatgggacttgga

SEQ ID NO: 3904638 - DNA, 25 bp, Homo sapien
tccaggtactcaggccacagagagc

SEQ ID NO: 3904639 - DNA, 25 bp, Homo sapien
agcagaaaagcagaatgggacttgg

SEQ ID NO: 3904640 - DNA, 25 bp, Homo sapien
tgcgcccctttctcaccgcaggctg

SEQ ID NO: 3904641 - DNA, 25 bp, Homo sapien
aaagatgcggctgccgcttttgcgg

SEQ ID NO: 3904642 - DNA, 25 bp, Homo sapien
gctccagtaccagggacgctgtcca

SEQ ID NO: 3904643 - DNA, 25 bp, Homo sapien
gggacgctgtccaaggtcttcttac

SEQ ID NO: 3904644 - DNA, 25 bp, Homo sapien
cgtatagccaagtagcacgtccagg

SEQ ID NO: 3904645 - DNA, 25 bp, Homo sapien
gcgaagcgtcggaactcggcgtcaa

SEQ ID NO: 3904646 - DNA, 25 bp, Homo sapien
gcaggtcgccatgagcatccgtata

SEQ ID NO: 3904647 - DNA, 25 bp, Homo sapien
agcaaccgcgagaactcctggaagc

SEQ ID NO: 3904648 - DNA, 25 bp, Homo sapien
cacagaggctgcccactgtacccct

SEQ ID NO: 3904649 - DNA, 25 bp, Homo sapien
ccacagaggctgcccactgtacccc

SEQ ID NO: 3904650 - DNA, 25 bp, Homo sapien
acagaggctgcccactgtacccctc

SEQ ID NO: 3904651 - DNA, 25 bp, Homo sapien
gtagacctgccccacagacacctta

SEQ ID NO: 3904652 - DNA, 25 bp, Homo sapien
ccttgtagacctgccccacagacac

SEQ ID NO: 3904653 - DNA, 25 bp, Homo sapien
ttgtagacctgccccacagacacct

SEQ ID NO: 3904654 - DNA, 25 bp, Homo sapien
tagacctgccccacagacaccttac

SEQ ID NO: 3904655 - DNA, 25 bp, Homo sapien
gggcactgtagctatttcctaccac

SEQ ID NO: 3904656 - DNA, 25 bp, Homo sapien
gatgttgagatcagagacctgctcc

SEQ ID NO: 3904657 - DNA, 25 bp, Homo sapien
acttagaggtcaagccaagggcagg

SEQ ID NO: 3904658 - DNA, 25 bp, Homo sapien
gacctgctccccgacttgggctgtt

SEQ ID NO: 3904659 - DNA, 25 bp, Homo sapien
ggaggctggcggttctcaatgacca

SEQ ID NO: 3904660 - DNA, 25 bp, Homo sapien
caatgaggttatggctgttggcaac

SEQ ID NO: 3904661 - DNA, 25 bp, Homo sapien
tcttgcgccgctgcagagagttgga

SEQ ID NO: 3904662 - DNA, 25 bp, Homo sapien
ggtctcaggcagtaggtccacgtct

SEQ ID NO: 3904663 - DNA, 25 bp, Homo sapien
tccccaggctgagggagccctgtga

SEQ ID NO: 3904664 - DNA, 25 bp, Homo sapien
gttccccaggctgagggagccctgt

SEQ ID NO: 3904665 - DNA, 25 bp, Homo sapien
cagctaaaaacccccactgtgaagt

SEQ ID NO: 3904666 - DNA, 25 bp, Homo sapien
agccagctaaaaacccccactgtga

SEQ ID NO: 3904667 - DNA, 25 bp, Homo sapien
aactgggacacacaaggaccatgac

SEQ ID NO: 3904668 - DNA, 25 bp, Homo sapien
aatgtcactcctgccttagtccaga

SEQ ID NO: 3904669 - DNA, 25 bp, Homo sapien
tgcttgattgcaggaagttctcccc

SEQ ID NO: 3904670 - DNA, 25 bp, Homo sapien
gaagttctccccaatgtcactcctg

SEQ ID NO: 3904671 - DNA, 25 bp, Homo sapien
tggacttgctgacttccgaccgggc

SEQ ID NO: 3904672 - DNA, 25 bp, Homo sapien
gcaacaacaagtcccgtcgggtggc

SEQ ID NO: 3904673 - DNA, 25 bp, Homo sapien
tgtcctgacaactacaggcggccga

SEQ ID NO: 3904674 - DNA, 25 bp, Homo sapien
gctggcggcaaaacctctcgagtga

SEQ ID NO: 3904675 - DNA, 25 bp, Homo sapien
ctgagtgcgtcctcgacagctgctt

SEQ ID NO: 3904676 - DNA, 25 bp, Homo sapien
ctgcgcaggctgagtgcgtcctcga

SEQ ID NO: 3904677 - DNA, 25 bp, Homo sapien
gagctgggaagagaaaccggcgacc

SEQ ID NO: 3904678 - DNA, 25 bp, Homo sapien
cgctgaccccggagaccggccagca

SEQ ID NO: 3904679 - DNA, 25 bp, Homo sapien
gccccacgaccgtcgcctcctggac

SEQ ID NO: 3904680 - DNA, 25 bp, Homo sapien
ctcggaggtctgagcgctgccgggc

SEQ ID NO: 3904681 - DNA, 25 bp, Homo sapien
tcggaggtctgagcgctgccgggct

SEQ ID NO: 3904682 - DNA, 25 bp, Homo sapien
cctgccccacgaccgtcgcctcctg

SEQ ID NO: 3904683 - DNA, 25 bp, Homo sapien
cgggaataaggacaccagcctgtgc

SEQ ID NO: 3904684 - DNA, 25 bp, Homo sapien
cccagcctggcagttagcgggtcgg

SEQ ID NO: 3904685 - DNA, 25 bp, Homo sapien
tgcggccctgtgtttgaaggttaaa

SEQ ID NO: 3904686 - DNA, 25 bp, Homo sapien
gggcgctcagttccacctctcagag

SEQ ID NO: 3904687 - DNA, 25 bp, Homo sapien
gcaaaggacatagggatccgtcact

SEQ ID NO: 3904688 - DNA, 25 bp, Homo sapien
catggccgggcaaaggacataggga

SEQ ID NO: 3904689 - DNA, 25 bp, Homo sapien
ggacatagggatccgtcactgaaca

SEQ ID NO: 3904690 - DNA, 25 bp, Homo sapien
ccgggcaaaggacatagggatccgt

SEQ ID NO: 3904691 - DNA, 25 bp, Homo sapien
agatgacacacaggccatcggtcac

SEQ ID NO: 3904692 - DNA, 25 bp, Homo sapien
gagatgacacacaggccatcggtca

SEQ ID NO: 3904693 - DNA, 25 bp, Homo sapien
ctagagatgacacacaggccatcgg

SEQ ID NO: 3904694 - DNA, 25 bp, Homo sapien
tagagatgacacacaggccatcggt

SEQ ID NO: 3904695 - DNA, 25 bp, Homo sapien
gactccgaagctgcgcctgctgggc

SEQ ID NO: 3904696 - DNA, 25 bp, Homo sapien
tcctggagctccgactccgaagctg

SEQ ID NO: 3904697 - DNA, 25 bp, Homo sapien
gttccgcgggcctcatgggcaggca

SEQ ID NO: 3904698 - DNA, 25 bp, Homo sapien
tctagcgccccggcatgcggcttgg

SEQ ID NO: 3904699 - DNA, 25 bp, Homo sapien
ctctttggaccatgacggggcctca

SEQ ID NO: 3904700 - DNA, 25 bp, Homo sapien
tctctttggaccatgacggggcctc

SEQ ID NO: 3904701 - DNA, 25 bp, Homo sapien
tctttggaccatgacggggcctcac

SEQ ID NO: 3904702 - DNA, 25 bp, Homo sapien
tgtcccgttcctggtcaatgagacc

SEQ ID NO: 3904703 - DNA, 25 bp, Homo sapien
ggaatcctactgtggtgtgtgcccc

SEQ ID NO: 3904704 - DNA, 25 bp, Homo sapien
gcccaagaggcttagaggccagtga

SEQ ID NO: 3904705 - DNA, 25 bp, Homo sapien
ggacaagagacttgagccaggctcc

SEQ ID NO: 3904706 - DNA, 25 bp, Homo sapien
tgggcacgaaggcccgggaggctga

SEQ ID NO: 3904707 - DNA, 25 bp, Homo sapien
cttaagatgggcacgaaggcccggg

SEQ ID NO: 3904708 - DNA, 25 bp, Homo sapien
aagatgggcacgaaggcccgggagg

SEQ ID NO: 3904709 - DNA, 25 bp, Homo sapien
atgggcacgaaggcccgggaggctg

SEQ ID NO: 3904710 - DNA, 25 bp, Homo sapien
ctgcagcggcagcttgggtggcagc

SEQ ID NO: 3904711 - DNA, 25 bp, Homo sapien
gcggcagcttgggtggcagctcagc

SEQ ID NO: 3904712 - DNA, 25 bp, Homo sapien
tgcagcggcagcttgggtggcagct

SEQ ID NO: 3904713 - DNA, 25 bp, Homo sapien
cagcggcagcttgggtggcagctca

SEQ ID NO: 3904714 - DNA, 25 bp, Homo sapien
caatgtctctaagggtgcagacacc

SEQ ID NO: 3904715 - DNA, 25 bp, Homo sapien
gcctcaatgtctctaagggtgcaga

SEQ ID NO: 3904716 - DNA, 25 bp, Homo sapien
acagcgtggagcacgggagccccca

SEQ ID NO: 3904717 - DNA, 25 bp, Homo sapien
ccagcctcaatgtctctaagggtgc

SEQ ID NO: 3904718 - DNA, 25 bp, Homo sapien
gccaggttgtgccatgtcgggcccc

SEQ ID NO: 3904719 - DNA, 25 bp, Homo sapien
aggttgtgccatgtcgggccccaca

SEQ ID NO: 3904720 - DNA, 25 bp, Homo sapien
gttgtgccatgtcgggccccacagg

SEQ ID NO: 3904721 - DNA, 25 bp, Homo sapien
agagcgccaggttgtgccatgtcgg

SEQ ID NO: 3904722 - DNA, 25 bp, Homo sapien
gcaaagacccagggcagggcagagg

SEQ ID NO: 3904723 - DNA, 25 bp, Homo sapien
tgcaaagacccagggcagggcagag

SEQ ID NO: 3904724 - DNA, 25 bp, Homo sapien
ctgcaaagacccagggcagggcaga

SEQ ID NO: 3904725 - DNA, 25 bp, Homo sapien
gcaatagttgacgtactggtacagc

SEQ ID NO: 3904726 - DNA, 25 bp, Homo sapien
cagctcagggttgcaatagttgacg

SEQ ID NO: 3904727 - DNA, 25 bp, Homo sapien
ttgacgtactggtacagcggccgca

SEQ ID NO: 3904728 - DNA, 25 bp, Homo sapien
ttccctgcctggttcagctcagggt

SEQ ID NO: 3904729 - DNA, 25 bp, Homo sapien
acagggcaaagcgaggcctgggccc

SEQ ID NO: 3904730 - DNA, 25 bp, Homo sapien
ctagtggactgggacagggcaaagc

SEQ ID NO: 3904731 - DNA, 25 bp, Homo sapien
agtggactgggacagggcaaagcga

SEQ ID NO: 3904732 - DNA, 25 bp, Homo sapien
tgggacagggcaaagcgaggcctgg

SEQ ID NO: 3904733 - DNA, 25 bp, Homo sapien
gggagccagggcatgggtgggggtc

SEQ ID NO: 3904734 - DNA, 25 bp, Homo sapien
cgaggggagccagggcatgggtggg

SEQ ID NO: 3904735 - DNA, 25 bp, Homo sapien
ctccgaggggagccagggcatgggt

SEQ ID NO: 3904736 - DNA, 25 bp, Homo sapien
ggagccagggcatgggtgggggtca

SEQ ID NO: 3904737 - DNA, 25 bp, Homo sapien
catcttgtcgatgtccacctgggtt

SEQ ID NO: 3904738 - DNA, 25 bp, Homo sapien
actcagcatcttgtcgatgtccacc

SEQ ID NO: 3904739 - DNA, 25 bp, Homo sapien
ctgggttgacttatccacctcggcc

SEQ ID NO: 3904740 - DNA, 25 bp, Homo sapien
tccacctcggccttgtggtcactca

SEQ ID NO: 3904741 - DNA, 25 bp, Homo sapien
aagccaaattcaggcgtggaaggag

SEQ ID NO: 3904742 - DNA, 25 bp, Homo sapien
gccaaattcaggcgtggaaggaggg

SEQ ID NO: 3904743 - DNA, 25 bp, Homo sapien
tgaagccaaattcaggcgtggaagg

SEQ ID NO: 3904744 - DNA, 25 bp, Homo sapien
ccaaattcaggcgtggaaggagggg

SEQ ID NO: 3904745 - DNA, 25 bp, Homo sapien
agaccaaagtcccaagtgggggcag

SEQ ID NO: 3904746 - DNA, 25 bp, Homo sapien
tttcagcaagaccaaagtcccaagt

SEQ ID NO: 3904747 - DNA, 25 bp, Homo sapien
gccaaatttgcccccgccaccagag

SEQ ID NO: 3904748 - DNA, 25 bp, Homo sapien
ttattttcagcaagaccaaagtccc

SEQ ID NO: 3904749 - DNA, 25 bp, Homo sapien
cccaccctaggtgcaatgacggagt

SEQ ID NO: 3904750 - DNA, 25 bp, Homo sapien
cagaaccatatcctgggagggagag

SEQ ID NO: 3904751 - DNA, 25 bp, Homo sapien
cccagggactggcaaggtagtgtcc

SEQ ID NO: 3904752 - DNA, 25 bp, Homo sapien
aacatacaagggatagtggagcacc

SEQ ID NO: 3904753 - DNA, 25 bp, Homo sapien
cagtgtgacacactgcccagggaaa

SEQ ID NO: 3904754 - DNA, 25 bp, Homo sapien
ccagtgtgacacactgcccagggaa

SEQ ID NO: 3904755 - DNA, 25 bp, Homo sapien
gacacactgcccagggaaaagtgcc

SEQ ID NO: 3904756 - DNA, 25 bp, Homo sapien
tgtgacacactgcccagggaaaagt

SEQ ID NO: 3904757 - DNA, 25 bp, Homo sapien
ctgtgtgaggatggacgctttgtgg

SEQ ID NO: 3904758 - DNA, 25 bp, Homo sapien
ggtagctggttcgtcccctttcaga

SEQ ID NO: 3904759 - DNA, 25 bp, Homo sapien
gatgtgtgaggtgtagaagctcaga

SEQ ID NO: 3904760 - DNA, 25 bp, Homo sapien
agaaacgggtgttcagttgacaggt

SEQ ID NO: 3904761 - DNA, 25 bp, Homo sapien
tgagggcgaaagagggcatggcgcg

SEQ ID NO: 3904762 - DNA, 25 bp, Homo sapien
ggcgatgccagcgtgccaggtgaga

SEQ ID NO: 3904763 - DNA, 25 bp, Homo sapien
tggtttccagtgcagcgcggagtgg

SEQ ID NO: 3904764 - DNA, 25 bp, Homo sapien
cccggcgccggaggttggaggcgtg

SEQ ID NO: 3904765 - DNA, 25 bp, Homo sapien
aggcggcgcgttcccggtggcggcg

SEQ ID NO: 3904766 - DNA, 25 bp, Homo sapien
tccttagaaaccaggcggcgcgttc

SEQ ID NO: 3904767 - DNA, 25 bp, Homo sapien
cagccttccttaaggcggatgggtg

SEQ ID NO: 3904768 - DNA, 25 bp, Homo sapien
tggagcatgcgcagtcctcctgccg

SEQ ID NO: 3904769 - DNA, 25 bp, Homo sapien
gaggaagaggagcccagacaggcac

SEQ ID NO: 3904770 - DNA, 25 bp, Homo sapien
tcaaaaaacatccagaggaagagga

SEQ ID NO: 3904771 - DNA, 25 bp, Homo sapien
aaaaaacatccagaggaagaggagc

SEQ ID NO: 3904772 - DNA, 25 bp, Homo sapien
ccagaggaagaggagcccagacagg

SEQ ID NO: 3904773 - DNA, 25 bp, Homo sapien
gaaatcctactcaagaagagtggaa

SEQ ID NO: 3904774 - DNA, 25 bp, Homo sapien
tttggtagtcacaactgggcttggg

SEQ ID NO: 3904775 - DNA, 25 bp, Homo sapien
gattaagcataaagtcctggttcta

SEQ ID NO: 3904776 - DNA, 25 bp, Homo sapien
gagtggaactccgaacaatgactaa

SEQ ID NO: 3904777 - DNA, 25 bp, Homo sapien
ttcaactaaataaaggtgggccaca

SEQ ID NO: 3904778 - DNA, 25 bp, Homo sapien
ttatgcacatccagtcctaccagcc

SEQ ID NO: 3904779 - DNA, 25 bp, Homo sapien
tttgggacataagcctttgccccac

SEQ ID NO: 3904780 - DNA, 25 bp, Homo sapien
caagctgcttgagcccactctcttg

SEQ ID NO: 3904781 - DNA, 25 bp, Homo sapien
cagccagaggtgccccttatgcaca

SEQ ID NO: 3904782 - DNA, 25 bp, Homo sapien
tatcgtagcattagtggtccagcac

SEQ ID NO: 3904783 - DNA, 25 bp, Homo sapien
cacacagcagaggtagagggtcctt

SEQ ID NO: 3904784 - DNA, 25 bp, Homo sapien
agaactgtagatccctaggcccctg

SEQ ID NO: 3904785 - DNA, 25 bp, Homo sapien
gagctgcagcctaggaaacccaaat

SEQ ID NO: 3904786 - DNA, 25 bp, Homo sapien
tgagtgaacggagatactgactgat

SEQ ID NO: 3904787 - DNA, 25 bp, Homo sapien
ccacaaggtctttatgttctcagcc

SEQ ID NO: 3904788 - DNA, 25 bp, Homo sapien
gggtactccttatcagcaagttcag

SEQ ID NO: 3904789 - DNA, 25 bp, Homo sapien
tcagctatcccgtttgcatcctgga

SEQ ID NO: 3904790 - DNA, 25 bp, Homo sapien
gtggcatgatccaatcttcccaact

SEQ ID NO: 3904791 - DNA, 25 bp, Homo sapien
gggaccacaagtacacaccgccaca

SEQ ID NO: 3904792 - DNA, 25 bp, Homo sapien
gcatgatccaatcttcccaacttag

SEQ ID NO: 3904793 - DNA, 25 bp, Homo sapien
cagtggcatgatccaatcttcccaa

SEQ ID NO: 3904794 - DNA, 25 bp, Homo sapien
gcctcaagagtgacattctgagagc

SEQ ID NO: 3904795 - DNA, 25 bp, Homo sapien
cactctggccaagccagcgcagcac

SEQ ID NO: 3904796 - DNA, 25 bp, Homo sapien
ctggacacggccccatgctcaggaa

SEQ ID NO: 3904797 - DNA, 25 bp, Homo sapien
tggacacggccccatgctcaggaag

SEQ ID NO: 3904798 - DNA, 25 bp, Homo sapien
ctggccaagccagcgcagcactcat

SEQ ID NO: 3904799 - DNA, 25 bp, Homo sapien
ctgtagaggtagcctttttctcctg

SEQ ID NO: 3904800 - DNA, 25 bp, Homo sapien
tgttgtttctcgttccgagagaccc

SEQ ID NO: 3904801 - DNA, 25 bp, Homo sapien
ttctgttgtttctcgttccgagaga

SEQ ID NO: 3904802 - DNA, 25 bp, Homo sapien
tttctcgttccgagagacccctggc

SEQ ID NO: 3904803 - DNA, 25 bp, Homo sapien
ttctcgttccgagagacccctggca

SEQ ID NO: 3904804 - DNA, 25 bp, Homo sapien
gatagcagagatcagggcagaacac

SEQ ID NO: 3904805 - DNA, 25 bp, Homo sapien
gaagctgcttctgctgggtaggaca

SEQ ID NO: 3904806 - DNA, 25 bp, Homo sapien
tcacatctgcgtgtgccatggaaga

SEQ ID NO: 3904807 - DNA, 25 bp, Homo sapien
tgttagaggcataggcccaacagga

SEQ ID NO: 3904808 - DNA, 25 bp, Homo sapien
ttgtgaggcctatgaatgatggctg

SEQ ID NO: 3904809 - DNA, 25 bp, Homo sapien
tatgaatgatggctgtgctttgcca

SEQ ID NO: 3904810 - DNA, 25 bp, Homo sapien
gacccagaagacttgtgaggcctat

SEQ ID NO: 3904811 - DNA, 25 bp, Homo sapien
cttgagggacccagaagacttgtga

SEQ ID NO: 3904812 - DNA, 25 bp, Homo sapien
cgccatgtgttggacttagtatcct

SEQ ID NO: 3904813 - DNA, 25 bp, Homo sapien
cctcatgtttgtcttttaggtagtc

SEQ ID NO: 3904814 - DNA, 25 bp, Homo sapien
ctgtatcaggaaatcctcatgtttg

SEQ ID NO: 3904815 - DNA, 25 bp, Homo sapien
taggatgtggtctgttacgccatgt

SEQ ID NO: 3904816 - DNA, 25 bp, Homo sapien
ctaagccatgtgggccacgttatca

SEQ ID NO: 3904817 - DNA, 25 bp, Homo sapien
agccatgtgggccacgttatcaggg

SEQ ID NO: 3904818 - DNA, 25 bp, Homo sapien
gtgggccacgttatcagggccatat

SEQ ID NO: 3904819 - DNA, 25 bp, Homo sapien
gccacgttatcagggccatatgctg

SEQ ID NO: 3904820 - DNA, 25 bp, Homo sapien
agatggagtccgtgtctgttgtccg

SEQ ID NO: 3904821 - DNA, 25 bp, Homo sapien
gatggagtccgtgtctgttgtccgg

SEQ ID NO: 3904822 - DNA, 25 bp, Homo sapien
tggagtccgtgtctgttgtccgggc

SEQ ID NO: 3904823 - DNA, 25 bp, Homo sapien
ggagtccgtgtctgttgtccgggct

SEQ ID NO: 3904824 - DNA, 25 bp, Homo sapien
caacggtaggaactgagaagttaca

SEQ ID NO: 3904825 - DNA, 25 bp, Homo sapien
tacaggcctactcatggcctcactg

SEQ ID NO: 3904826 - DNA, 25 bp, Homo sapien
ttttggcaggcaacggtaggaactg

SEQ ID NO: 3904827 - DNA, 25 bp, Homo sapien
catggcctcactgccacgaagagct

SEQ ID NO: 3904828 - DNA, 25 bp, Homo sapien
tctctcttgagctagatagggcaga

SEQ ID NO: 3904829 - DNA, 25 bp, Homo sapien
ggatctcgactccacttgtcccaag

SEQ ID NO: 3904830 - DNA, 25 bp, Homo sapien
cctgcttccaggtgcggttgcttct

SEQ ID NO: 3904831 - DNA, 25 bp, Homo sapien
gaatagctgttctcgtatctccacc

SEQ ID NO: 3904832 - DNA, 25 bp, Homo sapien
tctgctcagcaaggattttgactgt

SEQ ID NO: 3904833 - DNA, 25 bp, Homo sapien
tctgaagctgtactgttgtgatgca

SEQ ID NO: 3904834 - DNA, 25 bp, Homo sapien
gaaagccacgttccctaatgtgtcc

SEQ ID NO: 3904835 - DNA, 25 bp, Homo sapien
ccttctgtcaagactcggggtgcta

SEQ ID NO: 3904836 - DNA, 25 bp, Homo sapien
atttttgagaccgactctcgatctg

SEQ ID NO: 3904837 - DNA, 25 bp, Homo sapien
tcttttgggtgttcacctaagaatg

SEQ ID NO: 3904838 - DNA, 25 bp, Homo sapien
aacattggtgtacatagtgtttgag

SEQ ID NO: 3904839 - DNA, 25 bp, Homo sapien
ggtgtacatagtgtttgagttccta

SEQ ID NO: 3904840 - DNA, 25 bp, Homo sapien
ttgggtgttcacctaagaatggtat

SEQ ID NO: 3904841 - DNA, 25 bp, Homo sapien
tcaccaagttccagtctacatgcat

SEQ ID NO: 3904842 - DNA, 25 bp, Homo sapien
gctgttgagaactttggtgctcata

SEQ ID NO: 3904843 - DNA, 25 bp, Homo sapien
catgcattgtacagtgctgttgaga

SEQ ID NO: 3904844 - DNA, 25 bp, Homo sapien
catctaagcttaggcccttccagct

SEQ ID NO: 3904845 - DNA, 25 bp, Homo sapien
ggctgttcctttggtatgaagagat

SEQ ID NO: 3904846 - DNA, 25 bp, Homo sapien
cttgtgctggagttctggtattttg

SEQ ID NO: 3904847 - DNA, 25 bp, Homo sapien
aagactggtagccaggaggcttctc

SEQ ID NO: 3904848 - DNA, 25 bp, Homo sapien
catggttttctcatagcggttgtct

SEQ ID NO: 3904849 - DNA, 25 bp, Homo sapien
gtggtagcgtacagccggtcgccat

SEQ ID NO: 3904850 - DNA, 25 bp, Homo sapien
tgagagtcaaccactacagccgatt

SEQ ID NO: 3904851 - DNA, 25 bp, Homo sapien
acagccgatttgaccccaggtacca

SEQ ID NO: 3904852 - DNA, 25 bp, Homo sapien
ttcggtgtcccgacgtctcgatggg

SEQ ID NO: 3904853 - DNA, 25 bp, Homo sapien
tgctggagccctagatcaatggtca

SEQ ID NO: 3904854 - DNA, 25 bp, Homo sapien
cagaggtccggatcaagtgccattt

SEQ ID NO: 3904855 - DNA, 25 bp, Homo sapien
cacgtaacgtcttcactgggctaaa

SEQ ID NO: 3904856 - DNA, 25 bp, Homo sapien
ctaaccattgactctgtggtgctgg

SEQ ID NO: 3904857 - DNA, 25 bp, Homo sapien
tgcaacctctgccctctgcctccct

SEQ ID NO: 3904858 - DNA, 25 bp, Homo sapien
tttgagacgtagtctcgctctgttg

SEQ ID NO: 3904859 - DNA, 25 bp, Homo sapien
ttgagacgtagtctcgctctgttgc

SEQ ID NO: 3904860 - DNA, 25 bp, Homo sapien
caacctctgccctctgcctccctgg

SEQ ID NO: 3904861 - DNA, 25 bp, Homo sapien
agaaaggattcgtctatggtcactc

SEQ ID NO: 3904862 - DNA, 25 bp, Homo sapien
ttctgaagaagcttgcgattctggg

SEQ ID NO: 3904863 - DNA, 25 bp, Homo sapien
gattctgggtgctcttgtcttctgt

SEQ ID NO: 3904864 - DNA, 25 bp, Homo sapien
tgtgagaaaggattcgtctatggtc

SEQ ID NO: 3904865 - DNA, 25 bp, Homo sapien
tactcgcttccggtagtcatctgaa

SEQ ID NO: 3904866 - DNA, 25 bp, Homo sapien
aatggtctggccactggtgtatgtg

SEQ ID NO: 3904867 - DNA, 25 bp, Homo sapien
catctgaacagggttttcgattttg

SEQ ID NO: 3904868 - DNA, 25 bp, Homo sapien
ctggccactggtgtatgtgggccat

SEQ ID NO: 3904869 - DNA, 25 bp, Homo sapien
ctccttgcgtaggtagttttccagt

SEQ ID NO: 3904870 - DNA, 25 bp, Homo sapien
actggggcttggcagtgcgaaaggg

SEQ ID NO: 3904871 - DNA, 25 bp, Homo sapien
agctccttgcgtaggtagttttcca

SEQ ID NO: 3904872 - DNA, 25 bp, Homo sapien
ttggcagtgcgaaaggggtgctgct

SEQ ID NO: 3904873 - DNA, 25 bp, Homo sapien
tgtacgttttgaagtcctctatgaa

SEQ ID NO: 3904874 - DNA, 25 bp, Homo sapien
agcatcccctcatacgcattcttga

SEQ ID NO: 3904875 - DNA, 25 bp, Homo sapien
tcctctatgaagaactcaaagatct

SEQ ID NO: 3904876 - DNA, 25 bp, Homo sapien
tcttgatggaggatagtaatggctt

SEQ ID NO: 3904877 - DNA, 25 bp, Homo sapien
ttgtcgatgagttttagcaagttca

SEQ ID NO: 3904878 - DNA, 25 bp, Homo sapien
gccaggatcctctcattgcagtcct

SEQ ID NO: 3904879 - DNA, 25 bp, Homo sapien
gagcccgaatcttctccctttggtg

SEQ ID NO: 3904880 - DNA, 25 bp, Homo sapien
ctcgctctgcaatgaaatcttctcc

SEQ ID NO: 3904881 - DNA, 25 bp, Homo sapien
cttgtcgtggagttggcaggaattc

SEQ ID NO: 3904882 - DNA, 25 bp, Homo sapien
agttggcaggaattcggggacttgg

SEQ ID NO: 3904883 - DNA, 25 bp, Homo sapien
ggcaggaattcggggacttggtcat

SEQ ID NO: 3904884 - DNA, 25 bp, Homo sapien
ccttgtcgtggagttggcaggaatt

SEQ ID NO: 3904885 - DNA, 25 bp, Homo sapien
attcggcaaggtgccaatgtttccc

SEQ ID NO: 3904886 - DNA, 25 bp, Homo sapien
tggccatttctgagaattcggcaag

SEQ ID NO: 3904887 - DNA, 25 bp, Homo sapien
tttctgagaattcggcaaggtgcca

SEQ ID NO: 3904888 - DNA, 25 bp, Homo sapien
tgagaattcggcaaggtgccaatgt

SEQ ID NO: 3904889 - DNA, 25 bp, Homo sapien
gctgcccctggacccctgtatgcag

SEQ ID NO: 3904890 - DNA, 25 bp, Homo sapien
ctggcaagaaggtggctgtgtggtc

SEQ ID NO: 3904891 - DNA, 25 bp, Homo sapien
ggacccctgtatgcagctggtcacc

SEQ ID NO: 3904892 - DNA, 25 bp, Homo sapien
tatgcagctggtcaccccagggagt

SEQ ID NO: 3904893 - DNA, 25 bp, Homo sapien
tcaggtctgcgatgaggatcttaca

SEQ ID NO: 3904894 - DNA, 25 bp, Homo sapien
gctaatgacatgtcctcccgctggt

SEQ ID NO: 3904895 - DNA, 25 bp, Homo sapien
tcactgaggtagtgcaggtactcct

SEQ ID NO: 3904896 - DNA, 25 bp, Homo sapien
tggtaccgcagctcattcaggtctg

SEQ ID NO: 3904897 - DNA, 25 bp, Homo sapien
tgctcctgaagatccttgttggtct

SEQ ID NO: 3904898 - DNA, 25 bp, Homo sapien
gagccagggttaacttcacagggtc

SEQ ID NO: 3904899 - DNA, 25 bp, Homo sapien
tcttgccgggtcatcttaagagcca

SEQ ID NO: 3904900 - DNA, 25 bp, Homo sapien
tgagttccatctgcgtgcgggtcag

SEQ ID NO: 3904901 - DNA, 25 bp, Homo sapien
cacctgtgagaccccgtcctaccct

SEQ ID NO: 3904902 - DNA, 25 bp, Homo sapien
ggatctcatgctccttgcgaacctc

SEQ ID NO: 3904903 - DNA, 25 bp, Homo sapien
ctcatgctccttgcgaacctcctcg

SEQ ID NO: 3904904 - DNA, 25 bp, Homo sapien
atgctccttgcgaacctcctcgtag

SEQ ID NO: 3904905 - DNA, 25 bp, Homo sapien
gaggatctcatgctccttgcgaacc

SEQ ID NO: 3904906 - DNA, 25 bp, Homo sapien
tcagcgtgctcatgtgcagctgcat

SEQ ID NO: 3904907 - DNA, 25 bp, Homo sapien
tttgcacttggtccagtcaggccgc

SEQ ID NO: 3904908 - DNA, 25 bp, Homo sapien
gcagctcagagaagaattggtcccg

SEQ ID NO: 3904909 - DNA, 25 bp, Homo sapien
gtggaagtgcgctggatctcctgca

SEQ ID NO: 3904910 - DNA, 25 bp, Homo sapien
ggcccacatgtaagcaggacctggg

SEQ ID NO: 3904911 - DNA, 25 bp, Homo sapien
tctgggcccacatgtaagcaggacc

SEQ ID NO: 3904912 - DNA, 25 bp, Homo sapien
gagctggagtctgggcccacatgta

SEQ ID NO: 3904913 - DNA, 25 bp, Homo sapien
ggagtctgggcccacatgtaagcag

SEQ ID NO: 3904914 - DNA, 25 bp, Homo sapien
gcagccccgaaccaatctcttccag

SEQ ID NO: 3904915 - DNA, 25 bp, Homo sapien
ccagggaagaagtctttctcccgca

SEQ ID NO: 3904916 - DNA, 25 bp, Homo sapien
gggaagaagtctttctcccgcagca

SEQ ID NO: 3904917 - DNA, 25 bp, Homo sapien
cgcagcagccccgaaccaatctctt

SEQ ID NO: 3904918 - DNA, 25 bp, Homo sapien
ggttgaccacgtccttcttgcttgg

SEQ ID NO: 3904919 - DNA, 25 bp, Homo sapien
cttcttgttctccacgaggccatca

SEQ ID NO: 3904920 - DNA, 25 bp, Homo sapien
caggcatccttgaggaggttgacca

SEQ ID NO: 3904921 - DNA, 25 bp, Homo sapien
tcagcaagacgttccttccaggcat

SEQ ID NO: 3904922 - DNA, 25 bp, Homo sapien
aaaatagtataagcccaggccatgg

SEQ ID NO: 3904923 - DNA, 25 bp, Homo sapien
ctttcccatcaagactgcatagaac

SEQ ID NO: 3904924 - DNA, 25 bp, Homo sapien
caagactgcatagaactgactcata

SEQ ID NO: 3904925 - DNA, 25 bp, Homo sapien
cataacctcgttggagtggaagatc

SEQ ID NO: 3904926 - DNA, 25 bp, Homo sapien
cagctgggctactgtctccttctgg

SEQ ID NO: 3904927 - DNA, 25 bp, Homo sapien
gctgggctactgtctccttctgggt

SEQ ID NO: 3904928 - DNA, 25 bp, Homo sapien
ttgaactgctccatggttagtagcc

SEQ ID NO: 3904929 - DNA, 25 bp, Homo sapien
gtagcccctcgttctgactgtcagc

SEQ ID NO: 3904930 - DNA, 25 bp, Homo sapien
tcttgagagggaaggtactcttgag

SEQ ID NO: 3904931 - DNA, 25 bp, Homo sapien
gagcggtagttgagcaagtctgcat

SEQ ID NO: 3904932 - DNA, 25 bp, Homo sapien
ctccataaacagtgagcggtagttg

SEQ ID NO: 3904933 - DNA, 25 bp, Homo sapien
tagttgagcaagtctgcattgctgc

SEQ ID NO: 3904934 - DNA, 25 bp, Homo sapien
tgctttagctgctgtaagtactcgt

SEQ ID NO: 3904935 - DNA, 25 bp, Homo sapien
gctgtaagtactcgtccttctcatc

SEQ ID NO: 3904936 - DNA, 25 bp, Homo sapien
tgttcccagagtttttgcacaaagg

SEQ ID NO: 3904937 - DNA, 25 bp, Homo sapien
tttttgcacaaagggctcactctgg

SEQ ID NO: 3904938 - DNA, 25 bp, Homo sapien
ggctgagcagtggatggtgcatggt

SEQ ID NO: 3904939 - DNA, 25 bp, Homo sapien
gatggtgcatggtgcacagggagac

SEQ ID NO: 3904940 - DNA, 25 bp, Homo sapien
gggcccagcctgtgggactcgccta

SEQ ID NO: 3904941 - DNA, 25 bp, Homo sapien
gactcgcctatggatgagggtcact

SEQ ID NO: 3904942 - DNA, 25 bp, Homo sapien
taggtgttcactgtctgcttgtcca

SEQ ID NO: 3904943 - DNA, 25 bp, Homo sapien
aaggcctggctcatgtaggtgttca

SEQ ID NO: 3904944 - DNA, 25 bp, Homo sapien
tctggaggatttccaccacggcttc

SEQ ID NO: 3904945 - DNA, 25 bp, Homo sapien
ggcatttccgactcagggagctgga

SEQ ID NO: 3904946 - DNA, 25 bp, Homo sapien
ggctctggctctcgaggtcccacac

SEQ ID NO: 3904947 - DNA, 25 bp, Homo sapien
ctctggctctcgaggtcccacacgc

SEQ ID NO: 3904948 - DNA, 25 bp, Homo sapien
gctctggctctcgaggtcccacacg

SEQ ID NO: 3904949 - DNA, 25 bp, Homo sapien
aggctctggctctcgaggtcccaca

SEQ ID NO: 3904950 - DNA, 25 bp, Homo sapien
ttagcaggactggagtacgcaggct

SEQ ID NO: 3904951 - DNA, 25 bp, Homo sapien
gggttagcaggactggagtacgcag

SEQ ID NO: 3904952 - DNA, 25 bp, Homo sapien
aggactggagtacgcaggctgccca

SEQ ID NO: 3904953 - DNA, 25 bp, Homo sapien
tatattaaaagctaggggttagcag

SEQ ID NO: 3904954 - DNA, 25 bp, Homo sapien
aaatggaggcaacaggagcacaagg

SEQ ID NO: 3904955 - DNA, 25 bp, Homo sapien
gcagaggaggtcaatgcctttgctc

SEQ ID NO: 3904956 - DNA, 25 bp, Homo sapien
tctctgagctatgcagccttggcct

SEQ ID NO: 3904957 - DNA, 25 bp, Homo sapien
gaagtagagcccttacacgatggag

SEQ ID NO: 3904958 - DNA, 25 bp, Homo sapien
gtgcccctagagcaccctggctgtg

SEQ ID NO: 3904959 - DNA, 25 bp, Homo sapien
ggctgccggtcgcaagacacagagc

SEQ ID NO: 3904960 - DNA, 25 bp, Homo sapien
gtgagagttgacaatggtagttttc

SEQ ID NO: 3904961 - DNA, 25 bp, Homo sapien
cagccgttctctcagcccatggttg

SEQ ID NO: 3904962 - DNA, 25 bp, Homo sapien
ccgagctgtagacgtgggtgccttt

SEQ ID NO: 3904963 - DNA, 25 bp, Homo sapien
ggcaaactgggtctcaggtacctga

SEQ ID NO: 3904964 - DNA, 25 bp, Homo sapien
cctttttgcgggatctgcgagatac

SEQ ID NO: 3904965 - DNA, 25 bp, Homo sapien
gttctaagagatgagagccccaggg

SEQ ID NO: 3904966 - DNA, 25 bp, Homo sapien
agaatcttccatcctgatgcctgag

SEQ ID NO: 3904967 - DNA, 25 bp, Homo sapien
cctgatgcctgagtcggtagtgaag

SEQ ID NO: 3904968 - DNA, 25 bp, Homo sapien
gccagtgccagcaccgcaggcggtc

SEQ ID NO: 3904969 - DNA, 25 bp, Homo sapien
tgcctgagtcggtagtgaagccagt

SEQ ID NO: 3904970 - DNA, 25 bp, Homo sapien
aattcccgtggggctgtgcgggagc

SEQ ID NO: 3904971 - DNA, 25 bp, Homo sapien
attcccgtggggctgtgcgggagca

SEQ ID NO: 3904972 - DNA, 25 bp, Homo sapien
ttcccgtggggctgtgcgggagcat

SEQ ID NO: 3904973 - DNA, 25 bp, Homo sapien
tgcgctcttcgacggcccagtggct

SEQ ID NO: 3904974 - DNA, 25 bp, Homo sapien
gtgcccagaatacgcttcctgccgg

SEQ ID NO: 3904975 - DNA, 25 bp, Homo sapien
gcgccccgtgcccagaatacgcttc

SEQ ID NO: 3904976 - DNA, 25 bp, Homo sapien
tgggtggtatcccaccactgccgct

SEQ ID NO: 3904977 - DNA, 25 bp, Homo sapien
cacgcgacacgttcttgagccagag

SEQ ID NO: 3904978 - DNA, 25 bp, Homo sapien
tcccggtgcgagttgttgtagcagc

SEQ ID NO: 3904979 - DNA, 25 bp, Homo sapien
cgccctggaagtgaacgctgcagag

SEQ ID NO: 3904980 - DNA, 25 bp, Homo sapien
tggaaacgtgtagaagtgcagcgcc

SEQ ID NO: 3904981 - DNA, 25 bp, Homo sapien
tttgcgctcattgacgccgcgcagc

SEQ ID NO: 3904982 - DNA, 25 bp, Homo sapien
tgacgccgcgcagcgggaagatggt

SEQ ID NO: 3904983 - DNA, 25 bp, Homo sapien
cattgacgccgcgcagcgggaagat

SEQ ID NO: 3904984 - DNA, 25 bp, Homo sapien
gcgggaagatggtggggacgcgtac

SEQ ID NO: 3904985 - DNA, 25 bp, Homo sapien
cggccccagcgggtctgcgcgctac

SEQ ID NO: 3904986 - DNA, 25 bp, Homo sapien
cagtggaggcagagggtgaggactg

SEQ ID NO: 3904987 - DNA, 25 bp, Homo sapien
gcagagggtgaggactgctgctgct

SEQ ID NO: 3904988 - DNA, 25 bp, Homo sapien
ctgggcagtggaggcagagggtgag

SEQ ID NO: 3904989 - DNA, 25 bp, Homo sapien
aggcagagggtgaggactgctgctg

SEQ ID NO: 3904990 - DNA, 25 bp, Homo sapien
gggtgagaagcacggccgcggaagc

SEQ ID NO: 3904991 - DNA, 25 bp, Homo sapien
ggccgcggaagcagataccaggttc

SEQ ID NO: 3904992 - DNA, 25 bp, Homo sapien
agcacggccgcggaagcagatacca

SEQ ID NO: 3904993 - DNA, 25 bp, Homo sapien
cagataccaggttcggctgcagctg

SEQ ID NO: 3904994 - DNA, 25 bp, Homo sapien
cagccctgcggtagcagcctgtaac

SEQ ID NO: 3904995 - DNA, 25 bp, Homo sapien
ggagcctgactgctgtctacagtgg

SEQ ID NO: 3904996 - DNA, 25 bp, Homo sapien
ggctgtacggatcccggagcctgac

SEQ ID NO: 3904997 - DNA, 25 bp, Homo sapien
cacttgcactgtgagatcgatgggc

SEQ ID NO: 3904998 - DNA, 25 bp, Homo sapien
tcacgcagttcttcgcgcagcttgg

SEQ ID NO: 3904999 - DNA, 25 bp, Homo sapien
cgtggtgcctgacgacaaggagtac

SEQ ID NO: 3905000 - DNA, 25 bp, Homo sapien
caaggagtacgaatggtcggagcca

SEQ ID NO: 3905001 - DNA, 25 bp, Homo sapien
tgcttcttgcggatgacagccatgg

SEQ ID NO: 3905002 - DNA, 25 bp, Homo sapien
gcccaggagtatagaggagttcaac

SEQ ID NO: 3905003 - DNA, 25 bp, Homo sapien
gaaacaattgaggatgccaggtcac

SEQ ID NO: 3905004 - DNA, 25 bp, Homo sapien
gagtccagctgccttaagcctcagt

SEQ ID NO: 3905005 - DNA, 25 bp, Homo sapien
tcagtactgtcaaccagtgcccagg

SEQ ID NO: 3905006 - DNA, 25 bp, Homo sapien
gatccccttgtaaatggcctcctgg

SEQ ID NO: 3905007 - DNA, 25 bp, Homo sapien
tagagttgtctgactgctgaccaac

SEQ ID NO: 3905008 - DNA, 25 bp, Homo sapien
tcccaaacctatagtccctggacat

SEQ ID NO: 3905009 - DNA, 25 bp, Homo sapien
gataaacctaagtccctggcaagct

SEQ ID NO: 3905010 - DNA, 25 bp, Homo sapien
cagcggcagcggcaacccagcgcgg

SEQ ID NO: 3905011 - DNA, 25 bp, Homo sapien
agcggcagcggcaacccagcgcggt

SEQ ID NO: 3905012 - DNA, 25 bp, Homo sapien
ccgaggggctggcacgatggcggca

SEQ ID NO: 3905013 - DNA, 25 bp, Homo sapien
aggggctggcacgatggcggcagcg

SEQ ID NO: 3905014 - DNA, 25 bp, Homo sapien
cggggactctcagcggagcctcccg

SEQ ID NO: 3905015 - DNA, 25 bp, Homo sapien
ggggactctcagcggagcctcccgg

SEQ ID NO: 3905016 - DNA, 25 bp, Homo sapien
gggactctcagcggagcctcccggc

SEQ ID NO: 3905017 - DNA, 25 bp, Homo sapien
agaaaaaggcctggccatggcgcag

SEQ ID NO: 3905018 - DNA, 25 bp, Homo sapien
catccggacggtcctgactagagaa

SEQ ID NO: 3905019 - DNA, 25 bp, Homo sapien
acggtacggcccagataggcgcccg

SEQ ID NO: 3905020 - DNA, 25 bp, Homo sapien
catccccggatccttcgtaggtggg

SEQ ID NO: 3905021 - DNA, 25 bp, Homo sapien
ggctatggtcgggaacagggtgagg

SEQ ID NO: 3905022 - DNA, 25 bp, Homo sapien
ggtgaggggcccaagccccggctgc

SEQ ID NO: 3905023 - DNA, 25 bp, Homo sapien
tgaggggcccaagccccggctgcgg

SEQ ID NO: 3905024 - DNA, 25 bp, Homo sapien
ccggccgggctatggtcgggaacag

SEQ ID NO: 3905025 - DNA, 25 bp, Homo sapien
ccgaggggcagacaaggagggggcg

SEQ ID NO: 3905026 - DNA, 25 bp, Homo sapien
cagacaaggagggggcgttcaccta

SEQ ID NO: 3905027 - DNA, 25 bp, Homo sapien
gggcagacaaggagggggcgttcac

SEQ ID NO: 3905028 - DNA, 25 bp, Homo sapien
acttccgaggggcagacaaggaggg

SEQ ID NO: 3905029 - DNA, 25 bp, Homo sapien
atcccctcccgcctcatattccctg

SEQ ID NO: 3905030 - DNA, 25 bp, Homo sapien
cagtccgggctccacaaagggcgcg

SEQ ID NO: 3905031 - DNA, 25 bp, Homo sapien
gctccacaaagggcgcggtaagaaa

SEQ ID NO: 3905032 - DNA, 25 bp, Homo sapien
tgccctccctgcgagaactccagtc

SEQ ID NO: 3905033 - DNA, 25 bp, Homo sapien
ttacagaagtgcacctccacgttca

SEQ ID NO: 3905034 - DNA, 25 bp, Homo sapien
tacagaagtgcacctccacgttcag

SEQ ID NO: 3905035 - DNA, 25 bp, Homo sapien
gaacctgatttccatgtcctcatgg

SEQ ID NO: 3905036 - DNA, 25 bp, Homo sapien
tcattgtcctgtgggtagtccctcc

SEQ ID NO: 3905037 - DNA, 25 bp, Homo sapien
cctcatgggccaggatatggactag

SEQ ID NO: 3905038 - DNA, 25 bp, Homo sapien
agtccctccttattgcccagctcca

SEQ ID NO: 3905039 - DNA, 25 bp, Homo sapien
taccggcaggcgggtataatcccag

SEQ ID NO: 3905040 - DNA, 25 bp, Homo sapien
tgggcaagagtgacacttcactcca

SEQ ID NO: 3905041 - DNA, 25 bp, Homo sapien
ggcaagagtgacacttcactccagc

SEQ ID NO: 3905042 - DNA, 25 bp, Homo sapien
taaaattagccggattataccggca

SEQ ID NO: 3905043 - DNA, 25 bp, Homo sapien
ttgttgactaagtgcatgagtgtgt

SEQ ID NO: 3905044 - DNA, 25 bp, Homo sapien
gcccagccctcaaacaaactatttg

SEQ ID NO: 3905045 - DNA, 25 bp, Homo sapien
tggcccagccctcaaacaaactatt

SEQ ID NO: 3905046 - DNA, 25 bp, Homo sapien
ctaagtgcatgagtgtgtcagagcc

SEQ ID NO: 3905047 - DNA, 25 bp, Homo sapien
tcctcagaaagggtatgccaaccag

SEQ ID NO: 3905048 - DNA, 25 bp, Homo sapien
tgtgaccaacactcaagccaatgag

SEQ ID NO: 3905049 - DNA, 25 bp, Homo sapien
gaaagcttggatccagtcacgcctg

SEQ ID NO: 3905050 - DNA, 25 bp, Homo sapien
gctctctgaggaataggacacatca

SEQ ID NO: 3905051 - DNA, 25 bp, Homo sapien
ttgatgggagtgactcctacccact

SEQ ID NO: 3905052 - DNA, 25 bp, Homo sapien
gcaagtgatcccttagtctcatggg

SEQ ID NO: 3905053 - DNA, 25 bp, Homo sapien
gacctggccctttctaggatatttc

SEQ ID NO: 3905054 - DNA, 25 bp, Homo sapien
cccgaggccaggtgattacctgacc

SEQ ID NO: 3905055 - DNA, 25 bp, Homo sapien
gagcgtcacccggcctcacggagac

SEQ ID NO: 3905056 - DNA, 25 bp, Homo sapien
tctggagcgtcacccggcctcacgg

SEQ ID NO: 3905057 - DNA, 25 bp, Homo sapien
tggagcgtcacccggcctcacggag

SEQ ID NO: 3905058 - DNA, 25 bp, Homo sapien
ggagcgtcacccggcctcacggaga

SEQ ID NO: 3905059 - DNA, 25 bp, Homo sapien
cgcctagttgggttctatcattatc

SEQ ID NO: 3905060 - DNA, 25 bp, Homo sapien
aatctgctcccaaattggcttgtct

SEQ ID NO: 3905061 - DNA, 25 bp, Homo sapien
tgaatgaagctggatccaatctgct

SEQ ID NO: 3905062 - DNA, 25 bp, Homo sapien
gtaaattgcgcctagttgggttcta

SEQ ID NO: 3905063 - DNA, 25 bp, Homo sapien
cttcccacgtaaggcatgacgcgtc

SEQ ID NO: 3905064 - DNA, 25 bp, Homo sapien
gtccttcccacgtaaggcatgacgc

SEQ ID NO: 3905065 - DNA, 25 bp, Homo sapien
tggaactgttgtccttcccacgtaa

SEQ ID NO: 3905066 - DNA, 25 bp, Homo sapien
cccacgtaaggcatgacgcgtcaat

SEQ ID NO: 3905067 - DNA, 25 bp, Homo sapien
atgcagctatctggagtgggctgat

SEQ ID NO: 3905068 - DNA, 25 bp, Homo sapien
atgatgcagctatctggagtgggct

SEQ ID NO: 3905069 - DNA, 25 bp, Homo sapien
tcctgcgcggtgatgctgtgctgaa

SEQ ID NO: 3905070 - DNA, 25 bp, Homo sapien
gctgaattttctggaacggaaggct

SEQ ID NO: 3905071 - DNA, 25 bp, Homo sapien
tgggaattatcgtcatcaaggaggc

SEQ ID NO: 3905072 - DNA, 25 bp, Homo sapien
agtgaacaatgagctccctacagag

SEQ ID NO: 3905073 - DNA, 25 bp, Homo sapien
gaggatgtacctgcctccaagcaca

SEQ ID NO: 3905074 - DNA, 25 bp, Homo sapien
taggagcctagctaaccagcactgt

SEQ ID NO: 3905075 - DNA, 25 bp, Homo sapien
aacatctggtggaaccccatgatgg

SEQ ID NO: 3905076 - DNA, 25 bp, Homo sapien
gaaccccatgatggggtcttcatcc

SEQ ID NO: 3905077 - DNA, 25 bp, Homo sapien
gttctttaataggaacatctggtgg

SEQ ID NO: 3905078 - DNA, 25 bp, Homo sapien
ccaagcatcgttgatgttctttaat

SEQ ID NO: 3905079 - DNA, 25 bp, Homo sapien
agccaaagttgtgcagggcgagcct

SEQ ID NO: 3905080 - DNA, 25 bp, Homo sapien
cagccaaagttgtgcagggcgagcc

SEQ ID NO: 3905081 - DNA, 25 bp, Homo sapien
tcagccaaagttgtgcagggcgagc

SEQ ID NO: 3905082 - DNA, 25 bp, Homo sapien
gaggaaacagcgtgagtgcctagct

SEQ ID NO: 3905083 - DNA, 25 bp, Homo sapien
aggaaacagcgtgagtgcctagctg

SEQ ID NO: 3905084 - DNA, 25 bp, Homo sapien
tgggagagaactgccctacacggct

SEQ ID NO: 3905085 - DNA, 25 bp, Homo sapien
gatgcccagccaactagtaaactaa

SEQ ID NO: 3905086 - DNA, 25 bp, Homo sapien
tatcagaactgactgcacaggcttc

SEQ ID NO: 3905087 - DNA, 25 bp, Homo sapien
gacaacgggtctgggtagcttctga

SEQ ID NO: 3905088 - DNA, 25 bp, Homo sapien
cctctgcctggcttggtgtatgtgg

SEQ ID NO: 3905089 - DNA, 25 bp, Homo sapien
ctccagcttcaacaggattcaggat

SEQ ID NO: 3905090 - DNA, 25 bp, Homo sapien
gggcatcctggatatgatcctgatc

SEQ ID NO: 3905091 - DNA, 25 bp, Homo sapien
gagggcctgaacgtgatgagccatt

SEQ ID NO: 3905092 - DNA, 25 bp, Homo sapien
gctagatttgtactgggcaaggcct

SEQ ID NO: 3905093 - DNA, 25 bp, Homo sapien
tgacctatactccaacacaactggg

SEQ ID NO: 3905094 - DNA, 25 bp, Homo sapien
cagatttagctgtggtgtccttacc

SEQ ID NO: 3905095 - DNA, 25 bp, Homo sapien
tgccctaatagctaagactccccgg

SEQ ID NO: 3905096 - DNA, 25 bp, Homo sapien
acttccggcacccacgagccgaggc

SEQ ID NO: 3905097 - DNA, 25 bp, Homo sapien
gccacccgcgcagcgtcgctgagcc

SEQ ID NO: 3905098 - DNA, 25 bp, Homo sapien
cgagacagcgggacgccggtcacta

SEQ ID NO: 3905099 - DNA, 25 bp, Homo sapien
ggtcactacacagtccacccgcagt

SEQ ID NO: 3905100 - DNA, 25 bp, Homo sapien
ccgcgcaccacgcaccctcgctcac

SEQ ID NO: 3905101 - DNA, 25 bp, Homo sapien
gcccgcaccgcgttcgttccgccgc

SEQ ID NO: 3905102 - DNA, 25 bp, Homo sapien
ccgccgcgcaccacgcaccctcgct

SEQ ID NO: 3905103 - DNA, 25 bp, Homo sapien
cgcccgcaccgcgttcgttccgccg

SEQ ID NO: 3905104 - DNA, 25 bp, Homo sapien
ctcgatgtcgatgctcgcgcaggag

SEQ ID NO: 3905105 - DNA, 25 bp, Homo sapien
agcttgaggatgtcccgcaggtgct

SEQ ID NO: 3905106 - DNA, 25 bp, Homo sapien
ggcgtcctcgatgtcgatgctcgcg

SEQ ID NO: 3905107 - DNA, 25 bp, Homo sapien
ccgcgggccggtccagcttgaggat

SEQ ID NO: 3905108 - DNA, 25 bp, Homo sapien
aaccgagacgctgaaggacaaggca

SEQ ID NO: 3905109 - DNA, 25 bp, Homo sapien
caggaccaaggatgagcatgaggct

SEQ ID NO: 3905110 - DNA, 25 bp, Homo sapien
cactgatgtaggcaggaccaaggat

SEQ ID NO: 3905111 - DNA, 25 bp, Homo sapien
gcaggaccaaggatgagcatgaggc

SEQ ID NO: 3905112 - DNA, 25 bp, Homo sapien
acactgatgtaggcaggaccaagga

SEQ ID NO: 3905113 - DNA, 25 bp, Homo sapien
ctgaggtactatcacctgagcagag

SEQ ID NO: 3905114 - DNA, 25 bp, Homo sapien
taatgggtggcatggtccgaagacc

SEQ ID NO: 3905115 - DNA, 25 bp, Homo sapien
aagaccagtcttgtttgctgaggta

SEQ ID NO: 3905116 - DNA, 25 bp, Homo sapien
tgaggtccccattgtaggcactgga

SEQ ID NO: 3905117 - DNA, 25 bp, Homo sapien
gcttccccgggccttgcttgaaatg

SEQ ID NO: 3905118 - DNA, 25 bp, Homo sapien
cttggccaaaatcccaatgcaggtg

SEQ ID NO: 3905119 - DNA, 25 bp, Homo sapien
ccaatgcaggtggagctatcatctc

SEQ ID NO: 3905120 - DNA, 25 bp, Homo sapien
cttgttgcttccccgggccttgctt

SEQ ID NO: 3905121 - DNA, 25 bp, Homo sapien
catggaacttccccagagcctaggt

SEQ ID NO: 3905122 - DNA, 25 bp, Homo sapien
gaaaagtcatggaacttccccagag

SEQ ID NO: 3905123 - DNA, 25 bp, Homo sapien
aacccagggtgagaaaagtcatgga

SEQ ID NO: 3905124 - DNA, 25 bp, Homo sapien
gaacttccccagagcctaggtggcc

SEQ ID NO: 3905125 - DNA, 25 bp, Homo sapien
tcaggttgccatagtagtacttctg

SEQ ID NO: 3905126 - DNA, 25 bp, Homo sapien
tacttggcgacaggctgaattttca

SEQ ID NO: 3905127 - DNA, 25 bp, Homo sapien
cccgaatggcataggccaagaagga

SEQ ID NO: 3905128 - DNA, 25 bp, Homo sapien
ccaagaaggagttagacacagcaat

SEQ ID NO: 3905129 - DNA, 25 bp, Homo sapien
tttgccattaaccagagccaagcgc

SEQ ID NO: 3905130 - DNA, 25 bp, Homo sapien
tccgaagtgctgacgctgatcaccc

SEQ ID NO: 3905131 - DNA, 25 bp, Homo sapien
gttgaggtgcgcgaaagccagatca

SEQ ID NO: 3905132 - DNA, 25 bp, Homo sapien
aagcgccacacgaacaggttgcctg

SEQ ID NO: 3905133 - DNA, 25 bp, Homo sapien
gatgaatgaagaggcgtgacacccc

SEQ ID NO: 3905134 - DNA, 25 bp, Homo sapien
gaagaggcgtgacaccccagctccg

SEQ ID NO: 3905135 - DNA, 25 bp, Homo sapien
gaatgaagaggcgtgacaccccagc

SEQ ID NO: 3905136 - DNA, 25 bp, Homo sapien
agatgaatgaagaggcgtgacaccc

SEQ ID NO: 3905137 - DNA, 25 bp, Homo sapien
gttcagtggcgtgccctctggctgc

SEQ ID NO: 3905138 - DNA, 25 bp, Homo sapien
cgaaagtggttcagtggcgtgccct

SEQ ID NO: 3905139 - DNA, 25 bp, Homo sapien
gggcaccagatgatcctgcgaaagt

SEQ ID NO: 3905140 - DNA, 25 bp, Homo sapien
tgccctctggctgccgaatatggac

SEQ ID NO: 3905141 - DNA, 25 bp, Homo sapien
gagtgtgcagcccaaccccacacta

SEQ ID NO: 3905142 - DNA, 25 bp, Homo sapien
accccacactatggcttctctggcg

SEQ ID NO: 3905143 - DNA, 25 bp, Homo sapien
tctggcgcctcttcgccatgtcagc

SEQ ID NO: 3905144 - DNA, 25 bp, Homo sapien
gcagcccaaccccacactatggctt

SEQ ID NO: 3905145 - DNA, 25 bp, Homo sapien
aatgaagccctgcttgatctggcta

SEQ ID NO: 3905146 - DNA, 25 bp, Homo sapien
gatctggctaacatccacaggccag

SEQ ID NO: 3905147 - DNA, 25 bp, Homo sapien
gaagccctgcttgatctggctaaca

SEQ ID NO: 3905148 - DNA, 25 bp, Homo sapien
tgcttgatctggctaacatccacag

SEQ ID NO: 3905149 - DNA, 25 bp, Homo sapien
ggccaatttgagctcagagtcccca

SEQ ID NO: 3905150 - DNA, 25 bp, Homo sapien
gaatgctagtaaagctgcccgggca

SEQ ID NO: 3905151 - DNA, 25 bp, Homo sapien
gactggcatgcttgtgtgactgact

SEQ ID NO: 3905152 - DNA, 25 bp, Homo sapien
gaacaagcccctcccaagtgaggat

SEQ ID NO: 3905153 - DNA, 25 bp, Homo sapien
catcttgcccctcaatgtagatctg

SEQ ID NO: 3905154 - DNA, 25 bp, Homo sapien
acatagccatcgtggctcgcagtag

SEQ ID NO: 3905155 - DNA, 25 bp, Homo sapien
agatctgccagaacttgacatagcc

SEQ ID NO: 3905156 - DNA, 25 bp, Homo sapien
agccagcacagtcccatcaggagag

SEQ ID NO: 3905157 - DNA, 25 bp, Homo sapien
ttgtttcttatggttgtcacagaac

SEQ ID NO: 3905158 - DNA, 25 bp, Homo sapien
gggccgcccatcatgaggtttccac

SEQ ID NO: 3905159 - DNA, 25 bp, Homo sapien
cagggtcttgtttcttatggttgtc

SEQ ID NO: 3905160 - DNA, 25 bp, Homo sapien
catgaggtttccactcgtgcagaca

SEQ ID NO: 3905161 - DNA, 25 bp, Homo sapien
tgtacaccacatctttaactctcgg

SEQ ID NO: 3905162 - DNA, 25 bp, Homo sapien
gcaccagtaataaggaacctccaga

SEQ ID NO: 3905163 - DNA, 25 bp, Homo sapien
tttaactctcggttctggtcagcac

SEQ ID NO: 3905164 - DNA, 25 bp, Homo sapien
caggcaggtccaggatactgtacac

SEQ ID NO: 3905165 - DNA, 25 bp, Homo sapien
ggtccaagcaaaccttgaggctagg

SEQ ID NO: 3905166 - DNA, 25 bp, Homo sapien
cttccgttgcacatcgctgagaatc

SEQ ID NO: 3905167 - DNA, 25 bp, Homo sapien
gggcacactcactgagctgaagata

SEQ ID NO: 3905168 - DNA, 25 bp, Homo sapien
gaatcaggtattctgctgagaggtc

SEQ ID NO: 3905169 - DNA, 25 bp, Homo sapien
gctaagggctgtgatgcgccacctg

SEQ ID NO: 3905170 - DNA, 25 bp, Homo sapien
aagggctgtgatgcgccacctgccc

SEQ ID NO: 3905171 - DNA, 25 bp, Homo sapien
ctcagaggctaagggctgtgatgcg

SEQ ID NO: 3905172 - DNA, 25 bp, Homo sapien
aggctaagggctgtgatgcgccacc

SEQ ID NO: 3905173 - DNA, 25 bp, Homo sapien
tcattttcctcttcggcaggcagca

SEQ ID NO: 3905174 - DNA, 25 bp, Homo sapien
ctggataccaaagctcagcacaggg

SEQ ID NO: 3905175 - DNA, 25 bp, Homo sapien
tgagcaggaactccgagatggagct

SEQ ID NO: 3905176 - DNA, 25 bp, Homo sapien
cggcagcgactcacaacctggatac

SEQ ID NO: 3905177 - DNA, 25 bp, Homo sapien
tggacacatagctctgaccctgagg

SEQ ID NO: 3905178 - DNA, 25 bp, Homo sapien
tatggacacatagctctgaccctga

SEQ ID NO: 3905179 - DNA, 25 bp, Homo sapien
atggacacatagctctgaccctgag

SEQ ID NO: 3905180 - DNA, 25 bp, Homo sapien
gtggatgatgaagcccctggccctc

SEQ ID NO: 3905181 - DNA, 25 bp, Homo sapien
aagagcttgatgagcacaccggccg

SEQ ID NO: 3905182 - DNA, 25 bp, Homo sapien
acaccggccgcagactccatggcac

SEQ ID NO: 3905183 - DNA, 25 bp, Homo sapien
ttagtatgcacacaaaagagcttga

SEQ ID NO: 3905184 - DNA, 25 bp, Homo sapien
cagactccatggcaccggctccatg

SEQ ID NO: 3905185 - DNA, 25 bp, Homo sapien
ctggaagcggatctgcacatcttgc

SEQ ID NO: 3905186 - DNA, 25 bp, Homo sapien
tcagagcccagttcgggccgagact

SEQ ID NO: 3905187 - DNA, 25 bp, Homo sapien
catgaaggcgtcaggtgtcatcaac

SEQ ID NO: 3905188 - DNA, 25 bp, Homo sapien
tccacgattcgtcggaggtcaggct

SEQ ID NO: 3905189 - DNA, 25 bp, Homo sapien
caaggaggcgctaggtgtcatgaag

SEQ ID NO: 3905190 - DNA, 25 bp, Homo sapien
gctgctgctgctgggagaggcagtg

SEQ ID NO: 3905191 - DNA, 25 bp, Homo sapien
tgctgctgctgggagaggcagtgat

SEQ ID NO: 3905192 - DNA, 25 bp, Homo sapien
ctgtaagggagctgctgctactgct

SEQ ID NO: 3905193 - DNA, 25 bp, Homo sapien
ctgctgctgctgctgggagaggcag

SEQ ID NO: 3905194 - DNA, 25 bp, Homo sapien
agctgaggtgctgctcatggcagac

SEQ ID NO: 3905195 - DNA, 25 bp, Homo sapien
gaggggtccacagctgaggtgctgc

SEQ ID NO: 3905196 - DNA, 25 bp, Homo sapien
ggtcaaggaggggtccacagctgag

SEQ ID NO: 3905197 - DNA, 25 bp, Homo sapien
tgaggtgctgctcatggcagacaca

SEQ ID NO: 3905198 - DNA, 25 bp, Homo sapien
ttggcatcatctggtaccagcccct

SEQ ID NO: 3905199 - DNA, 25 bp, Homo sapien
ccacgcgggcttgcctgaaggctgc

SEQ ID NO: 3905200 - DNA, 25 bp, Homo sapien
ctggcccggccccttgggagtcagt

SEQ ID NO: 3905201 - DNA, 25 bp, Homo sapien
ggcaggaggccacgcgggcttgcct

SEQ ID NO: 3905202 - DNA, 25 bp, Homo sapien
aggaggccacgcgggcttgcctgaa

SEQ ID NO: 3905203 - DNA, 25 bp, Homo sapien
gtgggccaaacctgactgtcaggag

SEQ ID NO: 3905204 - DNA, 25 bp, Homo sapien
gggtgctgcaggtctcacgagtaat

SEQ ID NO: 3905205 - DNA, 25 bp, Homo sapien
tgccgaggcggctgaagccatactg

SEQ ID NO: 3905206 - DNA, 25 bp, Homo sapien
ggtattatgccgatctccatcccca

SEQ ID NO: 3905207 - DNA, 25 bp, Homo sapien
tggtggtcggtggaaggccaggctc

SEQ ID NO: 3905208 - DNA, 25 bp, Homo sapien
agcaggtgatatggtggtcggtgga

SEQ ID NO: 3905209 - DNA, 25 bp, Homo sapien
ggctgtcacgttgctgcagcaggtg

SEQ ID NO: 3905210 - DNA, 25 bp, Homo sapien
gctgtcacgttgctgcagcaggtga

SEQ ID NO: 3905211 - DNA, 25 bp, Homo sapien
actttggtgccaaagcctcctgaag

SEQ ID NO: 3905212 - DNA, 25 bp, Homo sapien
gatcccttggtcttccagtccttgg

SEQ ID NO: 3905213 - DNA, 25 bp, Homo sapien
tcgaggggatcccttggtcttccag

SEQ ID NO: 3905214 - DNA, 25 bp, Homo sapien
caggaactttggtgccaaagcctcc

SEQ ID NO: 3905215 - DNA, 25 bp, Homo sapien
tctccctccctaggatttctcccta

SEQ ID NO: 3905216 - DNA, 25 bp, Homo sapien
ctgtgagccgggatcccatggctgc

SEQ ID NO: 3905217 - DNA, 25 bp, Homo sapien
tgcaggccttcgagttgggtacaca

SEQ ID NO: 3905218 - DNA, 25 bp, Homo sapien
tctgctgttgccaaattagtgctgg

SEQ ID NO: 3905219 - DNA, 25 bp, Homo sapien
gctcgtgccgagtctcaagggcacg

SEQ ID NO: 3905220 - DNA, 25 bp, Homo sapien
gttctacgtggcctgtgactgtgct

SEQ ID NO: 3905221 - DNA, 25 bp, Homo sapien
actccttcccaggccaagaatgctg

SEQ ID NO: 3905222 - DNA, 25 bp, Homo sapien
ccgtccctatgccatgttgtgctac

SEQ ID NO: 3905223 - DNA, 25 bp, Homo sapien
ctggagcaggtcgtgtactccttcc

SEQ ID NO: 3905224 - DNA, 25 bp, Homo sapien
agcaggtcgtgtactccttcccagg

SEQ ID NO: 3905225 - DNA, 25 bp, Homo sapien
gctgacgacagtgcttgggacaact

SEQ ID NO: 3905226 - DNA, 25 bp, Homo sapien
tgggacaactgttgtgtcagctgct

SEQ ID NO: 3905227 - DNA, 25 bp, Homo sapien
tcttgatctcatcccgtatgctgcg

SEQ ID NO: 3905228 - DNA, 25 bp, Homo sapien
cgcccagctacagctgacgacagtg

SEQ ID NO: 3905229 - DNA, 25 bp, Homo sapien
gagttgctcagttggcctgccatag

SEQ ID NO: 3905230 - DNA, 25 bp, Homo sapien
gcttggtagccactgagttgctcag

SEQ ID NO: 3905231 - DNA, 25 bp, Homo sapien
ccacagctgtgagcttggtagccac

SEQ ID NO: 3905232 - DNA, 25 bp, Homo sapien
cactgagttgctcagttggcctgcc

SEQ ID NO: 3905233 - DNA, 25 bp, Homo sapien
catcggcccttgtaatgtgtctgca

SEQ ID NO: 3905234 - DNA, 25 bp, Homo sapien
tgtccccagccggaagctatcattg

SEQ ID NO: 3905235 - DNA, 25 bp, Homo sapien
tcattgatttgctggaacatggcct

SEQ ID NO: 3905236 - DNA, 25 bp, Homo sapien
ggccggcagcaccacactctggaag

SEQ ID NO: 3905237 - DNA, 25 bp, Homo sapien
ttcatgtggctttctagctgctgca

SEQ ID NO: 3905238 - DNA, 25 bp, Homo sapien
ccctggcctcctgttcccgtgcctt

SEQ ID NO: 3905239 - DNA, 25 bp, Homo sapien
ttcccgtgccttccggctcttcatg

SEQ ID NO: 3905240 - DNA, 25 bp, Homo sapien
tcttcatgtggctttctagctgctg

SEQ ID NO: 3905241 - DNA, 25 bp, Homo sapien
acggtggctgccatctgctcagtgg

SEQ ID NO: 3905242 - DNA, 25 bp, Homo sapien
ggtgctgcacctcagcacgaacact

SEQ ID NO: 3905243 - DNA, 25 bp, Homo sapien
agtgtgctgaccaggccccgcagct

SEQ ID NO: 3905244 - DNA, 25 bp, Homo sapien
gctcagtggcactctgcagtgtgct

SEQ ID NO: 3905245 - DNA, 25 bp, Homo sapien
tcacccttaacgatgcgctgtacct

SEQ ID NO: 3905246 - DNA, 25 bp, Homo sapien
cccttaacgatgcgctgtacctgtg

SEQ ID NO: 3905247 - DNA, 25 bp, Homo sapien
ctcacccttaacgatgcgctgtacc

SEQ ID NO: 3905248 - DNA, 25 bp, Homo sapien
cacccttaacgatgcgctgtacctg

SEQ ID NO: 3905249 - DNA, 25 bp, Homo sapien
tgccagcagctgagcgcatggcctg

SEQ ID NO: 3905250 - DNA, 25 bp, Homo sapien
gcctgcatgatgctggaggtgacgg

SEQ ID NO: 3905251 - DNA, 25 bp, Homo sapien
cctgcatgatgctggaggtgacggc

SEQ ID NO: 3905252 - DNA, 25 bp, Homo sapien
ctgcatgatgctggaggtgacggcg

SEQ ID NO: 3905253 - DNA, 25 bp, Homo sapien
tgctggaaggcctgattgaggtggc

SEQ ID NO: 3905254 - DNA, 25 bp, Homo sapien
ctggaaggcctgattgaggtggccc

SEQ ID NO: 3905255 - DNA, 25 bp, Homo sapien
gctgcaggatatgggcttgctgggc

SEQ ID NO: 3905256 - DNA, 25 bp, Homo sapien
gctggaaggcctgattgaggtggcc

SEQ ID NO: 3905257 - DNA, 25 bp, Homo sapien
cagttcgagtgccaaggtcagatgc

SEQ ID NO: 3905258 - DNA, 25 bp, Homo sapien
acacacatacagcaccaggttcagg

SEQ ID NO: 3905259 - DNA, 25 bp, Homo sapien
cacacatacagcaccaggttcaggt

SEQ ID NO: 3905260 - DNA, 25 bp, Homo sapien
cacatacagcaccaggttcaggtca

SEQ ID NO: 3905261 - DNA, 25 bp, Homo sapien
tggagaaaattagggagaggattca

SEQ ID NO: 3905262 - DNA, 25 bp, Homo sapien
gaagtgggcgtcagcttcaaactgc

SEQ ID NO: 3905263 - DNA, 25 bp, Homo sapien
aattagggagaggattcaggcagaa

SEQ ID NO: 3905264 - DNA, 25 bp, Homo sapien
gaaaggacaggctacaggtgggtgc

SEQ ID NO: 3905265 - DNA, 25 bp, Homo sapien
gagcccatgtggtcccgagtgatgg

SEQ ID NO: 3905266 - DNA, 25 bp, Homo sapien
ctgggccataacggagcccatgtgg

SEQ ID NO: 3905267 - DNA, 25 bp, Homo sapien
tgatggggtcactgtggtccaggtg

SEQ ID NO: 3905268 - DNA, 25 bp, Homo sapien
tgtggtccaggtgcatcacggcctc

SEQ ID NO: 3905269 - DNA, 25 bp, Homo sapien
ctttgccaagtgagttgtgtggctc

SEQ ID NO: 3905270 - DNA, 25 bp, Homo sapien
aagtgagttgtgtggctcagcctgc

SEQ ID NO: 3905271 - DNA, 25 bp, Homo sapien
tgccaagtgagttgtgtggctcagc

SEQ ID NO: 3905272 - DNA, 25 bp, Homo sapien
ctgctttgccaagtgagttgtgtgg

SEQ ID NO: 3905273 - DNA, 25 bp, Homo sapien
aggccatgcagcatgaggctgagac

SEQ ID NO: 3905274 - DNA, 25 bp, Homo sapien
acccctgggcaaggcaggcttagca

SEQ ID NO: 3905275 - DNA, 25 bp, Homo sapien
aagtggtgtcacgatctcagggtca

SEQ ID NO: 3905276 - DNA, 25 bp, Homo sapien
tgggcccagctaaaccttctgacta

SEQ ID NO: 3905277 - DNA, 25 bp, Homo sapien
gactaccacacgctgtagaccacgg

SEQ ID NO: 3905278 - DNA, 25 bp, Homo sapien
atgggcagagaacgaacagacggca

SEQ ID NO: 3905279 - DNA, 25 bp, Homo sapien
cagttatgagagtcacaccaaagac

SEQ ID NO: 3905280 - DNA, 25 bp, Homo sapien
gcagagaacgaacagacggcagtta

SEQ ID NO: 3905281 - DNA, 25 bp, Homo sapien
cgaacagacggcagttatgagagtc

SEQ ID NO: 3905282 - DNA, 25 bp, Homo sapien
ttggagtgcagcccgtccgcccagc

SEQ ID NO: 3905283 - DNA, 25 bp, Homo sapien
cttggagtgcagcccgtccgcccag

SEQ ID NO: 3905284 - DNA, 25 bp, Homo sapien
ctggctgagagcctagtgcaggagc

SEQ ID NO: 3905285 - DNA, 25 bp, Homo sapien
ccctggctgagagcctagtgcagga

SEQ ID NO: 3905286 - DNA, 25 bp, Homo sapien
cctggctgagagcctagtgcaggag

SEQ ID NO: 3905287 - DNA, 25 bp, Homo sapien
caacagcaacggcctcagggcatgg

SEQ ID NO: 3905288 - DNA, 25 bp, Homo sapien
agggcatggggtggttgccggcagc

SEQ ID NO: 3905289 - DNA, 25 bp, Homo sapien
tctctgcggtttagacaagctttgc

SEQ ID NO: 3905290 - DNA, 25 bp, Homo sapien
tggccctccgaactctctctaaaga

SEQ ID NO: 3905291 - DNA, 25 bp, Homo sapien
tgacaagggtccatgtaaaggagtc

SEQ ID NO: 3905292 - DNA, 25 bp, Homo sapien
gacttagggatcctacgactggtct

SEQ ID NO: 3905293 - DNA, 25 bp, Homo sapien
ggatgtgactcagcggaaaaagggt

SEQ ID NO: 3905294 - DNA, 25 bp, Homo sapien
tctggggatgtgactcagcggaaaa

SEQ ID NO: 3905295 - DNA, 25 bp, Homo sapien
actcagcggaaaaagggtgccccag

SEQ ID NO: 3905296 - DNA, 25 bp, Homo sapien
tgtgactcagcggaaaaagggtgcc

SEQ ID NO: 3905297 - DNA, 25 bp, Homo sapien
ggaaggaatggtagataggatgagc

SEQ ID NO: 3905298 - DNA, 25 bp, Homo sapien
ggtagataggatgagccaggctcat

SEQ ID NO: 3905299 - DNA, 25 bp, Homo sapien
gataggatgagccaggctcatcccc

SEQ ID NO: 3905300 - DNA, 25 bp, Homo sapien
aatggtagataggatgagccaggct

SEQ ID NO: 3905301 - DNA, 25 bp, Homo sapien
cgaagccctggtatatggtgtcaca

SEQ ID NO: 3905302 - DNA, 25 bp, Homo sapien
gtcacatcggtttgggcccgctgca

SEQ ID NO: 3905303 - DNA, 25 bp, Homo sapien
atgctgtcccccaagcggatgagac

SEQ ID NO: 3905304 - DNA, 25 bp, Homo sapien
aagcggatgagacactcggcgaagc

SEQ ID NO: 3905305 - DNA, 25 bp, Homo sapien
gagaggcacaggcatggaagtcatt

SEQ ID NO: 3905306 - DNA, 25 bp, Homo sapien
aggcacaggcatggaagtcattcca

SEQ ID NO: 3905307 - DNA, 25 bp, Homo sapien
cacaggcatggaagtcattccaaga

SEQ ID NO: 3905308 - DNA, 25 bp, Homo sapien
ctgagaggcacaggcatggaagtca

SEQ ID NO: 3905309 - DNA, 25 bp, Homo sapien
ctcctggttggtttcggagcctgtg

SEQ ID NO: 3905310 - DNA, 25 bp, Homo sapien
cagagtgtgcaagttattcggacgg

SEQ ID NO: 3905311 - DNA, 25 bp, Homo sapien
ccgcacagagtgtgcaagttattcg

SEQ ID NO: 3905312 - DNA, 25 bp, Homo sapien
tggtttcggagcctgtgccgcgctc

SEQ ID NO: 3905313 - DNA, 25 bp, Homo sapien
agagcctggacaaccaccgccagag

SEQ ID NO: 3905314 - DNA, 25 bp, Homo sapien
gaggtacgggcgctgctacccaacc

SEQ ID NO: 3905315 - DNA, 25 bp, Homo sapien
ctttaatgaaaagccctgctgcgct

SEQ ID NO: 3905316 - DNA, 25 bp, Homo sapien
gcagggctggaggtacgggcgctgc

SEQ ID NO: 3905317 - DNA, 25 bp, Homo sapien
aggctctctcagaacaataaggtac

SEQ ID NO: 3905318 - DNA, 25 bp, Homo sapien
ggtccttaggtgaagagatatatta

SEQ ID NO: 3905319 - DNA, 25 bp, Homo sapien
tgaagagatatattaatgcagaggg

SEQ ID NO: 3905320 - DNA, 25 bp, Homo sapien
tcagaacaataaggtactccttgtc

SEQ ID NO: 3905321 - DNA, 25 bp, Homo sapien
ctccgggcaatggcagcggccgccg

SEQ ID NO: 3905322 - DNA, 25 bp, Homo sapien
ggcgggctcttcggcgtctcggcgg

SEQ ID NO: 3905323 - DNA, 25 bp, Homo sapien
cgggctcttcggcgtctcggcggct

SEQ ID NO: 3905324 - DNA, 25 bp, Homo sapien
ggctcttcggcgtctcggcggctct

SEQ ID NO: 3905325 - DNA, 25 bp, Homo sapien
cggcgggctcttcggcgtctcggcg

SEQ ID NO: 3905326 - DNA, 25 bp, Homo sapien
agaaagcgaccacgaccacagttcg

SEQ ID NO: 3905327 - DNA, 25 bp, Homo sapien
ggacgccgggaacccgagcagccat

SEQ ID NO: 3905328 - DNA, 25 bp, Homo sapien
acgttccgaggccagtccagactcg

SEQ ID NO: 3905329 - DNA, 25 bp, Homo sapien
cctggagacgggctatccagcacga

SEQ ID NO: 3905330 - DNA, 25 bp, Homo sapien
ggctgatgcgggtactccaccatcc

SEQ ID NO: 3905331 - DNA, 25 bp, Homo sapien
ccaccatcccaactacagattgaaa

SEQ ID NO: 3905332 - DNA, 25 bp, Homo sapien
tctctcacattgattccaatcagaa

SEQ ID NO: 3905333 - DNA, 25 bp, Homo sapien
cattgattccaatcagaaactctgt

SEQ ID NO: 3905334 - DNA, 25 bp, Homo sapien
ggaaaagattcctccacaaggctct

SEQ ID NO: 3905335 - DNA, 25 bp, Homo sapien
aggaaaagattcctccacaaggctc

SEQ ID NO: 3905336 - DNA, 25 bp, Homo sapien
gctgcttctccaaggcctccttcat

SEQ ID NO: 3905337 - DNA, 25 bp, Homo sapien
cagggctcagaaagctgcttctcca

SEQ ID NO: 3905338 - DNA, 25 bp, Homo sapien
agggctcagaaagctgcttctccaa

SEQ ID NO: 3905339 - DNA, 25 bp, Homo sapien
aaagctgcttctccaaggcctcctt

SEQ ID NO: 3905340 - DNA, 25 bp, Homo sapien
aagagagaacaagtcagcacagcca

SEQ ID NO: 3905341 - DNA, 25 bp, Homo sapien
acacgagggcatcctctccagcgag

SEQ ID NO: 3905342 - DNA, 25 bp, Homo sapien
cgagggcatcctctccagcgaggct

SEQ ID NO: 3905343 - DNA, 25 bp, Homo sapien
cacggacacgagggcatcctctcca

SEQ ID NO: 3905344 - DNA, 25 bp, Homo sapien
cagcgaggctggcaggacctgctct

SEQ ID NO: 3905345 - DNA, 25 bp, Homo sapien
gagtaactgtacttgcccctgagga

SEQ ID NO: 3905346 - DNA, 25 bp, Homo sapien
tatggcttgcggaccaggacttctg

SEQ ID NO: 3905347 - DNA, 25 bp, Homo sapien
ggttgtcatcctcaaacggcatggt

SEQ ID NO: 3905348 - DNA, 25 bp, Homo sapien
tgtaacacgtgggtcaaacttggcc

SEQ ID NO: 3905349 - DNA, 25 bp, Homo sapien
gcacattccacatggttattaccaa

SEQ ID NO: 3905350 - DNA, 25 bp, Homo sapien
cccacagtggcagtccatttctcaa

SEQ ID NO: 3905351 - DNA, 25 bp, Homo sapien
ttgtctcagggctcaccttgaggga

SEQ ID NO: 3905352 - DNA, 25 bp, Homo sapien
aataaactatctgctcccaagtcct

SEQ ID NO: 3905353 - DNA, 25 bp, Homo sapien
tgtcagctattgagacagtcgtggg

SEQ ID NO: 3905354 - DNA, 25 bp, Homo sapien
cagtcgtgggaaagccatcctctga

SEQ ID NO: 3905355 - DNA, 25 bp, Homo sapien
gggcttagggacagatgcctcatag

SEQ ID NO: 3905356 - DNA, 25 bp, Homo sapien
gatttgtgtttgctcgtgctgtcag

SEQ ID NO: 3905357 - DNA, 25 bp, Homo sapien
gccatgcaattgagagccagcctcc

SEQ ID NO: 3905358 - DNA, 25 bp, Homo sapien
accacacatctaccgagggacgtca

SEQ ID NO: 3905359 - DNA, 25 bp, Homo sapien
ggctcagtgactgtaaccatctcat

SEQ ID NO: 3905360 - DNA, 25 bp, Homo sapien
ggtcaccatcagctatgccatgcaa

SEQ ID NO: 3905361 - DNA, 25 bp, Homo sapien
ctgaatgagagcagagaaaagggca

SEQ ID NO: 3905362 - DNA, 25 bp, Homo sapien
cagagaaaagggcacagaggaaatt

SEQ ID NO: 3905363 - DNA, 25 bp, Homo sapien
gaatgagagcagagaaaagggcaca

SEQ ID NO: 3905364 - DNA, 25 bp, Homo sapien
gagcagagaaaagggcacagaggaa

SEQ ID NO: 3905365 - DNA, 25 bp, Homo sapien
tcaaaggcctcctttctgtacttac

SEQ ID NO: 3905366 - DNA, 25 bp, Homo sapien
ttcaaaggcctcctttctgtactta

SEQ ID NO: 3905367 - DNA, 25 bp, Homo sapien
cttcaaaggcctcctttctgtactt

SEQ ID NO: 3905368 - DNA, 25 bp, Homo sapien
ggcagtctctgaggcttccacctgc

SEQ ID NO: 3905369 - DNA, 25 bp, Homo sapien
cagtctctgaggcttccacctgctt

SEQ ID NO: 3905370 - DNA, 25 bp, Homo sapien
tgggcagtctctgaggcttccacct

SEQ ID NO: 3905371 - DNA, 25 bp, Homo sapien
ctgggcagtctctgaggcttccacc

SEQ ID NO: 3905372 - DNA, 25 bp, Homo sapien
ccctggagccacgtaagtatgtgtg

SEQ ID NO: 3905373 - DNA, 25 bp, Homo sapien
taagtatgtgtgtcagccaagggct

SEQ ID NO: 3905374 - DNA, 25 bp, Homo sapien
gagccacgtaagtatgtgtgtcagc

SEQ ID NO: 3905375 - DNA, 25 bp, Homo sapien
ctgcttcccctggagccacgtaagt

SEQ ID NO: 3905376 - DNA, 25 bp, Homo sapien
gcacacggcgtgacttattggagcg

SEQ ID NO: 3905377 - DNA, 25 bp, Homo sapien
ctgcagtgcagtcatacgggctcca

SEQ ID NO: 3905378 - DNA, 25 bp, Homo sapien
ccattgtattgctgctggtagcgca

SEQ ID NO: 3905379 - DNA, 25 bp, Homo sapien
tccactgtcagcaggcggtcaatga

SEQ ID NO: 3905380 - DNA, 25 bp, Homo sapien
agacattcttcacctactgtgggcc

SEQ ID NO: 3905381 - DNA, 25 bp, Homo sapien
ccaggctgggtcgtgctgcatgtgt

SEQ ID NO: 3905382 - DNA, 25 bp, Homo sapien
ctatctccagagagggcatcggacc

SEQ ID NO: 3905383 - DNA, 25 bp, Homo sapien
agagggcatcggacccagatggcac

SEQ ID NO: 3905384 - DNA, 25 bp, Homo sapien
gggtccagtcaaggcacaagctttg

SEQ ID NO: 3905385 - DNA, 25 bp, Homo sapien
ggctgacactcgaccctaatcggga

SEQ ID NO: 3905386 - DNA, 25 bp, Homo sapien
cacgatgggcgtgcagtgatcactc

SEQ ID NO: 3905387 - DNA, 25 bp, Homo sapien
tgcaccaaaggatagaacccaggct

SEQ ID NO: 3905388 - DNA, 25 bp, Homo sapien
cctgtttactgaatacagaggatac

SEQ ID NO: 3905389 - DNA, 25 bp, Homo sapien
actgaatacgcataataaataactg

SEQ ID NO: 3905390 - DNA, 25 bp, Homo sapien
tacagaggatacgtttacaaactga

SEQ ID NO: 3905391 - DNA, 25 bp, Homo sapien
tggagaggcagcctgtttactgaat

SEQ ID NO: 3905392 - DNA, 25 bp, Homo sapien
accacaggacagcagcggcttccac

SEQ ID NO: 3905393 - DNA, 25 bp, Homo sapien
tgaccacaggacagcagcggcttcc

SEQ ID NO: 3905394 - DNA, 25 bp, Homo sapien
cctgaccacaggacagcagcggctt

SEQ ID NO: 3905395 - DNA, 25 bp, Homo sapien
ctgaccacaggacagcagcggcttc

SEQ ID NO: 3905396 - DNA, 25 bp, Homo sapien
aggtcctcattagcccaatggccag

SEQ ID NO: 3905397 - DNA, 25 bp, Homo sapien
gggcccgaaggtgcttgcatgtacc

SEQ ID NO: 3905398 - DNA, 25 bp, Homo sapien
ggtagtgctgtaccctctcgacaga

SEQ ID NO: 3905399 - DNA, 25 bp, Homo sapien
gagcttcagccagaggattgtcaac

SEQ ID NO: 3905400 - DNA, 25 bp, Homo sapien
caaagttgaccgcagtgagcattcc

SEQ ID NO: 3905401 - DNA, 25 bp, Homo sapien
cgatgatgtgttaggactcccagcc

SEQ ID NO: 3905402 - DNA, 25 bp, Homo sapien
tgtgtacaactcaaccacgtgctgg

SEQ ID NO: 3905403 - DNA, 25 bp, Homo sapien
tccaaatggacgaggaaccactgcg

SEQ ID NO: 3905404 - DNA, 25 bp, Homo sapien
tggacaggcaagtccccaggctgta

SEQ ID NO: 3905405 - DNA, 25 bp, Homo sapien
tacttatatcaacgtctggagccta

SEQ ID NO: 3905406 - DNA, 25 bp, Homo sapien
cacagaggatctttaggagccgagg

SEQ ID NO: 3905407 - DNA, 25 bp, Homo sapien
taccaaagcctgcacggctgggaga

SEQ ID NO: 3905408 - DNA, 25 bp, Homo sapien
cacaagtgtttagaggccgggcacg

SEQ ID NO: 3905409 - DNA, 25 bp, Homo sapien
tttgctaccgtaagccctgatggct

SEQ ID NO: 3905410 - DNA, 25 bp, Homo sapien
tacatgtggctgcagtcacgtgacc

SEQ ID NO: 3905411 - DNA, 25 bp, Homo sapien
tatactgtctttacggcgtgggcct

SEQ ID NO: 3905412 - DNA, 25 bp, Homo sapien
gcactgacacagctaccacctactc

SEQ ID NO: 3905413 - DNA, 25 bp, Homo sapien
tcttccctagggagtggcaccaggg

SEQ ID NO: 3905414 - DNA, 25 bp, Homo sapien
caccccctgtaccctgggagctggt

SEQ ID NO: 3905415 - DNA, 25 bp, Homo sapien
cagcactgacacagctaccacctac

SEQ ID NO: 3905416 - DNA, 25 bp, Homo sapien
tcaccatcagagacgaagggaaggg

SEQ ID NO: 3905417 - DNA, 25 bp, Homo sapien
ttggccaggacataacaagctgtgg

SEQ ID NO: 3905418 - DNA, 25 bp, Homo sapien
gatctggctcagtctactatgggca

SEQ ID NO: 3905419 - DNA, 25 bp, Homo sapien
gcctcaaaatggagatggatcccag

SEQ ID NO: 3905420 - DNA, 25 bp, Homo sapien
tgtttggttgactctgtccaggctg

SEQ ID NO: 3905421 - DNA, 25 bp, Homo sapien
cgtggctgacgctccttcttgcttg

SEQ ID NO: 3905422 - DNA, 25 bp, Homo sapien
tgcggttatgaaaggcctcctcttc

SEQ ID NO: 3905423 - DNA, 25 bp, Homo sapien
gaccccgaggcagcgcttgtttggt

SEQ ID NO: 3905424 - DNA, 25 bp, Homo sapien
tctgtacgtggtcgctgacatcgcc

SEQ ID NO: 3905425 - DNA, 25 bp, Homo sapien
ttgtctgtcgacttctagctgggca

SEQ ID NO: 3905426 - DNA, 25 bp, Homo sapien
cagtcattgggctgaagctgttccc

SEQ ID NO: 3905427 - DNA, 25 bp, Homo sapien
acatcgtggagaagcatgggctgcc

SEQ ID NO: 3905428 - DNA, 25 bp, Homo sapien
taagaagtgacctaatgagaatccc

SEQ ID NO: 3905429 - DNA, 25 bp, Homo sapien
cactgaatgccttgtctcaggaggc

SEQ ID NO: 3905430 - DNA, 25 bp, Homo sapien
tactgtgtgcgaggtaccacaccag

SEQ ID NO: 3905431 - DNA, 25 bp, Homo sapien
aagtgggtgccaagcatagtgagca

SEQ ID NO: 3905432 - DNA, 25 bp, Homo sapien
caagtggaaaaggtactctgggctg

SEQ ID NO: 3905433 - DNA, 25 bp, Homo sapien
tacccggtcctgatagaggagttgc

SEQ ID NO: 3905434 - DNA, 25 bp, Homo sapien
aacctgctgcgggtcttcagacaag

SEQ ID NO: 3905435 - DNA, 25 bp, Homo sapien
tggaagacgtgtccacatacccggt

SEQ ID NO: 3905436 - DNA, 25 bp, Homo sapien
aatttgagggccagcagaaaggcca

SEQ ID NO: 3905437 - DNA, 25 bp, Homo sapien
gagcattactggaggaaatttcaag

SEQ ID NO: 3905438 - DNA, 25 bp, Homo sapien
acccggcctacaagactgaccaatt

SEQ ID NO: 3905439 - DNA, 25 bp, Homo sapien
taatggtaagaatgagactgatcca

SEQ ID NO: 3905440 - DNA, 25 bp, Homo sapien
tcctgtctcagggacacatagaggt

SEQ ID NO: 3905441 - DNA, 25 bp, Homo sapien
catagaggtgataggccaaggctgt

SEQ ID NO: 3905442 - DNA, 25 bp, Homo sapien
ccaaggctgtgtctgggatgcgaag

SEQ ID NO: 3905443 - DNA, 25 bp, Homo sapien
gatgcgaagaagatgaaaggacttc

SEQ ID NO: 3905444 - DNA, 25 bp, Homo sapien
ggctttctgtagtctttagcaagac

SEQ ID NO: 3905445 - DNA, 25 bp, Homo sapien
tctgtagtctttagcaagacacaag

SEQ ID NO: 3905446 - DNA, 25 bp, Homo sapien
tagcaagacacaagtggattttgac

SEQ ID NO: 3905447 - DNA, 25 bp, Homo sapien
ttagcaagacacaagtggattttga

SEQ ID NO: 3905448 - DNA, 25 bp, Homo sapien
cacatttcccgaaggtgtaggccag

SEQ ID NO: 3905449 - DNA, 25 bp, Homo sapien
cacggcatgcgtaggatcaggctgc

SEQ ID NO: 3905450 - DNA, 25 bp, Homo sapien
cagaaaccggcagtggcaagactct

SEQ ID NO: 3905451 - DNA, 25 bp, Homo sapien
gaaggccctgaaaagtcgactgatc

SEQ ID NO: 3905452 - DNA, 25 bp, Homo sapien
cagctccacacaccgtactgagcct

SEQ ID NO: 3905453 - DNA, 25 bp, Homo sapien
tccagctccacacaccgtactgagc

SEQ ID NO: 3905454 - DNA, 25 bp, Homo sapien
taaaaagaacctcgcttcttcctca

SEQ ID NO: 3905455 - DNA, 25 bp, Homo sapien
aaagaacctcgcttcttcctcacgg

SEQ ID NO: 3905456 - DNA, 25 bp, Homo sapien
acttgatcactttgtagggtcgcag

SEQ ID NO: 3905457 - DNA, 25 bp, Homo sapien
tgaccagggctacatgataagccac

SEQ ID NO: 3905458 - DNA, 25 bp, Homo sapien
tacaacccgaatatctgaattcagg

SEQ ID NO: 3905459 - DNA, 25 bp, Homo sapien
aaaaaagtgactcgtatagttcttg

SEQ ID NO: 3905460 - DNA, 25 bp, Homo sapien
gatatatgtgttctggctttgtaca

SEQ ID NO: 3905461 - DNA, 25 bp, Homo sapien
tttgatatatgtgttctggctttgt

SEQ ID NO: 3905462 - DNA, 25 bp, Homo sapien
atatatgtgttctggctttgtacag

SEQ ID NO: 3905463 - DNA, 25 bp, Homo sapien
tgatatatgtgttctggctttgtac

SEQ ID NO: 3905464 - DNA, 25 bp, Homo sapien
gcatggagccatcacttgagtgaac

SEQ ID NO: 3905465 - DNA, 25 bp, Homo sapien
ggttgagcccaattctggatactga

SEQ ID NO: 3905466 - DNA, 25 bp, Homo sapien
taggaaataatctgcaggcaacaag

SEQ ID NO: 3905467 - DNA, 25 bp, Homo sapien
catgaatggcttttgagtcaaaggg

SEQ ID NO: 3905468 - DNA, 25 bp, Homo sapien
taaaggactacaagccctttggcca

SEQ ID NO: 3905469 - DNA, 25 bp, Homo sapien
cagtaaaggactacaagccctttgg

SEQ ID NO: 3905470 - DNA, 25 bp, Homo sapien
ccagtaaaggactacaagccctttg

SEQ ID NO: 3905471 - DNA, 25 bp, Homo sapien
gtccaagagttcgatgcagcagtga

SEQ ID NO: 3905472 - DNA, 25 bp, Homo sapien
aagagttcatgagtttcctagagga

SEQ ID NO: 3905473 - DNA, 25 bp, Homo sapien
aaaaaatgtctatgccaggcaaggt

SEQ ID NO: 3905474 - DNA, 25 bp, Homo sapien
ttataatccaggatgcacagaaggg

SEQ ID NO: 3905475 - DNA, 25 bp, Homo sapien
gaagaaaatctctcctgttatcaag

SEQ ID NO: 3905476 - DNA, 25 bp, Homo sapien
aaaagaggaaacaagagtcagaaat

SEQ ID NO: 3905477 - DNA, 25 bp, Homo sapien
aggaaacaagagtcagaaattcaaa

SEQ ID NO: 3905478 - DNA, 25 bp, Homo sapien
tctctcctgttatcaagagcaggct

SEQ ID NO: 3905479 - DNA, 25 bp, Homo sapien
gggccaggattagcttattatggta

SEQ ID NO: 3905480 - DNA, 25 bp, Homo sapien
tagcttattatggtaacacagagag

SEQ ID NO: 3905481 - DNA, 25 bp, Homo sapien
taacacagagagaggctattcaaaa

SEQ ID NO: 3905482 - DNA, 25 bp, Homo sapien
caggattagcttattatggtaacac

SEQ ID NO: 3905483 - DNA, 25 bp, Homo sapien
gcagcctcattggaagagtccctac

SEQ ID NO: 3905484 - DNA, 25 bp, Homo sapien
aatgtccgctccataatccagggcc

SEQ ID NO: 3905485 - DNA, 25 bp, Homo sapien
tcacagtaaacaatgtccgctccat

SEQ ID NO: 3905486 - DNA, 25 bp, Homo sapien
tcattggaagagtccctacccgaac

SEQ ID NO: 3905487 - DNA, 25 bp, Homo sapien
cagaggaatcagaggacgcttgtca

SEQ ID NO: 3905488 - DNA, 25 bp, Homo sapien
ggaatcagaggacgcttgtcattcc

SEQ ID NO: 3905489 - DNA, 25 bp, Homo sapien
ctgcagaggaatcagaggacgcttg

SEQ ID NO: 3905490 - DNA, 25 bp, Homo sapien
gaggaatcagaggacgcttgtcatt

SEQ ID NO: 3905491 - DNA, 25 bp, Homo sapien
tgaatcatcttgaggtcgatcagct

SEQ ID NO: 3905492 - DNA, 25 bp, Homo sapien
ctgaatcatcttgaggtcgatcagc

SEQ ID NO: 3905493 - DNA, 25 bp, Homo sapien
gaatcatcttgaggtcgatcagctc

SEQ ID NO: 3905494 - DNA, 25 bp, Homo sapien
actgaatcatcttgaggtcgatcag

SEQ ID NO: 3905495 - DNA, 25 bp, Homo sapien
tcatcaggggcgacaaagtccactg

SEQ ID NO: 3905496 - DNA, 25 bp, Homo sapien
gggcgacaaagtccactgtgctgag

SEQ ID NO: 3905497 - DNA, 25 bp, Homo sapien
gcggaagacaactcgatcatcaggg

SEQ ID NO: 3905498 - DNA, 25 bp, Homo sapien
tgctctctttcacaggtgcggaaga

SEQ ID NO: 3905499 - DNA, 25 bp, Homo sapien
agcaagggctcgctctgcgtctgaa

SEQ ID NO: 3905500 - DNA, 25 bp, Homo sapien
cacagcaagggctcgctctgcgtct

SEQ ID NO: 3905501 - DNA, 25 bp, Homo sapien
ctggccacagcaagggctcgctctg

SEQ ID NO: 3905502 - DNA, 25 bp, Homo sapien
agggctcgctctgcgtctgaagtcc

SEQ ID NO: 3905503 - DNA, 25 bp, Homo sapien
aatattgttttggacagcccatgtt

SEQ ID NO: 3905504 - DNA, 25 bp, Homo sapien
gaatattgttttggacagcccatgt

SEQ ID NO: 3905505 - DNA, 25 bp, Homo sapien
tattgttttggacagcccatgttga

SEQ ID NO: 3905506 - DNA, 25 bp, Homo sapien
atattgttttggacagcccatgttg

SEQ ID NO: 3905507 - DNA, 25 bp, Homo sapien
ttctcaatcttgtcagggtctgaca

SEQ ID NO: 3905508 - DNA, 25 bp, Homo sapien
tctcaatcttgtcagggtctgacag

SEQ ID NO: 3905509 - DNA, 25 bp, Homo sapien
ttttggaaatcgctaggcctcaggg

SEQ ID NO: 3905510 - DNA, 25 bp, Homo sapien
ctttttaggaacatcaaggctgctg

SEQ ID NO: 3905511 - DNA, 25 bp, Homo sapien
ggttcccaaacttagctgcatgtca

SEQ ID NO: 3905512 - DNA, 25 bp, Homo sapien
gagagagactaacttcagcttgcct

SEQ ID NO: 3905513 - DNA, 25 bp, Homo sapien
caggaaggaacagtctctaggtgct

SEQ ID NO: 3905514 - DNA, 25 bp, Homo sapien
tctggccaggctctagcatgacact

SEQ ID NO: 3905515 - DNA, 25 bp, Homo sapien
gcacttgcaagggtcacactgaggg

SEQ ID NO: 3905516 - DNA, 25 bp, Homo sapien
tttaagggcgggactgacaggttca

SEQ ID NO: 3905517 - DNA, 25 bp, Homo sapien
ggcagtcagacatacatgagtgaaa

SEQ ID NO: 3905518 - DNA, 25 bp, Homo sapien
tagggcagtcagacatacatgagtg

SEQ ID NO: 3905519 - DNA, 25 bp, Homo sapien
ctttagggcagtcagacatacatga

SEQ ID NO: 3905520 - DNA, 25 bp, Homo sapien
tttagggcagtcagacatacatgag

SEQ ID NO: 3905521 - DNA, 25 bp, Homo sapien
aggtcacaggtctgcgtgtcccttt

SEQ ID NO: 3905522 - DNA, 25 bp, Homo sapien
cgatggcaggatgcgaatcttgcag

SEQ ID NO: 3905523 - DNA, 25 bp, Homo sapien
caggatgcgaatcttgcaggtcaca

SEQ ID NO: 3905524 - DNA, 25 bp, Homo sapien
tccctttaacaagagtgctgaggat

SEQ ID NO: 3905525 - DNA, 25 bp, Homo sapien
ctcccatgaactgcgatggcagcaa

SEQ ID NO: 3905526 - DNA, 25 bp, Homo sapien
agtcctctctatccgcttcacaagg

SEQ ID NO: 3905527 - DNA, 25 bp, Homo sapien
gcgatggcagcaatgccagtcctct

SEQ ID NO: 3905528 - DNA, 25 bp, Homo sapien
tcacaaggctcagggtatcttctag

SEQ ID NO: 3905529 - DNA, 25 bp, Homo sapien
acaggatgctgaggtcgctcctccc

SEQ ID NO: 3905530 - DNA, 25 bp, Homo sapien
tgacttcacagctgacaggatgctg

SEQ ID NO: 3905531 - DNA, 25 bp, Homo sapien
atgacttcacagctgacaggatgct

SEQ ID NO: 3905532 - DNA, 25 bp, Homo sapien
ggatgctgaggtcgctcctcccgct

SEQ ID NO: 3905533 - DNA, 25 bp, Homo sapien
ggttccacatggctgctcgggccac

SEQ ID NO: 3905534 - DNA, 25 bp, Homo sapien
aagaggctgccgtggcttgtcgaaa

SEQ ID NO: 3905535 - DNA, 25 bp, Homo sapien
tcgggccaccatcacggaagaggct

SEQ ID NO: 3905536 - DNA, 25 bp, Homo sapien
gaaagtcctctatgtccgaatactg

SEQ ID NO: 3905537 - DNA, 25 bp, Homo sapien
tgggcagcatggagcaaccttccct

SEQ ID NO: 3905538 - DNA, 25 bp, Homo sapien
ggcgactccagctgttctcgtagca

SEQ ID NO: 3905539 - DNA, 25 bp, Homo sapien
catctggcacaagcagtacttggtg

SEQ ID NO: 3905540 - DNA, 25 bp, Homo sapien
aatttcccgggaagactgggcagca

SEQ ID NO: 3905541 - DNA, 25 bp, Homo sapien
ctctgaagtcttggctgagagcctg

SEQ ID NO: 3905542 - DNA, 25 bp, Homo sapien
ttgacagccatcttaatgacaccag

SEQ ID NO: 3905543 - DNA, 25 bp, Homo sapien
tgtgtggtctcctcatagaaggcac

SEQ ID NO: 3905544 - DNA, 25 bp, Homo sapien
tgacaccagaggtatcttcagctgg

SEQ ID NO: 3905545 - DNA, 25 bp, Homo sapien
accactctagtaggcacatcttagg

SEQ ID NO: 3905546 - DNA, 25 bp, Homo sapien
atacacaggctgtgccaacttctcc

SEQ ID NO: 3905547 - DNA, 25 bp, Homo sapien
ttctccctccggcaccactctagta

SEQ ID NO: 3905548 - DNA, 25 bp, Homo sapien
ttcatacacaggctgtgccaacttc

SEQ ID NO: 3905549 - DNA, 25 bp, Homo sapien
caatgacctcaagtgtctggagctg

SEQ ID NO: 3905550 - DNA, 25 bp, Homo sapien
tgtcacagacctaagcaaagcgcag

SEQ ID NO: 3905551 - DNA, 25 bp, Homo sapien
tggaagggtctcaggctctatgctg

SEQ ID NO: 3905552 - DNA, 25 bp, Homo sapien
tgcacatgactatggagcctcctgc

SEQ ID NO: 3905553 - DNA, 25 bp, Homo sapien
caaggtagactgatacttttgttca

SEQ ID NO: 3905554 - DNA, 25 bp, Homo sapien
tgacaatagaggagaacaggcgatc

SEQ ID NO: 3905555 - DNA, 25 bp, Homo sapien
tacttttgttcagcaacggtgacaa

SEQ ID NO: 3905556 - DNA, 25 bp, Homo sapien
acaggcgatctagagggcgttgaac

SEQ ID NO: 3905557 - DNA, 25 bp, Homo sapien
cgcagacagacgatggctgcagcct

SEQ ID NO: 3905558 - DNA, 25 bp, Homo sapien
tggctccgcagacagacgatggctg

SEQ ID NO: 3905559 - DNA, 25 bp, Homo sapien
tccgcagacagacgatggctgcagc

SEQ ID NO: 3905560 - DNA, 25 bp, Homo sapien
gctccgcagacagacgatggctgca

SEQ ID NO: 3905561 - DNA, 25 bp, Homo sapien
tcaggagcctccctctttcgcttgt

SEQ ID NO: 3905562 - DNA, 25 bp, Homo sapien
ggttgtgctagctcctgagctctgg

SEQ ID NO: 3905563 - DNA, 25 bp, Homo sapien
cacagatccccaggttgtgctagct

SEQ ID NO: 3905564 - DNA, 25 bp, Homo sapien
ccctctttcgcttgtgcaaggaagg

SEQ ID NO: 3905565 - DNA, 25 bp, Homo sapien
cagccttccagggggctttcttcac

SEQ ID NO: 3905566 - DNA, 25 bp, Homo sapien
gcaaactgttcaacggcatctggtt

SEQ ID NO: 3905567 - DNA, 25 bp, Homo sapien
ccctggtccatgctctaggctgatg

SEQ ID NO: 3905568 - DNA, 25 bp, Homo sapien
tgccaggcaagaccagcaaactgtt

SEQ ID NO: 3905569 - DNA, 25 bp, Homo sapien
gagaacttgaccctgtcactcagat

SEQ ID NO: 3905570 - DNA, 25 bp, Homo sapien
gggtgtctttattgcacagtaccaa

SEQ ID NO: 3905571 - DNA, 25 bp, Homo sapien
gtctttattgcacagtaccaatgtc

SEQ ID NO: 3905572 - DNA, 25 bp, Homo sapien
tttattgcacagtaccaatgtcagg

SEQ ID NO: 3905573 - DNA, 25 bp, Homo sapien
gtagggggtgtctttattgcacagt

SEQ ID NO: 3905574 - DNA, 25 bp, Homo sapien
agatgcccaaggctgaagcagccag

SEQ ID NO: 3905575 - DNA, 25 bp, Homo sapien
gatgcccaaggctgaagcagccagc

SEQ ID NO: 3905576 - DNA, 25 bp, Homo sapien
caaggctgaagcagccagccgtggg

SEQ ID NO: 3905577 - DNA, 25 bp, Homo sapien
gcccaaggctgaagcagccagccgt

SEQ ID NO: 3905578 - DNA, 25 bp, Homo sapien
cgaaccccaatgggcagggcctgtc

SEQ ID NO: 3905579 - DNA, 25 bp, Homo sapien
ggaagttgagtagattgagcgggaa

SEQ ID NO: 3905580 - DNA, 25 bp, Homo sapien
agggcctgtcccttgctggaagttg

SEQ ID NO: 3905581 - DNA, 25 bp, Homo sapien
agttgagtagattgagcgggaaagc

SEQ ID NO: 3905582 - DNA, 25 bp, Homo sapien
caactttaatggctgagtctccaga

SEQ ID NO: 3905583 - DNA, 25 bp, Homo sapien
cctcaactttaatggctgagtctcc

SEQ ID NO: 3905584 - DNA, 25 bp, Homo sapien
taatggctgagtctccagagggcag

SEQ ID NO: 3905585 - DNA, 25 bp, Homo sapien
agagttacctggacgccgcccacat

SEQ ID NO: 3905586 - DNA, 25 bp, Homo sapien
tcattgggcggagctcatgtcgagg

SEQ ID NO: 3905587 - DNA, 25 bp, Homo sapien
atgtgggggcgcatcgtgttactcc

SEQ ID NO: 3905588 - DNA, 25 bp, Homo sapien
ctgaggttctgggttcggtgatgtg

SEQ ID NO: 3905589 - DNA, 25 bp, Homo sapien
gcatcgtgttactcctgatggctgg

SEQ ID NO: 3905590 - DNA, 25 bp, Homo sapien
accggccaatgcagaagacccttct

SEQ ID NO: 3905591 - DNA, 25 bp, Homo sapien
ttggcctgtattcccccggcgattc

SEQ ID NO: 3905592 - DNA, 25 bp, Homo sapien
tccttctaaaccagacgagagaagg

SEQ ID NO: 3905593 - DNA, 25 bp, Homo sapien
cgttagcctctctaattggataggg

SEQ ID NO: 3905594 - DNA, 25 bp, Homo sapien
tgtcggcttagccaatgttccccgc

SEQ ID NO: 3905595 - DNA, 25 bp, Homo sapien
taagcctccactgtcggcttagcca

SEQ ID NO: 3905596 - DNA, 25 bp, Homo sapien
ttccgttccgaaagctggccgcgcg

SEQ ID NO: 3905597 - DNA, 25 bp, Homo sapien
gcgacgccgagcgttccgttccgaa

SEQ ID NO: 3905598 - DNA, 25 bp, Homo sapien
cttcatgccgggccgcgcgggccaa

SEQ ID NO: 3905599 - DNA, 25 bp, Homo sapien
gcttcatgccgggccgcgcgggcca

SEQ ID NO: 3905600 - DNA, 25 bp, Homo sapien
acgccgcttcatgccgggccgcgcg

SEQ ID NO: 3905601 - DNA, 25 bp, Homo sapien
tcaacgccgcttcatgccgggccgc

SEQ ID NO: 3905602 - DNA, 25 bp, Homo sapien
gcgtggcccagggtgctgcagctcc

SEQ ID NO: 3905603 - DNA, 25 bp, Homo sapien
agcggcaagcggcggcagcagctcc

SEQ ID NO: 3905604 - DNA, 25 bp, Homo sapien
cggcgtggcccagggtgctgcagct

SEQ ID NO: 3905605 - DNA, 25 bp, Homo sapien
tgcagctcctcctcaggcggcggcg

SEQ ID NO: 3905606 - DNA, 25 bp, Homo sapien
gggcgccacagtttgcagtagtcat

SEQ ID NO: 3905607 - DNA, 25 bp, Homo sapien
cgagtttgaagtcgagctcgtcgtg

SEQ ID NO: 3905608 - DNA, 25 bp, Homo sapien
cgtcgtgggcgccacagtttgcagt

SEQ ID NO: 3905609 - DNA, 25 bp, Homo sapien
ccgtcctcgccaaagacgagtttga

SEQ ID NO: 3905610 - DNA, 25 bp, Homo sapien
gcagccccaaattaccaagatctaa

SEQ ID NO: 3905611 - DNA, 25 bp, Homo sapien
gccaaagaactgaaacaattctcgt

SEQ ID NO: 3905612 - DNA, 25 bp, Homo sapien
tcaaaaatcttctcactgtatggaa

SEQ ID NO: 3905613 - DNA, 25 bp, Homo sapien
gtgatacaagtactcccaaaccttc

SEQ ID NO: 3905614 - DNA, 25 bp, Homo sapien
gttactgctgtgagcaaactactgc

SEQ ID NO: 3905615 - DNA, 25 bp, Homo sapien
tactcaactagcaataatgagaggg

SEQ ID NO: 3905616 - DNA, 25 bp, Homo sapien
agcagaatttggactatgccttcaa

SEQ ID NO: 3905617 - DNA, 25 bp, Homo sapien
actactgcttactatcaaatgaggc

SEQ ID NO: 3905618 - DNA, 25 bp, Homo sapien
cactgttacttgaacctcatatggc

SEQ ID NO: 3905619 - DNA, 25 bp, Homo sapien
actgttacttgaacctcatatggca

SEQ ID NO: 3905620 - DNA, 25 bp, Homo sapien
ccactgttacttgaacctcatatgg

SEQ ID NO: 3905621 - DNA, 25 bp, Homo sapien
gaataagaagcatccctcaagtagc

SEQ ID NO: 3905622 - DNA, 25 bp, Homo sapien
caagtagctattttgagcccaaagc

SEQ ID NO: 3905623 - DNA, 25 bp, Homo sapien
gacccttgctttcaccataggaaaa

SEQ ID NO: 3905624 - DNA, 25 bp, Homo sapien
tataggttgcgcaaaaagaactgta

SEQ ID NO: 3905625 - DNA, 25 bp, Homo sapien
taatcaagacaacatgggcggagag

SEQ ID NO: 3905626 - DNA, 25 bp, Homo sapien
caattttgacgacagatctaaacgc

SEQ ID NO: 3905627 - DNA, 25 bp, Homo sapien
cattcaggtttagggcaattttgac

SEQ ID NO: 3905628 - DNA, 25 bp, Homo sapien
tgaaactaccctgactattgagcat

SEQ ID NO: 3905629 - DNA, 25 bp, Homo sapien
aaacccgaatatctatggccaattg

SEQ ID NO: 3905630 - DNA, 25 bp, Homo sapien
gatgtacaatgcaatccctaccaaa

SEQ ID NO: 3905631 - DNA, 25 bp, Homo sapien
gacttcttgtgtacatggattgaaa

SEQ ID NO: 3905632 - DNA, 25 bp, Homo sapien
aacagtgtggtgctagcataagaag

SEQ ID NO: 3905633 - DNA, 25 bp, Homo sapien
taaggccttgcgagatgggaaacca

SEQ ID NO: 3905634 - DNA, 25 bp, Homo sapien
ctatctaaatggtactcaagtggac

SEQ ID NO: 3905635 - DNA, 25 bp, Homo sapien
cagcctgttgaattatgatggtagc

SEQ ID NO: 3905636 - DNA, 25 bp, Homo sapien
tgctcagggagaggctagtcaagta

SEQ ID NO: 3905637 - DNA, 25 bp, Homo sapien
ttttcaaccacatatacctattctg

SEQ ID NO: 3905638 - DNA, 25 bp, Homo sapien
gggagctaactttgtgctgttcatt

SEQ ID NO: 3905639 - DNA, 25 bp, Homo sapien
tgtctacactggaaacaacatgatt

SEQ ID NO: 3905640 - DNA, 25 bp, Homo sapien
gcaactactatgtaagcaggcatgt

SEQ ID NO: 3905641 - DNA, 25 bp, Homo sapien
taaatggatgcacaatcatctggct

SEQ ID NO: 3905642 - DNA, 25 bp, Homo sapien
aacagaagagtgagacggtaatcca

SEQ ID NO: 3905643 - DNA, 25 bp, Homo sapien
taaagtagatggaggtggatctaca

SEQ ID NO: 3905644 - DNA, 25 bp, Homo sapien
catgatgtggtaagcaaagtggtgt

SEQ ID NO: 3905645 - DNA, 25 bp, Homo sapien
ggatccaagggtaaatcgggctgca

SEQ ID NO: 3905646 - DNA, 25 bp, Homo sapien
ctaggactaagagaagactcccggt

SEQ ID NO: 3905647 - DNA, 25 bp, Homo sapien
gatgcatcagagaaccaactcctag

SEQ ID NO: 3905648 - DNA, 25 bp, Homo sapien
gactcccggtaggatggctcaagag

SEQ ID NO: 3905649 - DNA, 25 bp, Homo sapien
ttgatgccaagtttcttctccaggg

SEQ ID NO: 3905650 - DNA, 25 bp, Homo sapien
tgttgatgccaagtttcttctccag

SEQ ID NO: 3905651 - DNA, 25 bp, Homo sapien
gccaagtttcttctccagggcagcc

SEQ ID NO: 3905652 - DNA, 25 bp, Homo sapien
caagtttcttctccagggcagcccc

SEQ ID NO: 3905653 - DNA, 25 bp, Homo sapien
caaggagattgcctgggtgataatg

SEQ ID NO: 3905654 - DNA, 25 bp, Homo sapien
ggagagtggcaaggagattgcctgg

SEQ ID NO: 3905655 - DNA, 25 bp, Homo sapien
catcagtgacactggatctaggaga

SEQ ID NO: 3905656 - DNA, 25 bp, Homo sapien
ggtgataatgagtgtccaagtccat

SEQ ID NO: 3905657 - DNA, 25 bp, Homo sapien
gagggatgtcagtctctacacagta

SEQ ID NO: 3905658 - DNA, 25 bp, Homo sapien
agggacccagcataacaaacttcag

SEQ ID NO: 3905659 - DNA, 25 bp, Homo sapien
gcattgagccacgtatcttctgtca

SEQ ID NO: 3905660 - DNA, 25 bp, Homo sapien
catctattgaagtctcccgggctgg

SEQ ID NO: 3905661 - DNA, 25 bp, Homo sapien
tataatccaagttgtacaataaact

SEQ ID NO: 3905662 - DNA, 25 bp, Homo sapien
aattcatattataatccaagttgta

SEQ ID NO: 3905663 - DNA, 25 bp, Homo sapien
tcatattataatccaagttgtacaa

SEQ ID NO: 3905664 - DNA, 25 bp, Homo sapien
ttataatccaagttgtacaataaac

SEQ ID NO: 3905665 - DNA, 25 bp, Homo sapien
ggatgtcccccagtagatgctttta

SEQ ID NO: 3905666 - DNA, 25 bp, Homo sapien
ccctcggctaccttcagtttcataa

SEQ ID NO: 3905667 - DNA, 25 bp, Homo sapien
aatgggctcgatgatgagttttagg

SEQ ID NO: 3905668 - DNA, 25 bp, Homo sapien
tcagttcacattgtccaaaatgagc

SEQ ID NO: 3905669 - DNA, 25 bp, Homo sapien
tttctagctatccattcagtcttcc

SEQ ID NO: 3905670 - DNA, 25 bp, Homo sapien
atttttctagctatccattcagtct

SEQ ID NO: 3905671 - DNA, 25 bp, Homo sapien
tctggaatgttaatcaaatgttaac

SEQ ID NO: 3905672 - DNA, 25 bp, Homo sapien
cacagagagttatctggaatgttaa

SEQ ID NO: 3905673 - DNA, 25 bp, Homo sapien
gggagactcatgaagtgcttaaaat

SEQ ID NO: 3905674 - DNA, 25 bp, Homo sapien
gttagatacaaagcaggacatccat

SEQ ID NO: 3905675 - DNA, 25 bp, Homo sapien
tacttgcgtgttaaatattcattgc

SEQ ID NO: 3905676 - DNA, 25 bp, Homo sapien
tcatacactagaataacacaaagca

SEQ ID NO: 3905677 - DNA, 25 bp, Homo sapien
caaaccctagcaaattacttaatgg

SEQ ID NO: 3905678 - DNA, 25 bp, Homo sapien
ttattcgaagatgagctggctgggc

SEQ ID NO: 3905679 - DNA, 25 bp, Homo sapien
aggatcaatcacttgaagccaagag

SEQ ID NO: 3905680 - DNA, 25 bp, Homo sapien
tgccctgagtttgggaaaaagacaa

SEQ ID NO: 3905681 - DNA, 25 bp, Homo sapien
tacttctgcatgtaagtagggccat

SEQ ID NO: 3905682 - DNA, 25 bp, Homo sapien
tatcttgagtgctttccatacacct

SEQ ID NO: 3905683 - DNA, 25 bp, Homo sapien
gccatgtgactacttgtagccaaaa

SEQ ID NO: 3905684 - DNA, 25 bp, Homo sapien
tcccatggacagtagaagctgtgca

SEQ ID NO: 3905685 - DNA, 25 bp, Homo sapien
ccaccgctcctgacctgtgttttat

SEQ ID NO: 3905686 - DNA, 25 bp, Homo sapien
gccttatgggtgtccaattgctcca

SEQ ID NO: 3905687 - DNA, 25 bp, Homo sapien
taattaaatccacaacccattttga

SEQ ID NO: 3905688 - DNA, 25 bp, Homo sapien
taacgtatctcaagtaattcctaca

SEQ ID NO: 3905689 - DNA, 25 bp, Homo sapien
ctgagcactgatatgacacccaaag

SEQ ID NO: 3905690 - DNA, 25 bp, Homo sapien
tctgagcactgatatgacacccaaa

SEQ ID NO: 3905691 - DNA, 25 bp, Homo sapien
tacagaatcacatcactacacctgg

SEQ ID NO: 3905692 - DNA, 25 bp, Homo sapien
ctataagaaactgcccgagactggg

SEQ ID NO: 3905693 - DNA, 25 bp, Homo sapien
ccagtgattcaattacccccatctg

SEQ ID NO: 3905694 - DNA, 25 bp, Homo sapien
aaatttacagtcatggttgaaggta

SEQ ID NO: 3905695 - DNA, 25 bp, Homo sapien
gctacaatgcccagccatactttta

SEQ ID NO: 3905696 - DNA, 25 bp, Homo sapien
gccacggtacccagtttgctatcta

SEQ ID NO: 3905697 - DNA, 25 bp, Homo sapien
catctatatggaaatgtgaggctac

SEQ ID NO: 3905698 - DNA, 25 bp, Homo sapien
caatgctggtcacactgtagtcgag

SEQ ID NO: 3905699 - DNA, 25 bp, Homo sapien
agtccactgtgcctcaaaagaatga

SEQ ID NO: 3905700 - DNA, 25 bp, Homo sapien
gatcatggtgtataaacttttgtag

SEQ ID NO: 3905701 - DNA, 25 bp, Homo sapien
attcatgaaggatatcggtttgcag

SEQ ID NO: 3905702 - DNA, 25 bp, Homo sapien
gcacccagccaatccatttgactta

SEQ ID NO: 3905703 - DNA, 25 bp, Homo sapien
tctatcaactgagatgaccacatgg

SEQ ID NO: 3905704 - DNA, 25 bp, Homo sapien
ttgtagatttattggcttttcgtta

SEQ ID NO: 3905705 - DNA, 25 bp, Homo sapien
agatttattggcttttcgttatagc

SEQ ID NO: 3905706 - DNA, 25 bp, Homo sapien
ttggcttttcgttatagcccaggag

SEQ ID NO: 3905707 - DNA, 25 bp, Homo sapien
ttattggcttttcgttatagcccag

SEQ ID NO: 3905708 - DNA, 25 bp, Homo sapien
tctcttggcttgcagtagcgactgt

SEQ ID NO: 3905709 - DNA, 25 bp, Homo sapien
tagcgactgtcttcccagtgattcg

SEQ ID NO: 3905710 - DNA, 25 bp, Homo sapien
cagtgattcgatgcacctggtaaaa

SEQ ID NO: 3905711 - DNA, 25 bp, Homo sapien
cctggtaaaatgcatgaggtcgtaa

SEQ ID NO: 3905712 - DNA, 25 bp, Homo sapien
gcggagtttcaaaatacctgcacaa

SEQ ID NO: 3905713 - DNA, 25 bp, Homo sapien
ggctgtgggatgtgtacacgaaaca

SEQ ID NO: 3905714 - DNA, 25 bp, Homo sapien
cactcaacgggtatagaggctatct

SEQ ID NO: 3905715 - DNA, 25 bp, Homo sapien
gaagttctatatctgaattgcggag

SEQ ID NO: 3905716 - DNA, 25 bp, Homo sapien
gaagctggcaatggtagctgtttct

SEQ ID NO: 3905717 - DNA, 25 bp, Homo sapien
ccctctggcaggataattaagaagc

SEQ ID NO: 3905718 - DNA, 25 bp, Homo sapien
ctgggcatagaaccctctggcagga

SEQ ID NO: 3905719 - DNA, 25 bp, Homo sapien
caggataattaagaagctggcaatg

SEQ ID NO: 3905720 - DNA, 25 bp, Homo sapien
ttccaagttgctacattttctggag

SEQ ID NO: 3905721 - DNA, 25 bp, Homo sapien
aatgactggttccaagttgctacat

SEQ ID NO: 3905722 - DNA, 25 bp, Homo sapien
tggttccaagttgctacattttctg

SEQ ID NO: 3905723 - DNA, 25 bp, Homo sapien
ccaagttgctacattttctggagat

SEQ ID NO: 3905724 - DNA, 25 bp, Homo sapien
gttaaaaatctttgatacataaatg

SEQ ID NO: 3905725 - DNA, 25 bp, Homo sapien
ctttgatacataaatgacaaactca

SEQ ID NO: 3905726 - DNA, 25 bp, Homo sapien
taaaaatctttgatacataaatgac

SEQ ID NO: 3905727 - DNA, 25 bp, Homo sapien
ttgatacataaatgacaaactcaag

SEQ ID NO: 3905728 - DNA, 25 bp, Homo sapien
gaagaaaattagatccagtcacaac

SEQ ID NO: 3905729 - DNA, 25 bp, Homo sapien
tcaatatgaggaagttcttgagcag

SEQ ID NO: 3905730 - DNA, 25 bp, Homo sapien
caactgttgatactgtacttctcaa

SEQ ID NO: 3905731 - DNA, 25 bp, Homo sapien
aaccatttcatgacctccatttaca

SEQ ID NO: 3905732 - DNA, 25 bp, Homo sapien
cttgtcctttttcaagaaaaatgat

SEQ ID NO: 3905733 - DNA, 25 bp, Homo sapien
tttccctgattatcttcccttctac

SEQ ID NO: 3905734 - DNA, 25 bp, Homo sapien
tcccttctacctcccactgaggtcg

SEQ ID NO: 3905735 - DNA, 25 bp, Homo sapien
cccttgacatttttccctgattatc

SEQ ID NO: 3905736 - DNA, 25 bp, Homo sapien
tctacctcccactgaggtcgtccat

SEQ ID NO: 3905737 - DNA, 25 bp, Homo sapien
cctcttgccattgcaaagataaaag

SEQ ID NO: 3905738 - DNA, 25 bp, Homo sapien
cttgccattgcaaagataaaagtgc

SEQ ID NO: 3905739 - DNA, 25 bp, Homo sapien
gcagctgtaactgctgggttatgat

SEQ ID NO: 3905740 - DNA, 25 bp, Homo sapien
gatatggaggaacttcaaggacaat

SEQ ID NO: 3905741 - DNA, 25 bp, Homo sapien
gtcatctatcaaccataaggccagt

SEQ ID NO: 3905742 - DNA, 25 bp, Homo sapien
gctgaaaggcggcaaattctcctgg

SEQ ID NO: 3905743 - DNA, 25 bp, Homo sapien
tattgtcctcccaattcatgggctg

SEQ ID NO: 3905744 - DNA, 25 bp, Homo sapien
gagatagtaaccaaccagaacaagt

SEQ ID NO: 3905745 - DNA, 25 bp, Homo sapien
tccctggcttatatgagataggcag

SEQ ID NO: 3905746 - DNA, 25 bp, Homo sapien
aaagccaagctggaataaataaggc

SEQ ID NO: 3905747 - DNA, 25 bp, Homo sapien
agataggcagcaccaaccagacatc

SEQ ID NO: 3905748 - DNA, 25 bp, Homo sapien
taaaccaggtatgggcacagaccaa

SEQ ID NO: 3905749 - DNA, 25 bp, Homo sapien
caagagatctcaaatagccaacaca

SEQ ID NO: 3905750 - DNA, 25 bp, Homo sapien
aaaaatgtccttgagtcatataaag

SEQ ID NO: 3905751 - DNA, 25 bp, Homo sapien
tattgctaagacgacaacactctcc

SEQ ID NO: 3905752 - DNA, 25 bp, Homo sapien
taatccctatcaaagtctcagtgac

SEQ ID NO: 3905753 - DNA, 25 bp, Homo sapien
tatggatgacagtggttgacagcca

SEQ ID NO: 3905754 - DNA, 25 bp, Homo sapien
gatgtcctgttgagcctgaatttga

SEQ ID NO: 3905755 - DNA, 25 bp, Homo sapien
taggaagaccccacaggaggtgttg

SEQ ID NO: 3905756 - DNA, 25 bp, Homo sapien
taaaccagaaagagttgcatcctgc

SEQ ID NO: 3905757 - DNA, 25 bp, Homo sapien
gaagctgttgtagcagaccctgaat

SEQ ID NO: 3905758 - DNA, 25 bp, Homo sapien
gaccctgaatgtgaaggaccatatg

SEQ ID NO: 3905759 - DNA, 25 bp, Homo sapien
aactagccaagggatgagaagctgc

SEQ ID NO: 3905760 - DNA, 25 bp, Homo sapien
gcccagaaagcggtgaactagccaa

SEQ ID NO: 3905761 - DNA, 25 bp, Homo sapien
gagacggtgatgaggcagttcctga

SEQ ID NO: 3905762 - DNA, 25 bp, Homo sapien
tggagacggtgatgaggcagttcct

SEQ ID NO: 3905763 - DNA, 25 bp, Homo sapien
ctggagacggtgatgaggcagttcc

SEQ ID NO: 3905764 - DNA, 25 bp, Homo sapien
agacggtgatgaggcagttcctgag

SEQ ID NO: 3905765 - DNA, 25 bp, Homo sapien
gagtgctgtccagaatgcattctgg

SEQ ID NO: 3905766 - DNA, 25 bp, Homo sapien
tgagtgctgtccagaatgcattctg

SEQ ID NO: 3905767 - DNA, 25 bp, Homo sapien
tgctgtccagaatgcattctggtgg

SEQ ID NO: 3905768 - DNA, 25 bp, Homo sapien
agtgctgtccagaatgcattctggt

SEQ ID NO: 3905769 - DNA, 25 bp, Homo sapien
tgaaggtgcagaaagacccccctgg

SEQ ID NO: 3905770 - DNA, 25 bp, Homo sapien
catattaaggatgaaggtgcagaaa

SEQ ID NO: 3905771 - DNA, 25 bp, Homo sapien
gaaggtgcagaaagacccccctggc

SEQ ID NO: 3905772 - DNA, 25 bp, Homo sapien
caatggttgcaaagttaggctctcg

SEQ ID NO: 3905773 - DNA, 25 bp, Homo sapien
ttaggctctcgatcttctggttcag

SEQ ID NO: 3905774 - DNA, 25 bp, Homo sapien
tcacagttgccccatcaggtggaaa

SEQ ID NO: 3905775 - DNA, 25 bp, Homo sapien
catctaaagtgatgtcctgcagacc

SEQ ID NO: 3905776 - DNA, 25 bp, Homo sapien
aagaacatatcagagatgaacttac

SEQ ID NO: 3905777 - DNA, 25 bp, Homo sapien
tacttcaagaacatatcagagatga

SEQ ID NO: 3905778 - DNA, 25 bp, Homo sapien
cttcaagaacatatcagagatgaac

SEQ ID NO: 3905779 - DNA, 25 bp, Homo sapien
ctacttcaagaacatatcagagatg

SEQ ID NO: 3905780 - DNA, 25 bp, Homo sapien
ttaaaagcccaaccatatgccaata

SEQ ID NO: 3905781 - DNA, 25 bp, Homo sapien
catgacacttgggagaataaagtcc

SEQ ID NO: 3905782 - DNA, 25 bp, Homo sapien
tgccaataagcaatccatagaaact

SEQ ID NO: 3905783 - DNA, 25 bp, Homo sapien
gagccgtggtacctggcaaagttat

SEQ ID NO: 3905784 - DNA, 25 bp, Homo sapien
ggattatagtcacacaccaccatgc

SEQ ID NO: 3905785 - DNA, 25 bp, Homo sapien
gccacctcccgggttcaagtgattc

SEQ ID NO: 3905786 - DNA, 25 bp, Homo sapien
gatcttagctccctgcaactgccac

SEQ ID NO: 3905787 - DNA, 25 bp, Homo sapien
gcgcgatcttagctccctgcaactg

SEQ ID NO: 3905788 - DNA, 25 bp, Homo sapien
gggctcaagagatctacccgcctca

SEQ ID NO: 3905789 - DNA, 25 bp, Homo sapien
tgggctcaagagatctacccgcctc

SEQ ID NO: 3905790 - DNA, 25 bp, Homo sapien
tctgggctcaagagatctacccgcc

SEQ ID NO: 3905791 - DNA, 25 bp, Homo sapien
gttctgggctcaagagatctacccg

SEQ ID NO: 3905792 - DNA, 25 bp, Homo sapien
tcaaaaggccctgagatgttccaaa

SEQ ID NO: 3905793 - DNA, 25 bp, Homo sapien
aaaaggccctgagatgttccaaaga

SEQ ID NO: 3905794 - DNA, 25 bp, Homo sapien
caaaaggccctgagatgttccaaag

SEQ ID NO: 3905795 - DNA, 25 bp, Homo sapien
aaggccctgagatgttccaaagaag

SEQ ID NO: 3905796 - DNA, 25 bp, Homo sapien
tctgggattcttctgagcttggaaa

SEQ ID NO: 3905797 - DNA, 25 bp, Homo sapien
gaaagagaacttggtgaaacgtcag

SEQ ID NO: 3905798 - DNA, 25 bp, Homo sapien
tcagtgataattggacagccacaga

SEQ ID NO: 3905799 - DNA, 25 bp, Homo sapien
cttggaaaattggtatgaggcaccg

SEQ ID NO: 3905800 - DNA, 25 bp, Homo sapien
taatgtttactgtctggtccaaaac

SEQ ID NO: 3905801 - DNA, 25 bp, Homo sapien
ttaatgtttactgtctggtccaaaa

SEQ ID NO: 3905802 - DNA, 25 bp, Homo sapien
ccatatctgttataaaatcaactgt

SEQ ID NO: 3905803 - DNA, 25 bp, Homo sapien
tttccatatctgttataaaatcaac

SEQ ID NO: 3905804 - DNA, 25 bp, Homo sapien
agtttccatatctgttataaaatca

SEQ ID NO: 3905805 - DNA, 25 bp, Homo sapien
tgaaaaacagcttgacagtttccat

SEQ ID NO: 3905806 - DNA, 25 bp, Homo sapien
cctaaacacgtttgaggctgtatag

SEQ ID NO: 3905807 - DNA, 25 bp, Homo sapien
ggcattatttacaagacctttcagc

SEQ ID NO: 3905808 - DNA, 25 bp, Homo sapien
gtacatgtatgcttcccaaaagagg

SEQ ID NO: 3905809 - DNA, 25 bp, Homo sapien
tggtccatctcgcataagccatgat

SEQ ID NO: 3905810 - DNA, 25 bp, Homo sapien
ggataaacaagatgtggtgtacaca

SEQ ID NO: 3905811 - DNA, 25 bp, Homo sapien
tgtggtgtacacaaaaaattgaata

SEQ ID NO: 3905812 - DNA, 25 bp, Homo sapien
caagatgtggtgtacacaaaaaatt

SEQ ID NO: 3905813 - DNA, 25 bp, Homo sapien
taaacaagatgtggtgtacacaaaa

SEQ ID NO: 3905814 - DNA, 25 bp, Homo sapien
ggacagtcttcaacacctcttgtaa

SEQ ID NO: 3905815 - DNA, 25 bp, Homo sapien
ttcagcagctttgcaaattccacgt

SEQ ID NO: 3905816 - DNA, 25 bp, Homo sapien
ctaggccatcatgggtgaggacagt

SEQ ID NO: 3905817 - DNA, 25 bp, Homo sapien
aagcagtattaacagccaccacacc

SEQ ID NO: 3905818 - DNA, 25 bp, Homo sapien
agaacctctatgaacttgacatagg

SEQ ID NO: 3905819 - DNA, 25 bp, Homo sapien
gtgttcagcacaaagaacctctatg

SEQ ID NO: 3905820 - DNA, 25 bp, Homo sapien
aaagaacctctatgaacttgacata

SEQ ID NO: 3905821 - DNA, 25 bp, Homo sapien
aagaacctctatgaacttgacatag

SEQ ID NO: 3905822 - DNA, 25 bp, Homo sapien
cgagccactgcacctggccattttt

SEQ ID NO: 3905823 - DNA, 25 bp, Homo sapien
gagccactgcacctggccatttttt

SEQ ID NO: 3905824 - DNA, 25 bp, Homo sapien
gccactgcacctggccattttttgt

SEQ ID NO: 3905825 - DNA, 25 bp, Homo sapien
cactgcacctggccattttttgtat

SEQ ID NO: 3905826 - DNA, 25 bp, Homo sapien
tgtgtcaaagaagacaacatcacta

SEQ ID NO: 3905827 - DNA, 25 bp, Homo sapien
ctgtgtcaaagaagacaacatcact

SEQ ID NO: 3905828 - DNA, 25 bp, Homo sapien
cagaaaggagctggacatgagagca

SEQ ID NO: 3905829 - DNA, 25 bp, Homo sapien
catgagagcacactgtggttaggcc

SEQ ID NO: 3905830 - DNA, 25 bp, Homo sapien
tctctgctgaacctgatggctggtg

SEQ ID NO: 3905831 - DNA, 25 bp, Homo sapien
ggctggtgttccaagtcagatataa

SEQ ID NO: 3905832 - DNA, 25 bp, Homo sapien
attgaaaggaatcttgatctctgaa

SEQ ID NO: 3905833 - DNA, 25 bp, Homo sapien
agaggaacaacaaattgaaaggaat

SEQ ID NO: 3905834 - DNA, 25 bp, Homo sapien
aggagaaagaggaacaacaaattga

SEQ ID NO: 3905835 - DNA, 25 bp, Homo sapien
gaacaacaaattgaaaggaatcttg

SEQ ID NO: 3905836 - DNA, 25 bp, Homo sapien
aagtggtttctctgctttgacaaaa

SEQ ID NO: 3905837 - DNA, 25 bp, Homo sapien
agtggtttctctgctttgacaaaac

SEQ ID NO: 3905838 - DNA, 25 bp, Homo sapien
ctaagtggtttctctgctttgacaa

SEQ ID NO: 3905839 - DNA, 25 bp, Homo sapien
taagtggtttctctgctttgacaaa

SEQ ID NO: 3905840 - DNA, 25 bp, Homo sapien
tccccagtgtagctaggtatggccc

SEQ ID NO: 3905841 - DNA, 25 bp, Homo sapien
ggtatggcccatgcaattcgttttc

SEQ ID NO: 3905842 - DNA, 25 bp, Homo sapien
gtcacactgacacccagctacagag

SEQ ID NO: 3905843 - DNA, 25 bp, Homo sapien
gaaggtatctatggtaggctgctaa

SEQ ID NO: 3905844 - DNA, 25 bp, Homo sapien
aagcaagtcaaaattattactggta

SEQ ID NO: 3905845 - DNA, 25 bp, Homo sapien
tgaagcaagtcaaaattattactgg

SEQ ID NO: 3905846 - DNA, 25 bp, Homo sapien
ctgaagcaagtcaaaattattactg

SEQ ID NO: 3905847 - DNA, 25 bp, Homo sapien
gcaagtcaaaattattactggtaaa

SEQ ID NO: 3905848 - DNA, 25 bp, Homo sapien
tgctgggactggccaaaacgtaggt

SEQ ID NO: 3905849 - DNA, 25 bp, Homo sapien
tcatgcaagtcctctgctttccttc

SEQ ID NO: 3905850 - DNA, 25 bp, Homo sapien
ctttccttctccctcacttctccct

SEQ ID NO: 3905851 - DNA, 25 bp, Homo sapien
acttctccctcgggctgggggctct

SEQ ID NO: 3905852 - DNA, 25 bp, Homo sapien
gggggctctgggttcaggctctcac

SEQ ID NO: 3905853 - DNA, 25 bp, Homo sapien
tgagggtccatatctggcactgtcc

SEQ ID NO: 3905854 - DNA, 25 bp, Homo sapien
tataatggaagcctgctcaatgctg

SEQ ID NO: 3905855 - DNA, 25 bp, Homo sapien
cttacttagctgaaggaacctggaa

SEQ ID NO: 3905856 - DNA, 25 bp, Homo sapien
tctattttcctgacgatgagggtcc

SEQ ID NO: 3905857 - DNA, 25 bp, Homo sapien
aggcatgtgctactacgcctatgcc

SEQ ID NO: 3905858 - DNA, 25 bp, Homo sapien
gtgctactacgcctatgcctttcta

SEQ ID NO: 3905859 - DNA, 25 bp, Homo sapien
gcatgtgctactacgcctatgcctt

SEQ ID NO: 3905860 - DNA, 25 bp, Homo sapien
catgtgctactacgcctatgccttt

SEQ ID NO: 3905861 - DNA, 25 bp, Homo sapien
tctcattacagctgttataaacaaa

SEQ ID NO: 3905862 - DNA, 25 bp, Homo sapien
aaaaatagatactagtaatagttgc

SEQ ID NO: 3905863 - DNA, 25 bp, Homo sapien
tatctcattacagctgttataaaca

SEQ ID NO: 3905864 - DNA, 25 bp, Homo sapien
aatagttgcaaaactctgactatac

SEQ ID NO: 3905865 - DNA, 25 bp, Homo sapien
ctgggacatgtctctcccaattatc

SEQ ID NO: 3905866 - DNA, 25 bp, Homo sapien
aatctgggacatgtctctcccaatt

SEQ ID NO: 3905867 - DNA, 25 bp, Homo sapien
tctgggacatgtctctcccaattat

SEQ ID NO: 3905868 - DNA, 25 bp, Homo sapien
gaaatctgggacatgtctctcccaa

SEQ ID NO: 3905869 - DNA, 25 bp, Homo sapien
taaatccagggactcaggactcggg

SEQ ID NO: 3905870 - DNA, 25 bp, Homo sapien
ttcctaaatccagggactcaggact

SEQ ID NO: 3905871 - DNA, 25 bp, Homo sapien
tccagggactcaggactcgggaggg

SEQ ID NO: 3905872 - DNA, 25 bp, Homo sapien
ttagagcccatcagatcttcctaaa

SEQ ID NO: 3905873 - DNA, 25 bp, Homo sapien
tctggaatgtcaaccgagaggccaa

SEQ ID NO: 3905874 - DNA, 25 bp, Homo sapien
taaatgtagccatcttacccagggt

SEQ ID NO: 3905875 - DNA, 25 bp, Homo sapien
gacagggtaggccagaatcatttca

SEQ ID NO: 3905876 - DNA, 25 bp, Homo sapien
gataagccttccatgccagtgtgac

SEQ ID NO: 3905877 - DNA, 25 bp, Homo sapien
tctagtgctacaggcatcaaggtat

SEQ ID NO: 3905878 - DNA, 25 bp, Homo sapien
caactctggatcatagaggctttta

SEQ ID NO: 3905879 - DNA, 25 bp, Homo sapien
ggtgcatagcaactctggatcatag

SEQ ID NO: 3905880 - DNA, 25 bp, Homo sapien
aaatttggtgcatagcaactctgga

SEQ ID NO: 3905881 - DNA, 25 bp, Homo sapien
gggatagtttacacccgggcagcag

SEQ ID NO: 3905882 - DNA, 25 bp, Homo sapien
ccagttgctcagtgctgctagtaga

SEQ ID NO: 3905883 - DNA, 25 bp, Homo sapien
gcactgcactcccataaaaggtttt

SEQ ID NO: 3905884 - DNA, 25 bp, Homo sapien
tgtgcatctccagtaagcagaaggc

SEQ ID NO: 3905885 - DNA, 25 bp, Homo sapien
gatgccttcgccctctttgcttgtg

SEQ ID NO: 3905886 - DNA, 25 bp, Homo sapien
cacaagggcatgctgggtaagcgat

SEQ ID NO: 3905887 - DNA, 25 bp, Homo sapien
atgtactgttactccagggcggccc

SEQ ID NO: 3905888 - DNA, 25 bp, Homo sapien
gctgctctttgtgcgccatcctgat

SEQ ID NO: 3905889 - DNA, 25 bp, Homo sapien
tcctaccgaagggatcgggacgcag

SEQ ID NO: 3905890 - DNA, 25 bp, Homo sapien
gggacgcaggctttgggatccatcc

SEQ ID NO: 3905891 - DNA, 25 bp, Homo sapien
cgcctttgggagacctgctgggtca

SEQ ID NO: 3905892 - DNA, 25 bp, Homo sapien
catggcctggacgtgaggacatttc

SEQ ID NO: 3905893 - DNA, 25 bp, Homo sapien
gagagcggaagaatgggttagcccc

SEQ ID NO: 3905894 - DNA, 25 bp, Homo sapien
cagaggcctgacgacccctggggaa

SEQ ID NO: 3905895 - DNA, 25 bp, Homo sapien
ggcctctgtcttgcacgctcctttg

SEQ ID NO: 3905896 - DNA, 25 bp, Homo sapien
gcaggaccagccctggaagtaggaa

SEQ ID NO: 3905897 - DNA, 25 bp, Homo sapien
tctcagtcacctccctgggagagtt

SEQ ID NO: 3905898 - DNA, 25 bp, Homo sapien
cagtcacctccctgggagagtttgg

SEQ ID NO: 3905899 - DNA, 25 bp, Homo sapien
gtcacctccctgggagagtttggga

SEQ ID NO: 3905900 - DNA, 25 bp, Homo sapien
tcagtcacctccctgggagagtttg

SEQ ID NO: 3905901 - DNA, 25 bp, Homo sapien
cctttcccgggcatgagctctggtg

SEQ ID NO: 3905902 - DNA, 25 bp, Homo sapien
tccttgtccgaaagcgcgtggtgcg

SEQ ID NO: 3905903 - DNA, 25 bp, Homo sapien
tcagtctcgagtcgggctaggcaac

SEQ ID NO: 3905904 - DNA, 25 bp, Homo sapien
tttagctgccaagtggagctacgct

SEQ ID NO: 3905905 - DNA, 25 bp, Homo sapien
tgctctccctgtcgccgtgtccggg

SEQ ID NO: 3905906 - DNA, 25 bp, Homo sapien
tccctgtcgccgtgtccgggcgcga

SEQ ID NO: 3905907 - DNA, 25 bp, Homo sapien
tctccctgtcgccgtgtccgggcgc

SEQ ID NO: 3905908 - DNA, 25 bp, Homo sapien
catgctctccctgtcgccgtgtccg

SEQ ID NO: 3905909 - DNA, 25 bp, Homo sapien
cagtgcccgggtgggcggtccggag

SEQ ID NO: 3905910 - DNA, 25 bp, Homo sapien
tgcccgggtgggcggtccggagatg

SEQ ID NO: 3905911 - DNA, 25 bp, Homo sapien
tgacattccaggcttatcgggagga

SEQ ID NO: 3905912 - DNA, 25 bp, Homo sapien
aatggagcagtcacctcgcgaaggt

SEQ ID NO: 3905913 - DNA, 25 bp, Homo sapien
gcataagcgcgtcttccgtgggaaa

SEQ ID NO: 3905914 - DNA, 25 bp, Homo sapien
ccctgtgctgtaagagtggaaccca

SEQ ID NO: 3905915 - DNA, 25 bp, Homo sapien
ccgggatgcaggttcagctctctgg

SEQ ID NO: 3905916 - DNA, 25 bp, Homo sapien
caggtccgggatgcaggttcagctc

SEQ ID NO: 3905917 - DNA, 25 bp, Homo sapien
agctctctgggctctcgcctaggcg

SEQ ID NO: 3905918 - DNA, 25 bp, Homo sapien
gtgtacgacggtcgccgcaggtccg

SEQ ID NO: 3905919 - DNA, 25 bp, Homo sapien
ccagcaccactggggggtgacgtcc

SEQ ID NO: 3905920 - DNA, 25 bp, Homo sapien
tgggtccgcgagcagcattagcagc

SEQ ID NO: 3905921 - DNA, 25 bp, Homo sapien
ggtgacgtccggccgggagcgctgg

SEQ ID NO: 3905922 - DNA, 25 bp, Homo sapien
cagccccacacggtaggggcggagg

SEQ ID NO: 3905923 - DNA, 25 bp, Homo sapien
ccattttctaccaggacaggaggtg

SEQ ID NO: 3905924 - DNA, 25 bp, Homo sapien
cccattttctaccaggacaggaggt

SEQ ID NO: 3905925 - DNA, 25 bp, Homo sapien
ccccattttctaccaggacaggagg

SEQ ID NO: 3905926 - DNA, 25 bp, Homo sapien
cgccacttcccaaacacatccccgt

SEQ ID NO: 3905927 - DNA, 25 bp, Homo sapien
ctgcccccacatgccatgctctcgc

SEQ ID NO: 3905928 - DNA, 25 bp, Homo sapien
atgctctcgccacttcccaaacaca

SEQ ID NO: 3905929 - DNA, 25 bp, Homo sapien
acatgccatgctctcgccacttccc

SEQ ID NO: 3905930 - DNA, 25 bp, Homo sapien
cagaggtagtgcaccactgtcggct

SEQ ID NO: 3905931 - DNA, 25 bp, Homo sapien
gatattgtcaatccagcagtcaatg

SEQ ID NO: 3905932 - DNA, 25 bp, Homo sapien
aagtagctttcggtcttcttggagc

SEQ ID NO: 3905933 - DNA, 25 bp, Homo sapien
cagttccaggttcagccagattgtg

SEQ ID NO: 3905934 - DNA, 25 bp, Homo sapien
ggagggaacctcagctcaacgccac

SEQ ID NO: 3905935 - DNA, 25 bp, Homo sapien
cgccacacattctggatttgaattc

SEQ ID NO: 3905936 - DNA, 25 bp, Homo sapien
tatcaggcgccaactgtgtttctgg

SEQ ID NO: 3905937 - DNA, 25 bp, Homo sapien
tcacggaactcagcctgggagggaa

SEQ ID NO: 3905938 - DNA, 25 bp, Homo sapien
ccagttatccggagtctgaggcagg

SEQ ID NO: 3905939 - DNA, 25 bp, Homo sapien
aatcccagttatccggagtctgagg

SEQ ID NO: 3905940 - DNA, 25 bp, Homo sapien
tgtaatcccagttatccggagtctg

SEQ ID NO: 3905941 - DNA, 25 bp, Homo sapien
cccagttatccggagtctgaggcag

SEQ ID NO: 3905942 - DNA, 25 bp, Homo sapien
ccaacagtgcatcatgtcctgagtc

SEQ ID NO: 3905943 - DNA, 25 bp, Homo sapien
tgttgtgagaggatattgagccagt

SEQ ID NO: 3905944 - DNA, 25 bp, Homo sapien
tgtgtcccaacagtgcatcatgtcc

SEQ ID NO: 3905945 - DNA, 25 bp, Homo sapien
ttggtgtgtcccaacagtgcatcat

SEQ ID NO: 3905946 - DNA, 25 bp, Homo sapien
aagccagggacacgtacatccacac

SEQ ID NO: 3905947 - DNA, 25 bp, Homo sapien
ccaaagccagggacacgtacatcca

SEQ ID NO: 3905948 - DNA, 25 bp, Homo sapien
aggaactccagtgagaaggtcttcc

SEQ ID NO: 3905949 - DNA, 25 bp, Homo sapien
ggaactccagtgagaaggtcttccc

SEQ ID NO: 3905950 - DNA, 25 bp, Homo sapien
tgacagctagcaggtccttggaaga

SEQ ID NO: 3905951 - DNA, 25 bp, Homo sapien
tgtccctacaaaccagcagagttcc

SEQ ID NO: 3905952 - DNA, 25 bp, Homo sapien
gctgatcagagacagctcacaggct

SEQ ID NO: 3905953 - DNA, 25 bp, Homo sapien
gaaaagatacagctagtgccggcca

SEQ ID NO: 3905954 - DNA, 25 bp, Homo sapien
tcggacatcctcaccccgtgtgtag

SEQ ID NO: 3905955 - DNA, 25 bp, Homo sapien
gctcggcgccagtcatagggagccc

SEQ ID NO: 3905956 - DNA, 25 bp, Homo sapien
gcgccagtcatagggagcccctcgg

SEQ ID NO: 3905957 - DNA, 25 bp, Homo sapien
cagtcatagggagcccctcggacat

SEQ ID NO: 3905958 - DNA, 25 bp, Homo sapien
caggataagactgaccaaaggtggt

SEQ ID NO: 3905959 - DNA, 25 bp, Homo sapien
tacctcccgagacgtcagggaggga

SEQ ID NO: 3905960 - DNA, 25 bp, Homo sapien
tcaaacagagcggtctgggtccccc

SEQ ID NO: 3905961 - DNA, 25 bp, Homo sapien
gggagagcccaaggtctgtggtgcc

SEQ ID NO: 3905962 - DNA, 25 bp, Homo sapien
cagagccaggcaggggtcaggtggg

SEQ ID NO: 3905963 - DNA, 25 bp, Homo sapien
caggcaggggtcaggtgggaagggt

SEQ ID NO: 3905964 - DNA, 25 bp, Homo sapien
gccagagccaggcaggggtcaggtg

SEQ ID NO: 3905965 - DNA, 25 bp, Homo sapien
gagccaggcaggggtcaggtgggaa

SEQ ID NO: 3905966 - DNA, 25 bp, Homo sapien
atactgtgggcaaccagcaccacgg

SEQ ID NO: 3905967 - DNA, 25 bp, Homo sapien
ctggtacatctcctcgatcatctcg

SEQ ID NO: 3905968 - DNA, 25 bp, Homo sapien
tcatctcgcggagggccaggaagta

SEQ ID NO: 3905969 - DNA, 25 bp, Homo sapien
gggcccccatacagctggtacatct

SEQ ID NO: 3905970 - DNA, 25 bp, Homo sapien
gcagaaagtagagcgtgtacatgtt

SEQ ID NO: 3905971 - DNA, 25 bp, Homo sapien
ctgcagaaagtagagcgtgtacatg

SEQ ID NO: 3905972 - DNA, 25 bp, Homo sapien
agaaagtagagcgtgtacatgttgc

SEQ ID NO: 3905973 - DNA, 25 bp, Homo sapien
tgcagaaagtagagcgtgtacatgt

SEQ ID NO: 3905974 - DNA, 25 bp, Homo sapien
ctgaagccaggacgcgcagggtctt

SEQ ID NO: 3905975 - DNA, 25 bp, Homo sapien
ggatatacttgtccttccaggcctg

SEQ ID NO: 3905976 - DNA, 25 bp, Homo sapien
ccaggacgcgcagggtcttggccac

SEQ ID NO: 3905977 - DNA, 25 bp, Homo sapien
agggcgcacccagtgacacgaaggc

SEQ ID NO: 3905978 - DNA, 25 bp, Homo sapien
tcctcaccagggagtaaggcggcac

SEQ ID NO: 3905979 - DNA, 25 bp, Homo sapien
tgggaaccacacatccaagctatgt

SEQ ID NO: 3905980 - DNA, 25 bp, Homo sapien
cacatacccacagggtgatttatga

SEQ ID NO: 3905981 - DNA, 25 bp, Homo sapien
atttttgctacatctgggaaccaca

SEQ ID NO: 3905982 - DNA, 25 bp, Homo sapien
tcctggaagaacttgcggtagtccc

SEQ ID NO: 3905983 - DNA, 25 bp, Homo sapien
caaagcagattttagggtcacggtc

SEQ ID NO: 3905984 - DNA, 25 bp, Homo sapien
tcaagttcacagtaccatcgccgtc

SEQ ID NO: 3905985 - DNA, 25 bp, Homo sapien
catgtgtagttgtagggcagcagcc

SEQ ID NO: 3905986 - DNA, 25 bp, Homo sapien
gaaaccctgtgggagagcagctcag

SEQ ID NO: 3905987 - DNA, 25 bp, Homo sapien
tagcacatccgaggaaatcagggcc

SEQ ID NO: 3905988 - DNA, 25 bp, Homo sapien
caaactttgcaaaacgcgtgggcca

SEQ ID NO: 3905989 - DNA, 25 bp, Homo sapien
taacatccctcataggaaggctgcg

SEQ ID NO: 3905990 - DNA, 25 bp, Homo sapien
agctgcctcgtcagggctcgagcag

SEQ ID NO: 3905991 - DNA, 25 bp, Homo sapien
agggcgtccacagcggacattcccg

SEQ ID NO: 3905992 - DNA, 25 bp, Homo sapien
ctccgagggcgtccacagcggacat

SEQ ID NO: 3905993 - DNA, 25 bp, Homo sapien
attcccgcggggagctctcatcggc

SEQ ID NO: 3905994 - DNA, 25 bp, Homo sapien
cgccgccaggatgctcggtcgcgcc

SEQ ID NO: 3905995 - DNA, 25 bp, Homo sapien
cccggcgccgccaggatgctcggtc

SEQ ID NO: 3905996 - DNA, 25 bp, Homo sapien
ggcgccgccaggatgctcggtcgcg

SEQ ID NO: 3905997 - DNA, 25 bp, Homo sapien
cgccaggatgctcggtcgcgccgcc

SEQ ID NO: 3905998 - DNA, 25 bp, Homo sapien
ggtccctctctcctcgtggcgcccc

SEQ ID NO: 3905999 - DNA, 25 bp, Homo sapien
gcgcctctcgcgcggccccgatcgg

SEQ ID NO: 3906000 - DNA, 25 bp, Homo sapien
cggccagccccgcgctgtttctggg

SEQ ID NO: 3906001 - DNA, 25 bp, Homo sapien
acccgcagcgcctctcgcgcggccc

SEQ ID NO: 3906002 - DNA, 25 bp, Homo sapien
aagactggctccctcgcggtcacca

SEQ ID NO: 3906003 - DNA, 25 bp, Homo sapien
gccgcgtcgccagcacaccccaaga

SEQ ID NO: 3906004 - DNA, 25 bp, Homo sapien
gggctcgcacccatacagcgtttct

SEQ ID NO: 3906005 - DNA, 25 bp, Homo sapien
gtctccctcacactcgccgcgtcgc

SEQ ID NO: 3906006 - DNA, 25 bp, Homo sapien
ctgtcaagaaatacgcgaacatcac

SEQ ID NO: 3906007 - DNA, 25 bp, Homo sapien
gcctaattccacttgtctgcctcgg

SEQ ID NO: 3906008 - DNA, 25 bp, Homo sapien
cccctgcagcaaggcctaattccac

SEQ ID NO: 3906009 - DNA, 25 bp, Homo sapien
taaatgggtccagtactgagaagga

SEQ ID NO: 3906010 - DNA, 25 bp, Homo sapien
aaacagggcctgcttaagactgagg

SEQ ID NO: 3906011 - DNA, 25 bp, Homo sapien
gaaccatgatggcactacgggcact

SEQ ID NO: 3906012 - DNA, 25 bp, Homo sapien
gaggcataggtgcacagagaaatcc

SEQ ID NO: 3906013 - DNA, 25 bp, Homo sapien
aattctgggcaagaccaccggaggt

SEQ ID NO: 3906014 - DNA, 25 bp, Homo sapien
agctttaaggcagcaccacttttgc

SEQ ID NO: 3906015 - DNA, 25 bp, Homo sapien
ctttaaggcagcaccacttttgctc

SEQ ID NO: 3906016 - DNA, 25 bp, Homo sapien
ctgagctttaaggcagcaccacttt

SEQ ID NO: 3906017 - DNA, 25 bp, Homo sapien
gagctttaaggcagcaccacttttg

SEQ ID NO: 3906018 - DNA, 25 bp, Homo sapien
agtcctttaaggtcacagagataac

SEQ ID NO: 3906019 - DNA, 25 bp, Homo sapien
gataacctccaagaatcagcaatag

SEQ ID NO: 3906020 - DNA, 25 bp, Homo sapien
taaggtcacagagataacctccaag

SEQ ID NO: 3906021 - DNA, 25 bp, Homo sapien
caagaatcagcaataggaacaggat

SEQ ID NO: 3906022 - DNA, 25 bp, Homo sapien
atgttgctgcttgcccattccacat

SEQ ID NO: 3906023 - DNA, 25 bp, Homo sapien
gagaagaccagagtccctgcacctg

SEQ ID NO: 3906024 - DNA, 25 bp, Homo sapien
ctgcagagaagaccagagtccctgc

SEQ ID NO: 3906025 - DNA, 25 bp, Homo sapien
agagaagaccagagtccctgcacct

SEQ ID NO: 3906026 - DNA, 25 bp, Homo sapien
gcagagaagaccagagtccctgcac

SEQ ID NO: 3906027 - DNA, 25 bp, Homo sapien
gacttctgatgacaaatacctgtcc

SEQ ID NO: 3906028 - DNA, 25 bp, Homo sapien
taggctggcattaaatttgtccaac

SEQ ID NO: 3906029 - DNA, 25 bp, Homo sapien
caacgattggattctccttgagtta

SEQ ID NO: 3906030 - DNA, 25 bp, Homo sapien
tacctgtcctgcagcccagaatagg

SEQ ID NO: 3906031 - DNA, 25 bp, Homo sapien
gaatataagcgtagctggctcccga

SEQ ID NO: 3906032 - DNA, 25 bp, Homo sapien
catcccataggaggcagtgtgtacc

SEQ ID NO: 3906033 - DNA, 25 bp, Homo sapien
tcagctgcatagtttcggaggacct

SEQ ID NO: 3906034 - DNA, 25 bp, Homo sapien
ggtgagacaaagatccctgagccga

SEQ ID NO: 3906035 - DNA, 25 bp, Homo sapien
ctagcaatgttgacttcaatcgaaa

SEQ ID NO: 3906036 - DNA, 25 bp, Homo sapien
aactagcaatgttgacttcaatcga

SEQ ID NO: 3906037 - DNA, 25 bp, Homo sapien
gcaatgttgacttcaatcgaaacag

SEQ ID NO: 3906038 - DNA, 25 bp, Homo sapien
tagcaatgttgacttcaatcgaaac

SEQ ID NO: 3906039 - DNA, 25 bp, Homo sapien
ttctcactgatgactttaactggtt

SEQ ID NO: 3906040 - DNA, 25 bp, Homo sapien
tgctgctcagagcaagccgcaaaga

SEQ ID NO: 3906041 - DNA, 25 bp, Homo sapien
agcaagccgcaaagagcagcaatgg

SEQ ID NO: 3906042 - DNA, 25 bp, Homo sapien
tttctcactgatgactttaactggt

SEQ ID NO: 3906043 - DNA, 25 bp, Homo sapien
cagttggtcaatgataaagctgaaa

SEQ ID NO: 3906044 - DNA, 25 bp, Homo sapien
agagaaaatcgaggcagcaattagt

SEQ ID NO: 3906045 - DNA, 25 bp, Homo sapien
aaaagagaaaatcgaggcagcaatt

SEQ ID NO: 3906046 - DNA, 25 bp, Homo sapien
ccccaagatcaacagttggtcaatg

SEQ ID NO: 3906047 - DNA, 25 bp, Homo sapien
atgaaagaggctggcgggcccacac

SEQ ID NO: 3906048 - DNA, 25 bp, Homo sapien
tgaaagaggctggcgggcccacact

SEQ ID NO: 3906049 - DNA, 25 bp, Homo sapien
aaagccagtgcttctaggatagaaa

SEQ ID NO: 3906050 - DNA, 25 bp, Homo sapien
ccctcaggcctagattctggaaaag

SEQ ID NO: 3906051 - DNA, 25 bp, Homo sapien
tggccactactatgacaagcaagtt

SEQ ID NO: 3906052 - DNA, 25 bp, Homo sapien
cttctaggatagaaagcctgcagga

SEQ ID NO: 3906053 - DNA, 25 bp, Homo sapien
actgcaacctaagttccaagaaggg

SEQ ID NO: 3906054 - DNA, 25 bp, Homo sapien
taaagcctaccctagtcggaagaga

SEQ ID NO: 3906055 - DNA, 25 bp, Homo sapien
gcctctactcaaggagactcagcat

SEQ ID NO: 3906056 - DNA, 25 bp, Homo sapien
cagcatatcctagctctgttgaaag

SEQ ID NO: 3906057 - DNA, 25 bp, Homo sapien
tgggccctcccttctaggatggaag

SEQ ID NO: 3906058 - DNA, 25 bp, Homo sapien
gcagcctctgccctagagttggtta

SEQ ID NO: 3906059 - DNA, 25 bp, Homo sapien
aatttgggtccaatgatgcctgaac

SEQ ID NO: 3906060 - DNA, 25 bp, Homo sapien
aatccagcttattttatcgggcagg

SEQ ID NO: 3906061 - DNA, 25 bp, Homo sapien
taagcctacacaagagggaggatcc

SEQ ID NO: 3906062 - DNA, 25 bp, Homo sapien
cacaagtgagtatgagcccctaaac

SEQ ID NO: 3906063 - DNA, 25 bp, Homo sapien
tagcaactagccaaaatgaggagcg

SEQ ID NO: 3906064 - DNA, 25 bp, Homo sapien
tactgggcacctgggttactgtgaa

SEQ ID NO: 3906065 - DNA, 25 bp, Homo sapien
gaaggaataaacctggctccctgaa

SEQ ID NO: 3906066 - DNA, 25 bp, Homo sapien
tctcctgcaggtaggtacggctgtg

SEQ ID NO: 3906067 - DNA, 25 bp, Homo sapien
tgcaaccaggttttctcccgggatg

SEQ ID NO: 3906068 - DNA, 25 bp, Homo sapien
gaccaccagctagaagtcacaggct

SEQ ID NO: 3906069 - DNA, 25 bp, Homo sapien
cacttcagtgacatctgggccctgt

SEQ ID NO: 3906070 - DNA, 25 bp, Homo sapien
actgaggtgagagaagctaactacc

SEQ ID NO: 3906071 - DNA, 25 bp, Homo sapien
tcacgtggctttaagttctagctcc

SEQ ID NO: 3906072 - DNA, 25 bp, Homo sapien
tcgagtactccctaggctcacgtgg

SEQ ID NO: 3906073 - DNA, 25 bp, Homo sapien
ccacaggagacacaagacctcttca

SEQ ID NO: 3906074 - DNA, 25 bp, Homo sapien
tgcagatggcaggttacctaagaaa

SEQ ID NO: 3906075 - DNA, 25 bp, Homo sapien
taagtgaggtaaatttgaatgcaga

SEQ ID NO: 3906076 - DNA, 25 bp, Homo sapien
gagacacaagacctcttcatggcca

SEQ ID NO: 3906077 - DNA, 25 bp, Homo sapien
cttatacatcctgatggctagcacc

SEQ ID NO: 3906078 - DNA, 25 bp, Homo sapien
gcatgcgtgaacacatacttataca

SEQ ID NO: 3906079 - DNA, 25 bp, Homo sapien
cttccatcactactggtgctcaagg

SEQ ID NO: 3906080 - DNA, 25 bp, Homo sapien
aggatatgaaggcatgcgtgaacac

SEQ ID NO: 3906081 - DNA, 25 bp, Homo sapien
ggcacagttcacaaatgtcagcaga

SEQ ID NO: 3906082 - DNA, 25 bp, Homo sapien
taacaaggcccatgacaatgatggc

SEQ ID NO: 3906083 - DNA, 25 bp, Homo sapien
caatgatggcaatgagcgctacgac

SEQ ID NO: 3906084 - DNA, 25 bp, Homo sapien
accttggcgtaagtgaacgtgtcct

SEQ ID NO: 3906085 - DNA, 25 bp, Homo sapien
tatctgtggctaaagacacctcaag

SEQ ID NO: 3906086 - DNA, 25 bp, Homo sapien
tgtacatagaaacagccgagcagtg

SEQ ID NO: 3906087 - DNA, 25 bp, Homo sapien
gactgatgacctagagaactgggct

SEQ ID NO: 3906088 - DNA, 25 bp, Homo sapien
gcagtgaagctaacagagtcgccat

SEQ ID NO: 3906089 - DNA, 25 bp, Homo sapien
cctcaaaggcgtcctgaaagtgctc

SEQ ID NO: 3906090 - DNA, 25 bp, Homo sapien
gaggaaccctcaaaggcgtcctgaa

SEQ ID NO: 3906091 - DNA, 25 bp, Homo sapien
caggaggaaccctcaaaggcgtcct

SEQ ID NO: 3906092 - DNA, 25 bp, Homo sapien
accctcaaaggcgtcctgaaagtgc

SEQ ID NO: 3906093 - DNA, 25 bp, Homo sapien
tgggtttttgatttcttctgttaca

SEQ ID NO: 3906094 - DNA, 25 bp, Homo sapien
ctttctgggtttttgatttcttctg

SEQ ID NO: 3906095 - DNA, 25 bp, Homo sapien
tgatttcttctgttacaaaattaag

SEQ ID NO: 3906096 - DNA, 25 bp, Homo sapien
tttgatttcttctgttacaaaatta

SEQ ID NO: 3906097 - DNA, 25 bp, Homo sapien
gagtccgaggtcctaattcctttgc

SEQ ID NO: 3906098 - DNA, 25 bp, Homo sapien
tagtgtcagcaccagagtccgaggt

SEQ ID NO: 3906099 - DNA, 25 bp, Homo sapien
cctccagtgcgaacgtgaggacagg

SEQ ID NO: 3906100 - DNA, 25 bp, Homo sapien
gcccactatcagcaggagttccagc

SEQ ID NO: 3906101 - DNA, 25 bp, Homo sapien
caaagtttatcaagtctccactggg

SEQ ID NO: 3906102 - DNA, 25 bp, Homo sapien
tctcagaggaacagtgcaaggaaca

SEQ ID NO: 3906103 - DNA, 25 bp, Homo sapien
gaccctgggttctttctattgagaa

SEQ ID NO: 3906104 - DNA, 25 bp, Homo sapien
tttgccacagtaggaccaatgggtc

SEQ ID NO: 3906105 - DNA, 25 bp, Homo sapien
caggatgtagatgagcgtcacaatt

SEQ ID NO: 3906106 - DNA, 25 bp, Homo sapien
gtagatgagcgtcacaattggcata

SEQ ID NO: 3906107 - DNA, 25 bp, Homo sapien
ggatgtagatgagcgtcacaattgg

SEQ ID NO: 3906108 - DNA, 25 bp, Homo sapien
atgtagatgagcgtcacaattggca

SEQ ID NO: 3906109 - DNA, 25 bp, Homo sapien
tggtccagctgaacatgccaaacgt

SEQ ID NO: 3906110 - DNA, 25 bp, Homo sapien
agcaatggggatggtccagctgaac

SEQ ID NO: 3906111 - DNA, 25 bp, Homo sapien
gggatggtccagctgaacatgccaa

SEQ ID NO: 3906112 - DNA, 25 bp, Homo sapien
gaacatgccaaacgtctggtcagca

SEQ ID NO: 3906113 - DNA, 25 bp, Homo sapien
aggtgtaaaacgctcaatgtggatc

SEQ ID NO: 3906114 - DNA, 25 bp, Homo sapien
taaagcagggataggtgtaaaacgc

SEQ ID NO: 3906115 - DNA, 25 bp, Homo sapien
caatgtggatcatggacagaaggtc

SEQ ID NO: 3906116 - DNA, 25 bp, Homo sapien
ttgaacagtaaagcagggataggtg

SEQ ID NO: 3906117 - DNA, 25 bp, Homo sapien
aatcagaaggagcaatgcacagatc

SEQ ID NO: 3906118 - DNA, 25 bp, Homo sapien
cagaaggagcaatgcacagatccac

SEQ ID NO: 3906119 - DNA, 25 bp, Homo sapien
acagatccacctgagccccgtggtc

SEQ ID NO: 3906120 - DNA, 25 bp, Homo sapien
agatccacctgagccccgtggtccc

SEQ ID NO: 3906121 - DNA, 25 bp, Homo sapien
ccagcggaggtagagctgtccaaca

SEQ ID NO: 3906122 - DNA, 25 bp, Homo sapien
agttgataagctggaaaacatcctc

SEQ ID NO: 3906123 - DNA, 25 bp, Homo sapien
ccttccagcggaggtagagctgtcc

SEQ ID NO: 3906124 - DNA, 25 bp, Homo sapien
tgtccaacaacagacaggcccacga

SEQ ID NO: 3906125 - DNA, 25 bp, Homo sapien
cccgatgccaatgagggaattaatg

SEQ ID NO: 3906126 - DNA, 25 bp, Homo sapien
tccagaaagggcaatcccgatgcca

SEQ ID NO: 3906127 - DNA, 25 bp, Homo sapien
cgaataaacaatggcctccgggact

SEQ ID NO: 3906128 - DNA, 25 bp, Homo sapien
ctccgggactctggcaggtaaacac

SEQ ID NO: 3906129 - DNA, 25 bp, Homo sapien
atcctttttttcttcggctacatca

SEQ ID NO: 3906130 - DNA, 25 bp, Homo sapien
tcaagctcagtcaggacacaaaagc

SEQ ID NO: 3906131 - DNA, 25 bp, Homo sapien
ggctacatcaagctcagtcaggaca

SEQ ID NO: 3906132 - DNA, 25 bp, Homo sapien
caaaagcaaagctgctgggtgcctc

SEQ ID NO: 3906133 - DNA, 25 bp, Homo sapien
taattcaggagagttgggcccacag

SEQ ID NO: 3906134 - DNA, 25 bp, Homo sapien
tcctgtagatgaagagacacgcatg

SEQ ID NO: 3906135 - DNA, 25 bp, Homo sapien
caggttatttgatgacttgggccca

SEQ ID NO: 3906136 - DNA, 25 bp, Homo sapien
tgtacaatccaatgcagccgtcctg

SEQ ID NO: 3906137 - DNA, 25 bp, Homo sapien
tattgagcaaatatatggccaaggt

SEQ ID NO: 3906138 - DNA, 25 bp, Homo sapien
gggtatgtcaagctagcaggttctt

SEQ ID NO: 3906139 - DNA, 25 bp, Homo sapien
ctgttgaccaattccaaaacctaag

SEQ ID NO: 3906140 - DNA, 25 bp, Homo sapien
gccaaggttattcccttatctgtga

SEQ ID NO: 3906141 - DNA, 25 bp, Homo sapien
cattctcatacagcaaccgggtgaa

SEQ ID NO: 3906142 - DNA, 25 bp, Homo sapien
tatgcattatgctctgaacccaggg

SEQ ID NO: 3906143 - DNA, 25 bp, Homo sapien
taagcaagtactagggcacctggca

SEQ ID NO: 3906144 - DNA, 25 bp, Homo sapien
tctggcttcgctcccaaagagagga

SEQ ID NO: 3906145 - DNA, 25 bp, Homo sapien
gactctgtccgtatgcctttccaaa

SEQ ID NO: 3906146 - DNA, 25 bp, Homo sapien
tctgcactgtgtagtagtagacacg

SEQ ID NO: 3906147 - DNA, 25 bp, Homo sapien
tgaaatgtgattagcgcaactgaga

SEQ ID NO: 3906148 - DNA, 25 bp, Homo sapien
tttattctagcgtaacattgtccag

SEQ ID NO: 3906149 - DNA, 25 bp, Homo sapien
tgcctgcctctaggaaaaccctgtt

SEQ ID NO: 3906150 - DNA, 25 bp, Homo sapien
gatgtggagcaagtaccctctggat

SEQ ID NO: 3906151 - DNA, 25 bp, Homo sapien
catatcaagcatatcgggcggcacc

SEQ ID NO: 3906152 - DNA, 25 bp, Homo sapien
ggaggttcccatttcattagcagta

SEQ ID NO: 3906153 - DNA, 25 bp, Homo sapien
aacaaaaagaatttattggtgtctg

SEQ ID NO: 3906154 - DNA, 25 bp, Homo sapien
acaaaaagaatttattggtgtctga

SEQ ID NO: 3906155 - DNA, 25 bp, Homo sapien
caacaaaaagaatttattggtgtct

SEQ ID NO: 3906156 - DNA, 25 bp, Homo sapien
ctcgcctccgctgctaccactttta

SEQ ID NO: 3906157 - DNA, 25 bp, Homo sapien
ctaccacttttaccgcggccagcac

SEQ ID NO: 3906158 - DNA, 25 bp, Homo sapien
gctaccacttttaccgcggccagca

SEQ ID NO: 3906159 - DNA, 25 bp, Homo sapien
ctccgctcgcctccgctgctaccac

SEQ ID NO: 3906160 - DNA, 25 bp, Homo sapien
gcctgagcgaccgaagcacttttgc

SEQ ID NO: 3906161 - DNA, 25 bp, Homo sapien
agctgggccttgtcgacttcggaaa

SEQ ID NO: 3906162 - DNA, 25 bp, Homo sapien
cagtgagtggcaaagacaacaggtc

SEQ ID NO: 3906163 - DNA, 25 bp, Homo sapien
tcagagaactcgtggcccagttagg

SEQ ID NO: 3906164 - DNA, 25 bp, Homo sapien
gctactcggtaggccgaggtgagga

SEQ ID NO: 3906165 - DNA, 25 bp, Homo sapien
tcggtaggccgaggtgaggatcgct

SEQ ID NO: 3906166 - DNA, 25 bp, Homo sapien
ctcggtaggccgaggtgaggatcgc

SEQ ID NO: 3906167 - DNA, 25 bp, Homo sapien
tactcggtaggccgaggtgaggatc

SEQ ID NO: 3906168 - DNA, 25 bp, Homo sapien
attggcacgttacccatttgaactg

SEQ ID NO: 3906169 - DNA, 25 bp, Homo sapien
gaagaactttaatccataggattcc

SEQ ID NO: 3906170 - DNA, 25 bp, Homo sapien
tcaaacctttactacattggcacgt

SEQ ID NO: 3906171 - DNA, 25 bp, Homo sapien
ctgtgtcagacgtgcctccctcaaa

SEQ ID NO: 3906172 - DNA, 25 bp, Homo sapien
tcacgtcttgtatggcctgtctccc

SEQ ID NO: 3906173 - DNA, 25 bp, Homo sapien
gagagaaacaccaccgctcaaagtc

SEQ ID NO: 3906174 - DNA, 25 bp, Homo sapien
aagcaataggtgttctacactgccc

SEQ ID NO: 3906175 - DNA, 25 bp, Homo sapien
aaaatgtcaccagattcacgtcttg

SEQ ID NO: 3906176 - DNA, 25 bp, Homo sapien
ggcttcggtgcttccaaaaggttca

SEQ ID NO: 3906177 - DNA, 25 bp, Homo sapien
gatacgttcttcagggatcacacta

SEQ ID NO: 3906178 - DNA, 25 bp, Homo sapien
caagttcatctaggtgcagccctca

SEQ ID NO: 3906179 - DNA, 25 bp, Homo sapien
gcacaatgccccaaaatgtggaggg

SEQ ID NO: 3906180 - DNA, 25 bp, Homo sapien
cccactagctccccagttttagcac

SEQ ID NO: 3906181 - DNA, 25 bp, Homo sapien
ccttgccagttgagttcttgtggac

SEQ ID NO: 3906182 - DNA, 25 bp, Homo sapien
ggtgcccactagctccccagtttta

SEQ ID NO: 3906183 - DNA, 25 bp, Homo sapien
cactagctccccagttttagcacag

SEQ ID NO: 3906184 - DNA, 25 bp, Homo sapien
ggtggtaatcatagtgttcatcctc

SEQ ID NO: 3906185 - DNA, 25 bp, Homo sapien
tccacagaccccgtggtcggattgg

SEQ ID NO: 3906186 - DNA, 25 bp, Homo sapien
tcctggtggtaatcatagtgttcat

SEQ ID NO: 3906187 - DNA, 25 bp, Homo sapien
gattggcccgactgcagaagatctt

SEQ ID NO: 3906188 - DNA, 25 bp, Homo sapien
agcctgctgtaaaccaacccagtac

SEQ ID NO: 3906189 - DNA, 25 bp, Homo sapien
gctgcagcctgctgtaaaccaaccc

SEQ ID NO: 3906190 - DNA, 25 bp, Homo sapien
tgcagcctgctgtaaaccaacccag

SEQ ID NO: 3906191 - DNA, 25 bp, Homo sapien
gcagcctgctgtaaaccaacccagt

SEQ ID NO: 3906192 - DNA, 25 bp, Homo sapien
taatgtctgactctccaaacaggca

SEQ ID NO: 3906193 - DNA, 25 bp, Homo sapien
tctgctttgagatcaagtgccccac

SEQ ID NO: 3906194 - DNA, 25 bp, Homo sapien
tgctacatatacctacctggctgag

SEQ ID NO: 3906195 - DNA, 25 bp, Homo sapien
gaacatgtcaccatttcagtaaggc

SEQ ID NO: 3906196 - DNA, 25 bp, Homo sapien
cacaaaactgcatggtccttgaaga

SEQ ID NO: 3906197 - DNA, 25 bp, Homo sapien
ctcaagtgatcagccgccaccaccc

SEQ ID NO: 3906198 - DNA, 25 bp, Homo sapien
ccctcaagtgatcagccgccaccac

SEQ ID NO: 3906199 - DNA, 25 bp, Homo sapien
ggattacgggcatgagccaccgtgc

SEQ ID NO: 3906200 - DNA, 25 bp, Homo sapien
tgggattacgggcatgagccaccgt

SEQ ID NO: 3906201 - DNA, 25 bp, Homo sapien
aaatgcaatccaatcctctttctct

SEQ ID NO: 3906202 - DNA, 25 bp, Homo sapien
cagaaaataacgtccaggcctgaca

SEQ ID NO: 3906203 - DNA, 25 bp, Homo sapien
tatatcactcagaaaataacgtcca

SEQ ID NO: 3906204 - DNA, 25 bp, Homo sapien
tctctcctgtttaatatatcactca

SEQ ID NO: 3906205 - DNA, 25 bp, Homo sapien
atgtagcatatctgcataagatgac

SEQ ID NO: 3906206 - DNA, 25 bp, Homo sapien
tcatgtagcatatctgcataagatg

SEQ ID NO: 3906207 - DNA, 25 bp, Homo sapien
tgtcatgtagcatatctgcataaga

SEQ ID NO: 3906208 - DNA, 25 bp, Homo sapien
ctttgtcatgtagcatatctgcata

SEQ ID NO: 3906209 - DNA, 25 bp, Homo sapien
gatttcctgacttctacaccatacg

SEQ ID NO: 3906210 - DNA, 25 bp, Homo sapien
gataaagctgggagattaaacaaca

SEQ ID NO: 3906211 - DNA, 25 bp, Homo sapien
tagagccagaagtaggacccagtct

SEQ ID NO: 3906212 - DNA, 25 bp, Homo sapien
cgcctctcagtatcatttaacatca

SEQ ID NO: 3906213 - DNA, 25 bp, Homo sapien
taggcaaggtaactgctccctgcaa

SEQ ID NO: 3906214 - DNA, 25 bp, Homo sapien
tagccagctccttgtgttaaagccg

SEQ ID NO: 3906215 - DNA, 25 bp, Homo sapien
tgcaaagttctagagtcacagctgg

SEQ ID NO: 3906216 - DNA, 25 bp, Homo sapien
tgcagccgtacttggacagtggtcc

SEQ ID NO: 3906217 - DNA, 25 bp, Homo sapien
gccagtgccaatgtcgagaaccaag

SEQ ID NO: 3906218 - DNA, 25 bp, Homo sapien
cggcagcccggataccttggtagta

SEQ ID NO: 3906219 - DNA, 25 bp, Homo sapien
gatggcatagcagaagtcggcacct

SEQ ID NO: 3906220 - DNA, 25 bp, Homo sapien
gctgtgaccgccatcattgacaaga

SEQ ID NO: 3906221 - DNA, 25 bp, Homo sapien
gaagccttgtctcgggcagtgagaa

SEQ ID NO: 3906222 - DNA, 25 bp, Homo sapien
tcagacgcagggcttacataccaca

SEQ ID NO: 3906223 - DNA, 25 bp, Homo sapien
ggaggattagcattcacagtggagc

SEQ ID NO: 3906224 - DNA, 25 bp, Homo sapien
taccacagggaatttgacgaagggc

SEQ ID NO: 3906225 - DNA, 25 bp, Homo sapien
taaccttaatcttatcactaaagcc

SEQ ID NO: 3906226 - DNA, 25 bp, Homo sapien
tggacctacagtcacctcggtggaa

SEQ ID NO: 3906227 - DNA, 25 bp, Homo sapien
tttctccacaatcttcacagcagca

SEQ ID NO: 3906228 - DNA, 25 bp, Homo sapien
ggaatgcttgttgataaccttaatc

SEQ ID NO: 3906229 - DNA, 25 bp, Homo sapien
tctgtgaccaggatgttggcacggc

SEQ ID NO: 3906230 - DNA, 25 bp, Homo sapien
ttggcacggcatggcatgtcaccct

SEQ ID NO: 3906231 - DNA, 25 bp, Homo sapien
ctgtgtgcgtgctcataggagggca

SEQ ID NO: 3906232 - DNA, 25 bp, Homo sapien
cagctctgtgtcaaacaactctgtg

SEQ ID NO: 3906233 - DNA, 25 bp, Homo sapien
tgtgcatagacggtggctctgtggg

SEQ ID NO: 3906234 - DNA, 25 bp, Homo sapien
gtgcatagacggtggctctgtgggg

SEQ ID NO: 3906235 - DNA, 25 bp, Homo sapien
ctgtgcatagacggtggctctgtgg

SEQ ID NO: 3906236 - DNA, 25 bp, Homo sapien
gggaaatagcttgttccacgaccac

SEQ ID NO: 3906237 - DNA, 25 bp, Homo sapien
ggaaatagcttgttccacgaccaca

SEQ ID NO: 3906238 - DNA, 25 bp, Homo sapien
tgggaaatagcttgttccacgacca

SEQ ID NO: 3906239 - DNA, 25 bp, Homo sapien
gaaatagcttgttccacgaccacat

SEQ ID NO: 3906240 - DNA, 25 bp, Homo sapien
tctccacgtcaacgggagggacgat

SEQ ID NO: 3906241 - DNA, 25 bp, Homo sapien
atgtcacagacagagggtgcgccag

SEQ ID NO: 3906242 - DNA, 25 bp, Homo sapien
catcgctgaggactgtaaagtcggc

SEQ ID NO: 3906243 - DNA, 25 bp, Homo sapien
tgaacatgggcagcacatcgctgag

SEQ ID NO: 3906244 - DNA, 25 bp, Homo sapien
ggccatggtgcacttgatcttcccc

SEQ ID NO: 3906245 - DNA, 25 bp, Homo sapien
ggttcaaaccgcctgctatggcagg

SEQ ID NO: 3906246 - DNA, 25 bp, Homo sapien
tttcaatgtcccaccacgagagaac

SEQ ID NO: 3906247 - DNA, 25 bp, Homo sapien
tgagctactgacttgcttgctgaag

SEQ ID NO: 3906248 - DNA, 25 bp, Homo sapien
atcgtggtgggctaccagatagagc

SEQ ID NO: 3906249 - DNA, 25 bp, Homo sapien
caggctgtaccatacgcagtagtca

SEQ ID NO: 3906250 - DNA, 25 bp, Homo sapien
cacaggctcctcttgtggcaggaag

SEQ ID NO: 3906251 - DNA, 25 bp, Homo sapien
gcagtagtcatcgtggtgggctacc

SEQ ID NO: 3906252 - DNA, 25 bp, Homo sapien
tctgtcctggtcattgatctctcca

SEQ ID NO: 3906253 - DNA, 25 bp, Homo sapien
aggtgagcctggcagtcacacacgg

SEQ ID NO: 3906254 - DNA, 25 bp, Homo sapien
tcagagcctggacgtatcgatcagt

SEQ ID NO: 3906255 - DNA, 25 bp, Homo sapien
aaccgaggccggttccagagcaggt

SEQ ID NO: 3906256 - DNA, 25 bp, Homo sapien
gagtgttcacaattgactgcccaaa

SEQ ID NO: 3906257 - DNA, 25 bp, Homo sapien
gcttgagtgttcacaattgactgcc

SEQ ID NO: 3906258 - DNA, 25 bp, Homo sapien
ttcacaattgactgcccaaaggcaa

SEQ ID NO: 3906259 - DNA, 25 bp, Homo sapien
cctccaaggcttgagtgttcacaat

SEQ ID NO: 3906260 - DNA, 25 bp, Homo sapien
aggtgatgggccagcacggagagca

SEQ ID NO: 3906261 - DNA, 25 bp, Homo sapien
aggctgccatcgctgacacacaggc

SEQ ID NO: 3906262 - DNA, 25 bp, Homo sapien
ggctgccatcgctgacacacaggca

SEQ ID NO: 3906263 - DNA, 25 bp, Homo sapien
cccccaggtgatgggccagcacgga

SEQ ID NO: 3906264 - DNA, 25 bp, Homo sapien
ttttctcaacagtttgtgagaagct

SEQ ID NO: 3906265 - DNA, 25 bp, Homo sapien
tcaacagtttgtgagaagctgctga

SEQ ID NO: 3906266 - DNA, 25 bp, Homo sapien
agaagctgctgaactctcgactgta

SEQ ID NO: 3906267 - DNA, 25 bp, Homo sapien
gctgctgaactctcgactgtaaaca

SEQ ID NO: 3906268 - DNA, 25 bp, Homo sapien
cttccaagtggttagccttgaagat

SEQ ID NO: 3906269 - DNA, 25 bp, Homo sapien
tatcttccaagtggttagccttgaa

SEQ ID NO: 3906270 - DNA, 25 bp, Homo sapien
attttatcttccaagtggttagcct

SEQ ID NO: 3906271 - DNA, 25 bp, Homo sapien
aataattccggccgtttctctatga

SEQ ID NO: 3906272 - DNA, 25 bp, Homo sapien
gagctcgtaggaggtaaggttgcat

SEQ ID NO: 3906273 - DNA, 25 bp, Homo sapien
cacccttgatggtgggagctcgtag

SEQ ID NO: 3906274 - DNA, 25 bp, Homo sapien
catgaaagcttcaccacacccttga

SEQ ID NO: 3906275 - DNA, 25 bp, Homo sapien
ggtaaggttgcatgtggaggaccca

SEQ ID NO: 3906276 - DNA, 25 bp, Homo sapien
tggatgagcccgaaaacatgaagcc

SEQ ID NO: 3906277 - DNA, 25 bp, Homo sapien
gaagaggcacatactggagacacaa

SEQ ID NO: 3906278 - DNA, 25 bp, Homo sapien
tctaaatgagactgggtgacggcta

SEQ ID NO: 3906279 - DNA, 25 bp, Homo sapien
catgaatggatagccacaccgtgga

SEQ ID NO: 3906280 - DNA, 25 bp, Homo sapien
aggtgctctgtacctgccctggagg

SEQ ID NO: 3906281 - DNA, 25 bp, Homo sapien
taaatgaacacgtgcacagcgagga

SEQ ID NO: 3906282 - DNA, 25 bp, Homo sapien
tgggccagtgccgtgaccagatgtt

SEQ ID NO: 3906283 - DNA, 25 bp, Homo sapien
catgagtcccgtgctcaggagagca

SEQ ID NO: 3906284 - DNA, 25 bp, Homo sapien
acagcggtccgcacgtaccagaagt

SEQ ID NO: 3906285 - DNA, 25 bp, Homo sapien
gctggtagtgaagaacggctcgccc

SEQ ID NO: 3906286 - DNA, 25 bp, Homo sapien
tggtagtgaagaacggctcgcccag

SEQ ID NO: 3906287 - DNA, 25 bp, Homo sapien
gcacgtaccagaagtagaggttgtg

SEQ ID NO: 3906288 - DNA, 25 bp, Homo sapien
cctgaactccacaaccacagcgtgc

SEQ ID NO: 3906289 - DNA, 25 bp, Homo sapien
cacagcgtgcagcgaggctgcctgg

SEQ ID NO: 3906290 - DNA, 25 bp, Homo sapien
acaaccacagcgtgcagcgaggctg

SEQ ID NO: 3906291 - DNA, 25 bp, Homo sapien
tgaactccacaaccacagcgtgcag

SEQ ID NO: 3906292 - DNA, 25 bp, Homo sapien
aaaacacaagctcaaatcatcaagg

SEQ ID NO: 3906293 - DNA, 25 bp, Homo sapien
ccatttcgtatgtcaaattatcgca

SEQ ID NO: 3906294 - DNA, 25 bp, Homo sapien
tcttctattcaaccccacagtgtgc

SEQ ID NO: 3906295 - DNA, 25 bp, Homo sapien
tctgataagccacaattgtaaaatg

SEQ ID NO: 3906296 - DNA, 25 bp, Homo sapien
gaacaagaggcacatcttgctgttc

SEQ ID NO: 3906297 - DNA, 25 bp, Homo sapien
agaacaagaggcacatcttgctgtt

SEQ ID NO: 3906298 - DNA, 25 bp, Homo sapien
tcgaagccttcgcagtcaccacagg

SEQ ID NO: 3906299 - DNA, 25 bp, Homo sapien
taatcatgtcgtccatgatgtgcac

SEQ ID NO: 3906300 - DNA, 25 bp, Homo sapien
gatgtgcacgtcgaagccttcgcag

SEQ ID NO: 3906301 - DNA, 25 bp, Homo sapien
tcgtccatgatgtgcacgtcgaagc

SEQ ID NO: 3906302 - DNA, 25 bp, Homo sapien
gcccctctcatgtggatggaacacg

SEQ ID NO: 3906303 - DNA, 25 bp, Homo sapien
tttccttaatacacagcacggccca

SEQ ID NO: 3906304 - DNA, 25 bp, Homo sapien
catggttctggagaacgtaggccca

SEQ ID NO: 3906305 - DNA, 25 bp, Homo sapien
tgtaaataacctgtgggaatctcct

SEQ ID NO: 3906306 - DNA, 25 bp, Homo sapien
tctaaaagcatcgaacagtcaatgg

SEQ ID NO: 3906307 - DNA, 25 bp, Homo sapien
tagcagaaccgtatcagcaagaggg

SEQ ID NO: 3906308 - DNA, 25 bp, Homo sapien
ttagcacacgagagacagacactgg

SEQ ID NO: 3906309 - DNA, 25 bp, Homo sapien
cagggctcagcacgaaggagatttc

SEQ ID NO: 3906310 - DNA, 25 bp, Homo sapien
tgggcctggctggtcgtgtgaagtg

SEQ ID NO: 3906311 - DNA, 25 bp, Homo sapien
caggagcacgaagaccaatggcagg

SEQ ID NO: 3906312 - DNA, 25 bp, Homo sapien
tggctggtcgtgtgaagtggcgcca

SEQ ID NO: 3906313 - DNA, 25 bp, Homo sapien
ctggtcgtgtgaagtggcgccaggt

SEQ ID NO: 3906314 - DNA, 25 bp, Homo sapien
gataaatgcgtgacagtacagcccc

SEQ ID NO: 3906315 - DNA, 25 bp, Homo sapien
gaggaccacatatctacatcactgg

SEQ ID NO: 3906316 - DNA, 25 bp, Homo sapien
gagcctcgctctccggatttttaag

SEQ ID NO: 3906317 - DNA, 25 bp, Homo sapien
gatctacaagttcatgtgggctccg

SEQ ID NO: 3906318 - DNA, 25 bp, Homo sapien
agaggctgcggcatgggtactccca

SEQ ID NO: 3906319 - DNA, 25 bp, Homo sapien
cggcatgggtactcccacagcgggt

SEQ ID NO: 3906320 - DNA, 25 bp, Homo sapien
tgcggcatgggtactcccacagcgg

SEQ ID NO: 3906321 - DNA, 25 bp, Homo sapien
aggctgcggcatgggtactcccaca

SEQ ID NO: 3906322 - DNA, 25 bp, Homo sapien
aggccagtgctgagcgtgcactccg

SEQ ID NO: 3906323 - DNA, 25 bp, Homo sapien
gggtcaggtggtactccatccatag

SEQ ID NO: 3906324 - DNA, 25 bp, Homo sapien
tggtactccatccatagcaccgctg

SEQ ID NO: 3906325 - DNA, 25 bp, Homo sapien
tccatagcaccgctgcgtggctctg

SEQ ID NO: 3906326 - DNA, 25 bp, Homo sapien
actgggcccggtgcgcaggcactac

SEQ ID NO: 3906327 - DNA, 25 bp, Homo sapien
tcagggtctgcacgcacactgggcc

SEQ ID NO: 3906328 - DNA, 25 bp, Homo sapien
acactgggcccggtgcgcaggcact

SEQ ID NO: 3906329 - DNA, 25 bp, Homo sapien
ggtctgcacgcacactgggcccggt

SEQ ID NO: 3906330 - DNA, 25 bp, Homo sapien
cagtctggggtatctgcatgcctga

SEQ ID NO: 3906331 - DNA, 25 bp, Homo sapien
tgaagaagtagacggcctgcttgca

SEQ ID NO: 3906332 - DNA, 25 bp, Homo sapien
ccatgatgatgtcgcctgtgtcggg

SEQ ID NO: 3906333 - DNA, 25 bp, Homo sapien
tgcatagctgacagtccgtgggcca

SEQ ID NO: 3906334 - DNA, 25 bp, Homo sapien
agccctcaggccactttattgctca

SEQ ID NO: 3906335 - DNA, 25 bp, Homo sapien
tcaggccactttattgctcaagagt

SEQ ID NO: 3906336 - DNA, 25 bp, Homo sapien
aggccactttattgctcaagagtgg

SEQ ID NO: 3906337 - DNA, 25 bp, Homo sapien
cctcaggccactttattgctcaaga

SEQ ID NO: 3906338 - DNA, 25 bp, Homo sapien
gcaacaagatgcaacacggcgcagt

SEQ ID NO: 3906339 - DNA, 25 bp, Homo sapien
tcaccttctaagctgcgagccagag

SEQ ID NO: 3906340 - DNA, 25 bp, Homo sapien
aactctgctcatacaggcggctcgg

SEQ ID NO: 3906341 - DNA, 25 bp, Homo sapien
cccggagatcctcgagagtgagaca

SEQ ID NO: 3906342 - DNA, 25 bp, Homo sapien
gtccagagtaaggatgtgcggcccc

SEQ ID NO: 3906343 - DNA, 25 bp, Homo sapien
attgtggctgcctatggactcccgg

SEQ ID NO: 3906344 - DNA, 25 bp, Homo sapien
gcctgtgagccttgactgggattca

SEQ ID NO: 3906345 - DNA, 25 bp, Homo sapien
caaggtcgcctctgcctagtcaggt

SEQ ID NO: 3906346 - DNA, 25 bp, Homo sapien
tgcctttaagagactccagggctgc

SEQ ID NO: 3906347 - DNA, 25 bp, Homo sapien
gctgacagttgctgcatgcccaggg

SEQ ID NO: 3906348 - DNA, 25 bp, Homo sapien
ccattgagctgcaagagggaccaag

SEQ ID NO: 3906349 - DNA, 25 bp, Homo sapien
tactggcacccaagttcagcatggc

SEQ ID NO: 3906350 - DNA, 25 bp, Homo sapien
gtctcgcattcaagggcaattacat

SEQ ID NO: 3906351 - DNA, 25 bp, Homo sapien
tcaggcacaacagagtctggcaggc

SEQ ID NO: 3906352 - DNA, 25 bp, Homo sapien
tgtctgctgccaatgtcgtctcgca

SEQ ID NO: 3906353 - DNA, 25 bp, Homo sapien
tcatagaactttgctcttcccgaga

SEQ ID NO: 3906354 - DNA, 25 bp, Homo sapien
gtggatcccctagcaccatcatggg

SEQ ID NO: 3906355 - DNA, 25 bp, Homo sapien
gggcatactgcttgtctcagggcaa

SEQ ID NO: 3906356 - DNA, 25 bp, Homo sapien
gggtgccccttttgcatccgtccag

SEQ ID NO: 3906357 - DNA, 25 bp, Homo sapien
gactaccagtagctctcagatcatt

SEQ ID NO: 3906358 - DNA, 25 bp, Homo sapien
aggtgggaagcacacctcaggacca

SEQ ID NO: 3906359 - DNA, 25 bp, Homo sapien
ggtgggaagcacacctcaggaccaa

SEQ ID NO: 3906360 - DNA, 25 bp, Homo sapien
cgggaccacggcctataaagcagat

SEQ ID NO: 3906361 - DNA, 25 bp, Homo sapien
caggtcagggagctctcatccaaga

SEQ ID NO: 3906362 - DNA, 25 bp, Homo sapien
catccaagacgggtgacaacgggac

SEQ ID NO: 3906363 - DNA, 25 bp, Homo sapien
taagccagcctttgggatcctgcca

SEQ ID NO: 3906364 - DNA, 25 bp, Homo sapien
agctccacagatgtggggcacccac

SEQ ID NO: 3906365 - DNA, 25 bp, Homo sapien
gctgctgtgagctccacagatgtgg

SEQ ID NO: 3906366 - DNA, 25 bp, Homo sapien
tgacgtttgggctgctgtgagctcc

SEQ ID NO: 3906367 - DNA, 25 bp, Homo sapien
gtgacgtttgggctgctgtgagctc

SEQ ID NO: 3906368 - DNA, 25 bp, Homo sapien
gatgctgttaggctaaggtttgggt

SEQ ID NO: 3906369 - DNA, 25 bp, Homo sapien
gggctgaacagccagacgttcgtac

SEQ ID NO: 3906370 - DNA, 25 bp, Homo sapien
catcaatgctgcgtgatctcacaga

SEQ ID NO: 3906371 - DNA, 25 bp, Homo sapien
atctcacagagccattcggggggcg

SEQ ID NO: 3906372 - DNA, 25 bp, Homo sapien
gaggctgacgccttaagaccaacaa

SEQ ID NO: 3906373 - DNA, 25 bp, Homo sapien
gagccaggaatcaatgaggcccagc

SEQ ID NO: 3906374 - DNA, 25 bp, Homo sapien
caaacagatccgactggaagctgcc

SEQ ID NO: 3906375 - DNA, 25 bp, Homo sapien
gttgacagtctttgcccgccaggac

SEQ ID NO: 3906376 - DNA, 25 bp, Homo sapien
ggtctgcacagatacacatgctgct

SEQ ID NO: 3906377 - DNA, 25 bp, Homo sapien
gccacgagcactggccgcagagtga

SEQ ID NO: 3906378 - DNA, 25 bp, Homo sapien
aaactgcacccgtccagtgttggct

SEQ ID NO: 3906379 - DNA, 25 bp, Homo sapien
aggttgccccgctgtggtctgcaca

SEQ ID NO: 3906380 - DNA, 25 bp, Homo sapien
tcagaaaggcatccgcttctgtctt

SEQ ID NO: 3906381 - DNA, 25 bp, Homo sapien
tgcatcactcagaaaggcatccgct

SEQ ID NO: 3906382 - DNA, 25 bp, Homo sapien
cactcagaaaggcatccgcttctgt

SEQ ID NO: 3906383 - DNA, 25 bp, Homo sapien
aaggcatccgcttctgtctttctgt

SEQ ID NO: 3906384 - DNA, 25 bp, Homo sapien
tggtggtgccgagacttggagctcc

SEQ ID NO: 3906385 - DNA, 25 bp, Homo sapien
aggacgtgcaaacagacacgtgcct

SEQ ID NO: 3906386 - DNA, 25 bp, Homo sapien
cagacacgtgcctgattagagtgac

SEQ ID NO: 3906387 - DNA, 25 bp, Homo sapien
caaacagacacgtgcctgattagag

SEQ ID NO: 3906388 - DNA, 25 bp, Homo sapien
ggaggccctgacgtcgtcccctgca

SEQ ID NO: 3906389 - DNA, 25 bp, Homo sapien
acggaggccctgacgtcgtcccctg

SEQ ID NO: 3906390 - DNA, 25 bp, Homo sapien
cggaggccctgacgtcgtcccctgc

SEQ ID NO: 3906391 - DNA, 25 bp, Homo sapien
cacaacagatggctctgataacctc

SEQ ID NO: 3906392 - DNA, 25 bp, Homo sapien
aagcagcccacaacagatggctctg

SEQ ID NO: 3906393 - DNA, 25 bp, Homo sapien
gtgccttgggctcgcacaagcagcc

SEQ ID NO: 3906394 - DNA, 25 bp, Homo sapien
ctgtgccttgggctcgcacaagcag

SEQ ID NO: 3906395 - DNA, 25 bp, Homo sapien
ctgaactgggatatggctgtgggaa

SEQ ID NO: 3906396 - DNA, 25 bp, Homo sapien
aaggtggaatctgttacagtgtcta

SEQ ID NO: 3906397 - DNA, 25 bp, Homo sapien
gagggcgaggcctgaactgggatat

SEQ ID NO: 3906398 - DNA, 25 bp, Homo sapien
tacagtgtctaggttggagagggcg

SEQ ID NO: 3906399 - DNA, 25 bp, Homo sapien
ttgttccgggcacccctgtgaactg

SEQ ID NO: 3906400 - DNA, 25 bp, Homo sapien
cctttcaggtctgcggtgacagctc

SEQ ID NO: 3906401 - DNA, 25 bp, Homo sapien
atctcctttcaggtctgcggtgaca

SEQ ID NO: 3906402 - DNA, 25 bp, Homo sapien
gagctctggagattgttccgggcac

SEQ ID NO: 3906403 - DNA, 25 bp, Homo sapien
ttggggcctgtgggattgaggcctc

SEQ ID NO: 3906404 - DNA, 25 bp, Homo sapien
cttggggcctgtgggattgaggcct

SEQ ID NO: 3906405 - DNA, 25 bp, Homo sapien
tcaccccaggtactggtctgtggtc

SEQ ID NO: 3906406 - DNA, 25 bp, Homo sapien
ccccaggtactggtctgtggtcttg

SEQ ID NO: 3906407 - DNA, 25 bp, Homo sapien
agacagaatctcgtgctctatcgcc

SEQ ID NO: 3906408 - DNA, 25 bp, Homo sapien
gagacagaatctcgtgctctatcgc

SEQ ID NO: 3906409 - DNA, 25 bp, Homo sapien
aattctgtctggacatgtctatgca

SEQ ID NO: 3906410 - DNA, 25 bp, Homo sapien
gtgagcaacttcactagccatacag

SEQ ID NO: 3906411 - DNA, 25 bp, Homo sapien
gagtccgcctacactctaatattct

SEQ ID NO: 3906412 - DNA, 25 bp, Homo sapien
gggtctgaagatccaaattctgtct

SEQ ID NO: 3906413 - DNA, 25 bp, Homo sapien
ttattgattccaccgaggttcctgg

SEQ ID NO: 3906414 - DNA, 25 bp, Homo sapien
gatgattccagtaagctataggcac

SEQ ID NO: 3906415 - DNA, 25 bp, Homo sapien
tataggcactcacaacacacacgtg

SEQ ID NO: 3906416 - DNA, 25 bp, Homo sapien
ctgccagtacaaagccccagggtgt

SEQ ID NO: 3906417 - DNA, 25 bp, Homo sapien
gagtccccaccaactgctcattcct

SEQ ID NO: 3906418 - DNA, 25 bp, Homo sapien
ttttcttctgagtccccaccaactg

SEQ ID NO: 3906419 - DNA, 25 bp, Homo sapien
cttgacaggcagtgagattttcttc

SEQ ID NO: 3906420 - DNA, 25 bp, Homo sapien
gacaggcagtgagattttcttctga

SEQ ID NO: 3906421 - DNA, 25 bp, Homo sapien
ctggggccaactccgagtctataac

SEQ ID NO: 3906422 - DNA, 25 bp, Homo sapien
gctggggccaactccgagtctataa

SEQ ID NO: 3906423 - DNA, 25 bp, Homo sapien
tgcaatggcctagcccatagcgcat

SEQ ID NO: 3906424 - DNA, 25 bp, Homo sapien
cactgcaatggcctagcccatagcg

SEQ ID NO: 3906425 - DNA, 25 bp, Homo sapien
ccctttgtcttcatactgtcttgag

SEQ ID NO: 3906426 - DNA, 25 bp, Homo sapien
gcctggccccactttaactgaatgt

SEQ ID NO: 3906427 - DNA, 25 bp, Homo sapien
tgagtctggacttcaaagggcagga

SEQ ID NO: 3906428 - DNA, 25 bp, Homo sapien
caggaggtaaatagcagaactggtc

SEQ ID NO: 3906429 - DNA, 25 bp, Homo sapien
ccagagcttctggagggtattgcca

SEQ ID NO: 3906430 - DNA, 25 bp, Homo sapien
tctggagggtattgccaggtagcac

SEQ ID NO: 3906431 - DNA, 25 bp, Homo sapien
gccaggtagcaccacagttgagcat

SEQ ID NO: 3906432 - DNA, 25 bp, Homo sapien
tattgccaggtagcaccacagttga

SEQ ID NO: 3906433 - DNA, 25 bp, Homo sapien
gagaactccccattcgatttggatg

SEQ ID NO: 3906434 - DNA, 25 bp, Homo sapien
tccatatgtggctgcaagactccag

SEQ ID NO: 3906435 - DNA, 25 bp, Homo sapien
tggtgaatttcagaccacaagtctt

SEQ ID NO: 3906436 - DNA, 25 bp, Homo sapien
cacaggggccggtttctgagaactc

SEQ ID NO: 3906437 - DNA, 25 bp, Homo sapien
gccgccagatctgcggccgggagcc

SEQ ID NO: 3906438 - DNA, 25 bp, Homo sapien
gggtcagaggaatgaagcgcggagc

SEQ ID NO: 3906439 - DNA, 25 bp, Homo sapien
aatgaagcgcggagctgttcgccgc

SEQ ID NO: 3906440 - DNA, 25 bp, Homo sapien
cgcggagctgttcgccgctccaggt

SEQ ID NO: 3906441 - DNA, 25 bp, Homo sapien
gcaggaaccaaacctgcttgccctc

SEQ ID NO: 3906442 - DNA, 25 bp, Homo sapien
ggcaggaaccaaacctgcttgccct

SEQ ID NO: 3906443 - DNA, 25 bp, Homo sapien
tccgggggcatgtgaagcgccctcc

SEQ ID NO: 3906444 - DNA, 25 bp, Homo sapien
gagatgctgcggtatcctggagtgg

SEQ ID NO: 3906445 - DNA, 25 bp, Homo sapien
tgtgaagcgccctccgtctgctgcg

SEQ ID NO: 3906446 - DNA, 25 bp, Homo sapien
tcctggagtggtgtgaaggaggcca

SEQ ID NO: 3906447 - DNA, 25 bp, Homo sapien
gcacagaaacgagtagggccaacag

SEQ ID NO: 3906448 - DNA, 25 bp, Homo sapien
gaggtagggcatttaggcacagaaa

SEQ ID NO: 3906449 - DNA, 25 bp, Homo sapien
ccaatgaggcctaagatgctgagca

SEQ ID NO: 3906450 - DNA, 25 bp, Homo sapien
tgctacctagcaaggtgggacatca

SEQ ID NO: 3906451 - DNA, 25 bp, Homo sapien
gctacctaacaccaataaacagcat

SEQ ID NO: 3906452 - DNA, 25 bp, Homo sapien
tgctacctaacaccaataaacagca

SEQ ID NO: 3906453 - DNA, 25 bp, Homo sapien
tgcgccactgcactgagttattttt

SEQ ID NO: 3906454 - DNA, 25 bp, Homo sapien
gctgctacctaacaccaataaacag

SEQ ID NO: 3906455 - DNA, 25 bp, Homo sapien
aacagactaacatttggtaagtgct

SEQ ID NO: 3906456 - DNA, 25 bp, Homo sapien
taaacagactgcaaatccaaggagg

SEQ ID NO: 3906457 - DNA, 25 bp, Homo sapien
ggaatctcatttatcccttatgaca

SEQ ID NO: 3906458 - DNA, 25 bp, Homo sapien
caaggaggtagtttaggcaaggtca

SEQ ID NO: 3906459 - DNA, 25 bp, Homo sapien
cagtgactgtgggagctcgcctttt

SEQ ID NO: 3906460 - DNA, 25 bp, Homo sapien
gactgtgggagctcgccttttaccc

SEQ ID NO: 3906461 - DNA, 25 bp, Homo sapien
cacagtgactgtgggagctcgcctt

SEQ ID NO: 3906462 - DNA, 25 bp, Homo sapien
tgggagctcgccttttaccctggct

SEQ ID NO: 3906463 - DNA, 25 bp, Homo sapien
tgtccctcagcatctcacaaatgct

SEQ ID NO: 3906464 - DNA, 25 bp, Homo sapien
gggtcggggccaagcaagccagaga

SEQ ID NO: 3906465 - DNA, 25 bp, Homo sapien
ctgatccctgaagggtcggggccaa

SEQ ID NO: 3906466 - DNA, 25 bp, Homo sapien
cagcatctcacaaatgctgctgatc

SEQ ID NO: 3906467 - DNA, 25 bp, Homo sapien
tcactccaggaagactcccaacatt

SEQ ID NO: 3906468 - DNA, 25 bp, Homo sapien
cactccaggaagactcccaacattg

SEQ ID NO: 3906469 - DNA, 25 bp, Homo sapien
cagtggcatgtttcgtgccaagttc

SEQ ID NO: 3906470 - DNA, 25 bp, Homo sapien
aaacagtggcatgtttcgtgccaag

SEQ ID NO: 3906471 - DNA, 25 bp, Homo sapien
tttcgtgccaagttccaaaggaatc

SEQ ID NO: 3906472 - DNA, 25 bp, Homo sapien
catgtttcgtgccaagttccaaagg

SEQ ID NO: 3906473 - DNA, 25 bp, Homo sapien
cttcagaaatgaacgccagctttat

SEQ ID NO: 3906474 - DNA, 25 bp, Homo sapien
tgaacgccagctttattaaccccaa

SEQ ID NO: 3906475 - DNA, 25 bp, Homo sapien
atgaacgccagctttattaacccca

SEQ ID NO: 3906476 - DNA, 25 bp, Homo sapien
agctttattaaccccaagcctccat

SEQ ID NO: 3906477 - DNA, 25 bp, Homo sapien
ctatttggctcagatatgatccatc

SEQ ID NO: 3906478 - DNA, 25 bp, Homo sapien
gctatttggctcagatatgatccat

SEQ ID NO: 3906479 - DNA, 25 bp, Homo sapien
gctgaggcattgctgctatttggct

SEQ ID NO: 3906480 - DNA, 25 bp, Homo sapien
gaggcattgctgctatttggctcag

SEQ ID NO: 3906481 - DNA, 25 bp, Homo sapien
ctcagaggctcattgactgccacag

SEQ ID NO: 3906482 - DNA, 25 bp, Homo sapien
tgctcagaggctcattgactgccac

SEQ ID NO: 3906483 - DNA, 25 bp, Homo sapien
gctcagaggctcattgactgccaca

SEQ ID NO: 3906484 - DNA, 25 bp, Homo sapien
cagattttagcttaggaaagttgct

SEQ ID NO: 3906485 - DNA, 25 bp, Homo sapien
tgctaaggctctcggcatcctccat

SEQ ID NO: 3906486 - DNA, 25 bp, Homo sapien
agattttagcttaggaaagttgcta

SEQ ID NO: 3906487 - DNA, 25 bp, Homo sapien
ccacagattttagcttaggaaagtt

SEQ ID NO: 3906488 - DNA, 25 bp, Homo sapien
tgccattttgaggtcgtctgtggac

SEQ ID NO: 3906489 - DNA, 25 bp, Homo sapien
aggtgaattctgcttacggtgaatg

SEQ ID NO: 3906490 - DNA, 25 bp, Homo sapien
ggtgaattctgcttacggtgaatgc

SEQ ID NO: 3906491 - DNA, 25 bp, Homo sapien
gcagccctccatacagggcccaggt

SEQ ID NO: 3906492 - DNA, 25 bp, Homo sapien
cctccatacagggcccaggtagcac

SEQ ID NO: 3906493 - DNA, 25 bp, Homo sapien
gccctccatacagggcccaggtagc

SEQ ID NO: 3906494 - DNA, 25 bp, Homo sapien
agccctccatacagggcccaggtag

SEQ ID NO: 3906495 - DNA, 25 bp, Homo sapien
tgacattgaccacagccctgagcgg

SEQ ID NO: 3906496 - DNA, 25 bp, Homo sapien
gccctgagcggtaccccagtgaggc

SEQ ID NO: 3906497 - DNA, 25 bp, Homo sapien
ttgaccacagccctgagcggtaccc

SEQ ID NO: 3906498 - DNA, 25 bp, Homo sapien
acattgaccacagccctgagcggta

SEQ ID NO: 3906499 - DNA, 25 bp, Homo sapien
caggttcaggcagtaccaggtgctg

SEQ ID NO: 3906500 - DNA, 25 bp, Homo sapien
tctgaccatccatagtggcccctct

SEQ ID NO: 3906501 - DNA, 25 bp, Homo sapien
agtggcccctcttggggcacagatc

SEQ ID NO: 3906502 - DNA, 25 bp, Homo sapien
gcacagatccacttgtagtaccagg

SEQ ID NO: 3906503 - DNA, 25 bp, Homo sapien
gggagagcgggatacttctgtaggg

SEQ ID NO: 3906504 - DNA, 25 bp, Homo sapien
tctctgggaggggtgtcagaacaaa

SEQ ID NO: 3906505 - DNA, 25 bp, Homo sapien
aggggtggttcttgaccagagcaga

SEQ ID NO: 3906506 - DNA, 25 bp, Homo sapien
cattacttgctttcttaaaaacttg

SEQ ID NO: 3906507 - DNA, 25 bp, Homo sapien
atcagcatgatgacagagatcatca

SEQ ID NO: 3906508 - DNA, 25 bp, Homo sapien
cagcatgatgacagagatcatcatt

SEQ ID NO: 3906509 - DNA, 25 bp, Homo sapien
agcatgatgacagagatcatcattc

SEQ ID NO: 3906510 - DNA, 25 bp, Homo sapien
tcagcatgatgacagagatcatcat

SEQ ID NO: 3906511 - DNA, 25 bp, Homo sapien
tagcgcagccttcgcaacgggtctt

SEQ ID NO: 3906512 - DNA, 25 bp, Homo sapien
tgggcttccaaaccgacgttggatg

SEQ ID NO: 3906513 - DNA, 25 bp, Homo sapien
ggtttgtcagcggatactttcaccg

SEQ ID NO: 3906514 - DNA, 25 bp, Homo sapien
gcaaacttgcagagccaagcgggct

SEQ ID NO: 3906515 - DNA, 25 bp, Homo sapien
gtgtccgggccggagaactccagat

SEQ ID NO: 3906516 - DNA, 25 bp, Homo sapien
gctgcgcagctgaggcccgtacaac

SEQ ID NO: 3906517 - DNA, 25 bp, Homo sapien
gtaggagttcttaaccgccagcgcc

SEQ ID NO: 3906518 - DNA, 25 bp, Homo sapien
gatccgagtgcgtcctcttggtcca

SEQ ID NO: 3906519 - DNA, 25 bp, Homo sapien
aatgcttctgtcccggccctttgac

SEQ ID NO: 3906520 - DNA, 25 bp, Homo sapien
aaatgcttctgtcccggccctttga

SEQ ID NO: 3906521 - DNA, 25 bp, Homo sapien
caaatgcttctgtcccggccctttg

SEQ ID NO: 3906522 - DNA, 25 bp, Homo sapien
tctcacgggtttttcggagcccagc

SEQ ID NO: 3906523 - DNA, 25 bp, Homo sapien
tggactgaagtctcacgggtttttc

SEQ ID NO: 3906524 - DNA, 25 bp, Homo sapien
tttgcagtagggatggactgaagtc

SEQ ID NO: 3906525 - DNA, 25 bp, Homo sapien
cgggtttttcggagcccagccacat

SEQ ID NO: 3906526 - DNA, 25 bp, Homo sapien
ctgttttctggggtatggttttcat

SEQ ID NO: 3906527 - DNA, 25 bp, Homo sapien
tctgttttctggggtatggttttca

SEQ ID NO: 3906528 - DNA, 25 bp, Homo sapien
ctcttctgttttctggggtatggtt

SEQ ID NO: 3906529 - DNA, 25 bp, Homo sapien
ctcctcttctgttttctggggtatg

SEQ ID NO: 3906530 - DNA, 25 bp, Homo sapien
ctcgtcacaggcagtccctggatgt

SEQ ID NO: 3906531 - DNA, 25 bp, Homo sapien
gttacacgtgatccttttctcctcg

SEQ ID NO: 3906532 - DNA, 25 bp, Homo sapien
agcatctccttgttacacgtgatcc

SEQ ID NO: 3906533 - DNA, 25 bp, Homo sapien
tttctcctcgtcacaggcagtccct

SEQ ID NO: 3906534 - DNA, 25 bp, Homo sapien
ggaatccagggagccactagtgcat

SEQ ID NO: 3906535 - DNA, 25 bp, Homo sapien
ggcctcgtgcatctgtgtgatggaa

SEQ ID NO: 3906536 - DNA, 25 bp, Homo sapien
gtgtgatggaatcccataggcagca

SEQ ID NO: 3906537 - DNA, 25 bp, Homo sapien
gcagcatcaccagaactgggcatac

SEQ ID NO: 3906538 - DNA, 25 bp, Homo sapien
tagcggacacttatggaacctgcag

SEQ ID NO: 3906539 - DNA, 25 bp, Homo sapien
ctcgggcggcgtatttcacctgcag

SEQ ID NO: 3906540 - DNA, 25 bp, Homo sapien
gttaccaaggcgacccagctggtgt

SEQ ID NO: 3906541 - DNA, 25 bp, Homo sapien
cagctggtgtatcctcggtagcccc

SEQ ID NO: 3906542 - DNA, 25 bp, Homo sapien
gtcatgaatgtccacccaggcaagg

SEQ ID NO: 3906543 - DNA, 25 bp, Homo sapien
aagtcatgaatgtccacccaggcaa

SEQ ID NO: 3906544 - DNA, 25 bp, Homo sapien
tcatgaatgtccacccaggcaaggc

SEQ ID NO: 3906545 - DNA, 25 bp, Homo sapien
agtcatgaatgtccacccaggcaag

SEQ ID NO: 3906546 - DNA, 25 bp, Homo sapien
cagttgtcgagttgcaaggcgcgaa

SEQ ID NO: 3906547 - DNA, 25 bp, Homo sapien
caccaggtgctaaaagccagcagcc

SEQ ID NO: 3906548 - DNA, 25 bp, Homo sapien
ttgcaaggcgcgaaacccaccaggt

SEQ ID NO: 3906549 - DNA, 25 bp, Homo sapien
actccgtcccggcagttgtcgagtt

SEQ ID NO: 3906550 - DNA, 25 bp, Homo sapien
gtgcagctccgctgactgctgctgg

SEQ ID NO: 3906551 - DNA, 25 bp, Homo sapien
aaggtaccaggtgcaccagaagtgg

SEQ ID NO: 3906552 - DNA, 25 bp, Homo sapien
agaagtggagtctgactcgtgcagc

SEQ ID NO: 3906553 - DNA, 25 bp, Homo sapien
agtgagtcccagagcaacgacgcgc

SEQ ID NO: 3906554 - DNA, 25 bp, Homo sapien
gaaaattagaagatggctagctggg

SEQ ID NO: 3906555 - DNA, 25 bp, Homo sapien
tgaaaattagaagatggctagctgg

SEQ ID NO: 3906556 - DNA, 25 bp, Homo sapien
atgaaaattagaagatggctagctg

SEQ ID NO: 3906557 - DNA, 25 bp, Homo sapien
aaaattagaagatggctagctgggc

SEQ ID NO: 3906558 - DNA, 25 bp, Homo sapien
gccaatgcctagtatagctcaagtc

SEQ ID NO: 3906559 - DNA, 25 bp, Homo sapien
tagtatagctcaagtcattatggca

SEQ ID NO: 3906560 - DNA, 25 bp, Homo sapien
ctcaagtcattatggcagtgttggg

SEQ ID NO: 3906561 - DNA, 25 bp, Homo sapien
ttaaattgccaatgcctagtatagc

SEQ ID NO: 3906562 - DNA, 25 bp, Homo sapien
ttggtagggaataccgagaagccca

SEQ ID NO: 3906563 - DNA, 25 bp, Homo sapien
gagtgtggctcagcaactttaatgc

SEQ ID NO: 3906564 - DNA, 25 bp, Homo sapien
cgcagttcacaatagtaagaggcta

SEQ ID NO: 3906565 - DNA, 25 bp, Homo sapien
aagcagagccgggtgttccaagtca

SEQ ID NO: 3906566 - DNA, 25 bp, Homo sapien
gggtcggacaatggccgcagcggtg

SEQ ID NO: 3906567 - DNA, 25 bp, Homo sapien
ggctccggatttcgcgacctccggc

SEQ ID NO: 3906568 - DNA, 25 bp, Homo sapien
tatctccaattctgatctgcggagg

SEQ ID NO: 3906569 - DNA, 25 bp, Homo sapien
tcagccgcaccggggtcggacaatg

SEQ ID NO: 3906570 - DNA, 25 bp, Homo sapien
ccagggcccggctccggggcaggag

SEQ ID NO: 3906571 - DNA, 25 bp, Homo sapien
tcctgcctcgccagggcccggctcc

SEQ ID NO: 3906572 - DNA, 25 bp, Homo sapien
gccagggcccggctccggggcagga

SEQ ID NO: 3906573 - DNA, 25 bp, Homo sapien
tgcctcgccagggcccggctccggg

SEQ ID NO: 3906574 - DNA, 25 bp, Homo sapien
cggcggtcggaggcctcggggccat

SEQ ID NO: 3906575 - DNA, 25 bp, Homo sapien
gcgcggcggtcggaggcctcggggc

SEQ ID NO: 3906576 - DNA, 25 bp, Homo sapien
gcggcggtcggaggcctcggggcca

SEQ ID NO: 3906577 - DNA, 25 bp, Homo sapien
tctccatttcttattgacaagagtt

SEQ ID NO: 3906578 - DNA, 25 bp, Homo sapien
cctctctccacacttgccgacagtc

SEQ ID NO: 3906579 - DNA, 25 bp, Homo sapien
ccatttcttattgacaagagttcaa

SEQ ID NO: 3906580 - DNA, 25 bp, Homo sapien
cacacttgccgacagtcacttcctc

SEQ ID NO: 3906581 - DNA, 25 bp, Homo sapien
gagagaacacttcaaggtaggctct

SEQ ID NO: 3906582 - DNA, 25 bp, Homo sapien
ttaaaagcgttatttattagagcac

SEQ ID NO: 3906583 - DNA, 25 bp, Homo sapien
ccaggtcctaagaggtaagtgccac

SEQ ID NO: 3906584 - DNA, 25 bp, Homo sapien
gagcacaatatgagacaatacacag

SEQ ID NO: 3906585 - DNA, 25 bp, Homo sapien
tttctgttcaacacttggctgtgtc

SEQ ID NO: 3906586 - DNA, 25 bp, Homo sapien
ttctgttcaacacttggctgtgtcc

SEQ ID NO: 3906587 - DNA, 25 bp, Homo sapien
ggtgaagtccacagacacatctttg

SEQ ID NO: 3906588 - DNA, 25 bp, Homo sapien
cagacacatctttgaatgtcactga

SEQ ID NO: 3906589 - DNA, 25 bp, Homo sapien
acacatctttgaatgtcactgattc

SEQ ID NO: 3906590 - DNA, 25 bp, Homo sapien
agtccacagacacatctttgaatgt

SEQ ID NO: 3906591 - DNA, 25 bp, Homo sapien
tcacatcctgtataagctcctctga

SEQ ID NO: 3906592 - DNA, 25 bp, Homo sapien
catcacatcctgtataagctcctct

SEQ ID NO: 3906593 - DNA, 25 bp, Homo sapien
cacatcctgtataagctcctctgag

SEQ ID NO: 3906594 - DNA, 25 bp, Homo sapien
catcctgtataagctcctctgagca

SEQ ID NO: 3906595 - DNA, 25 bp, Homo sapien
tgtgcaagtggacaaagaaccctcc

SEQ ID NO: 3906596 - DNA, 25 bp, Homo sapien
cagtactagtccttgatcctcagga

SEQ ID NO: 3906597 - DNA, 25 bp, Homo sapien
ctgctcatgggtaaatacacaagat

SEQ ID NO: 3906598 - DNA, 25 bp, Homo sapien
gaaccctcctaaggacaagtcagta

SEQ ID NO: 3906599 - DNA, 25 bp, Homo sapien
ggatagaaaggtcgttggatttctc

SEQ ID NO: 3906600 - DNA, 25 bp, Homo sapien
tggatagaaaggtcgttggatttct

SEQ ID NO: 3906601 - DNA, 25 bp, Homo sapien
ctggatagaaaggtcgttggatttc

SEQ ID NO: 3906602 - DNA, 25 bp, Homo sapien
gatagaaaggtcgttggatttctcc

SEQ ID NO: 3906603 - DNA, 25 bp, Homo sapien
agagcatgagcacccttttgaagag

SEQ ID NO: 3906604 - DNA, 25 bp, Homo sapien
cacaacaaagagatacgggagttca

SEQ ID NO: 3906605 - DNA, 25 bp, Homo sapien
gagagacctacaaggtgtcggccag

SEQ ID NO: 3906606 - DNA, 25 bp, Homo sapien
gatctaggagatcgcaagccagctg

SEQ ID NO: 3906607 - DNA, 25 bp, Homo sapien
aactaattagggtatccagcctgag

SEQ ID NO: 3906608 - DNA, 25 bp, Homo sapien
tgagaaataggcaaggtagcaaaac

SEQ ID NO: 3906609 - DNA, 25 bp, Homo sapien
ccatggtacaaataaggaagacttc

SEQ ID NO: 3906610 - DNA, 25 bp, Homo sapien
tagcaatctaaatctgggacctcag

SEQ ID NO: 3906611 - DNA, 25 bp, Homo sapien
tctgatacatcctgctgcaaatgtg

SEQ ID NO: 3906612 - DNA, 25 bp, Homo sapien
tagcatgtaagagatcatgtgtgca

SEQ ID NO: 3906613 - DNA, 25 bp, Homo sapien
ggctgctaacatcccaggagtcttc

SEQ ID NO: 3906614 - DNA, 25 bp, Homo sapien
catgtgtgcagtgggatacttctga

SEQ ID NO: 3906615 - DNA, 25 bp, Homo sapien
ggtgttcaatctagaattttcacca

SEQ ID NO: 3906616 - DNA, 25 bp, Homo sapien
gtgttcaatctagaattttcaccaa

SEQ ID NO: 3906617 - DNA, 25 bp, Homo sapien
tcttgcaggaatgttcagttgtgta

SEQ ID NO: 3906618 - DNA, 25 bp, Homo sapien
tatgtcccaaattgcttccaagggt

SEQ ID NO: 3906619 - DNA, 25 bp, Homo sapien
tattattctcattaagtaagtctgc

SEQ ID NO: 3906620 - DNA, 25 bp, Homo sapien
tattcttgcaggaatgttcagttgt

SEQ ID NO: 3906621 - DNA, 25 bp, Homo sapien
ctcatgtttagtaagcgatgatcta

SEQ ID NO: 3906622 - DNA, 25 bp, Homo sapien
tgttccattagggaaagctccctct

SEQ ID NO: 3906623 - DNA, 25 bp, Homo sapien
tgatctgttccattagggaaagctc

SEQ ID NO: 3906624 - DNA, 25 bp, Homo sapien
gcgatgatctatgaataaaggcttt

SEQ ID NO: 3906625 - DNA, 25 bp, Homo sapien
tgtgccatgcctaaaggacctccca

SEQ ID NO: 3906626 - DNA, 25 bp, Homo sapien
cactgtgtgtgacctcgtgttgagt

SEQ ID NO: 3906627 - DNA, 25 bp, Homo sapien
gggatgggctctgaccaaaagccct

SEQ ID NO: 3906628 - DNA, 25 bp, Homo sapien
ggaagaacatcgactaaaggctttc

SEQ ID NO: 3906629 - DNA, 25 bp, Homo sapien
taggatttcacttcggtaagagtgc

SEQ ID NO: 3906630 - DNA, 25 bp, Homo sapien
tagcttgctgactaaaagcctgctc

SEQ ID NO: 3906631 - DNA, 25 bp, Homo sapien
tactgctttggtaaggtttgcctct

SEQ ID NO: 3906632 - DNA, 25 bp, Homo sapien
tgatgctctatgaaacttgtactcc

SEQ ID NO: 3906633 - DNA, 25 bp, Homo sapien
taagcgatgagcgtcgactaaaggc

SEQ ID NO: 3906634 - DNA, 25 bp, Homo sapien
ttgagtaagcgatgagcgtcgacta

SEQ ID NO: 3906635 - DNA, 25 bp, Homo sapien
gcgatgagcgtcgactaaaggcttc

SEQ ID NO: 3906636 - DNA, 25 bp, Homo sapien
atgagcgtcgactaaaggcttctcc

SEQ ID NO: 3906637 - DNA, 25 bp, Homo sapien
tttagtaagagctgaacttcggctg

SEQ ID NO: 3906638 - DNA, 25 bp, Homo sapien
gagtttatttcgagtatgaattctc

SEQ ID NO: 3906639 - DNA, 25 bp, Homo sapien
gtaagagctgaacttcggctgaagt

SEQ ID NO: 3906640 - DNA, 25 bp, Homo sapien
tctctgatgatcatgcaggttggtt

SEQ ID NO: 3906641 - DNA, 25 bp, Homo sapien
aataaccttttcactggcaaggcca

SEQ ID NO: 3906642 - DNA, 25 bp, Homo sapien
gcaaagtccaacatacaggcatatc

SEQ ID NO: 3906643 - DNA, 25 bp, Homo sapien
gctgtatcatactgtggaaaccact

SEQ ID NO: 3906644 - DNA, 25 bp, Homo sapien
taatgtaagagctgcagttgagtgc

SEQ ID NO: 3906645 - DNA, 25 bp, Homo sapien
ggcaatgggcaattagacttaactt

SEQ ID NO: 3906646 - DNA, 25 bp, Homo sapien
gcttctctgagtacaaggcaaaatt

SEQ ID NO: 3906647 - DNA, 25 bp, Homo sapien
tctcaaagtgtccaacccataggtg

SEQ ID NO: 3906648 - DNA, 25 bp, Homo sapien
taaattgtggtttgtaagcctccaa

SEQ ID NO: 3906649 - DNA, 25 bp, Homo sapien
gatgcatttcacgtagccctaaaag

SEQ ID NO: 3906650 - DNA, 25 bp, Homo sapien
gaatacttgggtgctgctgcatgcc

SEQ ID NO: 3906651 - DNA, 25 bp, Homo sapien
catggttcatggctgttgggactaa

SEQ ID NO: 3906652 - DNA, 25 bp, Homo sapien
caatgagccacacatatgtcctggg

SEQ ID NO: 3906653 - DNA, 25 bp, Homo sapien
ggctgtgatgagtttagcagttaat

SEQ ID NO: 3906654 - DNA, 25 bp, Homo sapien
gctgtgatgagtttagcagttaatt

SEQ ID NO: 3906655 - DNA, 25 bp, Homo sapien
gagcagccattgacacagccttatg

SEQ ID NO: 3906656 - DNA, 25 bp, Homo sapien
ggataacacaaatgcagacccttag

SEQ ID NO: 3906657 - DNA, 25 bp, Homo sapien
taaggacaccctatccaggaaccac

SEQ ID NO: 3906658 - DNA, 25 bp, Homo sapien
ggtacagggtgaacatacatctggg

SEQ ID NO: 3906659 - DNA, 25 bp, Homo sapien
agaatgacttgtccctgcatgcagg

SEQ ID NO: 3906660 - DNA, 25 bp, Homo sapien
gcacaaggccgtctggtccagaaga

SEQ ID NO: 3906661 - DNA, 25 bp, Homo sapien
tcacatgataggagatggcagtctc

SEQ ID NO: 3906662 - DNA, 25 bp, Homo sapien
gacacattgacctggagtttccccg

SEQ ID NO: 3906663 - DNA, 25 bp, Homo sapien
gaacttggcaactgtcaaatgcggg

SEQ ID NO: 3906664 - DNA, 25 bp, Homo sapien
tgtcaaatgcgggtatgaactgtga

SEQ ID NO: 3906665 - DNA, 25 bp, Homo sapien
ccaggcacagcatggtgggctgagt

SEQ ID NO: 3906666 - DNA, 25 bp, Homo sapien
gctgagtggatgaggtgcctcctgt

SEQ ID NO: 3906667 - DNA, 25 bp, Homo sapien
gagctgttgtgttactcaataaaat

SEQ ID NO: 3906668 - DNA, 25 bp, Homo sapien
gccctggacccagtcaacagagaga

SEQ ID NO: 3906669 - DNA, 25 bp, Homo sapien
cagtcaacagagagatgacctgact

SEQ ID NO: 3906670 - DNA, 25 bp, Homo sapien
taaaagccctggacccagtcaacag

SEQ ID NO: 3906671 - DNA, 25 bp, Homo sapien
tctggaggtccttacttagccattc

SEQ ID NO: 3906672 - DNA, 25 bp, Homo sapien
aaatgttccagagttgtgaaaaatc

SEQ ID NO: 3906673 - DNA, 25 bp, Homo sapien
cagatggtagcgacagcggcaggag

SEQ ID NO: 3906674 - DNA, 25 bp, Homo sapien
tcagtatttgcatggcttgtacggg

SEQ ID NO: 3906675 - DNA, 25 bp, Homo sapien
gttgctgggtccttgggtcagtgga

SEQ ID NO: 3906676 - DNA, 25 bp, Homo sapien
ttgctgggtccttgggtcagtggag

SEQ ID NO: 3906677 - DNA, 25 bp, Homo sapien
cattgtcctgttgggttgctgggtc

SEQ ID NO: 3906678 - DNA, 25 bp, Homo sapien
caaacctcttaggaattcggtgata

SEQ ID NO: 3906679 - DNA, 25 bp, Homo sapien
tttaaccagctttccaactgattct

SEQ ID NO: 3906680 - DNA, 25 bp, Homo sapien
gataaatgctcaattttgagaacca

SEQ ID NO: 3906681 - DNA, 25 bp, Homo sapien
accactgtactgcacaatgaccaaa

SEQ ID NO: 3906682 - DNA, 25 bp, Homo sapien
gagaatgccagttagctaccacttg

SEQ ID NO: 3906683 - DNA, 25 bp, Homo sapien
ggaagtccatccacctagctcttgt

SEQ ID NO: 3906684 - DNA, 25 bp, Homo sapien
caccatgtttctttggaaggcctca

SEQ ID NO: 3906685 - DNA, 25 bp, Homo sapien
tgtggcagcaccaggtactcagtcc

SEQ ID NO: 3906686 - DNA, 25 bp, Homo sapien
cattgcggttgcctacagagataca

SEQ ID NO: 3906687 - DNA, 25 bp, Homo sapien
tgacagagtttacacaccaccagag

SEQ ID NO: 3906688 - DNA, 25 bp, Homo sapien
agtgagataagaccctagacagccc

SEQ ID NO: 3906689 - DNA, 25 bp, Homo sapien
tacgcgtgtcaggaatagcaagtgc

SEQ ID NO: 3906690 - DNA, 25 bp, Homo sapien
tggtaggcccctaatacatatttaa

SEQ ID NO: 3906691 - DNA, 25 bp, Homo sapien
cagtgtctggcagaatgcctgggca

SEQ ID NO: 3906692 - DNA, 25 bp, Homo sapien
ctacttatatcctccacaagactga

SEQ ID NO: 3906693 - DNA, 25 bp, Homo sapien
tgggcatggtaggcccctaatacat

SEQ ID NO: 3906694 - DNA, 25 bp, Homo sapien
taattttgctaaaacgcttctcaga

SEQ ID NO: 3906695 - DNA, 25 bp, Homo sapien
tctttgggtattgagtccagattct

SEQ ID NO: 3906696 - DNA, 25 bp, Homo sapien
tgttcaacaatcttcgatggtcccc

SEQ ID NO: 3906697 - DNA, 25 bp, Homo sapien
cttctcagatgatgaactcctcgtg

SEQ ID NO: 3906698 - DNA, 25 bp, Homo sapien
cccatctcagtaggtgtagctggca

SEQ ID NO: 3906699 - DNA, 25 bp, Homo sapien
catctcagtaggtgtagctggcacc

SEQ ID NO: 3906700 - DNA, 25 bp, Homo sapien
ctcagtaggtgtagctggcaccaca

SEQ ID NO: 3906701 - DNA, 25 bp, Homo sapien
attctcccatctcagtaggtgtagc

SEQ ID NO: 3906702 - DNA, 25 bp, Homo sapien
tgtcaacaaaattggccaaaagatt

SEQ ID NO: 3906703 - DNA, 25 bp, Homo sapien
ggcagagcaggtcaagaatgactcc

SEQ ID NO: 3906704 - DNA, 25 bp, Homo sapien
ccaaaagattggatgtggagtatga

SEQ ID NO: 3906705 - DNA, 25 bp, Homo sapien
tggcccgagcaatcagcaggatgac

SEQ ID NO: 3906706 - DNA, 25 bp, Homo sapien
cacaccttgtagagcatgtaggcca

SEQ ID NO: 3906707 - DNA, 25 bp, Homo sapien
gaggccccgagacagtagattactt

SEQ ID NO: 3906708 - DNA, 25 bp, Homo sapien
gcccagccgggaggttcaagtctta

SEQ ID NO: 3906709 - DNA, 25 bp, Homo sapien
gaaggaaccacgctttggaaagagc

SEQ ID NO: 3906710 - DNA, 25 bp, Homo sapien
tattagtctcataatctccagcacc

SEQ ID NO: 3906711 - DNA, 25 bp, Homo sapien
cagctaaacaaagggaagctagtcg

SEQ ID NO: 3906712 - DNA, 25 bp, Homo sapien
gaagctagtcgagaaagtcccagag

SEQ ID NO: 3906713 - DNA, 25 bp, Homo sapien
tttggaagctgtagtggtgccaaag

SEQ ID NO: 3906714 - DNA, 25 bp, Homo sapien
tacagggactcagcctctgtctcgc

SEQ ID NO: 3906715 - DNA, 25 bp, Homo sapien
aagtcgactgaaaacggaggctccg

SEQ ID NO: 3906716 - DNA, 25 bp, Homo sapien
cagcctcctcagtacgggaagagaa

SEQ ID NO: 3906717 - DNA, 25 bp, Homo sapien
tacagcggaaaaaagtggagacaca

SEQ ID NO: 3906718 - DNA, 25 bp, Homo sapien
acgcgagaggtccacgagggagccc

SEQ ID NO: 3906719 - DNA, 25 bp, Homo sapien
cgagaggtccacgagggagccccat

SEQ ID NO: 3906720 - DNA, 25 bp, Homo sapien
agagacgcgagaggtccacgaggga

SEQ ID NO: 3906721 - DNA, 25 bp, Homo sapien
gaggagagacgcgagaggtccacga

SEQ ID NO: 3906722 - DNA, 25 bp, Homo sapien
gcctccaaggtcacttcagcctccc

SEQ ID NO: 3906723 - DNA, 25 bp, Homo sapien
gcctccctgaagaccgcccggcacg

SEQ ID NO: 3906724 - DNA, 25 bp, Homo sapien
aagaccgcccggcacggctcggagg

SEQ ID NO: 3906725 - DNA, 25 bp, Homo sapien
tcggaggccgcgcactgcagccagc

SEQ ID NO: 3906726 - DNA, 25 bp, Homo sapien
tgtggcagcagggatattcccccct

SEQ ID NO: 3906727 - DNA, 25 bp, Homo sapien
gggttaaggctgtatcccgaagcat

SEQ ID NO: 3906728 - DNA, 25 bp, Homo sapien
tccctgctggcacgtccaggctatg

SEQ ID NO: 3906729 - DNA, 25 bp, Homo sapien
ccgaaggtttccagttgccttgcct

SEQ ID NO: 3906730 - DNA, 25 bp, Homo sapien
taatgaaactgatacgaaaccaggt

SEQ ID NO: 3906731 - DNA, 25 bp, Homo sapien
tgatacgaaaccaggtctcatcatc

SEQ ID NO: 3906732 - DNA, 25 bp, Homo sapien
tggcttgtatcactagtttcataat

SEQ ID NO: 3906733 - DNA, 25 bp, Homo sapien
tgaaactgatacgaaaccaggtctc

SEQ ID NO: 3906734 - DNA, 25 bp, Homo sapien
ggattccaatccctataatgtcact

SEQ ID NO: 3906735 - DNA, 25 bp, Homo sapien
tacctacctcatcaggttattagga

SEQ ID NO: 3906736 - DNA, 25 bp, Homo sapien
ggagtccagaagacttggattccaa

SEQ ID NO: 3906737 - DNA, 25 bp, Homo sapien
acttatctatcacatgattgggcaa

SEQ ID NO: 3906738 - DNA, 25 bp, Homo sapien
cctaagggaagatctttagccagta

SEQ ID NO: 3906739 - DNA, 25 bp, Homo sapien
tcaatcctaaaacagccctcttcct

SEQ ID NO: 3906740 - DNA, 25 bp, Homo sapien
tcccaaagtgagtgactaaaggtca

SEQ ID NO: 3906741 - DNA, 25 bp, Homo sapien
ttagccagtaaagggctaaccagac

SEQ ID NO: 3906742 - DNA, 25 bp, Homo sapien
gactaatacaagtttcagaggaggc

SEQ ID NO: 3906743 - DNA, 25 bp, Homo sapien
gaggcttccaagtttggtttcgaga

SEQ ID NO: 3906744 - DNA, 25 bp, Homo sapien
cagaggaccaagatcatagacattc

SEQ ID NO: 3906745 - DNA, 25 bp, Homo sapien
cctggtggtcagtttgtgggtcaaa

SEQ ID NO: 3906746 - DNA, 25 bp, Homo sapien
ctgcagaagggagacttggcttact

SEQ ID NO: 3906747 - DNA, 25 bp, Homo sapien
tggatccaggactgctaagtggctg

SEQ ID NO: 3906748 - DNA, 25 bp, Homo sapien
tgactggatccaggactgctaagtg

SEQ ID NO: 3906749 - DNA, 25 bp, Homo sapien
gactgacaagagtcctctgactgga

SEQ ID NO: 3906750 - DNA, 25 bp, Homo sapien
tcagtgctaaacagagctggctctt

SEQ ID NO: 3906751 - DNA, 25 bp, Homo sapien
ggactgtctcgccattccgcacagt

SEQ ID NO: 3906752 - DNA, 25 bp, Homo sapien
tcatcattatcagtgctaaacagag

SEQ ID NO: 3906753 - DNA, 25 bp, Homo sapien
gccattccgcacagtgaagtcatca

SEQ ID NO: 3906754 - DNA, 25 bp, Homo sapien
ggccagcaatttgggcatgcacaga

SEQ ID NO: 3906755 - DNA, 25 bp, Homo sapien
tggccagcaatttgggcatgcacag

SEQ ID NO: 3906756 - DNA, 25 bp, Homo sapien
ctggccagcaatttgggcatgcaca

SEQ ID NO: 3906757 - DNA, 25 bp, Homo sapien
cctctgaagggctgacttggctcac

SEQ ID NO: 3906758 - DNA, 25 bp, Homo sapien
ctcctctgaagggctgacttggctc

SEQ ID NO: 3906759 - DNA, 25 bp, Homo sapien
tcctctgaagggctgacttggctca

SEQ ID NO: 3906760 - DNA, 25 bp, Homo sapien
gggaatccgagggactcagtacagt

SEQ ID NO: 3906761 - DNA, 25 bp, Homo sapien
gattactcacaaggcagctcttggc

SEQ ID NO: 3906762 - DNA, 25 bp, Homo sapien
gtgtggccaagcaccccagatgtat

SEQ ID NO: 3906763 - DNA, 25 bp, Homo sapien
caccactgttgggtagctgcaagca

SEQ ID NO: 3906764 - DNA, 25 bp, Homo sapien
tcttcgtaagatacgtttggatggg

SEQ ID NO: 3906765 - DNA, 25 bp, Homo sapien
tcgtaagatacgtttggatgggaag

SEQ ID NO: 3906766 - DNA, 25 bp, Homo sapien
taagatacgtttggatgggaagatc

SEQ ID NO: 3906767 - DNA, 25 bp, Homo sapien
tgtgtcttcgtaagatacgtttgga

SEQ ID NO: 3906768 - DNA, 25 bp, Homo sapien
ggacagatattggagcaaccaccca

SEQ ID NO: 3906769 - DNA, 25 bp, Homo sapien
tattcaacaacaaccagcctgtctc

SEQ ID NO: 3906770 - DNA, 25 bp, Homo sapien
ccccggccccgtgatgctgtagaaa

SEQ ID NO: 3906771 - DNA, 25 bp, Homo sapien
tcctcccggtccagtggcttattca

SEQ ID NO: 3906772 - DNA, 25 bp, Homo sapien
ttctctacagcgaagacaccctcag

SEQ ID NO: 3906773 - DNA, 25 bp, Homo sapien
ggtcagcccggtgccacccacctca

SEQ ID NO: 3906774 - DNA, 25 bp, Homo sapien
gggtcagcccggtgccacccacctc

SEQ ID NO: 3906775 - DNA, 25 bp, Homo sapien
tggtaggactccctctaagacactc

SEQ ID NO: 3906776 - DNA, 25 bp, Homo sapien
ctctaagacactccctcggaaggtg

SEQ ID NO: 3906777 - DNA, 25 bp, Homo sapien
gatgttcatggggtcctccactgag

SEQ ID NO: 3906778 - DNA, 25 bp, Homo sapien
tctggtcggtcacgatgatggagat

SEQ ID NO: 3906779 - DNA, 25 bp, Homo sapien
tgaacatgaggtcgtgtgggtcctt

SEQ ID NO: 3906780 - DNA, 25 bp, Homo sapien
ggagtaagcaaccaccccattgtag

SEQ ID NO: 3906781 - DNA, 25 bp, Homo sapien
gcatcatcctcatccgtggctgtca

SEQ ID NO: 3906782 - DNA, 25 bp, Homo sapien
ctgatggtgcctgtgctccggtgaa

SEQ ID NO: 3906783 - DNA, 25 bp, Homo sapien
ggatggtcagtgtgtactcagggac

SEQ ID NO: 3906784 - DNA, 25 bp, Homo sapien
cttctgggggtcaaacatgggagca

SEQ ID NO: 3906785 - DNA, 25 bp, Homo sapien
gagccgtccccatccatgtctgtgg

SEQ ID NO: 3906786 - DNA, 25 bp, Homo sapien
ttgtcattggcatcaaggatctcca

SEQ ID NO: 3906787 - DNA, 25 bp, Homo sapien
gggcgtccagatcagtgaccgtcag

SEQ ID NO: 3906788 - DNA, 25 bp, Homo sapien
gatggtaaaatggtccccgtcgtca

SEQ ID NO: 3906789 - DNA, 25 bp, Homo sapien
actgcattctcaggcacatgggcct

SEQ ID NO: 3906790 - DNA, 25 bp, Homo sapien
tcgtcaccgcccatgataaggtagg

SEQ ID NO: 3906791 - DNA, 25 bp, Homo sapien
tcgttggtcacttcaacgtacaggg

SEQ ID NO: 3906792 - DNA, 25 bp, Homo sapien
gggcctcgttggtcacttcaacgta

SEQ ID NO: 3906793 - DNA, 25 bp, Homo sapien
cttcagcacaaaaggggcctcgttg

SEQ ID NO: 3906794 - DNA, 25 bp, Homo sapien
cacttcaacgtacagggtgtgctgg

SEQ ID NO: 3906795 - DNA, 25 bp, Homo sapien
ccacgtggaccactatggtggctgt

SEQ ID NO: 3906796 - DNA, 25 bp, Homo sapien
gacaaacacaggtgcctcattcaca

SEQ ID NO: 3906797 - DNA, 25 bp, Homo sapien
agggtgggacaaacacaggtgcctc

SEQ ID NO: 3906798 - DNA, 25 bp, Homo sapien
tcctggacctcaacgactttggagg

SEQ ID NO: 3906799 - DNA, 25 bp, Homo sapien
atcctcacggtcgagggtgcccaca

SEQ ID NO: 3906800 - DNA, 25 bp, Homo sapien
tcctcacggtcgagggtgcccacag

SEQ ID NO: 3906801 - DNA, 25 bp, Homo sapien
cctcacggtcgagggtgcccacagc

SEQ ID NO: 3906802 - DNA, 25 bp, Homo sapien
gggagggctgggaggatgctctcac

SEQ ID NO: 3906803 - DNA, 25 bp, Homo sapien
ccgcaaggagagacatgcggtctga

SEQ ID NO: 3906804 - DNA, 25 bp, Homo sapien
caacagcaactactgttgctgcaat

SEQ ID NO: 3906805 - DNA, 25 bp, Homo sapien
gcaaggagagacatgcggtctgacc

SEQ ID NO: 3906806 - DNA, 25 bp, Homo sapien
aaggagagacatgcggtctgaccct

SEQ ID NO: 3906807 - DNA, 25 bp, Homo sapien
ctgtttgtaatgacacatatgatga

SEQ ID NO: 3906808 - DNA, 25 bp, Homo sapien
ttgtaatgacacatatgatgagctc

SEQ ID NO: 3906809 - DNA, 25 bp, Homo sapien
tgtaatgacacatatgatgagctcc

SEQ ID NO: 3906810 - DNA, 25 bp, Homo sapien
gtttgtaatgacacatatgatgagc

SEQ ID NO: 3906811 - DNA, 25 bp, Homo sapien
tcagtgttagcagaagggttcccgt

SEQ ID NO: 3906812 - DNA, 25 bp, Homo sapien
gccgtccagtagatgtctgagtcat

SEQ ID NO: 3906813 - DNA, 25 bp, Homo sapien
ggtcattgacatcaatcagtgttag

SEQ ID NO: 3906814 - DNA, 25 bp, Homo sapien
gatgttcagcacctggcgcacaggg

SEQ ID NO: 3906815 - DNA, 25 bp, Homo sapien
agtggccctgatcaccgtcagctgc

SEQ ID NO: 3906816 - DNA, 25 bp, Homo sapien
ggaacttcttcagggacaagaccac

SEQ ID NO: 3906817 - DNA, 25 bp, Homo sapien
gcacgtcatatgtatcctgcttcag

SEQ ID NO: 3906818 - DNA, 25 bp, Homo sapien
cagagaaaggtgcacgtcatatgta

SEQ ID NO: 3906819 - DNA, 25 bp, Homo sapien
ggcaggtttcgacatggccatggca

SEQ ID NO: 3906820 - DNA, 25 bp, Homo sapien
cgacatggccatggcagtcgcacac

SEQ ID NO: 3906821 - DNA, 25 bp, Homo sapien
tttcgacatggccatggcagtcgca

SEQ ID NO: 3906822 - DNA, 25 bp, Homo sapien
ccagggcaggtttcgacatggccat

SEQ ID NO: 3906823 - DNA, 25 bp, Homo sapien
gaagacgttgtcacgggtgtcatct

SEQ ID NO: 3906824 - DNA, 25 bp, Homo sapien
tcgccatagtagaagacgttgtcac

SEQ ID NO: 3906825 - DNA, 25 bp, Homo sapien
tgtcacgggtgtcatcttctgggag

SEQ ID NO: 3906826 - DNA, 25 bp, Homo sapien
cccctcttcgccatagtagaagacg

SEQ ID NO: 3906827 - DNA, 25 bp, Homo sapien
tggccgaggacggtacatgggtgtc

SEQ ID NO: 3906828 - DNA, 25 bp, Homo sapien
gatttcatctgggttggctggccga

SEQ ID NO: 3906829 - DNA, 25 bp, Homo sapien
ggtgccacgtcattgcggagaacca

SEQ ID NO: 3906830 - DNA, 25 bp, Homo sapien
ctccagacctcggtggagctgggtg

SEQ ID NO: 3906831 - DNA, 25 bp, Homo sapien
tagaatagcacctcgcaacaatagc

SEQ ID NO: 3906832 - DNA, 25 bp, Homo sapien
tctttggaggtgagctgaggcatca

SEQ ID NO: 3906833 - DNA, 25 bp, Homo sapien
ggtgattccaacacgcaggcagggt

SEQ ID NO: 3906834 - DNA, 25 bp, Homo sapien
catgctaggtcagtagttccgaaac

SEQ ID NO: 3906835 - DNA, 25 bp, Homo sapien
cagagaacaggtagttaggagcggc

SEQ ID NO: 3906836 - DNA, 25 bp, Homo sapien
aggagcggcgggtcctgcctcttgc

SEQ ID NO: 3906837 - DNA, 25 bp, Homo sapien
ttaggagcggcgggtcctgcctctt

SEQ ID NO: 3906838 - DNA, 25 bp, Homo sapien
caggtagttaggagcggcgggtcct

SEQ ID NO: 3906839 - DNA, 25 bp, Homo sapien
catagtcgaacaccaagagggtgtc

SEQ ID NO: 3906840 - DNA, 25 bp, Homo sapien
gggtctgtgttagccgccttcaggt

SEQ ID NO: 3906841 - DNA, 25 bp, Homo sapien
cgtaatcttggtcttggtcggaggc

SEQ ID NO: 3906842 - DNA, 25 bp, Homo sapien
gccccactcgttcagataatcgtaa

SEQ ID NO: 3906843 - DNA, 25 bp, Homo sapien
aggaagccaccactctaacgtcaga

SEQ ID NO: 3906844 - DNA, 25 bp, Homo sapien
aaaattaagttgcaccaggaggcct

SEQ ID NO: 3906845 - DNA, 25 bp, Homo sapien
gtataaaaacgcagagatccatccg

SEQ ID NO: 3906846 - DNA, 25 bp, Homo sapien
cacagggttgagcattttacggcag

SEQ ID NO: 3906847 - DNA, 25 bp, Homo sapien
ttgaacttcacgttaacaagggcac

SEQ ID NO: 3906848 - DNA, 25 bp, Homo sapien
ccctggtattgtcaggaatgttcca

SEQ ID NO: 3906849 - DNA, 25 bp, Homo sapien
cactgacatcttgggtaggttctct

SEQ ID NO: 3906850 - DNA, 25 bp, Homo sapien
gaattgttctatcactgctgcctat

SEQ ID NO: 3906851 - DNA, 25 bp, Homo sapien
tcaccagtcttcatacagccgtttg

SEQ ID NO: 3906852 - DNA, 25 bp, Homo sapien
ttattggagtgcactatagtacgcc

SEQ ID NO: 3906853 - DNA, 25 bp, Homo sapien
tatagtacgccttgtctcaccagtc

SEQ ID NO: 3906854 - DNA, 25 bp, Homo sapien
caggctttgtgctggatgccaataa

SEQ ID NO: 3906855 - DNA, 25 bp, Homo sapien
ctcagtctgcatatctgagaaagac

SEQ ID NO: 3906856 - DNA, 25 bp, Homo sapien
tatctcagtctgcatatctgagaaa

SEQ ID NO: 3906857 - DNA, 25 bp, Homo sapien
ttttaaacatgatcccatgccatta

SEQ ID NO: 3906858 - DNA, 25 bp, Homo sapien
atcttttaaacatgatcccatgcca

SEQ ID NO: 3906859 - DNA, 25 bp, Homo sapien
tccgcaagctcacaggtgctttgca

SEQ ID NO: 3906860 - DNA, 25 bp, Homo sapien
ggtgctttgcagttccgacgccact

SEQ ID NO: 3906861 - DNA, 25 bp, Homo sapien
aactgacttccgcaagctcacaggt

SEQ ID NO: 3906862 - DNA, 25 bp, Homo sapien
gcaggcgccgggtgcggtcgggtcg

SEQ ID NO: 3906863 - DNA, 25 bp, Homo sapien
gcagcagcagcgccgagaggctgcg

SEQ ID NO: 3906864 - DNA, 25 bp, Homo sapien
cgccgagaggctgcggctccaaggg

SEQ ID NO: 3906865 - DNA, 25 bp, Homo sapien
cagcagcgccgagaggctgcggctc

SEQ ID NO: 3906866 - DNA, 25 bp, Homo sapien
agaggctgcggctccaagggcccat

SEQ ID NO: 3906867 - DNA, 25 bp, Homo sapien
gaacgtgtagctctcggcgtcaaag

SEQ ID NO: 3906868 - DNA, 25 bp, Homo sapien
ctctcggcgtcaaagccagggtggc

SEQ ID NO: 3906869 - DNA, 25 bp, Homo sapien
gggcaccgtgaacgtgtagctctcg

SEQ ID NO: 3906870 - DNA, 25 bp, Homo sapien
caggacgcggcctctctccaggtgg

SEQ ID NO: 3906871 - DNA, 25 bp, Homo sapien
agggacaccggcagcgcgccctcac

SEQ ID NO: 3906872 - DNA, 25 bp, Homo sapien
tggacgtcactctcttagcctcggt

SEQ ID NO: 3906873 - DNA, 25 bp, Homo sapien
taaaacgggaatactcctgccaggc

SEQ ID NO: 3906874 - DNA, 25 bp, Homo sapien
tacgaaggcttctagtaagtgccct

SEQ ID NO: 3906875 - DNA, 25 bp, Homo sapien
aacatagtcaacaaccaggcagggt

SEQ ID NO: 3906876 - DNA, 25 bp, Homo sapien
agatcattattcctggccaggcgtg

SEQ ID NO: 3906877 - DNA, 25 bp, Homo sapien
gatcattattcctggccaggcgtgc

SEQ ID NO: 3906878 - DNA, 25 bp, Homo sapien
cttgggggaaacagtacctgtatca

SEQ ID NO: 3906879 - DNA, 25 bp, Homo sapien
gtatcaagatgttttggtccaggca

SEQ ID NO: 3906880 - DNA, 25 bp, Homo sapien
cagattgaacgtgtgattttaccag

SEQ ID NO: 3906881 - DNA, 25 bp, Homo sapien
cagaggcctgcggattctgtgtgaa

SEQ ID NO: 3906882 - DNA, 25 bp, Homo sapien
gggcgactccacattggactgatac

SEQ ID NO: 3906883 - DNA, 25 bp, Homo sapien
gactgatacaaggagaccccacagt

SEQ ID NO: 3906884 - DNA, 25 bp, Homo sapien
tctccatgaagccaatgtctaaacc

SEQ ID NO: 3906885 - DNA, 25 bp, Homo sapien
ggtgccaatgttacatccatccctt

SEQ ID NO: 3906886 - DNA, 25 bp, Homo sapien
aagccaatgtctaaacctggtgcca

SEQ ID NO: 3906887 - DNA, 25 bp, Homo sapien
caagtttcaaaattcccatggagta

SEQ ID NO: 3906888 - DNA, 25 bp, Homo sapien
tagcaaacactccaaagtcccctga

SEQ ID NO: 3906889 - DNA, 25 bp, Homo sapien
gagttaagaccctacagctgcctgt

SEQ ID NO: 3906890 - DNA, 25 bp, Homo sapien
tagaagctggagataaaccaatgga

SEQ ID NO: 3906891 - DNA, 25 bp, Homo sapien
gggcagaggaatgaccctagcaaac

SEQ ID NO: 3906892 - DNA, 25 bp, Homo sapien
catccaagtactagtactaaccagg

SEQ ID NO: 3906893 - DNA, 25 bp, Homo sapien
taacaaggcactaggcttagtcact

SEQ ID NO: 3906894 - DNA, 25 bp, Homo sapien
tgatgctagtaccacaggtgcacgc

SEQ ID NO: 3906895 - DNA, 25 bp, Homo sapien
gttctacacaacctccacgagcagg

SEQ ID NO: 3906896 - DNA, 25 bp, Homo sapien
catgggagactttcaaacagacagc

SEQ ID NO: 3906897 - DNA, 25 bp, Homo sapien
ggtacgatcatggctaaacctccca

SEQ ID NO: 3906898 - DNA, 25 bp, Homo sapien
agaggcggggttctatcatgcccag

SEQ ID NO: 3906899 - DNA, 25 bp, Homo sapien
tgtagaggcggggttctatcatgcc

SEQ ID NO: 3906900 - DNA, 25 bp, Homo sapien
acgatcatggctaaacctcccaggc

SEQ ID NO: 3906901 - DNA, 25 bp, Homo sapien
cattggaaatgggagtccatggccc

SEQ ID NO: 3906902 - DNA, 25 bp, Homo sapien
gcaacaacgaagatggccctgagag

SEQ ID NO: 3906903 - DNA, 25 bp, Homo sapien
gaaggagtaggacgtatcccgacac

SEQ ID NO: 3906904 - DNA, 25 bp, Homo sapien
ggcttcctagaggtagcaacaacga

SEQ ID NO: 3906905 - DNA, 25 bp, Homo sapien
caggcattctccaggattggcaggc

SEQ ID NO: 3906906 - DNA, 25 bp, Homo sapien
tggtactaagcacgcaaaacaggaa

SEQ ID NO: 3906907 - DNA, 25 bp, Homo sapien
cagggttggctcaacagccaagagt

SEQ ID NO: 3906908 - DNA, 25 bp, Homo sapien
aattccacacattgtagggagtggg

SEQ ID NO: 3906909 - DNA, 25 bp, Homo sapien
aaagtgaaactgcagctgccttatc

SEQ ID NO: 3906910 - DNA, 25 bp, Homo sapien
tgttttctgctcagcttgagtttca

SEQ ID NO: 3906911 - DNA, 25 bp, Homo sapien
aaaagtgaaactgcagctgccttat

SEQ ID NO: 3906912 - DNA, 25 bp, Homo sapien
gctgccttatctccatgctggatct

SEQ ID NO: 3906913 - DNA, 25 bp, Homo sapien
gcacttagccgtgtccatggaagaa

SEQ ID NO: 3906914 - DNA, 25 bp, Homo sapien
gaacagccaggagctaacttccacc

SEQ ID NO: 3906915 - DNA, 25 bp, Homo sapien
tcatttccaaaagacgggagagcct

SEQ ID NO: 3906916 - DNA, 25 bp, Homo sapien
aaaagaagatcagagcctgcgtagg

SEQ ID NO: 3906917 - DNA, 25 bp, Homo sapien
cagttgaccagagtcagatgaccag

SEQ ID NO: 3906918 - DNA, 25 bp, Homo sapien
ctggagaatgtcaggcaagacccct

SEQ ID NO: 3906919 - DNA, 25 bp, Homo sapien
tgttcacataaccaacaccatgcag

SEQ ID NO: 3906920 - DNA, 25 bp, Homo sapien
tctgctaaaatgaccgaacaggagg

SEQ ID NO: 3906921 - DNA, 25 bp, Homo sapien
gaccccaagagagatgactgatgtt

SEQ ID NO: 3906922 - DNA, 25 bp, Homo sapien
ttgccatcatgccacacggaacagt

SEQ ID NO: 3906923 - DNA, 25 bp, Homo sapien
ggtgccccactttctagcctactgg

SEQ ID NO: 3906924 - DNA, 25 bp, Homo sapien
tgcatgctgctattaaacctacggt

SEQ ID NO: 3906925 - DNA, 25 bp, Homo sapien
taggctgtcctttgtcgaccggtgc

SEQ ID NO: 3906926 - DNA, 25 bp, Homo sapien
ctgtattcagcgtgactttggtgga

SEQ ID NO: 3906927 - DNA, 25 bp, Homo sapien
tgaaaccgtagaggccttttgactg

SEQ ID NO: 3906928 - DNA, 25 bp, Homo sapien
gagtcccaggcgtagaccaagaaat

SEQ ID NO: 3906929 - DNA, 25 bp, Homo sapien
caccacgggagcacttgagaaactg

SEQ ID NO: 3906930 - DNA, 25 bp, Homo sapien
gagaaactggcttcgaataacaacc

SEQ ID NO: 3906931 - DNA, 25 bp, Homo sapien
tggccctggcacttacaacatattc

SEQ ID NO: 3906932 - DNA, 25 bp, Homo sapien
catttcggtaggaagcaccacggga

SEQ ID NO: 3906933 - DNA, 25 bp, Homo sapien
cacaggtcctcaacgtggagttatc

SEQ ID NO: 3906934 - DNA, 25 bp, Homo sapien
tactaagaactactttgtgatcaat

SEQ ID NO: 3906935 - DNA, 25 bp, Homo sapien
tctaacagaagctgttgggatggaa

SEQ ID NO: 3906936 - DNA, 25 bp, Homo sapien
tatggtttccatttgttctaacaga

SEQ ID NO: 3906937 - DNA, 25 bp, Homo sapien
aatgtgagcaattctgcttggattc

SEQ ID NO: 3906938 - DNA, 25 bp, Homo sapien
gaaatgtgagcaattctgcttggat

SEQ ID NO: 3906939 - DNA, 25 bp, Homo sapien
tgtgagcaattctgcttggattcca

SEQ ID NO: 3906940 - DNA, 25 bp, Homo sapien
gtgagcaattctgcttggattccag

SEQ ID NO: 3906941 - DNA, 25 bp, Homo sapien
tgggaggaataacccagtctctctt

SEQ ID NO: 3906942 - DNA, 25 bp, Homo sapien
tgatgggaggaataacccagtctct

SEQ ID NO: 3906943 - DNA, 25 bp, Homo sapien
atgggaggaataacccagtctctct

SEQ ID NO: 3906944 - DNA, 25 bp, Homo sapien
gatgggaggaataacccagtctctc

SEQ ID NO: 3906945 - DNA, 25 bp, Homo sapien
accaacagggggtgtgtcagctcct

SEQ ID NO: 3906946 - DNA, 25 bp, Homo sapien
tgatgctgtagaaaaccttgccttc

SEQ ID NO: 3906947 - DNA, 25 bp, Homo sapien
ggcaatgcgttctctatccagaggc

SEQ ID NO: 3906948 - DNA, 25 bp, Homo sapien
aaagacaccaacagggggtgtgtca

SEQ ID NO: 3906949 - DNA, 25 bp, Homo sapien
ggatcctcaactgcattcccgttgg

SEQ ID NO: 3906950 - DNA, 25 bp, Homo sapien
gttaccgtgatcaaaatctccattg

SEQ ID NO: 3906951 - DNA, 25 bp, Homo sapien
ttcccgttggatgacacagcgtgag

SEQ ID NO: 3906952 - DNA, 25 bp, Homo sapien
cctgggtgaattcgggcttgttgtc

SEQ ID NO: 3906953 - DNA, 25 bp, Homo sapien
ttcagattctcattagtggatatac

SEQ ID NO: 3906954 - DNA, 25 bp, Homo sapien
ctttctgagtattcagattctcatt

SEQ ID NO: 3906955 - DNA, 25 bp, Homo sapien
gagtattcagattctcattagtgga

SEQ ID NO: 3906956 - DNA, 25 bp, Homo sapien
tctgagtattcagattctcattagt

SEQ ID NO: 3906957 - DNA, 25 bp, Homo sapien
gatggcggcattgtaggtgttcaca

SEQ ID NO: 3906958 - DNA, 25 bp, Homo sapien
gatcttggctgaggatggtgtaagc

SEQ ID NO: 3906959 - DNA, 25 bp, Homo sapien
gaggatggtgtaagcgatggcggca

SEQ ID NO: 3906960 - DNA, 25 bp, Homo sapien
ggtgttcacatcatcgtccgcgtct

SEQ ID NO: 3906961 - DNA, 25 bp, Homo sapien
tgcagagagatcgacacaaccaagt

SEQ ID NO: 3906962 - DNA, 25 bp, Homo sapien
cagagagatcgacacaaccaagtca

SEQ ID NO: 3906963 - DNA, 25 bp, Homo sapien
agagagatcgacacaaccaagtcag

SEQ ID NO: 3906964 - DNA, 25 bp, Homo sapien
ctgcagagagatcgacacaaccaag

SEQ ID NO: 3906965 - DNA, 25 bp, Homo sapien
tgggattgaagatcggaggattatc

SEQ ID NO: 3906966 - DNA, 25 bp, Homo sapien
tgtgcttaacccctcaccttgaagg

SEQ ID NO: 3906967 - DNA, 25 bp, Homo sapien
gactgtgatcacagctgttgctgtt

SEQ ID NO: 3906968 - DNA, 25 bp, Homo sapien
tcggaggattatcgttggtgtcagt

SEQ ID NO: 3906969 - DNA, 25 bp, Homo sapien
caaaatgccatcgttgttcactgga

SEQ ID NO: 3906970 - DNA, 25 bp, Homo sapien
ttcactggatttgtggtgacgacaa

SEQ ID NO: 3906971 - DNA, 25 bp, Homo sapien
tatggtgtatacagcctcccacgct

SEQ ID NO: 3906972 - DNA, 25 bp, Homo sapien
cactttcagtgtggtgattacgacg

SEQ ID NO: 3906973 - DNA, 25 bp, Homo sapien
gggacaagggtatgaacagctgtga

SEQ ID NO: 3906974 - DNA, 25 bp, Homo sapien
ggacaagggtatgaacagctgtgag

SEQ ID NO: 3906975 - DNA, 25 bp, Homo sapien
ggggacaagggtatgaacagctgtg

SEQ ID NO: 3906976 - DNA, 25 bp, Homo sapien
caaagcgaatctacttctaagaaga

SEQ ID NO: 3906977 - DNA, 25 bp, Homo sapien
ctgtccccctgccaaagcgaatcta

SEQ ID NO: 3906978 - DNA, 25 bp, Homo sapien
ccctgccaaagcgaatctacttcta

SEQ ID NO: 3906979 - DNA, 25 bp, Homo sapien
tgccaaagcgaatctacttctaaga

SEQ ID NO: 3906980 - DNA, 25 bp, Homo sapien
ttcaggatcctgtgtaacagcttct

SEQ ID NO: 3906981 - DNA, 25 bp, Homo sapien
aagcagatagtacttctttttcaat

SEQ ID NO: 3906982 - DNA, 25 bp, Homo sapien
caccatgagccaccaagaagcctta

SEQ ID NO: 3906983 - DNA, 25 bp, Homo sapien
taggatgtgatttcctggcccacgc

SEQ ID NO: 3906984 - DNA, 25 bp, Homo sapien
aaaaggtaccacattcgtcactgct

SEQ ID NO: 3906985 - DNA, 25 bp, Homo sapien
gaatgtactgctgcttggcctcaaa

SEQ ID NO: 3906986 - DNA, 25 bp, Homo sapien
atccagcacatccacggtgacggtg

SEQ ID NO: 3906987 - DNA, 25 bp, Homo sapien
tctattgtcgaatatatggtgcata

SEQ ID NO: 3906988 - DNA, 25 bp, Homo sapien
gaatatatggtgcatattcgaattg

SEQ ID NO: 3906989 - DNA, 25 bp, Homo sapien
tagcaaccttgcacccttctggatt

SEQ ID NO: 3906990 - DNA, 25 bp, Homo sapien
aaactttgatagaattctattgtcg

SEQ ID NO: 3906991 - DNA, 25 bp, Homo sapien
tgttcttcacgtgctcaaaatcctc

SEQ ID NO: 3906992 - DNA, 25 bp, Homo sapien
agtgtccggattaatctccagccag

SEQ ID NO: 3906993 - DNA, 25 bp, Homo sapien
gctgtgtacgtgctgttcttcacgt

SEQ ID NO: 3906994 - DNA, 25 bp, Homo sapien
gaaatggcaccagtgtccggattaa

SEQ ID NO: 3906995 - DNA, 25 bp, Homo sapien
gaagtgtccctgttccagtagcaac

SEQ ID NO: 3906996 - DNA, 25 bp, Homo sapien
tgaatggtccagttggcactcgccc

SEQ ID NO: 3906997 - DNA, 25 bp, Homo sapien
ccccgtgtgttagttctgctgtgaa

SEQ ID NO: 3906998 - DNA, 25 bp, Homo sapien
cattcacatcagacaggatcagcag

SEQ ID NO: 3906999 - DNA, 25 bp, Homo sapien
ctgggagctcacgattggttggcaa

SEQ ID NO: 3907000 - DNA, 25 bp, Homo sapien
gctcacgattggttggcaagaagga

SEQ ID NO: 3907001 - DNA, 25 bp, Homo sapien
ggagctcacgattggttggcaagaa

SEQ ID NO: 3907002 - DNA, 25 bp, Homo sapien
ctcacgattggttggcaagaaggag

SEQ ID NO: 3907003 - DNA, 25 bp, Homo sapien
ttccagatccacatcgtcatggtgg

SEQ ID NO: 3907004 - DNA, 25 bp, Homo sapien
tgacttccatcgcacccagggtttt

SEQ ID NO: 3907005 - DNA, 25 bp, Homo sapien
gctgcctccacctcggtagaatagt

SEQ ID NO: 3907006 - DNA, 25 bp, Homo sapien
gaagatccaaaagggtccagttcag

SEQ ID NO: 3907007 - DNA, 25 bp, Homo sapien
tcgctgggttcggtaggctcccgtg

SEQ ID NO: 3907008 - DNA, 25 bp, Homo sapien
gttcggtaggctcccgtgtgcctga

SEQ ID NO: 3907009 - DNA, 25 bp, Homo sapien
agagcggggctcttcagatgtcgct

SEQ ID NO: 3907010 - DNA, 25 bp, Homo sapien
gcctgagggtgaacctttttgccca

SEQ ID NO: 3907011 - DNA, 25 bp, Homo sapien
tccatttggtctaaggcttgggaga

SEQ ID NO: 3907012 - DNA, 25 bp, Homo sapien
tctagagttggtttaaaaaagctgc

SEQ ID NO: 3907013 - DNA, 25 bp, Homo sapien
ttggcttcaaaatgatagattcttg

SEQ ID NO: 3907014 - DNA, 25 bp, Homo sapien
ctttggcttcaaaatgatagattct

SEQ ID NO: 3907015 - DNA, 25 bp, Homo sapien
tggcttcaaaatgatagattcttgg

SEQ ID NO: 3907016 - DNA, 25 bp, Homo sapien
ggcttcaaaatgatagattcttggg

SEQ ID NO: 3907017 - DNA, 25 bp, Homo sapien
gagattgattttgtagtcacccacc

SEQ ID NO: 3907018 - DNA, 25 bp, Homo sapien
gacaggctgtgccttcctacagacg

SEQ ID NO: 3907019 - DNA, 25 bp, Homo sapien
tctggttatccatgagcttgagatt

SEQ ID NO: 3907020 - DNA, 25 bp, Homo sapien
acacgctgacctctaaggtggtcac

SEQ ID NO: 3907021 - DNA, 25 bp, Homo sapien
tcttcatcatagtaataaacgttgt

SEQ ID NO: 3907022 - DNA, 25 bp, Homo sapien
gctctcctccgaagaaacagcaaga

SEQ ID NO: 3907023 - DNA, 25 bp, Homo sapien
gggctctttgaccaccgctctcctc

SEQ ID NO: 3907024 - DNA, 25 bp, Homo sapien
atcatagtaataaacgttgtcccgg

SEQ ID NO: 3907025 - DNA, 25 bp, Homo sapien
gttggtgcaacgtcgttacgagtca

SEQ ID NO: 3907026 - DNA, 25 bp, Homo sapien
ttacgagtcacttcaggccgagcgt

SEQ ID NO: 3907027 - DNA, 25 bp, Homo sapien
ggacactcatgagggttggtgcaac

SEQ ID NO: 3907028 - DNA, 25 bp, Homo sapien
aatttccaatttcatcgggattggc

SEQ ID NO: 3907029 - DNA, 25 bp, Homo sapien
gccccattcgttcaagtagtcatag

SEQ ID NO: 3907030 - DNA, 25 bp, Homo sapien
gcttcttgaagcgattgccccattc

SEQ ID NO: 3907031 - DNA, 25 bp, Homo sapien
tcagactagcagcttcggaaccgct

SEQ ID NO: 3907032 - DNA, 25 bp, Homo sapien
cacgagcagagaatcataaggcggg

SEQ ID NO: 3907033 - DNA, 25 bp, Homo sapien
gagaactcctatcttgggcaaagca

SEQ ID NO: 3907034 - DNA, 25 bp, Homo sapien
gaacaagtcactggatagctgccca

SEQ ID NO: 3907035 - DNA, 25 bp, Homo sapien
cagaaactcatctcaagggaaggga

SEQ ID NO: 3907036 - DNA, 25 bp, Homo sapien
caatacctagtcaagatgtggccag

SEQ ID NO: 3907037 - DNA, 25 bp, Homo sapien
ccagagctgatggttatacaatatt

SEQ ID NO: 3907038 - DNA, 25 bp, Homo sapien
gttctaacaccagagctgatggtta

SEQ ID NO: 3907039 - DNA, 25 bp, Homo sapien
tggctacaatgaggccaacgtggtg

SEQ ID NO: 3907040 - DNA, 25 bp, Homo sapien
atggctacaatgaggccaacgtggt

SEQ ID NO: 3907041 - DNA, 25 bp, Homo sapien
ggagtgtaacaccacgctcgcgacc

SEQ ID NO: 3907042 - DNA, 25 bp, Homo sapien
gactggagtgtaacaccacgctcgc

SEQ ID NO: 3907043 - DNA, 25 bp, Homo sapien
ctggagtgtaacaccacgctcgcga

SEQ ID NO: 3907044 - DNA, 25 bp, Homo sapien
acgctcgcgacccgctcaggcgcct

SEQ ID NO: 3907045 - DNA, 25 bp, Homo sapien
gatccagaccgcatgtctcctgagc

SEQ ID NO: 3907046 - DNA, 25 bp, Homo sapien
ccgctgcccacggcctgtcgggccg

SEQ ID NO: 3907047 - DNA, 25 bp, Homo sapien
tgcctccaaaatccgatccagaccg

SEQ ID NO: 3907048 - DNA, 25 bp, Homo sapien
aaaatccgatccagaccgcatgtct

SEQ ID NO: 3907049 - DNA, 25 bp, Homo sapien
ccggcgcggagatgcgtcctctcac

SEQ ID NO: 3907050 - DNA, 25 bp, Homo sapien
tgagagtcccgggtccagcccggcg

SEQ ID NO: 3907051 - DNA, 25 bp, Homo sapien
ctgagagtcccgggtccagcccggc

SEQ ID NO: 3907052 - DNA, 25 bp, Homo sapien
cagcccggcgcggagatgcgtcctc

SEQ ID NO: 3907053 - DNA, 25 bp, Homo sapien
ggaggattacgaagtcatgagttcc

SEQ ID NO: 3907054 - DNA, 25 bp, Homo sapien
aggattacgaagtcatgagttccag

SEQ ID NO: 3907055 - DNA, 25 bp, Homo sapien
gttgagctttagaattgtataaaag

SEQ ID NO: 3907056 - DNA, 25 bp, Homo sapien
cgggaggattacgaagtcatgagtt

SEQ ID NO: 3907057 - DNA, 25 bp, Homo sapien
tatacacatagaaaacaagctgcac

SEQ ID NO: 3907058 - DNA, 25 bp, Homo sapien
atacacatagaaaacaagctgcact

SEQ ID NO: 3907059 - DNA, 25 bp, Homo sapien
ttaaagtagccaacaagacatcatg

SEQ ID NO: 3907060 - DNA, 25 bp, Homo sapien
tcctccaaagcagacaggttagatt

SEQ ID NO: 3907061 - DNA, 25 bp, Homo sapien
ggtaaaactccaagtgacatccaca

SEQ ID NO: 3907062 - DNA, 25 bp, Homo sapien
cacagagttttgtggccattctgcc

SEQ ID NO: 3907063 - DNA, 25 bp, Homo sapien
cgacggcaccaaattcagttctata

SEQ ID NO: 3907064 - DNA, 25 bp, Homo sapien
gttctatatctcaaagggactccaa

SEQ ID NO: 3907065 - DNA, 25 bp, Homo sapien
tacaaactgcaaaacgaactggaca

SEQ ID NO: 3907066 - DNA, 25 bp, Homo sapien
tgctgagcaacattcagaagggcct

SEQ ID NO: 3907067 - DNA, 25 bp, Homo sapien
gggcagaatcccagttggcacagac

SEQ ID NO: 3907068 - DNA, 25 bp, Homo sapien
gcaggtgttagcagttttcttttgg

SEQ ID NO: 3907069 - DNA, 25 bp, Homo sapien
tttcttttggttgggcagaatccca

SEQ ID NO: 3907070 - DNA, 25 bp, Homo sapien
ctcttctgcaggtgttagcagtttt

SEQ ID NO: 3907071 - DNA, 25 bp, Homo sapien
gttttggcaagcatctctcagctca

SEQ ID NO: 3907072 - DNA, 25 bp, Homo sapien
ttttcagaggcatatcccctgcaga

SEQ ID NO: 3907073 - DNA, 25 bp, Homo sapien
tggcaagcatctctcagctcattcc

SEQ ID NO: 3907074 - DNA, 25 bp, Homo sapien
catatcccctgcagaaggtgctgca

SEQ ID NO: 3907075 - DNA, 25 bp, Homo sapien
taagggctgatagacttgatccagc

SEQ ID NO: 3907076 - DNA, 25 bp, Homo sapien
ccctggaggataagcagttcccgga

SEQ ID NO: 3907077 - DNA, 25 bp, Homo sapien
cagttcccggactgctaagggctga

SEQ ID NO: 3907078 - DNA, 25 bp, Homo sapien
tgatccagcatgtctctcaaggccc

SEQ ID NO: 3907079 - DNA, 25 bp, Homo sapien
attaatgagtcacccccaagagtcc

SEQ ID NO: 3907080 - DNA, 25 bp, Homo sapien
taatgagtcacccccaagagtccct

SEQ ID NO: 3907081 - DNA, 25 bp, Homo sapien
cattaatgagtcacccccaagagtc

SEQ ID NO: 3907082 - DNA, 25 bp, Homo sapien
tgagtcacccccaagagtccctagg

SEQ ID NO: 3907083 - DNA, 25 bp, Homo sapien
tgtccacatagacgccgaagccaag

SEQ ID NO: 3907084 - DNA, 25 bp, Homo sapien
agctgtccacatagacgccgaagcc

SEQ ID NO: 3907085 - DNA, 25 bp, Homo sapien
tgaacaccattaggtctcattaacc

SEQ ID NO: 3907086 - DNA, 25 bp, Homo sapien
aatgccccggactactgcctgaaca

SEQ ID NO: 3907087 - DNA, 25 bp, Homo sapien
tagtaattctctggtgaaagagact

SEQ ID NO: 3907088 - DNA, 25 bp, Homo sapien
ggcagatgtccctgtagtaattctc

SEQ ID NO: 3907089 - DNA, 25 bp, Homo sapien
agaggccaaaatctttgcgatcagg

SEQ ID NO: 3907090 - DNA, 25 bp, Homo sapien
ctttgcgatcaggtcacacttcttc

SEQ ID NO: 3907091 - DNA, 25 bp, Homo sapien
ctctctgaaattgtcgtgctgtcaa

SEQ ID NO: 3907092 - DNA, 25 bp, Homo sapien
agttataaaggtagtggtggcaact

SEQ ID NO: 3907093 - DNA, 25 bp, Homo sapien
gctgtcaatttatcttgaaagtgaa

SEQ ID NO: 3907094 - DNA, 25 bp, Homo sapien
tataaaggtagtggtggcaactctc

SEQ ID NO: 3907095 - DNA, 25 bp, Homo sapien
ggagcaaatactttgctgccaaatg

SEQ ID NO: 3907096 - DNA, 25 bp, Homo sapien
actggctggagcaaatactttgctg

SEQ ID NO: 3907097 - DNA, 25 bp, Homo sapien
ttcaaacatcgatgaagaggagcta

SEQ ID NO: 3907098 - DNA, 25 bp, Homo sapien
ctgtattcaaacatcgatgaagagg

SEQ ID NO: 3907099 - DNA, 25 bp, Homo sapien
acacatcctcaatgcatctactaag

SEQ ID NO: 3907100 - DNA, 25 bp, Homo sapien
cttaaacacatcctcaatgcatcta

SEQ ID NO: 3907101 - DNA, 25 bp, Homo sapien
cttcttctgtcaccaaaatagttcc

SEQ ID NO: 3907102 - DNA, 25 bp, Homo sapien
catcctcaatgcatctactaagttc

SEQ ID NO: 3907103 - DNA, 25 bp, Homo sapien
tcctgttttcccactgcagctggct

SEQ ID NO: 3907104 - DNA, 25 bp, Homo sapien
tgttttcccactgcagctggctgcc

SEQ ID NO: 3907105 - DNA, 25 bp, Homo sapien
cattttcctccaacatacacatttc

SEQ ID NO: 3907106 - DNA, 25 bp, Homo sapien
acatacacatttcctgttttcccac

SEQ ID NO: 3907107 - DNA, 25 bp, Homo sapien
tctgcttagtaaaacagtagagaag

SEQ ID NO: 3907108 - DNA, 25 bp, Homo sapien
actggaagcagggaatccatcaaaa

SEQ ID NO: 3907109 - DNA, 25 bp, Homo sapien
agggaatccatcaaaactgttaaag

SEQ ID NO: 3907110 - DNA, 25 bp, Homo sapien
cttatgtgagacacactctgcttag

SEQ ID NO: 3907111 - DNA, 25 bp, Homo sapien
gcagttatgaatgagcttgtcatct

SEQ ID NO: 3907112 - DNA, 25 bp, Homo sapien
catcttactccatgcatctaacaag

SEQ ID NO: 3907113 - DNA, 25 bp, Homo sapien
aaaagcagttatgaatgagcttgtc

SEQ ID NO: 3907114 - DNA, 25 bp, Homo sapien
gaatgagcttgtcatcttactccat

SEQ ID NO: 3907115 - DNA, 25 bp, Homo sapien
tttcaggctggcaattgccttcttc

SEQ ID NO: 3907116 - DNA, 25 bp, Homo sapien
ctttgatggtaatcataatgccacc

SEQ ID NO: 3907117 - DNA, 25 bp, Homo sapien
tggcaactctaaactgacacagaga

SEQ ID NO: 3907118 - DNA, 25 bp, Homo sapien
gagagagggcacagctttgtccaac

SEQ ID NO: 3907119 - DNA, 25 bp, Homo sapien
gccctgctcagaggataccttctgg

SEQ ID NO: 3907120 - DNA, 25 bp, Homo sapien
ctcagaggataccttctggtacagg

SEQ ID NO: 3907121 - DNA, 25 bp, Homo sapien
gtctcctgccaaaccgcattcctgg

SEQ ID NO: 3907122 - DNA, 25 bp, Homo sapien
gcagtgggacagcaagtccccgaga

SEQ ID NO: 3907123 - DNA, 25 bp, Homo sapien
agaagggctcagtttttaactctgt

SEQ ID NO: 3907124 - DNA, 25 bp, Homo sapien
tcattttccgaggccacatgagtca

SEQ ID NO: 3907125 - DNA, 25 bp, Homo sapien
attttccgaggccacatgagtcaac

SEQ ID NO: 3907126 - DNA, 25 bp, Homo sapien
tttccgaggccacatgagtcaactc

SEQ ID NO: 3907127 - DNA, 25 bp, Homo sapien
ctgcaggacaagcagcttccgctct

SEQ ID NO: 3907128 - DNA, 25 bp, Homo sapien
gacattctctcgcacagaacagcca

SEQ ID NO: 3907129 - DNA, 25 bp, Homo sapien
ttgtgaatatctgctcagacattct

SEQ ID NO: 3907130 - DNA, 25 bp, Homo sapien
tgctcagacattctctcgcacagaa

SEQ ID NO: 3907131 - DNA, 25 bp, Homo sapien
agccccatggacatgctcagcgtct

SEQ ID NO: 3907132 - DNA, 25 bp, Homo sapien
ctcagcgtctgtgattccacggtgc

SEQ ID NO: 3907133 - DNA, 25 bp, Homo sapien
tgaacagctcctcctagcatgacag

SEQ ID NO: 3907134 - DNA, 25 bp, Homo sapien
caatgttgctgctacaaagtccacc

SEQ ID NO: 3907135 - DNA, 25 bp, Homo sapien
ggcaaaggctccatgggtagagatg

SEQ ID NO: 3907136 - DNA, 25 bp, Homo sapien
atggtgatgcggagatcaacagcga

SEQ ID NO: 3907137 - DNA, 25 bp, Homo sapien
tcaacagcgagttcttggatgaccg

SEQ ID NO: 3907138 - DNA, 25 bp, Homo sapien
cttggatgaccggatcagggtatgt

SEQ ID NO: 3907139 - DNA, 25 bp, Homo sapien
tgctgttgttcaaggtggctatgag

SEQ ID NO: 3907140 - DNA, 25 bp, Homo sapien
gtctttcatgactggtttgttgctg

SEQ ID NO: 3907141 - DNA, 25 bp, Homo sapien
aggtggctatgagctacatcagtgg

SEQ ID NO: 3907142 - DNA, 25 bp, Homo sapien
tgaggaatgattggagcatttgact

SEQ ID NO: 3907143 - DNA, 25 bp, Homo sapien
tctgacttgtagtagtgctgggctc

SEQ ID NO: 3907144 - DNA, 25 bp, Homo sapien
tctctctgctctatccagtgggaaa

SEQ ID NO: 3907145 - DNA, 25 bp, Homo sapien
gcagcagcccgtgttggaatttgag

SEQ ID NO: 3907146 - DNA, 25 bp, Homo sapien
tgacaaaagaacctcttggagctgt

SEQ ID NO: 3907147 - DNA, 25 bp, Homo sapien
cctgaattgcagatagatatacaaa

SEQ ID NO: 3907148 - DNA, 25 bp, Homo sapien
ggtaaacagaacacatcaacgtgaa

SEQ ID NO: 3907149 - DNA, 25 bp, Homo sapien
gtaaacagaacacatcaacgtgaag

SEQ ID NO: 3907150 - DNA, 25 bp, Homo sapien
ctttgtgctcactgacaaccttgcc

SEQ ID NO: 3907151 - DNA, 25 bp, Homo sapien
tttgtgctcactgacaaccttgcct

SEQ ID NO: 3907152 - DNA, 25 bp, Homo sapien
caattagtccaaacttgtccatcat

SEQ ID NO: 3907153 - DNA, 25 bp, Homo sapien
gaagccttggcttttaagtgcatat

SEQ ID NO: 3907154 - DNA, 25 bp, Homo sapien
caccaaaaacatcaattagtccaaa

SEQ ID NO: 3907155 - DNA, 25 bp, Homo sapien
agtgcatattacaaacaccaaaaac

SEQ ID NO: 3907156 - DNA, 25 bp, Homo sapien
ccatgccaggtccaattagatgatc

SEQ ID NO: 3907157 - DNA, 25 bp, Homo sapien
cactgacttgcatgttttaattggg

SEQ ID NO: 3907158 - DNA, 25 bp, Homo sapien
gagatgataaacttcgcaggactgc

SEQ ID NO: 3907159 - DNA, 25 bp, Homo sapien
tactgagagaccatatatgagagac

SEQ ID NO: 3907160 - DNA, 25 bp, Homo sapien
gaccattaggtctgcatgtatgcac

SEQ ID NO: 3907161 - DNA, 25 bp, Homo sapien
gaaactgcctgttgtagcctaaagc

SEQ ID NO: 3907162 - DNA, 25 bp, Homo sapien
catacttccctgctgatgtgggaca

SEQ ID NO: 3907163 - DNA, 25 bp, Homo sapien
ggtccatcctagctctgagggacaa

SEQ ID NO: 3907164 - DNA, 25 bp, Homo sapien
tgtagtcagaccaaatcagaatcca

SEQ ID NO: 3907165 - DNA, 25 bp, Homo sapien
ccagctcaggtgctacacagtttat

SEQ ID NO: 3907166 - DNA, 25 bp, Homo sapien
tacagcacactagaaactgaagcag

SEQ ID NO: 3907167 - DNA, 25 bp, Homo sapien
caagttcatgaatcacaggcagtcc

SEQ ID NO: 3907168 - DNA, 25 bp, Homo sapien
tatcatcttaatcacatctggtgag

SEQ ID NO: 3907169 - DNA, 25 bp, Homo sapien
tcaagtatcatcttaatcacatctg

SEQ ID NO: 3907170 - DNA, 25 bp, Homo sapien
tttgagatgaagggtgacataggct

SEQ ID NO: 3907171 - DNA, 25 bp, Homo sapien
tgaagggtgacataggctgcttgct

SEQ ID NO: 3907172 - DNA, 25 bp, Homo sapien
accactgccaagttctcaacgtgac

SEQ ID NO: 3907173 - DNA, 25 bp, Homo sapien
tccaccactgccaagttctcaacgt

SEQ ID NO: 3907174 - DNA, 25 bp, Homo sapien
cttccaccactgccaagttctcaac

SEQ ID NO: 3907175 - DNA, 25 bp, Homo sapien
caccactgccaagttctcaacgtga

SEQ ID NO: 3907176 - DNA, 25 bp, Homo sapien
tgcctcggagaaaataactaccgga

SEQ ID NO: 3907177 - DNA, 25 bp, Homo sapien
gcagtgcctcggagaaaataactac

SEQ ID NO: 3907178 - DNA, 25 bp, Homo sapien
tcggagaaaataactaccggaatca

SEQ ID NO: 3907179 - DNA, 25 bp, Homo sapien
tggcagcagtgcctcggagaaaata

SEQ ID NO: 3907180 - DNA, 25 bp, Homo sapien
tgtggtcctaaaccacacctccaat

SEQ ID NO: 3907181 - DNA, 25 bp, Homo sapien
atgtggtcctaaaccacacctccaa

SEQ ID NO: 3907182 - DNA, 25 bp, Homo sapien
ctctgcatgtggtcctaaaccacac

SEQ ID NO: 3907183 - DNA, 25 bp, Homo sapien
tgcatgtggtcctaaaccacacctc

SEQ ID NO: 3907184 - DNA, 25 bp, Homo sapien
aaaaccatctctaaagctctcccag

SEQ ID NO: 3907185 - DNA, 25 bp, Homo sapien
tgaacgcagagatgctgaaaaccat

SEQ ID NO: 3907186 - DNA, 25 bp, Homo sapien
aataaaccagtcaccctgtgatggg

SEQ ID NO: 3907187 - DNA, 25 bp, Homo sapien
tactgtttacgatcaaaaggcaaat

SEQ ID NO: 3907188 - DNA, 25 bp, Homo sapien
tcatattgagccaacaagtccggca

SEQ ID NO: 3907189 - DNA, 25 bp, Homo sapien
taatgccctgacgattcgcataagg

SEQ ID NO: 3907190 - DNA, 25 bp, Homo sapien
caggatagacgtctgacagcagggc

SEQ ID NO: 3907191 - DNA, 25 bp, Homo sapien
aggacttccccgactttcattctgg

SEQ ID NO: 3907192 - DNA, 25 bp, Homo sapien
tgaggaacggatgtagccttgtagc

SEQ ID NO: 3907193 - DNA, 25 bp, Homo sapien
atgaggaacggatgtagccttgtag

SEQ ID NO: 3907194 - DNA, 25 bp, Homo sapien
ccttgtagcacactgccacactcaa

SEQ ID NO: 3907195 - DNA, 25 bp, Homo sapien
tgtagccttgtagcacactgccaca

SEQ ID NO: 3907196 - DNA, 25 bp, Homo sapien
cgtagcctgctagataaatccaatt

SEQ ID NO: 3907197 - DNA, 25 bp, Homo sapien
gtagcctgctagataaatccaatta

SEQ ID NO: 3907198 - DNA, 25 bp, Homo sapien
aaatattagtatatctgctacctgc

SEQ ID NO: 3907199 - DNA, 25 bp, Homo sapien
agtatatctgctacctgcttcttat

SEQ ID NO: 3907200 - DNA, 25 bp, Homo sapien
agcaaatattagtatatctgctacc

SEQ ID NO: 3907201 - DNA, 25 bp, Homo sapien
ctcttagcaaatattagtatatctg

SEQ ID NO: 3907202 - DNA, 25 bp, Homo sapien
ggttcactgttggacactcccaaga

SEQ ID NO: 3907203 - DNA, 25 bp, Homo sapien
tagaattgtgggttagagtcccacc

SEQ ID NO: 3907204 - DNA, 25 bp, Homo sapien
caagacacttggttgtgagtggtcc

SEQ ID NO: 3907205 - DNA, 25 bp, Homo sapien
ctgtttgtcatccatgccagatgct

SEQ ID NO: 3907206 - DNA, 25 bp, Homo sapien
gagttgtgaaggaaagtctgctaga

SEQ ID NO: 3907207 - DNA, 25 bp, Homo sapien
catgaggaactaaaggataaggccc

SEQ ID NO: 3907208 - DNA, 25 bp, Homo sapien
gaagactctcagaaaactttttgcc

SEQ ID NO: 3907209 - DNA, 25 bp, Homo sapien
gctttaattggtttaggcatgggca

SEQ ID NO: 3907210 - DNA, 25 bp, Homo sapien
gctttagggattcctctatgtcaaa

SEQ ID NO: 3907211 - DNA, 25 bp, Homo sapien
ccagcccaggggttaatttgagctt

SEQ ID NO: 3907212 - DNA, 25 bp, Homo sapien
aaattttgtatacatctcactggca

SEQ ID NO: 3907213 - DNA, 25 bp, Homo sapien
tttttacagagattgggccttgcta

SEQ ID NO: 3907214 - DNA, 25 bp, Homo sapien
tggccctgtgagcaccatcaggatc

SEQ ID NO: 3907215 - DNA, 25 bp, Homo sapien
aaggttctcggtactttgagaccat

SEQ ID NO: 3907216 - DNA, 25 bp, Homo sapien
gctccccaaggttggccaagctgct

SEQ ID NO: 3907217 - DNA, 25 bp, Homo sapien
tctcactcccctcaggaaggtatgg

SEQ ID NO: 3907218 - DNA, 25 bp, Homo sapien
agagaaaggaatcaaaatacagtac

SEQ ID NO: 3907219 - DNA, 25 bp, Homo sapien
ttagagaaaggaatcaaaatacagt

SEQ ID NO: 3907220 - DNA, 25 bp, Homo sapien
tagagaaaggaatcaaaatacagta

SEQ ID NO: 3907221 - DNA, 25 bp, Homo sapien
tgcatcgtaggtccaagtgaaaaca

SEQ ID NO: 3907222 - DNA, 25 bp, Homo sapien
atgcatcgtaggtccaagtgaaaac

SEQ ID NO: 3907223 - DNA, 25 bp, Homo sapien
catcgtaggtccaagtgaaaacacg

SEQ ID NO: 3907224 - DNA, 25 bp, Homo sapien
gcatcgtaggtccaagtgaaaacac

SEQ ID NO: 3907225 - DNA, 25 bp, Homo sapien
cctgctttgataagacatctgccat

SEQ ID NO: 3907226 - DNA, 25 bp, Homo sapien
gagggcatcatgcagctcgctttgc

SEQ ID NO: 3907227 - DNA, 25 bp, Homo sapien
aggcctagcctacagaggagggcat

SEQ ID NO: 3907228 - DNA, 25 bp, Homo sapien
ctgccatgccctgctttgataagac

SEQ ID NO: 3907229 - DNA, 25 bp, Homo sapien
tgtgcctatagtcccagctactcag

SEQ ID NO: 3907230 - DNA, 25 bp, Homo sapien
ttttgttaaactgggcatggtggtg

SEQ ID NO: 3907231 - DNA, 25 bp, Homo sapien
aaggctgaggcaggtggatcacttc

SEQ ID NO: 3907232 - DNA, 25 bp, Homo sapien
agcccaggagttcgagaccagcctg

SEQ ID NO: 3907233 - DNA, 25 bp, Homo sapien
cttcatatccttgaccagagggacc

SEQ ID NO: 3907234 - DNA, 25 bp, Homo sapien
tatccttgaccagagggaccagctt

SEQ ID NO: 3907235 - DNA, 25 bp, Homo sapien
tgggtatccactccttgtcctcagt

SEQ ID NO: 3907236 - DNA, 25 bp, Homo sapien
ttggtgatgggtatccactccttgt

SEQ ID NO: 3907237 - DNA, 25 bp, Homo sapien
tgagagatgccccttgaaaaaagct

SEQ ID NO: 3907238 - DNA, 25 bp, Homo sapien
gagagatgccccttgaaaaaagcta

SEQ ID NO: 3907239 - DNA, 25 bp, Homo sapien
catgagagatgccccttgaaaaaag

SEQ ID NO: 3907240 - DNA, 25 bp, Homo sapien
agatgccccttgaaaaaagctaatg

SEQ ID NO: 3907241 - DNA, 25 bp, Homo sapien
atctggtgcggtggccagtgtgggt

SEQ ID NO: 3907242 - DNA, 25 bp, Homo sapien
aatctggtgcggtggccagtgtggg

SEQ ID NO: 3907243 - DNA, 25 bp, Homo sapien
acacttaaactgatgtggccatcat

SEQ ID NO: 3907244 - DNA, 25 bp, Homo sapien
aacacttaaactgatgtggccatca

SEQ ID NO: 3907245 - DNA, 25 bp, Homo sapien
cttaaactgatgtggccatcatagt

SEQ ID NO: 3907246 - DNA, 25 bp, Homo sapien
cacttaaactgatgtggccatcata

SEQ ID NO: 3907247 - DNA, 25 bp, Homo sapien
ggaaagcttggccagggtgatggtc

SEQ ID NO: 3907248 - DNA, 25 bp, Homo sapien
tggaaagcttggccagggtgatggt

SEQ ID NO: 3907249 - DNA, 25 bp, Homo sapien
ggcagggataaggtgtactagccca

SEQ ID NO: 3907250 - DNA, 25 bp, Homo sapien
ctgtaaccatacagggggtggtgta

SEQ ID NO: 3907251 - DNA, 25 bp, Homo sapien
taaggtgtactagcccagagctaca

SEQ ID NO: 3907252 - DNA, 25 bp, Homo sapien
cagcagcctgtaaccatacaggggg

SEQ ID NO: 3907253 - DNA, 25 bp, Homo sapien
tgatgtgatggtcagtgcattccac

SEQ ID NO: 3907254 - DNA, 25 bp, Homo sapien
tcttgatgtgatggtcagtgcattc

SEQ ID NO: 3907255 - DNA, 25 bp, Homo sapien
tgtgatggtcagtgcattccacagg

SEQ ID NO: 3907256 - DNA, 25 bp, Homo sapien
atggtcagtgcattccacagggagg

SEQ ID NO: 3907257 - DNA, 25 bp, Homo sapien
attcttgtatgaaagcttatgctgt

SEQ ID NO: 3907258 - DNA, 25 bp, Homo sapien
ttattcttgtatgaaagcttatgct

SEQ ID NO: 3907259 - DNA, 25 bp, Homo sapien
tattcttgtatgaaagcttatgctg

SEQ ID NO: 3907260 - DNA, 25 bp, Homo sapien
cttgtatgaaagcttatgctgtaac

SEQ ID NO: 3907261 - DNA, 25 bp, Homo sapien
tattatttttaacaggtgtaattca

SEQ ID NO: 3907262 - DNA, 25 bp, Homo sapien
ttctgcttattatttttaacaggtg

SEQ ID NO: 3907263 - DNA, 25 bp, Homo sapien
tgcttattatttttaacaggtgtaa

SEQ ID NO: 3907264 - DNA, 25 bp, Homo sapien
cattttcttctgcttattattttta

SEQ ID NO: 3907265 - DNA, 25 bp, Homo sapien
gatttggttttaagcgacacagcct

SEQ ID NO: 3907266 - DNA, 25 bp, Homo sapien
cgctttagaagggactacggtggct

SEQ ID NO: 3907267 - DNA, 25 bp, Homo sapien
tcagatgccgaagagctatagccag

SEQ ID NO: 3907268 - DNA, 25 bp, Homo sapien
taaattcaggtcattccgtgggatc

SEQ ID NO: 3907269 - DNA, 25 bp, Homo sapien
tgtatcaaggaagcatgactttaat

SEQ ID NO: 3907270 - DNA, 25 bp, Homo sapien
gttgccagaattgaggtatgtatca

SEQ ID NO: 3907271 - DNA, 25 bp, Homo sapien
tatgtatcaaggaagcatgacttta

SEQ ID NO: 3907272 - DNA, 25 bp, Homo sapien
tccaagtgagaagttgccagaattg

SEQ ID NO: 3907273 - DNA, 25 bp, Homo sapien
acagtggcatgctcgcagcttaccg

SEQ ID NO: 3907274 - DNA, 25 bp, Homo sapien
tgctctgagtaaaccacactatgga

SEQ ID NO: 3907275 - DNA, 25 bp, Homo sapien
ctgtgtccacttctaaaagccatcc

SEQ ID NO: 3907276 - DNA, 25 bp, Homo sapien
aacatcactcccaaaacagctggca

SEQ ID NO: 3907277 - DNA, 25 bp, Homo sapien
atgaactactgcaccccggtcaagg

SEQ ID NO: 3907278 - DNA, 25 bp, Homo sapien
gaaatgtataatggtctgtcacgca

SEQ ID NO: 3907279 - DNA, 25 bp, Homo sapien
aggacaatcaggaagaggcccgaga

SEQ ID NO: 3907280 - DNA, 25 bp, Homo sapien
ttagtgacttatgcgccagactcca

SEQ ID NO: 3907281 - DNA, 25 bp, Homo sapien
tgcctctctttgctgagcgggtcat

SEQ ID NO: 3907282 - DNA, 25 bp, Homo sapien
tgtcctgcctctctttgctgagcgg

SEQ ID NO: 3907283 - DNA, 25 bp, Homo sapien
ctctgtcctgcctctctttgctgag

SEQ ID NO: 3907284 - DNA, 25 bp, Homo sapien
gtcctgcctctctttgctgagcggg

SEQ ID NO: 3907285 - DNA, 25 bp, Homo sapien
gcagcacaaccacatgtatggcagc

SEQ ID NO: 3907286 - DNA, 25 bp, Homo sapien
tagctttctggctgagtccccgaag

SEQ ID NO: 3907287 - DNA, 25 bp, Homo sapien
cagctctgcgtacttgaacttcacc

SEQ ID NO: 3907288 - DNA, 25 bp, Homo sapien
ttctggctgagtccccgaagcagca

SEQ ID NO: 3907289 - DNA, 25 bp, Homo sapien
tggaacttatcgtgtgcatcacctc

SEQ ID NO: 3907290 - DNA, 25 bp, Homo sapien
tgcccctactatatcgcatgccttg

SEQ ID NO: 3907291 - DNA, 25 bp, Homo sapien
ggcaactaccttgcttggttcaggg

SEQ ID NO: 3907292 - DNA, 25 bp, Homo sapien
taagcatgaactccccatcagaact

SEQ ID NO: 3907293 - DNA, 25 bp, Homo sapien
cagcaagaccctttgtctacaagaa

SEQ ID NO: 3907294 - DNA, 25 bp, Homo sapien
tcatacctatgatcccggcacttcg

SEQ ID NO: 3907295 - DNA, 25 bp, Homo sapien
gtgcccagcctcagctaataaaaaa

SEQ ID NO: 3907296 - DNA, 25 bp, Homo sapien
ccctttgtctacaagaaataataga

SEQ ID NO: 3907297 - DNA, 25 bp, Homo sapien
cattgtgtcagaggcgttaaaacca

SEQ ID NO: 3907298 - DNA, 25 bp, Homo sapien
cacggtgatctagcagaggtttttc

SEQ ID NO: 3907299 - DNA, 25 bp, Homo sapien
aaaaaggactctggacacggtgatc

SEQ ID NO: 3907300 - DNA, 25 bp, Homo sapien
ggacaaaaacgttaaatgctagcat

SEQ ID NO: 3907301 - DNA, 25 bp, Homo sapien
tggactccccaaggatcaaagcttc

SEQ ID NO: 3907302 - DNA, 25 bp, Homo sapien
gtctatcttagcaacccatcctggt

SEQ ID NO: 3907303 - DNA, 25 bp, Homo sapien
taactgagtgttaagcaaagcctcc

SEQ ID NO: 3907304 - DNA, 25 bp, Homo sapien
caaagcctcctgcttaattaatggg

SEQ ID NO: 3907305 - DNA, 25 bp, Homo sapien
tgctctttctccgtgtgggtaggaa

SEQ ID NO: 3907306 - DNA, 25 bp, Homo sapien
tcttctagggccaactgggcatgga

SEQ ID NO: 3907307 - DNA, 25 bp, Homo sapien
tggagcttggccacgtcatcgggct

SEQ ID NO: 3907308 - DNA, 25 bp, Homo sapien
cgggctccagacacactacgtgctt

SEQ ID NO: 3907309 - DNA, 25 bp, Homo sapien
caggaagtttttcatgatgtcatcc

SEQ ID NO: 3907310 - DNA, 25 bp, Homo sapien
tgaacacatgccctcggaagggacc

SEQ ID NO: 3907311 - DNA, 25 bp, Homo sapien
tgaagacccaagtgacctgcaccat

SEQ ID NO: 3907312 - DNA, 25 bp, Homo sapien
tcttaactgtacacccctcaggctg

SEQ ID NO: 3907313 - DNA, 25 bp, Homo sapien
tgaacgcgggagtgctgaacacatg

SEQ ID NO: 3907314 - DNA, 25 bp, Homo sapien
tgggaggataaatacagggcttacc

SEQ ID NO: 3907315 - DNA, 25 bp, Homo sapien
cagttttccatctcgacaccagagg

SEQ ID NO: 3907316 - DNA, 25 bp, Homo sapien
tcctgataatcagggcaactctctg

SEQ ID NO: 3907317 - DNA, 25 bp, Homo sapien
aggatgtaaactctctggatgctcg

SEQ ID NO: 3907318 - DNA, 25 bp, Homo sapien
ctgtggatctagtcaccccagagag

SEQ ID NO: 3907319 - DNA, 25 bp, Homo sapien
aaattctgtacctagccctgcaaag

SEQ ID NO: 3907320 - DNA, 25 bp, Homo sapien
tgatcaagcatctctgggttggcct

SEQ ID NO: 3907321 - DNA, 25 bp, Homo sapien
gcctcatcaaggtgttgacaacaga

SEQ ID NO: 3907322 - DNA, 25 bp, Homo sapien
gatttgaaagccacaatgcccattt

SEQ ID NO: 3907323 - DNA, 25 bp, Homo sapien
gaaattaatccagctacactagctg

SEQ ID NO: 3907324 - DNA, 25 bp, Homo sapien
tttttattgtacatccagctggccc

SEQ ID NO: 3907325 - DNA, 25 bp, Homo sapien
ccttaaacacacctagctagatttg

SEQ ID NO: 3907326 - DNA, 25 bp, Homo sapien
tcattaattcacctgatcgttattc

SEQ ID NO: 3907327 - DNA, 25 bp, Homo sapien
ctcattaattcacctgatcgttatt

SEQ ID NO: 3907328 - DNA, 25 bp, Homo sapien
attcacctgatcgttattcaaatag

SEQ ID NO: 3907329 - DNA, 25 bp, Homo sapien
ttcacctgatcgttattcaaatagc

SEQ ID NO: 3907330 - DNA, 25 bp, Homo sapien
gacccagggtagatcaacacgcttg

SEQ ID NO: 3907331 - DNA, 25 bp, Homo sapien
gaggagctgaaacaacagagccacc

SEQ ID NO: 3907332 - DNA, 25 bp, Homo sapien
tcaccctcgcagacaaagagacaaa

SEQ ID NO: 3907333 - DNA, 25 bp, Homo sapien
gaggagaaactgctgctaccagaga

SEQ ID NO: 3907334 - DNA, 25 bp, Homo sapien
gcagcaccgggtattgtaaggagca

SEQ ID NO: 3907335 - DNA, 25 bp, Homo sapien
aggtgccgcgcactgcagtgtggct

SEQ ID NO: 3907336 - DNA, 25 bp, Homo sapien
gtattgtaaggagcaacacaggttc

SEQ ID NO: 3907337 - DNA, 25 bp, Homo sapien
ccccaagcggtgattcagttccaac

SEQ ID NO: 3907338 - DNA, 25 bp, Homo sapien
ctcctcattgaggaccacagtggtc

SEQ ID NO: 3907339 - DNA, 25 bp, Homo sapien
tggtcaaagaaggtgttaacaattg

SEQ ID NO: 3907340 - DNA, 25 bp, Homo sapien
aagagaattgtcaaatgtaaaaagg

SEQ ID NO: 3907341 - DNA, 25 bp, Homo sapien
caaagaaggtgttaacaattgtgac

SEQ ID NO: 3907342 - DNA, 25 bp, Homo sapien
ctgaagagaattgtcaaatgtaaaa

SEQ ID NO: 3907343 - DNA, 25 bp, Homo sapien
cacgcgaaggggcagttcgctgtct

SEQ ID NO: 3907344 - DNA, 25 bp, Homo sapien
tagggggctcccgaaagccaaggca

SEQ ID NO: 3907345 - DNA, 25 bp, Homo sapien
gccaaggcagcaaaaccttcctgct

SEQ ID NO: 3907346 - DNA, 25 bp, Homo sapien
ttccccgacttctgcacgcgaaggg

SEQ ID NO: 3907347 - DNA, 25 bp, Homo sapien
tgccgcgctccggagctcagcaggc

SEQ ID NO: 3907348 - DNA, 25 bp, Homo sapien
ccggctgccgcgctccggagctcag

SEQ ID NO: 3907349 - DNA, 25 bp, Homo sapien
ggctgccgcgctccggagctcagca

SEQ ID NO: 3907350 - DNA, 25 bp, Homo sapien
aggcccgcggcggctccatgcccct

SEQ ID NO: 3907351 - DNA, 25 bp, Homo sapien
tgctcttcctggtaccccagctacc

SEQ ID NO: 3907352 - DNA, 25 bp, Homo sapien
ctcgagcctcgcctcttggcaaagg

SEQ ID NO: 3907353 - DNA, 25 bp, Homo sapien
acccaagggatcccagtcggaccag

SEQ ID NO: 3907354 - DNA, 25 bp, Homo sapien
gaacgcactcgccacgcttctcatc

SEQ ID NO: 3907355 - DNA, 25 bp, Homo sapien
gcccagcaacctgggcgctggcgcc

SEQ ID NO: 3907356 - DNA, 25 bp, Homo sapien
gcctgcctgcgctctgggtagggga

SEQ ID NO: 3907357 - DNA, 25 bp, Homo sapien
tggcgccccgcctcggtgcagtgcc

SEQ ID NO: 3907358 - DNA, 25 bp, Homo sapien
ggtgcagtgccggaggcggcgccca

SEQ ID NO: 3907359 - DNA, 25 bp, Homo sapien
cacttgcgcaagtagtcagggtcct

SEQ ID NO: 3907360 - DNA, 25 bp, Homo sapien
tacaggccgaaggacaggtagtgct

SEQ ID NO: 3907361 - DNA, 25 bp, Homo sapien
ggtcctcctggtatgcggcaatgca

SEQ ID NO: 3907362 - DNA, 25 bp, Homo sapien
ttgctgcgccacacaaagaagccgg

SEQ ID NO: 3907363 - DNA, 25 bp, Homo sapien
tggtgcaggctggatccagcacagt

SEQ ID NO: 3907364 - DNA, 25 bp, Homo sapien
ctcgaagcatctcgatggtgcaggc

SEQ ID NO: 3907365 - DNA, 25 bp, Homo sapien
caggctggatccagcacagtgtcag

SEQ ID NO: 3907366 - DNA, 25 bp, Homo sapien
tcctccaggactcgaagcatctcga

SEQ ID NO: 3907367 - DNA, 25 bp, Homo sapien
tggagcgcgcggtatacttagttcg

SEQ ID NO: 3907368 - DNA, 25 bp, Homo sapien
gcggccccggtagaaaagctgtata

SEQ ID NO: 3907369 - DNA, 25 bp, Homo sapien
gaaggctagctctgtctcactgaac

SEQ ID NO: 3907370 - DNA, 25 bp, Homo sapien
tctctgtgaggcacttggagcgcgc

SEQ ID NO: 3907371 - DNA, 25 bp, Homo sapien
tgaaagtcacacatgctaacccggc

SEQ ID NO: 3907372 - DNA, 25 bp, Homo sapien
gttagctggcccctctgagaaagga

SEQ ID NO: 3907373 - DNA, 25 bp, Homo sapien
tcaaaggcttagtcaggatcccagg

SEQ ID NO: 3907374 - DNA, 25 bp, Homo sapien
tgaactctgcacttggctgaccgga

SEQ ID NO: 3907375 - DNA, 25 bp, Homo sapien
gggacttagaggtggccagatttaa

SEQ ID NO: 3907376 - DNA, 25 bp, Homo sapien
cacagaacagggagatggacaacca

SEQ ID NO: 3907377 - DNA, 25 bp, Homo sapien
tggacaaccacttcaaagaaagacc

SEQ ID NO: 3907378 - DNA, 25 bp, Homo sapien
aaatcactgtgctttgttcggcctg

SEQ ID NO: 3907379 - DNA, 25 bp, Homo sapien
catgcttccgtagctctgacctggg

SEQ ID NO: 3907380 - DNA, 25 bp, Homo sapien
gcttggacctggtcatcctctactg

SEQ ID NO: 3907381 - DNA, 25 bp, Homo sapien
aacgtggcgttggtgaacggaccat

SEQ ID NO: 3907382 - DNA, 25 bp, Homo sapien
tcactgctctctagaaacgtggcgt

SEQ ID NO: 3907383 - DNA, 25 bp, Homo sapien
cttttcctcagggatacattggcct

SEQ ID NO: 3907384 - DNA, 25 bp, Homo sapien
tatttgtggcatgtgaactgtggca

SEQ ID NO: 3907385 - DNA, 25 bp, Homo sapien
tacattggcctgcaggtcccagttc

SEQ ID NO: 3907386 - DNA, 25 bp, Homo sapien
tctgcccattgtttcttactagttt

SEQ ID NO: 3907387 - DNA, 25 bp, Homo sapien
cctttccaaggatgaatggccctgc

SEQ ID NO: 3907388 - DNA, 25 bp, Homo sapien
caatggctgcaatgtacccaaatgg

SEQ ID NO: 3907389 - DNA, 25 bp, Homo sapien
gagtttcgtcccatttcctagagtg

SEQ ID NO: 3907390 - DNA, 25 bp, Homo sapien
ggaccaccttggtttctaggcactg

SEQ ID NO: 3907391 - DNA, 25 bp, Homo sapien
tagctctcggggaattggccttcca

SEQ ID NO: 3907392 - DNA, 25 bp, Homo sapien
ggcccaggccctaatctagatgcca

SEQ ID NO: 3907393 - DNA, 25 bp, Homo sapien
cgatcttgcccccattctaagagca

SEQ ID NO: 3907394 - DNA, 25 bp, Homo sapien
catgggcccaaactcgggtcctagc

SEQ ID NO: 3907395 - DNA, 25 bp, Homo sapien
tcccggctggtgctcgtgacccaag

SEQ ID NO: 3907396 - DNA, 25 bp, Homo sapien
caaatccagcacctttcccggctgg

SEQ ID NO: 3907397 - DNA, 25 bp, Homo sapien
tcatcaggctcattggcttcaaatc

SEQ ID NO: 3907398 - DNA, 25 bp, Homo sapien
cttttccaagagggatgaatcccac

SEQ ID NO: 3907399 - DNA, 25 bp, Homo sapien
gagtgtagatagtcagatggcccag

SEQ ID NO: 3907400 - DNA, 25 bp, Homo sapien
tcagtacttttggagggcaacgcgg

SEQ ID NO: 3907401 - DNA, 25 bp, Homo sapien
agatttctactctgtcacatagcag

SEQ ID NO: 3907402 - DNA, 25 bp, Homo sapien
cagtagcctgatctgcaaaatagga

SEQ ID NO: 3907403 - DNA, 25 bp, Homo sapien
gaggacaggctaagatggggctgca

SEQ ID NO: 3907404 - DNA, 25 bp, Homo sapien
aactgcagtaactcagatcgactga

SEQ ID NO: 3907405 - DNA, 25 bp, Homo sapien
agaaaactgcagtaactcagatcga

SEQ ID NO: 3907406 - DNA, 25 bp, Homo sapien
cagtaactcagatcgactgaagcca

SEQ ID NO: 3907407 - DNA, 25 bp, Homo sapien
gaagtgctcctggcgcatagtcgga

SEQ ID NO: 3907408 - DNA, 25 bp, Homo sapien
cctggcgcatagtcggaagtgcgca

SEQ ID NO: 3907409 - DNA, 25 bp, Homo sapien
aagtgcgcaggcagtgctcgcggcg

SEQ ID NO: 3907410 - DNA, 25 bp, Homo sapien
gctcctggcgcatagtcggaagtgc

SEQ ID NO: 3907411 - DNA, 25 bp, Homo sapien
acgtactcgatggaccttaaattca

SEQ ID NO: 3907412 - DNA, 25 bp, Homo sapien
tgatggaacataattaaagaaacgt

SEQ ID NO: 3907413 - DNA, 25 bp, Homo sapien
taattaaagaaacgtactcgatgga

SEQ ID NO: 3907414 - DNA, 25 bp, Homo sapien
tactcgatggaccttaaattcaccc

SEQ ID NO: 3907415 - DNA, 25 bp, Homo sapien
ttattgtaagccacacagcggattc

SEQ ID NO: 3907416 - DNA, 25 bp, Homo sapien
gaaacagccaatctgtttgactggt

SEQ ID NO: 3907417 - DNA, 25 bp, Homo sapien
gaaagtagtttgctgacaagttata

SEQ ID NO: 3907418 - DNA, 25 bp, Homo sapien
cagtgccatctgttcgtgaaacagc

SEQ ID NO: 3907419 - DNA, 25 bp, Homo sapien
tttgcttaccaaagctgcaatggtg

SEQ ID NO: 3907420 - DNA, 25 bp, Homo sapien
tacacagattgaaactgagcttctc

SEQ ID NO: 3907421 - DNA, 25 bp, Homo sapien
gatgtcacatttctaggtaggaccc

SEQ ID NO: 3907422 - DNA, 25 bp, Homo sapien
gaaaatcactagtcagtgcccttgg

SEQ ID NO: 3907423 - DNA, 25 bp, Homo sapien
caaataggtcctccaaaggcatcca

SEQ ID NO: 3907424 - DNA, 25 bp, Homo sapien
tagcatacttgatgtttaacgcctg

SEQ ID NO: 3907425 - DNA, 25 bp, Homo sapien
taaagagtcgctgtccttctgccca

SEQ ID NO: 3907426 - DNA, 25 bp, Homo sapien
cacaaagcttctgtagcccgagact

SEQ ID NO: 3907427 - DNA, 25 bp, Homo sapien
tagtttcacagatccatcttcacaa

SEQ ID NO: 3907428 - DNA, 25 bp, Homo sapien
gggtaatttgaaatagtttcacaga

SEQ ID NO: 3907429 - DNA, 25 bp, Homo sapien
tttgaaatagtttcacagatccatc

SEQ ID NO: 3907430 - DNA, 25 bp, Homo sapien
ttttctgccgatcaaaatttctttc

SEQ ID NO: 3907431 - DNA, 25 bp, Homo sapien
tgttaaggctatttaccgccccatg

SEQ ID NO: 3907432 - DNA, 25 bp, Homo sapien
ccgccccatgaaaaatgacgcttac

SEQ ID NO: 3907433 - DNA, 25 bp, Homo sapien
atatcccatccccagtggcacagaa

SEQ ID NO: 3907434 - DNA, 25 bp, Homo sapien
tatttaccgccccatgaaaaatgac

SEQ ID NO: 3907435 - DNA, 25 bp, Homo sapien
gagtgttctacaatcttagctctct

SEQ ID NO: 3907436 - DNA, 25 bp, Homo sapien
ttagctctctcatctatagtactcc

SEQ ID NO: 3907437 - DNA, 25 bp, Homo sapien
tcttcccacaactatctctagagtg

SEQ ID NO: 3907438 - DNA, 25 bp, Homo sapien
tctatagtactccttgaagcaccat

SEQ ID NO: 3907439 - DNA, 25 bp, Homo sapien
aacacactaatgtagtctatggaac

SEQ ID NO: 3907440 - DNA, 25 bp, Homo sapien
aatgtagtctatggaaccagctgca

SEQ ID NO: 3907441 - DNA, 25 bp, Homo sapien
cactaatgtagtctatggaaccagc

SEQ ID NO: 3907442 - DNA, 25 bp, Homo sapien
aatgtgggtaccagagggatgccag

SEQ ID NO: 3907443 - DNA, 25 bp, Homo sapien
gaagaacctaccaggtgtccagaac

SEQ ID NO: 3907444 - DNA, 25 bp, Homo sapien
cttgctaataatacgaggagctgga

SEQ ID NO: 3907445 - DNA, 25 bp, Homo sapien
caggtcctacacaaagggataactc

SEQ ID NO: 3907446 - DNA, 25 bp, Homo sapien
gggataactctcagaatggcagctt

SEQ ID NO: 3907447 - DNA, 25 bp, Homo sapien
aagaaggcgacaccccacacgatgc

SEQ ID NO: 3907448 - DNA, 25 bp, Homo sapien
tccacacttatgatagtgccatcgg

SEQ ID NO: 3907449 - DNA, 25 bp, Homo sapien
cacacgatgcacttccgcttagaca

SEQ ID NO: 3907450 - DNA, 25 bp, Homo sapien
tggctgagtcccagaactgcacctt

SEQ ID NO: 3907451 - DNA, 25 bp, Homo sapien
tacagcaatggactgcacgtcagca

SEQ ID NO: 3907452 - DNA, 25 bp, Homo sapien
gactgcacgtcagcattagcgatga

SEQ ID NO: 3907453 - DNA, 25 bp, Homo sapien
aatggactgcacgtcagcattagcg

SEQ ID NO: 3907454 - DNA, 25 bp, Homo sapien
gtcagctacagcaatggactgcacg

SEQ ID NO: 3907455 - DNA, 25 bp, Homo sapien
tgctgttagatgtcacagggaccag

SEQ ID NO: 3907456 - DNA, 25 bp, Homo sapien
ctccagatatcagcgctgttgggct

SEQ ID NO: 3907457 - DNA, 25 bp, Homo sapien
tggaagactgttccctcggctgtgc

SEQ ID NO: 3907458 - DNA, 25 bp, Homo sapien
gctggaacggttttgtccgcaccca

SEQ ID NO: 3907459 - DNA, 25 bp, Homo sapien
ccaccttctccatgagaggacgaaa

SEQ ID NO: 3907460 - DNA, 25 bp, Homo sapien
cgaaagactaagtgggtgtcagtgc

SEQ ID NO: 3907461 - DNA, 25 bp, Homo sapien
aaaggtgatttttcggagagcggca

SEQ ID NO: 3907462 - DNA, 25 bp, Homo sapien
gagagcggcatcgtaattctttact

SEQ ID NO: 3907463 - DNA, 25 bp, Homo sapien
gctgcctctttttagaacaggagat

SEQ ID NO: 3907464 - DNA, 25 bp, Homo sapien
taagtgatgagcaaactggaagagg

SEQ ID NO: 3907465 - DNA, 25 bp, Homo sapien
caaactggaagaggagaagctgcct

SEQ ID NO: 3907466 - DNA, 25 bp, Homo sapien
ttttagaacaggagatgagacatcg

SEQ ID NO: 3907467 - DNA, 25 bp, Homo sapien
ttgcaactgtggatcccagtcgcca

SEQ ID NO: 3907468 - DNA, 25 bp, Homo sapien
actgtggatcccagtcgccaaagtt

SEQ ID NO: 3907469 - DNA, 25 bp, Homo sapien
ctgttgcaactgtggatcccagtcg

SEQ ID NO: 3907470 - DNA, 25 bp, Homo sapien
gcaactgtggatcccagtcgccaaa

SEQ ID NO: 3907471 - DNA, 25 bp, Homo sapien
tgtctttaggtgcagtaaatgatct

SEQ ID NO: 3907472 - DNA, 25 bp, Homo sapien
tctttaggtgcagtaaatgatctgc

SEQ ID NO: 3907473 - DNA, 25 bp, Homo sapien
gtctttaggtgcagtaaatgatctg

SEQ ID NO: 3907474 - DNA, 25 bp, Homo sapien
tgaagaacatttgaaggccaggtac

SEQ ID NO: 3907475 - DNA, 25 bp, Homo sapien
gaagaacatttgaaggccaggtaca

SEQ ID NO: 3907476 - DNA, 25 bp, Homo sapien
aatgaagaacatttgaaggccaggt

SEQ ID NO: 3907477 - DNA, 25 bp, Homo sapien
aagacttctaagaaatagcaaatga

SEQ ID NO: 3907478 - DNA, 25 bp, Homo sapien
tcagccgatagagaaaaaaccgaga

SEQ ID NO: 3907479 - DNA, 25 bp, Homo sapien
aaaccgagaaactgtagaataggct

SEQ ID NO: 3907480 - DNA, 25 bp, Homo sapien
tgtagaataggctatccaacttcca

SEQ ID NO: 3907481 - DNA, 25 bp, Homo sapien
tttgaggcttatgttgtcatgttca

SEQ ID NO: 3907482 - DNA, 25 bp, Homo sapien
agggcagagcgaaggaatgctggca

SEQ ID NO: 3907483 - DNA, 25 bp, Homo sapien
gggcagagcgaaggaatgctggcat

SEQ ID NO: 3907484 - DNA, 25 bp, Homo sapien
tgcagagctccttgatttgatgcta

SEQ ID NO: 3907485 - DNA, 25 bp, Homo sapien
gctgaacaatatgcagagctccttg

SEQ ID NO: 3907486 - DNA, 25 bp, Homo sapien
cctgacagctgaacaatatgcagag

SEQ ID NO: 3907487 - DNA, 25 bp, Homo sapien
ggtgcttgaagcttcctcctgacag

SEQ ID NO: 3907488 - DNA, 25 bp, Homo sapien
ctgttttacgttgtagacatggact

SEQ ID NO: 3907489 - DNA, 25 bp, Homo sapien
tacctgatgcagctagccaattccc

SEQ ID NO: 3907490 - DNA, 25 bp, Homo sapien
tctggactgactgccaaaagacaca

SEQ ID NO: 3907491 - DNA, 25 bp, Homo sapien
caattcccatctggactgactgcca

SEQ ID NO: 3907492 - DNA, 25 bp, Homo sapien
ccgaatgagcgatgacaaggttgtt

SEQ ID NO: 3907493 - DNA, 25 bp, Homo sapien
tggtccgaatgagcgatgacaaggt

SEQ ID NO: 3907494 - DNA, 25 bp, Homo sapien
ctgctggtccgaatgagcgatgaca

SEQ ID NO: 3907495 - DNA, 25 bp, Homo sapien
agccatagcagtcactgggaaattg

SEQ ID NO: 3907496 - DNA, 25 bp, Homo sapien
taggagtatccctttggagccaaag

SEQ ID NO: 3907497 - DNA, 25 bp, Homo sapien
tcatggagaaggatgtgcatcggtc

SEQ ID NO: 3907498 - DNA, 25 bp, Homo sapien
gagccaaaggtggtgaaagccctgc

SEQ ID NO: 3907499 - DNA, 25 bp, Homo sapien
tgcatcggtctcttgggatgaaaac

SEQ ID NO: 3907500 - DNA, 25 bp, Homo sapien
gagggtcaccttccgaatactggcc

SEQ ID NO: 3907501 - DNA, 25 bp, Homo sapien
tcaatgatacttccggatgagggtc

SEQ ID NO: 3907502 - DNA, 25 bp, Homo sapien
gaagaaaatgctcgtatcccatgta

SEQ ID NO: 3907503 - DNA, 25 bp, Homo sapien
tcagataccccagagttcaaagttg

SEQ ID NO: 3907504 - DNA, 25 bp, Homo sapien
ggtcgcagggcccacgagatgattc

SEQ ID NO: 3907505 - DNA, 25 bp, Homo sapien
cagggcccacgagatgattccagtg

SEQ ID NO: 3907506 - DNA, 25 bp, Homo sapien
cacgagatgattccagtgacacatc

SEQ ID NO: 3907507 - DNA, 25 bp, Homo sapien
atccccgtgcacacctcctttagag

SEQ ID NO: 3907508 - DNA, 25 bp, Homo sapien
tccatgcagcaagatcaaagggccc

SEQ ID NO: 3907509 - DNA, 25 bp, Homo sapien
tgatgtcactgacacctcgaggtgg

SEQ ID NO: 3907510 - DNA, 25 bp, Homo sapien
gatctgtagtgcattttgagcccaa

SEQ ID NO: 3907511 - DNA, 25 bp, Homo sapien
ttaattcgggaaaacagctgtagcc

SEQ ID NO: 3907512 - DNA, 25 bp, Homo sapien
gcctccggatgacatctgattcatt

SEQ ID NO: 3907513 - DNA, 25 bp, Homo sapien
cggatgacatctgattcattcgtgg

SEQ ID NO: 3907514 - DNA, 25 bp, Homo sapien
gcgcctccggatgacatctgattca

SEQ ID NO: 3907515 - DNA, 25 bp, Homo sapien
tgtgcgcctccggatgacatctgat

SEQ ID NO: 3907516 - DNA, 25 bp, Homo sapien
tgtctcccacaagccaggttctctg

SEQ ID NO: 3907517 - DNA, 25 bp, Homo sapien
aaacatatacaagggacagccagcc

SEQ ID NO: 3907518 - DNA, 25 bp, Homo sapien
gccagcctcaaaaaggtgacttgtc

SEQ ID NO: 3907519 - DNA, 25 bp, Homo sapien
cctaaggcaactgacaactggcaag

SEQ ID NO: 3907520 - DNA, 25 bp, Homo sapien
gagcagtggtcattcatagacatga

SEQ ID NO: 3907521 - DNA, 25 bp, Homo sapien
gcaggagagcagtggtcattcatag

SEQ ID NO: 3907522 - DNA, 25 bp, Homo sapien
acatgatcaacgtgcactgaagccc

SEQ ID NO: 3907523 - DNA, 25 bp, Homo sapien
tcatagacatgatcaacgtgcactg

SEQ ID NO: 3907524 - DNA, 25 bp, Homo sapien
aatgatgtcatccagaggccgttct

SEQ ID NO: 3907525 - DNA, 25 bp, Homo sapien
gccacgagtgttctttcatccaaaa

SEQ ID NO: 3907526 - DNA, 25 bp, Homo sapien
atccagaggccgttctactgccacg

SEQ ID NO: 3907527 - DNA, 25 bp, Homo sapien
gaggccgttctactgccacgagtgt

SEQ ID NO: 3907528 - DNA, 25 bp, Homo sapien
acagggtagacagttcaaggaagga

SEQ ID NO: 3907529 - DNA, 25 bp, Homo sapien
cagattcctacgcagttccatgggc

SEQ ID NO: 3907530 - DNA, 25 bp, Homo sapien
ggagcactcccttataatgctggag

SEQ ID NO: 3907531 - DNA, 25 bp, Homo sapien
taagtaattacggtcctctgccctc

SEQ ID NO: 3907532 - DNA, 25 bp, Homo sapien
taaataaaattaacggctgactgtc

SEQ ID NO: 3907533 - DNA, 25 bp, Homo sapien
tccagtcaggcagcctcggcgcttc

SEQ ID NO: 3907534 - DNA, 25 bp, Homo sapien
gccccgctttggtggcccgcgtcca

SEQ ID NO: 3907535 - DNA, 25 bp, Homo sapien
gctttggtggcccgcgtccacaccg

SEQ ID NO: 3907536 - DNA, 25 bp, Homo sapien
ccaccagccccgctttggtggcccg

SEQ ID NO: 3907537 - DNA, 25 bp, Homo sapien
accagccccgctttggtggcccgcg

SEQ ID NO: 3907538 - DNA, 25 bp, Homo sapien
ggtcccagagcgggctccagctcgg

SEQ ID NO: 3907539 - DNA, 25 bp, Homo sapien
ttgggaggccgttgaaggcggcggc

SEQ ID NO: 3907540 - DNA, 25 bp, Homo sapien
ggctctccccgctcagctcggccac

SEQ ID NO: 3907541 - DNA, 25 bp, Homo sapien
cggcgtcgcccgtcaggctcaggct

SEQ ID NO: 3907542 - DNA, 25 bp, Homo sapien
tgaggatcggcatccggttctcgcg

SEQ ID NO: 3907543 - DNA, 25 bp, Homo sapien
gcctggtcgtgggtggcctggcgca

SEQ ID NO: 3907544 - DNA, 25 bp, Homo sapien
cggtgccgttcaccgacaggatggc

SEQ ID NO: 3907545 - DNA, 25 bp, Homo sapien
ggttctcgcggccgcccttgatgct

SEQ ID NO: 3907546 - DNA, 25 bp, Homo sapien
ccagaggtgagtgagttaagcgcca

SEQ ID NO: 3907547 - DNA, 25 bp, Homo sapien
tagtgtcagcttatcgggccgaggt

SEQ ID NO: 3907548 - DNA, 25 bp, Homo sapien
aatctcagccgagtcttccctaggg

SEQ ID NO: 3907549 - DNA, 25 bp, Homo sapien
tctcagcgggcaaacggagacagac

SEQ ID NO: 3907550 - DNA, 25 bp, Homo sapien
agcgctttggtggtttgcccgagca

SEQ ID NO: 3907551 - DNA, 25 bp, Homo sapien
tcccataaattaaccagcgctttgg

SEQ ID NO: 3907552 - DNA, 25 bp, Homo sapien
acgtgagcctccactgttaaacaag

SEQ ID NO: 3907553 - DNA, 25 bp, Homo sapien
aagagtcttgaagcagcgcgcctgt

SEQ ID NO: 3907554 - DNA, 25 bp, Homo sapien
caaaagtgtgcctgaaattccctgc

SEQ ID NO: 3907555 - DNA, 25 bp, Homo sapien
gcacacgtggcctattttagcccaa

SEQ ID NO: 3907556 - DNA, 25 bp, Homo sapien
tggaaggacaacatggtacagcctg

SEQ ID NO: 3907557 - DNA, 25 bp, Homo sapien
aactgtctgcccatcacaactgagg

SEQ ID NO: 3907558 - DNA, 25 bp, Homo sapien
tactcaacacgtgaattgcaaaatg

SEQ ID NO: 3907559 - DNA, 25 bp, Homo sapien
agagtgtctttgttaactggtggca

SEQ ID NO: 3907560 - DNA, 25 bp, Homo sapien
ggtaaaaatggagccctggatgtta

SEQ ID NO: 3907561 - DNA, 25 bp, Homo sapien
tggtggcataccttcgtgacccggt

SEQ ID NO: 3907562 - DNA, 25 bp, Homo sapien
ggaacaaataatctgtaactagttg

SEQ ID NO: 3907563 - DNA, 25 bp, Homo sapien
gaaggaacaaataatctgtaactag

SEQ ID NO: 3907564 - DNA, 25 bp, Homo sapien
acaaataatctgtaactagttgtga

SEQ ID NO: 3907565 - DNA, 25 bp, Homo sapien
gaacaaataatctgtaactagttgt

SEQ ID NO: 3907566 - DNA, 25 bp, Homo sapien
taaacataactgaccataccatcat

SEQ ID NO: 3907567 - DNA, 25 bp, Homo sapien
gaatatgttctcattccatgtgacc

SEQ ID NO: 3907568 - DNA, 25 bp, Homo sapien
tccatgtgaccagatacagtatact

SEQ ID NO: 3907569 - DNA, 25 bp, Homo sapien
tgtttttacactaaaatctaacaca

SEQ ID NO: 3907570 - DNA, 25 bp, Homo sapien
acaaagttaacagccatccgaaatg

SEQ ID NO: 3907571 - DNA, 25 bp, Homo sapien
tttcttttcagacccaagcacagaa

SEQ ID NO: 3907572 - DNA, 25 bp, Homo sapien
cagaggcagaacgtgcaatgaagac

SEQ ID NO: 3907573 - DNA, 25 bp, Homo sapien
ggaataagaatggactacatcttcc

SEQ ID NO: 3907574 - DNA, 25 bp, Homo sapien
tgatgtatcacgaatgtgttgtttt

SEQ ID NO: 3907575 - DNA, 25 bp, Homo sapien
tatatcctaaatttgatgtatcacg

SEQ ID NO: 3907576 - DNA, 25 bp, Homo sapien
tcctaaatttgatgtatcacgaatg

SEQ ID NO: 3907577 - DNA, 25 bp, Homo sapien
ctagcagttatatcctaaatttgat

SEQ ID NO: 3907578 - DNA, 25 bp, Homo sapien
ttcaagatggatcacagggccagac

SEQ ID NO: 3907579 - DNA, 25 bp, Homo sapien
tggctgcagcaactcggtaaagtgt

SEQ ID NO: 3907580 - DNA, 25 bp, Homo sapien
tggtaaaagttacagagcagtcttc

SEQ ID NO: 3907581 - DNA, 25 bp, Homo sapien
gacatataaacgaattggctgcagc

SEQ ID NO: 3907582 - DNA, 25 bp, Homo sapien
tcaggtggtaacttttaagccagga

SEQ ID NO: 3907583 - DNA, 25 bp, Homo sapien
gaatgttctgctttcaaaccaggcc

SEQ ID NO: 3907584 - DNA, 25 bp, Homo sapien
aatgttctgctttcaaaccaggccc

SEQ ID NO: 3907585 - DNA, 25 bp, Homo sapien
gttctgctttcaaaccaggcccctg

SEQ ID NO: 3907586 - DNA, 25 bp, Homo sapien
ccattaaataagcatctgttcacat

SEQ ID NO: 3907587 - DNA, 25 bp, Homo sapien
cattaaataagcatctgttcacatg

SEQ ID NO: 3907588 - DNA, 25 bp, Homo sapien
aaagaagccatcaaaatccattaaa

SEQ ID NO: 3907589 - DNA, 25 bp, Homo sapien
aacagaagaactgggcatctcatgc

SEQ ID NO: 3907590 - DNA, 25 bp, Homo sapien
cagaagaactgggcatctcatgcct

SEQ ID NO: 3907591 - DNA, 25 bp, Homo sapien
acagaagaactgggcatctcatgcc

SEQ ID NO: 3907592 - DNA, 25 bp, Homo sapien
ttaagaatcatagggtgggcatggt

SEQ ID NO: 3907593 - DNA, 25 bp, Homo sapien
ctgtcttgtccacttgaccaatggg

SEQ ID NO: 3907594 - DNA, 25 bp, Homo sapien
atggcatccgccatatgtcacagtt

SEQ ID NO: 3907595 - DNA, 25 bp, Homo sapien
tcttgtccacttgaccaatgggaca

SEQ ID NO: 3907596 - DNA, 25 bp, Homo sapien
catccgccatatgtcacagtttttg

SEQ ID NO: 3907597 - DNA, 25 bp, Homo sapien
ggaggcagaggttatcgtcagccga

SEQ ID NO: 3907598 - DNA, 25 bp, Homo sapien
ggcagaggttatcgtcagccgagat

SEQ ID NO: 3907599 - DNA, 25 bp, Homo sapien
gaggttatcgtcagccgagattgcg

SEQ ID NO: 3907600 - DNA, 25 bp, Homo sapien
cagaggttatcgtcagccgagattg

SEQ ID NO: 3907601 - DNA, 25 bp, Homo sapien
tatctactgtataaattccccttgg

SEQ ID NO: 3907602 - DNA, 25 bp, Homo sapien
gaatgtttcctcaaactacaaaaga

SEQ ID NO: 3907603 - DNA, 25 bp, Homo sapien
tttgtaaggaagacagctaccagta

SEQ ID NO: 3907604 - DNA, 25 bp, Homo sapien
ggagacactgcatctgaacaatcac

SEQ ID NO: 3907605 - DNA, 25 bp, Homo sapien
gctgatgtgcccctgatattggtca

SEQ ID NO: 3907606 - DNA, 25 bp, Homo sapien
gaaacttagtacagcagctgatgtg

SEQ ID NO: 3907607 - DNA, 25 bp, Homo sapien
tattggtcagacagaaatttcctca

SEQ ID NO: 3907608 - DNA, 25 bp, Homo sapien
tatttgaagaaacttagtacagcag

SEQ ID NO: 3907609 - DNA, 25 bp, Homo sapien
tttaagtgaaactaagttagtcaca

SEQ ID NO: 3907610 - DNA, 25 bp, Homo sapien
gaaactaagttagtcacacaacatt

SEQ ID NO: 3907611 - DNA, 25 bp, Homo sapien
tctttactatgagtttaagtgaaac

SEQ ID NO: 3907612 - DNA, 25 bp, Homo sapien
taagttagtcacacaacattatttc

SEQ ID NO: 3907613 - DNA, 25 bp, Homo sapien
ccaaaaaggatacataatagggcag

SEQ ID NO: 3907614 - DNA, 25 bp, Homo sapien
tttggataaatggatcaacctcttt

SEQ ID NO: 3907615 - DNA, 25 bp, Homo sapien
gcctacggctgcaaacacacatatt

SEQ ID NO: 3907616 - DNA, 25 bp, Homo sapien
aatagggcagacacagcctacggct

SEQ ID NO: 3907617 - DNA, 25 bp, Homo sapien
ggtctggctctatcacccaggttga

SEQ ID NO: 3907618 - DNA, 25 bp, Homo sapien
agtgcagtggcatgatctcagctca

SEQ ID NO: 3907619 - DNA, 25 bp, Homo sapien
catgatctcagctcactgcaacctc

SEQ ID NO: 3907620 - DNA, 25 bp, Homo sapien
caaggtctggctctatcacccaggt

SEQ ID NO: 3907621 - DNA, 25 bp, Homo sapien
gatgtctggaaggaacttaatcaaa

SEQ ID NO: 3907622 - DNA, 25 bp, Homo sapien
cccaccccaaaagcattactgtgat

SEQ ID NO: 3907623 - DNA, 25 bp, Homo sapien
tctcttctttagagtgacaaaaaca

SEQ ID NO: 3907624 - DNA, 25 bp, Homo sapien
tttactgaacgtgaaggtgggcttc

SEQ ID NO: 3907625 - DNA, 25 bp, Homo sapien
tttggcgaaccagagtcctcactgc

SEQ ID NO: 3907626 - DNA, 25 bp, Homo sapien
cacattttgagagggatgatcttcc

SEQ ID NO: 3907627 - DNA, 25 bp, Homo sapien
tgttttccagatccggcatgcttag

SEQ ID NO: 3907628 - DNA, 25 bp, Homo sapien
cactgccactaaagcttggtgactg

SEQ ID NO: 3907629 - DNA, 25 bp, Homo sapien
tctttgcagcgtaggatcaacgtgt

SEQ ID NO: 3907630 - DNA, 25 bp, Homo sapien
tatcaggagaatgtagctctatcaa

SEQ ID NO: 3907631 - DNA, 25 bp, Homo sapien
tgtggctgtatctttgcagcgtagg

SEQ ID NO: 3907632 - DNA, 25 bp, Homo sapien
ggatcaacgtgttcctgctatcagg

SEQ ID NO: 3907633 - DNA, 25 bp, Homo sapien
tgggaggagagccattatgttggtg

SEQ ID NO: 3907634 - DNA, 25 bp, Homo sapien
tatgttggtgtggatagctacgaac

SEQ ID NO: 3907635 - DNA, 25 bp, Homo sapien
gccattatgttggtgtggatagcta

SEQ ID NO: 3907636 - DNA, 25 bp, Homo sapien
gagagccattatgttggtgtggata

SEQ ID NO: 3907637 - DNA, 25 bp, Homo sapien
caagcatggcgttgagttcagccaa

SEQ ID NO: 3907638 - DNA, 25 bp, Homo sapien
caggcaatatgcttcacctctttac

SEQ ID NO: 3907639 - DNA, 25 bp, Homo sapien
tactggttgccccaagcatggcgtt

SEQ ID NO: 3907640 - DNA, 25 bp, Homo sapien
tgccccaagcatggcgttgagttca

SEQ ID NO: 3907641 - DNA, 25 bp, Homo sapien
cagttatggaagacaattgtacctc

SEQ ID NO: 3907642 - DNA, 25 bp, Homo sapien
gatgtaacataatgtcacacggaac

SEQ ID NO: 3907643 - DNA, 25 bp, Homo sapien
tactctccttttgtcaaacctggga

SEQ ID NO: 3907644 - DNA, 25 bp, Homo sapien
tgtacctctgtctaattgtaaagta

SEQ ID NO: 3907645 - DNA, 25 bp, Homo sapien
ttctgcctttgggtgaactcggctg

SEQ ID NO: 3907646 - DNA, 25 bp, Homo sapien
gattcatcaaagtagttctgccttt

SEQ ID NO: 3907647 - DNA, 25 bp, Homo sapien
ttagattcatcaaagtagttctgcc

SEQ ID NO: 3907648 - DNA, 25 bp, Homo sapien
ctttgggtgaactcggctgctcttc

SEQ ID NO: 3907649 - DNA, 25 bp, Homo sapien
tgtggcataaggctgtcaaagagta

SEQ ID NO: 3907650 - DNA, 25 bp, Homo sapien
gctgtggcataaggctgtcaaagag

SEQ ID NO: 3907651 - DNA, 25 bp, Homo sapien
tggcataaggctgtcaaagagtagg

SEQ ID NO: 3907652 - DNA, 25 bp, Homo sapien
cataaggctgtcaaagagtaggatt

SEQ ID NO: 3907653 - DNA, 25 bp, Homo sapien
gtccacggcatacagtcatagagca

SEQ ID NO: 3907654 - DNA, 25 bp, Homo sapien
caacaagtgggtagctgtggcatgg

SEQ ID NO: 3907655 - DNA, 25 bp, Homo sapien
gtcacagccatgaggacaggtctcc

SEQ ID NO: 3907656 - DNA, 25 bp, Homo sapien
catacagtcatagagcagcaaatcc

SEQ ID NO: 3907657 - DNA, 25 bp, Homo sapien
cagtagcatgctatcgcttacttag

SEQ ID NO: 3907658 - DNA, 25 bp, Homo sapien
tattaggaatcagtcttagtctctc

SEQ ID NO: 3907659 - DNA, 25 bp, Homo sapien
tatcccttgaagtacagtggtcttt

SEQ ID NO: 3907660 - DNA, 25 bp, Homo sapien
aatatgtggcacagaaagtttcagt

SEQ ID NO: 3907661 - DNA, 25 bp, Homo sapien
gtagaggatcattaagccccactta

SEQ ID NO: 3907662 - DNA, 25 bp, Homo sapien
ctcacttaaatctcaaacactccct

SEQ ID NO: 3907663 - DNA, 25 bp, Homo sapien
tctggttggtagaggatcattaagc

SEQ ID NO: 3907664 - DNA, 25 bp, Homo sapien
tctggtctggtttcatcttcttgtc

SEQ ID NO: 3907665 - DNA, 25 bp, Homo sapien
caaatgtaaggtcagatccaaggga

SEQ ID NO: 3907666 - DNA, 25 bp, Homo sapien
tggtagcaaatgtaaggtcagatcc

SEQ ID NO: 3907667 - DNA, 25 bp, Homo sapien
acatccggagccagaatgaaccaac

SEQ ID NO: 3907668 - DNA, 25 bp, Homo sapien
gatcgacatccggagccagaatgaa

SEQ ID NO: 3907669 - DNA, 25 bp, Homo sapien
ccgatgtgtctccaccctgaagaga

SEQ ID NO: 3907670 - DNA, 25 bp, Homo sapien
tgaacaagtatcctggtccaggatg

SEQ ID NO: 3907671 - DNA, 25 bp, Homo sapien
tctcaatgccctgtcgagagcctgt

SEQ ID NO: 3907672 - DNA, 25 bp, Homo sapien
aggatgacagatcccgatgtgtctc

SEQ ID NO: 3907673 - DNA, 25 bp, Homo sapien
aataaatagaagctcaaagctgctg

SEQ ID NO: 3907674 - DNA, 25 bp, Homo sapien
taaataaatagaagctcaaagctgc

SEQ ID NO: 3907675 - DNA, 25 bp, Homo sapien
aaataaatagaagctcaaagctgct

SEQ ID NO: 3907676 - DNA, 25 bp, Homo sapien
taagggcgcctatccacaacttaga

SEQ ID NO: 3907677 - DNA, 25 bp, Homo sapien
tatttgagtaagtgttgggcacaca

SEQ ID NO: 3907678 - DNA, 25 bp, Homo sapien
tatctagtacttggtaaatgagtcc

SEQ ID NO: 3907679 - DNA, 25 bp, Homo sapien
tcatgacaactaaccacaagagggc

SEQ ID NO: 3907680 - DNA, 25 bp, Homo sapien
gaccaccaaaatccaagtatagatt

SEQ ID NO: 3907681 - DNA, 25 bp, Homo sapien
tagcggtacaatatgctgctggagc

SEQ ID NO: 3907682 - DNA, 25 bp, Homo sapien
tagatttcggatgccatcatcagca

SEQ ID NO: 3907683 - DNA, 25 bp, Homo sapien
ttcatagtgaatagtaagcctcacc

SEQ ID NO: 3907684 - DNA, 25 bp, Homo sapien
agcagtcccatacgagtgactttgg

SEQ ID NO: 3907685 - DNA, 25 bp, Homo sapien
tcggcttcggacaagagtgcaggtc

SEQ ID NO: 3907686 - DNA, 25 bp, Homo sapien
gtgtgcaacacaaatacaatcggct

SEQ ID NO: 3907687 - DNA, 25 bp, Homo sapien
tggccgataaaaacgtgtgcaacac

SEQ ID NO: 3907688 - DNA, 25 bp, Homo sapien
aagtctactcctcaagcaggctggc

SEQ ID NO: 3907689 - DNA, 25 bp, Homo sapien
gctgtgaagccaatagtaagtctcg

SEQ ID NO: 3907690 - DNA, 25 bp, Homo sapien
aaaagcaggtagctgttccacggtc

SEQ ID NO: 3907691 - DNA, 25 bp, Homo sapien
tatttgcaggtccttgggaaggcac

SEQ ID NO: 3907692 - DNA, 25 bp, Homo sapien
ccagaaatcatttctggacgttcaa

SEQ ID NO: 3907693 - DNA, 25 bp, Homo sapien
gaaatcatttctggacgttcaagag

SEQ ID NO: 3907694 - DNA, 25 bp, Homo sapien
catttctggacgttcaagagatttt

SEQ ID NO: 3907695 - DNA, 25 bp, Homo sapien
gaaattctgattccagaaatcattt

SEQ ID NO: 3907696 - DNA, 25 bp, Homo sapien
tgctaatggacaaaggaaacctccc

SEQ ID NO: 3907697 - DNA, 25 bp, Homo sapien
taagaaccctacagacctcagtgct

SEQ ID NO: 3907698 - DNA, 25 bp, Homo sapien
aatgtggagaagctgtcgaagcccc

SEQ ID NO: 3907699 - DNA, 25 bp, Homo sapien
gaagctcccctgcaaatctcagtgg

SEQ ID NO: 3907700 - DNA, 25 bp, Homo sapien
cccgctttaacaggacccagataga

SEQ ID NO: 3907701 - DNA, 25 bp, Homo sapien
aacggattatgtgctactagagggc

SEQ ID NO: 3907702 - DNA, 25 bp, Homo sapien
gttgcctgaaaagctaaccctagag

SEQ ID NO: 3907703 - DNA, 25 bp, Homo sapien
cagaatgcctggtgtagaactatac

SEQ ID NO: 3907704 - DNA, 25 bp, Homo sapien
caagtgatccatttgtccacaagtc

SEQ ID NO: 3907705 - DNA, 25 bp, Homo sapien
cagaggcaagtgatccatttgtcca

SEQ ID NO: 3907706 - DNA, 25 bp, Homo sapien
gaggcaagtgatccatttgtccaca

SEQ ID NO: 3907707 - DNA, 25 bp, Homo sapien
tgatccatttgtccacaagtctatc

SEQ ID NO: 3907708 - DNA, 25 bp, Homo sapien
ggtcgggcccgagccgagcggctgc

SEQ ID NO: 3907709 - DNA, 25 bp, Homo sapien
agtccgagggcaagcgaggagcgca

SEQ ID NO: 3907710 - DNA, 25 bp, Homo sapien
gctcgcagcgggagccgagtccgag

SEQ ID NO: 3907711 - DNA, 25 bp, Homo sapien
aggagcgcagcccagagcggtcggg

SEQ ID NO: 3907712 - DNA, 25 bp, Homo sapien
ccgcggcgctgcttgcggcctcggt

SEQ ID NO: 3907713 - DNA, 25 bp, Homo sapien
gcggcgctgcttgcggcctcggtcc

SEQ ID NO: 3907714 - DNA, 25 bp, Homo sapien
cgcggcgctgcttgcggcctcggtc

SEQ ID NO: 3907715 - DNA, 25 bp, Homo sapien
ggagccgaggtactgggtccggcgc

SEQ ID NO: 3907716 - DNA, 25 bp, Homo sapien
ttcatctcctgggtccgccccacac

SEQ ID NO: 3907717 - DNA, 25 bp, Homo sapien
gctgccttcggcctccgaagtcggg

SEQ ID NO: 3907718 - DNA, 25 bp, Homo sapien
cgaagtcgggccgggccgcacgaag

SEQ ID NO: 3907719 - DNA, 25 bp, Homo sapien
gccccgctgccttcggcctccgaag

SEQ ID NO: 3907720 - DNA, 25 bp, Homo sapien
ccgctgccttcggcctccgaagtcg

SEQ ID NO: 3907721 - DNA, 25 bp, Homo sapien
aaggaccacctattgtatgactctg

SEQ ID NO: 3907722 - DNA, 25 bp, Homo sapien
ggtttctctgtaggcaaacccacag

SEQ ID NO: 3907723 - DNA, 25 bp, Homo sapien
taagtcataatgaaagaagctagcc

SEQ ID NO: 3907724 - DNA, 25 bp, Homo sapien
aatgtaaaaacctatgacattatgt

SEQ ID NO: 3907725 - DNA, 25 bp, Homo sapien
aaggctttgaaaaccagccggccat

SEQ ID NO: 3907726 - DNA, 25 bp, Homo sapien
tttttcaacatcggctagaaaggcc

SEQ ID NO: 3907727 - DNA, 25 bp, Homo sapien
ttttcaacatcggctagaaaggcct

SEQ ID NO: 3907728 - DNA, 25 bp, Homo sapien
tgcttcctcggagaggtggaaagtc

SEQ ID NO: 3907729 - DNA, 25 bp, Homo sapien
cagtgcttcctcggagaggtggaaa

SEQ ID NO: 3907730 - DNA, 25 bp, Homo sapien
agtgcttcctcggagaggtggaaag

SEQ ID NO: 3907731 - DNA, 25 bp, Homo sapien
tcagtgcttcctcggagaggtggaa

SEQ ID NO: 3907732 - DNA, 25 bp, Homo sapien
tgatagcgtggaggaagtactccac

SEQ ID NO: 3907733 - DNA, 25 bp, Homo sapien
gtggctttcgtcaccagatcaatgg

SEQ ID NO: 3907734 - DNA, 25 bp, Homo sapien
gcctcctcgtagttcttggctttgt

SEQ ID NO: 3907735 - DNA, 25 bp, Homo sapien
tggaggaagtactccaccgcatgct

SEQ ID NO: 3907736 - DNA, 25 bp, Homo sapien
gcccctgtgaggctcgtgcgccacc

SEQ ID NO: 3907737 - DNA, 25 bp, Homo sapien
cccctctggagtgcggcagcctgag

SEQ ID NO: 3907738 - DNA, 25 bp, Homo sapien
gcctgaggacccctcgtgtgactca

SEQ ID NO: 3907739 - DNA, 25 bp, Homo sapien
tgtgaggctcgtgcgccaccccctc

SEQ ID NO: 3907740 - DNA, 25 bp, Homo sapien
ttctcggcccggtctaggtactgca

SEQ ID NO: 3907741 - DNA, 25 bp, Homo sapien
gactggcttcttgccgtgtttctct

SEQ ID NO: 3907742 - DNA, 25 bp, Homo sapien
ctttgcttcgtaaataatccttcag

SEQ ID NO: 3907743 - DNA, 25 bp, Homo sapien
gcacttggctcgaatgctctccttg

SEQ ID NO: 3907744 - DNA, 25 bp, Homo sapien
ttgcagtttctttttctccggatta

SEQ ID NO: 3907745 - DNA, 25 bp, Homo sapien
catcagctgttcttgcagtttcttt

SEQ ID NO: 3907746 - DNA, 25 bp, Homo sapien
tttctccggattatccccttcactg

SEQ ID NO: 3907747 - DNA, 25 bp, Homo sapien
ccatcagctgttcttgcagtttctt

SEQ ID NO: 3907748 - DNA, 25 bp, Homo sapien
cggccacgtcgttccaccgtatgtt

SEQ ID NO: 3907749 - DNA, 25 bp, Homo sapien
cacgtcgttccaccgtatgttgggc

SEQ ID NO: 3907750 - DNA, 25 bp, Homo sapien
gttgggcttctccatcacgacggca

SEQ ID NO: 3907751 - DNA, 25 bp, Homo sapien
tccaccgtatgttgggcttctccat

SEQ ID NO: 3907752 - DNA, 25 bp, Homo sapien
caagtgtgggaatttgattggcaaa

SEQ ID NO: 3907753 - DNA, 25 bp, Homo sapien
tgtgggaatttgattggcaaaatga

SEQ ID NO: 3907754 - DNA, 25 bp, Homo sapien
gaacaagtgtgggaatttgattggc

SEQ ID NO: 3907755 - DNA, 25 bp, Homo sapien
ctgtgaacaagtgtgggaatttgat

SEQ ID NO: 3907756 - DNA, 25 bp, Homo sapien
aggtggagttgttggcctctgttgc

SEQ ID NO: 3907757 - DNA, 25 bp, Homo sapien
gccacttggacatcagatctgagga

SEQ ID NO: 3907758 - DNA, 25 bp, Homo sapien
cctgtgccagggggtccgaacagca

SEQ ID NO: 3907759 - DNA, 25 bp, Homo sapien
gctttggccaggtaggatttccctg

SEQ ID NO: 3907760 - DNA, 25 bp, Homo sapien
cgttttgatcctccgggcggcctca

SEQ ID NO: 3907761 - DNA, 25 bp, Homo sapien
tggaccaagaactccgttttgatcc

SEQ ID NO: 3907762 - DNA, 25 bp, Homo sapien
cagctcaaacaggttcttgaccagc

SEQ ID NO: 3907763 - DNA, 25 bp, Homo sapien
agggaatccacctcatcgatgaaga

SEQ ID NO: 3907764 - DNA, 25 bp, Homo sapien
caacacccatgggatgtttgtggct

SEQ ID NO: 3907765 - DNA, 25 bp, Homo sapien
gatgtttgtggctccaagaaccaga

SEQ ID NO: 3907766 - DNA, 25 bp, Homo sapien
tgatggccgaatccaacacccatgg

SEQ ID NO: 3907767 - DNA, 25 bp, Homo sapien
accagagtcccatcattgttattcc

SEQ ID NO: 3907768 - DNA, 25 bp, Homo sapien
gccagcagcaggcggaccgtgacca

SEQ ID NO: 3907769 - DNA, 25 bp, Homo sapien
agcaggcggaccgtgaccatggtgg

SEQ ID NO: 3907770 - DNA, 25 bp, Homo sapien
ggcggaccgtgaccatggtgggagg

SEQ ID NO: 3907771 - DNA, 25 bp, Homo sapien
cagcagcaggcggaccgtgaccatg

SEQ ID NO: 3907772 - DNA, 25 bp, Homo sapien
gatgcaaccggaacatctgggcgcg

SEQ ID NO: 3907773 - DNA, 25 bp, Homo sapien
ccgggccagctcgtggatgtttgca

SEQ ID NO: 3907774 - DNA, 25 bp, Homo sapien
atgatgctgatgtccgcgcccgagt

SEQ ID NO: 3907775 - DNA, 25 bp, Homo sapien
gcatgagagagtcccgcacgatgat

SEQ ID NO: 3907776 - DNA, 25 bp, Homo sapien
tctgtgggtccctagcatctgagga

SEQ ID NO: 3907777 - DNA, 25 bp, Homo sapien
tggttttccaactgaagtccgctgc

SEQ ID NO: 3907778 - DNA, 25 bp, Homo sapien
aggacgggctccttcagaactcggg

SEQ ID NO: 3907779 - DNA, 25 bp, Homo sapien
ggccgcagcagggttaagacagtaa

SEQ ID NO: 3907780 - DNA, 25 bp, Homo sapien
tcaggaggtcatcaatcatcatgct

SEQ ID NO: 3907781 - DNA, 25 bp, Homo sapien
cccctggtgagcatggagtcaggag

SEQ ID NO: 3907782 - DNA, 25 bp, Homo sapien
aaaccacaggctctaagagtttgtc

SEQ ID NO: 3907783 - DNA, 25 bp, Homo sapien
gagtttgtccccagggacatccatc

SEQ ID NO: 3907784 - DNA, 25 bp, Homo sapien
ttccctcccctgtcaagtcacttac

SEQ ID NO: 3907785 - DNA, 25 bp, Homo sapien
tggagaagaccgtttttattctgga

SEQ ID NO: 3907786 - DNA, 25 bp, Homo sapien
ccaaaccctcaattttctgggctct

SEQ ID NO: 3907787 - DNA, 25 bp, Homo sapien
ctggcctggagaagaccgtttttat

SEQ ID NO: 3907788 - DNA, 25 bp, Homo sapien
gcttccctgagctacaaaggccatt

SEQ ID NO: 3907789 - DNA, 25 bp, Homo sapien
gcaacactgtgaggccgtttctaaa

SEQ ID NO: 3907790 - DNA, 25 bp, Homo sapien
gccaaacccatggattgacgtcata

SEQ ID NO: 3907791 - DNA, 25 bp, Homo sapien
tgtgagctcgtgaggtcaagcctgc

SEQ ID NO: 3907792 - DNA, 25 bp, Homo sapien
cagcacacaacaggcgcagctgagg

SEQ ID NO: 3907793 - DNA, 25 bp, Homo sapien
tcccctcagcacacaacaggcgcag

SEQ ID NO: 3907794 - DNA, 25 bp, Homo sapien
cttgaatctgcctatggcagggacc

SEQ ID NO: 3907795 - DNA, 25 bp, Homo sapien
cacaacaggcgcagctgagggtggg

SEQ ID NO: 3907796 - DNA, 25 bp, Homo sapien
cttcactttcaggaggtcgtctgca

SEQ ID NO: 3907797 - DNA, 25 bp, Homo sapien
tctgcattcaccgtgggccgggtgg

SEQ ID NO: 3907798 - DNA, 25 bp, Homo sapien
ctcttgcccaaagtcctctgagaat

SEQ ID NO: 3907799 - DNA, 25 bp, Homo sapien
tggtggccagagaccgcagcatgtc

SEQ ID NO: 3907800 - DNA, 25 bp, Homo sapien
ttcaccattgcccaagtgaagcagc

SEQ ID NO: 3907801 - DNA, 25 bp, Homo sapien
tcaccattgcccaagtgaagcagct

SEQ ID NO: 3907802 - DNA, 25 bp, Homo sapien
caccattgcccaagtgaagcagctt

SEQ ID NO: 3907803 - DNA, 25 bp, Homo sapien
cttcaccattgcccaagtgaagcag

SEQ ID NO: 3907804 - DNA, 25 bp, Homo sapien
tctgtattgactgggacaagccctg

SEQ ID NO: 3907805 - DNA, 25 bp, Homo sapien
tgggaatggcttatgtcactcggtc

SEQ ID NO: 3907806 - DNA, 25 bp, Homo sapien
ggagtgcctggatttgccccaatca

SEQ ID NO: 3907807 - DNA, 25 bp, Homo sapien
gactgccttaccctgatctaaacga

SEQ ID NO: 3907808 - DNA, 25 bp, Homo sapien
aaaggatttattagaccatttccag

SEQ ID NO: 3907809 - DNA, 25 bp, Homo sapien
gatttattagaccatttccaggaca

SEQ ID NO: 3907810 - DNA, 25 bp, Homo sapien
ggatttattagaccatttccaggac

SEQ ID NO: 3907811 - DNA, 25 bp, Homo sapien
aggatttattagaccatttccagga

SEQ ID NO: 3907812 - DNA, 25 bp, Homo sapien
aagcaagggtggcccttcagagtct

SEQ ID NO: 3907813 - DNA, 25 bp, Homo sapien
agagggtcttttaattggaagcaag

SEQ ID NO: 3907814 - DNA, 25 bp, Homo sapien
gcaagggtggcccttcagagtctca

SEQ ID NO: 3907815 - DNA, 25 bp, Homo sapien
cagagtctcagttaagagtcaagga

SEQ ID NO: 3907816 - DNA, 25 bp, Homo sapien
tataagcttcatttactaggccagg

SEQ ID NO: 3907817 - DNA, 25 bp, Homo sapien
gacttttaaatgttagcggcagacc

SEQ ID NO: 3907818 - DNA, 25 bp, Homo sapien
taactagagcacagggatggaccat

SEQ ID NO: 3907819 - DNA, 25 bp, Homo sapien
ttcatatcctggtggctgagggcac

SEQ ID NO: 3907820 - DNA, 25 bp, Homo sapien
catttggacaatgttcagaagctct

SEQ ID NO: 3907821 - DNA, 25 bp, Homo sapien
ttaacgcttttgtggtgggcatcgg

SEQ ID NO: 3907822 - DNA, 25 bp, Homo sapien
ccagatactggtgcaaggtcagaga

SEQ ID NO: 3907823 - DNA, 25 bp, Homo sapien
ttcagctgagcctcctttcatttgg

SEQ ID NO: 3907824 - DNA, 25 bp, Homo sapien
taggaagtccattaagctgtttaga

SEQ ID NO: 3907825 - DNA, 25 bp, Homo sapien
aagtaggtattcttgctgaacagag

SEQ ID NO: 3907826 - DNA, 25 bp, Homo sapien
ggatcagttgtgagccacactaccc

SEQ ID NO: 3907827 - DNA, 25 bp, Homo sapien
caaactatacaagtagtaggaagtc

SEQ ID NO: 3907828 - DNA, 25 bp, Homo sapien
tatcacagcaaccaatgtgtaggtt

SEQ ID NO: 3907829 - DNA, 25 bp, Homo sapien
gggtgacaattgagaagtgcactga

SEQ ID NO: 3907830 - DNA, 25 bp, Homo sapien
taacaattgggcatagaaagcagga

SEQ ID NO: 3907831 - DNA, 25 bp, Homo sapien
gaaagcaggattagtacttcctggt

SEQ ID NO: 3907832 - DNA, 25 bp, Homo sapien
cattggctacctgcggcgcatggac

SEQ ID NO: 3907833 - DNA, 25 bp, Homo sapien
tgtcattggctacctgcggcgcatg

SEQ ID NO: 3907834 - DNA, 25 bp, Homo sapien
tcattggctacctgcggcgcatgga

SEQ ID NO: 3907835 - DNA, 25 bp, Homo sapien
ttggctacctgcggcgcatggacgt

SEQ ID NO: 3907836 - DNA, 25 bp, Homo sapien
taggtagggtgatcaagaaggactc

SEQ ID NO: 3907837 - DNA, 25 bp, Homo sapien
cagcttacgtgctaatgggaagtct

SEQ ID NO: 3907838 - DNA, 25 bp, Homo sapien
tgtgaataaagtggtcctggctctc

SEQ ID NO: 3907839 - DNA, 25 bp, Homo sapien
ttaagctgagacctaaatgagaagg

SEQ ID NO: 3907840 - DNA, 25 bp, Homo sapien
catagagaccggaaatgtgcctgtt

SEQ ID NO: 3907841 - DNA, 25 bp, Homo sapien
aatagttcgtctcgctagcgcccaa

SEQ ID NO: 3907842 - DNA, 25 bp, Homo sapien
tgggttggaacaccggatcctcgtg

SEQ ID NO: 3907843 - DNA, 25 bp, Homo sapien
tagcgcccaatagtctggacgaccg

SEQ ID NO: 3907844 - DNA, 25 bp, Homo sapien
tctcctcttcagtcaaaggccgcat

SEQ ID NO: 3907845 - DNA, 25 bp, Homo sapien
aacatgacacgggtctcctcttcag

SEQ ID NO: 3907846 - DNA, 25 bp, Homo sapien
ttctcaaacatgacacgggtctcct

SEQ ID NO: 3907847 - DNA, 25 bp, Homo sapien
tatttcgctatcttctcaaacatga

SEQ ID NO: 3907848 - DNA, 25 bp, Homo sapien
ggactggagaccgcgcccgaacgaa

SEQ ID NO: 3907849 - DNA, 25 bp, Homo sapien
ctggagaccgcgcccgaacgaaccg

SEQ ID NO: 3907850 - DNA, 25 bp, Homo sapien
aggactggagaccgcgcccgaacga

SEQ ID NO: 3907851 - DNA, 25 bp, Homo sapien
gactggagaccgcgcccgaacgaac

SEQ ID NO: 3907852 - DNA, 25 bp, Homo sapien
agtaggtgccatcgggccggtccac

SEQ ID NO: 3907853 - DNA, 25 bp, Homo sapien
tgtgcagacggaaacagtaggtgcc

SEQ ID NO: 3907854 - DNA, 25 bp, Homo sapien
acggaaacagtaggtgccatcgggc

SEQ ID NO: 3907855 - DNA, 25 bp, Homo sapien
cagcagttgaagattctccccaatg

SEQ ID NO: 3907856 - DNA, 25 bp, Homo sapien
ggatgaaggaggctcgtgggaccca

SEQ ID NO: 3907857 - DNA, 25 bp, Homo sapien
gaaggaggctcgtgggacccaggac

SEQ ID NO: 3907858 - DNA, 25 bp, Homo sapien
gggagcaaggttgcggatgaaggag

SEQ ID NO: 3907859 - DNA, 25 bp, Homo sapien
atgaaggaggctcgtgggacccagg

SEQ ID NO: 3907860 - DNA, 25 bp, Homo sapien
cccggaaatattggcggccagcttc

SEQ ID NO: 3907861 - DNA, 25 bp, Homo sapien
ttgtccccggaaatattggcggcca

SEQ ID NO: 3907862 - DNA, 25 bp, Homo sapien
gagctgtgacgtgcaaccgaaactt

SEQ ID NO: 3907863 - DNA, 25 bp, Homo sapien
agagctgtgacgtgcaaccgaaact

SEQ ID NO: 3907864 - DNA, 25 bp, Homo sapien
aaactcctccaagcacactgtcagg

SEQ ID NO: 3907865 - DNA, 25 bp, Homo sapien
gaagctgccggacaatctgcctaat

SEQ ID NO: 3907866 - DNA, 25 bp, Homo sapien
tgatctctagctgggtctccctagg

SEQ ID NO: 3907867 - DNA, 25 bp, Homo sapien
taatccttgacttcatcgcccgtgg

SEQ ID NO: 3907868 - DNA, 25 bp, Homo sapien
gcaccaggctttatccaaactttat

SEQ ID NO: 3907869 - DNA, 25 bp, Homo sapien
tattttcagtgattcgacccagacc

SEQ ID NO: 3907870 - DNA, 25 bp, Homo sapien
ccacgccctggtactgagaagtatt

SEQ ID NO: 3907871 - DNA, 25 bp, Homo sapien
ggttcccatacaggaaggactgctc

SEQ ID NO: 3907872 - DNA, 25 bp, Homo sapien
tcttgaataagagtacttgagttct

SEQ ID NO: 3907873 - DNA, 25 bp, Homo sapien
tgtaacagctaccatctctactcac

SEQ ID NO: 3907874 - DNA, 25 bp, Homo sapien
tacttgagttctgtaacagctacca

SEQ ID NO: 3907875 - DNA, 25 bp, Homo sapien
gagaatttattctctcaagcactca

SEQ ID NO: 3907876 - DNA, 25 bp, Homo sapien
aatcgccatggggtctacttttctg

SEQ ID NO: 3907877 - DNA, 25 bp, Homo sapien
taccacaatcgccatggggtctact

SEQ ID NO: 3907878 - DNA, 25 bp, Homo sapien
cacaatcgccatggggtctactttt

SEQ ID NO: 3907879 - DNA, 25 bp, Homo sapien
atcgccatggggtctacttttctgc

SEQ ID NO: 3907880 - DNA, 25 bp, Homo sapien
tcatgccgcacatattccccaatgt

SEQ ID NO: 3907881 - DNA, 25 bp, Homo sapien
ttcatgccgcacatattccccaatg

SEQ ID NO: 3907882 - DNA, 25 bp, Homo sapien
gccgtctgtccttggaatggcttcg

SEQ ID NO: 3907883 - DNA, 25 bp, Homo sapien
aagctcggcctttccatacagccgt

SEQ ID NO: 3907884 - DNA, 25 bp, Homo sapien
gaagccctctgattcaaatatgaaa

SEQ ID NO: 3907885 - DNA, 25 bp, Homo sapien
acagtattctatttcgtcacaaaga

SEQ ID NO: 3907886 - DNA, 25 bp, Homo sapien
tagcgtcatcccatccaagaaaaat

SEQ ID NO: 3907887 - DNA, 25 bp, Homo sapien
gaatgactcattcaaggccatatag

SEQ ID NO: 3907888 - DNA, 25 bp, Homo sapien
tgaatttttatgtcgtggcctctga

SEQ ID NO: 3907889 - DNA, 25 bp, Homo sapien
gtccaatccagtcaagtaagtaaag

SEQ ID NO: 3907890 - DNA, 25 bp, Homo sapien
taactacgtgaactggtggtcgaca

SEQ ID NO: 3907891 - DNA, 25 bp, Homo sapien
tgtggcgatactacaactttgcccg

SEQ ID NO: 3907892 - DNA, 25 bp, Homo sapien
taaggtgactatagcaccctggctg

SEQ ID NO: 3907893 - DNA, 25 bp, Homo sapien
tttgcccggatgaggaaaatggctg

SEQ ID NO: 3907894 - DNA, 25 bp, Homo sapien
agacaaagtcttgtgctgtcggcca

SEQ ID NO: 3907895 - DNA, 25 bp, Homo sapien
tgagacaaagtcttgtgctgtcggc

SEQ ID NO: 3907896 - DNA, 25 bp, Homo sapien
acaaagtcttgtgctgtcggccagg

SEQ ID NO: 3907897 - DNA, 25 bp, Homo sapien
caaagtcttgtgctgtcggccaggc

SEQ ID NO: 3907898 - DNA, 25 bp, Homo sapien
ggttctgtgcaagtgtacctcaact

SEQ ID NO: 3907899 - DNA, 25 bp, Homo sapien
gaatgatactctggatgcaattgag

SEQ ID NO: 3907900 - DNA, 25 bp, Homo sapien
ttgtctaagtaatcagcataatcac

SEQ ID NO: 3907901 - DNA, 25 bp, Homo sapien
gggcctgagactgatcacaaacaga

SEQ ID NO: 3907902 - DNA, 25 bp, Homo sapien
ggccagattaacttctctacccaag

SEQ ID NO: 3907903 - DNA, 25 bp, Homo sapien
gattaacttctctacccaagagaca

SEQ ID NO: 3907904 - DNA, 25 bp, Homo sapien
cctcccagggtgttcggggccagat

SEQ ID NO: 3907905 - DNA, 25 bp, Homo sapien
tcccagggtgttcggggccagatta

SEQ ID NO: 3907906 - DNA, 25 bp, Homo sapien
gaggtgggtgttgaaatcatgaata

SEQ ID NO: 3907907 - DNA, 25 bp, Homo sapien
caggtgtgcttgtgggagcgtgagc

SEQ ID NO: 3907908 - DNA, 25 bp, Homo sapien
ccttgcagggctattgtgagaataa

SEQ ID NO: 3907909 - DNA, 25 bp, Homo sapien
gatgcaggtaaatcttagctcagtg

SEQ ID NO: 3907910 - DNA, 25 bp, Homo sapien
ttctcctaggaaatggtgaagtcta

SEQ ID NO: 3907911 - DNA, 25 bp, Homo sapien
gagaattttgggcaacctccttcga

SEQ ID NO: 3907912 - DNA, 25 bp, Homo sapien
cagcttgtgcagtgccagaatatca

SEQ ID NO: 3907913 - DNA, 25 bp, Homo sapien
gatcatggagctaagaagcagagcc

SEQ ID NO: 3907914 - DNA, 25 bp, Homo sapien
tggggacatgagttagcagttgtca

SEQ ID NO: 3907915 - DNA, 25 bp, Homo sapien
ggggacatgagttagcagttgtcag

SEQ ID NO: 3907916 - DNA, 25 bp, Homo sapien
acatgagttagcagttgtcagatac

SEQ ID NO: 3907917 - DNA, 25 bp, Homo sapien
catgagttagcagttgtcagatact

SEQ ID NO: 3907918 - DNA, 25 bp, Homo sapien
aagtccagtggatgactctagtcct

SEQ ID NO: 3907919 - DNA, 25 bp, Homo sapien
gtggatgactctagtcctttaaaag

SEQ ID NO: 3907920 - DNA, 25 bp, Homo sapien
tggttcctaagtccagtggatgact

SEQ ID NO: 3907921 - DNA, 25 bp, Homo sapien
ccagtggatgactctagtcctttaa

SEQ ID NO: 3907922 - DNA, 25 bp, Homo sapien
cctatctggcctcagcaggattttc

SEQ ID NO: 3907923 - DNA, 25 bp, Homo sapien
tgtgttcccatattgcacagtctgg

SEQ ID NO: 3907924 - DNA, 25 bp, Homo sapien
gactggctaattctaaaacatatgg

SEQ ID NO: 3907925 - DNA, 25 bp, Homo sapien
ttttctatagatacagactggctaa

SEQ ID NO: 3907926 - DNA, 25 bp, Homo sapien
aatgtgacagattaagaaaagttta

SEQ ID NO: 3907927 - DNA, 25 bp, Homo sapien
tcagcttcgtatgtgtataaagcca

SEQ ID NO: 3907928 - DNA, 25 bp, Homo sapien
gaatcaaacaagaatagccacagtt

SEQ ID NO: 3907929 - DNA, 25 bp, Homo sapien
aaagtttacttactgcagtttcgtg

SEQ ID NO: 3907930 - DNA, 25 bp, Homo sapien
tagagttgcatgctgaactagctgc

SEQ ID NO: 3907931 - DNA, 25 bp, Homo sapien
ggaatactattttacctgaagaaca

SEQ ID NO: 3907932 - DNA, 25 bp, Homo sapien
aaacctgtcacataaaacaagtgac

SEQ ID NO: 3907933 - DNA, 25 bp, Homo sapien
aacttgtattcatgtgcttgatagc

SEQ ID NO: 3907934 - DNA, 25 bp, Homo sapien
atagcaaagacagaaggacacggcc

SEQ ID NO: 3907935 - DNA, 25 bp, Homo sapien
gaagaaagcatcaatcccaacgtgt

SEQ ID NO: 3907936 - DNA, 25 bp, Homo sapien
cagccaggatgaatctgagagctca

SEQ ID NO: 3907937 - DNA, 25 bp, Homo sapien
gacacggccctggttgtattcccac

SEQ ID NO: 3907938 - DNA, 25 bp, Homo sapien
ctactcttggagagaagtaacataa

SEQ ID NO: 3907939 - DNA, 25 bp, Homo sapien
tctactcttggagagaagtaacata

SEQ ID NO: 3907940 - DNA, 25 bp, Homo sapien
tcttacaagaattcagtgaggcagg

SEQ ID NO: 3907941 - DNA, 25 bp, Homo sapien
gccaagtcttggaaacatgcctgat

SEQ ID NO: 3907942 - DNA, 25 bp, Homo sapien
gagtgacccagtccaaagcatctgc

SEQ ID NO: 3907943 - DNA, 25 bp, Homo sapien
gaaccagagctgcaagggtgtttga

SEQ ID NO: 3907944 - DNA, 25 bp, Homo sapien
gttggctccagaatagcattgcctc

SEQ ID NO: 3907945 - DNA, 25 bp, Homo sapien
tgttggctccagaatagcattgcct

SEQ ID NO: 3907946 - DNA, 25 bp, Homo sapien
cagtcttgagtcacatatgggcatc

SEQ ID NO: 3907947 - DNA, 25 bp, Homo sapien
gagccaagctcatttatagggaaca

SEQ ID NO: 3907948 - DNA, 25 bp, Homo sapien
tgatatgagctgcatagagccaagc

SEQ ID NO: 3907949 - DNA, 25 bp, Homo sapien
tgtagtcatgaaccgaagccatagc

SEQ ID NO: 3907950 - DNA, 25 bp, Homo sapien
ggagcacataccattagtgagcaca

SEQ ID NO: 3907951 - DNA, 25 bp, Homo sapien
cacataccattagtgagcacaatgg

SEQ ID NO: 3907952 - DNA, 25 bp, Homo sapien
gcacataccattagtgagcacaatg

SEQ ID NO: 3907953 - DNA, 25 bp, Homo sapien
gagcacataccattagtgagcacaa

SEQ ID NO: 3907954 - DNA, 25 bp, Homo sapien
ccccgctctggagcacagatcctct

SEQ ID NO: 3907955 - DNA, 25 bp, Homo sapien
ttcagtgcttccagaccgctgaagc

SEQ ID NO: 3907956 - DNA, 25 bp, Homo sapien
agtgcttccagaccgctgaagccca

SEQ ID NO: 3907957 - DNA, 25 bp, Homo sapien
ttccagaccgctgaagcccacacgc

SEQ ID NO: 3907958 - DNA, 25 bp, Homo sapien
ctgtagagggcccagcatatcacag

SEQ ID NO: 3907959 - DNA, 25 bp, Homo sapien
agagggcccagcatatcacagagga

SEQ ID NO: 3907960 - DNA, 25 bp, Homo sapien
gtagagggcccagcatatcacagag

SEQ ID NO: 3907961 - DNA, 25 bp, Homo sapien
tcactgtagagggcccagcatatca

SEQ ID NO: 3907962 - DNA, 25 bp, Homo sapien
cagggcccataaggccttgagacgg

SEQ ID NO: 3907963 - DNA, 25 bp, Homo sapien
actttccttgagagcccgcgctcag

SEQ ID NO: 3907964 - DNA, 25 bp, Homo sapien
cttgagacggttcctagcaacagcc

SEQ ID NO: 3907965 - DNA, 25 bp, Homo sapien
tccaccgctaactgagattccgcga

SEQ ID NO: 3907966 - DNA, 25 bp, Homo sapien
caaggagttgcgctttgccacctcc

SEQ ID NO: 3907967 - DNA, 25 bp, Homo sapien
cacaagccacagttccttcaaggag

SEQ ID NO: 3907968 - DNA, 25 bp, Homo sapien
gaagcgggtgacatcgtagactcgc

SEQ ID NO: 3907969 - DNA, 25 bp, Homo sapien
gtagactcgcccatggatcacaagc

SEQ ID NO: 3907970 - DNA, 25 bp, Homo sapien
tggcctcaaggtcaactcagattag

SEQ ID NO: 3907971 - DNA, 25 bp, Homo sapien
tacataaggcaccagaactcggagc

SEQ ID NO: 3907972 - DNA, 25 bp, Homo sapien
taagctgctaactctatggccctga

SEQ ID NO: 3907973 - DNA, 25 bp, Homo sapien
gatgtgggtgcacttcagacctagg

SEQ ID NO: 3907974 - DNA, 25 bp, Homo sapien
cataaaatgccatacaccatacaaa

SEQ ID NO: 3907975 - DNA, 25 bp, Homo sapien
tgccatacaccatacaaatgcaaga

SEQ ID NO: 3907976 - DNA, 25 bp, Homo sapien
caccgcgcccgaccggaaagcactt

SEQ ID NO: 3907977 - DNA, 25 bp, Homo sapien
aaatgccatacaccatacaaatgca

SEQ ID NO: 3907978 - DNA, 25 bp, Homo sapien
ccagaagtcatagctaaggctagaa

SEQ ID NO: 3907979 - DNA, 25 bp, Homo sapien
accagaagtcatagctaaggctaga

SEQ ID NO: 3907980 - DNA, 25 bp, Homo sapien
agctaaggctagaattttgaagtaa

SEQ ID NO: 3907981 - DNA, 25 bp, Homo sapien
agtcatagctaaggctagaattttg

SEQ ID NO: 3907982 - DNA, 25 bp, Homo sapien
ctttgtatttttagaagagatgggg

SEQ ID NO: 3907983 - DNA, 25 bp, Homo sapien
ctgccaccacacgtggctaactttg

SEQ ID NO: 3907984 - DNA, 25 bp, Homo sapien
aagagatggggtttcactatgttgg

SEQ ID NO: 3907985 - DNA, 25 bp, Homo sapien
agccacagcacctggccaaccacac

SEQ ID NO: 3907986 - DNA, 25 bp, Homo sapien
cactaggcccgaggctatagcaggg

SEQ ID NO: 3907987 - DNA, 25 bp, Homo sapien
tacatgttcatcctggtacagagcg

SEQ ID NO: 3907988 - DNA, 25 bp, Homo sapien
gaaaatcaaatggatgcagggctgc

SEQ ID NO: 3907989 - DNA, 25 bp, Homo sapien
tgcccaggctgaggagcatacgaag

SEQ ID NO: 3907990 - DNA, 25 bp, Homo sapien
cggatggatatcaccaatgtagtac

SEQ ID NO: 3907991 - DNA, 25 bp, Homo sapien
ggatatcaccaatgtagtactgctt

SEQ ID NO: 3907992 - DNA, 25 bp, Homo sapien
gatggatatcaccaatgtagtactg

SEQ ID NO: 3907993 - DNA, 25 bp, Homo sapien
atcaccaatgtagtactgctttagc

SEQ ID NO: 3907994 - DNA, 25 bp, Homo sapien
ctctgcataagggctcccatctctg

SEQ ID NO: 3907995 - DNA, 25 bp, Homo sapien
gttttctctgcataagggctcccat

SEQ ID NO: 3907996 - DNA, 25 bp, Homo sapien
ttctctgcataagggctcccatctc

SEQ ID NO: 3907997 - DNA, 25 bp, Homo sapien
ttttctctgcataagggctcccatc

SEQ ID NO: 3907998 - DNA, 25 bp, Homo sapien
ggaacatgagactatattctggtga

SEQ ID NO: 3907999 - DNA, 25 bp, Homo sapien
gaaagatacctctactctgagcata

SEQ ID NO: 3908000 - DNA, 25 bp, Homo sapien
tagtgaattccctgggagatttgag

SEQ ID NO: 3908001 - DNA, 25 bp, Homo sapien
cagagtcccttgttagaatggtata

SEQ ID NO: 3908002 - DNA, 25 bp, Homo sapien
cttgctaccactttcaggtttaagg

SEQ ID NO: 3908003 - DNA, 25 bp, Homo sapien
tgctaccactttcaggtttaaggtc

SEQ ID NO: 3908004 - DNA, 25 bp, Homo sapien
gctaccactttcaggtttaaggtca

SEQ ID NO: 3908005 - DNA, 25 bp, Homo sapien
tattcctgagatgatactgagtcca

SEQ ID NO: 3908006 - DNA, 25 bp, Homo sapien
cacacagggcatagctttggagttt

SEQ ID NO: 3908007 - DNA, 25 bp, Homo sapien
taaacacaagacaaaccgctgactt

SEQ ID NO: 3908008 - DNA, 25 bp, Homo sapien
gaaaataagtacagaaaggcctctg

SEQ ID NO: 3908009 - DNA, 25 bp, Homo sapien
gtcttttgttttcgctgtattacta

SEQ ID NO: 3908010 - DNA, 25 bp, Homo sapien
tagtcttttgttttcgctgtattac

SEQ ID NO: 3908011 - DNA, 25 bp, Homo sapien
cttttgttttcgctgtattactaag

SEQ ID NO: 3908012 - DNA, 25 bp, Homo sapien
tttgttttcgctgtattactaagta

SEQ ID NO: 3908013 - DNA, 25 bp, Homo sapien
taggtggcacctaaactgctgtccc

SEQ ID NO: 3908014 - DNA, 25 bp, Homo sapien
taagggaaatgaaccacctagcatg

SEQ ID NO: 3908015 - DNA, 25 bp, Homo sapien
cagatggaagtgcaatggtgttacc

SEQ ID NO: 3908016 - DNA, 25 bp, Homo sapien
ggcagacaatgcttaccacagaaga

SEQ ID NO: 3908017 - DNA, 25 bp, Homo sapien
tcaaagagagaattcatagaccacg

SEQ ID NO: 3908018 - DNA, 25 bp, Homo sapien
aatggtgcccacttttttagtcagg

SEQ ID NO: 3908019 - DNA, 25 bp, Homo sapien
taggttacttgctaaagagcaggca

SEQ ID NO: 3908020 - DNA, 25 bp, Homo sapien
tagtcaggttacgatttgtatgcac

SEQ ID NO: 3908021 - DNA, 25 bp, Homo sapien
aaaaaatttccctgtagatatggca

SEQ ID NO: 3908022 - DNA, 25 bp, Homo sapien
ggatgatctctatcaggacttaaga

SEQ ID NO: 3908023 - DNA, 25 bp, Homo sapien
tatataatcctagagtcaaaccgtt

SEQ ID NO: 3908024 - DNA, 25 bp, Homo sapien
tatggatcttgaggacagccttctc

SEQ ID NO: 3908025 - DNA, 25 bp, Homo sapien
aaaacagggcattataccttcagcc

SEQ ID NO: 3908026 - DNA, 25 bp, Homo sapien
tcagcctatacagcttacatttagg

SEQ ID NO: 3908027 - DNA, 25 bp, Homo sapien
tataccttcagcctatacagcttac

SEQ ID NO: 3908028 - DNA, 25 bp, Homo sapien
ggcattataccttcagcctatacag

SEQ ID NO: 3908029 - DNA, 25 bp, Homo sapien
gaatattagctctgcttaaccaccg

SEQ ID NO: 3908030 - DNA, 25 bp, Homo sapien
tgttactatctacagattcggaagg

SEQ ID NO: 3908031 - DNA, 25 bp, Homo sapien
cattggccccaatatactttagagc

SEQ ID NO: 3908032 - DNA, 25 bp, Homo sapien
tcaactagtctagtaaggatccgat

SEQ ID NO: 3908033 - DNA, 25 bp, Homo sapien
gccagaggacaataaccctttagca

SEQ ID NO: 3908034 - DNA, 25 bp, Homo sapien
aggacaataaccctttagcataggt

SEQ ID NO: 3908035 - DNA, 25 bp, Homo sapien
agaggacaataaccctttagcatag

SEQ ID NO: 3908036 - DNA, 25 bp, Homo sapien
cctttagcataggttgctgctgccc

SEQ ID NO: 3908037 - DNA, 25 bp, Homo sapien
tcaagctatgtcaaccctgtaactg

SEQ ID NO: 3908038 - DNA, 25 bp, Homo sapien
gccactggcaatagctaacatcaca

SEQ ID NO: 3908039 - DNA, 25 bp, Homo sapien
gaaatggactactctgtggtcatga

SEQ ID NO: 3908040 - DNA, 25 bp, Homo sapien
tgataacatactggcacttcactag

SEQ ID NO: 3908041 - DNA, 25 bp, Homo sapien
gatactgtacaagccaaggattcca

SEQ ID NO: 3908042 - DNA, 25 bp, Homo sapien
cgcccggccctgcataagcataagt

SEQ ID NO: 3908043 - DNA, 25 bp, Homo sapien
ccacagtcattttagatagaggcac

SEQ ID NO: 3908044 - DNA, 25 bp, Homo sapien
tgaacttcgggactaaaggctgacc

SEQ ID NO: 3908045 - DNA, 25 bp, Homo sapien
tacgtacagcagaaagctactctgg

SEQ ID NO: 3908046 - DNA, 25 bp, Homo sapien
taaccgcaagagactgaagaatcca

SEQ ID NO: 3908047 - DNA, 25 bp, Homo sapien
taccctaggagtgcttaagagtcgg

SEQ ID NO: 3908048 - DNA, 25 bp, Homo sapien
catcacaggagattcaggttcaaca

SEQ ID NO: 3908049 - DNA, 25 bp, Homo sapien
ggaaatataagctttgcaccccaaa

SEQ ID NO: 3908050 - DNA, 25 bp, Homo sapien
gttagggattatggatactctcaca

SEQ ID NO: 3908051 - DNA, 25 bp, Homo sapien
taagtttggacactaataaggatac

SEQ ID NO: 3908052 - DNA, 25 bp, Homo sapien
tattctcatctcatacaagggaaat

SEQ ID NO: 3908053 - DNA, 25 bp, Homo sapien
cagcgcctatgatgggtaaaatcca

SEQ ID NO: 3908054 - DNA, 25 bp, Homo sapien
gatgggtaaaatccaatatgcccag

SEQ ID NO: 3908055 - DNA, 25 bp, Homo sapien
gagaacagcgcctatgatgggtaaa

SEQ ID NO: 3908056 - DNA, 25 bp, Homo sapien
tatgatgggtaaaatccaatatgcc

SEQ ID NO: 3908057 - DNA, 25 bp, Homo sapien
tttccgatgtgtagtagcggtacag

SEQ ID NO: 3908058 - DNA, 25 bp, Homo sapien
ccgatgtgtagtagcggtacaggaa

SEQ ID NO: 3908059 - DNA, 25 bp, Homo sapien
gatgtgtagtagcggtacaggaaac

SEQ ID NO: 3908060 - DNA, 25 bp, Homo sapien
tccgatgtgtagtagcggtacagga

SEQ ID NO: 3908061 - DNA, 25 bp, Homo sapien
gaggtgatgtctggccaatcgtctt

SEQ ID NO: 3908062 - DNA, 25 bp, Homo sapien
gcaagtctctagttttcgccccaaa

SEQ ID NO: 3908063 - DNA, 25 bp, Homo sapien
ttttcgccccaaagtggatgcactt

SEQ ID NO: 3908064 - DNA, 25 bp, Homo sapien
aatgcaactggcaggattcgaggag

SEQ ID NO: 3908065 - DNA, 25 bp, Homo sapien
ccagtgaagagaggaaacaccggca

SEQ ID NO: 3908066 - DNA, 25 bp, Homo sapien
tagactgccgccctgttaagaatgt

SEQ ID NO: 3908067 - DNA, 25 bp, Homo sapien
taagggtactcatggaaaccagtga

SEQ ID NO: 3908068 - DNA, 25 bp, Homo sapien
ctctgagagatggaagacgctggtc

SEQ ID NO: 3908069 - DNA, 25 bp, Homo sapien
cccacaagttggagtcacggagata

SEQ ID NO: 3908070 - DNA, 25 bp, Homo sapien
aaagattactctgaattcaccaggg

SEQ ID NO: 3908071 - DNA, 25 bp, Homo sapien
ccatgtagttttttgtccggcacca

SEQ ID NO: 3908072 - DNA, 25 bp, Homo sapien
ccaagacacgaaagggccatgtagt

SEQ ID NO: 3908073 - DNA, 25 bp, Homo sapien
gtctaatatgccagagaaatcatca

SEQ ID NO: 3908074 - DNA, 25 bp, Homo sapien
gacacagtaacataattctagtaac

SEQ ID NO: 3908075 - DNA, 25 bp, Homo sapien
aataaaagtctaatatgccagagaa

SEQ ID NO: 3908076 - DNA, 25 bp, Homo sapien
tcatcattgaaccaataagacacag

SEQ ID NO: 3908077 - DNA, 25 bp, Homo sapien
gaagcagactagcaattctcaaagg

SEQ ID NO: 3908078 - DNA, 25 bp, Homo sapien
taaatagtttacatgggcagtccct

SEQ ID NO: 3908079 - DNA, 25 bp, Homo sapien
tatggtccttcttgaaccaagctgc

SEQ ID NO: 3908080 - DNA, 25 bp, Homo sapien
tatatccaagtgtgcaagtacaagg

SEQ ID NO: 3908081 - DNA, 25 bp, Homo sapien
caagatttagctttcacctggctgt

SEQ ID NO: 3908082 - DNA, 25 bp, Homo sapien
tgcaaactctcacacaagatttagc

SEQ ID NO: 3908083 - DNA, 25 bp, Homo sapien
acatcggcagtagttcagaagaagc

SEQ ID NO: 3908084 - DNA, 25 bp, Homo sapien
taacagtaaatggaccccaaagtga

SEQ ID NO: 3908085 - DNA, 25 bp, Homo sapien
tctaacaaacgttcactgtgtgcgc

SEQ ID NO: 3908086 - DNA, 25 bp, Homo sapien
tagggtaggtaacttgacaaatgcc

SEQ ID NO: 3908087 - DNA, 25 bp, Homo sapien
caaacgtaggatacaagcgtgggca

SEQ ID NO: 3908088 - DNA, 25 bp, Homo sapien
tacaggctcaaacgataggttccaa

SEQ ID NO: 3908089 - DNA, 25 bp, Homo sapien
tattacctggtactggcttctctgt

SEQ ID NO: 3908090 - DNA, 25 bp, Homo sapien
ggaactccccaccacgttatgctaa

SEQ ID NO: 3908091 - DNA, 25 bp, Homo sapien
gagaatcctggagaaccacggaact

SEQ ID NO: 3908092 - DNA, 25 bp, Homo sapien
cagacacgggagactgtcatgcttc

SEQ ID NO: 3908093 - DNA, 25 bp, Homo sapien
tttagctccaagaagtcttgcaatg

SEQ ID NO: 3908094 - DNA, 25 bp, Homo sapien
tagctccaagaagtcttgcaatgag

SEQ ID NO: 3908095 - DNA, 25 bp, Homo sapien
caagaagtcttgcaatgagaaagct

SEQ ID NO: 3908096 - DNA, 25 bp, Homo sapien
gctccaagaagtcttgcaatgagaa

SEQ ID NO: 3908097 - DNA, 25 bp, Homo sapien
caggaccaggtttgaagacaattgg

SEQ ID NO: 3908098 - DNA, 25 bp, Homo sapien
ccaggtttgaagacaattggcctca

SEQ ID NO: 3908099 - DNA, 25 bp, Homo sapien
gccagccaccgctcctgtttttcct

SEQ ID NO: 3908100 - DNA, 25 bp, Homo sapien
ttcccaggaccaggtttgaagacaa

SEQ ID NO: 3908101 - DNA, 25 bp, Homo sapien
ttgttgagtgaccttctgaatgaga

SEQ ID NO: 3908102 - DNA, 25 bp, Homo sapien
agtgatgccaggaaaagacagcatt

SEQ ID NO: 3908103 - DNA, 25 bp, Homo sapien
gccaggaaaagacagcatttcctga

SEQ ID NO: 3908104 - DNA, 25 bp, Homo sapien
catcagtgatgccaggaaaagacag

SEQ ID NO: 3908105 - DNA, 25 bp, Homo sapien
tcagtgatgccaggaaaagacagca

SEQ ID NO: 3908106 - DNA, 25 bp, Homo sapien
aagtttcctccaagagctgcaccac

SEQ ID NO: 3908107 - DNA, 25 bp, Homo sapien
agtttcctccaagagctgcaccacc

SEQ ID NO: 3908108 - DNA, 25 bp, Homo sapien
gggctgaactgagccaatcggcttc

SEQ ID NO: 3908109 - DNA, 25 bp, Homo sapien
gagcaggagagtattgtggcattaa

SEQ ID NO: 3908110 - DNA, 25 bp, Homo sapien
gatgtcaagcttgcaccaggtaaaa

SEQ ID NO: 3908111 - DNA, 25 bp, Homo sapien
gtccttcagagtctgacttaaatag

SEQ ID NO: 3908112 - DNA, 25 bp, Homo sapien
cagctgattggttctgagtgatcac

SEQ ID NO: 3908113 - DNA, 25 bp, Homo sapien
tcacatgattttcttcttggccaca

SEQ ID NO: 3908114 - DNA, 25 bp, Homo sapien
cacagctgattggttctgagtgatc

SEQ ID NO: 3908115 - DNA, 25 bp, Homo sapien
ggccacagctgattggttctgagtg

SEQ ID NO: 3908116 - DNA, 25 bp, Homo sapien
ccctcctggcacgcctggattggca

SEQ ID NO: 3908117 - DNA, 25 bp, Homo sapien
ctcctggcacgcctggattggcagg

SEQ ID NO: 3908118 - DNA, 25 bp, Homo sapien
cctcctggcacgcctggattggcag

SEQ ID NO: 3908119 - DNA, 25 bp, Homo sapien
tcagcagtgaaggatgcgaacggag

SEQ ID NO: 3908120 - DNA, 25 bp, Homo sapien
ggccatggccatgatcgttgtagaa

SEQ ID NO: 3908121 - DNA, 25 bp, Homo sapien
gaaaataacgagtgtgattgaggat

SEQ ID NO: 3908122 - DNA, 25 bp, Homo sapien
attgaggatgtttcaggttgtcagc

SEQ ID NO: 3908123 - DNA, 25 bp, Homo sapien
tgcagactgaaactcctcccgggct

SEQ ID NO: 3908124 - DNA, 25 bp, Homo sapien
tagtggcagcttcatagctcagtgc

SEQ ID NO: 3908125 - DNA, 25 bp, Homo sapien
agctgcagactgaaactcctcccgg

SEQ ID NO: 3908126 - DNA, 25 bp, Homo sapien
gtgtagtggcagcttcatagctcag

SEQ ID NO: 3908127 - DNA, 25 bp, Homo sapien
tcattaggtcctgcattaagcacgg

SEQ ID NO: 3908128 - DNA, 25 bp, Homo sapien
gacctaaactgcgaattccctgaga

SEQ ID NO: 3908129 - DNA, 25 bp, Homo sapien
gcacctgtcttcttacagagatata

SEQ ID NO: 3908130 - DNA, 25 bp, Homo sapien
tcaggcctcacttacctcattaggt

SEQ ID NO: 3908131 - DNA, 25 bp, Homo sapien
tcgtggagccaaaagtttccgttgc

SEQ ID NO: 3908132 - DNA, 25 bp, Homo sapien
tattcggagtgggacatagaagaca

SEQ ID NO: 3908133 - DNA, 25 bp, Homo sapien
aaaaacgatctctctgattgtgctg

SEQ ID NO: 3908134 - DNA, 25 bp, Homo sapien
ttggatcatgtgaatccacctggct

SEQ ID NO: 3908135 - DNA, 25 bp, Homo sapien
tgtgtacaaagggactgtcaaaccc

SEQ ID NO: 3908136 - DNA, 25 bp, Homo sapien
tatttgcaacgacctggtggcggcg

SEQ ID NO: 3908137 - DNA, 25 bp, Homo sapien
gggtttgcatagcagtgtgtacaaa

SEQ ID NO: 3908138 - DNA, 25 bp, Homo sapien
gaccggagtgtcatcgcccggacag

SEQ ID NO: 3908139 - DNA, 25 bp, Homo sapien
ggtccgtttcgtgtttctcctcagc

SEQ ID NO: 3908140 - DNA, 25 bp, Homo sapien
tctcctcagcgaaaactgacggtcg

SEQ ID NO: 3908141 - DNA, 25 bp, Homo sapien
tcctcctcgagggtagtgacttcca

SEQ ID NO: 3908142 - DNA, 25 bp, Homo sapien
gccgccgctgacaggaatctgagcc

SEQ ID NO: 3908143 - DNA, 25 bp, Homo sapien
cagctcgacccagcccggcccgagg

SEQ ID NO: 3908144 - DNA, 25 bp, Homo sapien
agctcgacccagcccggcccgaggg

SEQ ID NO: 3908145 - DNA, 25 bp, Homo sapien
gcagctcgacccagcccggcccgag

SEQ ID NO: 3908146 - DNA, 25 bp, Homo sapien
ttgggcgattccaggtctaggtccg

SEQ ID NO: 3908147 - DNA, 25 bp, Homo sapien
gcaatgagatgaagtccgagggcat

SEQ ID NO: 3908148 - DNA, 25 bp, Homo sapien
ctcgcgagtagagggacttgggcga

SEQ ID NO: 3908149 - DNA, 25 bp, Homo sapien
aggtccgcgctgagcaatgagatga

SEQ ID NO: 3908150 - DNA, 25 bp, Homo sapien
taaaaagcgtaaagagcgcagtggg

SEQ ID NO: 3908151 - DNA, 25 bp, Homo sapien
tacactagtaggaaggtgaagtccc

SEQ ID NO: 3908152 - DNA, 25 bp, Homo sapien
cattggagcaacagacagtggctac

SEQ ID NO: 3908153 - DNA, 25 bp, Homo sapien
gtacctcaggtaatgttgcccgaaa

SEQ ID NO: 3908154 - DNA, 25 bp, Homo sapien
ttccaatagtccagctctatgaaaa

SEQ ID NO: 3908155 - DNA, 25 bp, Homo sapien
aaaattctgtgatgggtgtaacttc

SEQ ID NO: 3908156 - DNA, 25 bp, Homo sapien
agtccagctctatgaaaattctgtg

SEQ ID NO: 3908157 - DNA, 25 bp, Homo sapien
tgtgatgggtgtaacttcagagaat

SEQ ID NO: 3908158 - DNA, 25 bp, Homo sapien
aacaaaacccattgaaacattcagc

SEQ ID NO: 3908159 - DNA, 25 bp, Homo sapien
aacaagcacatcaaacgcagcaaca

SEQ ID NO: 3908160 - DNA, 25 bp, Homo sapien
tctaaagtagaacactcaacacata

SEQ ID NO: 3908161 - DNA, 25 bp, Homo sapien
gcagatagaacagccaacaagcaca

SEQ ID NO: 3908162 - DNA, 25 bp, Homo sapien
catgttaatgtttgggccttttcac

SEQ ID NO: 3908163 - DNA, 25 bp, Homo sapien
ctaagcatagctcaatcatcatcgc

SEQ ID NO: 3908164 - DNA, 25 bp, Homo sapien
caatggcatcaatgcttttgcaata

SEQ ID NO: 3908165 - DNA, 25 bp, Homo sapien
catcatcgctattacttggctttcc

SEQ ID NO: 3908166 - DNA, 25 bp, Homo sapien
cactctgtcttgaaaagagggcagg

SEQ ID NO: 3908167 - DNA, 25 bp, Homo sapien
tatatactagaagcggtagcctcct

SEQ ID NO: 3908168 - DNA, 25 bp, Homo sapien
tatgaactccaatctagcagcatgg

SEQ ID NO: 3908169 - DNA, 25 bp, Homo sapien
cacaaaaacctaggatgaggcacta

SEQ ID NO: 3908170 - DNA, 25 bp, Homo sapien
gattatatcagatcagcatttagct

SEQ ID NO: 3908171 - DNA, 25 bp, Homo sapien
ataacaaagattatatcagatcagc

SEQ ID NO: 3908172 - DNA, 25 bp, Homo sapien
acaaagattatatcagatcagcatt

SEQ ID NO: 3908173 - DNA, 25 bp, Homo sapien
tatatcagatcagcatttagctctt

SEQ ID NO: 3908174 - DNA, 25 bp, Homo sapien
aaatatgtgggacttctgatctgcc

SEQ ID NO: 3908175 - DNA, 25 bp, Homo sapien
ccattcctcgttacagttctataag

SEQ ID NO: 3908176 - DNA, 25 bp, Homo sapien
tcatcctgtacccaatattataggc

SEQ ID NO: 3908177 - DNA, 25 bp, Homo sapien
tctatccatccttgtgaagtttggt

SEQ ID NO: 3908178 - DNA, 25 bp, Homo sapien
aaacataggtatacctctgtgaccc

SEQ ID NO: 3908179 - DNA, 25 bp, Homo sapien
tcaaatgacactacccccttacaat

SEQ ID NO: 3908180 - DNA, 25 bp, Homo sapien
tagtgctcaggcaactagatatgca

SEQ ID NO: 3908181 - DNA, 25 bp, Homo sapien
gaagctgttaggctcttacctcaca

SEQ ID NO: 3908182 - DNA, 25 bp, Homo sapien
tacacctgtaaacactgagtagtcc

SEQ ID NO: 3908183 - DNA, 25 bp, Homo sapien
actacagtgattcatgctcatgcca

SEQ ID NO: 3908184 - DNA, 25 bp, Homo sapien
acacctgtaaacactgagtagtccc

SEQ ID NO: 3908185 - DNA, 25 bp, Homo sapien
caagactacagtgattcatgctcat

SEQ ID NO: 3908186 - DNA, 25 bp, Homo sapien
tgaacacaggggggcggaggttaca

SEQ ID NO: 3908187 - DNA, 25 bp, Homo sapien
aagaagagaaattgaagaaaaatag

SEQ ID NO: 3908188 - DNA, 25 bp, Homo sapien
aaattagccaggcggtaattccagc

SEQ ID NO: 3908189 - DNA, 25 bp, Homo sapien
aattgaagaaaaataggccgggcat

SEQ ID NO: 3908190 - DNA, 25 bp, Homo sapien
tgtttactgaaatccatgatctctg

SEQ ID NO: 3908191 - DNA, 25 bp, Homo sapien
caactgatagacaagttagacaaac

SEQ ID NO: 3908192 - DNA, 25 bp, Homo sapien
tacaaagagctatgtttactgaaat

SEQ ID NO: 3908193 - DNA, 25 bp, Homo sapien
gatctctgaaacatccaactgatag

SEQ ID NO: 3908194 - DNA, 25 bp, Homo sapien
gatcatgctctacaaaatagtgccc

SEQ ID NO: 3908195 - DNA, 25 bp, Homo sapien
gaaaagaagcaaccatgtgcactag

SEQ ID NO: 3908196 - DNA, 25 bp, Homo sapien
tactacagttgtcttcctagctgcc

SEQ ID NO: 3908197 - DNA, 25 bp, Homo sapien
ttgtacttgcctttcctccacctgg

SEQ ID NO: 3908198 - DNA, 25 bp, Homo sapien
cccacaagcaagtattcagacctca

SEQ ID NO: 3908199 - DNA, 25 bp, Homo sapien
taagtgtctacaatgagtggcaatg

SEQ ID NO: 3908200 - DNA, 25 bp, Homo sapien
tactttccgtacaactgcagaatgc

SEQ ID NO: 3908201 - DNA, 25 bp, Homo sapien
tgcagaatgcctctaacttaagact

SEQ ID NO: 3908202 - DNA, 25 bp, Homo sapien
acaacttcctttgtagagccaagac

SEQ ID NO: 3908203 - DNA, 25 bp, Homo sapien
caagactagctaaagctgggtccca

SEQ ID NO: 3908204 - DNA, 25 bp, Homo sapien
ctatgcaattagagtaacactgagg

SEQ ID NO: 3908205 - DNA, 25 bp, Homo sapien
taccttaagtgattctacccaaaca

SEQ ID NO: 3908206 - DNA, 25 bp, Homo sapien
aataacctcttagcatgaaagacag

SEQ ID NO: 3908207 - DNA, 25 bp, Homo sapien
tcttgagtctatcctagaaggaaca

SEQ ID NO: 3908208 - DNA, 25 bp, Homo sapien
cagaatggaatataccagtcaccta

SEQ ID NO: 3908209 - DNA, 25 bp, Homo sapien
tctactaggtattatttttcactca

SEQ ID NO: 3908210 - DNA, 25 bp, Homo sapien
cagatgtttctctagatggaggtaa

SEQ ID NO: 3908211 - DNA, 25 bp, Homo sapien
agatgtttctctagatggaggtaac

SEQ ID NO: 3908212 - DNA, 25 bp, Homo sapien
gatgtttctctagatggaggtaact

SEQ ID NO: 3908213 - DNA, 25 bp, Homo sapien
aggcgagcctgcctcaccaccgctt

SEQ ID NO: 3908214 - DNA, 25 bp, Homo sapien
gcctgcctcaccaccgcttgtctga

SEQ ID NO: 3908215 - DNA, 25 bp, Homo sapien
gagcctgcctcaccaccgcttgtct

SEQ ID NO: 3908216 - DNA, 25 bp, Homo sapien
gcgagcctgcctcaccaccgcttgt

SEQ ID NO: 3908217 - DNA, 25 bp, Homo sapien
tgtcactgataacacttttttctat

SEQ ID NO: 3908218 - DNA, 25 bp, Homo sapien
ctataaatccaatattaggtgggta

SEQ ID NO: 3908219 - DNA, 25 bp, Homo sapien
tttctattagcttgtctatctttta

SEQ ID NO: 3908220 - DNA, 25 bp, Homo sapien
aaactaacattacaggaaggactga

SEQ ID NO: 3908221 - DNA, 25 bp, Homo sapien
aactctgacagttatatcaccaaga

SEQ ID NO: 3908222 - DNA, 25 bp, Homo sapien
tggtaatatactccaagtaactctg

SEQ ID NO: 3908223 - DNA, 25 bp, Homo sapien
taatatgcctttccctagacatcta

SEQ ID NO: 3908224 - DNA, 25 bp, Homo sapien
gccttctggctagaaaaacattgag

SEQ ID NO: 3908225 - DNA, 25 bp, Homo sapien
taatcgaagtgatagcacacaatgc

SEQ ID NO: 3908226 - DNA, 25 bp, Homo sapien
taaggatcttgcgtttccctaatcg

SEQ ID NO: 3908227 - DNA, 25 bp, Homo sapien
cattcgaagatcctgacacttgtag

SEQ ID NO: 3908228 - DNA, 25 bp, Homo sapien
gatgacatgcaaattacctaacaca

SEQ ID NO: 3908229 - DNA, 25 bp, Homo sapien
aagtccacttctatgcattaatttc

SEQ ID NO: 3908230 - DNA, 25 bp, Homo sapien
tcttgttggtgatataaaaaagtcc

SEQ ID NO: 3908231 - DNA, 25 bp, Homo sapien
catggggtagataatgttctgatac

SEQ ID NO: 3908232 - DNA, 25 bp, Homo sapien
tctattatctatcctctgtcttact

SEQ ID NO: 3908233 - DNA, 25 bp, Homo sapien
tttaacaccttactaatggccaggc

SEQ ID NO: 3908234 - DNA, 25 bp, Homo sapien
cagaaagtatatcccatggcccaca

SEQ ID NO: 3908235 - DNA, 25 bp, Homo sapien
gattcccactgagagagtgtcaaca

SEQ ID NO: 3908236 - DNA, 25 bp, Homo sapien
tacatcttgactggtgtgcgaaact

SEQ ID NO: 3908237 - DNA, 25 bp, Homo sapien
gacaacctgcatcatgcacctagaa

SEQ ID NO: 3908238 - DNA, 25 bp, Homo sapien
gaagggaggctatactctacaaagc

SEQ ID NO: 3908239 - DNA, 25 bp, Homo sapien
gggccaatgtacacagctcaagctg

SEQ ID NO: 3908240 - DNA, 25 bp, Homo sapien
cacacagagtccgtactgggtacta

SEQ ID NO: 3908241 - DNA, 25 bp, Homo sapien
gaactgtaagtccaaatgaacattt

SEQ ID NO: 3908242 - DNA, 25 bp, Homo sapien
gggtgttgctgaaaaaataccagaa

SEQ ID NO: 3908243 - DNA, 25 bp, Homo sapien
ctaacacagtaaactggtaccagga

SEQ ID NO: 3908244 - DNA, 25 bp, Homo sapien
tgtaagtccaaatgaacattttttc

SEQ ID NO: 3908245 - DNA, 25 bp, Homo sapien
attccatgtgtcacaggatggaccc

SEQ ID NO: 3908246 - DNA, 25 bp, Homo sapien
tccttcagaaactgtcggtctttcc

SEQ ID NO: 3908247 - DNA, 25 bp, Homo sapien
gactttatagaattagtccttcaga

SEQ ID NO: 3908248 - DNA, 25 bp, Homo sapien
taagaactcttaaacagcagacttt

SEQ ID NO: 3908249 - DNA, 25 bp, Homo sapien
accttcgttatttcttcttaagcat

SEQ ID NO: 3908250 - DNA, 25 bp, Homo sapien
gcctggccagaaactatttctgatc

SEQ ID NO: 3908251 - DNA, 25 bp, Homo sapien
taaaacacataatgttcaaccttcg

SEQ ID NO: 3908252 - DNA, 25 bp, Homo sapien
tgcctggccagaaactatttctgat

SEQ ID NO: 3908253 - DNA, 25 bp, Homo sapien
caaatgccagtaacgatggtgaact

SEQ ID NO: 3908254 - DNA, 25 bp, Homo sapien
ttgccactattaacagtagccagtt

SEQ ID NO: 3908255 - DNA, 25 bp, Homo sapien
acttgaattgtacatacagcttctt

SEQ ID NO: 3908256 - DNA, 25 bp, Homo sapien
gaggcaggtaaagtgtcatatgtaa

SEQ ID NO: 3908257 - DNA, 25 bp, Homo sapien
gaaggaattatctttgaacctatag

SEQ ID NO: 3908258 - DNA, 25 bp, Homo sapien
tgaaggaattatctttgaacctata

SEQ ID NO: 3908259 - DNA, 25 bp, Homo sapien
aaggaattatctttgaacctatagt

SEQ ID NO: 3908260 - DNA, 25 bp, Homo sapien
ctgggaataccactgtatcactaaa

SEQ ID NO: 3908261 - DNA, 25 bp, Homo sapien
tctatagaaccaaagtgtgaatgca

SEQ ID NO: 3908262 - DNA, 25 bp, Homo sapien
taccactgtatcactaaataaagta

SEQ ID NO: 3908263 - DNA, 25 bp, Homo sapien
caaaaaacagcttgatattctatag

SEQ ID NO: 3908264 - DNA, 25 bp, Homo sapien
tttgtgtacttatgagcctatgttc

SEQ ID NO: 3908265 - DNA, 25 bp, Homo sapien
taaatctaaggatcatgcacatgag

SEQ ID NO: 3908266 - DNA, 25 bp, Homo sapien
tgcagcatacaagtatgcagcatgc

SEQ ID NO: 3908267 - DNA, 25 bp, Homo sapien
tctgttccaactattggcaaaaacg

SEQ ID NO: 3908268 - DNA, 25 bp, Homo sapien
tgaagcagagaactacaggtcattt

SEQ ID NO: 3908269 - DNA, 25 bp, Homo sapien
atgaagcagagaactacaggtcatt

SEQ ID NO: 3908270 - DNA, 25 bp, Homo sapien
ttttaatgcagacactccctgcttc

SEQ ID NO: 3908271 - DNA, 25 bp, Homo sapien
acactccctgcttcagaggcaaatc

SEQ ID NO: 3908272 - DNA, 25 bp, Homo sapien
tttccccaaaatgaatagtcagaat

SEQ ID NO: 3908273 - DNA, 25 bp, Homo sapien
gctagcagtcccattgaaaatgtga

SEQ ID NO: 3908274 - DNA, 25 bp, Homo sapien
gttttcacctatgctggctagcagt

SEQ ID NO: 3908275 - DNA, 25 bp, Homo sapien
tgcttcaagcaatataaggcctaag

SEQ ID NO: 3908276 - DNA, 25 bp, Homo sapien
ctgcagtgtacaattcaagagtaaa

SEQ ID NO: 3908277 - DNA, 25 bp, Homo sapien
cagtgtacaattcaagagtaaatac

SEQ ID NO: 3908278 - DNA, 25 bp, Homo sapien
gtacaattcaagagtaaatacacta

SEQ ID NO: 3908279 - DNA, 25 bp, Homo sapien
tgtacaattcaagagtaaatacact

SEQ ID NO: 3908280 - DNA, 25 bp, Homo sapien
aggaagaggagggagctgaagaagc

SEQ ID NO: 3908281 - DNA, 25 bp, Homo sapien
gaggaagaggagggagctgaagaag

SEQ ID NO: 3908282 - DNA, 25 bp, Homo sapien
ggaagaggagggagctgaagaagca

SEQ ID NO: 3908283 - DNA, 25 bp, Homo sapien
gaagaggagggagctgaagaagcat

SEQ ID NO: 3908284 - DNA, 25 bp, Homo sapien
actgaggtagaataaatggtagggc

SEQ ID NO: 3908285 - DNA, 25 bp, Homo sapien
cacttgcatagccttgctgtcggtg

SEQ ID NO: 3908286 - DNA, 25 bp, Homo sapien
gtggtaaaggagctgcaagcaccgc

SEQ ID NO: 3908287 - DNA, 25 bp, Homo sapien
gcagctctccacttgcatagccttg

SEQ ID NO: 3908288 - DNA, 25 bp, Homo sapien
tgagatgtacaagactgtgtgcctc

SEQ ID NO: 3908289 - DNA, 25 bp, Homo sapien
cctggcaggacatccgactgttatc

SEQ ID NO: 3908290 - DNA, 25 bp, Homo sapien
gcctcttcggtgttgatggatgctg

SEQ ID NO: 3908291 - DNA, 25 bp, Homo sapien
tccgactgttatccagcaagtcctc

SEQ ID NO: 3908292 - DNA, 25 bp, Homo sapien
gagggggaatcctccatccacatac

SEQ ID NO: 3908293 - DNA, 25 bp, Homo sapien
ggagggggaatcctccatccacata

SEQ ID NO: 3908294 - DNA, 25 bp, Homo sapien
ggtgctttggcactgtcggcatcaa

SEQ ID NO: 3908295 - DNA, 25 bp, Homo sapien
tgtccgtggtaagctgagaaagcac

SEQ ID NO: 3908296 - DNA, 25 bp, Homo sapien
acgaggtacctcagtgttatcattg

SEQ ID NO: 3908297 - DNA, 25 bp, Homo sapien
ttatcattgtaggaactggtgctca

SEQ ID NO: 3908298 - DNA, 25 bp, Homo sapien
gataataagatatctattgctagaa

SEQ ID NO: 3908299 - DNA, 25 bp, Homo sapien
actatactgataataagatatctat

SEQ ID NO: 3908300 - DNA, 25 bp, Homo sapien
aagatatctattgctagaatctatg

SEQ ID NO: 3908301 - DNA, 25 bp, Homo sapien
gatatctattgctagaatctatgat

SEQ ID NO: 3908302 - DNA, 25 bp, Homo sapien
tgtttcatcaccctctaaataagta

SEQ ID NO: 3908303 - DNA, 25 bp, Homo sapien
gcattatagcagtgaatattctgta

SEQ ID NO: 3908304 - DNA, 25 bp, Homo sapien
tgtaaaactgaaattgtaggagatc

SEQ ID NO: 3908305 - DNA, 25 bp, Homo sapien
aaatatcgactctgtacaatcaatg

SEQ ID NO: 3908306 - DNA, 25 bp, Homo sapien
ttctgcttgatggaatttctgctcc

SEQ ID NO: 3908307 - DNA, 25 bp, Homo sapien
ccaatgtcattatactttccctggg

SEQ ID NO: 3908308 - DNA, 25 bp, Homo sapien
gaattatttcatgaaagagtctgtc

SEQ ID NO: 3908309 - DNA, 25 bp, Homo sapien
caaatcactgtttactagccataag

SEQ ID NO: 3908310 - DNA, 25 bp, Homo sapien
ttgactcacatcaaagatccaggag

SEQ ID NO: 3908311 - DNA, 25 bp, Homo sapien
gaaaagttctcaaggcgcaatactg

SEQ ID NO: 3908312 - DNA, 25 bp, Homo sapien
cagctgtaaccaagttgttgcctta

SEQ ID NO: 3908313 - DNA, 25 bp, Homo sapien
ctaaaagcaaccagattccagtagg

SEQ ID NO: 3908314 - DNA, 25 bp, Homo sapien
taacaggatattgtccacacaacat

SEQ ID NO: 3908315 - DNA, 25 bp, Homo sapien
tgtccacacaacatagggctcttct

SEQ ID NO: 3908316 - DNA, 25 bp, Homo sapien
acttttaacaggatattgtccacac

SEQ ID NO: 3908317 - DNA, 25 bp, Homo sapien
ggatattgtccacacaacatagggc

SEQ ID NO: 3908318 - DNA, 25 bp, Homo sapien
tgttctatctttcactgagccacgg

SEQ ID NO: 3908319 - DNA, 25 bp, Homo sapien
taccgagctcggtgctgtgtctcag

SEQ ID NO: 3908320 - DNA, 25 bp, Homo sapien
acggctgccctcagtcaggtaccga

SEQ ID NO: 3908321 - DNA, 25 bp, Homo sapien
tgtgttctatctttcactgagccac

SEQ ID NO: 3908322 - DNA, 25 bp, Homo sapien
gagtcgttgcccacaaacacttgca

SEQ ID NO: 3908323 - DNA, 25 bp, Homo sapien
tccatgtggtttcactcgtccagag

SEQ ID NO: 3908324 - DNA, 25 bp, Homo sapien
tatttcgtccagttactctgcaggc

SEQ ID NO: 3908325 - DNA, 25 bp, Homo sapien
tgttgctaggatcaaggccgacttc

SEQ ID NO: 3908326 - DNA, 25 bp, Homo sapien
tcttatattgaataagtactatttt

SEQ ID NO: 3908327 - DNA, 25 bp, Homo sapien
tttcctcctctactatatgtattta

SEQ ID NO: 3908328 - DNA, 25 bp, Homo sapien
ctttcctcctctactatatgtattt

SEQ ID NO: 3908329 - DNA, 25 bp, Homo sapien
cctttcctcctctactatatgtatt

SEQ ID NO: 3908330 - DNA, 25 bp, Homo sapien
tattctggcttcgacatcagcattc

SEQ ID NO: 3908331 - DNA, 25 bp, Homo sapien
tattaactcgaaaaaccaatctggc

SEQ ID NO: 3908332 - DNA, 25 bp, Homo sapien
caatctggcacgagtgcttttcttc

SEQ ID NO: 3908333 - DNA, 25 bp, Homo sapien
tgcagtgtcaaagtggagccatctt

SEQ ID NO: 3908334 - DNA, 25 bp, Homo sapien
cagttagaaccacagtaatttacca

SEQ ID NO: 3908335 - DNA, 25 bp, Homo sapien
taccacacagtgaagatgcttagaa

SEQ ID NO: 3908336 - DNA, 25 bp, Homo sapien
tgtaatttacttctgataaccagct

SEQ ID NO: 3908337 - DNA, 25 bp, Homo sapien
tgagacagtcgcagtctgctgccca

SEQ ID NO: 3908338 - DNA, 25 bp, Homo sapien
tcagaaagttcttgccgattaaaaa

SEQ ID NO: 3908339 - DNA, 25 bp, Homo sapien
cactgaacagctatgcaagcttttc

SEQ ID NO: 3908340 - DNA, 25 bp, Homo sapien
actgaacagctatgcaagcttttct

SEQ ID NO: 3908341 - DNA, 25 bp, Homo sapien
ctgaacagctatgcaagcttttctt

SEQ ID NO: 3908342 - DNA, 25 bp, Homo sapien
gtagctatgactatatccatataac

SEQ ID NO: 3908343 - DNA, 25 bp, Homo sapien
tagctatgactatatccatataaca

SEQ ID NO: 3908344 - DNA, 25 bp, Homo sapien
tgatgaaatagttccatatcaattt

SEQ ID NO: 3908345 - DNA, 25 bp, Homo sapien
tagttccatatcaatttcagcttct

SEQ ID NO: 3908346 - DNA, 25 bp, Homo sapien
tttcagcttctgacttccaagagtt

SEQ ID NO: 3908347 - DNA, 25 bp, Homo sapien
gaaatagttccatatcaatttcagc

SEQ ID NO: 3908348 - DNA, 25 bp, Homo sapien
gcaagactgtcttaaaagaacaaca

SEQ ID NO: 3908349 - DNA, 25 bp, Homo sapien
gagcaagactgtcttaaaagaacaa

SEQ ID NO: 3908350 - DNA, 25 bp, Homo sapien
gctgaaatcgcgccactgtatgcca

SEQ ID NO: 3908351 - DNA, 25 bp, Homo sapien
gaaatcgcgccactgtatgccagcc

SEQ ID NO: 3908352 - DNA, 25 bp, Homo sapien
tgttatcatcacacattgctatgcc

SEQ ID NO: 3908353 - DNA, 25 bp, Homo sapien
ctgaggatgacagaaggttagtgcc

SEQ ID NO: 3908354 - DNA, 25 bp, Homo sapien
tgcctgggacactccgagaccttgt

SEQ ID NO: 3908355 - DNA, 25 bp, Homo sapien
ctgcatgggcagtatataatcaggt

SEQ ID NO: 3908356 - DNA, 25 bp, Homo sapien
gccatattgtctaggctggtcgcga

SEQ ID NO: 3908357 - DNA, 25 bp, Homo sapien
caaactgctgggattataggcatga

SEQ ID NO: 3908358 - DNA, 25 bp, Homo sapien
cccaaactgctgggattataggcat

SEQ ID NO: 3908359 - DNA, 25 bp, Homo sapien
ttgccatattgtctaggctggtcgc

SEQ ID NO: 3908360 - DNA, 25 bp, Homo sapien
gtcacattaattttacagttgggaa

SEQ ID NO: 3908361 - DNA, 25 bp, Homo sapien
tcttcccctgagctatccttttatg

SEQ ID NO: 3908362 - DNA, 25 bp, Homo sapien
ttttcagagtgtaccagcaatggtg

SEQ ID NO: 3908363 - DNA, 25 bp, Homo sapien
caggtataatgctctttgggataaa

SEQ ID NO: 3908364 - DNA, 25 bp, Homo sapien
catccacagttataaggcaggagct

SEQ ID NO: 3908365 - DNA, 25 bp, Homo sapien
catacaaggtcataaaaaacgcact

SEQ ID NO: 3908366 - DNA, 25 bp, Homo sapien
cactggtattgatctaacttctaag

SEQ ID NO: 3908367 - DNA, 25 bp, Homo sapien
taacagaatgcctcctaagttggcc

SEQ ID NO: 3908368 - DNA, 25 bp, Homo sapien
tgctcttctagctcactacactgta

SEQ ID NO: 3908369 - DNA, 25 bp, Homo sapien
tcttctagctcactacactgtagcc

SEQ ID NO: 3908370 - DNA, 25 bp, Homo sapien
tataatggcttacaaggtcaagatc

SEQ ID NO: 3908371 - DNA, 25 bp, Homo sapien
aaagctcaggttcacaggcatcagg

SEQ ID NO: 3908372 - DNA, 25 bp, Homo sapien
catttgtcactacatatattcccac

SEQ ID NO: 3908373 - DNA, 25 bp, Homo sapien
ttgtcactacatatattcccactga

SEQ ID NO: 3908374 - DNA, 25 bp, Homo sapien
aagttatatgttggtcatgataggg

SEQ ID NO: 3908375 - DNA, 25 bp, Homo sapien
gggaggaaccttcacaataagatga

SEQ ID NO: 3908376 - DNA, 25 bp, Homo sapien
tcaaatttccttagatgttttaagc

SEQ ID NO: 3908377 - DNA, 25 bp, Homo sapien
cttgctggactagatatttccttct

SEQ ID NO: 3908378 - DNA, 25 bp, Homo sapien
aaagagcaaggtcttgctggactag

SEQ ID NO: 3908379 - DNA, 25 bp, Homo sapien
aaaagagcaaggtcttgctggacta

SEQ ID NO: 3908380 - DNA, 25 bp, Homo sapien
aagagcaaggtcttgctggactaga

SEQ ID NO: 3908381 - DNA, 25 bp, Homo sapien
actcctccactccaatatacttaaa

SEQ ID NO: 3908382 - DNA, 25 bp, Homo sapien
aactcctccactccaatatacttaa

SEQ ID NO: 3908383 - DNA, 25 bp, Homo sapien
aaactcctccactccaatatactta

SEQ ID NO: 3908384 - DNA, 25 bp, Homo sapien
gagacaagaaatcttctcactgtgc

SEQ ID NO: 3908385 - DNA, 25 bp, Homo sapien
catgaatagctaggatgataagtgc

SEQ ID NO: 3908386 - DNA, 25 bp, Homo sapien
ggtcactctggtcttaaatgcctga

SEQ ID NO: 3908387 - DNA, 25 bp, Homo sapien
tgcccatatctgttcagcaataact

SEQ ID NO: 3908388 - DNA, 25 bp, Homo sapien
tcctcctaagaattaatttgctcta

SEQ ID NO: 3908389 - DNA, 25 bp, Homo sapien
tccaggccagacattaagtttgtca

SEQ ID NO: 3908390 - DNA, 25 bp, Homo sapien
taagaacatcaagctggtgtcaatg

SEQ ID NO: 3908391 - DNA, 25 bp, Homo sapien
gtctagtcccaccaaaaacagtcca

SEQ ID NO: 3908392 - DNA, 25 bp, Homo sapien
ggctcatgcctgcaatcccagcact

SEQ ID NO: 3908393 - DNA, 25 bp, Homo sapien
gccagcagttcgagaccagcctggc

SEQ ID NO: 3908394 - DNA, 25 bp, Homo sapien
ttgggaggccgaggcaggtggctca

SEQ ID NO: 3908395 - DNA, 25 bp, Homo sapien
atgctgctgaaaggccaagtgtggt

SEQ ID NO: 3908396 - DNA, 25 bp, Homo sapien
taccacttggaagctctatggaaac

SEQ ID NO: 3908397 - DNA, 25 bp, Homo sapien
catggtctataagttggatcgctcc

SEQ ID NO: 3908398 - DNA, 25 bp, Homo sapien
gagttgagcacatagccaaatcctg

SEQ ID NO: 3908399 - DNA, 25 bp, Homo sapien
tgtctacttgagtccgcagtggcac

SEQ ID NO: 3908400 - DNA, 25 bp, Homo sapien
gatgctacaatggtagcatgagata

SEQ ID NO: 3908401 - DNA, 25 bp, Homo sapien
aatttgttattagccatgatttaaa

SEQ ID NO: 3908402 - DNA, 25 bp, Homo sapien
tgttattagccatgatttaaatgtc

SEQ ID NO: 3908403 - DNA, 25 bp, Homo sapien
atttttttgatgctacaatggtagc

SEQ ID NO: 3908404 - DNA, 25 bp, Homo sapien
ctaaattacatccagtagttttcat

SEQ ID NO: 3908405 - DNA, 25 bp, Homo sapien
cagggcattagggataatatttacc

SEQ ID NO: 3908406 - DNA, 25 bp, Homo sapien
tctaaattacatccagtagttttca

SEQ ID NO: 3908407 - DNA, 25 bp, Homo sapien
atctaaattacatccagtagttttc

SEQ ID NO: 3908408 - DNA, 25 bp, Homo sapien
aaatagtggaagatcttttttctgc

SEQ ID NO: 3908409 - DNA, 25 bp, Homo sapien
tagtggaagatcttttttctgctgt

SEQ ID NO: 3908410 - DNA, 25 bp, Homo sapien
aaaatagtggaagatcttttttctg

SEQ ID NO: 3908411 - DNA, 25 bp, Homo sapien
aatagtggaagatcttttttctgct

SEQ ID NO: 3908412 - DNA, 25 bp, Homo sapien
gtactgcctgtgaaactccctgctt

SEQ ID NO: 3908413 - DNA, 25 bp, Homo sapien
aaaagtaccaggctgtgagatgtcc

SEQ ID NO: 3908414 - DNA, 25 bp, Homo sapien
aatagtgcatcgctgttgggcagct

SEQ ID NO: 3908415 - DNA, 25 bp, Homo sapien
tgtgtagcctgctgcaatagtgcat

SEQ ID NO: 3908416 - DNA, 25 bp, Homo sapien
aaatatctgcactaagctgctcttg

SEQ ID NO: 3908417 - DNA, 25 bp, Homo sapien
aaaatatctgcactaagctgctctt

SEQ ID NO: 3908418 - DNA, 25 bp, Homo sapien
tgttgaggaaaacattccagggctt

SEQ ID NO: 3908419 - DNA, 25 bp, Homo sapien
gttgaggaaaacattccagggctta

SEQ ID NO: 3908420 - DNA, 25 bp, Homo sapien
ctgttgaggaaaacattccagggct

SEQ ID NO: 3908421 - DNA, 25 bp, Homo sapien
ttgaggaaaacattccagggcttac

SEQ ID NO: 3908422 - DNA, 25 bp, Homo sapien
gctcttccaggtaataaattatctg

SEQ ID NO: 3908423 - DNA, 25 bp, Homo sapien
ttcagctcttccaggtaataaatta

SEQ ID NO: 3908424 - DNA, 25 bp, Homo sapien
gtgttttcagactgtggatgaacac

SEQ ID NO: 3908425 - DNA, 25 bp, Homo sapien
tttcagactgtggatgaacactttc

SEQ ID NO: 3908426 - DNA, 25 bp, Homo sapien
ctgctgctgctgctgttgattagat

SEQ ID NO: 3908427 - DNA, 25 bp, Homo sapien
ctgctgctgctgttgattagataac

SEQ ID NO: 3908428 - DNA, 25 bp, Homo sapien
gctgctgctgctgttgattagataa

SEQ ID NO: 3908429 - DNA, 25 bp, Homo sapien
tgctgctgctgctgttgattagata

SEQ ID NO: 3908430 - DNA, 25 bp, Homo sapien
tggtagacaatgcactcatcatgtg

SEQ ID NO: 3908431 - DNA, 25 bp, Homo sapien
tctgctggtaaactggcgattgctg

SEQ ID NO: 3908432 - DNA, 25 bp, Homo sapien
gaagggaataactctgactgaatct

SEQ ID NO: 3908433 - DNA, 25 bp, Homo sapien
tcaccattgcggctgaagattccat

SEQ ID NO: 3908434 - DNA, 25 bp, Homo sapien
ttggaccatggtctgaaagacactg

SEQ ID NO: 3908435 - DNA, 25 bp, Homo sapien
taacttgaggttgattgtccccact

SEQ ID NO: 3908436 - DNA, 25 bp, Homo sapien
tgttgggtaccactattctgaacac

SEQ ID NO: 3908437 - DNA, 25 bp, Homo sapien
tctcctgaacttgatgtctgaaaca

SEQ ID NO: 3908438 - DNA, 25 bp, Homo sapien
ttcttgggaaagcataggagtctgg

SEQ ID NO: 3908439 - DNA, 25 bp, Homo sapien
tgagagtgaaacattggaggctgca

SEQ ID NO: 3908440 - DNA, 25 bp, Homo sapien
gaagagccctgtaacacagcaatgg

SEQ ID NO: 3908441 - DNA, 25 bp, Homo sapien
ttcctgggaaaggttctgagcatcg

SEQ ID NO: 3908442 - DNA, 25 bp, Homo sapien
cattggattaggtggaagggagccc

SEQ ID NO: 3908443 - DNA, 25 bp, Homo sapien
ccttgttggctttgaggcattggat

SEQ ID NO: 3908444 - DNA, 25 bp, Homo sapien
tggaacatggttccttgttggcttt

SEQ ID NO: 3908445 - DNA, 25 bp, Homo sapien
ctttgaggcattggattaggtggaa

SEQ ID NO: 3908446 - DNA, 25 bp, Homo sapien
tctgcatggcaactattgagtgctg

SEQ ID NO: 3908447 - DNA, 25 bp, Homo sapien
gcatggcaactattgagtgctgtga

SEQ ID NO: 3908448 - DNA, 25 bp, Homo sapien
catggcaactattgagtgctgtgac

SEQ ID NO: 3908449 - DNA, 25 bp, Homo sapien
tgcatggcaactattgagtgctgtg

SEQ ID NO: 3908450 - DNA, 25 bp, Homo sapien
gctgctgctgttcctgggatggaga

SEQ ID NO: 3908451 - DNA, 25 bp, Homo sapien
tgctgctgttcctgggatggagagt

SEQ ID NO: 3908452 - DNA, 25 bp, Homo sapien
ctgctgttcctgggatggagagtta

SEQ ID NO: 3908453 - DNA, 25 bp, Homo sapien
tgctgttcctgggatggagagttac

SEQ ID NO: 3908454 - DNA, 25 bp, Homo sapien
ctgaataaaatgctctgttgttgtt

SEQ ID NO: 3908455 - DNA, 25 bp, Homo sapien
tttggagacgccattgtagccatgg

SEQ ID NO: 3908456 - DNA, 25 bp, Homo sapien
ctttggagacgccattgtagccatg

SEQ ID NO: 3908457 - DNA, 25 bp, Homo sapien
tggagacgccattgtagccatggta

SEQ ID NO: 3908458 - DNA, 25 bp, Homo sapien
gagacgccattgtagccatggtatt

SEQ ID NO: 3908459 - DNA, 25 bp, Homo sapien
gacccttgtaccaactgaatctgag

SEQ ID NO: 3908460 - DNA, 25 bp, Homo sapien
gctcttgagaactaggtgacccttg

SEQ ID NO: 3908461 - DNA, 25 bp, Homo sapien
gactgactctgaaattgcatgggct

SEQ ID NO: 3908462 - DNA, 25 bp, Homo sapien
gatgattccgactgggtaggacctg

SEQ ID NO: 3908463 - DNA, 25 bp, Homo sapien
atttatactggtctgcaaggcagac

SEQ ID NO: 3908464 - DNA, 25 bp, Homo sapien
atcttgttgatttatactggtctgc

SEQ ID NO: 3908465 - DNA, 25 bp, Homo sapien
tcttgttgatttatactggtctgca

SEQ ID NO: 3908466 - DNA, 25 bp, Homo sapien
ttgatttatactggtctgcaaggca

SEQ ID NO: 3908467 - DNA, 25 bp, Homo sapien
tgaaataaagtagcctgtggttgag

SEQ ID NO: 3908468 - DNA, 25 bp, Homo sapien
gatgtggctccttgaattccaggca

SEQ ID NO: 3908469 - DNA, 25 bp, Homo sapien
tggttgaggcgaagatgtggctcct

SEQ ID NO: 3908470 - DNA, 25 bp, Homo sapien
tctgcagttggttcattgtgcctcc

SEQ ID NO: 3908471 - DNA, 25 bp, Homo sapien
tgatcaggcaatgtagctggtccag

SEQ ID NO: 3908472 - DNA, 25 bp, Homo sapien
gacttatggccatcaactgatcagg

SEQ ID NO: 3908473 - DNA, 25 bp, Homo sapien
gctggtccagaggttaaaagctgac

SEQ ID NO: 3908474 - DNA, 25 bp, Homo sapien
aaaggagccagtcaagttgttccct

SEQ ID NO: 3908475 - DNA, 25 bp, Homo sapien
gaccataagctatcattcagaataa

SEQ ID NO: 3908476 - DNA, 25 bp, Homo sapien
ctgtattaactatatgaccataagc

SEQ ID NO: 3908477 - DNA, 25 bp, Homo sapien
tctgatgcttttcaataagaagcca

SEQ ID NO: 3908478 - DNA, 25 bp, Homo sapien
ctactattacttaacctaaatctgt

SEQ ID NO: 3908479 - DNA, 25 bp, Homo sapien
gatacaaccctgtaaagcctaaggc

SEQ ID NO: 3908480 - DNA, 25 bp, Homo sapien
taaagtggccaaagatgctacaggg

SEQ ID NO: 3908481 - DNA, 25 bp, Homo sapien
taggtcaccctagattaaagtggcc

SEQ ID NO: 3908482 - DNA, 25 bp, Homo sapien
tgtgggaaccatcaggtaagtgacc

SEQ ID NO: 3908483 - DNA, 25 bp, Homo sapien
tactgacatcaaggaactaactgcc

SEQ ID NO: 3908484 - DNA, 25 bp, Homo sapien
taactgcctgatggaatggccacag

SEQ ID NO: 3908485 - DNA, 25 bp, Homo sapien
ccacgttgtggtagaacatcagaca

SEQ ID NO: 3908486 - DNA, 25 bp, Homo sapien
gaaaagttcccttcatatcggcaag

SEQ ID NO: 3908487 - DNA, 25 bp, Homo sapien
cctcctcataacctgaactatactg

SEQ ID NO: 3908488 - DNA, 25 bp, Homo sapien
tcaaactgaagcactggattgtgtg

SEQ ID NO: 3908489 - DNA, 25 bp, Homo sapien
cataacctgaactatactgggtaat

SEQ ID NO: 3908490 - DNA, 25 bp, Homo sapien
gcactggattgtgtggctgatcctc

SEQ ID NO: 3908491 - DNA, 25 bp, Homo sapien
taaagtaactagagcactgggacct

SEQ ID NO: 3908492 - DNA, 25 bp, Homo sapien
tacacttgagaaacgagaaatgccc

SEQ ID NO: 3908493 - DNA, 25 bp, Homo sapien
ggaaagcagccctatcccaaaggta

SEQ ID NO: 3908494 - DNA, 25 bp, Homo sapien
gaatatggtagcatagcacagccct

SEQ ID NO: 3908495 - DNA, 25 bp, Homo sapien
gatgcaaatgaaattcccccagaga

SEQ ID NO: 3908496 - DNA, 25 bp, Homo sapien
tatacaaatgttccaatagaagcaa

SEQ ID NO: 3908497 - DNA, 25 bp, Homo sapien
tacagaaatatagttgcgagtatac

SEQ ID NO: 3908498 - DNA, 25 bp, Homo sapien
cacagatagctaaaaacatagatgc

SEQ ID NO: 3908499 - DNA, 25 bp, Homo sapien
taagtatgctgtctaaagcaatgtc

SEQ ID NO: 3908500 - DNA, 25 bp, Homo sapien
gcttggcaaggcatactgtatttag

SEQ ID NO: 3908501 - DNA, 25 bp, Homo sapien
gacacccatgtatctgtattagcat

SEQ ID NO: 3908502 - DNA, 25 bp, Homo sapien
cagatactgtctatatttgatagga

SEQ ID NO: 3908503 - DNA, 25 bp, Homo sapien
ggagaatatgataaaacactgccct

SEQ ID NO: 3908504 - DNA, 25 bp, Homo sapien
tgccctcttgtggtgcattgaaaga

SEQ ID NO: 3908505 - DNA, 25 bp, Homo sapien
tggcccttgcaatcttctactttaa

SEQ ID NO: 3908506 - DNA, 25 bp, Homo sapien
tccacaccgtacatctgcaatatga

SEQ ID NO: 3908507 - DNA, 25 bp, Homo sapien
ggtagttagccatctaatgcttgtt

SEQ ID NO: 3908508 - DNA, 25 bp, Homo sapien
caaagcagttactaatatgcctagc

SEQ ID NO: 3908509 - DNA, 25 bp, Homo sapien
tatgcctagcacaagtaccactctt

SEQ ID NO: 3908510 - DNA, 25 bp, Homo sapien
tacagtacacagataccttgaaagg

SEQ ID NO: 3908511 - DNA, 25 bp, Homo sapien
gacgcccgaattcaaatcctggaag

SEQ ID NO: 3908512 - DNA, 25 bp, Homo sapien
aactgacatatagcattgggcacac

SEQ ID NO: 3908513 - DNA, 25 bp, Homo sapien
tgacctaaacttccaggcaggattc

SEQ ID NO: 3908514 - DNA, 25 bp, Homo sapien
gaatatttgggatgagacaccactg

SEQ ID NO: 3908515 - DNA, 25 bp, Homo sapien
gccctggagccaatcttcaagaaag

SEQ ID NO: 3908516 - DNA, 25 bp, Homo sapien
aaaaggtgaagagcgagttcccgca

SEQ ID NO: 3908517 - DNA, 25 bp, Homo sapien
cgatggaaataacaggcgggcttca

SEQ ID NO: 3908518 - DNA, 25 bp, Homo sapien
tgcctgccaaggaagtgcaattgca

SEQ ID NO: 3908519 - DNA, 25 bp, Homo sapien
gattggaggacgaatgagtggcact

SEQ ID NO: 3908520 - DNA, 25 bp, Homo sapien
cagctgccgacgcagagaatcggga

SEQ ID NO: 3908521 - DNA, 25 bp, Homo sapien
gccggacgggctagatgagcagcag

SEQ ID NO: 3908522 - DNA, 25 bp, Homo sapien
cacagcacggaagagagggccggac

SEQ ID NO: 3908523 - DNA, 25 bp, Homo sapien
tgacatgtgtggtgcggttcagccc

SEQ ID NO: 3908524 - DNA, 25 bp, Homo sapien
tagttcactcacaagagacttcagg

SEQ ID NO: 3908525 - DNA, 25 bp, Homo sapien
ggactagtgatgtgaaccctacaga

SEQ ID NO: 3908526 - DNA, 25 bp, Homo sapien
ccctcgagaaagtgccgtgatgtga

SEQ ID NO: 3908527 - DNA, 25 bp, Homo sapien
gacaaaatccacaagtagaaggagt

SEQ ID NO: 3908528 - DNA, 25 bp, Homo sapien
ttctttagcggtacataccgaaatg

SEQ ID NO: 3908529 - DNA, 25 bp, Homo sapien
gcggtacataccgaaatgtttgtcc

SEQ ID NO: 3908530 - DNA, 25 bp, Homo sapien
gtttgtccttggaatgtctgggatt

SEQ ID NO: 3908531 - DNA, 25 bp, Homo sapien
gaacggcatgctgattcgtgaggcc

SEQ ID NO: 3908532 - DNA, 25 bp, Homo sapien
ggtcagtcaggttcttaacacaggg

SEQ ID NO: 3908533 - DNA, 25 bp, Homo sapien
gctgagtttccttcgcaaaagccaa

SEQ ID NO: 3908534 - DNA, 25 bp, Homo sapien
gagagggttttcagcccagcaatga

SEQ ID NO: 3908535 - DNA, 25 bp, Homo sapien
tggaaacacgaaccctagcggagat

SEQ ID NO: 3908536 - DNA, 25 bp, Homo sapien
tgatgaggcgccaagaagaacttcg

SEQ ID NO: 3908537 - DNA, 25 bp, Homo sapien
cattgtggatgatcgaggaaggccc

SEQ ID NO: 3908538 - DNA, 25 bp, Homo sapien
tctggacagacgcagtgaaggctcc

SEQ ID NO: 3908539 - DNA, 25 bp, Homo sapien
ctgccgtggccacagaagcggcgcc

SEQ ID NO: 3908540 - DNA, 25 bp, Homo sapien
gaactcctctcctacttccgccttc

SEQ ID NO: 3908541 - DNA, 25 bp, Homo sapien
gcgccgaactcctctcctacttccg

SEQ ID NO: 3908542 - DNA, 25 bp, Homo sapien
gtggccacagaagcggcgccgaact

SEQ ID NO: 3908543 - DNA, 25 bp, Homo sapien
aaatgagctgaagggctaggctccc

SEQ ID NO: 3908544 - DNA, 25 bp, Homo sapien
cgtcatcaaagtctcgggtaacaat

SEQ ID NO: 3908545 - DNA, 25 bp, Homo sapien
taaagcctcgatgatggcccgttca

SEQ ID NO: 3908546 - DNA, 25 bp, Homo sapien
taaaaactgaatgggaccgtcatca

SEQ ID NO: 3908547 - DNA, 25 bp, Homo sapien
ttgtaacccaaaacgatgctggctg

SEQ ID NO: 3908548 - DNA, 25 bp, Homo sapien
ctgctgtgaatgtccagtttgaaca

SEQ ID NO: 3908549 - DNA, 25 bp, Homo sapien
tggctgctgtgaatgtccagtttga

SEQ ID NO: 3908550 - DNA, 25 bp, Homo sapien
aacccaaaacgatgctggctgctgt

SEQ ID NO: 3908551 - DNA, 25 bp, Homo sapien
ctgtcccatcatccaggggaaacat

SEQ ID NO: 3908552 - DNA, 25 bp, Homo sapien
ccatcatccaggggaaacatcttcc

SEQ ID NO: 3908553 - DNA, 25 bp, Homo sapien
atcatccaggggaaacatcttccct

SEQ ID NO: 3908554 - DNA, 25 bp, Homo sapien
tcccatcatccaggggaaacatctt

SEQ ID NO: 3908555 - DNA, 25 bp, Homo sapien
ttggaagccccgtggaattacaggc

SEQ ID NO: 3908556 - DNA, 25 bp, Homo sapien
gggccctaggtcaggactgccatgt

SEQ ID NO: 3908557 - DNA, 25 bp, Homo sapien
caagaagcaaaaggcatgggtgact

SEQ ID NO: 3908558 - DNA, 25 bp, Homo sapien
gcagggaggtacactattggaagcc

SEQ ID NO: 3908559 - DNA, 25 bp, Homo sapien
ggtggaagagaagtcccctgactcc

SEQ ID NO: 3908560 - DNA, 25 bp, Homo sapien
tggaagagaagtcccctgactccag

SEQ ID NO: 3908561 - DNA, 25 bp, Homo sapien
ctggtggaagagaagtcccctgact

SEQ ID NO: 3908562 - DNA, 25 bp, Homo sapien
ggaagagaagtcccctgactccagc

SEQ ID NO: 3908563 - DNA, 25 bp, Homo sapien
cgaggagtggtggcgcaactataat

SEQ ID NO: 3908564 - DNA, 25 bp, Homo sapien
agcgaggagtggtggcgcaactata

SEQ ID NO: 3908565 - DNA, 25 bp, Homo sapien
gcgaggagtggtggcgcaactataa

SEQ ID NO: 3908566 - DNA, 25 bp, Homo sapien
tgagcaagataccaccctgacatta

SEQ ID NO: 3908567 - DNA, 25 bp, Homo sapien
tgcagtccactgcttatataacagt

SEQ ID NO: 3908568 - DNA, 25 bp, Homo sapien
cagtaatccatgttattctatagag

SEQ ID NO: 3908569 - DNA, 25 bp, Homo sapien
tccagatctaatgagcaagatacca

SEQ ID NO: 3908570 - DNA, 25 bp, Homo sapien
tagcattcaggggttgtatacaaac

SEQ ID NO: 3908571 - DNA, 25 bp, Homo sapien
agccaaatttagcattcaggggttg

SEQ ID NO: 3908572 - DNA, 25 bp, Homo sapien
tttagtgacactaatgttaataagt

SEQ ID NO: 3908573 - DNA, 25 bp, Homo sapien
gataacccactaccacaggaccaac

SEQ ID NO: 3908574 - DNA, 25 bp, Homo sapien
gcaccccagcctgggggagagagtg

SEQ ID NO: 3908575 - DNA, 25 bp, Homo sapien
ctgcaccccagcctgggggagagag

SEQ ID NO: 3908576 - DNA, 25 bp, Homo sapien
cgctgcaccccagcctgggggagag

SEQ ID NO: 3908577 - DNA, 25 bp, Homo sapien
ccgctgcaccccagcctgggggaga

SEQ ID NO: 3908578 - DNA, 25 bp, Homo sapien
ctgcccggctagagctggcagatgc

SEQ ID NO: 3908579 - DNA, 25 bp, Homo sapien
ctgagacttctcaaaaggcagggcc

SEQ ID NO: 3908580 - DNA, 25 bp, Homo sapien
gacaggaggctactgccttaactca

SEQ ID NO: 3908581 - DNA, 25 bp, Homo sapien
caggacaggaggctactgccttaac

SEQ ID NO: 3908582 - DNA, 25 bp, Homo sapien
tactgccttaactcagggtggagac

SEQ ID NO: 3908583 - DNA, 25 bp, Homo sapien
ggaggctactgccttaactcagggt

SEQ ID NO: 3908584 - DNA, 25 bp, Homo sapien
ggctactatctccttaatcttttaa

SEQ ID NO: 3908585 - DNA, 25 bp, Homo sapien
tcaatatatacaaattgcctgtggc

SEQ ID NO: 3908586 - DNA, 25 bp, Homo sapien
gacttccaccagctgttttaaagaa

SEQ ID NO: 3908587 - DNA, 25 bp, Homo sapien
gctttgccaaggcaacaatgatttt

SEQ ID NO: 3908588 - DNA, 25 bp, Homo sapien
taggagttaattcgaggttgacgat

SEQ ID NO: 3908589 - DNA, 25 bp, Homo sapien
tgcaccttgggctttgcggacacca

SEQ ID NO: 3908590 - DNA, 25 bp, Homo sapien
cctccacgtaggagttaattcgagg

SEQ ID NO: 3908591 - DNA, 25 bp, Homo sapien
cgaggttgacgattatgcaccttgg

SEQ ID NO: 3908592 - DNA, 25 bp, Homo sapien
agagctcccaatgcgcttcccagtc

SEQ ID NO: 3908593 - DNA, 25 bp, Homo sapien
ctcccaatgcgcttcccagtcttct

SEQ ID NO: 3908594 - DNA, 25 bp, Homo sapien
gctcagagctcccaatgcgcttccc

SEQ ID NO: 3908595 - DNA, 25 bp, Homo sapien
tcagagctcccaatgcgcttcccag

SEQ ID NO: 3908596 - DNA, 25 bp, Homo sapien
tcttcaagacgttggagaggttgac

SEQ ID NO: 3908597 - DNA, 25 bp, Homo sapien
taaatgactctgtgccgtgacattc

SEQ ID NO: 3908598 - DNA, 25 bp, Homo sapien
tcaaggtatggcagctccagacctt

SEQ ID NO: 3908599 - DNA, 25 bp, Homo sapien
gacagatgcggtgcctagcagttca

SEQ ID NO: 3908600 - DNA, 25 bp, Homo sapien
ccaagaatcacgtcggcaccccctt

SEQ ID NO: 3908601 - DNA, 25 bp, Homo sapien
ttgatctgccaggtcctcccatccc

SEQ ID NO: 3908602 - DNA, 25 bp, Homo sapien
gatctgccaggtcctcccatcccca

SEQ ID NO: 3908603 - DNA, 25 bp, Homo sapien
ggttgatctgccaggtcctcccatc

SEQ ID NO: 3908604 - DNA, 25 bp, Homo sapien
caggttgatctgccaggtcctccca

SEQ ID NO: 3908605 - DNA, 25 bp, Homo sapien
tcagccttcccaaaactccaaagac

SEQ ID NO: 3908606 - DNA, 25 bp, Homo sapien
cctggacaaagagggctaaactctg

SEQ ID NO: 3908607 - DNA, 25 bp, Homo sapien
aaggagaacagaggtactgcagccc

SEQ ID NO: 3908608 - DNA, 25 bp, Homo sapien
taaactctgtagtggaggcagagag

SEQ ID NO: 3908609 - DNA, 25 bp, Homo sapien
ttttgacggaccactctcccacaaa

SEQ ID NO: 3908610 - DNA, 25 bp, Homo sapien
ggaccactctcccacaaagaataag

SEQ ID NO: 3908611 - DNA, 25 bp, Homo sapien
ataagcctcctacactaagaaaaat

SEQ ID NO: 3908612 - DNA, 25 bp, Homo sapien
tcccttttgacggaccactctccca

SEQ ID NO: 3908613 - DNA, 25 bp, Homo sapien
cccgtgacagtcacactgccatggg

SEQ ID NO: 3908614 - DNA, 25 bp, Homo sapien
agaaggcagagagatagcctgaatt

SEQ ID NO: 3908615 - DNA, 25 bp, Homo sapien
ccccgtgacagtcacactgccatgg

SEQ ID NO: 3908616 - DNA, 25 bp, Homo sapien
ctttgggttttcaagctctcctaag

SEQ ID NO: 3908617 - DNA, 25 bp, Homo sapien
ttgggttttcaagctctcctaagcg

SEQ ID NO: 3908618 - DNA, 25 bp, Homo sapien
tttgggttttcaagctctcctaagc

SEQ ID NO: 3908619 - DNA, 25 bp, Homo sapien
tctgtcagggcactgccattaggca

SEQ ID NO: 3908620 - DNA, 25 bp, Homo sapien
ttaggcacatttcccagatcaacag

SEQ ID NO: 3908621 - DNA, 25 bp, Homo sapien
agatcaacagttggcccgtccagga

SEQ ID NO: 3908622 - DNA, 25 bp, Homo sapien
aattgtcagctctccgcctgagaca

SEQ ID NO: 3908623 - DNA, 25 bp, Homo sapien
gggctggtgccggttctctggagct

SEQ ID NO: 3908624 - DNA, 25 bp, Homo sapien
tcttccaccaaagcagtttgtgctg

SEQ ID NO: 3908625 - DNA, 25 bp, Homo sapien
ttccaccaaagcagtttgtgctggg

SEQ ID NO: 3908626 - DNA, 25 bp, Homo sapien
ggtgccggttctctggagctactgc

SEQ ID NO: 3908627 - DNA, 25 bp, Homo sapien
tgtagttactagcaccaaagctgag

SEQ ID NO: 3908628 - DNA, 25 bp, Homo sapien
ttgtaagtcacctaccgagacacgg

SEQ ID NO: 3908629 - DNA, 25 bp, Homo sapien
tcaactagaggaattcagagaccag

SEQ ID NO: 3908630 - DNA, 25 bp, Homo sapien
cgagacacggaaaacatgactggtc

SEQ ID NO: 3908631 - DNA, 25 bp, Homo sapien
gacttcctgaagtgttcacagtgga

SEQ ID NO: 3908632 - DNA, 25 bp, Homo sapien
taaatcttcagaggccgttaatgcc

SEQ ID NO: 3908633 - DNA, 25 bp, Homo sapien
tatttagagctcaccggagacggtt

SEQ ID NO: 3908634 - DNA, 25 bp, Homo sapien
aaatgcagattgtgaccaacactgg

SEQ ID NO: 3908635 - DNA, 25 bp, Homo sapien
acctgtgaatatgacaaggtgccac

SEQ ID NO: 3908636 - DNA, 25 bp, Homo sapien
tatgtcgtcgtgtaccacagcagac

SEQ ID NO: 3908637 - DNA, 25 bp, Homo sapien
aaatcacagggagatctgacactcc

SEQ ID NO: 3908638 - DNA, 25 bp, Homo sapien
ggtgccacacccttgagtatgtcgt

SEQ ID NO: 3908639 - DNA, 25 bp, Homo sapien
tctctagacccctaccaagggagag

SEQ ID NO: 3908640 - DNA, 25 bp, Homo sapien
gacatccctcaaaatacctctctag

SEQ ID NO: 3908641 - DNA, 25 bp, Homo sapien
ggaggcaggctccaaaaagaatatg

SEQ ID NO: 3908642 - DNA, 25 bp, Homo sapien
tgttctgacacgacaaatcacaagg

SEQ ID NO: 3908643 - DNA, 25 bp, Homo sapien
ttgccgcttaggagatgagcatccc

SEQ ID NO: 3908644 - DNA, 25 bp, Homo sapien
tgtcctatgacctgagatcccctga

SEQ ID NO: 3908645 - DNA, 25 bp, Homo sapien
tacaggtgcgccagaaaagcctctt

SEQ ID NO: 3908646 - DNA, 25 bp, Homo sapien
ttttgcgcaccctagagtacagagc

SEQ ID NO: 3908647 - DNA, 25 bp, Homo sapien
catgagggccgctgaaatgtactca

SEQ ID NO: 3908648 - DNA, 25 bp, Homo sapien
tcatgagggccgctgaaatgtactc

SEQ ID NO: 3908649 - DNA, 25 bp, Homo sapien
cgcccttcatgagggccgctgaaat

SEQ ID NO: 3908650 - DNA, 25 bp, Homo sapien
tggcctcgcccttcatgagggccgc

SEQ ID NO: 3908651 - DNA, 25 bp, Homo sapien
aattggcaaaatatcctgtgaccat

SEQ ID NO: 3908652 - DNA, 25 bp, Homo sapien
aataattggcaaaatatcctgtgac

SEQ ID NO: 3908653 - DNA, 25 bp, Homo sapien
atctgaaataattggcaaaatatcc

SEQ ID NO: 3908654 - DNA, 25 bp, Homo sapien
ctgaaataattggcaaaatatcctg

SEQ ID NO: 3908655 - DNA, 25 bp, Homo sapien
gggggttcaaagtagaaagcagaca

SEQ ID NO: 3908656 - DNA, 25 bp, Homo sapien
ctgggggttcaaagtagaaagcaga

SEQ ID NO: 3908657 - DNA, 25 bp, Homo sapien
gtagaaagcagacagacataagtca

SEQ ID NO: 3908658 - DNA, 25 bp, Homo sapien
gttcaaagtagaaagcagacagaca

SEQ ID NO: 3908659 - DNA, 25 bp, Homo sapien
tgaagcacccgaatgtctgtgcgtc

SEQ ID NO: 3908660 - DNA, 25 bp, Homo sapien
ggttgttctggctgaagcacccgaa

SEQ ID NO: 3908661 - DNA, 25 bp, Homo sapien
tggcggtgccggctccgagcaccgg

SEQ ID NO: 3908662 - DNA, 25 bp, Homo sapien
ctgtggcctgagttcttgacgggct

SEQ ID NO: 3908663 - DNA, 25 bp, Homo sapien
ccaaggcagctgatcagtcggctct

SEQ ID NO: 3908664 - DNA, 25 bp, Homo sapien
aacacaagcaactgcactgccaagg

SEQ ID NO: 3908665 - DNA, 25 bp, Homo sapien
tcggctcttcacgacagcaaccaaa

SEQ ID NO: 3908666 - DNA, 25 bp, Homo sapien
aagatcagctcgtaacatgtgggcc

SEQ ID NO: 3908667 - DNA, 25 bp, Homo sapien
ggtctcagctacacagtcgcacagc

SEQ ID NO: 3908668 - DNA, 25 bp, Homo sapien
agcccctgtgacatgctgttttgac

SEQ ID NO: 3908669 - DNA, 25 bp, Homo sapien
cccctgtgacatgctgttttgactt

SEQ ID NO: 3908670 - DNA, 25 bp, Homo sapien
gctacacagtcgcacagcccctgtg

SEQ ID NO: 3908671 - DNA, 25 bp, Homo sapien
gggaaagcactccacactgtgaagc

SEQ ID NO: 3908672 - DNA, 25 bp, Homo sapien
tgttcttgctgcatctctttgccca

SEQ ID NO: 3908673 - DNA, 25 bp, Homo sapien
tctttgcccacatcggccttcttcc

SEQ ID NO: 3908674 - DNA, 25 bp, Homo sapien
tgagagcgagggcagatttgtttcc

SEQ ID NO: 3908675 - DNA, 25 bp, Homo sapien
tggggacgtcacaccaacaacggaa

SEQ ID NO: 3908676 - DNA, 25 bp, Homo sapien
aacggaaggttcttcgggatcagtg

SEQ ID NO: 3908677 - DNA, 25 bp, Homo sapien
cgggatcagtggctgttgtgggttc

SEQ ID NO: 3908678 - DNA, 25 bp, Homo sapien
cagggagagaagtcgtgttgggatt

SEQ ID NO: 3908679 - DNA, 25 bp, Homo sapien
tgggagctgctgtgtacccgaagtg

SEQ ID NO: 3908680 - DNA, 25 bp, Homo sapien
ggagctgctgtgtacccgaagtgct

SEQ ID NO: 3908681 - DNA, 25 bp, Homo sapien
ctgctgtgtacccgaagtgctgggt

SEQ ID NO: 3908682 - DNA, 25 bp, Homo sapien
agctgctgtgtacccgaagtgctgg

SEQ ID NO: 3908683 - DNA, 25 bp, Homo sapien
tcaattaattccactcggaggcagg

SEQ ID NO: 3908684 - DNA, 25 bp, Homo sapien
ccgaaagatccagaaaacatccctc

SEQ ID NO: 3908685 - DNA, 25 bp, Homo sapien
cgtccttgatagtgtcttaagggcc

SEQ ID NO: 3908686 - DNA, 25 bp, Homo sapien
tctcaagagagtgcctctggatatc

SEQ ID NO: 3908687 - DNA, 25 bp, Homo sapien
cagtcttggtaagagcattatcagc

SEQ ID NO: 3908688 - DNA, 25 bp, Homo sapien
taacagcaattcttttcaagtggcc

SEQ ID NO: 3908689 - DNA, 25 bp, Homo sapien
tcaagtggcccttataaattgatac

SEQ ID NO: 3908690 - DNA, 25 bp, Homo sapien
tagaaaataagaccatgtgaaaccc

SEQ ID NO: 3908691 - DNA, 25 bp, Homo sapien
tggccgctgactcacatagatggag

SEQ ID NO: 3908692 - DNA, 25 bp, Homo sapien
caacactgcatcttggtcacatggg

SEQ ID NO: 3908693 - DNA, 25 bp, Homo sapien
caggcagcacagtcggtggattcta

SEQ ID NO: 3908694 - DNA, 25 bp, Homo sapien
ggttggatcatggactacacgaggt

SEQ ID NO: 3908695 - DNA, 25 bp, Homo sapien
tatttaacatgacaaacaccattaa

SEQ ID NO: 3908696 - DNA, 25 bp, Homo sapien
aacaccattaaatagcatgtaggga

SEQ ID NO: 3908697 - DNA, 25 bp, Homo sapien
tagggatgttttctctcccgggcat

SEQ ID NO: 3908698 - DNA, 25 bp, Homo sapien
taaatagcatgtagggatgttttct

SEQ ID NO: 3908699 - DNA, 25 bp, Homo sapien
atagacacgtccgttgggcagctct

SEQ ID NO: 3908700 - DNA, 25 bp, Homo sapien
cataatagacacgtccgttgggcag

SEQ ID NO: 3908701 - DNA, 25 bp, Homo sapien
gtggtcaacataatagacacgtccg

SEQ ID NO: 3908702 - DNA, 25 bp, Homo sapien
aacataatagacacgtccgttgggc

SEQ ID NO: 3908703 - DNA, 25 bp, Homo sapien
aaattacctagatcagggtgcggcg

SEQ ID NO: 3908704 - DNA, 25 bp, Homo sapien
tagggtacggcggaatgcatcaaca

SEQ ID NO: 3908705 - DNA, 25 bp, Homo sapien
tacaaaaacagtcagagggccggat

SEQ ID NO: 3908706 - DNA, 25 bp, Homo sapien
taacttggcggcattctcacgaagc

SEQ ID NO: 3908707 - DNA, 25 bp, Homo sapien
caaatattgactgggtatttgataa

SEQ ID NO: 3908708 - DNA, 25 bp, Homo sapien
catactgttaaagtcaatgtttaat

SEQ ID NO: 3908709 - DNA, 25 bp, Homo sapien
acatactgttaaagtcaatgtttaa

SEQ ID NO: 3908710 - DNA, 25 bp, Homo sapien
tattgactgggtatttgataatata

SEQ ID NO: 3908711 - DNA, 25 bp, Homo sapien
ctgatataaggtgccagtgtaaaca

SEQ ID NO: 3908712 - DNA, 25 bp, Homo sapien
tgatataaggtgccagtgtaaacat

SEQ ID NO: 3908713 - DNA, 25 bp, Homo sapien
ggtggtccgagtattgtgatccaca

SEQ ID NO: 3908714 - DNA, 25 bp, Homo sapien
catagttgcgcacgtactccgcggt

SEQ ID NO: 3908715 - DNA, 25 bp, Homo sapien
gcgactgccactgctcatagttgcg

SEQ ID NO: 3908716 - DNA, 25 bp, Homo sapien
tccacatagtaaaacctgcctcggg

SEQ ID NO: 3908717 - DNA, 25 bp, Homo sapien
tcgggccaagcgcctgccctctcac

SEQ ID NO: 3908718 - DNA, 25 bp, Homo sapien
ctcgggccaagcgcctgccctctca

SEQ ID NO: 3908719 - DNA, 25 bp, Homo sapien
aatgacagtaacgtttgaagactgc

SEQ ID NO: 3908720 - DNA, 25 bp, Homo sapien
agtaaatggatgcaatgacagtaac

SEQ ID NO: 3908721 - DNA, 25 bp, Homo sapien
aagaccacaaaaggttttgagccag

SEQ ID NO: 3908722 - DNA, 25 bp, Homo sapien
tggatgcaatgacagtaacgtttga

SEQ ID NO: 3908723 - DNA, 25 bp, Homo sapien
gataatgcaatttggagtccacacc

SEQ ID NO: 3908724 - DNA, 25 bp, Homo sapien
ttctcgataatgcaatttggagtcc

SEQ ID NO: 3908725 - DNA, 25 bp, Homo sapien
tctgtttctcgataatgcaatttgg

SEQ ID NO: 3908726 - DNA, 25 bp, Homo sapien
aagttgtctgtttctcgataatgca

SEQ ID NO: 3908727 - DNA, 25 bp, Homo sapien
gcaatgttggctctctttcgttaaa

SEQ ID NO: 3908728 - DNA, 25 bp, Homo sapien
gtctccctgactagcactgaactag

SEQ ID NO: 3908729 - DNA, 25 bp, Homo sapien
tggtaccaacccagcttccacaggg

SEQ ID NO: 3908730 - DNA, 25 bp, Homo sapien
tacaaatcaacagaccaaaaaggtc

SEQ ID NO: 3908731 - DNA, 25 bp, Homo sapien
acacagaatgcaagtgcacggaggt

SEQ ID NO: 3908732 - DNA, 25 bp, Homo sapien
ctttctttccaaggtggcaacacag

SEQ ID NO: 3908733 - DNA, 25 bp, Homo sapien
tctttccaaggtggcaacacaggcc

SEQ ID NO: 3908734 - DNA, 25 bp, Homo sapien
tttctttccaaggtggcaacacagg

SEQ ID NO: 3908735 - DNA, 25 bp, Homo sapien
gcccctcttccaagcaagttccaac

SEQ ID NO: 3908736 - DNA, 25 bp, Homo sapien
tggaactcaactgccagcaagcccc

SEQ ID NO: 3908737 - DNA, 25 bp, Homo sapien
cagtgtcggcttgagaaaacattgg

SEQ ID NO: 3908738 - DNA, 25 bp, Homo sapien
gggtgccggagccacacatgggcag

SEQ ID NO: 3908739 - DNA, 25 bp, Homo sapien
ttctaaatgcggacttcaggctgct

SEQ ID NO: 3908740 - DNA, 25 bp, Homo sapien
cacagcagaacacagaggttacaaa

SEQ ID NO: 3908741 - DNA, 25 bp, Homo sapien
caaaaaagaaccctgcgcacggagg

SEQ ID NO: 3908742 - DNA, 25 bp, Homo sapien
atttgagcgctttgcagggaatgca

SEQ ID NO: 3908743 - DNA, 25 bp, Homo sapien
gtgggactttaggtggcatctgctc

SEQ ID NO: 3908744 - DNA, 25 bp, Homo sapien
cccagccaggagggagggggcccag

SEQ ID NO: 3908745 - DNA, 25 bp, Homo sapien
ccagccaggagggagggggcccagg

SEQ ID NO: 3908746 - DNA, 25 bp, Homo sapien
cagccaggagggagggggcccaggg

SEQ ID NO: 3908747 - DNA, 25 bp, Homo sapien
catggactcttgagtagacaccttg

SEQ ID NO: 3908748 - DNA, 25 bp, Homo sapien
cactcctttagcgatggtgggtgga

SEQ ID NO: 3908749 - DNA, 25 bp, Homo sapien
agtgtcaaaatatcttagtggtagc

SEQ ID NO: 3908750 - DNA, 25 bp, Homo sapien
atccatttgggagttaggcagtgtc

SEQ ID NO: 3908751 - DNA, 25 bp, Homo sapien
tttgttagggtggatcattccaacc

SEQ ID NO: 3908752 - DNA, 25 bp, Homo sapien
tcattccaaccatacggtcacagat

SEQ ID NO: 3908753 - DNA, 25 bp, Homo sapien
ggtggatcattccaaccatacggtc

SEQ ID NO: 3908754 - DNA, 25 bp, Homo sapien
gcattcaactctcgtatctgcttcc

SEQ ID NO: 3908755 - DNA, 25 bp, Homo sapien
tagcagcgatgcgtttccagagtca

SEQ ID NO: 3908756 - DNA, 25 bp, Homo sapien
catcaaggacttgggataggtaaga

SEQ ID NO: 3908757 - DNA, 25 bp, Homo sapien
taccaagcgcgaggagaaatctaca

SEQ ID NO: 3908758 - DNA, 25 bp, Homo sapien
tacacggcgataataactagcagcg

SEQ ID NO: 3908759 - DNA, 25 bp, Homo sapien
gaagtgtctgcatcgagaagatcca

SEQ ID NO: 3908760 - DNA, 25 bp, Homo sapien
gagcagaagtgtctgcatcgagaag

SEQ ID NO: 3908761 - DNA, 25 bp, Homo sapien
ccgagagcagaagtgtctgcatcga

SEQ ID NO: 3908762 - DNA, 25 bp, Homo sapien
tgtctgcatcgagaagatccagctc

SEQ ID NO: 3908763 - DNA, 25 bp, Homo sapien
ggggcagccaacacagatccccaag

SEQ ID NO: 3908764 - DNA, 25 bp, Homo sapien
tggggcagccaacacagatccccaa

SEQ ID NO: 3908765 - DNA, 25 bp, Homo sapien
ctggggcagccaacacagatcccca

SEQ ID NO: 3908766 - DNA, 25 bp, Homo sapien
gttcttcctgttcattctcggtgag

SEQ ID NO: 3908767 - DNA, 25 bp, Homo sapien
ttcctgttcattctcggtgagccct

SEQ ID NO: 3908768 - DNA, 25 bp, Homo sapien
tcttcctgttcattctcggtgagcc

SEQ ID NO: 3908769 - DNA, 25 bp, Homo sapien
cctgttcattctcggtgagccctgg

SEQ ID NO: 3908770 - DNA, 25 bp, Homo sapien
cacctggctcgacctcattttagga

SEQ ID NO: 3908771 - DNA, 25 bp, Homo sapien
tctgaacccgaggtgtcctgagtcc

SEQ ID NO: 3908772 - DNA, 25 bp, Homo sapien
tgcctcgcggcattcagtttcagtt

SEQ ID NO: 3908773 - DNA, 25 bp, Homo sapien
tgggttagcaagctgccgatcactc

SEQ ID NO: 3908774 - DNA, 25 bp, Homo sapien
gggatctgtccagcgggcttgaggc

SEQ ID NO: 3908775 - DNA, 25 bp, Homo sapien
ggtgcccagagctgttacagagcta

SEQ ID NO: 3908776 - DNA, 25 bp, Homo sapien
aaagccaaggctaaccacagggcca

SEQ ID NO: 3908777 - DNA, 25 bp, Homo sapien
cacgtctgccctgttaagggccaaa

SEQ ID NO: 3908778 - DNA, 25 bp, Homo sapien
tctgaacaatctctgttctcttgcc

SEQ ID NO: 3908779 - DNA, 25 bp, Homo sapien
ctgatatactgataagggctctggg

SEQ ID NO: 3908780 - DNA, 25 bp, Homo sapien
taggcctaagtatgtgctttgagac

SEQ ID NO: 3908781 - DNA, 25 bp, Homo sapien
cctggcctgcctatcctgttcttag

SEQ ID NO: 3908782 - DNA, 25 bp, Homo sapien
caaacacggagagccggtgtccttt

SEQ ID NO: 3908783 - DNA, 25 bp, Homo sapien
ttcaaacacggagagccggtgtcct

SEQ ID NO: 3908784 - DNA, 25 bp, Homo sapien
attcaaacacggagagccggtgtcc

SEQ ID NO: 3908785 - DNA, 25 bp, Homo sapien
aagaacatcagattcaaacacggag

SEQ ID NO: 3908786 - DNA, 25 bp, Homo sapien
tgttatggttcacgtaatacacccg

SEQ ID NO: 3908787 - DNA, 25 bp, Homo sapien
gttcacgtaatacacccgtccattg

SEQ ID NO: 3908788 - DNA, 25 bp, Homo sapien
gtcgtgcgagtgttatggttcacgt

SEQ ID NO: 3908789 - DNA, 25 bp, Homo sapien
cgagtgttatggttcacgtaataca

SEQ ID NO: 3908790 - DNA, 25 bp, Homo sapien
tatcgcaccccctcgctggtgtatt

SEQ ID NO: 3908791 - DNA, 25 bp, Homo sapien
gtggtccacaaagtatcgcaccccc

SEQ ID NO: 3908792 - DNA, 25 bp, Homo sapien
cgggcgaggatccttaaaggtggtg

SEQ ID NO: 3908793 - DNA, 25 bp, Homo sapien
cttaaaggtggtggtgcgggtattg

SEQ ID NO: 3908794 - DNA, 25 bp, Homo sapien
aaaactgcggtcataagcaccaggg

SEQ ID NO: 3908795 - DNA, 25 bp, Homo sapien
gaggaaacggaactggtgatacttc

SEQ ID NO: 3908796 - DNA, 25 bp, Homo sapien
gtgatacttccaccgaaaactgcgg

SEQ ID NO: 3908797 - DNA, 25 bp, Homo sapien
cagaggaaacggaactggtgatact

SEQ ID NO: 3908798 - DNA, 25 bp, Homo sapien
gctgtgccgggaactcacactgaaa

SEQ ID NO: 3908799 - DNA, 25 bp, Homo sapien
tgctgtgccgggaactcacactgaa

SEQ ID NO: 3908800 - DNA, 25 bp, Homo sapien
cgggagccccagtaccagaactcac

SEQ ID NO: 3908801 - DNA, 25 bp, Homo sapien
tgtgccgggaactcacactgaaata

SEQ ID NO: 3908802 - DNA, 25 bp, Homo sapien
gcctggaaacgctgatcttcacgtg

SEQ ID NO: 3908803 - DNA, 25 bp, Homo sapien
tgatcttcacgtggctaggtagggc

SEQ ID NO: 3908804 - DNA, 25 bp, Homo sapien
gaaggaatcttcgaaaagcgtctgc

SEQ ID NO: 3908805 - DNA, 25 bp, Homo sapien
ttggaaggaatcttcgaaaagcgtc

SEQ ID NO: 3908806 - DNA, 25 bp, Homo sapien
tttaacaggccacgcgataggagat

SEQ ID NO: 3908807 - DNA, 25 bp, Homo sapien
ctgcagtgtgggtttaacaggccac

SEQ ID NO: 3908808 - DNA, 25 bp, Homo sapien
gcctgccactggtttcgggcaccat

SEQ ID NO: 3908809 - DNA, 25 bp, Homo sapien
ctggtttcgggcaccatgatctaac

SEQ ID NO: 3908810 - DNA, 25 bp, Homo sapien
gcaggcaggggcgggagggacaggg

SEQ ID NO: 3908811 - DNA, 25 bp, Homo sapien
ccacagcaggcaggggcgggaggga

SEQ ID NO: 3908812 - DNA, 25 bp, Homo sapien
acagcaggcaggggcgggagggaca

SEQ ID NO: 3908813 - DNA, 25 bp, Homo sapien
ctgccactctcccttccacagcagg

SEQ ID NO: 3908814 - DNA, 25 bp, Homo sapien
ctgggaagacagagcatcgggccag

SEQ ID NO: 3908815 - DNA, 25 bp, Homo sapien
tgggaagacagagcatcgggccagc

SEQ ID NO: 3908816 - DNA, 25 bp, Homo sapien
ctcctcgccacgcatgatgatgtag

SEQ ID NO: 3908817 - DNA, 25 bp, Homo sapien
agccggcggcgcaggtcatagggtt

SEQ ID NO: 3908818 - DNA, 25 bp, Homo sapien
ggtcatagggtttcatgttcatgat

SEQ ID NO: 3908819 - DNA, 25 bp, Homo sapien
cacgcatgatgatgtagagccggcg

SEQ ID NO: 3908820 - DNA, 25 bp, Homo sapien
tgtggtagaacagcatgacgtaacc

SEQ ID NO: 3908821 - DNA, 25 bp, Homo sapien
tgccccggtatcctgtccgtggttc

SEQ ID NO: 3908822 - DNA, 25 bp, Homo sapien
tgtccgtggttctaccctgtggtag

SEQ ID NO: 3908823 - DNA, 25 bp, Homo sapien
catagggtaaaaccactggcaggac

SEQ ID NO: 3908824 - DNA, 25 bp, Homo sapien
tagggttgagcacctcatgagacag

SEQ ID NO: 3908825 - DNA, 25 bp, Homo sapien
caggcagtaattgttctttccggca

SEQ ID NO: 3908826 - DNA, 25 bp, Homo sapien
tctttccggcatattcaaataaaca

SEQ ID NO: 3908827 - DNA, 25 bp, Homo sapien
gaatctgcctataaagcgaaagtag

SEQ ID NO: 3908828 - DNA, 25 bp, Homo sapien
attgagcatccgcttgtagaaaggg

SEQ ID NO: 3908829 - DNA, 25 bp, Homo sapien
tagaactcagggtcaatggactcca

SEQ ID NO: 3908830 - DNA, 25 bp, Homo sapien
ttgatccagacaatggagttgtaga

SEQ ID NO: 3908831 - DNA, 25 bp, Homo sapien
tccaggtctttcagggttggtctct

SEQ ID NO: 3908832 - DNA, 25 bp, Homo sapien
cagtatctccatgtcctggatgaag

SEQ ID NO: 3908833 - DNA, 25 bp, Homo sapien
catgtcctggatgaagtacagctcc

SEQ ID NO: 3908834 - DNA, 25 bp, Homo sapien
ttcagctcgtgggtcgtcaccttgc

SEQ ID NO: 3908835 - DNA, 25 bp, Homo sapien
gtcaccttgcccagtatctccatgt

SEQ ID NO: 3908836 - DNA, 25 bp, Homo sapien
tcaaagaaattccacgctgcaggct

SEQ ID NO: 3908837 - DNA, 25 bp, Homo sapien
gcacagctgggagtcggtaactaag

SEQ ID NO: 3908838 - DNA, 25 bp, Homo sapien
acagagatcctttcggcccggagaa

SEQ ID NO: 3908839 - DNA, 25 bp, Homo sapien
tcccacatggcgaaaaagcacagct

SEQ ID NO: 3908840 - DNA, 25 bp, Homo sapien
ggtgaaacgccagtcagtcagcagc

SEQ ID NO: 3908841 - DNA, 25 bp, Homo sapien
ggccacctcgttgaagccatccagg

SEQ ID NO: 3908842 - DNA, 25 bp, Homo sapien
tggtctgctcttccacgcctcgggt

SEQ ID NO: 3908843 - DNA, 25 bp, Homo sapien
tctttctcgtcaaagtagcgcagcc

SEQ ID NO: 3908844 - DNA, 25 bp, Homo sapien
gctcatgtctatctcctgcatgccg

SEQ ID NO: 3908845 - DNA, 25 bp, Homo sapien
tgccagtcgctcatgtctatctcct

SEQ ID NO: 3908846 - DNA, 25 bp, Homo sapien
gctcttctgccagtcgctcatgtct

SEQ ID NO: 3908847 - DNA, 25 bp, Homo sapien
ggtgtagtgccggtagatggtgctc

SEQ ID NO: 3908848 - DNA, 25 bp, Homo sapien
ggatcctcttctcgttgtccatctc

SEQ ID NO: 3908849 - DNA, 25 bp, Homo sapien
gcaggtaccggtgacaaactgcagc

SEQ ID NO: 3908850 - DNA, 25 bp, Homo sapien
atgagttcggcaaatcccccgacgg

SEQ ID NO: 3908851 - DNA, 25 bp, Homo sapien
aaactgcagcagccggatcctcttc

SEQ ID NO: 3908852 - DNA, 25 bp, Homo sapien
ggtttccttgccaactttgtcaatg

SEQ ID NO: 3908853 - DNA, 25 bp, Homo sapien
aggtttccttgccaactttgtcaat

SEQ ID NO: 3908854 - DNA, 25 bp, Homo sapien
ttccttgccaactttgtcaatgcaa

SEQ ID NO: 3908855 - DNA, 25 bp, Homo sapien
gtttccttgccaactttgtcaatgc

SEQ ID NO: 3908856 - DNA, 25 bp, Homo sapien
cgtagctcttgtagggtggaagatc

SEQ ID NO: 3908857 - DNA, 25 bp, Homo sapien
tcttgtagggtggaagatccagacg

SEQ ID NO: 3908858 - DNA, 25 bp, Homo sapien
tcagctgttcgtagctcttgtaggg

SEQ ID NO: 3908859 - DNA, 25 bp, Homo sapien
ttctctctcagctgttcgtagctct

SEQ ID NO: 3908860 - DNA, 25 bp, Homo sapien
gatgacagtgtggtcccacacaggg

SEQ ID NO: 3908861 - DNA, 25 bp, Homo sapien
gactcaggactacatgtgcgctggg

SEQ ID NO: 3908862 - DNA, 25 bp, Homo sapien
ttattccagactgccatccgcgggt

SEQ ID NO: 3908863 - DNA, 25 bp, Homo sapien
cagggaggactcaggactacatgtg

SEQ ID NO: 3908864 - DNA, 25 bp, Homo sapien
gaatgaacactttccgctggcgggc

SEQ ID NO: 3908865 - DNA, 25 bp, Homo sapien
gaaactggcaatatcgaggcaaggg

SEQ ID NO: 3908866 - DNA, 25 bp, Homo sapien
agagttttgcagagagggtcagccc

SEQ ID NO: 3908867 - DNA, 25 bp, Homo sapien
catggctagcaaagggcattccgta

SEQ ID NO: 3908868 - DNA, 25 bp, Homo sapien
gtctggttcatgtttcaaagtctgg

SEQ ID NO: 3908869 - DNA, 25 bp, Homo sapien
aagctccccgtatctataccaaggg

SEQ ID NO: 3908870 - DNA, 25 bp, Homo sapien
ggtcagccgctacttcttaaaatgt

SEQ ID NO: 3908871 - DNA, 25 bp, Homo sapien
caaagtctggttcatgactctgcta

SEQ ID NO: 3908872 - DNA, 25 bp, Homo sapien
ttggcccgcggacattccagtgctg

SEQ ID NO: 3908873 - DNA, 25 bp, Homo sapien
ggcccgcggacattccagtgctgca

SEQ ID NO: 3908874 - DNA, 25 bp, Homo sapien
gctgattggcccgcggacattccag

SEQ ID NO: 3908875 - DNA, 25 bp, Homo sapien
gattggcccgcggacattccagtgc

SEQ ID NO: 3908876 - DNA, 25 bp, Homo sapien
tgttggcgctggcatgaaaagagac

SEQ ID NO: 3908877 - DNA, 25 bp, Homo sapien
gacaaaagagggaggctggtgagtg

SEQ ID NO: 3908878 - DNA, 25 bp, Homo sapien
gaaaagagacaactccgggggatgc

SEQ ID NO: 3908879 - DNA, 25 bp, Homo sapien
taatcagtgtgtccagacagcctcc

SEQ ID NO: 3908880 - DNA, 25 bp, Homo sapien
tggatggagctattcacaatctcca

SEQ ID NO: 3908881 - DNA, 25 bp, Homo sapien
ggatggagctattcacaatctccag

SEQ ID NO: 3908882 - DNA, 25 bp, Homo sapien
ctccggccatcggagcctgctcctg

SEQ ID NO: 3908883 - DNA, 25 bp, Homo sapien
gagctcgtaatggtgcctccaccta

SEQ ID NO: 3908884 - DNA, 25 bp, Homo sapien
tcctcagagctcgtaatggtgcctc

SEQ ID NO: 3908885 - DNA, 25 bp, Homo sapien
ctcattaaaccacccgcacggcctg

SEQ ID NO: 3908886 - DNA, 25 bp, Homo sapien
acccactcctcagagctcgtaatgg

SEQ ID NO: 3908887 - DNA, 25 bp, Homo sapien
ctccgcatgtcagccgcagggggct

SEQ ID NO: 3908888 - DNA, 25 bp, Homo sapien
cccagctgcgcaggcggttgtgcag

SEQ ID NO: 3908889 - DNA, 25 bp, Homo sapien
ctgcgcaggcggttgtgcagggaga

SEQ ID NO: 3908890 - DNA, 25 bp, Homo sapien
cctccgcatgtcagccgcagggggc

SEQ ID NO: 3908891 - DNA, 25 bp, Homo sapien
cgtcctcgtggctcagataagctca

SEQ ID NO: 3908892 - DNA, 25 bp, Homo sapien
gcaggataggactcacaagcactga

SEQ ID NO: 3908893 - DNA, 25 bp, Homo sapien
tcttcttaaacaagtgggcctggca

SEQ ID NO: 3908894 - DNA, 25 bp, Homo sapien
tagagtgctcaaggtcgccactgtg

SEQ ID NO: 3908895 - DNA, 25 bp, Homo sapien
cacttgcagggtgcgccacaggccg

SEQ ID NO: 3908896 - DNA, 25 bp, Homo sapien
gcaggtggcgttgcgagcacactct

SEQ ID NO: 3908897 - DNA, 25 bp, Homo sapien
gcagctgcatgttccagcccacttg

SEQ ID NO: 3908898 - DNA, 25 bp, Homo sapien
tgcgtgtagtgggtgcaggtggcgt

SEQ ID NO: 3908899 - DNA, 25 bp, Homo sapien
ggcacagacaaaggcttctatcgct

SEQ ID NO: 3908900 - DNA, 25 bp, Homo sapien
atggtcccaggctttgaagcagcct

SEQ ID NO: 3908901 - DNA, 25 bp, Homo sapien
gattgtcttcccgttgacctcccag

SEQ ID NO: 3908902 - DNA, 25 bp, Homo sapien
tgtcttcccgttgacctcccagttg

SEQ ID NO: 3908903 - DNA, 25 bp, Homo sapien
gctgtgcagagcgaacaccaggcac

SEQ ID NO: 3908904 - DNA, 25 bp, Homo sapien
agctcatgcgacaaggattcctggg

SEQ ID NO: 3908905 - DNA, 25 bp, Homo sapien
ctggcagctcatgcgacaaggattc

SEQ ID NO: 3908906 - DNA, 25 bp, Homo sapien
ttggcagtatctgcccgtgtagcca

SEQ ID NO: 3908907 - DNA, 25 bp, Homo sapien
tgctgatgttgagacgtccatggtt

SEQ ID NO: 3908908 - DNA, 25 bp, Homo sapien
atgtcacagacgcacgagcactcct

SEQ ID NO: 3908909 - DNA, 25 bp, Homo sapien
agccgatgtcacagacgcacgagca

SEQ ID NO: 3908910 - DNA, 25 bp, Homo sapien
tgggctcccccgtagccgatgtcac

SEQ ID NO: 3908911 - DNA, 25 bp, Homo sapien
ccgtagccgatgtcacagacgcacg

SEQ ID NO: 3908912 - DNA, 25 bp, Homo sapien
tctcaacgtgttgtcactgaatgag

SEQ ID NO: 3908913 - DNA, 25 bp, Homo sapien
gggagctaagctcagggtgcccctt

SEQ ID NO: 3908914 - DNA, 25 bp, Homo sapien
aagttggaatattgagcttgctctc

SEQ ID NO: 3908915 - DNA, 25 bp, Homo sapien
tggccagtttcaagatctcaacgtg

SEQ ID NO: 3908916 - DNA, 25 bp, Homo sapien
acaggtgtggaagggaaaatgcacc

SEQ ID NO: 3908917 - DNA, 25 bp, Homo sapien
gtgtggaagggaaaatgcaccttgg

SEQ ID NO: 3908918 - DNA, 25 bp, Homo sapien
tcaggtcacaggtgtggaagggaaa

SEQ ID NO: 3908919 - DNA, 25 bp, Homo sapien
gtcacaggtgtggaagggaaaatgc

SEQ ID NO: 3908920 - DNA, 25 bp, Homo sapien
accatgaagcagtctccgtcgatcc

SEQ ID NO: 3908921 - DNA, 25 bp, Homo sapien
acatttcatcctggctctgtaatag

SEQ ID NO: 3908922 - DNA, 25 bp, Homo sapien
gacaccatgaagcagtctccgtcga

SEQ ID NO: 3908923 - DNA, 25 bp, Homo sapien
ggctctgtaataggtgtctgcctct

SEQ ID NO: 3908924 - DNA, 25 bp, Homo sapien
ccttagatggaggttggtcttgacc

SEQ ID NO: 3908925 - DNA, 25 bp, Homo sapien
tatccaagttgattgccaaccccag

SEQ ID NO: 3908926 - DNA, 25 bp, Homo sapien
tgcattcctgcaaggcaaccagtgg

SEQ ID NO: 3908927 - DNA, 25 bp, Homo sapien
tttcttgaacaaccccgagctctgg

SEQ ID NO: 3908928 - DNA, 25 bp, Homo sapien
gcccagatagaaggcgaggatgtcc

SEQ ID NO: 3908929 - DNA, 25 bp, Homo sapien
gaagttcctggtctcgaagtcactg

SEQ ID NO: 3908930 - DNA, 25 bp, Homo sapien
tcaatcacctcgttggtggtctcca

SEQ ID NO: 3908931 - DNA, 25 bp, Homo sapien
tagaaggcgaggatgtcctgcactt

SEQ ID NO: 3908932 - DNA, 25 bp, Homo sapien
tcacaaccccttactcgccataccc

SEQ ID NO: 3908933 - DNA, 25 bp, Homo sapien
gcatcacaaccccttactcgccata

SEQ ID NO: 3908934 - DNA, 25 bp, Homo sapien
ttactcgccatacccccaatcagct

SEQ ID NO: 3908935 - DNA, 25 bp, Homo sapien
ccttactcgccatacccccaatcag

SEQ ID NO: 3908936 - DNA, 25 bp, Homo sapien
ccttgccatctgctggcagccgcca

SEQ ID NO: 3908937 - DNA, 25 bp, Homo sapien
tggcagccgccatggcccagggttc

SEQ ID NO: 3908938 - DNA, 25 bp, Homo sapien
tgctggcagccgccatggcccaggg

SEQ ID NO: 3908939 - DNA, 25 bp, Homo sapien
catctgctggcagccgccatggccc

SEQ ID NO: 3908940 - DNA, 25 bp, Homo sapien
gggtgagcagctggccccgctctgg

SEQ ID NO: 3908941 - DNA, 25 bp, Homo sapien
tcccgggaaagggggtgagcagctg

SEQ ID NO: 3908942 - DNA, 25 bp, Homo sapien
tctgggctccaggccctcaacacac

SEQ ID NO: 3908943 - DNA, 25 bp, Homo sapien
aaagggggtgagcagctggccccgc

SEQ ID NO: 3908944 - DNA, 25 bp, Homo sapien
gggtagtcaaggttggcccactcag

SEQ ID NO: 3908945 - DNA, 25 bp, Homo sapien
gtagtcaaggttggcccactcagac

SEQ ID NO: 3908946 - DNA, 25 bp, Homo sapien
ggggtagtcaaggttggcccactca

SEQ ID NO: 3908947 - DNA, 25 bp, Homo sapien
ggtagtcaaggttggcccactcaga

SEQ ID NO: 3908948 - DNA, 25 bp, Homo sapien
tccttggcggtcttgtaggtgagcc

SEQ ID NO: 3908949 - DNA, 25 bp, Homo sapien
agcggaaggagtccttggcggtctt

SEQ ID NO: 3908950 - DNA, 25 bp, Homo sapien
gaaggagtccttggcggtcttgtag

SEQ ID NO: 3908951 - DNA, 25 bp, Homo sapien
gagtccttggcggtcttgtaggtga

SEQ ID NO: 3908952 - DNA, 25 bp, Homo sapien
gaatagacagcccacttgagaggta

SEQ ID NO: 3908953 - DNA, 25 bp, Homo sapien
gcccacttgagaggtacacctggga

SEQ ID NO: 3908954 - DNA, 25 bp, Homo sapien
tggctgaaatcgctggagcccttgg

SEQ ID NO: 3908955 - DNA, 25 bp, Homo sapien
gcccagacttcctccaggcaagagg

SEQ ID NO: 3908956 - DNA, 25 bp, Homo sapien
actggcagatgtaacggtttcgggt

SEQ ID NO: 3908957 - DNA, 25 bp, Homo sapien
ctggcagatgtaacggtttcgggtt

SEQ ID NO: 3908958 - DNA, 25 bp, Homo sapien
aactggcagatgtaacggtttcggg

SEQ ID NO: 3908959 - DNA, 25 bp, Homo sapien
gcagaagagagcagggctcgatggc

SEQ ID NO: 3908960 - DNA, 25 bp, Homo sapien
aagagagcagggctcgatggcagcc

SEQ ID NO: 3908961 - DNA, 25 bp, Homo sapien
cagaagagagcagggctcgatggca

SEQ ID NO: 3908962 - DNA, 25 bp, Homo sapien
agagcagggctcgatggcagcccag

SEQ ID NO: 3908963 - DNA, 25 bp, Homo sapien
agagcagcctttttggaccactggc

SEQ ID NO: 3908964 - DNA, 25 bp, Homo sapien
gacaggtaagcagagccggtgctcc

SEQ ID NO: 3908965 - DNA, 25 bp, Homo sapien
gggttcatgccacagggaagctccg

SEQ ID NO: 3908966 - DNA, 25 bp, Homo sapien
ggcgaagggccccagcttcttctaa

SEQ ID NO: 3908967 - DNA, 25 bp, Homo sapien
ttccctttgaaatgagcatgcacag

SEQ ID NO: 3908968 - DNA, 25 bp, Homo sapien
taccattggccctggtgcgatgaca

SEQ ID NO: 3908969 - DNA, 25 bp, Homo sapien
gggagacccagaacttccagagagt

SEQ ID NO: 3908970 - DNA, 25 bp, Homo sapien
tggaggccgctgcagtgaagcctca

SEQ ID NO: 3908971 - DNA, 25 bp, Homo sapien
ctgcggccgtggccccggacaaggg

SEQ ID NO: 3908972 - DNA, 25 bp, Homo sapien
cccgcgggcatgcgcagggcggccc

SEQ ID NO: 3908973 - DNA, 25 bp, Homo sapien
cgggcatgcgcagggcggcccctcc

SEQ ID NO: 3908974 - DNA, 25 bp, Homo sapien
ctcccgcgggcatgcgcagggcggc

SEQ ID NO: 3908975 - DNA, 25 bp, Homo sapien
cgcgggcatgcgcagggcggcccct

SEQ ID NO: 3908976 - DNA, 25 bp, Homo sapien
agagtgaatgacaaacgcaagggag

SEQ ID NO: 3908977 - DNA, 25 bp, Homo sapien
gccaaggccttttgatgtcatggtc

SEQ ID NO: 3908978 - DNA, 25 bp, Homo sapien
tgtcatggtccgtgtttttctccgg

SEQ ID NO: 3908979 - DNA, 25 bp, Homo sapien
cagggatcccctttgaggtgcagaa

SEQ ID NO: 3908980 - DNA, 25 bp, Homo sapien
ttttctccggatcgttgggcatgcg

SEQ ID NO: 3908981 - DNA, 25 bp, Homo sapien
taagtcaggctttgtacgttttcca

SEQ ID NO: 3908982 - DNA, 25 bp, Homo sapien
tgtaagtcaggctttgtacgttttc

SEQ ID NO: 3908983 - DNA, 25 bp, Homo sapien
tgaaacgccacagataacaggcata

SEQ ID NO: 3908984 - DNA, 25 bp, Homo sapien
atgaaacgccacagataacaggcat

SEQ ID NO: 3908985 - DNA, 25 bp, Homo sapien
gtaccgatattgaggattccacagg

SEQ ID NO: 3908986 - DNA, 25 bp, Homo sapien
tgccaggcaaactcggacaattggt

SEQ ID NO: 3908987 - DNA, 25 bp, Homo sapien
tggcagggcctgtattcaaatgcag

SEQ ID NO: 3908988 - DNA, 25 bp, Homo sapien
tcaatcttgagcatgcaaacctgga

SEQ ID NO: 3908989 - DNA, 25 bp, Homo sapien
tgtaacacaccctgtaatgaccctg

SEQ ID NO: 3908990 - DNA, 25 bp, Homo sapien
ccaaatctaggagggtactgaatca

SEQ ID NO: 3908991 - DNA, 25 bp, Homo sapien
taaatgacaagtcacatccccgcag

SEQ ID NO: 3908992 - DNA, 25 bp, Homo sapien
ggaagagcctttcaagagcgagagc

SEQ ID NO: 3908993 - DNA, 25 bp, Homo sapien
ctgcggatgtcacatgggcaggaca

SEQ ID NO: 3908994 - DNA, 25 bp, Homo sapien
tgattgacgcactgccaggagtagc

SEQ ID NO: 3908995 - DNA, 25 bp, Homo sapien
tctgattgacgcactgccaggagta

SEQ ID NO: 3908996 - DNA, 25 bp, Homo sapien
aggacgctctgattgacgcactgcc

SEQ ID NO: 3908997 - DNA, 25 bp, Homo sapien
cgctctgattgacgcactgccagga

SEQ ID NO: 3908998 - DNA, 25 bp, Homo sapien
ttgacctggtgcaagaaacatgctc

SEQ ID NO: 3908999 - DNA, 25 bp, Homo sapien
caagaaacatgctctggtgatggct

SEQ ID NO: 3909000 - DNA, 25 bp, Homo sapien
cagagttccgagaatcagagacaga

SEQ ID NO: 3909001 - DNA, 25 bp, Homo sapien
gacagaacataaaaggcctggaaaa

SEQ ID NO: 3909002 - DNA, 25 bp, Homo sapien
gcagagttccgagaatcagagacag

SEQ ID NO: 3909003 - DNA, 25 bp, Homo sapien
tctgttttcttagatttggagcagg

SEQ ID NO: 3909004 - DNA, 25 bp, Homo sapien
ctttgtttagaattcccacctcatt

SEQ ID NO: 3909005 - DNA, 25 bp, Homo sapien
tttatgtcctagtgcacttacaatt

SEQ ID NO: 3909006 - DNA, 25 bp, Homo sapien
ctttatgtcctagtgcacttacaat

SEQ ID NO: 3909007 - DNA, 25 bp, Homo sapien
tctttatgtcctagtgcacttacaa

SEQ ID NO: 3909008 - DNA, 25 bp, Homo sapien
gcaatcctctgcttccgatggagtt

SEQ ID NO: 3909009 - DNA, 25 bp, Homo sapien
cttccgatggagttagttgtgatga

SEQ ID NO: 3909010 - DNA, 25 bp, Homo sapien
tgaactgcggggttaatgacaccat

SEQ ID NO: 3909011 - DNA, 25 bp, Homo sapien
aaggatctctctatggctgatggtc

SEQ ID NO: 3909012 - DNA, 25 bp, Homo sapien
ttcaatgactacctcaggagattca

SEQ ID NO: 3909013 - DNA, 25 bp, Homo sapien
ttctcttctgcacaatttacctttg

SEQ ID NO: 3909014 - DNA, 25 bp, Homo sapien
tacaaatttaccattctcttctgca

SEQ ID NO: 3909015 - DNA, 25 bp, Homo sapien
ttatcattattgtgtttctgggacg

SEQ ID NO: 3909016 - DNA, 25 bp, Homo sapien
ggtggaagtccttggataattatca

SEQ ID NO: 3909017 - DNA, 25 bp, Homo sapien
catccaatgttatacatcaatttaa

SEQ ID NO: 3909018 - DNA, 25 bp, Homo sapien
aatgcatccaatgttatacatcaat

SEQ ID NO: 3909019 - DNA, 25 bp, Homo sapien
gcatccaatgttatacatcaattta

SEQ ID NO: 3909020 - DNA, 25 bp, Homo sapien
tgcatccaatgttatacatcaattt

SEQ ID NO: 3909021 - DNA, 25 bp, Homo sapien
atggctacatggatgtgatggagat

SEQ ID NO: 3909022 - DNA, 25 bp, Homo sapien
acaggttgatggacggatggctaca

SEQ ID NO: 3909023 - DNA, 25 bp, Homo sapien
tgattgctctcaaatatattgagat

SEQ ID NO: 3909024 - DNA, 25 bp, Homo sapien
gagatggtttactatcgggaccttc

SEQ ID NO: 3909025 - DNA, 25 bp, Homo sapien
catggctgcagcatacaaatagaat

SEQ ID NO: 3909026 - DNA, 25 bp, Homo sapien
tgaattccatagttttgttcacccc

SEQ ID NO: 3909027 - DNA, 25 bp, Homo sapien
cagccaaatctagggctggaacatg

SEQ ID NO: 3909028 - DNA, 25 bp, Homo sapien
atgcccagccaaatctagggctgga

SEQ ID NO: 3909029 - DNA, 25 bp, Homo sapien
ctcacatctcctgggtcaaagcaaa

SEQ ID NO: 3909030 - DNA, 25 bp, Homo sapien
gcctatgcagtcatatcatgggtaa

SEQ ID NO: 3909031 - DNA, 25 bp, Homo sapien
aagcctatgcagtcatatcatgggt

SEQ ID NO: 3909032 - DNA, 25 bp, Homo sapien
ctatgcagtcatatcatgggtaaac

SEQ ID NO: 3909033 - DNA, 25 bp, Homo sapien
gaaagcctatgcagtcatatcatgg

SEQ ID NO: 3909034 - DNA, 25 bp, Homo sapien
actgatgtattgcttggacccttgc

SEQ ID NO: 3909035 - DNA, 25 bp, Homo sapien
ctgatgtattgcttggacccttgca

SEQ ID NO: 3909036 - DNA, 25 bp, Homo sapien
tactgatgtattgcttggacccttg

SEQ ID NO: 3909037 - DNA, 25 bp, Homo sapien
gatgtattgcttggacccttgcatt

SEQ ID NO: 3909038 - DNA, 25 bp, Homo sapien
tgagataatcgtatggtttttgttg

SEQ ID NO: 3909039 - DNA, 25 bp, Homo sapien
ataatcgtatggtttttgttgttgg

SEQ ID NO: 3909040 - DNA, 25 bp, Homo sapien
cgtatggtttttgttgttggttctg

SEQ ID NO: 3909041 - DNA, 25 bp, Homo sapien
gagataatcgtatggtttttgttgt

SEQ ID NO: 3909042 - DNA, 25 bp, Homo sapien
gaactctgtacctcaggtgggccac

SEQ ID NO: 3909043 - DNA, 25 bp, Homo sapien
gatgcttaatcttaatgagccagta

SEQ ID NO: 3909044 - DNA, 25 bp, Homo sapien
ccttatacagtacttggctaaccct

SEQ ID NO: 3909045 - DNA, 25 bp, Homo sapien
caactaggaaggttatgatgcttaa

SEQ ID NO: 3909046 - DNA, 25 bp, Homo sapien
cagtagatgctagtcgcactcccta

SEQ ID NO: 3909047 - DNA, 25 bp, Homo sapien
catggcagcatgcttagcggtgtcc

SEQ ID NO: 3909048 - DNA, 25 bp, Homo sapien
gtccctgacctctgctcagtagatg

SEQ ID NO: 3909049 - DNA, 25 bp, Homo sapien
taaacttgtagaatagcccagacct

SEQ ID NO: 3909050 - DNA, 25 bp, Homo sapien
cagcagcgtggtgtacctggctgac

SEQ ID NO: 3909051 - DNA, 25 bp, Homo sapien
agcagcgtggtgtacctggctgact

SEQ ID NO: 3909052 - DNA, 25 bp, Homo sapien
cagcgtggtgtacctggctgactgc

SEQ ID NO: 3909053 - DNA, 25 bp, Homo sapien
gcagcgtggtgtacctggctgactg

SEQ ID NO: 3909054 - DNA, 25 bp, Homo sapien
gctcccgcttccgaggcaactattt

SEQ ID NO: 3909055 - DNA, 25 bp, Homo sapien
gaggcaactatttcccagtcgcgag

SEQ ID NO: 3909056 - DNA, 25 bp, Homo sapien
actatttcccagtcgcgagctgcca

SEQ ID NO: 3909057 - DNA, 25 bp, Homo sapien
ctcagccatggacgcgtccctggag

SEQ ID NO: 3909058 - DNA, 25 bp, Homo sapien
gggacgtcagcgctgccagcgtgga

SEQ ID NO: 3909059 - DNA, 25 bp, Homo sapien
tcaggttcggcagccggcggcgccg

SEQ ID NO: 3909060 - DNA, 25 bp, Homo sapien
cgtcagcgctgccagcgtggaaaga

SEQ ID NO: 3909061 - DNA, 25 bp, Homo sapien
ggcgcgggggacgtcagcgctgcca

SEQ ID NO: 3909062 - DNA, 25 bp, Homo sapien
gaggtgcgtcactagtatttccagc

SEQ ID NO: 3909063 - DNA, 25 bp, Homo sapien
taagattgtggttgcagcgtcctcg

SEQ ID NO: 3909064 - DNA, 25 bp, Homo sapien
gaatcctacctagatcggcactgcg

SEQ ID NO: 3909065 - DNA, 25 bp, Homo sapien
tcctcgcagaggtgaagtgttccat

SEQ ID NO: 3909066 - DNA, 25 bp, Homo sapien
tctgttaagttgcaggtctctccag

SEQ ID NO: 3909067 - DNA, 25 bp, Homo sapien
caatattgtcttctacgggatggat

SEQ ID NO: 3909068 - DNA, 25 bp, Homo sapien
tacgggatggattagcatctcttcc

SEQ ID NO: 3909069 - DNA, 25 bp, Homo sapien
cttcctaagtacccagacctggcag

SEQ ID NO: 3909070 - DNA, 25 bp, Homo sapien
tcctgaagttgagtaagagagtccg

SEQ ID NO: 3909071 - DNA, 25 bp, Homo sapien
tcatgcctggcaatgtctccgccgt

SEQ ID NO: 3909072 - DNA, 25 bp, Homo sapien
gataagcatatgagagcagcgcctc

SEQ ID NO: 3909073 - DNA, 25 bp, Homo sapien
tctccgccgtgtgtgggtttcctaa

SEQ ID NO: 3909074 - DNA, 25 bp, Homo sapien
gcaaatgtaatgacttttacattgg

SEQ ID NO: 3909075 - DNA, 25 bp, Homo sapien
ggcaaatgtaatgacttttacattg

SEQ ID NO: 3909076 - DNA, 25 bp, Homo sapien
taagaatatagttcatggttgacct

SEQ ID NO: 3909077 - DNA, 25 bp, Homo sapien
ataagaatatagttcatggttgacc

SEQ ID NO: 3909078 - DNA, 25 bp, Homo sapien
agaatatagttcatggttgacctgt

SEQ ID NO: 3909079 - DNA, 25 bp, Homo sapien
aagaatatagttcatggttgacctg

SEQ ID NO: 3909080 - DNA, 25 bp, Homo sapien
tatctaatcatcatacaaggctgaa

SEQ ID NO: 3909081 - DNA, 25 bp, Homo sapien
cctatgagatgagtatggcaataaa

SEQ ID NO: 3909082 - DNA, 25 bp, Homo sapien
cagaagctggctctcaagtgcatat

SEQ ID NO: 3909083 - DNA, 25 bp, Homo sapien
tatggcaataaagtcagtcagagaa

SEQ ID NO: 3909084 - DNA, 25 bp, Homo sapien
gaaaacgcttctcatcgccgtggga

SEQ ID NO: 3909085 - DNA, 25 bp, Homo sapien
gctttcttgggcgaggctctcacag

SEQ ID NO: 3909086 - DNA, 25 bp, Homo sapien
tctgcacgtggaaccggaacatctg

SEQ ID NO: 3909087 - DNA, 25 bp, Homo sapien
ctgagatgatcgcaggccctgtgga

SEQ ID NO: 3909088 - DNA, 25 bp, Homo sapien
aagcggaccgcacgtctcaacgcgg

SEQ ID NO: 3909089 - DNA, 25 bp, Homo sapien
aaagcacaagcggaccgcacgtctc

SEQ ID NO: 3909090 - DNA, 25 bp, Homo sapien
tctcaacgcgggaaaacagttccat

SEQ ID NO: 3909091 - DNA, 25 bp, Homo sapien
cgcacgtctcaacgcgggaaaacag

SEQ ID NO: 3909092 - DNA, 25 bp, Homo sapien
ccggactctgcagcagtctttagtt

SEQ ID NO: 3909093 - DNA, 25 bp, Homo sapien
ttcctccggactctgcagcagtctt

SEQ ID NO: 3909094 - DNA, 25 bp, Homo sapien
gtcccagatttttctaggtgacttc

SEQ ID NO: 3909095 - DNA, 25 bp, Homo sapien
gatttttctaggtgacttcttcctc

SEQ ID NO: 3909096 - DNA, 25 bp, Homo sapien
gtgcttggcgccaaaaaagggatct

SEQ ID NO: 3909097 - DNA, 25 bp, Homo sapien
agtgggcagattcgcgccactgcct

SEQ ID NO: 3909098 - DNA, 25 bp, Homo sapien
gaccttcaaaagagtgaagtggtga

SEQ ID NO: 3909099 - DNA, 25 bp, Homo sapien
tcaaaaaagcccagggtgcttggcg

SEQ ID NO: 3909100 - DNA, 25 bp, Homo sapien
agtgcaagatccttcacactctggt

SEQ ID NO: 3909101 - DNA, 25 bp, Homo sapien
gtgcaagatccttcacactctggtt

SEQ ID NO: 3909102 - DNA, 25 bp, Homo sapien
aaaactcttttcatatcaagtgcaa

SEQ ID NO: 3909103 - DNA, 25 bp, Homo sapien
caaaactcttttcatatcaagtgca

SEQ ID NO: 3909104 - DNA, 25 bp, Homo sapien
agaagcttctctacccggctagtct

SEQ ID NO: 3909105 - DNA, 25 bp, Homo sapien
catctccacgtgaccaatttatttc

SEQ ID NO: 3909106 - DNA, 25 bp, Homo sapien
tctctaccctctgtcccaatggcaa

SEQ ID NO: 3909107 - DNA, 25 bp, Homo sapien
tttcccgtggcccaagctctctttg

SEQ ID NO: 3909108 - DNA, 25 bp, Homo sapien
catgccattctactcagtgcatggg

SEQ ID NO: 3909109 - DNA, 25 bp, Homo sapien
caaagaacgatagccattcattcag

SEQ ID NO: 3909110 - DNA, 25 bp, Homo sapien
cagtgcatgggattaatgagaaagg

SEQ ID NO: 3909111 - DNA, 25 bp, Homo sapien
aagggatttgacaaagaacgatagc

SEQ ID NO: 3909112 - DNA, 25 bp, Homo sapien
tcaccaactagatctcaggaactca

SEQ ID NO: 3909113 - DNA, 25 bp, Homo sapien
catgtctctcaccaactagatctca

SEQ ID NO: 3909114 - DNA, 25 bp, Homo sapien
tgtctctcaccaactagatctcagg

SEQ ID NO: 3909115 - DNA, 25 bp, Homo sapien
tctcaccaactagatctcaggaact

SEQ ID NO: 3909116 - DNA, 25 bp, Homo sapien
cccattttggagaggtgataggcca

SEQ ID NO: 3909117 - DNA, 25 bp, Homo sapien
ccattttggagaggtgataggccac

SEQ ID NO: 3909118 - DNA, 25 bp, Homo sapien
gctcaatggtcaagtgcctggcagt

SEQ ID NO: 3909119 - DNA, 25 bp, Homo sapien
tctgctcaatggtcaagtgcctggc

SEQ ID NO: 3909120 - DNA, 25 bp, Homo sapien
ttctgctcaatggtcaagtgcctgg

SEQ ID NO: 3909121 - DNA, 25 bp, Homo sapien
atcttctgctcaatggtcaagtgcc

SEQ ID NO: 3909122 - DNA, 25 bp, Homo sapien
tttggatccctgtttcttgctctaa

SEQ ID NO: 3909123 - DNA, 25 bp, Homo sapien
gtttggatccctgtttcttgctcta

SEQ ID NO: 3909124 - DNA, 25 bp, Homo sapien
ctgtttggatccctgtttcttgctc

SEQ ID NO: 3909125 - DNA, 25 bp, Homo sapien
ttggatccctgtttcttgctctaac

SEQ ID NO: 3909126 - DNA, 25 bp, Homo sapien
aagattgagcctgtccttgtgtaac

SEQ ID NO: 3909127 - DNA, 25 bp, Homo sapien
tcggtcctgagtttgggccagaaag

SEQ ID NO: 3909128 - DNA, 25 bp, Homo sapien
cagggagatcagtcggtcctgagtt

SEQ ID NO: 3909129 - DNA, 25 bp, Homo sapien
tcagccctgcgttgatgcgcttcag

SEQ ID NO: 3909130 - DNA, 25 bp, Homo sapien
caccaggtcgtgcacgttgaggaga

SEQ ID NO: 3909131 - DNA, 25 bp, Homo sapien
cggccactttcttgggggagatgat

SEQ ID NO: 3909132 - DNA, 25 bp, Homo sapien
gtcagcggaagacaccactgcatcc

SEQ ID NO: 3909133 - DNA, 25 bp, Homo sapien
aagagccacgtcagcggaagacacc

SEQ ID NO: 3909134 - DNA, 25 bp, Homo sapien
gaagaacagatgtccggtcatagat

SEQ ID NO: 3909135 - DNA, 25 bp, Homo sapien
tgaagaacagatgtccggtcataga

SEQ ID NO: 3909136 - DNA, 25 bp, Homo sapien
tgtcctttatcggtctccactccag

SEQ ID NO: 3909137 - DNA, 25 bp, Homo sapien
tctccactccagtaacttgaccttt

SEQ ID NO: 3909138 - DNA, 25 bp, Homo sapien
ggcatgtagcgggatactaaccggc

SEQ ID NO: 3909139 - DNA, 25 bp, Homo sapien
ctcgttggacagacccagctcgtat

SEQ ID NO: 3909140 - DNA, 25 bp, Homo sapien
aggtagaagtgttcgcaggcatgta

SEQ ID NO: 3909141 - DNA, 25 bp, Homo sapien
gatactaaccggctcctcgttggac

SEQ ID NO: 3909142 - DNA, 25 bp, Homo sapien
tttgaggtcacgggggaagatcctc

SEQ ID NO: 3909143 - DNA, 25 bp, Homo sapien
cacgggggaagatcctcccatttag

SEQ ID NO: 3909144 - DNA, 25 bp, Homo sapien
aggtcacgggggaagatcctcccat

SEQ ID NO: 3909145 - DNA, 25 bp, Homo sapien
tcacgggggaagatcctcccattta

SEQ ID NO: 3909146 - DNA, 25 bp, Homo sapien
tgccaccctgccagttccgaatata

SEQ ID NO: 3909147 - DNA, 25 bp, Homo sapien
gccagttccgaatataaattcttcc

SEQ ID NO: 3909148 - DNA, 25 bp, Homo sapien
tccagctggttcttgccctcagtga

SEQ ID NO: 3909149 - DNA, 25 bp, Homo sapien
tcttgccctcagtgaaaattggttt

SEQ ID NO: 3909150 - DNA, 25 bp, Homo sapien
gcagagttcattcctgccaggacaa

SEQ ID NO: 3909151 - DNA, 25 bp, Homo sapien
ctcagaagggaactcaacagaggct

SEQ ID NO: 3909152 - DNA, 25 bp, Homo sapien
tccggctcctccaccaaatgaaagg

SEQ ID NO: 3909153 - DNA, 25 bp, Homo sapien
aaggtctctgggcagttcaccaact

SEQ ID NO: 3909154 - DNA, 25 bp, Homo sapien
tctggagggctccaaaacgtttcag

SEQ ID NO: 3909155 - DNA, 25 bp, Homo sapien
ccatgacccggtggcgcagaaaggt

SEQ ID NO: 3909156 - DNA, 25 bp, Homo sapien
gcatgacttccatgacccggtggcg

SEQ ID NO: 3909157 - DNA, 25 bp, Homo sapien
ctctggagggctccaaaacgtttca

SEQ ID NO: 3909158 - DNA, 25 bp, Homo sapien
atctcacaccatcccaaacaaaagg

SEQ ID NO: 3909159 - DNA, 25 bp, Homo sapien
tagtactttcggttctatcatcccc

SEQ ID NO: 3909160 - DNA, 25 bp, Homo sapien
ggtctaatcttcaacagcaataagt

SEQ ID NO: 3909161 - DNA, 25 bp, Homo sapien
gaagagtgtgatctgtggtccctga

SEQ ID NO: 3909162 - DNA, 25 bp, Homo sapien
cgtaactgcctaccggtctggaagt

SEQ ID NO: 3909163 - DNA, 25 bp, Homo sapien
gggaacaaagtactttggcctctca

SEQ ID NO: 3909164 - DNA, 25 bp, Homo sapien
catccagccggtcgtagagaggaga

SEQ ID NO: 3909165 - DNA, 25 bp, Homo sapien
gaggagaggtgcgtaactgcctacc

SEQ ID NO: 3909166 - DNA, 25 bp, Homo sapien
gactccacgatgtcaaaccaatctg

SEQ ID NO: 3909167 - DNA, 25 bp, Homo sapien
gatgtcaaaccaatctggcttatag

SEQ ID NO: 3909168 - DNA, 25 bp, Homo sapien
tcagactccacgatgtcaaaccaat

SEQ ID NO: 3909169 - DNA, 25 bp, Homo sapien
cttgacttcagactccacgatgtca

SEQ ID NO: 3909170 - DNA, 25 bp, Homo sapien
taaatatgtaaagtttcctaatcta

SEQ ID NO: 3909171 - DNA, 25 bp, Homo sapien
actgcacccagtcaggaatcagttt

SEQ ID NO: 3909172 - DNA, 25 bp, Homo sapien
tatgtaaagtttcctaatctattac

SEQ ID NO: 3909173 - DNA, 25 bp, Homo sapien
cacccagtcaggaatcagttttgaa

SEQ ID NO: 3909174 - DNA, 25 bp, Homo sapien
cagggttagggaatgaaacagagag

SEQ ID NO: 3909175 - DNA, 25 bp, Homo sapien
gaacctcattgagaaaattcaatca

SEQ ID NO: 3909176 - DNA, 25 bp, Homo sapien
acatggccccaccagcaatgaacct

SEQ ID NO: 3909177 - DNA, 25 bp, Homo sapien
gagaaaattcaatcagccaattccc

SEQ ID NO: 3909178 - DNA, 25 bp, Homo sapien
tccaccctcgttgagcatgccagta

SEQ ID NO: 3909179 - DNA, 25 bp, Homo sapien
tcagtcgtgctatgctgcagtcatt

SEQ ID NO: 3909180 - DNA, 25 bp, Homo sapien
ccagtatgcacaatgtggcccacag

SEQ ID NO: 3909181 - DNA, 25 bp, Homo sapien
gtagaacttctaatgcctgatcccc

SEQ ID NO: 3909182 - DNA, 25 bp, Homo sapien
ttatggttcccggagaagcgcctga

SEQ ID NO: 3909183 - DNA, 25 bp, Homo sapien
aggactgctaataaactggctttga

SEQ ID NO: 3909184 - DNA, 25 bp, Homo sapien
tctgctacagcacccctaaggaatc

SEQ ID NO: 3909185 - DNA, 25 bp, Homo sapien
agcagagcgggacggcagctcatct

SEQ ID NO: 3909186 - DNA, 25 bp, Homo sapien
cctgctggtcggttggagagatcat

SEQ ID NO: 3909187 - DNA, 25 bp, Homo sapien
caggttgctgtctttcggcatgtgt

SEQ ID NO: 3909188 - DNA, 25 bp, Homo sapien
ttccaggtgacgtcctccaggagca

SEQ ID NO: 3909189 - DNA, 25 bp, Homo sapien
gtttcttaagccaggcccaacagtg

SEQ ID NO: 3909190 - DNA, 25 bp, Homo sapien
ggtggagatctgcccaaccaaaaag

SEQ ID NO: 3909191 - DNA, 25 bp, Homo sapien
tggagatctgcccaaccaaaaagta

SEQ ID NO: 3909192 - DNA, 25 bp, Homo sapien
gtggagatctgcccaaccaaaaagt

SEQ ID NO: 3909193 - DNA, 25 bp, Homo sapien
tatgtgatggaagaagccccaaccc

SEQ ID NO: 3909194 - DNA, 25 bp, Homo sapien
tggatgctaagcaccccgattctgg

SEQ ID NO: 3909195 - DNA, 25 bp, Homo sapien
tttgcttagacactccaaggatgga

SEQ ID NO: 3909196 - DNA, 25 bp, Homo sapien
gacttgctcagctatagccaggcct

SEQ ID NO: 3909197 - DNA, 25 bp, Homo sapien
gggcataggacaactcagacagcac

SEQ ID NO: 3909198 - DNA, 25 bp, Homo sapien
ttgggaagtggtctggagtcatagg

SEQ ID NO: 3909199 - DNA, 25 bp, Homo sapien
acagctcgagggccaatcagattga

SEQ ID NO: 3909200 - DNA, 25 bp, Homo sapien
agacagcacatccacagctcgaggg

SEQ ID NO: 3909201 - DNA, 25 bp, Homo sapien
ccgtttggccctctctaatcagcag

SEQ ID NO: 3909202 - DNA, 25 bp, Homo sapien
gggaggattccgttgtcattgcttt

SEQ ID NO: 3909203 - DNA, 25 bp, Homo sapien
ggaagttgctcgttacaggtggcca

SEQ ID NO: 3909204 - DNA, 25 bp, Homo sapien
caggtggccaagatgtctgtccgtt

SEQ ID NO: 3909205 - DNA, 25 bp, Homo sapien
tcctctttgccaggtccttgtgtta

SEQ ID NO: 3909206 - DNA, 25 bp, Homo sapien
tagtcgagggtagcaggcacaatga

SEQ ID NO: 3909207 - DNA, 25 bp, Homo sapien
gagttttagccaagctgatggtaga

SEQ ID NO: 3909208 - DNA, 25 bp, Homo sapien
gaggaaagtccttgacaagcacaaa

SEQ ID NO: 3909209 - DNA, 25 bp, Homo sapien
ctgtttactgttgagggagacagac

SEQ ID NO: 3909210 - DNA, 25 bp, Homo sapien
gacgtcaaggcaagaatttcatccc

SEQ ID NO: 3909211 - DNA, 25 bp, Homo sapien
gggagacagacgtcaaggcaagaat

SEQ ID NO: 3909212 - DNA, 25 bp, Homo sapien
gcaagaatttcatcccgaaagtggt

SEQ ID NO: 3909213 - DNA, 25 bp, Homo sapien
gcctgggcactcacattacttgtca

SEQ ID NO: 3909214 - DNA, 25 bp, Homo sapien
gcactcacattacttgtcaagggag

SEQ ID NO: 3909215 - DNA, 25 bp, Homo sapien
tggggaaacctttcattagtgctgc

SEQ ID NO: 3909216 - DNA, 25 bp, Homo sapien
agtcagcctgggcactcacattact

SEQ ID NO: 3909217 - DNA, 25 bp, Homo sapien
gggatgtagagcatgaatcctggct

SEQ ID NO: 3909218 - DNA, 25 bp, Homo sapien
catcacccggatcccatttgcatag

SEQ ID NO: 3909219 - DNA, 25 bp, Homo sapien
gatgtagagcatgaatcctggctct

SEQ ID NO: 3909220 - DNA, 25 bp, Homo sapien
tcctgtgtgcgtcatgctcatcacc

SEQ ID NO: 3909221 - DNA, 25 bp, Homo sapien
tgccagtgctggtgaacgcgctgct

SEQ ID NO: 3909222 - DNA, 25 bp, Homo sapien
cttagttaaaaatggtcaaatctct

SEQ ID NO: 3909223 - DNA, 25 bp, Homo sapien
ccaaggcccaatcagatacagctct

SEQ ID NO: 3909224 - DNA, 25 bp, Homo sapien
taaaaatggtcaaatctcttcaatg

SEQ ID NO: 3909225 - DNA, 25 bp, Homo sapien
cgagactctcgtccacattccaggg

SEQ ID NO: 3909226 - DNA, 25 bp, Homo sapien
gagcgtaatacccagcattccggat

SEQ ID NO: 3909227 - DNA, 25 bp, Homo sapien
caattcggagactgcgaagagcgta

SEQ ID NO: 3909228 - DNA, 25 bp, Homo sapien
tatttatatcctgaccccagaaggc

SEQ ID NO: 3909229 - DNA, 25 bp, Homo sapien
tttttgtaacaacagaggtacgcat

SEQ ID NO: 3909230 - DNA, 25 bp, Homo sapien
cacgccttgaacagagatgaggcaa

SEQ ID NO: 3909231 - DNA, 25 bp, Homo sapien
tgaaatataaaagacgccgcggtaa

SEQ ID NO: 3909232 - DNA, 25 bp, Homo sapien
aaactgtgcgatttctaccatgtga

SEQ ID NO: 3909233 - DNA, 25 bp, Homo sapien
cgtcgcgaccaatgaaatccatgcc

SEQ ID NO: 3909234 - DNA, 25 bp, Homo sapien
tgaggcgtttatacactccattctg

SEQ ID NO: 3909235 - DNA, 25 bp, Homo sapien
tgaacatggtgaggcgtttatacac

SEQ ID NO: 3909236 - DNA, 25 bp, Homo sapien
ggagggcgtcgcgaccaatgaaatc

SEQ ID NO: 3909237 - DNA, 25 bp, Homo sapien
ccaaggccaaaggtctaggtctgaa

SEQ ID NO: 3909238 - DNA, 25 bp, Homo sapien
cattccggtaaatgggctctcccca

SEQ ID NO: 3909239 - DNA, 25 bp, Homo sapien
aaacgtggcgctccaggctgtagct

SEQ ID NO: 3909240 - DNA, 25 bp, Homo sapien
cccgtgtcctcagaaaaattgtgca

SEQ ID NO: 3909241 - DNA, 25 bp, Homo sapien
ttatatcaaggagataagagatggg

SEQ ID NO: 3909242 - DNA, 25 bp, Homo sapien
caagttcaaaattatatcaaggaga

SEQ ID NO: 3909243 - DNA, 25 bp, Homo sapien
gaagctccaaggtgacgcccactct

SEQ ID NO: 3909244 - DNA, 25 bp, Homo sapien
cgcccactctaggacaagatgatgg

SEQ ID NO: 3909245 - DNA, 25 bp, Homo sapien
tcttgccagaggtatcgagtgccag

SEQ ID NO: 3909246 - DNA, 25 bp, Homo sapien
gagtcaaacctggaattccggcagc

SEQ ID NO: 3909247 - DNA, 25 bp, Homo sapien
gaagaaaattatagggaggctgccc

SEQ ID NO: 3909248 - DNA, 25 bp, Homo sapien
tgacaaagtcaaacgcactgggaga

SEQ ID NO: 3909249 - DNA, 25 bp, Homo sapien
ttccaagataccaacacgccaaagg

SEQ ID NO: 3909250 - DNA, 25 bp, Homo sapien
taagctgctctaatgaaatggaagg

SEQ ID NO: 3909251 - DNA, 25 bp, Homo sapien
cagcgtaagtgggtaaacagagatc

SEQ ID NO: 3909252 - DNA, 25 bp, Homo sapien
tccatcttcggaggtaagtctgctc

SEQ ID NO: 3909253 - DNA, 25 bp, Homo sapien
tgaaaggagatcaaatggcccagct

SEQ ID NO: 3909254 - DNA, 25 bp, Homo sapien
caagcaagcaggtaaaactccgggt

SEQ ID NO: 3909255 - DNA, 25 bp, Homo sapien
tgagctgagacacaaggcaaaccct

SEQ ID NO: 3909256 - DNA, 25 bp, Homo sapien
aaacgtgctgcccagaatgagctga

SEQ ID NO: 3909257 - DNA, 25 bp, Homo sapien
tgttggcgctggcatgaaaagagac

SEQ ID NO: 3909258 - DNA, 25 bp, Homo sapien
gacaaaagagggaggctggtgagtg

SEQ ID NO: 3909259 - DNA, 25 bp, Homo sapien
gaaaagagacaactccgggggatgc

SEQ ID NO: 3909260 - DNA, 25 bp, Homo sapien
taatcagtgtgtccagacagcctcc

SEQ ID NO: 3909261 - DNA, 25 bp, Homo sapien
tggatggagctattcacaatctcca

SEQ ID NO: 3909262 - DNA, 25 bp, Homo sapien
ggatggagctattcacaatctccag

SEQ ID NO: 3909263 - DNA, 25 bp, Homo sapien
caggagatgcccccggccaggggag

SEQ ID NO: 3909264 - DNA, 25 bp, Homo sapien
cccagctgcgcaggcggttgtgcag

SEQ ID NO: 3909265 - DNA, 25 bp, Homo sapien
ctgcgcaggcggttgtgcagggaga

SEQ ID NO: 3909266 - DNA, 25 bp, Homo sapien
ctccgcatgtcagccgcagggggct

SEQ ID NO: 3909267 - DNA, 25 bp, Homo sapien
cctccgcatgtcagccgcagggggc

SEQ ID NO: 3909268 - DNA, 25 bp, Homo sapien
cacttgcagggtgcgccacaggccg

SEQ ID NO: 3909269 - DNA, 25 bp, Homo sapien
gcaggtggcgttgcgagcacactct

SEQ ID NO: 3909270 - DNA, 25 bp, Homo sapien
gcagctgcatgttccagcccacttg

SEQ ID NO: 3909271 - DNA, 25 bp, Homo sapien
tgcgtgtagtgggtgcaggtggcgt

SEQ ID NO: 3909272 - DNA, 25 bp, Homo sapien
ggcacagacaaaggcttctatcgct

SEQ ID NO: 3909273 - DNA, 25 bp, Homo sapien
atggtcccaggctttgaagcagcct

SEQ ID NO: 3909274 - DNA, 25 bp, Homo sapien
gattgtcttcccgttgacctcccag

SEQ ID NO: 3909275 - DNA, 25 bp, Homo sapien
tgtcttcccgttgacctcccagttg

SEQ ID NO: 3909276 - DNA, 25 bp, Homo sapien
gctgtgcagagcgaacaccaggcac

SEQ ID NO: 3909277 - DNA, 25 bp, Homo sapien
agctcatgcgacaaggattcctggg

SEQ ID NO: 3909278 - DNA, 25 bp, Homo sapien
ctggcagctcatgcgacaaggattc

SEQ ID NO: 3909279 - DNA, 25 bp, Homo sapien
ttggcagtatctgcccgtgtagcca

SEQ ID NO: 3909280 - DNA, 25 bp, Homo sapien
tgctgatgttgagacgtccatggtt

SEQ ID NO: 3909281 - DNA, 25 bp, Homo sapien
atgtcacagacgcacgagcactcct

SEQ ID NO: 3909282 - DNA, 25 bp, Homo sapien
agccgatgtcacagacgcacgagca

SEQ ID NO: 3909283 - DNA, 25 bp, Homo sapien
tgggctcccccgtagccgatgtcac

SEQ ID NO: 3909284 - DNA, 25 bp, Homo sapien
ccgtagccgatgtcacagacgcacg

SEQ ID NO: 3909285 - DNA, 25 bp, Homo sapien
tctcaacgtgttgtcactgaatgag

SEQ ID NO: 3909286 - DNA, 25 bp, Homo sapien
gggagctaagctcagggtgcccctt

SEQ ID NO: 3909287 - DNA, 25 bp, Homo sapien
aagttggaatattgagcttgctctc

SEQ ID NO: 3909288 - DNA, 25 bp, Homo sapien
tggccagtttcaagatctcaacgtg

SEQ ID NO: 3909289 - DNA, 25 bp, Homo sapien
gtgtggaagggaaaatgcaccttgg

SEQ ID NO: 3909290 - DNA, 25 bp, Homo sapien
tcaggtcacaggtgtggaagggaaa

SEQ ID NO: 3909291 - DNA, 25 bp, Homo sapien
acaggtgtggaagggaaaatgcacc

SEQ ID NO: 3909292 - DNA, 25 bp, Homo sapien
gtcacaggtgtggaagggaaaatgc

SEQ ID NO: 3909293 - DNA, 25 bp, Homo sapien
acatttcatcctggctctgtaatag

SEQ ID NO: 3909294 - DNA, 25 bp, Homo sapien
ggctctgtaataggtgtctgcctct

SEQ ID NO: 3909295 - DNA, 25 bp, Homo sapien
gacaccatgaagcagtctccgtcga

SEQ ID NO: 3909296 - DNA, 25 bp, Homo sapien
accatgaagcagtctccgtcgatcc

SEQ ID NO: 3909297 - DNA, 25 bp, Homo sapien
gttcctaggaagctaggggtgactg

SEQ ID NO: 3909298 - DNA, 25 bp, Homo sapien
ttcctaggaagctaggggtgactgt

SEQ ID NO: 3909299 - DNA, 25 bp, Homo sapien
ccttagatggaggttggtcttgacc

SEQ ID NO: 3909300 - DNA, 25 bp, Homo sapien
tgcattcctgcaaggcaaccagtgg

SEQ ID NO: 3909301 - DNA, 25 bp, Homo sapien
tatccaagttgattgccaaccccag

SEQ ID NO: 3909302 - DNA, 25 bp, Homo sapien
tttcttgaacaaccccgagctctgg

SEQ ID NO: 3909303 - DNA, 25 bp, Homo sapien
gcccagatagaaggcgaggatgtcc

SEQ ID NO: 3909304 - DNA, 25 bp, Homo sapien
gaagttcctggtctcgaagtcactg

SEQ ID NO: 3909305 - DNA, 25 bp, Homo sapien
tagaaggcgaggatgtcctgcactt

SEQ ID NO: 3909306 - DNA, 25 bp, Homo sapien
tcaatcacctcgttggtggtctcca

SEQ ID NO: 3909307 - DNA, 25 bp, Homo sapien
tcacaaccccttactcgccataccc

SEQ ID NO: 3909308 - DNA, 25 bp, Homo sapien
gcatcacaaccccttactcgccata

SEQ ID NO: 3909309 - DNA, 25 bp, Homo sapien
ccttactcgccatacccccaatcag

SEQ ID NO: 3909310 - DNA, 25 bp, Homo sapien
ttactcgccatacccccaatcagct

SEQ ID NO: 3909311 - DNA, 25 bp, Homo sapien
ccttgccatctgctggcagccgcca

SEQ ID NO: 3909312 - DNA, 25 bp, Homo sapien
tggcagccgccatggcccagggttc

SEQ ID NO: 3909313 - DNA, 25 bp, Homo sapien
tgctggcagccgccatggcccaggg

SEQ ID NO: 3909314 - DNA, 25 bp, Homo sapien
catctgctggcagccgccatggccc

SEQ ID NO: 3909315 - DNA, 25 bp, Homo sapien
aaagggggtgagcagctggccccgc

SEQ ID NO: 3909316 - DNA, 25 bp, Homo sapien
tctgggctccaggccctcaacacac

SEQ ID NO: 3909317 - DNA, 25 bp, Homo sapien
tcccgggaaagggggtgagcagctg

SEQ ID NO: 3909318 - DNA, 25 bp, Homo sapien
gggtgagcagctggccccgctctgg

SEQ ID NO: 3909319 - DNA, 25 bp, Homo sapien
gggtagtcaaggttggcccactcag

SEQ ID NO: 3909320 - DNA, 25 bp, Homo sapien
ggggtagtcaaggttggcccactca

SEQ ID NO: 3909321 - DNA, 25 bp, Homo sapien
gtagtcaaggttggcccactcagac

SEQ ID NO: 3909322 - DNA, 25 bp, Homo sapien
ggtagtcaaggttggcccactcaga

SEQ ID NO: 3909323 - DNA, 25 bp, Homo sapien
gagtccttggcggtcttgtaggtga

SEQ ID NO: 3909324 - DNA, 25 bp, Homo sapien
agcggaaggagtccttggcggtctt

SEQ ID NO: 3909325 - DNA, 25 bp, Homo sapien
gaaggagtccttggcggtcttgtag

SEQ ID NO: 3909326 - DNA, 25 bp, Homo sapien
tccttggcggtcttgtaggtgagcc

SEQ ID NO: 3909327 - DNA, 25 bp, Homo sapien
gaatagacagcccacttgagaggta

SEQ ID NO: 3909328 - DNA, 25 bp, Homo sapien
tggctgaaatcgctggagcccttgg

SEQ ID NO: 3909329 - DNA, 25 bp, Homo sapien
gcccacttgagaggtacacctggga

SEQ ID NO: 3909330 - DNA, 25 bp, Homo sapien
gcccagacttcctccaggcaagagg

SEQ ID NO: 3909331 - DNA, 25 bp, Homo sapien
actggcagatgtaacggtttcgggt

SEQ ID NO: 3909332 - DNA, 25 bp, Homo sapien
ctggcagatgtaacggtttcgggtt

SEQ ID NO: 3909333 - DNA, 25 bp, Homo sapien
aactggcagatgtaacggtttcggg

SEQ ID NO: 3909334 - DNA, 25 bp, Homo sapien
agagcagcctttttggaccactggc

SEQ ID NO: 3909335 - DNA, 25 bp, Homo sapien
gggttcatgccacagggaagctccg

SEQ ID NO: 3909336 - DNA, 25 bp, Homo sapien
gacaggtaagcagagccggtgctcc

SEQ ID NO: 3909337 - DNA, 25 bp, Homo sapien
ggcgaagggccccagcttcttctaa

SEQ ID NO: 3909338 - DNA, 25 bp, Homo sapien
gacccagaacttccagagagtgtcc

SEQ ID NO: 3909339 - DNA, 25 bp, Homo sapien
ttcttggggagacccagaacttcca

SEQ ID NO: 3909340 - DNA, 25 bp, Homo sapien
tggaggccgctgcagtgaagcctca

SEQ ID NO: 3909341 - DNA, 25 bp, Homo sapien
ttccctttgaaatgagcatgcacag

SEQ ID NO: 3909342 - DNA, 25 bp, Homo sapien
tgagggagcgggactgcacaggctc

SEQ ID NO: 3909343 - DNA, 25 bp, Homo sapien
gggggcaacacacacgcgtcgtctc

SEQ ID NO: 3909344 - DNA, 25 bp, Homo sapien
ctggtgcgatgacactccgccggtg

SEQ ID NO: 3909345 - DNA, 25 bp, Homo sapien
ctaccattggccctggtgcgatgac

SEQ ID NO: 3909346 - DNA, 25 bp, Homo sapien
tgcccgcgcccggttagacaggcga

SEQ ID NO: 3909347 - DNA, 25 bp, Homo sapien
cccgcgcccggttagacaggcgaag

SEQ ID NO: 3909348 - DNA, 25 bp, Homo sapien
cgcgcccggttagacaggcgaagcc

SEQ ID NO: 3909349 - DNA, 25 bp, Homo sapien
aactgcccgcgcccggttagacagg

SEQ ID NO: 3909350 - DNA, 25 bp, Homo sapien
aagagaaggaccagccagccaaggg

SEQ ID NO: 3909351 - DNA, 25 bp, Homo sapien
attcagggggtcaaagcctccggcg

SEQ ID NO: 3909352 - DNA, 25 bp, Homo sapien
ggagcaggtcgtcccgcaccagtgt

SEQ ID NO: 3909353 - DNA, 25 bp, Homo sapien
gactggaggcgccccagtttctctg

SEQ ID NO: 3909354 - DNA, 25 bp, Homo sapien
ttttctccggatcgttgggcatgcg

SEQ ID NO: 3909355 - DNA, 25 bp, Homo sapien
tgtcatggtccgtgtttttctccgg

SEQ ID NO: 3909356 - DNA, 25 bp, Homo sapien
cagggatcccctttgaggtgcagaa

SEQ ID NO: 3909357 - DNA, 25 bp, Homo sapien
gccaaggccttttgatgtcatggtc

SEQ ID NO: 3909358 - DNA, 25 bp, Homo sapien
tgtaagtcaggctttgtacgttttc

SEQ ID NO: 3909359 - DNA, 25 bp, Homo sapien
taagtcaggctttgtacgttttcca

SEQ ID NO: 3909360 - DNA, 25 bp, Homo sapien
tgaaacgccacagataacaggcata

SEQ ID NO: 3909361 - DNA, 25 bp, Homo sapien
atgaaacgccacagataacaggcat

SEQ ID NO: 3909362 - DNA, 25 bp, Homo sapien
agactgagggacatactctggatga

SEQ ID NO: 3909363 - DNA, 25 bp, Homo sapien
catactctggatgagaatagtttac

SEQ ID NO: 3909364 - DNA, 25 bp, Homo sapien
ccctaatagatgtagggcaccatgg

SEQ ID NO: 3909365 - DNA, 25 bp, Homo sapien
ttcctcactcccctaatagatgtag

SEQ ID NO: 3909366 - DNA, 25 bp, Homo sapien
cagtacatggttggctaaaaaattt

SEQ ID NO: 3909367 - DNA, 25 bp, Homo sapien
acagtacatggttggctaaaaaatt

SEQ ID NO: 3909368 - DNA, 25 bp, Homo sapien
cacagtacatggttggctaaaaaat

SEQ ID NO: 3909369 - DNA, 25 bp, Homo sapien
tcacagtacatggttggctaaaaaa

SEQ ID NO: 3909370 - DNA, 25 bp, Homo sapien
gtcctctctggtagcaagtgctgag

SEQ ID NO: 3909371 - DNA, 25 bp, Homo sapien
tcctctctggtagcaagtgctgaga

SEQ ID NO: 3909372 - DNA, 25 bp, Homo sapien
ctgcggatgtcacatgggcaggaca

SEQ ID NO: 3909373 - DNA, 25 bp, Homo sapien
tgattgacgcactgccaggagtagc

SEQ ID NO: 3909374 - DNA, 25 bp, Homo sapien
aggacgctctgattgacgcactgcc

SEQ ID NO: 3909375 - DNA, 25 bp, Homo sapien
tctgattgacgcactgccaggagta

SEQ ID NO: 3909376 - DNA, 25 bp, Homo sapien
cgctctgattgacgcactgccagga

SEQ ID NO: 3909377 - DNA, 25 bp, Homo sapien
aatttggtcaatgtcaccagcgtag

SEQ ID NO: 3909378 - DNA, 25 bp, Homo sapien
cattaatgtgtggtcaatttggtca

SEQ ID NO: 3909379 - DNA, 25 bp, Homo sapien
accaactaagcttatcattaatgtg

SEQ ID NO: 3909380 - DNA, 25 bp, Homo sapien
tcacgttattccgttgaggtcatca

SEQ ID NO: 3909381 - DNA, 25 bp, Homo sapien
tcggaccaccaggtttacaattcca

SEQ ID NO: 3909382 - DNA, 25 bp, Homo sapien
tacataggaagatcgaattagacca

SEQ ID NO: 3909383 - DNA, 25 bp, Homo sapien
gaaaacgtttgttgttgccgtgaga

SEQ ID NO: 3909384 - DNA, 25 bp, Homo sapien
tgagaagaggcattgaaacgctgaa

SEQ ID NO: 3909385 - DNA, 25 bp, Homo sapien
cagcctgttttacgttgagtaattt

SEQ ID NO: 3909386 - DNA, 25 bp, Homo sapien
tcaacagcctgttttacgttgagta

SEQ ID NO: 3909387 - DNA, 25 bp, Homo sapien
gaagctttacgttcatgtaaacagc

SEQ ID NO: 3909388 - DNA, 25 bp, Homo sapien
ctttacgttcatgtaaacagcatga

SEQ ID NO: 3909389 - DNA, 25 bp, Homo sapien
gacacacacactctgcctaggaaaa

SEQ ID NO: 3909390 - DNA, 25 bp, Homo sapien
tgaggatcttttaggcctttgagaa

SEQ ID NO: 3909391 - DNA, 25 bp, Homo sapien
ctaaaaggtggttgtttgaagactg

SEQ ID NO: 3909392 - DNA, 25 bp, Homo sapien
tatacttttgctgaacatgttgcta

SEQ ID NO: 3909393 - DNA, 25 bp, Homo sapien
ccagcatatcggtattttaaaccaa

SEQ ID NO: 3909394 - DNA, 25 bp, Homo sapien
tatgtataatggtaacctgagcctg

SEQ ID NO: 3909395 - DNA, 25 bp, Homo sapien
cacaggtggaatcttaaagagagca

SEQ ID NO: 3909396 - DNA, 25 bp, Homo sapien
cggagtttcatcgagctggccagac

SEQ ID NO: 3909397 - DNA, 25 bp, Homo sapien
catgttattcatgtgtggtgccata

SEQ ID NO: 3909398 - DNA, 25 bp, Homo sapien
tatagataacggctctccagacctg

SEQ ID NO: 3909399 - DNA, 25 bp, Homo sapien
gagctttccgcgtcagcaagtagga

SEQ ID NO: 3909400 - DNA, 25 bp, Homo sapien
ccacgtcagtgccatcggtctagaa

SEQ ID NO: 3909401 - DNA, 25 bp, Homo sapien
tgatcgtcacgctcgcatctataga

SEQ ID NO: 3909402 - DNA, 25 bp, Homo sapien
gataacgaggagataactagcagtc

SEQ ID NO: 3909403 - DNA, 25 bp, Homo sapien
tgtccacccaacagatcaagaaggc

SEQ ID NO: 3909404 - DNA, 25 bp, Homo sapien
gaaaggctcattggttgctcctgac

SEQ ID NO: 3909405 - DNA, 25 bp, Homo sapien
tgactttactgccaagggagccatg

SEQ ID NO: 3909406 - DNA, 25 bp, Homo sapien
tcactcttaaatgaaccccagagtt

SEQ ID NO: 3909407 - DNA, 25 bp, Homo sapien
cctcactcttaaatgaaccccagag

SEQ ID NO: 3909408 - DNA, 25 bp, Homo sapien
tttcctcactcttaaatgaacccca

SEQ ID NO: 3909409 - DNA, 25 bp, Homo sapien
tcctcactcttaaatgaaccccaga

SEQ ID NO: 3909410 - DNA, 25 bp, Homo sapien
tgagggctgtgtatcactcagcaac

SEQ ID NO: 3909411 - DNA, 25 bp, Homo sapien
ccggacaagtgtaaccatgggcaca

SEQ ID NO: 3909412 - DNA, 25 bp, Homo sapien
gactttgcctatggaaaccaaaatg

SEQ ID NO: 3909413 - DNA, 25 bp, Homo sapien
gatatgtaacctctaccaaacacgt

SEQ ID NO: 3909414 - DNA, 25 bp, Homo sapien
cggcagccccagccatcgcggctga

SEQ ID NO: 3909415 - DNA, 25 bp, Homo sapien
gcagggtgatgggaaaccgccgcag

SEQ ID NO: 3909416 - DNA, 25 bp, Homo sapien
gccgcagggcgcgatcttggacgcg

SEQ ID NO: 3909417 - DNA, 25 bp, Homo sapien
gcgcgatcttggacgcgcccggcag

SEQ ID NO: 3909418 - DNA, 25 bp, Homo sapien
ttcgagggatggcacgagggatcgt

SEQ ID NO: 3909419 - DNA, 25 bp, Homo sapien
tggattcgagggatggcacgaggga

SEQ ID NO: 3909420 - DNA, 25 bp, Homo sapien
ggctccgggggttcgcggcaggctc

SEQ ID NO: 3909421 - DNA, 25 bp, Homo sapien
ggcacgagggatcgtgggctccggg

SEQ ID NO: 3909422 - DNA, 25 bp, Homo sapien
ggtcccaggcgcgggtgggacgctc

SEQ ID NO: 3909423 - DNA, 25 bp, Homo sapien
gtcccaggcgcgggtgggacgctcg

SEQ ID NO: 3909424 - DNA, 25 bp, Homo sapien
cccaggcgcgggtgggacgctcgtg

SEQ ID NO: 3909425 - DNA, 25 bp, Homo sapien
tcccaggcgcgggtgggacgctcgt

SEQ ID NO: 3909426 - DNA, 25 bp, Homo sapien
gactcagccgcagcttcctgctcgt

SEQ ID NO: 3909427 - DNA, 25 bp, Homo sapien
tcgtccaccgccagggcccatgagt

SEQ ID NO: 3909428 - DNA, 25 bp, Homo sapien
cgactcagccgcagcttcctgctcg

SEQ ID NO: 3909429 - DNA, 25 bp, Homo sapien
agcttcctgctcgtccaccgccagg

SEQ ID NO: 3909430 - DNA, 25 bp, Homo sapien
ttactcagttaacaatgcctgccag

SEQ ID NO: 3909431 - DNA, 25 bp, Homo sapien
aatatgaagccagcacacacaagca

SEQ ID NO: 3909432 - DNA, 25 bp, Homo sapien
tgctcaaatggataaggaccacagt

SEQ ID NO: 3909433 - DNA, 25 bp, Homo sapien
gcctgccaggttaggcatgagaaat

SEQ ID NO: 3909434 - DNA, 25 bp, Homo sapien
acgcccggcctttctagtcgtacat

SEQ ID NO: 3909435 - DNA, 25 bp, Homo sapien
cgcccggcctttctagtcgtacatt

SEQ ID NO: 3909436 - DNA, 25 bp, Homo sapien
ctcttccttaagatgcaagttgctc

SEQ ID NO: 3909437 - DNA, 25 bp, Homo sapien
ttctcttccttaagatgcaagttgc

SEQ ID NO: 3909438 - DNA, 25 bp, Homo sapien
cttccttaagatgcaagttgctcaa

SEQ ID NO: 3909439 - DNA, 25 bp, Homo sapien
gattttctcttccttaagatgcaag

SEQ ID NO: 3909440 - DNA, 25 bp, Homo sapien
gccatcattcaaaatcgcatcccat

SEQ ID NO: 3909441 - DNA, 25 bp, Homo sapien
tctatgacactagaagtttttgtaa

SEQ ID NO: 3909442 - DNA, 25 bp, Homo sapien
gcatcccatacccaacagttgagac

SEQ ID NO: 3909443 - DNA, 25 bp, Homo sapien
tatgacactagaagtttttgtaaag

SEQ ID NO: 3909444 - DNA, 25 bp, Homo sapien
ctgcattggcattggtcttgacaac

SEQ ID NO: 3909445 - DNA, 25 bp, Homo sapien
tgcattggcattggtcttgacaaca

SEQ ID NO: 3909446 - DNA, 25 bp, Homo sapien
gacttcaccgagtacagaggggagt

SEQ ID NO: 3909447 - DNA, 25 bp, Homo sapien
gcaggacttccacttggtttgtgtt

SEQ ID NO: 3909448 - DNA, 25 bp, Homo sapien
tctgatcagcttgttgagtaaggac

SEQ ID NO: 3909449 - DNA, 25 bp, Homo sapien
tcaacaaggttgcttctgatcagct

SEQ ID NO: 3909450 - DNA, 25 bp, Homo sapien
tgagctgtggtgaactgaatacatg

SEQ ID NO: 3909451 - DNA, 25 bp, Homo sapien
tatgcctggcctacacatagtttgt

SEQ ID NO: 3909452 - DNA, 25 bp, Homo sapien
gtaatcaacaataattgagctgtgg

SEQ ID NO: 3909453 - DNA, 25 bp, Homo sapien
atgttagtacagctaaagcttttat

SEQ ID NO: 3909454 - DNA, 25 bp, Homo sapien
tagactccttggagaagctgtggtt

SEQ ID NO: 3909455 - DNA, 25 bp, Homo sapien
gactccttggagaagctgtggtttc

SEQ ID NO: 3909456 - DNA, 25 bp, Homo sapien
ggcatagactccttggagaagctgt

SEQ ID NO: 3909457 - DNA, 25 bp, Homo sapien
gcatagactccttggagaagctgtg

SEQ ID NO: 3909458 - DNA, 25 bp, Homo sapien
ttgtatcttggatggacgattgaaa

SEQ ID NO: 3909459 - DNA, 25 bp, Homo sapien
tcttggatggacgattgaaacccat

SEQ ID NO: 3909460 - DNA, 25 bp, Homo sapien
tatcttggatggacgattgaaaccc

SEQ ID NO: 3909461 - DNA, 25 bp, Homo sapien
aatgcgttctcttgtatcttggatg

SEQ ID NO: 3909462 - DNA, 25 bp, Homo sapien
ctacaggagcacaccatgacacctg

SEQ ID NO: 3909463 - DNA, 25 bp, Homo sapien
ggactacaggagcacaccatgacac

SEQ ID NO: 3909464 - DNA, 25 bp, Homo sapien
tacaggagcacaccatgacacctgg

SEQ ID NO: 3909465 - DNA, 25 bp, Homo sapien
actacaggagcacaccatgacacct

SEQ ID NO: 3909466 - DNA, 25 bp, Homo sapien
tcataatggcatacaggtcctgcat

SEQ ID NO: 3909467 - DNA, 25 bp, Homo sapien
gagaacatgccagtcatgctcttgt

SEQ ID NO: 3909468 - DNA, 25 bp, Homo sapien
cagggccctagtactgctcagagaa

SEQ ID NO: 3909469 - DNA, 25 bp, Homo sapien
tttgcccagatatctacttcaggag

SEQ ID NO: 3909470 - DNA, 25 bp, Homo sapien
tgtttgcaggttctacttggctaag

SEQ ID NO: 3909471 - DNA, 25 bp, Homo sapien
tttgcaggttctacttggctaagca

SEQ ID NO: 3909472 - DNA, 25 bp, Homo sapien
tgcaggttctacttggctaagcatg

SEQ ID NO: 3909473 - DNA, 25 bp, Homo sapien
ctgggggtatttgtttgcaggttct

SEQ ID NO: 3909474 - DNA, 25 bp, Homo sapien
tgtttggagggcgagctcatacgtt

SEQ ID NO: 3909475 - DNA, 25 bp, Homo sapien
tttattgcctcgaacagcataagct

SEQ ID NO: 3909476 - DNA, 25 bp, Homo sapien
agctagcttcagttcagggtaaaat

SEQ ID NO: 3909477 - DNA, 25 bp, Homo sapien
tcatacgttggggagagacatagac

SEQ ID NO: 3909478 - DNA, 25 bp, Homo sapien
gcttggagcaccagtccagcacagt

SEQ ID NO: 3909479 - DNA, 25 bp, Homo sapien
gagcttggagcaccagtccagcaca

SEQ ID NO: 3909480 - DNA, 25 bp, Homo sapien
agcttggagcaccagtccagcacag

SEQ ID NO: 3909481 - DNA, 25 bp, Homo sapien
tggccccgggaagcgacagaagcac

SEQ ID NO: 3909482 - DNA, 25 bp, Homo sapien
gccccgggaagcgacagaagcacag

SEQ ID NO: 3909483 - DNA, 25 bp, Homo sapien
cccgggaagcgacagaagcacagcc

SEQ ID NO: 3909484 - DNA, 25 bp, Homo sapien
cgggaagcgacagaagcacagcctt

SEQ ID NO: 3909485 - DNA, 25 bp, Homo sapien
aggacatagtactgcttgatggtgt

SEQ ID NO: 3909486 - DNA, 25 bp, Homo sapien
ggacatagtactgcttgatggtgtc

SEQ ID NO: 3909487 - DNA, 25 bp, Homo sapien
gacatagtactgcttgatggtgtcc

SEQ ID NO: 3909488 - DNA, 25 bp, Homo sapien
caggacatagtactgcttgatggtg

SEQ ID NO: 3909489 - DNA, 25 bp, Homo sapien
tctttgccctctcggaagcgctcaa

SEQ ID NO: 3909490 - DNA, 25 bp, Homo sapien
ggcacacacgttggtggtcaccaaa

SEQ ID NO: 3909491 - DNA, 25 bp, Homo sapien
ccagccaactagctgttttgcgagt

SEQ ID NO: 3909492 - DNA, 25 bp, Homo sapien
tctgctgccagccaactagctgttt

SEQ ID NO: 3909493 - DNA, 25 bp, Homo sapien
gaagatcaaagttgatgacgacaga

SEQ ID NO: 3909494 - DNA, 25 bp, Homo sapien
gatcaaagttgatgacgacagacac

SEQ ID NO: 3909495 - DNA, 25 bp, Homo sapien
tgacgacagacacttgttcaacatc

SEQ ID NO: 3909496 - DNA, 25 bp, Homo sapien
agttgatgacgacagacacttgttc

SEQ ID NO: 3909497 - DNA, 25 bp, Homo sapien
gattctgttcaggatgttcatgctg

SEQ ID NO: 3909498 - DNA, 25 bp, Homo sapien
caggtaggtctcattgtcaggattc

SEQ ID NO: 3909499 - DNA, 25 bp, Homo sapien
tgtccaccatgttcactgccaggcc

SEQ ID NO: 3909500 - DNA, 25 bp, Homo sapien
ccgtgcgcccgatccggtgcaggta

SEQ ID NO: 3909501 - DNA, 25 bp, Homo sapien
ttctcaatctcgtccaaatcatctg

SEQ ID NO: 3909502 - DNA, 25 bp, Homo sapien
tctcaatctcgtccaaatcatctgt

SEQ ID NO: 3909503 - DNA, 25 bp, Homo sapien
tcaatctcgtccaaatcatctgtgt

SEQ ID NO: 3909504 - DNA, 25 bp, Homo sapien
ctcaatctcgtccaaatcatctgtg

SEQ ID NO: 3909505 - DNA, 25 bp, Homo sapien
caaaggccttggtgatactcttgcc

SEQ ID NO: 3909506 - DNA, 25 bp, Homo sapien
catttcgtgggtaccaacagccttg

SEQ ID NO: 3909507 - DNA, 25 bp, Homo sapien
tagtgtagctagtccctcagttgca

SEQ ID NO: 3909508 - DNA, 25 bp, Homo sapien
agtatttcagggttggtccacagga

SEQ ID NO: 3909509 - DNA, 25 bp, Homo sapien
cccaagtttctctgttctagagcag

SEQ ID NO: 3909510 - DNA, 25 bp, Homo sapien
atagataatgaatatatccagaatt

SEQ ID NO: 3909511 - DNA, 25 bp, Homo sapien
ccagaattttccattgggccaaaca

SEQ ID NO: 3909512 - DNA, 25 bp, Homo sapien
tccattgggccaaacattccttttc

SEQ ID NO: 3909513 - DNA, 25 bp, Homo sapien
gggaatatagcacttcgccaccacc

SEQ ID NO: 3909514 - DNA, 25 bp, Homo sapien
taatttttgtgtgagaacttgtgca

SEQ ID NO: 3909515 - DNA, 25 bp, Homo sapien
tgtgagaacttgtgcatttaaaata

SEQ ID NO: 3909516 - DNA, 25 bp, Homo sapien
cccagcagctgggaatatagcactt

SEQ ID NO: 3909517 - DNA, 25 bp, Homo sapien
agaatgcacctcacgcggaccggaa

SEQ ID NO: 3909518 - DNA, 25 bp, Homo sapien
agggagacccacttgtgaaaatatg

SEQ ID NO: 3909519 - DNA, 25 bp, Homo sapien
taacctcgccaccggcgcgagaatg

SEQ ID NO: 3909520 - DNA, 25 bp, Homo sapien
gaaaatatgcgctgcaccacgtcgc

SEQ ID NO: 3909521 - DNA, 25 bp, Homo sapien
gacttgacagccgcttcctgctcgt

SEQ ID NO: 3909522 - DNA, 25 bp, Homo sapien
tcgtccaccgccagggcccacgagt

SEQ ID NO: 3909523 - DNA, 25 bp, Homo sapien
ccagggcccacgagtcggtggccat

SEQ ID NO: 3909524 - DNA, 25 bp, Homo sapien
cttgacagccgcttcctgctcgtcc

SEQ ID NO: 3909525 - DNA, 25 bp, Homo sapien
caaaaatccccataccggctgggcg

SEQ ID NO: 3909526 - DNA, 25 bp, Homo sapien
tgaagtccttaaccagcccagatgg

SEQ ID NO: 3909527 - DNA, 25 bp, Homo sapien
cctagcaaactgcaggagcgcgttg

SEQ ID NO: 3909528 - DNA, 25 bp, Homo sapien
tcgtcaccgaggaggtcaatagagg

SEQ ID NO: 3909529 - DNA, 25 bp, Homo sapien
ctgctttgactttctcttccttgat

SEQ ID NO: 3909530 - DNA, 25 bp, Homo sapien
attggtatctgctttgactttctct

SEQ ID NO: 3909531 - DNA, 25 bp, Homo sapien
tatctgctttgactttctcttcctt

SEQ ID NO: 3909532 - DNA, 25 bp, Homo sapien
cattggtatctgctttgactttctc

SEQ ID NO: 3909533 - DNA, 25 bp, Homo sapien
ttttgactaatttcagacagatcag

SEQ ID NO: 3909534 - DNA, 25 bp, Homo sapien
gacagatcagaatatgttacctctt

SEQ ID NO: 3909535 - DNA, 25 bp, Homo sapien
ggcatgaactactatacctggtgaa

SEQ ID NO: 3909536 - DNA, 25 bp, Homo sapien
tactagccctactttaaaatacagc

SEQ ID NO: 3909537 - DNA, 25 bp, Homo sapien
atctgttttctcggcagtggtactg

SEQ ID NO: 3909538 - DNA, 25 bp, Homo sapien
cgtctcttgccaagggcatccaaaa

SEQ ID NO: 3909539 - DNA, 25 bp, Homo sapien
tcttgccaagggcatccaaaagtag

SEQ ID NO: 3909540 - DNA, 25 bp, Homo sapien
gccaagggcatccaaaagtagttac

SEQ ID NO: 3909541 - DNA, 25 bp, Homo sapien
ttgccaagggcatccaaaagtagtt

SEQ ID NO: 3909542 - DNA, 25 bp, Homo sapien
agccgaagctcttcaaacgacttca

SEQ ID NO: 3909543 - DNA, 25 bp, Homo sapien
caggatagccaaggacacaagggtg

SEQ ID NO: 3909544 - DNA, 25 bp, Homo sapien
cagaaatgttcctgacatccagaaa

SEQ ID NO: 3909545 - DNA, 25 bp, Homo sapien
ttcctaccaagagaacaggatagcc

SEQ ID NO: 3909546 - DNA, 25 bp, Homo sapien
cacaagggtgggagattaatactgc

SEQ ID NO: 3909547 - DNA, 25 bp, Homo sapien
agacccgcaaatctggctggccttg

SEQ ID NO: 3909548 - DNA, 25 bp, Homo sapien
ttaatgctttcagcagacccgcaaa

SEQ ID NO: 3909549 - DNA, 25 bp, Homo sapien
tccctaaggaatcttaatctgcaac

SEQ ID NO: 3909550 - DNA, 25 bp, Homo sapien
caaatcaaaccaagctaccgccctt

SEQ ID NO: 3909551 - DNA, 25 bp, Homo sapien
ggttcagcaagcatcatgggtaatg

SEQ ID NO: 3909552 - DNA, 25 bp, Homo sapien
agggtcgattgaagcccatggcata

SEQ ID NO: 3909553 - DNA, 25 bp, Homo sapien
aatgcgttctcttgtatcttggagg

SEQ ID NO: 3909554 - DNA, 25 bp, Homo sapien
tatcttggagggtcgattgaagccc

SEQ ID NO: 3909555 - DNA, 25 bp, Homo sapien
taaagcactacctttctctataagt

SEQ ID NO: 3909556 - DNA, 25 bp, Homo sapien
gaaactgtagctaactccatccgat

SEQ ID NO: 3909557 - DNA, 25 bp, Homo sapien
ttctattgttaagtgggaaaggcag

SEQ ID NO: 3909558 - DNA, 25 bp, Homo sapien
tttaagatagcatggaataaagcac

SEQ ID NO: 3909559 - DNA, 25 bp, Homo sapien
actgagactgggcaatcagattctg

SEQ ID NO: 3909560 - DNA, 25 bp, Homo sapien
gagactgggcaatcagattctgtgg

SEQ ID NO: 3909561 - DNA, 25 bp, Homo sapien
cactcggctgagcatggctaagaca

SEQ ID NO: 3909562 - DNA, 25 bp, Homo sapien
gggtatctgtctgatggctccactc

SEQ ID NO: 3909563 - DNA, 25 bp, Homo sapien
cataaaggatgagtttaggagagcc

SEQ ID NO: 3909564 - DNA, 25 bp, Homo sapien
cctgaaggcacccagtatgctgatg

SEQ ID NO: 3909565 - DNA, 25 bp, Homo sapien
ggcacccagtatgctgatgttatta

SEQ ID NO: 3909566 - DNA, 25 bp, Homo sapien
tcataaaggatgagtttaggagagc

SEQ ID NO: 3909567 - DNA, 25 bp, Homo sapien
tctgggtaaaatttgcccatctgct

SEQ ID NO: 3909568 - DNA, 25 bp, Homo sapien
tcgaacggcataggcaagcttcagt

SEQ ID NO: 3909569 - DNA, 25 bp, Homo sapien
ttgaagcgccagctcatatgttggg

SEQ ID NO: 3909570 - DNA, 25 bp, Homo sapien
acttttcctgtttgaagcgccagct

SEQ ID NO: 3909571 - DNA, 25 bp, Homo sapien
ttcagttgtcgcctgccgtactcac

SEQ ID NO: 3909572 - DNA, 25 bp, Homo sapien
gttcagttgtcgcctgccgtactca

SEQ ID NO: 3909573 - DNA, 25 bp, Homo sapien
tgttcagttgtcgcctgccgtactc

SEQ ID NO: 3909574 - DNA, 25 bp, Homo sapien
tagaaagttgaatacggtcatcgca

SEQ ID NO: 3909575 - DNA, 25 bp, Homo sapien
taagaactctgtgagccatgcgtgg

SEQ ID NO: 3909576 - DNA, 25 bp, Homo sapien
tcaaaactctaccttctgagcgaag

SEQ ID NO: 3909577 - DNA, 25 bp, Homo sapien
taatccctctttggtagcaggtccc

SEQ ID NO: 3909578 - DNA, 25 bp, Homo sapien
cttggagcaccagtccagcacggtc

SEQ ID NO: 3909579 - DNA, 25 bp, Homo sapien
tggagcaccagtccagcacggtccc

SEQ ID NO: 3909580 - DNA, 25 bp, Homo sapien
gcttggagcaccagtccagcacggt

SEQ ID NO: 3909581 - DNA, 25 bp, Homo sapien
gagcttggagcaccagtccagcacg

SEQ ID NO: 3909582 - DNA, 25 bp, Homo sapien
ggaagcaacggaagcacagcctccc

SEQ ID NO: 3909583 - DNA, 25 bp, Homo sapien
ggccctgggaagcaacggaagcaca

SEQ ID NO: 3909584 - DNA, 25 bp, Homo sapien
tgggaagcaacggaagcacagcctc

SEQ ID NO: 3909585 - DNA, 25 bp, Homo sapien
cctgggaagcaacggaagcacagcc

SEQ ID NO: 3909586 - DNA, 25 bp, Homo sapien
aggacatagtactgcttgatggtat

SEQ ID NO: 3909587 - DNA, 25 bp, Homo sapien
caggacatagtactgcttgatggta

SEQ ID NO: 3909588 - DNA, 25 bp, Homo sapien
tctttgccctctcggaagcgctcaa

SEQ ID NO: 3909589 - DNA, 25 bp, Homo sapien
ggcacacacgttggtggtcaccaaa

SEQ ID NO: 3909590 - DNA, 25 bp, Homo sapien
ccagccaactagctgttttgcgagt

SEQ ID NO: 3909591 - DNA, 25 bp, Homo sapien
tctgctgccagccaactagctgttt

SEQ ID NO: 3909592 - DNA, 25 bp, Homo sapien
taggtcaatgcgtaccaactttggg

SEQ ID NO: 3909593 - DNA, 25 bp, Homo sapien
caactctgggtacaagagagggcac

SEQ ID NO: 3909594 - DNA, 25 bp, Homo sapien
cacatataggcaggcaacagaaccc

SEQ ID NO: 3909595 - DNA, 25 bp, Homo sapien
tcagtcggtaatcctctgggagaca

SEQ ID NO: 3909596 - DNA, 25 bp, Homo sapien
gattctgttcaggatgttcatgctg

SEQ ID NO: 3909597 - DNA, 25 bp, Homo sapien
gatcaaagttgatgacgacagacac

SEQ ID NO: 3909598 - DNA, 25 bp, Homo sapien
cattgtcaggattcccgtccttgtc

SEQ ID NO: 3909599 - DNA, 25 bp, Homo sapien
ccgatccggtgcaggtaggtctcat

SEQ ID NO: 3909600 - DNA, 25 bp, Homo sapien
ttctcaatctcgtccaaatcatctg

SEQ ID NO: 3909601 - DNA, 25 bp, Homo sapien
tctcaatctcgtccaaatcatctgt

SEQ ID NO: 3909602 - DNA, 25 bp, Homo sapien
ctcaatctcgtccaaatcatctgtg

SEQ ID NO: 3909603 - DNA, 25 bp, Homo sapien
tcaatctcgtccaaatcatctgtgt

SEQ ID NO: 3909604 - DNA, 25 bp, Homo sapien
ctgcacatctatcgtttcttcaggg

SEQ ID NO: 3909605 - DNA, 25 bp, Homo sapien
tccctcattcgatgcacagcggtgg

SEQ ID NO: 3909606 - DNA, 25 bp, Homo sapien
tggagctggttccacgatgcctagc

SEQ ID NO: 3909607 - DNA, 25 bp, Homo sapien
cgatgcctagccaaaatcaggaggg

SEQ ID NO: 3909608 - DNA, 25 bp, Homo sapien
aagtttacaaaagtagccgagctgc

SEQ ID NO: 3909609 - DNA, 25 bp, Homo sapien
gtttctctccaaatctgaagtttac

SEQ ID NO: 3909610 - DNA, 25 bp, Homo sapien
caggattcagactttcgtgtttctc

SEQ ID NO: 3909611 - DNA, 25 bp, Homo sapien
gctcatcagggatatgcaagtctgc

SEQ ID NO: 3909612 - DNA, 25 bp, Homo sapien
tcctggctgccgtgactgagtacca

SEQ ID NO: 3909613 - DNA, 25 bp, Homo sapien
gggtaagaaccaactacgtatgcgc

SEQ ID NO: 3909614 - DNA, 25 bp, Homo sapien
cgtatgcgctcagaaactcacctgg

SEQ ID NO: 3909615 - DNA, 25 bp, Homo sapien
tggtgcatacgctacaatttatcca

SEQ ID NO: 3909616 - DNA, 25 bp, Homo sapien
aaaaatgttcggccaggcgtgatgg

SEQ ID NO: 3909617 - DNA, 25 bp, Homo sapien
aggccgacagaggtaggcagaccac

SEQ ID NO: 3909618 - DNA, 25 bp, Homo sapien
ccgacagaggtaggcagaccacttg

SEQ ID NO: 3909619 - DNA, 25 bp, Homo sapien
aaaaaatgttcggccaggcgtgatg

SEQ ID NO: 3909620 - DNA, 25 bp, Homo sapien
gaagtgattttcaccaacgctcaaa

SEQ ID NO: 3909621 - DNA, 25 bp, Homo sapien
cattgataatactgttggcaagcac

SEQ ID NO: 3909622 - DNA, 25 bp, Homo sapien
gatgttcagtttgggtcaagggctc

SEQ ID NO: 3909623 - DNA, 25 bp, Homo sapien
aacctttggcaagtgtaaatgacaa

SEQ ID NO: 3909624 - DNA, 25 bp, Homo sapien
gcctggtcctcagagtgtggaatta

SEQ ID NO: 3909625 - DNA, 25 bp, Homo sapien
gtctatgcctgggtaacaaccaacc

SEQ ID NO: 3909626 - DNA, 25 bp, Homo sapien
catccggccttgctataaaatgact

SEQ ID NO: 3909627 - DNA, 25 bp, Homo sapien
gaagaaacatatggcatctgcactc

SEQ ID NO: 3909628 - DNA, 25 bp, Homo sapien
tgcccatgtgagttgataccttttt

SEQ ID NO: 3909629 - DNA, 25 bp, Homo sapien
ttaaatttcccgtctattgctgtta

SEQ ID NO: 3909630 - DNA, 25 bp, Homo sapien
catagctttagtgacgttgtgggaa

SEQ ID NO: 3909631 - DNA, 25 bp, Homo sapien
aggtaagtgatgtttcatcttgtac

SEQ ID NO: 3909632 - DNA, 25 bp, Homo sapien
taaatcatgaatcccgccaggtacg

SEQ ID NO: 3909633 - DNA, 25 bp, Homo sapien
caccgttttagagagctaggcctca

SEQ ID NO: 3909634 - DNA, 25 bp, Homo sapien
gaggatcgtcttagtagctggccag

SEQ ID NO: 3909635 - DNA, 25 bp, Homo sapien
tattggaacctagctcgagtgtcgt

SEQ ID NO: 3909636 - DNA, 25 bp, Homo sapien
gatgattgccacctctaatggagca

SEQ ID NO: 3909637 - DNA, 25 bp, Homo sapien
caatgatgaacaagccacgggagag

SEQ ID NO: 3909638 - DNA, 25 bp, Homo sapien
ggaaggccccatcgcttgctgaaaa

SEQ ID NO: 3909639 - DNA, 25 bp, Homo sapien
ccgttgaaggctttagagtaaggca

SEQ ID NO: 3909640 - DNA, 25 bp, Homo sapien
tttgtctgacttactttacttagca

SEQ ID NO: 3909641 - DNA, 25 bp, Homo sapien
tactatgccaatgtagggatatacc

SEQ ID NO: 3909642 - DNA, 25 bp, Homo sapien
atgtcctcatagttcatccgtgttg

SEQ ID NO: 3909643 - DNA, 25 bp, Homo sapien
cccggccctgatttgactattcttt

SEQ ID NO: 3909644 - DNA, 25 bp, Homo sapien
ctggacagcctcagcaacttggaca

SEQ ID NO: 3909645 - DNA, 25 bp, Homo sapien
aggcggggtcttcaaggcccttgct

SEQ ID NO: 3909646 - DNA, 25 bp, Homo sapien
ctctggacagcctcagcaacttgga

SEQ ID NO: 3909647 - DNA, 25 bp, Homo sapien
ctcctgaggatggaaggcggggtct

SEQ ID NO: 3909648 - DNA, 25 bp, Homo sapien
ctggtgagggtctcctttgaggttc

SEQ ID NO: 3909649 - DNA, 25 bp, Homo sapien
gaggtggaagtagcccttcggctgc

SEQ ID NO: 3909650 - DNA, 25 bp, Homo sapien
ctgggaggtggaagtagcccttcgg

SEQ ID NO: 3909651 - DNA, 25 bp, Homo sapien
tgggaggtggaagtagcccttcggc

SEQ ID NO: 3909652 - DNA, 25 bp, Homo sapien
cctgctgttctcgttttggggcact

SEQ ID NO: 3909653 - DNA, 25 bp, Homo sapien
gctctaaagctgctacagcctccaa

SEQ ID NO: 3909654 - DNA, 25 bp, Homo sapien
cgagaattggctctaaagctgctac

SEQ ID NO: 3909655 - DNA, 25 bp, Homo sapien
gaattggctctaaagctgctacagc

SEQ ID NO: 3909656 - DNA, 25 bp, Homo sapien
gaggtggtgcttatcctgtgcttca

SEQ ID NO: 3909657 - DNA, 25 bp, Homo sapien
aggttaagtcgttgatggctgtctc

SEQ ID NO: 3909658 - DNA, 25 bp, Homo sapien
gctggtctgaggtggtgcttatcct

SEQ ID NO: 3909659 - DNA, 25 bp, Homo sapien
tcctgtgcttcattaggttaagtcg

SEQ ID NO: 3909660 - DNA, 25 bp, Homo sapien
tttctggctacaaactctgggcggc

SEQ ID NO: 3909661 - DNA, 25 bp, Homo sapien
gcctgagtccctagggtagcactga

SEQ ID NO: 3909662 - DNA, 25 bp, Homo sapien
gaggtaccagagctgagatttcaga

SEQ ID NO: 3909663 - DNA, 25 bp, Homo sapien
aagtgtgttagctcttgccttctgg

SEQ ID NO: 3909664 - DNA, 25 bp, Homo sapien
gttgaccacattaccaaggaagaat

SEQ ID NO: 3909665 - DNA, 25 bp, Homo sapien
aaactagaattgttgaccacattac

SEQ ID NO: 3909666 - DNA, 25 bp, Homo sapien
gaattttattgttaagccacaccaa

SEQ ID NO: 3909667 - DNA, 25 bp, Homo sapien
ccttgttaagagaatggcattactg

SEQ ID NO: 3909668 - DNA, 25 bp, Homo sapien
tggacaacaaagacagctccctggg

SEQ ID NO: 3909669 - DNA, 25 bp, Homo sapien
tcatgtgggcgatgcctgtgtaacc

SEQ ID NO: 3909670 - DNA, 25 bp, Homo sapien
tccactgtaatggaccaaggtctgt

SEQ ID NO: 3909671 - DNA, 25 bp, Homo sapien
cagtccctgatagcaccatcatgtg

SEQ ID NO: 3909672 - DNA, 25 bp, Homo sapien
ggactggatgcctcttgcattctga

SEQ ID NO: 3909673 - DNA, 25 bp, Homo sapien
gggactggatgcctcttgcattctg

SEQ ID NO: 3909674 - DNA, 25 bp, Homo sapien
cagctcctgagttctcgggagtgaa

SEQ ID NO: 3909675 - DNA, 25 bp, Homo sapien
ctcctgagttctcgggagtgaagtt

SEQ ID NO: 3909676 - DNA, 25 bp, Homo sapien
ccaagatacaaaggcctgaactgag

SEQ ID NO: 3909677 - DNA, 25 bp, Homo sapien
cacataccaagatacaaaggcctga

SEQ ID NO: 3909678 - DNA, 25 bp, Homo sapien
gatacaaaggcctgaactgagaagg

SEQ ID NO: 3909679 - DNA, 25 bp, Homo sapien
gaaaaggccacacataccaagatac

SEQ ID NO: 3909680 - DNA, 25 bp, Homo sapien
cagccacgtggcagatctgtgagga

SEQ ID NO: 3909681 - DNA, 25 bp, Homo sapien
tgtgctctgctctagccaggttttt

SEQ ID NO: 3909682 - DNA, 25 bp, Homo sapien
gaatcagactgatctgggaggcgct

SEQ ID NO: 3909683 - DNA, 25 bp, Homo sapien
tctgtgaggagttgagaacccgctt

SEQ ID NO: 3909684 - DNA, 25 bp, Homo sapien
ggtgacaggaacctaggattacagg

SEQ ID NO: 3909685 - DNA, 25 bp, Homo sapien
tctcggccttgttggccaccccttc

SEQ ID NO: 3909686 - DNA, 25 bp, Homo sapien
atacgccacgacaccccgctacttt

SEQ ID NO: 3909687 - DNA, 25 bp, Homo sapien
ggcatacgccacgacaccccgctac

SEQ ID NO: 3909688 - DNA, 25 bp, Homo sapien
cggcgacggctttctgcgcgggcgg

SEQ ID NO: 3909689 - DNA, 25 bp, Homo sapien
gcgacggctttctgcgcgggcggcg

SEQ ID NO: 3909690 - DNA, 25 bp, Homo sapien
cggcggcgacggctttctgcgcggg

SEQ ID NO: 3909691 - DNA, 25 bp, Homo sapien
gcggccggagcggcgagcatggccc

SEQ ID NO: 3909692 - DNA, 25 bp, Homo sapien
ccgtcgcccggcgctcggcggagcg

SEQ ID NO: 3909693 - DNA, 25 bp, Homo sapien
gtcgcccggcgctcggcggagcggg

SEQ ID NO: 3909694 - DNA, 25 bp, Homo sapien
ctgccgtcgcccggcgctcggcgga

SEQ ID NO: 3909695 - DNA, 25 bp, Homo sapien
tgccgtcgcccggcgctcggcggag

SEQ ID NO: 3909696 - DNA, 25 bp, Homo sapien
caaacattctctgagttaaagactg

SEQ ID NO: 3909697 - DNA, 25 bp, Homo sapien
tcaaacattctctgagttaaagact

SEQ ID NO: 3909698 - DNA, 25 bp, Homo sapien
aacattctctgagttaaagactgtc

SEQ ID NO: 3909699 - DNA, 25 bp, Homo sapien
aaacattctctgagttaaagactgt

SEQ ID NO: 3909700 - DNA, 25 bp, Homo sapien
tggacactgtccttgtactggcagg

SEQ ID NO: 3909701 - DNA, 25 bp, Homo sapien
tggcaggtcaggatgatgactgtcc

SEQ ID NO: 3909702 - DNA, 25 bp, Homo sapien
gaaagacctggacactgtccttgta

SEQ ID NO: 3909703 - DNA, 25 bp, Homo sapien
tgactgtccaatcaactcccttcgg

SEQ ID NO: 3909704 - DNA, 25 bp, Homo sapien
ccgctgcccacacgcttctctgggt

SEQ ID NO: 3909705 - DNA, 25 bp, Homo sapien
gtgaagcctgcccgggcactcaggt

SEQ ID NO: 3909706 - DNA, 25 bp, Homo sapien
tgggtcctccacggccagtaacagc

SEQ ID NO: 3909707 - DNA, 25 bp, Homo sapien
gcagggcgttgagggtggctcctcc

SEQ ID NO: 3909708 - DNA, 25 bp, Homo sapien
caccctcgaatccagagagagactc

SEQ ID NO: 3909709 - DNA, 25 bp, Homo sapien
ggccgagtgcaggacatcggatgtg

SEQ ID NO: 3909710 - DNA, 25 bp, Homo sapien
agtgcaggacatcggatgtgaccac

SEQ ID NO: 3909711 - DNA, 25 bp, Homo sapien
ccgagtgcaggacatcggatgtgac

SEQ ID NO: 3909712 - DNA, 25 bp, Homo sapien
gagtgcaggacatcggatgtgacca

SEQ ID NO: 3909713 - DNA, 25 bp, Homo sapien
ccacagtcatcaaaggggaagtctc

SEQ ID NO: 3909714 - DNA, 25 bp, Homo sapien
tgccacagtcatcaaaggggaagtc

SEQ ID NO: 3909715 - DNA, 25 bp, Homo sapien
gtccaggttgcagaccaaggcttcc

SEQ ID NO: 3909716 - DNA, 25 bp, Homo sapien
acagtcatcaaaggggaagtctcga

SEQ ID NO: 3909717 - DNA, 25 bp, Homo sapien
tttggcttctcaaagtgctgaaatt

SEQ ID NO: 3909718 - DNA, 25 bp, Homo sapien
agtgcatgccatcatgcccaggtaa

SEQ ID NO: 3909719 - DNA, 25 bp, Homo sapien
acaagtgcatgccatcatgcccagg

SEQ ID NO: 3909720 - DNA, 25 bp, Homo sapien
actttggcttctcaaagtgctgaaa

SEQ ID NO: 3909721 - DNA, 25 bp, Homo sapien
agcatgtcggtgctgcagacccaca

SEQ ID NO: 3909722 - DNA, 25 bp, Homo sapien
tgcagacccacacgcctggcgggga

SEQ ID NO: 3909723 - DNA, 25 bp, Homo sapien
cagacagcagcatgtcggtgctgca

SEQ ID NO: 3909724 - DNA, 25 bp, Homo sapien
caggatttgcaggaacagacagcag

SEQ ID NO: 3909725 - DNA, 25 bp, Homo sapien
agcttcccgtctaatagggcagcgg

SEQ ID NO: 3909726 - DNA, 25 bp, Homo sapien
ttcgcctgggagaatgacaaccctc

SEQ ID NO: 3909727 - DNA, 25 bp, Homo sapien
ttccaagccaaatggacattcgcct

SEQ ID NO: 3909728 - DNA, 25 bp, Homo sapien
caaggcacggatttccccaccaggt

SEQ ID NO: 3909729 - DNA, 25 bp, Homo sapien
gggtcagttaggtagacgccatgat

SEQ ID NO: 3909730 - DNA, 25 bp, Homo sapien
cctgggagggcgatcactctggctc

SEQ ID NO: 3909731 - DNA, 25 bp, Homo sapien
ccccggaagctgtcccagctgatac

SEQ ID NO: 3909732 - DNA, 25 bp, Homo sapien
atgattctgagcgtaggccgggctc

SEQ ID NO: 3909733 - DNA, 25 bp, Homo sapien
gaggaggctgcccactgacaggagg

SEQ ID NO: 3909734 - DNA, 25 bp, Homo sapien
tgccccagccggctccactgtcccc

SEQ ID NO: 3909735 - DNA, 25 bp, Homo sapien
ccagccggctccactgtccccaggg

SEQ ID NO: 3909736 - DNA, 25 bp, Homo sapien
ctgcccactgacaggaggaaggctg

SEQ ID NO: 3909737 - DNA, 25 bp, Homo sapien
gtggcacccgcccatcaggcctgac

SEQ ID NO: 3909738 - DNA, 25 bp, Homo sapien
cagtggcacccgcccatcaggcctg

SEQ ID NO: 3909739 - DNA, 25 bp, Homo sapien
aggcctgacacaccgctgaatctct

SEQ ID NO: 3909740 - DNA, 25 bp, Homo sapien
tgcctcagtgccctggtagtaaatg

SEQ ID NO: 3909741 - DNA, 25 bp, Homo sapien
aagcctaggtaggtgcaggcatcca

SEQ ID NO: 3909742 - DNA, 25 bp, Homo sapien
acaggccgggctccggagtccaagc

SEQ ID NO: 3909743 - DNA, 25 bp, Homo sapien
tgggtggctaggaggcgctcggcag

SEQ ID NO: 3909744 - DNA, 25 bp, Homo sapien
gctaggaggcgctcggcagtctcca

SEQ ID NO: 3909745 - DNA, 25 bp, Homo sapien
gggcgctctgcagataacccgctac

SEQ ID NO: 3909746 - DNA, 25 bp, Homo sapien
cagtggagaatgtcaaaaaacagag

SEQ ID NO: 3909747 - DNA, 25 bp, Homo sapien
taaggggctgatcgcgaagctccct

SEQ ID NO: 3909748 - DNA, 25 bp, Homo sapien
tggtcacgttctcagccatgcagtg

SEQ ID NO: 3909749 - DNA, 25 bp, Homo sapien
cctgggagtgcacaatctgggcccc

SEQ ID NO: 3909750 - DNA, 25 bp, Homo sapien
acctgggagtgcacaatctgggccc

SEQ ID NO: 3909751 - DNA, 25 bp, Homo sapien
agctcccggccgccagaagctgctg

SEQ ID NO: 3909752 - DNA, 25 bp, Homo sapien
cgctcccaggacccagctggacagg

SEQ ID NO: 3909753 - DNA, 25 bp, Homo sapien
gctcccaggacccagctggacaggg

SEQ ID NO: 3909754 - DNA, 25 bp, Homo sapien
agctcccggccatgcagggccttgg

SEQ ID NO: 3909755 - DNA, 25 bp, Homo sapien
tgtccagacggccaacgagggtgaa

SEQ ID NO: 3909756 - DNA, 25 bp, Homo sapien
gggagccgtgtagccgcgtgtggtg

SEQ ID NO: 3909757 - DNA, 25 bp, Homo sapien
cgcgtgtggtgtccctgcaggacaa

SEQ ID NO: 3909758 - DNA, 25 bp, Homo sapien
ctgggggagaggaagaagcagtcag

SEQ ID NO: 3909759 - DNA, 25 bp, Homo sapien
tgggggagaggaagaagcagtcagg

SEQ ID NO: 3909760 - DNA, 25 bp, Homo sapien
gggggagaggaagaagcagtcaggg

SEQ ID NO: 3909761 - DNA, 25 bp, Homo sapien
cactccagggcacgttgagatatgt

SEQ ID NO: 3909762 - DNA, 25 bp, Homo sapien
tgagatatgtgcctgccccctgtct

SEQ ID NO: 3909763 - DNA, 25 bp, Homo sapien
ttcactccagggcacgttgagatat

SEQ ID NO: 3909764 - DNA, 25 bp, Homo sapien
tccagggcacgttgagatatgtgcc

SEQ ID NO: 3909765 - DNA, 25 bp, Homo sapien
gcgggcgctgggaaggcagtactct

SEQ ID NO: 3909766 - DNA, 25 bp, Homo sapien
ctgggaaggcagtactctgcgggca

SEQ ID NO: 3909767 - DNA, 25 bp, Homo sapien
aggcagtactctgcgggcagcgtct

SEQ ID NO: 3909768 - DNA, 25 bp, Homo sapien
aagaggcgggcgctgggaaggcagt

SEQ ID NO: 3909769 - DNA, 25 bp, Homo sapien
gtggcagcccgatccaggcacggct

SEQ ID NO: 3909770 - DNA, 25 bp, Homo sapien
cagggcctggcggaagaacaggtcc

SEQ ID NO: 3909771 - DNA, 25 bp, Homo sapien
acgtgccgcgccttatgcagggcct

SEQ ID NO: 3909772 - DNA, 25 bp, Homo sapien
acagcagcccagatcagcgggcgca

SEQ ID NO: 3909773 - DNA, 25 bp, Homo sapien
tctccacactccaggtatgagaagg

SEQ ID NO: 3909774 - DNA, 25 bp, Homo sapien
cactccaggtatgagaagggccgca

SEQ ID NO: 3909775 - DNA, 25 bp, Homo sapien
aagggccgcatccactcagggttgg

SEQ ID NO: 3909776 - DNA, 25 bp, Homo sapien
gtgccgccacaccagggtctcctgc

SEQ ID NO: 3909777 - DNA, 25 bp, Homo sapien
agtggcgggccgctcgcaccagcaa

SEQ ID NO: 3909778 - DNA, 25 bp, Homo sapien
tgacatcacagcctggcggatcagg

SEQ ID NO: 3909779 - DNA, 25 bp, Homo sapien
tgaccagccccctcatagtggcggg

SEQ ID NO: 3909780 - DNA, 25 bp, Homo sapien
agcctggcggatcaggatctgacca

SEQ ID NO: 3909781 - DNA, 25 bp, Homo sapien
tgcccaggtcccggcagttccacct

SEQ ID NO: 3909782 - DNA, 25 bp, Homo sapien
gcccaggtcccggcagttccacctg

SEQ ID NO: 3909783 - DNA, 25 bp, Homo sapien
ccaggtcccggcagttccacctgct

SEQ ID NO: 3909784 - DNA, 25 bp, Homo sapien
cccaggtcccggcagttccacctgc

SEQ ID NO: 3909785 - DNA, 25 bp, Homo sapien
caaggggtggcgtgtcactccagcc

SEQ ID NO: 3909786 - DNA, 25 bp, Homo sapien
gcatgaggctggcagtagtcccgca

SEQ ID NO: 3909787 - DNA, 25 bp, Homo sapien
aggcaccggcacactatcttcacag

SEQ ID NO: 3909788 - DNA, 25 bp, Homo sapien
tgcggcgtgccctggctccgatggg

SEQ ID NO: 3909789 - DNA, 25 bp, Homo sapien
ttccgagtggacatgcacgatccct

SEQ ID NO: 3909790 - DNA, 25 bp, Homo sapien
tggacatgcacgatccctgcacaga

SEQ ID NO: 3909791 - DNA, 25 bp, Homo sapien
ctgcacagatgaaggccgccttcag

SEQ ID NO: 3909792 - DNA, 25 bp, Homo sapien
cgagtggacatgcacgatccctgca

SEQ ID NO: 3909793 - DNA, 25 bp, Homo sapien
gcagctcaaagccgcccccgaaggt

SEQ ID NO: 3909794 - DNA, 25 bp, Homo sapien
gtggggcagctcagaccaggtgtgc

SEQ ID NO: 3909795 - DNA, 25 bp, Homo sapien
ccgtggggcagctcagaccaggtgt

SEQ ID NO: 3909796 - DNA, 25 bp, Homo sapien
agagccgtggggcagctcagaccag

SEQ ID NO: 3909797 - DNA, 25 bp, Homo sapien
cggcctgcggctcgctgcaaggcag

SEQ ID NO: 3909798 - DNA, 25 bp, Homo sapien
tgcagcactgcgtggatcagggctt

SEQ ID NO: 3909799 - DNA, 25 bp, Homo sapien
gctccaggtgcagcactgcgtggat

SEQ ID NO: 3909800 - DNA, 25 bp, Homo sapien
ctgcgtggatcagggcttccgtgcc

SEQ ID NO: 3909801 - DNA, 25 bp, Homo sapien
ttccaacaagcatgagaggcacagc

SEQ ID NO: 3909802 - DNA, 25 bp, Homo sapien
caacaagcatgagaggcacagcaca

SEQ ID NO: 3909803 - DNA, 25 bp, Homo sapien
ctggttccaacaagcatgagaggca

SEQ ID NO: 3909804 - DNA, 25 bp, Homo sapien
ggttccaacaagcatgagaggcaca

SEQ ID NO: 3909805 - DNA, 25 bp, Homo sapien
aataacaaaactagtccgggcatgg

SEQ ID NO: 3909806 - DNA, 25 bp, Homo sapien
gaccagtgtggaaagatagcttccc

SEQ ID NO: 3909807 - DNA, 25 bp, Homo sapien
cactgttggagtctatctggcccag

SEQ ID NO: 3909808 - DNA, 25 bp, Homo sapien
aagattttacactatggccgggcac

SEQ ID NO: 3909809 - DNA, 25 bp, Homo sapien
caccttgatgccaggcattaggcca

SEQ ID NO: 3909810 - DNA, 25 bp, Homo sapien
tgtacaccaagagcaggtggtcatt

SEQ ID NO: 3909811 - DNA, 25 bp, Homo sapien
taggccacctacttggtcctgccag

SEQ ID NO: 3909812 - DNA, 25 bp, Homo sapien
ggcgggtcttgccagtgtacaccaa

SEQ ID NO: 3909813 - DNA, 25 bp, Homo sapien
cagtttgccgtaccaggctgtgggc

SEQ ID NO: 3909814 - DNA, 25 bp, Homo sapien
tggcggaagccttcagcacactcct

SEQ ID NO: 3909815 - DNA, 25 bp, Homo sapien
caggaagtcgggcataccagctcct

SEQ ID NO: 3909816 - DNA, 25 bp, Homo sapien
aagtcgggcataccagctcctcagc

SEQ ID NO: 3909817 - DNA, 25 bp, Homo sapien
cctggcctcaaacccacaagtgaca

SEQ ID NO: 3909818 - DNA, 25 bp, Homo sapien
gaggccgaatatctggagcttgtgc

SEQ ID NO: 3909819 - DNA, 25 bp, Homo sapien
tgccaagcctgcagatgaccctggc

SEQ ID NO: 3909820 - DNA, 25 bp, Homo sapien
gtgacagaatactcgctcccagtgc

SEQ ID NO: 3909821 - DNA, 25 bp, Homo sapien
tgtagctctcccctaaatgtgagac

SEQ ID NO: 3909822 - DNA, 25 bp, Homo sapien
gagctgtgaagccacacactgggga

SEQ ID NO: 3909823 - DNA, 25 bp, Homo sapien
attttgtcctcagatgtagctctcc

SEQ ID NO: 3909824 - DNA, 25 bp, Homo sapien
tcagatgtagctctcccctaaatgt

SEQ ID NO: 3909825 - DNA, 25 bp, Homo sapien
gagccagtgtcatggtaaagaagcc

SEQ ID NO: 3909826 - DNA, 25 bp, Homo sapien
taaagaagccggattccagtgccgg

SEQ ID NO: 3909827 - DNA, 25 bp, Homo sapien
agtgccaagacgtgctgctgagcca

SEQ ID NO: 3909828 - DNA, 25 bp, Homo sapien
tgcctgggccaagatactcagcacc

SEQ ID NO: 3909829 - DNA, 25 bp, Homo sapien
cttctgctcccagtacgaggtcagg

SEQ ID NO: 3909830 - DNA, 25 bp, Homo sapien
tctgctcccagtacgaggtcaggca

SEQ ID NO: 3909831 - DNA, 25 bp, Homo sapien
tgctcccagtacgaggtcaggcact

SEQ ID NO: 3909832 - DNA, 25 bp, Homo sapien
ttctgctcccagtacgaggtcaggc

SEQ ID NO: 3909833 - DNA, 25 bp, Homo sapien
gatagagaaagcctccaccgcctgc

SEQ ID NO: 3909834 - DNA, 25 bp, Homo sapien
gctccttggtcaacagatagagaaa

SEQ ID NO: 3909835 - DNA, 25 bp, Homo sapien
ctgtggctccttggtcaacagatag

SEQ ID NO: 3909836 - DNA, 25 bp, Homo sapien
ggacatccatcatacgccgcacagt

SEQ ID NO: 3909837 - DNA, 25 bp, Homo sapien
aacaggttgaggcctcggtccccag

SEQ ID NO: 3909838 - DNA, 25 bp, Homo sapien
caacaggttgaggcctcggtcccca

SEQ ID NO: 3909839 - DNA, 25 bp, Homo sapien
ccaggtggatgctgtaattcccaag

SEQ ID NO: 3909840 - DNA, 25 bp, Homo sapien
ggtggatgctgtaattcccaaggcc

SEQ ID NO: 3909841 - DNA, 25 bp, Homo sapien
tagggaatgcctcaaagggcctctt

SEQ ID NO: 3909842 - DNA, 25 bp, Homo sapien
cacgtgggatactaagcttgggacc

SEQ ID NO: 3909843 - DNA, 25 bp, Homo sapien
cttcctttgggagcagattcgcaga

SEQ ID NO: 3909844 - DNA, 25 bp, Homo sapien
gaacagaggctacatctaggcccct

SEQ ID NO: 3909845 - DNA, 25 bp, Homo sapien
tgtggatatccaacggatgctacct

SEQ ID NO: 3909846 - DNA, 25 bp, Homo sapien
ttagacctcaagacagggacattct

SEQ ID NO: 3909847 - DNA, 25 bp, Homo sapien
caacatactggcgtccgccattaga

SEQ ID NO: 3909848 - DNA, 25 bp, Homo sapien
gatgctacctcccttcaaaacttaa

SEQ ID NO: 3909849 - DNA, 25 bp, Homo sapien
agcctctcgggcctagactgcccgt

SEQ ID NO: 3909850 - DNA, 25 bp, Homo sapien
gtcccccttccatatggccggtctc

SEQ ID NO: 3909851 - DNA, 25 bp, Homo sapien
tcgggcctagactgcccgtgacccc

SEQ ID NO: 3909852 - DNA, 25 bp, Homo sapien
ccccttccatatggccggtctccgc

SEQ ID NO: 3909853 - DNA, 25 bp, Homo sapien
gaagttaaaagcaatctccacgagc

SEQ ID NO: 3909854 - DNA, 25 bp, Homo sapien
tacccagagggagacatccatgcct

SEQ ID NO: 3909855 - DNA, 25 bp, Homo sapien
gatagaatatgttcccacactgtgg

SEQ ID NO: 3909856 - DNA, 25 bp, Homo sapien
gataactgcaggaagccgttttggc

SEQ ID NO: 3909857 - DNA, 25 bp, Homo sapien
aggccttggttacaccaacagtacg

SEQ ID NO: 3909858 - DNA, 25 bp, Homo sapien
tgcaggaaacctgagccacccagac

SEQ ID NO: 3909859 - DNA, 25 bp, Homo sapien
ggctgcaggaaacctgagccaccca

SEQ ID NO: 3909860 - DNA, 25 bp, Homo sapien
accaacagtacggagtccaagaaag

SEQ ID NO: 3909861 - DNA, 25 bp, Homo sapien
gctctctgcaaggttaagttgtaca

SEQ ID NO: 3909862 - DNA, 25 bp, Homo sapien
tggctctctgcaaggttaagttgta

SEQ ID NO: 3909863 - DNA, 25 bp, Homo sapien
atggcaaagctgatgccagtggctc

SEQ ID NO: 3909864 - DNA, 25 bp, Homo sapien
tctctgcaaggttaagttgtacaga

SEQ ID NO: 3909865 - DNA, 25 bp, Homo sapien
taatcataacggctcgccctttggg

SEQ ID NO: 3909866 - DNA, 25 bp, Homo sapien
tggccaggaacgatgcgacggcatc

SEQ ID NO: 3909867 - DNA, 25 bp, Homo sapien
ctttgggatccacagctaagaactg

SEQ ID NO: 3909868 - DNA, 25 bp, Homo sapien
ggccatgagtgaccggataacaccg

SEQ ID NO: 3909869 - DNA, 25 bp, Homo sapien
cagacaagcaaacattggattttca

SEQ ID NO: 3909870 - DNA, 25 bp, Homo sapien
tccaactacatgatacactaaagtg

SEQ ID NO: 3909871 - DNA, 25 bp, Homo sapien
tggtaagtcgggctgcagcatctct

SEQ ID NO: 3909872 - DNA, 25 bp, Homo sapien
ggattttcaaatccgacatctactc

SEQ ID NO: 3909873 - DNA, 25 bp, Homo sapien
gcttcccctgttggatcattgtctg

SEQ ID NO: 3909874 - DNA, 25 bp, Homo sapien
gtattttcggaccacatgatttaaa

SEQ ID NO: 3909875 - DNA, 25 bp, Homo sapien
tgttcctccaaaggttcactgtatt

SEQ ID NO: 3909876 - DNA, 25 bp, Homo sapien
gctcatagaaagtaagtgtctgctg

SEQ ID NO: 3909877 - DNA, 25 bp, Homo sapien
catactagactcagagagcggcaca

SEQ ID NO: 3909878 - DNA, 25 bp, Homo sapien
tacaaccgtatgaactagcctgcaa

SEQ ID NO: 3909879 - DNA, 25 bp, Homo sapien
aaatcctggacctcaatcttttggg

SEQ ID NO: 3909880 - DNA, 25 bp, Homo sapien
gagtgactttggactactgcttcaa

SEQ ID NO: 3909881 - DNA, 25 bp, Homo sapien
cctgggaattggacagcggatatct

SEQ ID NO: 3909882 - DNA, 25 bp, Homo sapien
cgcctcctgggaattggacagcgga

SEQ ID NO: 3909883 - DNA, 25 bp, Homo sapien
gtcaccaaagttcttgtaagtaata

SEQ ID NO: 3909884 - DNA, 25 bp, Homo sapien
gacagcggatatctggctggtcacc

SEQ ID NO: 3909885 - DNA, 25 bp, Homo sapien
gatcttaaagatatctccctgctca

SEQ ID NO: 3909886 - DNA, 25 bp, Homo sapien
gccaaaaagaagaacatcgatttgg

SEQ ID NO: 3909887 - DNA, 25 bp, Homo sapien
tccctgctcagtttgagccaaaaag

SEQ ID NO: 3909888 - DNA, 25 bp, Homo sapien
tgcagagcagacaaaaatcattcct

SEQ ID NO: 3909889 - DNA, 25 bp, Homo sapien
catggcagcagcaacgggtacagta

SEQ ID NO: 3909890 - DNA, 25 bp, Homo sapien
aaccctgttttaagcacacacatgg

SEQ ID NO: 3909891 - DNA, 25 bp, Homo sapien
cagcagcaacgggtacagtatcaaa

SEQ ID NO: 3909892 - DNA, 25 bp, Homo sapien
accctgttttaagcacacacatggc

SEQ ID NO: 3909893 - DNA, 25 bp, Homo sapien
aaaagctaagaaggctcggctgggc

SEQ ID NO: 3909894 - DNA, 25 bp, Homo sapien
tagccaggcatgcaccttgctaata

SEQ ID NO: 3909895 - DNA, 25 bp, Homo sapien
tggattgcttggattgcttaagtcc

SEQ ID NO: 3909896 - DNA, 25 bp, Homo sapien
cagcttggccagctggtttgagacc

SEQ ID NO: 3909897 - DNA, 25 bp, Homo sapien
ccaagatgtgcaatttgatataagt

SEQ ID NO: 3909898 - DNA, 25 bp, Homo sapien
aagatgtgcaatttgatataagtaa

SEQ ID NO: 3909899 - DNA, 25 bp, Homo sapien
ctccaagatgtgcaatttgatataa

SEQ ID NO: 3909900 - DNA, 25 bp, Homo sapien
tccaagatgtgcaatttgatataag

SEQ ID NO: 3909901 - DNA, 25 bp, Homo sapien
caaggtttttaagtggtcttggctg

SEQ ID NO: 3909902 - DNA, 25 bp, Homo sapien
catcaaccagcacaaggtttttaag

SEQ ID NO: 3909903 - DNA, 25 bp, Homo sapien
ttccagaggcatggctgatgaaaac

SEQ ID NO: 3909904 - DNA, 25 bp, Homo sapien
gcatggctgatgaaaactcaggttc

SEQ ID NO: 3909905 - DNA, 25 bp, Homo sapien
gatgatcggggtcccctaccacagg

SEQ ID NO: 3909906 - DNA, 25 bp, Homo sapien
caggccacatacaactgtggagtat

SEQ ID NO: 3909907 - DNA, 25 bp, Homo sapien
ctcaagtccatgtcttaggactctc

SEQ ID NO: 3909908 - DNA, 25 bp, Homo sapien
gactctcagagatgatcggggtccc

SEQ ID NO: 3909909 - DNA, 25 bp, Homo sapien
cttcaatgtgtcgacgcactgtcca

SEQ ID NO: 3909910 - DNA, 25 bp, Homo sapien
gacgcactgtccagacagcgttggg

SEQ ID NO: 3909911 - DNA, 25 bp, Homo sapien
cgttggggttaccaggtagctcaga

SEQ ID NO: 3909912 - DNA, 25 bp, Homo sapien
aatgtgtcgacgcactgtccagaca

SEQ ID NO: 3909913 - DNA, 25 bp, Homo sapien
aaaaggcttggtattggtagtgtgc

SEQ ID NO: 3909914 - DNA, 25 bp, Homo sapien
gtagtgtgcatcaccaagtaccagc

SEQ ID NO: 3909915 - DNA, 25 bp, Homo sapien
tcaccaagtaccagccaaggttagt

SEQ ID NO: 3909916 - DNA, 25 bp, Homo sapien
cagccaaggttagtatttgcctgga

SEQ ID NO: 3909917 - DNA, 25 bp, Homo sapien
ctgtggtgatcagcaccttcaccag

SEQ ID NO: 3909918 - DNA, 25 bp, Homo sapien
cttgagacatctgctaaagaagtga

SEQ ID NO: 3909919 - DNA, 25 bp, Homo sapien
ggtcagaagagcctacagatatact

SEQ ID NO: 3909920 - DNA, 25 bp, Homo sapien
caagagaatcggagacatgaggaca

SEQ ID NO: 3909921 - DNA, 25 bp, Homo sapien
aaccttccaaggcagttcttctatg

SEQ ID NO: 3909922 - DNA, 25 bp, Homo sapien
cacttcttctacagtttctccaatg

SEQ ID NO: 3909923 - DNA, 25 bp, Homo sapien
ttctccaatggacaacactagggtg

SEQ ID NO: 3909924 - DNA, 25 bp, Homo sapien
cactagggtggcattcacgaaagac

SEQ ID NO: 3909925 - DNA, 25 bp, Homo sapien
ggcattcacgaaagacacaatgatg

SEQ ID NO: 3909926 - DNA, 25 bp, Homo sapien
ggatccatctcgaaatagaccagct

SEQ ID NO: 3909927 - DNA, 25 bp, Homo sapien
cacttgtcgctggttcactgcacac

SEQ ID NO: 3909928 - DNA, 25 bp, Homo sapien
tctgctcgtatgtgccgaatgccat

SEQ ID NO: 3909929 - DNA, 25 bp, Homo sapien
tgtcagggcaatcaccacttgtcgc

SEQ ID NO: 3909930 - DNA, 25 bp, Homo sapien
tctgacagtgttgtccacaagcccc

SEQ ID NO: 3909931 - DNA, 25 bp, Homo sapien
gaagcgagaccgctgctctccaggg

SEQ ID NO: 3909932 - DNA, 25 bp, Homo sapien
ccacagccaggaagcgagaccgctg

SEQ ID NO: 3909933 - DNA, 25 bp, Homo sapien
tctgctgacatctccttccgttctg

SEQ ID NO: 3909934 - DNA, 25 bp, Homo sapien
gagagcctgcatgcttagaggttgc

SEQ ID NO: 3909935 - DNA, 25 bp, Homo sapien
ggtataggaagccaatcgagcccct

SEQ ID NO: 3909936 - DNA, 25 bp, Homo sapien
tgtagcccaatattcaggtatagga

SEQ ID NO: 3909937 - DNA, 25 bp, Homo sapien
tttccacgatacacaaggactcagg

SEQ ID NO: 3909938 - DNA, 25 bp, Homo sapien
gtccacaatgtgggcctctggatct

SEQ ID NO: 3909939 - DNA, 25 bp, Homo sapien
caatgtgggcctctggatctcttac

SEQ ID NO: 3909940 - DNA, 25 bp, Homo sapien
cacaatgtgggcctctggatctctt

SEQ ID NO: 3909941 - DNA, 25 bp, Homo sapien
ccacaatgtgggcctctggatctct

SEQ ID NO: 3909942 - DNA, 25 bp, Homo sapien
taccgagtgcgagtatcagacaaat

SEQ ID NO: 3909943 - DNA, 25 bp, Homo sapien
cctggccttgcattcggactcggaa

SEQ ID NO: 3909944 - DNA, 25 bp, Homo sapien
gacaaatccccagtgacagggtcca

SEQ ID NO: 3909945 - DNA, 25 bp, Homo sapien
gggtccaagacagtcctcagcagca

SEQ ID NO: 3909946 - DNA, 25 bp, Homo sapien
taagaatagctcaaccatgagcggc

SEQ ID NO: 3909947 - DNA, 25 bp, Homo sapien
gatgcaaattccagtgtctcgtaag

SEQ ID NO: 3909948 - DNA, 25 bp, Homo sapien
tgttccgaggcaaaacccgatgcaa

SEQ ID NO: 3909949 - DNA, 25 bp, Homo sapien
catgagcggcttgacatggccaata

SEQ ID NO: 3909950 - DNA, 25 bp, Homo sapien
caagagacagcaaataagggaccta

SEQ ID NO: 3909951 - DNA, 25 bp, Homo sapien
gtcaaatgggacagagatgtacaca

SEQ ID NO: 3909952 - DNA, 25 bp, Homo sapien
agttacccgatctctaatgatggag

SEQ ID NO: 3909953 - DNA, 25 bp, Homo sapien
tactctgaaaagtatagttacccga

SEQ ID NO: 3909954 - DNA, 25 bp, Homo sapien
cctcagtgtaggcattgtggtccgt

SEQ ID NO: 3909955 - DNA, 25 bp, Homo sapien
cagcaccgagcttctctaatgccaa

SEQ ID NO: 3909956 - DNA, 25 bp, Homo sapien
tgtgtactgcagtgggaaggctact

SEQ ID NO: 3909957 - DNA, 25 bp, Homo sapien
ctctcagggtggatgacaaatttcc

SEQ ID NO: 3909958 - DNA, 25 bp, Homo sapien
tcccttgaatgggattcatcactcg

SEQ ID NO: 3909959 - DNA, 25 bp, Homo sapien
taaaagctgcctcattctgttccag

SEQ ID NO: 3909960 - DNA, 25 bp, Homo sapien
cattgccagccttgggagctccaaa

SEQ ID NO: 3909961 - DNA, 25 bp, Homo sapien
ttcatcactcggatcacagaggccc

SEQ ID NO: 3909962 - DNA, 25 bp, Homo sapien
agcacataccagtcttcaccagtgt

SEQ ID NO: 3909963 - DNA, 25 bp, Homo sapien
ataccagtcttcaccagtgttggaa

SEQ ID NO: 3909964 - DNA, 25 bp, Homo sapien
cacaagcttgtaagtatagacgaag

SEQ ID NO: 3909965 - DNA, 25 bp, Homo sapien
cctgccacagatcgggggtttagta

SEQ ID NO: 3909966 - DNA, 25 bp, Homo sapien
tctaggagaaccactggcagattcc

SEQ ID NO: 3909967 - DNA, 25 bp, Homo sapien
caaaagtgagagaattcaatgggac

SEQ ID NO: 3909968 - DNA, 25 bp, Homo sapien
caatgggacttaaaatctaggagaa

SEQ ID NO: 3909969 - DNA, 25 bp, Homo sapien
gagctggtccccaaaagacctgatc

SEQ ID NO: 3909970 - DNA, 25 bp, Homo sapien
tagaggaaaagcaggtaatacagct

SEQ ID NO: 3909971 - DNA, 25 bp, Homo sapien
ctatagaggaaaagcaggtaataca

SEQ ID NO: 3909972 - DNA, 25 bp, Homo sapien
atagaggaaaagcaggtaatacagc

SEQ ID NO: 3909973 - DNA, 25 bp, Homo sapien
tatagaggaaaagcaggtaatacag

SEQ ID NO: 3909974 - DNA, 25 bp, Homo sapien
cttcttctttcccaggtcatagaca

SEQ ID NO: 3909975 - DNA, 25 bp, Homo sapien
aggtcatagacacgcaacagcttcc

SEQ ID NO: 3909976 - DNA, 25 bp, Homo sapien
cttattctcacattttcggagtaac

SEQ ID NO: 3909977 - DNA, 25 bp, Homo sapien
tcacattttcggagtaacttcttct

SEQ ID NO: 3909978 - DNA, 25 bp, Homo sapien
tatgtccgatagtctggatcccaga

SEQ ID NO: 3909979 - DNA, 25 bp, Homo sapien
gcttgtagcgaacccagatgaaact

SEQ ID NO: 3909980 - DNA, 25 bp, Homo sapien
tcccagagatataattggcaatatg

SEQ ID NO: 3909981 - DNA, 25 bp, Homo sapien
tcttggacatcagatacaattaccc

SEQ ID NO: 3909982 - DNA, 25 bp, Homo sapien
gaggcctgagcccacgtgtcctgca

SEQ ID NO: 3909983 - DNA, 25 bp, Homo sapien
aagcaacaggtctggccaggtcttt

SEQ ID NO: 3909984 - DNA, 25 bp, Homo sapien
tctttgcaagtcagccacaggggca

SEQ ID NO: 3909985 - DNA, 25 bp, Homo sapien
caccaagcaacaggtctggccaggt

SEQ ID NO: 3909986 - DNA, 25 bp, Homo sapien
cattgagcaagccacggtcccacag

SEQ ID NO: 3909987 - DNA, 25 bp, Homo sapien
tcatcattggtgttaggtgggagcc

SEQ ID NO: 3909988 - DNA, 25 bp, Homo sapien
cattggtgttaggtgggagcctcac

SEQ ID NO: 3909989 - DNA, 25 bp, Homo sapien
agcaagccacggtcccacagggctt

SEQ ID NO: 3909990 - DNA, 25 bp, Homo sapien
taagaaaggactgtggacggacagc

SEQ ID NO: 3909991 - DNA, 25 bp, Homo sapien
cagcacatgcctacaggagaaagta

SEQ ID NO: 3909992 - DNA, 25 bp, Homo sapien
aagtgctaagcagtgttctccctgg

SEQ ID NO: 3909993 - DNA, 25 bp, Homo sapien
gatttgcccgaaagtccagagatgc

SEQ ID NO: 3909994 - DNA, 25 bp, Homo sapien
tgactgtgtgcaccctcaggagcct

SEQ ID NO: 3909995 - DNA, 25 bp, Homo sapien
cacaaacagactagtgactgtgtgc

SEQ ID NO: 3909996 - DNA, 25 bp, Homo sapien
gactagtgactgtgtgcaccctcag

SEQ ID NO: 3909997 - DNA, 25 bp, Homo sapien
gtgagtcacaaacagactagtgact

SEQ ID NO: 3909998 - DNA, 25 bp, Homo sapien
accgtctccccgacatggtagttca

SEQ ID NO: 3909999 - DNA, 25 bp, Homo sapien
tcatgggacgtgaatggcacaagga

SEQ ID NO: 3910000 - DNA, 25 bp, Homo sapien
gatgccaattcctccagacaaggtg

SEQ ID NO: 3910001 - DNA, 25 bp, Homo sapien
tgagcctccagggatcagcgtggtc

SEQ ID NO: 3910002 - DNA, 25 bp, Homo sapien
tgttcagaccgcaggtgcatttcca

SEQ ID NO: 3910003 - DNA, 25 bp, Homo sapien
tcacagggaagtagtaggagcgaaa

SEQ ID NO: 3910004 - DNA, 25 bp, Homo sapien
aagctgaggtggtcccgcccacaga

SEQ ID NO: 3910005 - DNA, 25 bp, Homo sapien
agcgaaagctgaggtggtcccgccc

SEQ ID NO: 3910006 - DNA, 25 bp, Homo sapien
taaagcagcacttgtagggaaagct

SEQ ID NO: 3910007 - DNA, 25 bp, Homo sapien
tcgatacttgaaccccacttgtaga

SEQ ID NO: 3910008 - DNA, 25 bp, Homo sapien
cctatcatccgggttgcagtgcagt

SEQ ID NO: 3910009 - DNA, 25 bp, Homo sapien
tcagagttcagattggcagaagcag

SEQ ID NO: 3910010 - DNA, 25 bp, Homo sapien
catttgtgcaaaaagatgaaatctc

SEQ ID NO: 3910011 - DNA, 25 bp, Homo sapien
cagggaaccgttgataacctcttat

SEQ ID NO: 3910012 - DNA, 25 bp, Homo sapien
tgaaatctcaccaaccatacaggga

SEQ ID NO: 3910013 - DNA, 25 bp, Homo sapien
ttttccattaaagcgaacgtgtgtg

SEQ ID NO: 3910014 - DNA, 25 bp, Homo sapien
tgtctgtctggcacaaggcactcct

SEQ ID NO: 3910015 - DNA, 25 bp, Homo sapien
tttctacagtgtgatgcctctgtcc

SEQ ID NO: 3910016 - DNA, 25 bp, Homo sapien
atgtctgtctggcacaaggcactcc

SEQ ID NO: 3910017 - DNA, 25 bp, Homo sapien
attattatcattggtctttctacag

SEQ ID NO: 3910018 - DNA, 25 bp, Homo sapien
tattcctgggcgtgaacaatgatga

SEQ ID NO: 3910019 - DNA, 25 bp, Homo sapien
gagaactctgctcaaatgtgcatgt

SEQ ID NO: 3910020 - DNA, 25 bp, Homo sapien
aagttctgtaacctctctctgtgcc

SEQ ID NO: 3910021 - DNA, 25 bp, Homo sapien
cagggaatctggaaactataggagg

SEQ ID NO: 3910022 - DNA, 25 bp, Homo sapien
tgagactccaagctactatccctgg

SEQ ID NO: 3910023 - DNA, 25 bp, Homo sapien
gaaggcctttggctcacatgagact

SEQ ID NO: 3910024 - DNA, 25 bp, Homo sapien
caaactggctgaaaagtagaggcta

SEQ ID NO: 3910025 - DNA, 25 bp, Homo sapien
taagcacttgatccttgtggaccaa

SEQ ID NO: 3910026 - DNA, 25 bp, Homo sapien
gaatcatccacgtagcctttataga

SEQ ID NO: 3910027 - DNA, 25 bp, Homo sapien
tggcatcatcgccagcttccagagg

SEQ ID NO: 3910028 - DNA, 25 bp, Homo sapien
tcagtgggcacctcgtttctcagcc

SEQ ID NO: 3910029 - DNA, 25 bp, Homo sapien
tcatcacggtagttcacagcctctg

SEQ ID NO: 3910030 - DNA, 25 bp, Homo sapien
gatggctacaaattgcaggatattt

SEQ ID NO: 3910031 - DNA, 25 bp, Homo sapien
ttgatggctacaaattgcaggatat

SEQ ID NO: 3910032 - DNA, 25 bp, Homo sapien
tccttttgatggctacaaattgcag

SEQ ID NO: 3910033 - DNA, 25 bp, Homo sapien
ttttgatggctacaaattgcaggat

SEQ ID NO: 3910034 - DNA, 25 bp, Homo sapien
tttctcatggggaaccaggcttcgc

SEQ ID NO: 3910035 - DNA, 25 bp, Homo sapien
tcgaccagccagctcattttctcat

SEQ ID NO: 3910036 - DNA, 25 bp, Homo sapien
gtacggagatgtccgggccttctcg

SEQ ID NO: 3910037 - DNA, 25 bp, Homo sapien
caccttggagccagggtacggagat

SEQ ID NO: 3910038 - DNA, 25 bp, Homo sapien
agagaaaacctatgtgaggaaaaca

SEQ ID NO: 3910039 - DNA, 25 bp, Homo sapien
ctggcgttttggttgtaaattgaga

SEQ ID NO: 3910040 - DNA, 25 bp, Homo sapien
tcgctgccgccctggcgttttggtt

SEQ ID NO: 3910041 - DNA, 25 bp, Homo sapien
gaaaagctcccaaatggaaagtgct

SEQ ID NO: 3910042 - DNA, 25 bp, Homo sapien
taaattgagagattttgacctctgg

SEQ ID NO: 3910043 - DNA, 25 bp, Homo sapien
cccctcggcgcgctcgccccgcgcc

SEQ ID NO: 3910044 - DNA, 25 bp, Homo sapien
tcctccgccccctcggcgcgctcgc

SEQ ID NO: 3910045 - DNA, 25 bp, Homo sapien
tccgccccctcggcgcgctcgcccc

SEQ ID NO: 3910046 - DNA, 25 bp, Homo sapien
gccccctcggcgcgctcgccccgcg

SEQ ID NO: 3910047 - DNA, 25 bp, Homo sapien
cgcccggatcgtggcctctcgagag

SEQ ID NO: 3910048 - DNA, 25 bp, Homo sapien
agagcaaggtaagggcgatgcgcgg

SEQ ID NO: 3910049 - DNA, 25 bp, Homo sapien
tcgtggcctctcgagagcaaggtaa

SEQ ID NO: 3910050 - DNA, 25 bp, Homo sapien
ccggatcgtggcctctcgagagcaa

SEQ ID NO: 3910051 - DNA, 25 bp, Homo sapien
ttcatgcggggtacacacacgcgcg

SEQ ID NO: 3910052 - DNA, 25 bp, Homo sapien
ggccccgatgattcatgcggggtac

SEQ ID NO: 3910053 - DNA, 25 bp, Homo sapien
ccgatgattcatgcggggtacacac

SEQ ID NO: 3910054 - DNA, 25 bp, Homo sapien
gattcatgcggggtacacacacgcg

SEQ ID NO: 3910055 - DNA, 25 bp, Homo sapien
attcaccagtagcagtattgccagg

SEQ ID NO: 3910056 - DNA, 25 bp, Homo sapien
tcacagctgtggtgtaccaggcgtt

SEQ ID NO: 3910057 - DNA, 25 bp, Homo sapien
tgtaccaggcgttcattcaccagta

SEQ ID NO: 3910058 - DNA, 25 bp, Homo sapien
ggttgcaactgggatcaccagcagt

SEQ ID NO: 3910059 - DNA, 25 bp, Homo sapien
tacagtccatagagaagggattcct

SEQ ID NO: 3910060 - DNA, 25 bp, Homo sapien
cttcactactagattcccagagatg

SEQ ID NO: 3910061 - DNA, 25 bp, Homo sapien
tgaatgcacctgctttgtggataca

SEQ ID NO: 3910062 - DNA, 25 bp, Homo sapien
tagaggtcgctatcagagaagcaca

SEQ ID NO: 3910063 - DNA, 25 bp, Homo sapien
tgtccttcgatcttcttgggagttt

SEQ ID NO: 3910064 - DNA, 25 bp, Homo sapien
aaggccctgattagtggcagcacca

SEQ ID NO: 3910065 - DNA, 25 bp, Homo sapien
tgtaaaggccctgattagtggcagc

SEQ ID NO: 3910066 - DNA, 25 bp, Homo sapien
gtctctgtccttcgatcttcttggg

SEQ ID NO: 3910067 - DNA, 25 bp, Homo sapien
cctactgccatgaagtcatttgacc

SEQ ID NO: 3910068 - DNA, 25 bp, Homo sapien
tttaaaggactatacgaatgtggtc

SEQ ID NO: 3910069 - DNA, 25 bp, Homo sapien
cttatgaagttgatcccagcttgga

SEQ ID NO: 3910070 - DNA, 25 bp, Homo sapien
tactcattgtgattgctgcgactta

SEQ ID NO: 3910071 - DNA, 25 bp, Homo sapien
tcaggcgagagcgacacctccagac

SEQ ID NO: 3910072 - DNA, 25 bp, Homo sapien
gagctgcagggacgccagactcctc

SEQ ID NO: 3910073 - DNA, 25 bp, Homo sapien
aggcgagagcgacacctccagacac

SEQ ID NO: 3910074 - DNA, 25 bp, Homo sapien
tcacccaagtttgcgcctcaggcga

SEQ ID NO: 3910075 - DNA, 25 bp, Homo sapien
gccacgaatggctacccaaaggaaa

SEQ ID NO: 3910076 - DNA, 25 bp, Homo sapien
gacggaatgcctccatacatgtaag

SEQ ID NO: 3910077 - DNA, 25 bp, Homo sapien
taaagccagtcttcactagccacga

SEQ ID NO: 3910078 - DNA, 25 bp, Homo sapien
tctgtaaagggtatctgatcaagcc

SEQ ID NO: 3910079 - DNA, 25 bp, Homo sapien
caactgtttgctctccttgaaatga

SEQ ID NO: 3910080 - DNA, 25 bp, Homo sapien
tgtgcccagctagcagttacccatc

SEQ ID NO: 3910081 - DNA, 25 bp, Homo sapien
ttaaagctacttagtggtgactggt

SEQ ID NO: 3910082 - DNA, 25 bp, Homo sapien
taaaggtatcccgttgacctcagga

SEQ ID NO: 3910083 - DNA, 25 bp, Homo sapien
caccacacctggcctaatcatatat

SEQ ID NO: 3910084 - DNA, 25 bp, Homo sapien
catgaaacgtcattgtatagcccat

SEQ ID NO: 3910085 - DNA, 25 bp, Homo sapien
ggcatgttagccctccagattgaaa

SEQ ID NO: 3910086 - DNA, 25 bp, Homo sapien
tagtctaccaattgcacaaggaagg

SEQ ID NO: 3910087 - DNA, 25 bp, Homo sapien
tgaaaatgtatgtgacctcttgaac

SEQ ID NO: 3910088 - DNA, 25 bp, Homo sapien
gatttacctgacaaacctagttgag

SEQ ID NO: 3910089 - DNA, 25 bp, Homo sapien
tgctcgagcacttcctttcagaaag

SEQ ID NO: 3910090 - DNA, 25 bp, Homo sapien
tgtgtctgtatacttgctatgcccc

SEQ ID NO: 3910091 - DNA, 25 bp, Homo sapien
taaggaacatgtctgctagatctgg

SEQ ID NO: 3910092 - DNA, 25 bp, Homo sapien
tggacttagccaagtatatttcacc

SEQ ID NO: 3910093 - DNA, 25 bp, Homo sapien
tgatctatggaatgttctgtacaaa

SEQ ID NO: 3910094 - DNA, 25 bp, Homo sapien
ctggacttagccaagtatatttcac

SEQ ID NO: 3910095 - DNA, 25 bp, Homo sapien
tgtacaaagctgtataattgtactg

SEQ ID NO: 3910096 - DNA, 25 bp, Homo sapien
cactttagggaatccttaatccagt

SEQ ID NO: 3910097 - DNA, 25 bp, Homo sapien
gcctgacactttagggaatccttaa

SEQ ID NO: 3910098 - DNA, 25 bp, Homo sapien
cagaggcctgacactttagggaatc

SEQ ID NO: 3910099 - DNA, 25 bp, Homo sapien
gacactttagggaatccttaatcca

SEQ ID NO: 3910100 - DNA, 25 bp, Homo sapien
tgtttccactgacatggagtgatcc

SEQ ID NO: 3910101 - DNA, 25 bp, Homo sapien
ttccactgacatggagtgatccagt

SEQ ID NO: 3910102 - DNA, 25 bp, Homo sapien
tttccactgacatggagtgatccag

SEQ ID NO: 3910103 - DNA, 25 bp, Homo sapien
ctaaagtgaaccatgacaacagaca

SEQ ID NO: 3910104 - DNA, 25 bp, Homo sapien
tctatggcctcaggacaatagggct

SEQ ID NO: 3910105 - DNA, 25 bp, Homo sapien
tcaggtccaggcaccgataatggcc

SEQ ID NO: 3910106 - DNA, 25 bp, Homo sapien
tgacccaggaatcgagtgagtttct

SEQ ID NO: 3910107 - DNA, 25 bp, Homo sapien
caatagggcttgaattgttccagac

SEQ ID NO: 3910108 - DNA, 25 bp, Homo sapien
gaagaacatctttctgaaagcattg

SEQ ID NO: 3910109 - DNA, 25 bp, Homo sapien
gctgccactcctaccatgctccaaa

SEQ ID NO: 3910110 - DNA, 25 bp, Homo sapien
tttctgaaagcattgccctaaagct

SEQ ID NO: 3910111 - DNA, 25 bp, Homo sapien
catcagctttctaatgtgccctgtg

SEQ ID NO: 3910112 - DNA, 25 bp, Homo sapien
caaaattatacaaccttcctcagtc

SEQ ID NO: 3910113 - DNA, 25 bp, Homo sapien
catgacctaaactttggagcagttc

SEQ ID NO: 3910114 - DNA, 25 bp, Homo sapien
cttcagctggatttgtggtggacct

SEQ ID NO: 3910115 - DNA, 25 bp, Homo sapien
tgtggtggaccttgcacaaaattat

SEQ ID NO: 3910116 - DNA, 25 bp, Homo sapien
tgggaacattggagaacatcgtgcc

SEQ ID NO: 3910117 - DNA, 25 bp, Homo sapien
cagagctatcaacctggaatcagca

SEQ ID NO: 3910118 - DNA, 25 bp, Homo sapien
aaaggagtccataccggaaacagcg

SEQ ID NO: 3910119 - DNA, 25 bp, Homo sapien
ggtgtatgcagagataaaggagtcc

SEQ ID NO: 3910120 - DNA, 25 bp, Homo sapien
tctgctcctactccatcatgaagag

SEQ ID NO: 3910121 - DNA, 25 bp, Homo sapien
acaagctgcacaagcacactgggca

SEQ ID NO: 3910122 - DNA, 25 bp, Homo sapien
cagtgagttcctacagcgggctgcc

SEQ ID NO: 3910123 - DNA, 25 bp, Homo sapien
agctctgctcctactccatcatgaa

SEQ ID NO: 3910124 - DNA, 25 bp, Homo sapien
gtgtaatgtgtttgaaaagcccttc

SEQ ID NO: 3910125 - DNA, 25 bp, Homo sapien
aacactcctatgcactttccaaggt

SEQ ID NO: 3910126 - DNA, 25 bp, Homo sapien
atatgggtgctccaatgtcaggtgc

SEQ ID NO: 3910127 - DNA, 25 bp, Homo sapien
tctaagtcccttcataggttcctaa

SEQ ID NO: 3910128 - DNA, 25 bp, Homo sapien
atccacaaccattatacctaagaaa

SEQ ID NO: 3910129 - DNA, 25 bp, Homo sapien
taggacaacattcagttgaaatatt

SEQ ID NO: 3910130 - DNA, 25 bp, Homo sapien
ttttaacaaggtcaacatggctaaa

SEQ ID NO: 3910131 - DNA, 25 bp, Homo sapien
tttttaacaaggtcaacatggctaa

SEQ ID NO: 3910132 - DNA, 25 bp, Homo sapien
agcaggtgtccccgccgctccagta

SEQ ID NO: 3910133 - DNA, 25 bp, Homo sapien
caggtgtccccgccgctccagtaga

SEQ ID NO: 3910134 - DNA, 25 bp, Homo sapien
gcaggtgtccccgccgctccagtag

SEQ ID NO: 3910135 - DNA, 25 bp, Homo sapien
tcagcaggtgtccccgccgctccag

SEQ ID NO: 3910136 - DNA, 25 bp, Homo sapien
ggttttccacggaggtgcctgcctg

SEQ ID NO: 3910137 - DNA, 25 bp, Homo sapien
gaacacttcgcgaggtacacctacc

SEQ ID NO: 3910138 - DNA, 25 bp, Homo sapien
gaatgacctgcatcttgagtcggca

SEQ ID NO: 3910139 - DNA, 25 bp, Homo sapien
aaagagttgtgcctcgtggacagcc

SEQ ID NO: 3910140 - DNA, 25 bp, Homo sapien
atttgtgtgggaaatattcctccat

SEQ ID NO: 3910141 - DNA, 25 bp, Homo sapien
aatttgctagtgtgtgtctttcaac

SEQ ID NO: 3910142 - DNA, 25 bp, Homo sapien
tctttttccaatttgctagtgtgtg

SEQ ID NO: 3910143 - DNA, 25 bp, Homo sapien
ctagctgtttattttgcccattggt

SEQ ID NO: 3910144 - DNA, 25 bp, Homo sapien
gataagcaattaaagtccctgggcc

SEQ ID NO: 3910145 - DNA, 25 bp, Homo sapien
gaagtcgtgagagactgtgccctga

SEQ ID NO: 3910146 - DNA, 25 bp, Homo sapien
ggctttgccacatccgggaagcaca

SEQ ID NO: 3910147 - DNA, 25 bp, Homo sapien
gggcctcagtttagacattatacaa

SEQ ID NO: 3910148 - DNA, 25 bp, Homo sapien
caaattttagccgatacaagaaggc

SEQ ID NO: 3910149 - DNA, 25 bp, Homo sapien
tacagaatatgtatgcttagaatca

SEQ ID NO: 3910150 - DNA, 25 bp, Homo sapien
tgaacacacggacactaaaataaaa

SEQ ID NO: 3910151 - DNA, 25 bp, Homo sapien
tatggttgaagaatacacgataaac

SEQ ID NO: 3910152 - DNA, 25 bp, Homo sapien
tgttagacaaaaacagcgtacatct

SEQ ID NO: 3910153 - DNA, 25 bp, Homo sapien
cagcgtacatctatggatgcatcat

SEQ ID NO: 3910154 - DNA, 25 bp, Homo sapien
tacttcacagtgagagaaccaccac

SEQ ID NO: 3910155 - DNA, 25 bp, Homo sapien
ttatacttcacagtgagagaaccac

SEQ ID NO: 3910156 - DNA, 25 bp, Homo sapien
gacttgcacaattcaagcctgtatt

SEQ ID NO: 3910157 - DNA, 25 bp, Homo sapien
actgtactttgctatattcatccat

SEQ ID NO: 3910158 - DNA, 25 bp, Homo sapien
aataatgtatataagcagacttgca

SEQ ID NO: 3910159 - DNA, 25 bp, Homo sapien
tctaatcctgtatcttatatggata

SEQ ID NO: 3910160 - DNA, 25 bp, Homo sapien
gcaaagagttgagcagttagtcagt

SEQ ID NO: 3910161 - DNA, 25 bp, Homo sapien
catgtcatatacagctctaagtagc

SEQ ID NO: 3910162 - DNA, 25 bp, Homo sapien
cagatactgataagtgcttcgagaa

SEQ ID NO: 3910163 - DNA, 25 bp, Homo sapien
gcttcgagaagatagggcaatgtaa

SEQ ID NO: 3910164 - DNA, 25 bp, Homo sapien
taggagtttctaggtcaaggctgtc

SEQ ID NO: 3910165 - DNA, 25 bp, Homo sapien
taaatggccatctgcatattccctt

SEQ ID NO: 3910166 - DNA, 25 bp, Homo sapien
taagtgcatatgagctaggacccct

SEQ ID NO: 3910167 - DNA, 25 bp, Homo sapien
cacacagaaataggagtaaatggcc

SEQ ID NO: 3910168 - DNA, 25 bp, Homo sapien
tggaactcacacatcagaagtcacc

SEQ ID NO: 3910169 - DNA, 25 bp, Homo sapien
tgtagcttctgcagagaataaaggc

SEQ ID NO: 3910170 - DNA, 25 bp, Homo sapien
tagacaatgtaagtggttagcacac

SEQ ID NO: 3910171 - DNA, 25 bp, Homo sapien
tggccatgttgttcacaggtgatga

SEQ ID NO: 3910172 - DNA, 25 bp, Homo sapien
tctgtgcgtgagagcgtgcatgtat

SEQ ID NO: 3910173 - DNA, 25 bp, Homo sapien
agatattgcactttgttaaccgttg

SEQ ID NO: 3910174 - DNA, 25 bp, Homo sapien
tatccagtaccttgggcatctatag

SEQ ID NO: 3910175 - DNA, 25 bp, Homo sapien
tggccactgtacattaactgagaag

SEQ ID NO: 3910176 - DNA, 25 bp, Homo sapien
gtatagtgggtacttgagcttccag

SEQ ID NO: 3910177 - DNA, 25 bp, Homo sapien
gagagcctggtagcaattggccaca

SEQ ID NO: 3910178 - DNA, 25 bp, Homo sapien
tctggcctgcctgagcctaggtata

SEQ ID NO: 3910179 - DNA, 25 bp, Homo sapien
tttgataaagtatggatttctgcac

SEQ ID NO: 3910180 - DNA, 25 bp, Homo sapien
catcccctagggcaccgttggagtc

SEQ ID NO: 3910181 - DNA, 25 bp, Homo sapien
gaaagatgttcaggtcagcgaggca

SEQ ID NO: 3910182 - DNA, 25 bp, Homo sapien
gggcaccgttggagtccatattcag

SEQ ID NO: 3910183 - DNA, 25 bp, Homo sapien
atctctccttctcgggatcaccagg

SEQ ID NO: 3910184 - DNA, 25 bp, Homo sapien
cattccagtgcactggcagacaggc

SEQ ID NO: 3910185 - DNA, 25 bp, Homo sapien
gaggcattccagtgcactggcagac

SEQ ID NO: 3910186 - DNA, 25 bp, Homo sapien
ggcattccagtgcactggcagacag

SEQ ID NO: 3910187 - DNA, 25 bp, Homo sapien
attccagtgcactggcagacaggcc

SEQ ID NO: 3910188 - DNA, 25 bp, Homo sapien
agtggggtacatgaggcgagtggga

SEQ ID NO: 3910189 - DNA, 25 bp, Homo sapien
gtcagtggggtacatgaggcgagtg

SEQ ID NO: 3910190 - DNA, 25 bp, Homo sapien
cagtggggtacatgaggcgagtggg

SEQ ID NO: 3910191 - DNA, 25 bp, Homo sapien
tcagtggggtacatgaggcgagtgg

SEQ ID NO: 3910192 - DNA, 25 bp, Homo sapien
tactcttagccagtttgcagaagga

SEQ ID NO: 3910193 - DNA, 25 bp, Homo sapien
tactgcatagatgtaagatgcccag

SEQ ID NO: 3910194 - DNA, 25 bp, Homo sapien
agatgcccaggatgtgacacagttg

SEQ ID NO: 3910195 - DNA, 25 bp, Homo sapien
tcttcggccacgcacacattgcggt

SEQ ID NO: 3910196 - DNA, 25 bp, Homo sapien
agcccataacctgctgtggcttatc

SEQ ID NO: 3910197 - DNA, 25 bp, Homo sapien
ttagaaccgtgcctccacagaaagc

SEQ ID NO: 3910198 - DNA, 25 bp, Homo sapien
ccacagaaagcccataacctgctgt

SEQ ID NO: 3910199 - DNA, 25 bp, Homo sapien
tgtggcttatccaagccccagtgac

SEQ ID NO: 3910200 - DNA, 25 bp, Homo sapien
ctaaaacacttcggcctgctgcttc

SEQ ID NO: 3910201 - DNA, 25 bp, Homo sapien
tctaaaacacttcggcctgctgctt

SEQ ID NO: 3910202 - DNA, 25 bp, Homo sapien
gcatgtttgcagtgaggcccttcca

SEQ ID NO: 3910203 - DNA, 25 bp, Homo sapien
aacacatggtttggtcagtgagtcc

SEQ ID NO: 3910204 - DNA, 25 bp, Homo sapien
ggccagatccagatgagggtttcat

SEQ ID NO: 3910205 - DNA, 25 bp, Homo sapien
ggcccttccagcacaaacacatggt

SEQ ID NO: 3910206 - DNA, 25 bp, Homo sapien
ccagccagagaagactcagtttcac

SEQ ID NO: 3910207 - DNA, 25 bp, Homo sapien
gaagacctgaacttgagctccagcc

SEQ ID NO: 3910208 - DNA, 25 bp, Homo sapien
gtgactgcggaagacctgaacttga

SEQ ID NO: 3910209 - DNA, 25 bp, Homo sapien
ctggagctgagcaaactcgctggcc

SEQ ID NO: 3910210 - DNA, 25 bp, Homo sapien
tgtggtcactcggagctctctgtac

SEQ ID NO: 3910211 - DNA, 25 bp, Homo sapien
ccaaatactatgaccctggatctga

SEQ ID NO: 3910212 - DNA, 25 bp, Homo sapien
catactttggaagtatccactgaac

SEQ ID NO: 3910213 - DNA, 25 bp, Homo sapien
gatctgagagtgctgccctgctgtg

SEQ ID NO: 3910214 - DNA, 25 bp, Homo sapien
catttgcagtccgaaagattcatgc

SEQ ID NO: 3910215 - DNA, 25 bp, Homo sapien
gactgtcaatagcaccgacatcctt

SEQ ID NO: 3910216 - DNA, 25 bp, Homo sapien
ctctgcttgagaaagagcaagccat

SEQ ID NO: 3910217 - DNA, 25 bp, Homo sapien
caagccatgtctgtgcattggaaat

SEQ ID NO: 3910218 - DNA, 25 bp, Homo sapien
cctcataatgaaggggccaattgtg

SEQ ID NO: 3910219 - DNA, 25 bp, Homo sapien
aattgtgctgttggtgggtgtatct

SEQ ID NO: 3910220 - DNA, 25 bp, Homo sapien
gttggtgggtgtatctgaaacgccc

SEQ ID NO: 3910221 - DNA, 25 bp, Homo sapien
catggccctaggctttcctttggcc

SEQ ID NO: 3910222 - DNA, 25 bp, Homo sapien
ttgttaagttccctgaaggtatctc

SEQ ID NO: 3910223 - DNA, 25 bp, Homo sapien
tgttaagttccctgaaggtatctct

SEQ ID NO: 3910224 - DNA, 25 bp, Homo sapien
gaaggtatctctttgcacttgactt

SEQ ID NO: 3910225 - DNA, 25 bp, Homo sapien
tcaggtttgtagagtggtaataaga

SEQ ID NO: 3910226 - DNA, 25 bp, Homo sapien
ctgccctggtgatagatggccttga

SEQ ID NO: 3910227 - DNA, 25 bp, Homo sapien
ggccttgagcttctgatatgtgata

SEQ ID NO: 3910228 - DNA, 25 bp, Homo sapien
gtaataagagttatctgtctgatgc

SEQ ID NO: 3910229 - DNA, 25 bp, Homo sapien
gttaatgccagataccttgtagggt

SEQ ID NO: 3910230 - DNA, 25 bp, Homo sapien
cttgtagggtaagcccatgaaaggg

SEQ ID NO: 3910231 - DNA, 25 bp, Homo sapien
aacagggctgttctatgttaatgcc

SEQ ID NO: 3910232 - DNA, 25 bp, Homo sapien
tggaggttcacctagcttgtaggaa

SEQ ID NO: 3910233 - DNA, 25 bp, Homo sapien
aaagcacatgggcaacctcaaagct

SEQ ID NO: 3910234 - DNA, 25 bp, Homo sapien
tcagcatagatctctgagctgaaag

SEQ ID NO: 3910235 - DNA, 25 bp, Homo sapien
tcagctgtcagcatagatctctgag

SEQ ID NO: 3910236 - DNA, 25 bp, Homo sapien
acctcaaagcttgcaatatcttctg

SEQ ID NO: 3910237 - DNA, 25 bp, Homo sapien
cactctcccactatctcctgaaatt

SEQ ID NO: 3910238 - DNA, 25 bp, Homo sapien
ctcccactatctcctgaaattctgg

SEQ ID NO: 3910239 - DNA, 25 bp, Homo sapien
cccactctcccactatctcctgaaa

SEQ ID NO: 3910240 - DNA, 25 bp, Homo sapien
ctctcccactatctcctgaaattct

SEQ ID NO: 3910241 - DNA, 25 bp, Homo sapien
ttacagccttcaaacagggtcttct

SEQ ID NO: 3910242 - DNA, 25 bp, Homo sapien
tacagccttcaaacagggtcttctg

SEQ ID NO: 3910243 - DNA, 25 bp, Homo sapien
ctacgggaccttaatgttacagcct

SEQ ID NO: 3910244 - DNA, 25 bp, Homo sapien
gttacagccttcaaacagggtcttc

SEQ ID NO: 3910245 - DNA, 25 bp, Homo sapien
catcaactgagtggcaggatgggaa

SEQ ID NO: 3910246 - DNA, 25 bp, Homo sapien
caactgagtggcaggatgggaacct

SEQ ID NO: 3910247 - DNA, 25 bp, Homo sapien
gaacctgagcccaggtgtgcctcca

SEQ ID NO: 3910248 - DNA, 25 bp, Homo sapien
ccaagggtggcatcaactgagtggc

SEQ ID NO: 3910249 - DNA, 25 bp, Homo sapien
ccatcctgggaattgtgaacttgga

SEQ ID NO: 3910250 - DNA, 25 bp, Homo sapien
ggaaggccaacccattaacagtctg

SEQ ID NO: 3910251 - DNA, 25 bp, Homo sapien
gaatcccaaggaccgagctaatgag

SEQ ID NO: 3910252 - DNA, 25 bp, Homo sapien
tcttagcaacaagagagcagctccc

SEQ ID NO: 3910253 - DNA, 25 bp, Homo sapien
tccaattcttggccatcactgccaa

SEQ ID NO: 3910254 - DNA, 25 bp, Homo sapien
ctccaattcttggccatcactgcca

SEQ ID NO: 3910255 - DNA, 25 bp, Homo sapien
ttgccacttgtagcccacctcacaa

SEQ ID NO: 3910256 - DNA, 25 bp, Homo sapien
tgtagcccacctcacaaactcttgt

SEQ ID NO: 3910257 - DNA, 25 bp, Homo sapien
cttgtagcccacctcacaaactctt

SEQ ID NO: 3910258 - DNA, 25 bp, Homo sapien
cacttgtagcccacctcacaaactc

SEQ ID NO: 3910259 - DNA, 25 bp, Homo sapien
tcttttgacgcgtgggaaatctaac

SEQ ID NO: 3910260 - DNA, 25 bp, Homo sapien
ctcagcattcttttgacgcgtggga

SEQ ID NO: 3910261 - DNA, 25 bp, Homo sapien
cagcattcttttgacgcgtgggaaa

SEQ ID NO: 3910262 - DNA, 25 bp, Homo sapien
gcattcttttgacgcgtgggaaatc

SEQ ID NO: 3910263 - DNA, 25 bp, Homo sapien
cataagccaggtcttcagatatgga

SEQ ID NO: 3910264 - DNA, 25 bp, Homo sapien
tatggataggtttctttctaggctc

SEQ ID NO: 3910265 - DNA, 25 bp, Homo sapien
tggaaatttgtccacccctgagcta

SEQ ID NO: 3910266 - DNA, 25 bp, Homo sapien
cagagccaagtactgtgaagttcat

SEQ ID NO: 3910267 - DNA, 25 bp, Homo sapien
tgcttgcttttaccgagcacctggg

SEQ ID NO: 3910268 - DNA, 25 bp, Homo sapien
tgggtactgcaaccaaggaccatat

SEQ ID NO: 3910269 - DNA, 25 bp, Homo sapien
gaaaattccttgaggcttaggctga

SEQ ID NO: 3910270 - DNA, 25 bp, Homo sapien
gctgaaggcactcttgcagagagca

SEQ ID NO: 3910271 - DNA, 25 bp, Homo sapien
ctgaggaggcaagacatcatagccc

SEQ ID NO: 3910272 - DNA, 25 bp, Homo sapien
caaatgtgttgctgaagtcgcgagt

SEQ ID NO: 3910273 - DNA, 25 bp, Homo sapien
gaatcagccttgatgaccgctctca

SEQ ID NO: 3910274 - DNA, 25 bp, Homo sapien
gtagaccaccatacagcgaccatga

SEQ ID NO: 3910275 - DNA, 25 bp, Homo sapien
ggatgctatcaaacacctctttagg

SEQ ID NO: 3910276 - DNA, 25 bp, Homo sapien
tcttcttagaataggatgaggcact

SEQ ID NO: 3910277 - DNA, 25 bp, Homo sapien
caggacaggtgccagcttcgataca

SEQ ID NO: 3910278 - DNA, 25 bp, Homo sapien
tagatattaactgtgacgctcccaa

SEQ ID NO: 3910279 - DNA, 25 bp, Homo sapien
cattgatagagctattagtggcctc

SEQ ID NO: 3910280 - DNA, 25 bp, Homo sapien
tagaaggtcgtagattacaagcaga

SEQ ID NO: 3910281 - DNA, 25 bp, Homo sapien
ggaaccctggcacaaacatcaaact

SEQ ID NO: 3910282 - DNA, 25 bp, Homo sapien
tgattggactgaggcaagcagccct

SEQ ID NO: 3910283 - DNA, 25 bp, Homo sapien
tataacatacgtctaatcagagtcc

SEQ ID NO: 3910284 - DNA, 25 bp, Homo sapien
ctgaagcccagacagaaaaaagagt

SEQ ID NO: 3910285 - DNA, 25 bp, Homo sapien
catgagacagaggaaatatttgaag

SEQ ID NO: 3910286 - DNA, 25 bp, Homo sapien
gctatgtgaactggaaaacaagtca

SEQ ID NO: 3910287 - DNA, 25 bp, Homo sapien
tatgaactgatagggtagagatgtg

SEQ ID NO: 3910288 - DNA, 25 bp, Homo sapien
gaactgatagggtagagatgtgaaa

SEQ ID NO: 3910289 - DNA, 25 bp, Homo sapien
tactatgaactgatagggtagagat

SEQ ID NO: 3910290 - DNA, 25 bp, Homo sapien
ccaaaattatccagctggggtgtta

SEQ ID NO: 3910291 - DNA, 25 bp, Homo sapien
ggtccatactaactctgctcagttg

SEQ ID NO: 3910292 - DNA, 25 bp, Homo sapien
catactaactctgctcagttgttcc

SEQ ID NO: 3910293 - DNA, 25 bp, Homo sapien
atgtcttggtccatactaactctgc

SEQ ID NO: 3910294 - DNA, 25 bp, Homo sapien
tcttggtccatactaactctgctca

SEQ ID NO: 3910295 - DNA, 25 bp, Homo sapien
gaagtccctacgtgttgttagccat

SEQ ID NO: 3910296 - DNA, 25 bp, Homo sapien
gcttttctccacaaggatacgtaga

SEQ ID NO: 3910297 - DNA, 25 bp, Homo sapien
cattgagaatcctagtgtcgggcct

SEQ ID NO: 3910298 - DNA, 25 bp, Homo sapien
tcttatgaggccaaaaacccatgag

SEQ ID NO: 3910299 - DNA, 25 bp, Homo sapien
taaacctactgatggagtagcaaag

SEQ ID NO: 3910300 - DNA, 25 bp, Homo sapien
caatacagacctaggattgcatggg

SEQ ID NO: 3910301 - DNA, 25 bp, Homo sapien
gccaaattgggtagcatcatctgta

SEQ ID NO: 3910302 - DNA, 25 bp, Homo sapien
catagccaggtctcaaaagctcaaa

SEQ ID NO: 3910303 - DNA, 25 bp, Homo sapien
tcatcgataagaggccaagttctcc

SEQ ID NO: 3910304 - DNA, 25 bp, Homo sapien
catcgataagaggccaagttctcca

SEQ ID NO: 3910305 - DNA, 25 bp, Homo sapien
tgaaattcatcgtacgggcccagga

SEQ ID NO: 3910306 - DNA, 25 bp, Homo sapien
taggagacgtctggtggaatgcaca

SEQ ID NO: 3910307 - DNA, 25 bp, Homo sapien
tgtcaaaggacgtggatctaaaacc

SEQ ID NO: 3910308 - DNA, 25 bp, Homo sapien
gatcaaactgcagatcccacgctgg

SEQ ID NO: 3910309 - DNA, 25 bp, Homo sapien
tctttgggacatttgtgcaggacca

SEQ ID NO: 3910310 - DNA, 25 bp, Homo sapien
agagatgatagaactgaaacgcccc

SEQ ID NO: 3910311 - DNA, 25 bp, Homo sapien
cctgtgttcctagcgcgcagagttg

SEQ ID NO: 3910312 - DNA, 25 bp, Homo sapien
cgaatgaatgcaaacgtcgtcctgt

SEQ ID NO: 3910313 - DNA, 25 bp, Homo sapien
gcctgcacaaattcgaaccacagct

SEQ ID NO: 3910314 - DNA, 25 bp, Homo sapien
agcacccgctgcctgcacaaattcg

SEQ ID NO: 3910315 - DNA, 25 bp, Homo sapien
cagagaggcggcggaccctaaaagc

SEQ ID NO: 3910316 - DNA, 25 bp, Homo sapien
ggcccggcgcctagaggccgcttat

SEQ ID NO: 3910317 - DNA, 25 bp, Homo sapien
tatcgttcattacccggtgtatccg

SEQ ID NO: 3910318 - DNA, 25 bp, Homo sapien
cagaagatgtggctcaaaccgaatg

SEQ ID NO: 3910319 - DNA, 25 bp, Homo sapien
tcactgcgggtgaatctgcacacag

SEQ ID NO: 3910320 - DNA, 25 bp, Homo sapien
ccgaatgtgtatcgcatttgaaatg

SEQ ID NO: 3910321 - DNA, 25 bp, Homo sapien
cagagccagttatctcacagccact

SEQ ID NO: 3910322 - DNA, 25 bp, Homo sapien
ttaaccgaggcactatgtacactgc

SEQ ID NO: 3910323 - DNA, 25 bp, Homo sapien
agggcagagccagttatctcacagc

SEQ ID NO: 3910324 - DNA, 25 bp, Homo sapien
cattaaccgaggcactatgtacact

SEQ ID NO: 3910325 - DNA, 25 bp, Homo sapien
ggaaatgaggttgacaaagtgattg

SEQ ID NO: 3910326 - DNA, 25 bp, Homo sapien
aatgaggttgacaaagtgattgttg

SEQ ID NO: 3910327 - DNA, 25 bp, Homo sapien
tgaggttgacaaagtgattgttgag

SEQ ID NO: 3910328 - DNA, 25 bp, Homo sapien
cattgaaggcagaagagtggaagtt

SEQ ID NO: 3910329 - DNA, 25 bp, Homo sapien
atgagggggcctccaattcctgctt

SEQ ID NO: 3910330 - DNA, 25 bp, Homo sapien
ggatgcccatgagggggcctccaat

SEQ ID NO: 3910331 - DNA, 25 bp, Homo sapien
ccatgagggggcctccaattcctgc

SEQ ID NO: 3910332 - DNA, 25 bp, Homo sapien
caggatgcccatgagggggcctcca

SEQ ID NO: 3910333 - DNA, 25 bp, Homo sapien
gccttggcaccactagtagatgtag

SEQ ID NO: 3910334 - DNA, 25 bp, Homo sapien
agctcgggagtaacctggcccacag

SEQ ID NO: 3910335 - DNA, 25 bp, Homo sapien
ctagtagatgtagggatgatgtcct

SEQ ID NO: 3910336 - DNA, 25 bp, Homo sapien
cattcagctcgggagtaacctggcc

SEQ ID NO: 3910337 - DNA, 25 bp, Homo sapien
gttataagttcttctatgatgccaa

SEQ ID NO: 3910338 - DNA, 25 bp, Homo sapien
tgtggttataagttcttctatgatg

SEQ ID NO: 3910339 - DNA, 25 bp, Homo sapien
aagttcttctatgatgccaaagttg

SEQ ID NO: 3910340 - DNA, 25 bp, Homo sapien
taagttcttctatgatgccaaagtt

SEQ ID NO: 3910341 - DNA, 25 bp, Homo sapien
gattcatgcctatcatgaacaaggg

SEQ ID NO: 3910342 - DNA, 25 bp, Homo sapien
tatcatgaacaagggggtgtcagca

SEQ ID NO: 3910343 - DNA, 25 bp, Homo sapien
acttctcatgattcatgcctatcat

SEQ ID NO: 3910344 - DNA, 25 bp, Homo sapien
ctcatgattcatgcctatcatgaac

SEQ ID NO: 3910345 - DNA, 25 bp, Homo sapien
ccagccttctcatggtattgaagat

SEQ ID NO: 3910346 - DNA, 25 bp, Homo sapien
acacaacataatcagcaccagcatc

SEQ ID NO: 3910347 - DNA, 25 bp, Homo sapien
ctacacaacataatcagcaccagca

SEQ ID NO: 3910348 - DNA, 25 bp, Homo sapien
aacataatcagcaccagcatcacac

SEQ ID NO: 3910349 - DNA, 25 bp, Homo sapien
acaacataatcagcaccagcatcac

SEQ ID NO: 3910350 - DNA, 25 bp, Homo sapien
ttggtgggatctcgctcttagaaga

SEQ ID NO: 3910351 - DNA, 25 bp, Homo sapien
ggtgggatctcgctcttagaagatg

SEQ ID NO: 3910352 - DNA, 25 bp, Homo sapien
ttttggtgggatctcgctcttagaa

SEQ ID NO: 3910353 - DNA, 25 bp, Homo sapien
ggatctcgctcttagaagatggtaa

SEQ ID NO: 3910354 - DNA, 25 bp, Homo sapien
gcttcctattctcagctttaatggt

SEQ ID NO: 3910355 - DNA, 25 bp, Homo sapien
aagcttcctattctcagctttaatg

SEQ ID NO: 3910356 - DNA, 25 bp, Homo sapien
tattctcagctttaatggtgccatg

SEQ ID NO: 3910357 - DNA, 25 bp, Homo sapien
cctattctcagctttaatggtgcca

SEQ ID NO: 3910358 - DNA, 25 bp, Homo sapien
agacacccaacatggccaaatccat

SEQ ID NO: 3910359 - DNA, 25 bp, Homo sapien
ggtgacagtatccactttgccaaag

SEQ ID NO: 3910360 - DNA, 25 bp, Homo sapien
ggatcatgtagttgaagtcaacgaa

SEQ ID NO: 3910361 - DNA, 25 bp, Homo sapien
tgtggatcatgtagttgaagtcaac

SEQ ID NO: 3910362 - DNA, 25 bp, Homo sapien
tcagatgctcttgggtgtggtgaca

SEQ ID NO: 3910363 - DNA, 25 bp, Homo sapien
agatctgtccccgatggggacaagc

SEQ ID NO: 3910364 - DNA, 25 bp, Homo sapien
gacattgagatctgtccccgatggg

SEQ ID NO: 3910365 - DNA, 25 bp, Homo sapien
gtgacattgagatctgtccccgatg

SEQ ID NO: 3910366 - DNA, 25 bp, Homo sapien
gctctgggggttctcttttgacaca

SEQ ID NO: 3910367 - DNA, 25 bp, Homo sapien
ctgcactcgatgtttcctgtttctt

SEQ ID NO: 3910368 - DNA, 25 bp, Homo sapien
cctgtttcttgctctgggggttctc

SEQ ID NO: 3910369 - DNA, 25 bp, Homo sapien
ttttgacacagaggtctggggcacc

SEQ ID NO: 3910370 - DNA, 25 bp, Homo sapien
tgctgctaggcaagataattggtgg

SEQ ID NO: 3910371 - DNA, 25 bp, Homo sapien
tgtggccaagatttggcaggatgca

SEQ ID NO: 3910372 - DNA, 25 bp, Homo sapien
acacttctgcgttgtgactgccgcc

SEQ ID NO: 3910373 - DNA, 25 bp, Homo sapien
tttgcaggaatgctccccagtagca

SEQ ID NO: 3910374 - DNA, 25 bp, Homo sapien
gccatatgacattggtgccagtcaa

SEQ ID NO: 3910375 - DNA, 25 bp, Homo sapien
agcttgaatcatccgccacagccag

SEQ ID NO: 3910376 - DNA, 25 bp, Homo sapien
gccagcagaatccatcgccatatga

SEQ ID NO: 3910377 - DNA, 25 bp, Homo sapien
tattccctctcctagtgagtagctg

SEQ ID NO: 3910378 - DNA, 25 bp, Homo sapien
gaatgctatcctccacgtaccttga

SEQ ID NO: 3910379 - DNA, 25 bp, Homo sapien
cacggtgactggctgagatcaaatc

SEQ ID NO: 3910380 - DNA, 25 bp, Homo sapien
gcccagcaggttgaaagatgtcatc

SEQ ID NO: 3910381 - DNA, 25 bp, Homo sapien
agatcagggtctagctcatggtaag

SEQ ID NO: 3910382 - DNA, 25 bp, Homo sapien
caataatcatgtgtgaaaacacaac

SEQ ID NO: 3910383 - DNA, 25 bp, Homo sapien
ctagacaataatcatgtgtgaaaac

SEQ ID NO: 3910384 - DNA, 25 bp, Homo sapien
agacaataatcatgtgtgaaaacac

SEQ ID NO: 3910385 - DNA, 25 bp, Homo sapien
gacaataatcatgtgtgaaaacaca

SEQ ID NO: 3910386 - DNA, 25 bp, Homo sapien
ttgcactttgaccaatggtactcac

SEQ ID NO: 3910387 - DNA, 25 bp, Homo sapien
ttcccactcttaatctcagtttgca

SEQ ID NO: 3910388 - DNA, 25 bp, Homo sapien
gcccacttgaacttcccactcttaa

SEQ ID NO: 3910389 - DNA, 25 bp, Homo sapien
ctcagtttgcactttgaccaatggt

SEQ ID NO: 3910390 - DNA, 25 bp, Homo sapien
ttcatcatctttgtccttggaggcc

SEQ ID NO: 3910391 - DNA, 25 bp, Homo sapien
tcaacggtactgacatttcatcatc

SEQ ID NO: 3910392 - DNA, 25 bp, Homo sapien
tctttgtccttggaggccaatccag

SEQ ID NO: 3910393 - DNA, 25 bp, Homo sapien
catcaacggtactgacatttcatca

SEQ ID NO: 3910394 - DNA, 25 bp, Homo sapien
gatcatttcagccaccacaatcaca

SEQ ID NO: 3910395 - DNA, 25 bp, Homo sapien
caagttcttctgttgtgattctcag

SEQ ID NO: 3910396 - DNA, 25 bp, Homo sapien
tctcagtcctcctggatgttgaacg

SEQ ID NO: 3910397 - DNA, 25 bp, Homo sapien
ctcctggatgttgaacgctgcctgc

SEQ ID NO: 3910398 - DNA, 25 bp, Homo sapien
tgttggccacgttttatttcctgcc

SEQ ID NO: 3910399 - DNA, 25 bp, Homo sapien
ctgccttccaaccttgcctttctct

SEQ ID NO: 3910400 - DNA, 25 bp, Homo sapien
ttctcttccaattttcatgatgtca

SEQ ID NO: 3910401 - DNA, 25 bp, Homo sapien
ctttctgcccatattttgattgtcc

SEQ ID NO: 3910402 - DNA, 25 bp, Homo sapien
gcctgtagtgtgcttttgatctatt

SEQ ID NO: 3910403 - DNA, 25 bp, Homo sapien
cataatcagagcctgtagtgtgctt

SEQ ID NO: 3910404 - DNA, 25 bp, Homo sapien
ctaattcagactctttgcttcatac

SEQ ID NO: 3910405 - DNA, 25 bp, Homo sapien
aattcagactctttgcttcatacca

SEQ ID NO: 3910406 - DNA, 25 bp, Homo sapien
ggaaaaattggcttcaattggaagc

SEQ ID NO: 3910407 - DNA, 25 bp, Homo sapien
tcctgtatggctgagtccaacctcc

SEQ ID NO: 3910408 - DNA, 25 bp, Homo sapien
tgtctattagatcctgaacaaacag

SEQ ID NO: 3910409 - DNA, 25 bp, Homo sapien
catagggaaattgggcagcacttgc

SEQ ID NO: 3910410 - DNA, 25 bp, Homo sapien
catttctttctcctggtcagccctg

SEQ ID NO: 3910411 - DNA, 25 bp, Homo sapien
ttctgctgcttaagctcccactcct

SEQ ID NO: 3910412 - DNA, 25 bp, Homo sapien
tgggagaagccaggtaggcctcatc

SEQ ID NO: 3910413 - DNA, 25 bp, Homo sapien
gcctcatcctgcttttgtctcaaca

SEQ ID NO: 3910414 - DNA, 25 bp, Homo sapien
gaggtcatccagttgaaggaggcct

SEQ ID NO: 3910415 - DNA, 25 bp, Homo sapien
taagtctggtttgtatccatgatag

SEQ ID NO: 3910416 - DNA, 25 bp, Homo sapien
tgtatccatgatagatgtcagttgg

SEQ ID NO: 3910417 - DNA, 25 bp, Homo sapien
cacagtcatccgctgatccttcagc

SEQ ID NO: 3910418 - DNA, 25 bp, Homo sapien
tgaaaacactccatacaccatctcg

SEQ ID NO: 3910419 - DNA, 25 bp, Homo sapien
gacccctcggttgtggtcttgagac

SEQ ID NO: 3910420 - DNA, 25 bp, Homo sapien
tccaaggtctggtgatgctgatcca

SEQ ID NO: 3910421 - DNA, 25 bp, Homo sapien
gctgtcctgttcagcaacctgtatg

SEQ ID NO: 3910422 - DNA, 25 bp, Homo sapien
tggacctaaggtaatgctagcctct

SEQ ID NO: 3910423 - DNA, 25 bp, Homo sapien
tttgagtctatacaacattggcagg

SEQ ID NO: 3910424 - DNA, 25 bp, Homo sapien
ccataaggttatctgggcctgaata

SEQ ID NO: 3910425 - DNA, 25 bp, Homo sapien
caacctcaacagaagccaatttggt

SEQ ID NO: 3910426 - DNA, 25 bp, Homo sapien
cttagcaagctatcatcatttatcc

SEQ ID NO: 3910427 - DNA, 25 bp, Homo sapien
tctttccaaaagtggtatagttcag

SEQ ID NO: 3910428 - DNA, 25 bp, Homo sapien
tttacctcagatgtacagaattgag

SEQ ID NO: 3910429 - DNA, 25 bp, Homo sapien
tcagtgaattactagcagaggcttt

SEQ ID NO: 3910430 - DNA, 25 bp, Homo sapien
gcttgaagcatataatcaaggtgtt

SEQ ID NO: 3910431 - DNA, 25 bp, Homo sapien
aggtgctgggtggatatgaatatcc

SEQ ID NO: 3910432 - DNA, 25 bp, Homo sapien
tggtgattaccagcaatccttagtg

SEQ ID NO: 3910433 - DNA, 25 bp, Homo sapien
aacacatttcaatctggtagtcttt

SEQ ID NO: 3910434 - DNA, 25 bp, Homo sapien
ctctaatcaatcctgagctaataac

SEQ ID NO: 3910435 - DNA, 25 bp, Homo sapien
caaactttaggcatgtcaggtacaa

SEQ ID NO: 3910436 - DNA, 25 bp, Homo sapien
gaattatcgtgtaaaactacaccag

SEQ ID NO: 3910437 - DNA, 25 bp, Homo sapien
gatgcgtatgctcagtgtatccaaa

SEQ ID NO: 3910438 - DNA, 25 bp, Homo sapien
taatggtagtgagaaagttcagcct

SEQ ID NO: 3910439 - DNA, 25 bp, Homo sapien
gatccgagcaaaactttcaagggct

SEQ ID NO: 3910440 - DNA, 25 bp, Homo sapien
gatcagagccatccctccaattgga

SEQ ID NO: 3910441 - DNA, 25 bp, Homo sapien
gagtcaacttccatgactgttcgga

SEQ ID NO: 3910442 - DNA, 25 bp, Homo sapien
gcaaagatggcggtgggacgaagcc

SEQ ID NO: 3910443 - DNA, 25 bp, Homo sapien
cgcaaagatggcggtgggacgaagc

SEQ ID NO: 3910444 - DNA, 25 bp, Homo sapien
caaagatggcggtgggacgaagccc

SEQ ID NO: 3910445 - DNA, 25 bp, Homo sapien
ttccgccgccgcgtcgtttcaggac

SEQ ID NO: 3910446 - DNA, 25 bp, Homo sapien
gcgcacgcgcgggacgacgtcacgt

SEQ ID NO: 3910447 - DNA, 25 bp, Homo sapien
ggacgacgtcacgtgcgctcccggg

SEQ ID NO: 3910448 - DNA, 25 bp, Homo sapien
ttcaggacccggacggcggattcgc

SEQ ID NO: 3910449 - DNA, 25 bp, Homo sapien
ggtgtcacagaagtatgcaaggatt

SEQ ID NO: 3910450 - DNA, 25 bp, Homo sapien
tatagctaagggaacttaccatgct

SEQ ID NO: 3910451 - DNA, 25 bp, Homo sapien
tactgatctctctgaaacatgccaa

SEQ ID NO: 3910452 - DNA, 25 bp, Homo sapien
gattcaaagtcattgctcaacaagc

SEQ ID NO: 3910453 - DNA, 25 bp, Homo sapien
catagggtcagcgaggtaaagcttc

SEQ ID NO: 3910454 - DNA, 25 bp, Homo sapien
tgcctatatttgagaaccacacgtg

SEQ ID NO: 3910455 - DNA, 25 bp, Homo sapien
ccttggctaccataagtcgcattag

SEQ ID NO: 3910456 - DNA, 25 bp, Homo sapien
ttccatggtaacattgcgggcttcc

SEQ ID NO: 3910457 - DNA, 25 bp, Homo sapien
cgggagtcgccaaccgacgcgagtc

SEQ ID NO: 3910458 - DNA, 25 bp, Homo sapien
gggagtcgccaaccgacgcgagtcc

SEQ ID NO: 3910459 - DNA, 25 bp, Homo sapien
tccgggagtcgccaaccgacgcgag

SEQ ID NO: 3910460 - DNA, 25 bp, Homo sapien
cgtccgggagtcgccaaccgacgcg

SEQ ID NO: 3910461 - DNA, 25 bp, Homo sapien
taatctaaagtcaagagccaaaggg

SEQ ID NO: 3910462 - DNA, 25 bp, Homo sapien
ccttggcagtcagtatgcagttcac

SEQ ID NO: 3910463 - DNA, 25 bp, Homo sapien
tcttgggcctcaaaagaagcattgc

SEQ ID NO: 3910464 - DNA, 25 bp, Homo sapien
cagaagaggattctaggcacactca

SEQ ID NO: 3910465 - DNA, 25 bp, Homo sapien
gacttgttccagttcagatagctaa

SEQ ID NO: 3910466 - DNA, 25 bp, Homo sapien
ggagtttactttgttctaaggtgca

SEQ ID NO: 3910467 - DNA, 25 bp, Homo sapien
ctaaggtgcaaggtagatgttttcc

SEQ ID NO: 3910468 - DNA, 25 bp, Homo sapien
caatggcttgcttatagagcaggcc

SEQ ID NO: 3910469 - DNA, 25 bp, Homo sapien
tagaatggcctgtgataactaccaa

SEQ ID NO: 3910470 - DNA, 25 bp, Homo sapien
caccaggctggatactttattcgac

SEQ ID NO: 3910471 - DNA, 25 bp, Homo sapien
taggaacctgacttgagacccactg

SEQ ID NO: 3910472 - DNA, 25 bp, Homo sapien
ctgacaggtaaagagtagaatggcc

SEQ ID NO: 3910473 - DNA, 25 bp, Homo sapien
gtctgggttggtcacccacgctgga

SEQ ID NO: 3910474 - DNA, 25 bp, Homo sapien
gaccctcccaagtagtagagacagg

SEQ ID NO: 3910475 - DNA, 25 bp, Homo sapien
atggagtctgggttggtcacccacg

SEQ ID NO: 3910476 - DNA, 25 bp, Homo sapien
ctgcttgaccctcccaagtagtaga

SEQ ID NO: 3910477 - DNA, 25 bp, Homo sapien
cactgtctgtaccagttcaccttta

SEQ ID NO: 3910478 - DNA, 25 bp, Homo sapien
gacatacatccattatggcttggca

SEQ ID NO: 3910479 - DNA, 25 bp, Homo sapien
tctagctcccttcaaagtcgaggaa

SEQ ID NO: 3910480 - DNA, 25 bp, Homo sapien
ggccctttgcagtaacttgtacata

SEQ ID NO: 3910481 - DNA, 25 bp, Homo sapien
tcagtgtcttacttgtactgtatca

SEQ ID NO: 3910482 - DNA, 25 bp, Homo sapien
ggtagcatggtaattactggaatag

SEQ ID NO: 3910483 - DNA, 25 bp, Homo sapien
tgtgcaagtagtactattataccca

SEQ ID NO: 3910484 - DNA, 25 bp, Homo sapien
tctaatagtgataaagaatgcagtt

SEQ ID NO: 3910485 - DNA, 25 bp, Homo sapien
tcaccccaaagacgagacggctctt

SEQ ID NO: 3910486 - DNA, 25 bp, Homo sapien
tggattgtcaatctcaccccaaaga

SEQ ID NO: 3910487 - DNA, 25 bp, Homo sapien
gagacggctctttctctccatgaga

SEQ ID NO: 3910488 - DNA, 25 bp, Homo sapien
ttagggtggttggattgtcaatctc

SEQ ID NO: 3910489 - DNA, 25 bp, Homo sapien
cattgaggcaggcagttagattttc

SEQ ID NO: 3910490 - DNA, 25 bp, Homo sapien
tctgcctctagggacagaaatctcc

SEQ ID NO: 3910491 - DNA, 25 bp, Homo sapien
gcaggcagttagattttcatcagct

SEQ ID NO: 3910492 - DNA, 25 bp, Homo sapien
aatctcctctgaccgaatctgcagg

SEQ ID NO: 3910493 - DNA, 25 bp, Homo sapien
cccgtggagtatcgctccttgaggg

SEQ ID NO: 3910494 - DNA, 25 bp, Homo sapien
agctgtgaccccgaacccgtggagt

SEQ ID NO: 3910495 - DNA, 25 bp, Homo sapien
ggcaggaccaatggcccgctcattc

SEQ ID NO: 3910496 - DNA, 25 bp, Homo sapien
gatatggaccacttgattcaacact

SEQ ID NO: 3910497 - DNA, 25 bp, Homo sapien
acatatatatagttgcccctccaca

SEQ ID NO: 3910498 - DNA, 25 bp, Homo sapien
gagaaccagggtgcaaatcaaatag

SEQ ID NO: 3910499 - DNA, 25 bp, Homo sapien
ggaagtagatcaaatgcaggtagaa

SEQ ID NO: 3910500 - DNA, 25 bp, Homo sapien
ggctgccagtttgtgactcttgctt

SEQ ID NO: 3910501 - DNA, 25 bp, Homo sapien
tattacacctgtgactagccaccgc

SEQ ID NO: 3910502 - DNA, 25 bp, Homo sapien
gacattgattcaacctggctcaggt

SEQ ID NO: 3910503 - DNA, 25 bp, Homo sapien
ttgagactggaatgtcgaggccgca

SEQ ID NO: 3910504 - DNA, 25 bp, Homo sapien
gaatcactgtttactggagcactca

SEQ ID NO: 3910505 - DNA, 25 bp, Homo sapien
tcagccgttccagaaattgacaaag

SEQ ID NO: 3910506 - DNA, 25 bp, Homo sapien
gtccccatgggtcgctcctcgttgg

SEQ ID NO: 3910507 - DNA, 25 bp, Homo sapien
tcagcgcagtaggtctccgtgagct

SEQ ID NO: 3910508 - DNA, 25 bp, Homo sapien
aaagaagttgcagagggagtgccac

SEQ ID NO: 3910509 - DNA, 25 bp, Homo sapien
cgaatcccgcgacggtggggcgtgc

SEQ ID NO: 3910510 - DNA, 25 bp, Homo sapien
gcagctcggcgccgtggcccttctt

SEQ ID NO: 3910511 - DNA, 25 bp, Homo sapien
ttctttgggcggtgcgctttgggga

SEQ ID NO: 3910512 - DNA, 25 bp, Homo sapien
gacgcgcggggcactagccgcagct

SEQ ID NO: 3910513 - DNA, 25 bp, Homo sapien
gatgcccgcggtaggcgcactggtg

SEQ ID NO: 3910514 - DNA, 25 bp, Homo sapien
ggctgaggaagcgacccgaggagcc

SEQ ID NO: 3910515 - DNA, 25 bp, Homo sapien
gtaggctgcgcagcgctccggatgc

SEQ ID NO: 3910516 - DNA, 25 bp, Homo sapien
acctgcttccagaagtgcgcgcggc

SEQ ID NO: 3910517 - DNA, 25 bp, Homo sapien
gacagcgacgctcgcagcttcggag

SEQ ID NO: 3910518 - DNA, 25 bp, Homo sapien
gcgacagcgacgctcgcagcttcgg

SEQ ID NO: 3910519 - DNA, 25 bp, Homo sapien
cagcgacgctcgcagcttcggagga

SEQ ID NO: 3910520 - DNA, 25 bp, Homo sapien
cggcgacagcgacgctcgcagcttc

SEQ ID NO: 3910521 - DNA, 25 bp, Homo sapien
accaggcaaagagcattccccagga

SEQ ID NO: 3910522 - DNA, 25 bp, Homo sapien
cggtttccgcgctccgctgttctca

SEQ ID NO: 3910523 - DNA, 25 bp, Homo sapien
ggaccaggcaaagagcattccccag

SEQ ID NO: 3910524 - DNA, 25 bp, Homo sapien
gaccacgtttgtcggggctggacca

SEQ ID NO: 3910525 - DNA, 25 bp, Homo sapien
ttagggtagagggaacgactgcacg

SEQ ID NO: 3910526 - DNA, 25 bp, Homo sapien
agggtagagggaacgactgcacggg

SEQ ID NO: 3910527 - DNA, 25 bp, Homo sapien
actgcacgggggagtagtctgtttt

SEQ ID NO: 3910528 - DNA, 25 bp, Homo sapien
ggagaggcgccaaagccttattagg

SEQ ID NO: 3910529 - DNA, 25 bp, Homo sapien
ctacattgcaaaaacagtggcctat

SEQ ID NO: 3910530 - DNA, 25 bp, Homo sapien
tgtactacattgcaaaaacagtggc

SEQ ID NO: 3910531 - DNA, 25 bp, Homo sapien
ttcttcagtgtcatagcgacttttt

SEQ ID NO: 3910532 - DNA, 25 bp, Homo sapien
tttttgctttcactcctcccactgg

SEQ ID NO: 3910533 - DNA, 25 bp, Homo sapien
caatacctaggcagaacttctggca

SEQ ID NO: 3910534 - DNA, 25 bp, Homo sapien
gaccttctctccaatacctaggcag

SEQ ID NO: 3910535 - DNA, 25 bp, Homo sapien
cccgcgtcagcaaagagcggagctg

SEQ ID NO: 3910536 - DNA, 25 bp, Homo sapien
ttccggcgcgctgacgctcagttgt

SEQ ID NO: 3910537 - DNA, 25 bp, Homo sapien
gcggagctgagggtacccggtttga

SEQ ID NO: 3910538 - DNA, 25 bp, Homo sapien
ttgtgcgtgccgacgcccgcgtcag

SEQ ID NO: 3910539 - DNA, 25 bp, Homo sapien
cctttgtgatctggttcctgtgtca

SEQ ID NO: 3910540 - DNA, 25 bp, Homo sapien
caagtcctttgtgatctggttcctg

SEQ ID NO: 3910541 - DNA, 25 bp, Homo sapien
agtcctttgtgatctggttcctgtg

SEQ ID NO: 3910542 - DNA, 25 bp, Homo sapien
tcctttgtgatctggttcctgtgtc

SEQ ID NO: 3910543 - DNA, 25 bp, Homo sapien
tcagttgaccatagacacaggttat

SEQ ID NO: 3910544 - DNA, 25 bp, Homo sapien
tatgttaatgagctgggtgttcaac

SEQ ID NO: 3910545 - DNA, 25 bp, Homo sapien
tcaagaagtgtatgttgccaagtat

SEQ ID NO: 3910546 - DNA, 25 bp, Homo sapien
ggtacatgcccataggcacagctac

SEQ ID NO: 3910547 - DNA, 25 bp, Homo sapien
agatgtttttagacctcacatggat

SEQ ID NO: 3910548 - DNA, 25 bp, Homo sapien
tagatgtttttagacctcacatgga

SEQ ID NO: 3910549 - DNA, 25 bp, Homo sapien
atagatgtttttagacctcacatgg

SEQ ID NO: 3910550 - DNA, 25 bp, Homo sapien
aaaacacttagctaggcatggttgt

SEQ ID NO: 3910551 - DNA, 25 bp, Homo sapien
acacttagctaggcatggttgtgtg

SEQ ID NO: 3910552 - DNA, 25 bp, Homo sapien
aaacacttagctaggcatggttgtg

SEQ ID NO: 3910553 - DNA, 25 bp, Homo sapien
aacacttagctaggcatggttgtgt

SEQ ID NO: 3910554 - DNA, 25 bp, Homo sapien
ccagaactgggctcagagggatatt

SEQ ID NO: 3910555 - DNA, 25 bp, Homo sapien
tattttagggaaatggcctattgcc

SEQ ID NO: 3910556 - DNA, 25 bp, Homo sapien
gctgattcctctcaaaggataaaag

SEQ ID NO: 3910557 - DNA, 25 bp, Homo sapien
aaggcactatttagacaattggcag

SEQ ID NO: 3910558 - DNA, 25 bp, Homo sapien
tagatgtacctatcctgcacccaaa

SEQ ID NO: 3910559 - DNA, 25 bp, Homo sapien
tattgtagtaatgcatggctgaagc

SEQ ID NO: 3910560 - DNA, 25 bp, Homo sapien
aatgaatttaatcgggcccttggtg

SEQ ID NO: 3910561 - DNA, 25 bp, Homo sapien
ggaacaggcctcctatctttagtca

SEQ ID NO: 3910562 - DNA, 25 bp, Homo sapien
aatgtcagatagagctagaagtcag

SEQ ID NO: 3910563 - DNA, 25 bp, Homo sapien
tgaatgggaaacaggagtcagagct

SEQ ID NO: 3910564 - DNA, 25 bp, Homo sapien
agctgacaggaaaacttagagtggc

SEQ ID NO: 3910565 - DNA, 25 bp, Homo sapien
gctagttccataaaccagctcttta

SEQ ID NO: 3910566 - DNA, 25 bp, Homo sapien
gaggaagatgcaacccgacacatag

SEQ ID NO: 3910567 - DNA, 25 bp, Homo sapien
taatgactgtgccttaactgcccag

SEQ ID NO: 3910568 - DNA, 25 bp, Homo sapien
gatgaacctcgcctccatagcgatg

SEQ ID NO: 3910569 - DNA, 25 bp, Homo sapien
caaaccttgcaagtagagatgtcac

SEQ ID NO: 3910570 - DNA, 25 bp, Homo sapien
gctgcacctggtgttgtataaatcc

SEQ ID NO: 3910571 - DNA, 25 bp, Homo sapien
accgtgacatccctagagaactgca

SEQ ID NO: 3910572 - DNA, 25 bp, Homo sapien
gcactgtgacatccctagtcttaca

SEQ ID NO: 3910573 - DNA, 25 bp, Homo sapien
tagtcttacactaaaccactgtgat

SEQ ID NO: 3910574 - DNA, 25 bp, Homo sapien
ccaatcactttacataaccaagcat

SEQ ID NO: 3910575 - DNA, 25 bp, Homo sapien
cacatcagcaagttaatacataaag

SEQ ID NO: 3910576 - DNA, 25 bp, Homo sapien
ttcatcgttgtcacactattgtaaa

SEQ ID NO: 3910577 - DNA, 25 bp, Homo sapien
caattatccattacatttccaatca

SEQ ID NO: 3910578 - DNA, 25 bp, Homo sapien
tgtctcagtacaaaggctacattac

SEQ ID NO: 3910579 - DNA, 25 bp, Homo sapien
gatttcagtgaatcacaatgtctaa

SEQ ID NO: 3910580 - DNA, 25 bp, Homo sapien
ccagatatgaaagtccctcccagaa

SEQ ID NO: 3910581 - DNA, 25 bp, Homo sapien
gaaacaactctattaatgattgaga

SEQ ID NO: 3910582 - DNA, 25 bp, Homo sapien
tcaagtgtcacaccaaggaaaggcc

SEQ ID NO: 3910583 - DNA, 25 bp, Homo sapien
tagccttcaaaaaatcgactagttc

SEQ ID NO: 3910584 - DNA, 25 bp, Homo sapien
cgactagttcaagtgtcacaccaag

SEQ ID NO: 3910585 - DNA, 25 bp, Homo sapien
tgcacataacaacaaatagtcgagg

SEQ ID NO: 3910586 - DNA, 25 bp, Homo sapien
tttcacaatcctggtcagtcgcgca

SEQ ID NO: 3910587 - DNA, 25 bp, Homo sapien
ctctttcacaatcctggtcagtcgc

SEQ ID NO: 3910588 - DNA, 25 bp, Homo sapien
atcctggtcagtcgcgcacaatcaa

SEQ ID NO: 3910589 - DNA, 25 bp, Homo sapien
gtcagtcgcgcacaatcaacacttg

SEQ ID NO: 3910590 - DNA, 25 bp, Homo sapien
taagacagtacaaggacatcacagc

SEQ ID NO: 3910591 - DNA, 25 bp, Homo sapien
taagtgacccgagctaatgattgct

SEQ ID NO: 3910592 - DNA, 25 bp, Homo sapien
tgaatgctagaaaaatgtccacgct

SEQ ID NO: 3910593 - DNA, 25 bp, Homo sapien
gaatcacagacagtagcctgacggc

SEQ ID NO: 3910594 - DNA, 25 bp, Homo sapien
tactgcagacaggtgacgttggcac

SEQ ID NO: 3910595 - DNA, 25 bp, Homo sapien
tgctcgcccagcagtattcacagta

SEQ ID NO: 3910596 - DNA, 25 bp, Homo sapien
cagcggtttgtggaactcccgcccg

SEQ ID NO: 3910597 - DNA, 25 bp, Homo sapien
cggctcgggaatgtatgctcgccca

SEQ ID NO: 3910598 - DNA, 25 bp, Homo sapien
tctagatgtctagtatccaggcttc

SEQ ID NO: 3910599 - DNA, 25 bp, Homo sapien
gaaaagtgggtattagccaggcaac

SEQ ID NO: 3910600 - DNA, 25 bp, Homo sapien
gcaacgtatgtataatgaccctgag

SEQ ID NO: 3910601 - DNA, 25 bp, Homo sapien
taaaaagctcgctctcgttgctgtg

SEQ ID NO: 3910602 - DNA, 25 bp, Homo sapien
ggacacacctcatatggccctactg

SEQ ID NO: 3910603 - DNA, 25 bp, Homo sapien
gaattgtctcacttgatggtcaggc

SEQ ID NO: 3910604 - DNA, 25 bp, Homo sapien
tggtcaggcattgctgctctgcagg

SEQ ID NO: 3910605 - DNA, 25 bp, Homo sapien
tacacaagaaagttgcaacctgagg

SEQ ID NO: 3910606 - DNA, 25 bp, Homo sapien
tagagtccacagcactcaatagtac

SEQ ID NO: 3910607 - DNA, 25 bp, Homo sapien
caggaagtaagtgacccttaaatgc

SEQ ID NO: 3910608 - DNA, 25 bp, Homo sapien
tcctgaggagatataagacttagcc

SEQ ID NO: 3910609 - DNA, 25 bp, Homo sapien
tagtcaaggtattggtttaaagcca

SEQ ID NO: 3910610 - DNA, 25 bp, Homo sapien
caaacggtccatgatcattgccagt

SEQ ID NO: 3910611 - DNA, 25 bp, Homo sapien
tcagctctgggtccgtatcaatgcc

SEQ ID NO: 3910612 - DNA, 25 bp, Homo sapien
caaaacgagcgctgatggctgcaat

SEQ ID NO: 3910613 - DNA, 25 bp, Homo sapien
tgctgattggagaatgccacgcggc

SEQ ID NO: 3910614 - DNA, 25 bp, Homo sapien
tgtttacttgatagtggacagcacc

SEQ ID NO: 3910615 - DNA, 25 bp, Homo sapien
ttacttgatagtggacagcaccttc

SEQ ID NO: 3910616 - DNA, 25 bp, Homo sapien
attgtttacttgatagtggacagca

SEQ ID NO: 3910617 - DNA, 25 bp, Homo sapien
cagattgtctgaaggtaattgttta

SEQ ID NO: 3910618 - DNA, 25 bp, Homo sapien
tccttttaggctactcacataatat

SEQ ID NO: 3910619 - DNA, 25 bp, Homo sapien
ttttaggctactcacataatataag

SEQ ID NO: 3910620 - DNA, 25 bp, Homo sapien
taggctactcacataatataagtcc

SEQ ID NO: 3910621 - DNA, 25 bp, Homo sapien
tactcacataatataagtccaaaag

SEQ ID NO: 3910622 - DNA, 25 bp, Homo sapien
gaaagtttttccagcctgatcaagg

SEQ ID NO: 3910623 - DNA, 25 bp, Homo sapien
gggcagtcctcccatcagatgccaa

SEQ ID NO: 3910624 - DNA, 25 bp, Homo sapien
caagaaatttgggatcagaggaata

SEQ ID NO: 3910625 - DNA, 25 bp, Homo sapien
ccagcctgatcaaggttgggaatga

SEQ ID NO: 3910626 - DNA, 25 bp, Homo sapien
aactgcccattattaccctgtactg

SEQ ID NO: 3910627 - DNA, 25 bp, Homo sapien
aaagaatatgcgagctttagccaca

SEQ ID NO: 3910628 - DNA, 25 bp, Homo sapien
agcaggaggagaatcaaactgccca

SEQ ID NO: 3910629 - DNA, 25 bp, Homo sapien
tggcaacgtgttgtacttccaggtg

SEQ ID NO: 3910630 - DNA, 25 bp, Homo sapien
tttttcagaatattttttcagattc

SEQ ID NO: 3910631 - DNA, 25 bp, Homo sapien
ctatagggctttttcagaatatttt

SEQ ID NO: 3910632 - DNA, 25 bp, Homo sapien
ttcagaatattttttcagattccta

SEQ ID NO: 3910633 - DNA, 25 bp, Homo sapien
tcagaatattttttcagattcctat

SEQ ID NO: 3910634 - DNA, 25 bp, Homo sapien
cagctcgaaggggtcgtggaactcc

SEQ ID NO: 3910635 - DNA, 25 bp, Homo sapien
actgtcacttaggttccatggtcga

SEQ ID NO: 3910636 - DNA, 25 bp, Homo sapien
aaagtcactgtcacttaggttccat

SEQ ID NO: 3910637 - DNA, 25 bp, Homo sapien
ttaggttccatggtcgaatttgcac

SEQ ID NO: 3910638 - DNA, 25 bp, Homo sapien
cagaaataaactagtttgtggccgg

SEQ ID NO: 3910639 - DNA, 25 bp, Homo sapien
tgcagaaccatcaggactgctctcc

SEQ ID NO: 3910640 - DNA, 25 bp, Homo sapien
gatgagtcagctaaacctaggtctg

SEQ ID NO: 3910641 - DNA, 25 bp, Homo sapien
tggtgatgaactcagacccacccca

SEQ ID NO: 3910642 - DNA, 25 bp, Homo sapien
caagaattcaagaaacaaataaata

SEQ ID NO: 3910643 - DNA, 25 bp, Homo sapien
attcaagaaacaaataaataaatca

SEQ ID NO: 3910644 - DNA, 25 bp, Homo sapien
acgttctggttcacagtaaccagta

SEQ ID NO: 3910645 - DNA, 25 bp, Homo sapien
tactgtgccttgaccacggcaggta

SEQ ID NO: 3910646 - DNA, 25 bp, Homo sapien
ccttgaccacggcaggtactcaaac

SEQ ID NO: 3910647 - DNA, 25 bp, Homo sapien
tctggttcacagtaaccagtactgt

SEQ ID NO: 3910648 - DNA, 25 bp, Homo sapien
ccatcttcttctaggcaggcatcta

SEQ ID NO: 3910649 - DNA, 25 bp, Homo sapien
aagcttgtactgagctttcctcttg

SEQ ID NO: 3910650 - DNA, 25 bp, Homo sapien
gtccttgatggtggggcttgacaca

SEQ ID NO: 3910651 - DNA, 25 bp, Homo sapien
cacacacaggtagagtttcccatct

SEQ ID NO: 3910652 - DNA, 25 bp, Homo sapien
ttccataagatttaccgagtaactg

SEQ ID NO: 3910653 - DNA, 25 bp, Homo sapien
tacagtaggtctagaaaaatggaca

SEQ ID NO: 3910654 - DNA, 25 bp, Homo sapien
taactgatacaagtgggacatatcc

SEQ ID NO: 3910655 - DNA, 25 bp, Homo sapien
aggatttccatagacacagccagtt

SEQ ID NO: 3910656 - DNA, 25 bp, Homo sapien
gataagtggggacaaaatgtgtcac

SEQ ID NO: 3910657 - DNA, 25 bp, Homo sapien
cacaatctctgtggtatgatctcgg

SEQ ID NO: 3910658 - DNA, 25 bp, Homo sapien
tactcactacaaagctgagggagat

SEQ ID NO: 3910659 - DNA, 25 bp, Homo sapien
catttagacaattaactactcacta

SEQ ID NO: 3910660 - DNA, 25 bp, Homo sapien
cagccatgtagttgcaagagagaga

SEQ ID NO: 3910661 - DNA, 25 bp, Homo sapien
caccaggtgccagggaatcttaaaa

SEQ ID NO: 3910662 - DNA, 25 bp, Homo sapien
aaggcaccaaattgaatgggcagcc

SEQ ID NO: 3910663 - DNA, 25 bp, Homo sapien
ggaccaagagctgttttctgggctt

SEQ ID NO: 3910664 - DNA, 25 bp, Homo sapien
ctcttattccttgcctcaagaaggc

SEQ ID NO: 3910665 - DNA, 25 bp, Homo sapien
ctttctcttattccttgcctcaaga

SEQ ID NO: 3910666 - DNA, 25 bp, Homo sapien
cctggtgatagggaatgcccagtga

SEQ ID NO: 3910667 - DNA, 25 bp, Homo sapien
cttattccttgcctcaagaaggcct

SEQ ID NO: 3910668 - DNA, 25 bp, Homo sapien
tgggcatccaaagaaaaggcggttg

SEQ ID NO: 3910669 - DNA, 25 bp, Homo sapien
cttcaacatcaaatccagttttgca

SEQ ID NO: 3910670 - DNA, 25 bp, Homo sapien
ccagttttgcattgaccttgggcat

SEQ ID NO: 3910671 - DNA, 25 bp, Homo sapien
gcggttgtctccctatagcagctga

SEQ ID NO: 3910672 - DNA, 25 bp, Homo sapien
tctggactaggagacagaaggtcta

SEQ ID NO: 3910673 - DNA, 25 bp, Homo sapien
caaggtcaatgtgaggcggaaatcc

SEQ ID NO: 3910674 - DNA, 25 bp, Homo sapien
gaaggtctagattcgggtacaagtc

SEQ ID NO: 3910675 - DNA, 25 bp, Homo sapien
ggtaaattgcacatggtactaggaa

SEQ ID NO: 3910676 - DNA, 25 bp, Homo sapien
cagccatatgaagaacggaggttcc

SEQ ID NO: 3910677 - DNA, 25 bp, Homo sapien
tgaagattccccagctataccagtc

SEQ ID NO: 3910678 - DNA, 25 bp, Homo sapien
ttgatgtgagacctaggaaaaggcc

SEQ ID NO: 3910679 - DNA, 25 bp, Homo sapien
tggtctcttcccatggcaatggcca

SEQ ID NO: 3910680 - DNA, 25 bp, Homo sapien
gaatggctggttttggattgagacc

SEQ ID NO: 3910681 - DNA, 25 bp, Homo sapien
gattgagaccaaccctagaaggaaa

SEQ ID NO: 3910682 - DNA, 25 bp, Homo sapien
ggagctgtatcctgaaccactgcag

SEQ ID NO: 3910683 - DNA, 25 bp, Homo sapien
ggtacaggcagtctgtcccaaacat

SEQ ID NO: 3910684 - DNA, 25 bp, Homo sapien
caagcacctgaccaaggaaactgag

SEQ ID NO: 3910685 - DNA, 25 bp, Homo sapien
tgtgggagagaactggtcaaactcg

SEQ ID NO: 3910686 - DNA, 25 bp, Homo sapien
ggcaaggaccaaggacgctaagatt

SEQ ID NO: 3910687 - DNA, 25 bp, Homo sapien
tagcaaagtcttgcagtccagggca

SEQ ID NO: 3910688 - DNA, 25 bp, Homo sapien
aataatgaaaattagcaggaggctc

SEQ ID NO: 3910689 - DNA, 25 bp, Homo sapien
tcggtgccatgaaacaatcagtgtg

SEQ ID NO: 3910690 - DNA, 25 bp, Homo sapien
tcaaaaccctagatctttcctttca

SEQ ID NO: 3910691 - DNA, 25 bp, Homo sapien
ggaggctcatccacaacagacttcc

SEQ ID NO: 3910692 - DNA, 25 bp, Homo sapien
tatctctccaacaggcaagcagtgg

SEQ ID NO: 3910693 - DNA, 25 bp, Homo sapien
caggcaagcagtggaaacattttaa

SEQ ID NO: 3910694 - DNA, 25 bp, Homo sapien
actgtcatgctatctctccaacagg

SEQ ID NO: 3910695 - DNA, 25 bp, Homo sapien
catgctatctctccaacaggcaagc

SEQ ID NO: 3910696 - DNA, 25 bp, Homo sapien
gccagtctactacgagaggtccaaa

SEQ ID NO: 3910697 - DNA, 25 bp, Homo sapien
gaggtccaaacctgcgaaagctggc

SEQ ID NO: 3910698 - DNA, 25 bp, Homo sapien
gctttgtgaggccagtctactacga

SEQ ID NO: 3910699 - DNA, 25 bp, Homo sapien
acctgcgaaagctggcagtgatctc

SEQ ID NO: 3910700 - DNA, 25 bp, Homo sapien
gcgttctactcgttccccattttga

SEQ ID NO: 3910701 - DNA, 25 bp, Homo sapien
cattttgacagcgagtgggagaact

SEQ ID NO: 3910702 - DNA, 25 bp, Homo sapien
tgggagaacttaagccagatgacaa

SEQ ID NO: 3910703 - DNA, 25 bp, Homo sapien
tcaccatggctatcatccaggaagg

SEQ ID NO: 3910704 - DNA, 25 bp, Homo sapien
cttcaaagggaaagagagaagatcg

SEQ ID NO: 3910705 - DNA, 25 bp, Homo sapien
tcaaagggaaagagagaagatcgac

SEQ ID NO: 3910706 - DNA, 25 bp, Homo sapien
ttcaaagggaaagagagaagatcga

SEQ ID NO: 3910707 - DNA, 25 bp, Homo sapien
gactgtccagatgagacatgaggaa

SEQ ID NO: 3910708 - DNA, 25 bp, Homo sapien
tgtcctctaaccaaaatcctaccat

SEQ ID NO: 3910709 - DNA, 25 bp, Homo sapien
tctattacttccaacattttgaact

SEQ ID NO: 3910710 - DNA, 25 bp, Homo sapien
ctatgaccatgttgtcctctaacca

SEQ ID NO: 3910711 - DNA, 25 bp, Homo sapien
gaacgagagcagtgaaagagtgaag

SEQ ID NO: 3910712 - DNA, 25 bp, Homo sapien
gagagcagtgaaagagtgaagaagc

SEQ ID NO: 3910713 - DNA, 25 bp, Homo sapien
acgagagcagtgaaagagtgaagaa

SEQ ID NO: 3910714 - DNA, 25 bp, Homo sapien
aacgagagcagtgaaagagtgaaga

SEQ ID NO: 3910715 - DNA, 25 bp, Homo sapien
agcagctccagggtacctctggccc

SEQ ID NO: 3910716 - DNA, 25 bp, Homo sapien
tctactccaagcctgactcttttca

SEQ ID NO: 3910717 - DNA, 25 bp, Homo sapien
tggcccagcacttctactccaagcc

SEQ ID NO: 3910718 - DNA, 25 bp, Homo sapien
ggcctctgccatcactccagcagct

SEQ ID NO: 3910719 - DNA, 25 bp, Homo sapien
tgtcttataatatctgaaattccct

SEQ ID NO: 3910720 - DNA, 25 bp, Homo sapien
catacaaatacgtgactcttgagat

SEQ ID NO: 3910721 - DNA, 25 bp, Homo sapien
gtatcatacaaatacgtgactcttg

SEQ ID NO: 3910722 - DNA, 25 bp, Homo sapien
cttccccttttaaactagctatctg

SEQ ID NO: 3910723 - DNA, 25 bp, Homo sapien
gagatatgtactccaagcctctggt

SEQ ID NO: 3910724 - DNA, 25 bp, Homo sapien
gctgatgttcaagttatcccctgct

SEQ ID NO: 3910725 - DNA, 25 bp, Homo sapien
tgtgtccaggagtttcaccgcctgt

SEQ ID NO: 3910726 - DNA, 25 bp, Homo sapien
ttcattaaggcagcatagatcgtcc

SEQ ID NO: 3910727 - DNA, 25 bp, Homo sapien
ccaggtttagtctggctctaaagca

SEQ ID NO: 3910728 - DNA, 25 bp, Homo sapien
gatgactggcccaaagttatacagc

SEQ ID NO: 3910729 - DNA, 25 bp, Homo sapien
gtacttgtacgtcttctaatcccca

SEQ ID NO: 3910730 - DNA, 25 bp, Homo sapien
tcaagatatgacagttcaacacctt

SEQ ID NO: 3910731 - DNA, 25 bp, Homo sapien
tactttattgttgcctagcacagtg

SEQ ID NO: 3910732 - DNA, 25 bp, Homo sapien
aagtgcacagtagcattatgtctta

SEQ ID NO: 3910733 - DNA, 25 bp, Homo sapien
gtagtctattaagtgcacagtagca

SEQ ID NO: 3910734 - DNA, 25 bp, Homo sapien
aaatactttattgttgcctagcaca

SEQ ID NO: 3910735 - DNA, 25 bp, Homo sapien
tccatgaggaatggaactgacctct

SEQ ID NO: 3910736 - DNA, 25 bp, Homo sapien
tgcctaggttcatcagaggaagcac

SEQ ID NO: 3910737 - DNA, 25 bp, Homo sapien
cctccatgtggattgttgctaactg

SEQ ID NO: 3910738 - DNA, 25 bp, Homo sapien
gacctcgtccaatgaatcacaaaag

SEQ ID NO: 3910739 - DNA, 25 bp, Homo sapien
gaaacctacaggtatcttaagcaaa

SEQ ID NO: 3910740 - DNA, 25 bp, Homo sapien
taggtacttttgtggattggtcaga

SEQ ID NO: 3910741 - DNA, 25 bp, Homo sapien
tatgaagcatgatacagtgaagcac

SEQ ID NO: 3910742 - DNA, 25 bp, Homo sapien
tatatcctgtattctcaccaactga

SEQ ID NO: 3910743 - DNA, 25 bp, Homo sapien
gaaacaataactgatgaaagaaaga

SEQ ID NO: 3910744 - DNA, 25 bp, Homo sapien
aaaagagaaagatggagaatgaaag

SEQ ID NO: 3910745 - DNA, 25 bp, Homo sapien
caataactgatgaaagaaagagaaa

SEQ ID NO: 3910746 - DNA, 25 bp, Homo sapien
taaatgaaacaataactgatgaaag

SEQ ID NO: 3910747 - DNA, 25 bp, Homo sapien
tcattacacatgacttctccaagat

SEQ ID NO: 3910748 - DNA, 25 bp, Homo sapien
cttctccaagatctaagccctcaat

SEQ ID NO: 3910749 - DNA, 25 bp, Homo sapien
catcattacacatgacttctccaag

SEQ ID NO: 3910750 - DNA, 25 bp, Homo sapien
gacttctccaagatctaagccctca

SEQ ID NO: 3910751 - DNA, 25 bp, Homo sapien
tcaagcaactttccgatatttatct

SEQ ID NO: 3910752 - DNA, 25 bp, Homo sapien
ccgatatttatctgttttcccaagc

SEQ ID NO: 3910753 - DNA, 25 bp, Homo sapien
tttccgatatttatctgttttccca

SEQ ID NO: 3910754 - DNA, 25 bp, Homo sapien
caactttccgatatttatctgtttt

SEQ ID NO: 3910755 - DNA, 25 bp, Homo sapien
gaatcatggaggcaccagtatcctt

SEQ ID NO: 3910756 - DNA, 25 bp, Homo sapien
atgtgatgaatcatggaggcaccag

SEQ ID NO: 3910757 - DNA, 25 bp, Homo sapien
gctgattttgaacattaatttgaac

SEQ ID NO: 3910758 - DNA, 25 bp, Homo sapien
ccaggcatgctgattttgaacatta

SEQ ID NO: 3910759 - DNA, 25 bp, Homo sapien
ttctatattctgtaatacttgagga

SEQ ID NO: 3910760 - DNA, 25 bp, Homo sapien
tctgtaatacttgaggacctaatat

SEQ ID NO: 3910761 - DNA, 25 bp, Homo sapien
tatattctgtaatacttgaggacct

SEQ ID NO: 3910762 - DNA, 25 bp, Homo sapien
tattctgtaatacttgaggacctaa

SEQ ID NO: 3910763 - DNA, 25 bp, Homo sapien
tggcctgccaattcttactattaat

SEQ ID NO: 3910764 - DNA, 25 bp, Homo sapien
gccaattcttactattaatagattc

SEQ ID NO: 3910765 - DNA, 25 bp, Homo sapien
gcctgccaattcttactattaatag

SEQ ID NO: 3910766 - DNA, 25 bp, Homo sapien
ctgccaattcttactattaatagat

SEQ ID NO: 3910767 - DNA, 25 bp, Homo sapien
tatctgttcctggatgatggaaatt

SEQ ID NO: 3910768 - DNA, 25 bp, Homo sapien
tgttaagtgccataatattatctgt

SEQ ID NO: 3910769 - DNA, 25 bp, Homo sapien
tcctggatgatggaaatttatcccc

SEQ ID NO: 3910770 - DNA, 25 bp, Homo sapien
aatattatctgttcctggatgatgg

SEQ ID NO: 3910771 - DNA, 25 bp, Homo sapien
tgggccactgggagggtagtgttta

SEQ ID NO: 3910772 - DNA, 25 bp, Homo sapien
cattatatcagcgaaactcattggt

SEQ ID NO: 3910773 - DNA, 25 bp, Homo sapien
tcctccacattatatcagcgaaact

SEQ ID NO: 3910774 - DNA, 25 bp, Homo sapien
gcgaaactcattggtgggccactgg

SEQ ID NO: 3910775 - DNA, 25 bp, Homo sapien
tatcatatccattaaggagttctcc

SEQ ID NO: 3910776 - DNA, 25 bp, Homo sapien
cagaggttcatgatcagtccttatc

SEQ ID NO: 3910777 - DNA, 25 bp, Homo sapien
aaaagtatcatagggcctactccgg

SEQ ID NO: 3910778 - DNA, 25 bp, Homo sapien
ccaacgagtgcaagttaaaagtatc

SEQ ID NO: 3910779 - DNA, 25 bp, Homo sapien
gataaacatgactcaacttgaagca

SEQ ID NO: 3910780 - DNA, 25 bp, Homo sapien
aaattagataaacatgactcaactt

SEQ ID NO: 3910781 - DNA, 25 bp, Homo sapien
tagataaacatgactcaacttgaag

SEQ ID NO: 3910782 - DNA, 25 bp, Homo sapien
taaacatgactcaacttgaagcaca

SEQ ID NO: 3910783 - DNA, 25 bp, Homo sapien
cggccgctgcgatgaccaaaataaa

SEQ ID NO: 3910784 - DNA, 25 bp, Homo sapien
gaggctcaggcggaggtgtgttccg

SEQ ID NO: 3910785 - DNA, 25 bp, Homo sapien
agatcccgaagggcccgaggctcag

SEQ ID NO: 3910786 - DNA, 25 bp, Homo sapien
taggtttcagcggccgctgcgatga

SEQ ID NO: 3910787 - DNA, 25 bp, Homo sapien
ggagctgctggtcaaccagaacccc

SEQ ID NO: 3910788 - DNA, 25 bp, Homo sapien
aaccccatcgcgcagctcctggctt

SEQ ID NO: 3910789 - DNA, 25 bp, Homo sapien
gagctgctggtcaaccagaacccca

SEQ ID NO: 3910790 - DNA, 25 bp, Homo sapien
cttctcgccgcctcaagcggaagct

SEQ ID NO: 3910791 - DNA, 25 bp, Homo sapien
ttaggtgtgaggaccgaaatctgcc

SEQ ID NO: 3910792 - DNA, 25 bp, Homo sapien
tcatggttttggcaggagacacact

SEQ ID NO: 3910793 - DNA, 25 bp, Homo sapien
tatatcccctctaagacggacctgg

SEQ ID NO: 3910794 - DNA, 25 bp, Homo sapien
cactgcccattgaggtatactgcca

SEQ ID NO: 3910795 - DNA, 25 bp, Homo sapien
caaagttcagcaggaattctctcag

SEQ ID NO: 3910796 - DNA, 25 bp, Homo sapien
tcaaagttcagcaggaattctctca

SEQ ID NO: 3910797 - DNA, 25 bp, Homo sapien
aaagttcagcaggaattctctcagc

SEQ ID NO: 3910798 - DNA, 25 bp, Homo sapien
aagttcagcaggaattctctcagct

SEQ ID NO: 3910799 - DNA, 25 bp, Homo sapien
gctaggttggtctctttggccaggt

SEQ ID NO: 3910800 - DNA, 25 bp, Homo sapien
tgcccctgattgttgcttaaatctg

SEQ ID NO: 3910801 - DNA, 25 bp, Homo sapien
cctgattgttgcttaaatctgtccc

SEQ ID NO: 3910802 - DNA, 25 bp, Homo sapien
ccaccgtgcccctgattgttgctta

SEQ ID NO: 3910803 - DNA, 25 bp, Homo sapien
acagctgagtatggtagcacatgct

SEQ ID NO: 3910804 - DNA, 25 bp, Homo sapien
tgcccactcacctctaaataaagta

SEQ ID NO: 3910805 - DNA, 25 bp, Homo sapien
taccccattttctgatctgcctgtc

SEQ ID NO: 3910806 - DNA, 25 bp, Homo sapien
tatgatgcccaacgatgttcatgac

SEQ ID NO: 3910807 - DNA, 25 bp, Homo sapien
agggaggagacctgcaggaggggcc

SEQ ID NO: 3910808 - DNA, 25 bp, Homo sapien
ctgggcagagtgggggctcagggag

SEQ ID NO: 3910809 - DNA, 25 bp, Homo sapien
gctcagggaggagacctgcaggagg

SEQ ID NO: 3910810 - DNA, 25 bp, Homo sapien
tgggcagagtgggggctcagggagg

SEQ ID NO: 3910811 - DNA, 25 bp, Homo sapien
agacaggctctcaccatgtttgcca

SEQ ID NO: 3910812 - DNA, 25 bp, Homo sapien
cctcaggtgatctgcccatcttggc

SEQ ID NO: 3910813 - DNA, 25 bp, Homo sapien
tgacctcaggtgatctgcccatctt

SEQ ID NO: 3910814 - DNA, 25 bp, Homo sapien
tgccagcctggtctcaaactcctga

SEQ ID NO: 3910815 - DNA, 25 bp, Homo sapien
ccaccattagtgtgacatgtctata

SEQ ID NO: 3910816 - DNA, 25 bp, Homo sapien
gatagtcacacatctccaccattag

SEQ ID NO: 3910817 - DNA, 25 bp, Homo sapien
tatatactccctagtcttcggacca

SEQ ID NO: 3910818 - DNA, 25 bp, Homo sapien
tggtgagtcagccataagcacaagc

SEQ ID NO: 3910819 - DNA, 25 bp, Homo sapien
tcatgaatgggagccactccaaaca

SEQ ID NO: 3910820 - DNA, 25 bp, Homo sapien
gagtcatgtccttctcaataacctc

SEQ ID NO: 3910821 - DNA, 25 bp, Homo sapien
ctagagagtcatgtccttctcaata

SEQ ID NO: 3910822 - DNA, 25 bp, Homo sapien
tcttccttcatgaatgggagccact

SEQ ID NO: 3910823 - DNA, 25 bp, Homo sapien
acgcctttccaacccaagatgccca

SEQ ID NO: 3910824 - DNA, 25 bp, Homo sapien
ccaggacactgccaattgctatggc

SEQ ID NO: 3910825 - DNA, 25 bp, Homo sapien
gcactacgcctttccaacccaagat

SEQ ID NO: 3910826 - DNA, 25 bp, Homo sapien
cactgccaattgctatggctgtgga

SEQ ID NO: 3910827 - DNA, 25 bp, Homo sapien
gattctagcaccttagcgagacata

SEQ ID NO: 3910828 - DNA, 25 bp, Homo sapien
taactgagcatacgcaaccgtctga

SEQ ID NO: 3910829 - DNA, 25 bp, Homo sapien
cgtctgaaatagcaccactcaaggg

SEQ ID NO: 3910830 - DNA, 25 bp, Homo sapien
gagagggttgcccttagaatttcca

SEQ ID NO: 3910831 - DNA, 25 bp, Homo sapien
cagattgttaccattatcggtccgg

SEQ ID NO: 3910832 - DNA, 25 bp, Homo sapien
cgtgttccagctggacgaggccgac

SEQ ID NO: 3910833 - DNA, 25 bp, Homo sapien
gaaagcgttatcctccatccaggac

SEQ ID NO: 3910834 - DNA, 25 bp, Homo sapien
cattcacgctttggtgcgtgttcca

SEQ ID NO: 3910835 - DNA, 25 bp, Homo sapien
gggctggtggccgtacgccgcggcg

SEQ ID NO: 3910836 - DNA, 25 bp, Homo sapien
ctgggtctgcgccaggccgatctgc

SEQ ID NO: 3910837 - DNA, 25 bp, Homo sapien
gctcctctgcgcgtagggcgcctgg

SEQ ID NO: 3910838 - DNA, 25 bp, Homo sapien
ccgatctgcggggagaaagtgcctc

SEQ ID NO: 3910839 - DNA, 25 bp, Homo sapien
actgcgctgttttcctccggcttgg

SEQ ID NO: 3910840 - DNA, 25 bp, Homo sapien
tctgcatcttgtccgggccgttggg

SEQ ID NO: 3910841 - DNA, 25 bp, Homo sapien
aagcctggcaggagcggtgattcca

SEQ ID NO: 3910842 - DNA, 25 bp, Homo sapien
aagaagctgtcctctaccgcgttgg

SEQ ID NO: 3910843 - DNA, 25 bp, Homo sapien
ggttttgcttttgtccatcagtaaa

SEQ ID NO: 3910844 - DNA, 25 bp, Homo sapien
gttttgcttttgtccatcagtaaat

SEQ ID NO: 3910845 - DNA, 25 bp, Homo sapien
ttttgcttttgtccatcagtaaatc

SEQ ID NO: 3910846 - DNA, 25 bp, Homo sapien
gggttttgcttttgtccatcagtaa

SEQ ID NO: 3910847 - DNA, 25 bp, Homo sapien
taatcactcaaaacccggagactgc

SEQ ID NO: 3910848 - DNA, 25 bp, Homo sapien
tcaggacacttgtgaaaaggcattc

SEQ ID NO: 3910849 - DNA, 25 bp, Homo sapien
tacagtgctgagaccctaaaaacaa

SEQ ID NO: 3910850 - DNA, 25 bp, Homo sapien
ggagactgccatacatgtagttagc

SEQ ID NO: 3910851 - DNA, 25 bp, Homo sapien
tacagtatttattttcttctttcag

SEQ ID NO: 3910852 - DNA, 25 bp, Homo sapien
aagtatacagtatttattttcttct

SEQ ID NO: 3910853 - DNA, 25 bp, Homo sapien
atcgataaaatttaaaagtatacag

SEQ ID NO: 3910854 - DNA, 25 bp, Homo sapien
ttgagtgtccagtttttaagaatcg

SEQ ID NO: 3910855 - DNA, 25 bp, Homo sapien
tctagtttccttgagacctagctca

SEQ ID NO: 3910856 - DNA, 25 bp, Homo sapien
taggtagtaatgtctccaatttccc

SEQ ID NO: 3910857 - DNA, 25 bp, Homo sapien
cccattcctggcaggctatttgaaa

SEQ ID NO: 3910858 - DNA, 25 bp, Homo sapien
caggctagtttcaaatgccgggcct

SEQ ID NO: 3910859 - DNA, 25 bp, Homo sapien
tgaacaaagaacctaaccgtggtgc

SEQ ID NO: 3910860 - DNA, 25 bp, Homo sapien
ccactgtttaggtctccggatgaaa

SEQ ID NO: 3910861 - DNA, 25 bp, Homo sapien
cagtctattaacaccctgaacaaag

SEQ ID NO: 3910862 - DNA, 25 bp, Homo sapien
acttctgacctatggaactgttagt

SEQ ID NO: 3910863 - DNA, 25 bp, Homo sapien
aaatagtagaacaatgagattgatc

SEQ ID NO: 3910864 - DNA, 25 bp, Homo sapien
cagaaatagtagaacaatgagattg

SEQ ID NO: 3910865 - DNA, 25 bp, Homo sapien
gcagaaatagtagaacaatgagatt

SEQ ID NO: 3910866 - DNA, 25 bp, Homo sapien
gggggcagaaatagtagaacaatga

SEQ ID NO: 3910867 - DNA, 25 bp, Homo sapien
taggagataaacgaaccagacttgg

SEQ ID NO: 3910868 - DNA, 25 bp, Homo sapien
tcaaggtaagagatgctggtcaact

SEQ ID NO: 3910869 - DNA, 25 bp, Homo sapien
tcagtcggaaagaggtgaaggtcaa

SEQ ID NO: 3910870 - DNA, 25 bp, Homo sapien
gaggccaattgccaaatcagtcgga

SEQ ID NO: 3910871 - DNA, 25 bp, Homo sapien
tccttcacaagtggatatccagctg

SEQ ID NO: 3910872 - DNA, 25 bp, Homo sapien
tccctggtcatgtagatttatgcct

SEQ ID NO: 3910873 - DNA, 25 bp, Homo sapien
tctgatgtgggtagggatgcaacac

SEQ ID NO: 3910874 - DNA, 25 bp, Homo sapien
taagaaaacacagtctaatccctgg

SEQ ID NO: 3910875 - DNA, 25 bp, Homo sapien
gaggatgtaagaggacatattcttg

SEQ ID NO: 3910876 - DNA, 25 bp, Homo sapien
gactaattgacctggctagaacctc

SEQ ID NO: 3910877 - DNA, 25 bp, Homo sapien
gatgtaagaggacatattcttgcct

SEQ ID NO: 3910878 - DNA, 25 bp, Homo sapien
ttgactaattgacctggctagaacc

SEQ ID NO: 3910879 - DNA, 25 bp, Homo sapien
tgtttgagttctgggtaactcacaa

SEQ ID NO: 3910880 - DNA, 25 bp, Homo sapien
gcttcagggcccaaaatgtttaata

SEQ ID NO: 3910881 - DNA, 25 bp, Homo sapien
gatcagtgaacaccctggcttttgc

SEQ ID NO: 3910882 - DNA, 25 bp, Homo sapien
ttggaaataacagatcagtgaacac

SEQ ID NO: 3910883 - DNA, 25 bp, Homo sapien
tccatttggagactgtcggcgagcc

SEQ ID NO: 3910884 - DNA, 25 bp, Homo sapien
agcaagagctgtttattcaccaacg

SEQ ID NO: 3910885 - DNA, 25 bp, Homo sapien
ggaccctgataagaaatggcccttc

SEQ ID NO: 3910886 - DNA, 25 bp, Homo sapien
ggcttcggaaggagtttctgccacc

SEQ ID NO: 3910887 - DNA, 25 bp, Homo sapien
ggcaggcgcggaggcgttggtccgg

SEQ ID NO: 3910888 - DNA, 25 bp, Homo sapien
agtggagcggcgcatcctgctgctt

SEQ ID NO: 3910889 - DNA, 25 bp, Homo sapien
gcttcctggaaagcggcccgaaaga

SEQ ID NO: 3910890 - DNA, 25 bp, Homo sapien
cttgttgctaccgacagtggagcgg

SEQ ID NO: 3910891 - DNA, 25 bp, Homo sapien
gctccgcggaagatgccggaccaag

SEQ ID NO: 3910892 - DNA, 25 bp, Homo sapien
ctgggtgacgggttcgcggctgccg

SEQ ID NO: 3910893 - DNA, 25 bp, Homo sapien
gctagcggagctgccccgggaagct

SEQ ID NO: 3910894 - DNA, 25 bp, Homo sapien
tcagtgctattgtccctgggcctgg

SEQ ID NO: 3910895 - DNA, 25 bp, Homo sapien
ctcctgttctccaccaatcctacct

SEQ ID NO: 3910896 - DNA, 25 bp, Homo sapien
actcctgttctccaccaatcctacc

SEQ ID NO: 3910897 - DNA, 25 bp, Homo sapien
cacttgttcatcacatattgttgat

SEQ ID NO: 3910898 - DNA, 25 bp, Homo sapien
cttgttcatcacatattgttgattt

SEQ ID NO: 3910899 - DNA, 25 bp, Homo sapien
tccacttgttcatcacatattgttg

SEQ ID NO: 3910900 - DNA, 25 bp, Homo sapien
ccacttgttcatcacatattgttga

SEQ ID NO: 3910901 - DNA, 25 bp, Homo sapien
ggagcgaagggtctcattgaattga

SEQ ID NO: 3910902 - DNA, 25 bp, Homo sapien
tggaaatcgatgtcaaaacttgtgt

SEQ ID NO: 3910903 - DNA, 25 bp, Homo sapien
taagcaccccagacttgatacttct

SEQ ID NO: 3910904 - DNA, 25 bp, Homo sapien
tgaactgtatttgccctgatggaaa

SEQ ID NO: 3910905 - DNA, 25 bp, Homo sapien
ggtactatgaggatttttctcactg

SEQ ID NO: 3910906 - DNA, 25 bp, Homo sapien
agaatcagcaactcaaggtactatg

SEQ ID NO: 3910907 - DNA, 25 bp, Homo sapien
gatatgttaatatgaggaaatgtaa

SEQ ID NO: 3910908 - DNA, 25 bp, Homo sapien
ctaaataagaggatatgttaatatg

SEQ ID NO: 3910909 - DNA, 25 bp, Homo sapien
tgaagatttgactaacagtgagcct

SEQ ID NO: 3910910 - DNA, 25 bp, Homo sapien
agaacactactacagttctgaaggg

SEQ ID NO: 3910911 - DNA, 25 bp, Homo sapien
tgtttccccttactgataagcggcc

SEQ ID NO: 3910912 - DNA, 25 bp, Homo sapien
gcggccactttaggagtgtagcaaa

SEQ ID NO: 3910913 - DNA, 25 bp, Homo sapien
taattgctaagtaatctgtttgcac

SEQ ID NO: 3910914 - DNA, 25 bp, Homo sapien
gtttgcactctaggaaaagtaaatg

SEQ ID NO: 3910915 - DNA, 25 bp, Homo sapien
aaaggaacagcagcacttaggctca

SEQ ID NO: 3910916 - DNA, 25 bp, Homo sapien
tcaaaatcgcccctacaaagcagta

SEQ ID NO: 3910917 - DNA, 25 bp, Homo sapien
tccccctctgtgagaaacacccaag

SEQ ID NO: 3910918 - DNA, 25 bp, Homo sapien
caaatccccctctgtgagaaacacc

SEQ ID NO: 3910919 - DNA, 25 bp, Homo sapien
cccctctgtgagaaacacccaagaa

SEQ ID NO: 3910920 - DNA, 25 bp, Homo sapien
aatccccctctgtgagaaacaccca

SEQ ID NO: 3910921 - DNA, 25 bp, Homo sapien
tgttcaaaccacacttcggaaggat

SEQ ID NO: 3910922 - DNA, 25 bp, Homo sapien
cacacttcggaaggatccattcata

SEQ ID NO: 3910923 - DNA, 25 bp, Homo sapien
gaaggatccattcataatacatcac

SEQ ID NO: 3910924 - DNA, 25 bp, Homo sapien
ctaggtgttcaaaccacacttcgga

SEQ ID NO: 3910925 - DNA, 25 bp, Homo sapien
tcctgggagtccagtatcctcccca

SEQ ID NO: 3910926 - DNA, 25 bp, Homo sapien
tgctcctgggagtccagtatcctcc

SEQ ID NO: 3910927 - DNA, 25 bp, Homo sapien
atctgctcctgggagtccagtatcc

SEQ ID NO: 3910928 - DNA, 25 bp, Homo sapien
tgggagtccagtatcctccccaggg

SEQ ID NO: 3910929 - DNA, 25 bp, Homo sapien
aggttgcatggtaaggactggctcc

SEQ ID NO: 3910930 - DNA, 25 bp, Homo sapien
tggcataaggttgcatggtaaggac

SEQ ID NO: 3910931 - DNA, 25 bp, Homo sapien
caccaagtgcaggtgagaggagagc

SEQ ID NO: 3910932 - DNA, 25 bp, Homo sapien
ttgcatggtaaggactggctcctcc

SEQ ID NO: 3910933 - DNA, 25 bp, Homo sapien
ttcatcccaggaggtacagctcagg

SEQ ID NO: 3910934 - DNA, 25 bp, Homo sapien
aaattcgcctttcgcaacaagctgg

SEQ ID NO: 3910935 - DNA, 25 bp, Homo sapien
caaactaagttcatggtatccgtgg

SEQ ID NO: 3910936 - DNA, 25 bp, Homo sapien
caagcacgtatgtaagtccctggct

SEQ ID NO: 3910937 - DNA, 25 bp, Homo sapien
gtccttcgcctgcagtatttaaacg

SEQ ID NO: 3910938 - DNA, 25 bp, Homo sapien
aataagaacccgtccttcgcctgca

SEQ ID NO: 3910939 - DNA, 25 bp, Homo sapien
cgattgtcggtggaagttcacgtcg

SEQ ID NO: 3910940 - DNA, 25 bp, Homo sapien
gcctgcagtatttaaacgattgtcg

SEQ ID NO: 3910941 - DNA, 25 bp, Homo sapien
gacaaggtgttaacttttctcatat

SEQ ID NO: 3910942 - DNA, 25 bp, Homo sapien
tctcatattgctagcaactccttga

SEQ ID NO: 3910943 - DNA, 25 bp, Homo sapien
tgcaagttgtaagagggcctttgga

SEQ ID NO: 3910944 - DNA, 25 bp, Homo sapien
tacagagattgcctcgggacgctga

SEQ ID NO: 3910945 - DNA, 25 bp, Homo sapien
ataggctactgaggggaagagttcc

SEQ ID NO: 3910946 - DNA, 25 bp, Homo sapien
taaacaaacaatacgataccaaaga

SEQ ID NO: 3910947 - DNA, 25 bp, Homo sapien
acaatacgataccaaagagccgccg

SEQ ID NO: 3910948 - DNA, 25 bp, Homo sapien
acactgagtacgtgaccccttccta

SEQ ID NO: 3910949 - DNA, 25 bp, Homo sapien
ctgaccaggtgggtgagtgatccac

SEQ ID NO: 3910950 - DNA, 25 bp, Homo sapien
tcctgaccaggtgggtgagtgatcc

SEQ ID NO: 3910951 - DNA, 25 bp, Homo sapien
aactcctgaccaggtgggtgagtga

SEQ ID NO: 3910952 - DNA, 25 bp, Homo sapien
tgaccaggtgggtgagtgatccacc

SEQ ID NO: 3910953 - DNA, 25 bp, Homo sapien
tgagaacaatgctgactgtgcgggc

SEQ ID NO: 3910954 - DNA, 25 bp, Homo sapien
ctgccacatcgtccctgagaacaat

SEQ ID NO: 3910955 - DNA, 25 bp, Homo sapien
gaatgagaggacgactgtcccaact

SEQ ID NO: 3910956 - DNA, 25 bp, Homo sapien
tgtgcgggctggaccactgtcctat

SEQ ID NO: 3910957 - DNA, 25 bp, Homo sapien
aaggagtccaacatcaaatactgag

SEQ ID NO: 3910958 - DNA, 25 bp, Homo sapien
cagtgacaatactcacagcaaggag

SEQ ID NO: 3910959 - DNA, 25 bp, Homo sapien
caaaaatcattgttacccagaaaca

SEQ ID NO: 3910960 - DNA, 25 bp, Homo sapien
gaaatctggtcaaactgggatgttg

SEQ ID NO: 3910961 - DNA, 25 bp, Homo sapien
actagtacagtggtggatcggaaca

SEQ ID NO: 3910962 - DNA, 25 bp, Homo sapien
tagtatgcctgagtgatcaacagca

SEQ ID NO: 3910963 - DNA, 25 bp, Homo sapien
gctgacgcataccaaacaattgcag

SEQ ID NO: 3910964 - DNA, 25 bp, Homo sapien
agcagctctagatccaacctggaaa

SEQ ID NO: 3910965 - DNA, 25 bp, Homo sapien
gataaagacaggcttcatataagga

SEQ ID NO: 3910966 - DNA, 25 bp, Homo sapien
taaagacaggcttcatataaggagg

SEQ ID NO: 3910967 - DNA, 25 bp, Homo sapien
aagacaggcttcatataaggaggtt

SEQ ID NO: 3910968 - DNA, 25 bp, Homo sapien
aaagacaggcttcatataaggaggt

SEQ ID NO: 3910969 - DNA, 25 bp, Homo sapien
tgacagtagaaatggagccccgctt

SEQ ID NO: 3910970 - DNA, 25 bp, Homo sapien
gaagccttctatgtcaagctaggag

SEQ ID NO: 3910971 - DNA, 25 bp, Homo sapien
gaaaagcatgtcacacactcagtag

SEQ ID NO: 3910972 - DNA, 25 bp, Homo sapien
gattagactggtagcaacaagggat

SEQ ID NO: 3910973 - DNA, 25 bp, Homo sapien
ggcagaccacgcttgaattcggtca

SEQ ID NO: 3910974 - DNA, 25 bp, Homo sapien
agtggcagaccacgcttgaattcgg

SEQ ID NO: 3910975 - DNA, 25 bp, Homo sapien
ccacgcttgaattcggtcatgttct

SEQ ID NO: 3910976 - DNA, 25 bp, Homo sapien
gggaaacagtggcagaccacgcttg

SEQ ID NO: 3910977 - DNA, 25 bp, Homo sapien
tgttttggcttgaggccgctctacc

SEQ ID NO: 3910978 - DNA, 25 bp, Homo sapien
ggtcgtgaattggtctgtacaaacc

SEQ ID NO: 3910979 - DNA, 25 bp, Homo sapien
ttttggcggacactgggagcatacc

SEQ ID NO: 3910980 - DNA, 25 bp, Homo sapien
tcagtatgtctggagggtcgtgaat

SEQ ID NO: 3910981 - DNA, 25 bp, Homo sapien
ggcaaggctggtgcttgtgacaaat

SEQ ID NO: 3910982 - DNA, 25 bp, Homo sapien
ttgacatgggaactctccaacaaca

SEQ ID NO: 3910983 - DNA, 25 bp, Homo sapien
ttatgtcattttgacatgggaactc

SEQ ID NO: 3910984 - DNA, 25 bp, Homo sapien
tggcaaggctggtgcttgtgacaaa

SEQ ID NO: 3910985 - DNA, 25 bp, Homo sapien
ccttggagcatctactgccaacatt

SEQ ID NO: 3910986 - DNA, 25 bp, Homo sapien
ggataccttatgtctccttggagca

SEQ ID NO: 3910987 - DNA, 25 bp, Homo sapien
catggacggataccttatgtctcct

SEQ ID NO: 3910988 - DNA, 25 bp, Homo sapien
ctggcaagaacatggacggatacct

SEQ ID NO: 3910989 - DNA, 25 bp, Homo sapien
ctcaaactcctacagctaataagtg

SEQ ID NO: 3910990 - DNA, 25 bp, Homo sapien
aatccaaggagattaaaaaactgct

SEQ ID NO: 3910991 - DNA, 25 bp, Homo sapien
gattaaaaacctagcctagtactca

SEQ ID NO: 3910992 - DNA, 25 bp, Homo sapien
aaactgctcaaactcctacagctaa

SEQ ID NO: 3910993 - DNA, 25 bp, Homo sapien
gggctgcacttggtgatctttagtg

SEQ ID NO: 3910994 - DNA, 25 bp, Homo sapien
ggctgcacttggtgatctttagtgt

SEQ ID NO: 3910995 - DNA, 25 bp, Homo sapien
caatggtctgagcttagtcagggac

SEQ ID NO: 3910996 - DNA, 25 bp, Homo sapien
catgaattacatgggtcacacagtt

SEQ ID NO: 3910997 - DNA, 25 bp, Homo sapien
actgagtcctgcgttatatcaggca

SEQ ID NO: 3910998 - DNA, 25 bp, Homo sapien
catggactctaagacacagcagctt

SEQ ID NO: 3910999 - DNA, 25 bp, Homo sapien
caggtctgcctctattaacatgtag

SEQ ID NO: 3911000 - DNA, 25 bp, Homo sapien
ccaggtctgcctctattaacatgta

SEQ ID NO: 3911001 - DNA, 25 bp, Homo sapien
gtctgcctctattaacatgtagtac

SEQ ID NO: 3911002 - DNA, 25 bp, Homo sapien
gcccaggtctgcctctattaacatg

SEQ ID NO: 3911003 - DNA, 25 bp, Homo sapien
tctgaccaactctggacaatcctca

SEQ ID NO: 3911004 - DNA, 25 bp, Homo sapien
gacagcagaacaccttctccagttt

SEQ ID NO: 3911005 - DNA, 25 bp, Homo sapien
tttcagattgttcccgattttctga

SEQ ID NO: 3911006 - DNA, 25 bp, Homo sapien
gattgttcccgattttctgaccaac

SEQ ID NO: 3911007 - DNA, 25 bp, Homo sapien
ccttcttgcaaactattaatatgtt

SEQ ID NO: 3911008 - DNA, 25 bp, Homo sapien
aaaacaaacaactgcaccttcttgc

SEQ ID NO: 3911009 - DNA, 25 bp, Homo sapien
accttcttgcaaactattaatatgt

SEQ ID NO: 3911010 - DNA, 25 bp, Homo sapien
tctaaaaacaaacaactgcaccttc

SEQ ID NO: 3911011 - DNA, 25 bp, Homo sapien
gcccagccggtgtgaatctcttaaa

SEQ ID NO: 3911012 - DNA, 25 bp, Homo sapien
gaagactttaatggtggtgcctccc

SEQ ID NO: 3911013 - DNA, 25 bp, Homo sapien
gcctaaaaaggtagatctggaagtc

SEQ ID NO: 3911014 - DNA, 25 bp, Homo sapien
cttcctaagtgagcgcaagcatgta

SEQ ID NO: 3911015 - DNA, 25 bp, Homo sapien
ccttggtaagtgtctttaaatatgc

SEQ ID NO: 3911016 - DNA, 25 bp, Homo sapien
cttgtagaatttgatgatatcttcc

SEQ ID NO: 3911017 - DNA, 25 bp, Homo sapien
gatgatatcttccttggtaagtgtc

SEQ ID NO: 3911018 - DNA, 25 bp, Homo sapien
gtctttaaatatgcaacctcagtgt

SEQ ID NO: 3911019 - DNA, 25 bp, Homo sapien
taattaagaaagcttccactctgct

SEQ ID NO: 3911020 - DNA, 25 bp, Homo sapien
tctagtcgacgaattgctaatgcct

SEQ ID NO: 3911021 - DNA, 25 bp, Homo sapien
gatgaatctcaagccctgtatgcca

SEQ ID NO: 3911022 - DNA, 25 bp, Homo sapien
tatgccattagctcgacgtggcccg

SEQ ID NO: 3911023 - DNA, 25 bp, Homo sapien
gttgaagcaaggttccgagataatc

SEQ ID NO: 3911024 - DNA, 25 bp, Homo sapien
cgagataatctgacagaagagctcc

SEQ ID NO: 3911025 - DNA, 25 bp, Homo sapien
tctgtttggtagtatatctcgatgc

SEQ ID NO: 3911026 - DNA, 25 bp, Homo sapien
tgaggtgctttgcatgtctgtttgg

SEQ ID NO: 3911027 - DNA, 25 bp, Homo sapien
gagaggtttggtatgagcatgttca

SEQ ID NO: 3911028 - DNA, 25 bp, Homo sapien
tctataccgaaccagctgacttgga

SEQ ID NO: 3911029 - DNA, 25 bp, Homo sapien
cttctctataccgaaccagctgact

SEQ ID NO: 3911030 - DNA, 25 bp, Homo sapien
aatgagggtgtcttcaaccatctgc

SEQ ID NO: 3911031 - DNA, 25 bp, Homo sapien
gcttcaatgtgcagccgtgacagga

SEQ ID NO: 3911032 - DNA, 25 bp, Homo sapien
tatgaaggccttaaggcgaggaagg

SEQ ID NO: 3911033 - DNA, 25 bp, Homo sapien
aggtatgaaggccttaaggcgagga

SEQ ID NO: 3911034 - DNA, 25 bp, Homo sapien
aatgtgcagccgtgacaggagctga

SEQ ID NO: 3911035 - DNA, 25 bp, Homo sapien
cagccagctttaatagaactacaag

SEQ ID NO: 3911036 - DNA, 25 bp, Homo sapien
tacacagccagctttaatagaacta

SEQ ID NO: 3911037 - DNA, 25 bp, Homo sapien
ccagctttaatagaactacaagtta

SEQ ID NO: 3911038 - DNA, 25 bp, Homo sapien
cacagccagctttaatagaactaca

SEQ ID NO: 3911039 - DNA, 25 bp, Homo sapien
aactcatctttagtccaggccactt

SEQ ID NO: 3911040 - DNA, 25 bp, Homo sapien
tcagcaagcggaggtagtacatggc

SEQ ID NO: 3911041 - DNA, 25 bp, Homo sapien
ctggtgaggctgttcagcccggaaa

SEQ ID NO: 3911042 - DNA, 25 bp, Homo sapien
gcccggaaattgttaagagatcgca

SEQ ID NO: 3911043 - DNA, 25 bp, Homo sapien
aatctcaaaggtagccattttctca

SEQ ID NO: 3911044 - DNA, 25 bp, Homo sapien
atcaatctcaaaggtagccattttc

SEQ ID NO: 3911045 - DNA, 25 bp, Homo sapien
tcaatctcaaaggtagccattttct

SEQ ID NO: 3911046 - DNA, 25 bp, Homo sapien
caatctcaaaggtagccattttctc

SEQ ID NO: 3911047 - DNA, 25 bp, Homo sapien
ttcattcctgatgcaatgccatagc

SEQ ID NO: 3911048 - DNA, 25 bp, Homo sapien
gctcaaacctgagaggcgtgctgca

SEQ ID NO: 3911049 - DNA, 25 bp, Homo sapien
gataaacaggtatgtcatgttgcaa

SEQ ID NO: 3911050 - DNA, 25 bp, Homo sapien
tcatgttgcaatggagaggatcagc

SEQ ID NO: 3911051 - DNA, 25 bp, Homo sapien
tttggagatcatagctcaagcctgc

SEQ ID NO: 3911052 - DNA, 25 bp, Homo sapien
gctgcatatgcatactcgttgagtg

SEQ ID NO: 3911053 - DNA, 25 bp, Homo sapien
aataggccatgttacagtgcaaggg

SEQ ID NO: 3911054 - DNA, 25 bp, Homo sapien
cgttgagtgagtctttgaggagctc

SEQ ID NO: 3911055 - DNA, 25 bp, Homo sapien
caccggttaatatgatttcctgagg

SEQ ID NO: 3911056 - DNA, 25 bp, Homo sapien
cgtgcgcactggtagtagtgaagaa

SEQ ID NO: 3911057 - DNA, 25 bp, Homo sapien
taccccagatggtgtggcagaactg

SEQ ID NO: 3911058 - DNA, 25 bp, Homo sapien
tcaatgtgatatggccttttgagat

SEQ ID NO: 3911059 - DNA, 25 bp, Homo sapien
cttgtagcacagtaaatataactaa

SEQ ID NO: 3911060 - DNA, 25 bp, Homo sapien
aaatagctactgctaaaggcctgag

SEQ ID NO: 3911061 - DNA, 25 bp, Homo sapien
taaaagtttcactctacttgtagca

SEQ ID NO: 3911062 - DNA, 25 bp, Homo sapien
ctgaagaaatagctactgctaaagg

SEQ ID NO: 3911063 - DNA, 25 bp, Homo sapien
ccaaaagccaacaattttatcaaag

SEQ ID NO: 3911064 - DNA, 25 bp, Homo sapien
agctatcgcacccagccaaaagcca

SEQ ID NO: 3911065 - DNA, 25 bp, Homo sapien
tgtgagctatcgcacccagccaaaa

SEQ ID NO: 3911066 - DNA, 25 bp, Homo sapien
gccaaaagccaacaattttatcaaa

SEQ ID NO: 3911067 - DNA, 25 bp, Homo sapien
tcaactgggatacctaaattctggt

SEQ ID NO: 3911068 - DNA, 25 bp, Homo sapien
gagtgtcctaaaatgctacatccag

SEQ ID NO: 3911069 - DNA, 25 bp, Homo sapien
agaggtcggccccacaggcaactat

SEQ ID NO: 3911070 - DNA, 25 bp, Homo sapien
aatccaagttttgggtctcaaagca

SEQ ID NO: 3911071 - DNA, 25 bp, Homo sapien
tgtttgaaccaaagtttgctcatag

SEQ ID NO: 3911072 - DNA, 25 bp, Homo sapien
accaaagtttgctcatagctgtatc

SEQ ID NO: 3911073 - DNA, 25 bp, Homo sapien
ttgaaccaaagtttgctcatagctg

SEQ ID NO: 3911074 - DNA, 25 bp, Homo sapien
gttgagacaagccttcggcaaaaaa

SEQ ID NO: 3911075 - DNA, 25 bp, Homo sapien
ctcaaaattcgtaggaataaattca

SEQ ID NO: 3911076 - DNA, 25 bp, Homo sapien
aatctcaaaattcgtaggaataaat

SEQ ID NO: 3911077 - DNA, 25 bp, Homo sapien
agcagggtatggtgtcgcctctttt

SEQ ID NO: 3911078 - DNA, 25 bp, Homo sapien
gagcagggtatggtgtcgcctcttt

SEQ ID NO: 3911079 - DNA, 25 bp, Homo sapien
cttgatgacttcatccggtatagct

SEQ ID NO: 3911080 - DNA, 25 bp, Homo sapien
catccggtatagcttcttgtttgta

SEQ ID NO: 3911081 - DNA, 25 bp, Homo sapien
tactgggttccataccactcttctg

SEQ ID NO: 3911082 - DNA, 25 bp, Homo sapien
taccactcttctgtgcgatcagttt

SEQ ID NO: 3911083 - DNA, 25 bp, Homo sapien
ctgactacagacatgaaaaggcaat

SEQ ID NO: 3911084 - DNA, 25 bp, Homo sapien
gctgtcgaagctggatggaactcat

SEQ ID NO: 3911085 - DNA, 25 bp, Homo sapien
ggaactcatctggaaacaaaaggtc

SEQ ID NO: 3911086 - DNA, 25 bp, Homo sapien
cagacctggcaataagaaactgaga

SEQ ID NO: 3911087 - DNA, 25 bp, Homo sapien
gagccaccctagtctggtctggcag

SEQ ID NO: 3911088 - DNA, 25 bp, Homo sapien
cagctggcaatattatcccaggctg

SEQ ID NO: 3911089 - DNA, 25 bp, Homo sapien
aatattatcccaggctgttttgcac

SEQ ID NO: 3911090 - DNA, 25 bp, Homo sapien
ccttgagccaccctagtctggtctg

SEQ ID NO: 3911091 - DNA, 25 bp, Homo sapien
cagaatgtagaatagtgattatcag

SEQ ID NO: 3911092 - DNA, 25 bp, Homo sapien
tatcgaaagtagttaaacccataga

SEQ ID NO: 3911093 - DNA, 25 bp, Homo sapien
tgtgtggaactatatctggactctg

SEQ ID NO: 3911094 - DNA, 25 bp, Homo sapien
catatgatgtcaatactaccgtgtc

SEQ ID NO: 3911095 - DNA, 25 bp, Homo sapien
catacacctgtaatcccagctactt

SEQ ID NO: 3911096 - DNA, 25 bp, Homo sapien
aaaggaaaaacagcctggccaacat

SEQ ID NO: 3911097 - DNA, 25 bp, Homo sapien
ggtgaaaccccatctctactgaaaa

SEQ ID NO: 3911098 - DNA, 25 bp, Homo sapien
cacaaaaattagctgggcgtggtgg

SEQ ID NO: 3911099 - DNA, 25 bp, Homo sapien
cagattggagagaactaacatatta

SEQ ID NO: 3911100 - DNA, 25 bp, Homo sapien
aatatcaagtctcctaatgtatgac

SEQ ID NO: 3911101 - DNA, 25 bp, Homo sapien
gtatgactatagtatgcttctccat

SEQ ID NO: 3911102 - DNA, 25 bp, Homo sapien
cattgagtctatgaatcagattgga

SEQ ID NO: 3911103 - DNA, 25 bp, Homo sapien
taagtcaggtctaaattcttccagt

SEQ ID NO: 3911104 - DNA, 25 bp, Homo sapien
tctggtctgagtttatcgagaacca

SEQ ID NO: 3911105 - DNA, 25 bp, Homo sapien
cgagaaccatctctattaagtcagg

SEQ ID NO: 3911106 - DNA, 25 bp, Homo sapien
ccagtaaatattccgctgtgagcac

SEQ ID NO: 3911107 - DNA, 25 bp, Homo sapien
caatcttagatgtatagccccgtgg

SEQ ID NO: 3911108 - DNA, 25 bp, Homo sapien
aatcttagatgtatagccccgtggc

SEQ ID NO: 3911109 - DNA, 25 bp, Homo sapien
tcttagatgtatagccccgtggcct

SEQ ID NO: 3911110 - DNA, 25 bp, Homo sapien
tagatgtatagccccgtggcctctc

SEQ ID NO: 3911111 - DNA, 25 bp, Homo sapien
tacaggatatggctcgatagcctaa

SEQ ID NO: 3911112 - DNA, 25 bp, Homo sapien
gaacagcacccagattaggagttat

SEQ ID NO: 3911113 - DNA, 25 bp, Homo sapien
aattttcagaagcagagattatacc

SEQ ID NO: 3911114 - DNA, 25 bp, Homo sapien
gaaccttgtgagatccaacaattcc

SEQ ID NO: 3911115 - DNA, 25 bp, Homo sapien
cttctgcacgtaacttctgaatgta

SEQ ID NO: 3911116 - DNA, 25 bp, Homo sapien
ttgaggtccttctgcacgtaacttc

SEQ ID NO: 3911117 - DNA, 25 bp, Homo sapien
ggtccttctgcacgtaacttctgaa

SEQ ID NO: 3911118 - DNA, 25 bp, Homo sapien
aacatgtgcaaaattatatcttcaa

SEQ ID NO: 3911119 - DNA, 25 bp, Homo sapien
ataatccttcctcggtcaagtccac

SEQ ID NO: 3911120 - DNA, 25 bp, Homo sapien
cttctgcccaccaacaagagtatta

SEQ ID NO: 3911121 - DNA, 25 bp, Homo sapien
ccaccaacaagagtattaacccagc

SEQ ID NO: 3911122 - DNA, 25 bp, Homo sapien
cggtcaagtccacattaatgataaa

SEQ ID NO: 3911123 - DNA, 25 bp, Homo sapien
aatgaccaggatttgatttgtagta

SEQ ID NO: 3911124 - DNA, 25 bp, Homo sapien
catgcccaatgagatgaccaagata

SEQ ID NO: 3911125 - DNA, 25 bp, Homo sapien
ccaggaccttcatgcccaatgagat

SEQ ID NO: 3911126 - DNA, 25 bp, Homo sapien
agatgaccaagataatgaccaggat

SEQ ID NO: 3911127 - DNA, 25 bp, Homo sapien
gggaaatgtcacatagagattccta

SEQ ID NO: 3911128 - DNA, 25 bp, Homo sapien
atgggaaatgtcacatagagattcc

SEQ ID NO: 3911129 - DNA, 25 bp, Homo sapien
ggaaatgtcacatagagattcctaa

SEQ ID NO: 3911130 - DNA, 25 bp, Homo sapien
tgggaaatgtcacatagagattcct

SEQ ID NO: 3911131 - DNA, 25 bp, Homo sapien
aaagggtgttcaggaaattctggca

SEQ ID NO: 3911132 - DNA, 25 bp, Homo sapien
accagattagtcaagtcatctaaag

SEQ ID NO: 3911133 - DNA, 25 bp, Homo sapien
aattctggcaatggaacatttttgt

SEQ ID NO: 3911134 - DNA, 25 bp, Homo sapien
taccaccagattagtcaagtcatct

SEQ ID NO: 3911135 - DNA, 25 bp, Homo sapien
cagtagctcttgtcttacatcaatg

SEQ ID NO: 3911136 - DNA, 25 bp, Homo sapien
ttggatgaatagtaagcagaatgga

SEQ ID NO: 3911137 - DNA, 25 bp, Homo sapien
tggtctagtctccagagtatatttg

SEQ ID NO: 3911138 - DNA, 25 bp, Homo sapien
cctaaaacacaaacagccattaagt

SEQ ID NO: 3911139 - DNA, 25 bp, Homo sapien
tacaagcggcagagattacacacaa

SEQ ID NO: 3911140 - DNA, 25 bp, Homo sapien
tgtacaccggatgctcaaagtgcat

SEQ ID NO: 3911141 - DNA, 25 bp, Homo sapien
ggcaaatgtctgtgtacctacctct

SEQ ID NO: 3911142 - DNA, 25 bp, Homo sapien
caatttgaattgtaggaaggactct

SEQ ID NO: 3911143 - DNA, 25 bp, Homo sapien
ccattagacaagacataaagggcat

SEQ ID NO: 3911144 - DNA, 25 bp, Homo sapien
tggaacagcgaaaaagtgaaagcct

SEQ ID NO: 3911145 - DNA, 25 bp, Homo sapien
taccactttatacagcatagcactg

SEQ ID NO: 3911146 - DNA, 25 bp, Homo sapien
tcaacacactgggtagagaaggaac

SEQ ID NO: 3911147 - DNA, 25 bp, Homo sapien
aggattccctgtagctttttccaat

SEQ ID NO: 3911148 - DNA, 25 bp, Homo sapien
ttaggattccctgtagctttttcca

SEQ ID NO: 3911149 - DNA, 25 bp, Homo sapien
ctgtcccaaatttactgaaggggtg

SEQ ID NO: 3911150 - DNA, 25 bp, Homo sapien
ttttccaattgaaagagtctccagg

SEQ ID NO: 3911151 - DNA, 25 bp, Homo sapien
ttcatcgaacaaggggcacagaaaa

SEQ ID NO: 3911152 - DNA, 25 bp, Homo sapien
ggggcacagaaaaaactgtgcaaac

SEQ ID NO: 3911153 - DNA, 25 bp, Homo sapien
tcatcgaacaaggggcacagaaaaa

SEQ ID NO: 3911154 - DNA, 25 bp, Homo sapien
tttcatcgaacaaggggcacagaaa

SEQ ID NO: 3911155 - DNA, 25 bp, Homo sapien
gcaatttcacttagactcaggcacc

SEQ ID NO: 3911156 - DNA, 25 bp, Homo sapien
gcaggtcatagtttttaggccaatc

SEQ ID NO: 3911157 - DNA, 25 bp, Homo sapien
cagaggagttgatctaccccagaga

SEQ ID NO: 3911158 - DNA, 25 bp, Homo sapien
tcaggcaccttaggacaaacaagtg

SEQ ID NO: 3911159 - DNA, 25 bp, Homo sapien
gagaaactggctgtattcattttct

SEQ ID NO: 3911160 - DNA, 25 bp, Homo sapien
ctagtaaaggcatttgaacttcctg

SEQ ID NO: 3911161 - DNA, 25 bp, Homo sapien
aaatagtaattggtatgctctccac

SEQ ID NO: 3911162 - DNA, 25 bp, Homo sapien
caccttctaggtgttcatgagaaac

SEQ ID NO: 3911163 - DNA, 25 bp, Homo sapien
tgctgatgacttatccgtggtggga

SEQ ID NO: 3911164 - DNA, 25 bp, Homo sapien
gctctagccctcgatattctcgctt

SEQ ID NO: 3911165 - DNA, 25 bp, Homo sapien
ttctcgcttgtcttcaggagacttg

SEQ ID NO: 3911166 - DNA, 25 bp, Homo sapien
tttgataccattggccagctctagc

SEQ ID NO: 3911167 - DNA, 25 bp, Homo sapien
tatttgtatctgaaagagcacatgg

SEQ ID NO: 3911168 - DNA, 25 bp, Homo sapien
tagaccatgtgttggcctgtatgca

SEQ ID NO: 3911169 - DNA, 25 bp, Homo sapien
tcaccgaggcttgtatgcagtagcg

SEQ ID NO: 3911170 - DNA, 25 bp, Homo sapien
cactctacagggtgcagtcattcct

SEQ ID NO: 3911171 - DNA, 25 bp, Homo sapien
gtgaagacaatgactgggaactctt

SEQ ID NO: 3911172 - DNA, 25 bp, Homo sapien
gaagacaatgactgggaactcttcc

SEQ ID NO: 3911173 - DNA, 25 bp, Homo sapien
tgaagacaatgactgggaactcttc

SEQ ID NO: 3911174 - DNA, 25 bp, Homo sapien
cacagatagctttcagatgccacat

SEQ ID NO: 3911175 - DNA, 25 bp, Homo sapien
ttcacagatagctttcagatgccac

SEQ ID NO: 3911176 - DNA, 25 bp, Homo sapien
tcacagatagctttcagatgccaca

SEQ ID NO: 3911177 - DNA, 25 bp, Homo sapien
acagatagctttcagatgccacatg

SEQ ID NO: 3911178 - DNA, 25 bp, Homo sapien
gagccaacacgcccggcctagagaa

SEQ ID NO: 3911179 - DNA, 25 bp, Homo sapien
acacgcccggcctagagaatatatt

SEQ ID NO: 3911180 - DNA, 25 bp, Homo sapien
ccaacacgcccggcctagagaatat

SEQ ID NO: 3911181 - DNA, 25 bp, Homo sapien
aacacgcccggcctagagaatatat

SEQ ID NO: 3911182 - DNA, 25 bp, Homo sapien
aaatagtgccgctgctttgaaaaac

SEQ ID NO: 3911183 - DNA, 25 bp, Homo sapien
aagtacatatagcaagtgttgtcaa

SEQ ID NO: 3911184 - DNA, 25 bp, Homo sapien
gtacatatagcaagtgttgtcaagg

SEQ ID NO: 3911185 - DNA, 25 bp, Homo sapien
tggaaatgcaaaatagtgccgctgc

SEQ ID NO: 3911186 - DNA, 25 bp, Homo sapien
tggttaacatcgtcagcagcagcaa

SEQ ID NO: 3911187 - DNA, 25 bp, Homo sapien
cacaggtcagacttgttctaggctc

SEQ ID NO: 3911188 - DNA, 25 bp, Homo sapien
caattgaactagtccctgagctacc

SEQ ID NO: 3911189 - DNA, 25 bp, Homo sapien
gcaagagcgttacagctgaatccac

SEQ ID NO: 3911190 - DNA, 25 bp, Homo sapien
tgtccactaccctacgggacctgag

SEQ ID NO: 3911191 - DNA, 25 bp, Homo sapien
taacagccagcccaaaagtgcctac

SEQ ID NO: 3911192 - DNA, 25 bp, Homo sapien
cagtggttcgttctcttggtatgcc

SEQ ID NO: 3911193 - DNA, 25 bp, Homo sapien
tgcctacaagactgtgcccactgct

SEQ ID NO: 3911194 - DNA, 25 bp, Homo sapien
cctcctattctagactcaaagtcac

SEQ ID NO: 3911195 - DNA, 25 bp, Homo sapien
ctattctagactcaaagtcactcac

SEQ ID NO: 3911196 - DNA, 25 bp, Homo sapien
cccctcctattctagactcaaagtc

SEQ ID NO: 3911197 - DNA, 25 bp, Homo sapien
cctattctagactcaaagtcactca

SEQ ID NO: 3911198 - DNA, 25 bp, Homo sapien
gacctcaggcttctctgactcccac

SEQ ID NO: 3911199 - DNA, 25 bp, Homo sapien
gctcaagacctcaggcttctctgac

SEQ ID NO: 3911200 - DNA, 25 bp, Homo sapien
aagacctcaggcttctctgactccc

SEQ ID NO: 3911201 - DNA, 25 bp, Homo sapien
cctcaggcttctctgactcccacat

SEQ ID NO: 3911202 - DNA, 25 bp, Homo sapien
taccagggcatacttgcatgactgc

SEQ ID NO: 3911203 - DNA, 25 bp, Homo sapien
tcaagcaagtagaccagtgtgactc

SEQ ID NO: 3911204 - DNA, 25 bp, Homo sapien
aagctctcgccattcttactagcag

SEQ ID NO: 3911205 - DNA, 25 bp, Homo sapien
gatctgaggtaagagcaagtcaagc

SEQ ID NO: 3911206 - DNA, 25 bp, Homo sapien
cacactcgtcttccaaggcgggagg

SEQ ID NO: 3911207 - DNA, 25 bp, Homo sapien
tgctgtagaggatcccgaggtatct

SEQ ID NO: 3911208 - DNA, 25 bp, Homo sapien
tccgacgtaaaacaagggagctgct

SEQ ID NO: 3911209 - DNA, 25 bp, Homo sapien
caatctcggcagttgctgggaaatc

SEQ ID NO: 3911210 - DNA, 25 bp, Homo sapien
gaggactgagcggaaggtgctgggc

SEQ ID NO: 3911211 - DNA, 25 bp, Homo sapien
caggcgggcgccgaggactgagcgg

SEQ ID NO: 3911212 - DNA, 25 bp, Homo sapien
ccacacaggcgctccggaggcggca

SEQ ID NO: 3911213 - DNA, 25 bp, Homo sapien
gaagccacgctagccggtaccgcat

SEQ ID NO: 3911214 - DNA, 25 bp, Homo sapien
tgcgcactgcgcatgctctagccgc

SEQ ID NO: 3911215 - DNA, 25 bp, Homo sapien
aggcgaggacggtgaagaccgcgga

SEQ ID NO: 3911216 - DNA, 25 bp, Homo sapien
ctgctccgggttttgcctggagccg

SEQ ID NO: 3911217 - DNA, 25 bp, Homo sapien
aaacgcttcctgcttgcgcttcgag

SEQ ID NO: 3911218 - DNA, 25 bp, Homo sapien
aggcgtggtggcatgcgtctgtaat

SEQ ID NO: 3911219 - DNA, 25 bp, Homo sapien
ggagaatcacttgaaccctggaggc

SEQ ID NO: 3911220 - DNA, 25 bp, Homo sapien
cccagctactgaggaggctgaggca

SEQ ID NO: 3911221 - DNA, 25 bp, Homo sapien
caggcgtggtggcatgcgtctgtaa

SEQ ID NO: 3911222 - DNA, 25 bp, Homo sapien
gtcgagtcacgccaggcactgccaa

SEQ ID NO: 3911223 - DNA, 25 bp, Homo sapien
ggcactgccaagacgccgaaaagtt

SEQ ID NO: 3911224 - DNA, 25 bp, Homo sapien
acctacagcggtcgagtcacgccag

SEQ ID NO: 3911225 - DNA, 25 bp, Homo sapien
cgccgaaaagttctcccgcagcagg

SEQ ID NO: 3911226 - DNA, 25 bp, Homo sapien
gacctgcgtgcgtcggtcctccagg

SEQ ID NO: 3911227 - DNA, 25 bp, Homo sapien
ccacggccagagtaccgggtagaga

SEQ ID NO: 3911228 - DNA, 25 bp, Homo sapien
cgactggcgcgggacaaacgccacg

SEQ ID NO: 3911229 - DNA, 25 bp, Homo sapien
tagtgatttggcggctccgactggc

SEQ ID NO: 3911230 - DNA, 25 bp, Homo sapien
cccctactgcgcggtccagggagag

SEQ ID NO: 3911231 - DNA, 25 bp, Homo sapien
acaggattccgagcgctgcggcttc

SEQ ID NO: 3911232 - DNA, 25 bp, Homo sapien
tgacaggattccgagcgctgcggct

SEQ ID NO: 3911233 - DNA, 25 bp, Homo sapien
gggctgacaggattccgagcgctgc

SEQ ID NO: 3911234 - DNA, 25 bp, Homo sapien
aaatctgtgtgttcctggatctcca

SEQ ID NO: 3911235 - DNA, 25 bp, Homo sapien
caattagatatttgcgtgtagtctc

SEQ ID NO: 3911236 - DNA, 25 bp, Homo sapien
gtatgtagacttgtataaaggtcac

SEQ ID NO: 3911237 - DNA, 25 bp, Homo sapien
cagtttcgcggttaattcagtatgt

SEQ ID NO: 3911238 - DNA, 25 bp, Homo sapien
gtgtgtgtggtctttaaacctcaga

SEQ ID NO: 3911239 - DNA, 25 bp, Homo sapien
taaactaatgccttacctggtacca

SEQ ID NO: 3911240 - DNA, 25 bp, Homo sapien
tacacaacagctgacatggatggga

SEQ ID NO: 3911241 - DNA, 25 bp, Homo sapien
gacataccaggcaactgtttcgacc

SEQ ID NO: 3911242 - DNA, 25 bp, Homo sapien
gtctcaaagcagagaagtgtacttg

SEQ ID NO: 3911243 - DNA, 25 bp, Homo sapien
tccaagacctgtgccttttagagaa

SEQ ID NO: 3911244 - DNA, 25 bp, Homo sapien
tgacagagttcacaaaaagcccact

SEQ ID NO: 3911245 - DNA, 25 bp, Homo sapien
tttaagaggcctaactcattcaccc

SEQ ID NO: 3911246 - DNA, 25 bp, Homo sapien
tacattgctattatgggagaccacc

SEQ ID NO: 3911247 - DNA, 25 bp, Homo sapien
tcagcataagcgatggataatacct

SEQ ID NO: 3911248 - DNA, 25 bp, Homo sapien
tctgctcacgatgagtttagtgtgt

SEQ ID NO: 3911249 - DNA, 25 bp, Homo sapien
actgccctcagtaaatccatggtta

SEQ ID NO: 3911250 - DNA, 25 bp, Homo sapien
gataatacctaataaactgccctca

SEQ ID NO: 3911251 - DNA, 25 bp, Homo sapien
tatgtccccagcaaccatacctgga

SEQ ID NO: 3911252 - DNA, 25 bp, Homo sapien
cacggtggtgtgctcacttgcccat

SEQ ID NO: 3911253 - DNA, 25 bp, Homo sapien
gtgtccagtaatcggcacgtgtgac

SEQ ID NO: 3911254 - DNA, 25 bp, Homo sapien
cagcctggtagctggttttgatgct

SEQ ID NO: 3911255 - DNA, 25 bp, Homo sapien
tgtttctgaaggctgggttatctct

SEQ ID NO: 3911256 - DNA, 25 bp, Homo sapien
agttcaagtcatctagatcaccagc

SEQ ID NO: 3911257 - DNA, 25 bp, Homo sapien
gctgggttatctctgtttgggtatc

SEQ ID NO: 3911258 - DNA, 25 bp, Homo sapien
ttctctggttcagttggttcttgaa

SEQ ID NO: 3911259 - DNA, 25 bp, Homo sapien
cacggacgggaagtcagacgggtca

SEQ ID NO: 3911260 - DNA, 25 bp, Homo sapien
gcacggacgggaagtcagacgggtc

SEQ ID NO: 3911261 - DNA, 25 bp, Homo sapien
cagccagacgtggtgctgcacgcca

SEQ ID NO: 3911262 - DNA, 25 bp, Homo sapien
gccagacgtggtgctgcacgccagt

SEQ ID NO: 3911263 - DNA, 25 bp, Homo sapien
cagacgtggtgctgcacgccagtaa

SEQ ID NO: 3911264 - DNA, 25 bp, Homo sapien
agacgtggtgctgcacgccagtaat

SEQ ID NO: 3911265 - DNA, 25 bp, Homo sapien
gcagaacacaggtcttgcgacttca

SEQ ID NO: 3911266 - DNA, 25 bp, Homo sapien
gacagaatttggactggctttcagg

SEQ ID NO: 3911267 - DNA, 25 bp, Homo sapien
tgagttctctggcagtaagtccctc

SEQ ID NO: 3911268 - DNA, 25 bp, Homo sapien
tgtggccatatgatctgagaggacg

SEQ ID NO: 3911269 - DNA, 25 bp, Homo sapien
ggccatgtagaaagttaagatccac

SEQ ID NO: 3911270 - DNA, 25 bp, Homo sapien
tgttctgactgtcctactcacaggc

SEQ ID NO: 3911271 - DNA, 25 bp, Homo sapien
cagaaatgattaagctcagcaagga

SEQ ID NO: 3911272 - DNA, 25 bp, Homo sapien
tagacagcgctgtgaacacaaagga

SEQ ID NO: 3911273 - DNA, 25 bp, Homo sapien
tgccgatggaaaccactccaaggtg

SEQ ID NO: 3911274 - DNA, 25 bp, Homo sapien
aggtcatacatccatctagtgcaag

SEQ ID NO: 3911275 - DNA, 25 bp, Homo sapien
gccaatgttcgttatccttccagag

SEQ ID NO: 3911276 - DNA, 25 bp, Homo sapien
aggacttacttatacgacgaatagg

SEQ ID NO: 3911277 - DNA, 25 bp, Homo sapien
gcctcccaggaagaccttgaatcag

SEQ ID NO: 3911278 - DNA, 25 bp, Homo sapien
caattaacaaacctacatggagacc

SEQ ID NO: 3911279 - DNA, 25 bp, Homo sapien
gcattggcatgttcagaaaactgga

SEQ ID NO: 3911280 - DNA, 25 bp, Homo sapien
tggatagctctcaatgttcgccctc

SEQ ID NO: 3911281 - DNA, 25 bp, Homo sapien
tctggataacacagagggctgctgc

SEQ ID NO: 3911282 - DNA, 25 bp, Homo sapien
agttgcaggcgggaaacctcttcag

SEQ ID NO: 3911283 - DNA, 25 bp, Homo sapien
gacagctcttgggttcgcagttgca

SEQ ID NO: 3911284 - DNA, 25 bp, Homo sapien
gcggaggatcttgactttggagcat

SEQ ID NO: 3911285 - DNA, 25 bp, Homo sapien
tcaactgagataactcactatgttc

SEQ ID NO: 3911286 - DNA, 25 bp, Homo sapien
aactgagataactcactatgttcag

SEQ ID NO: 3911287 - DNA, 25 bp, Homo sapien
ctgagataactcactatgttcagac

SEQ ID NO: 3911288 - DNA, 25 bp, Homo sapien
gagttcgatctataactgactgaac

SEQ ID NO: 3911289 - DNA, 25 bp, Homo sapien
caggcttagcaactttaggagatag

SEQ ID NO: 3911290 - DNA, 25 bp, Homo sapien
tagagcccacccttatcaagtatga

SEQ ID NO: 3911291 - DNA, 25 bp, Homo sapien
cactagtcattaggtttagagccca

SEQ ID NO: 3911292 - DNA, 25 bp, Homo sapien
ggaacacttattcagcccaccctgg

SEQ ID NO: 3911293 - DNA, 25 bp, Homo sapien
cttcacctggcaatagtagaccgct

SEQ ID NO: 3911294 - DNA, 25 bp, Homo sapien
gaatgggcttccctaggtatgcctg

SEQ ID NO: 3911295 - DNA, 25 bp, Homo sapien
gtgctgtagggctgtaccaccaagg

SEQ ID NO: 3911296 - DNA, 25 bp, Homo sapien
cagtctttctcatgcatgccgagta

SEQ ID NO: 3911297 - DNA, 25 bp, Homo sapien
tgaatatttgactgaagtgtagcct

SEQ ID NO: 3911298 - DNA, 25 bp, Homo sapien
agcttttttggacagtggccctaga

SEQ ID NO: 3911299 - DNA, 25 bp, Homo sapien
ctagagcagtggattctgaaatgac

SEQ ID NO: 3911300 - DNA, 25 bp, Homo sapien
aatcctgttgtgagtttaagtggcc

SEQ ID NO: 3911301 - DNA, 25 bp, Homo sapien
tagcatgtcctactgttcccaccag

SEQ ID NO: 3911302 - DNA, 25 bp, Homo sapien
gattcatgtcttcgtggacagcttt

SEQ ID NO: 3911303 - DNA, 25 bp, Homo sapien
tcttcgtggacagcttttgttatcc

SEQ ID NO: 3911304 - DNA, 25 bp, Homo sapien
tcctgcaagggagtgtgattggata

SEQ ID NO: 3911305 - DNA, 25 bp, Homo sapien
cctggagcagtaccgctttcatctc

SEQ ID NO: 3911306 - DNA, 25 bp, Homo sapien
taccctggagcagtaccgctttcat

SEQ ID NO: 3911307 - DNA, 25 bp, Homo sapien
ctaccctggagcagtaccgctttca

SEQ ID NO: 3911308 - DNA, 25 bp, Homo sapien
ccctggagcagtaccgctttcatct

SEQ ID NO: 3911309 - DNA, 25 bp, Homo sapien
acagaggcatcccatgaacttgagg

SEQ ID NO: 3911310 - DNA, 25 bp, Homo sapien
acaccaggagccacgggtccatgag

SEQ ID NO: 3911311 - DNA, 25 bp, Homo sapien
catcccatgaacttgaggaagccct

SEQ ID NO: 3911312 - DNA, 25 bp, Homo sapien
aggagccacgggtccatgagctaca

SEQ ID NO: 3911313 - DNA, 25 bp, Homo sapien
ctcatcataatgacgaagagaatac

SEQ ID NO: 3911314 - DNA, 25 bp, Homo sapien
taatgacgaagagaatactaacacc

SEQ ID NO: 3911315 - DNA, 25 bp, Homo sapien
agaatactaacacctgcacagccct

SEQ ID NO: 3911316 - DNA, 25 bp, Homo sapien
aggtttttcacagggagtacattca

SEQ ID NO: 3911317 - DNA, 25 bp, Homo sapien
cctcatcgagtctttgcatcatcct

SEQ ID NO: 3911318 - DNA, 25 bp, Homo sapien
tattgagccctgactttataccagt

SEQ ID NO: 3911319 - DNA, 25 bp, Homo sapien
gcttgtgaagcattacctcatcgag

SEQ ID NO: 3911320 - DNA, 25 bp, Homo sapien
ccaatgacatgggttaggttttcct

SEQ ID NO: 3911321 - DNA, 25 bp, Homo sapien
caggaacggagaggaacagcgcaat

SEQ ID NO: 3911322 - DNA, 25 bp, Homo sapien
gggctcaccaaacaagctcctcaga

SEQ ID NO: 3911323 - DNA, 25 bp, Homo sapien
tcaaggctcgccaggaacggagagg

SEQ ID NO: 3911324 - DNA, 25 bp, Homo sapien
agaggaacagcgcaatgggctcacc

SEQ ID NO: 3911325 - DNA, 25 bp, Homo sapien
aaggcctttaggactgctgcattct

SEQ ID NO: 3911326 - DNA, 25 bp, Homo sapien
cacaatttttctcaaaggcctttag

SEQ ID NO: 3911327 - DNA, 25 bp, Homo sapien
ctggaggaatttcatctcacaattt

SEQ ID NO: 3911328 - DNA, 25 bp, Homo sapien
tgctgcattctttttgagatccttg

SEQ ID NO: 3911329 - DNA, 25 bp, Homo sapien
gttacctgtatctcctcctctgtga

SEQ ID NO: 3911330 - DNA, 25 bp, Homo sapien
catgcattgctaaattgagtaccag

SEQ ID NO: 3911331 - DNA, 25 bp, Homo sapien
gcttgcaatctacccaaaagtcaga

SEQ ID NO: 3911332 - DNA, 25 bp, Homo sapien
tgagtaccagtgtaacagcttgcaa

SEQ ID NO: 3911333 - DNA, 25 bp, Homo sapien
gccaaggatgtgcccttctctctca

SEQ ID NO: 3911334 - DNA, 25 bp, Homo sapien
gtgaaatccttgtgcaagcagtggt

SEQ ID NO: 3911335 - DNA, 25 bp, Homo sapien
cttgactgggctgcttcagacagtg

SEQ ID NO: 3911336 - DNA, 25 bp, Homo sapien
gcttcagacagtgaaatccttgtgc

SEQ ID NO: 3911337 - DNA, 25 bp, Homo sapien
ccttgactgggctgcttcagacagt

SEQ ID NO: 3911338 - DNA, 25 bp, Homo sapien
gatttgtgccaagaaactgttcacc

SEQ ID NO: 3911339 - DNA, 25 bp, Homo sapien
aactgttcaccagcaagtgatctgg

SEQ ID NO: 3911340 - DNA, 25 bp, Homo sapien
caagtgatctggtgtccttgccaaa

SEQ ID NO: 3911341 - DNA, 25 bp, Homo sapien
agtctgtccactggctgttccctga

SEQ ID NO: 3911342 - DNA, 25 bp, Homo sapien
ttatctgccttcttgttagtttgag

SEQ ID NO: 3911343 - DNA, 25 bp, Homo sapien
ttttatctgccttcttgttagtttg

SEQ ID NO: 3911344 - DNA, 25 bp, Homo sapien
catggcttttttatctgccttcttg

SEQ ID NO: 3911345 - DNA, 25 bp, Homo sapien
gcttttttatctgccttcttgttag

SEQ ID NO: 3911346 - DNA, 25 bp, Homo sapien
tgtctagcacatgccttactgtggg

SEQ ID NO: 3911347 - DNA, 25 bp, Homo sapien
ggaagcttgaagagcaactcccttg

SEQ ID NO: 3911348 - DNA, 25 bp, Homo sapien
tgaatgctgtcagagtcatctcctg

SEQ ID NO: 3911349 - DNA, 25 bp, Homo sapien
gcccggattaaactctgaatgctgt

SEQ ID NO: 3911350 - DNA, 25 bp, Homo sapien
ctggaacaggatttaatcctgccat

SEQ ID NO: 3911351 - DNA, 25 bp, Homo sapien
acagagccctcctttgtcactggaa

SEQ ID NO: 3911352 - DNA, 25 bp, Homo sapien
tcctggaacaggatttaatcctgcc

SEQ ID NO: 3911353 - DNA, 25 bp, Homo sapien
atcctggaacaggatttaatcctgc

SEQ ID NO: 3911354 - DNA, 25 bp, Homo sapien
tgggtccctcttgagatttaggcca

SEQ ID NO: 3911355 - DNA, 25 bp, Homo sapien
ctggttgggaggtggtttgtactgt

SEQ ID NO: 3911356 - DNA, 25 bp, Homo sapien
gatttaggccatggatctggtcata

SEQ ID NO: 3911357 - DNA, 25 bp, Homo sapien
ggccatggatctggtcataattcat

SEQ ID NO: 3911358 - DNA, 25 bp, Homo sapien
atgctggtttagccagtggaaacag

SEQ ID NO: 3911359 - DNA, 25 bp, Homo sapien
taatctgtgcgaacttccggcagga

SEQ ID NO: 3911360 - DNA, 25 bp, Homo sapien
tagaagaaagtaagaggcagacaga

SEQ ID NO: 3911361 - DNA, 25 bp, Homo sapien
cccgtgtctcctacggtgtagaaga

SEQ ID NO: 3911362 - DNA, 25 bp, Homo sapien
tatactttcccctgaaggtctgtgg

SEQ ID NO: 3911363 - DNA, 25 bp, Homo sapien
gcagaggtgcaagaggacaaacaga

SEQ ID NO: 3911364 - DNA, 25 bp, Homo sapien
tctcatgtagctctcagggaatgct

SEQ ID NO: 3911365 - DNA, 25 bp, Homo sapien
tcctgccatggagcaaaactagggc

SEQ ID NO: 3911366 - DNA, 25 bp, Homo sapien
ccttgggtttgtgggcaagcccttg

SEQ ID NO: 3911367 - DNA, 25 bp, Homo sapien
ccgtcgttcccgcggcgccgcgcct

SEQ ID NO: 3911368 - DNA, 25 bp, Homo sapien
gcgccgcgcctcgctggctcctcag

SEQ ID NO: 3911369 - DNA, 25 bp, Homo sapien
tggagctcgcccccgtcgttcccgc

SEQ ID NO: 3911370 - DNA, 25 bp, Homo sapien
cccgcggcgccgcgcctcgctggct

SEQ ID NO: 3911371 - DNA, 25 bp, Homo sapien
ccgcgcgcgaagctccccgacaggt

SEQ ID NO: 3911372 - DNA, 25 bp, Homo sapien
cccgacaggtggtgcgcgcgggggc

SEQ ID NO: 3911373 - DNA, 25 bp, Homo sapien
gcgcgcgaagctccccgacaggtgg

SEQ ID NO: 3911374 - DNA, 25 bp, Homo sapien
cgcgcgcgaagctccccgacaggtg

SEQ ID NO: 3911375 - DNA, 25 bp, Homo sapien
gctacatgttgaatttcattaggct

SEQ ID NO: 3911376 - DNA, 25 bp, Homo sapien
taaattagacaatttggactaggga

SEQ ID NO: 3911377 - DNA, 25 bp, Homo sapien
gtgtgtatgtcctgcttcattgtgc

SEQ ID NO: 3911378 - DNA, 25 bp, Homo sapien
tatacagacctatagtaaaagatgt

SEQ ID NO: 3911379 - DNA, 25 bp, Homo sapien
tttctcaactatccccaaaatgtct

SEQ ID NO: 3911380 - DNA, 25 bp, Homo sapien
gggcattatcggtttttcagtaata

SEQ ID NO: 3911381 - DNA, 25 bp, Homo sapien
tctcttgtagaccagggcattttgg

SEQ ID NO: 3911382 - DNA, 25 bp, Homo sapien
ttcatggaagagtgcaggtcagttc

SEQ ID NO: 3911383 - DNA, 25 bp, Homo sapien
ggaggcttataaagtcatgttgtcc

SEQ ID NO: 3911384 - DNA, 25 bp, Homo sapien
gcttataaagtcatgttgtccttag

SEQ ID NO: 3911385 - DNA, 25 bp, Homo sapien
gaggcttataaagtcatgttgtcct

SEQ ID NO: 3911386 - DNA, 25 bp, Homo sapien
ggcttataaagtcatgttgtcctta

SEQ ID NO: 3911387 - DNA, 25 bp, Homo sapien
ttacttctccctgcatcaggatcct

SEQ ID NO: 3911388 - DNA, 25 bp, Homo sapien
ccttttgccccatccccctctgctc

SEQ ID NO: 3911389 - DNA, 25 bp, Homo sapien
cctttacttctccctgcatcaggat

SEQ ID NO: 3911390 - DNA, 25 bp, Homo sapien
tccaagctctactgtactacttctc

SEQ ID NO: 3911391 - DNA, 25 bp, Homo sapien
actacttctctgttagcatataacg

SEQ ID NO: 3911392 - DNA, 25 bp, Homo sapien
gcatataacgggcagtggctttctt

SEQ ID NO: 3911393 - DNA, 25 bp, Homo sapien
gaaagcacccgttcatgaattccca

SEQ ID NO: 3911394 - DNA, 25 bp, Homo sapien
taattaggttgaccagcctggctag

SEQ ID NO: 3911395 - DNA, 25 bp, Homo sapien
gcctggctagtgagtatctgcttct

SEQ ID NO: 3911396 - DNA, 25 bp, Homo sapien
cagtctaggcgatactggaagttca

SEQ ID NO: 3911397 - DNA, 25 bp, Homo sapien
tatctagggtctattccagtcttcc

SEQ ID NO: 3911398 - DNA, 25 bp, Homo sapien
ctattttagccatggtagtgaccaa

SEQ ID NO: 3911399 - DNA, 25 bp, Homo sapien
caaactcacctagaggttatctagg

SEQ ID NO: 3911400 - DNA, 25 bp, Homo sapien
tacttctgagtacggcagtgaactg

SEQ ID NO: 3911401 - DNA, 25 bp, Homo sapien
gatatgctccatttgattattaact

SEQ ID NO: 3911402 - DNA, 25 bp, Homo sapien
ggctttggaattcaatcatgtctga

SEQ ID NO: 3911403 - DNA, 25 bp, Homo sapien
tctgaatatgaacaaaaggttttgg

SEQ ID NO: 3911404 - DNA, 25 bp, Homo sapien
atagacaaatcttaaaagctgcctg

SEQ ID NO: 3911405 - DNA, 25 bp, Homo sapien
cacctcaatgtgatttaagcagacc

SEQ ID NO: 3911406 - DNA, 25 bp, Homo sapien
tcttcaggcacggtgaaatctggag

SEQ ID NO: 3911407 - DNA, 25 bp, Homo sapien
gatactgcctttgcactgcctggag

SEQ ID NO: 3911408 - DNA, 25 bp, Homo sapien
gctttggctgagacgtcccgggatt

SEQ ID NO: 3911409 - DNA, 25 bp, Homo sapien
gcggtgaacagctagctctctttga

SEQ ID NO: 3911410 - DNA, 25 bp, Homo sapien
ggagaatctcggctgcgctatccct

SEQ ID NO: 3911411 - DNA, 25 bp, Homo sapien
tgaaatagtcggagcaaaggagaga

SEQ ID NO: 3911412 - DNA, 25 bp, Homo sapien
tttgcgatgccaacgcaggcgtcga

SEQ ID NO: 3911413 - DNA, 25 bp, Homo sapien
ggcgtcgacgactgcagtttccctg

SEQ ID NO: 3911414 - DNA, 25 bp, Homo sapien
cagtcgcggcggtaatagcacttcc

SEQ ID NO: 3911415 - DNA, 25 bp, Homo sapien
tagggaccttgagcactactctgga

SEQ ID NO: 3911416 - DNA, 25 bp, Homo sapien
tctctctgggaaccatcgcaaggcg

SEQ ID NO: 3911417 - DNA, 25 bp, Homo sapien
cgcaaggcgggtggatagatcctaa

SEQ ID NO: 3911418 - DNA, 25 bp, Homo sapien
gtgcaggccccgctcatcttgtgac

SEQ ID NO: 3911419 - DNA, 25 bp, Homo sapien
tgacccggcttgagctgaacttggc

SEQ ID NO: 3911420 - DNA, 25 bp, Homo sapien
ttttccctgcggcaatttccagcgt

SEQ ID NO: 3911421 - DNA, 25 bp, Homo sapien
ctgaacttggcgaggtggccccgca

SEQ ID NO: 3911422 - DNA, 25 bp, Homo sapien
gtcacgtccccattcgtcggctttg

SEQ ID NO: 3911423 - DNA, 25 bp, Homo sapien
gccccaggtcacgtccccattcgtc

SEQ ID NO: 3911424 - DNA, 25 bp, Homo sapien
gggtcacaggcgggtcaggcccgag

SEQ ID NO: 3911425 - DNA, 25 bp, Homo sapien
tgcaggggtcacaggcgggtcaggc

SEQ ID NO: 3911426 - DNA, 25 bp, Homo sapien
gtttgccggagactgaaaccctgcc

SEQ ID NO: 3911427 - DNA, 25 bp, Homo sapien
tgagaattacctccagcgcgattgg

SEQ ID NO: 3911428 - DNA, 25 bp, Homo sapien
tacagccaccaaatcgtttgccgga

SEQ ID NO: 3911429 - DNA, 25 bp, Homo sapien
cagaggttggttcgccgtgtttaca

SEQ ID NO: 3911430 - DNA, 25 bp, Homo sapien
ctaccgcgagaagggcaacgcattt

SEQ ID NO: 3911431 - DNA, 25 bp, Homo sapien
cagtagcagctgattgtagatgggc

SEQ ID NO: 3911432 - DNA, 25 bp, Homo sapien
ccaaacccaggtagcgtgtgaccct

SEQ ID NO: 3911433 - DNA, 25 bp, Homo sapien
tctgtttcattttcggcgccgcagg

SEQ ID NO: 3911434 - DNA, 25 bp, Homo sapien
aatgtgcggcgcatcttgctcggag

SEQ ID NO: 3911435 - DNA, 25 bp, Homo sapien
tacaagacgcatctgttcgggcggc

SEQ ID NO: 3911436 - DNA, 25 bp, Homo sapien
gaaatacggcttcatctacaagacg

SEQ ID NO: 3911437 - DNA, 25 bp, Homo sapien
ccccatttatgagcggaattccggc

SEQ ID NO: 3911438 - DNA, 25 bp, Homo sapien
gttactctccagagatccacaaggg

SEQ ID NO: 3911439 - DNA, 25 bp, Homo sapien
ttctatgccaggctcagaggccagt

SEQ ID NO: 3911440 - DNA, 25 bp, Homo sapien
accagtgtccacgaattccagtgta

SEQ ID NO: 3911441 - DNA, 25 bp, Homo sapien
agtgtacaagactctggcccagggc

SEQ ID NO: 3911442 - DNA, 25 bp, Homo sapien
ctgcgcgtctttcagttcctgaagc

SEQ ID NO: 3911443 - DNA, 25 bp, Homo sapien
gcaccaagtgccctgtgttgactgc

SEQ ID NO: 3911444 - DNA, 25 bp, Homo sapien
accaagtgccctgtgttgactgccc

SEQ ID NO: 3911445 - DNA, 25 bp, Homo sapien
agaaaggcaccaagtgccctgtgtt

SEQ ID NO: 3911446 - DNA, 25 bp, Homo sapien
ctcagaaaggcaccaagtgccctgt

SEQ ID NO: 3911447 - DNA, 25 bp, Homo sapien
gctgaccattcgcttgacctggcct

SEQ ID NO: 3911448 - DNA, 25 bp, Homo sapien
gtgtctgctccaaccacccctagtt

SEQ ID NO: 3911449 - DNA, 25 bp, Homo sapien
ctgcccatgctgaccattcgcttga

SEQ ID NO: 3911450 - DNA, 25 bp, Homo sapien
caggtcctgtgtctgctccaaccac

SEQ ID NO: 3911451 - DNA, 25 bp, Homo sapien
tccttgaaaaatctcagcggccgca

SEQ ID NO: 3911452 - DNA, 25 bp, Homo sapien
tgtcacattcctgaaaccgacgctc

SEQ ID NO: 3911453 - DNA, 25 bp, Homo sapien
gacgctccacgggtatttgaccaaa

SEQ ID NO: 3911454 - DNA, 25 bp, Homo sapien
catacacggctgtggtttaacagca

SEQ ID NO: 3911455 - DNA, 25 bp, Homo sapien
acttttgattggctgagcgcaggcc

SEQ ID NO: 3911456 - DNA, 25 bp, Homo sapien
gaaggagagggaatgtccgacttct

SEQ ID NO: 3911457 - DNA, 25 bp, Homo sapien
catgactgggctgccagttgaagga

SEQ ID NO: 3911458 - DNA, 25 bp, Homo sapien
tgctgcccacctatgagggcttgta

SEQ ID NO: 3911459 - DNA, 25 bp, Homo sapien
gctgctatttccaacaccctggagg

SEQ ID NO: 3911460 - DNA, 25 bp, Homo sapien
agctgctatttccaacaccctggag

SEQ ID NO: 3911461 - DNA, 25 bp, Homo sapien
ctgctatttccaacaccctggaggc

SEQ ID NO: 3911462 - DNA, 25 bp, Homo sapien
ttgagctgatcaagaagatgaactg

SEQ ID NO: 3911463 - DNA, 25 bp, Homo sapien
tgtccagcacgcttgcttgcctgct

SEQ ID NO: 3911464 - DNA, 25 bp, Homo sapien
acctgctgtccagcacgcttgcttg

SEQ ID NO: 3911465 - DNA, 25 bp, Homo sapien
gagttgagctgatcaagaagatgaa

SEQ ID NO: 3911466 - DNA, 25 bp, Homo sapien
tgcatcttatcagcacagcagccag

SEQ ID NO: 3911467 - DNA, 25 bp, Homo sapien
agaatttattagaggccacctccat

SEQ ID NO: 3911468 - DNA, 25 bp, Homo sapien
agtccaggacacaggcaagtccctg

SEQ ID NO: 3911469 - DNA, 25 bp, Homo sapien
ggtcacttgtttgcatcttatcagc

SEQ ID NO: 3911470 - DNA, 25 bp, Homo sapien
agtcaccaggaggtccacttttctg

SEQ ID NO: 3911471 - DNA, 25 bp, Homo sapien
taagtcaacgtcatttcatgtctca

SEQ ID NO: 3911472 - DNA, 25 bp, Homo sapien
tttcatgtctcacatatttcccagt

SEQ ID NO: 3911473 - DNA, 25 bp, Homo sapien
atgatgaaataccacagtcaccagg

SEQ ID NO: 3911474 - DNA, 25 bp, Homo sapien
ctgccaccccaaaacccaaggaatg

SEQ ID NO: 3911475 - DNA, 25 bp, Homo sapien
ggtactgagaagtctttttggtgat

SEQ ID NO: 3911476 - DNA, 25 bp, Homo sapien
tttttggtgattcaacccagaccat

SEQ ID NO: 3911477 - DNA, 25 bp, Homo sapien
ctggtactgagaagtctttttggtg

SEQ ID NO: 3911478 - DNA, 25 bp, Homo sapien
tttggtgattcaacccagaccatat

SEQ ID NO: 3911479 - DNA, 25 bp, Homo sapien
aagaagctctaggctttatccgcac

SEQ ID NO: 3911480 - DNA, 25 bp, Homo sapien
caggaagaagctctaggctttatcc

SEQ ID NO: 3911481 - DNA, 25 bp, Homo sapien
ggaagaagctctaggctttatccgc

SEQ ID NO: 3911482 - DNA, 25 bp, Homo sapien
gaagaagctctaggctttatccgca

SEQ ID NO: 3911483 - DNA, 25 bp, Homo sapien
tagggtacaaggtaatccagagttg

SEQ ID NO: 3911484 - DNA, 25 bp, Homo sapien
tacaaggtaatccagagttgtgatg

SEQ ID NO: 3911485 - DNA, 25 bp, Homo sapien
ttggtatagggtacaaggtaatcca

SEQ ID NO: 3911486 - DNA, 25 bp, Homo sapien
ttcccagcaacaccagcttgtccct

SEQ ID NO: 3911487 - DNA, 25 bp, Homo sapien
tcacatagcgtaggtgccgtcgggc

SEQ ID NO: 3911488 - DNA, 25 bp, Homo sapien
cactcacatagcgtaggtgccgtcg

SEQ ID NO: 3911489 - DNA, 25 bp, Homo sapien
ctcactcacatagcgtaggtgccgt

SEQ ID NO: 3911490 - DNA, 25 bp, Homo sapien
ttctcactcacatagcgtaggtgcc

SEQ ID NO: 3911491 - DNA, 25 bp, Homo sapien
aagcccaaaggtggggtcacatgac

SEQ ID NO: 3911492 - DNA, 25 bp, Homo sapien
atggatcaccaatggatcacactcc

SEQ ID NO: 3911493 - DNA, 25 bp, Homo sapien
ccaatggatcaccaatggatcacac

SEQ ID NO: 3911494 - DNA, 25 bp, Homo sapien
tcacatgaccaacccaatggatcac

SEQ ID NO: 3911495 - DNA, 25 bp, Homo sapien
gtagccacgaactgagccttcctgg

SEQ ID NO: 3911496 - DNA, 25 bp, Homo sapien
tgccctgatgaatgtactgcgtgtc

SEQ ID NO: 3911497 - DNA, 25 bp, Homo sapien
gccctgatgaatgtactgcgtgtcc

SEQ ID NO: 3911498 - DNA, 25 bp, Homo sapien
ctggagccctcaggtagccacgaac

SEQ ID NO: 3911499 - DNA, 25 bp, Homo sapien
cagtcagctctgtgtctgagagcag

SEQ ID NO: 3911500 - DNA, 25 bp, Homo sapien
caaggctggagaaatcagtcagctc

SEQ ID NO: 3911501 - DNA, 25 bp, Homo sapien
catgagggccttgagagggtgggca

SEQ ID NO: 3911502 - DNA, 25 bp, Homo sapien
ctgtagaaggacaagggcaaggctg

SEQ ID NO: 3911503 - DNA, 25 bp, Homo sapien
ggcaatgtaaccctggtaacagtgc

SEQ ID NO: 3911504 - DNA, 25 bp, Homo sapien
gcaatgtaaccctggtaacagtgca

SEQ ID NO: 3911505 - DNA, 25 bp, Homo sapien
caatgtaaccctggtaacagtgcat

SEQ ID NO: 3911506 - DNA, 25 bp, Homo sapien
gggcaatgtaaccctggtaacagtg

SEQ ID NO: 3911507 - DNA, 25 bp, Homo sapien
cgcatgtcaggcatagcactagatg

SEQ ID NO: 3911508 - DNA, 25 bp, Homo sapien
tcattactcattccacaatgatgtg

SEQ ID NO: 3911509 - DNA, 25 bp, Homo sapien
acaatgatgtgtggagcagcagcgc

SEQ ID NO: 3911510 - DNA, 25 bp, Homo sapien
gcagcagcgcatgtcaggcatagca

SEQ ID NO: 3911511 - DNA, 25 bp, Homo sapien
tttgaggaggcgattgttcagcaga

SEQ ID NO: 3911512 - DNA, 25 bp, Homo sapien
cacagacaaatcgtcagtgttccaa

SEQ ID NO: 3911513 - DNA, 25 bp, Homo sapien
tcaaagggtatatgttatgggggat

SEQ ID NO: 3911514 - DNA, 25 bp, Homo sapien
cacaaacacagacaaatcgtcagtg

SEQ ID NO: 3911515 - DNA, 25 bp, Homo sapien
gcaggctgtaaatgactcttttcaa

SEQ ID NO: 3911516 - DNA, 25 bp, Homo sapien
aacagacacattacttcccaagatt

SEQ ID NO: 3911517 - DNA, 25 bp, Homo sapien
gacacattacttcccaagattgcgg

SEQ ID NO: 3911518 - DNA, 25 bp, Homo sapien
cttaggtcaaacagcaggctgtaaa

SEQ ID NO: 3911519 - DNA, 25 bp, Homo sapien
cctctcccggattaatgtgaaggag

SEQ ID NO: 3911520 - DNA, 25 bp, Homo sapien
gattaatgtgaaggagtcctgtgtg

SEQ ID NO: 3911521 - DNA, 25 bp, Homo sapien
tgtggggaaggcaccggcttcctca

SEQ ID NO: 3911522 - DNA, 25 bp, Homo sapien
tcccggattaatgtgaaggagtcct

SEQ ID NO: 3911523 - DNA, 25 bp, Homo sapien
tgtagtcactgagacataggctagg

SEQ ID NO: 3911524 - DNA, 25 bp, Homo sapien
cactgagacataggctaggattggc

SEQ ID NO: 3911525 - DNA, 25 bp, Homo sapien
ttccttgtagtcactgagacatagg

SEQ ID NO: 3911526 - DNA, 25 bp, Homo sapien
tgagacataggctaggattggctga

SEQ ID NO: 3911527 - DNA, 25 bp, Homo sapien
tcctcgaatggaggctgctgtccag

SEQ ID NO: 3911528 - DNA, 25 bp, Homo sapien
tctttagctctcattcctcgaatgg

SEQ ID NO: 3911529 - DNA, 25 bp, Homo sapien
agaccagtaatttctgtgagcccac

SEQ ID NO: 3911530 - DNA, 25 bp, Homo sapien
cagaaaaggaagcttgccaagtttt

SEQ ID NO: 3911531 - DNA, 25 bp, Homo sapien
gcccgtcttcctggcaagacaagca

SEQ ID NO: 3911532 - DNA, 25 bp, Homo sapien
ttattagaggctggtgatgactccc

SEQ ID NO: 3911533 - DNA, 25 bp, Homo sapien
agagtgaatcggacacggatgctgc

SEQ ID NO: 3911534 - DNA, 25 bp, Homo sapien
gtctgcatttctaggagatggctcc

SEQ ID NO: 3911535 - DNA, 25 bp, Homo sapien
tgcgtctgagttatggccactctga

SEQ ID NO: 3911536 - DNA, 25 bp, Homo sapien
ttctaagaagaaccatgcgtctgag

SEQ ID NO: 3911537 - DNA, 25 bp, Homo sapien
gccactctgagctataaaagcattg

SEQ ID NO: 3911538 - DNA, 25 bp, Homo sapien
catgctttgcggtatagaaaaagac

SEQ ID NO: 3911539 - DNA, 25 bp, Homo sapien
ggttaatatcactctggctccaggg

SEQ ID NO: 3911540 - DNA, 25 bp, Homo sapien
gggttaatatcactctggctccagg

SEQ ID NO: 3911541 - DNA, 25 bp, Homo sapien
tctttgtccttccacgtctggattt

SEQ ID NO: 3911542 - DNA, 25 bp, Homo sapien
gctctttgtccttccacgtctggat

SEQ ID NO: 3911543 - DNA, 25 bp, Homo sapien
tgtccttccacgtctggattttggg

SEQ ID NO: 3911544 - DNA, 25 bp, Homo sapien
tttgtccttccacgtctggattttg

SEQ ID NO: 3911545 - DNA, 25 bp, Homo sapien
gggactgctgtggacctatagcctc

SEQ ID NO: 3911546 - DNA, 25 bp, Homo sapien
ctctctgctctagccctgctgatgg

SEQ ID NO: 3911547 - DNA, 25 bp, Homo sapien
tgtggacctatagcctctcctggct

SEQ ID NO: 3911548 - DNA, 25 bp, Homo sapien
ctgggctgatagttcctgaaatgta

SEQ ID NO: 3911549 - DNA, 25 bp, Homo sapien
tgaatccctaactgcatacctgtgc

SEQ ID NO: 3911550 - DNA, 25 bp, Homo sapien
tctgactctgtattattctctgtgc

SEQ ID NO: 3911551 - DNA, 25 bp, Homo sapien
tgagcctggttctgactctgtatta

SEQ ID NO: 3911552 - DNA, 25 bp, Homo sapien
tctctgtgctcagtaatgaatccct

SEQ ID NO: 3911553 - DNA, 25 bp, Homo sapien
ttatcaacagattcatactcagcca

SEQ ID NO: 3911554 - DNA, 25 bp, Homo sapien
tatcaacagattcatactcagccag

SEQ ID NO: 3911555 - DNA, 25 bp, Homo sapien
ctgtctgctactgctggttcctggg

SEQ ID NO: 3911556 - DNA, 25 bp, Homo sapien
gggaagcacatcgtcatagagtgga

SEQ ID NO: 3911557 - DNA, 25 bp, Homo sapien
tggatgaccgccactgggaaactga

SEQ ID NO: 3911558 - DNA, 25 bp, Homo sapien
gccaagcctgtctgctactgctggt

SEQ ID NO: 3911559 - DNA, 25 bp, Homo sapien
tacattccatggcaaaccaatttgg

SEQ ID NO: 3911560 - DNA, 25 bp, Homo sapien
ggcaaaccaatttggccatttctct

SEQ ID NO: 3911561 - DNA, 25 bp, Homo sapien
gggtcagttgggtttgtacattcca

SEQ ID NO: 3911562 - DNA, 25 bp, Homo sapien
tgaaatccaatcatggggtcagttg

SEQ ID NO: 3911563 - DNA, 25 bp, Homo sapien
ggaagtgggaagtctgcacaaatct

SEQ ID NO: 3911564 - DNA, 25 bp, Homo sapien
tcttgtttcatggatctctgcttct

SEQ ID NO: 3911565 - DNA, 25 bp, Homo sapien
gtgtcattctcactgcataccagat

SEQ ID NO: 3911566 - DNA, 25 bp, Homo sapien
taaacagtaggaatgagccaagctt

SEQ ID NO: 3911567 - DNA, 25 bp, Homo sapien
gactttgcagtaccacaggcacagg

SEQ ID NO: 3911568 - DNA, 25 bp, Homo sapien
cttaaagtccttcctagctcagaag

SEQ ID NO: 3911569 - DNA, 25 bp, Homo sapien
agtccttcctagctcagaagaaaca

SEQ ID NO: 3911570 - DNA, 25 bp, Homo sapien
tttagcacactcttcagcccatcca

SEQ ID NO: 3911571 - DNA, 25 bp, Homo sapien
aaacttaaagtccttcctagctcag

SEQ ID NO: 3911572 - DNA, 25 bp, Homo sapien
agaaccttcgttattgtgctttctc

SEQ ID NO: 3911573 - DNA, 25 bp, Homo sapien
ctcccagaaccttcgttattgtgct

SEQ ID NO: 3911574 - DNA, 25 bp, Homo sapien
tcccagaaccttcgttattgtgctt

SEQ ID NO: 3911575 - DNA, 25 bp, Homo sapien
ccagaaccttcgttattgtgctttc

SEQ ID NO: 3911576 - DNA, 25 bp, Homo sapien
tgtgaagcggagcttctgaatgata

SEQ ID NO: 3911577 - DNA, 25 bp, Homo sapien
ttctgtatgtgaagcggagcttctg

SEQ ID NO: 3911578 - DNA, 25 bp, Homo sapien
tgtatgtgaagcggagcttctgaat

SEQ ID NO: 3911579 - DNA, 25 bp, Homo sapien
tatgtgaagcggagcttctgaatga

SEQ ID NO: 3911580 - DNA, 25 bp, Homo sapien
ttatcatcagcaaagggtaaaaaga

SEQ ID NO: 3911581 - DNA, 25 bp, Homo sapien
tcattttatcatcagcaaagggtaa

SEQ ID NO: 3911582 - DNA, 25 bp, Homo sapien
cttcattttatcatcagcaaagggt

SEQ ID NO: 3911583 - DNA, 25 bp, Homo sapien
attttatcatcagcaaagggtaaaa

SEQ ID NO: 3911584 - DNA, 25 bp, Homo sapien
gggaatgttcctgtggggcgtgtat

SEQ ID NO: 3911585 - DNA, 25 bp, Homo sapien
ggaatgttcctgtggggcgtgtatc

SEQ ID NO: 3911586 - DNA, 25 bp, Homo sapien
gaatgttcctgtggggcgtgtatct

SEQ ID NO: 3911587 - DNA, 25 bp, Homo sapien
cattaccaagggcttgaaacccagg

SEQ ID NO: 3911588 - DNA, 25 bp, Homo sapien
gatgacttccaaagatctgagacct

SEQ ID NO: 3911589 - DNA, 25 bp, Homo sapien
ttccaaagatctgagacctcttggt

SEQ ID NO: 3911590 - DNA, 25 bp, Homo sapien
ctcagggtacaccaacagggagggc

SEQ ID NO: 3911591 - DNA, 25 bp, Homo sapien
atgtatttgtgttaaatgtccgggt

SEQ ID NO: 3911592 - DNA, 25 bp, Homo sapien
gcatgtatttgtgttaaatgtccgg

SEQ ID NO: 3911593 - DNA, 25 bp, Homo sapien
catgtatttgtgttaaatgtccggg

SEQ ID NO: 3911594 - DNA, 25 bp, Homo sapien
ctgcatgtatttgtgttaaatgtcc

SEQ ID NO: 3911595 - DNA, 25 bp, Homo sapien
tggttcatttgtttcctgatagagc

SEQ ID NO: 3911596 - DNA, 25 bp, Homo sapien
catttgtttcctgatagagctttac

SEQ ID NO: 3911597 - DNA, 25 bp, Homo sapien
tcatttgtttcctgatagagcttta

SEQ ID NO: 3911598 - DNA, 25 bp, Homo sapien
gttcatttgtttcctgatagagctt

SEQ ID NO: 3911599 - DNA, 25 bp, Homo sapien
aatgcccacagagatcactatatct

SEQ ID NO: 3911600 - DNA, 25 bp, Homo sapien
gaggaggcttaagagccttttggac

SEQ ID NO: 3911601 - DNA, 25 bp, Homo sapien
gcttaagagccttttggaccagatt

SEQ ID NO: 3911602 - DNA, 25 bp, Homo sapien
ttttggaccagattacaaatgccca

SEQ ID NO: 3911603 - DNA, 25 bp, Homo sapien
ctggtcaacagcatgatcctcgtat

SEQ ID NO: 3911604 - DNA, 25 bp, Homo sapien
tgtccttggcgtgaaccttcggcaa

SEQ ID NO: 3911605 - DNA, 25 bp, Homo sapien
tcttcaaccagacatcactaaagag

SEQ ID NO: 3911606 - DNA, 25 bp, Homo sapien
cctcggctatgttgatggtatctct

SEQ ID NO: 3911607 - DNA, 25 bp, Homo sapien
gttttgcacttggattatccaactc

SEQ ID NO: 3911608 - DNA, 25 bp, Homo sapien
atttgttttgcacttggattatcca

SEQ ID NO: 3911609 - DNA, 25 bp, Homo sapien
ttgttttgcacttggattatccaac

SEQ ID NO: 3911610 - DNA, 25 bp, Homo sapien
ctagaatttgttttgcacttggatt

SEQ ID NO: 3911611 - DNA, 25 bp, Homo sapien
tttttgtctttctcggtaccataga

SEQ ID NO: 3911612 - DNA, 25 bp, Homo sapien
atttttgtctttctcggtaccatag

SEQ ID NO: 3911613 - DNA, 25 bp, Homo sapien
ttgtctttctcggtaccatagaaca

SEQ ID NO: 3911614 - DNA, 25 bp, Homo sapien
tctttctcggtaccatagaacacca

SEQ ID NO: 3911615 - DNA, 25 bp, Homo sapien
aaaaggaatcaaaacttcactctga

SEQ ID NO: 3911616 - DNA, 25 bp, Homo sapien
tgtcaaaaggaatcaaaacttcact

SEQ ID NO: 3911617 - DNA, 25 bp, Homo sapien
ggaatcaaaacttcactctgagatt

SEQ ID NO: 3911618 - DNA, 25 bp, Homo sapien
aaggaatcaaaacttcactctgaga

SEQ ID NO: 3911619 - DNA, 25 bp, Homo sapien
atcgccctcgattttgtaatacaac

SEQ ID NO: 3911620 - DNA, 25 bp, Homo sapien
catcgccctcgattttgtaatacaa

SEQ ID NO: 3911621 - DNA, 25 bp, Homo sapien
tggctactgttcactttggcgcagg

SEQ ID NO: 3911622 - DNA, 25 bp, Homo sapien
gctactgttcactttggcgcaggga

SEQ ID NO: 3911623 - DNA, 25 bp, Homo sapien
gttggctactgttcactttggcgca

SEQ ID NO: 3911624 - DNA, 25 bp, Homo sapien
ctactgttcactttggcgcagggaa

SEQ ID NO: 3911625 - DNA, 25 bp, Homo sapien
tcctctcctggaaggtccatcctag

SEQ ID NO: 3911626 - DNA, 25 bp, Homo sapien
tctcctggaaggtccatcctagacc

SEQ ID NO: 3911627 - DNA, 25 bp, Homo sapien
ctgaccaagcaggtgattcgagtct

SEQ ID NO: 3911628 - DNA, 25 bp, Homo sapien
ttcgagtctgatatcctgtgttcct

SEQ ID NO: 3911629 - DNA, 25 bp, Homo sapien
tcacaggatctgtcagaggtgcctg

SEQ ID NO: 3911630 - DNA, 25 bp, Homo sapien
atcacaggatctgtcagaggtgcct

SEQ ID NO: 3911631 - DNA, 25 bp, Homo sapien
ctagcccccgaagggtatcacagga

SEQ ID NO: 3911632 - DNA, 25 bp, Homo sapien
agagcctagcccccgaagggtatca

SEQ ID NO: 3911633 - DNA, 25 bp, Homo sapien
tggactcccttggtgctcctacagc

SEQ ID NO: 3911634 - DNA, 25 bp, Homo sapien
tatattctggcctcaattgtccttt

SEQ ID NO: 3911635 - DNA, 25 bp, Homo sapien
gtccctgagtctgcaagccctcaga

SEQ ID NO: 3911636 - DNA, 25 bp, Homo sapien
acaaaaccagatgccttaacttggc

SEQ ID NO: 3911637 - DNA, 25 bp, Homo sapien
ggaattccagatcctcgcaaggaag

SEQ ID NO: 3911638 - DNA, 25 bp, Homo sapien
gaattcctggccgtcaatgaggtcc

SEQ ID NO: 3911639 - DNA, 25 bp, Homo sapien
cagaaagcttctcctcccgaggtac

SEQ ID NO: 3911640 - DNA, 25 bp, Homo sapien
cggcccgttgctattgaattcctgg

SEQ ID NO: 3911641 - DNA, 25 bp, Homo sapien
gctcgtcaatgggagggcagtacca

SEQ ID NO: 3911642 - DNA, 25 bp, Homo sapien
caaggtggtcggagaattggcacac

SEQ ID NO: 3911643 - DNA, 25 bp, Homo sapien
acagcaggccctcggcacctgttta

SEQ ID NO: 3911644 - DNA, 25 bp, Homo sapien
ttggcacacctgtataaacagcagg

SEQ ID NO: 3911645 - DNA, 25 bp, Homo sapien
caactcccaagtcagatgtggggct

SEQ ID NO: 3911646 - DNA, 25 bp, Homo sapien
gatttcaactcccaagtcagatgtg

SEQ ID NO: 3911647 - DNA, 25 bp, Homo sapien
tttcaactcccaagtcagatgtggg

SEQ ID NO: 3911648 - DNA, 25 bp, Homo sapien
ggatttcaactcccaagtcagatgt

SEQ ID NO: 3911649 - DNA, 25 bp, Homo sapien
tgctcaagcctcatcacgtatatac

SEQ ID NO: 3911650 - DNA, 25 bp, Homo sapien
ttccatttgatggtggaaggctgtg

SEQ ID NO: 3911651 - DNA, 25 bp, Homo sapien
gtccagtaacaagccaagatctgtc

SEQ ID NO: 3911652 - DNA, 25 bp, Homo sapien
aagtccagtaacaagccaagatctg

SEQ ID NO: 3911653 - DNA, 25 bp, Homo sapien
tcaacacaatccatttgagcccagg

SEQ ID NO: 3911654 - DNA, 25 bp, Homo sapien
tgtcaatagactctgacaggcacac

SEQ ID NO: 3911655 - DNA, 25 bp, Homo sapien
cacaatccatttgagcccaggttca

SEQ ID NO: 3911656 - DNA, 25 bp, Homo sapien
cccaggttcacagcttggtcagtgt

SEQ ID NO: 3911657 - DNA, 25 bp, Homo sapien
cctctattttactacgactattcag

SEQ ID NO: 3911658 - DNA, 25 bp, Homo sapien
acttcctctattttactacgactat

SEQ ID NO: 3911659 - DNA, 25 bp, Homo sapien
attttactacgactattcagacagg

SEQ ID NO: 3911660 - DNA, 25 bp, Homo sapien
tttactacgactattcagacaggga

SEQ ID NO: 3911661 - DNA, 25 bp, Homo sapien
caaaaaagccttcttgcaagggcag

SEQ ID NO: 3911662 - DNA, 25 bp, Homo sapien
gcaggacgcagaaagtgttctgcag

SEQ ID NO: 3911663 - DNA, 25 bp, Homo sapien
tcttgcaagggcaggacgcagaaag

SEQ ID NO: 3911664 - DNA, 25 bp, Homo sapien
tcaaaaaagccttcttgcaagggca

SEQ ID NO: 3911665 - DNA, 25 bp, Homo sapien
cagcctgatagtatgggacgtcttc

SEQ ID NO: 3911666 - DNA, 25 bp, Homo sapien
aggacctgcccaataggaccccagt

SEQ ID NO: 3911667 - DNA, 25 bp, Homo sapien
caagtgctcatggttcagcctgata

SEQ ID NO: 3911668 - DNA, 25 bp, Homo sapien
catacagtagacatcctcttgaggc

SEQ ID NO: 3911669 - DNA, 25 bp, Homo sapien
gagaaccctggcctcactgaaagtg

SEQ ID NO: 3911670 - DNA, 25 bp, Homo sapien
gggacacgacacaaatcacaggagc

SEQ ID NO: 3911671 - DNA, 25 bp, Homo sapien
tagacagttcaattgaccaagcaag

SEQ ID NO: 3911672 - DNA, 25 bp, Homo sapien
gcctcactgaaagtgttgacggcct

SEQ ID NO: 3911673 - DNA, 25 bp, Homo sapien
tgctcagaaatactacagcggtttg

SEQ ID NO: 3911674 - DNA, 25 bp, Homo sapien
tgggcactagtggattctaactgcc

SEQ ID NO: 3911675 - DNA, 25 bp, Homo sapien
cagctgcctgtaatcatgggcacta

SEQ ID NO: 3911676 - DNA, 25 bp, Homo sapien
cagcggtttgggaagtcagctgcct

SEQ ID NO: 3911677 - DNA, 25 bp, Homo sapien
attttgataaccatagtagccttag

SEQ ID NO: 3911678 - DNA, 25 bp, Homo sapien
tctaagagctttaggaatctcaaag

SEQ ID NO: 3911679 - DNA, 25 bp, Homo sapien
agcatcagcactagggccatttcct

SEQ ID NO: 3911680 - DNA, 25 bp, Homo sapien
catagtagccttagcatcagcacta

SEQ ID NO: 3911681 - DNA, 25 bp, Homo sapien
aataggattgaaatgggctactttc

SEQ ID NO: 3911682 - DNA, 25 bp, Homo sapien
ataggattgaaatgggctactttca

SEQ ID NO: 3911683 - DNA, 25 bp, Homo sapien
tttccagtaagaatcatctcaatgc

SEQ ID NO: 3911684 - DNA, 25 bp, Homo sapien
ccagtaagaatcatctcaatgcggc

SEQ ID NO: 3911685 - DNA, 25 bp, Homo sapien
tactttaatgctgaatttgctctcg

SEQ ID NO: 3911686 - DNA, 25 bp, Homo sapien
tccttttccagtaagaatcatctca

SEQ ID NO: 3911687 - DNA, 25 bp, Homo sapien
tgggccaccgaaagagtgtccagcc

SEQ ID NO: 3911688 - DNA, 25 bp, Homo sapien
ccaccgaaagagtgtccagccccac

SEQ ID NO: 3911689 - DNA, 25 bp, Homo sapien
tttctgggccaccgaaagagtgtcc

SEQ ID NO: 3911690 - DNA, 25 bp, Homo sapien
ttctgggccaccgaaagagtgtcca

SEQ ID NO: 3911691 - DNA, 25 bp, Homo sapien
ttggaactcttgatttgcattattt

SEQ ID NO: 3911692 - DNA, 25 bp, Homo sapien
gtggcagcttccattagccagccca

SEQ ID NO: 3911693 - DNA, 25 bp, Homo sapien
gcttcccacttcgtatccacttgat

SEQ ID NO: 3911694 - DNA, 25 bp, Homo sapien
agtgctagggatagaagacattctc

SEQ ID NO: 3911695 - DNA, 25 bp, Homo sapien
ccacttgatttggtgcttcagtgaa

SEQ ID NO: 3911696 - DNA, 25 bp, Homo sapien
taaagggtggaggagaaatagcctc

SEQ ID NO: 3911697 - DNA, 25 bp, Homo sapien
ttgcagctggggatgtaaagggtgg

SEQ ID NO: 3911698 - DNA, 25 bp, Homo sapien
ttgcttgaatgtgaagcaatttatt

SEQ ID NO: 3911699 - DNA, 25 bp, Homo sapien
cctggagcacttgacacagagttgc

SEQ ID NO: 3911700 - DNA, 25 bp, Homo sapien
tagaggcgagcctactctggttact

SEQ ID NO: 3911701 - DNA, 25 bp, Homo sapien
tgtcaaaaggctcaaagtgacccga

SEQ ID NO: 3911702 - DNA, 25 bp, Homo sapien
ggtgctaccctgaagtccagcgtgg

SEQ ID NO: 3911703 - DNA, 25 bp, Homo sapien
tgggcagcaaacgtccatggagcaa

SEQ ID NO: 3911704 - DNA, 25 bp, Homo sapien
gcaacatgcaggtccaattgtgaca

SEQ ID NO: 3911705 - DNA, 25 bp, Homo sapien
caacatctgcttcacggtggtgaaa

SEQ ID NO: 3911706 - DNA, 25 bp, Homo sapien
acttggacgccagacagctcagctt

SEQ ID NO: 3911707 - DNA, 25 bp, Homo sapien
tgccacttggccagcacttggacgc

SEQ ID NO: 3911708 - DNA, 25 bp, Homo sapien
cagaataagtacctttagtgttagc

SEQ ID NO: 3911709 - DNA, 25 bp, Homo sapien
cacagaataagtacctttagtgtta

SEQ ID NO: 3911710 - DNA, 25 bp, Homo sapien
agaataagtacctttagtgttagct

SEQ ID NO: 3911711 - DNA, 25 bp, Homo sapien
gcacagaataagtacctttagtgtt

SEQ ID NO: 3911712 - DNA, 25 bp, Homo sapien
cctactggctaaaattgggcagcat

SEQ ID NO: 3911713 - DNA, 25 bp, Homo sapien
tataaagggtatatggccaagaggt

SEQ ID NO: 3911714 - DNA, 25 bp, Homo sapien
gtatgccagggcattctcttcactg

SEQ ID NO: 3911715 - DNA, 25 bp, Homo sapien
acttgacccacagttacaacaaaca

SEQ ID NO: 3911716 - DNA, 25 bp, Homo sapien
tgaagtatatcacctcaggatgcag

SEQ ID NO: 3911717 - DNA, 25 bp, Homo sapien
caaaagctgaagtctagaaccgaag

SEQ ID NO: 3911718 - DNA, 25 bp, Homo sapien
gagataacatgatgcaaacgttgct

SEQ ID NO: 3911719 - DNA, 25 bp, Homo sapien
tcattacagaggttaaatagacttt

SEQ ID NO: 3911720 - DNA, 25 bp, Homo sapien
gctggatgactcttgaaatgaagcc

SEQ ID NO: 3911721 - DNA, 25 bp, Homo sapien
tgctggatgactcttgaaatgaagc

SEQ ID NO: 3911722 - DNA, 25 bp, Homo sapien
atttggctttacaatcttcattgac

SEQ ID NO: 3911723 - DNA, 25 bp, Homo sapien
ttacacatttggctttacaatcttc

SEQ ID NO: 3911724 - DNA, 25 bp, Homo sapien
acacatttggctttacaatcttcat

SEQ ID NO: 3911725 - DNA, 25 bp, Homo sapien
acatttggctttacaatcttcattg

SEQ ID NO: 3911726 - DNA, 25 bp, Homo sapien
agtcatgtgtccttgttcccgtggc

SEQ ID NO: 3911727 - DNA, 25 bp, Homo sapien
tccttgttcccgtggctgcctgttc

SEQ ID NO: 3911728 - DNA, 25 bp, Homo sapien
tgtgtccttgttcccgtggctgcct

SEQ ID NO: 3911729 - DNA, 25 bp, Homo sapien
ctcccttagtcatgtgtccttgttc

SEQ ID NO: 3911730 - DNA, 25 bp, Homo sapien
agcaggaacagcaagccgatgatga

SEQ ID NO: 3911731 - DNA, 25 bp, Homo sapien
tgatgacccacttaaagcggcgcca

SEQ ID NO: 3911732 - DNA, 25 bp, Homo sapien
gcggcgccacacgatgaacttcatg

SEQ ID NO: 3911733 - DNA, 25 bp, Homo sapien
catggtcttgcatgggttggtgaac

SEQ ID NO: 3911734 - DNA, 25 bp, Homo sapien
taaataccagattaggaggaccaca

SEQ ID NO: 3911735 - DNA, 25 bp, Homo sapien
cccttcgttgactgagaaaggctct

SEQ ID NO: 3911736 - DNA, 25 bp, Homo sapien
taaaatgaagccagatcaccaacct

SEQ ID NO: 3911737 - DNA, 25 bp, Homo sapien
gaaaggctctttaacctacgacagc

SEQ ID NO: 3911738 - DNA, 25 bp, Homo sapien
tctcgtcggcctccttctcgttgag

SEQ ID NO: 3911739 - DNA, 25 bp, Homo sapien
ccagcttggggttcatgttgggttc

SEQ ID NO: 3911740 - DNA, 25 bp, Homo sapien
cggctggcctctcgtcggcctcctt

SEQ ID NO: 3911741 - DNA, 25 bp, Homo sapien
ttctcgttgaggatttccaatgtca

SEQ ID NO: 3911742 - DNA, 25 bp, Homo sapien
ggttcctgagtgatgttcccagcac

SEQ ID NO: 3911743 - DNA, 25 bp, Homo sapien
tgagaacagtgaggccaaagtgaaa

SEQ ID NO: 3911744 - DNA, 25 bp, Homo sapien
tgctcatggcaaccctacaaaggta

SEQ ID NO: 3911745 - DNA, 25 bp, Homo sapien
gaaagtggtctagaaacttgcccac

SEQ ID NO: 3911746 - DNA, 25 bp, Homo sapien
gcctagcattaattaacttccctga

SEQ ID NO: 3911747 - DNA, 25 bp, Homo sapien
gcatctcccaccttatattgtaaga

SEQ ID NO: 3911748 - DNA, 25 bp, Homo sapien
tacgaaattgtactagaagcctagc

SEQ ID NO: 3911749 - DNA, 25 bp, Homo sapien
aggaaaatatagtgaaaccacctgg

SEQ ID NO: 3911750 - DNA, 25 bp, Homo sapien
tttctctgcgtagcatggccaccat

SEQ ID NO: 3911751 - DNA, 25 bp, Homo sapien
catggacttctgctcaaagagggag

SEQ ID NO: 3911752 - DNA, 25 bp, Homo sapien
tcatggctttgaggtccggaatcat

SEQ ID NO: 3911753 - DNA, 25 bp, Homo sapien
ggcgccatctttctctgcgtagcat

SEQ ID NO: 3911754 - DNA, 25 bp, Homo sapien
gaatgatcgtgtgacgcaagtcaag

SEQ ID NO: 3911755 - DNA, 25 bp, Homo sapien
cgtgtgacgcaagtcaagttctagg

SEQ ID NO: 3911756 - DNA, 25 bp, Homo sapien
ttttgcaggaatgatcgtgtgacgc

SEQ ID NO: 3911757 - DNA, 25 bp, Homo sapien
ggtgattttgcaggaatgatcgtgt

SEQ ID NO: 3911758 - DNA, 25 bp, Homo sapien
tgggattcgaaattccgtttggtca

SEQ ID NO: 3911759 - DNA, 25 bp, Homo sapien
cagcctgggtgggattcgaaattcc

SEQ ID NO: 3911760 - DNA, 25 bp, Homo sapien
ccatatctgaatgatcagcctgggt

SEQ ID NO: 3911761 - DNA, 25 bp, Homo sapien
tcccatatctgaatgatcagcctgg

SEQ ID NO: 3911762 - DNA, 25 bp, Homo sapien
ttcccagcggcatatttcagagctc

SEQ ID NO: 3911763 - DNA, 25 bp, Homo sapien
tcccagcggcatatttcagagctca

SEQ ID NO: 3911764 - DNA, 25 bp, Homo sapien
aaagatctgtaatggacatctgttt

SEQ ID NO: 3911765 - DNA, 25 bp, Homo sapien
ttttttcgcaacgatacagagttgt

SEQ ID NO: 3911766 - DNA, 25 bp, Homo sapien
tcccttcaccatccaaagatctgta

SEQ ID NO: 3911767 - DNA, 25 bp, Homo sapien
tgttcggctggaaggtagtcaaacg

SEQ ID NO: 3911768 - DNA, 25 bp, Homo sapien
acttttaaggtaactcactgaggag

SEQ ID NO: 3911769 - DNA, 25 bp, Homo sapien
cactaggcatggtatttatgcacga

SEQ ID NO: 3911770 - DNA, 25 bp, Homo sapien
gtcaaacagctcctataggtatacg

SEQ ID NO: 3911771 - DNA, 25 bp, Homo sapien
aatataatacccagctgtgtctagc

SEQ ID NO: 3911772 - DNA, 25 bp, Homo sapien
tgcacgcaacatctatgatcgaggc

SEQ ID NO: 3911773 - DNA, 25 bp, Homo sapien
catagacatgggctgctggtaataa

SEQ ID NO: 3911774 - DNA, 25 bp, Homo sapien
cacttgacatgttggatgctggcac

SEQ ID NO: 3911775 - DNA, 25 bp, Homo sapien
aaggcatagccatccacagagacga

SEQ ID NO: 3911776 - DNA, 25 bp, Homo sapien
tttgacgtagatgtcactcatttcc

SEQ ID NO: 3911777 - DNA, 25 bp, Homo sapien
tccagatgatcacacgcaggtagta

SEQ ID NO: 3911778 - DNA, 25 bp, Homo sapien
tctcctgtgatgcttttctcgtcca

SEQ ID NO: 3911779 - DNA, 25 bp, Homo sapien
tcgtccaagataacgtccttggtgt

SEQ ID NO: 3911780 - DNA, 25 bp, Homo sapien
ttccggggtgtgatgttgaaaggag

SEQ ID NO: 3911781 - DNA, 25 bp, Homo sapien
ctttccggggtgtgatgttgaaagg

SEQ ID NO: 3911782 - DNA, 25 bp, Homo sapien
catccacccacatctgaagttttcc

SEQ ID NO: 3911783 - DNA, 25 bp, Homo sapien
ttcttggctttccggggtgtgatgt

SEQ ID NO: 3911784 - DNA, 25 bp, Homo sapien
cagtctgtggctaatgctggaggca

SEQ ID NO: 3911785 - DNA, 25 bp, Homo sapien
gaatattaggcgtccagtgtctccc

SEQ ID NO: 3911786 - DNA, 25 bp, Homo sapien
ggctcagggctctacaattcatcaa

SEQ ID NO: 3911787 - DNA, 25 bp, Homo sapien
gcaactaatctctagggctcagggc

SEQ ID NO: 3911788 - DNA, 25 bp, Homo sapien
gatgtgaagagcaagccgctcttca

SEQ ID NO: 3911789 - DNA, 25 bp, Homo sapien
ctggaaggtgctgtgcaaagtcctt

SEQ ID NO: 3911790 - DNA, 25 bp, Homo sapien
ggtgctgtgcaaagtccttgtttcc

SEQ ID NO: 3911791 - DNA, 25 bp, Homo sapien
tgtgaagagcaagccgctcttcagg

SEQ ID NO: 3911792 - DNA, 25 bp, Homo sapien
gtttacaatccacagctaggtgctc

SEQ ID NO: 3911793 - DNA, 25 bp, Homo sapien
tgtaccagtttacaatccacagcta

SEQ ID NO: 3911794 - DNA, 25 bp, Homo sapien
ttacaatccacagctaggtgctcac

SEQ ID NO: 3911795 - DNA, 25 bp, Homo sapien
ccagtttacaatccacagctaggtg

SEQ ID NO: 3911796 - DNA, 25 bp, Homo sapien
gggaagcctttgaatctggcgacat

SEQ ID NO: 3911797 - DNA, 25 bp, Homo sapien
tactcccatcttcggaaaggatggg

SEQ ID NO: 3911798 - DNA, 25 bp, Homo sapien
gatctcgccaggtattgactccaga

SEQ ID NO: 3911799 - DNA, 25 bp, Homo sapien
caagctgtagtctcgtcctccatat

SEQ ID NO: 3911800 - DNA, 25 bp, Homo sapien
acagtactcctctggtatgccgcag

SEQ ID NO: 3911801 - DNA, 25 bp, Homo sapien
tttcatcccgggtaaaggtgtcata

SEQ ID NO: 3911802 - DNA, 25 bp, Homo sapien
tttcttgaggtaagtagcagctcag

SEQ ID NO: 3911803 - DNA, 25 bp, Homo sapien
aatcatagacagaaattttcaggtc

SEQ ID NO: 3911804 - DNA, 25 bp, Homo sapien
gtgatctcggtcttcaatgactttt

SEQ ID NO: 3911805 - DNA, 25 bp, Homo sapien
ttgggaatgtagtgatctcggtctt

SEQ ID NO: 3911806 - DNA, 25 bp, Homo sapien
ctgccaaagactgggttgagagtgt

SEQ ID NO: 3911807 - DNA, 25 bp, Homo sapien
cggtcttcaatgacttttttgccca

SEQ ID NO: 3911808 - DNA, 25 bp, Homo sapien
gacgctgtcaggtaattcccgaaac

SEQ ID NO: 3911809 - DNA, 25 bp, Homo sapien
ggagctctaagcctcgaacaatgta

SEQ ID NO: 3911810 - DNA, 25 bp, Homo sapien
tcatccggcagagggtagatccgaa

SEQ ID NO: 3911811 - DNA, 25 bp, Homo sapien
cgtgcattcctgtgggacgctgtca

SEQ ID NO: 3911812 - DNA, 25 bp, Homo sapien
ttgaaggagcgagccaacaagacct

SEQ ID NO: 3911813 - DNA, 25 bp, Homo sapien
cacagcgatgttcagtagggttggc

SEQ ID NO: 3911814 - DNA, 25 bp, Homo sapien
caagcagcatggaataagcacctac

SEQ ID NO: 3911815 - DNA, 25 bp, Homo sapien
tactgagaaggatttgagaccacac

SEQ ID NO: 3911816 - DNA, 25 bp, Homo sapien
gagaagtctgtcaggccctcaaatt

SEQ ID NO: 3911817 - DNA, 25 bp, Homo sapien
cttgaacgtatctgagaagtctgtc

SEQ ID NO: 3911818 - DNA, 25 bp, Homo sapien
gacttgcctcggtacaacttgaacg

SEQ ID NO: 3911819 - DNA, 25 bp, Homo sapien
cttcattttcatccgacttgcctcg

SEQ ID NO: 3911820 - DNA, 25 bp, Homo sapien
tgaatacacacaaccacatgatgag

SEQ ID NO: 3911821 - DNA, 25 bp, Homo sapien
gatgagtctcaaaactacaacgtgg

SEQ ID NO: 3911822 - DNA, 25 bp, Homo sapien
tccaatcagttgctcctaggaggga

SEQ ID NO: 3911823 - DNA, 25 bp, Homo sapien
gacagtatcaagtgggcctgaggtt

SEQ ID NO: 3911824 - DNA, 25 bp, Homo sapien
gaaactcatgcaagagggctctccg

SEQ ID NO: 3911825 - DNA, 25 bp, Homo sapien
tcaatagctgtcctcaagtccctgg

SEQ ID NO: 3911826 - DNA, 25 bp, Homo sapien
gaaagctcagagctagtcagccgtg

SEQ ID NO: 3911827 - DNA, 25 bp, Homo sapien
gcctaattagtgtggtgccagccca

SEQ ID NO: 3911828 - DNA, 25 bp, Homo sapien
taaaatttactccaccagtccacga

SEQ ID NO: 3911829 - DNA, 25 bp, Homo sapien
tcatgttcccctgaggaagcataaa

SEQ ID NO: 3911830 - DNA, 25 bp, Homo sapien
tatactgtccgcatttttcatgttc

SEQ ID NO: 3911831 - DNA, 25 bp, Homo sapien
cttgagcttggaatagcctttctga

SEQ ID NO: 3911832 - DNA, 25 bp, Homo sapien
ttccccaggagagtccaatacgtag

SEQ ID NO: 3911833 - DNA, 25 bp, Homo sapien
tgagaccagggcatccaataagctt

SEQ ID NO: 3911834 - DNA, 25 bp, Homo sapien
cgtgaaacgaaaggcaggaggcatc

SEQ ID NO: 3911835 - DNA, 25 bp, Homo sapien
tatcctaggagatgcaatcagtctg

SEQ ID NO: 3911836 - DNA, 25 bp, Homo sapien
ctgctcgtgcacatgtcccgtgagg

SEQ ID NO: 3911837 - DNA, 25 bp, Homo sapien
tcccgtgaggaagagggcaaaccat

SEQ ID NO: 3911838 - DNA, 25 bp, Homo sapien
gggcaaaccatataacaggtcacat

SEQ ID NO: 3911839 - DNA, 25 bp, Homo sapien
tcgtgcacatgtcccgtgaggaaga

SEQ ID NO: 3911840 - DNA, 25 bp, Homo sapien
ttatgttcatcctgaagggctcttc

SEQ ID NO: 3911841 - DNA, 25 bp, Homo sapien
ttttgctgagtgctgttgacatact

SEQ ID NO: 3911842 - DNA, 25 bp, Homo sapien
tgtcgctggagaagccattttgctg

SEQ ID NO: 3911843 - DNA, 25 bp, Homo sapien
ctgggtgtcccatacactgataaat

SEQ ID NO: 3911844 - DNA, 25 bp, Homo sapien
tctctgatctgaatgttgcaatgct

SEQ ID NO: 3911845 - DNA, 25 bp, Homo sapien
ggcgtgttgcatgttatctctgatc

SEQ ID NO: 3911846 - DNA, 25 bp, Homo sapien
caaatgatctttctcagactgtcca

SEQ ID NO: 3911847 - DNA, 25 bp, Homo sapien
gccagtaatggtttggtgtcttcca

SEQ ID NO: 3911848 - DNA, 25 bp, Homo sapien
cgataacgatgtcccggcatggtgg

SEQ ID NO: 3911849 - DNA, 25 bp, Homo sapien
ggtgtcttccatttcgataacgatg

SEQ ID NO: 3911850 - DNA, 25 bp, Homo sapien
ttccatttcgataacgatgtcccgg

SEQ ID NO: 3911851 - DNA, 25 bp, Homo sapien
cataagggtcacagcgaaagcggtc

SEQ ID NO: 3911852 - DNA, 25 bp, Homo sapien
tggtcgatgaccttgatcaccagtg

SEQ ID NO: 3911853 - DNA, 25 bp, Homo sapien
catgtacaattcctccttgggcaag

SEQ ID NO: 3911854 - DNA, 25 bp, Homo sapien
tccaggcgctcgatggtgcactggc

SEQ ID NO: 3911855 - DNA, 25 bp, Homo sapien
ctctgctgaccaaggctagattcca

SEQ ID NO: 3911856 - DNA, 25 bp, Homo sapien
taggggcccatttggtatgtggttc

SEQ ID NO: 3911857 - DNA, 25 bp, Homo sapien
ggcttgacacaggaatagaaactgg

SEQ ID NO: 3911858 - DNA, 25 bp, Homo sapien
gaatcatgagctgacctaggggccc

SEQ ID NO: 3911859 - DNA, 25 bp, Homo sapien
ggctgccaaggtcatggccctatca

SEQ ID NO: 3911860 - DNA, 25 bp, Homo sapien
cacagttatgggctgccaaggtcat

SEQ ID NO: 3911861 - DNA, 25 bp, Homo sapien
ggtcatggccctatcaccccatata

SEQ ID NO: 3911862 - DNA, 25 bp, Homo sapien
gttatgggctgccaaggtcatggcc

SEQ ID NO: 3911863 - DNA, 25 bp, Homo sapien
ttctggtccatgcacagttgtaggg

SEQ ID NO: 3911864 - DNA, 25 bp, Homo sapien
tccagaaggttctggtccatgcaca

SEQ ID NO: 3911865 - DNA, 25 bp, Homo sapien
gacagccagtccttatccagaaggt

SEQ ID NO: 3911866 - DNA, 25 bp, Homo sapien
gaaggttctggtccatgcacagttg

SEQ ID NO: 3911867 - DNA, 25 bp, Homo sapien
gggatgtgatagaagccatctggaa

SEQ ID NO: 3911868 - DNA, 25 bp, Homo sapien
tatttcttaagccccaagctagaat

SEQ ID NO: 3911869 - DNA, 25 bp, Homo sapien
ctccacactccacaacaagactggg

SEQ ID NO: 3911870 - DNA, 25 bp, Homo sapien
tcttaaggtttttgatcaccaccga

SEQ ID NO: 3911871 - DNA, 25 bp, Homo sapien
gcagtgagctggaccacaggcctga

SEQ ID NO: 3911872 - DNA, 25 bp, Homo sapien
cccctgggggaccatgtatagattt

SEQ ID NO: 3911873 - DNA, 25 bp, Homo sapien
gaagaatgggaaggttggagccatc

SEQ ID NO: 3911874 - DNA, 25 bp, Homo sapien
catgtatagatttggcgccctttga

SEQ ID NO: 3911875 - DNA, 25 bp, Homo sapien
gaatcagctctgcagttacaagaac

SEQ ID NO: 3911876 - DNA, 25 bp, Homo sapien
gttacaagaacatccccgcaggctt

SEQ ID NO: 3911877 - DNA, 25 bp, Homo sapien
ccagagaagtttgggtgtgatgtcc

SEQ ID NO: 3911878 - DNA, 25 bp, Homo sapien
caggagagaaaatgcttcgtcctaa

SEQ ID NO: 3911879 - DNA, 25 bp, Homo sapien
gaatataattgtttggtcccacgtg

SEQ ID NO: 3911880 - DNA, 25 bp, Homo sapien
gataactttgggtggattctgtaga

SEQ ID NO: 3911881 - DNA, 25 bp, Homo sapien
tcagtggttttgctccgatggagga

SEQ ID NO: 3911882 - DNA, 25 bp, Homo sapien
tcccacgtgggattcagggttgaat

SEQ ID NO: 3911883 - DNA, 25 bp, Homo sapien
gaaaagctatccttatctaaagcca

SEQ ID NO: 3911884 - DNA, 25 bp, Homo sapien
aagctatccttatctaaagccaaga

SEQ ID NO: 3911885 - DNA, 25 bp, Homo sapien
catagcagcgcagatggtagatgta

SEQ ID NO: 3911886 - DNA, 25 bp, Homo sapien
gaggtttctggcttgatagacatag

SEQ ID NO: 3911887 - DNA, 25 bp, Homo sapien
tgggggtgtttgctccgaacacagt

SEQ ID NO: 3911888 - DNA, 25 bp, Homo sapien
ccccatcttcggtagtgtctgcccc

SEQ ID NO: 3911889 - DNA, 25 bp, Homo sapien
tgtttgctccgaacacagtggtggc

SEQ ID NO: 3911890 - DNA, 25 bp, Homo sapien
atccccatcttcggtagtgtctgcc

SEQ ID NO: 3911891 - DNA, 25 bp, Homo sapien
gcaccttcaagtttaaagatggcag

SEQ ID NO: 3911892 - DNA, 25 bp, Homo sapien
tcttggtcttgcaattcctccatgg

SEQ ID NO: 3911893 - DNA, 25 bp, Homo sapien
gagaagcatattcccagccctcttg

SEQ ID NO: 3911894 - DNA, 25 bp, Homo sapien
cgtctgcggcggaaggtatctgaac

SEQ ID NO: 3911895 - DNA, 25 bp, Homo sapien
ccttcgccgtctatgagtgtggtac

SEQ ID NO: 3911896 - DNA, 25 bp, Homo sapien
agtgtggtacattttctctgctgca

SEQ ID NO: 3911897 - DNA, 25 bp, Homo sapien
tctttcttgcgttttcggaccagcc

SEQ ID NO: 3911898 - DNA, 25 bp, Homo sapien
ccaggatttgggcttatgatcagga

SEQ ID NO: 3911899 - DNA, 25 bp, Homo sapien
caacctggaggacaagtcaactcgc

SEQ ID NO: 3911900 - DNA, 25 bp, Homo sapien
taagaccatgcatcatcttcccatt

SEQ ID NO: 3911901 - DNA, 25 bp, Homo sapien
tccaccgctcgatttatgtcataag

SEQ ID NO: 3911902 - DNA, 25 bp, Homo sapien
ctttctcatccaccgctcgatttat

SEQ ID NO: 3911903 - DNA, 25 bp, Homo sapien
ccgtgtaggtgtcctcggccggctt

SEQ ID NO: 3911904 - DNA, 25 bp, Homo sapien
gggtagcggctctcgttctgataga

SEQ ID NO: 3911905 - DNA, 25 bp, Homo sapien
gcggctctcgttctgatagacttca

SEQ ID NO: 3911906 - DNA, 25 bp, Homo sapien
agacttcatcagtgaactccgtgtg

SEQ ID NO: 3911907 - DNA, 25 bp, Homo sapien
tgaactccgtgtgacctgcatctgc

SEQ ID NO: 3911908 - DNA, 25 bp, Homo sapien
cattgctattgctgtgggcaataaa

SEQ ID NO: 3911909 - DNA, 25 bp, Homo sapien
ttgctgtgggcaataaagttctttt

SEQ ID NO: 3911910 - DNA, 25 bp, Homo sapien
tttattctaacccaggagtcatgtg

SEQ ID NO: 3911911 - DNA, 25 bp, Homo sapien
taacccaggagtcatgtgtcggcat

SEQ ID NO: 3911912 - DNA, 25 bp, Homo sapien
ttatgacgtcctactaatccagaag

SEQ ID NO: 3911913 - DNA, 25 bp, Homo sapien
taatccagaagtaccccattttcca

SEQ ID NO: 3911914 - DNA, 25 bp, Homo sapien
tcaggatcaactatccactctcctt

SEQ ID NO: 3911915 - DNA, 25 bp, Homo sapien
acatcagaaaacttatgacgtccta

SEQ ID NO: 3911916 - DNA, 25 bp, Homo sapien
tacttagtgtcccagcatcaggaac

SEQ ID NO: 3911917 - DNA, 25 bp, Homo sapien
cccttaagtgtgaaatgggtcttca

SEQ ID NO: 3911918 - DNA, 25 bp, Homo sapien
gatctgaacatctcaagtgtcccct

SEQ ID NO: 3911919 - DNA, 25 bp, Homo sapien
tgagagctagaaagacacccatttt

SEQ ID NO: 3911920 - DNA, 25 bp, Homo sapien
atgttcactcgcaactccacaggca

SEQ ID NO: 3911921 - DNA, 25 bp, Homo sapien
tcagcaaagacggtgaaagttcctt

SEQ ID NO: 3911922 - DNA, 25 bp, Homo sapien
cagcacttaagcctagccagatgtt

SEQ ID NO: 3911923 - DNA, 25 bp, Homo sapien
cacaggcacctttggcccgttgttt

SEQ ID NO: 3911924 - DNA, 25 bp, Homo sapien
tctcaccactggtggagtacaagac

SEQ ID NO: 3911925 - DNA, 25 bp, Homo sapien
ttctctccccggatcatccagatga

SEQ ID NO: 3911926 - DNA, 25 bp, Homo sapien
gagtacaagacctgatgtgcgggaa

SEQ ID NO: 3911927 - DNA, 25 bp, Homo sapien
gaattcgtgcataggccagtctctt

SEQ ID NO: 3911928 - DNA, 25 bp, Homo sapien
agagagacctggaccgcagctttcg

SEQ ID NO: 3911929 - DNA, 25 bp, Homo sapien
tcacatctgtggcttccgacctcat

SEQ ID NO: 3911930 - DNA, 25 bp, Homo sapien
ctcacagccgcctcatgtatttggg

SEQ ID NO: 3911931 - DNA, 25 bp, Homo sapien
gagtatcgagaactgtgacgttggc

SEQ ID NO: 3911932 - DNA, 25 bp, Homo sapien
ctagcacaacttcccttagacactg

SEQ ID NO: 3911933 - DNA, 25 bp, Homo sapien
gaaaatcctagcacaacttccctta

SEQ ID NO: 3911934 - DNA, 25 bp, Homo sapien
caacttcccttagacactgaatttc

SEQ ID NO: 3911935 - DNA, 25 bp, Homo sapien
atgaagaaaatcctagcacaacttc

SEQ ID NO: 3911936 - DNA, 25 bp, Homo sapien
ttcagccacaattcagccagctggt

SEQ ID NO: 3911937 - DNA, 25 bp, Homo sapien
acttcatctatcagcttcagccaca

SEQ ID NO: 3911938 - DNA, 25 bp, Homo sapien
gctggtttgcaggaattttaccttg

SEQ ID NO: 3911939 - DNA, 25 bp, Homo sapien
ctcgtgtcttctataacttcatcta

SEQ ID NO: 3911940 - DNA, 25 bp, Homo sapien
catccaggcgatgactaatatcctc

SEQ ID NO: 3911941 - DNA, 25 bp, Homo sapien
cagccgttctgccatagctaggaga

SEQ ID NO: 3911942 - DNA, 25 bp, Homo sapien
gagtgttcaccgcatccaggcgatg

SEQ ID NO: 3911943 - DNA, 25 bp, Homo sapien
catagctaggagagtgttcaccgca

SEQ ID NO: 3911944 - DNA, 25 bp, Homo sapien
gcccaaggcaagtaataatagtagt

SEQ ID NO: 3911945 - DNA, 25 bp, Homo sapien
ttggtgtgggcccaaggcaagtaat

SEQ ID NO: 3911946 - DNA, 25 bp, Homo sapien
ccagtatgaagtcagggtaacaact

SEQ ID NO: 3911947 - DNA, 25 bp, Homo sapien
tcagggtaacaactggcttggtgtg

SEQ ID NO: 3911948 - DNA, 25 bp, Homo sapien
cataggctgcgtagaacagtgccag

SEQ ID NO: 3911949 - DNA, 25 bp, Homo sapien
cccattgtaaacgtgtggagagaac

SEQ ID NO: 3911950 - DNA, 25 bp, Homo sapien
cggtcccgtggtgcacccattgtaa

SEQ ID NO: 3911951 - DNA, 25 bp, Homo sapien
aagacacagtgcttgcttccggtcc

SEQ ID NO: 3911952 - DNA, 25 bp, Homo sapien
ggctgtactgagttgttgatgccaa

SEQ ID NO: 3911953 - DNA, 25 bp, Homo sapien
tgttgccatagttcccaatgctgac

SEQ ID NO: 3911954 - DNA, 25 bp, Homo sapien
tgaaacacggcagacaggctgtact

SEQ ID NO: 3911955 - DNA, 25 bp, Homo sapien
caaaggcttacaggtggtgtcaaac

SEQ ID NO: 3911956 - DNA, 25 bp, Homo sapien
gatagggtcaacgataaccacattg

SEQ ID NO: 3911957 - DNA, 25 bp, Homo sapien
tactaagagagttgaagatagggtc

SEQ ID NO: 3911958 - DNA, 25 bp, Homo sapien
cccagctaaactattgattttctaa

SEQ ID NO: 3911959 - DNA, 25 bp, Homo sapien
tactacagcttcgacttcttgggca

SEQ ID NO: 3911960 - DNA, 25 bp, Homo sapien
cagaaatgaccatgagcccttcaag

SEQ ID NO: 3911961 - DNA, 25 bp, Homo sapien
ccttgctcagctggcatatctcctt

SEQ ID NO: 3911962 - DNA, 25 bp, Homo sapien
aaatgaccatgagcccttcaagcct

SEQ ID NO: 3911963 - DNA, 25 bp, Homo sapien
atgagcccttcaagccttccttcat

SEQ ID NO: 3911964 - DNA, 25 bp, Homo sapien
atctccacagatcttcaggcactgt

SEQ ID NO: 3911965 - DNA, 25 bp, Homo sapien
tctccacagatcttcaggcactgtg

SEQ ID NO: 3911966 - DNA, 25 bp, Homo sapien
cacagatcttcaggcactgtgcctt

SEQ ID NO: 3911967 - DNA, 25 bp, Homo sapien
tccacagatcttcaggcactgtgcc

SEQ ID NO: 3911968 - DNA, 25 bp, Homo sapien
cgatccgcatcctgtgtctattcta

SEQ ID NO: 3911969 - DNA, 25 bp, Homo sapien
gagccatgcaatggtttaggttgct

SEQ ID NO: 3911970 - DNA, 25 bp, Homo sapien
gctgtgtttcattatgtcccgtgca

SEQ ID NO: 3911971 - DNA, 25 bp, Homo sapien
tgtcccgtgcattctgccatgcaat

SEQ ID NO: 3911972 - DNA, 25 bp, Homo sapien
ctaacctcctgatacggctgccttc

SEQ ID NO: 3911973 - DNA, 25 bp, Homo sapien
taacctcctgatacggctgccttct

SEQ ID NO: 3911974 - DNA, 25 bp, Homo sapien
cctcctgatacggctgccttctggg

SEQ ID NO: 3911975 - DNA, 25 bp, Homo sapien
aacctcctgatacggctgccttctg

SEQ ID NO: 3911976 - DNA, 25 bp, Homo sapien
gatgaaaacgtgttctgggtaccac

SEQ ID NO: 3911977 - DNA, 25 bp, Homo sapien
gcagttgggcctggactcagatgaa

SEQ ID NO: 3911978 - DNA, 25 bp, Homo sapien
tttgggggagagcatggagaaccca

SEQ ID NO: 3911979 - DNA, 25 bp, Homo sapien
ggcctggactcagatgaaaacgtgt

SEQ ID NO: 3911980 - DNA, 25 bp, Homo sapien
taattcaaccaagatcctgcctctg

SEQ ID NO: 3911981 - DNA, 25 bp, Homo sapien
ggctcaagctttttatctggtggtg

SEQ ID NO: 3911982 - DNA, 25 bp, Homo sapien
ctcaagaaaagtggctaattcaacc

SEQ ID NO: 3911983 - DNA, 25 bp, Homo sapien
cagcaggtcatcatttgaaatgggc

SEQ ID NO: 3911984 - DNA, 25 bp, Homo sapien
agattcaggtaacaaggtccaaacg

SEQ ID NO: 3911985 - DNA, 25 bp, Homo sapien
aacgttggaacaaagcctacctctg

SEQ ID NO: 3911986 - DNA, 25 bp, Homo sapien
ttccagtattcagctcatcataggg

SEQ ID NO: 3911987 - DNA, 25 bp, Homo sapien
tctgggaatcccgtgtactctctgg

SEQ ID NO: 3911988 - DNA, 25 bp, Homo sapien
catcatgaggtgttaggcttttaac

SEQ ID NO: 3911989 - DNA, 25 bp, Homo sapien
catcatcatgaggtgttaggctttt

SEQ ID NO: 3911990 - DNA, 25 bp, Homo sapien
gagaaacatcatcatgaggtgttag

SEQ ID NO: 3911991 - DNA, 25 bp, Homo sapien
gaaacatcatcatgaggtgttaggc

SEQ ID NO: 3911992 - DNA, 25 bp, Homo sapien
gctacaacccactttccaacaatat

SEQ ID NO: 3911993 - DNA, 25 bp, Homo sapien
gacctagctacaacccactttccaa

SEQ ID NO: 3911994 - DNA, 25 bp, Homo sapien
cccactttccaacaatattttccat

SEQ ID NO: 3911995 - DNA, 25 bp, Homo sapien
cctctgacctagctacaacccactt

SEQ ID NO: 3911996 - DNA, 25 bp, Homo sapien
agccccagttcccgaagatgagaaa

SEQ ID NO: 3911997 - DNA, 25 bp, Homo sapien
cagccccagttcccgaagatgagaa

SEQ ID NO: 3911998 - DNA, 25 bp, Homo sapien
gccccagttcccgaagatgagaaat

SEQ ID NO: 3911999 - DNA, 25 bp, Homo sapien
ttctcatctctatcttccacacttt

SEQ ID NO: 3912000 - DNA, 25 bp, Homo sapien
gcttctcatctctatcttccacact

SEQ ID NO: 3912001 - DNA, 25 bp, Homo sapien
ctcatctctatcttccacactttta

SEQ ID NO: 3912002 - DNA, 25 bp, Homo sapien
ctgcttctcatctctatcttccaca

SEQ ID NO: 3912003 - DNA, 25 bp, Homo sapien
tgttcctgccaagggattcggttga

SEQ ID NO: 3912004 - DNA, 25 bp, Homo sapien
cattatcttagggagtgaggactac

SEQ ID NO: 3912005 - DNA, 25 bp, Homo sapien
tcaatgcttgtcagagtaaagacca

SEQ ID NO: 3912006 - DNA, 25 bp, Homo sapien
aaggtgctagctctctgtattgaca

SEQ ID NO: 3912007 - DNA, 25 bp, Homo sapien
gtagatatgttgttccaactacatc

SEQ ID NO: 3912008 - DNA, 25 bp, Homo sapien
gatatgttgttccaactacatcatt

SEQ ID NO: 3912009 - DNA, 25 bp, Homo sapien
tttagagaggtgtagatatgttgtt

SEQ ID NO: 3912010 - DNA, 25 bp, Homo sapien
tatgttgttccaactacatcatttt

SEQ ID NO: 3912011 - DNA, 25 bp, Homo sapien
tatgttgaattagacacatacgtat

SEQ ID NO: 3912012 - DNA, 25 bp, Homo sapien
gttgaattagacacatacgtatttt

SEQ ID NO: 3912013 - DNA, 25 bp, Homo sapien
tgttgaattagacacatacgtattt

SEQ ID NO: 3912014 - DNA, 25 bp, Homo sapien
atgttgaattagacacatacgtatt

SEQ ID NO: 3912015 - DNA, 25 bp, Homo sapien
agttttattttttcacacactgaag

SEQ ID NO: 3912016 - DNA, 25 bp, Homo sapien
ttattttttcacacactgaaggaaa

SEQ ID NO: 3912017 - DNA, 25 bp, Homo sapien
ttttattttttcacacactgaagga

SEQ ID NO: 3912018 - DNA, 25 bp, Homo sapien
ttagttttattttttcacacactga

SEQ ID NO: 3912019 - DNA, 25 bp, Homo sapien
tgaagattgacgacctgattccact

SEQ ID NO: 3912020 - DNA, 25 bp, Homo sapien
gacctgattccactctgggtttgca

SEQ ID NO: 3912021 - DNA, 25 bp, Homo sapien
gacgacctgattccactctgggttt

SEQ ID NO: 3912022 - DNA, 25 bp, Homo sapien
gattgacgacctgattccactctgg

SEQ ID NO: 3912023 - DNA, 25 bp, Homo sapien
atcaccaaagcaaaagtgtaggttt

SEQ ID NO: 3912024 - DNA, 25 bp, Homo sapien
ctgtaaaatcaccaaagcaaaagtg

SEQ ID NO: 3912025 - DNA, 25 bp, Homo sapien
taaaatcaccaaagcaaaagtgtag

SEQ ID NO: 3912026 - DNA, 25 bp, Homo sapien
aaatcaccaaagcaaaagtgtaggt

SEQ ID NO: 3912027 - DNA, 25 bp, Homo sapien
aggatccacgagatttttcttatct

SEQ ID NO: 3912028 - DNA, 25 bp, Homo sapien
acaaaaggatccacgagatttttct

SEQ ID NO: 3912029 - DNA, 25 bp, Homo sapien
aaaggatccacgagatttttcttat

SEQ ID NO: 3912030 - DNA, 25 bp, Homo sapien
ctacaaaaggatccacgagattttt

SEQ ID NO: 3912031 - DNA, 25 bp, Homo sapien
taaaagttctcttatacatcaaaat

SEQ ID NO: 3912032 - DNA, 25 bp, Homo sapien
aaaagttctcttatacatcaaaata

SEQ ID NO: 3912033 - DNA, 25 bp, Homo sapien
aaagttctcttatacatcaaaatag

SEQ ID NO: 3912034 - DNA, 25 bp, Homo sapien
ttaaaagttctcttatacatcaaaa

SEQ ID NO: 3912035 - DNA, 25 bp, Homo sapien
ggtcaaaatgatatagtcctagtct

SEQ ID NO: 3912036 - DNA, 25 bp, Homo sapien
gaatcacttgaatcttgcagttagc

SEQ ID NO: 3912037 - DNA, 25 bp, Homo sapien
caggcctgctttcaattgggagaaa

SEQ ID NO: 3912038 - DNA, 25 bp, Homo sapien
gtatatgccagcctccagcctaggt

SEQ ID NO: 3912039 - DNA, 25 bp, Homo sapien
ggggatgtcctcagctcggtagatt

SEQ ID NO: 3912040 - DNA, 25 bp, Homo sapien
cctcagctcggtagattttcagcaa

SEQ ID NO: 3912041 - DNA, 25 bp, Homo sapien
gtcctcagctcggtagattttcagc

SEQ ID NO: 3912042 - DNA, 25 bp, Homo sapien
ggatgtcctcagctcggtagatttt

SEQ ID NO: 3912043 - DNA, 25 bp, Homo sapien
cattatcacgatctcgtctctcagg

SEQ ID NO: 3912044 - DNA, 25 bp, Homo sapien
catcactgtcattatcacgatctcg

SEQ ID NO: 3912045 - DNA, 25 bp, Homo sapien
cactgtcattatcacgatctcgtct

SEQ ID NO: 3912046 - DNA, 25 bp, Homo sapien
tgtcattatcacgatctcgtctctc

SEQ ID NO: 3912047 - DNA, 25 bp, Homo sapien
gctcatctccggttcccaggacaaa

SEQ ID NO: 3912048 - DNA, 25 bp, Homo sapien
tgaactggtatcttccgggtcattg

SEQ ID NO: 3912049 - DNA, 25 bp, Homo sapien
tccgggtcattgagaagaagccact

SEQ ID NO: 3912050 - DNA, 25 bp, Homo sapien
catataacctttagaacctgaactg

SEQ ID NO: 3912051 - DNA, 25 bp, Homo sapien
catcataaacaaatccaacatcaat

SEQ ID NO: 3912052 - DNA, 25 bp, Homo sapien
cttaaattcccccatcagacaatct

SEQ ID NO: 3912053 - DNA, 25 bp, Homo sapien
agacaatctgcccgcagagagtgag

SEQ ID NO: 3912054 - DNA, 25 bp, Homo sapien
cagacaatctgcccgcagagagtga

SEQ ID NO: 3912055 - DNA, 25 bp, Homo sapien
aaattcccccatcagacaatctgcc

SEQ ID NO: 3912056 - DNA, 25 bp, Homo sapien
agaaggggtcatgttgacattgtag

SEQ ID NO: 3912057 - DNA, 25 bp, Homo sapien
gatgatctcatccatcaattcagaa

SEQ ID NO: 3912058 - DNA, 25 bp, Homo sapien
tgatgatctcatccatcaattcaga

SEQ ID NO: 3912059 - DNA, 25 bp, Homo sapien
ggctgcctgctgtcgtctgcgattc

SEQ ID NO: 3912060 - DNA, 25 bp, Homo sapien
tggctgcctgctgtcgtctgcgatt

SEQ ID NO: 3912061 - DNA, 25 bp, Homo sapien
ttggctgcctgctgtcgtctgcgat

SEQ ID NO: 3912062 - DNA, 25 bp, Homo sapien
tggaagccagtttgaacgaagagga

SEQ ID NO: 3912063 - DNA, 25 bp, Homo sapien
gaagaaatagaaacgcggcatagaa

SEQ ID NO: 3912064 - DNA, 25 bp, Homo sapien
agctggaagccagtttgaacgaaga

SEQ ID NO: 3912065 - DNA, 25 bp, Homo sapien
atagaaacgcggcatagaagaaatc

SEQ ID NO: 3912066 - DNA, 25 bp, Homo sapien
tgttgttaccacttaactgtcggcc

SEQ ID NO: 3912067 - DNA, 25 bp, Homo sapien
tgaccacaggccttatgttgttacc

SEQ ID NO: 3912068 - DNA, 25 bp, Homo sapien
gattcttgttcggtgtgtctggcca

SEQ ID NO: 3912069 - DNA, 25 bp, Homo sapien
gccacagacgtgaactttgaccaca

SEQ ID NO: 3912070 - DNA, 25 bp, Homo sapien
gctaccaattgggtggagccaccta

SEQ ID NO: 3912071 - DNA, 25 bp, Homo sapien
gagccacctagggtcattcccaaga

SEQ ID NO: 3912072 - DNA, 25 bp, Homo sapien
cccagcacgtgggatccttaggatc

SEQ ID NO: 3912073 - DNA, 25 bp, Homo sapien
cagctttgtgctataccaggtgcta

SEQ ID NO: 3912074 - DNA, 25 bp, Homo sapien
cggttgagccattgtccattggaat

SEQ ID NO: 3912075 - DNA, 25 bp, Homo sapien
taggtccactgaaacatcactgcaa

SEQ ID NO: 3912076 - DNA, 25 bp, Homo sapien
atataaagattaaacaaagaagcag

SEQ ID NO: 3912077 - DNA, 25 bp, Homo sapien
aagcagaacgccaggccgttgctac

SEQ ID NO: 3912078 - DNA, 25 bp, Homo sapien
aagtcctgtggcttatttgacagca

SEQ ID NO: 3912079 - DNA, 25 bp, Homo sapien
tgagcctccgagcaagctgagcttc

SEQ ID NO: 3912080 - DNA, 25 bp, Homo sapien
catccgccggctgttctttactttg

SEQ ID NO: 3912081 - DNA, 25 bp, Homo sapien
tgagcttccgacaccgtcccaactg

SEQ ID NO: 3912082 - DNA, 25 bp, Homo sapien
cactgggggccaggcgcttcccctc

SEQ ID NO: 3912083 - DNA, 25 bp, Homo sapien
caccagcctcggggaagcactgggg

SEQ ID NO: 3912084 - DNA, 25 bp, Homo sapien
ccagcctcggggaagcactgggggc

SEQ ID NO: 3912085 - DNA, 25 bp, Homo sapien
cttggcaccagcctcggggaagcac

SEQ ID NO: 3912086 - DNA, 25 bp, Homo sapien
ttcctccaagcagcgaagacgaact

SEQ ID NO: 3912087 - DNA, 25 bp, Homo sapien
cctccaagcagcgaagacgaacttc

SEQ ID NO: 3912088 - DNA, 25 bp, Homo sapien
ccaagcagcgaagacgaacttcctt

SEQ ID NO: 3912089 - DNA, 25 bp, Homo sapien
ctgtcctggaccgagcaatggctgg

SEQ ID NO: 3912090 - DNA, 25 bp, Homo sapien
ctgggcctaagtggtacttcctcct

SEQ ID NO: 3912091 - DNA, 25 bp, Homo sapien
ttttaggctggtgatttgtacttcc

SEQ ID NO: 3912092 - DNA, 25 bp, Homo sapien
attatagcattttaggctggtgatt

SEQ ID NO: 3912093 - DNA, 25 bp, Homo sapien
ggcctaagtggtacttcctccttgc

SEQ ID NO: 3912094 - DNA, 25 bp, Homo sapien
tgtttccgctaacatttggaaatgg

SEQ ID NO: 3912095 - DNA, 25 bp, Homo sapien
cttgtgatgtttccgctaacatttg

SEQ ID NO: 3912096 - DNA, 25 bp, Homo sapien
actgcatgtgatccactcttcttta

SEQ ID NO: 3912097 - DNA, 25 bp, Homo sapien
gaatatcagtaactgcatgtgatcc

SEQ ID NO: 3912098 - DNA, 25 bp, Homo sapien
aaaaataaaattgccctgcagacac

SEQ ID NO: 3912099 - DNA, 25 bp, Homo sapien
agctcatttgcagaccaacacttgg

SEQ ID NO: 3912100 - DNA, 25 bp, Homo sapien
acacagaatgccacctttgaccgag

SEQ ID NO: 3912101 - DNA, 25 bp, Homo sapien
cgagccccggcaaacattcatttat

SEQ ID NO: 3912102 - DNA, 25 bp, Homo sapien
tccagatagcccatcaatgagggct

SEQ ID NO: 3912103 - DNA, 25 bp, Homo sapien
tgacaatagtcatcggcagcggagg

SEQ ID NO: 3912104 - DNA, 25 bp, Homo sapien
gcaggccagaaagcgcctagtgcct

SEQ ID NO: 3912105 - DNA, 25 bp, Homo sapien
tgctggtgacaatagtcatcggcag

SEQ ID NO: 3912106 - DNA, 25 bp, Homo sapien
gagggaaatgggtgggaccactcag

SEQ ID NO: 3912107 - DNA, 25 bp, Homo sapien
aaatgggtgggaccactcagttctg

SEQ ID NO: 3912108 - DNA, 25 bp, Homo sapien
ggtgttactggtgctggcctgtgtc

SEQ ID NO: 3912109 - DNA, 25 bp, Homo sapien
ggcctgtgtcctctgtgtttcgtgg

SEQ ID NO: 3912110 - DNA, 25 bp, Homo sapien
ggatgttcttgagccactgcagcgc

SEQ ID NO: 3912111 - DNA, 25 bp, Homo sapien
gagccatggatgttcttgagccact

SEQ ID NO: 3912112 - DNA, 25 bp, Homo sapien
ctgtggaagcaaagggagccatgga

SEQ ID NO: 3912113 - DNA, 25 bp, Homo sapien
ttgagccactgcagcgctcccgcag

SEQ ID NO: 3912114 - DNA, 25 bp, Homo sapien
tttcataaacaattgcaatgtccca

SEQ ID NO: 3912115 - DNA, 25 bp, Homo sapien
tgcaatgtcccaattcaggcagccc

SEQ ID NO: 3912116 - DNA, 25 bp, Homo sapien
agctacaggcttgtgatcaatggca

SEQ ID NO: 3912117 - DNA, 25 bp, Homo sapien
gggagctacaggcttgtgatcaatg

SEQ ID NO: 3912118 - DNA, 25 bp, Homo sapien
tgggcccgctcaggtcatttggatg

SEQ ID NO: 3912119 - DNA, 25 bp, Homo sapien
tcatagccgatcaccaagtcaatgg

SEQ ID NO: 3912120 - DNA, 25 bp, Homo sapien
agcagaaggcggatcatagccgatc

SEQ ID NO: 3912121 - DNA, 25 bp, Homo sapien
acgctgggcccgctcaggtcatttg

SEQ ID NO: 3912122 - DNA, 25 bp, Homo sapien
aatcataagagcagcatctcatggc

SEQ ID NO: 3912123 - DNA, 25 bp, Homo sapien
cataagagcagcatctcatggctga

SEQ ID NO: 3912124 - DNA, 25 bp, Homo sapien
taagagcagcatctcatggctgaac

SEQ ID NO: 3912125 - DNA, 25 bp, Homo sapien
agaatcataagagcagcatctcatg

SEQ ID NO: 3912126 - DNA, 25 bp, Homo sapien
tttctcactatgtgtcacgcctgct

SEQ ID NO: 3912127 - DNA, 25 bp, Homo sapien
tccaatagtggagttgggccctggt

SEQ ID NO: 3912128 - DNA, 25 bp, Homo sapien
catgctgtgttctataacctcagga

SEQ ID NO: 3912129 - DNA, 25 bp, Homo sapien
ttactttccttactccatgatatgg

SEQ ID NO: 3912130 - DNA, 25 bp, Homo sapien
tagcagggagatcagcttgtacggc

SEQ ID NO: 3912131 - DNA, 25 bp, Homo sapien
cagggctacagtcgccgtgccaatt

SEQ ID NO: 3912132 - DNA, 25 bp, Homo sapien
gcttgtacggcagggatctgctctg

SEQ ID NO: 3912133 - DNA, 25 bp, Homo sapien
ctgctctggtcaccagtcaggtcct

SEQ ID NO: 3912134 - DNA, 25 bp, Homo sapien
tagacagtgactcccaatggctgtg

SEQ ID NO: 3912135 - DNA, 25 bp, Homo sapien
tgcagattcccagatccctgagtcc

SEQ ID NO: 3912136 - DNA, 25 bp, Homo sapien
attcttaatacccaggaagtccgag

SEQ ID NO: 3912137 - DNA, 25 bp, Homo sapien
ggaagtccgagaaacaatggtctag

SEQ ID NO: 3912138 - DNA, 25 bp, Homo sapien
tccacgccctggttttggaatcact

SEQ ID NO: 3912139 - DNA, 25 bp, Homo sapien
cacgattttcgtggccagcatctac

SEQ ID NO: 3912140 - DNA, 25 bp, Homo sapien
ggtatcactgttacctttgcaggta

SEQ ID NO: 3912141 - DNA, 25 bp, Homo sapien
aactctggccactatggtatcactg

SEQ ID NO: 3912142 - DNA, 25 bp, Homo sapien
aaggctgtggcaggatttgcacgat

SEQ ID NO: 3912143 - DNA, 25 bp, Homo sapien
agtggaagcccaggtctcctcacca

SEQ ID NO: 3912144 - DNA, 25 bp, Homo sapien
ctgagtggaagcccaggtctcctca

SEQ ID NO: 3912145 - DNA, 25 bp, Homo sapien
ggaagcccaggtctcctcaccaaag

SEQ ID NO: 3912146 - DNA, 25 bp, Homo sapien
tgagtggaagcccaggtctcctcac

SEQ ID NO: 3912147 - DNA, 25 bp, Homo sapien
gtcagtgaggcattgaggccagagt

SEQ ID NO: 3912148 - DNA, 25 bp, Homo sapien
gggtcagtgaggcattgaggccaga

SEQ ID NO: 3912149 - DNA, 25 bp, Homo sapien
ctccgggtcagtgaggcattgaggc

SEQ ID NO: 3912150 - DNA, 25 bp, Homo sapien
ccgggtcagtgaggcattgaggcca

SEQ ID NO: 3912151 - DNA, 25 bp, Homo sapien
ctgacaggacagctgcaaggtgctt

SEQ ID NO: 3912152 - DNA, 25 bp, Homo sapien
gagctgacaggacagctgcaaggtg

SEQ ID NO: 3912153 - DNA, 25 bp, Homo sapien
cagtgagctgacaggacagctgcaa

SEQ ID NO: 3912154 - DNA, 25 bp, Homo sapien
agtgagctgacaggacagctgcaag

SEQ ID NO: 3912155 - DNA, 25 bp, Homo sapien
tccctctgaatggctggttggatga

SEQ ID NO: 3912156 - DNA, 25 bp, Homo sapien
gcaaagtgagggctcatgtttgcac

SEQ ID NO: 3912157 - DNA, 25 bp, Homo sapien
aaagtgagggctcatgtttgcacag

SEQ ID NO: 3912158 - DNA, 25 bp, Homo sapien
tgggaactgtttgctaataggccgg

SEQ ID NO: 3912159 - DNA, 25 bp, Homo sapien
agcagatgcaaagtgagggctcatg

SEQ ID NO: 3912160 - DNA, 25 bp, Homo sapien
agtctcttgtgaacttggttagttt

SEQ ID NO: 3912161 - DNA, 25 bp, Homo sapien
gtctcttgtgaacttggttagtttg

SEQ ID NO: 3912162 - DNA, 25 bp, Homo sapien
ttagtctcttgtgaacttggttagt

SEQ ID NO: 3912163 - DNA, 25 bp, Homo sapien
tagtctcttgtgaacttggttagtt

SEQ ID NO: 3912164 - DNA, 25 bp, Homo sapien
atactaagatcattctgtcccacgg

SEQ ID NO: 3912165 - DNA, 25 bp, Homo sapien
ccagatccaggactagggtgaattt

SEQ ID NO: 3912166 - DNA, 25 bp, Homo sapien
ccaggactagggtgaatttattaat

SEQ ID NO: 3912167 - DNA, 25 bp, Homo sapien
caccacgggcaccaccgtgaccctt

SEQ ID NO: 3912168 - DNA, 25 bp, Homo sapien
aaagtccagtggtatacccctcaag

SEQ ID NO: 3912169 - DNA, 25 bp, Homo sapien
tttcacaataatcccaagggaagat

SEQ ID NO: 3912170 - DNA, 25 bp, Homo sapien
gtccagtggtatacccctcaagtca

SEQ ID NO: 3912171 - DNA, 25 bp, Homo sapien
ttcacaataatcccaagggaagatg

SEQ ID NO: 3912172 - DNA, 25 bp, Homo sapien
tatgcaacataagtggaccaagctc

SEQ ID NO: 3912173 - DNA, 25 bp, Homo sapien
gatggtcgctggtgagctactctcc

SEQ ID NO: 3912174 - DNA, 25 bp, Homo sapien
ggcggtgcctggtaagaactcaact

SEQ ID NO: 3912175 - DNA, 25 bp, Homo sapien
tcacacagcaagctcgtggcggtgc

SEQ ID NO: 3912176 - DNA, 25 bp, Homo sapien
ccagacagggttcaattcattatca

SEQ ID NO: 3912177 - DNA, 25 bp, Homo sapien
gacagggttcaattcattatcaact

SEQ ID NO: 3912178 - DNA, 25 bp, Homo sapien
ctcattccagacagggttcaattca

SEQ ID NO: 3912179 - DNA, 25 bp, Homo sapien
attccagacagggttcaattcatta

SEQ ID NO: 3912180 - DNA, 25 bp, Homo sapien
tgagcacacgagcaaatccagcaag

SEQ ID NO: 3912181 - DNA, 25 bp, Homo sapien
tccagcaagtgcttaaagtttcctt

SEQ ID NO: 3912182 - DNA, 25 bp, Homo sapien
ctggatgagcacacgagcaaatcca

SEQ ID NO: 3912183 - DNA, 25 bp, Homo sapien
ttgtagcaaagtccaaagagcagag

SEQ ID NO: 3912184 - DNA, 25 bp, Homo sapien
ggtcccctagacgctgtccagaaac

SEQ ID NO: 3912185 - DNA, 25 bp, Homo sapien
ctctggttacagtataagaaagtgc

SEQ ID NO: 3912186 - DNA, 25 bp, Homo sapien
tagacgctgtccagaaacttcccct

SEQ ID NO: 3912187 - DNA, 25 bp, Homo sapien
tctggttacagtataagaaagtgct

SEQ ID NO: 3912188 - DNA, 25 bp, Homo sapien
cctgctcccataaccggggcttggg

SEQ ID NO: 3912189 - DNA, 25 bp, Homo sapien
gggtggagaactgagtctcaaagga

SEQ ID NO: 3912190 - DNA, 25 bp, Homo sapien
tggagaactgagtctcaaaggagtg

SEQ ID NO: 3912191 - DNA, 25 bp, Homo sapien
aaaggagtggatctggaccctgaga

SEQ ID NO: 3912192 - DNA, 25 bp, Homo sapien
cgccctggtggaatatttcttccac

SEQ ID NO: 3912193 - DNA, 25 bp, Homo sapien
ggctaatttctactatcaacaaggg

SEQ ID NO: 3912194 - DNA, 25 bp, Homo sapien
agaagggctggcagaaacgcctcca

SEQ ID NO: 3912195 - DNA, 25 bp, Homo sapien
cagctggcatgtgagcagtgactgc

SEQ ID NO: 3912196 - DNA, 25 bp, Homo sapien
gcatgtgagcagtgactgctcctct

SEQ ID NO: 3912197 - DNA, 25 bp, Homo sapien
tggcaacaggatacaaagcgaggct

SEQ ID NO: 3912198 - DNA, 25 bp, Homo sapien
ttggctgccctatcgttccaggaag

SEQ ID NO: 3912199 - DNA, 25 bp, Homo sapien
ttttgggcaagtggcaacaggatac

SEQ ID NO: 3912200 - DNA, 25 bp, Homo sapien
caaagcgaggctgtttgggacattt

SEQ ID NO: 3912201 - DNA, 25 bp, Homo sapien
ttcaggcaagctttgggaggatcca

SEQ ID NO: 3912202 - DNA, 25 bp, Homo sapien
aaaacaaatgcaaagcgcggagtga

SEQ ID NO: 3912203 - DNA, 25 bp, Homo sapien
catttcaaacccagctgaggaggta

SEQ ID NO: 3912204 - DNA, 25 bp, Homo sapien
ccacctggtagaattgcagcaagga

SEQ ID NO: 3912205 - DNA, 25 bp, Homo sapien
agctgaccagcatcctgtttattct

SEQ ID NO: 3912206 - DNA, 25 bp, Homo sapien
ccttcaagctgtttgtgcagccaca

SEQ ID NO: 3912207 - DNA, 25 bp, Homo sapien
cttcaagctgtttgtgcagccacag

SEQ ID NO: 3912208 - DNA, 25 bp, Homo sapien
ccagcatcctgtttattctgaacag

SEQ ID NO: 3912209 - DNA, 25 bp, Homo sapien
tacttccccattcttaagtggaatc

SEQ ID NO: 3912210 - DNA, 25 bp, Homo sapien
ggaatcgcatagctttggagcttat

SEQ ID NO: 3912211 - DNA, 25 bp, Homo sapien
ccattcttaagtggaatcgcatagc

SEQ ID NO: 3912212 - DNA, 25 bp, Homo sapien
aagtggaatcgcatagctttggagc

SEQ ID NO: 3912213 - DNA, 25 bp, Homo sapien
cagaggtctgtgtagtctaatctca

SEQ ID NO: 3912214 - DNA, 25 bp, Homo sapien
ggctgtccgcatggaacttagggca

SEQ ID NO: 3912215 - DNA, 25 bp, Homo sapien
gaagaatcatcaagtctcagagttg

SEQ ID NO: 3912216 - DNA, 25 bp, Homo sapien
tcaattcggatctggctcatggaac

SEQ ID NO: 3912217 - DNA, 25 bp, Homo sapien
ccactttagccaaaactaagtcact

SEQ ID NO: 3912218 - DNA, 25 bp, Homo sapien
caaattgtaccatgacaccaagcat

SEQ ID NO: 3912219 - DNA, 25 bp, Homo sapien
acactgagatttagaaaccccactt

SEQ ID NO: 3912220 - DNA, 25 bp, Homo sapien
tttagccaaaactaagtcacttaca

SEQ ID NO: 3912221 - DNA, 25 bp, Homo sapien
caaatttcgttttagggatattgct

SEQ ID NO: 3912222 - DNA, 25 bp, Homo sapien
tattgctggcagattccacaatcac

SEQ ID NO: 3912223 - DNA, 25 bp, Homo sapien
taggatccggcttgccaaatttcgt

SEQ ID NO: 3912224 - DNA, 25 bp, Homo sapien
aataggatccggcttgccaaatttc

SEQ ID NO: 3912225 - DNA, 25 bp, Homo sapien
ctctggcggattttactgaaggcaa

SEQ ID NO: 3912226 - DNA, 25 bp, Homo sapien
gaaggcaacgtgtaaactgataccg

SEQ ID NO: 3912227 - DNA, 25 bp, Homo sapien
caaacgaagtggagactagggcgct

SEQ ID NO: 3912228 - DNA, 25 bp, Homo sapien
aaggcaaaatgggtggacctctggc

SEQ ID NO: 3912229 - DNA, 25 bp, Homo sapien
aagtactaaacagactcaacgctgc

SEQ ID NO: 3912230 - DNA, 25 bp, Homo sapien
ccaagtactaaacagactcaacgct

SEQ ID NO: 3912231 - DNA, 25 bp, Homo sapien
taaacagactcaacgctgcttagct

SEQ ID NO: 3912232 - DNA, 25 bp, Homo sapien
caagatcagccaagatcaggcgcgt

SEQ ID NO: 3912233 - DNA, 25 bp, Homo sapien
gaaagagtggctgctataaaaggaa

SEQ ID NO: 3912234 - DNA, 25 bp, Homo sapien
tatgtcctcttcattgtggaactag

SEQ ID NO: 3912235 - DNA, 25 bp, Homo sapien
ggaaacactatattgtattgtcaga

SEQ ID NO: 3912236 - DNA, 25 bp, Homo sapien
taatagatcattttaagagctactg

SEQ ID NO: 3912237 - DNA, 25 bp, Homo sapien
tgttctgcgcacgaaacagtatctg

SEQ ID NO: 3912238 - DNA, 25 bp, Homo sapien
ccattgaaacttaacccagctgtgt

SEQ ID NO: 3912239 - DNA, 25 bp, Homo sapien
taacatgcttaccactgggctactg

SEQ ID NO: 3912240 - DNA, 25 bp, Homo sapien
ggcataatcttaagtggccacacac

SEQ ID NO: 3912241 - DNA, 25 bp, Homo sapien
tatgccataaggaagttgctcccct

SEQ ID NO: 3912242 - DNA, 25 bp, Homo sapien
tgagcagtggagtcaagcagaaccc

SEQ ID NO: 3912243 - DNA, 25 bp, Homo sapien
tctcatgggataactggccaggaca

SEQ ID NO: 3912244 - DNA, 25 bp, Homo sapien
tctgtgtttcactggagggctgtac

SEQ ID NO: 3912245 - DNA, 25 bp, Homo sapien
atgtggagccccatcatcatcacca

SEQ ID NO: 3912246 - DNA, 25 bp, Homo sapien
tcaaggaagaggctcacggtaagcc

SEQ ID NO: 3912247 - DNA, 25 bp, Homo sapien
gcgtgtcccagcaggacttccggct

SEQ ID NO: 3912248 - DNA, 25 bp, Homo sapien
tggcctactcggagagccaccagat

SEQ ID NO: 3912249 - DNA, 25 bp, Homo sapien
tacgtagtgcacgagaaaggctggc

SEQ ID NO: 3912250 - DNA, 25 bp, Homo sapien
tctttggtggagaacactagcatgg

SEQ ID NO: 3912251 - DNA, 25 bp, Homo sapien
tggatattccaacacccaggcggag

SEQ ID NO: 3912252 - DNA, 25 bp, Homo sapien
tgacagcctgtggttccgtgagaga

SEQ ID NO: 3912253 - DNA, 25 bp, Homo sapien
gaccctctggtaccaaagccttgct

SEQ ID NO: 3912254 - DNA, 25 bp, Homo sapien
tgcagcccatcaggcaaggactatt

SEQ ID NO: 3912255 - DNA, 25 bp, Homo sapien
ttgcacttacaccaagaccctctgg

SEQ ID NO: 3912256 - DNA, 25 bp, Homo sapien
tagggttcccacgtgctgctaatga

SEQ ID NO: 3912257 - DNA, 25 bp, Homo sapien
gccacgtgctcctggtataaagaag

SEQ ID NO: 3912258 - DNA, 25 bp, Homo sapien
taggcactagaacaggccaaaggtc

SEQ ID NO: 3912259 - DNA, 25 bp, Homo sapien
caaaggtcagaaagagccacgtgct

SEQ ID NO: 3912260 - DNA, 25 bp, Homo sapien
taataatggagattaggcactagaa

SEQ ID NO: 3912261 - DNA, 25 bp, Homo sapien
ccccacgtgtatctttatgtgtaat

SEQ ID NO: 3912262 - DNA, 25 bp, Homo sapien
aaatagagctgaagactgagagcta

SEQ ID NO: 3912263 - DNA, 25 bp, Homo sapien
attaaactcctaagataaatagagc

SEQ ID NO: 3912264 - DNA, 25 bp, Homo sapien
gagtctggaatcttaagccccagaa

SEQ ID NO: 3912265 - DNA, 25 bp, Homo sapien
tcagaagttctcagatgaaactaga

SEQ ID NO: 3912266 - DNA, 25 bp, Homo sapien
ttctcagatgaaactagattcttga

SEQ ID NO: 3912267 - DNA, 25 bp, Homo sapien
ctcagatgaaactagattcttgata

SEQ ID NO: 3912268 - DNA, 25 bp, Homo sapien
cagatgaaactagattcttgatatt

SEQ ID NO: 3912269 - DNA, 25 bp, Homo sapien
ctttctgatctgccatcgcagtaac

SEQ ID NO: 3912270 - DNA, 25 bp, Homo sapien
tctttctgatctgccatcgcagtaa

SEQ ID NO: 3912271 - DNA, 25 bp, Homo sapien
ctacaaaaggtttctttctgatctg

SEQ ID NO: 3912272 - DNA, 25 bp, Homo sapien
gtttctttctgatctgccatcgcag

SEQ ID NO: 3912273 - DNA, 25 bp, Homo sapien
ccattaacgacagaaagtggaccca

SEQ ID NO: 3912274 - DNA, 25 bp, Homo sapien
aatgcttcttaattcaaatgcatca

SEQ ID NO: 3912275 - DNA, 25 bp, Homo sapien
tgcatcacagcagattgcaaccctt

SEQ ID NO: 3912276 - DNA, 25 bp, Homo sapien
gaacatcatgatggccttagagctg

SEQ ID NO: 3912277 - DNA, 25 bp, Homo sapien
cactgaattttctctggacgtaatg

SEQ ID NO: 3912278 - DNA, 25 bp, Homo sapien
tacaggtggctgtaattcataaaca

SEQ ID NO: 3912279 - DNA, 25 bp, Homo sapien
cttaagtctgccttattgcatttca

SEQ ID NO: 3912280 - DNA, 25 bp, Homo sapien
catttcaaagtgtcggaggccaccc

SEQ ID NO: 3912281 - DNA, 25 bp, Homo sapien
ggtggaatccttgctggccctacat

SEQ ID NO: 3912282 - DNA, 25 bp, Homo sapien
tgaggaaacccagctagacaatgtc

SEQ ID NO: 3912283 - DNA, 25 bp, Homo sapien
cccatagcaatgagtgagtgtccac

SEQ ID NO: 3912284 - DNA, 25 bp, Homo sapien
ataatctgcttcctacggtgccctg

SEQ ID NO: 3912285 - DNA, 25 bp, Homo sapien
tgaactggacaaaggcctttaccca

SEQ ID NO: 3912286 - DNA, 25 bp, Homo sapien
gaaaagagagcccacggcagtgtta

SEQ ID NO: 3912287 - DNA, 25 bp, Homo sapien
taattcagtcacaatggttttttgg

SEQ ID NO: 3912288 - DNA, 25 bp, Homo sapien
cagaaatggcccgaggaagcagaat

SEQ ID NO: 3912289 - DNA, 25 bp, Homo sapien
ccgggaaaacacgaaggagtagctg

SEQ ID NO: 3912290 - DNA, 25 bp, Homo sapien
cgttgtggacgatcagcctgtactg

SEQ ID NO: 3912291 - DNA, 25 bp, Homo sapien
tgtgtcgacgatccagtggtcatca

SEQ ID NO: 3912292 - DNA, 25 bp, Homo sapien
cacaggtgccatcgaggttcaggag

SEQ ID NO: 3912293 - DNA, 25 bp, Homo sapien
gctgagccactgaatttagattata

SEQ ID NO: 3912294 - DNA, 25 bp, Homo sapien
caccatctggcatcagatattcctt

SEQ ID NO: 3912295 - DNA, 25 bp, Homo sapien
ttgtcctcttcacaactcacagagg

SEQ ID NO: 3912296 - DNA, 25 bp, Homo sapien
gccttgaggacacaagaggcccacc

SEQ ID NO: 3912297 - DNA, 25 bp, Homo sapien
ggttaatctccaggctcttttggct

SEQ ID NO: 3912298 - DNA, 25 bp, Homo sapien
agtaactttcaatacttggatttag

SEQ ID NO: 3912299 - DNA, 25 bp, Homo sapien
taaaattggctactgttcttgactt

SEQ ID NO: 3912300 - DNA, 25 bp, Homo sapien
catttaaattttgacagaggaatta

SEQ ID NO: 3912301 - DNA, 25 bp, Homo sapien
tgaactgccagagcactgcgagaat

SEQ ID NO: 3912302 - DNA, 25 bp, Homo sapien
caggctctcccttttaagagtattt

SEQ ID NO: 3912303 - DNA, 25 bp, Homo sapien
ggttggttctctaacctcctcacac

SEQ ID NO: 3912304 - DNA, 25 bp, Homo sapien
agtatttgcaagagatgaactgcca

SEQ ID NO: 3912305 - DNA, 25 bp, Homo sapien
cacagactggtttagcggtttggac

SEQ ID NO: 3912306 - DNA, 25 bp, Homo sapien
gcaggaaccctgactttgaccaaca

SEQ ID NO: 3912307 - DNA, 25 bp, Homo sapien
tattcagtctgacaagggccccttt

SEQ ID NO: 3912308 - DNA, 25 bp, Homo sapien
ggttctcaggcctaacagtccagct

SEQ ID NO: 3912309 - DNA, 25 bp, Homo sapien
tcagggaggctagcctgtattcaac

SEQ ID NO: 3912310 - DNA, 25 bp, Homo sapien
gaaggaagtcaaatctcagggaggc

SEQ ID NO: 3912311 - DNA, 25 bp, Homo sapien
tcatgatcgcttggccctgagttac

SEQ ID NO: 3912312 - DNA, 25 bp, Homo sapien
gaagaccagtatggagcatgcccaa

SEQ ID NO: 3912313 - DNA, 25 bp, Homo sapien
gccatgccatttgcgagatactcag

SEQ ID NO: 3912314 - DNA, 25 bp, Homo sapien
gaacaaggtaggtgcatcaagccat

SEQ ID NO: 3912315 - DNA, 25 bp, Homo sapien
caagccatgggttaagaggtgtcac

SEQ ID NO: 3912316 - DNA, 25 bp, Homo sapien
gctatgatttcacgaccagggagat

SEQ ID NO: 3912317 - DNA, 25 bp, Homo sapien
gggcgggcttaactacaacactgca

SEQ ID NO: 3912318 - DNA, 25 bp, Homo sapien
tcactttgggatgttttgctgcact

SEQ ID NO: 3912319 - DNA, 25 bp, Homo sapien
gaccctgtgcctaaaggcattgcca

SEQ ID NO: 3912320 - DNA, 25 bp, Homo sapien
tcaagatggcagtactttttcgccc

SEQ ID NO: 3912321 - DNA, 25 bp, Homo sapien
gagaaaggaggctacgccccagtac

SEQ ID NO: 3912322 - DNA, 25 bp, Homo sapien
agaaaggaggctacgccccagtact

SEQ ID NO: 3912323 - DNA, 25 bp, Homo sapien
tctggagaaaggaggctacgcccca

SEQ ID NO: 3912324 - DNA, 25 bp, Homo sapien
tcctcggtgtctgtgaaggtgccca

SEQ ID NO: 3912325 - DNA, 25 bp, Homo sapien
gaacttggcagggtcctcggtgtct

SEQ ID NO: 3912326 - DNA, 25 bp, Homo sapien
catgtctgcgcacacgtcccagtta

SEQ ID NO: 3912327 - DNA, 25 bp, Homo sapien
tgtctgtgaaggtgcccaccatgtc

SEQ ID NO: 3912328 - DNA, 25 bp, Homo sapien
atcctcagccaagccgggcaaaggg

SEQ ID NO: 3912329 - DNA, 25 bp, Homo sapien
ctcagccaagccgggcaaagggctt

SEQ ID NO: 3912330 - DNA, 25 bp, Homo sapien
gccaagccgggcaaagggcttcctc

SEQ ID NO: 3912331 - DNA, 25 bp, Homo sapien
agccaagccgggcaaagggcttcct

SEQ ID NO: 3912332 - DNA, 25 bp, Homo sapien
attcggtgctcccttcccttcacaa

SEQ ID NO: 3912333 - DNA, 25 bp, Homo sapien
tcggtgctcccttcccttcacaatg

SEQ ID NO: 3912334 - DNA, 25 bp, Homo sapien
ccattcggtgctcccttcccttcac

SEQ ID NO: 3912335 - DNA, 25 bp, Homo sapien
tgctcccttcccttcacaatgccca

SEQ ID NO: 3912336 - DNA, 25 bp, Homo sapien
ccctggagcgcaaagggcgcagctg

SEQ ID NO: 3912337 - DNA, 25 bp, Homo sapien
agcgcaaagggcgcagctgccccgg

SEQ ID NO: 3912338 - DNA, 25 bp, Homo sapien
accctggagcgcaaagggcgcagct

SEQ ID NO: 3912339 - DNA, 25 bp, Homo sapien
aaccctggagcgcaaagggcgcagc

SEQ ID NO: 3912340 - DNA, 25 bp, Homo sapien
gtctcgtccacggagaactccgcga

SEQ ID NO: 3912341 - DNA, 25 bp, Homo sapien
tggctgtggcgctcatctggccggt

SEQ ID NO: 3912342 - DNA, 25 bp, Homo sapien
ttcttggccatggcgtaccaggtcc

SEQ ID NO: 3912343 - DNA, 25 bp, Homo sapien
tcaaaagacggactcggcccttggc

SEQ ID NO: 3912344 - DNA, 25 bp, Homo sapien
ttgtcgaagttctccttgactcgga

SEQ ID NO: 3912345 - DNA, 25 bp, Homo sapien
gcgagccttgtcgaagttctccttg

SEQ ID NO: 3912346 - DNA, 25 bp, Homo sapien
aagctgctcactcggcagtcgcgct

SEQ ID NO: 3912347 - DNA, 25 bp, Homo sapien
gttctccttgactcggaagctgctc

SEQ ID NO: 3912348 - DNA, 25 bp, Homo sapien
ggaaccgcgcgcaagcctggccgcc

SEQ ID NO: 3912349 - DNA, 25 bp, Homo sapien
aggggaaccgcgcgcaagcctggcc

SEQ ID NO: 3912350 - DNA, 25 bp, Homo sapien
gaggggaaccgcgcgcaagcctggc

SEQ ID NO: 3912351 - DNA, 25 bp, Homo sapien
gggaaccgcgcgcaagcctggccgc

SEQ ID NO: 3912352 - DNA, 25 bp, Homo sapien
caacctggcgggaagaccgtggcct

SEQ ID NO: 3912353 - DNA, 25 bp, Homo sapien
ccagctgcggtctagggtggcctcc

SEQ ID NO: 3912354 - DNA, 25 bp, Homo sapien
tggcctcacagagcgagagcggacc

SEQ ID NO: 3912355 - DNA, 25 bp, Homo sapien
ctggctcagttaccctgcactcgtg

SEQ ID NO: 3912356 - DNA, 25 bp, Homo sapien
ctgaggtccacttgtgcaggaattt

SEQ ID NO: 3912357 - DNA, 25 bp, Homo sapien
ctgccttctgaggtccacttgtgca

SEQ ID NO: 3912358 - DNA, 25 bp, Homo sapien
gtccacttgtgcaggaattttggaa

SEQ ID NO: 3912359 - DNA, 25 bp, Homo sapien
cacttgtgcaggaattttggaataa

SEQ ID NO: 3912360 - DNA, 25 bp, Homo sapien
caatatcgattgtgtctccatggcc

SEQ ID NO: 3912361 - DNA, 25 bp, Homo sapien
aaagattcgagatcaatttgggcca

SEQ ID NO: 3912362 - DNA, 25 bp, Homo sapien
cggaatgagaattcatgatgtggca

SEQ ID NO: 3912363 - DNA, 25 bp, Homo sapien
catggcctaaattggaaagattcga

SEQ ID NO: 3912364 - DNA, 25 bp, Homo sapien
cactgggtatatcaagagacttgtt

SEQ ID NO: 3912365 - DNA, 25 bp, Homo sapien
tgggtatatcaagagacttgttcat

SEQ ID NO: 3912366 - DNA, 25 bp, Homo sapien
ccccacttttccactgggtatatca

SEQ ID NO: 3912367 - DNA, 25 bp, Homo sapien
cccacttttccactgggtatatcaa

SEQ ID NO: 3912368 - DNA, 25 bp, Homo sapien
gcaatattctcttgcgggcgtcata

SEQ ID NO: 3912369 - DNA, 25 bp, Homo sapien
tggcactagcaaggcaagaacatgt

SEQ ID NO: 3912370 - DNA, 25 bp, Homo sapien
aaataccttgtgtactggcactagc

SEQ ID NO: 3912371 - DNA, 25 bp, Homo sapien
ttttcatatcaaccgcatcagcctg

SEQ ID NO: 3912372 - DNA, 25 bp, Homo sapien
taatcgtgaggcagcttagcaaggc

SEQ ID NO: 3912373 - DNA, 25 bp, Homo sapien
tctttatcgatgaggtcacccaagc

SEQ ID NO: 3912374 - DNA, 25 bp, Homo sapien
gagccttcgtgaggaaacaaagacc

SEQ ID NO: 3912375 - DNA, 25 bp, Homo sapien
gcactggcctagagaatcaaattca

SEQ ID NO: 3912376 - DNA, 25 bp, Homo sapien
tatgcaatcctgaaactagtcacaa

SEQ ID NO: 3912377 - DNA, 25 bp, Homo sapien
gggaggcctctcaacttggtttgca

SEQ ID NO: 3912378 - DNA, 25 bp, Homo sapien
acagactgggtgcttaaccaataga

SEQ ID NO: 3912379 - DNA, 25 bp, Homo sapien
ggattagggcctacccatgtgacct

SEQ ID NO: 3912380 - DNA, 25 bp, Homo sapien
gacagtaagtcatatgtacactcaa

SEQ ID NO: 3912381 - DNA, 25 bp, Homo sapien
atcaacttagctaagtgatgcatgc

SEQ ID NO: 3912382 - DNA, 25 bp, Homo sapien
caagataatgttcaattttgagcag

SEQ ID NO: 3912383 - DNA, 25 bp, Homo sapien
ttgttcacagctctatctcggcacc

SEQ ID NO: 3912384 - DNA, 25 bp, Homo sapien
tctcttattcatcaagtcaagcatc

SEQ ID NO: 3912385 - DNA, 25 bp, Homo sapien
tattgccaatcattccgtgtttaaa

SEQ ID NO: 3912386 - DNA, 25 bp, Homo sapien
tggttcctttacagccatgcccagc

SEQ ID NO: 3912387 - DNA, 25 bp, Homo sapien
aatgattgcataattacttcctaga

SEQ ID NO: 3912388 - DNA, 25 bp, Homo sapien
gcgactaggaccttatgttaagaag

SEQ ID NO: 3912389 - DNA, 25 bp, Homo sapien
tctgcatagaagttctattagtcca

SEQ ID NO: 3912390 - DNA, 25 bp, Homo sapien
gacccttgcgactaggaccttatgt

SEQ ID NO: 3912391 - DNA, 25 bp, Homo sapien
cctccatagacccttgcgactagga

SEQ ID NO: 3912392 - DNA, 25 bp, Homo sapien
ttttagactactgggacctcactgg

SEQ ID NO: 3912393 - DNA, 25 bp, Homo sapien
ctggctccctgtggtaataatttac

SEQ ID NO: 3912394 - DNA, 25 bp, Homo sapien
tatcttactgcataatctctgccgg

SEQ ID NO: 3912395 - DNA, 25 bp, Homo sapien
actggatccctcctataaaatgtgg

SEQ ID NO: 3912396 - DNA, 25 bp, Homo sapien
ctttaattgaactaatgaacttcca

SEQ ID NO: 3912397 - DNA, 25 bp, Homo sapien
aagtctttaattgaactaatgaact

SEQ ID NO: 3912398 - DNA, 25 bp, Homo sapien
agtctttaattgaactaatgaactt

SEQ ID NO: 3912399 - DNA, 25 bp, Homo sapien
tatggaatttcaaattgcatgaagt

SEQ ID NO: 3912400 - DNA, 25 bp, Homo sapien
tcatgaagtttcacattaaggagcg

SEQ ID NO: 3912401 - DNA, 25 bp, Homo sapien
tttcacattaaggagcggaggcttc

SEQ ID NO: 3912402 - DNA, 25 bp, Homo sapien
aaccacacaagctgtaacttgcaga

SEQ ID NO: 3912403 - DNA, 25 bp, Homo sapien
aacaaatcctgaaaatactcatcaa

SEQ ID NO: 3912404 - DNA, 25 bp, Homo sapien
tcacagtatgatggaataggcttct

SEQ ID NO: 3912405 - DNA, 25 bp, Homo sapien
tccaagcaaggaccagaggttcatc

SEQ ID NO: 3912406 - DNA, 25 bp, Homo sapien
tagaagtgtacttcccatgcaaggg

SEQ ID NO: 3912407 - DNA, 25 bp, Homo sapien
tatgacaatggctgggaataagctc

SEQ ID NO: 3912408 - DNA, 25 bp, Homo sapien
tgtctctggtagtggacccttccaa

SEQ ID NO: 3912409 - DNA, 25 bp, Homo sapien
tggtagtggacccttccaaagttca

SEQ ID NO: 3912410 - DNA, 25 bp, Homo sapien
tctctggtagtggacccttccaaag

SEQ ID NO: 3912411 - DNA, 25 bp, Homo sapien
ctctggtagtggacccttccaaagt

SEQ ID NO: 3912412 - DNA, 25 bp, Homo sapien
cattgctgggagtgaaaattctgta

SEQ ID NO: 3912413 - DNA, 25 bp, Homo sapien
taccaaagaatctcagcaaaaaggc

SEQ ID NO: 3912414 - DNA, 25 bp, Homo sapien
ggattagtaccttaagaactgagct

SEQ ID NO: 3912415 - DNA, 25 bp, Homo sapien
ccaccaattagggattaaggactgg

SEQ ID NO: 3912416 - DNA, 25 bp, Homo sapien
tcataactgttacaacctgccaggg

SEQ ID NO: 3912417 - DNA, 25 bp, Homo sapien
gatgccagagaacgaaacctacaag

SEQ ID NO: 3912418 - DNA, 25 bp, Homo sapien
tcaaggacttactttgcgtcaggca

SEQ ID NO: 3912419 - DNA, 25 bp, Homo sapien
aaaaagtggccagatatccctagag

SEQ ID NO: 3912420 - DNA, 25 bp, Homo sapien
ttcagatttctttgaagatgaatgt

SEQ ID NO: 3912421 - DNA, 25 bp, Homo sapien
gtagagaatcttcagatttctttga

SEQ ID NO: 3912422 - DNA, 25 bp, Homo sapien
tcagatttctttgaagatgaatgtc

SEQ ID NO: 3912423 - DNA, 25 bp, Homo sapien
taagtagagaatcttcagatttctt

SEQ ID NO: 3912424 - DNA, 25 bp, Homo sapien
aagataatctggattttttatgtga

SEQ ID NO: 3912425 - DNA, 25 bp, Homo sapien
ataatctggattttttatgtgatga

SEQ ID NO: 3912426 - DNA, 25 bp, Homo sapien
gataatctggattttttatgtgatg

SEQ ID NO: 3912427 - DNA, 25 bp, Homo sapien
taatctggattttttatgtgatgac

SEQ ID NO: 3912428 - DNA, 25 bp, Homo sapien
taatttaatggaacattcttggcat

SEQ ID NO: 3912429 - DNA, 25 bp, Homo sapien
tttaatggaacattcttggcataac

SEQ ID NO: 3912430 - DNA, 25 bp, Homo sapien
ttaatggaacattcttggcataacc

SEQ ID NO: 3912431 - DNA, 25 bp, Homo sapien
tttaatttaatggaacattcttggc

SEQ ID NO: 3912432 - DNA, 25 bp, Homo sapien
aacttggaagaatcaatcatatacc

SEQ ID NO: 3912433 - DNA, 25 bp, Homo sapien
atcatataccccctaaaatcaactt

SEQ ID NO: 3912434 - DNA, 25 bp, Homo sapien
ttctttgagactttgggaagctcca

SEQ ID NO: 3912435 - DNA, 25 bp, Homo sapien
ctttgagactttgggaagctccaag

SEQ ID NO: 3912436 - DNA, 25 bp, Homo sapien
aatttaacaagtgcatttctcttct

SEQ ID NO: 3912437 - DNA, 25 bp, Homo sapien
catgctcaatataaccaaaattaac

SEQ ID NO: 3912438 - DNA, 25 bp, Homo sapien
tgctcaatataaccaaaattaactt

SEQ ID NO: 3912439 - DNA, 25 bp, Homo sapien
atgctcaatataaccaaaattaact

SEQ ID NO: 3912440 - DNA, 25 bp, Homo sapien
gctcaatataaccaaaattaacttc

SEQ ID NO: 3912441 - DNA, 25 bp, Homo sapien
gatctagtattacccctaaaatgta

SEQ ID NO: 3912442 - DNA, 25 bp, Homo sapien
tagctatggtagttggtgataatat

SEQ ID NO: 3912443 - DNA, 25 bp, Homo sapien
aaggaaaggaatattagctatggta

SEQ ID NO: 3912444 - DNA, 25 bp, Homo sapien
tatctatatgatctagtattacccc

SEQ ID NO: 3912445 - DNA, 25 bp, Homo sapien
tttgggctcaatataagggacttcc

SEQ ID NO: 3912446 - DNA, 25 bp, Homo sapien
gaagatatatatgagccacgatagc

SEQ ID NO: 3912447 - DNA, 25 bp, Homo sapien
caaaaatgagtactagcctgcccca

SEQ ID NO: 3912448 - DNA, 25 bp, Homo sapien
tactgattgcctaccaaatgtctgg

SEQ ID NO: 3912449 - DNA, 25 bp, Homo sapien
tttttctactcgccacctaaatcca

SEQ ID NO: 3912450 - DNA, 25 bp, Homo sapien
tttctactcgccacctaaatccaaa

SEQ ID NO: 3912451 - DNA, 25 bp, Homo sapien
ttttctactcgccacctaaatccaa

SEQ ID NO: 3912452 - DNA, 25 bp, Homo sapien
tctaaacatggagccaacaatgaca

SEQ ID NO: 3912453 - DNA, 25 bp, Homo sapien
gaaatatgagtacctacttccttgg

SEQ ID NO: 3912454 - DNA, 25 bp, Homo sapien
ctatggaggaagtagcaagatcagt

SEQ ID NO: 3912455 - DNA, 25 bp, Homo sapien
gcttaaaagttataggtgccaggcc

SEQ ID NO: 3912456 - DNA, 25 bp, Homo sapien
ctagtgagggaaccaaaggcattac

SEQ ID NO: 3912457 - DNA, 25 bp, Homo sapien
caatgaggtcacgtacgcaagcagt

SEQ ID NO: 3912458 - DNA, 25 bp, Homo sapien
ggatgtctactgaagcacagccaag

SEQ ID NO: 3912459 - DNA, 25 bp, Homo sapien
tgggcttggcattccactgaggata

SEQ ID NO: 3912460 - DNA, 25 bp, Homo sapien
catcataaacgcaggacaactgagt

SEQ ID NO: 3912461 - DNA, 25 bp, Homo sapien
cacagctgcagaggttaaatggtcc

SEQ ID NO: 3912462 - DNA, 25 bp, Homo sapien
tgaaacaggatccaatacccacttg

SEQ ID NO: 3912463 - DNA, 25 bp, Homo sapien
tcattacaatcactagaggctctag

SEQ ID NO: 3912464 - DNA, 25 bp, Homo sapien
taatttatcatagtatttcttagca

SEQ ID NO: 3912465 - DNA, 25 bp, Homo sapien
agtatttcttagcaagtctcttctc

SEQ ID NO: 3912466 - DNA, 25 bp, Homo sapien
agatctgctatgcagtattccttaa

SEQ ID NO: 3912467 - DNA, 25 bp, Homo sapien
tatttactgagatctgctatgcagt

SEQ ID NO: 3912468 - DNA, 25 bp, Homo sapien
cctcctcattccataggaatctatg

SEQ ID NO: 3912469 - DNA, 25 bp, Homo sapien
ttttctcgtataacatccaagtctg

SEQ ID NO: 3912470 - DNA, 25 bp, Homo sapien
agtcatgtccatttcgtcctcctca

SEQ ID NO: 3912471 - DNA, 25 bp, Homo sapien
ggaatctatgattttctcgtataac

SEQ ID NO: 3912472 - DNA, 25 bp, Homo sapien
aatatagtcatttacgaactttgta

SEQ ID NO: 3912473 - DNA, 25 bp, Homo sapien
ttacgaactttgtatgtctttgata

SEQ ID NO: 3912474 - DNA, 25 bp, Homo sapien
catttacgaactttgtatgtctttg

SEQ ID NO: 3912475 - DNA, 25 bp, Homo sapien
tagtcatttacgaactttgtatgtc

SEQ ID NO: 3912476 - DNA, 25 bp, Homo sapien
agcatccatagctatgagatgaaac

SEQ ID NO: 3912477 - DNA, 25 bp, Homo sapien
catccatagctatgagatgaaacct

SEQ ID NO: 3912478 - DNA, 25 bp, Homo sapien
gcatccatagctatgagatgaaacc

SEQ ID NO: 3912479 - DNA, 25 bp, Homo sapien
tccatagctatgagatgaaaccttc

SEQ ID NO: 3912480 - DNA, 25 bp, Homo sapien
ttggagcagtaagtcatcttcaact

SEQ ID NO: 3912481 - DNA, 25 bp, Homo sapien
gcaacttgtttatgggccacctttc

SEQ ID NO: 3912482 - DNA, 25 bp, Homo sapien
tttggagcagtaagtcatcttcaac

SEQ ID NO: 3912483 - DNA, 25 bp, Homo sapien
tgctgcaacttgtttatgggccacc

SEQ ID NO: 3912484 - DNA, 25 bp, Homo sapien
catcactaaaatcagaatcatagcc

SEQ ID NO: 3912485 - DNA, 25 bp, Homo sapien
tcatcactaaaatcagaatcatagc

SEQ ID NO: 3912486 - DNA, 25 bp, Homo sapien
gctggattctccacagcgttcatca

SEQ ID NO: 3912487 - DNA, 25 bp, Homo sapien
tcactaaaatcagaatcatagcctc

SEQ ID NO: 3912488 - DNA, 25 bp, Homo sapien
ttaaaggatcattgtgggcagattc

SEQ ID NO: 3912489 - DNA, 25 bp, Homo sapien
gggcagattcctattcacaggccat

SEQ ID NO: 3912490 - DNA, 25 bp, Homo sapien
gacatacctttcaggaaatgcatca

SEQ ID NO: 3912491 - DNA, 25 bp, Homo sapien
tctatgttgccaattgtccaggaaa

SEQ ID NO: 3912492 - DNA, 25 bp, Homo sapien
cattgcattggatctagggtaaacg

SEQ ID NO: 3912493 - DNA, 25 bp, Homo sapien
taaacgacatgtttctagtcctggc

SEQ ID NO: 3912494 - DNA, 25 bp, Homo sapien
taatataacgacagcaagtgcagct

SEQ ID NO: 3912495 - DNA, 25 bp, Homo sapien
agtcctggctaccttgaataagtca

SEQ ID NO: 3912496 - DNA, 25 bp, Homo sapien
gatcagctagtactatatgaaaaac

SEQ ID NO: 3912497 - DNA, 25 bp, Homo sapien
aaaaacccgacgatcagctagtact

SEQ ID NO: 3912498 - DNA, 25 bp, Homo sapien
tccctgatgccaaatatacccacag

SEQ ID NO: 3912499 - DNA, 25 bp, Homo sapien
caactgacaagagcggggagaaact

SEQ ID NO: 3912500 - DNA, 25 bp, Homo sapien
tgtgtgccaagttcgcccccggagt

SEQ ID NO: 3912501 - DNA, 25 bp, Homo sapien
gcagcgacgacccacggcctgagag

SEQ ID NO: 3912502 - DNA, 25 bp, Homo sapien
acggcctgagagagccgctgcagca

SEQ ID NO: 3912503 - DNA, 25 bp, Homo sapien
gacccacggcctgagagagccgctg

SEQ ID NO: 3912504 - DNA, 25 bp, Homo sapien
ctgccgcacagcctcgccacaacca

SEQ ID NO: 3912505 - DNA, 25 bp, Homo sapien
gcctcgccacaaccaccaccgccgc

SEQ ID NO: 3912506 - DNA, 25 bp, Homo sapien
gcacagcctcgccacaaccaccacc

SEQ ID NO: 3912507 - DNA, 25 bp, Homo sapien
cgccgcccgcaacccgcctctccct

SEQ ID NO: 3912508 - DNA, 25 bp, Homo sapien
gccagaacagctccgggaaacaagg

SEQ ID NO: 3912509 - DNA, 25 bp, Homo sapien
aagaggcttccagctttcgccaagt

SEQ ID NO: 3912510 - DNA, 25 bp, Homo sapien
gagtgcgccgaccttgtgctacagc

SEQ ID NO: 3912511 - DNA, 25 bp, Homo sapien
tgttacatctaaatggcaccgtccc

SEQ ID NO: 3912512 - DNA, 25 bp, Homo sapien
tttctgcggtcacattcccagcttc

SEQ ID NO: 3912513 - DNA, 25 bp, Homo sapien
gggcactaatcctatggtcataacc

SEQ ID NO: 3912514 - DNA, 25 bp, Homo sapien
tcctacagaaaccaatgggtgtaac

SEQ ID NO: 3912515 - DNA, 25 bp, Homo sapien
tgtaacacaggccataagtcacggg

SEQ ID NO: 3912516 - DNA, 25 bp, Homo sapien
agaacgacagtataaagccaaacaa

SEQ ID NO: 3912517 - DNA, 25 bp, Homo sapien
cttccagaacgacagtataaagcca

SEQ ID NO: 3912518 - DNA, 25 bp, Homo sapien
ccagaacgacagtataaagccaaac

SEQ ID NO: 3912519 - DNA, 25 bp, Homo sapien
ttccagaacgacagtataaagccaa

SEQ ID NO: 3912520 - DNA, 25 bp, Homo sapien
tgtcccgatccactatcatatctga

SEQ ID NO: 3912521 - DNA, 25 bp, Homo sapien
gagaaagctgcttaaaatgacacca

SEQ ID NO: 3912522 - DNA, 25 bp, Homo sapien
ttgatattgatgtcccgatccacta

SEQ ID NO: 3912523 - DNA, 25 bp, Homo sapien
actatcatatctgacacgcagcttt

SEQ ID NO: 3912524 - DNA, 25 bp, Homo sapien
ggaacactgtacatgtgctcccaaa

SEQ ID NO: 3912525 - DNA, 25 bp, Homo sapien
ccccttctggtctttctgaggatgt

SEQ ID NO: 3912526 - DNA, 25 bp, Homo sapien
tgctttcaacagctcttccagaacc

SEQ ID NO: 3912527 - DNA, 25 bp, Homo sapien
caaacatcattccttgtccctcatt

SEQ ID NO: 3912528 - DNA, 25 bp, Homo sapien
ctcatggcggaacccttgacaaggc

SEQ ID NO: 3912529 - DNA, 25 bp, Homo sapien
catatggctggcaaagtgcagagct

SEQ ID NO: 3912530 - DNA, 25 bp, Homo sapien
taaatcggcccatggtcatatggct

SEQ ID NO: 3912531 - DNA, 25 bp, Homo sapien
cagactgggcattgagcctgcctca

SEQ ID NO: 3912532 - DNA, 25 bp, Homo sapien
aggaagctagagctggccgcctcct

SEQ ID NO: 3912533 - DNA, 25 bp, Homo sapien
tggcagggagttccttccaggcttc

SEQ ID NO: 3912534 - DNA, 25 bp, Homo sapien
catgtcacagcctcggggctgagcc

SEQ ID NO: 3912535 - DNA, 25 bp, Homo sapien
gagccaggcctttttcaaagcccca

SEQ ID NO: 3912536 - DNA, 25 bp, Homo sapien
gagaagctcacgaatcagctgcagg

SEQ ID NO: 3912537 - DNA, 25 bp, Homo sapien
tgcattgctggagcgaggagaagct

SEQ ID NO: 3912538 - DNA, 25 bp, Homo sapien
ttcccccgagcagtgcattgctgga

SEQ ID NO: 3912539 - DNA, 25 bp, Homo sapien
gaagctcacgaatcagctgcaggtc

SEQ ID NO: 3912540 - DNA, 25 bp, Homo sapien
tccagaagccctgttcatggttggg

SEQ ID NO: 3912541 - DNA, 25 bp, Homo sapien
aaatgcctgcattcccctgaaaaga

SEQ ID NO: 3912542 - DNA, 25 bp, Homo sapien
tgtctcttatctgcgcttttgctga

SEQ ID NO: 3912543 - DNA, 25 bp, Homo sapien
gggatattttctcgactgcatggaa

SEQ ID NO: 3912544 - DNA, 25 bp, Homo sapien
caaagataatgctttatgtgagaat

SEQ ID NO: 3912545 - DNA, 25 bp, Homo sapien
atgttatctcattgtaaggcccgta

SEQ ID NO: 3912546 - DNA, 25 bp, Homo sapien
gtaaggcccgtaagcattttgatat

SEQ ID NO: 3912547 - DNA, 25 bp, Homo sapien
agatccattccacgcaccgttcctc

SEQ ID NO: 3912548 - DNA, 25 bp, Homo sapien
attagcgctgcctttcctgagacac

SEQ ID NO: 3912549 - DNA, 25 bp, Homo sapien
tctccattagcgctgcctttcctga

SEQ ID NO: 3912550 - DNA, 25 bp, Homo sapien
tttcctgagacacagctctccgtgc

SEQ ID NO: 3912551 - DNA, 25 bp, Homo sapien
ctttcctgagacacagctctccgtg

SEQ ID NO: 3912552 - DNA, 25 bp, Homo sapien
agtatccctctcatggagcaaggat

SEQ ID NO: 3912553 - DNA, 25 bp, Homo sapien
cagtatccctctcatggagcaagga

SEQ ID NO: 3912554 - DNA, 25 bp, Homo sapien
tcagtatccctctcatggagcaagg

SEQ ID NO: 3912555 - DNA, 25 bp, Homo sapien
tgggatgctggttgatttagagact

SEQ ID NO: 3912556 - DNA, 25 bp, Homo sapien
caggctacttgggccatgggatgct

SEQ ID NO: 3912557 - DNA, 25 bp, Homo sapien
ggctacttgggccatgggatgctgg

SEQ ID NO: 3912558 - DNA, 25 bp, Homo sapien
atgggatgctggttgatttagagac

SEQ ID NO: 3912559 - DNA, 25 bp, Homo sapien
cttggagtcaagctgagcagtcttc

SEQ ID NO: 3912560 - DNA, 25 bp, Homo sapien
ttggagtcaagctgagcagtcttct

SEQ ID NO: 3912561 - DNA, 25 bp, Homo sapien
ggtatctctgttagaattgtctgaa

SEQ ID NO: 3912562 - DNA, 25 bp, Homo sapien
acatgtctttttcggctctgtctga

SEQ ID NO: 3912563 - DNA, 25 bp, Homo sapien
tagagcagatgtctcaatgaatgac

SEQ ID NO: 3912564 - DNA, 25 bp, Homo sapien
aagctcttgccttcaactctaggaa

SEQ ID NO: 3912565 - DNA, 25 bp, Homo sapien
cattaaagaggtagtcattctcatt

SEQ ID NO: 3912566 - DNA, 25 bp, Homo sapien
cattctcattgttgcaggtgcccat

SEQ ID NO: 3912567 - DNA, 25 bp, Homo sapien
aggtagtcattctcattgttgcagg

SEQ ID NO: 3912568 - DNA, 25 bp, Homo sapien
aacattaaagaggtagtcattctca

SEQ ID NO: 3912569 - DNA, 25 bp, Homo sapien
gaaaacttgtctcatattcaatgac

SEQ ID NO: 3912570 - DNA, 25 bp, Homo sapien
tgagcattagctgggtctaagtttc

SEQ ID NO: 3912571 - DNA, 25 bp, Homo sapien
aaattcatgagattgagaatgagca

SEQ ID NO: 3912572 - DNA, 25 bp, Homo sapien
gaatttgaatagcagtaatcatact

SEQ ID NO: 3912573 - DNA, 25 bp, Homo sapien
cagtaaggtgtgtagccaaaccagc

SEQ ID NO: 3912574 - DNA, 25 bp, Homo sapien
tcaccagtaaggtgtgtagccaaac

SEQ ID NO: 3912575 - DNA, 25 bp, Homo sapien
ccagtaaggtgtgtagccaaaccag

SEQ ID NO: 3912576 - DNA, 25 bp, Homo sapien
caccagtaaggtgtgtagccaaacc

SEQ ID NO: 3912577 - DNA, 25 bp, Homo sapien
aaaattgaccatcgcacttctacag

SEQ ID NO: 3912578 - DNA, 25 bp, Homo sapien
taaaaggacattctctcaataagca

SEQ ID NO: 3912579 - DNA, 25 bp, Homo sapien
tcttccaaatcccaaagtctggtac

SEQ ID NO: 3912580 - DNA, 25 bp, Homo sapien
cagaacattaacatcaatacagtgc

SEQ ID NO: 3912581 - DNA, 25 bp, Homo sapien
catctgctccgggaacttgtttttc

SEQ ID NO: 3912582 - DNA, 25 bp, Homo sapien
tcatctgctccgggaacttgttttt

SEQ ID NO: 3912583 - DNA, 25 bp, Homo sapien
tctcatctgctccgggaacttgttt

SEQ ID NO: 3912584 - DNA, 25 bp, Homo sapien
ctcatctgctccgggaacttgtttt

SEQ ID NO: 3912585 - DNA, 25 bp, Homo sapien
gcttatagatatgttcagatctctt

SEQ ID NO: 3912586 - DNA, 25 bp, Homo sapien
gatctcttctatattcacaccaaac

SEQ ID NO: 3912587 - DNA, 25 bp, Homo sapien
cagatctcttctatattcacaccaa

SEQ ID NO: 3912588 - DNA, 25 bp, Homo sapien
ctgacccctcttctgcttatagata

SEQ ID NO: 3912589 - DNA, 25 bp, Homo sapien
tgggttggcaccctcgttcttccca

SEQ ID NO: 3912590 - DNA, 25 bp, Homo sapien
cgttcttcccatccgacgcagattt

SEQ ID NO: 3912591 - DNA, 25 bp, Homo sapien
ttctcttgggttggcaccctcgttc

SEQ ID NO: 3912592 - DNA, 25 bp, Homo sapien
tcgttcttcccatccgacgcagatt

SEQ ID NO: 3912593 - DNA, 25 bp, Homo sapien
tagacaccattgtttccttacccaa

SEQ ID NO: 3912594 - DNA, 25 bp, Homo sapien
cctcattatcctccccacacattca

SEQ ID NO: 3912595 - DNA, 25 bp, Homo sapien
tagagacccacatctgcctcattat

SEQ ID NO: 3912596 - DNA, 25 bp, Homo sapien
cacctcttgattgtagtagacacca

SEQ ID NO: 3912597 - DNA, 25 bp, Homo sapien
tcatgccatgcctctactcaaaagt

SEQ ID NO: 3912598 - DNA, 25 bp, Homo sapien
ggtctacaagcctcaccagcacata

SEQ ID NO: 3912599 - DNA, 25 bp, Homo sapien
cttctgcatgctgttgtgaaaccag

SEQ ID NO: 3912600 - DNA, 25 bp, Homo sapien
gaaaggctactactgtccttcaggg

SEQ ID NO: 3912601 - DNA, 25 bp, Homo sapien
cttaggaagacagtggatttagaat

SEQ ID NO: 3912602 - DNA, 25 bp, Homo sapien
gaccatctgcagaagttagagcaaa

SEQ ID NO: 3912603 - DNA, 25 bp, Homo sapien
tactaggttgagcatgaccatctgc

SEQ ID NO: 3912604 - DNA, 25 bp, Homo sapien
tgagaggttcttttgtacaacggcc

SEQ ID NO: 3912605 - DNA, 25 bp, Homo sapien
tagaatggaatgtagggcagacacc

SEQ ID NO: 3912606 - DNA, 25 bp, Homo sapien
cacacagaaacctgatatagtggct

SEQ ID NO: 3912607 - DNA, 25 bp, Homo sapien
tggcttcagccggatgcctaattcc

SEQ ID NO: 3912608 - DNA, 25 bp, Homo sapien
gcctgcaccgagaatgtaccacatg

SEQ ID NO: 3912609 - DNA, 25 bp, Homo sapien
tgtgatagatgcatgaagtgcagtc

SEQ ID NO: 3912610 - DNA, 25 bp, Homo sapien
ggtcctcgttgaggcagaaagtgct

SEQ ID NO: 3912611 - DNA, 25 bp, Homo sapien
gggcaaagcagcaatatgaattacc

SEQ ID NO: 3912612 - DNA, 25 bp, Homo sapien
aggaaactcctgtgatagatgcatg

SEQ ID NO: 3912613 - DNA, 25 bp, Homo sapien
tgaggcaagagaccagaagctttga

SEQ ID NO: 3912614 - DNA, 25 bp, Homo sapien
ccagaagctttgataagaaacaggt

SEQ ID NO: 3912615 - DNA, 25 bp, Homo sapien
accagaagctttgataagaaacagg

SEQ ID NO: 3912616 - DNA, 25 bp, Homo sapien
tgaactgcaggcaggaaacagaggt

SEQ ID NO: 3912617 - DNA, 25 bp, Homo sapien
tgtccagagaggacatccactgaag

SEQ ID NO: 3912618 - DNA, 25 bp, Homo sapien
tgggcaccttgtccagagaggacat

SEQ ID NO: 3912619 - DNA, 25 bp, Homo sapien
ccagagaggacatccactgaagtga

SEQ ID NO: 3912620 - DNA, 25 bp, Homo sapien
atatgacctatctgattaggggtgg

SEQ ID NO: 3912621 - DNA, 25 bp, Homo sapien
cattcatatgacctatctgattagg

SEQ ID NO: 3912622 - DNA, 25 bp, Homo sapien
ggcctgaggttaatttctccctcat

SEQ ID NO: 3912623 - DNA, 25 bp, Homo sapien
gctggttggaatctgctgggcctga

SEQ ID NO: 3912624 - DNA, 25 bp, Homo sapien
gatcacacagctcagatgaagctca

SEQ ID NO: 3912625 - DNA, 25 bp, Homo sapien
cattcacaacccctgtgtaaggaag

SEQ ID NO: 3912626 - DNA, 25 bp, Homo sapien
gaaaaatatcagtacctgagtccca

SEQ ID NO: 3912627 - DNA, 25 bp, Homo sapien
tgagtcccaggccaattaaattaga

SEQ ID NO: 3912628 - DNA, 25 bp, Homo sapien
cctatattccgtgcttcccatgcag

SEQ ID NO: 3912629 - DNA, 25 bp, Homo sapien
taaccctatattccgtgcttcccat

SEQ ID NO: 3912630 - DNA, 25 bp, Homo sapien
atattccgtgcttcccatgcagtcc

SEQ ID NO: 3912631 - DNA, 25 bp, Homo sapien
tctaaccctatattccgtgcttccc

SEQ ID NO: 3912632 - DNA, 25 bp, Homo sapien
ggcttcattgttgggatccacacct

SEQ ID NO: 3912633 - DNA, 25 bp, Homo sapien
aggccaaactctgctccctgcaggg

SEQ ID NO: 3912634 - DNA, 25 bp, Homo sapien
tctgccaggccaaactctgctccct

SEQ ID NO: 3912635 - DNA, 25 bp, Homo sapien
ctggcatcaatgtctgctgattctg

SEQ ID NO: 3912636 - DNA, 25 bp, Homo sapien
gtctgctgattctgccaggccaaac

SEQ ID NO: 3912637 - DNA, 25 bp, Homo sapien
gcatggcacaaacaatcttctcttc

SEQ ID NO: 3912638 - DNA, 25 bp, Homo sapien
tctgcatggcacaaacaatcttctc

SEQ ID NO: 3912639 - DNA, 25 bp, Homo sapien
atctgcatggcacaaacaatcttct

SEQ ID NO: 3912640 - DNA, 25 bp, Homo sapien
tgcatggcacaaacaatcttctctt

SEQ ID NO: 3912641 - DNA, 25 bp, Homo sapien
ccataaatacacgaaggaccaaggc

SEQ ID NO: 3912642 - DNA, 25 bp, Homo sapien
ataaatacacgaaggaccaaggcca

SEQ ID NO: 3912643 - DNA, 25 bp, Homo sapien
cataaatacacgaaggaccaaggcc

SEQ ID NO: 3912644 - DNA, 25 bp, Homo sapien
tccataaatacacgaaggaccaagg

SEQ ID NO: 3912645 - DNA, 25 bp, Homo sapien
atctttgccattcaacgtgtttaca

SEQ ID NO: 3912646 - DNA, 25 bp, Homo sapien
tctttgccattcaacgtgtttacaa

SEQ ID NO: 3912647 - DNA, 25 bp, Homo sapien
ctttgccattcaacgtgtttacaaa

SEQ ID NO: 3912648 - DNA, 25 bp, Homo sapien
ttccccaaaattgataatgtcaaca

SEQ ID NO: 3912649 - DNA, 25 bp, Homo sapien
ccccaaaattgataatgtcaacatt

SEQ ID NO: 3912650 - DNA, 25 bp, Homo sapien
tcttccccaaaattgataatgtcaa

SEQ ID NO: 3912651 - DNA, 25 bp, Homo sapien
tccccaaaattgataatgtcaacat

SEQ ID NO: 3912652 - DNA, 25 bp, Homo sapien
tatccagtgtgataaggcccacgtt

SEQ ID NO: 3912653 - DNA, 25 bp, Homo sapien
cagccgggtgggtaagaagtctcca

SEQ ID NO: 3912654 - DNA, 25 bp, Homo sapien
cgtggatgcccatgcagaaggtgat

SEQ ID NO: 3912655 - DNA, 25 bp, Homo sapien
ggtcaggagtaggtgagccctcact

SEQ ID NO: 3912656 - DNA, 25 bp, Homo sapien
gtaagtaatgcaggagttgccactg

SEQ ID NO: 3912657 - DNA, 25 bp, Homo sapien
atggctggtaagtaatgcaggagtt

SEQ ID NO: 3912658 - DNA, 25 bp, Homo sapien
tggtaagtaatgcaggagttgccac

SEQ ID NO: 3912659 - DNA, 25 bp, Homo sapien
gctggtaagtaatgcaggagttgcc

SEQ ID NO: 3912660 - DNA, 25 bp, Homo sapien
gaagcctgggcgatgcactgagaca

SEQ ID NO: 3912661 - DNA, 25 bp, Homo sapien
agaagcctgggcgatgcactgagac

SEQ ID NO: 3912662 - DNA, 25 bp, Homo sapien
tagaagcctgggcgatgcactgaga

SEQ ID NO: 3912663 - DNA, 25 bp, Homo sapien
tattatggattgacatcaagaggct

SEQ ID NO: 3912664 - DNA, 25 bp, Homo sapien
tatattatggattgacatcaagagg

SEQ ID NO: 3912665 - DNA, 25 bp, Homo sapien
ctatattatggattgacatcaagag

SEQ ID NO: 3912666 - DNA, 25 bp, Homo sapien
atattatggattgacatcaagaggc

SEQ ID NO: 3912667 - DNA, 25 bp, Homo sapien
catcagggatgtcttgtaagaagtc

SEQ ID NO: 3912668 - DNA, 25 bp, Homo sapien
cctttgaggtcatatttgatatgca

SEQ ID NO: 3912669 - DNA, 25 bp, Homo sapien
cacgctgcagggtcttacagagagc

SEQ ID NO: 3912670 - DNA, 25 bp, Homo sapien
tccaaaaaaagaccatcagggatgt

SEQ ID NO: 3912671 - DNA, 25 bp, Homo sapien
tgtctgcacacagtacagtccatag

SEQ ID NO: 3912672 - DNA, 25 bp, Homo sapien
tctggttgaggtttatgtagtatcc

SEQ ID NO: 3912673 - DNA, 25 bp, Homo sapien
gaaactccgcttctttatgtcggac

SEQ ID NO: 3912674 - DNA, 25 bp, Homo sapien
gttgaggtttatgtagtatcctgga

SEQ ID NO: 3912675 - DNA, 25 bp, Homo sapien
gtttggtactcaggctccccacagt

SEQ ID NO: 3912676 - DNA, 25 bp, Homo sapien
ggaaccactagctccagagctacag

SEQ ID NO: 3912677 - DNA, 25 bp, Homo sapien
actagctccagagctacagagttca

SEQ ID NO: 3912678 - DNA, 25 bp, Homo sapien
taatgcctaactggatggcaccttt

SEQ ID NO: 3912679 - DNA, 25 bp, Homo sapien
ctcctgaggaatcaacacttctatg

SEQ ID NO: 3912680 - DNA, 25 bp, Homo sapien
cttctatggcctattttcttgatgg

SEQ ID NO: 3912681 - DNA, 25 bp, Homo sapien
ctgatgaggttgtccctcctgagga

SEQ ID NO: 3912682 - DNA, 25 bp, Homo sapien
cacttctatggcctattttcttgat

SEQ ID NO: 3912683 - DNA, 25 bp, Homo sapien
agaggcataaggcacctcagatgcc

SEQ ID NO: 3912684 - DNA, 25 bp, Homo sapien
gccagaggcataaggcacctcagat

SEQ ID NO: 3912685 - DNA, 25 bp, Homo sapien
aggcataaggcacctcagatgccat

SEQ ID NO: 3912686 - DNA, 25 bp, Homo sapien
ccagaggcataaggcacctcagatg

SEQ ID NO: 3912687 - DNA, 25 bp, Homo sapien
cggaatcgaatcttcccaatgtctc

SEQ ID NO: 3912688 - DNA, 25 bp, Homo sapien
tacaggaagggaccgcgggatcaac

SEQ ID NO: 3912689 - DNA, 25 bp, Homo sapien
ggcctggctctctttcaatccggct

SEQ ID NO: 3912690 - DNA, 25 bp, Homo sapien
cccaatgtctctttatagaacccac

SEQ ID NO: 3912691 - DNA, 25 bp, Homo sapien
aagtccacaccattcgcctggcatg

SEQ ID NO: 3912692 - DNA, 25 bp, Homo sapien
cacagaagagtaagcttaagctggc

SEQ ID NO: 3912693 - DNA, 25 bp, Homo sapien
cagggctccctcagacaagtcgagc

SEQ ID NO: 3912694 - DNA, 25 bp, Homo sapien
ctgggaccttgcgtccagaccaagc

SEQ ID NO: 3912695 - DNA, 25 bp, Homo sapien
aaaaacgaggcatgaaaagtcccag

SEQ ID NO: 3912696 - DNA, 25 bp, Homo sapien
gaggcatgaaaagtcccagaggagc

SEQ ID NO: 3912697 - DNA, 25 bp, Homo sapien
tctccgtcctccctagccaccgcct

SEQ ID NO: 3912698 - DNA, 25 bp, Homo sapien
gaaaagtcccagaggagcaaacgcc

SEQ ID NO: 3912699 - DNA, 25 bp, Homo sapien
taatagtccatccagtagtgaagca

SEQ ID NO: 3912700 - DNA, 25 bp, Homo sapien
tggtcatgccactggtaattcactg

SEQ ID NO: 3912701 - DNA, 25 bp, Homo sapien
aaagaatccttagggcaatgcctgc

SEQ ID NO: 3912702 - DNA, 25 bp, Homo sapien
tgcatgctggcctatgcaggctgag

SEQ ID NO: 3912703 - DNA, 25 bp, Homo sapien
caagaaatgattccttctggggtta

SEQ ID NO: 3912704 - DNA, 25 bp, Homo sapien
acttcgaggggtcggagatttaatg

SEQ ID NO: 3912705 - DNA, 25 bp, Homo sapien
gtcaagggtggatccttgacttcga

SEQ ID NO: 3912706 - DNA, 25 bp, Homo sapien
catggtcaagggtggatccttgact

SEQ ID NO: 3912707 - DNA, 25 bp, Homo sapien
caagggtggatccttgacttcgagg

SEQ ID NO: 3912708 - DNA, 25 bp, Homo sapien
cctagctgagggtatatgtgactca

SEQ ID NO: 3912709 - DNA, 25 bp, Homo sapien
ggctcctgtcctagctgagggtata

SEQ ID NO: 3912710 - DNA, 25 bp, Homo sapien
tagaaggaggctcctgtcctagctg

SEQ ID NO: 3912711 - DNA, 25 bp, Homo sapien
tatatgtgactcaaagcagaggcca

SEQ ID NO: 3912712 - DNA, 25 bp, Homo sapien
ctggccccaagatgtctgcctggta

SEQ ID NO: 3912713 - DNA, 25 bp, Homo sapien
tggccccaagatgtctgcctggtat

SEQ ID NO: 3912714 - DNA, 25 bp, Homo sapien
tagtaagcccggtacagtttgatgc

SEQ ID NO: 3912715 - DNA, 25 bp, Homo sapien
tggcaactgcaaaagctgagggctg

SEQ ID NO: 3912716 - DNA, 25 bp, Homo sapien
gatgtctgttggcaaattcctctgt

SEQ ID NO: 3912717 - DNA, 25 bp, Homo sapien
ttggcctttgtgctacccagatgtc

SEQ ID NO: 3912718 - DNA, 25 bp, Homo sapien
tatgaacgggttaactgatggctgg

SEQ ID NO: 3912719 - DNA, 25 bp, Homo sapien
tctgtaatatgtgcagtagagggtg

SEQ ID NO: 3912720 - DNA, 25 bp, Homo sapien
gcttgttgagtgtggcaaagcgcca

SEQ ID NO: 3912721 - DNA, 25 bp, Homo sapien
atgaagtcagagaccactgccccca

SEQ ID NO: 3912722 - DNA, 25 bp, Homo sapien
tttcactgaacagagagcagggtgt

SEQ ID NO: 3912723 - DNA, 25 bp, Homo sapien
gcaccttgtgtgcaactgttggcga

SEQ ID NO: 3912724 - DNA, 25 bp, Homo sapien
gaatggagccattgttcccctgaga

SEQ ID NO: 3912725 - DNA, 25 bp, Homo sapien
tcctctagataatggctggcagcag

SEQ ID NO: 3912726 - DNA, 25 bp, Homo sapien
ttgcctggctcctgcgcgttcctgg

SEQ ID NO: 3912727 - DNA, 25 bp, Homo sapien
gccggcgagactcgccaggagccaa

SEQ ID NO: 3912728 - DNA, 25 bp, Homo sapien
gcgttcctgggcatcggctctgcag

SEQ ID NO: 3912729 - DNA, 25 bp, Homo sapien
agccaagaggtgaggaagcgactct

SEQ ID NO: 3912730 - DNA, 25 bp, Homo sapien
agtcgacccgcctaagggagcagcc

SEQ ID NO: 3912731 - DNA, 25 bp, Homo sapien
ggcagtcgacccgcctaagggagca

SEQ ID NO: 3912732 - DNA, 25 bp, Homo sapien
taagggagcagcccgactccgcgta

SEQ ID NO: 3912733 - DNA, 25 bp, Homo sapien
ggttctctcccaaggcagtcgaccc

SEQ ID NO: 3912734 - DNA, 25 bp, Homo sapien
tggcggaaaagtgtcctcgcgctcc

SEQ ID NO: 3912735 - DNA, 25 bp, Homo sapien
cggaaaagtgtcctcgcgctcccgg

SEQ ID NO: 3912736 - DNA, 25 bp, Homo sapien
ctggcggaaaagtgtcctcgcgctc

SEQ ID NO: 3912737 - DNA, 25 bp, Homo sapien
ggcggaaaagtgtcctcgcgctccc

SEQ ID NO: 3912738 - DNA, 25 bp, Homo sapien
tgccagtgccttcactccagacgcc

SEQ ID NO: 3912739 - DNA, 25 bp, Homo sapien
ctgccagtgccttcactccagacgc

SEQ ID NO: 3912740 - DNA, 25 bp, Homo sapien
gccagtgccttcactccagacgcct

SEQ ID NO: 3912741 - DNA, 25 bp, Homo sapien
cagtgccttcactccagacgcctgc

SEQ ID NO: 3912742 - DNA, 25 bp, Homo sapien
agaagccagattgaactggagggac

SEQ ID NO: 3912743 - DNA, 25 bp, Homo sapien
aagccagattgaactggagggacat

SEQ ID NO: 3912744 - DNA, 25 bp, Homo sapien
taagaagccagattgaactggaggg

SEQ ID NO: 3912745 - DNA, 25 bp, Homo sapien
ggtaagaagccagattgaactggag

SEQ ID NO: 3912746 - DNA, 25 bp, Homo sapien
gacaggcgcctatataggacagttg

SEQ ID NO: 3912747 - DNA, 25 bp, Homo sapien
gcgcctatataggacagttgcttta

SEQ ID NO: 3912748 - DNA, 25 bp, Homo sapien
gttgctttagtcttaatgccttctc

SEQ ID NO: 3912749 - DNA, 25 bp, Homo sapien
ctggctgacaggcgcctatatagga

SEQ ID NO: 3912750 - DNA, 25 bp, Homo sapien
tgtcagccacacttgtttttgagca

SEQ ID NO: 3912751 - DNA, 25 bp, Homo sapien
caattgtttagcttgcccctttcca

SEQ ID NO: 3912752 - DNA, 25 bp, Homo sapien
ccaccgtaatagacgtgcttagcaa

SEQ ID NO: 3912753 - DNA, 25 bp, Homo sapien
gaaatgccatggatagttcaaccac

SEQ ID NO: 3912754 - DNA, 25 bp, Homo sapien
gtccttgtccataggtgacttcata

SEQ ID NO: 3912755 - DNA, 25 bp, Homo sapien
taggtgacttcatatacagtgccac

SEQ ID NO: 3912756 - DNA, 25 bp, Homo sapien
gccactgaaatagccactgtccttg

SEQ ID NO: 3912757 - DNA, 25 bp, Homo sapien
cccagctgccactgaaatagccact

SEQ ID NO: 3912758 - DNA, 25 bp, Homo sapien
cttgtctcctttttgcccacaattt

SEQ ID NO: 3912759 - DNA, 25 bp, Homo sapien
tccttgtctcctttttgcccacaat

SEQ ID NO: 3912760 - DNA, 25 bp, Homo sapien
ccttgtctcctttttgcccacaatt

SEQ ID NO: 3912761 - DNA, 25 bp, Homo sapien
agtttccatgttgggctaactgcag

SEQ ID NO: 3912762 - DNA, 25 bp, Homo sapien
gtttccatgttgggctaactgcagc

SEQ ID NO: 3912763 - DNA, 25 bp, Homo sapien
ttccatgttgggctaactgcagcac

SEQ ID NO: 3912764 - DNA, 25 bp, Homo sapien
tttccatgttgggctaactgcagca

SEQ ID NO: 3912765 - DNA, 25 bp, Homo sapien
tcagcactgatgtagcaggtgtcct

SEQ ID NO: 3912766 - DNA, 25 bp, Homo sapien
cctgccaggtgttcaggaagctgca

SEQ ID NO: 3912767 - DNA, 25 bp, Homo sapien
gcacaacttcccaggcaattgcgaa

SEQ ID NO: 3912768 - DNA, 25 bp, Homo sapien
caattgcgaatcagtaacatggccg

SEQ ID NO: 3912769 - DNA, 25 bp, Homo sapien
cagaggtgctgcagttagcccaaag

SEQ ID NO: 3912770 - DNA, 25 bp, Homo sapien
acagaggtgctgcagttagcccaaa

SEQ ID NO: 3912771 - DNA, 25 bp, Homo sapien
agaggtgctgcagttagcccaaagt

SEQ ID NO: 3912772 - DNA, 25 bp, Homo sapien
gaggtgctgcagttagcccaaagtg

SEQ ID NO: 3912773 - DNA, 25 bp, Homo sapien
tgatctgcagagtggagcactgtca

SEQ ID NO: 3912774 - DNA, 25 bp, Homo sapien
ggatgatctgcagagtggagcactg

SEQ ID NO: 3912775 - DNA, 25 bp, Homo sapien
gatctgcagagtggagcactgtcat

SEQ ID NO: 3912776 - DNA, 25 bp, Homo sapien
gatgatctgcagagtggagcactgt

SEQ ID NO: 3912777 - DNA, 25 bp, Homo sapien
tttagattccagacaaatctccact

SEQ ID NO: 3912778 - DNA, 25 bp, Homo sapien
gattccagacaaatctccactccac

SEQ ID NO: 3912779 - DNA, 25 bp, Homo sapien
ttttagattccagacaaatctccac

SEQ ID NO: 3912780 - DNA, 25 bp, Homo sapien
tagattccagacaaatctccactcc

SEQ ID NO: 3912781 - DNA, 25 bp, Homo sapien
ctctcttccctctgtcccatgtcca

SEQ ID NO: 3912782 - DNA, 25 bp, Homo sapien
ctcctctcttccctctgtcccatgt

SEQ ID NO: 3912783 - DNA, 25 bp, Homo sapien
tctcttccctctgtcccatgtccat

SEQ ID NO: 3912784 - DNA, 25 bp, Homo sapien
catcctttgggctcctctcttccct

SEQ ID NO: 3912785 - DNA, 25 bp, Homo sapien
tactgtctttgattggatgaaatgt

SEQ ID NO: 3912786 - DNA, 25 bp, Homo sapien
tttccgtgatggtgaaattactgag

SEQ ID NO: 3912787 - DNA, 25 bp, Homo sapien
gtaacttttactgtctttgattgga

SEQ ID NO: 3912788 - DNA, 25 bp, Homo sapien
tttagtgtctcttttccgtgatggt

SEQ ID NO: 3912789 - DNA, 25 bp, Homo sapien
tctccccagacttggcctgaaaggt

SEQ ID NO: 3912790 - DNA, 25 bp, Homo sapien
agttcttttgtgcaatacctgtagg

SEQ ID NO: 3912791 - DNA, 25 bp, Homo sapien
tgtaggacggaatcaggattttcca

SEQ ID NO: 3912792 - DNA, 25 bp, Homo sapien
tcatctccccagacttggcctgaaa

SEQ ID NO: 3912793 - DNA, 25 bp, Homo sapien
atttagcagtgggttttgtatacca

SEQ ID NO: 3912794 - DNA, 25 bp, Homo sapien
agcagtgggttttgtataccaactt

SEQ ID NO: 3912795 - DNA, 25 bp, Homo sapien
caaatttagcagtgggttttgtata

SEQ ID NO: 3912796 - DNA, 25 bp, Homo sapien
agccaaatttagcagtgggttttgt

SEQ ID NO: 3912797 - DNA, 25 bp, Homo sapien
ttatgaacggtatggtttagaccag

SEQ ID NO: 3912798 - DNA, 25 bp, Homo sapien
agatggatcagaagagagaattgcc

SEQ ID NO: 3912799 - DNA, 25 bp, Homo sapien
ggactgaggccttgacaacaacatg

SEQ ID NO: 3912800 - DNA, 25 bp, Homo sapien
ctgtagtggacagatggatcagaag

SEQ ID NO: 3912801 - DNA, 25 bp, Homo sapien
ccttctcaactcttcgctggtctcc

SEQ ID NO: 3912802 - DNA, 25 bp, Homo sapien
cttctcaactcttcgctggtctcca

SEQ ID NO: 3912803 - DNA, 25 bp, Homo sapien
ttctcaactcttcgctggtctccat

SEQ ID NO: 3912804 - DNA, 25 bp, Homo sapien
gttgtctttgatccaatccccaatc

SEQ ID NO: 3912805 - DNA, 25 bp, Homo sapien
tcctgttgtctttgatccaatcccc

SEQ ID NO: 3912806 - DNA, 25 bp, Homo sapien
catgctcccttcctaatgcctcttc

SEQ ID NO: 3912807 - DNA, 25 bp, Homo sapien
cccacatgctcccttcctaatgcct

SEQ ID NO: 3912808 - DNA, 25 bp, Homo sapien
aagacgtagtcatccagcttgggcc

SEQ ID NO: 3912809 - DNA, 25 bp, Homo sapien
acccatgcacggaccagaagggctg

SEQ ID NO: 3912810 - DNA, 25 bp, Homo sapien
agcttgggcctgacccatgcacgga

SEQ ID NO: 3912811 - DNA, 25 bp, Homo sapien
caagacgtagtcatccagcttgggc

SEQ ID NO: 3912812 - DNA, 25 bp, Homo sapien
ggcacaccagttatcctggctcctg

SEQ ID NO: 3912813 - DNA, 25 bp, Homo sapien
tcagtagcagcttgggcccctcctc

SEQ ID NO: 3912814 - DNA, 25 bp, Homo sapien
cctctagcatttccagctgcagagc

SEQ ID NO: 3912815 - DNA, 25 bp, Homo sapien
tggagatcgctgaagagcccatggt

SEQ ID NO: 3912816 - DNA, 25 bp, Homo sapien
tctaggagtgtaactgctcccccca

SEQ ID NO: 3912817 - DNA, 25 bp, Homo sapien
cattttctaggagtgtaactgctcc

SEQ ID NO: 3912818 - DNA, 25 bp, Homo sapien
ttttctaggagtgtaactgctcccc

SEQ ID NO: 3912819 - DNA, 25 bp, Homo sapien
agcattttctaggagtgtaactgct

SEQ ID NO: 3912820 - DNA, 25 bp, Homo sapien
tctgaggaattaacaagtaactgca

SEQ ID NO: 3912821 - DNA, 25 bp, Homo sapien
cagtggaacttcagctatagggagt

SEQ ID NO: 3912822 - DNA, 25 bp, Homo sapien
gctgaggcaccttacaaagatcgac

SEQ ID NO: 3912823 - DNA, 25 bp, Homo sapien
gcctctctccatgaaaaagctgagg

SEQ ID NO: 3912824 - DNA, 25 bp, Homo sapien
aatctgaatgttgccaataaagggt

SEQ ID NO: 3912825 - DNA, 25 bp, Homo sapien
ttggagtttgcattctctgtttgca

SEQ ID NO: 3912826 - DNA, 25 bp, Homo sapien
tgcattgcatcagattcttggtcaa

SEQ ID NO: 3912827 - DNA, 25 bp, Homo sapien
gattcttggtcaagaatctgaatgt

SEQ ID NO: 3912828 - DNA, 25 bp, Homo sapien
tatcacatagggcacttagcaccat

SEQ ID NO: 3912829 - DNA, 25 bp, Homo sapien
gactttggagtaaggagtgcgcttc

SEQ ID NO: 3912830 - DNA, 25 bp, Homo sapien
ggcctaaagatagccaacagcagtt

SEQ ID NO: 3912831 - DNA, 25 bp, Homo sapien
cagactcagtggacacggttcaagt

SEQ ID NO: 3912832 - DNA, 25 bp, Homo sapien
tcacgagcaggctgatcatccaggg

SEQ ID NO: 3912833 - DNA, 25 bp, Homo sapien
aactgtagtagcctgtcacgagcag

SEQ ID NO: 3912834 - DNA, 25 bp, Homo sapien
tgaatgccagaacggccactagcag

SEQ ID NO: 3912835 - DNA, 25 bp, Homo sapien
ggcaggatgggaaactgtagtagcc

SEQ ID NO: 3912836 - DNA, 25 bp, Homo sapien
gaggtgccaccttccttgcaagggc

SEQ ID NO: 3912837 - DNA, 25 bp, Homo sapien
agcacatgctttgcacacccttttg

SEQ ID NO: 3912838 - DNA, 25 bp, Homo sapien
tgcaagggccttgcatttaggccag

SEQ ID NO: 3912839 - DNA, 25 bp, Homo sapien
tctggacaatggtagccaagaattt

SEQ ID NO: 3912840 - DNA, 25 bp, Homo sapien
cacctgtagcataggaacaataatg

SEQ ID NO: 3912841 - DNA, 25 bp, Homo sapien
cctgtagcataggaacaataatgga

SEQ ID NO: 3912842 - DNA, 25 bp, Homo sapien
tcacctgtagcataggaacaataat

SEQ ID NO: 3912843 - DNA, 25 bp, Homo sapien
cttcacctgtagcataggaacaata

SEQ ID NO: 3912844 - DNA, 25 bp, Homo sapien
cagccttatcaatcccaagtgccag

SEQ ID NO: 3912845 - DNA, 25 bp, Homo sapien
gctgtgctcatgcacgtagctgcca

SEQ ID NO: 3912846 - DNA, 25 bp, Homo sapien
acgctccttttggtgccagccttat

SEQ ID NO: 3912847 - DNA, 25 bp, Homo sapien
gccagagtttcacacccggcatctg

SEQ ID NO: 3912848 - DNA, 25 bp, Homo sapien
aaacttaatcatagcagaagaggaa

SEQ ID NO: 3912849 - DNA, 25 bp, Homo sapien
gcctcatgaaacttaatcatagcag

SEQ ID NO: 3912850 - DNA, 25 bp, Homo sapien
ggaggcctcatgaaacttaatcata

SEQ ID NO: 3912851 - DNA, 25 bp, Homo sapien
acttaatcatagcagaagaggaagc

SEQ ID NO: 3912852 - DNA, 25 bp, Homo sapien
aagagatactgtgtcaacaataaag

SEQ ID NO: 3912853 - DNA, 25 bp, Homo sapien
catcgtaaagagatactgtgtcaac

SEQ ID NO: 3912854 - DNA, 25 bp, Homo sapien
cgtaaagagatactgtgtcaacaat

SEQ ID NO: 3912855 - DNA, 25 bp, Homo sapien
agagatactgtgtcaacaataaagg

SEQ ID NO: 3912856 - DNA, 25 bp, Homo sapien
gaaagatagtgccagaaagacccag

SEQ ID NO: 3912857 - DNA, 25 bp, Homo sapien
ccctgatgccattaagaagactgtg

SEQ ID NO: 3912858 - DNA, 25 bp, Homo sapien
tgtccagttaatgccagtgagggtt

SEQ ID NO: 3912859 - DNA, 25 bp, Homo sapien
gacattaacttgcattgaggccctt

SEQ ID NO: 3912860 - DNA, 25 bp, Homo sapien
tgaaatccgtctacaaaaagccctg

SEQ ID NO: 3912861 - DNA, 25 bp, Homo sapien
tactgatgctaccagacaccctgag

SEQ ID NO: 3912862 - DNA, 25 bp, Homo sapien
gacaggcggctctttgaccaaagca

SEQ ID NO: 3912863 - DNA, 25 bp, Homo sapien
tagggcttgaaccttgggcctgact

SEQ ID NO: 3912864 - DNA, 25 bp, Homo sapien
agcaggcactgctcaaaacagtgta

SEQ ID NO: 3912865 - DNA, 25 bp, Homo sapien
catatatggtccttactgtacagca

SEQ ID NO: 3912866 - DNA, 25 bp, Homo sapien
tatggtccttactgtacagcaggca

SEQ ID NO: 3912867 - DNA, 25 bp, Homo sapien
cagtgtacaaatagtaacgtcctct

SEQ ID NO: 3912868 - DNA, 25 bp, Homo sapien
tctgacatagagttgattatcttca

SEQ ID NO: 3912869 - DNA, 25 bp, Homo sapien
ttcttctgacatagagttgattatc

SEQ ID NO: 3912870 - DNA, 25 bp, Homo sapien
cttcggtgtgcattactcgtggtta

SEQ ID NO: 3912871 - DNA, 25 bp, Homo sapien
cgtggttagtagtgttgccaatttc

SEQ ID NO: 3912872 - DNA, 25 bp, Homo sapien
tttaaggttttagacaactgcatgg

SEQ ID NO: 3912873 - DNA, 25 bp, Homo sapien
aattggagttaggatgcttggagtc

SEQ ID NO: 3912874 - DNA, 25 bp, Homo sapien
caactgcatggtaatacattgctgc

SEQ ID NO: 3912875 - DNA, 25 bp, Homo sapien
acattgctgctggatttctaattgg

SEQ ID NO: 3912876 - DNA, 25 bp, Homo sapien
aatctctctacttcttatctcttga

SEQ ID NO: 3912877 - DNA, 25 bp, Homo sapien
gaggactgactaagataatgcaaac

SEQ ID NO: 3912878 - DNA, 25 bp, Homo sapien
tactcttgcctggtctttcccttgg

SEQ ID NO: 3912879 - DNA, 25 bp, Homo sapien
taatcaggctgctaggaggactgac

SEQ ID NO: 3912880 - DNA, 25 bp, Homo sapien
catggcgaagcctcagtaaatggta

SEQ ID NO: 3912881 - DNA, 25 bp, Homo sapien
tgcttctgagccagtaatccccaac

SEQ ID NO: 3912882 - DNA, 25 bp, Homo sapien
ctgcttctgagccagtaatccccaa

SEQ ID NO: 3912883 - DNA, 25 bp, Homo sapien
ccccaaccctgacatctgcctgctg

SEQ ID NO: 3912884 - DNA, 25 bp, Homo sapien
taatccccaaccctgacatctgcct

SEQ ID NO: 3912885 - DNA, 25 bp, Homo sapien
ctaagaggaagttgaagaaagctgc

SEQ ID NO: 3912886 - DNA, 25 bp, Homo sapien
taagaggaagttgaagaaagctgct

SEQ ID NO: 3912887 - DNA, 25 bp, Homo sapien
agttgaagaaagctgctggagcaac

SEQ ID NO: 3912888 - DNA, 25 bp, Homo sapien
ggaagttgaagaaagctgctggagc

SEQ ID NO: 3912889 - DNA, 25 bp, Homo sapien
tatgtttgtctttccggagttctgt

SEQ ID NO: 3912890 - DNA, 25 bp, Homo sapien
tctttccggagttctgtttggtcag

SEQ ID NO: 3912891 - DNA, 25 bp, Homo sapien
taattcgcctggttttagcaaagtc

SEQ ID NO: 3912892 - DNA, 25 bp, Homo sapien
aagcctctggcacagttctggttaa

SEQ ID NO: 3912893 - DNA, 25 bp, Homo sapien
actgtgcctgatcaataccttgatt

SEQ ID NO: 3912894 - DNA, 25 bp, Homo sapien
ctgtgcctgatcaataccttgattt

SEQ ID NO: 3912895 - DNA, 25 bp, Homo sapien
attttgacaggttccctgaacattg

SEQ ID NO: 3912896 - DNA, 25 bp, Homo sapien
tgcatagctgtcacaagctgcttgg

SEQ ID NO: 3912897 - DNA, 25 bp, Homo sapien
aaatggcagtgcaccaaacaacctc

SEQ ID NO: 3912898 - DNA, 25 bp, Homo sapien
cctcagaaacttgtacactgcatag

SEQ ID NO: 3912899 - DNA, 25 bp, Homo sapien
tggcagtgcaccaaacaacctcaga

SEQ ID NO: 3912900 - DNA, 25 bp, Homo sapien
gaaagtctgttactaccatgatgag

SEQ ID NO: 3912901 - DNA, 25 bp, Homo sapien
catgatgagaatgttggacaaagcc

SEQ ID NO: 3912902 - DNA, 25 bp, Homo sapien
ggaggccagcaagatagtgcagaca

SEQ ID NO: 3912903 - DNA, 25 bp, Homo sapien
tgaaaatctattgccctcacaaagc

SEQ ID NO: 3912904 - DNA, 25 bp, Homo sapien
cattcgcaatgtcacctgctgctgg

SEQ ID NO: 3912905 - DNA, 25 bp, Homo sapien
gcttcaatctgaacatcaaagggca

SEQ ID NO: 3912906 - DNA, 25 bp, Homo sapien
ggaggaggtgttacatcattcgcaa

SEQ ID NO: 3912907 - DNA, 25 bp, Homo sapien
caaagggcatgtcaagtgtgtggaa

SEQ ID NO: 3912908 - DNA, 25 bp, Homo sapien
acatgaaaaccattagggatccgta

SEQ ID NO: 3912909 - DNA, 25 bp, Homo sapien
gacatgaaaaccattagggatccgt

SEQ ID NO: 3912910 - DNA, 25 bp, Homo sapien
gggacatgaaaaccattagggatcc

SEQ ID NO: 3912911 - DNA, 25 bp, Homo sapien
ggacatgaaaaccattagggatccg

SEQ ID NO: 3912912 - DNA, 25 bp, Homo sapien
cataatgtagagaaacgctgtgtct

SEQ ID NO: 3912913 - DNA, 25 bp, Homo sapien
tctttccagcctcacgatctagttt

SEQ ID NO: 3912914 - DNA, 25 bp, Homo sapien
gctggaaaggttccaggtagcattc

SEQ ID NO: 3912915 - DNA, 25 bp, Homo sapien
gatctagttttctacacgcataatg

SEQ ID NO: 3912916 - DNA, 25 bp, Homo sapien
cagagggagaccttgccttgaaaga

SEQ ID NO: 3912917 - DNA, 25 bp, Homo sapien
gcaacagagggagaccttgccttga

SEQ ID NO: 3912918 - DNA, 25 bp, Homo sapien
aacagagggagaccttgccttgaaa

SEQ ID NO: 3912919 - DNA, 25 bp, Homo sapien
caacagagggagaccttgccttgaa

SEQ ID NO: 3912920 - DNA, 25 bp, Homo sapien
caggttctggcagtctgagctgtcc

SEQ ID NO: 3912921 - DNA, 25 bp, Homo sapien
aggttctggcagtctgagctgtcca

SEQ ID NO: 3912922 - DNA, 25 bp, Homo sapien
ggttctggcagtctgagctgtccat

SEQ ID NO: 3912923 - DNA, 25 bp, Homo sapien
aatgcttcacaaatgtatatgtcat

SEQ ID NO: 3912924 - DNA, 25 bp, Homo sapien
cacaaatgtatatgtcatccttgcg

SEQ ID NO: 3912925 - DNA, 25 bp, Homo sapien
aatacagaatgcttcacaaatgtat

SEQ ID NO: 3912926 - DNA, 25 bp, Homo sapien
acagaatgcttcacaaatgtatatg

SEQ ID NO: 3912927 - DNA, 25 bp, Homo sapien
ccaccacttcttcacccagtaagcc

SEQ ID NO: 3912928 - DNA, 25 bp, Homo sapien
tccaccacttcttcacccagtaagc

SEQ ID NO: 3912929 - DNA, 25 bp, Homo sapien
gcttcccacccttcactgccaactt

SEQ ID NO: 3912930 - DNA, 25 bp, Homo sapien
tccattgatatgttctttctgaaca

SEQ ID NO: 3912931 - DNA, 25 bp, Homo sapien
ggatgttccattgatatgttctttc

SEQ ID NO: 3912932 - DNA, 25 bp, Homo sapien
tccttggatgttccattgatatgtt

SEQ ID NO: 3912933 - DNA, 25 bp, Homo sapien
ctgaggagagtgattacatacactc

SEQ ID NO: 3912934 - DNA, 25 bp, Homo sapien
aaggcacgatcatttaccctagagc

SEQ ID NO: 3912935 - DNA, 25 bp, Homo sapien
ctgcagtacgggcagtaaggcacga

SEQ ID NO: 3912936 - DNA, 25 bp, Homo sapien
tacgggcagtaaggcacgatcattt

SEQ ID NO: 3912937 - DNA, 25 bp, Homo sapien
aagagtgaatcacagcatggtctcc

SEQ ID NO: 3912938 - DNA, 25 bp, Homo sapien
ggaccaagagtgaatcacagcatgg

SEQ ID NO: 3912939 - DNA, 25 bp, Homo sapien
ccgaggaccaagagtgaatcacagc

SEQ ID NO: 3912940 - DNA, 25 bp, Homo sapien
ctgcccgaggaccaagagtgaatca

SEQ ID NO: 3912941 - DNA, 25 bp, Homo sapien
gataccctgggcaagtaaggtgctt

SEQ ID NO: 3912942 - DNA, 25 bp, Homo sapien
ataccctgggcaagtaaggtgcttg

SEQ ID NO: 3912943 - DNA, 25 bp, Homo sapien
taccctgggcaagtaaggtgcttgg

SEQ ID NO: 3912944 - DNA, 25 bp, Homo sapien
agtaaggtgcttggacagtcttctg

SEQ ID NO: 3912945 - DNA, 25 bp, Homo sapien
gaaaacctacctggcaataatggac

SEQ ID NO: 3912946 - DNA, 25 bp, Homo sapien
gttacttacaggatgctacacagag

SEQ ID NO: 3912947 - DNA, 25 bp, Homo sapien
gatggcagcccaactattttaggag

SEQ ID NO: 3912948 - DNA, 25 bp, Homo sapien
taatatgtatggtgttctgagtccc

SEQ ID NO: 3912949 - DNA, 25 bp, Homo sapien
gaggaatattaacctcagccctggg

SEQ ID NO: 3912950 - DNA, 25 bp, Homo sapien
ggaatcagacaatacactcaaaggt

SEQ ID NO: 3912951 - DNA, 25 bp, Homo sapien
cagccctgggcccttattaaataga

SEQ ID NO: 3912952 - DNA, 25 bp, Homo sapien
tgggacagaatcacaacagtggcct

SEQ ID NO: 3912953 - DNA, 25 bp, Homo sapien
gtttgatgtctatgcagtgccctgc

SEQ ID NO: 3912954 - DNA, 25 bp, Homo sapien
gaaaacaccagcgatcttcagcctg

SEQ ID NO: 3912955 - DNA, 25 bp, Homo sapien
cagcctgacctaggtttgttgaaca

SEQ ID NO: 3912956 - DNA, 25 bp, Homo sapien
tcattcagtgtcaggagccgcaagg

SEQ ID NO: 3912957 - DNA, 25 bp, Homo sapien
gcctgaccctgcaggcggtcacacc

SEQ ID NO: 3912958 - DNA, 25 bp, Homo sapien
ctgaccctgcaggcggtcacacctt

SEQ ID NO: 3912959 - DNA, 25 bp, Homo sapien
tgaccctgcaggcggtcacacctta

SEQ ID NO: 3912960 - DNA, 25 bp, Homo sapien
cctgaccctgcaggcggtcacacct

SEQ ID NO: 3912961 - DNA, 25 bp, Homo sapien
gacaaccagagaagtctgtgatgca

SEQ ID NO: 3912962 - DNA, 25 bp, Homo sapien
cacagttgtcgctaatatctccaag

SEQ ID NO: 3912963 - DNA, 25 bp, Homo sapien
gaagggatcctgtctcaccagacaa

SEQ ID NO: 3912964 - DNA, 25 bp, Homo sapien
aaaacaagtgaagaacccctgccat

SEQ ID NO: 3912965 - DNA, 25 bp, Homo sapien
gcaagtaacgtttcctatatttcag

SEQ ID NO: 3912966 - DNA, 25 bp, Homo sapien
gacaaccattgcttactgaccccgt

SEQ ID NO: 3912967 - DNA, 25 bp, Homo sapien
ccccgtttagattgtttcctgcatt

SEQ ID NO: 3912968 - DNA, 25 bp, Homo sapien
tcttaagctaggtaggttcccagac

SEQ ID NO: 3912969 - DNA, 25 bp, Homo sapien
tagagcgccaaagaccagtaatacg

SEQ ID NO: 3912970 - DNA, 25 bp, Homo sapien
ttataatggtgggaatgccaacccc

SEQ ID NO: 3912971 - DNA, 25 bp, Homo sapien
gaagttacagggagtcattcctacg

SEQ ID NO: 3912972 - DNA, 25 bp, Homo sapien
gaattcagtcacttagcaaggaccg

SEQ ID NO: 3912973 - DNA, 25 bp, Homo sapien
gtcacacgaatgatgttaactacag

SEQ ID NO: 3912974 - DNA, 25 bp, Homo sapien
tgctaatgacgcaacacaaaaagtc

SEQ ID NO: 3912975 - DNA, 25 bp, Homo sapien
gattactagcgaaggattcttctca

SEQ ID NO: 3912976 - DNA, 25 bp, Homo sapien
tcataccactaagccaacaagatct

SEQ ID NO: 3912977 - DNA, 25 bp, Homo sapien
gatagtagactgtttcattttggtg

SEQ ID NO: 3912978 - DNA, 25 bp, Homo sapien
ctgatagtagactgtttcattttgg

SEQ ID NO: 3912979 - DNA, 25 bp, Homo sapien
gtagactgtttcattttggtgatgt

SEQ ID NO: 3912980 - DNA, 25 bp, Homo sapien
ctttgctgatagtagactgtttcat

SEQ ID NO: 3912981 - DNA, 25 bp, Homo sapien
tctagatgtcatatgcccctataag

SEQ ID NO: 3912982 - DNA, 25 bp, Homo sapien
gcagtaatgccccatagaactaatt

SEQ ID NO: 3912983 - DNA, 25 bp, Homo sapien
taatagttgattgctccataccacc

SEQ ID NO: 3912984 - DNA, 25 bp, Homo sapien
aaaagccagtttgctacacctgaaa

SEQ ID NO: 3912985 - DNA, 25 bp, Homo sapien
tagaagtgcttcagccactaaatcc

SEQ ID NO: 3912986 - DNA, 25 bp, Homo sapien
tgacacggggtatcttccataatat

SEQ ID NO: 3912987 - DNA, 25 bp, Homo sapien
aaatccttcccaaacgtgtgtgctg

SEQ ID NO: 3912988 - DNA, 25 bp, Homo sapien
tcagcttcttgacacggggtatctt

SEQ ID NO: 3912989 - DNA, 25 bp, Homo sapien
gtaaataaggagcacaaattcccaa

SEQ ID NO: 3912990 - DNA, 25 bp, Homo sapien
ataaatgcagcggatgccacactcg

SEQ ID NO: 3912991 - DNA, 25 bp, Homo sapien
cattgcaggaacaaggatgagcgcc

SEQ ID NO: 3912992 - DNA, 25 bp, Homo sapien
tgtccaagaatcacacccactgcag

SEQ ID NO: 3912993 - DNA, 25 bp, Homo sapien
tacagttaagtgaatgatgttgaca

SEQ ID NO: 3912994 - DNA, 25 bp, Homo sapien
gaaagctgtgaattagttcctaaca

SEQ ID NO: 3912995 - DNA, 25 bp, Homo sapien
gattccagtcgtgtgattacccagt

SEQ ID NO: 3912996 - DNA, 25 bp, Homo sapien
taacacgtctgtgacttgctccaaa

SEQ ID NO: 3912997 - DNA, 25 bp, Homo sapien
gggcagcactctcttggcgaaaaga

SEQ ID NO: 3912998 - DNA, 25 bp, Homo sapien
caggatatcgacatcttcagctgcg

SEQ ID NO: 3912999 - DNA, 25 bp, Homo sapien
aaaagacgcctgttggttgcatgcc

SEQ ID NO: 3913000 - DNA, 25 bp, Homo sapien
ccatgtcagcctcttcggtaatgaa

SEQ ID NO: 3913001 - DNA, 25 bp, Homo sapien
tcctcctggtgagatgtgttcgctc

SEQ ID NO: 3913002 - DNA, 25 bp, Homo sapien
tggcccagaagcttcacatcctgaa

SEQ ID NO: 3913003 - DNA, 25 bp, Homo sapien
gtccattgctttactgtcacccgtg

SEQ ID NO: 3913004 - DNA, 25 bp, Homo sapien
aagagccacccatagcagtccattg

SEQ ID NO: 3913005 - DNA, 25 bp, Homo sapien
tgggaaattgcctcacatggtggct

SEQ ID NO: 3913006 - DNA, 25 bp, Homo sapien
acaaatgtctgtgcactgatggctc

SEQ ID NO: 3913007 - DNA, 25 bp, Homo sapien
gcactgcacaggatgtcattcagca

SEQ ID NO: 3913008 - DNA, 25 bp, Homo sapien
gagcaacctcgaacagtcatcaaag

SEQ ID NO: 3913009 - DNA, 25 bp, Homo sapien
cattttatggccgagaattagaagc

SEQ ID NO: 3913010 - DNA, 25 bp, Homo sapien
tattgtgtaccacagtgcactcctc

SEQ ID NO: 3913011 - DNA, 25 bp, Homo sapien
gcccaaggaccttaatttgccaaca

SEQ ID NO: 3913012 - DNA, 25 bp, Homo sapien
gaactgggaacaaggagcacaaaga

SEQ ID NO: 3913013 - DNA, 25 bp, Homo sapien
gaagagctattgatccaagtcatac

SEQ ID NO: 3913014 - DNA, 25 bp, Homo sapien
tatacatcgctctcttgatattgcc

SEQ ID NO: 3913015 - DNA, 25 bp, Homo sapien
tattttgcaaggtttgtactgacac

SEQ ID NO: 3913016 - DNA, 25 bp, Homo sapien
gaagcattagttctcagtacttgaa

SEQ ID NO: 3913017 - DNA, 25 bp, Homo sapien
gatcagaatggtaaagtcttgggcc

SEQ ID NO: 3913018 - DNA, 25 bp, Homo sapien
accctccagggaatgtcagaaaacg

SEQ ID NO: 3913019 - DNA, 25 bp, Homo sapien
taggccactcctagaatatgggaat

SEQ ID NO: 3913020 - DNA, 25 bp, Homo sapien
taacttctttaggtggatcatccag

SEQ ID NO: 3913021 - DNA, 25 bp, Homo sapien
aatccagaggcgattcagtagcaac

SEQ ID NO: 3913022 - DNA, 25 bp, Homo sapien
cactggagtatcttttgattagctg

SEQ ID NO: 3913023 - DNA, 25 bp, Homo sapien
cagtagcaacttcactggagtatct

SEQ ID NO: 3913024 - DNA, 25 bp, Homo sapien
caaatatttcgtgaaatccagaggc

SEQ ID NO: 3913025 - DNA, 25 bp, Homo sapien
gccatgctatatgcctcaaaaagtt

SEQ ID NO: 3913026 - DNA, 25 bp, Homo sapien
tctgccatgctatatgcctcaaaaa

SEQ ID NO: 3913027 - DNA, 25 bp, Homo sapien
tattttggggtttgaagattcaaca

SEQ ID NO: 3913028 - DNA, 25 bp, Homo sapien
caacaggaggattgaatgtcatttc

SEQ ID NO: 3913029 - DNA, 25 bp, Homo sapien
ttagaacacagctcaactcttcagc

SEQ ID NO: 3913030 - DNA, 25 bp, Homo sapien
ttcagtgtgatcaaatcccaaccca

SEQ ID NO: 3913031 - DNA, 25 bp, Homo sapien
ccaacccactgataatgcaactaag

SEQ ID NO: 3913032 - DNA, 25 bp, Homo sapien
ggactgaagcatggagtcattctcc

SEQ ID NO: 3913033 - DNA, 25 bp, Homo sapien
gcgatcaggtgggctgcaaatctct

SEQ ID NO: 3913034 - DNA, 25 bp, Homo sapien
tcaactctggtttgagtgctccaga

SEQ ID NO: 3913035 - DNA, 25 bp, Homo sapien
gaaggtgctccagcgatcaggtggg

SEQ ID NO: 3913036 - DNA, 25 bp, Homo sapien
tctgcactatgggatgataatgcct

SEQ ID NO: 3913037 - DNA, 25 bp, Homo sapien
tgtcaagcagtagatctgttttggg

SEQ ID NO: 3913038 - DNA, 25 bp, Homo sapien
agcagtgttctgagcattgcagtac

SEQ ID NO: 3913039 - DNA, 25 bp, Homo sapien
gcagttcccacagagcagtgttctg

SEQ ID NO: 3913040 - DNA, 25 bp, Homo sapien
actgtcaagcagtagatctgttttg

SEQ ID NO: 3913041 - DNA, 25 bp, Homo sapien
tgaagagcaagggtacaaaggcgtt

SEQ ID NO: 3913042 - DNA, 25 bp, Homo sapien
gcttagttagcatgacatcaaggca

SEQ ID NO: 3913043 - DNA, 25 bp, Homo sapien
caaaggcgtttgatgaaggcaagag

SEQ ID NO: 3913044 - DNA, 25 bp, Homo sapien
tattctggtagttgctaaaatgcca

SEQ ID NO: 3913045 - DNA, 25 bp, Homo sapien
ctgcatgtaatttgaacagtgtttt

SEQ ID NO: 3913046 - DNA, 25 bp, Homo sapien
tagagatgtgtgtagaatttcaatg

SEQ ID NO: 3913047 - DNA, 25 bp, Homo sapien
atttcaatggatcaatattcagaac

SEQ ID NO: 3913048 - DNA, 25 bp, Homo sapien
aatggatcaatattcagaacatcac

SEQ ID NO: 3913049 - DNA, 25 bp, Homo sapien
tgaagactttcttgatagcttaggt

SEQ ID NO: 3913050 - DNA, 25 bp, Homo sapien
gaagactttcttgatagcttaggtc

SEQ ID NO: 3913051 - DNA, 25 bp, Homo sapien
gaatatgaaaagcagtctggacaca

SEQ ID NO: 3913052 - DNA, 25 bp, Homo sapien
agtgaagactttcttgatagcttag

SEQ ID NO: 3913053 - DNA, 25 bp, Homo sapien
gaagaactactaacagatcatcaaa

SEQ ID NO: 3913054 - DNA, 25 bp, Homo sapien
aagaactactaacagatcatcaaaa

SEQ ID NO: 3913055 - DNA, 25 bp, Homo sapien
tggcaagaccttctagaactgctgg

SEQ ID NO: 3913056 - DNA, 25 bp, Homo sapien
ttggcaagaccttctagaactgctg

SEQ ID NO: 3913057 - DNA, 25 bp, Homo sapien
aaacacaatattcagagtctctgtg

SEQ ID NO: 3913058 - DNA, 25 bp, Homo sapien
caaacacaatattcagagtctctgt

SEQ ID NO: 3913059 - DNA, 25 bp, Homo sapien
aacacaatattcagagtctctgtgt

SEQ ID NO: 3913060 - DNA, 25 bp, Homo sapien
cgaagctctcgctctagtttctctt

SEQ ID NO: 3913061 - DNA, 25 bp, Homo sapien
ttaagttttttctcagtactctctg

SEQ ID NO: 3913062 - DNA, 25 bp, Homo sapien
tgcctctcgaagctctcgctctagt

SEQ ID NO: 3913063 - DNA, 25 bp, Homo sapien
tctcagtactctctgaagcttctgc

SEQ ID NO: 3913064 - DNA, 25 bp, Homo sapien
ttccttgattcttaggcataaaaat

SEQ ID NO: 3913065 - DNA, 25 bp, Homo sapien
cttccttgattcttaggcataaaaa

SEQ ID NO: 3913066 - DNA, 25 bp, Homo sapien
tccttgattcttaggcataaaaatg

SEQ ID NO: 3913067 - DNA, 25 bp, Homo sapien
acttccttgattcttaggcataaaa

SEQ ID NO: 3913068 - DNA, 25 bp, Homo sapien
tcactttaattacaccaagagaagc

SEQ ID NO: 3913069 - DNA, 25 bp, Homo sapien
caagagaagcttggcctaatttatc

SEQ ID NO: 3913070 - DNA, 25 bp, Homo sapien
ccagaaatcactttaattacaccaa

SEQ ID NO: 3913071 - DNA, 25 bp, Homo sapien
tctggcctaacttcgtaatttctgc

SEQ ID NO: 3913072 - DNA, 25 bp, Homo sapien
tcatgagagggacaatcaatacgat

SEQ ID NO: 3913073 - DNA, 25 bp, Homo sapien
agctcacacaagctcttcacagcga

SEQ ID NO: 3913074 - DNA, 25 bp, Homo sapien
cacagcgacttctgccagtcctttg

SEQ ID NO: 3913075 - DNA, 25 bp, Homo sapien
aaaatgaggtagtgccaccaacagc

SEQ ID NO: 3913076 - DNA, 25 bp, Homo sapien
tgcctctcactacacaacacagaac

SEQ ID NO: 3913077 - DNA, 25 bp, Homo sapien
ctgcctctcactacacaacacagaa

SEQ ID NO: 3913078 - DNA, 25 bp, Homo sapien
catgatcaaggctaagtatgttaca

SEQ ID NO: 3913079 - DNA, 25 bp, Homo sapien
gatcaaggctaagtatgttacaaac

SEQ ID NO: 3913080 - DNA, 25 bp, Homo sapien
cttcatgatcaaggctaagtatgtt

SEQ ID NO: 3913081 - DNA, 25 bp, Homo sapien
aaggctaagtatgttacaaactttg

SEQ ID NO: 3913082 - DNA, 25 bp, Homo sapien
aacttgtattggctaaccaggcctt

SEQ ID NO: 3913083 - DNA, 25 bp, Homo sapien
acttgtattggctaaccaggccttc

SEQ ID NO: 3913084 - DNA, 25 bp, Homo sapien
ccatcagagaaacaattaccagctt

SEQ ID NO: 3913085 - DNA, 25 bp, Homo sapien
tcaacatagaacgtaattctttcaa

SEQ ID NO: 3913086 - DNA, 25 bp, Homo sapien
cttgttccatcaacatagaacgtaa

SEQ ID NO: 3913087 - DNA, 25 bp, Homo sapien
ttcgaacagtaacagccacatcagg

SEQ ID NO: 3913088 - DNA, 25 bp, Homo sapien
tttctggatctgataatatggcaga

SEQ ID NO: 3913089 - DNA, 25 bp, Homo sapien
ggtcagctcttgaataggatcttca

SEQ ID NO: 3913090 - DNA, 25 bp, Homo sapien
tggcagatgccaaggctgcaatatg

SEQ ID NO: 3913091 - DNA, 25 bp, Homo sapien
tcaatcaaatgttcttctatggtca

SEQ ID NO: 3913092 - DNA, 25 bp, Homo sapien
ttgatcctcttcatctttgttacta

SEQ ID NO: 3913093 - DNA, 25 bp, Homo sapien
tcctcttcatctttgttactatcag

SEQ ID NO: 3913094 - DNA, 25 bp, Homo sapien
tcttcatctttgttactatcagtaa

SEQ ID NO: 3913095 - DNA, 25 bp, Homo sapien
gatcctcttcatctttgttactatc

SEQ ID NO: 3913096 - DNA, 25 bp, Homo sapien
tccctagtctgtgggattataccac

SEQ ID NO: 3913097 - DNA, 25 bp, Homo sapien
cttctctggtgcagtttgcagagtt

SEQ ID NO: 3913098 - DNA, 25 bp, Homo sapien
ccgtttcttcgcatgaacaggctca

SEQ ID NO: 3913099 - DNA, 25 bp, Homo sapien
tatctataatgcgttcatgcttccg

SEQ ID NO: 3913100 - DNA, 25 bp, Homo sapien
gtgaacaccttgaaccacctaagtg

SEQ ID NO: 3913101 - DNA, 25 bp, Homo sapien
tagccgtaggaactcagaactgttc

SEQ ID NO: 3913102 - DNA, 25 bp, Homo sapien
gggaataagacctaccagcagggta

SEQ ID NO: 3913103 - DNA, 25 bp, Homo sapien
ggctacatccagttttccctctaga

SEQ ID NO: 3913104 - DNA, 25 bp, Homo sapien
gatctcttgttagaaaagatactct

SEQ ID NO: 3913105 - DNA, 25 bp, Homo sapien
tcatatctaaaggaagggcttcttc

SEQ ID NO: 3913106 - DNA, 25 bp, Homo sapien
gatactctttgtcctaaatccttca

SEQ ID NO: 3913107 - DNA, 25 bp, Homo sapien
taactgtaagtcatcttcatccatc

SEQ ID NO: 3913108 - DNA, 25 bp, Homo sapien
gaaatgcctttcaggacgtttggaa

SEQ ID NO: 3913109 - DNA, 25 bp, Homo sapien
aacaattctttgtcgtactgggatg

SEQ ID NO: 3913110 - DNA, 25 bp, Homo sapien
gaactactgatatgctaggcaaaca

SEQ ID NO: 3913111 - DNA, 25 bp, Homo sapien
ttggaaaccaatgacttagcccctc

SEQ ID NO: 3913112 - DNA, 25 bp, Homo sapien
gcccaatatttatgtaacggagtac

SEQ ID NO: 3913113 - DNA, 25 bp, Homo sapien
gaaatgttttctcatactgactgtg

SEQ ID NO: 3913114 - DNA, 25 bp, Homo sapien
caagtagtgcatcttcagatctgcc

SEQ ID NO: 3913115 - DNA, 25 bp, Homo sapien
tgccttccagacaaactaaaagcag

SEQ ID NO: 3913116 - DNA, 25 bp, Homo sapien
ttctccaatggaatgggtttcttag

SEQ ID NO: 3913117 - DNA, 25 bp, Homo sapien
cctttgggttctccaatggaatggg

SEQ ID NO: 3913118 - DNA, 25 bp, Homo sapien
ttattaacttgcgaaagcttgggat

SEQ ID NO: 3913119 - DNA, 25 bp, Homo sapien
tgttcttttcggtacttcttgagag

SEQ ID NO: 3913120 - DNA, 25 bp, Homo sapien
gaatgacacacgtgccgaagtccct

SEQ ID NO: 3913121 - DNA, 25 bp, Homo sapien
tgaatgccggccagacaagttcacc

SEQ ID NO: 3913122 - DNA, 25 bp, Homo sapien
ttcaccagaagcagggttactacag

SEQ ID NO: 3913123 - DNA, 25 bp, Homo sapien
aagtccctacactaccagagccgga

SEQ ID NO: 3913124 - DNA, 25 bp, Homo sapien
ttcagcgttacctcgcggcggccgg

SEQ ID NO: 3913125 - DNA, 25 bp, Homo sapien
acgggcggctttggcggaggcgtcg

SEQ ID NO: 3913126 - DNA, 25 bp, Homo sapien
gagccggggctctgctactgtccgc

SEQ ID NO: 3913127 - DNA, 25 bp, Homo sapien
tggagccgccggaggaggctgacga

SEQ ID NO: 3913128 - DNA, 25 bp, Homo sapien
ctgagtacagggcactacaggcgca

SEQ ID NO: 3913129 - DNA, 25 bp, Homo sapien
atttacaaagtttttgctgggtgcg

SEQ ID NO: 3913130 - DNA, 25 bp, Homo sapien
caaaagaattaatggccatagtggt

SEQ ID NO: 3913131 - DNA, 25 bp, Homo sapien
tggaaagacatctgtaagattacac

SEQ ID NO: 3913132 - DNA, 25 bp, Homo sapien
aacataccatcaattgtaagacgca

SEQ ID NO: 3913133 - DNA, 25 bp, Homo sapien
tggattcagacgattcttatgcctt

SEQ ID NO: 3913134 - DNA, 25 bp, Homo sapien
aaatgtcccatcatcatactttgag

SEQ ID NO: 3913135 - DNA, 25 bp, Homo sapien
gatctttcccttatgtaaatgtccc

SEQ ID NO: 3913136 - DNA, 25 bp, Homo sapien
cagctcacgtatttctcagtatttt

SEQ ID NO: 3913137 - DNA, 25 bp, Homo sapien
tctatgtaataggtcactaacactt

SEQ ID NO: 3913138 - DNA, 25 bp, Homo sapien
cacctgcctggtgcaatgtgttgtt

SEQ ID NO: 3913139 - DNA, 25 bp, Homo sapien
atagtcaccattctatgtaataggt

SEQ ID NO: 3913140 - DNA, 25 bp, Homo sapien
ggttttaaatcatcatgcccatgga

SEQ ID NO: 3913141 - DNA, 25 bp, Homo sapien
aaggaaggtcttgatactgccctcg

SEQ ID NO: 3913142 - DNA, 25 bp, Homo sapien
tcacatggtacactaaatgctgcct

SEQ ID NO: 3913143 - DNA, 25 bp, Homo sapien
cattggccactttgcataggttcgg

SEQ ID NO: 3913144 - DNA, 25 bp, Homo sapien
aattcacatggtcagtatatggcag

SEQ ID NO: 3913145 - DNA, 25 bp, Homo sapien
ctcttgagcccagtatgtaggaaat

SEQ ID NO: 3913146 - DNA, 25 bp, Homo sapien
tccaaggaatgcactaagccttcag

SEQ ID NO: 3913147 - DNA, 25 bp, Homo sapien
tttttagactgacagtactggcagc

SEQ ID NO: 3913148 - DNA, 25 bp, Homo sapien
tctaggcttaccgcatcctccgctt

SEQ ID NO: 3913149 - DNA, 25 bp, Homo sapien
taggcttaccgcatcctccgcttcc

SEQ ID NO: 3913150 - DNA, 25 bp, Homo sapien
ctaggcttaccgcatcctccgcttc

SEQ ID NO: 3913151 - DNA, 25 bp, Homo sapien
tgagcctggcctagtcagaaattgt

SEQ ID NO: 3913152 - DNA, 25 bp, Homo sapien
ctttgttaaacgagtctgagcctgg

SEQ ID NO: 3913153 - DNA, 25 bp, Homo sapien
tacatatatgttgcggagagttggg

SEQ ID NO: 3913154 - DNA, 25 bp, Homo sapien
cattttgcaaggaactgtggaaaca

SEQ ID NO: 3913155 - DNA, 25 bp, Homo sapien
tccctgagtagtccagcgcctggga

SEQ ID NO: 3913156 - DNA, 25 bp, Homo sapien
tctcttttcctcttcgcctaactaa

SEQ ID NO: 3913157 - DNA, 25 bp, Homo sapien
catgcctggtcccataccagttatt

SEQ ID NO: 3913158 - DNA, 25 bp, Homo sapien
tcgcctaactaaattctttccattg

SEQ ID NO: 3913159 - DNA, 25 bp, Homo sapien
tcattgtcaagagtaccagattggt

SEQ ID NO: 3913160 - DNA, 25 bp, Homo sapien
gctactctggtgtttatgcccttac

SEQ ID NO: 3913161 - DNA, 25 bp, Homo sapien
gctgtcacacagataatcactaaca

SEQ ID NO: 3913162 - DNA, 25 bp, Homo sapien
tgcccttactgtgccctatttatag

SEQ ID NO: 3913163 - DNA, 25 bp, Homo sapien
taaaatccttttagcctcagcctta

SEQ ID NO: 3913164 - DNA, 25 bp, Homo sapien
tttacaggacagcttttatcagttc

SEQ ID NO: 3913165 - DNA, 25 bp, Homo sapien
attgaacctctgattgctgggctca

SEQ ID NO: 3913166 - DNA, 25 bp, Homo sapien
tgtgtcagccacttacatgtcctgt

SEQ ID NO: 3913167 - DNA, 25 bp, Homo sapien
tgatgggtccatgtcttactcagag

SEQ ID NO: 3913168 - DNA, 25 bp, Homo sapien
ccatgtcttactcagagagagaaaa

SEQ ID NO: 3913169 - DNA, 25 bp, Homo sapien
ggtccatgtcttactcagagagaga

SEQ ID NO: 3913170 - DNA, 25 bp, Homo sapien
ggcttgatgggtccatgtcttactc

SEQ ID NO: 3913171 - DNA, 25 bp, Homo sapien
gttggaagtatagcaaggaatatgc

SEQ ID NO: 3913172 - DNA, 25 bp, Homo sapien
tgcacagcttcaacacggatccaga

SEQ ID NO: 3913173 - DNA, 25 bp, Homo sapien
ggtggcctgggcattaatctgactg

SEQ ID NO: 3913174 - DNA, 25 bp, Homo sapien
tagtgagtacacgagctggtggcct

SEQ ID NO: 3913175 - DNA, 25 bp, Homo sapien
gtcacctaggcatgaatacagctca

SEQ ID NO: 3913176 - DNA, 25 bp, Homo sapien
ttcctgttctcagagggtcctccta

SEQ ID NO: 3913177 - DNA, 25 bp, Homo sapien
gcacctggcccgaatgctgctttga

SEQ ID NO: 3913178 - DNA, 25 bp, Homo sapien
aagagactcctgctatgttgcacag

SEQ ID NO: 3913179 - DNA, 25 bp, Homo sapien
gactgattcacccttttcagtgagt

SEQ ID NO: 3913180 - DNA, 25 bp, Homo sapien
tactctaccctgtctatatgtggat

SEQ ID NO: 3913181 - DNA, 25 bp, Homo sapien
tgttcaaaatgtagacttcctcagt

SEQ ID NO: 3913182 - DNA, 25 bp, Homo sapien
gggccatggtgtttgactcttcttt

SEQ ID NO: 3913183 - DNA, 25 bp, Homo sapien
aacatcttgcaagcgctagcttgat

SEQ ID NO: 3913184 - DNA, 25 bp, Homo sapien
ttggcctcccaatagcataagctac

SEQ ID NO: 3913185 - DNA, 25 bp, Homo sapien
tgttgcaacttctggcggctgcaac

SEQ ID NO: 3913186 - DNA, 25 bp, Homo sapien
ctggcggctgcaacttctggcctca

SEQ ID NO: 3913187 - DNA, 25 bp, Homo sapien
tgcgcccagtatatatccaccactt

SEQ ID NO: 3913188 - DNA, 25 bp, Homo sapien
cataatccgtattaccatggattaa

SEQ ID NO: 3913189 - DNA, 25 bp, Homo sapien
tttaccatccacattagcatttcat

SEQ ID NO: 3913190 - DNA, 25 bp, Homo sapien
catcttccgagtaggtggcattaca

SEQ ID NO: 3913191 - DNA, 25 bp, Homo sapien
caagaaattccctatacctgtatgc

SEQ ID NO: 3913192 - DNA, 25 bp, Homo sapien
tagtggatcatgtggccgagatcgc

SEQ ID NO: 3913193 - DNA, 25 bp, Homo sapien
gtctagcaacagagcgataccttgt

SEQ ID NO: 3913194 - DNA, 25 bp, Homo sapien
tcagatacgtgcatgatagctgctt

SEQ ID NO: 3913195 - DNA, 25 bp, Homo sapien
tggagtatattgttgcatctttgtg

SEQ ID NO: 3913196 - DNA, 25 bp, Homo sapien
acatagttaatttagtgaatgcttc

SEQ ID NO: 3913197 - DNA, 25 bp, Homo sapien
tgaatgcttccagttgtacttgaaa

SEQ ID NO: 3913198 - DNA, 25 bp, Homo sapien
tctttgtggcctagtacatagttaa

SEQ ID NO: 3913199 - DNA, 25 bp, Homo sapien
gagtcagggatagattcaggcccca

SEQ ID NO: 3913200 - DNA, 25 bp, Homo sapien
tcatccatcacttgggtcaaaccct

SEQ ID NO: 3913201 - DNA, 25 bp, Homo sapien
ggtggacgcatcattgaagcttttc

SEQ ID NO: 3913202 - DNA, 25 bp, Homo sapien
tgggctctgtcctgaacttctgtgt

SEQ ID NO: 3913203 - DNA, 25 bp, Homo sapien
atttgtagccacagaattcagcaaa

SEQ ID NO: 3913204 - DNA, 25 bp, Homo sapien
aactgactttcagggttctaaattg

SEQ ID NO: 3913205 - DNA, 25 bp, Homo sapien
aattggatttcctctagtcttttga

SEQ ID NO: 3913206 - DNA, 25 bp, Homo sapien
tcagggttctaaattggatttcctc

SEQ ID NO: 3913207 - DNA, 25 bp, Homo sapien
tggatttcctctagtcttttgactt

SEQ ID NO: 3913208 - DNA, 25 bp, Homo sapien
ggatgtgaaggcttcgcagatcttg

SEQ ID NO: 3913209 - DNA, 25 bp, Homo sapien
ggcttcgcagatcttggtggcagct

SEQ ID NO: 3913210 - DNA, 25 bp, Homo sapien
gaaggcttcgcagatcttggtggca

SEQ ID NO: 3913211 - DNA, 25 bp, Homo sapien
ggagtacagatagaatttggtgcat

SEQ ID NO: 3913212 - DNA, 25 bp, Homo sapien
cagtgtaaggagacgcagtgtctct

SEQ ID NO: 3913213 - DNA, 25 bp, Homo sapien
tgttcattgagattacagtgtaagg

SEQ ID NO: 3913214 - DNA, 25 bp, Homo sapien
cagggtgtaggtcctctgcaggccc

SEQ ID NO: 3913215 - DNA, 25 bp, Homo sapien
gtgtctctgatacaacaaatcctgc

SEQ ID NO: 3913216 - DNA, 25 bp, Homo sapien
gatgtaggctcctcccgagttgacc

SEQ ID NO: 3913217 - DNA, 25 bp, Homo sapien
cgcggatctgctccatactctgtac

SEQ ID NO: 3913218 - DNA, 25 bp, Homo sapien
catctccctaagatgtaggctcctc

SEQ ID NO: 3913219 - DNA, 25 bp, Homo sapien
tcccgagttgacctcgcggatctgc

SEQ ID NO: 3913220 - DNA, 25 bp, Homo sapien
tcttccggtacagatggaagtggaa

SEQ ID NO: 3913221 - DNA, 25 bp, Homo sapien
agcgtctggtacagccacctgttct

SEQ ID NO: 3913222 - DNA, 25 bp, Homo sapien
gaagtggaattgactatctgttcca

SEQ ID NO: 3913223 - DNA, 25 bp, Homo sapien
gcatcgcttcccgcagcgtctggta

SEQ ID NO: 3913224 - DNA, 25 bp, Homo sapien
tgcacacagcgatcctgagcttgct

SEQ ID NO: 3913225 - DNA, 25 bp, Homo sapien
gctgctgcctatctgcacggtcact

SEQ ID NO: 3913226 - DNA, 25 bp, Homo sapien
tcatagtcgtagctgctgcctatct

SEQ ID NO: 3913227 - DNA, 25 bp, Homo sapien
gcagccctgatgttctcatagtcgt

SEQ ID NO: 3913228 - DNA, 25 bp, Homo sapien
ttgagggtggtggtgtggtgcctca

SEQ ID NO: 3913229 - DNA, 25 bp, Homo sapien
tgttgagggtggtggtgtggtgcct

SEQ ID NO: 3913230 - DNA, 25 bp, Homo sapien
ctgttgagggtggtggtgtggtgcc

SEQ ID NO: 3913231 - DNA, 25 bp, Homo sapien
tgagggtggtggtgtggtgcctcat

SEQ ID NO: 3913232 - DNA, 25 bp, Homo sapien
cacggtggctaagtttttcaggata

SEQ ID NO: 3913233 - DNA, 25 bp, Homo sapien
ggtggctaagtttttcaggatagtc

SEQ ID NO: 3913234 - DNA, 25 bp, Homo sapien
gccacggtggctaagtttttcagga

SEQ ID NO: 3913235 - DNA, 25 bp, Homo sapien
tggctaagtttttcaggatagtcat

SEQ ID NO: 3913236 - DNA, 25 bp, Homo sapien
ttgaagaggtccttaacatcactcc

SEQ ID NO: 3913237 - DNA, 25 bp, Homo sapien
gtccttaacatcactcctaagttgg

SEQ ID NO: 3913238 - DNA, 25 bp, Homo sapien
acatcactcctaagttggattctta

SEQ ID NO: 3913239 - DNA, 25 bp, Homo sapien
gaggtccttaacatcactcctaagt

SEQ ID NO: 3913240 - DNA, 25 bp, Homo sapien
gcaaaaccaacagtctgaattcact

SEQ ID NO: 3913241 - DNA, 25 bp, Homo sapien
ttctagtactatactttacagtttc

SEQ ID NO: 3913242 - DNA, 25 bp, Homo sapien
taattgcatcaaatcattcctagga

SEQ ID NO: 3913243 - DNA, 25 bp, Homo sapien
acagtttctatgttggtaagtatac

SEQ ID NO: 3913244 - DNA, 25 bp, Homo sapien
tgtgcccgcagctgtaatctgtccc

SEQ ID NO: 3913245 - DNA, 25 bp, Homo sapien
caagcacaaccctgagatatgctct

SEQ ID NO: 3913246 - DNA, 25 bp, Homo sapien
tgggaaggtgctgctagtgttctcc

SEQ ID NO: 3913247 - DNA, 25 bp, Homo sapien
tatgatcacagaggatgagttaatt

SEQ ID NO: 3913248 - DNA, 25 bp, Homo sapien
gaggagtaacttctccctatgtttg

SEQ ID NO: 3913249 - DNA, 25 bp, Homo sapien
gttacacatgaggagtaacttctcc

SEQ ID NO: 3913250 - DNA, 25 bp, Homo sapien
catgaggagtaacttctccctatgt

SEQ ID NO: 3913251 - DNA, 25 bp, Homo sapien
tacacatgaggagtaacttctccct

SEQ ID NO: 3913252 - DNA, 25 bp, Homo sapien
ctgtgcctggtctaatgttacttta

SEQ ID NO: 3913253 - DNA, 25 bp, Homo sapien
tcaggttacttttattacttcatgt

SEQ ID NO: 3913254 - DNA, 25 bp, Homo sapien
tttattacttcatgtttccaactta

SEQ ID NO: 3913255 - DNA, 25 bp, Homo sapien
ctgctcatgtgttttgtcatgcttc

SEQ ID NO: 3913256 - DNA, 25 bp, Homo sapien
tccaaagcatagacaactaagtatc

SEQ ID NO: 3913257 - DNA, 25 bp, Homo sapien
cacagctcatctcctagaacaagct

SEQ ID NO: 3913258 - DNA, 25 bp, Homo sapien
ctaatataattagcctcatgtcatc

SEQ ID NO: 3913259 - DNA, 25 bp, Homo sapien
cacatacatatagggttaaatgttt

SEQ ID NO: 3913260 - DNA, 25 bp, Homo sapien
catgtccagacattatttagcctac

SEQ ID NO: 3913261 - DNA, 25 bp, Homo sapien
tatttggctcactaatgaataccag

SEQ ID NO: 3913262 - DNA, 25 bp, Homo sapien
gtgattacatgaaacccaccagtgt

SEQ ID NO: 3913263 - DNA, 25 bp, Homo sapien
tcagagccaacaattggacaagggc

SEQ ID NO: 3913264 - DNA, 25 bp, Homo sapien
ctcctagtgatatccctcccccatc

SEQ ID NO: 3913265 - DNA, 25 bp, Homo sapien
gccccagggtgtgatgttcctcacc

SEQ ID NO: 3913266 - DNA, 25 bp, Homo sapien
gcaatgtttgcttttctgtccttgt

SEQ ID NO: 3913267 - DNA, 25 bp, Homo sapien
atgtttgcttttctgtccttgtaat

SEQ ID NO: 3913268 - DNA, 25 bp, Homo sapien
tcctccccatgatgaattagagctt

SEQ ID NO: 3913269 - DNA, 25 bp, Homo sapien
actcctccccatgatgaattagagc

SEQ ID NO: 3913270 - DNA, 25 bp, Homo sapien
aaactcctccccatgatgaattaga

SEQ ID NO: 3913271 - DNA, 25 bp, Homo sapien
ctccccatgatgaattagagctttc

SEQ ID NO: 3913272 - DNA, 25 bp, Homo sapien
tcctgattattggaaatatcctgca

SEQ ID NO: 3913273 - DNA, 25 bp, Homo sapien
agaagggaagccttcaatggatcca

SEQ ID NO: 3913274 - DNA, 25 bp, Homo sapien
gaggctcctatttggccctactcct

SEQ ID NO: 3913275 - DNA, 25 bp, Homo sapien
tatcctgcagttagatgttaaggac

SEQ ID NO: 3913276 - DNA, 25 bp, Homo sapien
gacctggcaattgcggcctctatgt

SEQ ID NO: 3913277 - DNA, 25 bp, Homo sapien
caagcatcagtgtttgaataagcgg

SEQ ID NO: 3913278 - DNA, 25 bp, Homo sapien
tcttaaggtagactcgaaagtgctg

SEQ ID NO: 3913279 - DNA, 25 bp, Homo sapien
tgctgtgaggactattgacctggca

SEQ ID NO: 3913280 - DNA, 25 bp, Homo sapien
aaaatagagtaaatagacctgctga

SEQ ID NO: 3913281 - DNA, 25 bp, Homo sapien
catcacaggccatctgagtggcaag

SEQ ID NO: 3913282 - DNA, 25 bp, Homo sapien
agtggcaagtataatcatcatcatg

SEQ ID NO: 3913283 - DNA, 25 bp, Homo sapien
tcagaaatatttgaagcctgtgtgg

SEQ ID NO: 3913284 - DNA, 25 bp, Homo sapien
tagtaacttcgtttgctgttatctc

SEQ ID NO: 3913285 - DNA, 25 bp, Homo sapien
tagtggtgctgcatggatatgaagc

SEQ ID NO: 3913286 - DNA, 25 bp, Homo sapien
tattttggcctgaaacccatagtgg

SEQ ID NO: 3913287 - DNA, 25 bp, Homo sapien
ctagctctcaaaggtctatggccct

SEQ ID NO: 3913288 - DNA, 25 bp, Homo sapien
tttaggcccgtgcttgccattctgg

SEQ ID NO: 3913289 - DNA, 25 bp, Homo sapien
gactgtgtttgtatggtcagcctca

SEQ ID NO: 3913290 - DNA, 25 bp, Homo sapien
taggcatatcttagtgcagttctca

SEQ ID NO: 3913291 - DNA, 25 bp, Homo sapien
attctggccagtaatgacattctac

SEQ ID NO: 3913292 - DNA, 25 bp, Homo sapien
tgacttcctgaaacatatagatgtg

SEQ ID NO: 3913293 - DNA, 25 bp, Homo sapien
ctgacttcctgaaacatatagatgt

SEQ ID NO: 3913294 - DNA, 25 bp, Homo sapien
acttcctgaaacatatagatgtgaa

SEQ ID NO: 3913295 - DNA, 25 bp, Homo sapien
tgacattcgtcctcagcttaggaag

SEQ ID NO: 3913296 - DNA, 25 bp, Homo sapien
gaagttgaggcggtagttaatagcc

SEQ ID NO: 3913297 - DNA, 25 bp, Homo sapien
accgggcagagacataacagaaaaa

SEQ ID NO: 3913298 - DNA, 25 bp, Homo sapien
gatacccaaaccgggcagagacata

SEQ ID NO: 3913299 - DNA, 25 bp, Homo sapien
gcggtagttaatagcctaacaacca

SEQ ID NO: 3913300 - DNA, 25 bp, Homo sapien
tatatggaacgaaagaagagcccac

SEQ ID NO: 3913301 - DNA, 25 bp, Homo sapien
agaacaaaaagttcataatcactgg

SEQ ID NO: 3913302 - DNA, 25 bp, Homo sapien
aagaacaaaaagttcataatcactg

SEQ ID NO: 3913303 - DNA, 25 bp, Homo sapien
taccatttgacccagtaatcctgtt

SEQ ID NO: 3913304 - DNA, 25 bp, Homo sapien
catttgacccagtaatcctgttact

SEQ ID NO: 3913305 - DNA, 25 bp, Homo sapien
ccatttgacccagtaatcctgttac

SEQ ID NO: 3913306 - DNA, 25 bp, Homo sapien
ttgacccagtaatcctgttactggg

SEQ ID NO: 3913307 - DNA, 25 bp, Homo sapien
ccgttgtcatcgcaccattgttgaa

SEQ ID NO: 3913308 - DNA, 25 bp, Homo sapien
gataaggcgtaaacatcaatgccgt

SEQ ID NO: 3913309 - DNA, 25 bp, Homo sapien
tgtctgtcgtaatccctatagtgca

SEQ ID NO: 3913310 - DNA, 25 bp, Homo sapien
ggaatgctctacatggaggtgcaga

SEQ ID NO: 3913311 - DNA, 25 bp, Homo sapien
gatgaaaagttaatcagtgtccctt

SEQ ID NO: 3913312 - DNA, 25 bp, Homo sapien
gcagctagctctatcctacagaaag

SEQ ID NO: 3913313 - DNA, 25 bp, Homo sapien
aaacatatactgctagatacagggt

SEQ ID NO: 3913314 - DNA, 25 bp, Homo sapien
gacagattaggtacacatccactcc

SEQ ID NO: 3913315 - DNA, 25 bp, Homo sapien
ttccatctcctgtaatcaagaagag

SEQ ID NO: 3913316 - DNA, 25 bp, Homo sapien
tcctgttactttccatctcctgtaa

SEQ ID NO: 3913317 - DNA, 25 bp, Homo sapien
gcacatagtttcagtatcctgttac

SEQ ID NO: 3913318 - DNA, 25 bp, Homo sapien
ttcactctccagtcaagaaataagc

SEQ ID NO: 3913319 - DNA, 25 bp, Homo sapien
gacagccactagtttccaagcttga

SEQ ID NO: 3913320 - DNA, 25 bp, Homo sapien
tgccctgtgaacagatactgtggcc

SEQ ID NO: 3913321 - DNA, 25 bp, Homo sapien
tatccatctggaaatggtactgccc

SEQ ID NO: 3913322 - DNA, 25 bp, Homo sapien
gacagattcagaaggttgcatccaa

SEQ ID NO: 3913323 - DNA, 25 bp, Homo sapien
gagcccaaccatatcgcacactaat

SEQ ID NO: 3913324 - DNA, 25 bp, Homo sapien
ctaggtgatccatgctgtctgtttc

SEQ ID NO: 3913325 - DNA, 25 bp, Homo sapien
gatgtgggcctgttccttacagata

SEQ ID NO: 3913326 - DNA, 25 bp, Homo sapien
gagttccaagatcgatgtgtcagca

SEQ ID NO: 3913327 - DNA, 25 bp, Homo sapien
taactgctctctgtgtttgctattt

SEQ ID NO: 3913328 - DNA, 25 bp, Homo sapien
agtaactgctctctgtgtttgctat

SEQ ID NO: 3913329 - DNA, 25 bp, Homo sapien
gtaactgctctctgtgtttgctatt

SEQ ID NO: 3913330 - DNA, 25 bp, Homo sapien
tccctgaagatctagtgaacattcg

SEQ ID NO: 3913331 - DNA, 25 bp, Homo sapien
tctggttgacccaaagaaccttgac

SEQ ID NO: 3913332 - DNA, 25 bp, Homo sapien
tgaacattcgacctccattacggag

SEQ ID NO: 3913333 - DNA, 25 bp, Homo sapien
gacaccactccagttgtcaatggat

SEQ ID NO: 3913334 - DNA, 25 bp, Homo sapien
gggtggaatggacattaaatgctag

SEQ ID NO: 3913335 - DNA, 25 bp, Homo sapien
gggcagctctaacctctagggaaat

SEQ ID NO: 3913336 - DNA, 25 bp, Homo sapien
tcagaggatcagtcaaagggtggaa

SEQ ID NO: 3913337 - DNA, 25 bp, Homo sapien
gctagaattcttatatccacattgg

SEQ ID NO: 3913338 - DNA, 25 bp, Homo sapien
ggcaaacacccctaggtgagataaa

SEQ ID NO: 3913339 - DNA, 25 bp, Homo sapien
tatcaagtaatatggcagcaaaacc

SEQ ID NO: 3913340 - DNA, 25 bp, Homo sapien
tgttttctcctagagactgtagtga

SEQ ID NO: 3913341 - DNA, 25 bp, Homo sapien
tacattaatgggaagatccaaatgg

SEQ ID NO: 3913342 - DNA, 25 bp, Homo sapien
caagaatgaatacgcctactatggc

SEQ ID NO: 3913343 - DNA, 25 bp, Homo sapien
atgagtctgtgaaccagcccacgga

SEQ ID NO: 3913344 - DNA, 25 bp, Homo sapien
gaatgatttttctaggcacctttta

SEQ ID NO: 3913345 - DNA, 25 bp, Homo sapien
tcacttaccgctgagtttttggtta

SEQ ID NO: 3913346 - DNA, 25 bp, Homo sapien
tttacccactagaatattgactgaa

SEQ ID NO: 3913347 - DNA, 25 bp, Homo sapien
ggtcaaaggacccatatagggcact

SEQ ID NO: 3913348 - DNA, 25 bp, Homo sapien
gatggtgaattggactagagcacaa

SEQ ID NO: 3913349 - DNA, 25 bp, Homo sapien
ggcactcctcattgagctctaatag

SEQ ID NO: 3913350 - DNA, 25 bp, Homo sapien
tccttctctctaacttttgacaacg

SEQ ID NO: 3913351 - DNA, 25 bp, Homo sapien
cttttgacaacgacgtggtccccag

SEQ ID NO: 3913352 - DNA, 25 bp, Homo sapien
aggtaaggtcctttgccagttcaag

SEQ ID NO: 3913353 - DNA, 25 bp, Homo sapien
tgctgtccagactgccatttcggta

SEQ ID NO: 3913354 - DNA, 25 bp, Homo sapien
tcacagacagtcttcgacatgcctc

SEQ ID NO: 3913355 - DNA, 25 bp, Homo sapien
ctttcacagacagtcttcgacatgc

SEQ ID NO: 3913356 - DNA, 25 bp, Homo sapien
gactttcacagacagtcttcgacat

SEQ ID NO: 3913357 - DNA, 25 bp, Homo sapien
tttcacagacagtcttcgacatgcc

SEQ ID NO: 3913358 - DNA, 25 bp, Homo sapien
gtttccttccttggcttgtgcacga

SEQ ID NO: 3913359 - DNA, 25 bp, Homo sapien
tcctccagtgtttccttccttggct

SEQ ID NO: 3913360 - DNA, 25 bp, Homo sapien
agtgtttccttccttggcttgtgca

SEQ ID NO: 3913361 - DNA, 25 bp, Homo sapien
ctcctccagtgtttccttccttggc

SEQ ID NO: 3913362 - DNA, 25 bp, Homo sapien
tagaaaagtattagcatatgcagca

SEQ ID NO: 3913363 - DNA, 25 bp, Homo sapien
tcggcagccagatgggctagcattc

SEQ ID NO: 3913364 - DNA, 25 bp, Homo sapien
gcagtgacctgaacaactctcctta

SEQ ID NO: 3913365 - DNA, 25 bp, Homo sapien
gcaggtgatagcagatcggcagcca

SEQ ID NO: 3913366 - DNA, 25 bp, Homo sapien
gcagatctggtatgagggtggcaga

SEQ ID NO: 3913367 - DNA, 25 bp, Homo sapien
gaaacaatccctttggtaactgcag

SEQ ID NO: 3913368 - DNA, 25 bp, Homo sapien
gtggcagagaaacaatccctttggt

SEQ ID NO: 3913369 - DNA, 25 bp, Homo sapien
aaaaatagctccatgcgggcaagtc

SEQ ID NO: 3913370 - DNA, 25 bp, Homo sapien
gaggtgccatgtaaattccaactaa

SEQ ID NO: 3913371 - DNA, 25 bp, Homo sapien
atagcaattctaccagccccagagg

SEQ ID NO: 3913372 - DNA, 25 bp, Homo sapien
cagaggaggtgccatgtaaattcca

SEQ ID NO: 3913373 - DNA, 25 bp, Homo sapien
aatacaaatggaaacgagtttctat

SEQ ID NO: 3913374 - DNA, 25 bp, Homo sapien
tttgtcatcatgtagcacggaagtc

SEQ ID NO: 3913375 - DNA, 25 bp, Homo sapien
cacggaagtcagtaatgccattatg

SEQ ID NO: 3913376 - DNA, 25 bp, Homo sapien
catcatgtagcacggaagtcagtaa

SEQ ID NO: 3913377 - DNA, 25 bp, Homo sapien
gtggccagggtcaaagatatttgga

SEQ ID NO: 3913378 - DNA, 25 bp, Homo sapien
catggatgagcttaaggccagtggt

SEQ ID NO: 3913379 - DNA, 25 bp, Homo sapien
aagtagtggacatcacgtagcgcca

SEQ ID NO: 3913380 - DNA, 25 bp, Homo sapien
tcaggtccagccagacacagtaatt

SEQ ID NO: 3913381 - DNA, 25 bp, Homo sapien
ggatacttgtgtgcaaccttctgaa

SEQ ID NO: 3913382 - DNA, 25 bp, Homo sapien
ttatgcagccagcattatcttgtta

SEQ ID NO: 3913383 - DNA, 25 bp, Homo sapien
ccagcattatcttgttatcaaagct

SEQ ID NO: 3913384 - DNA, 25 bp, Homo sapien
atgcagccagcattatcttgttatc

SEQ ID NO: 3913385 - DNA, 25 bp, Homo sapien
agccagcattatcttgttatcaaag

SEQ ID NO: 3913386 - DNA, 25 bp, Homo sapien
ggacaaggtcactgtatctctggat

SEQ ID NO: 3913387 - DNA, 25 bp, Homo sapien
cgtgcactacagcatcagtgtaagg

SEQ ID NO: 3913388 - DNA, 25 bp, Homo sapien
cagtgtaaggcatgtggctcctatc

SEQ ID NO: 3913389 - DNA, 25 bp, Homo sapien
ttagtatcagtggtcactgcatggg

SEQ ID NO: 3913390 - DNA, 25 bp, Homo sapien
aatagatcagctacagtgccaacca

SEQ ID NO: 3913391 - DNA, 25 bp, Homo sapien
agatcagctacagtgccaaccaagt

SEQ ID NO: 3913392 - DNA, 25 bp, Homo sapien
tagatcagctacagtgccaaccaag

SEQ ID NO: 3913393 - DNA, 25 bp, Homo sapien
gatcagctacagtgccaaccaagtt

SEQ ID NO: 3913394 - DNA, 25 bp, Homo sapien
gaggattgttaacatccagtgatgc

SEQ ID NO: 3913395 - DNA, 25 bp, Homo sapien
gataaagtcccgaggattgttaaca

SEQ ID NO: 3913396 - DNA, 25 bp, Homo sapien
ttgttaacatccagtgatgcttggt

SEQ ID NO: 3913397 - DNA, 25 bp, Homo sapien
tgtaacttcgtgtaagagcaacatt

SEQ ID NO: 3913398 - DNA, 25 bp, Homo sapien
gggaaacaatcaatgagtagaggga

SEQ ID NO: 3913399 - DNA, 25 bp, Homo sapien
gaaacaatcaatgagtagagggaaa

SEQ ID NO: 3913400 - DNA, 25 bp, Homo sapien
caatcaatgagtagagggaaattat

SEQ ID NO: 3913401 - DNA, 25 bp, Homo sapien
ctgggaaacaatcaatgagtagagg

SEQ ID NO: 3913402 - DNA, 25 bp, Homo sapien
gaagttttcattgaatcttttcatc

SEQ ID NO: 3913403 - DNA, 25 bp, Homo sapien
gggagttcagaatcctgaagttttc

SEQ ID NO: 3913404 - DNA, 25 bp, Homo sapien
cattgaatcttttcatcagggtgag

SEQ ID NO: 3913405 - DNA, 25 bp, Homo sapien
cagggtgagaaaattctgatcttta

SEQ ID NO: 3913406 - DNA, 25 bp, Homo sapien
aacaacggagcagatcacattgcag

SEQ ID NO: 3913407 - DNA, 25 bp, Homo sapien
tggaaaacaacggagcagatcacat

SEQ ID NO: 3913408 - DNA, 25 bp, Homo sapien
gaaaacaacggagcagatcacattg

SEQ ID NO: 3913409 - DNA, 25 bp, Homo sapien
cacagcccaggatgaaagtgggatc

SEQ ID NO: 3913410 - DNA, 25 bp, Homo sapien
cccttgtctctgtgcttcaaatctc

SEQ ID NO: 3913411 - DNA, 25 bp, Homo sapien
gcacagatacacaaaacctcccttg

SEQ ID NO: 3913412 - DNA, 25 bp, Homo sapien
caggcaaagcacagatacacaaaac

SEQ ID NO: 3913413 - DNA, 25 bp, Homo sapien
ctatgaaccaacacatttatacagg

SEQ ID NO: 3913414 - DNA, 25 bp, Homo sapien
aaccaggatgcgcaatgaagacctg

SEQ ID NO: 3913415 - DNA, 25 bp, Homo sapien
ccaggatgcgcaatgaagacctggc

SEQ ID NO: 3913416 - DNA, 25 bp, Homo sapien
ggctgacaaccaggatgcgcaatga

SEQ ID NO: 3913417 - DNA, 25 bp, Homo sapien
gacaaccaggatgcgcaatgaagac

SEQ ID NO: 3913418 - DNA, 25 bp, Homo sapien
cccaaaattccgcaaggttgtgagg

SEQ ID NO: 3913419 - DNA, 25 bp, Homo sapien
caaaattccgcaaggttgtgaggga

SEQ ID NO: 3913420 - DNA, 25 bp, Homo sapien
ccaaaattccgcaaggttgtgaggg

SEQ ID NO: 3913421 - DNA, 25 bp, Homo sapien
aaaattccgcaaggttgtgagggag

SEQ ID NO: 3913422 - DNA, 25 bp, Homo sapien
gaaactgggagaattcacagccaag

SEQ ID NO: 3913423 - DNA, 25 bp, Homo sapien
aaactgggagaattcacagccaagg

SEQ ID NO: 3913424 - DNA, 25 bp, Homo sapien
gccatgcagataggctaagctctgc

SEQ ID NO: 3913425 - DNA, 25 bp, Homo sapien
tggcagccatgcagataggctaagc

SEQ ID NO: 3913426 - DNA, 25 bp, Homo sapien
cagccatgcagataggctaagctct

SEQ ID NO: 3913427 - DNA, 25 bp, Homo sapien
ggctaagctctgctgagaagctttt

SEQ ID NO: 3913428 - DNA, 25 bp, Homo sapien
aaagctgacacagaaatatgtgcac

SEQ ID NO: 3913429 - DNA, 25 bp, Homo sapien
cagttaccaaagctgacacagaaat

SEQ ID NO: 3913430 - DNA, 25 bp, Homo sapien
accaaagctgacacagaaatatgtg

SEQ ID NO: 3913431 - DNA, 25 bp, Homo sapien
cccagttaccaaagctgacacagaa

SEQ ID NO: 3913432 - DNA, 25 bp, Homo sapien
tctttgagatattggggaattgcct

SEQ ID NO: 3913433 - DNA, 25 bp, Homo sapien
gatattggggaattgcctcttccag

SEQ ID NO: 3913434 - DNA, 25 bp, Homo sapien
attcatgccaaaatacacggtgaac

SEQ ID NO: 3913435 - DNA, 25 bp, Homo sapien
tgcctcatatccatgaaacaccact

SEQ ID NO: 3913436 - DNA, 25 bp, Homo sapien
tgtgatgtgccacgcaatgacccag

SEQ ID NO: 3913437 - DNA, 25 bp, Homo sapien
cacaggtaatatgtagaagctccaa

SEQ ID NO: 3913438 - DNA, 25 bp, Homo sapien
ttgaggccactacccagctaaagac

SEQ ID NO: 3913439 - DNA, 25 bp, Homo sapien
tggtacacaaatcacacagttcatc

SEQ ID NO: 3913440 - DNA, 25 bp, Homo sapien
aagcaccacaaagttagaatcagga

SEQ ID NO: 3913441 - DNA, 25 bp, Homo sapien
agcaccacaaagttagaatcaggac

SEQ ID NO: 3913442 - DNA, 25 bp, Homo sapien
caccttcagtcaaaaatcatagcaa

SEQ ID NO: 3913443 - DNA, 25 bp, Homo sapien
ttcccttcaccttcagtcaaaaatc

SEQ ID NO: 3913444 - DNA, 25 bp, Homo sapien
tggatgaaatttctaatcacacaca

SEQ ID NO: 3913445 - DNA, 25 bp, Homo sapien
ccttcaccttcagtcaaaaatcata

SEQ ID NO: 3913446 - DNA, 25 bp, Homo sapien
gcaattggctggaggaacataaggc

SEQ ID NO: 3913447 - DNA, 25 bp, Homo sapien
caattggctggaggaacataaggca

SEQ ID NO: 3913448 - DNA, 25 bp, Homo sapien
ctttgcaattggctggaggaacata

SEQ ID NO: 3913449 - DNA, 25 bp, Homo sapien
ttgcaattggctggaggaacataag

SEQ ID NO: 3913450 - DNA, 25 bp, Homo sapien
agagaagcataaaagagagacacag

SEQ ID NO: 3913451 - DNA, 25 bp, Homo sapien
gaaagatttgcagatgtccttaaca

SEQ ID NO: 3913452 - DNA, 25 bp, Homo sapien
gcatatttccaataataggaagagg

SEQ ID NO: 3913453 - DNA, 25 bp, Homo sapien
agggagcttccttctcctacagctc

SEQ ID NO: 3913454 - DNA, 25 bp, Homo sapien
taaagtaaacaatcacctagatcca

SEQ ID NO: 3913455 - DNA, 25 bp, Homo sapien
ttctgagtggactttggcccatgga

SEQ ID NO: 3913456 - DNA, 25 bp, Homo sapien
gagcttgcactccaaagtttttata

SEQ ID NO: 3913457 - DNA, 25 bp, Homo sapien
gtaaacaatcacctagatccaattt

SEQ ID NO: 3913458 - DNA, 25 bp, Homo sapien
taaaaattctcatatcatctgtctc

SEQ ID NO: 3913459 - DNA, 25 bp, Homo sapien
tgtctgtcaagtggacctatccaat

SEQ ID NO: 3913460 - DNA, 25 bp, Homo sapien
tccaatgttgaaagtaaagtgttga

SEQ ID NO: 3913461 - DNA, 25 bp, Homo sapien
tcaagtggacctatccaatgttgaa

SEQ ID NO: 3913462 - DNA, 25 bp, Homo sapien
ggacttgcaaatactgtctcagtac

SEQ ID NO: 3913463 - DNA, 25 bp, Homo sapien
tgtctcagtacccactattttaacc

SEQ ID NO: 3913464 - DNA, 25 bp, Homo sapien
cagtacccactattttaacctgata

SEQ ID NO: 3913465 - DNA, 25 bp, Homo sapien
agattcccacatggacttgcaaata

SEQ ID NO: 3913466 - DNA, 25 bp, Homo sapien
tgcagctggtggctgtataattctc

SEQ ID NO: 3913467 - DNA, 25 bp, Homo sapien
catcaggatcagaatctagaccatt

SEQ ID NO: 3913468 - DNA, 25 bp, Homo sapien
tagaccatttctagattcctgatat

SEQ ID NO: 3913469 - DNA, 25 bp, Homo sapien
tgtataattctcaatctgccactca

SEQ ID NO: 3913470 - DNA, 25 bp, Homo sapien
cagatgacagtagtaatttcaacct

SEQ ID NO: 3913471 - DNA, 25 bp, Homo sapien
ccagatgacagtagtaatttcaacc

SEQ ID NO: 3913472 - DNA, 25 bp, Homo sapien
tcaatgggataggattgagaatcca

SEQ ID NO: 3913473 - DNA, 25 bp, Homo sapien
tgaatggcgctaagacaactagata

SEQ ID NO: 3913474 - DNA, 25 bp, Homo sapien
ggtgtagtggcgtacaaagaaagat

SEQ ID NO: 3913475 - DNA, 25 bp, Homo sapien
aatttacagcaaagatgattgggtg

SEQ ID NO: 3913476 - DNA, 25 bp, Homo sapien
taatcccgtcattataatgtttgct

SEQ ID NO: 3913477 - DNA, 25 bp, Homo sapien
atttaatcccgtcattataatgttt

SEQ ID NO: 3913478 - DNA, 25 bp, Homo sapien
aatcccgtcattataatgtttgctg

SEQ ID NO: 3913479 - DNA, 25 bp, Homo sapien
ttaatcccgtcattataatgtttgc

SEQ ID NO: 3913480 - DNA, 25 bp, Homo sapien
tactctctatgttcaatcagttcaa

SEQ ID NO: 3913481 - DNA, 25 bp, Homo sapien
tcagttacagagaatccaatttcat

SEQ ID NO: 3913482 - DNA, 25 bp, Homo sapien
ttttgcttaacataacaatctccag

SEQ ID NO: 3913483 - DNA, 25 bp, Homo sapien
tggcacacataaactatccctacct

SEQ ID NO: 3913484 - DNA, 25 bp, Homo sapien
caacagtgtacctgggtgtcctttt

SEQ ID NO: 3913485 - DNA, 25 bp, Homo sapien
tgatgataattgacattgagcacct

SEQ ID NO: 3913486 - DNA, 25 bp, Homo sapien
caccaacagtgtacctgggtgtcct

SEQ ID NO: 3913487 - DNA, 25 bp, Homo sapien
tttctctgatgataattgacattga

SEQ ID NO: 3913488 - DNA, 25 bp, Homo sapien
tttgatcctatcatgattctagctg

SEQ ID NO: 3913489 - DNA, 25 bp, Homo sapien
gctggggaggtgtttcaatcatttg

SEQ ID NO: 3913490 - DNA, 25 bp, Homo sapien
attatgaagttcttgcgctttattt

SEQ ID NO: 3913491 - DNA, 25 bp, Homo sapien
tatgaagttcttgcgctttattttt

SEQ ID NO: 3913492 - DNA, 25 bp, Homo sapien
gaggtgtttcaatcatttggagaag

SEQ ID NO: 3913493 - DNA, 25 bp, Homo sapien
tctcgtaatttctctgttgcctgca

SEQ ID NO: 3913494 - DNA, 25 bp, Homo sapien
ctgttgggcattacctgtaggcata

SEQ ID NO: 3913495 - DNA, 25 bp, Homo sapien
cttgtggcatcacctctgttgggca

SEQ ID NO: 3913496 - DNA, 25 bp, Homo sapien
taaggtcctgcaataagaagggagc

SEQ ID NO: 3913497 - DNA, 25 bp, Homo sapien
ggcctgttgctcctcctagccttct

SEQ ID NO: 3913498 - DNA, 25 bp, Homo sapien
gaactgtaattccattaaaatctct

SEQ ID NO: 3913499 - DNA, 25 bp, Homo sapien
tctgcacaagcctttttggcctgtt

SEQ ID NO: 3913500 - DNA, 25 bp, Homo sapien
gggcactacagaaaagataccccaa

SEQ ID NO: 3913501 - DNA, 25 bp, Homo sapien
ggtctgggttttctcatagggcaaa

SEQ ID NO: 3913502 - DNA, 25 bp, Homo sapien
taagaaggccacacctttgtgggaa

SEQ ID NO: 3913503 - DNA, 25 bp, Homo sapien
cctttgggccttcctgatatgattg

SEQ ID NO: 3913504 - DNA, 25 bp, Homo sapien
tcttgtatataatggaccttgggcc

SEQ ID NO: 3913505 - DNA, 25 bp, Homo sapien
tggccatcccatcctaatcgtctta

SEQ ID NO: 3913506 - DNA, 25 bp, Homo sapien
cagacaggcttgaggaagcagtgtc

SEQ ID NO: 3913507 - DNA, 25 bp, Homo sapien
cattttgaatgtgcccagtcccagg

SEQ ID NO: 3913508 - DNA, 25 bp, Homo sapien
gggatctttgcttgactaatgccat

SEQ ID NO: 3913509 - DNA, 25 bp, Homo sapien
aaattccaggtgtttatctgttcaa

SEQ ID NO: 3913510 - DNA, 25 bp, Homo sapien
catgcaccactatacttggtatgtc

SEQ ID NO: 3913511 - DNA, 25 bp, Homo sapien
ggaagtctaatttcaacctaagctc

SEQ ID NO: 3913512 - DNA, 25 bp, Homo sapien
ggtattaaacccattcattaagcaa

SEQ ID NO: 3913513 - DNA, 25 bp, Homo sapien
ggaatgatgcactccgacccagata

SEQ ID NO: 3913514 - DNA, 25 bp, Homo sapien
gcatgaaattctcgctgtaggcaca

SEQ ID NO: 3913515 - DNA, 25 bp, Homo sapien
tcccacttgaatggagcctagcaag

SEQ ID NO: 3913516 - DNA, 25 bp, Homo sapien
tgggacatcgcctcacccttgaagt

SEQ ID NO: 3913517 - DNA, 25 bp, Homo sapien
cagcaaacggaaccatcatcagagt

SEQ ID NO: 3913518 - DNA, 25 bp, Homo sapien
aatccaacttaagagcttccacaca

SEQ ID NO: 3913519 - DNA, 25 bp, Homo sapien
caaacggaaccatcatcagagtgaa

SEQ ID NO: 3913520 - DNA, 25 bp, Homo sapien
ctggaatttaatccaacttaagagc

SEQ ID NO: 3913521 - DNA, 25 bp, Homo sapien
ggagttggaagccatcaccctcagc

SEQ ID NO: 3913522 - DNA, 25 bp, Homo sapien
ggatggagttggaagccatcaccct

SEQ ID NO: 3913523 - DNA, 25 bp, Homo sapien
tggatggagttggaagccatcaccc

SEQ ID NO: 3913524 - DNA, 25 bp, Homo sapien
atggagttggaagccatcaccctca

SEQ ID NO: 3913525 - DNA, 25 bp, Homo sapien
ttagtgggagcttgatgatgagaac

SEQ ID NO: 3913526 - DNA, 25 bp, Homo sapien
gcttaatacctaggtaatgctatga

SEQ ID NO: 3913527 - DNA, 25 bp, Homo sapien
taggtaatgctatgatctttgcagc

SEQ ID NO: 3913528 - DNA, 25 bp, Homo sapien
cacatggacacctagagggaagcaa

SEQ ID NO: 3913529 - DNA, 25 bp, Homo sapien
cacttcaagtagattctggaggtga

SEQ ID NO: 3913530 - DNA, 25 bp, Homo sapien
atccacttcaagtagattctggagg

SEQ ID NO: 3913531 - DNA, 25 bp, Homo sapien
ccacttcaagtagattctggaggtg

SEQ ID NO: 3913532 - DNA, 25 bp, Homo sapien
ttcaagtagattctggaggtgatgc

SEQ ID NO: 3913533 - DNA, 25 bp, Homo sapien
ggttccaccaggagtcaatcctgtg

SEQ ID NO: 3913534 - DNA, 25 bp, Homo sapien
tgagttgggttccaccaggagtcaa

SEQ ID NO: 3913535 - DNA, 25 bp, Homo sapien
aacaccacactgcacagatcactga

SEQ ID NO: 3913536 - DNA, 25 bp, Homo sapien
acaccacactgcacagatcactgag

SEQ ID NO: 3913537 - DNA, 25 bp, Homo sapien
gggttcagtgcaccgtgcaccagct

SEQ ID NO: 3913538 - DNA, 25 bp, Homo sapien
gacagcagcattcccggtcaagaaa

SEQ ID NO: 3913539 - DNA, 25 bp, Homo sapien
aagaaaatccgcagttctgcagaca

SEQ ID NO: 3913540 - DNA, 25 bp, Homo sapien
tcagtgcaccgtgcaccagctgaag

SEQ ID NO: 3913541 - DNA, 25 bp, Homo sapien
catttgaataactctgaaggagcct

SEQ ID NO: 3913542 - DNA, 25 bp, Homo sapien
tgctcctctatggtcaaggttgcga

SEQ ID NO: 3913543 - DNA, 25 bp, Homo sapien
tatggtcaaggttgcgacacatttg

SEQ ID NO: 3913544 - DNA, 25 bp, Homo sapien
caaggttgcgacacatttgaataac

SEQ ID NO: 3913545 - DNA, 25 bp, Homo sapien
catgtcctggttttctcagggcccc

SEQ ID NO: 3913546 - DNA, 25 bp, Homo sapien
ccaagcaggaggagccaaaacagca

SEQ ID NO: 3913547 - DNA, 25 bp, Homo sapien
gtggattgatggctgggaaacccaa

SEQ ID NO: 3913548 - DNA, 25 bp, Homo sapien
acagcagccactggacccgcatgtc

SEQ ID NO: 3913549 - DNA, 25 bp, Homo sapien
ctggtttctaccaaaccttctcctg

SEQ ID NO: 3913550 - DNA, 25 bp, Homo sapien
tggtaccatagtgcctcacagtggg

SEQ ID NO: 3913551 - DNA, 25 bp, Homo sapien
ctcaggagcagttggagggagacca

SEQ ID NO: 3913552 - DNA, 25 bp, Homo sapien
tgggcgctaccttagcaaccctggg

SEQ ID NO: 3913553 - DNA, 25 bp, Homo sapien
gacaggtcctctctggaaacttcgc

SEQ ID NO: 3913554 - DNA, 25 bp, Homo sapien
ctggaaacttcgcagaccttctgac

SEQ ID NO: 3913555 - DNA, 25 bp, Homo sapien
ttctgggctgatctttccttcctga

SEQ ID NO: 3913556 - DNA, 25 bp, Homo sapien
ctgatgcgccatcccaaagacaggt

SEQ ID NO: 3913557 - DNA, 25 bp, Homo sapien
ttcccgtttaatcttgccagtgacg

SEQ ID NO: 3913558 - DNA, 25 bp, Homo sapien
catctgaccaaacttgaagttcccg

SEQ ID NO: 3913559 - DNA, 25 bp, Homo sapien
caggaaggatagtgcctggatttaa

SEQ ID NO: 3913560 - DNA, 25 bp, Homo sapien
ggcagtcagggatttactgactcaa

SEQ ID NO: 3913561 - DNA, 25 bp, Homo sapien
tgctatagctctttggtgagctggc

SEQ ID NO: 3913562 - DNA, 25 bp, Homo sapien
ctttatgtgctgctatagctctttg

SEQ ID NO: 3913563 - DNA, 25 bp, Homo sapien
tggtacttgcatgggcctgtcactg

SEQ ID NO: 3913564 - DNA, 25 bp, Homo sapien
cttcctttggtacttgcatgggcct

SEQ ID NO: 3913565 - DNA, 25 bp, Homo sapien
tgatagtttccggcttcatccaagt

SEQ ID NO: 3913566 - DNA, 25 bp, Homo sapien
aatgatagtttccggcttcatccaa

SEQ ID NO: 3913567 - DNA, 25 bp, Homo sapien
tagtttccggcttcatccaagtccc

SEQ ID NO: 3913568 - DNA, 25 bp, Homo sapien
gatagtttccggcttcatccaagtc

SEQ ID NO: 3913569 - DNA, 25 bp, Homo sapien
ggaaaccattccacttacaagagca

SEQ ID NO: 3913570 - DNA, 25 bp, Homo sapien
caggcctgcaagctatgttttgaca

SEQ ID NO: 3913571 - DNA, 25 bp, Homo sapien
gaattgccccaaagtagctaccatt

SEQ ID NO: 3913572 - DNA, 25 bp, Homo sapien
tggtgaagcccagaagccagtatat

SEQ ID NO: 3913573 - DNA, 25 bp, Homo sapien
cagacattatgacactttgtcctta

SEQ ID NO: 3913574 - DNA, 25 bp, Homo sapien
tgatgagacatttgggagtaaatgc

SEQ ID NO: 3913575 - DNA, 25 bp, Homo sapien
cagcagcatcctcctaataaggact

SEQ ID NO: 3913576 - DNA, 25 bp, Homo sapien
catcctcctaataaggactttcttc

SEQ ID NO: 3913577 - DNA, 25 bp, Homo sapien
gaatctgtgaacactccatggaacg

SEQ ID NO: 3913578 - DNA, 25 bp, Homo sapien
aatgggccaatctcatgcaaaggga

SEQ ID NO: 3913579 - DNA, 25 bp, Homo sapien
catggaacgatcctgcaaaatgggc

SEQ ID NO: 3913580 - DNA, 25 bp, Homo sapien
tgatgagcctgagaaaatagcagcc

SEQ ID NO: 3913581 - DNA, 25 bp, Homo sapien
tcaggacaaacctctgagtgaagtg

SEQ ID NO: 3913582 - DNA, 25 bp, Homo sapien
ggccttgtgctaaaatgctgtgtcc

SEQ ID NO: 3913583 - DNA, 25 bp, Homo sapien
agcctcaggacaaacctctgagtga

SEQ ID NO: 3913584 - DNA, 25 bp, Homo sapien
ctggccttgtgctaaaatgctgtgt

SEQ ID NO: 3913585 - DNA, 25 bp, Homo sapien
caaatgtccccgcaaccaggaagtt

SEQ ID NO: 3913586 - DNA, 25 bp, Homo sapien
tcccgcgtagaaacaactgctggtg

SEQ ID NO: 3913587 - DNA, 25 bp, Homo sapien
cacaaatggccgcacctgaatctgg

SEQ ID NO: 3913588 - DNA, 25 bp, Homo sapien
gatgctgttgccctatttcccgcgt

SEQ ID NO: 3913589 - DNA, 25 bp, Homo sapien
cgaggacaacgtcttctctgcgagc

SEQ ID NO: 3913590 - DNA, 25 bp, Homo sapien
aaaatattgcgaggacaacgtcttc

SEQ ID NO: 3913591 - DNA, 25 bp, Homo sapien
taaaaatattgcgaggacaacgtct

SEQ ID NO: 3913592 - DNA, 25 bp, Homo sapien
tattgcgaggacaacgtcttctctg

SEQ ID NO: 3913593 - DNA, 25 bp, Homo sapien
actcgttcttagcagccagggtcct

SEQ ID NO: 3913594 - DNA, 25 bp, Homo sapien
tcaggactcgttcttagcagccagg

SEQ ID NO: 3913595 - DNA, 25 bp, Homo sapien
aggactcgttcttagcagccagggt

SEQ ID NO: 3913596 - DNA, 25 bp, Homo sapien
ctggacactttcctgaggttgctgc

SEQ ID NO: 3913597 - DNA, 25 bp, Homo sapien
ccaagccaactgctaatgctcccac

SEQ ID NO: 3913598 - DNA, 25 bp, Homo sapien
tttccaagccaactgctaatgctcc

SEQ ID NO: 3913599 - DNA, 25 bp, Homo sapien
tagggaatgtttccaagccaactgc

SEQ ID NO: 3913600 - DNA, 25 bp, Homo sapien
ctagggaatgtttccaagccaactg

SEQ ID NO: 3913601 - DNA, 25 bp, Homo sapien
tgagtaaaaacaaaatcagtgtcag

SEQ ID NO: 3913602 - DNA, 25 bp, Homo sapien
tattgagtaaaaacaaaatcagtgt

SEQ ID NO: 3913603 - DNA, 25 bp, Homo sapien
agtaaaaacaaaatcagtgtcagac

SEQ ID NO: 3913604 - DNA, 25 bp, Homo sapien
atttattgagtaaaaacaaaatcag

SEQ ID NO: 3913605 - DNA, 25 bp, Homo sapien
atttggctgatgtccaaatgcagca

SEQ ID NO: 3913606 - DNA, 25 bp, Homo sapien
aaatttggctgatgtccaaatgcag

SEQ ID NO: 3913607 - DNA, 25 bp, Homo sapien
cagagaagaacggtggggcgaaggg

SEQ ID NO: 3913608 - DNA, 25 bp, Homo sapien
cagcagagaagaacggtggggcgaa

SEQ ID NO: 3913609 - DNA, 25 bp, Homo sapien
ttaattgtaaaagcgggcatcgcac

SEQ ID NO: 3913610 - DNA, 25 bp, Homo sapien
gcacagctggtgtgagtcaattaac

SEQ ID NO: 3913611 - DNA, 25 bp, Homo sapien
caatgttttacaagcagagggaaaa

SEQ ID NO: 3913612 - DNA, 25 bp, Homo sapien
gggactcaatgttttacaagcagag

SEQ ID NO: 3913613 - DNA, 25 bp, Homo sapien
taaccctcaggtggtgtgactcgct

SEQ ID NO: 3913614 - DNA, 25 bp, Homo sapien
cacataacactcagggtggcggtga

SEQ ID NO: 3913615 - DNA, 25 bp, Homo sapien
gtcagtgcacacataacactcaggg

SEQ ID NO: 3913616 - DNA, 25 bp, Homo sapien
cacttcataaccctcaggtggtgtg

SEQ ID NO: 3913617 - DNA, 25 bp, Homo sapien
gggaagggactccatcagtgacaag

SEQ ID NO: 3913618 - DNA, 25 bp, Homo sapien
gagggaagggactccatcagtgaca

SEQ ID NO: 3913619 - DNA, 25 bp, Homo sapien
aagggactccatcagtgacaagcac

SEQ ID NO: 3913620 - DNA, 25 bp, Homo sapien
gaagggactccatcagtgacaagca

SEQ ID NO: 3913621 - DNA, 25 bp, Homo sapien
tacatgttcataacctaagggctcc

SEQ ID NO: 3913622 - DNA, 25 bp, Homo sapien
caactggcctccaatcataagggac

SEQ ID NO: 3913623 - DNA, 25 bp, Homo sapien
taagggctccgcagtgaaggaaaac

SEQ ID NO: 3913624 - DNA, 25 bp, Homo sapien
catggtttacccaacctgcagggtc

SEQ ID NO: 3913625 - DNA, 25 bp, Homo sapien
cccagtgccacatttgtcacacata

SEQ ID NO: 3913626 - DNA, 25 bp, Homo sapien
atcccagtgccacatttgtcacaca

SEQ ID NO: 3913627 - DNA, 25 bp, Homo sapien
tcccagtgccacatttgtcacacat

SEQ ID NO: 3913628 - DNA, 25 bp, Homo sapien
aatcccagtgccacatttgtcacac

SEQ ID NO: 3913629 - DNA, 25 bp, Homo sapien
tgaatcctgagggcttgttgggatc

SEQ ID NO: 3913630 - DNA, 25 bp, Homo sapien
gccactttagtgacaggagctttaa

SEQ ID NO: 3913631 - DNA, 25 bp, Homo sapien
gcagccactttagtgacaggagctt

SEQ ID NO: 3913632 - DNA, 25 bp, Homo sapien
gaatcctgagggcttgttgggatcc

SEQ ID NO: 3913633 - DNA, 25 bp, Homo sapien
gcagaattgcataagtatcactcag

SEQ ID NO: 3913634 - DNA, 25 bp, Homo sapien
gaattgcataagtatcactcagctc

SEQ ID NO: 3913635 - DNA, 25 bp, Homo sapien
ttgcataagtatcactcagctcttc

SEQ ID NO: 3913636 - DNA, 25 bp, Homo sapien
cataagtatcactcagctcttcaga

SEQ ID NO: 3913637 - DNA, 25 bp, Homo sapien
gaactggagtgactctgctctgtga

SEQ ID NO: 3913638 - DNA, 25 bp, Homo sapien
ggaactggagtgactctgctctgtg

SEQ ID NO: 3913639 - DNA, 25 bp, Homo sapien
cttataaatatatgttcaagcaagg

SEQ ID NO: 3913640 - DNA, 25 bp, Homo sapien
aatatatgttcaagcaaggccatgg

SEQ ID NO: 3913641 - DNA, 25 bp, Homo sapien
catggttttaagtggtgagctctac

SEQ ID NO: 3913642 - DNA, 25 bp, Homo sapien
caagagggtatatgtgaatgcagcc

SEQ ID NO: 3913643 - DNA, 25 bp, Homo sapien
ccagcaggtgcataaggagaaacca

SEQ ID NO: 3913644 - DNA, 25 bp, Homo sapien
tgggactattcatcgctgggaaccg

SEQ ID NO: 3913645 - DNA, 25 bp, Homo sapien
tgggtaaccagccaaaacgagcctc

SEQ ID NO: 3913646 - DNA, 25 bp, Homo sapien
tgattcttaaccttgcacctggtgg

SEQ ID NO: 3913647 - DNA, 25 bp, Homo sapien
cgagcctcggtacttgctgaactag

SEQ ID NO: 3913648 - DNA, 25 bp, Homo sapien
tatctaactcgagatcacccaagga

SEQ ID NO: 3913649 - DNA, 25 bp, Homo sapien
gagcctctgactgcagatggagctg

SEQ ID NO: 3913650 - DNA, 25 bp, Homo sapien
gaacaagagcctctgactgcagatg

SEQ ID NO: 3913651 - DNA, 25 bp, Homo sapien
gcctctgactgcagatggagctgat

SEQ ID NO: 3913652 - DNA, 25 bp, Homo sapien
tctgactgcagatggagctgattac

SEQ ID NO: 3913653 - DNA, 25 bp, Homo sapien
tcctgcaaaaccaagaaagacgtgg

SEQ ID NO: 3913654 - DNA, 25 bp, Homo sapien
caaaaccaagaaagacgtggactgt

SEQ ID NO: 3913655 - DNA, 25 bp, Homo sapien
accaagaaagacgtggactgtttcg

SEQ ID NO: 3913656 - DNA, 25 bp, Homo sapien
caagaaagacgtggactgtttcggg

SEQ ID NO: 3913657 - DNA, 25 bp, Homo sapien
cagattctttgtcgatgacaaggct

SEQ ID NO: 3913658 - DNA, 25 bp, Homo sapien
tcagattctttgtcgatgacaaggc

SEQ ID NO: 3913659 - DNA, 25 bp, Homo sapien
cttcagattctttgtcgatgacaag

SEQ ID NO: 3913660 - DNA, 25 bp, Homo sapien
agattctttgtcgatgacaaggctg

SEQ ID NO: 3913661 - DNA, 25 bp, Homo sapien
gaaatgatctcaaagccctctccta

SEQ ID NO: 3913662 - DNA, 25 bp, Homo sapien
ccttgtatgggccacaaacattgct

SEQ ID NO: 3913663 - DNA, 25 bp, Homo sapien
ccatcagcagcattatgtccagaga

SEQ ID NO: 3913664 - DNA, 25 bp, Homo sapien
caaccatgaagaactcagccgggtc

SEQ ID NO: 3913665 - DNA, 25 bp, Homo sapien
cacccaaagagtggcatatgcttca

SEQ ID NO: 3913666 - DNA, 25 bp, Homo sapien
caatcatagcaatcaaggtccaggt

SEQ ID NO: 3913667 - DNA, 25 bp, Homo sapien
tcaggtccccagctaaaggcagagt

SEQ ID NO: 3913668 - DNA, 25 bp, Homo sapien
tcatggctaccaaagaaggtcagag

SEQ ID NO: 3913669 - DNA, 25 bp, Homo sapien
tgctccagccaaaagggcagctggg

SEQ ID NO: 3913670 - DNA, 25 bp, Homo sapien
ccttagtagggtcattttctcacac

SEQ ID NO: 3913671 - DNA, 25 bp, Homo sapien
tgagaagactctgacagggcaacgg

SEQ ID NO: 3913672 - DNA, 25 bp, Homo sapien
gaattattgaaagcatccagacagg

SEQ ID NO: 3913673 - DNA, 25 bp, Homo sapien
atataaatctcagctaggccaggtg

SEQ ID NO: 3913674 - DNA, 25 bp, Homo sapien
cctagggggaccagtatgacaccgt

SEQ ID NO: 3913675 - DNA, 25 bp, Homo sapien
tctgtggaaagcctagggggaccag

SEQ ID NO: 3913676 - DNA, 25 bp, Homo sapien
gggaccagtatgacaccgtttctca

SEQ ID NO: 3913677 - DNA, 25 bp, Homo sapien
gtatgacaccgtttctcaggtatct

SEQ ID NO: 3913678 - DNA, 25 bp, Homo sapien
ttgtgggcgcttcctatgtgcagga

SEQ ID NO: 3913679 - DNA, 25 bp, Homo sapien
gtgggcgcttcctatgtgcaggacc

SEQ ID NO: 3913680 - DNA, 25 bp, Homo sapien
cggttgtgggcgcttcctatgtgca

SEQ ID NO: 3913681 - DNA, 25 bp, Homo sapien
cttcggttgtgggcgcttcctatgt

SEQ ID NO: 3913682 - DNA, 25 bp, Homo sapien
atccaatgcaaaccccttgatgggc

SEQ ID NO: 3913683 - DNA, 25 bp, Homo sapien
gaggagaaatcaaggggggcatcca

SEQ ID NO: 3913684 - DNA, 25 bp, Homo sapien
gcaaaccccttgatgggcagtgcag

SEQ ID NO: 3913685 - DNA, 25 bp, Homo sapien
caaaccccttgatgggcagtgcagg

SEQ ID NO: 3913686 - DNA, 25 bp, Homo sapien
caatgggcacctgtgcgagttcaca

SEQ ID NO: 3913687 - DNA, 25 bp, Homo sapien
ctggggaagtttcccacaatgggca

SEQ ID NO: 3913688 - DNA, 25 bp, Homo sapien
aaagcctgccctctaaggcaccctc

SEQ ID NO: 3913689 - DNA, 25 bp, Homo sapien
cccctgaatcatctctaccttctga

SEQ ID NO: 3913690 - DNA, 25 bp, Homo sapien
gtaagattcaagtcagagctaaaac

SEQ ID NO: 3913691 - DNA, 25 bp, Homo sapien
agattcaagtcagagctaaaacacg

SEQ ID NO: 3913692 - DNA, 25 bp, Homo sapien
ctgtaagattcaagtcagagctaaa

SEQ ID NO: 3913693 - DNA, 25 bp, Homo sapien
aagattcaagtcagagctaaaacac

SEQ ID NO: 3913694 - DNA, 25 bp, Homo sapien
ctttcagggcacataccaaagagat

SEQ ID NO: 3913695 - DNA, 25 bp, Homo sapien
ggcacataccaaagagattaaagca

SEQ ID NO: 3913696 - DNA, 25 bp, Homo sapien
tcagggcacataccaaagagattaa

SEQ ID NO: 3913697 - DNA, 25 bp, Homo sapien
gggcacataccaaagagattaaagc

SEQ ID NO: 3913698 - DNA, 25 bp, Homo sapien
aggggcggtacccagcagagctgca

SEQ ID NO: 3913699 - DNA, 25 bp, Homo sapien
tacaggggcggtacccagcagagct

SEQ ID NO: 3913700 - DNA, 25 bp, Homo sapien
ctgttacaggggcggtacccagcag

SEQ ID NO: 3913701 - DNA, 25 bp, Homo sapien
ttacaggggcggtacccagcagagc

SEQ ID NO: 3913702 - DNA, 25 bp, Homo sapien
ttgcctacatgtgccgcagccagga

SEQ ID NO: 3913703 - DNA, 25 bp, Homo sapien
ccttgcctacatgtgccgcagccag

SEQ ID NO: 3913704 - DNA, 25 bp, Homo sapien
gcctacatgtgccgcagccaggatg

SEQ ID NO: 3913705 - DNA, 25 bp, Homo sapien
cttgcctacatgtgccgcagccagg

SEQ ID NO: 3913706 - DNA, 25 bp, Homo sapien
tgacgcttcccttcctccgtcacca

SEQ ID NO: 3913707 - DNA, 25 bp, Homo sapien
gaggagaccagactttatgttcaga

SEQ ID NO: 3913708 - DNA, 25 bp, Homo sapien
ttcatcttgtatggatgacgcttcc

SEQ ID NO: 3913709 - DNA, 25 bp, Homo sapien
tcctccgtcaccagaggagaccaga

SEQ ID NO: 3913710 - DNA, 25 bp, Homo sapien
tgagagtcaagttgtctgtgcagcc

SEQ ID NO: 3913711 - DNA, 25 bp, Homo sapien
ccaagtgtgtcatattgctagtatt

SEQ ID NO: 3913712 - DNA, 25 bp, Homo sapien
tgttctgagcttccaagtgtgtcat

SEQ ID NO: 3913713 - DNA, 25 bp, Homo sapien
tacataaattagctagagccgcctt

SEQ ID NO: 3913714 - DNA, 25 bp, Homo sapien
tgactctcgggatccagttgaggaa

SEQ ID NO: 3913715 - DNA, 25 bp, Homo sapien
tatggctgaaccacaggtaacaggt

SEQ ID NO: 3913716 - DNA, 25 bp, Homo sapien
caaaccaggacacacaagttgggtc

SEQ ID NO: 3913717 - DNA, 25 bp, Homo sapien
ccgcaggatcaaggtggcagtaaca

SEQ ID NO: 3913718 - DNA, 25 bp, Homo sapien
agatggggttttttcaccatgttgg

SEQ ID NO: 3913719 - DNA, 25 bp, Homo sapien
tgttgaccaggttggtgtacagtgg

SEQ ID NO: 3913720 - DNA, 25 bp, Homo sapien
ttgaccaggttggtgtacagtggcg

SEQ ID NO: 3913721 - DNA, 25 bp, Homo sapien
gatggggttttttcaccatgttggc

SEQ ID NO: 3913722 - DNA, 25 bp, Homo sapien
gattacctcaccaccaacatattag

SEQ ID NO: 3913723 - DNA, 25 bp, Homo sapien
ttttgctttagcacaatgccacaag

SEQ ID NO: 3913724 - DNA, 25 bp, Homo sapien
aattgtgagtggttcaagttcacac

SEQ ID NO: 3913725 - DNA, 25 bp, Homo sapien
gtcacaagcaacatcagataggact

SEQ ID NO: 3913726 - DNA, 25 bp, Homo sapien
gcttagaggccaacatgttctccac

SEQ ID NO: 3913727 - DNA, 25 bp, Homo sapien
agacactgcttgcttagaggccaac

SEQ ID NO: 3913728 - DNA, 25 bp, Homo sapien
tatagatagagctccacaacccatc

SEQ ID NO: 3913729 - DNA, 25 bp, Homo sapien
cagtgaaacccaagaacccatacct

SEQ ID NO: 3913730 - DNA, 25 bp, Homo sapien
caaagacagcctatacagtgaaacc

SEQ ID NO: 3913731 - DNA, 25 bp, Homo sapien
ccttggagttggctctaaacctcag

SEQ ID NO: 3913732 - DNA, 25 bp, Homo sapien
caactgatttaaagttcctggcact

SEQ ID NO: 3913733 - DNA, 25 bp, Homo sapien
tagtgtgcaattacagaaccaactg

SEQ ID NO: 3913734 - DNA, 25 bp, Homo sapien
tatctaaataactcgacgtgggtcc

SEQ ID NO: 3913735 - DNA, 25 bp, Homo sapien
tgcgtccaaccagtagaagtataat

SEQ ID NO: 3913736 - DNA, 25 bp, Homo sapien
aatgcctggcacgtaataaacactc

SEQ ID NO: 3913737 - DNA, 25 bp, Homo sapien
aagcgctattattcccacattgcaa

SEQ ID NO: 3913738 - DNA, 25 bp, Homo sapien
cacaacctttgaagacaagcgctat

SEQ ID NO: 3913739 - DNA, 25 bp, Homo sapien
gctggaaggcttaaatgagactgca

SEQ ID NO: 3913740 - DNA, 25 bp, Homo sapien
cttgttcttcactgtccaagtgggc

SEQ ID NO: 3913741 - DNA, 25 bp, Homo sapien
ttgttcttcactgtccaagtgggca

SEQ ID NO: 3913742 - DNA, 25 bp, Homo sapien
gtccaagtgggcatggaacctcata

SEQ ID NO: 3913743 - DNA, 25 bp, Homo sapien
tgggcatggaacctcataactggac

SEQ ID NO: 3913744 - DNA, 25 bp, Homo sapien
agggagaagtgccatctcccagcgc

SEQ ID NO: 3913745 - DNA, 25 bp, Homo sapien
caggtctttcctgttgcgttcggct

SEQ ID NO: 3913746 - DNA, 25 bp, Homo sapien
agtgccatctcccagcgcgcgggat

SEQ ID NO: 3913747 - DNA, 25 bp, Homo sapien
cggctgcactgcgatctgggaagaa

SEQ ID NO: 3913748 - DNA, 25 bp, Homo sapien
cccgcttccacgcacgtcccagctg

SEQ ID NO: 3913749 - DNA, 25 bp, Homo sapien
cgcttccacgcacgtcccagctgct

SEQ ID NO: 3913750 - DNA, 25 bp, Homo sapien
atagcgccccgcttccacgcacgtc

SEQ ID NO: 3913751 - DNA, 25 bp, Homo sapien
tcccatagcgccccgcttccacgca

SEQ ID NO: 3913752 - DNA, 25 bp, Homo sapien
ccgggccctggaggtctatctgctg

SEQ ID NO: 3913753 - DNA, 25 bp, Homo sapien
ccgggaaatggcgagaggctgctcg

SEQ ID NO: 3913754 - DNA, 25 bp, Homo sapien
gaaatggcgagaggctgctcgaagt

SEQ ID NO: 3913755 - DNA, 25 bp, Homo sapien
ccttgccgcccacgaggcggaagcc

SEQ ID NO: 3913756 - DNA, 25 bp, Homo sapien
cggggacagacgggcaggacgcgcg

SEQ ID NO: 3913757 - DNA, 25 bp, Homo sapien
gggcaggacgcgcggaacagcttgc

SEQ ID NO: 3913758 - DNA, 25 bp, Homo sapien
gcaggacgcgcggaacagcttgcag

SEQ ID NO: 3913759 - DNA, 25 bp, Homo sapien
tgtcggagaaagagcggcgcggcgc

SEQ ID NO: 3913760 - DNA, 25 bp, Homo sapien
tctgaatctgtccctagatgtgtaa

SEQ ID NO: 3913761 - DNA, 25 bp, Homo sapien
tagatgtgtaaccatcttgaatatt

SEQ ID NO: 3913762 - DNA, 25 bp, Homo sapien
tgaatctgtccctagatgtgtaacc

SEQ ID NO: 3913763 - DNA, 25 bp, Homo sapien
ctagatgtgtaaccatcttgaatat

SEQ ID NO: 3913764 - DNA, 25 bp, Homo sapien
tccagctcgggaaatcttgaagtgt

SEQ ID NO: 3913765 - DNA, 25 bp, Homo sapien
gcctctcggattccagttgcacaaa

SEQ ID NO: 3913766 - DNA, 25 bp, Homo sapien
gtctgcgcgtctttgatggagcccc

SEQ ID NO: 3913767 - DNA, 25 bp, Homo sapien
gcagggaattgagctcccaatcctt

SEQ ID NO: 3913768 - DNA, 25 bp, Homo sapien
tgagtagatgaactgccagatctga

SEQ ID NO: 3913769 - DNA, 25 bp, Homo sapien
gatgaactgccagatctgaggcctg

SEQ ID NO: 3913770 - DNA, 25 bp, Homo sapien
ctgggcacagaactgtctggcgttc

SEQ ID NO: 3913771 - DNA, 25 bp, Homo sapien
tctggcgttccctcagggctggtga

SEQ ID NO: 3913772 - DNA, 25 bp, Homo sapien
cttgggcgataatgtctcaagcatc

SEQ ID NO: 3913773 - DNA, 25 bp, Homo sapien
aacttgggcgataatgtctcaagca

SEQ ID NO: 3913774 - DNA, 25 bp, Homo sapien
gagagaaacttgggcgataatgtct

SEQ ID NO: 3913775 - DNA, 25 bp, Homo sapien
agaaacttgggcgataatgtctcaa

SEQ ID NO: 3913776 - DNA, 25 bp, Homo sapien
actgcttccagtgttattccttggg

SEQ ID NO: 3913777 - DNA, 25 bp, Homo sapien
attccttgggtagcatcagggctgc

SEQ ID NO: 3913778 - DNA, 25 bp, Homo sapien
tccttgggtagcatcagggctgctg

SEQ ID NO: 3913779 - DNA, 25 bp, Homo sapien
gggtccaccttctctccagttatct

SEQ ID NO: 3913780 - DNA, 25 bp, Homo sapien
gacaatgctggctccaggtaccagc

SEQ ID NO: 3913781 - DNA, 25 bp, Homo sapien
caatgctggctccaggtaccagcac

SEQ ID NO: 3913782 - DNA, 25 bp, Homo sapien
ccagctagcagtgacaatgctggct

SEQ ID NO: 3913783 - DNA, 25 bp, Homo sapien
cagctagcagtgacaatgctggctc

SEQ ID NO: 3913784 - DNA, 25 bp, Homo sapien
acattagggcatataccaggctggg

SEQ ID NO: 3913785 - DNA, 25 bp, Homo sapien
cacattagggcatataccaggctgg

SEQ ID NO: 3913786 - DNA, 25 bp, Homo sapien
agggcatataccaggctggggctca

SEQ ID NO: 3913787 - DNA, 25 bp, Homo sapien
cttcacattagggcatataccaggc

SEQ ID NO: 3913788 - DNA, 25 bp, Homo sapien
taatttgctaagcatgcccccttta

SEQ ID NO: 3913789 - DNA, 25 bp, Homo sapien
ccttggtcccatctgggctttttct

SEQ ID NO: 3913790 - DNA, 25 bp, Homo sapien
cataatttgctaagcatgccccctt

SEQ ID NO: 3913791 - DNA, 25 bp, Homo sapien
ctcccataatttgctaagcatgccc

SEQ ID NO: 3913792 - DNA, 25 bp, Homo sapien
gttcacctgtaattggactcccaaa

SEQ ID NO: 3913793 - DNA, 25 bp, Homo sapien
aaatactaaagtcttgttcacctgt

SEQ ID NO: 3913794 - DNA, 25 bp, Homo sapien
aaggacccgctcttcaattctctgg

SEQ ID NO: 3913795 - DNA, 25 bp, Homo sapien
gttaaggacccgctcttcaattctc

SEQ ID NO: 3913796 - DNA, 25 bp, Homo sapien
tctcagccaatgcagtagtgttagg

SEQ ID NO: 3913797 - DNA, 25 bp, Homo sapien
tgagactagttctaacgccctttgg

SEQ ID NO: 3913798 - DNA, 25 bp, Homo sapien
tggattaactcctgactgagactag

SEQ ID NO: 3913799 - DNA, 25 bp, Homo sapien
tctagggaagagtaaatatccaggc

SEQ ID NO: 3913800 - DNA, 25 bp, Homo sapien
gtttcgtcatacataggaaggcgac

SEQ ID NO: 3913801 - DNA, 25 bp, Homo sapien
caataggacttaatacgactgcaga

SEQ ID NO: 3913802 - DNA, 25 bp, Homo sapien
aatgtgttgcaaggcatgccgccag

SEQ ID NO: 3913803 - DNA, 25 bp, Homo sapien
tctatacaaggtaggtacatgggct

SEQ ID NO: 3913804 - DNA, 25 bp, Homo sapien
aatcggtgaaatgctgccgtgcaaa

SEQ ID NO: 3913805 - DNA, 25 bp, Homo sapien
tagccaatacagtccacaatcggtg

SEQ ID NO: 3913806 - DNA, 25 bp, Homo sapien
taagatgggtatttgtgacagcagc

SEQ ID NO: 3913807 - DNA, 25 bp, Homo sapien
gacgggcaaattggtgaggcatacc

SEQ ID NO: 3913808 - DNA, 25 bp, Homo sapien
tacacaaccctaccacctagaattg

SEQ ID NO: 3913809 - DNA, 25 bp, Homo sapien
tagaattgctactcctatttgtgag

SEQ ID NO: 3913810 - DNA, 25 bp, Homo sapien
ctagactttgggacaatggtcctgg

SEQ ID NO: 3913811 - DNA, 25 bp, Homo sapien
tctgagatatatgcagacagccagg

SEQ ID NO: 3913812 - DNA, 25 bp, Homo sapien
aatgctttctaggatccctccaggg

SEQ ID NO: 3913813 - DNA, 25 bp, Homo sapien
ttaaaagtgagctaatggagatggc

SEQ ID NO: 3913814 - DNA, 25 bp, Homo sapien
tgaactaccctcagacaaaggttct

SEQ ID NO: 3913815 - DNA, 25 bp, Homo sapien
aaaggttcttccagcaccctagttg

SEQ ID NO: 3913816 - DNA, 25 bp, Homo sapien
ccttgaattggacagagttgtgacc

SEQ ID NO: 3913817 - DNA, 25 bp, Homo sapien
taagagaggccgataaacatccttg

SEQ ID NO: 3913818 - DNA, 25 bp, Homo sapien
cccacaaagaacagacgtcctggtt

SEQ ID NO: 3913819 - DNA, 25 bp, Homo sapien
gaagagaagccttgccagggtgtac

SEQ ID NO: 3913820 - DNA, 25 bp, Homo sapien
cacagtaaccttagacaggcttggg

SEQ ID NO: 3913821 - DNA, 25 bp, Homo sapien
tgttctatgagaataggcctcccaa

SEQ ID NO: 3913822 - DNA, 25 bp, Homo sapien
aagtggctcccagaagcggctaagt

SEQ ID NO: 3913823 - DNA, 25 bp, Homo sapien
gaacatcagggcagtcaatggcact

SEQ ID NO: 3913824 - DNA, 25 bp, Homo sapien
tcggttcatgaatgatgcttcctcc

SEQ ID NO: 3913825 - DNA, 25 bp, Homo sapien
caataaaaataatctccatggtttt

SEQ ID NO: 3913826 - DNA, 25 bp, Homo sapien
taattttcctactgactcaactaaa

SEQ ID NO: 3913827 - DNA, 25 bp, Homo sapien
tactgactcaactaaaaagatcggt

SEQ ID NO: 3913828 - DNA, 25 bp, Homo sapien
caaaggttttacatagttgcctgga

SEQ ID NO: 3913829 - DNA, 25 bp, Homo sapien
tacatagttgcctggaaaagtacca

SEQ ID NO: 3913830 - DNA, 25 bp, Homo sapien
taccaaactgctttgtccttcttga

SEQ ID NO: 3913831 - DNA, 25 bp, Homo sapien
tggaaaagtaccaaactgctttgtc

SEQ ID NO: 3913832 - DNA, 25 bp, Homo sapien
cccagccctgatattactttgcttt

SEQ ID NO: 3913833 - DNA, 25 bp, Homo sapien
attactttgctttagcaaagctttg

SEQ ID NO: 3913834 - DNA, 25 bp, Homo sapien
ccagccctgatattactttgcttta

SEQ ID NO: 3913835 - DNA, 25 bp, Homo sapien
caactagtaagaaaagcatgatgag

SEQ ID NO: 3913836 - DNA, 25 bp, Homo sapien
tacacaactagtaagaaaagcatga

SEQ ID NO: 3913837 - DNA, 25 bp, Homo sapien
cacaactagtaagaaaagcatgatg

SEQ ID NO: 3913838 - DNA, 25 bp, Homo sapien
tagtaagaaaagcatgatgagattc

SEQ ID NO: 3913839 - DNA, 25 bp, Homo sapien
gacatcaacgatatctccatcgcgg

SEQ ID NO: 3913840 - DNA, 25 bp, Homo sapien
catcgcggagttccaactcatcatc

SEQ ID NO: 3913841 - DNA, 25 bp, Homo sapien
tttccatgacatcaacgatatctcc

SEQ ID NO: 3913842 - DNA, 25 bp, Homo sapien
cgatatctccatcgcggagttccaa

SEQ ID NO: 3913843 - DNA, 25 bp, Homo sapien
tatagctatataatgcttgatagct

SEQ ID NO: 3913844 - DNA, 25 bp, Homo sapien
tagctatataatgcttgatagctaa

SEQ ID NO: 3913845 - DNA, 25 bp, Homo sapien
gctatataatgcttgatagctaaat

SEQ ID NO: 3913846 - DNA, 25 bp, Homo sapien
atatagctatataatgcttgatagc

SEQ ID NO: 3913847 - DNA, 25 bp, Homo sapien
tcaatttggagtctcctactggcct

SEQ ID NO: 3913848 - DNA, 25 bp, Homo sapien
ctcagccctgggaaataactccaat

SEQ ID NO: 3913849 - DNA, 25 bp, Homo sapien
gtggagactggctggacaaagtccc

SEQ ID NO: 3913850 - DNA, 25 bp, Homo sapien
cctactcaatttggagtctcctact

SEQ ID NO: 3913851 - DNA, 25 bp, Homo sapien
taatttgggatgaacctcatactcc

SEQ ID NO: 3913852 - DNA, 25 bp, Homo sapien
actcctcagaacattgtcccatggg

SEQ ID NO: 3913853 - DNA, 25 bp, Homo sapien
gccaatcctggtgccccacgctcag

SEQ ID NO: 3913854 - DNA, 25 bp, Homo sapien
cccctccagatttaagtctctgtgc

SEQ ID NO: 3913855 - DNA, 25 bp, Homo sapien
tgaggaaagaaaggtcccttctcca

SEQ ID NO: 3913856 - DNA, 25 bp, Homo sapien
ccttcctgggctcttccttcactta

SEQ ID NO: 3913857 - DNA, 25 bp, Homo sapien
caagccacgttgaacccccttcctg

SEQ ID NO: 3913858 - DNA, 25 bp, Homo sapien
ccccttcctgggctcttccttcact

SEQ ID NO: 3913859 - DNA, 25 bp, Homo sapien
cctccgtctcgggagttcaggtgat

SEQ ID NO: 3913860 - DNA, 25 bp, Homo sapien
tgcaccctaaaaacacctcccctga

SEQ ID NO: 3913861 - DNA, 25 bp, Homo sapien
ttaactggcattttactctggtaaa

SEQ ID NO: 3913862 - DNA, 25 bp, Homo sapien
tgtctctgcaccctaaaaacacctc

SEQ ID NO: 3913863 - DNA, 25 bp, Homo sapien
gatcaatatgttccttacttcaaaa

SEQ ID NO: 3913864 - DNA, 25 bp, Homo sapien
caaacttacttcaactgcattctgg

SEQ ID NO: 3913865 - DNA, 25 bp, Homo sapien
tgcacatgtggtcctcacctctggg

SEQ ID NO: 3913866 - DNA, 25 bp, Homo sapien
ttccatgaaccatatgctgcagcta

SEQ ID NO: 3913867 - DNA, 25 bp, Homo sapien
cttgtgaggtttgactcctgtcggg

SEQ ID NO: 3913868 - DNA, 25 bp, Homo sapien
tcttgtgaggtttgactcctgtcgg

SEQ ID NO: 3913869 - DNA, 25 bp, Homo sapien
tttgactcctgtcgggggtgactct

SEQ ID NO: 3913870 - DNA, 25 bp, Homo sapien
ctgtcgggggtgactcttcgctgct

SEQ ID NO: 3913871 - DNA, 25 bp, Homo sapien
taaagatgatttattgtcagaaggg

SEQ ID NO: 3913872 - DNA, 25 bp, Homo sapien
gggataccttgtgatgaaagtcaag

SEQ ID NO: 3913873 - DNA, 25 bp, Homo sapien
acagtgctgcagtaatgaacagatt

SEQ ID NO: 3913874 - DNA, 25 bp, Homo sapien
cagatttttcggcaatgtttatgat

SEQ ID NO: 3913875 - DNA, 25 bp, Homo sapien
cagattctgtgagatctggtcctgc

SEQ ID NO: 3913876 - DNA, 25 bp, Homo sapien
tcctgctctcaatgaatgatgagaa

SEQ ID NO: 3913877 - DNA, 25 bp, Homo sapien
agattctgtgagatctggtcctgct

SEQ ID NO: 3913878 - DNA, 25 bp, Homo sapien
caccatcacgcttggatgacaccag

SEQ ID NO: 3913879 - DNA, 25 bp, Homo sapien
caacagggtgggtgcacagaagaaa

SEQ ID NO: 3913880 - DNA, 25 bp, Homo sapien
aacagggtgggtgcacagaagaaaa

SEQ ID NO: 3913881 - DNA, 25 bp, Homo sapien
gataccggcggcctatggccaccaa

SEQ ID NO: 3913882 - DNA, 25 bp, Homo sapien
ccaagcaaacctgccttttgagtgg

SEQ ID NO: 3913883 - DNA, 25 bp, Homo sapien
gaggccagccttcacttggagagtg

SEQ ID NO: 3913884 - DNA, 25 bp, Homo sapien
acatggccaagcaaacctgcctttt

SEQ ID NO: 3913885 - DNA, 25 bp, Homo sapien
gggcttccattgtagaggccagcct

SEQ ID NO: 3913886 - DNA, 25 bp, Homo sapien
caagtgtgaagaaaccaaaggcttt

SEQ ID NO: 3913887 - DNA, 25 bp, Homo sapien
gaaaggcccgaatgagtcagtctcc

SEQ ID NO: 3913888 - DNA, 25 bp, Homo sapien
gtaaatactcaaccaatgctcagcc

SEQ ID NO: 3913889 - DNA, 25 bp, Homo sapien
tttctctcttaggtggaacagggta

SEQ ID NO: 3913890 - DNA, 25 bp, Homo sapien
tgccagtcaacaaatagtgcttctg

SEQ ID NO: 3913891 - DNA, 25 bp, Homo sapien
aaatatttgatcatgcaaacgatgg

SEQ ID NO: 3913892 - DNA, 25 bp, Homo sapien
catgcaaacgatgggatttttcaag

SEQ ID NO: 3913893 - DNA, 25 bp, Homo sapien
cagtcaacaaatagtgcttctgtca

SEQ ID NO: 3913894 - DNA, 25 bp, Homo sapien
tagtggaacaaccagtttgatctgt

SEQ ID NO: 3913895 - DNA, 25 bp, Homo sapien
agataactcactaccatcagacctg

SEQ ID NO: 3913896 - DNA, 25 bp, Homo sapien
actgactgtgaacaatgaattgaga

SEQ ID NO: 3913897 - DNA, 25 bp, Homo sapien
ataactcactaccatcagacctgtc

SEQ ID NO: 3913898 - DNA, 25 bp, Homo sapien
gcttcaagtgatctgcccgcctcgg

SEQ ID NO: 3913899 - DNA, 25 bp, Homo sapien
ggcttcaagtgatctgcccgcctcg

SEQ ID NO: 3913900 - DNA, 25 bp, Homo sapien
ttacagatgtctaccaccacgcccg

SEQ ID NO: 3913901 - DNA, 25 bp, Homo sapien
cgttaaggcaccaaaacatctacag

SEQ ID NO: 3913902 - DNA, 25 bp, Homo sapien
aaattgcccttaagcttctgcctta

SEQ ID NO: 3913903 - DNA, 25 bp, Homo sapien
tgtggccagtatggtccaaattgcc

SEQ ID NO: 3913904 - DNA, 25 bp, Homo sapien
tgaaactcactgtgcaacccttgct

SEQ ID NO: 3913905 - DNA, 25 bp, Homo sapien
gcactgatactgtatgggaacacag

SEQ ID NO: 3913906 - DNA, 25 bp, Homo sapien
agagcactaatccactcatgcaggg

SEQ ID NO: 3913907 - DNA, 25 bp, Homo sapien
tgaagtgccttccatacattaggta

SEQ ID NO: 3913908 - DNA, 25 bp, Homo sapien
taggtatcacggtcccgcctttgga

SEQ ID NO: 3913909 - DNA, 25 bp, Homo sapien
agcctgtggtcacgtcatcctgatg

SEQ ID NO: 3913910 - DNA, 25 bp, Homo sapien
ttagttcagcaaggagaataatggc

SEQ ID NO: 3913911 - DNA, 25 bp, Homo sapien
aggaccccgtttccagagttgtcag

SEQ ID NO: 3913912 - DNA, 25 bp, Homo sapien
gatacacaaactggtctggaatgca

SEQ ID NO: 3913913 - DNA, 25 bp, Homo sapien
acaggaagtggtacacttggggtct

SEQ ID NO: 3913914 - DNA, 25 bp, Homo sapien
cacagcctgtgcacacccatggaga

SEQ ID NO: 3913915 - DNA, 25 bp, Homo sapien
gaacaccaagtttcaacaagcctgg

SEQ ID NO: 3913916 - DNA, 25 bp, Homo sapien
agcctggctttccaatcaacataat

SEQ ID NO: 3913917 - DNA, 25 bp, Homo sapien
tgcacacgcggcatgctgcagtcct

SEQ ID NO: 3913918 - DNA, 25 bp, Homo sapien
caccctgccaagtgagacgccaagt

SEQ ID NO: 3913919 - DNA, 25 bp, Homo sapien
cttggcctccgtagatggaccaggg

SEQ ID NO: 3913920 - DNA, 25 bp, Homo sapien
attcacttggcctccgtagatggac

SEQ ID NO: 3913921 - DNA, 25 bp, Homo sapien
cttagagatcttgggtccaccaggg

SEQ ID NO: 3913922 - DNA, 25 bp, Homo sapien
cacttcctggaaaagcgctacccag

SEQ ID NO: 3913923 - DNA, 25 bp, Homo sapien
tctgttcagtactcaggcacctgac

SEQ ID NO: 3913924 - DNA, 25 bp, Homo sapien
ggcacctgaccacgtctgaaggctt

SEQ ID NO: 3913925 - DNA, 25 bp, Homo sapien
atgcctgaagatggcgtgtggacac

SEQ ID NO: 3913926 - DNA, 25 bp, Homo sapien
gaagctatcttggtggatgcctgaa

SEQ ID NO: 3913927 - DNA, 25 bp, Homo sapien
caccgtctccattcatgtgaaggga

SEQ ID NO: 3913928 - DNA, 25 bp, Homo sapien
ccagcggcagctgcaagaagctatc

SEQ ID NO: 3913929 - DNA, 25 bp, Homo sapien
ccttggtgacaaggcgaggtggtca

SEQ ID NO: 3913930 - DNA, 25 bp, Homo sapien
ggacgatctgaccaactcaaatggg

SEQ ID NO: 3913931 - DNA, 25 bp, Homo sapien
ggtcagtgttatagatagaagcctc

SEQ ID NO: 3913932 - DNA, 25 bp, Homo sapien
gccagtggagaagctactgatcgtg

SEQ ID NO: 3913933 - DNA, 25 bp, Homo sapien
gagggggctggcgtgatgagcttgc

SEQ ID NO: 3913934 - DNA, 25 bp, Homo sapien
gagatgagggggctggcgtgatgag

SEQ ID NO: 3913935 - DNA, 25 bp, Homo sapien
ggggctggcgtgatgagcttgctgt

SEQ ID NO: 3913936 - DNA, 25 bp, Homo sapien
gatgagggggctggcgtgatgagct

SEQ ID NO: 3913937 - DNA, 25 bp, Homo sapien
aacaggatgcggctatcactgtcca

SEQ ID NO: 3913938 - DNA, 25 bp, Homo sapien
cggctatcactgtccaggaagccct

SEQ ID NO: 3913939 - DNA, 25 bp, Homo sapien
taagacaacaggatgcggctatcac

SEQ ID NO: 3913940 - DNA, 25 bp, Homo sapien
cacactctgtcctataagacaacag

SEQ ID NO: 3913941 - DNA, 25 bp, Homo sapien
ctttggatctggtctatatggctga

SEQ ID NO: 3913942 - DNA, 25 bp, Homo sapien
gaaggtgtaagtctctctttcagcc

SEQ ID NO: 3913943 - DNA, 25 bp, Homo sapien
gtcttctgcaggtcaactttggcca

SEQ ID NO: 3913944 - DNA, 25 bp, Homo sapien
ctttgtcttctgcaggtcaactttg

SEQ ID NO: 3913945 - DNA, 25 bp, Homo sapien
atatatctgcaaccaagcactggaa

SEQ ID NO: 3913946 - DNA, 25 bp, Homo sapien
ctggaaaaggccatttgtatgcata

SEQ ID NO: 3913947 - DNA, 25 bp, Homo sapien
tattcccagagcaattacttgacta

SEQ ID NO: 3913948 - DNA, 25 bp, Homo sapien
gcaattacttgactattccttttcc

SEQ ID NO: 3913949 - DNA, 25 bp, Homo sapien
tcagcactgttgactacaaaaattc

SEQ ID NO: 3913950 - DNA, 25 bp, Homo sapien
catcagcactgttgactacaaaaat

SEQ ID NO: 3913951 - DNA, 25 bp, Homo sapien
cagcactgttgactacaaaaattca

SEQ ID NO: 3913952 - DNA, 25 bp, Homo sapien
agcactgttgactacaaaaattcac

SEQ ID NO: 3913953 - DNA, 25 bp, Homo sapien
gtatgaaaaccagtgacgagaagct

SEQ ID NO: 3913954 - DNA, 25 bp, Homo sapien
gaaaaccagtgacgagaagcttaga

SEQ ID NO: 3913955 - DNA, 25 bp, Homo sapien
tatgaaaaccagtgacgagaagctt

SEQ ID NO: 3913956 - DNA, 25 bp, Homo sapien
aaccagtgacgagaagcttagatac

SEQ ID NO: 3913957 - DNA, 25 bp, Homo sapien
tgatcacatccacgtaggtgatggg

SEQ ID NO: 3913958 - DNA, 25 bp, Homo sapien
gaaaggcaggtccatgtaatccaca

SEQ ID NO: 3913959 - DNA, 25 bp, Homo sapien
tgccggagcagtgtgatcctctcac

SEQ ID NO: 3913960 - DNA, 25 bp, Homo sapien
cagttctcatctacctgccggagca

SEQ ID NO: 3913961 - DNA, 25 bp, Homo sapien
gaaggacatttctacttgtgtatca

SEQ ID NO: 3913962 - DNA, 25 bp, Homo sapien
gcaatagcttctccatattccaaaa

SEQ ID NO: 3913963 - DNA, 25 bp, Homo sapien
ctttctgaaggacatttctacttgt

SEQ ID NO: 3913964 - DNA, 25 bp, Homo sapien
tgtgtatcaccattaaagttaaact

SEQ ID NO: 3913965 - DNA, 25 bp, Homo sapien
gcactggtgtcaactttttgggctg

SEQ ID NO: 3913966 - DNA, 25 bp, Homo sapien
ctggtgtcaactttttgggctgtgc

SEQ ID NO: 3913967 - DNA, 25 bp, Homo sapien
ctgcactggtgtcaactttttgggc

SEQ ID NO: 3913968 - DNA, 25 bp, Homo sapien
cactggtgtcaactttttgggctgt

SEQ ID NO: 3913969 - DNA, 25 bp, Homo sapien
ctcgatgtaggtgcgtgggaagatt

SEQ ID NO: 3913970 - DNA, 25 bp, Homo sapien
tgtaggtgcgtgggaagattcccac

SEQ ID NO: 3913971 - DNA, 25 bp, Homo sapien
cgatgtaggtgcgtgggaagattcc

SEQ ID NO: 3913972 - DNA, 25 bp, Homo sapien
atgtaggtgcgtgggaagattccca

SEQ ID NO: 3913973 - DNA, 25 bp, Homo sapien
ccggccgtggtgttctccttcatac

SEQ ID NO: 3913974 - DNA, 25 bp, Homo sapien
cggccgtggtgttctccttcatacc

SEQ ID NO: 3913975 - DNA, 25 bp, Homo sapien
cttttttggagcatcacggtgtaca

SEQ ID NO: 3913976 - DNA, 25 bp, Homo sapien
gaaggagccctctctccggcattag

SEQ ID NO: 3913977 - DNA, 25 bp, Homo sapien
tactaagtatctcgcagctgtggag

SEQ ID NO: 3913978 - DNA, 25 bp, Homo sapien
gcaaaggacccacttgtgtgtgaga

SEQ ID NO: 3913979 - DNA, 25 bp, Homo sapien
tataccagatttgtgcctaggctct

SEQ ID NO: 3913980 - DNA, 25 bp, Homo sapien
taagagaaacgccagtctcctgtgg

SEQ ID NO: 3913981 - DNA, 25 bp, Homo sapien
gactggtctagatccttccacagaa

SEQ ID NO: 3913982 - DNA, 25 bp, Homo sapien
gaaaaattttacagggctagcactc

SEQ ID NO: 3913983 - DNA, 25 bp, Homo sapien
tgtctgagctttaaagtcaaatttg

SEQ ID NO: 3913984 - DNA, 25 bp, Homo sapien
agctttaaagtcaaatttggctctg

SEQ ID NO: 3913985 - DNA, 25 bp, Homo sapien
ctttaaagtcaaatttggctctggc

SEQ ID NO: 3913986 - DNA, 25 bp, Homo sapien
aaagtcaaatttggctctggcaggt

SEQ ID NO: 3913987 - DNA, 25 bp, Homo sapien
gattcatggacaacaaggacacatt

SEQ ID NO: 3913988 - DNA, 25 bp, Homo sapien
gacaagttaaaatcaggattcatgg

SEQ ID NO: 3913989 - DNA, 25 bp, Homo sapien
atcaggattcatggacaacaaggac

SEQ ID NO: 3913990 - DNA, 25 bp, Homo sapien
aacataagaaacaatgacaagttaa

SEQ ID NO: 3913991 - DNA, 25 bp, Homo sapien
tatacagatagggtcccacaatgtt

SEQ ID NO: 3913992 - DNA, 25 bp, Homo sapien
ctacccatctataccaaacgtacgg

SEQ ID NO: 3913993 - DNA, 25 bp, Homo sapien
tataatctagttaaagccacacaat

SEQ ID NO: 3913994 - DNA, 25 bp, Homo sapien
tacgcccggctgtggaatttctttc

SEQ ID NO: 3913995 - DNA, 25 bp, Homo sapien
cattgctctagaagggaggcaggct

SEQ ID NO: 3913996 - DNA, 25 bp, Homo sapien
gaaactttgcagataggacccaggg

SEQ ID NO: 3913997 - DNA, 25 bp, Homo sapien
tggtcacccaagtcctaccgaatgg

SEQ ID NO: 3913998 - DNA, 25 bp, Homo sapien
aactgtataagagggagacttccac

SEQ ID NO: 3913999 - DNA, 25 bp, Homo sapien
gtactgggattacaggtgtaagcca

SEQ ID NO: 3914000 - DNA, 25 bp, Homo sapien
caaagtactgggattacaggtgtaa

SEQ ID NO: 3914001 - DNA, 25 bp, Homo sapien
gcaattctcccaccttgacttccca

SEQ ID NO: 3914002 - DNA, 25 bp, Homo sapien
aagtactgggattacaggtgtaagc

SEQ ID NO: 3914003 - DNA, 25 bp, Homo sapien
tggactcatgaaggcagccaatggt

SEQ ID NO: 3914004 - DNA, 25 bp, Homo sapien
gctaccaatgcatatggactcaggt

SEQ ID NO: 3914005 - DNA, 25 bp, Homo sapien
tgcacaggcaacacagtagcatgat

SEQ ID NO: 3914006 - DNA, 25 bp, Homo sapien
gactcaggtataaggtttctaagca

SEQ ID NO: 3914007 - DNA, 25 bp, Homo sapien
atgctgaggggaggcaaataggcaa

SEQ ID NO: 3914008 - DNA, 25 bp, Homo sapien
tgctgaggggaggcaaataggcaaa

SEQ ID NO: 3914009 - DNA, 25 bp, Homo sapien
gctttgggtcaagcagcagattgag

SEQ ID NO: 3914010 - DNA, 25 bp, Homo sapien
tgctttgggtcaagcagcagattga

SEQ ID NO: 3914011 - DNA, 25 bp, Homo sapien
taaactgatggtgcgtcggaatgac

SEQ ID NO: 3914012 - DNA, 25 bp, Homo sapien
tatcgtctatattgaggaggtcccc

SEQ ID NO: 3914013 - DNA, 25 bp, Homo sapien
gaggtccccaaagcgctcattagtg

SEQ ID NO: 3914014 - DNA, 25 bp, Homo sapien
gcctgtgtggcgtcgagctgcaata

SEQ ID NO: 3914015 - DNA, 25 bp, Homo sapien
aaattgcataaaatgggcagtgaat

SEQ ID NO: 3914016 - DNA, 25 bp, Homo sapien
gccataaaattgcataaaatgggca

SEQ ID NO: 3914017 - DNA, 25 bp, Homo sapien
attgcataaaatgggcagtgaatca

SEQ ID NO: 3914018 - DNA, 25 bp, Homo sapien
cataaaattgcataaaatgggcagt

SEQ ID NO: 3914019 - DNA, 25 bp, Homo sapien
cacctgggctggtgtgtaatggcgc

SEQ ID NO: 3914020 - DNA, 25 bp, Homo sapien
cctgggctggtgtgtaatggcgcca

SEQ ID NO: 3914021 - DNA, 25 bp, Homo sapien
ctgggctggtgtgtaatggcgccat

SEQ ID NO: 3914022 - DNA, 25 bp, Homo sapien
gtcacctgggctggtgtgtaatggc

SEQ ID NO: 3914023 - DNA, 25 bp, Homo sapien
taattgctagatcatgtcacctctc

SEQ ID NO: 3914024 - DNA, 25 bp, Homo sapien
ttgcctctaattgctagatcatgtc

SEQ ID NO: 3914025 - DNA, 25 bp, Homo sapien
tagatgtcaagaatctgtacttgct

SEQ ID NO: 3914026 - DNA, 25 bp, Homo sapien
catgtcacctctctgatagatgtca

SEQ ID NO: 3914027 - DNA, 25 bp, Homo sapien
tgacgtcttcgaataaattcttccg

SEQ ID NO: 3914028 - DNA, 25 bp, Homo sapien
tccgtggattccaagtaatcagctg

SEQ ID NO: 3914029 - DNA, 25 bp, Homo sapien
tctttatcatcatgacgtcttcgaa

SEQ ID NO: 3914030 - DNA, 25 bp, Homo sapien
tataaaatgtcttggcgattctgaa

SEQ ID NO: 3914031 - DNA, 25 bp, Homo sapien
caggcaaagatttcgctggaaacca

SEQ ID NO: 3914032 - DNA, 25 bp, Homo sapien
gatcaatggtcgaattctgaaggaa

SEQ ID NO: 3914033 - DNA, 25 bp, Homo sapien
ccagcttgcgaaaagagttcacctt

SEQ ID NO: 3914034 - DNA, 25 bp, Homo sapien
caacaaagtagagttaaaacaggca

SEQ ID NO: 3914035 - DNA, 25 bp, Homo sapien
cagaaaatgagcaccaagggcacag

SEQ ID NO: 3914036 - DNA, 25 bp, Homo sapien
aaaatgagcaccaagggcacagagg

SEQ ID NO: 3914037 - DNA, 25 bp, Homo sapien
aagcaaagtggagggacgggcaggt

SEQ ID NO: 3914038 - DNA, 25 bp, Homo sapien
gacgggcaggtgagactaggcaaac

SEQ ID NO: 3914039 - DNA, 25 bp, Homo sapien
gtctgagtatggcacggagtttcca

SEQ ID NO: 3914040 - DNA, 25 bp, Homo sapien
aatggcccttgggtagtcctccagg

SEQ ID NO: 3914041 - DNA, 25 bp, Homo sapien
tggtgccagttcactttgtgggttg

SEQ ID NO: 3914042 - DNA, 25 bp, Homo sapien
tgagctgcggctaagcctggccatg

SEQ ID NO: 3914043 - DNA, 25 bp, Homo sapien
gatggggctgactggggaggtctgg

SEQ ID NO: 3914044 - DNA, 25 bp, Homo sapien
tgactggggaggtctggcttctggc

SEQ ID NO: 3914045 - DNA, 25 bp, Homo sapien
gggctgactggggaggtctggcttc

SEQ ID NO: 3914046 - DNA, 25 bp, Homo sapien
gctgactggggaggtctggcttctg

SEQ ID NO: 3914047 - DNA, 25 bp, Homo sapien
acttgctgtcataatcccgtcggga

SEQ ID NO: 3914048 - DNA, 25 bp, Homo sapien
tgttcctgcaaaagagcgctgggag

SEQ ID NO: 3914049 - DNA, 25 bp, Homo sapien
ttgactcaagtagggactcggccga

SEQ ID NO: 3914050 - DNA, 25 bp, Homo sapien
gatatttgaacagcggtccacgtca

SEQ ID NO: 3914051 - DNA, 25 bp, Homo sapien
tcatgtgagcattcccacctttacg

SEQ ID NO: 3914052 - DNA, 25 bp, Homo sapien
tgagcattcccacctttacgatcca

SEQ ID NO: 3914053 - DNA, 25 bp, Homo sapien
gatgaagaaatcatgtgagcattcc

SEQ ID NO: 3914054 - DNA, 25 bp, Homo sapien
gaaatcatgtgagcattcccacctt

SEQ ID NO: 3914055 - DNA, 25 bp, Homo sapien
gctggatggtcgcttgagcccactc

SEQ ID NO: 3914056 - DNA, 25 bp, Homo sapien
gagggatgtcaccaccttccaagac

SEQ ID NO: 3914057 - DNA, 25 bp, Homo sapien
ggagccccgtctgattccctcttca

SEQ ID NO: 3914058 - DNA, 25 bp, Homo sapien
tccaagctagtgagatccccaggag

SEQ ID NO: 3914059 - DNA, 25 bp, Homo sapien
ctgcatggaagttggaagaatatat

SEQ ID NO: 3914060 - DNA, 25 bp, Homo sapien
actgtacaacaaacacgcattgctc

SEQ ID NO: 3914061 - DNA, 25 bp, Homo sapien
aaacacgcattgctcccccagtctc

SEQ ID NO: 3914062 - DNA, 25 bp, Homo sapien
catctctgtctagaaaagatctcat

SEQ ID NO: 3914063 - DNA, 25 bp, Homo sapien
atgccctccagtcatctctgtctag

SEQ ID NO: 3914064 - DNA, 25 bp, Homo sapien
cagcagggttaacacgggcagtcag

SEQ ID NO: 3914065 - DNA, 25 bp, Homo sapien
gaagccctttccgtcttgtgcagtt

SEQ ID NO: 3914066 - DNA, 25 bp, Homo sapien
tagggaattcactctgccagctgtc

SEQ ID NO: 3914067 - DNA, 25 bp, Homo sapien
gagcttagtgccttggatccagtag

SEQ ID NO: 3914068 - DNA, 25 bp, Homo sapien
agcaatgtaggtaggatatgtccca

SEQ ID NO: 3914069 - DNA, 25 bp, Homo sapien
tatgtcccagagaccacaatatctg

SEQ ID NO: 3914070 - DNA, 25 bp, Homo sapien
aggtgggaactgtcccctaaggcag

SEQ ID NO: 3914071 - DNA, 25 bp, Homo sapien
tagctagagcttttgatcactaccc

SEQ ID NO: 3914072 - DNA, 25 bp, Homo sapien
gaagaaatttccggagtagggctga

SEQ ID NO: 3914073 - DNA, 25 bp, Homo sapien
ctgaagaaatttccggagtagggct

SEQ ID NO: 3914074 - DNA, 25 bp, Homo sapien
agaaatttccggagtagggctgatg

SEQ ID NO: 3914075 - DNA, 25 bp, Homo sapien
aatttccggagtagggctgatggct

SEQ ID NO: 3914076 - DNA, 25 bp, Homo sapien
ccctctgagcccaatgcagagccct

SEQ ID NO: 3914077 - DNA, 25 bp, Homo sapien
gctttagtgacatggacagcacatc

SEQ ID NO: 3914078 - DNA, 25 bp, Homo sapien
tctgagcccaatgcagagcccttca

SEQ ID NO: 3914079 - DNA, 25 bp, Homo sapien
cgtgggccaacatgctttagtgaca

SEQ ID NO: 3914080 - DNA, 25 bp, Homo sapien
cattttgacatagctccctttaaaa

SEQ ID NO: 3914081 - DNA, 25 bp, Homo sapien
tctctctcgtataccctttaataaa

SEQ ID NO: 3914082 - DNA, 25 bp, Homo sapien
tttaataaaccacattttgacatag

SEQ ID NO: 3914083 - DNA, 25 bp, Homo sapien
ggaaacctacttaccatgatgtctt

SEQ ID NO: 3914084 - DNA, 25 bp, Homo sapien
caaacactactactctgagagcacc

SEQ ID NO: 3914085 - DNA, 25 bp, Homo sapien
cacagaaagggtacccaaagcactg

SEQ ID NO: 3914086 - DNA, 25 bp, Homo sapien
tgatctttgaggttggtatctccca

SEQ ID NO: 3914087 - DNA, 25 bp, Homo sapien
aaatgacaaacactactactctgag

SEQ ID NO: 3914088 - DNA, 25 bp, Homo sapien
tcccctttaaggaagatgccaagct

SEQ ID NO: 3914089 - DNA, 25 bp, Homo sapien
ctaaaacagtagtcagaaagccatg

SEQ ID NO: 3914090 - DNA, 25 bp, Homo sapien
aaaaggtcgcccctggaaagcagag

SEQ ID NO: 3914091 - DNA, 25 bp, Homo sapien
gtagtttcaatcagcagcctctctg

SEQ ID NO: 3914092 - DNA, 25 bp, Homo sapien
aggctgagatctttgtctagattag

SEQ ID NO: 3914093 - DNA, 25 bp, Homo sapien
gtgctttattaagcgtctccatttt

SEQ ID NO: 3914094 - DNA, 25 bp, Homo sapien
ggctgagatctttgtctagattagt

SEQ ID NO: 3914095 - DNA, 25 bp, Homo sapien
tgggtgctttattaagcgtctccat

SEQ ID NO: 3914096 - DNA, 25 bp, Homo sapien
acacacagtccaacggaggaggcac

SEQ ID NO: 3914097 - DNA, 25 bp, Homo sapien
catacggccaagatagcatgattaa

SEQ ID NO: 3914098 - DNA, 25 bp, Homo sapien
tgctacggagaactacaaaaaccta

SEQ ID NO: 3914099 - DNA, 25 bp, Homo sapien
aacacaagagctcactggaaattag

SEQ ID NO: 3914100 - DNA, 25 bp, Homo sapien
ttctatcctctctaggaaggataga

SEQ ID NO: 3914101 - DNA, 25 bp, Homo sapien
cagtctccaggagtataatcccata

SEQ ID NO: 3914102 - DNA, 25 bp, Homo sapien
ctaggaaggatagagcagtctccag

SEQ ID NO: 3914103 - DNA, 25 bp, Homo sapien
gatagagcagtctccaggagtataa

SEQ ID NO: 3914104 - DNA, 25 bp, Homo sapien
tccagcgggtggaacattcagaggt

SEQ ID NO: 3914105 - DNA, 25 bp, Homo sapien
tcttacataatgacccctagggtga

SEQ ID NO: 3914106 - DNA, 25 bp, Homo sapien
taaagacaaacatggagactggctc

SEQ ID NO: 3914107 - DNA, 25 bp, Homo sapien
tgggtgctgcctacggacacaaggc

SEQ ID NO: 3914108 - DNA, 25 bp, Homo sapien
tctcttctgggcttatatcccgact

SEQ ID NO: 3914109 - DNA, 25 bp, Homo sapien
tataccaaggttcattctttaaatc

SEQ ID NO: 3914110 - DNA, 25 bp, Homo sapien
agaatttataccaaggttcattctt

SEQ ID NO: 3914111 - DNA, 25 bp, Homo sapien
tctttaaatctatctcttctgggct

SEQ ID NO: 3914112 - DNA, 25 bp, Homo sapien
cctacacaacaagtctgaatctggg

SEQ ID NO: 3914113 - DNA, 25 bp, Homo sapien
gagcaaatgacctggtgagcacacc

SEQ ID NO: 3914114 - DNA, 25 bp, Homo sapien
tctgggcataacagcattctgcaat

SEQ ID NO: 3914115 - DNA, 25 bp, Homo sapien
ccatctatgccagttgagtagagct

SEQ ID NO: 3914116 - DNA, 25 bp, Homo sapien
tacttctgggctataacacctgagg

SEQ ID NO: 3914117 - DNA, 25 bp, Homo sapien
aaagttctggcaccttatttcatgg

SEQ ID NO: 3914118 - DNA, 25 bp, Homo sapien
tgataatcgcaaaaagagagttggg

SEQ ID NO: 3914119 - DNA, 25 bp, Homo sapien
gcacaacaaacttcactacttctgg

SEQ ID NO: 3914120 - DNA, 25 bp, Homo sapien
taaaagaatctttagcattactttc

SEQ ID NO: 3914121 - DNA, 25 bp, Homo sapien
gctgctaactttcttagtgaccttt

SEQ ID NO: 3914122 - DNA, 25 bp, Homo sapien
ttttgctacaggtagaggactatgg

SEQ ID NO: 3914123 - DNA, 25 bp, Homo sapien
aagaatctttagcattactttcact

SEQ ID NO: 3914124 - DNA, 25 bp, Homo sapien
ggaaaagggcaggtaactcaccaga

SEQ ID NO: 3914125 - DNA, 25 bp, Homo sapien
tcaaacagcgatgggtgagagcaac

SEQ ID NO: 3914126 - DNA, 25 bp, Homo sapien
tactgtggaggttaatgctgtgaca

SEQ ID NO: 3914127 - DNA, 25 bp, Homo sapien
gaatcaggaggttatgtcaaacagc

SEQ ID NO: 3914128 - DNA, 25 bp, Homo sapien
cactaagtttgcgatgacaccaagc

SEQ ID NO: 3914129 - DNA, 25 bp, Homo sapien
gtttgcgatgacaccaagctaaagc

SEQ ID NO: 3914130 - DNA, 25 bp, Homo sapien
ttccacatgacaggggggcaggccc

SEQ ID NO: 3914131 - DNA, 25 bp, Homo sapien
tcatattccacatgacaggggggca

SEQ ID NO: 3914132 - DNA, 25 bp, Homo sapien
tctgtccgtcctactacatatatgt

SEQ ID NO: 3914133 - DNA, 25 bp, Homo sapien
taatatctgtccgtcctactacata

SEQ ID NO: 3914134 - DNA, 25 bp, Homo sapien
tgtccgtcctactacatatatgtgt

SEQ ID NO: 3914135 - DNA, 25 bp, Homo sapien
cctcttttaatatctgtccgtccta

SEQ ID NO: 3914136 - DNA, 25 bp, Homo sapien
tctttgcaggagcacctgggtgcaa

SEQ ID NO: 3914137 - DNA, 25 bp, Homo sapien
tattaatatgtaatggtgggtccca

SEQ ID NO: 3914138 - DNA, 25 bp, Homo sapien
caaggagcacgactttctttgcagg

SEQ ID NO: 3914139 - DNA, 25 bp, Homo sapien
aacactcaaaggtctacagagtccc

SEQ ID NO: 3914140 - DNA, 25 bp, Homo sapien
acagcagagaacctccaaagaaggg

SEQ ID NO: 3914141 - DNA, 25 bp, Homo sapien
acctccaaagaagggcagtagtggg

SEQ ID NO: 3914142 - DNA, 25 bp, Homo sapien
ggagaaggcgaaattctgtgctcct

SEQ ID NO: 3914143 - DNA, 25 bp, Homo sapien
gtacagtatcttctaacagcagaga

SEQ ID NO: 3914144 - DNA, 25 bp, Homo sapien
tgcttgaaataactggtgcatagtg

SEQ ID NO: 3914145 - DNA, 25 bp, Homo sapien
cttgaaataactggtgcatagtgaa

SEQ ID NO: 3914146 - DNA, 25 bp, Homo sapien
gcttgaaataactggtgcatagtga

SEQ ID NO: 3914147 - DNA, 25 bp, Homo sapien
ctgcttgaaataactggtgcatagt

SEQ ID NO: 3914148 - DNA, 25 bp, Homo sapien
atgacaactctaagtatttctgtga

SEQ ID NO: 3914149 - DNA, 25 bp, Homo sapien
aactctaagtatttctgtgacctgt

SEQ ID NO: 3914150 - DNA, 25 bp, Homo sapien
caactctaagtatttctgtgacctg

SEQ ID NO: 3914151 - DNA, 25 bp, Homo sapien
gacaactctaagtatttctgtgacc

SEQ ID NO: 3914152 - DNA, 25 bp, Homo sapien
tatggagctttggagaaccccttaa

SEQ ID NO: 3914153 - DNA, 25 bp, Homo sapien
gctggaggactgcaatgtttatgga

SEQ ID NO: 3914154 - DNA, 25 bp, Homo sapien
ccgatgaggcggagggaacataatt

SEQ ID NO: 3914155 - DNA, 25 bp, Homo sapien
tcaaaacatgtagagccgatgaggc

SEQ ID NO: 3914156 - DNA, 25 bp, Homo sapien
tgggcacggtgagacaaaataactt

SEQ ID NO: 3914157 - DNA, 25 bp, Homo sapien
gcaacagagccacaataagagggtt

SEQ ID NO: 3914158 - DNA, 25 bp, Homo sapien
gaatgtaatccaactgcacaatgca

SEQ ID NO: 3914159 - DNA, 25 bp, Homo sapien
tttaaaagcagactcgcgggactta

SEQ ID NO: 3914160 - DNA, 25 bp, Homo sapien
catcttttcgttggtcagaacggaa

SEQ ID NO: 3914161 - DNA, 25 bp, Homo sapien
ttgccaggctgatattcgtaaatgc

SEQ ID NO: 3914162 - DNA, 25 bp, Homo sapien
tgggctctgcacgatattttcttgt

SEQ ID NO: 3914163 - DNA, 25 bp, Homo sapien
tattcgtaaatgctcttgggctctg

SEQ ID NO: 3914164 - DNA, 25 bp, Homo sapien
gactttggatggctgtagtgtaatc

SEQ ID NO: 3914165 - DNA, 25 bp, Homo sapien
attttcatgacaactggcattagct

SEQ ID NO: 3914166 - DNA, 25 bp, Homo sapien
cattagcttccgacacggtctgact

SEQ ID NO: 3914167 - DNA, 25 bp, Homo sapien
ttggatggctgtagtgtaatcaaag

SEQ ID NO: 3914168 - DNA, 25 bp, Homo sapien
ggtagtgtggccgacctcttgacta

SEQ ID NO: 3914169 - DNA, 25 bp, Homo sapien
caccatcaatgtagctcatctcact

SEQ ID NO: 3914170 - DNA, 25 bp, Homo sapien
tcatctcactttttgagcgaggcac

SEQ ID NO: 3914171 - DNA, 25 bp, Homo sapien
gtgtggccgacctcttgactacctt

SEQ ID NO: 3914172 - DNA, 25 bp, Homo sapien
atgagtatctgggagagtacagatc

SEQ ID NO: 3914173 - DNA, 25 bp, Homo sapien
gtatctgggagagtacagatctgaa

SEQ ID NO: 3914174 - DNA, 25 bp, Homo sapien
gggagagtacagatctgaatcatca

SEQ ID NO: 3914175 - DNA, 25 bp, Homo sapien
tctgggagagtacagatctgaatca

SEQ ID NO: 3914176 - DNA, 25 bp, Homo sapien
cagtgtacggttaagctcaccgagt

SEQ ID NO: 3914177 - DNA, 25 bp, Homo sapien
tacaccacggcagagcacgtttgag

SEQ ID NO: 3914178 - DNA, 25 bp, Homo sapien
cagaagagtgaagcgccagaagcta

SEQ ID NO: 3914179 - DNA, 25 bp, Homo sapien
tccacagtctggtacgagcatccag

SEQ ID NO: 3914180 - DNA, 25 bp, Homo sapien
cgggctgctattgggtgggaaggag

SEQ ID NO: 3914181 - DNA, 25 bp, Homo sapien
ctcgggctgctattgggtgggaagg

SEQ ID NO: 3914182 - DNA, 25 bp, Homo sapien
tcgggctgctattgggtgggaagga

SEQ ID NO: 3914183 - DNA, 25 bp, Homo sapien
gggctgctattgggtgggaaggaga

SEQ ID NO: 3914184 - DNA, 25 bp, Homo sapien
tctgcaaaggtactactcggagtga

SEQ ID NO: 3914185 - DNA, 25 bp, Homo sapien
caaactcacgcgtgtctctatggtg

SEQ ID NO: 3914186 - DNA, 25 bp, Homo sapien
gacacacattcctacgtaggctaga

SEQ ID NO: 3914187 - DNA, 25 bp, Homo sapien
gacctgaagcccttgtggaagtggc

SEQ ID NO: 3914188 - DNA, 25 bp, Homo sapien
tgggtgacatgacagagcaagactt

SEQ ID NO: 3914189 - DNA, 25 bp, Homo sapien
gtgacatgacagagcaagactttgt

SEQ ID NO: 3914190 - DNA, 25 bp, Homo sapien
ggtgacatgacagagcaagactttg

SEQ ID NO: 3914191 - DNA, 25 bp, Homo sapien
cctgggtgacatgacagagcaagac

SEQ ID NO: 3914192 - DNA, 25 bp, Homo sapien
tgggaaaacagtgtaaggagcatgt

SEQ ID NO: 3914193 - DNA, 25 bp, Homo sapien
ggtatgcagttagaaataccaagga

SEQ ID NO: 3914194 - DNA, 25 bp, Homo sapien
aaacagtgtaaggagcatgtctgca

SEQ ID NO: 3914195 - DNA, 25 bp, Homo sapien
ggatgatgggtatgcagttagaaat

SEQ ID NO: 3914196 - DNA, 25 bp, Homo sapien
ctgtaacactgcatgggatttacac

SEQ ID NO: 3914197 - DNA, 25 bp, Homo sapien
aagctgtaacactgcatgggattta

SEQ ID NO: 3914198 - DNA, 25 bp, Homo sapien
gaagctgtaacactgcatgggattt

SEQ ID NO: 3914199 - DNA, 25 bp, Homo sapien
gctgtaacactgcatgggatttaca

SEQ ID NO: 3914200 - DNA, 25 bp, Homo sapien
cagctgagctctaatgtttacacaa

SEQ ID NO: 3914201 - DNA, 25 bp, Homo sapien
tacacaatgattcttcttgggcttt

SEQ ID NO: 3914202 - DNA, 25 bp, Homo sapien
ctgtccttggtagctcgatttgggg

SEQ ID NO: 3914203 - DNA, 25 bp, Homo sapien
ttggtagctcgatttggggacagcc

SEQ ID NO: 3914204 - DNA, 25 bp, Homo sapien
agggttagaagaagactcaccgtct

SEQ ID NO: 3914205 - DNA, 25 bp, Homo sapien
caaacaaaagggcaaggacgtcagg

SEQ ID NO: 3914206 - DNA, 25 bp, Homo sapien
gatgtggcaatcaagttctaaagaa

SEQ ID NO: 3914207 - DNA, 25 bp, Homo sapien
aaaattgcctgactaaaatgggagg

SEQ ID NO: 3914208 - DNA, 25 bp, Homo sapien
gaactcctgggccgtgaaggtggaa

SEQ ID NO: 3914209 - DNA, 25 bp, Homo sapien
atcgaactcctgggccgtgaaggtg

SEQ ID NO: 3914210 - DNA, 25 bp, Homo sapien
ctcctgggccgtgaaggtggaaagg

SEQ ID NO: 3914211 - DNA, 25 bp, Homo sapien
actcctgggccgtgaaggtggaaag

SEQ ID NO: 3914212 - DNA, 25 bp, Homo sapien
tcccctgggcagtactggctggagt

SEQ ID NO: 3914213 - DNA, 25 bp, Homo sapien
taactgtcccacaggccagtcaatg

SEQ ID NO: 3914214 - DNA, 25 bp, Homo sapien
cctgggaagctctcattaggagaac

SEQ ID NO: 3914215 - DNA, 25 bp, Homo sapien
ttgcacttgctaggcggagatctcc

SEQ ID NO: 3914216 - DNA, 25 bp, Homo sapien
attcttacaaatcctgtaaggccag

SEQ ID NO: 3914217 - DNA, 25 bp, Homo sapien
tacaaatcctgtaaggccagtagag

SEQ ID NO: 3914218 - DNA, 25 bp, Homo sapien
gatcccggccaagcatcttcacaat

SEQ ID NO: 3914219 - DNA, 25 bp, Homo sapien
gcaggaggcacagatcccggccaag

SEQ ID NO: 3914220 - DNA, 25 bp, Homo sapien
ccatctgggaggtactggcttagca

SEQ ID NO: 3914221 - DNA, 25 bp, Homo sapien
agtatagcagcgttgagtaaaagcc

SEQ ID NO: 3914222 - DNA, 25 bp, Homo sapien
aaagcctgtgttaatggagccccaa

SEQ ID NO: 3914223 - DNA, 25 bp, Homo sapien
gaatgcctgcagtcagataccagag

SEQ ID NO: 3914224 - DNA, 25 bp, Homo sapien
aatgacagccacatagtcactgagg

SEQ ID NO: 3914225 - DNA, 25 bp, Homo sapien
caaaatgattaaaagtgactgcccc

SEQ ID NO: 3914226 - DNA, 25 bp, Homo sapien
gaaacttgtatgtggcaagggctca

SEQ ID NO: 3914227 - DNA, 25 bp, Homo sapien
tattaataggattaccactctgggc

SEQ ID NO: 3914228 - DNA, 25 bp, Homo sapien
taacatctgtgggtagagcctccac

SEQ ID NO: 3914229 - DNA, 25 bp, Homo sapien
gacagagatggcagcccttaggcta

SEQ ID NO: 3914230 - DNA, 25 bp, Homo sapien
tcccttactattgaggaggatcagc

SEQ ID NO: 3914231 - DNA, 25 bp, Homo sapien
tctatgcccggatatgtcatctagg

SEQ ID NO: 3914232 - DNA, 25 bp, Homo sapien
caggatttcttcaagtgggccttcc

SEQ ID NO: 3914233 - DNA, 25 bp, Homo sapien
tggctgtgcggccatgaaaccctgt

SEQ ID NO: 3914234 - DNA, 25 bp, Homo sapien
tcttccagtctgatgggagccactg

SEQ ID NO: 3914235 - DNA, 25 bp, Homo sapien
tgtgtccgtgggatactgtgccttc

SEQ ID NO: 3914236 - DNA, 25 bp, Homo sapien
catgagacagaaagactgcgctctc

SEQ ID NO: 3914237 - DNA, 25 bp, Homo sapien
caaatcgaaaattgcaactagtcaa

SEQ ID NO: 3914238 - DNA, 25 bp, Homo sapien
aactccctaactcaactcagtcagt

SEQ ID NO: 3914239 - DNA, 25 bp, Homo sapien
caccaatgcttttgtgtggtaatca

SEQ ID NO: 3914240 - DNA, 25 bp, Homo sapien
catccctaagaaagaactctggctc

SEQ ID NO: 3914241 - DNA, 25 bp, Homo sapien
ggcgttctggacacacgctctcaca

SEQ ID NO: 3914242 - DNA, 25 bp, Homo sapien
ggcccactgtgtgccggcaaggttt

SEQ ID NO: 3914243 - DNA, 25 bp, Homo sapien
tagagaagcatcaagatggtggcac

SEQ ID NO: 3914244 - DNA, 25 bp, Homo sapien
taggtgggagtgtaaggattgtcct

SEQ ID NO: 3914245 - DNA, 25 bp, Homo sapien
ttaggactaggagtagatgcaggaa

SEQ ID NO: 3914246 - DNA, 25 bp, Homo sapien
gatgcaggaaactggtaggtgggag

SEQ ID NO: 3914247 - DNA, 25 bp, Homo sapien
cttcagatttaggactaggagtaga

SEQ ID NO: 3914248 - DNA, 25 bp, Homo sapien
taaagctcggacaacagatatgctg

SEQ ID NO: 3914249 - DNA, 25 bp, Homo sapien
taaaagcccaaatcttatgcctaca

SEQ ID NO: 3914250 - DNA, 25 bp, Homo sapien
catagcacatcatgcaaatgagtga

SEQ ID NO: 3914251 - DNA, 25 bp, Homo sapien
tgcctacaatggaactataagaatt

SEQ ID NO: 3914252 - DNA, 25 bp, Homo sapien
tttgctggatttcaggaagttcagg

SEQ ID NO: 3914253 - DNA, 25 bp, Homo sapien
ttgctggatttcaggaagttcaggg

SEQ ID NO: 3914254 - DNA, 25 bp, Homo sapien
tgctggatttcaggaagttcaggga

SEQ ID NO: 3914255 - DNA, 25 bp, Homo sapien
gaatagaggaagatacaaatggaga

SEQ ID NO: 3914256 - DNA, 25 bp, Homo sapien
agaatagaggaagatacaaatggag

SEQ ID NO: 3914257 - DNA, 25 bp, Homo sapien
gagaatagaggaagatacaaatgga

SEQ ID NO: 3914258 - DNA, 25 bp, Homo sapien
gcctgaattaccgagacacatagaa

SEQ ID NO: 3914259 - DNA, 25 bp, Homo sapien
caaagcttgtattgtggacattcag

SEQ ID NO: 3914260 - DNA, 25 bp, Homo sapien
tgagaacaccaaagctgcctgtggg

SEQ ID NO: 3914261 - DNA, 25 bp, Homo sapien
caaagaattgccatgaacaggctcc

SEQ ID NO: 3914262 - DNA, 25 bp, Homo sapien
gccagactggatgtgggtaagggga

SEQ ID NO: 3914263 - DNA, 25 bp, Homo sapien
tcatccatgacaggcagccagactg

SEQ ID NO: 3914264 - DNA, 25 bp, Homo sapien
gcaggatgctctgcctgtgggagaa

SEQ ID NO: 3914265 - DNA, 25 bp, Homo sapien
ggcaggatgctctgcctgtgggaga

SEQ ID NO: 3914266 - DNA, 25 bp, Homo sapien
gcctatcagctgactggcggcacag

SEQ ID NO: 3914267 - DNA, 25 bp, Homo sapien
gactctcagggctacctgccaaggg

SEQ ID NO: 3914268 - DNA, 25 bp, Homo sapien
tactatgcattctacttcacaaggc

SEQ ID NO: 3914269 - DNA, 25 bp, Homo sapien
tcgtattaacacagcctgagaggcg

SEQ ID NO: 3914270 - DNA, 25 bp, Homo sapien
ctctgttcagtttgtggatctgttt

SEQ ID NO: 3914271 - DNA, 25 bp, Homo sapien
tagtcttgtaccagtcttttgatct

SEQ ID NO: 3914272 - DNA, 25 bp, Homo sapien
gtggatctgtttaaacatagtcttg

SEQ ID NO: 3914273 - DNA, 25 bp, Homo sapien
catagtcttgtaccagtcttttgat

SEQ ID NO: 3914274 - DNA, 25 bp, Homo sapien
catccatggaaacatcgcttaagtc

SEQ ID NO: 3914275 - DNA, 25 bp, Homo sapien
ttgctcttttttcaatagccttgcc

SEQ ID NO: 3914276 - DNA, 25 bp, Homo sapien
taagtcctgagtgctcttcaccacc

SEQ ID NO: 3914277 - DNA, 25 bp, Homo sapien
gtgggatgcccacttcatccatgga

SEQ ID NO: 3914278 - DNA, 25 bp, Homo sapien
aaaagcaattgttagctgaagctct

SEQ ID NO: 3914279 - DNA, 25 bp, Homo sapien
aagcaattgttagctgaagctcttt

SEQ ID NO: 3914280 - DNA, 25 bp, Homo sapien
ttgttagctgaagctcttttggtag

SEQ ID NO: 3914281 - DNA, 25 bp, Homo sapien
caattgttagctgaagctcttttgg

SEQ ID NO: 3914282 - DNA, 25 bp, Homo sapien
gttctgggccactaaataaatgaca

SEQ ID NO: 3914283 - DNA, 25 bp, Homo sapien
tgcagaagaacgatggcctctctac

SEQ ID NO: 3914284 - DNA, 25 bp, Homo sapien
gaggtacctgagaacaccatgtagg

SEQ ID NO: 3914285 - DNA, 25 bp, Homo sapien
catcaagcctcatggagactcaaca

SEQ ID NO: 3914286 - DNA, 25 bp, Homo sapien
ctgaaaggctactgagtcgtttttg

SEQ ID NO: 3914287 - DNA, 25 bp, Homo sapien
tgaaaggctactgagtcgtttttgc

SEQ ID NO: 3914288 - DNA, 25 bp, Homo sapien
tcagcaatggccgagaaacttcaga

SEQ ID NO: 3914289 - DNA, 25 bp, Homo sapien
aatagaacatttgccaacccgtggg

SEQ ID NO: 3914290 - DNA, 25 bp, Homo sapien
accatcctgggcactcatgtggaag

SEQ ID NO: 3914291 - DNA, 25 bp, Homo sapien
actatagtaatctggcttgtccgga

SEQ ID NO: 3914292 - DNA, 25 bp, Homo sapien
aggaagacgtgagctctgaacaaaa

SEQ ID NO: 3914293 - DNA, 25 bp, Homo sapien
tgggcaaggagagccactgccagta

SEQ ID NO: 3914294 - DNA, 25 bp, Homo sapien
gaatgggctcctgcatggttccgtg

SEQ ID NO: 3914295 - DNA, 25 bp, Homo sapien
cattacagacactttctgggcaagg

SEQ ID NO: 3914296 - DNA, 25 bp, Homo sapien
aaaccaaccagaagcagtcagagac

SEQ ID NO: 3914297 - DNA, 25 bp, Homo sapien
gaatttctgacccaagtatcatgga

SEQ ID NO: 3914298 - DNA, 25 bp, Homo sapien
tagagccacatagtacagagacaaa

SEQ ID NO: 3914299 - DNA, 25 bp, Homo sapien
gaaaactctaagcagagctgcctag

SEQ ID NO: 3914300 - DNA, 25 bp, Homo sapien
ggaaaggcttgggaatcagttccaa

SEQ ID NO: 3914301 - DNA, 25 bp, Homo sapien
gataggcggatgaaggcttgctaac

SEQ ID NO: 3914302 - DNA, 25 bp, Homo sapien
gtgttgcaagagcacaatagtagga

SEQ ID NO: 3914303 - DNA, 25 bp, Homo sapien
gattgacaatcgttgtggagggata

SEQ ID NO: 3914304 - DNA, 25 bp, Homo sapien
ccctaagacttgtgagaatcctgac

SEQ ID NO: 3914305 - DNA, 25 bp, Homo sapien
gagattatcctatcctactgtgaca

SEQ ID NO: 3914306 - DNA, 25 bp, Homo sapien
taaagtgacaaagatccctaagact

SEQ ID NO: 3914307 - DNA, 25 bp, Homo sapien
caaatgcgatccaagaacaagagct

SEQ ID NO: 3914308 - DNA, 25 bp, Homo sapien
tatgtcaagctccataacaggaact

SEQ ID NO: 3914309 - DNA, 25 bp, Homo sapien
gaacccgaagccctgtgagtagatt

SEQ ID NO: 3914310 - DNA, 25 bp, Homo sapien
tttacactcgatcctactgaacccg

SEQ ID NO: 3914311 - DNA, 25 bp, Homo sapien
tgagtagattcacgtattcccatat

SEQ ID NO: 3914312 - DNA, 25 bp, Homo sapien
gagacccaagcactttgactcagct

SEQ ID NO: 3914313 - DNA, 25 bp, Homo sapien
cactttgactcagctttttctctaa

SEQ ID NO: 3914314 - DNA, 25 bp, Homo sapien
aaaaggagacccaagcactttgact

SEQ ID NO: 3914315 - DNA, 25 bp, Homo sapien
gacccaagcactttgactcagcttt

SEQ ID NO: 3914316 - DNA, 25 bp, Homo sapien
agacacacgggaagcatgcacgcta

SEQ ID NO: 3914317 - DNA, 25 bp, Homo sapien
gaatcagagaatcgcttcctccccg

SEQ ID NO: 3914318 - DNA, 25 bp, Homo sapien
gacctggcctgtgaaaagcatggcc

SEQ ID NO: 3914319 - DNA, 25 bp, Homo sapien
gacattcagaaaagccgtgaggagg

SEQ ID NO: 3914320 - DNA, 25 bp, Homo sapien
gtactcgaaacagctcccgtgaggt

SEQ ID NO: 3914321 - DNA, 25 bp, Homo sapien
gagaaggatggtggcgtctggctaa

SEQ ID NO: 3914322 - DNA, 25 bp, Homo sapien
gcaaaggagccagaggcgcgggctg

SEQ ID NO: 3914323 - DNA, 25 bp, Homo sapien
aggtcaggctccgagactctgcgga

SEQ ID NO: 3914324 - DNA, 25 bp, Homo sapien
cctctgtcagtattaaccaggtaga

SEQ ID NO: 3914325 - DNA, 25 bp, Homo sapien
aatcatctagagtcgggaaggtcag

SEQ ID NO: 3914326 - DNA, 25 bp, Homo sapien
cggcagaggcagtcgctgggattgt

SEQ ID NO: 3914327 - DNA, 25 bp, Homo sapien
caagaggccccagaggtgttggagg

SEQ ID NO: 3914328 - DNA, 25 bp, Homo sapien
ccggctgggctgcactggaggaagt

SEQ ID NO: 3914329 - DNA, 25 bp, Homo sapien
tccggctgggctgcactggaggaag

SEQ ID NO: 3914330 - DNA, 25 bp, Homo sapien
ctccggctgggctgcactggaggaa

SEQ ID NO: 3914331 - DNA, 25 bp, Homo sapien
ctgtggaaataagggggtcgttatg

SEQ ID NO: 3914332 - DNA, 25 bp, Homo sapien
gtcgttatggaaaggggtatgatac

SEQ ID NO: 3914333 - DNA, 25 bp, Homo sapien
ggggtatgatacgaggaaagaattc

SEQ ID NO: 3914334 - DNA, 25 bp, Homo sapien
ggtatgatacgaggaaagaattcca

SEQ ID NO: 3914335 - DNA, 25 bp, Homo sapien
tttgctcttccggttttcgggatca

SEQ ID NO: 3914336 - DNA, 25 bp, Homo sapien
cttggctggataactcggctgcaaa

SEQ ID NO: 3914337 - DNA, 25 bp, Homo sapien
aactcggctgcaaaaggtaagattc

SEQ ID NO: 3914338 - DNA, 25 bp, Homo sapien
ctcttccggttttcgggatcagagg

SEQ ID NO: 3914339 - DNA, 25 bp, Homo sapien
taaacaaggtacatataagctgctg

SEQ ID NO: 3914340 - DNA, 25 bp, Homo sapien
cacggttaacggcatctttacggat

SEQ ID NO: 3914341 - DNA, 25 bp, Homo sapien
cgtggagtccggaagcaaggaacca

SEQ ID NO: 3914342 - DNA, 25 bp, Homo sapien
agaggagttttctgacgccgccagg

SEQ ID NO: 3914343 - DNA, 25 bp, Homo sapien
gaggagggcgtgggggagagagaac

SEQ ID NO: 3914344 - DNA, 25 bp, Homo sapien
gggagaggagggcgtgggggagaga

SEQ ID NO: 3914345 - DNA, 25 bp, Homo sapien
gagaggagggcgtgggggagagaga

SEQ ID NO: 3914346 - DNA, 25 bp, Homo sapien
cttttgagggagaggagggcgtggg

SEQ ID NO: 3914347 - DNA, 25 bp, Homo sapien
caatatcggtaagtgaattttgacc

SEQ ID NO: 3914348 - DNA, 25 bp, Homo sapien
atcccagttctagaagaaaaccaga

SEQ ID NO: 3914349 - DNA, 25 bp, Homo sapien
tcctccaaattacgcaagtgaagta

SEQ ID NO: 3914350 - DNA, 25 bp, Homo sapien
tacaggcgtgaatggctcctatttt

SEQ ID NO: 3914351 - DNA, 25 bp, Homo sapien
ggttgggcactgtggtttaagcctg

SEQ ID NO: 3914352 - DNA, 25 bp, Homo sapien
gattatacataggtgcctgccatca

SEQ ID NO: 3914353 - DNA, 25 bp, Homo sapien
tagcccttggcagcgagtgaagagg

SEQ ID NO: 3914354 - DNA, 25 bp, Homo sapien
gtagcccttggcagcgagtgaagag

SEQ ID NO: 3914355 - DNA, 25 bp, Homo sapien
cactcacagggaataactccctggt

SEQ ID NO: 3914356 - DNA, 25 bp, Homo sapien
tgctgaagaaggctctggctccaga

SEQ ID NO: 3914357 - DNA, 25 bp, Homo sapien
gctgaagaaggctctggctccagac

SEQ ID NO: 3914358 - DNA, 25 bp, Homo sapien
ctgctgaagaaggctctggctccag

SEQ ID NO: 3914359 - DNA, 25 bp, Homo sapien
gactgcaggtccaagaatctttatg

SEQ ID NO: 3914360 - DNA, 25 bp, Homo sapien
caaatgtgagagtcaaaaccagagg

SEQ ID NO: 3914361 - DNA, 25 bp, Homo sapien
caatgttaaccttcttatggtacct

SEQ ID NO: 3914362 - DNA, 25 bp, Homo sapien
aaaccagaggaaataattggactgc

SEQ ID NO: 3914363 - DNA, 25 bp, Homo sapien
cataccgcaaagacagtaagtggca

SEQ ID NO: 3914364 - DNA, 25 bp, Homo sapien
ggccccaggataggacaatagactg

SEQ ID NO: 3914365 - DNA, 25 bp, Homo sapien
gacgccatctgacattagctatctg

SEQ ID NO: 3914366 - DNA, 25 bp, Homo sapien
gacaaatgctgtccctggtgagaag

SEQ ID NO: 3914367 - DNA, 25 bp, Homo sapien
cccacgtggctttgaacagctttcc

SEQ ID NO: 3914368 - DNA, 25 bp, Homo sapien
agcaaaaacaccagagcctcctccc

SEQ ID NO: 3914369 - DNA, 25 bp, Homo sapien
ttcccacgtggctttgaacagcttt

SEQ ID NO: 3914370 - DNA, 25 bp, Homo sapien
ctcccgcccttcccacgtggctttg

SEQ ID NO: 3914371 - DNA, 25 bp, Homo sapien
ggcccggagagtcaccgctcccttc

SEQ ID NO: 3914372 - DNA, 25 bp, Homo sapien
gaggcccggagagtcaccgctccct

SEQ ID NO: 3914373 - DNA, 25 bp, Homo sapien
ctggtttgctttcgtgttgccgggt

SEQ ID NO: 3914374 - DNA, 25 bp, Homo sapien
tcgtgttgccgggtttcctgagggc

SEQ ID NO: 3914375 - DNA, 25 bp, Homo sapien
ggtccaaaattgaagactgaatcca

SEQ ID NO: 3914376 - DNA, 25 bp, Homo sapien
tccaaaattgaagactgaatccaag

SEQ ID NO: 3914377 - DNA, 25 bp, Homo sapien
aaattgaagactgaatccaagactc

SEQ ID NO: 3914378 - DNA, 25 bp, Homo sapien
gaaaaggtccaaaattgaagactga

SEQ ID NO: 3914379 - DNA, 25 bp, Homo sapien
ctgaaagcgccattggataaagtac

SEQ ID NO: 3914380 - DNA, 25 bp, Homo sapien
cgatgagccagagctgacatctgaa

SEQ ID NO: 3914381 - DNA, 25 bp, Homo sapien
ccactttgtacagaaggaagcgatg

SEQ ID NO: 3914382 - DNA, 25 bp, Homo sapien
gataaagtactgtgtaggcctcatg

SEQ ID NO: 3914383 - DNA, 25 bp, Homo sapien
ccatcccaaagggaaagctgagcct

SEQ ID NO: 3914384 - DNA, 25 bp, Homo sapien
cacatacacagaggaagtaaggaag

SEQ ID NO: 3914385 - DNA, 25 bp, Homo sapien
attcacatacacagaggaagtaagg

SEQ ID NO: 3914386 - DNA, 25 bp, Homo sapien
tcaggaaaacgcacacagacattca

SEQ ID NO: 3914387 - DNA, 25 bp, Homo sapien
tacacagaggaagtaaggaagcaag

SEQ ID NO: 3914388 - DNA, 25 bp, Homo sapien
agagaaaatcgaccgacccaaggag

SEQ ID NO: 3914389 - DNA, 25 bp, Homo sapien
gaaaatcgaccgacccaaggagata

SEQ ID NO: 3914390 - DNA, 25 bp, Homo sapien
agaaaatcgaccgacccaaggagat

SEQ ID NO: 3914391 - DNA, 25 bp, Homo sapien
tagagaaaatcgaccgacccaagga

SEQ ID NO: 3914392 - DNA, 25 bp, Homo sapien
gagaactaggcctgaggcgtttttc

SEQ ID NO: 3914393 - DNA, 25 bp, Homo sapien
cgtgcgcgtaaagggtcggcagttg

SEQ ID NO: 3914394 - DNA, 25 bp, Homo sapien
aacagcagaaatagagcgtgcgcgt

SEQ ID NO: 3914395 - DNA, 25 bp, Homo sapien
ggcctgaggcgtttttcactgtctt

SEQ ID NO: 3914396 - DNA, 25 bp, Homo sapien
aagggtaaatggtgcatccagaaag

SEQ ID NO: 3914397 - DNA, 25 bp, Homo sapien
aaagggtaaatggtgcatccagaaa

SEQ ID NO: 3914398 - DNA, 25 bp, Homo sapien
gatgagtggaagaacgaaggaacaa

SEQ ID NO: 3914399 - DNA, 25 bp, Homo sapien
caagatcgtgagttgtctggtccct

SEQ ID NO: 3914400 - DNA, 25 bp, Homo sapien
gggtcttgtgcctgctccgataatt

SEQ ID NO: 3914401 - DNA, 25 bp, Homo sapien
tccgataattgtagccctctggccc

SEQ ID NO: 3914402 - DNA, 25 bp, Homo sapien
acggcagatggccttgctcaaaccc

SEQ ID NO: 3914403 - DNA, 25 bp, Homo sapien
ctgttaaacggcagatggccttgct

SEQ ID NO: 3914404 - DNA, 25 bp, Homo sapien
ggcagatggccttgctcaaacccac

SEQ ID NO: 3914405 - DNA, 25 bp, Homo sapien
taaacggcagatggccttgctcaaa

SEQ ID NO: 3914406 - DNA, 25 bp, Homo sapien
caaacttatctatctgcagggtctc

SEQ ID NO: 3914407 - DNA, 25 bp, Homo sapien
tggtgaaggctaccgctcgaacatc

SEQ ID NO: 3914408 - DNA, 25 bp, Homo sapien
caagtgtccaagtgcatatgtagtc

SEQ ID NO: 3914409 - DNA, 25 bp, Homo sapien
ttctgtaatctcatggtaggcacgt

SEQ ID NO: 3914410 - DNA, 25 bp, Homo sapien
gactgtggccacagatctacagaaa

SEQ ID NO: 3914411 - DNA, 25 bp, Homo sapien
gtgtgaaggtgccagagtcgactgt

SEQ ID NO: 3914412 - DNA, 25 bp, Homo sapien
cagcacataaagagggatgggagct

SEQ ID NO: 3914413 - DNA, 25 bp, Homo sapien
cacataaagagggatgggagctctg

SEQ ID NO: 3914414 - DNA, 25 bp, Homo sapien
cactgcaaagtcagcatcgtgctgg

SEQ ID NO: 3914415 - DNA, 25 bp, Homo sapien
gcaaagtcagcatcgtgctggtgag

SEQ ID NO: 3914416 - DNA, 25 bp, Homo sapien
ctgggaacaagaccgccactgcaaa

SEQ ID NO: 3914417 - DNA, 25 bp, Homo sapien
gaacaagaccgccactgcaaagtca

SEQ ID NO: 3914418 - DNA, 25 bp, Homo sapien
taggttgccaatgacgctgctgcat

SEQ ID NO: 3914419 - DNA, 25 bp, Homo sapien
ggattaagacacaaatgtgctctca

SEQ ID NO: 3914420 - DNA, 25 bp, Homo sapien
cctggccatcaatgactaggttgcc

SEQ ID NO: 3914421 - DNA, 25 bp, Homo sapien
gtcacacggcgcctggccatcaatg

SEQ ID NO: 3914422 - DNA, 25 bp, Homo sapien
aatgccttccagtaccaatccagat

SEQ ID NO: 3914423 - DNA, 25 bp, Homo sapien
gccttccagtaccaatccagatttc

SEQ ID NO: 3914424 - DNA, 25 bp, Homo sapien
aaatgccttccagtaccaatccaga

SEQ ID NO: 3914425 - DNA, 25 bp, Homo sapien
ttccagtaccaatccagatttctct

SEQ ID NO: 3914426 - DNA, 25 bp, Homo sapien
caagccattcatcacagctttggaa

SEQ ID NO: 3914427 - DNA, 25 bp, Homo sapien
ctttgtcttgcccattgctgccagg

SEQ ID NO: 3914428 - DNA, 25 bp, Homo sapien
cattgctgccaggtgccaagccatt

SEQ ID NO: 3914429 - DNA, 25 bp, Homo sapien
acagctttggaaccaccatcacatt

SEQ ID NO: 3914430 - DNA, 25 bp, Homo sapien
aaaccacactgacaggccagtctgg

SEQ ID NO: 3914431 - DNA, 25 bp, Homo sapien
taaaccacactgacaggccagtctg

SEQ ID NO: 3914432 - DNA, 25 bp, Homo sapien
tccaaaaggggggtcgcctgctata

SEQ ID NO: 3914433 - DNA, 25 bp, Homo sapien
acctggtgcctgggcttccgcatgc

SEQ ID NO: 3914434 - DNA, 25 bp, Homo sapien
cacctataggtgaaggctaattctc

SEQ ID NO: 3914435 - DNA, 25 bp, Homo sapien
cacacccacctataggtgaaggcta

SEQ ID NO: 3914436 - DNA, 25 bp, Homo sapien
gtgaaggctaattctcctagatgtc

SEQ ID NO: 3914437 - DNA, 25 bp, Homo sapien
gtgctggtgagaaggccagaaatcc

SEQ ID NO: 3914438 - DNA, 25 bp, Homo sapien
tggtgagaaggccagaaatccaagt

SEQ ID NO: 3914439 - DNA, 25 bp, Homo sapien
ctgagatgggtggaagaagggtgct

SEQ ID NO: 3914440 - DNA, 25 bp, Homo sapien
gtgagaaggccagaaatccaagtac

SEQ ID NO: 3914441 - DNA, 25 bp, Homo sapien
ccaggctagtgtggggcagcctctg

SEQ ID NO: 3914442 - DNA, 25 bp, Homo sapien
cttctgtgactgtaggccttgctcc

SEQ ID NO: 3914443 - DNA, 25 bp, Homo sapien
ctgtgactgtaggccttgctccagg

SEQ ID NO: 3914444 - DNA, 25 bp, Homo sapien
caggctagtgtggggcagcctctga

SEQ ID NO: 3914445 - DNA, 25 bp, Homo sapien
ggtggtggcaggacaagtcgtctgc

SEQ ID NO: 3914446 - DNA, 25 bp, Homo sapien
tggcaggacaagtcgtctgcaactg

SEQ ID NO: 3914447 - DNA, 25 bp, Homo sapien
gcaggacaagtcgtctgcaactggg

SEQ ID NO: 3914448 - DNA, 25 bp, Homo sapien
tcgtctgcaactggggctctgaact

SEQ ID NO: 3914449 - DNA, 25 bp, Homo sapien
gagcagacaccagttgtagcactct

SEQ ID NO: 3914450 - DNA, 25 bp, Homo sapien
gcgggtagccctttgcacatttcac

SEQ ID NO: 3914451 - DNA, 25 bp, Homo sapien
taatcaccgtcatatgcgggtagcc

SEQ ID NO: 3914452 - DNA, 25 bp, Homo sapien
tagacacagtcagggataatcttca

SEQ ID NO: 3914453 - DNA, 25 bp, Homo sapien
gttttgatccctattaaaagtcatg

SEQ ID NO: 3914454 - DNA, 25 bp, Homo sapien
ttgatccctattaaaagtcatgaag

SEQ ID NO: 3914455 - DNA, 25 bp, Homo sapien
tggttttgatccctattaaaagtca

SEQ ID NO: 3914456 - DNA, 25 bp, Homo sapien
tgatccctattaaaagtcatgaaga

SEQ ID NO: 3914457 - DNA, 25 bp, Homo sapien
cacctcgtatccctgtgctttagga

SEQ ID NO: 3914458 - DNA, 25 bp, Homo sapien
tagatacgtgaagaaatgattccca

SEQ ID NO: 3914459 - DNA, 25 bp, Homo sapien
tacacaccaagagctatgcacctcg

SEQ ID NO: 3914460 - DNA, 25 bp, Homo sapien
cagcagggtataagtctgtgtgaca

SEQ ID NO: 3914461 - DNA, 25 bp, Homo sapien
gcggattacaagttctgcagccaga

SEQ ID NO: 3914462 - DNA, 25 bp, Homo sapien
ggcaacaccaagtattaaacgctga

SEQ ID NO: 3914463 - DNA, 25 bp, Homo sapien
cactgtatgtactagagggcctcaa

SEQ ID NO: 3914464 - DNA, 25 bp, Homo sapien
tctggcacagggtttccgagtgaga

SEQ ID NO: 3914465 - DNA, 25 bp, Homo sapien
taatttatgagatgtctgaggcatg

SEQ ID NO: 3914466 - DNA, 25 bp, Homo sapien
caccctgaggcgctattgagcaaag

SEQ ID NO: 3914467 - DNA, 25 bp, Homo sapien
cacgttgttcaaactaacatatggc

SEQ ID NO: 3914468 - DNA, 25 bp, Homo sapien
gacagcctctaacatgggttcagaa

SEQ ID NO: 3914469 - DNA, 25 bp, Homo sapien
tgagcattaaaagccgccccaaatt

SEQ ID NO: 3914470 - DNA, 25 bp, Homo sapien
ccataagaagtattctaattgagca

SEQ ID NO: 3914471 - DNA, 25 bp, Homo sapien
ctttgggcttaagagaaactgagca

SEQ ID NO: 3914472 - DNA, 25 bp, Homo sapien
ttttcaaaggcaggtcttgtgcaga

SEQ ID NO: 3914473 - DNA, 25 bp, Homo sapien
tgttaggctaaagagacttcactgg

SEQ ID NO: 3914474 - DNA, 25 bp, Homo sapien
taaaaactggtagttcagcagcccc

SEQ ID NO: 3914475 - DNA, 25 bp, Homo sapien
ccatcttctaacaaaggtgttaggc

SEQ ID NO: 3914476 - DNA, 25 bp, Homo sapien
ttcactggaacagcacggcccagat

SEQ ID NO: 3914477 - DNA, 25 bp, Homo sapien
ccagaaagattttctaggatggatg

SEQ ID NO: 3914478 - DNA, 25 bp, Homo sapien
atggttcccacttcctccagaaaga

SEQ ID NO: 3914479 - DNA, 25 bp, Homo sapien
aaagattttctaggatggatggatc

SEQ ID NO: 3914480 - DNA, 25 bp, Homo sapien
tggttcccacttcctccagaaagat

SEQ ID NO: 3914481 - DNA, 25 bp, Homo sapien
taaaccaaggaccactaaatctgca

SEQ ID NO: 3914482 - DNA, 25 bp, Homo sapien
gaaacagtttcttgacatcgcctct

SEQ ID NO: 3914483 - DNA, 25 bp, Homo sapien
aaaatagttctcatgcaagtgcctt

SEQ ID NO: 3914484 - DNA, 25 bp, Homo sapien
ttggaggagttagcaaaggtcttcc

SEQ ID NO: 3914485 - DNA, 25 bp, Homo sapien
tacagaatttcctctcagtgcggca

SEQ ID NO: 3914486 - DNA, 25 bp, Homo sapien
ctggcagccatgagaaataaacgat

SEQ ID NO: 3914487 - DNA, 25 bp, Homo sapien
cagtgcggcaagttcaggataatac

SEQ ID NO: 3914488 - DNA, 25 bp, Homo sapien
ctttcgtgtttattactggcagcca

SEQ ID NO: 3914489 - DNA, 25 bp, Homo sapien
cccattctagaatgctgctgatcac

SEQ ID NO: 3914490 - DNA, 25 bp, Homo sapien
gctggggagtcttgaaatacatgta

SEQ ID NO: 3914491 - DNA, 25 bp, Homo sapien
ccagaccccattctagaatgctgct

SEQ ID NO: 3914492 - DNA, 25 bp, Homo sapien
caagctggggagtcttgaaatacat

SEQ ID NO: 3914493 - DNA, 25 bp, Homo sapien
aaggtggtgggaagatgcattggtc

SEQ ID NO: 3914494 - DNA, 25 bp, Homo sapien
gggaagatgcattggtccaggagct

SEQ ID NO: 3914495 - DNA, 25 bp, Homo sapien
tggtgggaagatgcattggtccagg

SEQ ID NO: 3914496 - DNA, 25 bp, Homo sapien
ggtggtgggaagatgcattggtcca

SEQ ID NO: 3914497 - DNA, 25 bp, Homo sapien
gaactcttccaaaggatgccaactc

SEQ ID NO: 3914498 - DNA, 25 bp, Homo sapien
tcacgaactcttccaaaggatgcca

SEQ ID NO: 3914499 - DNA, 25 bp, Homo sapien
cacgaactcttccaaaggatgccaa

SEQ ID NO: 3914500 - DNA, 25 bp, Homo sapien
cgaactcttccaaaggatgccaact

SEQ ID NO: 3914501 - DNA, 25 bp, Homo sapien
tccagcctgggcgacagagtgagac

SEQ ID NO: 3914502 - DNA, 25 bp, Homo sapien
ttgaaccagggaagcagactttgca

SEQ ID NO: 3914503 - DNA, 25 bp, Homo sapien
gtgagccaagatcacgccgctgcac

SEQ ID NO: 3914504 - DNA, 25 bp, Homo sapien
cgcttgaaccagggaagcagacttt

SEQ ID NO: 3914505 - DNA, 25 bp, Homo sapien
gatctgagccttcatacacctgtgt

SEQ ID NO: 3914506 - DNA, 25 bp, Homo sapien
cagcagatctgagccttcatacacc

SEQ ID NO: 3914507 - DNA, 25 bp, Homo sapien
gagccttcatacacctgtgtgggtt

SEQ ID NO: 3914508 - DNA, 25 bp, Homo sapien
tctgagccttcatacacctgtgtgg

SEQ ID NO: 3914509 - DNA, 25 bp, Homo sapien
gagccctctggtttccttcaaaata

SEQ ID NO: 3914510 - DNA, 25 bp, Homo sapien
cttggagccctctggtttccttcaa

SEQ ID NO: 3914511 - DNA, 25 bp, Homo sapien
ttcaaaatacacctcaaatttcatg

SEQ ID NO: 3914512 - DNA, 25 bp, Homo sapien
aaatacacctcaaatttcatgccac

SEQ ID NO: 3914513 - DNA, 25 bp, Homo sapien
gctgctttccgagctcacgacatac

SEQ ID NO: 3914514 - DNA, 25 bp, Homo sapien
ttccgagctcacgacatactctctt

SEQ ID NO: 3914515 - DNA, 25 bp, Homo sapien
tgttccagatccaaggcccaagctg

SEQ ID NO: 3914516 - DNA, 25 bp, Homo sapien
cccaagctgctttccgagctcacga

SEQ ID NO: 3914517 - DNA, 25 bp, Homo sapien
ggcagtccaggggagaaaatgccca

SEQ ID NO: 3914518 - DNA, 25 bp, Homo sapien
aggcagtccaggggagaaaatgccc

SEQ ID NO: 3914519 - DNA, 25 bp, Homo sapien
tgaaccccactgaagcttcctgggt

SEQ ID NO: 3914520 - DNA, 25 bp, Homo sapien
gctcaatgatgaggtcgctcccact

SEQ ID NO: 3914521 - DNA, 25 bp, Homo sapien
atgatgaggtcgctcccacttccca

SEQ ID NO: 3914522 - DNA, 25 bp, Homo sapien
tgccaacatctctaggacctgaacc

SEQ ID NO: 3914523 - DNA, 25 bp, Homo sapien
aggaagatgaatcctcaagagcttt

SEQ ID NO: 3914524 - DNA, 25 bp, Homo sapien
ttttaaagctcttccacctactcca

SEQ ID NO: 3914525 - DNA, 25 bp, Homo sapien
ggcaaaggaagatgaatcctcaaga

SEQ ID NO: 3914526 - DNA, 25 bp, Homo sapien
aaaggaagatgaatcctcaagagct

SEQ ID NO: 3914527 - DNA, 25 bp, Homo sapien
ggagggagaatgaatgtttccaagt

SEQ ID NO: 3914528 - DNA, 25 bp, Homo sapien
taggagggagaatgaatgtttccaa

SEQ ID NO: 3914529 - DNA, 25 bp, Homo sapien
agtaggagggagaatgaatgtttcc

SEQ ID NO: 3914530 - DNA, 25 bp, Homo sapien
ctgattcagtaggagggagaatgaa

SEQ ID NO: 3914531 - DNA, 25 bp, Homo sapien
ggttttgatgtcatactatacctac

SEQ ID NO: 3914532 - DNA, 25 bp, Homo sapien
cttgattatggtggtcattatacaa

SEQ ID NO: 3914533 - DNA, 25 bp, Homo sapien
ctgaataagactgtagcattgtcaa

SEQ ID NO: 3914534 - DNA, 25 bp, Homo sapien
gcctcaaaggttttcttgattatgg

SEQ ID NO: 3914535 - DNA, 25 bp, Homo sapien
aacacagggcctcaaggataacaac

SEQ ID NO: 3914536 - DNA, 25 bp, Homo sapien
tggagccgggtagtagctgctgccc

SEQ ID NO: 3914537 - DNA, 25 bp, Homo sapien
tggccaaggctctccgattcatctc

SEQ ID NO: 3914538 - DNA, 25 bp, Homo sapien
caaggataacaactggatggagccg

SEQ ID NO: 3914539 - DNA, 25 bp, Homo sapien
gcaaatggctgctttcctgagatct

SEQ ID NO: 3914540 - DNA, 25 bp, Homo sapien
ttgagacaccaggaactggtcacag

SEQ ID NO: 3914541 - DNA, 25 bp, Homo sapien
acaggccttttcccagcaaatggct

SEQ ID NO: 3914542 - DNA, 25 bp, Homo sapien
ggctgctttcctgagatctttcaaa

SEQ ID NO: 3914543 - DNA, 25 bp, Homo sapien
cagggaatcaccatctgccctgggc

SEQ ID NO: 3914544 - DNA, 25 bp, Homo sapien
aagactgcgatgcttatttacttac

SEQ ID NO: 3914545 - DNA, 25 bp, Homo sapien
aataagtaaataagactgcgatgct

SEQ ID NO: 3914546 - DNA, 25 bp, Homo sapien
tggccactgggctaaaaagaccttg

SEQ ID NO: 3914547 - DNA, 25 bp, Homo sapien
ctgaacattctgagtgtcagtcttc

SEQ ID NO: 3914548 - DNA, 25 bp, Homo sapien
tctggatgttactcttccgcagaag

SEQ ID NO: 3914549 - DNA, 25 bp, Homo sapien
tttctgcctttgactggtactcttg

SEQ ID NO: 3914550 - DNA, 25 bp, Homo sapien
ttgactggtactcttgcctgaacat

SEQ ID NO: 3914551 - DNA, 25 bp, Homo sapien
actgaacgtgaatgttggacaggca

SEQ ID NO: 3914552 - DNA, 25 bp, Homo sapien
aaagaagtcatctcactgaacgtga

SEQ ID NO: 3914553 - DNA, 25 bp, Homo sapien
cagatcgattcgactccaggaggca

SEQ ID NO: 3914554 - DNA, 25 bp, Homo sapien
taggagccgacaggaagaagctcca

SEQ ID NO: 3914555 - DNA, 25 bp, Homo sapien
tttctcaacacactgcctggctata

SEQ ID NO: 3914556 - DNA, 25 bp, Homo sapien
aacacactgcctggctatatccatc

SEQ ID NO: 3914557 - DNA, 25 bp, Homo sapien
tctcaacacactgcctggctatatc

SEQ ID NO: 3914558 - DNA, 25 bp, Homo sapien
tcaacacactgcctggctatatcca

SEQ ID NO: 3914559 - DNA, 25 bp, Homo sapien
tcccaatcctagtgaagtccagagt

SEQ ID NO: 3914560 - DNA, 25 bp, Homo sapien
cacggattggagctctaagaaaaca

SEQ ID NO: 3914561 - DNA, 25 bp, Homo sapien
gaaagacgtgcacactatagcaggc

SEQ ID NO: 3914562 - DNA, 25 bp, Homo sapien
tgattttaaggatacctgccatggg

SEQ ID NO: 3914563 - DNA, 25 bp, Homo sapien
gagttggaaactctcagaaatgaga

SEQ ID NO: 3914564 - DNA, 25 bp, Homo sapien
gtcgttgtcgtttctcaacatcaaa

SEQ ID NO: 3914565 - DNA, 25 bp, Homo sapien
cagttgcagcctttgggactgagtt

SEQ ID NO: 3914566 - DNA, 25 bp, Homo sapien
tgcttgtttttgtcgttgtcgtttc

SEQ ID NO: 3914567 - DNA, 25 bp, Homo sapien
tggagaagccagtatagacatggaa

SEQ ID NO: 3914568 - DNA, 25 bp, Homo sapien
agccagtatagacatggaagaggcc

SEQ ID NO: 3914569 - DNA, 25 bp, Homo sapien
tggaagaggccttgcatcagggaga

SEQ ID NO: 3914570 - DNA, 25 bp, Homo sapien
agaggccttgcatcagggagagggt

SEQ ID NO: 3914571 - DNA, 25 bp, Homo sapien
tttgcctaagcaggagggtcagttc

SEQ ID NO: 3914572 - DNA, 25 bp, Homo sapien
gccctgggtcttgacgcagtgaaac

SEQ ID NO: 3914573 - DNA, 25 bp, Homo sapien
ctgccctgggtcttgacgcagtgaa

SEQ ID NO: 3914574 - DNA, 25 bp, Homo sapien
tgcctaagcaggagggtcagttctg

SEQ ID NO: 3914575 - DNA, 25 bp, Homo sapien
tacgctaccgttaagttcaactgca

SEQ ID NO: 3914576 - DNA, 25 bp, Homo sapien
ccagatggacgggtatacgctaccg

SEQ ID NO: 3914577 - DNA, 25 bp, Homo sapien
aactgcacccttgactggtatggca

SEQ ID NO: 3914578 - DNA, 25 bp, Homo sapien
gagcattgagacacctttcgatcca

SEQ ID NO: 3914579 - DNA, 25 bp, Homo sapien
aaaatacatcctcgggagacacagg

SEQ ID NO: 3914580 - DNA, 25 bp, Homo sapien
caggacttaatatggccactggcag

SEQ ID NO: 3914581 - DNA, 25 bp, Homo sapien
taagagatactgtggagatcaagcc

SEQ ID NO: 3914582 - DNA, 25 bp, Homo sapien
taagtatgtttctcagacccctgca

SEQ ID NO: 3914583 - DNA, 25 bp, Homo sapien
ctcaagtgactatttccaagaccat

SEQ ID NO: 3914584 - DNA, 25 bp, Homo sapien
tccattaattctggattttcaatgc

SEQ ID NO: 3914585 - DNA, 25 bp, Homo sapien
ccaagaccatcttccattaattctg

SEQ ID NO: 3914586 - DNA, 25 bp, Homo sapien
catcttccattaattctggattttc

SEQ ID NO: 3914587 - DNA, 25 bp, Homo sapien
acagacaccccagaaccaaaatagg

SEQ ID NO: 3914588 - DNA, 25 bp, Homo sapien
gacttttacatgtatggcagggtat

SEQ ID NO: 3914589 - DNA, 25 bp, Homo sapien
tgcttgtccccactaagagtgagca

SEQ ID NO: 3914590 - DNA, 25 bp, Homo sapien
tcctgagctctataatctgcaaaac

SEQ ID NO: 3914591 - DNA, 25 bp, Homo sapien
aggtgaacggcacacagagagcttg

SEQ ID NO: 3914592 - DNA, 25 bp, Homo sapien
gtcagccctaagtcatcctttttca

SEQ ID NO: 3914593 - DNA, 25 bp, Homo sapien
aggagcatgtcagccctaagtcatc

SEQ ID NO: 3914594 - DNA, 25 bp, Homo sapien
agcttggagctcagtgcaaccgagg

SEQ ID NO: 3914595 - DNA, 25 bp, Homo sapien
ttataccttcggcactggcatagtg

SEQ ID NO: 3914596 - DNA, 25 bp, Homo sapien
aacttcctgaagtccacgagacctg

SEQ ID NO: 3914597 - DNA, 25 bp, Homo sapien
gattcaaatgaccttaacagcccag

SEQ ID NO: 3914598 - DNA, 25 bp, Homo sapien
gacgcagggttcaattcttaggcac

SEQ ID NO: 3914599 - DNA, 25 bp, Homo sapien
taggaaaggcatcgaattcacctgg

SEQ ID NO: 3914600 - DNA, 25 bp, Homo sapien
tctctcaggcgcatccaatgtgcag

SEQ ID NO: 3914601 - DNA, 25 bp, Homo sapien
gaattattgctctaacccacagcag

SEQ ID NO: 3914602 - DNA, 25 bp, Homo sapien
gctcagactcaaaccaacccaggta

SEQ ID NO: 3914603 - DNA, 25 bp, Homo sapien
ctggcccagcccttgtccaaaatcc

SEQ ID NO: 3914604 - DNA, 25 bp, Homo sapien
tacctcttcgtaacgggtcagaaca

SEQ ID NO: 3914605 - DNA, 25 bp, Homo sapien
tcgtaacgggtcagaacacagtgct

SEQ ID NO: 3914606 - DNA, 25 bp, Homo sapien
tcttcgtaacgggtcagaacacagt

SEQ ID NO: 3914607 - DNA, 25 bp, Homo sapien
ggttctccaaacatccacagctaga

SEQ ID NO: 3914608 - DNA, 25 bp, Homo sapien
catctgtggaggacatcggtcccca

SEQ ID NO: 3914609 - DNA, 25 bp, Homo sapien
ggtccccatacaatactccctggtg

SEQ ID NO: 3914610 - DNA, 25 bp, Homo sapien
gttctccaaacatccacagctagag

SEQ ID NO: 3914611 - DNA, 25 bp, Homo sapien
agagaaacaccatcccactttttca

SEQ ID NO: 3914612 - DNA, 25 bp, Homo sapien
agaaacaccatcccactttttcact

SEQ ID NO: 3914613 - DNA, 25 bp, Homo sapien
gagaaacaccatcccactttttcac

SEQ ID NO: 3914614 - DNA, 25 bp, Homo sapien
aaacaccatcccactttttcacttg

SEQ ID NO: 3914615 - DNA, 25 bp, Homo sapien
catggcccactgtgaaaccttcagg

SEQ ID NO: 3914616 - DNA, 25 bp, Homo sapien
cattgggacgaagcaccctgggaaa

SEQ ID NO: 3914617 - DNA, 25 bp, Homo sapien
taaggcctgaagtgcctagaccagg

SEQ ID NO: 3914618 - DNA, 25 bp, Homo sapien
tggacactgaccttcctaagaccag

SEQ ID NO: 3914619 - DNA, 25 bp, Homo sapien
cacagtctttttgcgttctgactgt

SEQ ID NO: 3914620 - DNA, 25 bp, Homo sapien
gtccatttgctcacggcagtccctc

SEQ ID NO: 3914621 - DNA, 25 bp, Homo sapien
ctgactgtgccacatggtctaatca

SEQ ID NO: 3914622 - DNA, 25 bp, Homo sapien
ttcacagtctttttgcgttctgact

SEQ ID NO: 3914623 - DNA, 25 bp, Homo sapien
accatctgagatatgtccacagagc

SEQ ID NO: 3914624 - DNA, 25 bp, Homo sapien
tcaccatctgagatatgtccacaga

SEQ ID NO: 3914625 - DNA, 25 bp, Homo sapien
ccatctgagatatgtccacagagcc

SEQ ID NO: 3914626 - DNA, 25 bp, Homo sapien
caccatctgagatatgtccacagag

SEQ ID NO: 3914627 - DNA, 25 bp, Homo sapien
gccctaacatgcctttttcatgcca

SEQ ID NO: 3914628 - DNA, 25 bp, Homo sapien
ctctggccctaacatgcctttttca

SEQ ID NO: 3914629 - DNA, 25 bp, Homo sapien
ttcctctggccctaacatgcctttt

SEQ ID NO: 3914630 - DNA, 25 bp, Homo sapien
tggccctaacatgcctttttcatgc

SEQ ID NO: 3914631 - DNA, 25 bp, Homo sapien
aacagtctttctccactccactctg

SEQ ID NO: 3914632 - DNA, 25 bp, Homo sapien
ttggctctcccactatcttctgtcc

SEQ ID NO: 3914633 - DNA, 25 bp, Homo sapien
ttctgtccccttctcagtctcaata

SEQ ID NO: 3914634 - DNA, 25 bp, Homo sapien
gtttgaaaatgcctccttggctctc

SEQ ID NO: 3914635 - DNA, 25 bp, Homo sapien
gacgctggtctataaccggtgctca

SEQ ID NO: 3914636 - DNA, 25 bp, Homo sapien
tgtggctagcatgaccgagaagctg

SEQ ID NO: 3914637 - DNA, 25 bp, Homo sapien
taagagacctgttcctagctcagtc

SEQ ID NO: 3914638 - DNA, 25 bp, Homo sapien
tatgatcagcctgcctaagagttcc

SEQ ID NO: 3914639 - DNA, 25 bp, Homo sapien
cagaggatggcgacgtgatactcac

SEQ ID NO: 3914640 - DNA, 25 bp, Homo sapien
tacgcatatcatcctaggaacgggc

SEQ ID NO: 3914641 - DNA, 25 bp, Homo sapien
tggagagctgaccaccatgcagtag

SEQ ID NO: 3914642 - DNA, 25 bp, Homo sapien
cgtagagaatcctagcaccgtggct

SEQ ID NO: 3914643 - DNA, 25 bp, Homo sapien
tgagtcatgccacaggcctagaggt

SEQ ID NO: 3914644 - DNA, 25 bp, Homo sapien
tagaacctagatgacagtggaatga

SEQ ID NO: 3914645 - DNA, 25 bp, Homo sapien
ggctttcgacttcaaattctagatg

SEQ ID NO: 3914646 - DNA, 25 bp, Homo sapien
ccaggataaggtgagggaattccca

SEQ ID NO: 3914647 - DNA, 25 bp, Homo sapien
caaaggtgccaacagaccaaccctt

SEQ ID NO: 3914648 - DNA, 25 bp, Homo sapien
gggcaaaggtgccaacagaccaacc

SEQ ID NO: 3914649 - DNA, 25 bp, Homo sapien
gcaaaggtgccaacagaccaaccct

SEQ ID NO: 3914650 - DNA, 25 bp, Homo sapien
tgggcaaaggtgccaacagaccaac

SEQ ID NO: 3914651 - DNA, 25 bp, Homo sapien
tattgacgatgaaaccaattccagc

SEQ ID NO: 3914652 - DNA, 25 bp, Homo sapien
ctccctcctattgacgatgaaacca

SEQ ID NO: 3914653 - DNA, 25 bp, Homo sapien
ctgacacgccagataggttccatga

SEQ ID NO: 3914654 - DNA, 25 bp, Homo sapien
cagaggcctgacacgccagataggt

SEQ ID NO: 3914655 - DNA, 25 bp, Homo sapien
cacatcggaaagcagcgaggtggta

SEQ ID NO: 3914656 - DNA, 25 bp, Homo sapien
tactagtccccgttcattcaggcgg

SEQ ID NO: 3914657 - DNA, 25 bp, Homo sapien
gaatggcgctaccacgtatcaagga

SEQ ID NO: 3914658 - DNA, 25 bp, Homo sapien
tgtccatgtcggtgatgagctgcct

SEQ ID NO: 3914659 - DNA, 25 bp, Homo sapien
gctggccctttaaatgcgcctcctc

SEQ ID NO: 3914660 - DNA, 25 bp, Homo sapien
gattcgccgagcaggcaggatggac

SEQ ID NO: 3914661 - DNA, 25 bp, Homo sapien
caggatggacggttcggccgcgagg

SEQ ID NO: 3914662 - DNA, 25 bp, Homo sapien
tcctccgagcgcggaacaaaggcgc

SEQ ID NO: 3914663 - DNA, 25 bp, Homo sapien
gccccactcgcactacacgctgcag

SEQ ID NO: 3914664 - DNA, 25 bp, Homo sapien
gtccgccccactcgcactacacgct

SEQ ID NO: 3914665 - DNA, 25 bp, Homo sapien
cgggctgcgcgcgtccgccccactc

SEQ ID NO: 3914666 - DNA, 25 bp, Homo sapien
gcgcgtccgccccactcgcactaca

SEQ ID NO: 3914667 - DNA, 25 bp, Homo sapien
tcagcgtttctcaagtggagatgca

SEQ ID NO: 3914668 - DNA, 25 bp, Homo sapien
cagcgtttctcaagtggagatgcag

SEQ ID NO: 3914669 - DNA, 25 bp, Homo sapien
tggtcccagattcatacttttccac

SEQ ID NO: 3914670 - DNA, 25 bp, Homo sapien
tccccactagcttcaatgagacaaa

SEQ ID NO: 3914671 - DNA, 25 bp, Homo sapien
gtctttccccactagcttcaatgag

SEQ ID NO: 3914672 - DNA, 25 bp, Homo sapien
cacttgaaggcgaacttggtggtcc

SEQ ID NO: 3914673 - DNA, 25 bp, Homo sapien
ggaaacggatgatgcctcctttttc

SEQ ID NO: 3914674 - DNA, 25 bp, Homo sapien
gaggcagacacatctacagtgagga

SEQ ID NO: 3914675 - DNA, 25 bp, Homo sapien
cttcttacaaacagacttcgggatg

SEQ ID NO: 3914676 - DNA, 25 bp, Homo sapien
aaagtggtccacttcttacaaacag

SEQ ID NO: 3914677 - DNA, 25 bp, Homo sapien
tgctattgccaaacggagcccagaa

SEQ ID NO: 3914678 - DNA, 25 bp, Homo sapien
tacaaaaggtcaatcttcccagtgg

SEQ ID NO: 3914679 - DNA, 25 bp, Homo sapien
tgtagatattcctccagctcagtgg

SEQ ID NO: 3914680 - DNA, 25 bp, Homo sapien
tccaggtacactttccaacaggcag

SEQ ID NO: 3914681 - DNA, 25 bp, Homo sapien
caagtcctactggtccccgggcgtg

SEQ ID NO: 3914682 - DNA, 25 bp, Homo sapien
agcagccacttagtagtaagcagtc

SEQ ID NO: 3914683 - DNA, 25 bp, Homo sapien
tgagaccacgtggtccttccctcgc

SEQ ID NO: 3914684 - DNA, 25 bp, Homo sapien
ttctctgaggaatagggaggttctc

SEQ ID NO: 3914685 - DNA, 25 bp, Homo sapien
tgtatacagtggaggcagggttccc

SEQ ID NO: 3914686 - DNA, 25 bp, Homo sapien
taaatagtctcctgtggtgctcaag

SEQ ID NO: 3914687 - DNA, 25 bp, Homo sapien
gacatgtttgtggtatcccctagaa

SEQ ID NO: 3914688 - DNA, 25 bp, Homo sapien
tgatattatagcaggcgaggcagcc

SEQ ID NO: 3914689 - DNA, 25 bp, Homo sapien
tactggtacccctgaaaacgagaga

SEQ ID NO: 3914690 - DNA, 25 bp, Homo sapien
gataggccttccaccaactcatggg

SEQ ID NO: 3914691 - DNA, 25 bp, Homo sapien
tacctctggcgcagcctgtgtaaaa

SEQ ID NO: 3914692 - DNA, 25 bp, Homo sapien
gctgtagcgggagaacccaggcttt

SEQ ID NO: 3914693 - DNA, 25 bp, Homo sapien
cagaaaagcgagtgctggcattcca

SEQ ID NO: 3914694 - DNA, 25 bp, Homo sapien
tgcaggaagaactccgctgtgtttt

SEQ ID NO: 3914695 - DNA, 25 bp, Homo sapien
caggcactgtctacgtgctgcagga

SEQ ID NO: 3914696 - DNA, 25 bp, Homo sapien
cagtccaaagcggtaaccatcagaa

SEQ ID NO: 3914697 - DNA, 25 bp, Homo sapien
cagacactgtatgcgggaagcatct

SEQ ID NO: 3914698 - DNA, 25 bp, Homo sapien
atgcgggaagcatctggacactgac

SEQ ID NO: 3914699 - DNA, 25 bp, Homo sapien
cactgtatgcgggaagcatctggac

SEQ ID NO: 3914700 - DNA, 25 bp, Homo sapien
aaggcagacactgtatgcgggaagc

SEQ ID NO: 3914701 - DNA, 25 bp, Homo sapien
gaacgttgtccactacttcaatgca

SEQ ID NO: 3914702 - DNA, 25 bp, Homo sapien
ggtcaatggcatcctgaacgttgtc

SEQ ID NO: 3914703 - DNA, 25 bp, Homo sapien
gtcctctgtgacgatgacatccgtg

SEQ ID NO: 3914704 - DNA, 25 bp, Homo sapien
tgtgggagctgccatacttgtggat

SEQ ID NO: 3914705 - DNA, 25 bp, Homo sapien
gatcccggtggattaacaaagtctc

SEQ ID NO: 3914706 - DNA, 25 bp, Homo sapien
gatctggtcaaataatggtgtcctg

SEQ ID NO: 3914707 - DNA, 25 bp, Homo sapien
aaagtctccaaagcattacaggcag

SEQ ID NO: 3914708 - DNA, 25 bp, Homo sapien
agctggatattcacatttagagtct

SEQ ID NO: 3914709 - DNA, 25 bp, Homo sapien
tgcagaggatgtaatatttctccgt

SEQ ID NO: 3914710 - DNA, 25 bp, Homo sapien
tccattgacatgatccagagctgca

SEQ ID NO: 3914711 - DNA, 25 bp, Homo sapien
gtgaaagagaagaccccatccagct

SEQ ID NO: 3914712 - DNA, 25 bp, Homo sapien
taatatttctccgttgtgaaagaga

SEQ ID NO: 3914713 - DNA, 25 bp, Homo sapien
gagccacgtggaatgatcagatcta

SEQ ID NO: 3914714 - DNA, 25 bp, Homo sapien
catgtgacagatcccttcgctgtgc

SEQ ID NO: 3914715 - DNA, 25 bp, Homo sapien
gatctatcattttgtctaggcggca

SEQ ID NO: 3914716 - DNA, 25 bp, Homo sapien
tcaacactggcctcggaatccacat

SEQ ID NO: 3914717 - DNA, 25 bp, Homo sapien
ccctctgggcctgacttggtgcatt

SEQ ID NO: 3914718 - DNA, 25 bp, Homo sapien
tgggcctgacttggtgcattcccag

SEQ ID NO: 3914719 - DNA, 25 bp, Homo sapien
tctggcccctctgggcctgacttgg

SEQ ID NO: 3914720 - DNA, 25 bp, Homo sapien
gcccctctgggcctgacttggtgca

SEQ ID NO: 3914721 - DNA, 25 bp, Homo sapien
gccacttgcgatagccaaagctgcc

SEQ ID NO: 3914722 - DNA, 25 bp, Homo sapien
cctttgagtaacaagccattgccac

SEQ ID NO: 3914723 - DNA, 25 bp, Homo sapien
ttgcacggcctccttgactccatgg

SEQ ID NO: 3914724 - DNA, 25 bp, Homo sapien
gactccatggattgagagagcctcc

SEQ ID NO: 3914725 - DNA, 25 bp, Homo sapien
caaacagtaatagcaacagtgatgt

SEQ ID NO: 3914726 - DNA, 25 bp, Homo sapien
aacagtaatagcaacagtgatgtta

SEQ ID NO: 3914727 - DNA, 25 bp, Homo sapien
acaaacagtaatagcaacagtgatg

SEQ ID NO: 3914728 - DNA, 25 bp, Homo sapien
gacaaacagtaatagcaacagtgat

SEQ ID NO: 3914729 - DNA, 25 bp, Homo sapien
tcagagaacaaagtgaaccacaggc

SEQ ID NO: 3914730 - DNA, 25 bp, Homo sapien
ggtccttttcacatgggccaagcca

SEQ ID NO: 3914731 - DNA, 25 bp, Homo sapien
caactactttaggatactggaggaa

SEQ ID NO: 3914732 - DNA, 25 bp, Homo sapien
cagcagcaggctaacagagacttgt

SEQ ID NO: 3914733 - DNA, 25 bp, Homo sapien
gggacagtcacttgttccagttcca

SEQ ID NO: 3914734 - DNA, 25 bp, Homo sapien
taaacgtttcagcagaggagctgca

SEQ ID NO: 3914735 - DNA, 25 bp, Homo sapien
gtcgcagaccgatggccaggctgtt

SEQ ID NO: 3914736 - DNA, 25 bp, Homo sapien
gacagtcaggacgagattcaaagat

SEQ ID NO: 3914737 - DNA, 25 bp, Homo sapien
catgtgggactgcattaggaacaga

SEQ ID NO: 3914738 - DNA, 25 bp, Homo sapien
tgcctggcccaactgatgtgtcttg

SEQ ID NO: 3914739 - DNA, 25 bp, Homo sapien
gatatagtctacgaaaaaggcaaac

SEQ ID NO: 3914740 - DNA, 25 bp, Homo sapien
tatctaggttcactgacatggagag

SEQ ID NO: 3914741 - DNA, 25 bp, Homo sapien
cactgcgcctagctgtaatttttgt

SEQ ID NO: 3914742 - DNA, 25 bp, Homo sapien
aatgtgagctaccacggccggcttt

SEQ ID NO: 3914743 - DNA, 25 bp, Homo sapien
caaatgtgagctaccacggccggct

SEQ ID NO: 3914744 - DNA, 25 bp, Homo sapien
tgtgagctaccacggccggcttttt

SEQ ID NO: 3914745 - DNA, 25 bp, Homo sapien
tctcatcacgctggtccgtcaacag

SEQ ID NO: 3914746 - DNA, 25 bp, Homo sapien
ggtccgtcaacagatcagccagatg

SEQ ID NO: 3914747 - DNA, 25 bp, Homo sapien
tgttggctaacaggatctcatcacg

SEQ ID NO: 3914748 - DNA, 25 bp, Homo sapien
cagccagatgatggataatttctgc

SEQ ID NO: 3914749 - DNA, 25 bp, Homo sapien
ttccaaggtggccaacatccttcct

SEQ ID NO: 3914750 - DNA, 25 bp, Homo sapien
tcaggttccaaggtggccaacatcc

SEQ ID NO: 3914751 - DNA, 25 bp, Homo sapien
aggttccaaggtggccaacatcctt

SEQ ID NO: 3914752 - DNA, 25 bp, Homo sapien
ctcaggttccaaggtggccaacatc

SEQ ID NO: 3914753 - DNA, 25 bp, Homo sapien
caacagaagtgccaccttgcaaagc

SEQ ID NO: 3914754 - DNA, 25 bp, Homo sapien
gacgtgcccagacacctttgggtgg

SEQ ID NO: 3914755 - DNA, 25 bp, Homo sapien
ttgggtgggttccattggcaataac

SEQ ID NO: 3914756 - DNA, 25 bp, Homo sapien
cacaatgtctgtgatgacgtgccca

SEQ ID NO: 3914757 - DNA, 25 bp, Homo sapien
tatcaataagctttgcatcatctga

SEQ ID NO: 3914758 - DNA, 25 bp, Homo sapien
caaatgtcacagactgctgatctcc

SEQ ID NO: 3914759 - DNA, 25 bp, Homo sapien
gctgatctccgggataaaatatatc

SEQ ID NO: 3914760 - DNA, 25 bp, Homo sapien
cattcccactctagacttggttcca

SEQ ID NO: 3914761 - DNA, 25 bp, Homo sapien
gcactaccacctgctttaaccagaa

SEQ ID NO: 3914762 - DNA, 25 bp, Homo sapien
aatagacaagagtcagtaatactgc

SEQ ID NO: 3914763 - DNA, 25 bp, Homo sapien
gatggaagtgtctccaagacaggcc

SEQ ID NO: 3914764 - DNA, 25 bp, Homo sapien
caagggattcgacactgacaaacat

SEQ ID NO: 3914765 - DNA, 25 bp, Homo sapien
ggatgaaatgcaacagaggtactca

SEQ ID NO: 3914766 - DNA, 25 bp, Homo sapien
catattcctggcaaggtgtccttaa

SEQ ID NO: 3914767 - DNA, 25 bp, Homo sapien
gaagggtggctattgcagaaacagc

SEQ ID NO: 3914768 - DNA, 25 bp, Homo sapien
ggccatatcctcagcacaacattta

SEQ ID NO: 3914769 - DNA, 25 bp, Homo sapien
agaacaatcaagagatcagttttca

SEQ ID NO: 3914770 - DNA, 25 bp, Homo sapien
cagtcgggcagccaggctatcatta

SEQ ID NO: 3914771 - DNA, 25 bp, Homo sapien
ggcagccaggctatcattatcttta

SEQ ID NO: 3914772 - DNA, 25 bp, Homo sapien
gaacaatcaagagatcagttttcat

SEQ ID NO: 3914773 - DNA, 25 bp, Homo sapien
cagcatcatttgtgttgacaatggg

SEQ ID NO: 3914774 - DNA, 25 bp, Homo sapien
gggacaatgttcattctaaggagtt

SEQ ID NO: 3914775 - DNA, 25 bp, Homo sapien
tcatcatggaaatccaaattggtca

SEQ ID NO: 3914776 - DNA, 25 bp, Homo sapien
gaagtgttccattgaggttccggcg

SEQ ID NO: 3914777 - DNA, 25 bp, Homo sapien
taaagaagagtgatataaatagaga

SEQ ID NO: 3914778 - DNA, 25 bp, Homo sapien
gttgtcattggactgtgaagagaaa

SEQ ID NO: 3914779 - DNA, 25 bp, Homo sapien
accaaagttgtcattggactgtgaa

SEQ ID NO: 3914780 - DNA, 25 bp, Homo sapien
caaagttgtcattggactgtgaaga

SEQ ID NO: 3914781 - DNA, 25 bp, Homo sapien
gtaaacatagcctcatacaaggcca

SEQ ID NO: 3914782 - DNA, 25 bp, Homo sapien
agatgctgtactgggtaaacatagc

SEQ ID NO: 3914783 - DNA, 25 bp, Homo sapien
cagctgcacaggctcgtgcctctaa

SEQ ID NO: 3914784 - DNA, 25 bp, Homo sapien
gccatcagcccactctgtccggcag

SEQ ID NO: 3914785 - DNA, 25 bp, Homo sapien
ttcagctggttctgccccgagtgga

SEQ ID NO: 3914786 - DNA, 25 bp, Homo sapien
cagaaggatctcatggcgcaagcgt

SEQ ID NO: 3914787 - DNA, 25 bp, Homo sapien
tttgccaaaggctacggctccactg

SEQ ID NO: 3914788 - DNA, 25 bp, Homo sapien
cctgccgcacgctctgagacagaag

SEQ ID NO: 3914789 - DNA, 25 bp, Homo sapien
ggcactgccgagcttcaccacgatt

SEQ ID NO: 3914790 - DNA, 25 bp, Homo sapien
cgagcttcaccacgattctcttggc

SEQ ID NO: 3914791 - DNA, 25 bp, Homo sapien
acattcatcccctcgggtcaccacg

SEQ ID NO: 3914792 - DNA, 25 bp, Homo sapien
gctcaacaatagatgccaagcgccc

SEQ ID NO: 3914793 - DNA, 25 bp, Homo sapien
tctgatgactgaaggctggatacaa

SEQ ID NO: 3914794 - DNA, 25 bp, Homo sapien
gacttgccatgtgtacgactgaggg

SEQ ID NO: 3914795 - DNA, 25 bp, Homo sapien
ccaagaacgaacatgtctgatgact

SEQ ID NO: 3914796 - DNA, 25 bp, Homo sapien
taaacgggatgttgctccaagaacg

SEQ ID NO: 3914797 - DNA, 25 bp, Homo sapien
ggctgtgttccaggcctcaacaaga

SEQ ID NO: 3914798 - DNA, 25 bp, Homo sapien
cccagtaaccaatgaggctgtgttc

SEQ ID NO: 3914799 - DNA, 25 bp, Homo sapien
ctctgacagaggagaaccctttact

SEQ ID NO: 3914800 - DNA, 25 bp, Homo sapien
tcttcagcatcagaatccttatgcc

SEQ ID NO: 3914801 - DNA, 25 bp, Homo sapien
tctgtttatctccacaagcgttctc

SEQ ID NO: 3914802 - DNA, 25 bp, Homo sapien
tgtttatctccacaagcgttctcat

SEQ ID NO: 3914803 - DNA, 25 bp, Homo sapien
ctgtttatctccacaagcgttctca

SEQ ID NO: 3914804 - DNA, 25 bp, Homo sapien
tttccctctgctattctgcttatca

SEQ ID NO: 3914805 - DNA, 25 bp, Homo sapien
aaagagctccacgttccagaaaaat

SEQ ID NO: 3914806 - DNA, 25 bp, Homo sapien
tctgcttatcatggtcagtgaaaga

SEQ ID NO: 3914807 - DNA, 25 bp, Homo sapien
catggtcagtgaaagagctccacgt

SEQ ID NO: 3914808 - DNA, 25 bp, Homo sapien
gagatctgaagacggttgtacactt

SEQ ID NO: 3914809 - DNA, 25 bp, Homo sapien
gaagacggttgtacacttgacccag

SEQ ID NO: 3914810 - DNA, 25 bp, Homo sapien
aacccacagcggtaaacttgactca

SEQ ID NO: 3914811 - DNA, 25 bp, Homo sapien
gctggaacccacagcggtaaacttg

SEQ ID NO: 3914812 - DNA, 25 bp, Homo sapien
gctgcgatgtggtcactaaccaaag

SEQ ID NO: 3914813 - DNA, 25 bp, Homo sapien
gcgatgtggtcactaaccaaagtat

SEQ ID NO: 3914814 - DNA, 25 bp, Homo sapien
tgcgatgtggtcactaaccaaagta

SEQ ID NO: 3914815 - DNA, 25 bp, Homo sapien
ctgcgatgtggtcactaaccaaagt

SEQ ID NO: 3914816 - DNA, 25 bp, Homo sapien
tgaacagagaagtgaacctcagtcc

SEQ ID NO: 3914817 - DNA, 25 bp, Homo sapien
tgtattacgccctcgagaagcacac

SEQ ID NO: 3914818 - DNA, 25 bp, Homo sapien
cacatgctcggtatatggctcacca

SEQ ID NO: 3914819 - DNA, 25 bp, Homo sapien
actgaccaggcagagtgtattacgc

SEQ ID NO: 3914820 - DNA, 25 bp, Homo sapien
ggtgcgtcctgctgtaacaggaaga

SEQ ID NO: 3914821 - DNA, 25 bp, Homo sapien
ggaagaccccagcatacacagaatg

SEQ ID NO: 3914822 - DNA, 25 bp, Homo sapien
ctgtaacaggaagaccccagcatac

SEQ ID NO: 3914823 - DNA, 25 bp, Homo sapien
gtatgtgggtgcgtcctgctgtaac

SEQ ID NO: 3914824 - DNA, 25 bp, Homo sapien
gagagtcagcgtgcggccagctaaa

SEQ ID NO: 3914825 - DNA, 25 bp, Homo sapien
tcagcgtgcggccagctaaaacccg

SEQ ID NO: 3914826 - DNA, 25 bp, Homo sapien
tgcggccagctaaaacccgcggcat

SEQ ID NO: 3914827 - DNA, 25 bp, Homo sapien
ctgagagtcagcgtgcggccagcta

SEQ ID NO: 3914828 - DNA, 25 bp, Homo sapien
tagccatccgtagatcccggggcgg

SEQ ID NO: 3914829 - DNA, 25 bp, Homo sapien
aggtcagggcccgtagccatccgta

SEQ ID NO: 3914830 - DNA, 25 bp, Homo sapien
agggcccgtagccatccgtagatcc

SEQ ID NO: 3914831 - DNA, 25 bp, Homo sapien
tcagggcccgtagccatccgtagat

SEQ ID NO: 3914832 - DNA, 25 bp, Homo sapien
acctgctccggcagcgtccccgctc

SEQ ID NO: 3914833 - DNA, 25 bp, Homo sapien
cgcgcttgagcctgggcgcgcaaca

SEQ ID NO: 3914834 - DNA, 25 bp, Homo sapien
agcttccgcagagacgcgggcgcct

SEQ ID NO: 3914835 - DNA, 25 bp, Homo sapien
gctcacgcccctcgcgcttgagcct

SEQ ID NO: 3914836 - DNA, 25 bp, Homo sapien
gggctgattccggcgctcgctcact

SEQ ID NO: 3914837 - DNA, 25 bp, Homo sapien
cacgtcccgcacgatgacgttacgt

SEQ ID NO: 3914838 - DNA, 25 bp, Homo sapien
cagtggcgtaagagtaaacctgggc

SEQ ID NO: 3914839 - DNA, 25 bp, Homo sapien
cagccggccctacgctgttgacgtg

SEQ ID NO: 3914840 - DNA, 25 bp, Homo sapien
tgttctaggctcctgggatcacctc

SEQ ID NO: 3914841 - DNA, 25 bp, Homo sapien
aaacttgcccctcactagtctaggc

SEQ ID NO: 3914842 - DNA, 25 bp, Homo sapien
ttcaagtccccacaaaaggagctgc

SEQ ID NO: 3914843 - DNA, 25 bp, Homo sapien
gtgtttctactacagtcacttcagg

SEQ ID NO: 3914844 - DNA, 25 bp, Homo sapien
ggtgtatttatggaagtttcatccc

SEQ ID NO: 3914845 - DNA, 25 bp, Homo sapien
tgctatggtgtatttatggaagttt

SEQ ID NO: 3914846 - DNA, 25 bp, Homo sapien
atttatggaagtttcatccctccct

SEQ ID NO: 3914847 - DNA, 25 bp, Homo sapien
gctatggtgtatttatggaagtttc

SEQ ID NO: 3914848 - DNA, 25 bp, Homo sapien
tagaagcataatcaggaggcagacc

SEQ ID NO: 3914849 - DNA, 25 bp, Homo sapien
aacctcacaaacatagaagcataat

SEQ ID NO: 3914850 - DNA, 25 bp, Homo sapien
agcataatcaggaggcagaccacag

SEQ ID NO: 3914851 - DNA, 25 bp, Homo sapien
caaacatagaagcataatcaggagg

SEQ ID NO: 3914852 - DNA, 25 bp, Homo sapien
ccaactgtgcctgagggctgatgga

SEQ ID NO: 3914853 - DNA, 25 bp, Homo sapien
ggctgatggatccagaccttgtaaa

SEQ ID NO: 3914854 - DNA, 25 bp, Homo sapien
tctacagtccagagggaagctattc

SEQ ID NO: 3914855 - DNA, 25 bp, Homo sapien
ggccttcccagcttgagaagtaggg

SEQ ID NO: 3914856 - DNA, 25 bp, Homo sapien
caagataagtggctgcctcagagtt

SEQ ID NO: 3914857 - DNA, 25 bp, Homo sapien
tgaggttctatttagccaagataag

SEQ ID NO: 3914858 - DNA, 25 bp, Homo sapien
tacaaggattccttcagttaggtcc

SEQ ID NO: 3914859 - DNA, 25 bp, Homo sapien
tctaaaataactcctttcatataca

SEQ ID NO: 3914860 - DNA, 25 bp, Homo sapien
gagagaatactcctctgctgaatgc

SEQ ID NO: 3914861 - DNA, 25 bp, Homo sapien
ttgaagggaaagaagtcgaatggcc

SEQ ID NO: 3914862 - DNA, 25 bp, Homo sapien
tagtctctaggttgagaactccaag

SEQ ID NO: 3914863 - DNA, 25 bp, Homo sapien
tgtccacaaagttcacaagagttgt

SEQ ID NO: 3914864 - DNA, 25 bp, Homo sapien
tattattactttccctgaagagaga

SEQ ID NO: 3914865 - DNA, 25 bp, Homo sapien
caatgacaggtcagcgcttggtacc

SEQ ID NO: 3914866 - DNA, 25 bp, Homo sapien
gcaatagtcaatgatagcagaactg

SEQ ID NO: 3914867 - DNA, 25 bp, Homo sapien
tcatatagcactctaacttggctgt

SEQ ID NO: 3914868 - DNA, 25 bp, Homo sapien
gactatacgagtgcacaaccacacc

SEQ ID NO: 3914869 - DNA, 25 bp, Homo sapien
tcctagggactgtcacttgattgtt

SEQ ID NO: 3914870 - DNA, 25 bp, Homo sapien
gtaactaagactatacgagtgcaca

SEQ ID NO: 3914871 - DNA, 25 bp, Homo sapien
tagggactgtcacttgattgtttgt

SEQ ID NO: 3914872 - DNA, 25 bp, Homo sapien
gaagattgacaaacatgcggaaagt

SEQ ID NO: 3914873 - DNA, 25 bp, Homo sapien
taaagatactaactgctccacagtg

SEQ ID NO: 3914874 - DNA, 25 bp, Homo sapien
gagattcaatctagcgacaccctaa

SEQ ID NO: 3914875 - DNA, 25 bp, Homo sapien
tgaaggccacaagtcagtcagtgtc

SEQ ID NO: 3914876 - DNA, 25 bp, Homo sapien
ctggcagagtagtgggggggtagga

SEQ ID NO: 3914877 - DNA, 25 bp, Homo sapien
atgcaaatacactggcagagtagtg

SEQ ID NO: 3914878 - DNA, 25 bp, Homo sapien
gatgcaaatacactggcagagtagt

SEQ ID NO: 3914879 - DNA, 25 bp, Homo sapien
tttgagttttagtatcacatgaaga

SEQ ID NO: 3914880 - DNA, 25 bp, Homo sapien
tagtatcacatgaagaacaaggttc

SEQ ID NO: 3914881 - DNA, 25 bp, Homo sapien
tattgacccattttagaatttgagt

SEQ ID NO: 3914882 - DNA, 25 bp, Homo sapien
gattctcaagtctaaatttttccat

SEQ ID NO: 3914883 - DNA, 25 bp, Homo sapien
taagctgaccaacacagcctaggta

SEQ ID NO: 3914884 - DNA, 25 bp, Homo sapien
tacattctgcaagtgtaactcctcc

SEQ ID NO: 3914885 - DNA, 25 bp, Homo sapien
tataaacacaaatgcctaccagcct

SEQ ID NO: 3914886 - DNA, 25 bp, Homo sapien
aaactttcaaacagtgtccagtgga

SEQ ID NO: 3914887 - DNA, 25 bp, Homo sapien
gtcacagcggtaactttaatcacaa

SEQ ID NO: 3914888 - DNA, 25 bp, Homo sapien
ttaatcacaatcaacaggctcaggg

SEQ ID NO: 3914889 - DNA, 25 bp, Homo sapien
tgtggctgacagattgaacaattat

SEQ ID NO: 3914890 - DNA, 25 bp, Homo sapien
ggactcacatataactgtgtggctg

SEQ ID NO: 3914891 - DNA, 25 bp, Homo sapien
ggagacctacatatgcccacaatac

SEQ ID NO: 3914892 - DNA, 25 bp, Homo sapien
tatagactggcactggtataggaat

SEQ ID NO: 3914893 - DNA, 25 bp, Homo sapien
gatacatgagcttgcgggttggaca

SEQ ID NO: 3914894 - DNA, 25 bp, Homo sapien
ggttggacaggagacctacatatgc

SEQ ID NO: 3914895 - DNA, 25 bp, Homo sapien
gagacagcaggaagtacagtttata

SEQ ID NO: 3914896 - DNA, 25 bp, Homo sapien
gacagcaggaagtacagtttatagc

SEQ ID NO: 3914897 - DNA, 25 bp, Homo sapien
tatgagacagcaggaagtacagttt

SEQ ID NO: 3914898 - DNA, 25 bp, Homo sapien
ctggtatgagacagcaggaagtaca

SEQ ID NO: 3914899 - DNA, 25 bp, Homo sapien
tgggcatgatttcttatactcttcc

SEQ ID NO: 3914900 - DNA, 25 bp, Homo sapien
ttcaagtgggcatgatttcttatac

SEQ ID NO: 3914901 - DNA, 25 bp, Homo sapien
ggtaaaaatgagtcttcatcagaaa

SEQ ID NO: 3914902 - DNA, 25 bp, Homo sapien
gcattatctatggagacaaggctgg

SEQ ID NO: 3914903 - DNA, 25 bp, Homo sapien
gatggcaacatactctggtctgggc

SEQ ID NO: 3914904 - DNA, 25 bp, Homo sapien
gctgcagtgcctgttgaggatcctg

SEQ ID NO: 3914905 - DNA, 25 bp, Homo sapien
gaagagtctgataaatctcctgctg

SEQ ID NO: 3914906 - DNA, 25 bp, Homo sapien
gctgggtcagcattaccaaagatgg

SEQ ID NO: 3914907 - DNA, 25 bp, Homo sapien
cagatattgcattcactccaaactg

SEQ ID NO: 3914908 - DNA, 25 bp, Homo sapien
ctgagcttgcatccagatattgcat

SEQ ID NO: 3914909 - DNA, 25 bp, Homo sapien
gcttgcatccagatattgcattcac

SEQ ID NO: 3914910 - DNA, 25 bp, Homo sapien
catccagatattgcattcactccaa

SEQ ID NO: 3914911 - DNA, 25 bp, Homo sapien
tactatcataatgttcgagtcacaa

SEQ ID NO: 3914912 - DNA, 25 bp, Homo sapien
taatgttcgagtcacaaatttgtga

SEQ ID NO: 3914913 - DNA, 25 bp, Homo sapien
tataagtacctcattataatgaaca

SEQ ID NO: 3914914 - DNA, 25 bp, Homo sapien
ttgtattactatcataatgttcgag

SEQ ID NO: 3914915 - DNA, 25 bp, Homo sapien
tttggctagtctaacataagtttga

SEQ ID NO: 3914916 - DNA, 25 bp, Homo sapien
ctttggctagtctaacataagtttg

SEQ ID NO: 3914917 - DNA, 25 bp, Homo sapien
ttggctagtctaacataagtttgaa

SEQ ID NO: 3914918 - DNA, 25 bp, Homo sapien
aggccacccagctctaaaaaggata

SEQ ID NO: 3914919 - DNA, 25 bp, Homo sapien
ggccacccagctctaaaaaggatac

SEQ ID NO: 3914920 - DNA, 25 bp, Homo sapien
agagccaagagtggcttcccaacta

SEQ ID NO: 3914921 - DNA, 25 bp, Homo sapien
caggattcccacttctaggactggt

SEQ ID NO: 3914922 - DNA, 25 bp, Homo sapien
tcccaactatatagccaggattccc

SEQ ID NO: 3914923 - DNA, 25 bp, Homo sapien
ccacttctaggactggtgagagaag

SEQ ID NO: 3914924 - DNA, 25 bp, Homo sapien
ccctctaaatcccctataagagaag

SEQ ID NO: 3914925 - DNA, 25 bp, Homo sapien
tctaaatcccctataagagaagggc

SEQ ID NO: 3914926 - DNA, 25 bp, Homo sapien
ctctaaatcccctataagagaaggg

SEQ ID NO: 3914927 - DNA, 25 bp, Homo sapien
tcccctctaaatcccctataagaga

SEQ ID NO: 3914928 - DNA, 25 bp, Homo sapien
ctcaacagtcaggttggtttgtccc

SEQ ID NO: 3914929 - DNA, 25 bp, Homo sapien
tggattccaaaagtcccattggtct

SEQ ID NO: 3914930 - DNA, 25 bp, Homo sapien
tgaagtgttgctgtaaggaagcgcc

SEQ ID NO: 3914931 - DNA, 25 bp, Homo sapien
tccaaaagtcccattggtctctatc

SEQ ID NO: 3914932 - DNA, 25 bp, Homo sapien
gtcttcaagggtgttattataacta

SEQ ID NO: 3914933 - DNA, 25 bp, Homo sapien
caaacacaaatactatgaaagataa

SEQ ID NO: 3914934 - DNA, 25 bp, Homo sapien
caagggtgttattataactaaatga

SEQ ID NO: 3914935 - DNA, 25 bp, Homo sapien
tataactaaatgaggcagactgaaa

SEQ ID NO: 3914936 - DNA, 25 bp, Homo sapien
ctacattctgacaagtgtttccagc

SEQ ID NO: 3914937 - DNA, 25 bp, Homo sapien
cagaggagcattagcctgtgaggta

SEQ ID NO: 3914938 - DNA, 25 bp, Homo sapien
ttccagccaacagaggagcattagc

SEQ ID NO: 3914939 - DNA, 25 bp, Homo sapien
ctgagaaactacattctgacaagtg

SEQ ID NO: 3914940 - DNA, 25 bp, Homo sapien
cagtacaacttagactaaaattgcc

SEQ ID NO: 3914941 - DNA, 25 bp, Homo sapien
tagactaaaattgcctcagatgcag

SEQ ID NO: 3914942 - DNA, 25 bp, Homo sapien
caacagtacaacttagactaaaatt

SEQ ID NO: 3914943 - DNA, 25 bp, Homo sapien
caacttagactaaaattgcctcaga

SEQ ID NO: 3914944 - DNA, 25 bp, Homo sapien
ccatattctgtggatcagtcatgct

SEQ ID NO: 3914945 - DNA, 25 bp, Homo sapien
ttctgtggatcagtcatgcttcttg

SEQ ID NO: 3914946 - DNA, 25 bp, Homo sapien
tattctgtggatcagtcatgcttct

SEQ ID NO: 3914947 - DNA, 25 bp, Homo sapien
ctgtggatcagtcatgcttcttgga

SEQ ID NO: 3914948 - DNA, 25 bp, Homo sapien
tatagtaagaggcagcattgagggc

SEQ ID NO: 3914949 - DNA, 25 bp, Homo sapien
cattgagggctgaatccaaggtaca

SEQ ID NO: 3914950 - DNA, 25 bp, Homo sapien
ccaggttcttgaaaaaacgagtgca

SEQ ID NO: 3914951 - DNA, 25 bp, Homo sapien
caaggtacagctactagccaggttc

SEQ ID NO: 3914952 - DNA, 25 bp, Homo sapien
ggttgtctcagcaagcttattacag

SEQ ID NO: 3914953 - DNA, 25 bp, Homo sapien
gcttattacagaccacttggggaag

SEQ ID NO: 3914954 - DNA, 25 bp, Homo sapien
tccaactcctgcaggttgtctcagc

SEQ ID NO: 3914955 - DNA, 25 bp, Homo sapien
gcaggattgctttcagcacagagtc

SEQ ID NO: 3914956 - DNA, 25 bp, Homo sapien
cctgtaaaaagatggtggtgattga

SEQ ID NO: 3914957 - DNA, 25 bp, Homo sapien
tgaatgattcgcctccaaactctgc

SEQ ID NO: 3914958 - DNA, 25 bp, Homo sapien
tggaatgttgaagtgaatgattcgc

SEQ ID NO: 3914959 - DNA, 25 bp, Homo sapien
tgttgaagtgaatgattcgcctcca

SEQ ID NO: 3914960 - DNA, 25 bp, Homo sapien
caaataggagatctgacaggctggc

SEQ ID NO: 3914961 - DNA, 25 bp, Homo sapien
tacagggcatatcttgaggacaacg

SEQ ID NO: 3914962 - DNA, 25 bp, Homo sapien
caaagcagagggtcaagtacagagt

SEQ ID NO: 3914963 - DNA, 25 bp, Homo sapien
gaagtggccatattcctccctcagg

SEQ ID NO: 3914964 - DNA, 25 bp, Homo sapien
aatgagaacaaccaacatgtttcta

SEQ ID NO: 3914965 - DNA, 25 bp, Homo sapien
aaatgagaacaaccaacatgtttct

SEQ ID NO: 3914966 - DNA, 25 bp, Homo sapien
agaacaaccaacatgtttctactca

SEQ ID NO: 3914967 - DNA, 25 bp, Homo sapien
tgagaacaaccaacatgtttctact

SEQ ID NO: 3914968 - DNA, 25 bp, Homo sapien
ttgttcacatggacacaaaactgcc

SEQ ID NO: 3914969 - DNA, 25 bp, Homo sapien
agttgttcacatggacacaaaactg

SEQ ID NO: 3914970 - DNA, 25 bp, Homo sapien
gttgttcacatggacacaaaactgc

SEQ ID NO: 3914971 - DNA, 25 bp, Homo sapien
gagttgtctacacaaacccagcttg

SEQ ID NO: 3914972 - DNA, 25 bp, Homo sapien
aacagagttgtctacacaaacccag

SEQ ID NO: 3914973 - DNA, 25 bp, Homo sapien
tgaagataacagagttgtctacaca

SEQ ID NO: 3914974 - DNA, 25 bp, Homo sapien
tgtctacacaaacccagcttgaaga

SEQ ID NO: 3914975 - DNA, 25 bp, Homo sapien
ccaaaaaagagtgtcccagcaatat

SEQ ID NO: 3914976 - DNA, 25 bp, Homo sapien
caatatcggccagatgatgccaaag

SEQ ID NO: 3914977 - DNA, 25 bp, Homo sapien
gggcacctataggacgacacgaagg

SEQ ID NO: 3914978 - DNA, 25 bp, Homo sapien
actccttgggcacctataggacgac

SEQ ID NO: 3914979 - DNA, 25 bp, Homo sapien
gcaggctccaggagtcaagtcacag

SEQ ID NO: 3914980 - DNA, 25 bp, Homo sapien
agcagcaatttatatcgcaggctcc

SEQ ID NO: 3914981 - DNA, 25 bp, Homo sapien
gaaaactgtcctcggatggagaaga

SEQ ID NO: 3914982 - DNA, 25 bp, Homo sapien
tggagaagatagcagtccctgtcgc

SEQ ID NO: 3914983 - DNA, 25 bp, Homo sapien
aagtacgacacagagtgagtgggat

SEQ ID NO: 3914984 - DNA, 25 bp, Homo sapien
gatctcagaagtaagtttccacccc

SEQ ID NO: 3914985 - DNA, 25 bp, Homo sapien
tttgtggcagctcaactttgctcac

SEQ ID NO: 3914986 - DNA, 25 bp, Homo sapien
acacagagtgagtgggatgaagatc

SEQ ID NO: 3914987 - DNA, 25 bp, Homo sapien
cgggcgagttgcagtcgcctctgaa

SEQ ID NO: 3914988 - DNA, 25 bp, Homo sapien
cagctccaaagacgtgggcactgcc

SEQ ID NO: 3914989 - DNA, 25 bp, Homo sapien
ggactggagggttccgccatccgtc

SEQ ID NO: 3914990 - DNA, 25 bp, Homo sapien
gagtcacgagagtagggaccactgt

SEQ ID NO: 3914991 - DNA, 25 bp, Homo sapien
cagaaagaacacttgcaggagcgcg

SEQ ID NO: 3914992 - DNA, 25 bp, Homo sapien
gaacacttgcaggagcgcgagctgt

SEQ ID NO: 3914993 - DNA, 25 bp, Homo sapien
aggaagagggctgaggccggacgcc

SEQ ID NO: 3914994 - DNA, 25 bp, Homo sapien
aacaccagaaagaacacttgcagga

SEQ ID NO: 3914995 - DNA, 25 bp, Homo sapien
cattcagggcctccgggtccgacgt

SEQ ID NO: 3914996 - DNA, 25 bp, Homo sapien
gacgtaggcctccgcggtctccaat

SEQ ID NO: 3914997 - DNA, 25 bp, Homo sapien
tccgacgtaggcctccgcggtctcc

SEQ ID NO: 3914998 - DNA, 25 bp, Homo sapien
aggcctccgcggtctccaatcgcat

SEQ ID NO: 3914999 - DNA, 25 bp, Homo sapien
cactgtccagcatggtagtcaccgg

SEQ ID NO: 3915000 - DNA, 25 bp, Homo sapien
ccagaggccggaactagaattgcaa

SEQ ID NO: 3915001 - DNA, 25 bp, Homo sapien
tagtcaccggccttatgtggcaatt

SEQ ID NO: 3915002 - DNA, 25 bp, Homo sapien
tattggaaatgtaccgtagctgcac

SEQ ID NO: 3915003 - DNA, 25 bp, Homo sapien
ggtcaaggtgaccatagagtggtac

SEQ ID NO: 3915004 - DNA, 25 bp, Homo sapien
gacactgagccatttctgtagctag

SEQ ID NO: 3915005 - DNA, 25 bp, Homo sapien
tatagtcaactagctggtcaaggtg

SEQ ID NO: 3915006 - DNA, 25 bp, Homo sapien
accatagagtggtactgtgtccctg

SEQ ID NO: 3915007 - DNA, 25 bp, Homo sapien
tctatgggtaatggggactcttgcc

SEQ ID NO: 3915008 - DNA, 25 bp, Homo sapien
gtaatggggactcttgcctgttctg

SEQ ID NO: 3915009 - DNA, 25 bp, Homo sapien
aagggatgaaggttcatgggtctat

SEQ ID NO: 3915010 - DNA, 25 bp, Homo sapien
aaggttcatgggtctatgggtaatg

SEQ ID NO: 3915011 - DNA, 25 bp, Homo sapien
caatttggaaaccttgcaggctctt

SEQ ID NO: 3915012 - DNA, 25 bp, Homo sapien
gcaatttggaaaccttgcaggctct

SEQ ID NO: 3915013 - DNA, 25 bp, Homo sapien
acctggtggaacaaatcagttgagg

SEQ ID NO: 3915014 - DNA, 25 bp, Homo sapien
tctgtaagaggaaaacctggtggaa

SEQ ID NO: 3915015 - DNA, 25 bp, Homo sapien
aacaaatcagttgagggctgggact

SEQ ID NO: 3915016 - DNA, 25 bp, Homo sapien
caccactctgtaagaggaaaacctg

SEQ ID NO: 3915017 - DNA, 25 bp, Homo sapien
ctgccacgttgggttgtagactttc

SEQ ID NO: 3915018 - DNA, 25 bp, Homo sapien
ctttcactttggaagagttggccat

SEQ ID NO: 3915019 - DNA, 25 bp, Homo sapien
ctcctgctgccacgttgggttgtag

SEQ ID NO: 3915020 - DNA, 25 bp, Homo sapien
cacgttgggttgtagactttcactt

SEQ ID NO: 3915021 - DNA, 25 bp, Homo sapien
agctgctggttgaatacatagaatc

SEQ ID NO: 3915022 - DNA, 25 bp, Homo sapien
ggagaggccctttgtgctatagaag

SEQ ID NO: 3915023 - DNA, 25 bp, Homo sapien
ggcttccccaagctcagttagggca

SEQ ID NO: 3915024 - DNA, 25 bp, Homo sapien
gggaaaggactttgactctcatttc

SEQ ID NO: 3915025 - DNA, 25 bp, Homo sapien
tggtcaggctctcatctacattggg

SEQ ID NO: 3915026 - DNA, 25 bp, Homo sapien
aagtatgactgaaagctcgctggag

SEQ ID NO: 3915027 - DNA, 25 bp, Homo sapien
tcctgcaggaaactcatcgcttggg

SEQ ID NO: 3915028 - DNA, 25 bp, Homo sapien
tgtaataaagtagagaaccgttgcc

SEQ ID NO: 3915029 - DNA, 25 bp, Homo sapien
cggagacggaccacagcaagcagag

SEQ ID NO: 3915030 - DNA, 25 bp, Homo sapien
tctctcacggagacggaccacagca

SEQ ID NO: 3915031 - DNA, 25 bp, Homo sapien
tgaggacctctctcacggagacgga

SEQ ID NO: 3915032 - DNA, 25 bp, Homo sapien
ctctgtttccttgaggacctctctc

SEQ ID NO: 3915033 - DNA, 25 bp, Homo sapien
tagaggcaaatgactttttcagtcc

SEQ ID NO: 3915034 - DNA, 25 bp, Homo sapien
gcaagtacttgaaagctggaggcaa

SEQ ID NO: 3915035 - DNA, 25 bp, Homo sapien
caaaagctgctacttatggaagata

SEQ ID NO: 3915036 - DNA, 25 bp, Homo sapien
cagtccccttgcagtttaagaggca

SEQ ID NO: 3915037 - DNA, 25 bp, Homo sapien
tcctgttgtgaaattagcaaaggct

SEQ ID NO: 3915038 - DNA, 25 bp, Homo sapien
tagatttgttttgttctcgaatttc

SEQ ID NO: 3915039 - DNA, 25 bp, Homo sapien
ctgggctctgcgtgtagatttgttt

SEQ ID NO: 3915040 - DNA, 25 bp, Homo sapien
tcgaatttcttgcatgctttcctgt

SEQ ID NO: 3915041 - DNA, 25 bp, Homo sapien
gcttataccgtatagaacatggaag

SEQ ID NO: 3915042 - DNA, 25 bp, Homo sapien
aacattcccacatgcttataccgta

SEQ ID NO: 3915043 - DNA, 25 bp, Homo sapien
ctgcttgccagcgtgtgagagccag

SEQ ID NO: 3915044 - DNA, 25 bp, Homo sapien
attttctgccaagacggagagccag

SEQ ID NO: 3915045 - DNA, 25 bp, Homo sapien
tcaacttgagaagtactggagcaga

SEQ ID NO: 3915046 - DNA, 25 bp, Homo sapien
ttacacaaaaaggccttgtgttaga

SEQ ID NO: 3915047 - DNA, 25 bp, Homo sapien
agactggcaacagtgtgcctgaggc

SEQ ID NO: 3915048 - DNA, 25 bp, Homo sapien
gagtcccagggagctagaggtagca

SEQ ID NO: 3915049 - DNA, 25 bp, Homo sapien
ttaaagcctggttttactgtagcag

SEQ ID NO: 3915050 - DNA, 25 bp, Homo sapien
ttccatatgtaggattgcactctga

SEQ ID NO: 3915051 - DNA, 25 bp, Homo sapien
ccaggttgcattcccaaaggttggg

SEQ ID NO: 3915052 - DNA, 25 bp, Homo sapien
tatagcgtggtctttgttagcgtaa

SEQ ID NO: 3915053 - DNA, 25 bp, Homo sapien
ctctgactctgttactttgttggca

SEQ ID NO: 3915054 - DNA, 25 bp, Homo sapien
caactcccgttgcagtgtctgggca

SEQ ID NO: 3915055 - DNA, 25 bp, Homo sapien
cccaaatgaccggatacccactgtg

SEQ ID NO: 3915056 - DNA, 25 bp, Homo sapien
cactgtggaagtcatcccctcatca

SEQ ID NO: 3915057 - DNA, 25 bp, Homo sapien
tccaaagcgttcacacatgatgctt

SEQ ID NO: 3915058 - DNA, 25 bp, Homo sapien
tgtatccaaagcgttcacacatgat

SEQ ID NO: 3915059 - DNA, 25 bp, Homo sapien
cttttgtatccaaagcgttcacaca

SEQ ID NO: 3915060 - DNA, 25 bp, Homo sapien
tatccaaagcgttcacacatgatgc

SEQ ID NO: 3915061 - DNA, 25 bp, Homo sapien
tcctgctggccagaacttggtgaaa

SEQ ID NO: 3915062 - DNA, 25 bp, Homo sapien
gtttaaggttttccttgcacacatc

SEQ ID NO: 3915063 - DNA, 25 bp, Homo sapien
caactgacatcttttcagatcctgc

SEQ ID NO: 3915064 - DNA, 25 bp, Homo sapien
cttggtgaaatatatactctaaacc

SEQ ID NO: 3915065 - DNA, 25 bp, Homo sapien
cttgggcctgcaatatcactttgtg

SEQ ID NO: 3915066 - DNA, 25 bp, Homo sapien
cggcctttaggagagcaagttggca

SEQ ID NO: 3915067 - DNA, 25 bp, Homo sapien
tggagaaaagtaactgccaggtggc

SEQ ID NO: 3915068 - DNA, 25 bp, Homo sapien
gtgtggaacacagcctaaaactgcg

SEQ ID NO: 3915069 - DNA, 25 bp, Homo sapien
gatgagaggtatggaatccactccg

SEQ ID NO: 3915070 - DNA, 25 bp, Homo sapien
tggtcagggccttcatcaagagttg

SEQ ID NO: 3915071 - DNA, 25 bp, Homo sapien
tccagtgccacaagatgaaaatcca

SEQ ID NO: 3915072 - DNA, 25 bp, Homo sapien
aaatagatgcttatccctgactgca

SEQ ID NO: 3915073 - DNA, 25 bp, Homo sapien
gactatcctgggtaggcagaaacca

SEQ ID NO: 3915074 - DNA, 25 bp, Homo sapien
tccaagtctgaaagtgttgccaccc

SEQ ID NO: 3915075 - DNA, 25 bp, Homo sapien
gcagctatagaccttaccatggaaa

SEQ ID NO: 3915076 - DNA, 25 bp, Homo sapien
gttgccacccgtcacacaacatggg

SEQ ID NO: 3915077 - DNA, 25 bp, Homo sapien
tctttcccgaacataccaggctgtc

SEQ ID NO: 3915078 - DNA, 25 bp, Homo sapien
cacgctgtgtgctcaagggtattac

SEQ ID NO: 3915079 - DNA, 25 bp, Homo sapien
tagttgcctatactgtcatcgctgc

SEQ ID NO: 3915080 - DNA, 25 bp, Homo sapien
taatcagtggttcccatacccctgg

SEQ ID NO: 3915081 - DNA, 25 bp, Homo sapien
attcctgtttggttgcctacgtcca

SEQ ID NO: 3915082 - DNA, 25 bp, Homo sapien
tatttgggagccaaactcaacttgt

SEQ ID NO: 3915083 - DNA, 25 bp, Homo sapien
tggagacaatcagcagacacaacct

SEQ ID NO: 3915084 - DNA, 25 bp, Homo sapien
tatcactgattaccattctcccctg

SEQ ID NO: 3915085 - DNA, 25 bp, Homo sapien
gagagagagtctcactccattgccc

SEQ ID NO: 3915086 - DNA, 25 bp, Homo sapien
tctcactccattgcccaggctggag

SEQ ID NO: 3915087 - DNA, 25 bp, Homo sapien
tatcagtcaaggtccctgcaagaga

SEQ ID NO: 3915088 - DNA, 25 bp, Homo sapien
cctcacatgtggcttgtagctacca

SEQ ID NO: 3915089 - DNA, 25 bp, Homo sapien
aattaggactagctgtgtgttcacc

SEQ ID NO: 3915090 - DNA, 25 bp, Homo sapien
gagatcctaggttgtattcctcagg

SEQ ID NO: 3915091 - DNA, 25 bp, Homo sapien
ttctcatgatgaaccccgcagaggc

SEQ ID NO: 3915092 - DNA, 25 bp, Homo sapien
tttcaatgatccatggccgccagct

SEQ ID NO: 3915093 - DNA, 25 bp, Homo sapien
gctgctcaactaaaaccactggtgg

SEQ ID NO: 3915094 - DNA, 25 bp, Homo sapien
taactgagcctccattagtgcactg

SEQ ID NO: 3915095 - DNA, 25 bp, Homo sapien
ggtaaagccaatacatctgtccagg

SEQ ID NO: 3915096 - DNA, 25 bp, Homo sapien
taggtaggttatgccagctcacacg

SEQ ID NO: 3915097 - DNA, 25 bp, Homo sapien
cacagcaggccagctaacgtggtat

SEQ ID NO: 3915098 - DNA, 25 bp, Homo sapien
cactctactagggatgaaacagcta

SEQ ID NO: 3915099 - DNA, 25 bp, Homo sapien
gaagctgccaatgcttggggcctct

SEQ ID NO: 3915100 - DNA, 25 bp, Homo sapien
tgagccctccagattatttcaacac

SEQ ID NO: 3915101 - DNA, 25 bp, Homo sapien
tgattttgtactttaaccagctgaa

SEQ ID NO: 3915102 - DNA, 25 bp, Homo sapien
tcttggagtactcatgaagatggaa

SEQ ID NO: 3915103 - DNA, 25 bp, Homo sapien
tgaaggatgtatttggctgtcttct

SEQ ID NO: 3915104 - DNA, 25 bp, Homo sapien
gatggaagtctacatggagaataca

SEQ ID NO: 3915105 - DNA, 25 bp, Homo sapien
gaatacaggatgaatccactctgtc

SEQ ID NO: 3915106 - DNA, 25 bp, Homo sapien
tctgcaattattggtaccaagattc

SEQ ID NO: 3915107 - DNA, 25 bp, Homo sapien
acttctacctctgcaattattggta

SEQ ID NO: 3915108 - DNA, 25 bp, Homo sapien
gacttctacctctgcaattattggt

SEQ ID NO: 3915109 - DNA, 25 bp, Homo sapien
gtccaggtaactggttctgaaaatc

SEQ ID NO: 3915110 - DNA, 25 bp, Homo sapien
tgtccaggtaactggttctgaaaat

SEQ ID NO: 3915111 - DNA, 25 bp, Homo sapien
aatgaaaaccttgtccaggtaactg

SEQ ID NO: 3915112 - DNA, 25 bp, Homo sapien
cagatgtcatctattgggaagaaca

SEQ ID NO: 3915113 - DNA, 25 bp, Homo sapien
tcagatgtcatctattgggaagaac

SEQ ID NO: 3915114 - DNA, 25 bp, Homo sapien
agatgtcatctattgggaagaacat

SEQ ID NO: 3915115 - DNA, 25 bp, Homo sapien
caacacctaagctgaaaatggtctc

SEQ ID NO: 3915116 - DNA, 25 bp, Homo sapien
cagttttgtaagaatcccatcctca

SEQ ID NO: 3915117 - DNA, 25 bp, Homo sapien
gaggtgttgtctgatcatcctggcc

SEQ ID NO: 3915118 - DNA, 25 bp, Homo sapien
tgagcccattctctactaggcccgg

SEQ ID NO: 3915119 - DNA, 25 bp, Homo sapien
attacactccaactggggcgacagt

SEQ ID NO: 3915120 - DNA, 25 bp, Homo sapien
ttacactccaactggggcgacagtg

SEQ ID NO: 3915121 - DNA, 25 bp, Homo sapien
taagtctggatcctcaatcccctgc

SEQ ID NO: 3915122 - DNA, 25 bp, Homo sapien
ttctgccccttagtctgtgggtgga

SEQ ID NO: 3915123 - DNA, 25 bp, Homo sapien
taatcactggcatcatactgcatct

SEQ ID NO: 3915124 - DNA, 25 bp, Homo sapien
taaaattctgctcttcgaagtgtcc

SEQ ID NO: 3915125 - DNA, 25 bp, Homo sapien
taacaatatacatttgcaactttac

SEQ ID NO: 3915126 - DNA, 25 bp, Homo sapien
atgataacaatatacatttgcaact

SEQ ID NO: 3915127 - DNA, 25 bp, Homo sapien
ccatgataacaatatacatttgcaa

SEQ ID NO: 3915128 - DNA, 25 bp, Homo sapien
gataacaatatacatttgcaacttt

SEQ ID NO: 3915129 - DNA, 25 bp, Homo sapien
taattaatccgagctcctcatttag

SEQ ID NO: 3915130 - DNA, 25 bp, Homo sapien
taatatcttgtggtgtatgttaaat

SEQ ID NO: 3915131 - DNA, 25 bp, Homo sapien
taaatcaataattaatccgagctcc

SEQ ID NO: 3915132 - DNA, 25 bp, Homo sapien
tcttgtggtgtatgttaaatcaata

SEQ ID NO: 3915133 - DNA, 25 bp, Homo sapien
ttggagtaagtctctgattaactgt

SEQ ID NO: 3915134 - DNA, 25 bp, Homo sapien
cttttattgcgctaatcaagtcttt

SEQ ID NO: 3915135 - DNA, 25 bp, Homo sapien
ttattgcgctaatcaagtcttttgg

SEQ ID NO: 3915136 - DNA, 25 bp, Homo sapien
aacttctgggttggagtaagtctct

SEQ ID NO: 3915137 - DNA, 25 bp, Homo sapien
ttagaggcccacagatatgaagagc

SEQ ID NO: 3915138 - DNA, 25 bp, Homo sapien
taaggctggcatcttactgagcaag

SEQ ID NO: 3915139 - DNA, 25 bp, Homo sapien
caagtacataagtctgagtggtcca

SEQ ID NO: 3915140 - DNA, 25 bp, Homo sapien
gcatcgtgggacatttagcagcacc

SEQ ID NO: 3915141 - DNA, 25 bp, Homo sapien
ttcatctgagacaggatatctgctg

SEQ ID NO: 3915142 - DNA, 25 bp, Homo sapien
tggtcagtgtcacagtattcatgtc

SEQ ID NO: 3915143 - DNA, 25 bp, Homo sapien
agtattcatgtctgagagtctctgt

SEQ ID NO: 3915144 - DNA, 25 bp, Homo sapien
tgttaagttggcctggtggtcagtg

SEQ ID NO: 3915145 - DNA, 25 bp, Homo sapien
agaccccagggtacgctacaactca

SEQ ID NO: 3915146 - DNA, 25 bp, Homo sapien
gatgagagacccacgccccaggcaa

SEQ ID NO: 3915147 - DNA, 25 bp, Homo sapien
cagaacagaccccagggtacgctac

SEQ ID NO: 3915148 - DNA, 25 bp, Homo sapien
tcttcaccaggacgagagggatgag

SEQ ID NO: 3915149 - DNA, 25 bp, Homo sapien
gcgaacagacttggcgcaccgaaga

SEQ ID NO: 3915150 - DNA, 25 bp, Homo sapien
ccggcggcgaacagacttggcgcac

SEQ ID NO: 3915151 - DNA, 25 bp, Homo sapien
cttggcgcaccgaagattcccaaag

SEQ ID NO: 3915152 - DNA, 25 bp, Homo sapien
gtgatagaccccggcggcgaacaga

SEQ ID NO: 3915153 - DNA, 25 bp, Homo sapien
tccgtccaggtgaatgtcgggctgc

SEQ ID NO: 3915154 - DNA, 25 bp, Homo sapien
tctgattcttccctgtcagacattc

SEQ ID NO: 3915155 - DNA, 25 bp, Homo sapien
tccctgcccagacgtaagaaaagtg

SEQ ID NO: 3915156 - DNA, 25 bp, Homo sapien
gaaaagtgcactgtccgtccaggtg

SEQ ID NO: 3915157 - DNA, 25 bp, Homo sapien
gcatagtgctaggtctcacccaagg

SEQ ID NO: 3915158 - DNA, 25 bp, Homo sapien
gaagggctatctgcttatgggcacc

SEQ ID NO: 3915159 - DNA, 25 bp, Homo sapien
caggttctgactgctgggatggaca

SEQ ID NO: 3915160 - DNA, 25 bp, Homo sapien
cagaaggtgtctctcactgtggccg

SEQ ID NO: 3915161 - DNA, 25 bp, Homo sapien
ggatttagggtcacatggtctggta

SEQ ID NO: 3915162 - DNA, 25 bp, Homo sapien
gatcagacgcacagttcacagtaag

SEQ ID NO: 3915163 - DNA, 25 bp, Homo sapien
ggctatttcagcagtctttcagtga

SEQ ID NO: 3915164 - DNA, 25 bp, Homo sapien
tctggtatctttggaccctgcccta

SEQ ID NO: 3915165 - DNA, 25 bp, Homo sapien
tcatgacttccctgaattaagggaa

SEQ ID NO: 3915166 - DNA, 25 bp, Homo sapien
caagtagttctccaggtaacattct

SEQ ID NO: 3915167 - DNA, 25 bp, Homo sapien
agagcgagcgagaaagtaagagaca

SEQ ID NO: 3915168 - DNA, 25 bp, Homo sapien
actgattaagagaactcattcttca

SEQ ID NO: 3915169 - DNA, 25 bp, Homo sapien
gcaaagagggagctggcacttcacg

SEQ ID NO: 3915170 - DNA, 25 bp, Homo sapien
aaagagggagctggcacttcacgag

SEQ ID NO: 3915171 - DNA, 25 bp, Homo sapien
cctcaagaaacttctgggaggcctc

SEQ ID NO: 3915172 - DNA, 25 bp, Homo sapien
aaacttgcagtcatggtggagggca

SEQ ID NO: 3915173 - DNA, 25 bp, Homo sapien
tgagaacgtggaggaaagcctttat

SEQ ID NO: 3915174 - DNA, 25 bp, Homo sapien
tataacatcgttcttggcagtggtt

SEQ ID NO: 3915175 - DNA, 25 bp, Homo sapien
tataaaactcctagatgagaacgtg

SEQ ID NO: 3915176 - DNA, 25 bp, Homo sapien
gaaagcctttataacatcgttcttg

SEQ ID NO: 3915177 - DNA, 25 bp, Homo sapien
gtcttggtctgaagatgattaatcc

SEQ ID NO: 3915178 - DNA, 25 bp, Homo sapien
ctgaagagtcttggtctgaagatga

SEQ ID NO: 3915179 - DNA, 25 bp, Homo sapien
gattaatccaaacagtcatctcatg

SEQ ID NO: 3915180 - DNA, 25 bp, Homo sapien
catgacatcatgaggggtatatgaa

SEQ ID NO: 3915181 - DNA, 25 bp, Homo sapien
gaaaggacctctccctactacacag

SEQ ID NO: 3915182 - DNA, 25 bp, Homo sapien
cacagtatattacgaacttggaaac

SEQ ID NO: 3915183 - DNA, 25 bp, Homo sapien
taaatctcttcgacatgggcaaggg

SEQ ID NO: 3915184 - DNA, 25 bp, Homo sapien
aaacagatgtatgacttagaaaggg

SEQ ID NO: 3915185 - DNA, 25 bp, Homo sapien
catttcccagagtcatttggctcag

SEQ ID NO: 3915186 - DNA, 25 bp, Homo sapien
tgcaagctatgtaagcaggaaatgc

SEQ ID NO: 3915187 - DNA, 25 bp, Homo sapien
actgatgtcgtattgattgccctga

SEQ ID NO: 3915188 - DNA, 25 bp, Homo sapien
gcactgcctacctggagaagattca

SEQ ID NO: 3915189 - DNA, 25 bp, Homo sapien
gcccaccaataatgtaggagacttc

SEQ ID NO: 3915190 - DNA, 25 bp, Homo sapien
tgtaccactttttatgcccaccaat

SEQ ID NO: 3915191 - DNA, 25 bp, Homo sapien
tctttcactttcttacaaacacttg

SEQ ID NO: 3915192 - DNA, 25 bp, Homo sapien
aatgtaggagacttccagttctttc

SEQ ID NO: 3915193 - DNA, 25 bp, Homo sapien
gcaatgtttcccaaccgaagaatcg

SEQ ID NO: 3915194 - DNA, 25 bp, Homo sapien
tgctacaccgcttttccatcatggg

SEQ ID NO: 3915195 - DNA, 25 bp, Homo sapien
tccaaggaggtaatagtgctctcag

SEQ ID NO: 3915196 - DNA, 25 bp, Homo sapien
caaacagaggtcttgcagagagcac

SEQ ID NO: 3915197 - DNA, 25 bp, Homo sapien
caggtgctccgcatcagttggatgc

SEQ ID NO: 3915198 - DNA, 25 bp, Homo sapien
aaaggtggccccaatgctccaagtc

SEQ ID NO: 3915199 - DNA, 25 bp, Homo sapien
cagataaggttcctcgaaataccag

SEQ ID NO: 3915200 - DNA, 25 bp, Homo sapien
gaaataccagtccatatgtccctgc

SEQ ID NO: 3915201 - DNA, 25 bp, Homo sapien
tgtcagagccttaagccagtttcca

SEQ ID NO: 3915202 - DNA, 25 bp, Homo sapien
ccaaagcagggatagtccatatagc

SEQ ID NO: 3915203 - DNA, 25 bp, Homo sapien
catacatgacagcactggctcacaa

SEQ ID NO: 3915204 - DNA, 25 bp, Homo sapien
gaaacccttgtaatgcactgatttg

SEQ ID NO: 3915205 - DNA, 25 bp, Homo sapien
tataccccagaggaacattcacggg

SEQ ID NO: 3915206 - DNA, 25 bp, Homo sapien
cctggtaaaggtgaagatgctcaac

SEQ ID NO: 3915207 - DNA, 25 bp, Homo sapien
catcacaatctctgagggtggaacc

SEQ ID NO: 3915208 - DNA, 25 bp, Homo sapien
gatagtctatcagattccctagggc

SEQ ID NO: 3915209 - DNA, 25 bp, Homo sapien
gccagtgttacgttagatgtagata

SEQ ID NO: 3915210 - DNA, 25 bp, Homo sapien
ctcttgttcattcaggtgatattta

SEQ ID NO: 3915211 - DNA, 25 bp, Homo sapien
gggagaataatctatttcaagatga

SEQ ID NO: 3915212 - DNA, 25 bp, Homo sapien
aagctgtgaccaaagcattgatgcc

SEQ ID NO: 3915213 - DNA, 25 bp, Homo sapien
tgtacttttattttgcgacaaatcc

SEQ ID NO: 3915214 - DNA, 25 bp, Homo sapien
aatccttcctaagctggaatttggc

SEQ ID NO: 3915215 - DNA, 25 bp, Homo sapien
taggatcgaaaggactctgaagagt

SEQ ID NO: 3915216 - DNA, 25 bp, Homo sapien
ggaatggcgacctaaacacccaaca

SEQ ID NO: 3915217 - DNA, 25 bp, Homo sapien
gattgtctttcccatgagaattgag

SEQ ID NO: 3915218 - DNA, 25 bp, Homo sapien
tcttcttggagcattactataatag

SEQ ID NO: 3915219 - DNA, 25 bp, Homo sapien
attctctgtcatcttagtgttagtg

SEQ ID NO: 3915220 - DNA, 25 bp, Homo sapien
ttgggttgtatccagggcaatttga

SEQ ID NO: 3915221 - DNA, 25 bp, Homo sapien
tagggtacggctcatatacatgtct

SEQ ID NO: 3915222 - DNA, 25 bp, Homo sapien
gtgataatccaccaaagaggttaaa

SEQ ID NO: 3915223 - DNA, 25 bp, Homo sapien
cagtctcactgtcctagggttacca

SEQ ID NO: 3915224 - DNA, 25 bp, Homo sapien
tgggtataagcatcgtctatggata

SEQ ID NO: 3915225 - DNA, 25 bp, Homo sapien
tacgagcacagatggttaattacat

SEQ ID NO: 3915226 - DNA, 25 bp, Homo sapien
tgcagtttcctgatttacgagcaca

SEQ ID NO: 3915227 - DNA, 25 bp, Homo sapien
caattgacgtcggagtgttctcaca

SEQ ID NO: 3915228 - DNA, 25 bp, Homo sapien
gtttgacaagcaaggttactagaag

SEQ ID NO: 3915229 - DNA, 25 bp, Homo sapien
ggaagagattaattaggtttctaga

SEQ ID NO: 3915230 - DNA, 25 bp, Homo sapien
gaagaaaggtggagtttgaggtgga

SEQ ID NO: 3915231 - DNA, 25 bp, Homo sapien
catttggagggcctgatgatccacg

SEQ ID NO: 3915232 - DNA, 25 bp, Homo sapien
agggcctgatgatccacggagcagc

SEQ ID NO: 3915233 - DNA, 25 bp, Homo sapien
aaactgaggcgtcggaactttgctc

SEQ ID NO: 3915234 - DNA, 25 bp, Homo sapien
aaggtaaaccgaatccatgccgtga

SEQ ID NO: 3915235 - DNA, 25 bp, Homo sapien
ccgcgggcatcgaggagccatcgaa

SEQ ID NO: 3915236 - DNA, 25 bp, Homo sapien
tgaagacttttaaacgccaaactga

SEQ ID NO: 3915237 - DNA, 25 bp, Homo sapien
ccggcgatcaggccggcttcgcagt

SEQ ID NO: 3915238 - DNA, 25 bp, Homo sapien
cttcgcagtaggtggcggctgagcg

SEQ ID NO: 3915239 - DNA, 25 bp, Homo sapien
cgatcaggccggcttcgcagtaggt

SEQ ID NO: 3915240 - DNA, 25 bp, Homo sapien
cggcttcgcagtaggtggcggctga

SEQ ID NO: 3915241 - DNA, 25 bp, Homo sapien
tcctttaacaatgggcggcgcgagc

SEQ ID NO: 3915242 - DNA, 25 bp, Homo sapien
gctttgccatgggagcgtttcccct

SEQ ID NO: 3915243 - DNA, 25 bp, Homo sapien
tttgtatgcggagccgcctgccggt

SEQ ID NO: 3915244 - DNA, 25 bp, Homo sapien
tgtatcgcgagacgagattggcagc

SEQ ID NO: 3915245 - DNA, 25 bp, Homo sapien
ttgcccgacacatagtcgagcagtg

SEQ ID NO: 3915246 - DNA, 25 bp, Homo sapien
cagacccggcttcgcgtgtggcgtt

SEQ ID NO: 3915247 - DNA, 25 bp, Homo sapien
cgacacatagtcgagcagtgagtct

SEQ ID NO: 3915248 - DNA, 25 bp, Homo sapien
acatagtcgagcagtgagtctcaga

SEQ ID NO: 3915249 - DNA, 25 bp, Homo sapien
gcgcctggggtgtgtcttacagact

SEQ ID NO: 3915250 - DNA, 25 bp, Homo sapien
cagactcgagttgccgcgtcgggct

SEQ ID NO: 3915251 - DNA, 25 bp, Homo sapien
gggtgtgtcttacagactcgagttg

SEQ ID NO: 3915252 - DNA, 25 bp, Homo sapien
tgtcttacagactcgagttgccgcg

SEQ ID NO: 3915253 - DNA, 25 bp, Homo sapien
tatctgaccttaaatggattggcca

SEQ ID NO: 3915254 - DNA, 25 bp, Homo sapien
ggcaataagctggataactatgtca

SEQ ID NO: 3915255 - DNA, 25 bp, Homo sapien
cacttcatactaggaacactggttc

SEQ ID NO: 3915256 - DNA, 25 bp, Homo sapien
ggattggccaacctcgctaccttgg

SEQ ID NO: 3915257 - DNA, 25 bp, Homo sapien
gacccaaagaggcttgatgacaact

SEQ ID NO: 3915258 - DNA, 25 bp, Homo sapien
gatgacaactctggttctgttgctg

SEQ ID NO: 3915259 - DNA, 25 bp, Homo sapien
taataggagctttagttataatttc

SEQ ID NO: 3915260 - DNA, 25 bp, Homo sapien
gaatctcctggcataggcataatat

SEQ ID NO: 3915261 - DNA, 25 bp, Homo sapien
caccatgaatcctgggagactaagc

SEQ ID NO: 3915262 - DNA, 25 bp, Homo sapien
tcctggctgatggtccaaatatttc

SEQ ID NO: 3915263 - DNA, 25 bp, Homo sapien
gatttgacctgtggtagcatctggg

SEQ ID NO: 3915264 - DNA, 25 bp, Homo sapien
catctgggcctaatgttggcttcta

SEQ ID NO: 3915265 - DNA, 25 bp, Homo sapien
tggcataaaacatccgttcattgcg

SEQ ID NO: 3915266 - DNA, 25 bp, Homo sapien
aagtatattggacaccactgttgcc

SEQ ID NO: 3915267 - DNA, 25 bp, Homo sapien
tttgcagctctagtgaaccatctca

SEQ ID NO: 3915268 - DNA, 25 bp, Homo sapien
gcaagtatggtgctaaagtctacac

SEQ ID NO: 3915269 - DNA, 25 bp, Homo sapien
gataaatacgactagcacacttgca

SEQ ID NO: 3915270 - DNA, 25 bp, Homo sapien
caattaggctagtagaggcccgcac

SEQ ID NO: 3915271 - DNA, 25 bp, Homo sapien
aaattaggctggtgtagtctggaac

SEQ ID NO: 3915272 - DNA, 25 bp, Homo sapien
tctcaggcacgtggtaaaagcctcc

SEQ ID NO: 3915273 - DNA, 25 bp, Homo sapien
ttttgtctactcaaagggacctgta

SEQ ID NO: 3915274 - DNA, 25 bp, Homo sapien
ggaatctcacttggtgggaacaagt

SEQ ID NO: 3915275 - DNA, 25 bp, Homo sapien
tctccctactagaaccttgtgttag

SEQ ID NO: 3915276 - DNA, 25 bp, Homo sapien
gagtgactgtcttgtatccatttac

SEQ ID NO: 3915277 - DNA, 25 bp, Homo sapien
aggaggactgcttgagcccaggagg

SEQ ID NO: 3915278 - DNA, 25 bp, Homo sapien
gtgagccatgtttgtgccactatac

SEQ ID NO: 3915279 - DNA, 25 bp, Homo sapien
tctcagctacttgtggggctgaagc

SEQ ID NO: 3915280 - DNA, 25 bp, Homo sapien
tcgaggctgcagtgagccatgtttg

SEQ ID NO: 3915281 - DNA, 25 bp, Homo sapien
tgttgacccatctaggtgcctgaga

SEQ ID NO: 3915282 - DNA, 25 bp, Homo sapien
gatagcctgtcacgcatgccaacag

SEQ ID NO: 3915283 - DNA, 25 bp, Homo sapien
tgagatcagaatatccttactggcc

SEQ ID NO: 3915284 - DNA, 25 bp, Homo sapien
ccgccagatgtacagagatagcctg

SEQ ID NO: 3915285 - DNA, 25 bp, Homo sapien
tcacctgaggaacttgataacaatt

SEQ ID NO: 3915286 - DNA, 25 bp, Homo sapien
gaggtttaagccttactaggtcagc

SEQ ID NO: 3915287 - DNA, 25 bp, Homo sapien
tataactacgtatattaagccttgt

SEQ ID NO: 3915288 - DNA, 25 bp, Homo sapien
taacacagtatgtggagtaaacctg

SEQ ID NO: 3915289 - DNA, 25 bp, Homo sapien
actccatgacaaagtctataggaca

SEQ ID NO: 3915290 - DNA, 25 bp, Homo sapien
tccatgacaaagtctataggacacc

SEQ ID NO: 3915291 - DNA, 25 bp, Homo sapien
gtttctgtttcactccatgacaaag

SEQ ID NO: 3915292 - DNA, 25 bp, Homo sapien
gtttcactccatgacaaagtctata

SEQ ID NO: 3915293 - DNA, 25 bp, Homo sapien
ggcaagaagggcgacttttctagaa

SEQ ID NO: 3915294 - DNA, 25 bp, Homo sapien
ggaagcgcggcgacacagttcctac

SEQ ID NO: 3915295 - DNA, 25 bp, Homo sapien
cttagcggcaagttaacgggaagcg

SEQ ID NO: 3915296 - DNA, 25 bp, Homo sapien
tctagaaaaacttagcggcaagtta

SEQ ID NO: 3915297 - DNA, 25 bp, Homo sapien
ggggggcactctgccgccaggcagt

SEQ ID NO: 3915298 - DNA, 25 bp, Homo sapien
gtggggggcactctgccgccaggca

SEQ ID NO: 3915299 - DNA, 25 bp, Homo sapien
ttgtggggggcactctgccgccagg

SEQ ID NO: 3915300 - DNA, 25 bp, Homo sapien
gattgtggggggcactctgccgcca

SEQ ID NO: 3915301 - DNA, 25 bp, Homo sapien
ggcaacccttgactcgatctccatt

SEQ ID NO: 3915302 - DNA, 25 bp, Homo sapien
tgactcgatctccattacgggccct

SEQ ID NO: 3915303 - DNA, 25 bp, Homo sapien
ctccttgaagccgaaggctcttaag

SEQ ID NO: 3915304 - DNA, 25 bp, Homo sapien
ttgagaggcctccttgaagccgaag

SEQ ID NO: 3915305 - DNA, 25 bp, Homo sapien
gagggatccgcgttcggcagtggga

SEQ ID NO: 3915306 - DNA, 25 bp, Homo sapien
gatatattgaatcgccgcggccaga

SEQ ID NO: 3915307 - DNA, 25 bp, Homo sapien
ccatgacagttgcttccggatatat

SEQ ID NO: 3915308 - DNA, 25 bp, Homo sapien
cgaagcgaagtggttcccggaagcg

SEQ ID NO: 3915309 - DNA, 25 bp, Homo sapien
ttagacacgtgttgaaattcccagt

SEQ ID NO: 3915310 - DNA, 25 bp, Homo sapien
tacttagtttagtccagttcctgag

SEQ ID NO: 3915311 - DNA, 25 bp, Homo sapien
gaaaatggccattcctttaagtgtg

SEQ ID NO: 3915312 - DNA, 25 bp, Homo sapien
tgcatagagttgttcgtcggcatct

SEQ ID NO: 3915313 - DNA, 25 bp, Homo sapien
tattggtatatccttctgcgccaag

SEQ ID NO: 3915314 - DNA, 25 bp, Homo sapien
tgttgcttaaacgtttgccgccact

SEQ ID NO: 3915315 - DNA, 25 bp, Homo sapien
tcttctagaactactggcggcagct

SEQ ID NO: 3915316 - DNA, 25 bp, Homo sapien
gagatgtgagcctccctcattgtga

SEQ ID NO: 3915317 - DNA, 25 bp, Homo sapien
ggttgctaaaacctgcgtgccagaa

SEQ ID NO: 3915318 - DNA, 25 bp, Homo sapien
tcagggtggagaccattcccagtca

SEQ ID NO: 3915319 - DNA, 25 bp, Homo sapien
gaggcgccatttgctaaaccggaac

SEQ ID NO: 3915320 - DNA, 25 bp, Homo sapien
catttcaccggcagtaagatcagca

SEQ ID NO: 3915321 - DNA, 25 bp, Homo sapien
gagaggtcagcggcgaacccagctc

SEQ ID NO: 3915322 - DNA, 25 bp, Homo sapien
aggtcagcggcgaacccagctccat

SEQ ID NO: 3915323 - DNA, 25 bp, Homo sapien
gctccatggcctagtctcgtcagac

SEQ ID NO: 3915324 - DNA, 25 bp, Homo sapien
cagctccatggcctagtctcgtcag

SEQ ID NO: 3915325 - DNA, 25 bp, Homo sapien
tgtctcaggtaaagcgcagatccct

SEQ ID NO: 3915326 - DNA, 25 bp, Homo sapien
gactcgcaggcaatgggtactacga

SEQ ID NO: 3915327 - DNA, 25 bp, Homo sapien
tgtcagaacttctagagggccaccc

SEQ ID NO: 3915328 - DNA, 25 bp, Homo sapien
gaagcgcgagttaaatagtcccggc

SEQ ID NO: 3915329 - DNA, 25 bp, Homo sapien
cctatgtatgttaacattaccagtt

SEQ ID NO: 3915330 - DNA, 25 bp, Homo sapien
cccagccgtgatttctgacctatgt

SEQ ID NO: 3915331 - DNA, 25 bp, Homo sapien
gctcccagccgtgatttctgaccta

SEQ ID NO: 3915332 - DNA, 25 bp, Homo sapien
ttaccagttccttggctcctcactt

SEQ ID NO: 3915333 - DNA, 25 bp, Homo sapien
tatgtagcgaaaggacagggctctt

SEQ ID NO: 3915334 - DNA, 25 bp, Homo sapien
taacagttggtgctagcaatcccct

SEQ ID NO: 3915335 - DNA, 25 bp, Homo sapien
gaagagagtatccttgctccaagag

SEQ ID NO: 3915336 - DNA, 25 bp, Homo sapien
tacttgggcataatgggcagatcct

SEQ ID NO: 3915337 - DNA, 25 bp, Homo sapien
gaaaccaacgagttctgtgaaagct

SEQ ID NO: 3915338 - DNA, 25 bp, Homo sapien
tctttataccttcttgcctgatggc

SEQ ID NO: 3915339 - DNA, 25 bp, Homo sapien
aatatctccgattcagtaaaacagc

SEQ ID NO: 3915340 - DNA, 25 bp, Homo sapien
tcttattcctaacatgctatctgag

SEQ ID NO: 3915341 - DNA, 25 bp, Homo sapien
gcagtttgtctactttcttagtgaa

SEQ ID NO: 3915342 - DNA, 25 bp, Homo sapien
tgcacattatacttgtactgttttg

SEQ ID NO: 3915343 - DNA, 25 bp, Homo sapien
caagctatcttgctatgcacattat

SEQ ID NO: 3915344 - DNA, 25 bp, Homo sapien
cttaaattgagcctaagaatggagt

SEQ ID NO: 3915345 - DNA, 25 bp, Homo sapien
ggcccaccagacatagtttactgac

SEQ ID NO: 3915346 - DNA, 25 bp, Homo sapien
taaataagcttcgtaggccttctag

SEQ ID NO: 3915347 - DNA, 25 bp, Homo sapien
tcctaactactcaattctcataatg

SEQ ID NO: 3915348 - DNA, 25 bp, Homo sapien
ccttctagtttctgtcctaactact

SEQ ID NO: 3915349 - DNA, 25 bp, Homo sapien
tatcttggaagtttaaaggagtaca

SEQ ID NO: 3915350 - DNA, 25 bp, Homo sapien
tggaagtttaaaggagtacactgaa

SEQ ID NO: 3915351 - DNA, 25 bp, Homo sapien
tgaaaattagttactttcctgaaca

SEQ ID NO: 3915352 - DNA, 25 bp, Homo sapien
gaacaattaacagtaatcaactggg

SEQ ID NO: 3915353 - DNA, 25 bp, Homo sapien
ggctcaatactagatttgagatggc

SEQ ID NO: 3915354 - DNA, 25 bp, Homo sapien
gaagccagatgtgaagaattaagga

SEQ ID NO: 3915355 - DNA, 25 bp, Homo sapien
gaaagtattctaatgtctcaccaag

SEQ ID NO: 3915356 - DNA, 25 bp, Homo sapien
caccaagtagagaacatagagatag

SEQ ID NO: 3915357 - DNA, 25 bp, Homo sapien
ctgccaggatcttgaatagtctcct

SEQ ID NO: 3915358 - DNA, 25 bp, Homo sapien
tagtctcctggtcagttgtccggaa

SEQ ID NO: 3915359 - DNA, 25 bp, Homo sapien
tgatgggtttgagtgttttctattc

SEQ ID NO: 3915360 - DNA, 25 bp, Homo sapien
agccagatattgactgttagagaaa

SEQ ID NO: 3915361 - DNA, 25 bp, Homo sapien
ttcaaccataaaagcactggtggtg

SEQ ID NO: 3915362 - DNA, 25 bp, Homo sapien
acacttcaaccataaaagcactggt

SEQ ID NO: 3915363 - DNA, 25 bp, Homo sapien
accataaaagcactggtggtgttat

SEQ ID NO: 3915364 - DNA, 25 bp, Homo sapien
ccacacttcaaccataaaagcactg

SEQ ID NO: 3915365 - DNA, 25 bp, Homo sapien
tggactgccttcataattcattgcc

SEQ ID NO: 3915366 - DNA, 25 bp, Homo sapien
gtgcagttcatcctttgcaccagcc

SEQ ID NO: 3915367 - DNA, 25 bp, Homo sapien
cttcaacaatgtgcagttcatcctt

SEQ ID NO: 3915368 - DNA, 25 bp, Homo sapien
gccttcataattcattgcctctgct

SEQ ID NO: 3915369 - DNA, 25 bp, Homo sapien
aatcttccatcaggtggcggcacac

SEQ ID NO: 3915370 - DNA, 25 bp, Homo sapien
gggggctcacgtccatgtccatcga

SEQ ID NO: 3915371 - DNA, 25 bp, Homo sapien
catcgaatcttccatcaggtggcgg

SEQ ID NO: 3915372 - DNA, 25 bp, Homo sapien
tcgaatcttccatcaggtggcggca

SEQ ID NO: 3915373 - DNA, 25 bp, Homo sapien
cagtggagagcccagctacattagt

SEQ ID NO: 3915374 - DNA, 25 bp, Homo sapien
taacagcataatcctagacaagaac

SEQ ID NO: 3915375 - DNA, 25 bp, Homo sapien
tatcccatggttgagagtgctcaca

SEQ ID NO: 3915376 - DNA, 25 bp, Homo sapien
taattgtcaagcattggcagtggag

SEQ ID NO: 3915377 - DNA, 25 bp, Homo sapien
tggatgaccacttcaatagctgact

SEQ ID NO: 3915378 - DNA, 25 bp, Homo sapien
atattaacagttcatcaggtcaggc

SEQ ID NO: 3915379 - DNA, 25 bp, Homo sapien
aactttgggaaagtgtctgaagcaa

SEQ ID NO: 3915380 - DNA, 25 bp, Homo sapien
ggtcaggcaatagaacaagtccaca

SEQ ID NO: 3915381 - DNA, 25 bp, Homo sapien
ttaactgcatacttcagtctggtgg

SEQ ID NO: 3915382 - DNA, 25 bp, Homo sapien
taactgcatacttcagtctggtgga

SEQ ID NO: 3915383 - DNA, 25 bp, Homo sapien
tttaactgcatacttcagtctggtg

SEQ ID NO: 3915384 - DNA, 25 bp, Homo sapien
ataagaaccaaaggactatgttgat

SEQ ID NO: 3915385 - DNA, 25 bp, Homo sapien
gaaccaaaggactatgttgatgatt

SEQ ID NO: 3915386 - DNA, 25 bp, Homo sapien
tcctgatgatttcagcaacacttcc

SEQ ID NO: 3915387 - DNA, 25 bp, Homo sapien
ctgatgatttcagcaacacttccaa

SEQ ID NO: 3915388 - DNA, 25 bp, Homo sapien
cattctcaagttagtaaaagttatt

SEQ ID NO: 3915389 - DNA, 25 bp, Homo sapien
gtgttaaatttgagctccactcctc

SEQ ID NO: 3915390 - DNA, 25 bp, Homo sapien
ttattacaccccagctgacattctg

SEQ ID NO: 3915391 - DNA, 25 bp, Homo sapien
tgttaaatttgagctccactcctcc

SEQ ID NO: 3915392 - DNA, 25 bp, Homo sapien
gaaatagcacaatctctttgaagtg

SEQ ID NO: 3915393 - DNA, 25 bp, Homo sapien
tcttttagataattggctagctgaa

SEQ ID NO: 3915394 - DNA, 25 bp, Homo sapien
tcaagggccagaaaacgaaatagca

SEQ ID NO: 3915395 - DNA, 25 bp, Homo sapien
taagagacagggactttcaaatacc

SEQ ID NO: 3915396 - DNA, 25 bp, Homo sapien
tacacccatttggacggctactata

SEQ ID NO: 3915397 - DNA, 25 bp, Homo sapien
taaaccctcgtgtgctgttggtgga

SEQ ID NO: 3915398 - DNA, 25 bp, Homo sapien
gagctgtctatcaccttacacccat

SEQ ID NO: 3915399 - DNA, 25 bp, Homo sapien
tttggacggctactataaaacaaca

SEQ ID NO: 3915400 - DNA, 25 bp, Homo sapien
tgttgcttcaataaatcgcacagga

SEQ ID NO: 3915401 - DNA, 25 bp, Homo sapien
tcgcacaggaatattatatactcgc

SEQ ID NO: 3915402 - DNA, 25 bp, Homo sapien
tactcgcttattaaagaatacaact

SEQ ID NO: 3915403 - DNA, 25 bp, Homo sapien
catggccagagcttttccgaataag

SEQ ID NO: 3915404 - DNA, 25 bp, Homo sapien
actccagtgaaactgcatcatctca

SEQ ID NO: 3915405 - DNA, 25 bp, Homo sapien
tgcactccagtgaaactgcatcatc

SEQ ID NO: 3915406 - DNA, 25 bp, Homo sapien
actgcactccagtgaaactgcatca

SEQ ID NO: 3915407 - DNA, 25 bp, Homo sapien
tccagtgaaactgcatcatctcaaa

SEQ ID NO: 3915408 - DNA, 25 bp, Homo sapien
cttgtttgatctgtgcaatgcctct

SEQ ID NO: 3915409 - DNA, 25 bp, Homo sapien
gcagactttcgatcacaggctccag

SEQ ID NO: 3915410 - DNA, 25 bp, Homo sapien
ggctccagcataccatggcttgcag

SEQ ID NO: 3915411 - DNA, 25 bp, Homo sapien
catggcttgcagagaacgccagctt

SEQ ID NO: 3915412 - DNA, 25 bp, Homo sapien
tccattgtgctcttattgctcttac

SEQ ID NO: 3915413 - DNA, 25 bp, Homo sapien
ttcttgcaagaaaggatatatgcct

SEQ ID NO: 3915414 - DNA, 25 bp, Homo sapien
gacacatgctattatccgtatttta

SEQ ID NO: 3915415 - DNA, 25 bp, Homo sapien
catatatttgtatggaaacttagaa

SEQ ID NO: 3915416 - DNA, 25 bp, Homo sapien
ctgttctgaaatagtggaattagat

SEQ ID NO: 3915417 - DNA, 25 bp, Homo sapien
tgggtaggggcccatccacagttgg

SEQ ID NO: 3915418 - DNA, 25 bp, Homo sapien
gaattagatgaaaagctgggtaggg

SEQ ID NO: 3915419 - DNA, 25 bp, Homo sapien
tctgaaatagtggaattagatgaaa

SEQ ID NO: 3915420 - DNA, 25 bp, Homo sapien
gcagaggtatgggtttttggtggat

SEQ ID NO: 3915421 - DNA, 25 bp, Homo sapien
tggcagaggtatgggtttttggtgg

SEQ ID NO: 3915422 - DNA, 25 bp, Homo sapien
ttggcagaggtatgggtttttggtg

SEQ ID NO: 3915423 - DNA, 25 bp, Homo sapien
cagaggtatgggtttttggtggatt

SEQ ID NO: 3915424 - DNA, 25 bp, Homo sapien
tggcgttcagcaggtataggttttt

SEQ ID NO: 3915425 - DNA, 25 bp, Homo sapien
ccctcggtggcgttcagcaggtata

SEQ ID NO: 3915426 - DNA, 25 bp, Homo sapien
ttgaccctcggtggcgttcagcagg

SEQ ID NO: 3915427 - DNA, 25 bp, Homo sapien
tgtgacttgaccctcggtggcgttc

SEQ ID NO: 3915428 - DNA, 25 bp, Homo sapien
tcttcccgggaacatgtcttagtta

SEQ ID NO: 3915429 - DNA, 25 bp, Homo sapien
tactgagatgtcatggatctgtgca

SEQ ID NO: 3915430 - DNA, 25 bp, Homo sapien
taggattagagtgaaatgtctgtcc

SEQ ID NO: 3915431 - DNA, 25 bp, Homo sapien
gatctgtgcacttgccagtctgttg

SEQ ID NO: 3915432 - DNA, 25 bp, Homo sapien
aacacttgaagcattctgttgagag

SEQ ID NO: 3915433 - DNA, 25 bp, Homo sapien
tcacaaacacttgaagcattctgtt

SEQ ID NO: 3915434 - DNA, 25 bp, Homo sapien
caaacacttgaagcattctgttgag

SEQ ID NO: 3915435 - DNA, 25 bp, Homo sapien
acttgaagcattctgttgagaggca

SEQ ID NO: 3915436 - DNA, 25 bp, Homo sapien
actgcttgggcagcaacttcagttg

SEQ ID NO: 3915437 - DNA, 25 bp, Homo sapien
tcttggactgcttgggcagcaactt

SEQ ID NO: 3915438 - DNA, 25 bp, Homo sapien
tgctaagattgctgtgttcaccata

SEQ ID NO: 3915439 - DNA, 25 bp, Homo sapien
ctgcttgggcagcaacttcagttgc

SEQ ID NO: 3915440 - DNA, 25 bp, Homo sapien
tgtcttcagtggtgtcgttggtttt

SEQ ID NO: 3915441 - DNA, 25 bp, Homo sapien
ccggcccgtggcaacggggatggtg

SEQ ID NO: 3915442 - DNA, 25 bp, Homo sapien
ccgtggcaacggggatggtgcagct

SEQ ID NO: 3915443 - DNA, 25 bp, Homo sapien
cccgtggcaacggggatggtgcagc

SEQ ID NO: 3915444 - DNA, 25 bp, Homo sapien
ggcccgtggcaacggggatggtgca

SEQ ID NO: 3915445 - DNA, 25 bp, Homo sapien
tctgtaagtacaggctggacctgct

SEQ ID NO: 3915446 - DNA, 25 bp, Homo sapien
cctcaaggatgggagcaacagcaaa

SEQ ID NO: 3915447 - DNA, 25 bp, Homo sapien
ttataacagggaagatacatgcacc

SEQ ID NO: 3915448 - DNA, 25 bp, Homo sapien
tgtcttccacggtacctgaactggg

SEQ ID NO: 3915449 - DNA, 25 bp, Homo sapien
cactgtcacggaggacactggtgga

SEQ ID NO: 3915450 - DNA, 25 bp, Homo sapien
cactggtggaaagcctatggtcttg

SEQ ID NO: 3915451 - DNA, 25 bp, Homo sapien
cagaatggtcatggatcaaggcagg

SEQ ID NO: 3915452 - DNA, 25 bp, Homo sapien
tcaaggcaggttgaacaagggattc

SEQ ID NO: 3915453 - DNA, 25 bp, Homo sapien
ccctccacagtctcggcacctcccc

SEQ ID NO: 3915454 - DNA, 25 bp, Homo sapien
tgagccagatcctggggtaggccct

SEQ ID NO: 3915455 - DNA, 25 bp, Homo sapien
tgaggaatttggcttggttgatcta

SEQ ID NO: 3915456 - DNA, 25 bp, Homo sapien
gaggcgggcgttgaggaatttggct

SEQ ID NO: 3915457 - DNA, 25 bp, Homo sapien
ggagaggcgggcgttgaggaatttg

SEQ ID NO: 3915458 - DNA, 25 bp, Homo sapien
ggaatttggcttggttgatctattc

SEQ ID NO: 3915459 - DNA, 25 bp, Homo sapien
gaggtatcacttgtactggatcata

SEQ ID NO: 3915460 - DNA, 25 bp, Homo sapien
ggttgctacatgatggcggactgaa

SEQ ID NO: 3915461 - DNA, 25 bp, Homo sapien
tgaaacctgaatatggctaccatgg

SEQ ID NO: 3915462 - DNA, 25 bp, Homo sapien
catgcctaatcttatgtagcactgg

SEQ ID NO: 3915463 - DNA, 25 bp, Homo sapien
tgggcactgtcatttctgagcctct

SEQ ID NO: 3915464 - DNA, 25 bp, Homo sapien
tcaggtgcttaaggcgacaaactct

SEQ ID NO: 3915465 - DNA, 25 bp, Homo sapien
ctatgatacacagagatgggttgtc

SEQ ID NO: 3915466 - DNA, 25 bp, Homo sapien
tacccaggtgctttcataatgtgag

SEQ ID NO: 3915467 - DNA, 25 bp, Homo sapien
tcaggtggaggtgaactgctttctg

SEQ ID NO: 3915468 - DNA, 25 bp, Homo sapien
caggtggaggtgaactgctttctgt

SEQ ID NO: 3915469 - DNA, 25 bp, Homo sapien
attatcttccacggggaccacataa

SEQ ID NO: 3915470 - DNA, 25 bp, Homo sapien
cttccacggggaccacataatcagc

SEQ ID NO: 3915471 - DNA, 25 bp, Homo sapien
cacaactcccgtctttttatggcca

SEQ ID NO: 3915472 - DNA, 25 bp, Homo sapien
ggtagctctaagtttaacagtcgga

SEQ ID NO: 3915473 - DNA, 25 bp, Homo sapien
tacagccatccttgtgtgtgcaaaa

SEQ ID NO: 3915474 - DNA, 25 bp, Homo sapien
tcttattggtatcattggtggcaca

SEQ ID NO: 3915475 - DNA, 25 bp, Homo sapien
ggaggtgagccttgctttctctgaa

SEQ ID NO: 3915476 - DNA, 25 bp, Homo sapien
gccagctgggcttactgggaagtgt

SEQ ID NO: 3915477 - DNA, 25 bp, Homo sapien
cagctgggcttactgggaagtgtct

SEQ ID NO: 3915478 - DNA, 25 bp, Homo sapien
gaaggccagctgggcttactgggaa

SEQ ID NO: 3915479 - DNA, 25 bp, Homo sapien
aaaatgaggatcgtaatatcgacct

SEQ ID NO: 3915480 - DNA, 25 bp, Homo sapien
atatcgaccttagagatcttgaggg

SEQ ID NO: 3915481 - DNA, 25 bp, Homo sapien
ggatcgtaatatcgaccttagagat

SEQ ID NO: 3915482 - DNA, 25 bp, Homo sapien
cgtaatatcgaccttagagatcttg

SEQ ID NO: 3915483 - DNA, 25 bp, Homo sapien
ccatgggcctggaaggccgagtgcc

SEQ ID NO: 3915484 - DNA, 25 bp, Homo sapien
catgggcctggaaggccgagtgccc

SEQ ID NO: 3915485 - DNA, 25 bp, Homo sapien
atgggcctggaaggccgagtgccca

SEQ ID NO: 3915486 - DNA, 25 bp, Homo sapien
atcagcgttctcctcggcgggcatc

SEQ ID NO: 3915487 - DNA, 25 bp, Homo sapien
ggcgggcatcacgtacatctctgag

SEQ ID NO: 3915488 - DNA, 25 bp, Homo sapien
ggtgaaccggcctggtttcctgctc

SEQ ID NO: 3915489 - DNA, 25 bp, Homo sapien
tactggaggcggctcgtagctgtca

SEQ ID NO: 3915490 - DNA, 25 bp, Homo sapien
aaagtcatcggaccactgctcctct

SEQ ID NO: 3915491 - DNA, 25 bp, Homo sapien
tgctcctcttcgtcagcagggctct

SEQ ID NO: 3915492 - DNA, 25 bp, Homo sapien
actgctcctcttcgtcagcagggct

SEQ ID NO: 3915493 - DNA, 25 bp, Homo sapien
accactgctcctcttcgtcagcagg

SEQ ID NO: 3915494 - DNA, 25 bp, Homo sapien
gaaggcacaagtgtgagcctcagct

SEQ ID NO: 3915495 - DNA, 25 bp, Homo sapien
gcacaagtgtgagcctcagctggcc

SEQ ID NO: 3915496 - DNA, 25 bp, Homo sapien
agcagaaggcacaagtgtgagcctc

SEQ ID NO: 3915497 - DNA, 25 bp, Homo sapien
gcagaaggcacaagtgtgagcctca

SEQ ID NO: 3915498 - DNA, 25 bp, Homo sapien
catcaagactatttggaagggttcc

SEQ ID NO: 3915499 - DNA, 25 bp, Homo sapien
caagctccagatgaggttgatgcta

SEQ ID NO: 3915500 - DNA, 25 bp, Homo sapien
gatttacattcagatcccctggaga

SEQ ID NO: 3915501 - DNA, 25 bp, Homo sapien
gatgctatcttgctgggaatcaaac

SEQ ID NO: 3915502 - DNA, 25 bp, Homo sapien
tcgaggaacacttggaggtgctttg

SEQ ID NO: 3915503 - DNA, 25 bp, Homo sapien
ccttcgaggaacacttggaggtgct

SEQ ID NO: 3915504 - DNA, 25 bp, Homo sapien
ctgaagcgtagtcccttcgaggaac

SEQ ID NO: 3915505 - DNA, 25 bp, Homo sapien
tagtcccttcgaggaacacttggag

SEQ ID NO: 3915506 - DNA, 25 bp, Homo sapien
aatatcatggaccatcttttgaagc

SEQ ID NO: 3915507 - DNA, 25 bp, Homo sapien
ttaatatcatggaccatcttttgaa

SEQ ID NO: 3915508 - DNA, 25 bp, Homo sapien
attcattattccaccttcattgttt

SEQ ID NO: 3915509 - DNA, 25 bp, Homo sapien
tatcatggaccatcttttgaagctg

SEQ ID NO: 3915510 - DNA, 25 bp, Homo sapien
gaatccgatagatctcaagagggct

SEQ ID NO: 3915511 - DNA, 25 bp, Homo sapien
ggctattggaccacaactggctggg

SEQ ID NO: 3915512 - DNA, 25 bp, Homo sapien
tctgtggtgcgtcagaaaatctgca

SEQ ID NO: 3915513 - DNA, 25 bp, Homo sapien
gaccctgggtaagtctgaatctcga

SEQ ID NO: 3915514 - DNA, 25 bp, Homo sapien
tttttgtcatggctcagtcactcag

SEQ ID NO: 3915515 - DNA, 25 bp, Homo sapien
tattgctaatcagagaaaatccctg

SEQ ID NO: 3915516 - DNA, 25 bp, Homo sapien
tctgagccaagatctaagcctacac

SEQ ID NO: 3915517 - DNA, 25 bp, Homo sapien
ggtatctactgaatcaagcctgagc

SEQ ID NO: 3915518 - DNA, 25 bp, Homo sapien
gattatagtacaagcccagtaagcc

SEQ ID NO: 3915519 - DNA, 25 bp, Homo sapien
cttcttatgccatagttcagagctg

SEQ ID NO: 3915520 - DNA, 25 bp, Homo sapien
cttatgccatagttcagagctgtga

SEQ ID NO: 3915521 - DNA, 25 bp, Homo sapien
gagctgtgattatagtacaagccca

SEQ ID NO: 3915522 - DNA, 25 bp, Homo sapien
tctttggcatgtctgaacggctgag

SEQ ID NO: 3915523 - DNA, 25 bp, Homo sapien
gaggcagttatgcatcaggcacacc

SEQ ID NO: 3915524 - DNA, 25 bp, Homo sapien
caccctgagactgatgagatggcaa

SEQ ID NO: 3915525 - DNA, 25 bp, Homo sapien
tgacagctgaaattggcatggccct

SEQ ID NO: 3915526 - DNA, 25 bp, Homo sapien
gggtcatttcactctaggtacgagc

SEQ ID NO: 3915527 - DNA, 25 bp, Homo sapien
tgttcaatattgagtagggacatta

SEQ ID NO: 3915528 - DNA, 25 bp, Homo sapien
atttgcagtgcaatgaaatactctt

SEQ ID NO: 3915529 - DNA, 25 bp, Homo sapien
tgtcttctactccaagcacccttgg

SEQ ID NO: 3915530 - DNA, 25 bp, Homo sapien
tcaagtttgggcctggaacacacaa

SEQ ID NO: 3915531 - DNA, 25 bp, Homo sapien
gataaatgagtcctgcgtgggtgct

SEQ ID NO: 3915532 - DNA, 25 bp, Homo sapien
gatcttctcaaagaccacaagctgg

SEQ ID NO: 3915533 - DNA, 25 bp, Homo sapien
gagacactgccatatcccaagtaga

SEQ ID NO: 3915534 - DNA, 25 bp, Homo sapien
caacttctgactggcggggacggtt

SEQ ID NO: 3915535 - DNA, 25 bp, Homo sapien
ctcaacttctgactggcggggacgg

SEQ ID NO: 3915536 - DNA, 25 bp, Homo sapien
cggttattttattaagcttgtccat

SEQ ID NO: 3915537 - DNA, 25 bp, Homo sapien
cttctgactggcggggacggttatt

SEQ ID NO: 3915538 - DNA, 25 bp, Homo sapien
tcctagggagcagcatggtaagcct

SEQ ID NO: 3915539 - DNA, 25 bp, Homo sapien
tccagtggtcacgtcagcagttcct

SEQ ID NO: 3915540 - DNA, 25 bp, Homo sapien
catgctataactgggaacttcctgg

SEQ ID NO: 3915541 - DNA, 25 bp, Homo sapien
taagcctctggtctcaagggttccg

SEQ ID NO: 3915542 - DNA, 25 bp, Homo sapien
tcacaggttctaagtgttaggcagt

SEQ ID NO: 3915543 - DNA, 25 bp, Homo sapien
tagctaaaacaggtgcgtggcagaa

SEQ ID NO: 3915544 - DNA, 25 bp, Homo sapien
actctggaggcggtgctctgacacc

SEQ ID NO: 3915545 - DNA, 25 bp, Homo sapien
gcagtagacttatcttttggaggac

SEQ ID NO: 3915546 - DNA, 25 bp, Homo sapien
ggctcaattactgtatcagcacaga

SEQ ID NO: 3915547 - DNA, 25 bp, Homo sapien
tcttccagtataagcattcaaggcc

SEQ ID NO: 3915548 - DNA, 25 bp, Homo sapien
aaactgaacacgcaaagagcctggg

SEQ ID NO: 3915549 - DNA, 25 bp, Homo sapien
tcatctccagggcagacgtttctcc

SEQ ID NO: 3915550 - DNA, 25 bp, Homo sapien
gctattggcacagtccagagctgga

SEQ ID NO: 3915551 - DNA, 25 bp, Homo sapien
cacctctccggtgtgtaatctgagt

SEQ ID NO: 3915552 - DNA, 25 bp, Homo sapien
caccatgtgtgatgagcgtgagaca

SEQ ID NO: 3915553 - DNA, 25 bp, Homo sapien
tactcgtagcccttaaatagatgaa

SEQ ID NO: 3915554 - DNA, 25 bp, Homo sapien
tgccatttcagtccaatccaatagt

SEQ ID NO: 3915555 - DNA, 25 bp, Homo sapien
tatccgggtacatgggagacgcatg

SEQ ID NO: 3915556 - DNA, 25 bp, Homo sapien
tagaacactgtctcatgggttggct

SEQ ID NO: 3915557 - DNA, 25 bp, Homo sapien
tggtgaagtggagctggtactcaac

SEQ ID NO: 3915558 - DNA, 25 bp, Homo sapien
ccatctgcaaaccagagctagtgcc

SEQ ID NO: 3915559 - DNA, 25 bp, Homo sapien
catctgcaaaccagagctagtgccc

SEQ ID NO: 3915560 - DNA, 25 bp, Homo sapien
caggaaacttttcagctggcacctt

SEQ ID NO: 3915561 - DNA, 25 bp, Homo sapien
gtgccctcaccaggaaacttttcag

SEQ ID NO: 3915562 - DNA, 25 bp, Homo sapien
gaggcaccaatacttccagttgcat

SEQ ID NO: 3915563 - DNA, 25 bp, Homo sapien
gttgcattcaaaagggtgctgtagg

SEQ ID NO: 3915564 - DNA, 25 bp, Homo sapien
cattcaaaagggtgctgtaggtgtt

SEQ ID NO: 3915565 - DNA, 25 bp, Homo sapien
aggtggttcaggcttgtgtagctcc

SEQ ID NO: 3915566 - DNA, 25 bp, Homo sapien
gactgtcttcattatgatctccata

SEQ ID NO: 3915567 - DNA, 25 bp, Homo sapien
ctaatgagattgtgcgtatgaaaac

SEQ ID NO: 3915568 - DNA, 25 bp, Homo sapien
aacaaaagttaattgactgtcttca

SEQ ID NO: 3915569 - DNA, 25 bp, Homo sapien
agctaatgagattgtgcgtatgaaa

SEQ ID NO: 3915570 - DNA, 25 bp, Homo sapien
gctggtgagatgacatcaaaaccct

SEQ ID NO: 3915571 - DNA, 25 bp, Homo sapien
ctgctggtgagatgacatcaaaacc

SEQ ID NO: 3915572 - DNA, 25 bp, Homo sapien
tgctggtgagatgacatcaaaaccc

SEQ ID NO: 3915573 - DNA, 25 bp, Homo sapien
gtctgctggtgagatgacatcaaaa

SEQ ID NO: 3915574 - DNA, 25 bp, Homo sapien
tcagggttgaaaatgagctcaggta

SEQ ID NO: 3915575 - DNA, 25 bp, Homo sapien
ccgcagagcgttcctcatggagctg

SEQ ID NO: 3915576 - DNA, 25 bp, Homo sapien
cttgagccctcggaagaagagaccc

SEQ ID NO: 3915577 - DNA, 25 bp, Homo sapien
agaaaatgggaaccacccgcagagc

SEQ ID NO: 3915578 - DNA, 25 bp, Homo sapien
ggatgactagccagcttaccacagg

SEQ ID NO: 3915579 - DNA, 25 bp, Homo sapien
gaagcatttggaccacctagattgg

SEQ ID NO: 3915580 - DNA, 25 bp, Homo sapien
tacatctgggcgtgctaaggcagct

SEQ ID NO: 3915581 - DNA, 25 bp, Homo sapien
cccaggcaaggaggcgatagaagca

SEQ ID NO: 3915582 - DNA, 25 bp, Homo sapien
gaagcaccacttactggaaagctct

SEQ ID NO: 3915583 - DNA, 25 bp, Homo sapien
tccattgaaacgtccaagcttccag

SEQ ID NO: 3915584 - DNA, 25 bp, Homo sapien
caaggacccgctgatttattataga

SEQ ID NO: 3915585 - DNA, 25 bp, Homo sapien
tgaatacatacaaggcggctgaggc

SEQ ID NO: 3915586 - DNA, 25 bp, Homo sapien
taatgggtaaggttctaataggcca

SEQ ID NO: 3915587 - DNA, 25 bp, Homo sapien
gagaaatgatgttgtcactggtggc

SEQ ID NO: 3915588 - DNA, 25 bp, Homo sapien
ttatgactgttgcatagaattcaca

SEQ ID NO: 3915589 - DNA, 25 bp, Homo sapien
aaagcccactttgttcgcagtgtag

SEQ ID NO: 3915590 - DNA, 25 bp, Homo sapien
taggatctaaggaccccatctggtg

SEQ ID NO: 3915591 - DNA, 25 bp, Homo sapien
gaatgatgtgtctcctaggccaggt

SEQ ID NO: 3915592 - DNA, 25 bp, Homo sapien
gatgatcaacaatcggcccaagggc

SEQ ID NO: 3915593 - DNA, 25 bp, Homo sapien
gatgaacttaagatgccctggaccc

SEQ ID NO: 3915594 - DNA, 25 bp, Homo sapien
gttccagtgccaggtctgctgctcc

SEQ ID NO: 3915595 - DNA, 25 bp, Homo sapien
tcaaccctgttccagtgccaggtct

SEQ ID NO: 3915596 - DNA, 25 bp, Homo sapien
tccagtgccaggtctgctgctcctt

SEQ ID NO: 3915597 - DNA, 25 bp, Homo sapien
cagtgccaggtctgctgctccttga

SEQ ID NO: 3915598 - DNA, 25 bp, Homo sapien
aggctcagtctgggcacaagccacc

SEQ ID NO: 3915599 - DNA, 25 bp, Homo sapien
gcacaagccaccacaatcccctcct

SEQ ID NO: 3915600 - DNA, 25 bp, Homo sapien
tcattccaggctcagtctgggcaca

SEQ ID NO: 3915601 - DNA, 25 bp, Homo sapien
attccaggctcagtctgggcacaag

SEQ ID NO: 3915602 - DNA, 25 bp, Homo sapien
tatagtaggacggtaacggtcatgc

SEQ ID NO: 3915603 - DNA, 25 bp, Homo sapien
tatatgtgggcctcttgtgctccca

SEQ ID NO: 3915604 - DNA, 25 bp, Homo sapien
cccatcgtattcttctcatgtgtgg

SEQ ID NO: 3915605 - DNA, 25 bp, Homo sapien
acggtcatgcacaggttcctcgctt

SEQ ID NO: 3915606 - DNA, 25 bp, Homo sapien
cagatatcttgggattgtcatcaat

SEQ ID NO: 3915607 - DNA, 25 bp, Homo sapien
tcagatatcttgggattgtcatcaa

SEQ ID NO: 3915608 - DNA, 25 bp, Homo sapien
ctcagatatcttgggattgtcatca

SEQ ID NO: 3915609 - DNA, 25 bp, Homo sapien
ctgaaatttcacatggtctgtcact

SEQ ID NO: 3915610 - DNA, 25 bp, Homo sapien
aaatttcacatggtctgtcactttc

SEQ ID NO: 3915611 - DNA, 25 bp, Homo sapien
tgaaatttcacatggtctgtcactt

SEQ ID NO: 3915612 - DNA, 25 bp, Homo sapien
gaaatttcacatggtctgtcacttt

SEQ ID NO: 3915613 - DNA, 25 bp, Homo sapien
tgacacccttagtccaaaagccagt

SEQ ID NO: 3915614 - DNA, 25 bp, Homo sapien
catgtctgcagtggaaattatggcc

SEQ ID NO: 3915615 - DNA, 25 bp, Homo sapien
ctggtggctgcctatacatctggac

SEQ ID NO: 3915616 - DNA, 25 bp, Homo sapien
tcagctctgtctggtgcctaatgtc

SEQ ID NO: 3915617 - DNA, 25 bp, Homo sapien
cttcttcggtgaatcaaagtaaata

SEQ ID NO: 3915618 - DNA, 25 bp, Homo sapien
cttcggtgaatcaaagtaaatagta

SEQ ID NO: 3915619 - DNA, 25 bp, Homo sapien
tcttcggtgaatcaaagtaaatagt

SEQ ID NO: 3915620 - DNA, 25 bp, Homo sapien
cggtgaatcaaagtaaatagtaaag

SEQ ID NO: 3915621 - DNA, 25 bp, Homo sapien
ccagcaatggtatgcccgccgctaa

SEQ ID NO: 3915622 - DNA, 25 bp, Homo sapien
tgcccgccgctaatccaagagaggg

SEQ ID NO: 3915623 - DNA, 25 bp, Homo sapien
gtatgcccgccgctaatccaagaga

SEQ ID NO: 3915624 - DNA, 25 bp, Homo sapien
gctaatccaagagagggcccacagt

SEQ ID NO: 3915625 - DNA, 25 bp, Homo sapien
tctttcccacctgtgacaggagagg

SEQ ID NO: 3915626 - DNA, 25 bp, Homo sapien
cgtttctttcccacctgtgacagga

SEQ ID NO: 3915627 - DNA, 25 bp, Homo sapien
gtttctttcccacctgtgacaggag

SEQ ID NO: 3915628 - DNA, 25 bp, Homo sapien
tttcccacctgtgacaggagaggac

SEQ ID NO: 3915629 - DNA, 25 bp, Homo sapien
tggtcttctctgcgttgcctggtga

SEQ ID NO: 3915630 - DNA, 25 bp, Homo sapien
tcttctctgcgttgcctggtgaatg

SEQ ID NO: 3915631 - DNA, 25 bp, Homo sapien
tgtaaattctgcactggtcttctct

SEQ ID NO: 3915632 - DNA, 25 bp, Homo sapien
ggtgaatgggggctgctgtacttac

SEQ ID NO: 3915633 - DNA, 25 bp, Homo sapien
cgccggcagggtgaagttcagtgaa

SEQ ID NO: 3915634 - DNA, 25 bp, Homo sapien
tgtgttcgccggcagggtgaagttc

SEQ ID NO: 3915635 - DNA, 25 bp, Homo sapien
ttcgccggcagggtgaagttcagtg

SEQ ID NO: 3915636 - DNA, 25 bp, Homo sapien
tgttcgccggcagggtgaagttcag

SEQ ID NO: 3915637 - DNA, 25 bp, Homo sapien
tgtctgaggggtcccattcacaagg

SEQ ID NO: 3915638 - DNA, 25 bp, Homo sapien
caggtcctcgaccaggatcagatga

SEQ ID NO: 3915639 - DNA, 25 bp, Homo sapien
agcctgcaaggctattgtctgaggg

SEQ ID NO: 3915640 - DNA, 25 bp, Homo sapien
ctcgaccaggatcagatgaagaggc

SEQ ID NO: 3915641 - DNA, 25 bp, Homo sapien
cgctagcaccagaccaacacgtgct

SEQ ID NO: 3915642 - DNA, 25 bp, Homo sapien
tcttgctcaagggacctaaccactg

SEQ ID NO: 3915643 - DNA, 25 bp, Homo sapien
gtctgggcctcttaggtcagggtcc

SEQ ID NO: 3915644 - DNA, 25 bp, Homo sapien
atgacggtggaacacagggacgtct

SEQ ID NO: 3915645 - DNA, 25 bp, Homo sapien
gaaccttcttcgtacactgcctttg

SEQ ID NO: 3915646 - DNA, 25 bp, Homo sapien
tcttcgtacactgcctttggtaagc

SEQ ID NO: 3915647 - DNA, 25 bp, Homo sapien
cgtacactgcctttggtaagctcct

SEQ ID NO: 3915648 - DNA, 25 bp, Homo sapien
caggaaccttcttcgtacactgcct

SEQ ID NO: 3915649 - DNA, 25 bp, Homo sapien
ctggccaagccatttatggtcaggg

SEQ ID NO: 3915650 - DNA, 25 bp, Homo sapien
tgctgcatggccgacgtgtatggcc

SEQ ID NO: 3915651 - DNA, 25 bp, Homo sapien
tggccgacgtgtatggcctggttca

SEQ ID NO: 3915652 - DNA, 25 bp, Homo sapien
catccctcgggaaagatgggctgct

SEQ ID NO: 3915653 - DNA, 25 bp, Homo sapien
ctttggaaacaatgggttacatgag

SEQ ID NO: 3915654 - DNA, 25 bp, Homo sapien
tttggaaacaatgggttacatgagg

SEQ ID NO: 3915655 - DNA, 25 bp, Homo sapien
caatatgagcgtgtaggctgagcct

SEQ ID NO: 3915656 - DNA, 25 bp, Homo sapien
caagtccagattagaggaacggcca

SEQ ID NO: 3915657 - DNA, 25 bp, Homo sapien
tggaatctaccctaacaggcaggtg

SEQ ID NO: 3915658 - DNA, 25 bp, Homo sapien
taattggaagcaccaaggcagaggc

SEQ ID NO: 3915659 - DNA, 25 bp, Homo sapien
aatcacctgcagagtagatttcttc

SEQ ID NO: 3915660 - DNA, 25 bp, Homo sapien
gaatcgaatcatcagggaatcacct

SEQ ID NO: 3915661 - DNA, 25 bp, Homo sapien
catctgtgcggaatcgaatcatcag

SEQ ID NO: 3915662 - DNA, 25 bp, Homo sapien
gtgtatcgggcatgaaagcctttct

SEQ ID NO: 3915663 - DNA, 25 bp, Homo sapien
tcgtagccgtcgtaggcttccatgt

SEQ ID NO: 3915664 - DNA, 25 bp, Homo sapien
gcttccatgtagtcgtagccgcagt

SEQ ID NO: 3915665 - DNA, 25 bp, Homo sapien
aaaggtccggaatgtcagctccacg

SEQ ID NO: 3915666 - DNA, 25 bp, Homo sapien
ggcctcgctcgggtagttgttgtcc

SEQ ID NO: 3915667 - DNA, 25 bp, Homo sapien
gaggcatccgaataaaacctgagaa

SEQ ID NO: 3915668 - DNA, 25 bp, Homo sapien
tacatttccaggtggtcataggcac

SEQ ID NO: 3915669 - DNA, 25 bp, Homo sapien
ctgccgcagaaacggcccagaatgg

SEQ ID NO: 3915670 - DNA, 25 bp, Homo sapien
tgagaaacatactgctgccggaagc

SEQ ID NO: 3915671 - DNA, 25 bp, Homo sapien
gatgtgtctaatccccgctttacag

SEQ ID NO: 3915672 - DNA, 25 bp, Homo sapien
gaccctttagtacaaatgacgctgg

SEQ ID NO: 3915673 - DNA, 25 bp, Homo sapien
tcacatactgagagttgggccatga

SEQ ID NO: 3915674 - DNA, 25 bp, Homo sapien
caagtggccctatgaagtagttaca

SEQ ID NO: 3915675 - DNA, 25 bp, Homo sapien
tctatggtagcgaaaagcgcgcaat

SEQ ID NO: 3915676 - DNA, 25 bp, Homo sapien
attctatggtagcgaaaagcgcgca

SEQ ID NO: 3915677 - DNA, 25 bp, Homo sapien
tggtagcgaaaagcgcgcaatcaat

SEQ ID NO: 3915678 - DNA, 25 bp, Homo sapien
tatggtagcgaaaagcgcgcaatca

SEQ ID NO: 3915679 - DNA, 25 bp, Homo sapien
ccctccacactgctgatcttgtgtg

SEQ ID NO: 3915680 - DNA, 25 bp, Homo sapien
tgttccaggtacactccctccggct

SEQ ID NO: 3915681 - DNA, 25 bp, Homo sapien
tctgtggcctgcagtcgaagagatg

SEQ ID NO: 3915682 - DNA, 25 bp, Homo sapien
ctgctgatcttgtgtgcacagccag

SEQ ID NO: 3915683 - DNA, 25 bp, Homo sapien
gccagtagccgtttctgcacctgca

SEQ ID NO: 3915684 - DNA, 25 bp, Homo sapien
gtcatgcccattctcgtggagccag

SEQ ID NO: 3915685 - DNA, 25 bp, Homo sapien
tgcacaggtagctcccgaaggtgtt

SEQ ID NO: 3915686 - DNA, 25 bp, Homo sapien
gttgtccttggcacactcgtcctta

SEQ ID NO: 3915687 - DNA, 25 bp, Homo sapien
tcaggtttcttgggtatgtacttgg

SEQ ID NO: 3915688 - DNA, 25 bp, Homo sapien
ctcaggtttcttgggtatgtacttg

SEQ ID NO: 3915689 - DNA, 25 bp, Homo sapien
caggtttcttgggtatgtacttggc

SEQ ID NO: 3915690 - DNA, 25 bp, Homo sapien
agaagtgggccctgaagccgcgctt

SEQ ID NO: 3915691 - DNA, 25 bp, Homo sapien
ctgagaagaagtgggccctgaagcc

SEQ ID NO: 3915692 - DNA, 25 bp, Homo sapien
gtgggccctgaagccgcgcttggag

SEQ ID NO: 3915693 - DNA, 25 bp, Homo sapien
agaagaagtgggccctgaagccgcg

SEQ ID NO: 3915694 - DNA, 25 bp, Homo sapien
tgcgaggtgatgacctccggcgtct

SEQ ID NO: 3915695 - DNA, 25 bp, Homo sapien
aggccgctgcgcacctctacaaagt

SEQ ID NO: 3915696 - DNA, 25 bp, Homo sapien
gtctcagagccgcagaacctgccgt

SEQ ID NO: 3915697 - DNA, 25 bp, Homo sapien
cgcatgttgttgctctgcgaggtga

SEQ ID NO: 3915698 - DNA, 25 bp, Homo sapien
ggagcatgatggggagcttcccaga

SEQ ID NO: 3915699 - DNA, 25 bp, Homo sapien
catgatggggagcttcccagagtcc

SEQ ID NO: 3915700 - DNA, 25 bp, Homo sapien
tgcaagggagcatgatggggagctt

SEQ ID NO: 3915701 - DNA, 25 bp, Homo sapien
agcatgatggggagcttcccagagt

SEQ ID NO: 3915702 - DNA, 25 bp, Homo sapien
tgtgggatactccttcggccaccca

SEQ ID NO: 3915703 - DNA, 25 bp, Homo sapien
acacttcaaactgaagggagatccg

SEQ ID NO: 3915704 - DNA, 25 bp, Homo sapien
agcttggtaatgaaaccgccacagg

SEQ ID NO: 3915705 - DNA, 25 bp, Homo sapien
acccagggctggtgatggttccatt

SEQ ID NO: 3915706 - DNA, 25 bp, Homo sapien
tttcccaccaggagcaatagagcct

SEQ ID NO: 3915707 - DNA, 25 bp, Homo sapien
caccaggagcaatagagccttgctg

SEQ ID NO: 3915708 - DNA, 25 bp, Homo sapien
ccaggagcaatagagccttgctgtt

SEQ ID NO: 3915709 - DNA, 25 bp, Homo sapien
tcccaccaggagcaatagagccttg

SEQ ID NO: 3915710 - DNA, 25 bp, Homo sapien
caaagacttgtcccatataccctct

SEQ ID NO: 3915711 - DNA, 25 bp, Homo sapien
ccaaagacttgtcccatataccctc

SEQ ID NO: 3915712 - DNA, 25 bp, Homo sapien
gcggccagctcgtagccagggtcac

SEQ ID NO: 3915713 - DNA, 25 bp, Homo sapien
gcgtgttcacacagcgatgctcgca

SEQ ID NO: 3915714 - DNA, 25 bp, Homo sapien
cacatcttcttatcggcggccagct

SEQ ID NO: 3915715 - DNA, 25 bp, Homo sapien
cagggtcacaggcacacttgtagct

SEQ ID NO: 3915716 - DNA, 25 bp, Homo sapien
ttgaaagtattttcttagacatttg

SEQ ID NO: 3915717 - DNA, 25 bp, Homo sapien
aaattgaaagtattttcttagacat

SEQ ID NO: 3915718 - DNA, 25 bp, Homo sapien
caaattgaaagtattttcttagaca

SEQ ID NO: 3915719 - DNA, 25 bp, Homo sapien
aattgaaagtattttcttagacatt

SEQ ID NO: 3915720 - DNA, 25 bp, Homo sapien
caggtgggagtggagcagtgcaggc

SEQ ID NO: 3915721 - DNA, 25 bp, Homo sapien
ccaggtgggagtggagcagtgcagg

SEQ ID NO: 3915722 - DNA, 25 bp, Homo sapien
gaccaggtgggagtggagcagtgca

SEQ ID NO: 3915723 - DNA, 25 bp, Homo sapien
ctggaccaggtgggagtggagcagt

SEQ ID NO: 3915724 - DNA, 25 bp, Homo sapien
ccactccaccagcagggaaactgag

SEQ ID NO: 3915725 - DNA, 25 bp, Homo sapien
agagtcttgcaagggaggcagagca

SEQ ID NO: 3915726 - DNA, 25 bp, Homo sapien
actccaccagcagggaaactgagcc

SEQ ID NO: 3915727 - DNA, 25 bp, Homo sapien
ttcttccagagagtcttgcaaggga

SEQ ID NO: 3915728 - DNA, 25 bp, Homo sapien
tgatagagccatcggacacaaactt

SEQ ID NO: 3915729 - DNA, 25 bp, Homo sapien
caggtagtcatatgcacagctgtcg

SEQ ID NO: 3915730 - DNA, 25 bp, Homo sapien
cacagtctgttggagctcgatttca

SEQ ID NO: 3915731 - DNA, 25 bp, Homo sapien
caaaagtggccgatcagggcactct

SEQ ID NO: 3915732 - DNA, 25 bp, Homo sapien
gatggttctgctttaaggtttttga

SEQ ID NO: 3915733 - DNA, 25 bp, Homo sapien
tcccaggtctctccatgctgcttcc

SEQ ID NO: 3915734 - DNA, 25 bp, Homo sapien
actctcaaaatctaaccaagaggcc

SEQ ID NO: 3915735 - DNA, 25 bp, Homo sapien
caaaatctaaccaagaggccaaagg

SEQ ID NO: 3915736 - DNA, 25 bp, Homo sapien
taagtcccacgtgaaacccctctga

SEQ ID NO: 3915737 - DNA, 25 bp, Homo sapien
gattgaatctgaccggcatctttgt

SEQ ID NO: 3915738 - DNA, 25 bp, Homo sapien
tcaaaagcttggaaggtaagtccca

SEQ ID NO: 3915739 - DNA, 25 bp, Homo sapien
gaaggtctgtagtcatccggatagt

SEQ ID NO: 3915740 - DNA, 25 bp, Homo sapien
agacgggggccctggtcagatctta

SEQ ID NO: 3915741 - DNA, 25 bp, Homo sapien
ggaagacgggggccctggtcagatc

SEQ ID NO: 3915742 - DNA, 25 bp, Homo sapien
aagacgggggccctggtcagatctt

SEQ ID NO: 3915743 - DNA, 25 bp, Homo sapien
agaggaagacgggggccctggtcag

SEQ ID NO: 3915744 - DNA, 25 bp, Homo sapien
agacgaggggctccgggatcttatc

SEQ ID NO: 3915745 - DNA, 25 bp, Homo sapien
tgctgcggaactccacccagagccg

SEQ ID NO: 3915746 - DNA, 25 bp, Homo sapien
ccgggatcttatcgccacaaaacct

SEQ ID NO: 3915747 - DNA, 25 bp, Homo sapien
gggctccgggatcttatcgccacaa

SEQ ID NO: 3915748 - DNA, 25 bp, Homo sapien
gcacagtcggcttttaaacaaatcc

SEQ ID NO: 3915749 - DNA, 25 bp, Homo sapien
ccagcacagtcggcttttaaacaaa

SEQ ID NO: 3915750 - DNA, 25 bp, Homo sapien
ctccacgtaatcataccagcacagt

SEQ ID NO: 3915751 - DNA, 25 bp, Homo sapien
catcccggacctccacgtaatcata

SEQ ID NO: 3915752 - DNA, 25 bp, Homo sapien
gggtgaccgagatcctccagacgca

SEQ ID NO: 3915753 - DNA, 25 bp, Homo sapien
tgcagaaaagtttcccgttgtgtcc

SEQ ID NO: 3915754 - DNA, 25 bp, Homo sapien
aaaagtttcccgttgtgtcctgcag

SEQ ID NO: 3915755 - DNA, 25 bp, Homo sapien
cagtgggagtaagatgggtacccat

SEQ ID NO: 3915756 - DNA, 25 bp, Homo sapien
tggtgagaagtgtagcaagcagatt

SEQ ID NO: 3915757 - DNA, 25 bp, Homo sapien
ttgccagccaaagccctcggaacag

SEQ ID NO: 3915758 - DNA, 25 bp, Homo sapien
ccctcggaacaggttggtgagaagt

SEQ ID NO: 3915759 - DNA, 25 bp, Homo sapien
tgtagcaagcagattgatgttttct

SEQ ID NO: 3915760 - DNA, 25 bp, Homo sapien
catttgtacagcttccgggcttgag

SEQ ID NO: 3915761 - DNA, 25 bp, Homo sapien
gaaggatggtgtctaagaaaactcc

SEQ ID NO: 3915762 - DNA, 25 bp, Homo sapien
tggttggcctgacgccattgtcatc

SEQ ID NO: 3915763 - DNA, 25 bp, Homo sapien
gcacgcgctggccaatggttggcct

SEQ ID NO: 3915764 - DNA, 25 bp, Homo sapien
gacgaggcataagcatagattccga

SEQ ID NO: 3915765 - DNA, 25 bp, Homo sapien
gccagccgtgctagaagcatgcaga

SEQ ID NO: 3915766 - DNA, 25 bp, Homo sapien
tatatttcactgcagcgcagaggcc

SEQ ID NO: 3915767 - DNA, 25 bp, Homo sapien
gaggccactgtatttcaaggacaga

SEQ ID NO: 3915768 - DNA, 25 bp, Homo sapien
gtagtgcatgatgctgtcaaagtcg

SEQ ID NO: 3915769 - DNA, 25 bp, Homo sapien
tagtgcatgatgctgtcaaagtcgt

SEQ ID NO: 3915770 - DNA, 25 bp, Homo sapien
agtgcatgatgctgtcaaagtcgta

SEQ ID NO: 3915771 - DNA, 25 bp, Homo sapien
cacaacactgtgttaagccctttga

SEQ ID NO: 3915772 - DNA, 25 bp, Homo sapien
tgacacaacactgtgttaagccctt

SEQ ID NO: 3915773 - DNA, 25 bp, Homo sapien
gacacaacactgtgttaagcccttt

SEQ ID NO: 3915774 - DNA, 25 bp, Homo sapien
caacactgtgttaagccctttgaaa

SEQ ID NO: 3915775 - DNA, 25 bp, Homo sapien
gtgagccacaatgccaaacttgtca

SEQ ID NO: 3915776 - DNA, 25 bp, Homo sapien
atgttttccctgatgatggtgacat

SEQ ID NO: 3915777 - DNA, 25 bp, Homo sapien
tcttcccaatggatatggcctgtgg

SEQ ID NO: 3915778 - DNA, 25 bp, Homo sapien
tcctcggcgcccaacataggagcaa

SEQ ID NO: 3915779 - DNA, 25 bp, Homo sapien
caattgcaggaatacccaggtcagc

SEQ ID NO: 3915780 - DNA, 25 bp, Homo sapien
gcaggaatacccaggtcagcaggtc

SEQ ID NO: 3915781 - DNA, 25 bp, Homo sapien
ctggacaattgcaggaatacccagg

SEQ ID NO: 3915782 - DNA, 25 bp, Homo sapien
caggaatacccaggtcagcaggtca

SEQ ID NO: 3915783 - DNA, 25 bp, Homo sapien
taactttagtcataagccagtcatt

SEQ ID NO: 3915784 - DNA, 25 bp, Homo sapien
cactgccttaagtcttcacatgaca

SEQ ID NO: 3915785 - DNA, 25 bp, Homo sapien
gtttgtaaacctgtagaatccctca

SEQ ID NO: 3915786 - DNA, 25 bp, Homo sapien
gacataacagataactttagtcata

SEQ ID NO: 3915787 - DNA, 25 bp, Homo sapien
cgtcctttctatgaaggtcacacag

SEQ ID NO: 3915788 - DNA, 25 bp, Homo sapien
catggcctgcttaaaaatggccctc

SEQ ID NO: 3915789 - DNA, 25 bp, Homo sapien
tcctcatccgtcctttctatgaagg

SEQ ID NO: 3915790 - DNA, 25 bp, Homo sapien
gtgtctcatggcctgcttaaaaatg

SEQ ID NO: 3915791 - DNA, 25 bp, Homo sapien
ggcactaggaagccgtgggttaatg

SEQ ID NO: 3915792 - DNA, 25 bp, Homo sapien
tggcactaggaagccgtgggttaat

SEQ ID NO: 3915793 - DNA, 25 bp, Homo sapien
ctggcactaggaagccgtgggttaa

SEQ ID NO: 3915794 - DNA, 25 bp, Homo sapien
agtgaagttccctccaatgacgtag

SEQ ID NO: 3915795 - DNA, 25 bp, Homo sapien
agaaggtcttggctgcggcatgcaa

SEQ ID NO: 3915796 - DNA, 25 bp, Homo sapien
gggatgactcctccaggccatatcc

SEQ ID NO: 3915797 - DNA, 25 bp, Homo sapien
aggagtgtggtattctcccggccat

SEQ ID NO: 3915798 - DNA, 25 bp, Homo sapien
gctgctctcagatgcctgctcttca

SEQ ID NO: 3915799 - DNA, 25 bp, Homo sapien
ccagcttccttggtgccagtgtcca

SEQ ID NO: 3915800 - DNA, 25 bp, Homo sapien
gctctcagatgcctgctcttcaagc

SEQ ID NO: 3915801 - DNA, 25 bp, Homo sapien
ggtgtctgggctgctctcagatgcc

SEQ ID NO: 3915802 - DNA, 25 bp, Homo sapien
cgggtgttcgctgccagctcctggc

SEQ ID NO: 3915803 - DNA, 25 bp, Homo sapien
tattcatccagttgcagcaatatca

SEQ ID NO: 3915804 - DNA, 25 bp, Homo sapien
ctgggtattcatccagttgcagcaa

SEQ ID NO: 3915805 - DNA, 25 bp, Homo sapien
cagctgccgggtgttcgctgccagc

SEQ ID NO: 3915806 - DNA, 25 bp, Homo sapien
cccaacctctctcctcctgagctca

SEQ ID NO: 3915807 - DNA, 25 bp, Homo sapien
ccaacctctctcctcctgagctcac

SEQ ID NO: 3915808 - DNA, 25 bp, Homo sapien
ctattttcttactcccaacctctct

SEQ ID NO: 3915809 - DNA, 25 bp, Homo sapien
ttcttactcccaacctctctcctcc

SEQ ID NO: 3915810 - DNA, 25 bp, Homo sapien
gaaatcgatgaaaagcgtttctccg

SEQ ID NO: 3915811 - DNA, 25 bp, Homo sapien
gccatgtctcacatcgaaatcgatg

SEQ ID NO: 3915812 - DNA, 25 bp, Homo sapien
ggagacagacactttgaacactagc

SEQ ID NO: 3915813 - DNA, 25 bp, Homo sapien
taaaaactggcaaatgagtacgaca

SEQ ID NO: 3915814 - DNA, 25 bp, Homo sapien
gaagtaagagtccaacgtggctgga

SEQ ID NO: 3915815 - DNA, 25 bp, Homo sapien
taggaactgtcacctgcgagggaca

SEQ ID NO: 3915816 - DNA, 25 bp, Homo sapien
aagagggcccgtctgactccagaat

SEQ ID NO: 3915817 - DNA, 25 bp, Homo sapien
tctgcacagcaatcccgtaaataag

SEQ ID NO: 3915818 - DNA, 25 bp, Homo sapien
ttctaagcggggtgctttctgaagc

SEQ ID NO: 3915819 - DNA, 25 bp, Homo sapien
agtttctaagcggggtgctttctga

SEQ ID NO: 3915820 - DNA, 25 bp, Homo sapien
gcaggaaggagtcgggtatagtggc

SEQ ID NO: 3915821 - DNA, 25 bp, Homo sapien
ggggcctctcgttcatgcagacttc

SEQ ID NO: 3915822 - DNA, 25 bp, Homo sapien
agcactgatgggcttcttacggtca

SEQ ID NO: 3915823 - DNA, 25 bp, Homo sapien
agaggtgttcgatttgatgggccca

SEQ ID NO: 3915824 - DNA, 25 bp, Homo sapien
gtggttcccgaagccagcactgatg

SEQ ID NO: 3915825 - DNA, 25 bp, Homo sapien
tcttacggtcatgtcttccgaggca

SEQ ID NO: 3915826 - DNA, 25 bp, Homo sapien
tgtgctgtgtcctgttgcccccact

SEQ ID NO: 3915827 - DNA, 25 bp, Homo sapien
tgtgtcctgttgcccccactgtctg

SEQ ID NO: 3915828 - DNA, 25 bp, Homo sapien
ctgttgcccccactgtctgcttggt

SEQ ID NO: 3915829 - DNA, 25 bp, Homo sapien
ctgtgctgtgtcctgttgcccccac

SEQ ID NO: 3915830 - DNA, 25 bp, Homo sapien
tctaaggcaatgtctccccaaaaga

SEQ ID NO: 3915831 - DNA, 25 bp, Homo sapien
acaacagctgcaagagggcatggcc

SEQ ID NO: 3915832 - DNA, 25 bp, Homo sapien
agggcatggcctggcccttccgcag

SEQ ID NO: 3915833 - DNA, 25 bp, Homo sapien
aacagctgcaagagggcatggcctg

SEQ ID NO: 3915834 - DNA, 25 bp, Homo sapien
cgacaacagctgcaagagggcatgg

SEQ ID NO: 3915835 - DNA, 25 bp, Homo sapien
aaagattggccatcgaagtcttctc

SEQ ID NO: 3915836 - DNA, 25 bp, Homo sapien
ctttatcagccaagcctccttggga

SEQ ID NO: 3915837 - DNA, 25 bp, Homo sapien
aagattggccatcgaagtcttctcc

SEQ ID NO: 3915838 - DNA, 25 bp, Homo sapien
gaaagattggccatcgaagtcttct

SEQ ID NO: 3915839 - DNA, 25 bp, Homo sapien
tgatacccatgcactgaccctgggc

SEQ ID NO: 3915840 - DNA, 25 bp, Homo sapien
gacccatcaccctcaactgacctga

SEQ ID NO: 3915841 - DNA, 25 bp, Homo sapien
gaggagagtggttggacccatcacc

SEQ ID NO: 3915842 - DNA, 25 bp, Homo sapien
caactgacctgatacccatgcactg

SEQ ID NO: 3915843 - DNA, 25 bp, Homo sapien
tggaaagccagaattctctcgtcct

SEQ ID NO: 3915844 - DNA, 25 bp, Homo sapien
ctatgctttaggacagagtacttgg

SEQ ID NO: 3915845 - DNA, 25 bp, Homo sapien
cttggaaagccagaattctctcgtc

SEQ ID NO: 3915846 - DNA, 25 bp, Homo sapien
gaaagccagaattctctcgtccttg

SEQ ID NO: 3915847 - DNA, 25 bp, Homo sapien
ttgattatgttgttgtggacttttc

SEQ ID NO: 3915848 - DNA, 25 bp, Homo sapien
tgattatgttgttgtggacttttct

SEQ ID NO: 3915849 - DNA, 25 bp, Homo sapien
tttgattatgttgttgtggactttt

SEQ ID NO: 3915850 - DNA, 25 bp, Homo sapien
ctttgattatgttgttgtggacttt

SEQ ID NO: 3915851 - DNA, 25 bp, Homo sapien
tctgccgaccgccaagtgaaacggg

SEQ ID NO: 3915852 - DNA, 25 bp, Homo sapien
tagagatgagtaacctggaactgat

SEQ ID NO: 3915853 - DNA, 25 bp, Homo sapien
tggaactgatagaggtttccagggc

SEQ ID NO: 3915854 - DNA, 25 bp, Homo sapien
cccacaaagccggagataaacacca

SEQ ID NO: 3915855 - DNA, 25 bp, Homo sapien
cgattgcgcccgaaaggcccgtacg

SEQ ID NO: 3915856 - DNA, 25 bp, Homo sapien
tggccccgaggaagcgggagctgca

SEQ ID NO: 3915857 - DNA, 25 bp, Homo sapien
gcccgggcggcgattgcgcccgaaa

SEQ ID NO: 3915858 - DNA, 25 bp, Homo sapien
cggcgattgcgcccgaaaggcccgt

SEQ ID NO: 3915859 - DNA, 25 bp, Homo sapien
ggacatcccagcctcggagtggttt

SEQ ID NO: 3915860 - DNA, 25 bp, Homo sapien
ccagcctcggagtggtttttaagca

SEQ ID NO: 3915861 - DNA, 25 bp, Homo sapien
agcctcggagtggtttttaagcaat

SEQ ID NO: 3915862 - DNA, 25 bp, Homo sapien
acatcccagcctcggagtggttttt

SEQ ID NO: 3915863 - DNA, 25 bp, Homo sapien
ctctgagtagtctgcggtggcgtcc

SEQ ID NO: 3915864 - DNA, 25 bp, Homo sapien
tcctcgccgtccagctctgagtagt

SEQ ID NO: 3915865 - DNA, 25 bp, Homo sapien
gctttgcaagggtcgtggtaatgct

SEQ ID NO: 3915866 - DNA, 25 bp, Homo sapien
ttgcaagggtcgtggtaatgctcca

SEQ ID NO: 3915867 - DNA, 25 bp, Homo sapien
aaagacggcgcacactgggtcggtc

SEQ ID NO: 3915868 - DNA, 25 bp, Homo sapien
gaagcagccgctcggagctacttgc

SEQ ID NO: 3915869 - DNA, 25 bp, Homo sapien
gagttgcgtgcacgaaagctcagct

SEQ ID NO: 3915870 - DNA, 25 bp, Homo sapien
ctgtcttcgtcgaggcaaccgggaa

SEQ ID NO: 3915871 - DNA, 25 bp, Homo sapien
aattcagataaattaacacactagg

SEQ ID NO: 3915872 - DNA, 25 bp, Homo sapien
taaaaatccaaattcagataaatta

SEQ ID NO: 3915873 - DNA, 25 bp, Homo sapien
tccaaattcagataaattaacacac

SEQ ID NO: 3915874 - DNA, 25 bp, Homo sapien
aatccaaattcagataaattaacac

SEQ ID NO: 3915875 - DNA, 25 bp, Homo sapien
gaactctgcaccgactgtccatgct

SEQ ID NO: 3915876 - DNA, 25 bp, Homo sapien
caaatgacctaagctgatgaactgg

SEQ ID NO: 3915877 - DNA, 25 bp, Homo sapien
tatggcctatacgaaccaaagagtg

SEQ ID NO: 3915878 - DNA, 25 bp, Homo sapien
ttaacgttctgatctagcctacctg

SEQ ID NO: 3915879 - DNA, 25 bp, Homo sapien
tgggcaaccccagtacaatctagga

SEQ ID NO: 3915880 - DNA, 25 bp, Homo sapien
tatagattacaaatgggtctcccca

SEQ ID NO: 3915881 - DNA, 25 bp, Homo sapien
tattctacaactgagcgctagggag

SEQ ID NO: 3915882 - DNA, 25 bp, Homo sapien
tagaatgaagcactaagacacggtg

SEQ ID NO: 3915883 - DNA, 25 bp, Homo sapien
acgggtcccctgtatgagagtagca

SEQ ID NO: 3915884 - DNA, 25 bp, Homo sapien
taatctagatgtaagcaagtctgga

SEQ ID NO: 3915885 - DNA, 25 bp, Homo sapien
aacctgaacagattttgtgccacaa

SEQ ID NO: 3915886 - DNA, 25 bp, Homo sapien
tgttgatccaacagtacgttaacca

SEQ ID NO: 3915887 - DNA, 25 bp, Homo sapien
taggcaagatgtaaaagcccaccca

SEQ ID NO: 3915888 - DNA, 25 bp, Homo sapien
tagtcgatctgtacatccaaatgca

SEQ ID NO: 3915889 - DNA, 25 bp, Homo sapien
aatgcatttgggaatctacacctac

SEQ ID NO: 3915890 - DNA, 25 bp, Homo sapien
caatgtttcatgcaatggtaggcaa

SEQ ID NO: 3915891 - DNA, 25 bp, Homo sapien
agagtacacttctgtcttcaaactg

SEQ ID NO: 3915892 - DNA, 25 bp, Homo sapien
gttggtccaactaagatgacagcag

SEQ ID NO: 3915893 - DNA, 25 bp, Homo sapien
taaaaatgtcccacaataggtcgac

SEQ ID NO: 3915894 - DNA, 25 bp, Homo sapien
gacagcagatatattacatgcagga

SEQ ID NO: 3915895 - DNA, 25 bp, Homo sapien
gaaacactaagtgccaggaagattc

SEQ ID NO: 3915896 - DNA, 25 bp, Homo sapien
taagtgccaggaagattcctattca

SEQ ID NO: 3915897 - DNA, 25 bp, Homo sapien
aacatagaaacactaagtgccagga

SEQ ID NO: 3915898 - DNA, 25 bp, Homo sapien
cactaagtgccaggaagattcctat

SEQ ID NO: 3915899 - DNA, 25 bp, Homo sapien
ctgtgaacagttggagaaagcagtc

SEQ ID NO: 3915900 - DNA, 25 bp, Homo sapien
tttaagccaccgacgaaagagagac

SEQ ID NO: 3915901 - DNA, 25 bp, Homo sapien
gctgtgcaagttccacccctatgaa

SEQ ID NO: 3915902 - DNA, 25 bp, Homo sapien
cacaaagtacccagtgtgttaaagc

SEQ ID NO: 3915903 - DNA, 25 bp, Homo sapien
cattagtatagatttttcggacaaa

SEQ ID NO: 3915904 - DNA, 25 bp, Homo sapien
cttgttcccatgtaaccaatcgctc

SEQ ID NO: 3915905 - DNA, 25 bp, Homo sapien
cacttgttcccatgtaaccaatcgc

SEQ ID NO: 3915906 - DNA, 25 bp, Homo sapien
cacattagtatagatttttcggaca

SEQ ID NO: 3915907 - DNA, 25 bp, Homo sapien
tttcccttaagttacctctgccaga

SEQ ID NO: 3915908 - DNA, 25 bp, Homo sapien
accaagggatcagtctcatttatca

SEQ ID NO: 3915909 - DNA, 25 bp, Homo sapien
ggaggaaaattatccactctctgga

SEQ ID NO: 3915910 - DNA, 25 bp, Homo sapien
accatgattagtcccgcagccttac

SEQ ID NO: 3915911 - DNA, 25 bp, Homo sapien
caaggctgtgctaaataccgccata

SEQ ID NO: 3915912 - DNA, 25 bp, Homo sapien
gctgtgctaaataccgccatatatc

SEQ ID NO: 3915913 - DNA, 25 bp, Homo sapien
gctaaataccgccatatatccaaag

SEQ ID NO: 3915914 - DNA, 25 bp, Homo sapien
taaataccgccatatatccaaagta

SEQ ID NO: 3915915 - DNA, 25 bp, Homo sapien
atacatgtaaacatagattgcagtt

SEQ ID NO: 3915916 - DNA, 25 bp, Homo sapien
gggaaagaagataaatctcttttga

SEQ ID NO: 3915917 - DNA, 25 bp, Homo sapien
gataaatctcttttgaatgaatggc

SEQ ID NO: 3915918 - DNA, 25 bp, Homo sapien
agaagataaatctcttttgaatgaa

SEQ ID NO: 3915919 - DNA, 25 bp, Homo sapien
agataaatctcttttgaatgaatgg

SEQ ID NO: 3915920 - DNA, 25 bp, Homo sapien
aatatgtgcacacaatagtcacaca

SEQ ID NO: 3915921 - DNA, 25 bp, Homo sapien
gcatcatgaagccatagacataata

SEQ ID NO: 3915922 - DNA, 25 bp, Homo sapien
cacacaatagtcacacagacagtca

SEQ ID NO: 3915923 - DNA, 25 bp, Homo sapien
tgcacaggataaccagcaccagcat

SEQ ID NO: 3915924 - DNA, 25 bp, Homo sapien
caggcaaacaataaccgcaggctcc

SEQ ID NO: 3915925 - DNA, 25 bp, Homo sapien
cccaggcaaacaataaccgcaggct

SEQ ID NO: 3915926 - DNA, 25 bp, Homo sapien
ggcaaacaataaccgcaggctccat

SEQ ID NO: 3915927 - DNA, 25 bp, Homo sapien
cacccaggcaaacaataaccgcagg

SEQ ID NO: 3915928 - DNA, 25 bp, Homo sapien
cacgctatactgtaactgtccaatt

SEQ ID NO: 3915929 - DNA, 25 bp, Homo sapien
tactgtaactgtccaattccaaata

SEQ ID NO: 3915930 - DNA, 25 bp, Homo sapien
gctatactgtaactgtccaattcca

SEQ ID NO: 3915931 - DNA, 25 bp, Homo sapien
tgtaactgtccaattccaaatacat

SEQ ID NO: 3915932 - DNA, 25 bp, Homo sapien
gtaaggatattgatgggtcctaaca

SEQ ID NO: 3915933 - DNA, 25 bp, Homo sapien
cagtaaggatattgatgggtcctaa

SEQ ID NO: 3915934 - DNA, 25 bp, Homo sapien
ccttcccagtaaggatattgatggg

SEQ ID NO: 3915935 - DNA, 25 bp, Homo sapien
aaggatattgatgggtcctaacata

SEQ ID NO: 3915936 - DNA, 25 bp, Homo sapien
cctccatgtctagaagggacagagc

SEQ ID NO: 3915937 - DNA, 25 bp, Homo sapien
ctcataagcaccaatctaaggaaag

SEQ ID NO: 3915938 - DNA, 25 bp, Homo sapien
cacctatttgtataagcacctgaat

SEQ ID NO: 3915939 - DNA, 25 bp, Homo sapien
taatctggtaaaatatctagggaca

SEQ ID NO: 3915940 - DNA, 25 bp, Homo sapien
gaggcacagcattgacacgacaagg

SEQ ID NO: 3915941 - DNA, 25 bp, Homo sapien
cagatttcggccaagtattgtacca

SEQ ID NO: 3915942 - DNA, 25 bp, Homo sapien
ttttctccggtataggacgaggcac

SEQ ID NO: 3915943 - DNA, 25 bp, Homo sapien
cacgacaaggaaagttgggctgacc

SEQ ID NO: 3915944 - DNA, 25 bp, Homo sapien
gcctcaatagccaagagatcaaagg

SEQ ID NO: 3915945 - DNA, 25 bp, Homo sapien
tcacccagaaaaaggcctcaatagc

SEQ ID NO: 3915946 - DNA, 25 bp, Homo sapien
tgcccagccagatgtggaaactttc

SEQ ID NO: 3915947 - DNA, 25 bp, Homo sapien
cagagaactagagtgaagatcaccc

SEQ ID NO: 3915948 - DNA, 25 bp, Homo sapien
acactacagattgggtttaaagcag

SEQ ID NO: 3915949 - DNA, 25 bp, Homo sapien
caggacagactaattagcttgaaag

SEQ ID NO: 3915950 - DNA, 25 bp, Homo sapien
gagactatgtaaccatttccttcag

SEQ ID NO: 3915951 - DNA, 25 bp, Homo sapien
gagaatcactgagtttatgagacta

SEQ ID NO: 3915952 - DNA, 25 bp, Homo sapien
gttcttcaagttcatgttctaaaca

SEQ ID NO: 3915953 - DNA, 25 bp, Homo sapien
gggtgaaacattcacttcaagttct

SEQ ID NO: 3915954 - DNA, 25 bp, Homo sapien
atgaagagctgggtgaaacattcac

SEQ ID NO: 3915955 - DNA, 25 bp, Homo sapien
tcaagttcatgttctaaacaagttt

SEQ ID NO: 3915956 - DNA, 25 bp, Homo sapien
cagtattccttcattagactaatgc

SEQ ID NO: 3915957 - DNA, 25 bp, Homo sapien
tacacacctaattaaaacatgaggc

SEQ ID NO: 3915958 - DNA, 25 bp, Homo sapien
aaacatgaggccaggggaataccct

SEQ ID NO: 3915959 - DNA, 25 bp, Homo sapien
aaagtacacacctaattaaaacatg

SEQ ID NO: 3915960 - DNA, 25 bp, Homo sapien
aacatctgctttatccatctccttc

SEQ ID NO: 3915961 - DNA, 25 bp, Homo sapien
ggaatgccccaataaacatctgctt

SEQ ID NO: 3915962 - DNA, 25 bp, Homo sapien
atggctcttgaagcatggtaataaa

SEQ ID NO: 3915963 - DNA, 25 bp, Homo sapien
cacacaccatagctgggataaggaa

SEQ ID NO: 3915964 - DNA, 25 bp, Homo sapien
tgaagtctctggctaaggtcctgga

SEQ ID NO: 3915965 - DNA, 25 bp, Homo sapien
cacacctgcgagtcgaatttagaga

SEQ ID NO: 3915966 - DNA, 25 bp, Homo sapien
tacagcattatagtgcactgaggac

SEQ ID NO: 3915967 - DNA, 25 bp, Homo sapien
gacttgatattcctagacctgagcc

SEQ ID NO: 3915968 - DNA, 25 bp, Homo sapien
tcttagcaagagactgtgacagtga

SEQ ID NO: 3915969 - DNA, 25 bp, Homo sapien
tagcagaaatctttgcgaagggtcc

SEQ ID NO: 3915970 - DNA, 25 bp, Homo sapien
tgtggatgcatcacatggagcacat

SEQ ID NO: 3915971 - DNA, 25 bp, Homo sapien
gccaggcacctcaaagcaaatagta

SEQ ID NO: 3915972 - DNA, 25 bp, Homo sapien
aaaataaccattcactggagacgta

SEQ ID NO: 3915973 - DNA, 25 bp, Homo sapien
cactggagacgtagcagcatagaca

SEQ ID NO: 3915974 - DNA, 25 bp, Homo sapien
ctccttgtctagcatacagacttcc

SEQ ID NO: 3915975 - DNA, 25 bp, Homo sapien
ggctgtactgagcattgatcccctc

SEQ ID NO: 3915976 - DNA, 25 bp, Homo sapien
ttttagatggaataacactgaggct

SEQ ID NO: 3915977 - DNA, 25 bp, Homo sapien
tcacaaatattctatgggcattccc

SEQ ID NO: 3915978 - DNA, 25 bp, Homo sapien
ggtatttagcctacacctgccacag

SEQ ID NO: 3915979 - DNA, 25 bp, Homo sapien
aatctgctgagggaggcaacagtcc

SEQ ID NO: 3915980 - DNA, 25 bp, Homo sapien
gacacagcaaatatctgacatccag

SEQ ID NO: 3915981 - DNA, 25 bp, Homo sapien
tatcattgcaacaataataacgatg

SEQ ID NO: 3915982 - DNA, 25 bp, Homo sapien
ggaaaatatcagtgggtgacttgat

SEQ ID NO: 3915983 - DNA, 25 bp, Homo sapien
aatatcagtgggtgacttgatggtc

SEQ ID NO: 3915984 - DNA, 25 bp, Homo sapien
aatcattgaaactaagcccaccaag

SEQ ID NO: 3915985 - DNA, 25 bp, Homo sapien
tcttcctctttactgtaccgagcat

SEQ ID NO: 3915986 - DNA, 25 bp, Homo sapien
ccaccaagaagatcaccatcatgaa

SEQ ID NO: 3915987 - DNA, 25 bp, Homo sapien
tactgtaccgagcataatcttttct

SEQ ID NO: 3915988 - DNA, 25 bp, Homo sapien
tcagcaatctccaaaggtccttatc

SEQ ID NO: 3915989 - DNA, 25 bp, Homo sapien
ccttatctacaatgatgtctactcc

SEQ ID NO: 3915990 - DNA, 25 bp, Homo sapien
tccctggggttgtcatagagtttaa

SEQ ID NO: 3915991 - DNA, 25 bp, Homo sapien
aaggtaaagcaaatagtatagtgcc

SEQ ID NO: 3915992 - DNA, 25 bp, Homo sapien
aatgatgatgataacaccctcgccc

SEQ ID NO: 3915993 - DNA, 25 bp, Homo sapien
ttaaccagcattccaatgatgatga

SEQ ID NO: 3915994 - DNA, 25 bp, Homo sapien
aaaagctccagtcttagtactctgc

SEQ ID NO: 3915995 - DNA, 25 bp, Homo sapien
gctcctcccatcctttgtgaacttc

SEQ ID NO: 3915996 - DNA, 25 bp, Homo sapien
taagccttatccctcttcaagaatc

SEQ ID NO: 3915997 - DNA, 25 bp, Homo sapien
gaaacctcttatctacatattccgg

SEQ ID NO: 3915998 - DNA, 25 bp, Homo sapien
tacttcctgtaatatggccatctca

SEQ ID NO: 3915999 - DNA, 25 bp, Homo sapien
tccaaagcaggttcatatatcactc

SEQ ID NO: 3916000 - DNA, 25 bp, Homo sapien
ccgatgttgaaaaaaggacggatca

SEQ ID NO: 3916001 - DNA, 25 bp, Homo sapien
aaaggacggatcaagatatttgtca

SEQ ID NO: 3916002 - DNA, 25 bp, Homo sapien
cggatcaagatatttgtcaaatcga

SEQ ID NO: 3916003 - DNA, 25 bp, Homo sapien
agatatttgtcaaatcgatcttcaa

SEQ ID NO: 3916004 - DNA, 25 bp, Homo sapien
tgttgacttacatattatgacctga

SEQ ID NO: 3916005 - DNA, 25 bp, Homo sapien
ttagtataagctcatatcacaagtg

SEQ ID NO: 3916006 - DNA, 25 bp, Homo sapien
tgagaagtggaaacgattatgataa

SEQ ID NO: 3916007 - DNA, 25 bp, Homo sapien
ggaaagttacttacaacatgagaag

SEQ ID NO: 3916008 - DNA, 25 bp, Homo sapien
gacagttgctaaaaggctctgacaa

SEQ ID NO: 3916009 - DNA, 25 bp, Homo sapien
tatattattccaactgacagagcaa

SEQ ID NO: 3916010 - DNA, 25 bp, Homo sapien
cattccagctatgaggcaataactg

SEQ ID NO: 3916011 - DNA, 25 bp, Homo sapien
ggcagaggctacctacactgaattt

SEQ ID NO: 3916012 - DNA, 25 bp, Homo sapien
ccttcactagttagattaacatcaa

SEQ ID NO: 3916013 - DNA, 25 bp, Homo sapien
tataggtccaaagatagtaatcttc

SEQ ID NO: 3916014 - DNA, 25 bp, Homo sapien
ttttataggtccaaagatagtaatc

SEQ ID NO: 3916015 - DNA, 25 bp, Homo sapien
caattcgatttccattaaaacctat

SEQ ID NO: 3916016 - DNA, 25 bp, Homo sapien
gtttatttacctatctactctgaaa

SEQ ID NO: 3916017 - DNA, 25 bp, Homo sapien
ggtttatttacctatctactctgaa

SEQ ID NO: 3916018 - DNA, 25 bp, Homo sapien
tttatttacctatctactctgaaaa

SEQ ID NO: 3916019 - DNA, 25 bp, Homo sapien
ttatttacctatctactctgaaaac

SEQ ID NO: 3916020 - DNA, 25 bp, Homo sapien
catattggtaaatcatctatgtaca

SEQ ID NO: 3916021 - DNA, 25 bp, Homo sapien
ccatattggtaaatcatctatgtac

SEQ ID NO: 3916022 - DNA, 25 bp, Homo sapien
cccatattggtaaatcatctatgta

SEQ ID NO: 3916023 - DNA, 25 bp, Homo sapien
atattggtaaatcatctatgtacat

SEQ ID NO: 3916024 - DNA, 25 bp, Homo sapien
ggcatatacaaatgcatctctcttt

SEQ ID NO: 3916025 - DNA, 25 bp, Homo sapien
tttatggcatatacaaatgcatctc

SEQ ID NO: 3916026 - DNA, 25 bp, Homo sapien
tctaaatcaatttcacagtaagtgg

SEQ ID NO: 3916027 - DNA, 25 bp, Homo sapien
ggtaccagtaatgattttttatggc

SEQ ID NO: 3916028 - DNA, 25 bp, Homo sapien
gtgggttcagtgtactattcctccc

SEQ ID NO: 3916029 - DNA, 25 bp, Homo sapien
aattgcaaattagcccactagtttg

SEQ ID NO: 3916030 - DNA, 25 bp, Homo sapien
gtgaaatcatcccttatacaaagca

SEQ ID NO: 3916031 - DNA, 25 bp, Homo sapien
ctgagtgataaataagtgtgggttc

SEQ ID NO: 3916032 - DNA, 25 bp, Homo sapien
gatgagtcattttccaccccgactg

SEQ ID NO: 3916033 - DNA, 25 bp, Homo sapien
gattctatgaaaacacccagtgact

SEQ ID NO: 3916034 - DNA, 25 bp, Homo sapien
catttgtagctataagatctctctg

SEQ ID NO: 3916035 - DNA, 25 bp, Homo sapien
aaggcaaacctctattcagcaaaca

SEQ ID NO: 3916036 - DNA, 25 bp, Homo sapien
aagcaaggttaggtagattctggac

SEQ ID NO: 3916037 - DNA, 25 bp, Homo sapien
tctttcgaaggtgaaacacacatcc

SEQ ID NO: 3916038 - DNA, 25 bp, Homo sapien
actccaggctaacaattgaataggc

SEQ ID NO: 3916039 - DNA, 25 bp, Homo sapien
gattctggacactatgcaccccaat

SEQ ID NO: 3916040 - DNA, 25 bp, Homo sapien
cctctcagttcccttaacagagaca

SEQ ID NO: 3916041 - DNA, 25 bp, Homo sapien
acagtctacctctaattcagcagca

SEQ ID NO: 3916042 - DNA, 25 bp, Homo sapien
tctctaagaacacagtatgccatac

SEQ ID NO: 3916043 - DNA, 25 bp, Homo sapien
ctctagtatctagtagctatgtgaa

SEQ ID NO: 3916044 - DNA, 25 bp, Homo sapien
tttacaaaacgataccaatccatgg

SEQ ID NO: 3916045 - DNA, 25 bp, Homo sapien
gaggcatcctgtattagagttagac

SEQ ID NO: 3916046 - DNA, 25 bp, Homo sapien
tagcatttttgtctagtgctagaat

SEQ ID NO: 3916047 - DNA, 25 bp, Homo sapien
tgtataaaatcttgagaggcatcct

SEQ ID NO: 3916048 - DNA, 25 bp, Homo sapien
tagatacggtatacctattttcaac

SEQ ID NO: 3916049 - DNA, 25 bp, Homo sapien
gaaatgcacaccaaatacggaaaaa

SEQ ID NO: 3916050 - DNA, 25 bp, Homo sapien
catatagtaccaaatctcaaagatc

SEQ ID NO: 3916051 - DNA, 25 bp, Homo sapien
gcctcaaaggtatgtttacagtgat

SEQ ID NO: 3916052 - DNA, 25 bp, Homo sapien
aaagaattatccaacaccagtgtca

SEQ ID NO: 3916053 - DNA, 25 bp, Homo sapien
ggttctcaactgacagcaattagca

SEQ ID NO: 3916054 - DNA, 25 bp, Homo sapien
tcaatagtgccaaaatatgaaaccc

SEQ ID NO: 3916055 - DNA, 25 bp, Homo sapien
ggactctgctagacatcctaacatg

SEQ ID NO: 3916056 - DNA, 25 bp, Homo sapien
aattccaattcaaccccttgaagtg

SEQ ID NO: 3916057 - DNA, 25 bp, Homo sapien
ggtagggcccaacagtattcatcca

SEQ ID NO: 3916058 - DNA, 25 bp, Homo sapien
gaagtgaaaagtacttatatgtttc

SEQ ID NO: 3916059 - DNA, 25 bp, Homo sapien
tatgtttcttgacgattatggtagg

SEQ ID NO: 3916060 - DNA, 25 bp, Homo sapien
tgtggtcagtaatgactttgagtag

SEQ ID NO: 3916061 - DNA, 25 bp, Homo sapien
aagtgtggtcagtaatgactttgag

SEQ ID NO: 3916062 - DNA, 25 bp, Homo sapien
ggtcagtaatgactttgagtagttc

SEQ ID NO: 3916063 - DNA, 25 bp, Homo sapien
gaagtgtggtcagtaatgactttga

SEQ ID NO: 3916064 - DNA, 25 bp, Homo sapien
ttttaatccggtctgggcagaagcg

SEQ ID NO: 3916065 - DNA, 25 bp, Homo sapien
cagaagcgggcgataaaagccaaag

SEQ ID NO: 3916066 - DNA, 25 bp, Homo sapien
ccgcggtggatgaacctcaaccctt

SEQ ID NO: 3916067 - DNA, 25 bp, Homo sapien
gccgggtaatcacgatgcatccatc

SEQ ID NO: 3916068 - DNA, 25 bp, Homo sapien
caactggggagctagcccggggcgg

SEQ ID NO: 3916069 - DNA, 25 bp, Homo sapien
tgggcaactggggagctagcccggg

SEQ ID NO: 3916070 - DNA, 25 bp, Homo sapien
cgccgggcactccaggctgcgtggg

SEQ ID NO: 3916071 - DNA, 25 bp, Homo sapien
ggagtcctcgggccgcagtggggca

SEQ ID NO: 3916072 - DNA, 25 bp, Homo sapien
gcggccgccgccacgccaagagcgc

SEQ ID NO: 3916073 - DNA, 25 bp, Homo sapien
gccgccacgccaagagcgccaggca

SEQ ID NO: 3916074 - DNA, 25 bp, Homo sapien
cgtgtgttcgtgctcgtccgcccgg

SEQ ID NO: 3916075 - DNA, 25 bp, Homo sapien
gtgttcgtgctcgtccgcccgggtc

SEQ ID NO: 3916076 - DNA, 25 bp, Homo sapien
ggttgtgtaaccttggccaaaatgc

SEQ ID NO: 3916077 - DNA, 25 bp, Homo sapien
acgcgccggaagtgcctcgcgacgc

SEQ ID NO: 3916078 - DNA, 25 bp, Homo sapien
cagtggcctagcctggaccgcaagg

SEQ ID NO: 3916079 - DNA, 25 bp, Homo sapien
ccgattcgcatccacggggcgcgga

SEQ ID NO: 3916080 - DNA, 25 bp, Homo sapien
tacaaacactctcgtgatggacatg

SEQ ID NO: 3916081 - DNA, 25 bp, Homo sapien
cagttccatccgtgtctcaagtgta

SEQ ID NO: 3916082 - DNA, 25 bp, Homo sapien
taagtaacagggcaagcataccaac

SEQ ID NO: 3916083 - DNA, 25 bp, Homo sapien
tatcacattcacgagacaaggcttc

SEQ ID NO: 3916084 - DNA, 25 bp, Homo sapien
gcaaaaatggacttactgagcatgg

SEQ ID NO: 3916085 - DNA, 25 bp, Homo sapien
tttaggcatcattaaggacctctga

SEQ ID NO: 3916086 - DNA, 25 bp, Homo sapien
tgtgccagggactccaaattcatga

SEQ ID NO: 3916087 - DNA, 25 bp, Homo sapien
taaggctccatattccatgcaaaaa

SEQ ID NO: 3916088 - DNA, 25 bp, Homo sapien
tcctcagaagcctcaacgaagaaaa

SEQ ID NO: 3916089 - DNA, 25 bp, Homo sapien
cttctctctctatgaccagaaataa

SEQ ID NO: 3916090 - DNA, 25 bp, Homo sapien
cagaagcctcaacgaagaaaaagtc

SEQ ID NO: 3916091 - DNA, 25 bp, Homo sapien
tcagaagcctcaacgaagaaaaagt

SEQ ID NO: 3916092 - DNA, 25 bp, Homo sapien
taataaaatcttcgaggcaagccca

SEQ ID NO: 3916093 - DNA, 25 bp, Homo sapien
caaacttggtagtctcatgcctggg

SEQ ID NO: 3916094 - DNA, 25 bp, Homo sapien
tggatcttaaggtcaacagtcatgc

SEQ ID NO: 3916095 - DNA, 25 bp, Homo sapien
aattctggaagaccaataggcactg

SEQ ID NO: 3916096 - DNA, 25 bp, Homo sapien
ggtggaacaggtggaggaggatgga

SEQ ID NO: 3916097 - DNA, 25 bp, Homo sapien
gatggaaggtctccctggtcggagg

SEQ ID NO: 3916098 - DNA, 25 bp, Homo sapien
aggatggaaggtctccctggtcgga

SEQ ID NO: 3916099 - DNA, 25 bp, Homo sapien
aggaggatggaaggtctccctggtc

SEQ ID NO: 3916100 - DNA, 25 bp, Homo sapien
atacggtggtagatgacttgatggc

SEQ ID NO: 3916101 - DNA, 25 bp, Homo sapien
cccctgcatacggtggtagatgact

SEQ ID NO: 3916102 - DNA, 25 bp, Homo sapien
tctataacccccctgcatacggtgg

SEQ ID NO: 3916103 - DNA, 25 bp, Homo sapien
taacccccctgcatacggtggtaga

SEQ ID NO: 3916104 - DNA, 25 bp, Homo sapien
tctacacaagggtcgcaacacagag

SEQ ID NO: 3916105 - DNA, 25 bp, Homo sapien
caggacttgagctaggcagagccaa

SEQ ID NO: 3916106 - DNA, 25 bp, Homo sapien
gattcactcgcatgggaacattagg

SEQ ID NO: 3916107 - DNA, 25 bp, Homo sapien
taagtgtgggccttcaagaatgaac

SEQ ID NO: 3916108 - DNA, 25 bp, Homo sapien
tgaggcagctctcggaggcaccctg

SEQ ID NO: 3916109 - DNA, 25 bp, Homo sapien
ggcctggactgcgacttctggtaac

SEQ ID NO: 3916110 - DNA, 25 bp, Homo sapien
gtcccatccacttgtggggggcctg

SEQ ID NO: 3916111 - DNA, 25 bp, Homo sapien
acttctggtaacctcagggacttca

SEQ ID NO: 3916112 - DNA, 25 bp, Homo sapien
cctgctcggaggcctagtggactca

SEQ ID NO: 3916113 - DNA, 25 bp, Homo sapien
ctgctcggaggcctagtggactcag

SEQ ID NO: 3916114 - DNA, 25 bp, Homo sapien
tcggaggcctagtggactcagggga

SEQ ID NO: 3916115 - DNA, 25 bp, Homo sapien
gctcggaggcctagtggactcaggg

SEQ ID NO: 3916116 - DNA, 25 bp, Homo sapien
acgacccctaggacaggataggtgg

SEQ ID NO: 3916117 - DNA, 25 bp, Homo sapien
gggtttctatctcttgcgatgaaac

SEQ ID NO: 3916118 - DNA, 25 bp, Homo sapien
tgtggatttgcccactctggcattt

SEQ ID NO: 3916119 - DNA, 25 bp, Homo sapien
tcttgcgatgaaacgacccctagga

SEQ ID NO: 3916120 - DNA, 25 bp, Homo sapien
ggtgctggagcggttacttgtgcta

SEQ ID NO: 3916121 - DNA, 25 bp, Homo sapien
ccttccatcccgctgctcacactga

SEQ ID NO: 3916122 - DNA, 25 bp, Homo sapien
cttccatcccgctgctcacactgag

SEQ ID NO: 3916123 - DNA, 25 bp, Homo sapien
gtgctggagcggttacttgtgctac

SEQ ID NO: 3916124 - DNA, 25 bp, Homo sapien
tgagtgccgaattgggaccgtgatc

SEQ ID NO: 3916125 - DNA, 25 bp, Homo sapien
tgctggaggtgctgtctgttttcca

SEQ ID NO: 3916126 - DNA, 25 bp, Homo sapien
caaactccacttttgcaggcaggtg

SEQ ID NO: 3916127 - DNA, 25 bp, Homo sapien
cagctccgtcctagggggaatgaca

SEQ ID NO: 3916128 - DNA, 25 bp, Homo sapien
tgtcttcgggtgatgctgtctctta

SEQ ID NO: 3916129 - DNA, 25 bp, Homo sapien
gatgctgtctcttagccgtttaaga

SEQ ID NO: 3916130 - DNA, 25 bp, Homo sapien
ctctgtcttcgggtgatgctgtctc

SEQ ID NO: 3916131 - DNA, 25 bp, Homo sapien
tcgggtgatgctgtctcttagccgt

SEQ ID NO: 3916132 - DNA, 25 bp, Homo sapien
gaaaggaaagcggccttgagggatg

SEQ ID NO: 3916133 - DNA, 25 bp, Homo sapien
atggtttgttgttagacatgctgtg

SEQ ID NO: 3916134 - DNA, 25 bp, Homo sapien
tgttgttagacatgctgtgagcctg

SEQ ID NO: 3916135 - DNA, 25 bp, Homo sapien
ggcactcagggggacaaagccaact

SEQ ID NO: 3916136 - DNA, 25 bp, Homo sapien
tagtcctcccctttcatatgaggca

SEQ ID NO: 3916137 - DNA, 25 bp, Homo sapien
agttatgctgcttacagtagcttat

SEQ ID NO: 3916138 - DNA, 25 bp, Homo sapien
gtagcttatatcacctagtcctccc

SEQ ID NO: 3916139 - DNA, 25 bp, Homo sapien
gaggcacagcaaggtcaaggtcatc

SEQ ID NO: 3916140 - DNA, 25 bp, Homo sapien
tgtgatagttatgagggtatttggc

SEQ ID NO: 3916141 - DNA, 25 bp, Homo sapien
tatgagggtatttggcagtaggaat

SEQ ID NO: 3916142 - DNA, 25 bp, Homo sapien
tcataaagtgtgatagttatgaggg

SEQ ID NO: 3916143 - DNA, 25 bp, Homo sapien
tagttatgagggtatttggcagtag

SEQ ID NO: 3916144 - DNA, 25 bp, Homo sapien
gactccgatcgtttcttctggttga

SEQ ID NO: 3916145 - DNA, 25 bp, Homo sapien
ttttcattcccgcaaaagggtcata

SEQ ID NO: 3916146 - DNA, 25 bp, Homo sapien
ctcctggagggtgataagctgccgc

SEQ ID NO: 3916147 - DNA, 25 bp, Homo sapien
tctttgaagtggagcacagcctcat

SEQ ID NO: 3916148 - DNA, 25 bp, Homo sapien
taagggaggcgtgaaatctgctgac

SEQ ID NO: 3916149 - DNA, 25 bp, Homo sapien
caaggcctatcacactgaagtagac

SEQ ID NO: 3916150 - DNA, 25 bp, Homo sapien
tagacaaggctgcaacatttaaggg

SEQ ID NO: 3916151 - DNA, 25 bp, Homo sapien
aagtgtacggttaatgaggctggtc

SEQ ID NO: 3916152 - DNA, 25 bp, Homo sapien
gcgtcttctgcttagagactctggt

SEQ ID NO: 3916153 - DNA, 25 bp, Homo sapien
gttgctagcagtcttagagatggca

SEQ ID NO: 3916154 - DNA, 25 bp, Homo sapien
tccagttgctagcagtcttagagat

SEQ ID NO: 3916155 - DNA, 25 bp, Homo sapien
cctgcgtcttctgcttagagactct

SEQ ID NO: 3916156 - DNA, 25 bp, Homo sapien
tgggggcagggatgaggcacacaca

SEQ ID NO: 3916157 - DNA, 25 bp, Homo sapien
ctgggggcagggatgaggcacacac

SEQ ID NO: 3916158 - DNA, 25 bp, Homo sapien
gggggcagggatgaggcacacacac

SEQ ID NO: 3916159 - DNA, 25 bp, Homo sapien
tctgtgcgggtccaatggagagctt

SEQ ID NO: 3916160 - DNA, 25 bp, Homo sapien
cctgtcacgttgcaaaggctggtgt

SEQ ID NO: 3916161 - DNA, 25 bp, Homo sapien
agtggcctgtcacgttgcaaaggct

SEQ ID NO: 3916162 - DNA, 25 bp, Homo sapien
gtagcctctctgtgcgggtccaatg

SEQ ID NO: 3916163 - DNA, 25 bp, Homo sapien
gtggctacccccttggagtgcttaa

SEQ ID NO: 3916164 - DNA, 25 bp, Homo sapien
gcttaatacccagacaacatggcca

SEQ ID NO: 3916165 - DNA, 25 bp, Homo sapien
ggatgatggcccgttggatggtagt

SEQ ID NO: 3916166 - DNA, 25 bp, Homo sapien
gcccgttggatggtagtggctaccc

SEQ ID NO: 3916167 - DNA, 25 bp, Homo sapien
taatcttcagaaccccattcttgag

SEQ ID NO: 3916168 - DNA, 25 bp, Homo sapien
taacttagtgataggcgtcgactcc

SEQ ID NO: 3916169 - DNA, 25 bp, Homo sapien
cattcttgagagacgactccaggaa

SEQ ID NO: 3916170 - DNA, 25 bp, Homo sapien
tgaacctggtgaaatggccagcatg

SEQ ID NO: 3916171 - DNA, 25 bp, Homo sapien
agccacagccacaaccttggcctga

SEQ ID NO: 3916172 - DNA, 25 bp, Homo sapien
cagccacagccacaaccttggcctg

SEQ ID NO: 3916173 - DNA, 25 bp, Homo sapien
tgcaccggtgagtactgaaaaagcc

SEQ ID NO: 3916174 - DNA, 25 bp, Homo sapien
tataaagtaggtgctggcttccagc

SEQ ID NO: 3916175 - DNA, 25 bp, Homo sapien
taaagactgagtgctgggccaccta

SEQ ID NO: 3916176 - DNA, 25 bp, Homo sapien
cacagtgattgtggacccatgggca

SEQ ID NO: 3916177 - DNA, 25 bp, Homo sapien
tagaaattcccaggccgctcttgac

SEQ ID NO: 3916178 - DNA, 25 bp, Homo sapien
gctctctgaggaaacgtagaaattc

SEQ ID NO: 3916179 - DNA, 25 bp, Homo sapien
atgctctctgaggaaacgtagaaat

SEQ ID NO: 3916180 - DNA, 25 bp, Homo sapien
aacgtagaaattcccaggccgctct

SEQ ID NO: 3916181 - DNA, 25 bp, Homo sapien
ctatgagataaagaatattctgatt

SEQ ID NO: 3916182 - DNA, 25 bp, Homo sapien
tatgagataaagaatattctgatta

SEQ ID NO: 3916183 - DNA, 25 bp, Homo sapien
tctccagattggtcattcccatgct

SEQ ID NO: 3916184 - DNA, 25 bp, Homo sapien
aaaaggcctcatcgtcatccaccgt

SEQ ID NO: 3916185 - DNA, 25 bp, Homo sapien
ccaagatggcactgatctctctcca

SEQ ID NO: 3916186 - DNA, 25 bp, Homo sapien
tatggttcgttgtcaggcagctggt

SEQ ID NO: 3916187 - DNA, 25 bp, Homo sapien
gaaaccatctccagggattgggtta

SEQ ID NO: 3916188 - DNA, 25 bp, Homo sapien
tagtggcccgagagaaaccatctcc

SEQ ID NO: 3916189 - DNA, 25 bp, Homo sapien
taaaaacttgcggatcatagagtcc

SEQ ID NO: 3916190 - DNA, 25 bp, Homo sapien
gattgggttagatgtactggcctga

SEQ ID NO: 3916191 - DNA, 25 bp, Homo sapien
cccaagggaagacatgctcgggtca

SEQ ID NO: 3916192 - DNA, 25 bp, Homo sapien
ccccaagggaagacatgctcgggtc

SEQ ID NO: 3916193 - DNA, 25 bp, Homo sapien
gcatctccaagaaccttctccaggg

SEQ ID NO: 3916194 - DNA, 25 bp, Homo sapien
cagcatctccaagaaccttctccag

SEQ ID NO: 3916195 - DNA, 25 bp, Homo sapien
cccagcatctccaagaaccttctcc

SEQ ID NO: 3916196 - DNA, 25 bp, Homo sapien
tctccaagaaccttctccagggcat

SEQ ID NO: 3916197 - DNA, 25 bp, Homo sapien
tgtctgcctacactatcaagctaag

SEQ ID NO: 3916198 - DNA, 25 bp, Homo sapien
taatcatagctcctgaggatgaccc

SEQ ID NO: 3916199 - DNA, 25 bp, Homo sapien
taggatcgcaatgcataggttccaa

SEQ ID NO: 3916200 - DNA, 25 bp, Homo sapien
tagaagcgtgggcattaggatcgca

SEQ ID NO: 3916201 - DNA, 25 bp, Homo sapien
gacatgcttggcaccagtccactca

SEQ ID NO: 3916202 - DNA, 25 bp, Homo sapien
tgggacatgcttggcaccagtccac

SEQ ID NO: 3916203 - DNA, 25 bp, Homo sapien
acatgcttggcaccagtccactcac

SEQ ID NO: 3916204 - DNA, 25 bp, Homo sapien
ggacatgcttggcaccagtccactc

SEQ ID NO: 3916205 - DNA, 25 bp, Homo sapien
aaaggacacaagctagcagggcagt

SEQ ID NO: 3916206 - DNA, 25 bp, Homo sapien
ccttgcatctgatcagcaactcaga

SEQ ID NO: 3916207 - DNA, 25 bp, Homo sapien
agataaaggacacaagctagcaggg

SEQ ID NO: 3916208 - DNA, 25 bp, Homo sapien
cagtccttgcatctgatcagcaact

SEQ ID NO: 3916209 - DNA, 25 bp, Homo sapien
ggtcaccatgagaggtatgccagag

SEQ ID NO: 3916210 - DNA, 25 bp, Homo sapien
ggaaagcccaaagaatgctgtccct

SEQ ID NO: 3916211 - DNA, 25 bp, Homo sapien
tagttcctgtacagatcctcccagt

SEQ ID NO: 3916212 - DNA, 25 bp, Homo sapien
gagtcaatgccctcaggaaagccca

SEQ ID NO: 3916213 - DNA, 25 bp, Homo sapien
catgagtattaaattaggaggttgc

SEQ ID NO: 3916214 - DNA, 25 bp, Homo sapien
taggaggttgccaagtgcttagcac

SEQ ID NO: 3916215 - DNA, 25 bp, Homo sapien
tgctgaaggaatgctagctactatt

SEQ ID NO: 3916216 - DNA, 25 bp, Homo sapien
tacgtatctcccaggtttgtcatga

SEQ ID NO: 3916217 - DNA, 25 bp, Homo sapien
gggcactgataaacgtggcaatcta

SEQ ID NO: 3916218 - DNA, 25 bp, Homo sapien
caatctagacatttagaaatagctc

SEQ ID NO: 3916219 - DNA, 25 bp, Homo sapien
cacagtcaatggtggggcactgata

SEQ ID NO: 3916220 - DNA, 25 bp, Homo sapien
gaaatagctcctgtgtaagtgtccc

SEQ ID NO: 3916221 - DNA, 25 bp, Homo sapien
atatagcccattccagaaattcccc

SEQ ID NO: 3916222 - DNA, 25 bp, Homo sapien
accttggttgatacttctcttcctt

SEQ ID NO: 3916223 - DNA, 25 bp, Homo sapien
tcaggctgaaggcttgtaacactca

SEQ ID NO: 3916224 - DNA, 25 bp, Homo sapien
ccatccataatgctgataccttggt

SEQ ID NO: 3916225 - DNA, 25 bp, Homo sapien
cataaagagttgttcaccatctagg

SEQ ID NO: 3916226 - DNA, 25 bp, Homo sapien
accatctaggaaaatccaggtgcca

SEQ ID NO: 3916227 - DNA, 25 bp, Homo sapien
gggaacttctactgctcattcactt

SEQ ID NO: 3916228 - DNA, 25 bp, Homo sapien
aaggcattacttttgcattggaaaa

SEQ ID NO: 3916229 - DNA, 25 bp, Homo sapien
tcatagagatcctcgtcacagccgg

SEQ ID NO: 3916230 - DNA, 25 bp, Homo sapien
gaaaggtgggccatggactcgtaca

SEQ ID NO: 3916231 - DNA, 25 bp, Homo sapien
gggttgagcgagcatttcataagca

SEQ ID NO: 3916232 - DNA, 25 bp, Homo sapien
tgactcttgagcatgtccaccgttt

SEQ ID NO: 3916233 - DNA, 25 bp, Homo sapien
taaatgtccactgaccagaggatac

SEQ ID NO: 3916234 - DNA, 25 bp, Homo sapien
tcttcctacaacactaagcacagag

SEQ ID NO: 3916235 - DNA, 25 bp, Homo sapien
aaaaattactttcccatggcctgat

SEQ ID NO: 3916236 - DNA, 25 bp, Homo sapien
cactcaggaaatactcgttaaatgt

SEQ ID NO: 3916237 - DNA, 25 bp, Homo sapien
ttgttggccacgctgtacgcctgca

SEQ ID NO: 3916238 - DNA, 25 bp, Homo sapien
gaggttcttcagtccatacttcgca

SEQ ID NO: 3916239 - DNA, 25 bp, Homo sapien
tactcgtcgatgaactgccgcaggt

SEQ ID NO: 3916240 - DNA, 25 bp, Homo sapien
tcctgggcaggtgagcaacaaggca

SEQ ID NO: 3916241 - DNA, 25 bp, Homo sapien
cggttagcagtttatcaagggtctc

SEQ ID NO: 3916242 - DNA, 25 bp, Homo sapien
caaagaggtgcagtccgcttgcagg

SEQ ID NO: 3916243 - DNA, 25 bp, Homo sapien
tgttcttcagggattcggttagcag

SEQ ID NO: 3916244 - DNA, 25 bp, Homo sapien
ccagctggttgattccaaagaggtg

SEQ ID NO: 3916245 - DNA, 25 bp, Homo sapien
gctgataacggtttcacacaccact

SEQ ID NO: 3916246 - DNA, 25 bp, Homo sapien
tcttccatgtcagtataatagctga

SEQ ID NO: 3916247 - DNA, 25 bp, Homo sapien
tatatcttcagagaaacgttcccag

SEQ ID NO: 3916248 - DNA, 25 bp, Homo sapien
catgaattccacaggattcgcggca

SEQ ID NO: 3916249 - DNA, 25 bp, Homo sapien
aaaactctgcttctgtcgccaccct

SEQ ID NO: 3916250 - DNA, 25 bp, Homo sapien
tgtcgccaccctgtcatccagctta

SEQ ID NO: 3916251 - DNA, 25 bp, Homo sapien
ttacatctcacaataacatagacag

SEQ ID NO: 3916252 - DNA, 25 bp, Homo sapien
tccttacagagggagaatcctcagg

SEQ ID NO: 3916253 - DNA, 25 bp, Homo sapien
catgcatttgaaaagcccaagtgct

SEQ ID NO: 3916254 - DNA, 25 bp, Homo sapien
caagtgctgacatccagctaccagg

SEQ ID NO: 3916255 - DNA, 25 bp, Homo sapien
tgaggtgcaatacaagaaaccactc

SEQ ID NO: 3916256 - DNA, 25 bp, Homo sapien
tgtctgctggtctcctaggtgctct

SEQ ID NO: 3916257 - DNA, 25 bp, Homo sapien
cccacagcgaatgcggtccggctgc

SEQ ID NO: 3916258 - DNA, 25 bp, Homo sapien
ccacagcgaatgcggtccggctgca

SEQ ID NO: 3916259 - DNA, 25 bp, Homo sapien
agcgaatgcggtccggctgcaccac

SEQ ID NO: 3916260 - DNA, 25 bp, Homo sapien
acagcgaatgcggtccggctgcacc

SEQ ID NO: 3916261 - DNA, 25 bp, Homo sapien
ggaaacaaccttctcgtcctcaggc

SEQ ID NO: 3916262 - DNA, 25 bp, Homo sapien
agtcaccgtcggcaggttctgctgc

SEQ ID NO: 3916263 - DNA, 25 bp, Homo sapien
ttctcgtcctcaggctcagtgtcag

SEQ ID NO: 3916264 - DNA, 25 bp, Homo sapien
caggtgaagtcaccgtcggcaggtt

SEQ ID NO: 3916265 - DNA, 25 bp, Homo sapien
ctgaggttgtgtgcaagattgtgtg

SEQ ID NO: 3916266 - DNA, 25 bp, Homo sapien
tgaggttgtgtgcaagattgtgtgt

SEQ ID NO: 3916267 - DNA, 25 bp, Homo sapien
tctgaggttgtgtgcaagattgtgt

SEQ ID NO: 3916268 - DNA, 25 bp, Homo sapien
ctctgaggttgtgtgcaagattgtg

SEQ ID NO: 3916269 - DNA, 25 bp, Homo sapien
caagtgctttgggaagccgagtcgg

SEQ ID NO: 3916270 - DNA, 25 bp, Homo sapien
gtgctttgggaagccgagtcgggag

SEQ ID NO: 3916271 - DNA, 25 bp, Homo sapien
tccaagtgctttgggaagccgagtc

SEQ ID NO: 3916272 - DNA, 25 bp, Homo sapien
agtgctttgggaagccgagtcggga

SEQ ID NO: 3916273 - DNA, 25 bp, Homo sapien
gatccttagggagcactatccaacc

SEQ ID NO: 3916274 - DNA, 25 bp, Homo sapien
gcatctaccatgcacaggcaaccag

SEQ ID NO: 3916275 - DNA, 25 bp, Homo sapien
gtgagaaagtgctcccctctaggca

SEQ ID NO: 3916276 - DNA, 25 bp, Homo sapien
tatcctggattcagcgtctcgggct

SEQ ID NO: 3916277 - DNA, 25 bp, Homo sapien
tagtggtcattgctggctactgctg

SEQ ID NO: 3916278 - DNA, 25 bp, Homo sapien
gctggccggtggcccctacatctta

SEQ ID NO: 3916279 - DNA, 25 bp, Homo sapien
tgatagtggtcattgctggctactg

SEQ ID NO: 3916280 - DNA, 25 bp, Homo sapien
agtggtcattgctggctactgctgg

SEQ ID NO: 3916281 - DNA, 25 bp, Homo sapien
ggctatgacccgaggtcattacaga

SEQ ID NO: 3916282 - DNA, 25 bp, Homo sapien
tgtccccttgttgggctggctatga

SEQ ID NO: 3916283 - DNA, 25 bp, Homo sapien
tgacccgaggtcattacagatttca

SEQ ID NO: 3916284 - DNA, 25 bp, Homo sapien
ttgggctggctatgacccgaggtca

SEQ ID NO: 3916285 - DNA, 25 bp, Homo sapien
tccagacacatggaagccaggctct

SEQ ID NO: 3916286 - DNA, 25 bp, Homo sapien
tgaccaagaatccagacataaggaa

SEQ ID NO: 3916287 - DNA, 25 bp, Homo sapien
gatcctcaggtcttagtgacagaaa

SEQ ID NO: 3916288 - DNA, 25 bp, Homo sapien
gaatgaccttgagttattccaactg

SEQ ID NO: 3916289 - DNA, 25 bp, Homo sapien
cagacatgcccagtgtttgagaggg

SEQ ID NO: 3916290 - DNA, 25 bp, Homo sapien
cagggagaaacaccgattcagccat

SEQ ID NO: 3916291 - DNA, 25 bp, Homo sapien
tgagagggggaactgccatcatcag

SEQ ID NO: 3916292 - DNA, 25 bp, Homo sapien
tgatgccagacatgcccagtgtttg

SEQ ID NO: 3916293 - DNA, 25 bp, Homo sapien
caattgaaaaaccaatcatgtttgg

SEQ ID NO: 3916294 - DNA, 25 bp, Homo sapien
gcatttatccttcccaccaattgaa

SEQ ID NO: 3916295 - DNA, 25 bp, Homo sapien
ttttgcctcttgtttgcatttatcc

SEQ ID NO: 3916296 - DNA, 25 bp, Homo sapien
ttgtttgcatttatccttcccacca

SEQ ID NO: 3916297 - DNA, 25 bp, Homo sapien
tttgttcaggttcaacaaccttcca

SEQ ID NO: 3916298 - DNA, 25 bp, Homo sapien
ttcaacaaccttccaaaagtagaga

SEQ ID NO: 3916299 - DNA, 25 bp, Homo sapien
tagtgttttgccaaccctgcagtca

SEQ ID NO: 3916300 - DNA, 25 bp, Homo sapien
gatattgtagtcctttgtatgtagt

SEQ ID NO: 3916301 - DNA, 25 bp, Homo sapien
atgtttccacagtcaaagtaggtga

SEQ ID NO: 3916302 - DNA, 25 bp, Homo sapien
taggtgactctggacatgaaggcac

SEQ ID NO: 3916303 - DNA, 25 bp, Homo sapien
agtaggtgactctggacatgaaggc

SEQ ID NO: 3916304 - DNA, 25 bp, Homo sapien
cccaaaagggggctctagtaggatg

SEQ ID NO: 3916305 - DNA, 25 bp, Homo sapien
tccccatgatgagataagcctgtgc

SEQ ID NO: 3916306 - DNA, 25 bp, Homo sapien
catgggagttcacctttgcaagagc

SEQ ID NO: 3916307 - DNA, 25 bp, Homo sapien
caaaggatgggaatcgtgactgcag

SEQ ID NO: 3916308 - DNA, 25 bp, Homo sapien
tgtggagcgagctgcatgtgacccc

SEQ ID NO: 3916309 - DNA, 25 bp, Homo sapien
taagtgacatatcatccaagacctc

SEQ ID NO: 3916310 - DNA, 25 bp, Homo sapien
cacatggctgtgctactcattgtaa

SEQ ID NO: 3916311 - DNA, 25 bp, Homo sapien
cactagatgctactacgtgctgaga

SEQ ID NO: 3916312 - DNA, 25 bp, Homo sapien
cattgtaataactccagtctggaca

SEQ ID NO: 3916313 - DNA, 25 bp, Homo sapien
gcatcataaagtggctagatctggc

SEQ ID NO: 3916314 - DNA, 25 bp, Homo sapien
tacatccaaccgactaaagaacaag

SEQ ID NO: 3916315 - DNA, 25 bp, Homo sapien
agaacaagagatagccctttagctg

SEQ ID NO: 3916316 - DNA, 25 bp, Homo sapien
ccatctttcacgtaggtaggatcta

SEQ ID NO: 3916317 - DNA, 25 bp, Homo sapien
gcaaacgcatcctgtgctttcctct

SEQ ID NO: 3916318 - DNA, 25 bp, Homo sapien
acttctcagcccaaatgcaaacgca

SEQ ID NO: 3916319 - DNA, 25 bp, Homo sapien
catttttccccactatcccagactc

SEQ ID NO: 3916320 - DNA, 25 bp, Homo sapien
agcccaaatgcaaacgcatcctgtg

SEQ ID NO: 3916321 - DNA, 25 bp, Homo sapien
agtgcagtggggctgtcctagctca

SEQ ID NO: 3916322 - DNA, 25 bp, Homo sapien
tggggctgtcctagctcactgaagt

SEQ ID NO: 3916323 - DNA, 25 bp, Homo sapien
ctcactgaagtcttggattcctgag

SEQ ID NO: 3916324 - DNA, 25 bp, Homo sapien
caaaactctatagattgcctcactt

SEQ ID NO: 3916325 - DNA, 25 bp, Homo sapien
ttcctccaaaactctatagattgcc

SEQ ID NO: 3916326 - DNA, 25 bp, Homo sapien
tagattgcctcacttttatgctctc

SEQ ID NO: 3916327 - DNA, 25 bp, Homo sapien
tctatagattgcctcacttttatgc

SEQ ID NO: 3916328 - DNA, 25 bp, Homo sapien
gaaacaccctatgttaccgaagaca

SEQ ID NO: 3916329 - DNA, 25 bp, Homo sapien
ggacatcttttctgcaactgggaca

SEQ ID NO: 3916330 - DNA, 25 bp, Homo sapien
aaaatacatgtgctgtgtaggctcc

SEQ ID NO: 3916331 - DNA, 25 bp, Homo sapien
tacataagatgctcatgggagggac

SEQ ID NO: 3916332 - DNA, 25 bp, Homo sapien
catgcagaccatagtaaacagtaca

SEQ ID NO: 3916333 - DNA, 25 bp, Homo sapien
tgagctaatgtccataaacagaaag

SEQ ID NO: 3916334 - DNA, 25 bp, Homo sapien
tatactcctaagactcaacttgagc

SEQ ID NO: 3916335 - DNA, 25 bp, Homo sapien
gaaaaatattagatcgagacccagt

SEQ ID NO: 3916336 - DNA, 25 bp, Homo sapien
gtaatgcatataccaacataaatat

SEQ ID NO: 3916337 - DNA, 25 bp, Homo sapien
taaaacatacctaaatcacattata

SEQ ID NO: 3916338 - DNA, 25 bp, Homo sapien
tacctaaatcacattatactataca

SEQ ID NO: 3916339 - DNA, 25 bp, Homo sapien
aaaaaagtaatgcatataccaacat

SEQ ID NO: 3916340 - DNA, 25 bp, Homo sapien
gtgttatacaacattccagcacctg

SEQ ID NO: 3916341 - DNA, 25 bp, Homo sapien
cattcaatacctttgaaatgactga

SEQ ID NO: 3916342 - DNA, 25 bp, Homo sapien
ataaagcagtgttatacaacattcc

SEQ ID NO: 3916343 - DNA, 25 bp, Homo sapien
gctcattcaatacctttgaaatgac

SEQ ID NO: 3916344 - DNA, 25 bp, Homo sapien
taaccatcagatgaacagttggctc

SEQ ID NO: 3916345 - DNA, 25 bp, Homo sapien
caggccttggactacaagacaggag

SEQ ID NO: 3916346 - DNA, 25 bp, Homo sapien
atctgccttatagggaagctgcaca

SEQ ID NO: 3916347 - DNA, 25 bp, Homo sapien
gatcctagccctaatggaaaagcag

SEQ ID NO: 3916348 - DNA, 25 bp, Homo sapien
acaccgagcagagcgcagcaacttc

SEQ ID NO: 3916349 - DNA, 25 bp, Homo sapien
tctgcgaggccacgacaccgagcag

SEQ ID NO: 3916350 - DNA, 25 bp, Homo sapien
cctttgctcagagggtctgactccc

SEQ ID NO: 3916351 - DNA, 25 bp, Homo sapien
tcccctttgctcagagggtctgact

SEQ ID NO: 3916352 - DNA, 25 bp, Homo sapien
tttttcagctataagaaagaagaaa

SEQ ID NO: 3916353 - DNA, 25 bp, Homo sapien
ttcttctttaacattatgacaaaca

SEQ ID NO: 3916354 - DNA, 25 bp, Homo sapien
atttttcagctataagaaagaagaa

SEQ ID NO: 3916355 - DNA, 25 bp, Homo sapien
ttgttaaaagacgtggtcatgttta

SEQ ID NO: 3916356 - DNA, 25 bp, Homo sapien
tgtttattggtttagagtagccaat

SEQ ID NO: 3916357 - DNA, 25 bp, Homo sapien
ttattggtttagagtagccaattcc

SEQ ID NO: 3916358 - DNA, 25 bp, Homo sapien
tgttaaaagacgtggtcatgtttat

SEQ ID NO: 3916359 - DNA, 25 bp, Homo sapien
gtgagatccccgctcattttggaat

SEQ ID NO: 3916360 - DNA, 25 bp, Homo sapien
ggctgctctaaacccataaatatga

SEQ ID NO: 3916361 - DNA, 25 bp, Homo sapien
tataaacttacacctaggacctgga

SEQ ID NO: 3916362 - DNA, 25 bp, Homo sapien
tgaccaggtctcttaacatagtgag

SEQ ID NO: 3916363 - DNA, 25 bp, Homo sapien
tcacaggtgagctcctgccaatggg

SEQ ID NO: 3916364 - DNA, 25 bp, Homo sapien
gaaagaagtctaggaactcctcgct

SEQ ID NO: 3916365 - DNA, 25 bp, Homo sapien
cattcctcggcatccgggctgtaga

SEQ ID NO: 3916366 - DNA, 25 bp, Homo sapien
aaaggcttaggtcctctgccgagaa

SEQ ID NO: 3916367 - DNA, 25 bp, Homo sapien
gcacatcataatacttgctgttcat

SEQ ID NO: 3916368 - DNA, 25 bp, Homo sapien
tctgtgaacagcacatcataatact

SEQ ID NO: 3916369 - DNA, 25 bp, Homo sapien
gaacagcacatcataatacttgctg

SEQ ID NO: 3916370 - DNA, 25 bp, Homo sapien
ctgtgaacagcacatcataatactt

SEQ ID NO: 3916371 - DNA, 25 bp, Homo sapien
tctttgtcctcgtaaaacgtcaaga

SEQ ID NO: 3916372 - DNA, 25 bp, Homo sapien
ttgtcctcgtaaaacgtcaagaaca

SEQ ID NO: 3916373 - DNA, 25 bp, Homo sapien
tgtcctcgtaaaacgtcaagaacag

SEQ ID NO: 3916374 - DNA, 25 bp, Homo sapien
tctgaactggagctcgccttcctag

SEQ ID NO: 3916375 - DNA, 25 bp, Homo sapien
tgaactggagctcgccttcctagct

SEQ ID NO: 3916376 - DNA, 25 bp, Homo sapien
gtgtccactggagagaggtacacag

SEQ ID NO: 3916377 - DNA, 25 bp, Homo sapien
actagggtccccctctgaactggag

SEQ ID NO: 3916378 - DNA, 25 bp, Homo sapien
gctccgcgcgggaccggccgccgct

SEQ ID NO: 3916379 - DNA, 25 bp, Homo sapien
ctcacatccctggctcgctgcgtgc

SEQ ID NO: 3916380 - DNA, 25 bp, Homo sapien
atccctggctcgctgcgtgcccggg

SEQ ID NO: 3916381 - DNA, 25 bp, Homo sapien
gcggggcgccgctcacatccctggc

SEQ ID NO: 3916382 - DNA, 25 bp, Homo sapien
tcatggagtaccttcctatgaggaa

SEQ ID NO: 3916383 - DNA, 25 bp, Homo sapien
gatgctcatgatccatccaaagtgg

SEQ ID NO: 3916384 - DNA, 25 bp, Homo sapien
tccaaagtggagtaccttcatagag

SEQ ID NO: 3916385 - DNA, 25 bp, Homo sapien
cctcccttactaggacaaaatgtga

SEQ ID NO: 3916386 - DNA, 25 bp, Homo sapien
gacatttgtggctttcaggaacaag

SEQ ID NO: 3916387 - DNA, 25 bp, Homo sapien
caggaacaagtatctttgcagatga

SEQ ID NO: 3916388 - DNA, 25 bp, Homo sapien
ccttccctactcaccgaaatggcca

SEQ ID NO: 3916389 - DNA, 25 bp, Homo sapien
ccctgctcgggccattttgagtggt

SEQ ID NO: 3916390 - DNA, 25 bp, Homo sapien
cctctgacgaaaagctggaaactga

SEQ ID NO: 3916391 - DNA, 25 bp, Homo sapien
tatctgaattttagccgcggcccag

SEQ ID NO: 3916392 - DNA, 25 bp, Homo sapien
tccctacagaagtcggccagaggtt

SEQ ID NO: 3916393 - DNA, 25 bp, Homo sapien
tgactggtccaagaaacaactcgtg

SEQ ID NO: 3916394 - DNA, 25 bp, Homo sapien
gagcccctggaactctggcccaagg

SEQ ID NO: 3916395 - DNA, 25 bp, Homo sapien
tggcccaaggctctctgactgactc

SEQ ID NO: 3916396 - DNA, 25 bp, Homo sapien
tgactccttcccagatcttctcggc

SEQ ID NO: 3916397 - DNA, 25 bp, Homo sapien
tccttcccagatcttctcggcttag

SEQ ID NO: 3916398 - DNA, 25 bp, Homo sapien
ccgcatcttctggcggaccgtgcga

SEQ ID NO: 3916399 - DNA, 25 bp, Homo sapien
tcttctggcggaccgtgcgaggtat

SEQ ID NO: 3916400 - DNA, 25 bp, Homo sapien
ggaccgtgcgaggtatgctgcccca

SEQ ID NO: 3916401 - DNA, 25 bp, Homo sapien
cggaccgtgcgaggtatgctgcccc

SEQ ID NO: 3916402 - DNA, 25 bp, Homo sapien
gtaatgattttgttcagcatggtgg

SEQ ID NO: 3916403 - DNA, 25 bp, Homo sapien
atggtgaggaagactaagcgttgcc

SEQ ID NO: 3916404 - DNA, 25 bp, Homo sapien
aatgattttgttcagcatggtggtg

SEQ ID NO: 3916405 - DNA, 25 bp, Homo sapien
aagactaagcgttgcccaggaatgt

SEQ ID NO: 3916406 - DNA, 25 bp, Homo sapien
ctctgatctcacccttcatctccac

SEQ ID NO: 3916407 - DNA, 25 bp, Homo sapien
tttctttctctgatctcacccttca

SEQ ID NO: 3916408 - DNA, 25 bp, Homo sapien
tgatctcacccttcatctccaccat

SEQ ID NO: 3916409 - DNA, 25 bp, Homo sapien
ctttctttctctgatctcacccttc

SEQ ID NO: 3916410 - DNA, 25 bp, Homo sapien
cttgcaacagttggtgccgggcgat

SEQ ID NO: 3916411 - DNA, 25 bp, Homo sapien
tcttagaggtcagtgcatccaccgg

SEQ ID NO: 3916412 - DNA, 25 bp, Homo sapien
ttaaaggccgcaaaagactcacacc

SEQ ID NO: 3916413 - DNA, 25 bp, Homo sapien
cacctgaaggatggttgtccacagc

SEQ ID NO: 3916414 - DNA, 25 bp, Homo sapien
tcgccccagaccagggaggaagctg

SEQ ID NO: 3916415 - DNA, 25 bp, Homo sapien
agggaggaagctggggaagtggcaa

SEQ ID NO: 3916416 - DNA, 25 bp, Homo sapien
gaggaagctggggaagtggcaattg

SEQ ID NO: 3916417 - DNA, 25 bp, Homo sapien
gtcgccccagaccagggaggaagct

SEQ ID NO: 3916418 - DNA, 25 bp, Homo sapien
tggccggggagttaatcctcgacgc

SEQ ID NO: 3916419 - DNA, 25 bp, Homo sapien
ctgcacttcctcagcgggcggcggt

SEQ ID NO: 3916420 - DNA, 25 bp, Homo sapien
taatcctcgacgcacgggtcggtgt

SEQ ID NO: 3916421 - DNA, 25 bp, Homo sapien
tgtgcgtatttgtgttcggtgtcgt

SEQ ID NO: 3916422 - DNA, 25 bp, Homo sapien
gaatgaccactgtatatatgacctg

SEQ ID NO: 3916423 - DNA, 25 bp, Homo sapien
cagatatccctgtgggtaaaacaaa

SEQ ID NO: 3916424 - DNA, 25 bp, Homo sapien
taaagttctaggttgaaagtgatgg

SEQ ID NO: 3916425 - DNA, 25 bp, Homo sapien
agcattactagcaaagaaagtcaag

SEQ ID NO: 3916426 - DNA, 25 bp, Homo sapien
ttgataactgttgtcatcctccagc

SEQ ID NO: 3916427 - DNA, 25 bp, Homo sapien
cgtggatcacgagggacatcttttc

SEQ ID NO: 3916428 - DNA, 25 bp, Homo sapien
tgctcatgcttactgcagggaagct

SEQ ID NO: 3916429 - DNA, 25 bp, Homo sapien
taccagtccattattacgctaacag

SEQ ID NO: 3916430 - DNA, 25 bp, Homo sapien
catagcattgtagatggagactgaa

SEQ ID NO: 3916431 - DNA, 25 bp, Homo sapien
ggtagcatataaattgagagtcagg

SEQ ID NO: 3916432 - DNA, 25 bp, Homo sapien
gagtcaggaatgatgctaatgccac

SEQ ID NO: 3916433 - DNA, 25 bp, Homo sapien
tgctcctgtgctcttagttacccca

SEQ ID NO: 3916434 - DNA, 25 bp, Homo sapien
gtagaagtagaagcaatggtggtgg

SEQ ID NO: 3916435 - DNA, 25 bp, Homo sapien
gaagcccatggagatagagctccat

SEQ ID NO: 3916436 - DNA, 25 bp, Homo sapien
gaagtagaagcaatggtggtggtga

SEQ ID NO: 3916437 - DNA, 25 bp, Homo sapien
tagaagcaatggtggtggtgatagt

SEQ ID NO: 3916438 - DNA, 25 bp, Homo sapien
tgtgatcagtgagtagctgacacca

SEQ ID NO: 3916439 - DNA, 25 bp, Homo sapien
cagtggtgtgatcagtgagtagctg

SEQ ID NO: 3916440 - DNA, 25 bp, Homo sapien
ggtgtgatcagtgagtagctgacac

SEQ ID NO: 3916441 - DNA, 25 bp, Homo sapien
gtggtgtgatcagtgagtagctgac

SEQ ID NO: 3916442 - DNA, 25 bp, Homo sapien
ctactacctctacatagatagccat

SEQ ID NO: 3916443 - DNA, 25 bp, Homo sapien
tctaagttggagactatatattaat

SEQ ID NO: 3916444 - DNA, 25 bp, Homo sapien
gaaattatatctcatggtgctctta

SEQ ID NO: 3916445 - DNA, 25 bp, Homo sapien
ccttctgaaatgtaatggttatcta

SEQ ID NO: 3916446 - DNA, 25 bp, Homo sapien
ttttttgcgacagactctcacctca

SEQ ID NO: 3916447 - DNA, 25 bp, Homo sapien
tgttgccctagaggatgttccagtg

SEQ ID NO: 3916448 - DNA, 25 bp, Homo sapien
tctgctcgtgttggttggagtgttc

SEQ ID NO: 3916449 - DNA, 25 bp, Homo sapien
tatcttttgcttagttgtaccaccc

SEQ ID NO: 3916450 - DNA, 25 bp, Homo sapien
tgtaccacccattattgaaagtagg

SEQ ID NO: 3916451 - DNA, 25 bp, Homo sapien
gcttgcctgacacataaaacagagt

SEQ ID NO: 3916452 - DNA, 25 bp, Homo sapien
gacgacatattgtgctcaagtggcg

SEQ ID NO: 3916453 - DNA, 25 bp, Homo sapien
caagtggcgtggaagcattgacagt

SEQ ID NO: 3916454 - DNA, 25 bp, Homo sapien
gaagaacattgtaggctgacgacat

SEQ ID NO: 3916455 - DNA, 25 bp, Homo sapien
cacgccctgccactcctatttaatc

SEQ ID NO: 3916456 - DNA, 25 bp, Homo sapien
acaatcctataaagttgattaaagg

SEQ ID NO: 3916457 - DNA, 25 bp, Homo sapien
gccctgccactcctatttaatcttc

SEQ ID NO: 3916458 - DNA, 25 bp, Homo sapien
cgccctgccactcctatttaatctt

SEQ ID NO: 3916459 - DNA, 25 bp, Homo sapien
ttttatgggcataaagtaggcactc

SEQ ID NO: 3916460 - DNA, 25 bp, Homo sapien
aatgaccaattctagctatgttagg

SEQ ID NO: 3916461 - DNA, 25 bp, Homo sapien
tctgtgtactgcttattcatgaggc

SEQ ID NO: 3916462 - DNA, 25 bp, Homo sapien
taagtaggtcttggaattcagttgg

SEQ ID NO: 3916463 - DNA, 25 bp, Homo sapien
atcaggtaccagtacctgtaccaca

SEQ ID NO: 3916464 - DNA, 25 bp, Homo sapien
cctgtaccacaagcaaatataagtt

SEQ ID NO: 3916465 - DNA, 25 bp, Homo sapien
caggacggctgggattatggaggag

SEQ ID NO: 3916466 - DNA, 25 bp, Homo sapien
tgtgggagaaaagtagggctccatc

SEQ ID NO: 3916467 - DNA, 25 bp, Homo sapien
tttcttgagccatatgaaaataagt

SEQ ID NO: 3916468 - DNA, 25 bp, Homo sapien
cataattactacttacaacgcaggc

SEQ ID NO: 3916469 - DNA, 25 bp, Homo sapien
aaatacctatatacccttcaccgag

SEQ ID NO: 3916470 - DNA, 25 bp, Homo sapien
aagttgtggacatcacacccctcag

SEQ ID NO: 3916471 - DNA, 25 bp, Homo sapien
tcatatttggtcagtggaagcccct

SEQ ID NO: 3916472 - DNA, 25 bp, Homo sapien
tcacttggtgagttgatgtctgcca

SEQ ID NO: 3916473 - DNA, 25 bp, Homo sapien
catacaatgccagtttaatcaggtg

SEQ ID NO: 3916474 - DNA, 25 bp, Homo sapien
gaaatgtcgttaactcatagccact

SEQ ID NO: 3916475 - DNA, 25 bp, Homo sapien
acttctatccacacagacccggcaa

SEQ ID NO: 3916476 - DNA, 25 bp, Homo sapien
gtctacttctatccacacagacccg

SEQ ID NO: 3916477 - DNA, 25 bp, Homo sapien
tatccacacagacccggcaaccatc

SEQ ID NO: 3916478 - DNA, 25 bp, Homo sapien
ttctatccacacagacccggcaacc

SEQ ID NO: 3916479 - DNA, 25 bp, Homo sapien
aagagaattgagttacctcacagag

SEQ ID NO: 3916480 - DNA, 25 bp, Homo sapien
gaaactacgtctgtcatactgggag

SEQ ID NO: 3916481 - DNA, 25 bp, Homo sapien
tcatactgggagctttatcactgca

SEQ ID NO: 3916482 - DNA, 25 bp, Homo sapien
gaagtggactccttgcctgtagagc

SEQ ID NO: 3916483 - DNA, 25 bp, Homo sapien
tttctgcggtttttgcaagaataag

SEQ ID NO: 3916484 - DNA, 25 bp, Homo sapien
gtttttggcatcctacataataccc

SEQ ID NO: 3916485 - DNA, 25 bp, Homo sapien
tgtttgtataagcactccttgaaga

SEQ ID NO: 3916486 - DNA, 25 bp, Homo sapien
tgtatattctaatctgctgagaaag

SEQ ID NO: 3916487 - DNA, 25 bp, Homo sapien
caatagaacatgagctaattctgca

SEQ ID NO: 3916488 - DNA, 25 bp, Homo sapien
catgctcaagatgatcaacactgga

SEQ ID NO: 3916489 - DNA, 25 bp, Homo sapien
tgtggtgaagttaggccatcttgat

SEQ ID NO: 3916490 - DNA, 25 bp, Homo sapien
taccccatcttgaactgtcattgaa

SEQ ID NO: 3916491 - DNA, 25 bp, Homo sapien
cgcttgttctttcgtgcatgtgtaa

SEQ ID NO: 3916492 - DNA, 25 bp, Homo sapien
tctagaagttcaagtgtcatacaac

SEQ ID NO: 3916493 - DNA, 25 bp, Homo sapien
cccatagcctttggagatatggaaa

SEQ ID NO: 3916494 - DNA, 25 bp, Homo sapien
cattcccagctgtaatgttgtgtat

SEQ ID NO: 3916495 - DNA, 25 bp, Homo sapien
atctccagctgtagccttgagtgtt

SEQ ID NO: 3916496 - DNA, 25 bp, Homo sapien
tctccagctgtagccttgagtgttt

SEQ ID NO: 3916497 - DNA, 25 bp, Homo sapien
tctaatggggactagcttgagccat

SEQ ID NO: 3916498 - DNA, 25 bp, Homo sapien
tgtggctgtctaatggggactagct

SEQ ID NO: 3916499 - DNA, 25 bp, Homo sapien
ctgtctaatggggactagcttgagc

SEQ ID NO: 3916500 - DNA, 25 bp, Homo sapien
taatggggactagcttgagccatat

SEQ ID NO: 3916501 - DNA, 25 bp, Homo sapien
aaaattccctgaggcctctgatagg

SEQ ID NO: 3916502 - DNA, 25 bp, Homo sapien
gtaaaaaattccctgaggcctctga

SEQ ID NO: 3916503 - DNA, 25 bp, Homo sapien
tcgaagagaatttggacaagaagaa

SEQ ID NO: 3916504 - DNA, 25 bp, Homo sapien
attccctgaggcctctgataggtgc

SEQ ID NO: 3916505 - DNA, 25 bp, Homo sapien
caaaaaccagcaggttgagagctgt

SEQ ID NO: 3916506 - DNA, 25 bp, Homo sapien
aatatattttgagcagtggacttcc

SEQ ID NO: 3916507 - DNA, 25 bp, Homo sapien
tctaaacaaatgaggcagacacttg

SEQ ID NO: 3916508 - DNA, 25 bp, Homo sapien
tgaatgagaaactaggtgccaggga

SEQ ID NO: 3916509 - DNA, 25 bp, Homo sapien
tgatccaaacaagacgactacagaa

SEQ ID NO: 3916510 - DNA, 25 bp, Homo sapien
aaaacgtgccacgaccacatagcat

SEQ ID NO: 3916511 - DNA, 25 bp, Homo sapien
tcatgggcctgttctaaaccagcct

SEQ ID NO: 3916512 - DNA, 25 bp, Homo sapien
aaacaatacttccagggcaggtgca

SEQ ID NO: 3916513 - DNA, 25 bp, Homo sapien
agagatacttttgcggttaggctac

SEQ ID NO: 3916514 - DNA, 25 bp, Homo sapien
taaagagatacttttgcggttaggc

SEQ ID NO: 3916515 - DNA, 25 bp, Homo sapien
tatattagaatctgtaagtattctg

SEQ ID NO: 3916516 - DNA, 25 bp, Homo sapien
gtaagtattctgtataaagagatac

SEQ ID NO: 3916517 - DNA, 25 bp, Homo sapien
ccctccggacgcaccctgctgtatc

SEQ ID NO: 3916518 - DNA, 25 bp, Homo sapien
cggccctgttgccagtggtgttgca

SEQ ID NO: 3916519 - DNA, 25 bp, Homo sapien
tgccagtggtgttgcaaggccacag

SEQ ID NO: 3916520 - DNA, 25 bp, Homo sapien
ctgacaccttcaccgggagccccgg

SEQ ID NO: 3916521 - DNA, 25 bp, Homo sapien
tgcagagcgaactaggggtcttcac

SEQ ID NO: 3916522 - DNA, 25 bp, Homo sapien
ctaaaatgcagagcgaactaggggt

SEQ ID NO: 3916523 - DNA, 25 bp, Homo sapien
gacaagatgtggagagaggacttct

SEQ ID NO: 3916524 - DNA, 25 bp, Homo sapien
caagatgtggagagaggacttctca

SEQ ID NO: 3916525 - DNA, 25 bp, Homo sapien
taagctcacatggtgctccctagga

SEQ ID NO: 3916526 - DNA, 25 bp, Homo sapien
gctagattgagtccccatggcatga

SEQ ID NO: 3916527 - DNA, 25 bp, Homo sapien
tgtgaaggactctgaaccagctgct

SEQ ID NO: 3916528 - DNA, 25 bp, Homo sapien
gtttgccccgagtgatagagccagc

SEQ ID NO: 3916529 - DNA, 25 bp, Homo sapien
tgcccccagctatggcgcaatttgc

SEQ ID NO: 3916530 - DNA, 25 bp, Homo sapien
tttgtgcaaggcacttccggagagg

SEQ ID NO: 3916531 - DNA, 25 bp, Homo sapien
tttattaagcgcctatttgtgcaag

SEQ ID NO: 3916532 - DNA, 25 bp, Homo sapien
cagctgctggcgactgtctccgctg

SEQ ID NO: 3916533 - DNA, 25 bp, Homo sapien
tggcagatggcatagcccctctgga

SEQ ID NO: 3916534 - DNA, 25 bp, Homo sapien
aagaggtcccatcgctgcactcaaa

SEQ ID NO: 3916535 - DNA, 25 bp, Homo sapien
ggtgggcttttccacctcctcggca

SEQ ID NO: 3916536 - DNA, 25 bp, Homo sapien
tctggacctggtgaaagtcccggac

SEQ ID NO: 3916537 - DNA, 25 bp, Homo sapien
ccatcttggtcaagcaggccaggga

SEQ ID NO: 3916538 - DNA, 25 bp, Homo sapien
tacagtctggtcctagcgtcagggc

SEQ ID NO: 3916539 - DNA, 25 bp, Homo sapien
gggtccccattgctagaggcgtgca

SEQ ID NO: 3916540 - DNA, 25 bp, Homo sapien
gaagaggcgcataccctgaataagg

SEQ ID NO: 3916541 - DNA, 25 bp, Homo sapien
ttgctcacacagctcgcccgaaaag

SEQ ID NO: 3916542 - DNA, 25 bp, Homo sapien
gaggggcacgcattgcccatggaca

SEQ ID NO: 3916543 - DNA, 25 bp, Homo sapien
tggcagtggccatgcaggcactgca

SEQ ID NO: 3916544 - DNA, 25 bp, Homo sapien
ctggttgcacagtgcccccgagtac

SEQ ID NO: 3916545 - DNA, 25 bp, Homo sapien
cagctgagttgacatccacgggcat

SEQ ID NO: 3916546 - DNA, 25 bp, Homo sapien
gatgtacaggtttcggatgcaaccg

SEQ ID NO: 3916547 - DNA, 25 bp, Homo sapien
cgttgaggatctgccacaggcggaa

SEQ ID NO: 3916548 - DNA, 25 bp, Homo sapien
tgcaaccgtggaagccggtgccgtt

SEQ ID NO: 3916549 - DNA, 25 bp, Homo sapien
gagagattcaccatctggtcaaagg

SEQ ID NO: 3916550 - DNA, 25 bp, Homo sapien
tgccaaagttgtccatggtcatggg

SEQ ID NO: 3916551 - DNA, 25 bp, Homo sapien
gctcaacggtgtggaattgcccatc

SEQ ID NO: 3916552 - DNA, 25 bp, Homo sapien
ggtcaaaggcaaccagctcaacggt

SEQ ID NO: 3916553 - DNA, 25 bp, Homo sapien
gtacagaaggatcccattgtcctct

SEQ ID NO: 3916554 - DNA, 25 bp, Homo sapien
gccctggtacagctcaactgcaatg

SEQ ID NO: 3916555 - DNA, 25 bp, Homo sapien
tcgttgtccccgttgtacagaagga

SEQ ID NO: 3916556 - DNA, 25 bp, Homo sapien
gggtcgtagctgacacgcacatggc

SEQ ID NO: 3916557 - DNA, 25 bp, Homo sapien
ggccagttttgcaggtcagtgaact

SEQ ID NO: 3916558 - DNA, 25 bp, Homo sapien
caacgtgatgttggcccgtggccag

SEQ ID NO: 3916559 - DNA, 25 bp, Homo sapien
cagtgaactgcaggtaagtgtcccg

SEQ ID NO: 3916560 - DNA, 25 bp, Homo sapien
cgatccacaaagttgacactgagca

SEQ ID NO: 3916561 - DNA, 25 bp, Homo sapien
catcctggttctcactgcagttgtc

SEQ ID NO: 3916562 - DNA, 25 bp, Homo sapien
catacactgggccccattctggcag

SEQ ID NO: 3916563 - DNA, 25 bp, Homo sapien
ttctggcagcggtggtccctgcagt

SEQ ID NO: 3916564 - DNA, 25 bp, Homo sapien
gctgttgacttcatccatacactgg

SEQ ID NO: 3916565 - DNA, 25 bp, Homo sapien
cacacactgggcctcgtgttgacat

SEQ ID NO: 3916566 - DNA, 25 bp, Homo sapien
ttcagatccggagagcacaagtcca

SEQ ID NO: 3916567 - DNA, 25 bp, Homo sapien
tgttgacatgggttcagatccggag

SEQ ID NO: 3916568 - DNA, 25 bp, Homo sapien
ccggagagcacaagtccaccagctg

SEQ ID NO: 3916569 - DNA, 25 bp, Homo sapien
ggtgtagttgcccacaccatccaca

SEQ ID NO: 3916570 - DNA, 25 bp, Homo sapien
agacgcccccattggcacaggcatg

SEQ ID NO: 3916571 - DNA, 25 bp, Homo sapien
ttcaaagccggtgggacaggagcac

SEQ ID NO: 3916572 - DNA, 25 bp, Homo sapien
tcaccccacaggttggtccttcaaa

SEQ ID NO: 3916573 - DNA, 25 bp, Homo sapien
gaactgtcagctgatagaacattaa

SEQ ID NO: 3916574 - DNA, 25 bp, Homo sapien
gagatttggcataaaaactgggagg

SEQ ID NO: 3916575 - DNA, 25 bp, Homo sapien
cttgatgacaggtcactgtggagat

SEQ ID NO: 3916576 - DNA, 25 bp, Homo sapien
gaagtaattgaaggaaggcctcata

SEQ ID NO: 3916577 - DNA, 25 bp, Homo sapien
ctggaacagctgtccagggacacct

SEQ ID NO: 3916578 - DNA, 25 bp, Homo sapien
ggaacagctgtccagggacacctca

SEQ ID NO: 3916579 - DNA, 25 bp, Homo sapien
gaacagctgtccagggacacctcac

SEQ ID NO: 3916580 - DNA, 25 bp, Homo sapien
tggaacagctgtccagggacacctc

SEQ ID NO: 3916581 - DNA, 25 bp, Homo sapien
caggcgcacctgtacacctcaaggg

SEQ ID NO: 3916582 - DNA, 25 bp, Homo sapien
gggcaggcgcacctgtacacctcaa

SEQ ID NO: 3916583 - DNA, 25 bp, Homo sapien
ccctggttctggcacggactggaca

SEQ ID NO: 3916584 - DNA, 25 bp, Homo sapien
tggcacggactggacaagcagagat

SEQ ID NO: 3916585 - DNA, 25 bp, Homo sapien
tggcctggacagccagcgttggagg

SEQ ID NO: 3916586 - DNA, 25 bp, Homo sapien
ggcctggacagccagcgttggagga

SEQ ID NO: 3916587 - DNA, 25 bp, Homo sapien
gcctggacagccagcgttggaggac

SEQ ID NO: 3916588 - DNA, 25 bp, Homo sapien
ttggcctggacagccagcgttggag

SEQ ID NO: 3916589 - DNA, 25 bp, Homo sapien
gagcaggggttgttaccctccatgc

SEQ ID NO: 3916590 - DNA, 25 bp, Homo sapien
ggagcaggggttgttaccctccatg

SEQ ID NO: 3916591 - DNA, 25 bp, Homo sapien
ctgagccagggaggaccattttccc

SEQ ID NO: 3916592 - DNA, 25 bp, Homo sapien
tgagccagggaggaccattttcccc

SEQ ID NO: 3916593 - DNA, 25 bp, Homo sapien
ggatgcactggttgtagaagtaacc

SEQ ID NO: 3916594 - DNA, 25 bp, Homo sapien
agtaaccagaggagccgacagccag

SEQ ID NO: 3916595 - DNA, 25 bp, Homo sapien
gttgtagaagtaaccagaggagccg

SEQ ID NO: 3916596 - DNA, 25 bp, Homo sapien
cactggttgtagaagtaaccagagg

SEQ ID NO: 3916597 - DNA, 25 bp, Homo sapien
aacacagagcaaaggtttcagcata

SEQ ID NO: 3916598 - DNA, 25 bp, Homo sapien
gcataaattgacttgctcccaacag

SEQ ID NO: 3916599 - DNA, 25 bp, Homo sapien
tcccaccccattaaataaacacaga

SEQ ID NO: 3916600 - DNA, 25 bp, Homo sapien
acagccaagccgcagatcaggcccc

SEQ ID NO: 3916601 - DNA, 25 bp, Homo sapien
cccggttccttgtagccagtcttca

SEQ ID NO: 3916602 - DNA, 25 bp, Homo sapien
ttcaaacttcttggcaggcgtggtg

SEQ ID NO: 3916603 - DNA, 25 bp, Homo sapien
agcacaacgagcaatgcccggttcc

SEQ ID NO: 3916604 - DNA, 25 bp, Homo sapien
cagcggaggtggcagtcacagtata

SEQ ID NO: 3916605 - DNA, 25 bp, Homo sapien
ctgagcagaaagcagagagaagcag

SEQ ID NO: 3916606 - DNA, 25 bp, Homo sapien
agcagaaagcagagagaagcaggca

SEQ ID NO: 3916607 - DNA, 25 bp, Homo sapien
gcagaaagcagagagaagcaggcat

SEQ ID NO: 3916608 - DNA, 25 bp, Homo sapien
gagcagaaagcagagagaagcaggc

SEQ ID NO: 3916609 - DNA, 25 bp, Homo sapien
gtggagatgtcattgccgtggagag

SEQ ID NO: 3916610 - DNA, 25 bp, Homo sapien
ggagatgtcattgccgtggagagac

SEQ ID NO: 3916611 - DNA, 25 bp, Homo sapien
ggtcacgtctgcaaagatgccctct

SEQ ID NO: 3916612 - DNA, 25 bp, Homo sapien
tggagatgtcattgccgtggagaga

SEQ ID NO: 3916613 - DNA, 25 bp, Homo sapien
agggagcggagtccctggaaggcca

SEQ ID NO: 3916614 - DNA, 25 bp, Homo sapien
aaggccaaaggcgggatgcactgca

SEQ ID NO: 3916615 - DNA, 25 bp, Homo sapien
ggaactgatcttgttgttgctcagg

SEQ ID NO: 3916616 - DNA, 25 bp, Homo sapien
gaattgcttaaggaactgatcttgt

SEQ ID NO: 3916617 - DNA, 25 bp, Homo sapien
ctcatgttggtgaaggaggaattgc

SEQ ID NO: 3916618 - DNA, 25 bp, Homo sapien
tgaaggaggaattgcttaaggaact

SEQ ID NO: 3916619 - DNA, 25 bp, Homo sapien
aggtagacagctgtcccggaaccag

SEQ ID NO: 3916620 - DNA, 25 bp, Homo sapien
cgtgaactggttcccgtccaaatag

SEQ ID NO: 3916621 - DNA, 25 bp, Homo sapien
gaaccagcgtgaactggttcccgtc

SEQ ID NO: 3916622 - DNA, 25 bp, Homo sapien
caggtacttgaaggtagacagctgt

SEQ ID NO: 3916623 - DNA, 25 bp, Homo sapien
cattcttgggaatgcccttgggcag

SEQ ID NO: 3916624 - DNA, 25 bp, Homo sapien
ttgttgctgcatcggaccacggtgt

SEQ ID NO: 3916625 - DNA, 25 bp, Homo sapien
tgacattcttgggaatgcccttggg

SEQ ID NO: 3916626 - DNA, 25 bp, Homo sapien
acggtgtccaggcaggcgcactcct

SEQ ID NO: 3916627 - DNA, 25 bp, Homo sapien
caaaggatagttaatggcatgagaa

SEQ ID NO: 3916628 - DNA, 25 bp, Homo sapien
gtttccaaaggatagttaatggcat

SEQ ID NO: 3916629 - DNA, 25 bp, Homo sapien
ttctggttgtccttggttgttgttg

SEQ ID NO: 3916630 - DNA, 25 bp, Homo sapien
tccaaaggatagttaatggcatgag

SEQ ID NO: 3916631 - DNA, 25 bp, Homo sapien
cttggggtgaaagtcaaagctctcc

SEQ ID NO: 3916632 - DNA, 25 bp, Homo sapien
tttcttggggtgaaagtcaaagctc

SEQ ID NO: 3916633 - DNA, 25 bp, Homo sapien
gggtgaaagtcaaagctctccactg

SEQ ID NO: 3916634 - DNA, 25 bp, Homo sapien
tgtttcttggggtgaaagtcaaagc

SEQ ID NO: 3916635 - DNA, 25 bp, Homo sapien
tctctgagcgatggaataataggta

SEQ ID NO: 3916636 - DNA, 25 bp, Homo sapien
tctagagtgcttagggacagccaaa

SEQ ID NO: 3916637 - DNA, 25 bp, Homo sapien
taaggtgaccccatgagtctagagt

SEQ ID NO: 3916638 - DNA, 25 bp, Homo sapien
gtgaccagggtttcctacatatggg

SEQ ID NO: 3916639 - DNA, 25 bp, Homo sapien
tgccccaccccactggttggaccca

SEQ ID NO: 3916640 - DNA, 25 bp, Homo sapien
agggcgccctctcccttgccaccgg

SEQ ID NO: 3916641 - DNA, 25 bp, Homo sapien
caccccactggttggacccagggcg

SEQ ID NO: 3916642 - DNA, 25 bp, Homo sapien
actggttggacccagggcgccctct

SEQ ID NO: 3916643 - DNA, 25 bp, Homo sapien
gaatctgccgcaaaaagtcagggtt

SEQ ID NO: 3916644 - DNA, 25 bp, Homo sapien
gaagtcagggaaggccacgtcctgc

SEQ ID NO: 3916645 - DNA, 25 bp, Homo sapien
gggttccccgtcacgatcttgcgct

SEQ ID NO: 3916646 - DNA, 25 bp, Homo sapien
tcagggttctggcatcgcgggttcc

SEQ ID NO: 3916647 - DNA, 25 bp, Homo sapien
gagaggagccggacgttgcgcaggc

SEQ ID NO: 3916648 - DNA, 25 bp, Homo sapien
cccgtgaagctgtcgttgtggatgc

SEQ ID NO: 3916649 - DNA, 25 bp, Homo sapien
tggttgtcgtagagcgagaggagcc

SEQ ID NO: 3916650 - DNA, 25 bp, Homo sapien
gatacggtggtgatctggttgtcgt

SEQ ID NO: 3916651 - DNA, 25 bp, Homo sapien
tgacaccttgttgttgctcagattg

SEQ ID NO: 3916652 - DNA, 25 bp, Homo sapien
gttggcagttaggtgcagctcgctc

SEQ ID NO: 3916653 - DNA, 25 bp, Homo sapien
cggaacatgccgctccggatggact

SEQ ID NO: 3916654 - DNA, 25 bp, Homo sapien
tcaagccatccagaccccggaacat

SEQ ID NO: 3916655 - DNA, 25 bp, Homo sapien
ggaaatctcattgttattcaatcgc

SEQ ID NO: 3916656 - DNA, 25 bp, Homo sapien
tccaggatggaaatctcattgttat

SEQ ID NO: 3916657 - DNA, 25 bp, Homo sapien
tttaaacatcccagtggcctccagg

SEQ ID NO: 3916658 - DNA, 25 bp, Homo sapien
ttcttcagatgtgtaagttttttaa

SEQ ID NO: 3916659 - DNA, 25 bp, Homo sapien
tcgctgttcagctggtaatcctccg

SEQ ID NO: 3916660 - DNA, 25 bp, Homo sapien
ggctggagcactccaccacgttggc

SEQ ID NO: 3916661 - DNA, 25 bp, Homo sapien
acgtcgctgttgcactcgctgttca

SEQ ID NO: 3916662 - DNA, 25 bp, Homo sapien
gttggcctcacagcggcacttgtgg

SEQ ID NO: 3916663 - DNA, 25 bp, Homo sapien
tggtgcgcaggaagtctgccagcca

SEQ ID NO: 3916664 - DNA, 25 bp, Homo sapien
aatgaaagggttctgcgccaggtgc

SEQ ID NO: 3916665 - DNA, 25 bp, Homo sapien
actcgtctcgatgggattggtgcgc

SEQ ID NO: 3916666 - DNA, 25 bp, Homo sapien
tgccagccacttgaggttacagtcg

SEQ ID NO: 3916667 - DNA, 25 bp, Homo sapien
ggagctacggacaaatcaaacatga

SEQ ID NO: 3916668 - DNA, 25 bp, Homo sapien
tgttctgcaacattgggtgtgtcac

SEQ ID NO: 3916669 - DNA, 25 bp, Homo sapien
gagatgcctgagatcaaattcctgt

SEQ ID NO: 3916670 - DNA, 25 bp, Homo sapien
tgttacacagggacttcgccacaga

SEQ ID NO: 3916671 - DNA, 25 bp, Homo sapien
ggcgaggctctggatcttgttgtca

SEQ ID NO: 3916672 - DNA, 25 bp, Homo sapien
cgggccggatgcagttgatcttgtt

SEQ ID NO: 3916673 - DNA, 25 bp, Homo sapien
cctggaaggcatcgggccggatgca

SEQ ID NO: 3916674 - DNA, 25 bp, Homo sapien
cccgcagggaggtgaaagtgccctt

SEQ ID NO: 3916675 - DNA, 25 bp, Homo sapien
tataggcctccaaacacaccacggg

SEQ ID NO: 3916676 - DNA, 25 bp, Homo sapien
acaccacgggggaggtctgtgatct

SEQ ID NO: 3916677 - DNA, 25 bp, Homo sapien
tgtgatcttgtttccatagaggacc

SEQ ID NO: 3916678 - DNA, 25 bp, Homo sapien
tgtagggtgtataggcctccaaaca

SEQ ID NO: 3916679 - DNA, 25 bp, Homo sapien
tatcataatcggaccccacaagcta

SEQ ID NO: 3916680 - DNA, 25 bp, Homo sapien
acatggcttcaaggtcattcctgga

SEQ ID NO: 3916681 - DNA, 25 bp, Homo sapien
taccctcgtaaacgttcaagctgag

SEQ ID NO: 3916682 - DNA, 25 bp, Homo sapien
gggtacttcctcttcaaacatggct

SEQ ID NO: 3916683 - DNA, 25 bp, Homo sapien
agcgatctgattgttgctcaggtct

SEQ ID NO: 3916684 - DNA, 25 bp, Homo sapien
tgcaatctcagcgatctgattgttg

SEQ ID NO: 3916685 - DNA, 25 bp, Homo sapien
ccctggaaggcgtcgggtgcaatct

SEQ ID NO: 3916686 - DNA, 25 bp, Homo sapien
agcgagttcagggagcggaggccct

SEQ ID NO: 3916687 - DNA, 25 bp, Homo sapien
caaggtgagcagaaggagagggggc

SEQ ID NO: 3916688 - DNA, 25 bp, Homo sapien
ctgcaaggtgagcagaaggagaggg

SEQ ID NO: 3916689 - DNA, 25 bp, Homo sapien
tgcaaggtgagcagaaggagagggg

SEQ ID NO: 3916690 - DNA, 25 bp, Homo sapien
aggtgagcagaaggagagggggcat

SEQ ID NO: 3916691 - DNA, 25 bp, Homo sapien
ttctgtagggtgagaaggctccagg

SEQ ID NO: 3916692 - DNA, 25 bp, Homo sapien
ctttctgtagggtgagaaggctcca

SEQ ID NO: 3916693 - DNA, 25 bp, Homo sapien
tttctgtagggtgagaaggctccag

SEQ ID NO: 3916694 - DNA, 25 bp, Homo sapien
atcctccgtagctttctgtagggtg

SEQ ID NO: 3916695 - DNA, 25 bp, Homo sapien
gcaggagccggaggacagggtgcag

SEQ ID NO: 3916696 - DNA, 25 bp, Homo sapien
atggtctcgggcaggttggccggga

SEQ ID NO: 3916697 - DNA, 25 bp, Homo sapien
gtgaggccttttccacgacagtcca

SEQ ID NO: 3916698 - DNA, 25 bp, Homo sapien
cacgatgccattgctgcaggtgcac

SEQ ID NO: 3916699 - DNA, 25 bp, Homo sapien
aagagcccgatggttggccgctgcc

SEQ ID NO: 3916700 - DNA, 25 bp, Homo sapien
agcccgatggttggccgctgcctca

SEQ ID NO: 3916701 - DNA, 25 bp, Homo sapien
ggtgaagagcccgatggttggccgc

SEQ ID NO: 3916702 - DNA, 25 bp, Homo sapien
atggttggccgctgcctcagccact

SEQ ID NO: 3916703 - DNA, 25 bp, Homo sapien
ggcatatggttgaagctggacacgg

SEQ ID NO: 3916704 - DNA, 25 bp, Homo sapien
aaggtccgtagcttgggcatatggt

SEQ ID NO: 3916705 - DNA, 25 bp, Homo sapien
gggcatatggttgaagctggacacg

SEQ ID NO: 3916706 - DNA, 25 bp, Homo sapien
ccttcctcaatgcagctgatctggt

SEQ ID NO: 3916707 - DNA, 25 bp, Homo sapien
acttgcagcggccttatgtatgtgt

SEQ ID NO: 3916708 - DNA, 25 bp, Homo sapien
tcagaacatgcctgtgaagtagatc

SEQ ID NO: 3916709 - DNA, 25 bp, Homo sapien
tatcgaggctcagcgatgttcactg

SEQ ID NO: 3916710 - DNA, 25 bp, Homo sapien
cctgtgaagtagatcttagtatccc

SEQ ID NO: 3916711 - DNA, 25 bp, Homo sapien
cactgtgccacctaaatggactgag

SEQ ID NO: 3916712 - DNA, 25 bp, Homo sapien
ccgttggctctcatatggaatcaca

SEQ ID NO: 3916713 - DNA, 25 bp, Homo sapien
caacccaaatatgaggcgggcacag

SEQ ID NO: 3916714 - DNA, 25 bp, Homo sapien
gactgagaacattgcccacgctgat

SEQ ID NO: 3916715 - DNA, 25 bp, Homo sapien
ctggatggcgttctcactcaagtcc

SEQ ID NO: 3916716 - DNA, 25 bp, Homo sapien
cgtagctccccgaaaagctttcctg

SEQ ID NO: 3916717 - DNA, 25 bp, Homo sapien
caggagcgtggcgtggatactatca

SEQ ID NO: 3916718 - DNA, 25 bp, Homo sapien
acccagatctttagctccaggcagg

SEQ ID NO: 3916719 - DNA, 25 bp, Homo sapien
tcttgtggactgcaggcaacagggc

SEQ ID NO: 3916720 - DNA, 25 bp, Homo sapien
caccggtcagaaaagaggttcctgc

SEQ ID NO: 3916721 - DNA, 25 bp, Homo sapien
agcggcagaccgtcctgacataggc

SEQ ID NO: 3916722 - DNA, 25 bp, Homo sapien
tcctgaaggtgaacaaccagcggca

SEQ ID NO: 3916723 - DNA, 25 bp, Homo sapien
ccttgaactgtcaaggccgccgctg

SEQ ID NO: 3916724 - DNA, 25 bp, Homo sapien
tttgacggtgcccttcctttcagcc

SEQ ID NO: 3916725 - DNA, 25 bp, Homo sapien
gaaacccaacggtgtgcacagagcc

SEQ ID NO: 3916726 - DNA, 25 bp, Homo sapien
tagaactgtgagaaggcactggacc

SEQ ID NO: 3916727 - DNA, 25 bp, Homo sapien
tgatggaactggagagatgcaccct

SEQ ID NO: 3916728 - DNA, 25 bp, Homo sapien
ggtgggctcctactgcctactagaa

SEQ ID NO: 3916729 - DNA, 25 bp, Homo sapien
ccacagagtgggcaccaacatctat

SEQ ID NO: 3916730 - DNA, 25 bp, Homo sapien
cccatggcatctttcatcttcgatc

SEQ ID NO: 3916731 - DNA, 25 bp, Homo sapien
ccccatggcatctttcatcttcgat

SEQ ID NO: 3916732 - DNA, 25 bp, Homo sapien
cttcgatcttggttacttgtgccat

SEQ ID NO: 3916733 - DNA, 25 bp, Homo sapien
catcttcgatcttggttacttgtgc

SEQ ID NO: 3916734 - DNA, 25 bp, Homo sapien
tttagagcagggctgtacaggccac

SEQ ID NO: 3916735 - DNA, 25 bp, Homo sapien
taagaaattgctaccctggtggtgc

SEQ ID NO: 3916736 - DNA, 25 bp, Homo sapien
tggatgcagagctaaccacaggtgc

SEQ ID NO: 3916737 - DNA, 25 bp, Homo sapien
ccatttaggctactccccagagggc

SEQ ID NO: 3916738 - DNA, 25 bp, Homo sapien
ttgtctcatctttcccaaatccctt

SEQ ID NO: 3916739 - DNA, 25 bp, Homo sapien
catctttcccaaatccctttgaaat

SEQ ID NO: 3916740 - DNA, 25 bp, Homo sapien
ttgccaatacttgtctcatctttcc

SEQ ID NO: 3916741 - DNA, 25 bp, Homo sapien
atccctttgaaataaagtttatcat

SEQ ID NO: 3916742 - DNA, 25 bp, Homo sapien
tctggagagcattcgatgataagaa

SEQ ID NO: 3916743 - DNA, 25 bp, Homo sapien
gggttctggagagcattcgatgata

SEQ ID NO: 3916744 - DNA, 25 bp, Homo sapien
tggagagcattcgatgataagaacc

SEQ ID NO: 3916745 - DNA, 25 bp, Homo sapien
gagcattcgatgataagaacctgca

SEQ ID NO: 3916746 - DNA, 25 bp, Homo sapien
caaaacctgaacatagagggcaact

SEQ ID NO: 3916747 - DNA, 25 bp, Homo sapien
tcttcatctagttgtggaagtgacg

SEQ ID NO: 3916748 - DNA, 25 bp, Homo sapien
ggaagtgacggccagctctgcaaaa

SEQ ID NO: 3916749 - DNA, 25 bp, Homo sapien
catagagggcaactacacctcctgg

SEQ ID NO: 3916750 - DNA, 25 bp, Homo sapien
ggtgacttggtgtcagcatccccac

SEQ ID NO: 3916751 - DNA, 25 bp, Homo sapien
tgacaggatcgcaggggcccacgtc

SEQ ID NO: 3916752 - DNA, 25 bp, Homo sapien
cactgtgtctgccacaccttttggt

SEQ ID NO: 3916753 - DNA, 25 bp, Homo sapien
tgtctgccacaccttttggtgactt

SEQ ID NO: 3916754 - DNA, 25 bp, Homo sapien
ccccaagtcgtccagcgggtgctgg

SEQ ID NO: 3916755 - DNA, 25 bp, Homo sapien
gaagaggtgaaattgcaagccccaa

SEQ ID NO: 3916756 - DNA, 25 bp, Homo sapien
aagcccacgctccatccatgaaagt

SEQ ID NO: 3916757 - DNA, 25 bp, Homo sapien
atccatgaaagtggccctctgctag

SEQ ID NO: 3916758 - DNA, 25 bp, Homo sapien
aatgctattcttatggaccaaccac

SEQ ID NO: 3916759 - DNA, 25 bp, Homo sapien
gctattcttatggaccaaccactac

SEQ ID NO: 3916760 - DNA, 25 bp, Homo sapien
acatcctaatgctattcttatggac

SEQ ID NO: 3916761 - DNA, 25 bp, Homo sapien
cctaatgctattcttatggaccaac

SEQ ID NO: 3916762 - DNA, 25 bp, Homo sapien
gaagagagtcataggcccccctggg

SEQ ID NO: 3916763 - DNA, 25 bp, Homo sapien
gtggaagagagtcataggcccccct

SEQ ID NO: 3916764 - DNA, 25 bp, Homo sapien
ggagaccagatacaggtggaagaga

SEQ ID NO: 3916765 - DNA, 25 bp, Homo sapien
aggagaccagatacaggtggaagag

SEQ ID NO: 3916766 - DNA, 25 bp, Homo sapien
tcttgccagccaaagaacccctagt

SEQ ID NO: 3916767 - DNA, 25 bp, Homo sapien
ccaaagaacccctagtggcggagtg

SEQ ID NO: 3916768 - DNA, 25 bp, Homo sapien
agtggcggagtgctcacacaaagga

SEQ ID NO: 3916769 - DNA, 25 bp, Homo sapien
agaacccctagtggcggagtgctca

SEQ ID NO: 3916770 - DNA, 25 bp, Homo sapien
gacgagcagaatcaggctcctcctg

SEQ ID NO: 3916771 - DNA, 25 bp, Homo sapien
tcctcctgaacctactgaatcagga

SEQ ID NO: 3916772 - DNA, 25 bp, Homo sapien
ctggcagcttggacgagcagaatca

SEQ ID NO: 3916773 - DNA, 25 bp, Homo sapien
caggctcctcctgaacctactgaat

SEQ ID NO: 3916774 - DNA, 25 bp, Homo sapien
tcagaggccatcgcagactgtcctt

SEQ ID NO: 3916775 - DNA, 25 bp, Homo sapien
caccatcagaggccatcgcagactg

SEQ ID NO: 3916776 - DNA, 25 bp, Homo sapien
cagaggccatcgcagactgtccttc

SEQ ID NO: 3916777 - DNA, 25 bp, Homo sapien
atcagaggccatcgcagactgtcct

SEQ ID NO: 3916778 - DNA, 25 bp, Homo sapien
cttagccccggtgctgagtaggcca

SEQ ID NO: 3916779 - DNA, 25 bp, Homo sapien
taaatgcacgactcctatttggccc

SEQ ID NO: 3916780 - DNA, 25 bp, Homo sapien
ttaaattcagctgaataacaccagt

SEQ ID NO: 3916781 - DNA, 25 bp, Homo sapien
gagacctggccgatactcagccaag

SEQ ID NO: 3916782 - DNA, 25 bp, Homo sapien
aagaaggtcccgcagatggtaccca

SEQ ID NO: 3916783 - DNA, 25 bp, Homo sapien
caggaaaggcatgcaggaggtcagg

SEQ ID NO: 3916784 - DNA, 25 bp, Homo sapien
tgggacagaacctctaggcaagaag

SEQ ID NO: 3916785 - DNA, 25 bp, Homo sapien
gcaccatcaggtggatgccaggaaa

SEQ ID NO: 3916786 - DNA, 25 bp, Homo sapien
tcagggaacatgctctgtgatctgg

SEQ ID NO: 3916787 - DNA, 25 bp, Homo sapien
tgctctgtgatctggacccctaaag

SEQ ID NO: 3916788 - DNA, 25 bp, Homo sapien
ggaacatgctctgtgatctggaccc

SEQ ID NO: 3916789 - DNA, 25 bp, Homo sapien
gatctggacccctaaagagtccacg

SEQ ID NO: 3916790 - DNA, 25 bp, Homo sapien
ctgctccatagaaaaatgcccagga

SEQ ID NO: 3916791 - DNA, 25 bp, Homo sapien
tccatagaaaaatgcccaggagctg

SEQ ID NO: 3916792 - DNA, 25 bp, Homo sapien
aaaaatgcccaggagctgacacact

SEQ ID NO: 3916793 - DNA, 25 bp, Homo sapien
tgctccatagaaaaatgcccaggag

SEQ ID NO: 3916794 - DNA, 25 bp, Homo sapien
catgcgaagtccagatggaagctgc

SEQ ID NO: 3916795 - DNA, 25 bp, Homo sapien
tgcgaagtccagatggaagctgcac

SEQ ID NO: 3916796 - DNA, 25 bp, Homo sapien
tacatgcgaagtccagatggaagct

SEQ ID NO: 3916797 - DNA, 25 bp, Homo sapien
ttacatgcgaagtccagatggaagc

SEQ ID NO: 3916798 - DNA, 25 bp, Homo sapien
caacagatggcgcttatcagcgagg

SEQ ID NO: 3916799 - DNA, 25 bp, Homo sapien
tgccttccgcaatgtacagctgaca

SEQ ID NO: 3916800 - DNA, 25 bp, Homo sapien
tggcgcttatcagcgagggatgcac

SEQ ID NO: 3916801 - DNA, 25 bp, Homo sapien
tgcattcacctccactatcaacaga

SEQ ID NO: 3916802 - DNA, 25 bp, Homo sapien
tgctggaacagcataacagtataat

SEQ ID NO: 3916803 - DNA, 25 bp, Homo sapien
tgaggaaggcgattatgctggaaca

SEQ ID NO: 3916804 - DNA, 25 bp, Homo sapien
cacagcttacatcaccctcttgaga

SEQ ID NO: 3916805 - DNA, 25 bp, Homo sapien
gacaagacattcagacacccaggtg

SEQ ID NO: 3916806 - DNA, 25 bp, Homo sapien
gcgtgtgtctgtgagcagattaacc

SEQ ID NO: 3916807 - DNA, 25 bp, Homo sapien
cgaaacaccgcttgggtcggcttct

SEQ ID NO: 3916808 - DNA, 25 bp, Homo sapien
gattaaccatccgaaacaccgcttg

SEQ ID NO: 3916809 - DNA, 25 bp, Homo sapien
ggcttcttccctactcgcaagtcct

SEQ ID NO: 3916810 - DNA, 25 bp, Homo sapien
caggagacactcagacctcctctga

SEQ ID NO: 3916811 - DNA, 25 bp, Homo sapien
ataaggcttctccaagatgctccac

SEQ ID NO: 3916812 - DNA, 25 bp, Homo sapien
gcaagagcaggagacactcagacct

SEQ ID NO: 3916813 - DNA, 25 bp, Homo sapien
gacaaagataaggcttctccaagat

SEQ ID NO: 3916814 - DNA, 25 bp, Homo sapien
caaagccagacagactgcggcagtg

SEQ ID NO: 3916815 - DNA, 25 bp, Homo sapien
aagccagacagactgcggcagtgag

SEQ ID NO: 3916816 - DNA, 25 bp, Homo sapien
gacagactgcggcagtgaggagccc

SEQ ID NO: 3916817 - DNA, 25 bp, Homo sapien
gccaaagccagacagactgcggcag

SEQ ID NO: 3916818 - DNA, 25 bp, Homo sapien
aacaggcccaaacgcacaagacagt

SEQ ID NO: 3916819 - DNA, 25 bp, Homo sapien
caggaacaggcccaaacgcacaaga

SEQ ID NO: 3916820 - DNA, 25 bp, Homo sapien
ggcccaaacgcacaagacagtaatt

SEQ ID NO: 3916821 - DNA, 25 bp, Homo sapien
caggcccaaacgcacaagacagtaa

SEQ ID NO: 3916822 - DNA, 25 bp, Homo sapien
ggaaagcacttcgagaatccagagt

SEQ ID NO: 3916823 - DNA, 25 bp, Homo sapien
cattcatccatgctgggcgcatcag

SEQ ID NO: 3916824 - DNA, 25 bp, Homo sapien
tccagagtgctccataattgccaac

SEQ ID NO: 3916825 - DNA, 25 bp, Homo sapien
cagatgtcaatctgaggccggccgc

SEQ ID NO: 3916826 - DNA, 25 bp, Homo sapien
aagaggagctctacccaacaggaag

SEQ ID NO: 3916827 - DNA, 25 bp, Homo sapien
tggctctcacattgaaccgggcggg

SEQ ID NO: 3916828 - DNA, 25 bp, Homo sapien
tgcaggaggtgaagcgtctgcgctt

SEQ ID NO: 3916829 - DNA, 25 bp, Homo sapien
ccttacttagcatggctctcacatt

SEQ ID NO: 3916830 - DNA, 25 bp, Homo sapien
gaaacgctgcaacatcgtatcacag

SEQ ID NO: 3916831 - DNA, 25 bp, Homo sapien
caggctcggttaaaggaaacgctgc

SEQ ID NO: 3916832 - DNA, 25 bp, Homo sapien
tcctaccgtaaacgtaacacatgct

SEQ ID NO: 3916833 - DNA, 25 bp, Homo sapien
tgcttcacctcagactacagaggct

SEQ ID NO: 3916834 - DNA, 25 bp, Homo sapien
aaccctattgtcaagctgctctgtg

SEQ ID NO: 3916835 - DNA, 25 bp, Homo sapien
gctctgtggtccaaggcaaatcacc

SEQ ID NO: 3916836 - DNA, 25 bp, Homo sapien
gatgcccaaatatgagattcctagg

SEQ ID NO: 3916837 - DNA, 25 bp, Homo sapien
gaaggcctggtgtctaattccaacc

SEQ ID NO: 3916838 - DNA, 25 bp, Homo sapien
tcacagcaggggaaacattcgtgca

SEQ ID NO: 3916839 - DNA, 25 bp, Homo sapien
aatagacagactaacctcacagcag

SEQ ID NO: 3916840 - DNA, 25 bp, Homo sapien
atcaactgaaatgtgggctgcgcca

SEQ ID NO: 3916841 - DNA, 25 bp, Homo sapien
tgcgccaccacctacagacttggtg

SEQ ID NO: 3916842 - DNA, 25 bp, Homo sapien
tccataatttgctccagatgggaag

SEQ ID NO: 3916843 - DNA, 25 bp, Homo sapien
tgctgatttagcataacagcctgtg

SEQ ID NO: 3916844 - DNA, 25 bp, Homo sapien
cataacagcctgtgcatgaaagtcc

SEQ ID NO: 3916845 - DNA, 25 bp, Homo sapien
tgcatgaaagtccataatttgctcc

SEQ ID NO: 3916846 - DNA, 25 bp, Homo sapien
gtgtgacctcttgacctaagatggg

SEQ ID NO: 3916847 - DNA, 25 bp, Homo sapien
tagtgttgctgcaccagcggatccc

SEQ ID NO: 3916848 - DNA, 25 bp, Homo sapien
gaggtcaacaagtgagagaacagga

SEQ ID NO: 3916849 - DNA, 25 bp, Homo sapien
caggcactgccttctaagggaatag

SEQ ID NO: 3916850 - DNA, 25 bp, Homo sapien
tgcaggagtcctctcggtttgcatg

SEQ ID NO: 3916851 - DNA, 25 bp, Homo sapien
cggtttgcatgccttgcttacagat

SEQ ID NO: 3916852 - DNA, 25 bp, Homo sapien
agatgaggttaagaaatgtcaaggg

SEQ ID NO: 3916853 - DNA, 25 bp, Homo sapien
gagtcctctcggtttgcatgccttg

SEQ ID NO: 3916854 - DNA, 25 bp, Homo sapien
ccaaatcctgctatgctcctggatg

SEQ ID NO: 3916855 - DNA, 25 bp, Homo sapien
caaatcctgctatgctcctggatga

SEQ ID NO: 3916856 - DNA, 25 bp, Homo sapien
aaatcctgctatgctcctggatgag

SEQ ID NO: 3916857 - DNA, 25 bp, Homo sapien
aatcctgctatgctcctggatgaga

SEQ ID NO: 3916858 - DNA, 25 bp, Homo sapien
taataaccttacagacctcatggcc

SEQ ID NO: 3916859 - DNA, 25 bp, Homo sapien
gatgggtaagaatgagcccctgtaa

SEQ ID NO: 3916860 - DNA, 25 bp, Homo sapien
tcatggccctaaacggtagaaagag

SEQ ID NO: 3916861 - DNA, 25 bp, Homo sapien
gcaggttactaaaggcgcagtgaga

SEQ ID NO: 3916862 - DNA, 25 bp, Homo sapien
gcaccttcctacagaaagggcctgg

SEQ ID NO: 3916863 - DNA, 25 bp, Homo sapien
cactgtcagcggcagctcacaaatc

SEQ ID NO: 3916864 - DNA, 25 bp, Homo sapien
cacaaatctggatgaactgcgggtt

SEQ ID NO: 3916865 - DNA, 25 bp, Homo sapien
gtgcttgccatggagaaataccctg

SEQ ID NO: 3916866 - DNA, 25 bp, Homo sapien
tcttgacaaagcctggttgttctgg

SEQ ID NO: 3916867 - DNA, 25 bp, Homo sapien
gcctggttgttctggaacagcagtt

SEQ ID NO: 3916868 - DNA, 25 bp, Homo sapien
acagcagttccggtaacatgtgcag

SEQ ID NO: 3916869 - DNA, 25 bp, Homo sapien
tgtgcagctggtttcggttcagtcg

SEQ ID NO: 3916870 - DNA, 25 bp, Homo sapien
tacttcttcccatagccatcatcat

SEQ ID NO: 3916871 - DNA, 25 bp, Homo sapien
ttccactacttcttcccatagccat

SEQ ID NO: 3916872 - DNA, 25 bp, Homo sapien
agcacctctccttccactacttctt

SEQ ID NO: 3916873 - DNA, 25 bp, Homo sapien
tccttccactacttcttcccatagc

SEQ ID NO: 3916874 - DNA, 25 bp, Homo sapien
cacgttccactgctccaatctggtt

SEQ ID NO: 3916875 - DNA, 25 bp, Homo sapien
atgtcatcaaaagcaccacgttcca

SEQ ID NO: 3916876 - DNA, 25 bp, Homo sapien
tgtcatcaaaagcaccacgttccac

SEQ ID NO: 3916877 - DNA, 25 bp, Homo sapien
gttccactgctccaatctggttctc

SEQ ID NO: 3916878 - DNA, 25 bp, Homo sapien
tcattcttatggatccgagtgatgt

SEQ ID NO: 3916879 - DNA, 25 bp, Homo sapien
tatggatccgagtgatgttgttgcc

SEQ ID NO: 3916880 - DNA, 25 bp, Homo sapien
aaagtcattcttatggatccgagtg

SEQ ID NO: 3916881 - DNA, 25 bp, Homo sapien
gagtgatgttgttgccattgagttc

SEQ ID NO: 3916882 - DNA, 25 bp, Homo sapien
ccagagagtcggaagctgtcagaag

SEQ ID NO: 3916883 - DNA, 25 bp, Homo sapien
cagacagccagagagtcggaagctg

SEQ ID NO: 3916884 - DNA, 25 bp, Homo sapien
cagccagagagtcggaagctgtcag

SEQ ID NO: 3916885 - DNA, 25 bp, Homo sapien
acagccagagagtcggaagctgtca

SEQ ID NO: 3916886 - DNA, 25 bp, Homo sapien
tactactgcactgttgtgattttcc

SEQ ID NO: 3916887 - DNA, 25 bp, Homo sapien
tttactactgcactgttgtgatttt

SEQ ID NO: 3916888 - DNA, 25 bp, Homo sapien
ttactactgcactgttgtgattttc

SEQ ID NO: 3916889 - DNA, 25 bp, Homo sapien
ctttactactgcactgttgtgattt

SEQ ID NO: 3916890 - DNA, 25 bp, Homo sapien
tgctggactggcagggccaagctga

SEQ ID NO: 3916891 - DNA, 25 bp, Homo sapien
gtgctggactggcagggccaagctg

SEQ ID NO: 3916892 - DNA, 25 bp, Homo sapien
gctggactggcagggccaagctgaa

SEQ ID NO: 3916893 - DNA, 25 bp, Homo sapien
caaagccagcgttggcctcaagcag

SEQ ID NO: 3916894 - DNA, 25 bp, Homo sapien
tccctgagcgcagctgcaagacttg

SEQ ID NO: 3916895 - DNA, 25 bp, Homo sapien
tgcttgggccaaataactcaggtct

SEQ ID NO: 3916896 - DNA, 25 bp, Homo sapien
caagacttggcaggtatcggaggac

SEQ ID NO: 3916897 - DNA, 25 bp, Homo sapien
gcctctttcaagatgttcttttcct

SEQ ID NO: 3916898 - DNA, 25 bp, Homo sapien
tctttgagcagctctttcacgggct

SEQ ID NO: 3916899 - DNA, 25 bp, Homo sapien
tttgagcagctctttcacgggctgc

SEQ ID NO: 3916900 - DNA, 25 bp, Homo sapien
cctctttgagcagctctttcacggg

SEQ ID NO: 3916901 - DNA, 25 bp, Homo sapien
aagccctcaggtcccattgtctgcc

SEQ ID NO: 3916902 - DNA, 25 bp, Homo sapien
gccctcaggtcccattgtctgcctg

SEQ ID NO: 3916903 - DNA, 25 bp, Homo sapien
caaagccctcaggtcccattgtctg

SEQ ID NO: 3916904 - DNA, 25 bp, Homo sapien
aaagccctcaggtcccattgtctgc

SEQ ID NO: 3916905 - DNA, 25 bp, Homo sapien
cctgctgcccttcgtcaggagcaag

SEQ ID NO: 3916906 - DNA, 25 bp, Homo sapien
gggagcgggaatctgcgcagctggc

SEQ ID NO: 3916907 - DNA, 25 bp, Homo sapien
ctctgggagcgggaatctgcgcagc

SEQ ID NO: 3916908 - DNA, 25 bp, Homo sapien
gcccttcgtcaggagcaagctctgg

SEQ ID NO: 3916909 - DNA, 25 bp, Homo sapien
gccgtagccccatgtgcccaaaagg

SEQ ID NO: 3916910 - DNA, 25 bp, Homo sapien
gacattgtgcttggcgagtgtggga

SEQ ID NO: 3916911 - DNA, 25 bp, Homo sapien
cagaacgcggccgtagccccatgtg

SEQ ID NO: 3916912 - DNA, 25 bp, Homo sapien
tgtgcttggcgagtgtgggaagtgt

SEQ ID NO: 3916913 - DNA, 25 bp, Homo sapien
gaataaagcgctggcgcagtgagga

SEQ ID NO: 3916914 - DNA, 25 bp, Homo sapien
gaggaataaagcgctggcgcagtga

SEQ ID NO: 3916915 - DNA, 25 bp, Homo sapien
tggaggaataaagcgctggcgcagt

SEQ ID NO: 3916916 - DNA, 25 bp, Homo sapien
ctggaggaataaagcgctggcgcag

SEQ ID NO: 3916917 - DNA, 25 bp, Homo sapien
agcagccagagctccggccggaccg

SEQ ID NO: 3916918 - DNA, 25 bp, Homo sapien
tcggtgttccgaggtatattcttgg

SEQ ID NO: 3916919 - DNA, 25 bp, Homo sapien
cagtccaccgtggttccggtgcagg

SEQ ID NO: 3916920 - DNA, 25 bp, Homo sapien
cgtgccgtggcagtccaccgtggtt

SEQ ID NO: 3916921 - DNA, 25 bp, Homo sapien
tcaatcgaaaagcacacatccaggg

SEQ ID NO: 3916922 - DNA, 25 bp, Homo sapien
cgcctgtgcgcggacggagggaggg

SEQ ID NO: 3916923 - DNA, 25 bp, Homo sapien
agccaccgaagagcccgcgggcttg

SEQ ID NO: 3916924 - DNA, 25 bp, Homo sapien
aggaaaatgggcaggccccgcgcgc

SEQ ID NO: 3916925 - DNA, 25 bp, Homo sapien
cactgtgaatgtcatgtgggtctga

SEQ ID NO: 3916926 - DNA, 25 bp, Homo sapien
aaacccattttcaccatccactgtg

SEQ ID NO: 3916927 - DNA, 25 bp, Homo sapien
tcacatgtagacagagtaactgaat

SEQ ID NO: 3916928 - DNA, 25 bp, Homo sapien
actgaatccagactccacggctgtg

SEQ ID NO: 3916929 - DNA, 25 bp, Homo sapien
gtgattaatgattatgtgctcagta

SEQ ID NO: 3916930 - DNA, 25 bp, Homo sapien
tgattaatgattatgtgctcagtac

SEQ ID NO: 3916931 - DNA, 25 bp, Homo sapien
tcagtgattaatgattatgtgctca

SEQ ID NO: 3916932 - DNA, 25 bp, Homo sapien
cagtgattaatgattatgtgctcag

SEQ ID NO: 3916933 - DNA, 25 bp, Homo sapien
gcttcattttgaaggacctggttcc

SEQ ID NO: 3916934 - DNA, 25 bp, Homo sapien
tcccacatgtaactttaagagtctc

SEQ ID NO: 3916935 - DNA, 25 bp, Homo sapien
cgtactcagcattttggtcctcttc

SEQ ID NO: 3916936 - DNA, 25 bp, Homo sapien
gtgagtaatacaagctggcccttgg

SEQ ID NO: 3916937 - DNA, 25 bp, Homo sapien
tcaacagaacagatacctccggagc

SEQ ID NO: 3916938 - DNA, 25 bp, Homo sapien
taaaaatcacctggttgcatggcca

SEQ ID NO: 3916939 - DNA, 25 bp, Homo sapien
aacgcttgtgcatcttaggaaccca

SEQ ID NO: 3916940 - DNA, 25 bp, Homo sapien
tctacgctggtagaagatctcggca

SEQ ID NO: 3916941 - DNA, 25 bp, Homo sapien
tgttttggccctcaggtacagtcag

SEQ ID NO: 3916942 - DNA, 25 bp, Homo sapien
gatgctctttcactactacagcagg

SEQ ID NO: 3916943 - DNA, 25 bp, Homo sapien
ggtacagtcagtatctcctgatgct

SEQ ID NO: 3916944 - DNA, 25 bp, Homo sapien
tggtcccaatgcaaaagtctatcat

SEQ ID NO: 3916945 - DNA, 25 bp, Homo sapien
ggttctcactaatttagtcagtggg

SEQ ID NO: 3916946 - DNA, 25 bp, Homo sapien
aaggtgagaaattccaacgcctatg

SEQ ID NO: 3916947 - DNA, 25 bp, Homo sapien
ttcacacagtacagtctggaccagg

SEQ ID NO: 3916948 - DNA, 25 bp, Homo sapien
gggttcacacagtacagtctggacc

SEQ ID NO: 3916949 - DNA, 25 bp, Homo sapien
gtgttttccgtaagattccactgga

SEQ ID NO: 3916950 - DNA, 25 bp, Homo sapien
gtatccctctggcacaaacacaagg

SEQ ID NO: 3916951 - DNA, 25 bp, Homo sapien
tactggctcaaaaacaatacctgcc

SEQ ID NO: 3916952 - DNA, 25 bp, Homo sapien
aacacaaggccccaaattgacacca

SEQ ID NO: 3916953 - DNA, 25 bp, Homo sapien
gattctaagtcgatcacagcttcta

SEQ ID NO: 3916954 - DNA, 25 bp, Homo sapien
gtcgatcacagcttctattaagaaa

SEQ ID NO: 3916955 - DNA, 25 bp, Homo sapien
caaatttggattctaagtcgatcac

SEQ ID NO: 3916956 - DNA, 25 bp, Homo sapien
ctcctcaaatttggattctaagtcg

SEQ ID NO: 3916957 - DNA, 25 bp, Homo sapien
gaccatagcaccacttcgggatgaa

SEQ ID NO: 3916958 - DNA, 25 bp, Homo sapien
gagaagggttgtacagctccacaga

SEQ ID NO: 3916959 - DNA, 25 bp, Homo sapien
cacactgcattaagctggaagacca

SEQ ID NO: 3916960 - DNA, 25 bp, Homo sapien
tagaggtatcagtcgggtcacggta

SEQ ID NO: 3916961 - DNA, 25 bp, Homo sapien
gaggtactactcctaccattttaca

SEQ ID NO: 3916962 - DNA, 25 bp, Homo sapien
gcccgaggactaatatataagctat

SEQ ID NO: 3916963 - DNA, 25 bp, Homo sapien
tctgcagcctacatagttcatttgc

SEQ ID NO: 3916964 - DNA, 25 bp, Homo sapien
taaccagtatatgaggtactactcc

SEQ ID NO: 3916965 - DNA, 25 bp, Homo sapien
ggctgctcatcatacagtgcacatg

SEQ ID NO: 3916966 - DNA, 25 bp, Homo sapien
ccaacatgtcagtagtgtgccaagg

SEQ ID NO: 3916967 - DNA, 25 bp, Homo sapien
caaagcattatctgaaccaacatgt

SEQ ID NO: 3916968 - DNA, 25 bp, Homo sapien
tgcacatggcagctcctacaacaaa

SEQ ID NO: 3916969 - DNA, 25 bp, Homo sapien
gggcttggagactgccaatgtctga

SEQ ID NO: 3916970 - DNA, 25 bp, Homo sapien
actgccaatgtctgaagagagttca

SEQ ID NO: 3916971 - DNA, 25 bp, Homo sapien
ccaggctggaagtagttatcataca

SEQ ID NO: 3916972 - DNA, 25 bp, Homo sapien
tagttatcatacagagagcagagct

SEQ ID NO: 3916973 - DNA, 25 bp, Homo sapien
ttggtgtcatcgtgacagctggaga

SEQ ID NO: 3916974 - DNA, 25 bp, Homo sapien
ccttcagaccacttcaatcttgttg

SEQ ID NO: 3916975 - DNA, 25 bp, Homo sapien
aatcttgttggtgtcatcgtgacag

SEQ ID NO: 3916976 - DNA, 25 bp, Homo sapien
ttcagaccacttcaatcttgttggt

SEQ ID NO: 3916977 - DNA, 25 bp, Homo sapien
ctattttctttgctggttcccttca

SEQ ID NO: 3916978 - DNA, 25 bp, Homo sapien
attttctttgctggttcccttcaat

SEQ ID NO: 3916979 - DNA, 25 bp, Homo sapien
tttctttgctggttcccttcaattc

SEQ ID NO: 3916980 - DNA, 25 bp, Homo sapien
tctttgctggttcccttcaattcac

SEQ ID NO: 3916981 - DNA, 25 bp, Homo sapien
catcatctgatttcccaggaccttc

SEQ ID NO: 3916982 - DNA, 25 bp, Homo sapien
ccacagattctggagtagggttctt

SEQ ID NO: 3916983 - DNA, 25 bp, Homo sapien
agattctggagtagggttcttcttt

SEQ ID NO: 3916984 - DNA, 25 bp, Homo sapien
tgacatcatctgatttcccaggacc

SEQ ID NO: 3916985 - DNA, 25 bp, Homo sapien
agaggccaaagcatgttaccaaaaa

SEQ ID NO: 3916986 - DNA, 25 bp, Homo sapien
tacagtgtgcctctgagaccagtta

SEQ ID NO: 3916987 - DNA, 25 bp, Homo sapien
catctacagtggagctatactagcc

SEQ ID NO: 3916988 - DNA, 25 bp, Homo sapien
tcaggccatcttatacaagagaggc

SEQ ID NO: 3916989 - DNA, 25 bp, Homo sapien
ttgaattctaaaaaaagaacatatc

SEQ ID NO: 3916990 - DNA, 25 bp, Homo sapien
gaattctaaaaaaagaacatatcaa

SEQ ID NO: 3916991 - DNA, 25 bp, Homo sapien
cccttagagaataaatttgaattct

SEQ ID NO: 3916992 - DNA, 25 bp, Homo sapien
tcccttagagaataaatttgaattc

SEQ ID NO: 3916993 - DNA, 25 bp, Homo sapien
atttaagtcctttgctcactatttt

SEQ ID NO: 3916994 - DNA, 25 bp, Homo sapien
tgtgtttcttggccatctgtacatc

SEQ ID NO: 3916995 - DNA, 25 bp, Homo sapien
gtgtttcttggccatctgtacatct

SEQ ID NO: 3916996 - DNA, 25 bp, Homo sapien
ctggagaaatttctatttaagtcct

SEQ ID NO: 3916997 - DNA, 25 bp, Homo sapien
taataagcccactgaaggagcgcga

SEQ ID NO: 3916998 - DNA, 25 bp, Homo sapien
aaggagcgcgaacgagccctctttt

SEQ ID NO: 3916999 - DNA, 25 bp, Homo sapien
cgagccctcttttgtacctgggaag

SEQ ID NO: 3917000 - DNA, 25 bp, Homo sapien
cttaataagcccactgaaggagcgc

SEQ ID NO: 3917001 - DNA, 25 bp, Homo sapien
tgcctcttccgtatggtgctgggtc

SEQ ID NO: 3917002 - DNA, 25 bp, Homo sapien
tgagggcaggaatctacccggttcc

SEQ ID NO: 3917003 - DNA, 25 bp, Homo sapien
tgttgaaacagctctctcagtgcct

SEQ ID NO: 3917004 - DNA, 25 bp, Homo sapien
tggcatatcatgaacgtgttgaaac

SEQ ID NO: 3917005 - DNA, 25 bp, Homo sapien
gtatgacatgaagctatgaggtcaa

SEQ ID NO: 3917006 - DNA, 25 bp, Homo sapien
tatgacatgaagctatgaggtcaag

SEQ ID NO: 3917007 - DNA, 25 bp, Homo sapien
atgacatgaagctatgaggtcaagg

SEQ ID NO: 3917008 - DNA, 25 bp, Homo sapien
ggatcccaaatagtgcaatctcgca

SEQ ID NO: 3917009 - DNA, 25 bp, Homo sapien
cacactcccgaatgtaagcaggagc

SEQ ID NO: 3917010 - DNA, 25 bp, Homo sapien
tgcaatctcgcacactcccgaatgt

SEQ ID NO: 3917011 - DNA, 25 bp, Homo sapien
tgagttctggatcccaaatagtgca

SEQ ID NO: 3917012 - DNA, 25 bp, Homo sapien
gcctctcccaggggcctgccaccgc

SEQ ID NO: 3917013 - DNA, 25 bp, Homo sapien
ctcagcctctcccaggggcctgcca

SEQ ID NO: 3917014 - DNA, 25 bp, Homo sapien
agcctctcccaggggcctgccaccg

SEQ ID NO: 3917015 - DNA, 25 bp, Homo sapien
tctcccaggggcctgccaccgcgcc

SEQ ID NO: 3917016 - DNA, 25 bp, Homo sapien
aaagtttctgggagtgtttaatcat

SEQ ID NO: 3917017 - DNA, 25 bp, Homo sapien
taactttgtgatattctcctgaagg

SEQ ID NO: 3917018 - DNA, 25 bp, Homo sapien
aagccatcccactgtttaactttgt

SEQ ID NO: 3917019 - DNA, 25 bp, Homo sapien
gatattctcctgaaggtcatttgca

SEQ ID NO: 3917020 - DNA, 25 bp, Homo sapien
caataagcctgttctttcaaatgta

SEQ ID NO: 3917021 - DNA, 25 bp, Homo sapien
aaatgtatgaagtttctatccctag

SEQ ID NO: 3917022 - DNA, 25 bp, Homo sapien
tttcaaatgtatgaagtttctatcc

SEQ ID NO: 3917023 - DNA, 25 bp, Homo sapien
tcaaatgtatgaagtttctatccct

SEQ ID NO: 3917024 - DNA, 25 bp, Homo sapien
aaaagactttagatgaggctacagt

SEQ ID NO: 3917025 - DNA, 25 bp, Homo sapien
gtagtgattgtgttactctcctcca

SEQ ID NO: 3917026 - DNA, 25 bp, Homo sapien
agtgagtagtgattgtgttactctc

SEQ ID NO: 3917027 - DNA, 25 bp, Homo sapien
ttgtgttactctcctccagcgtggg

SEQ ID NO: 3917028 - DNA, 25 bp, Homo sapien
cataagggcaaggttataggctgac

SEQ ID NO: 3917029 - DNA, 25 bp, Homo sapien
caaattacgattaggaggagggaga

SEQ ID NO: 3917030 - DNA, 25 bp, Homo sapien
caactggagagcctcaatttgccgg

SEQ ID NO: 3917031 - DNA, 25 bp, Homo sapien
aatttgccggtccttgtctggtata

SEQ ID NO: 3917032 - DNA, 25 bp, Homo sapien
tttgaggtgtgcattgaagtgttta

SEQ ID NO: 3917033 - DNA, 25 bp, Homo sapien
ggctccggcaactctcctagaaaca

SEQ ID NO: 3917034 - DNA, 25 bp, Homo sapien
gtttatgtgtcagcagaggctccgg

SEQ ID NO: 3917035 - DNA, 25 bp, Homo sapien
gcattgaagtgtttatgtgtcagca

SEQ ID NO: 3917036 - DNA, 25 bp, Homo sapien
cagttccattattgagagcatccct

SEQ ID NO: 3917037 - DNA, 25 bp, Homo sapien
cttaaaatctgctgtcggacactat

SEQ ID NO: 3917038 - DNA, 25 bp, Homo sapien
tactctaaacaaaccctctactcgc

SEQ ID NO: 3917039 - DNA, 25 bp, Homo sapien
tgtcggacactattacccggtactc

SEQ ID NO: 3917040 - DNA, 25 bp, Homo sapien
caatgccttcctccgtcagtgggga

SEQ ID NO: 3917041 - DNA, 25 bp, Homo sapien
ttgtgtagatactcaatcagttggt

SEQ ID NO: 3917042 - DNA, 25 bp, Homo sapien
ccgtcagtggggacccaaatatcac

SEQ ID NO: 3917043 - DNA, 25 bp, Homo sapien
tcagttggtatatctgggcaatgcc

SEQ ID NO: 3917044 - DNA, 25 bp, Homo sapien
cacactccagcatcggcaacaaagt

SEQ ID NO: 3917045 - DNA, 25 bp, Homo sapien
ctccagcatcggcaacaaagtggga

SEQ ID NO: 3917046 - DNA, 25 bp, Homo sapien
caccacactccagcatcggcaacaa

SEQ ID NO: 3917047 - DNA, 25 bp, Homo sapien
aaacagaaggagagtttgagcccag

SEQ ID NO: 3917048 - DNA, 25 bp, Homo sapien
gcaactcttcggtgaatgtgtagat

SEQ ID NO: 3917049 - DNA, 25 bp, Homo sapien
catgaaaatcaagatgccccgatga

SEQ ID NO: 3917050 - DNA, 25 bp, Homo sapien
tgttctatagtctctagctatgtaa

SEQ ID NO: 3917051 - DNA, 25 bp, Homo sapien
gactacctaagttaatcatgtcttc

SEQ ID NO: 3917052 - DNA, 25 bp, Homo sapien
tttcgcttgagagacatgagagacc

SEQ ID NO: 3917053 - DNA, 25 bp, Homo sapien
ggtttctcatgtcggagtttctcca

SEQ ID NO: 3917054 - DNA, 25 bp, Homo sapien
gataatgggctgacctcgaagggaa

SEQ ID NO: 3917055 - DNA, 25 bp, Homo sapien
tcagttccaggtaaatcgatgagcc

SEQ ID NO: 3917056 - DNA, 25 bp, Homo sapien
tggtaaatcgaagagacaggaagaa

SEQ ID NO: 3917057 - DNA, 25 bp, Homo sapien
ctgatgaggcattggtaaatcgaag

SEQ ID NO: 3917058 - DNA, 25 bp, Homo sapien
tgaggcattggtaaatcgaagagac

SEQ ID NO: 3917059 - DNA, 25 bp, Homo sapien
agacaggaagaaagctttccccttg

SEQ ID NO: 3917060 - DNA, 25 bp, Homo sapien
ctgaacgcacaaagtgcctcggaga

SEQ ID NO: 3917061 - DNA, 25 bp, Homo sapien
aaagtgcctcggagaagatgtgaag

SEQ ID NO: 3917062 - DNA, 25 bp, Homo sapien
gctgtgtgcaacagtgaggaattcg

SEQ ID NO: 3917063 - DNA, 25 bp, Homo sapien
agaagatgtgaagcgctgtgtgcaa

SEQ ID NO: 3917064 - DNA, 25 bp, Homo sapien
tctcggcgccaaagcgatcagcgct

SEQ ID NO: 3917065 - DNA, 25 bp, Homo sapien
atcaagaggtgtctcggcgccaaag

SEQ ID NO: 3917066 - DNA, 25 bp, Homo sapien
tcctcgccatcaagaggtgtctcgg

SEQ ID NO: 3917067 - DNA, 25 bp, Homo sapien
tggacttccgtttcctcgccatcaa

SEQ ID NO: 3917068 - DNA, 25 bp, Homo sapien
ctccggccggattcgcgggctggca

SEQ ID NO: 3917069 - DNA, 25 bp, Homo sapien
ccggccggattcgcgggctggcacc

SEQ ID NO: 3917070 - DNA, 25 bp, Homo sapien
tccggccggattcgcgggctggcac

SEQ ID NO: 3917071 - DNA, 25 bp, Homo sapien
cggccggattcgcgggctggcacct

SEQ ID NO: 3917072 - DNA, 25 bp, Homo sapien
ctaaagattggtgacgcctctgtca

SEQ ID NO: 3917073 - DNA, 25 bp, Homo sapien
cctctgtcaaacaatgttgatgatc

SEQ ID NO: 3917074 - DNA, 25 bp, Homo sapien
ggtgacgcctctgtcaaacaatgtt

SEQ ID NO: 3917075 - DNA, 25 bp, Homo sapien
gattggtgacgcctctgtcaaacaa

SEQ ID NO: 3917076 - DNA, 25 bp, Homo sapien
tttcactgtaatccccaggcctttc

SEQ ID NO: 3917077 - DNA, 25 bp, Homo sapien
tgtaatccccaggcctttccagtca

SEQ ID NO: 3917078 - DNA, 25 bp, Homo sapien
ctgggcccgtctgttctgaatgttc

SEQ ID NO: 3917079 - DNA, 25 bp, Homo sapien
tctgggcccgtctgttctgaatgtt

SEQ ID NO: 3917080 - DNA, 25 bp, Homo sapien
agtggcaccaacttcatccccggtg

SEQ ID NO: 3917081 - DNA, 25 bp, Homo sapien
gtgaagaagtggcaccaacttcatc

SEQ ID NO: 3917082 - DNA, 25 bp, Homo sapien
tagagacagaaccagggggctgatc

SEQ ID NO: 3917083 - DNA, 25 bp, Homo sapien
agaagtggcaccaacttcatccccg

SEQ ID NO: 3917084 - DNA, 25 bp, Homo sapien
tgttggggtcgaacttcggcggcat

SEQ ID NO: 3917085 - DNA, 25 bp, Homo sapien
ttgttggggtcgaacttcggcggca

SEQ ID NO: 3917086 - DNA, 25 bp, Homo sapien
caaggaggccgtgcgaaggcttcat

SEQ ID NO: 3917087 - DNA, 25 bp, Homo sapien
cagctcagaactggcgacggcgttc

SEQ ID NO: 3917088 - DNA, 25 bp, Homo sapien
gcttcattcgcgacggctgcagtta

SEQ ID NO: 3917089 - DNA, 25 bp, Homo sapien
gcagttacgtgcaaagcttccccaa

SEQ ID NO: 3917090 - DNA, 25 bp, Homo sapien
gaataggagttaacccctgcgctct

SEQ ID NO: 3917091 - DNA, 25 bp, Homo sapien
tagataatttcagggtgcagcccaa

SEQ ID NO: 3917092 - DNA, 25 bp, Homo sapien
gccggaaccacggaggatgatgcca

SEQ ID NO: 3917093 - DNA, 25 bp, Homo sapien
ccaaacatgcggtgccatgaaggga

SEQ ID NO: 3917094 - DNA, 25 bp, Homo sapien
ataaatagataaatggccgggcaca

SEQ ID NO: 3917095 - DNA, 25 bp, Homo sapien
tgaaataaaaggtgggccaggccca

SEQ ID NO: 3917096 - DNA, 25 bp, Homo sapien
ccaggcccagtagtttacacctgta

SEQ ID NO: 3917097 - DNA, 25 bp, Homo sapien
aataaataaatgaggcaagaggatt

SEQ ID NO: 3917098 - DNA, 25 bp, Homo sapien
atcctataaatcaggaccaccacaa

SEQ ID NO: 3917099 - DNA, 25 bp, Homo sapien
tgcgaagtgtacatcaatagctaca

SEQ ID NO: 3917100 - DNA, 25 bp, Homo sapien
ttaattatgaaatcctataaatcag

SEQ ID NO: 3917101 - DNA, 25 bp, Homo sapien
tcagacactccgttgcgaagtgtac

SEQ ID NO: 3917102 - DNA, 25 bp, Homo sapien
aactggacgctgttgggtctacgca

SEQ ID NO: 3917103 - DNA, 25 bp, Homo sapien
tggatggcccgggaaattctcatgc

SEQ ID NO: 3917104 - DNA, 25 bp, Homo sapien
cgtcaagtttcatacagccagcggc

SEQ ID NO: 3917105 - DNA, 25 bp, Homo sapien
tcgccgcggctggtaacttctctgg

SEQ ID NO: 3917106 - DNA, 25 bp, Homo sapien
gtctccgcacggcttccttgatgag

SEQ ID NO: 3917107 - DNA, 25 bp, Homo sapien
aatgcggtcaggtccgctgcggcct

SEQ ID NO: 3917108 - DNA, 25 bp, Homo sapien
gtccatcggcgctgctgcaagcggc

SEQ ID NO: 3917109 - DNA, 25 bp, Homo sapien
gcgacggctcgttggagtctccgca

SEQ ID NO: 3917110 - DNA, 25 bp, Homo sapien
accgtctcagccgaagcgggcggca

SEQ ID NO: 3917111 - DNA, 25 bp, Homo sapien
ctgcggcgacctccgccacgcagta

SEQ ID NO: 3917112 - DNA, 25 bp, Homo sapien
gggcctgcggcgacctccgccacgc

SEQ ID NO: 3917113 - DNA, 25 bp, Homo sapien
ggcccaccgtctcagccgaagcggg

SEQ ID NO: 3917114 - DNA, 25 bp, Homo sapien
agccggtccacctcgcccgagctgc

SEQ ID NO: 3917115 - DNA, 25 bp, Homo sapien
gcgtctcgccgatctgggccaccag

SEQ ID NO: 3917116 - DNA, 25 bp, Homo sapien
cagctgcagcgtctcgccgatctgg

SEQ ID NO: 3917117 - DNA, 25 bp, Homo sapien
gctgcagcgtctcgccgatctgggc

SEQ ID NO: 3917118 - DNA, 25 bp, Homo sapien
ctgggggcttggttgcccgcgggcg

SEQ ID NO: 3917119 - DNA, 25 bp, Homo sapien
agccggaatcctgccggctcgggtt

SEQ ID NO: 3917120 - DNA, 25 bp, Homo sapien
gagccggaatcctgccggctcgggt

SEQ ID NO: 3917121 - DNA, 25 bp, Homo sapien
tgggggcttggttgcccgcgggcgc

SEQ ID NO: 3917122 - DNA, 25 bp, Homo sapien
ctcattttcattccgatggtactta

SEQ ID NO: 3917123 - DNA, 25 bp, Homo sapien
ccccggagagactgattctcatttt

SEQ ID NO: 3917124 - DNA, 25 bp, Homo sapien
atctcccgagggctgttcacacact

SEQ ID NO: 3917125 - DNA, 25 bp, Homo sapien
cattccccccggagagactgattct

SEQ ID NO: 3917126 - DNA, 25 bp, Homo sapien
tacggatttcagtagagttaaaatg

SEQ ID NO: 3917127 - DNA, 25 bp, Homo sapien
ctcctttctgtatgatgatgcctgg

SEQ ID NO: 3917128 - DNA, 25 bp, Homo sapien
gagggcttacggatttcagtagagt

SEQ ID NO: 3917129 - DNA, 25 bp, Homo sapien
tggagaatttcgagaggaatgaaaa

SEQ ID NO: 3917130 - DNA, 25 bp, Homo sapien
agagaaaagcagttttatgctccat

SEQ ID NO: 3917131 - DNA, 25 bp, Homo sapien
gtagagaaaagcagttttatgctcc

SEQ ID NO: 3917132 - DNA, 25 bp, Homo sapien
aagtagagaaaagcagttttatgct

SEQ ID NO: 3917133 - DNA, 25 bp, Homo sapien
ctgtaagtagagaaaagcagtttta

SEQ ID NO: 3917134 - DNA, 25 bp, Homo sapien
ctcatccacagagggatcacatgac

SEQ ID NO: 3917135 - DNA, 25 bp, Homo sapien
tcctcagagccagcgctgatctcat

SEQ ID NO: 3917136 - DNA, 25 bp, Homo sapien
ccacagagggatcacatgacctcat

SEQ ID NO: 3917137 - DNA, 25 bp, Homo sapien
agagccagcgctgatctcatccaca

SEQ ID NO: 3917138 - DNA, 25 bp, Homo sapien
ggagaacagcgtgcacccaggaggt

SEQ ID NO: 3917139 - DNA, 25 bp, Homo sapien
gcaggagaacagcgtgcacccagga

SEQ ID NO: 3917140 - DNA, 25 bp, Homo sapien
gaggcaggagaacagcgtgcaccca

SEQ ID NO: 3917141 - DNA, 25 bp, Homo sapien
aggcaggagaacagcgtgcacccag

SEQ ID NO: 3917142 - DNA, 25 bp, Homo sapien
ggttattttctggagtacagtcatc

SEQ ID NO: 3917143 - DNA, 25 bp, Homo sapien
cagggttattttctggagtacagtc

SEQ ID NO: 3917144 - DNA, 25 bp, Homo sapien
tattttctggagtacagtcatctat

SEQ ID NO: 3917145 - DNA, 25 bp, Homo sapien
agggttattttctggagtacagtca

SEQ ID NO: 3917146 - DNA, 25 bp, Homo sapien
gaacatagagtagtcatcacggcat

SEQ ID NO: 3917147 - DNA, 25 bp, Homo sapien
cacggtctggcatctagtgatggca

SEQ ID NO: 3917148 - DNA, 25 bp, Homo sapien
caataatgtatatcgaaaatagaac

SEQ ID NO: 3917149 - DNA, 25 bp, Homo sapien
ttttctaaatactcctttgcacacg

SEQ ID NO: 3917150 - DNA, 25 bp, Homo sapien
caaatgttctgggaatctttatcac

SEQ ID NO: 3917151 - DNA, 25 bp, Homo sapien
ctcctgggcataaacgatactctcg

SEQ ID NO: 3917152 - DNA, 25 bp, Homo sapien
tccaaatgttctgggaatctttatc

SEQ ID NO: 3917153 - DNA, 25 bp, Homo sapien
ataaacgatactctcgcctcagcct

SEQ ID NO: 3917154 - DNA, 25 bp, Homo sapien
tccaaagcctgtcctatgggcaaag

SEQ ID NO: 3917155 - DNA, 25 bp, Homo sapien
caaagccttatgatatgccctggac

SEQ ID NO: 3917156 - DNA, 25 bp, Homo sapien
tgaacaaggctatgctgggcactta

SEQ ID NO: 3917157 - DNA, 25 bp, Homo sapien
tggagagacttgtgcccaggacagc

SEQ ID NO: 3917158 - DNA, 25 bp, Homo sapien
tcatggcacctactcagaggcactg

SEQ ID NO: 3917159 - DNA, 25 bp, Homo sapien
caggcaccagggatgtctctgaagg

SEQ ID NO: 3917160 - DNA, 25 bp, Homo sapien
gagccaagccctagttccaagtcat

SEQ ID NO: 3917161 - DNA, 25 bp, Homo sapien
ctgaaagggcctcagactggaccac

SEQ ID NO: 3917162 - DNA, 25 bp, Homo sapien
tcagggtcgacgatcctttctgcgg

SEQ ID NO: 3917163 - DNA, 25 bp, Homo sapien
tcgccgggcagccttcaccaggcct

SEQ ID NO: 3917164 - DNA, 25 bp, Homo sapien
tgggaacctcgccgggcagccttca

SEQ ID NO: 3917165 - DNA, 25 bp, Homo sapien
gcagccttcaccaggcctttgaact

SEQ ID NO: 3917166 - DNA, 25 bp, Homo sapien
ggcctttgaactgtccctgcagctt

SEQ ID NO: 3917167 - DNA, 25 bp, Homo sapien
cggccggcctttcttcttcacatca

SEQ ID NO: 3917168 - DNA, 25 bp, Homo sapien
ttgagcttgcttctgttgaggggga

SEQ ID NO: 3917169 - DNA, 25 bp, Homo sapien
aggcatagggatccggccggccttt

SEQ ID NO: 3917170 - DNA, 25 bp, Homo sapien
tctgttgagggggatgtaggcatag

SEQ ID NO: 3917171 - DNA, 25 bp, Homo sapien
tgccacaaggtcttagcatctgaac

SEQ ID NO: 3917172 - DNA, 25 bp, Homo sapien
tgtccctgccctagacttgacaggc

SEQ ID NO: 3917173 - DNA, 25 bp, Homo sapien
gaaacagagtcagctaggagggtgg

SEQ ID NO: 3917174 - DNA, 25 bp, Homo sapien
gccttaggtggtgccaaagagctcc

SEQ ID NO: 3917175 - DNA, 25 bp, Homo sapien
gcatagccttcttggccacagggcg

SEQ ID NO: 3917176 - DNA, 25 bp, Homo sapien
cttggccttgtattcagccccaggc

SEQ ID NO: 3917177 - DNA, 25 bp, Homo sapien
catagccttcttggccacagggcga

SEQ ID NO: 3917178 - DNA, 25 bp, Homo sapien
gccttgtattcagccccaggcatag

SEQ ID NO: 3917179 - DNA, 25 bp, Homo sapien
ctacggggagaacacaggaccatga

SEQ ID NO: 3917180 - DNA, 25 bp, Homo sapien
cctccagaaaggcaatgggcaccct

SEQ ID NO: 3917181 - DNA, 25 bp, Homo sapien
gaccatgagtcaggcaaagccaggg

SEQ ID NO: 3917182 - DNA, 25 bp, Homo sapien
aaaggcaatgggcaccctctctgag

SEQ ID NO: 3917183 - DNA, 25 bp, Homo sapien
ttagggtgaccaagagaggcaagca

SEQ ID NO: 3917184 - DNA, 25 bp, Homo sapien
gaaggctggtggttccatgcacaga

SEQ ID NO: 3917185 - DNA, 25 bp, Homo sapien
agaagggacagactcaagcctcttg

SEQ ID NO: 3917186 - DNA, 25 bp, Homo sapien
actcggttggtgctcttagggtgac

SEQ ID NO: 3917187 - DNA, 25 bp, Homo sapien
tttctggtgcttgagcttctggtgc

SEQ ID NO: 3917188 - DNA, 25 bp, Homo sapien
tctttctggtgcttgagcttctggt

SEQ ID NO: 3917189 - DNA, 25 bp, Homo sapien
ctggtgcttgagcttctggtgcttt

SEQ ID NO: 3917190 - DNA, 25 bp, Homo sapien
tggtactgagggggtatctccagct

SEQ ID NO: 3917191 - DNA, 25 bp, Homo sapien
ctctcaggcgggtgggagacccctg

SEQ ID NO: 3917192 - DNA, 25 bp, Homo sapien
ctgtgctccacgggctctcaggcgg

SEQ ID NO: 3917193 - DNA, 25 bp, Homo sapien
ttactgatcccctactaagtgccag

SEQ ID NO: 3917194 - DNA, 25 bp, Homo sapien
actcacttactgatcccctactaag

SEQ ID NO: 3917195 - DNA, 25 bp, Homo sapien
tcacctacgggtggtgcccaggaag

SEQ ID NO: 3917196 - DNA, 25 bp, Homo sapien
aggctctgtcacctacgggtggtgc

SEQ ID NO: 3917197 - DNA, 25 bp, Homo sapien
cacctacgggtggtgcccaggaagg

SEQ ID NO: 3917198 - DNA, 25 bp, Homo sapien
ggctctgtcacctacgggtggtgcc

SEQ ID NO: 3917199 - DNA, 25 bp, Homo sapien
acatcttccattgggtcagccatct

SEQ ID NO: 3917200 - DNA, 25 bp, Homo sapien
catcttccattgggtcagccatctc

SEQ ID NO: 3917201 - DNA, 25 bp, Homo sapien
atcttccattgggtcagccatctct

SEQ ID NO: 3917202 - DNA, 25 bp, Homo sapien
tgtttttagccacgcttcctcagca

SEQ ID NO: 3917203 - DNA, 25 bp, Homo sapien
ttcctcagcaagtgatcaccgaagg

SEQ ID NO: 3917204 - DNA, 25 bp, Homo sapien
tcaccgaaggaataagtgaacacgg

SEQ ID NO: 3917205 - DNA, 25 bp, Homo sapien
aatgaatggacaagcgcgttgggcc

SEQ ID NO: 3917206 - DNA, 25 bp, Homo sapien
tcccttatgatcagccggccatcgg

SEQ ID NO: 3917207 - DNA, 25 bp, Homo sapien
catcggcgctcaccttgaagccgtg

SEQ ID NO: 3917208 - DNA, 25 bp, Homo sapien
ccttgaagccgtggtccttcttcct

SEQ ID NO: 3917209 - DNA, 25 bp, Homo sapien
tgcctcctcccttatgatcagccgg

SEQ ID NO: 3917210 - DNA, 25 bp, Homo sapien
tcgttgggccaccttgggatccagg

SEQ ID NO: 3917211 - DNA, 25 bp, Homo sapien
accgccctctttcagccatgcccgg

SEQ ID NO: 3917212 - DNA, 25 bp, Homo sapien
caggaagttgaggggctcgtcccca

SEQ ID NO: 3917213 - DNA, 25 bp, Homo sapien
caccttgggatccaggaagttgagg

SEQ ID NO: 3917214 - DNA, 25 bp, Homo sapien
ccgctgctccttgcctcggcttctt

SEQ ID NO: 3917215 - DNA, 25 bp, Homo sapien
ctaaggacaaaaagcccccagtcag

SEQ ID NO: 3917216 - DNA, 25 bp, Homo sapien
ggacaaaaagcccccagtcagagtg

SEQ ID NO: 3917217 - DNA, 25 bp, Homo sapien
aaggacaaaaagcccccagtcagag

SEQ ID NO: 3917218 - DNA, 25 bp, Homo sapien
taaggacaaaaagcccccagtcaga

SEQ ID NO: 3917219 - DNA, 25 bp, Homo sapien
ttggcccgggcctcagctttccgga

SEQ ID NO: 3917220 - DNA, 25 bp, Homo sapien
tactcctcgggcaacagccttttca

SEQ ID NO: 3917221 - DNA, 25 bp, Homo sapien
ctcagctttccggatgttgaccagg

SEQ ID NO: 3917222 - DNA, 25 bp, Homo sapien
ttgaccaggactctgtggtactcct

SEQ ID NO: 3917223 - DNA, 25 bp, Homo sapien
caaacttgcggatgaacttggtgaa

SEQ ID NO: 3917224 - DNA, 25 bp, Homo sapien
atctgaaagcttcccaatggcttcc

SEQ ID NO: 3917225 - DNA, 25 bp, Homo sapien
gaacaggttccgaagcttcatgcgg

SEQ ID NO: 3917226 - DNA, 25 bp, Homo sapien
cttggtgaacaggttccgaagcttc

SEQ ID NO: 3917227 - DNA, 25 bp, Homo sapien
ccagtcatgcttccctcgggtgggc

SEQ ID NO: 3917228 - DNA, 25 bp, Homo sapien
gtccagcccagggacgcagcatgat

SEQ ID NO: 3917229 - DNA, 25 bp, Homo sapien
tttcagggaggcgagccttccatgc

SEQ ID NO: 3917230 - DNA, 25 bp, Homo sapien
gcagcatgatcaagcccagctgagg

SEQ ID NO: 3917231 - DNA, 25 bp, Homo sapien
acttgaccacgtcacgggtgcggga

SEQ ID NO: 3917232 - DNA, 25 bp, Homo sapien
ggccaggtgcgccacgtccatgaca

SEQ ID NO: 3917233 - DNA, 25 bp, Homo sapien
aagcccagtgcagacttgaccacgt

SEQ ID NO: 3917234 - DNA, 25 bp, Homo sapien
catgtttggccaggtgcgccacgtc

SEQ ID NO: 3917235 - DNA, 25 bp, Homo sapien
accaggccagggtagatcaggacga

SEQ ID NO: 3917236 - DNA, 25 bp, Homo sapien
gctgcagctgaccatggtcaccgcg

SEQ ID NO: 3917237 - DNA, 25 bp, Homo sapien
gatgctgcagctgaccatggtcacc

SEQ ID NO: 3917238 - DNA, 25 bp, Homo sapien
cagggtagatcaggacgaggtagca

SEQ ID NO: 3917239 - DNA, 25 bp, Homo sapien
tgcaaaagcgttcttccgtgcgccc

SEQ ID NO: 3917240 - DNA, 25 bp, Homo sapien
catctccacgagcagtgcaaaagcg

SEQ ID NO: 3917241 - DNA, 25 bp, Homo sapien
ccgacacctccttggtgcacaggat

SEQ ID NO: 3917242 - DNA, 25 bp, Homo sapien
ttcgagccaaaccttaggaaagcat

SEQ ID NO: 3917243 - DNA, 25 bp, Homo sapien
gcttcctcacgatgtgtaggaggca

SEQ ID NO: 3917244 - DNA, 25 bp, Homo sapien
ctgagagcttcctcacgatgtgtag

SEQ ID NO: 3917245 - DNA, 25 bp, Homo sapien
gagcttcctcacgatgtgtaggagg

SEQ ID NO: 3917246 - DNA, 25 bp, Homo sapien
gagagcttcctcacgatgtgtagga

SEQ ID NO: 3917247 - DNA, 25 bp, Homo sapien
ctccagcactcggtaggccttcttc

SEQ ID NO: 3917248 - DNA, 25 bp, Homo sapien
ctcctccagcactcggtaggccttc

SEQ ID NO: 3917249 - DNA, 25 bp, Homo sapien
tcctccagcactcggtaggccttct

SEQ ID NO: 3917250 - DNA, 25 bp, Homo sapien
cctcctccagcactcggtaggcctt

SEQ ID NO: 3917251 - DNA, 25 bp, Homo sapien
tttcctgaggtgacgtggcctggcc

SEQ ID NO: 3917252 - DNA, 25 bp, Homo sapien
taggtaactgctactaaactgtggc

SEQ ID NO: 3917253 - DNA, 25 bp, Homo sapien
tgcaagacagatgggctacacagga

SEQ ID NO: 3917254 - DNA, 25 bp, Homo sapien
tacaagagtcactcagcacgcaagg

SEQ ID NO: 3917255 - DNA, 25 bp, Homo sapien
tcagcacacggagccaaggccacga

SEQ ID NO: 3917256 - DNA, 25 bp, Homo sapien
tactgatggcagcttcgtcagcaca

SEQ ID NO: 3917257 - DNA, 25 bp, Homo sapien
aggccacgaccaggtccaggacaga

SEQ ID NO: 3917258 - DNA, 25 bp, Homo sapien
gccggatggtggagtatagcttact

SEQ ID NO: 3917259 - DNA, 25 bp, Homo sapien
cagggtcgagcaccttctcactggc

SEQ ID NO: 3917260 - DNA, 25 bp, Homo sapien
gctggcagggtcgagcaccttctca

SEQ ID NO: 3917261 - DNA, 25 bp, Homo sapien
tggcagggtcgagcaccttctcact

SEQ ID NO: 3917262 - DNA, 25 bp, Homo sapien
gcagggtcgagcaccttctcactgg

SEQ ID NO: 3917263 - DNA, 25 bp, Homo sapien
tgtcagtgatggtgaggtaagttct

SEQ ID NO: 3917264 - DNA, 25 bp, Homo sapien
gttcttggcaaagcgactcacttca

SEQ ID NO: 3917265 - DNA, 25 bp, Homo sapien
cccatacaggttgaagaggatcggc

SEQ ID NO: 3917266 - DNA, 25 bp, Homo sapien
ttctgatggtttccagcacagcccg

SEQ ID NO: 3917267 - DNA, 25 bp, Homo sapien
ggagccagcaaagttatcccctggg

SEQ ID NO: 3917268 - DNA, 25 bp, Homo sapien
ggcacaggagctgactgtgcctcag

SEQ ID NO: 3917269 - DNA, 25 bp, Homo sapien
ggcccatggtcctcgatggctccaa

SEQ ID NO: 3917270 - DNA, 25 bp, Homo sapien
ggatgagctccagaggtgagtttct

SEQ ID NO: 3917271 - DNA, 25 bp, Homo sapien
cccttggtgatgagggtgcgcaggg

SEQ ID NO: 3917272 - DNA, 25 bp, Homo sapien
ctggcagcccttggtgatgagggtg

SEQ ID NO: 3917273 - DNA, 25 bp, Homo sapien
gcagcccttggtgatgagggtgcgc

SEQ ID NO: 3917274 - DNA, 25 bp, Homo sapien
agcccttggtgatgagggtgcgcag

SEQ ID NO: 3917275 - DNA, 25 bp, Homo sapien
cgtgccagccctttgaaggagatgg

SEQ ID NO: 3917276 - DNA, 25 bp, Homo sapien
cctcaggtctggacgctcgctgatg

SEQ ID NO: 3917277 - DNA, 25 bp, Homo sapien
ggtctggacgctcgctgatggccat

SEQ ID NO: 3917278 - DNA, 25 bp, Homo sapien
cagcgtccgtgccagccctttgaag

SEQ ID NO: 3917279 - DNA, 25 bp, Homo sapien
ctgtaggccttgtgcagaacccagg

SEQ ID NO: 3917280 - DNA, 25 bp, Homo sapien
ggccttgtgcagaacccaggcagga

SEQ ID NO: 3917281 - DNA, 25 bp, Homo sapien
gtaggccttgtgcagaacccaggca

SEQ ID NO: 3917282 - DNA, 25 bp, Homo sapien
ccttgtgcagaacccaggcaggagt

SEQ ID NO: 3917283 - DNA, 25 bp, Homo sapien
agtgtgtcgtagatcttagattcca

SEQ ID NO: 3917284 - DNA, 25 bp, Homo sapien
ctgtgctgcctgcctgagccaggtc

SEQ ID NO: 3917285 - DNA, 25 bp, Homo sapien
ctgcctgcctgagccaggtccatgg

SEQ ID NO: 3917286 - DNA, 25 bp, Homo sapien
tgctgcctgcctgagccaggtccat

SEQ ID NO: 3917287 - DNA, 25 bp, Homo sapien
tgtgctgcctgcctgagccaggtcc

SEQ ID NO: 3917288 - DNA, 25 bp, Homo sapien
aatcaatctcaagggcttgcatgag

SEQ ID NO: 3917289 - DNA, 25 bp, Homo sapien
tgttgccaaacgtcttgaaggctgg

SEQ ID NO: 3917290 - DNA, 25 bp, Homo sapien
aagaaggggcacagctgttctctgt

SEQ ID NO: 3917291 - DNA, 25 bp, Homo sapien
cccaatcccttctgtggaggttcca

SEQ ID NO: 3917292 - DNA, 25 bp, Homo sapien
caagtcgcgtttcctgaacatggtc

SEQ ID NO: 3917293 - DNA, 25 bp, Homo sapien
catggtctcggatgacaggcagcag

SEQ ID NO: 3917294 - DNA, 25 bp, Homo sapien
aaaccaagtcgcgtttcctgaacat

SEQ ID NO: 3917295 - DNA, 25 bp, Homo sapien
tcctgaacatggtctcggatgacag

SEQ ID NO: 3917296 - DNA, 25 bp, Homo sapien
ctgcagcaccacctcaggtcccata

SEQ ID NO: 3917297 - DNA, 25 bp, Homo sapien
aggtcccatactggtcaccgcagcc

SEQ ID NO: 3917298 - DNA, 25 bp, Homo sapien
ccccactgcctggtcaagagccgcc

SEQ ID NO: 3917299 - DNA, 25 bp, Homo sapien
ctgcctggtcaagagccgccgtgtg

SEQ ID NO: 3917300 - DNA, 25 bp, Homo sapien
cacggagctccaggccgcatggaat

SEQ ID NO: 3917301 - DNA, 25 bp, Homo sapien
acagcagctgcaacacggagctcca

SEQ ID NO: 3917302 - DNA, 25 bp, Homo sapien
gcatggaatttgtacgtcaggccct

SEQ ID NO: 3917303 - DNA, 25 bp, Homo sapien
acacgcctcgaagaagacacacagc

SEQ ID NO: 3917304 - DNA, 25 bp, Homo sapien
gtggggagccacgcattccttcagg

SEQ ID NO: 3917305 - DNA, 25 bp, Homo sapien
aggaggtcacggagccaatgtcagc

SEQ ID NO: 3917306 - DNA, 25 bp, Homo sapien
ccgaggaggtcacggagccaatgtc

SEQ ID NO: 3917307 - DNA, 25 bp, Homo sapien
gaggccgaggaggtcacggagccaa

SEQ ID NO: 3917308 - DNA, 25 bp, Homo sapien
cagttccaaaaaagcgagggaggtg

SEQ ID NO: 3917309 - DNA, 25 bp, Homo sapien
gaaaggaggcaggtcaccgcagttc

SEQ ID NO: 3917310 - DNA, 25 bp, Homo sapien
ttgaggctctgcgtagcagcagtca

SEQ ID NO: 3917311 - DNA, 25 bp, Homo sapien
cagcagtcagcacttgcgagtgtgg

SEQ ID NO: 3917312 - DNA, 25 bp, Homo sapien
accccgaaccttggcagccaggaca

SEQ ID NO: 3917313 - DNA, 25 bp, Homo sapien
ccaacttcggcagcctggacggagg

SEQ ID NO: 3917314 - DNA, 25 bp, Homo sapien
tcagcagctaggacggagaccctaa

SEQ ID NO: 3917315 - DNA, 25 bp, Homo sapien
gcctggacaagaggtcctaaagacc

SEQ ID NO: 3917316 - DNA, 25 bp, Homo sapien
agaggctctgagaactctgcaacct

SEQ ID NO: 3917317 - DNA, 25 bp, Homo sapien
atgaccttaagccaggctagcaggg

SEQ ID NO: 3917318 - DNA, 25 bp, Homo sapien
ttgtaaatcattctcactgggaaca

SEQ ID NO: 3917319 - DNA, 25 bp, Homo sapien
cactgggaacatagtcgtacagggc

SEQ ID NO: 3917320 - DNA, 25 bp, Homo sapien
ggctagcaggggttgtaaatcattc

SEQ ID NO: 3917321 - DNA, 25 bp, Homo sapien
tgatctgggcgttgagctctgctga

SEQ ID NO: 3917322 - DNA, 25 bp, Homo sapien
gatgatctgggcgttgagctctgct

SEQ ID NO: 3917323 - DNA, 25 bp, Homo sapien
tctgggcgttgagctctgctgacag

SEQ ID NO: 3917324 - DNA, 25 bp, Homo sapien
cgtgatgatctgggcgttgagctct

SEQ ID NO: 3917325 - DNA, 25 bp, Homo sapien
accaggccttccgggaagcagggca

SEQ ID NO: 3917326 - DNA, 25 bp, Homo sapien
tccttcagcagcgtcagcatgtgca

SEQ ID NO: 3917327 - DNA, 25 bp, Homo sapien
tgaccctgaggagagtctcactgca

SEQ ID NO: 3917328 - DNA, 25 bp, Homo sapien
atggctcaaggtcatgaccctgagg

SEQ ID NO: 3917329 - DNA, 25 bp, Homo sapien
gaggactgagcatactccatgctgg

SEQ ID NO: 3917330 - DNA, 25 bp, Homo sapien
gaaatggcagcaggatgatgggcag

SEQ ID NO: 3917331 - DNA, 25 bp, Homo sapien
tgcccttgaggactgagcatactcc

SEQ ID NO: 3917332 - DNA, 25 bp, Homo sapien
ccttgaggactgagcatactccatg

SEQ ID NO: 3917333 - DNA, 25 bp, Homo sapien
acattcagccaattatctctatttc

SEQ ID NO: 3917334 - DNA, 25 bp, Homo sapien
ccacattcagccaattatctctatt

SEQ ID NO: 3917335 - DNA, 25 bp, Homo sapien
tcagccaattatctctatttcatag

SEQ ID NO: 3917336 - DNA, 25 bp, Homo sapien
ccaattatctctatttcatagtcag

SEQ ID NO: 3917337 - DNA, 25 bp, Homo sapien
gcagcccatggtacacctgaagggt

SEQ ID NO: 3917338 - DNA, 25 bp, Homo sapien
ggcttgggatgcaccgtgaagctca

SEQ ID NO: 3917339 - DNA, 25 bp, Homo sapien
catggtacacctgaagggtcacggg

SEQ ID NO: 3917340 - DNA, 25 bp, Homo sapien
tcttgcttccgcagaagggtggcca

SEQ ID NO: 3917341 - DNA, 25 bp, Homo sapien
tggaggtatcagagaacttcttaat

SEQ ID NO: 3917342 - DNA, 25 bp, Homo sapien
ttggaggtatcagagaacttcttaa

SEQ ID NO: 3917343 - DNA, 25 bp, Homo sapien
gtatcagagaacttcttaataagca

SEQ ID NO: 3917344 - DNA, 25 bp, Homo sapien
gaggtatcagagaacttcttaataa

SEQ ID NO: 3917345 - DNA, 25 bp, Homo sapien
caatgcaacctccacattctgtgtt

SEQ ID NO: 3917346 - DNA, 25 bp, Homo sapien
gcgtccagccatgacttttaatttt

SEQ ID NO: 3917347 - DNA, 25 bp, Homo sapien
actgcgtccagccatgacttttaat

SEQ ID NO: 3917348 - DNA, 25 bp, Homo sapien
cactgcgtccagccatgacttttaa

SEQ ID NO: 3917349 - DNA, 25 bp, Homo sapien
gccacagcatgtagcctacccagct

SEQ ID NO: 3917350 - DNA, 25 bp, Homo sapien
cacagcatgtagcctacccagctaa

SEQ ID NO: 3917351 - DNA, 25 bp, Homo sapien
cagcatgtagcctacccagctaatt

SEQ ID NO: 3917352 - DNA, 25 bp, Homo sapien
gagccacagcatgtagcctacccag

SEQ ID NO: 3917353 - DNA, 25 bp, Homo sapien
gcacacttgattctgtcatgaacac

SEQ ID NO: 3917354 - DNA, 25 bp, Homo sapien
ctcaataaggaaagcacacttgatt

SEQ ID NO: 3917355 - DNA, 25 bp, Homo sapien
taaggaaagcacacttgattctgtc

SEQ ID NO: 3917356 - DNA, 25 bp, Homo sapien
caataaggaaagcacacttgattct

SEQ ID NO: 3917357 - DNA, 25 bp, Homo sapien
ggaagcactgcaggccctatagaca

SEQ ID NO: 3917358 - DNA, 25 bp, Homo sapien
tagatctcacagcacgagctcctga

SEQ ID NO: 3917359 - DNA, 25 bp, Homo sapien
cgacggtatgtcacatgctggccca

SEQ ID NO: 3917360 - DNA, 25 bp, Homo sapien
tagttagagtttctcactagaggcc

SEQ ID NO: 3917361 - DNA, 25 bp, Homo sapien
ggactccactgcttccattgttgtc

SEQ ID NO: 3917362 - DNA, 25 bp, Homo sapien
cggggactccactgcttccattgtt

SEQ ID NO: 3917363 - DNA, 25 bp, Homo sapien
gggactccactgcttccattgttgt

SEQ ID NO: 3917364 - DNA, 25 bp, Homo sapien
cagcaggtaagcaacggcggccagg

SEQ ID NO: 3917365 - DNA, 25 bp, Homo sapien
gccagattgagggggtttgaatgga

SEQ ID NO: 3917366 - DNA, 25 bp, Homo sapien
cagattgagggggtttgaatggata

SEQ ID NO: 3917367 - DNA, 25 bp, Homo sapien
gggccagattgagggggtttgaatg

SEQ ID NO: 3917368 - DNA, 25 bp, Homo sapien
agggccagattgagggggtttgaat

SEQ ID NO: 3917369 - DNA, 25 bp, Homo sapien
gcagaacagttgtgactgagaacca

SEQ ID NO: 3917370 - DNA, 25 bp, Homo sapien
cattgtgtggttttgggctagtaat

SEQ ID NO: 3917371 - DNA, 25 bp, Homo sapien
ccacggtatcagaggttcagatcct

SEQ ID NO: 3917372 - DNA, 25 bp, Homo sapien
tgtaaagtagggatactaatgctac

SEQ ID NO: 3917373 - DNA, 25 bp, Homo sapien
ttccctccctgggagcgaatcacct

SEQ ID NO: 3917374 - DNA, 25 bp, Homo sapien
ctgggagcgaatcacctcagtgaca

SEQ ID NO: 3917375 - DNA, 25 bp, Homo sapien
gcagcgaagtactcagtctccgtct

SEQ ID NO: 3917376 - DNA, 25 bp, Homo sapien
agagcagcgaagtactcagtctccg

SEQ ID NO: 3917377 - DNA, 25 bp, Homo sapien
tccttgtgggcagccgagttggact

SEQ ID NO: 3917378 - DNA, 25 bp, Homo sapien
ccttgtgggcagccgagttggactc

SEQ ID NO: 3917379 - DNA, 25 bp, Homo sapien
gcttttgcccaagcgcaaggaccct

SEQ ID NO: 3917380 - DNA, 25 bp, Homo sapien
cactcaggaaggtacccgaggactt

SEQ ID NO: 3917381 - DNA, 25 bp, Homo sapien
taacttcacagcatcgactgtcagg

SEQ ID NO: 3917382 - DNA, 25 bp, Homo sapien
tttgtgcagtcggaaaggccactca

SEQ ID NO: 3917383 - DNA, 25 bp, Homo sapien
ctgacggccggctgaagaagcggct

SEQ ID NO: 3917384 - DNA, 25 bp, Homo sapien
cggcctgacggtggcggcagatggc

SEQ ID NO: 3917385 - DNA, 25 bp, Homo sapien
gcagatggcggggttgctgtcgctg

SEQ ID NO: 3917386 - DNA, 25 bp, Homo sapien
aagcggctgcgggcggcctgacggt

SEQ ID NO: 3917387 - DNA, 25 bp, Homo sapien
cagaaggcaactttcccgagcgacc

SEQ ID NO: 3917388 - DNA, 25 bp, Homo sapien
accagaaggcaactttcccgagcga

SEQ ID NO: 3917389 - DNA, 25 bp, Homo sapien
ctgagacaccagaaggcaactttcc

SEQ ID NO: 3917390 - DNA, 25 bp, Homo sapien
gacaccagaaggcaactttcccgag

SEQ ID NO: 3917391 - DNA, 25 bp, Homo sapien
agccgtggcgaggaatgagcttaaa

SEQ ID NO: 3917392 - DNA, 25 bp, Homo sapien
tgagcttaaatgaccggcttccagg

SEQ ID NO: 3917393 - DNA, 25 bp, Homo sapien
ttgactaagccgtggcgaggaatga

SEQ ID NO: 3917394 - DNA, 25 bp, Homo sapien
gacgtagaaacacgctcagaaccca

SEQ ID NO: 3917395 - DNA, 25 bp, Homo sapien
tggcgtcacttccggattcgtgtgc

SEQ ID NO: 3917396 - DNA, 25 bp, Homo sapien
gcgtcacttccggattcgtgtgcat

SEQ ID NO: 3917397 - DNA, 25 bp, Homo sapien
gtggataccctgtagccttcacttc

SEQ ID NO: 3917398 - DNA, 25 bp, Homo sapien
ggataccctgtagccttcacttcct

SEQ ID NO: 3917399 - DNA, 25 bp, Homo sapien
acagtcaacatccggttttacacct

SEQ ID NO: 3917400 - DNA, 25 bp, Homo sapien
tcaacatccggttttacacctcctc

SEQ ID NO: 3917401 - DNA, 25 bp, Homo sapien
ggaggagctccaaggagatccgttg

SEQ ID NO: 3917402 - DNA, 25 bp, Homo sapien
cctggcttcggatggggaggagctc

SEQ ID NO: 3917403 - DNA, 25 bp, Homo sapien
agaatgacacgtgaaggctagcggt

SEQ ID NO: 3917404 - DNA, 25 bp, Homo sapien
cacgatgtgtttgctctagatgcag

SEQ ID NO: 3917405 - DNA, 25 bp, Homo sapien
tcactgatgtgtcggaaactgctgc

SEQ ID NO: 3917406 - DNA, 25 bp, Homo sapien
ttgaaactaagaatgtggcagcggg

SEQ ID NO: 3917407 - DNA, 25 bp, Homo sapien
tctgaagaagggtaacttcggctgg

SEQ ID NO: 3917408 - DNA, 25 bp, Homo sapien
gcatttgcaatctaagacgacgctg

SEQ ID NO: 3917409 - DNA, 25 bp, Homo sapien
atgacttagcatccctgtatcaagg

SEQ ID NO: 3917410 - DNA, 25 bp, Homo sapien
caggcttgctgaattttccccagaa

SEQ ID NO: 3917411 - DNA, 25 bp, Homo sapien
cgcaggctgccggagagccctcctc

SEQ ID NO: 3917412 - DNA, 25 bp, Homo sapien
tccttgaggaagccgcaggctgccg

SEQ ID NO: 3917413 - DNA, 25 bp, Homo sapien
cctctttcttttccggcagcaccag

SEQ ID NO: 3917414 - DNA, 25 bp, Homo sapien
gagccctcctctttcttttccggca

SEQ ID NO: 3917415 - DNA, 25 bp, Homo sapien
cagctgagccgggagatctgaacat

SEQ ID NO: 3917416 - DNA, 25 bp, Homo sapien
gggcagtcaaagtccctgaagcact

SEQ ID NO: 3917417 - DNA, 25 bp, Homo sapien
tgagtcttgaggcatcatctgggct

SEQ ID NO: 3917418 - DNA, 25 bp, Homo sapien
gctcactctaaatctgggccttcaa

SEQ ID NO: 3917419 - DNA, 25 bp, Homo sapien
tggagaggcctttattagcctaagg

SEQ ID NO: 3917420 - DNA, 25 bp, Homo sapien
tggagggtaaaagggctgtgactct

SEQ ID NO: 3917421 - DNA, 25 bp, Homo sapien
ggctggagaggcctttattagccta

SEQ ID NO: 3917422 - DNA, 25 bp, Homo sapien
agggctgtgactcttggttggcttc

SEQ ID NO: 3917423 - DNA, 25 bp, Homo sapien
caatcataacttagcggggctcaag

SEQ ID NO: 3917424 - DNA, 25 bp, Homo sapien
tgcaatcataacttagcggggctca

SEQ ID NO: 3917425 - DNA, 25 bp, Homo sapien
gcaatcataacttagcggggctcaa

SEQ ID NO: 3917426 - DNA, 25 bp, Homo sapien
aatcataacttagcggggctcaagc

SEQ ID NO: 3917427 - DNA, 25 bp, Homo sapien
tgggaaagggtagaacaaggagctc

SEQ ID NO: 3917428 - DNA, 25 bp, Homo sapien
gatctgtaactgactgtgaacaatc

SEQ ID NO: 3917429 - DNA, 25 bp, Homo sapien
gcagtagtgagaaggtgggaaaggg

SEQ ID NO: 3917430 - DNA, 25 bp, Homo sapien
ctgactgtgaacaatcagttgagat

SEQ ID NO: 3917431 - DNA, 25 bp, Homo sapien
taataaatctcaggtaggcccggtg

SEQ ID NO: 3917432 - DNA, 25 bp, Homo sapien
gggagtctaccaagggcaaaggcat

SEQ ID NO: 3917433 - DNA, 25 bp, Homo sapien
caaaggcatcatcctaagtgcaggt

SEQ ID NO: 3917434 - DNA, 25 bp, Homo sapien
tttccaaggccagtggtgcagatgc

SEQ ID NO: 3917435 - DNA, 25 bp, Homo sapien
tgaacttgagtttccgagagcatct

SEQ ID NO: 3917436 - DNA, 25 bp, Homo sapien
aaggctttgcttaggtgggtatgaa

SEQ ID NO: 3917437 - DNA, 25 bp, Homo sapien
agttgagtgactcatggcaggcccc

SEQ ID NO: 3917438 - DNA, 25 bp, Homo sapien
gaaaacacggtaggagtcaggctag

SEQ ID NO: 3917439 - DNA, 25 bp, Homo sapien
gtgacagtgcagactaggccactgg

SEQ ID NO: 3917440 - DNA, 25 bp, Homo sapien
agctgcacctcatcccagtcacctc

SEQ ID NO: 3917441 - DNA, 25 bp, Homo sapien
cctctccagttactaaattccatct

SEQ ID NO: 3917442 - DNA, 25 bp, Homo sapien
tgcagactaggccactgggtggcct

SEQ ID NO: 3917443 - DNA, 25 bp, Homo sapien
cattccagtgttgctgtgaagttgc

SEQ ID NO: 3917444 - DNA, 25 bp, Homo sapien
ctgtcattccagtgttgctgtgaag

SEQ ID NO: 3917445 - DNA, 25 bp, Homo sapien
ttccagtgttgctgtgaagttgctg

SEQ ID NO: 3917446 - DNA, 25 bp, Homo sapien
tgtcattccagtgttgctgtgaagt

SEQ ID NO: 3917447 - DNA, 25 bp, Homo sapien
cgagcacttccaggtacccggtatt

SEQ ID NO: 3917448 - DNA, 25 bp, Homo sapien
cacttccaggtacccggtatttatg

SEQ ID NO: 3917449 - DNA, 25 bp, Homo sapien
ggtacccggtatttatgatcacatt

SEQ ID NO: 3917450 - DNA, 25 bp, Homo sapien
tccaggtacccggtatttatgatca

SEQ ID NO: 3917451 - DNA, 25 bp, Homo sapien
gagaaccgcttcagcggctggtacg

SEQ ID NO: 3917452 - DNA, 25 bp, Homo sapien
gagcgcatggaacctggagaaccgc

SEQ ID NO: 3917453 - DNA, 25 bp, Homo sapien
cgggccacgaggaggcgaagcgcgg

SEQ ID NO: 3917454 - DNA, 25 bp, Homo sapien
tggtacgacgccgacctgagcccgg

SEQ ID NO: 3917455 - DNA, 25 bp, Homo sapien
tcagtgcagaagagagcgatccgga

SEQ ID NO: 3917456 - DNA, 25 bp, Homo sapien
ggtctaaccggtctcaataaagcag

SEQ ID NO: 3917457 - DNA, 25 bp, Homo sapien
tctggaggcgctcctatgatgtccc

SEQ ID NO: 3917458 - DNA, 25 bp, Homo sapien
aactgctgcaaagcatggtgaggcc

SEQ ID NO: 3917459 - DNA, 25 bp, Homo sapien
gaatcggcatctattccccaggtga

SEQ ID NO: 3917460 - DNA, 25 bp, Homo sapien
cagaggcgccctcaaggaaggataa

SEQ ID NO: 3917461 - DNA, 25 bp, Homo sapien
tgcagaatagtgacagctggacccc

SEQ ID NO: 3917462 - DNA, 25 bp, Homo sapien
gaaaatcctccttagcttgccaagc

SEQ ID NO: 3917463 - DNA, 25 bp, Homo sapien
tgtctgtccccatgagcggagtctg

SEQ ID NO: 3917464 - DNA, 25 bp, Homo sapien
gaaaagctccccttatccaacagag

SEQ ID NO: 3917465 - DNA, 25 bp, Homo sapien
tgctaagccatgaccagtgaggaga

SEQ ID NO: 3917466 - DNA, 25 bp, Homo sapien
taacctgcgtggtgatgtgacaact

SEQ ID NO: 3917467 - DNA, 25 bp, Homo sapien
gccacccactggatgagggatatta

SEQ ID NO: 3917468 - DNA, 25 bp, Homo sapien
gttcactggactacaagaaatccca

SEQ ID NO: 3917469 - DNA, 25 bp, Homo sapien
gctagtgcaaacaaatgaaggttct

SEQ ID NO: 3917470 - DNA, 25 bp, Homo sapien
tctggtaggaacaagtaacaccctc

SEQ ID NO: 3917471 - DNA, 25 bp, Homo sapien
catgctatctgtatcaccacgtgtc

SEQ ID NO: 3917472 - DNA, 25 bp, Homo sapien
gaagtactgaaatgtcctgacacca

SEQ ID NO: 3917473 - DNA, 25 bp, Homo sapien
aatcacaatgtacctaaatgaaggg

SEQ ID NO: 3917474 - DNA, 25 bp, Homo sapien
gggacgtatgtaaagcacctgactc

SEQ ID NO: 3917475 - DNA, 25 bp, Homo sapien
tcttggtgttatactcaggaacagc

SEQ ID NO: 3917476 - DNA, 25 bp, Homo sapien
aaacatgttccatctacagcgtaaa

SEQ ID NO: 3917477 - DNA, 25 bp, Homo sapien
tggccgacgccaggtgtttgaataa

SEQ ID NO: 3917478 - DNA, 25 bp, Homo sapien
ccactgataggttcacagaaacatg

SEQ ID NO: 3917479 - DNA, 25 bp, Homo sapien
ctactttccggaattctttagtgtg

SEQ ID NO: 3917480 - DNA, 25 bp, Homo sapien
catctcacaccagctgatgggaacc

SEQ ID NO: 3917481 - DNA, 25 bp, Homo sapien
caagaattcgggttgtactcgggct

SEQ ID NO: 3917482 - DNA, 25 bp, Homo sapien
gggtcttagggcactgcatctcaca

SEQ ID NO: 3917483 - DNA, 25 bp, Homo sapien
tactgaacctcaactcataaagaaa

SEQ ID NO: 3917484 - DNA, 25 bp, Homo sapien
gaagtgccaccaagcttcctactga

SEQ ID NO: 3917485 - DNA, 25 bp, Homo sapien
gctgggtatgaagctgaagtgccac

SEQ ID NO: 3917486 - DNA, 25 bp, Homo sapien
gcgactcctcttttatgctgggtat

SEQ ID NO: 3917487 - DNA, 25 bp, Homo sapien
gttagcaggtagttggactgtgcat

SEQ ID NO: 3917488 - DNA, 25 bp, Homo sapien
agcaggtagttggactgtgcatcac

SEQ ID NO: 3917489 - DNA, 25 bp, Homo sapien
tctcggcggtggttagcaggtagtt

SEQ ID NO: 3917490 - DNA, 25 bp, Homo sapien
actcccagctcgttctcggcggtgg

SEQ ID NO: 3917491 - DNA, 25 bp, Homo sapien
cacataacaccggtgaaggaaaatg

SEQ ID NO: 3917492 - DNA, 25 bp, Homo sapien
taacaccggtgaaggaaaatgagga

SEQ ID NO: 3917493 - DNA, 25 bp, Homo sapien
ctagtcacataacaccggtgaagga

SEQ ID NO: 3917494 - DNA, 25 bp, Homo sapien
gaagtctgctgggaataaaggatac

SEQ ID NO: 3917495 - DNA, 25 bp, Homo sapien
tgggcggaaactcttataaatttca

SEQ ID NO: 3917496 - DNA, 25 bp, Homo sapien
ttttcagttgctcggacatcttcct

SEQ ID NO: 3917497 - DNA, 25 bp, Homo sapien
ctcaaaattctggtgtcctagtcta

SEQ ID NO: 3917498 - DNA, 25 bp, Homo sapien
tattccagttgctaaggtatatgtg

SEQ ID NO: 3917499 - DNA, 25 bp, Homo sapien
aaataggaattgtaactgttgctca

SEQ ID NO: 3917500 - DNA, 25 bp, Homo sapien
tactactaggggagaatcaaagcac

SEQ ID NO: 3917501 - DNA, 25 bp, Homo sapien
tcgaaaagagttcttaagaggcatg

SEQ ID NO: 3917502 - DNA, 25 bp, Homo sapien
caaagcgtgaattgatgctagagac

SEQ ID NO: 3917503 - DNA, 25 bp, Homo sapien
gtgtactttggcaaagcgtgaattg

SEQ ID NO: 3917504 - DNA, 25 bp, Homo sapien
cggatagttcctcgaaaagagttct

SEQ ID NO: 3917505 - DNA, 25 bp, Homo sapien
cttacaggttacaatagctcccaca

SEQ ID NO: 3917506 - DNA, 25 bp, Homo sapien
agtaactgggactctgtttctctca

SEQ ID NO: 3917507 - DNA, 25 bp, Homo sapien
ctctcactacagacaccactggaag

SEQ ID NO: 3917508 - DNA, 25 bp, Homo sapien
caggttacaatagctcccacatctg

SEQ ID NO: 3917509 - DNA, 25 bp, Homo sapien
cctccaaagttatactgcttccttc

SEQ ID NO: 3917510 - DNA, 25 bp, Homo sapien
tgcgccctgccgacaatttactctt

SEQ ID NO: 3917511 - DNA, 25 bp, Homo sapien
tgttacataatagcggctatgcttg

SEQ ID NO: 3917512 - DNA, 25 bp, Homo sapien
aagtgaatacttgcagagttttctc

SEQ ID NO: 3917513 - DNA, 25 bp, Homo sapien
caggactgttaagaacattcccaac

SEQ ID NO: 3917514 - DNA, 25 bp, Homo sapien
ggtttgcctgttacatgttctcaag

SEQ ID NO: 3917515 - DNA, 25 bp, Homo sapien
gtcacttctgctgactaggatgggt

SEQ ID NO: 3917516 - DNA, 25 bp, Homo sapien
tagaaagccccttgaatcagacagc

SEQ ID NO: 3917517 - DNA, 25 bp, Homo sapien
tagggcctgctttcacggacttaga

SEQ ID NO: 3917518 - DNA, 25 bp, Homo sapien
ggagctgccttgtgctatatacgga

SEQ ID NO: 3917519 - DNA, 25 bp, Homo sapien
tatatgatcctgagctaatcctgga

SEQ ID NO: 3917520 - DNA, 25 bp, Homo sapien
gaaagcttggcgcattaccgacact

SEQ ID NO: 3917521 - DNA, 25 bp, Homo sapien
ccacagcggcgatacggctagaaga

SEQ ID NO: 3917522 - DNA, 25 bp, Homo sapien
cagcagcacaaccaagcgagatcaa

SEQ ID NO: 3917523 - DNA, 25 bp, Homo sapien
gagttcgcatctgcttttgtcccaa

SEQ ID NO: 3917524 - DNA, 25 bp, Homo sapien
actagtgtgtggtggctaagtgcac

SEQ ID NO: 3917525 - DNA, 25 bp, Homo sapien
ctaaagacgcgtccgcagtgcccat

SEQ ID NO: 3917526 - DNA, 25 bp, Homo sapien
cagtgcccatgcctaaggactggaa

SEQ ID NO: 3917527 - DNA, 25 bp, Homo sapien
aacattgtaccactgaggcactaaa

SEQ ID NO: 3917528 - DNA, 25 bp, Homo sapien
gaactcaagggcagcctaagggaaa

SEQ ID NO: 3917529 - DNA, 25 bp, Homo sapien
gccattctcgctgctcttcatcaga

SEQ ID NO: 3917530 - DNA, 25 bp, Homo sapien
agcgacgaaaagatgtagccgtggc

SEQ ID NO: 3917531 - DNA, 25 bp, Homo sapien
tagccgtggcgggtgtaggtgccgc

SEQ ID NO: 3917532 - DNA, 25 bp, Homo sapien
agacagccggcaagcgacgaaaaga

SEQ ID NO: 3917533 - DNA, 25 bp, Homo sapien
gctgtaggccgtttagccttcttgc

SEQ ID NO: 3917534 - DNA, 25 bp, Homo sapien
aaaaatgctgcatcggtcacgggcc

SEQ ID NO: 3917535 - DNA, 25 bp, Homo sapien
gaaaaaatgctgcatcggtcacggg

SEQ ID NO: 3917536 - DNA, 25 bp, Homo sapien
acgggcccccagaagctgtaggccg

SEQ ID NO: 3917537 - DNA, 25 bp, Homo sapien
gggatgcagtatctcacaggtggcg

SEQ ID NO: 3917538 - DNA, 25 bp, Homo sapien
cggggatgcagtatctcacaggtgg

SEQ ID NO: 3917539 - DNA, 25 bp, Homo sapien
gatgcagtatctcacaggtggcgcc

SEQ ID NO: 3917540 - DNA, 25 bp, Homo sapien
tgcagtatctcacaggtggcgccat

SEQ ID NO: 3917541 - DNA, 25 bp, Homo sapien
taagacacgtgtcaattggtactct

SEQ ID NO: 3917542 - DNA, 25 bp, Homo sapien
ggcacagttccgcagtaagacacgt

SEQ ID NO: 3917543 - DNA, 25 bp, Homo sapien
cgatttctcattggccaaacccagg

SEQ ID NO: 3917544 - DNA, 25 bp, Homo sapien
ggatgaaaacgaagtcgatttctca

SEQ ID NO: 3917545 - DNA, 25 bp, Homo sapien
caggtaagggcgaagcctcggccct

SEQ ID NO: 3917546 - DNA, 25 bp, Homo sapien
tcggcaggcggcaggtaagggcgaa

SEQ ID NO: 3917547 - DNA, 25 bp, Homo sapien
aagggcgaagcctcggcccttgctc

SEQ ID NO: 3917548 - DNA, 25 bp, Homo sapien
tggggagtcggcaggcggcaggtaa

SEQ ID NO: 3917549 - DNA, 25 bp, Homo sapien
gagattgcaaacatcctgagagcag

SEQ ID NO: 3917550 - DNA, 25 bp, Homo sapien
gagagcagcgtctttgtccagatga

SEQ ID NO: 3917551 - DNA, 25 bp, Homo sapien
aacatcctgagagcagcgtctttgt

SEQ ID NO: 3917552 - DNA, 25 bp, Homo sapien
agagcagcgtctttgtccagatgac

SEQ ID NO: 3917553 - DNA, 25 bp, Homo sapien
gaaccaatccctccgcagatatggg

SEQ ID NO: 3917554 - DNA, 25 bp, Homo sapien
tgtgaacacaaggagattgagtccc

SEQ ID NO: 3917555 - DNA, 25 bp, Homo sapien
cctgcagcgctgaagaatttaggac

SEQ ID NO: 3917556 - DNA, 25 bp, Homo sapien
tggacagtccaaaagccacctagat

SEQ ID NO: 3917557 - DNA, 25 bp, Homo sapien
aatctgttagcgcatctgtgtcttc

SEQ ID NO: 3917558 - DNA, 25 bp, Homo sapien
tgatgaaactgtcatcgaaggaatc

SEQ ID NO: 3917559 - DNA, 25 bp, Homo sapien
tgtcatcgaaggaatctgttagcgc

SEQ ID NO: 3917560 - DNA, 25 bp, Homo sapien
gaaggaatctgttagcgcatctgtg

SEQ ID NO: 3917561 - DNA, 25 bp, Homo sapien
gagcagtgtctagagttcaagccaa

SEQ ID NO: 3917562 - DNA, 25 bp, Homo sapien
cagatgaggcttcaacgtgactaca

SEQ ID NO: 3917563 - DNA, 25 bp, Homo sapien
gaaagatgttctatgcctgtgagca

SEQ ID NO: 3917564 - DNA, 25 bp, Homo sapien
tagaggccctaagacagtaactgga

SEQ ID NO: 3917565 - DNA, 25 bp, Homo sapien
gatacagcactggagttggccacca

SEQ ID NO: 3917566 - DNA, 25 bp, Homo sapien
tctcaacagggcaaagataccaggc

SEQ ID NO: 3917567 - DNA, 25 bp, Homo sapien
ttgatcaaaaagagccagtgggcct

SEQ ID NO: 3917568 - DNA, 25 bp, Homo sapien
tgactagtacagctgagatcttggc

SEQ ID NO: 3917569 - DNA, 25 bp, Homo sapien
cagtgatgcctctggttatatgagg

SEQ ID NO: 3917570 - DNA, 25 bp, Homo sapien
aaaatttttggccaatccctgtcat

SEQ ID NO: 3917571 - DNA, 25 bp, Homo sapien
gctactgtcctggttaccctgaaaa

SEQ ID NO: 3917572 - DNA, 25 bp, Homo sapien
gatgcctctggttatatgaggcata

SEQ ID NO: 3917573 - DNA, 25 bp, Homo sapien
gagaccagtggtttccctgctttgg

SEQ ID NO: 3917574 - DNA, 25 bp, Homo sapien
gattgtcagaacagtctaggccagg

SEQ ID NO: 3917575 - DNA, 25 bp, Homo sapien
tacagccatgcaacagaggcctagc

SEQ ID NO: 3917576 - DNA, 25 bp, Homo sapien
tataaatgcaagagacccaggaccc

SEQ ID NO: 3917577 - DNA, 25 bp, Homo sapien
tcagctgccagggctccccaacaga

SEQ ID NO: 3917578 - DNA, 25 bp, Homo sapien
cagctgccagggctccccaacagaa

SEQ ID NO: 3917579 - DNA, 25 bp, Homo sapien
gctgccagggctccccaacagaaac

SEQ ID NO: 3917580 - DNA, 25 bp, Homo sapien
agctgccagggctccccaacagaaa

SEQ ID NO: 3917581 - DNA, 25 bp, Homo sapien
aggcaaaaagaaagttggcagcatt

SEQ ID NO: 3917582 - DNA, 25 bp, Homo sapien
aaaaagaaagttggcagcattagtg

SEQ ID NO: 3917583 - DNA, 25 bp, Homo sapien
ggcaaaaagaaagttggcagcatta

SEQ ID NO: 3917584 - DNA, 25 bp, Homo sapien
ctgtaggcaaaaagaaagttggcag

SEQ ID NO: 3917585 - DNA, 25 bp, Homo sapien
ttccttgcgcaccagtctcttcttg

SEQ ID NO: 3917586 - DNA, 25 bp, Homo sapien
tgacactgcttccttgcgcaccagt

SEQ ID NO: 3917587 - DNA, 25 bp, Homo sapien
tgcttccttgcgcaccagtctcttc

SEQ ID NO: 3917588 - DNA, 25 bp, Homo sapien
tccttgcgcaccagtctcttcttgt

SEQ ID NO: 3917589 - DNA, 25 bp, Homo sapien
tgagagcatgcatgcactgcagtgc

SEQ ID NO: 3917590 - DNA, 25 bp, Homo sapien
atgcactgcagtgcggcgatccgga

SEQ ID NO: 3917591 - DNA, 25 bp, Homo sapien
tgggcaggcgagtgagagcatgcat

SEQ ID NO: 3917592 - DNA, 25 bp, Homo sapien
catgcatgcactgcagtgcggcgat

SEQ ID NO: 3917593 - DNA, 25 bp, Homo sapien
acgagggtgtccacgtgaagactca

SEQ ID NO: 3917594 - DNA, 25 bp, Homo sapien
aaacttggtgacgagggtgtccacg

SEQ ID NO: 3917595 - DNA, 25 bp, Homo sapien
gactcatgacttggggtgcttccag

SEQ ID NO: 3917596 - DNA, 25 bp, Homo sapien
ttcagaaacttggtgacgagggtgt

SEQ ID NO: 3917597 - DNA, 25 bp, Homo sapien
ctgcaccacacagtcagggcaggac

SEQ ID NO: 3917598 - DNA, 25 bp, Homo sapien
accacacagtcagggcaggacaggg

SEQ ID NO: 3917599 - DNA, 25 bp, Homo sapien
ccacacagtcagggcaggacagggc

SEQ ID NO: 3917600 - DNA, 25 bp, Homo sapien
gcaccacacagtcagggcaggacag

SEQ ID NO: 3917601 - DNA, 25 bp, Homo sapien
caagagtacaggcttgggcagcctg

SEQ ID NO: 3917602 - DNA, 25 bp, Homo sapien
tgttaagtacatgagaaagaccctt

SEQ ID NO: 3917603 - DNA, 25 bp, Homo sapien
gcttgggcagcctgttaagtacatg

SEQ ID NO: 3917604 - DNA, 25 bp, Homo sapien
ggcagctctggcaagagtacaggct

SEQ ID NO: 3917605 - DNA, 25 bp, Homo sapien
gaatctagaagtttagtcttctagg

SEQ ID NO: 3917606 - DNA, 25 bp, Homo sapien
gctctaaagaagcaagcgggcccta

SEQ ID NO: 3917607 - DNA, 25 bp, Homo sapien
ggcacagaccacaatatagctctaa

SEQ ID NO: 3917608 - DNA, 25 bp, Homo sapien
ttatcttagggaatgtggccaagca

SEQ ID NO: 3917609 - DNA, 25 bp, Homo sapien
gcacatcagtgcagtcagacatgag

SEQ ID NO: 3917610 - DNA, 25 bp, Homo sapien
agcatggaagccctggaccaaagca

SEQ ID NO: 3917611 - DNA, 25 bp, Homo sapien
gaacatgatccgcacttcggcatgg

SEQ ID NO: 3917612 - DNA, 25 bp, Homo sapien
gaccaaagcaggcacattatctgtg

SEQ ID NO: 3917613 - DNA, 25 bp, Homo sapien
atctgagcactagggcctttgttac

SEQ ID NO: 3917614 - DNA, 25 bp, Homo sapien
gcaggagctgagaggatggtatctg

SEQ ID NO: 3917615 - DNA, 25 bp, Homo sapien
aggatggtatctgagcactagggcc

SEQ ID NO: 3917616 - DNA, 25 bp, Homo sapien
ccgggctgtaaggcaggagctgaga

SEQ ID NO: 3917617 - DNA, 25 bp, Homo sapien
gcaattggggaatgacactcaaacc

SEQ ID NO: 3917618 - DNA, 25 bp, Homo sapien
gagaaccctgagacatagatgttta

SEQ ID NO: 3917619 - DNA, 25 bp, Homo sapien
gggaatgacactcaaacccgagaac

SEQ ID NO: 3917620 - DNA, 25 bp, Homo sapien
tcaaacccgagaaccctgagacata

SEQ ID NO: 3917621 - DNA, 25 bp, Homo sapien
ctttgtccacagctagctgtaggaa

SEQ ID NO: 3917622 - DNA, 25 bp, Homo sapien
tagctgtaggaattcatccagctgc

SEQ ID NO: 3917623 - DNA, 25 bp, Homo sapien
aagagtgaaggcctgactacgacag

SEQ ID NO: 3917624 - DNA, 25 bp, Homo sapien
aggcctgactacgacagggcccaga

SEQ ID NO: 3917625 - DNA, 25 bp, Homo sapien
tgattggacacctgcataagagcct

SEQ ID NO: 3917626 - DNA, 25 bp, Homo sapien
ggtcttgacgcttttcccacgggca

SEQ ID NO: 3917627 - DNA, 25 bp, Homo sapien
tgggaggctccttacatagtctgat

SEQ ID NO: 3917628 - DNA, 25 bp, Homo sapien
ggtactataaagctctgcccaactg

SEQ ID NO: 3917629 - DNA, 25 bp, Homo sapien
gcaaagcacttggcagcagcggtgg

SEQ ID NO: 3917630 - DNA, 25 bp, Homo sapien
ctgtggcagcagctcagttccaaaa

SEQ ID NO: 3917631 - DNA, 25 bp, Homo sapien
tgtggcagcagctcagttccaaaag

SEQ ID NO: 3917632 - DNA, 25 bp, Homo sapien
ttcagcccggagtcaccttgtcaag

SEQ ID NO: 3917633 - DNA, 25 bp, Homo sapien
ccagtacatagtggcagcagggacc

SEQ ID NO: 3917634 - DNA, 25 bp, Homo sapien
tagcctgtggcaaatttcagcccgg

SEQ ID NO: 3917635 - DNA, 25 bp, Homo sapien
ccgggacggatgagaactaacttct

SEQ ID NO: 3917636 - DNA, 25 bp, Homo sapien
caaaggccataagcagtgcaatcag

SEQ ID NO: 3917637 - DNA, 25 bp, Homo sapien
gccataagcagtgcaatcagccgcc

SEQ ID NO: 3917638 - DNA, 25 bp, Homo sapien
aggccataagcagtgcaatcagccg

SEQ ID NO: 3917639 - DNA, 25 bp, Homo sapien
ccataagcagtgcaatcagccgcct

SEQ ID NO: 3917640 - DNA, 25 bp, Homo sapien
gacacgttgccatccaagaagaggg

SEQ ID NO: 3917641 - DNA, 25 bp, Homo sapien
tgctcgggaagctgttttcaggcag

SEQ ID NO: 3917642 - DNA, 25 bp, Homo sapien
ctggaatctgctcgggaagctgttt

SEQ ID NO: 3917643 - DNA, 25 bp, Homo sapien
tgtgtgtcacactctgggcagctaa

SEQ ID NO: 3917644 - DNA, 25 bp, Homo sapien
gtgggttgtagcagtgccaatgaca

SEQ ID NO: 3917645 - DNA, 25 bp, Homo sapien
tgtagcagtgccaatgacagacacc

SEQ ID NO: 3917646 - DNA, 25 bp, Homo sapien
accatggcagccaacacctcatcct

SEQ ID NO: 3917647 - DNA, 25 bp, Homo sapien
agcagtgccaatgacagacaccatg

SEQ ID NO: 3917648 - DNA, 25 bp, Homo sapien
tgaatgattgggttctgtcagcatc

SEQ ID NO: 3917649 - DNA, 25 bp, Homo sapien
tgcacacaatcacaagaccatgacg

SEQ ID NO: 3917650 - DNA, 25 bp, Homo sapien
cacaagaccatgacgggttcaagaa

SEQ ID NO: 3917651 - DNA, 25 bp, Homo sapien
cacaatcacaagaccatgacgggtt

SEQ ID NO: 3917652 - DNA, 25 bp, Homo sapien
tcactggattgtgcaaccatattcc

SEQ ID NO: 3917653 - DNA, 25 bp, Homo sapien
gctctgacagacagcaataacgtca

SEQ ID NO: 3917654 - DNA, 25 bp, Homo sapien
ggcaagcaggcaaggtatagctgtc

SEQ ID NO: 3917655 - DNA, 25 bp, Homo sapien
ggtatagctgtctggtggaaatacc

SEQ ID NO: 3917656 - DNA, 25 bp, Homo sapien
cagcccagtccgttggtggttattc

SEQ ID NO: 3917657 - DNA, 25 bp, Homo sapien
ttatgtatagctacagctagaacca

SEQ ID NO: 3917658 - DNA, 25 bp, Homo sapien
gactacagctccctattcagcccag

SEQ ID NO: 3917659 - DNA, 25 bp, Homo sapien
gagttgattctgttactcttatgta

SEQ ID NO: 3917660 - DNA, 25 bp, Homo sapien
ctccttgacgatgctgggatgtgtt

SEQ ID NO: 3917661 - DNA, 25 bp, Homo sapien
gcagaggcagtgtctccttgacgat

SEQ ID NO: 3917662 - DNA, 25 bp, Homo sapien
tgtgttgatacagctgacaaggctt

SEQ ID NO: 3917663 - DNA, 25 bp, Homo sapien
gcattgggtgggctcatctccgtta

SEQ ID NO: 3917664 - DNA, 25 bp, Homo sapien
caaaggtttactgtgtgataggaag

SEQ ID NO: 3917665 - DNA, 25 bp, Homo sapien
tgtgataggaagcacgaaggcccca

SEQ ID NO: 3917666 - DNA, 25 bp, Homo sapien
aggccccaaagccttgctggaaagg

SEQ ID NO: 3917667 - DNA, 25 bp, Homo sapien
cccatgagacaaaggtttactgtgt

SEQ ID NO: 3917668 - DNA, 25 bp, Homo sapien
ttcctgatgcttccagtgctgccac

SEQ ID NO: 3917669 - DNA, 25 bp, Homo sapien
cagggttcctgatgcttccagtgct

SEQ ID NO: 3917670 - DNA, 25 bp, Homo sapien
gcttgggtacgaggtggctgctgaa

SEQ ID NO: 3917671 - DNA, 25 bp, Homo sapien
gggttcctgatgcttccagtgctgc

SEQ ID NO: 3917672 - DNA, 25 bp, Homo sapien
gctcagtctgtacaggtgacccact

SEQ ID NO: 3917673 - DNA, 25 bp, Homo sapien
ctcagtctgtacaggtgacccactg

SEQ ID NO: 3917674 - DNA, 25 bp, Homo sapien
ccagtgagcacagctggtccttgaa

SEQ ID NO: 3917675 - DNA, 25 bp, Homo sapien
cagtgtacggatgccaacaagctga

SEQ ID NO: 3917676 - DNA, 25 bp, Homo sapien
aagactgtcagtgtacggatgccaa

SEQ ID NO: 3917677 - DNA, 25 bp, Homo sapien
gggtctgttagagccatgaatacca

SEQ ID NO: 3917678 - DNA, 25 bp, Homo sapien
tgcagcttcaagaaacccaggagca

SEQ ID NO: 3917679 - DNA, 25 bp, Homo sapien
gagcatttcaaggattgtccgccgc

SEQ ID NO: 3917680 - DNA, 25 bp, Homo sapien
ttcaaggattgtccgccgctggctg

SEQ ID NO: 3917681 - DNA, 25 bp, Homo sapien
caagaaacccaggagcatttcaagg

SEQ ID NO: 3917682 - DNA, 25 bp, Homo sapien
taaaacttagctcactctctgagaa

SEQ ID NO: 3917683 - DNA, 25 bp, Homo sapien
tatgttggcccaagctaaaacttag

SEQ ID NO: 3917684 - DNA, 25 bp, Homo sapien
ggagaatgatccttttatgtatgag

SEQ ID NO: 3917685 - DNA, 25 bp, Homo sapien
caaaacccaaggtctactatgttgg

SEQ ID NO: 3917686 - DNA, 25 bp, Homo sapien
cctgcaacagcttggcactaggcca

SEQ ID NO: 3917687 - DNA, 25 bp, Homo sapien
ggcagtacattgctggtgacagagt

SEQ ID NO: 3917688 - DNA, 25 bp, Homo sapien
tgttccagcagtaaaggcagtacat

SEQ ID NO: 3917689 - DNA, 25 bp, Homo sapien
ctgactgtgcttgtggaactgttcc

SEQ ID NO: 3917690 - DNA, 25 bp, Homo sapien
gaggccaaatggtgcctgactcccc

SEQ ID NO: 3917691 - DNA, 25 bp, Homo sapien
tcaattcaaagtagggctatcgccc

SEQ ID NO: 3917692 - DNA, 25 bp, Homo sapien
gagactgagacccatgacagtttgc

SEQ ID NO: 3917693 - DNA, 25 bp, Homo sapien
cagtttgcaagcagttaacactcaa

SEQ ID NO: 3917694 - DNA, 25 bp, Homo sapien
cccttcctggctgccacggccccat

SEQ ID NO: 3917695 - DNA, 25 bp, Homo sapien
tccccttcctggctgccacggcccc

SEQ ID NO: 3917696 - DNA, 25 bp, Homo sapien
ttcctggctgccacggccccattac

SEQ ID NO: 3917697 - DNA, 25 bp, Homo sapien
cttcctggctgccacggccccatta

SEQ ID NO: 3917698 - DNA, 25 bp, Homo sapien
acaaacacgcagtcagggagtggag

SEQ ID NO: 3917699 - DNA, 25 bp, Homo sapien
agcgagacaaacacgcagtcaggga

SEQ ID NO: 3917700 - DNA, 25 bp, Homo sapien
cacagagcgagacaaacacgcagtc

SEQ ID NO: 3917701 - DNA, 25 bp, Homo sapien
acccgctcacttgccgtctggaaca

SEQ ID NO: 3917702 - DNA, 25 bp, Homo sapien
caagtccttagtcacactcaggaca

SEQ ID NO: 3917703 - DNA, 25 bp, Homo sapien
aagtccttagtcacactcaggacag

SEQ ID NO: 3917704 - DNA, 25 bp, Homo sapien
tctctgcggatagaagcccaaaggc

SEQ ID NO: 3917705 - DNA, 25 bp, Homo sapien
ctctgcggatagaagcccaaaggct

SEQ ID NO: 3917706 - DNA, 25 bp, Homo sapien
ctctctgcggatagaagcccaaagg

SEQ ID NO: 3917707 - DNA, 25 bp, Homo sapien
tctgcggatagaagcccaaaggctg

SEQ ID NO: 3917708 - DNA, 25 bp, Homo sapien
cagagaagtaggagataaccctggt

SEQ ID NO: 3917709 - DNA, 25 bp, Homo sapien
taacttgtcaaaaggtagctgggtc

SEQ ID NO: 3917710 - DNA, 25 bp, Homo sapien
tcaggtcgacacaaaggcccaaatc

SEQ ID NO: 3917711 - DNA, 25 bp, Homo sapien
gatgggacacgacgatatgcagctg

SEQ ID NO: 3917712 - DNA, 25 bp, Homo sapien
ccaacttggcactcagaacctcaga

SEQ ID NO: 3917713 - DNA, 25 bp, Homo sapien
tctgtagagaatccaacttggcact

SEQ ID NO: 3917714 - DNA, 25 bp, Homo sapien
gaatccactttctcaatcaacaggg

SEQ ID NO: 3917715 - DNA, 25 bp, Homo sapien
tcagaatccactttctcaatcaaca

SEQ ID NO: 3917716 - DNA, 25 bp, Homo sapien
cacagcgcgaagactcaggatgagg

SEQ ID NO: 3917717 - DNA, 25 bp, Homo sapien
ctcagcaaatcgtggtgtagaagcc

SEQ ID NO: 3917718 - DNA, 25 bp, Homo sapien
agaagccagcacagcgcgaagactc

SEQ ID NO: 3917719 - DNA, 25 bp, Homo sapien
caaatcgtggtgtagaagccagcac

SEQ ID NO: 3917720 - DNA, 25 bp, Homo sapien
ggataccatggggatcattaggtgg

SEQ ID NO: 3917721 - DNA, 25 bp, Homo sapien
tggataccatggggatcattaggtg

SEQ ID NO: 3917722 - DNA, 25 bp, Homo sapien
gaacacaggctcgaacctggtaacc

SEQ ID NO: 3917723 - DNA, 25 bp, Homo sapien
ttgtgtaacatttcagaccaccttg

SEQ ID NO: 3917724 - DNA, 25 bp, Homo sapien
caccttgaacacaggctcgaacctg

SEQ ID NO: 3917725 - DNA, 25 bp, Homo sapien
taacatttcagaccaccttgaacac

SEQ ID NO: 3917726 - DNA, 25 bp, Homo sapien
caagacgacagactgaaaacatata

SEQ ID NO: 3917727 - DNA, 25 bp, Homo sapien
gtttctgtaccaagacgacagactg

SEQ ID NO: 3917728 - DNA, 25 bp, Homo sapien
taccaagacgacagactgaaaacat

SEQ ID NO: 3917729 - DNA, 25 bp, Homo sapien
tctgtaccaagacgacagactgaaa

SEQ ID NO: 3917730 - DNA, 25 bp, Homo sapien
gggctacagactcgaccaccacgcc

SEQ ID NO: 3917731 - DNA, 25 bp, Homo sapien
gcaggggctacagactcgaccacca

SEQ ID NO: 3917732 - DNA, 25 bp, Homo sapien
caggggctacagactcgaccaccac

SEQ ID NO: 3917733 - DNA, 25 bp, Homo sapien
aggggctacagactcgaccaccacg

SEQ ID NO: 3917734 - DNA, 25 bp, Homo sapien
taaaatcgatagggaaataacagga

SEQ ID NO: 3917735 - DNA, 25 bp, Homo sapien
aaaatcgatagggaaataacaggat

SEQ ID NO: 3917736 - DNA, 25 bp, Homo sapien
tcaaacaactcctccacaaagggtc

SEQ ID NO: 3917737 - DNA, 25 bp, Homo sapien
gacgatgcggaaggccaccagaaga

SEQ ID NO: 3917738 - DNA, 25 bp, Homo sapien
ggtgaagtcagctcctaggctcttt

SEQ ID NO: 3917739 - DNA, 25 bp, Homo sapien
gagatgaggtcatggacgatgcgga

SEQ ID NO: 3917740 - DNA, 25 bp, Homo sapien
caccagaagattacggggatccttt

SEQ ID NO: 3917741 - DNA, 25 bp, Homo sapien
gaaagtgtgggctttctcctagcct

SEQ ID NO: 3917742 - DNA, 25 bp, Homo sapien
gctcttctatataaccccaggtaaa

SEQ ID NO: 3917743 - DNA, 25 bp, Homo sapien
gaataaggttactatactgtcccac

SEQ ID NO: 3917744 - DNA, 25 bp, Homo sapien
ttccattccaagaaagtactcagtg

SEQ ID NO: 3917745 - DNA, 25 bp, Homo sapien
aaattggtgatgatattgtagactg

SEQ ID NO: 3917746 - DNA, 25 bp, Homo sapien
tcccgggttcgcataaaattggtga

SEQ ID NO: 3917747 - DNA, 25 bp, Homo sapien
tattgtagactgtgtgtcggtccac

SEQ ID NO: 3917748 - DNA, 25 bp, Homo sapien
ccgggttcgcataaaattggtgatg

SEQ ID NO: 3917749 - DNA, 25 bp, Homo sapien
gacacaggtcagatctaatggcatg

SEQ ID NO: 3917750 - DNA, 25 bp, Homo sapien
tctaatggcatgcacccctttcctt

SEQ ID NO: 3917751 - DNA, 25 bp, Homo sapien
caggtcagatctaatggcatgcacc

SEQ ID NO: 3917752 - DNA, 25 bp, Homo sapien
gtcagatctaatggcatgcacccct

SEQ ID NO: 3917753 - DNA, 25 bp, Homo sapien
ctgtacatgcacttcctggaagatg

SEQ ID NO: 3917754 - DNA, 25 bp, Homo sapien
ctgggggcagggccacacacaggct

SEQ ID NO: 3917755 - DNA, 25 bp, Homo sapien
taccgaaggaattgcagcatggcct

SEQ ID NO: 3917756 - DNA, 25 bp, Homo sapien
gggctcccttgaacaaagttatgta

SEQ ID NO: 3917757 - DNA, 25 bp, Homo sapien
ctctctagagggaaaacggaagtag

SEQ ID NO: 3917758 - DNA, 25 bp, Homo sapien
cactaatttagtcccacacttgggc

SEQ ID NO: 3917759 - DNA, 25 bp, Homo sapien
ccttcagccggttctcatagaacag

SEQ ID NO: 3917760 - DNA, 25 bp, Homo sapien
tgatggtccttcagccggttctcat

SEQ ID NO: 3917761 - DNA, 25 bp, Homo sapien
ccggttctcatagaacagtatcagg

SEQ ID NO: 3917762 - DNA, 25 bp, Homo sapien
aagatgatggtccttcagccggttc

SEQ ID NO: 3917763 - DNA, 25 bp, Homo sapien
taggcacgagaagggcccaagagct

SEQ ID NO: 3917764 - DNA, 25 bp, Homo sapien
cttccctaagtctataacagttgtt

SEQ ID NO: 3917765 - DNA, 25 bp, Homo sapien
cagattcagccattagttgacatag

SEQ ID NO: 3917766 - DNA, 25 bp, Homo sapien
tgttccttccctaagtctataacag

SEQ ID NO: 3917767 - DNA, 25 bp, Homo sapien
gtatctgtggcaggcggagttccct

SEQ ID NO: 3917768 - DNA, 25 bp, Homo sapien
tagctggtatctgtggcaggcggag

SEQ ID NO: 3917769 - DNA, 25 bp, Homo sapien
tggtatctgtggcaggcggagttcc

SEQ ID NO: 3917770 - DNA, 25 bp, Homo sapien
ctgtggcaggcggagttccctctct

SEQ ID NO: 3917771 - DNA, 25 bp, Homo sapien
atccaggaagacattcctattagtg

SEQ ID NO: 3917772 - DNA, 25 bp, Homo sapien
tgggctcagcaatccaggaagacat

SEQ ID NO: 3917773 - DNA, 25 bp, Homo sapien
ccaggaagacattcctattagtgac

SEQ ID NO: 3917774 - DNA, 25 bp, Homo sapien
acattcctattagtgacaccagtac

SEQ ID NO: 3917775 - DNA, 25 bp, Homo sapien
ggagcaaggtgtgacagtggagtag

SEQ ID NO: 3917776 - DNA, 25 bp, Homo sapien
gagcaaggtgtgacagtggagtagc

SEQ ID NO: 3917777 - DNA, 25 bp, Homo sapien
agcaaggtgtgacagtggagtagca

SEQ ID NO: 3917778 - DNA, 25 bp, Homo sapien
gcaaggtgtgacagtggagtagcac

SEQ ID NO: 3917779 - DNA, 25 bp, Homo sapien
ctggattgctcgtgcccgagttcgg

SEQ ID NO: 3917780 - DNA, 25 bp, Homo sapien
aaaagctggattgctcgtgcccgag

SEQ ID NO: 3917781 - DNA, 25 bp, Homo sapien
ccgagttcggggttctggattctct

SEQ ID NO: 3917782 - DNA, 25 bp, Homo sapien
gggttctggattctctagagaggac

SEQ ID NO: 3917783 - DNA, 25 bp, Homo sapien
cttgtaacactgtatagttgccaga

SEQ ID NO: 3917784 - DNA, 25 bp, Homo sapien
tgtaacactgtatagttgccagatt

SEQ ID NO: 3917785 - DNA, 25 bp, Homo sapien
caacttgtaacactgtatagttgcc

SEQ ID NO: 3917786 - DNA, 25 bp, Homo sapien
cacaacttgtaacactgtatagttg

SEQ ID NO: 3917787 - DNA, 25 bp, Homo sapien
ccactgcacctggccctaatttttg

SEQ ID NO: 3917788 - DNA, 25 bp, Homo sapien
cactgcacctggccctaatttttgt

SEQ ID NO: 3917789 - DNA, 25 bp, Homo sapien
aatcagtatctgtagagatgtctgt

SEQ ID NO: 3917790 - DNA, 25 bp, Homo sapien
cagtagccaagatctggtagcaacc

SEQ ID NO: 3917791 - DNA, 25 bp, Homo sapien
tctgtagagatgtctgtactcccat

SEQ ID NO: 3917792 - DNA, 25 bp, Homo sapien
tctggtagcaacctaagtgtcaaca

SEQ ID NO: 3917793 - DNA, 25 bp, Homo sapien
gtctcagaactccacggaagcctgg

SEQ ID NO: 3917794 - DNA, 25 bp, Homo sapien
gaaagtcttaaggaggacacccaga

SEQ ID NO: 3917795 - DNA, 25 bp, Homo sapien
caaacagcatggcttcgtggcgtga

SEQ ID NO: 3917796 - DNA, 25 bp, Homo sapien
taagctgtctgaactaagagatctc

SEQ ID NO: 3917797 - DNA, 25 bp, Homo sapien
cgaggccccatagggcacccatagg

SEQ ID NO: 3917798 - DNA, 25 bp, Homo sapien
ctcttgctgacccacgacgaagtcg

SEQ ID NO: 3917799 - DNA, 25 bp, Homo sapien
aagtcgtgcacgaggccccataggg

SEQ ID NO: 3917800 - DNA, 25 bp, Homo sapien
tgacccacgacgaagtcgtgcacga

SEQ ID NO: 3917801 - DNA, 25 bp, Homo sapien
tagggggcggtgctgtcggtcacat

SEQ ID NO: 3917802 - DNA, 25 bp, Homo sapien
gggcggtgctgtcggtcacatgcgc

SEQ ID NO: 3917803 - DNA, 25 bp, Homo sapien
tcaggcccagccctagggggcggtg

SEQ ID NO: 3917804 - DNA, 25 bp, Homo sapien
gcggtgctgtcggtcacatgcgcac

SEQ ID NO: 3917805 - DNA, 25 bp, Homo sapien
caccgcgagccggcggaagggagag

SEQ ID NO: 3917806 - DNA, 25 bp, Homo sapien
cgggcaccgcgagccggcggaaggg

SEQ ID NO: 3917807 - DNA, 25 bp, Homo sapien
ggcgcgggcaccgcgagccggcgga

SEQ ID NO: 3917808 - DNA, 25 bp, Homo sapien
gcgggcaccgcgagccggcggaagg

SEQ ID NO: 3917809 - DNA, 25 bp, Homo sapien
cgccgtccgctgagcagccgaccac

SEQ ID NO: 3917810 - DNA, 25 bp, Homo sapien
tttggcggagccatcgctggggctg

SEQ ID NO: 3917811 - DNA, 25 bp, Homo sapien
cctggcccgcaaagttttggcggag

SEQ ID NO: 3917812 - DNA, 25 bp, Homo sapien
cggccggagccattgacccgggacg

SEQ ID NO: 3917813 - DNA, 25 bp, Homo sapien
cggctgcgcgaccaactctctccaa

SEQ ID NO: 3917814 - DNA, 25 bp, Homo sapien
cccactggtgctggcgcttgggttt

SEQ ID NO: 3917815 - DNA, 25 bp, Homo sapien
ctgagttggggcaactgcgagcact

SEQ ID NO: 3917816 - DNA, 25 bp, Homo sapien
gaccaactctctccaactgggtagc

SEQ ID NO: 3917817 - DNA, 25 bp, Homo sapien
ggaatccgacttgcaaagcagcgca

SEQ ID NO: 3917818 - DNA, 25 bp, Homo sapien
cagatcgtgtctgcgggaatccgac

SEQ ID NO: 3917819 - DNA, 25 bp, Homo sapien
tttagagcctctcggccgtctggga

SEQ ID NO: 3917820 - DNA, 25 bp, Homo sapien
tgtgtcattatcgagctgcagatcg

SEQ ID NO: 3917821 - DNA, 25 bp, Homo sapien
ggaataatatcgtagacttgagagc

SEQ ID NO: 3917822 - DNA, 25 bp, Homo sapien
gacccgctgggaataatatcgtaga

SEQ ID NO: 3917823 - DNA, 25 bp, Homo sapien
acttgagagctcaaacttgtctgga

SEQ ID NO: 3917824 - DNA, 25 bp, Homo sapien
gtgttgcaaggacccgctgggaata

SEQ ID NO: 3917825 - DNA, 25 bp, Homo sapien
atcagagcctctttcgcacttgatg

SEQ ID NO: 3917826 - DNA, 25 bp, Homo sapien
ctcctctgtgaacttccaaggcact

SEQ ID NO: 3917827 - DNA, 25 bp, Homo sapien
cctctgtgaacttccaaggcactgc

SEQ ID NO: 3917828 - DNA, 25 bp, Homo sapien
gagcctctttcgcacttgatgagca

SEQ ID NO: 3917829 - DNA, 25 bp, Homo sapien
gcttgatatgtacaaccaactgggt

SEQ ID NO: 3917830 - DNA, 25 bp, Homo sapien
gtactgcactggttgaagccggaga

SEQ ID NO: 3917831 - DNA, 25 bp, Homo sapien
caaggtcgtcttatcttcattgccc

SEQ ID NO: 3917832 - DNA, 25 bp, Homo sapien
caaagctacttgaaccctttctggg

SEQ ID NO: 3917833 - DNA, 25 bp, Homo sapien
tggaaggattttggcaaggcagcct

SEQ ID NO: 3917834 - DNA, 25 bp, Homo sapien
aggagcccctccaggttcgctcagg

SEQ ID NO: 3917835 - DNA, 25 bp, Homo sapien
caaatacatggcttttccagttggg

SEQ ID NO: 3917836 - DNA, 25 bp, Homo sapien
gctccccaagcctggtgtcagcagg

SEQ ID NO: 3917837 - DNA, 25 bp, Homo sapien
ggcctgatggcacctcggatgctga

SEQ ID NO: 3917838 - DNA, 25 bp, Homo sapien
ctgatggcacctcggatgctgactg

SEQ ID NO: 3917839 - DNA, 25 bp, Homo sapien
ggccatggaggtgtgaggagccaca

SEQ ID NO: 3917840 - DNA, 25 bp, Homo sapien
gggccatggaggtgtgaggagccac

SEQ ID NO: 3917841 - DNA, 25 bp, Homo sapien
cagggagaggcagggcacctgggag

SEQ ID NO: 3917842 - DNA, 25 bp, Homo sapien
agaggcagggcacctgggagggcat

SEQ ID NO: 3917843 - DNA, 25 bp, Homo sapien
gggagaggcagggcacctgggaggg

SEQ ID NO: 3917844 - DNA, 25 bp, Homo sapien
ctgtgaccagggagaggcagggcac

SEQ ID NO: 3917845 - DNA, 25 bp, Homo sapien
gtctgctgtgaccttcttcccatag

SEQ ID NO: 3917846 - DNA, 25 bp, Homo sapien
cctgagggagatctcctttcccaaa

SEQ ID NO: 3917847 - DNA, 25 bp, Homo sapien
gatgcctggcactcatgagtggaag

SEQ ID NO: 3917848 - DNA, 25 bp, Homo sapien
gttcacttctaggtgcttggatgcc

SEQ ID NO: 3917849 - DNA, 25 bp, Homo sapien
ctgggacccgcctttcattccacag

SEQ ID NO: 3917850 - DNA, 25 bp, Homo sapien
cagatgtttgcgtcattggactgat

SEQ ID NO: 3917851 - DNA, 25 bp, Homo sapien
gttgtcaagtagctggccttgggct

SEQ ID NO: 3917852 - DNA, 25 bp, Homo sapien
tgggcttcagggatagcatgcacct

SEQ ID NO: 3917853 - DNA, 25 bp, Homo sapien
gaggctggcactagaatgggcttca

SEQ ID NO: 3917854 - DNA, 25 bp, Homo sapien
ggatacagagaggtgtgaggtggtc

SEQ ID NO: 3917855 - DNA, 25 bp, Homo sapien
gatacagagaggtgtgaggtggtcc

SEQ ID NO: 3917856 - DNA, 25 bp, Homo sapien
catgtaggagccatttggtgccagg

SEQ ID NO: 3917857 - DNA, 25 bp, Homo sapien
taggagccatttggtgccaggaata

SEQ ID NO: 3917858 - DNA, 25 bp, Homo sapien
gagccatttggtgccaggaataaga

SEQ ID NO: 3917859 - DNA, 25 bp, Homo sapien
catttggtgccaggaataagacaaa

SEQ ID NO: 3917860 - DNA, 25 bp, Homo sapien
ttgtgtagtctggaagcctattcgc

SEQ ID NO: 3917861 - DNA, 25 bp, Homo sapien
tgtgtagtctggaagcctattcgca

SEQ ID NO: 3917862 - DNA, 25 bp, Homo sapien
tttgtgtagtctggaagcctattcg

SEQ ID NO: 3917863 - DNA, 25 bp, Homo sapien
tgctcagatggagtatgcaggagcc

SEQ ID NO: 3917864 - DNA, 25 bp, Homo sapien
ccgaacagttgtgggcagatttgct

SEQ ID NO: 3917865 - DNA, 25 bp, Homo sapien
tctggactgttaagttagttgaaac

SEQ ID NO: 3917866 - DNA, 25 bp, Homo sapien
caaggatgggtgagacggtaaagaa

SEQ ID NO: 3917867 - DNA, 25 bp, Homo sapien
taatctcccttagatgtgtggctgg

SEQ ID NO: 3917868 - DNA, 25 bp, Homo sapien
cttggtgctaggacatcgcctgggc

SEQ ID NO: 3917869 - DNA, 25 bp, Homo sapien
ccaggtagctcagtaaagggtaact

SEQ ID NO: 3917870 - DNA, 25 bp, Homo sapien
gatgttcaagcccaagtctgcctga

SEQ ID NO: 3917871 - DNA, 25 bp, Homo sapien
gcaagcaggtggtacgtgacgggct

SEQ ID NO: 3917872 - DNA, 25 bp, Homo sapien
aggccaggcgtggtttcgggcctgg

SEQ ID NO: 3917873 - DNA, 25 bp, Homo sapien
aggtggtacgtgacgggctgcatgc

SEQ ID NO: 3917874 - DNA, 25 bp, Homo sapien
ccaggcaggccaggcgtggtttcgg

SEQ ID NO: 3917875 - DNA, 25 bp, Homo sapien
caaagtggctggtccatagtattat

SEQ ID NO: 3917876 - DNA, 25 bp, Homo sapien
ggctggtccatagtattatatgatt

SEQ ID NO: 3917877 - DNA, 25 bp, Homo sapien
gtgccaaagtggctggtccatagta

SEQ ID NO: 3917878 - DNA, 25 bp, Homo sapien
catcttgtgccaaagtggctggtcc

SEQ ID NO: 3917879 - DNA, 25 bp, Homo sapien
tatcaatagtggcacaagcatcaaa

SEQ ID NO: 3917880 - DNA, 25 bp, Homo sapien
tatatatactggaaacagttctcag

SEQ ID NO: 3917881 - DNA, 25 bp, Homo sapien
ggactgtggcaatcttttgtcttac

SEQ ID NO: 3917882 - DNA, 25 bp, Homo sapien
gatcatgggaggcttaaaatgggtc

SEQ ID NO: 3917883 - DNA, 25 bp, Homo sapien
gctcttgctgttgggtgtaatagat

SEQ ID NO: 3917884 - DNA, 25 bp, Homo sapien
gtctaacttttatgatcctctagta

SEQ ID NO: 3917885 - DNA, 25 bp, Homo sapien
atgaaaagctcttgctgttgggtgt

SEQ ID NO: 3917886 - DNA, 25 bp, Homo sapien
aaagctcttgctgttgggtgtaata

SEQ ID NO: 3917887 - DNA, 25 bp, Homo sapien
ggcggtatgtgacaggggatgcatg

SEQ ID NO: 3917888 - DNA, 25 bp, Homo sapien
caagcaggcggtatgtgacagggga

SEQ ID NO: 3917889 - DNA, 25 bp, Homo sapien
caggcggtatgtgacaggggatgca

SEQ ID NO: 3917890 - DNA, 25 bp, Homo sapien
aagcaggcggtatgtgacaggggat

SEQ ID NO: 3917891 - DNA, 25 bp, Homo sapien
ggctgccgcctatgctgctgaagcc

SEQ ID NO: 3917892 - DNA, 25 bp, Homo sapien
gctgaagccaacgaccacgagctgg

SEQ ID NO: 3917893 - DNA, 25 bp, Homo sapien
ctgccgcctatgctgctgaagccaa

SEQ ID NO: 3917894 - DNA, 25 bp, Homo sapien
tgaagccaacgaccacgagctggcc

SEQ ID NO: 3917895 - DNA, 25 bp, Homo sapien
gagttcccgctgaaggtgcgcctgt

SEQ ID NO: 3917896 - DNA, 25 bp, Homo sapien
atcgtggcagcggtggttcttctcc

SEQ ID NO: 3917897 - DNA, 25 bp, Homo sapien
tccacgggcaaggacgtgaggctca

SEQ ID NO: 3917898 - DNA, 25 bp, Homo sapien
ctgtgaatgctacgatgagctgggc

SEQ ID NO: 3917899 - DNA, 25 bp, Homo sapien
gggacagttccgtcggacagcactg

SEQ ID NO: 3917900 - DNA, 25 bp, Homo sapien
agttccgtcggacagcactgcaccg

SEQ ID NO: 3917901 - DNA, 25 bp, Homo sapien
ttccgtcggacagcactgcaccgag

SEQ ID NO: 3917902 - DNA, 25 bp, Homo sapien
acagttccgtcggacagcactgcac

SEQ ID NO: 3917903 - DNA, 25 bp, Homo sapien
cctgggactaaagcaatctgcccat

SEQ ID NO: 3917904 - DNA, 25 bp, Homo sapien
tgcctcctgggactaaagcaatctg

SEQ ID NO: 3917905 - DNA, 25 bp, Homo sapien
ccgcgctgggcctcttatttattta

SEQ ID NO: 3917906 - DNA, 25 bp, Homo sapien
taagatggggtctcagtctgccacc

SEQ ID NO: 3917907 - DNA, 25 bp, Homo sapien
cagccagaaaatccctgtactattt

SEQ ID NO: 3917908 - DNA, 25 bp, Homo sapien
gattatcgttgtaatgcaagcaaaa

SEQ ID NO: 3917909 - DNA, 25 bp, Homo sapien
gacctgtaagcagctaactcaaata

SEQ ID NO: 3917910 - DNA, 25 bp, Homo sapien
caaagtttgattatcgttgtaatgc

SEQ ID NO: 3917911 - DNA, 25 bp, Homo sapien
cattcaatgtgaggctagggagcta

SEQ ID NO: 3917912 - DNA, 25 bp, Homo sapien
ggaggcctacgtaataaactgcaga

SEQ ID NO: 3917913 - DNA, 25 bp, Homo sapien
gaagaaactgtgtcagcccaagcca

SEQ ID NO: 3917914 - DNA, 25 bp, Homo sapien
tagttccccacagtcctagagtagg

SEQ ID NO: 3917915 - DNA, 25 bp, Homo sapien
caaagagaccttcattgcgggggat

SEQ ID NO: 3917916 - DNA, 25 bp, Homo sapien
cacttctcacgtcgcagcagcttgt

SEQ ID NO: 3917917 - DNA, 25 bp, Homo sapien
gggattccatgagaaccatcaggga

SEQ ID NO: 3917918 - DNA, 25 bp, Homo sapien
gctctgggcccgctgaacaatggca

SEQ ID NO: 3917919 - DNA, 25 bp, Homo sapien
ggtcatgttgtcatatcgaatgaag

SEQ ID NO: 3917920 - DNA, 25 bp, Homo sapien
tgttgtcatatcgaatgaagactcc

SEQ ID NO: 3917921 - DNA, 25 bp, Homo sapien
agactccgacgccattaaacttgcc

SEQ ID NO: 3917922 - DNA, 25 bp, Homo sapien
tatcgaatgaagactccgacgccat

SEQ ID NO: 3917923 - DNA, 25 bp, Homo sapien
accccaaagccattaaagagcccat

SEQ ID NO: 3917924 - DNA, 25 bp, Homo sapien
gagaaggtcaataccccaaagccat

SEQ ID NO: 3917925 - DNA, 25 bp, Homo sapien
cttgaaccatctgagaaggtcaata

SEQ ID NO: 3917926 - DNA, 25 bp, Homo sapien
gagcccattctcaaaatgacccagg

SEQ ID NO: 3917927 - DNA, 25 bp, Homo sapien
tggcaggcactatatggaattaaat

SEQ ID NO: 3917928 - DNA, 25 bp, Homo sapien
gcaggcactatatggaattaaatcc

SEQ ID NO: 3917929 - DNA, 25 bp, Homo sapien
aatggcaggcactatatggaattaa

SEQ ID NO: 3917930 - DNA, 25 bp, Homo sapien
aggcactatatggaattaaatcctg

SEQ ID NO: 3917931 - DNA, 25 bp, Homo sapien
tatcctgatgtatttgtcctccagc

SEQ ID NO: 3917932 - DNA, 25 bp, Homo sapien
tatatatcctgatgtatttgtcctc

SEQ ID NO: 3917933 - DNA, 25 bp, Homo sapien
tgttcatcatggatactccccaggg

SEQ ID NO: 3917934 - DNA, 25 bp, Homo sapien
ccagcaaatgaagtgttcatcatgg

SEQ ID NO: 3917935 - DNA, 25 bp, Homo sapien
tgaaggaaccttttgtcagggtcat

SEQ ID NO: 3917936 - DNA, 25 bp, Homo sapien
tcctccccactggagtaggtgaagg

SEQ ID NO: 3917937 - DNA, 25 bp, Homo sapien
cctccttccactcgccacgatattc

SEQ ID NO: 3917938 - DNA, 25 bp, Homo sapien
cacgatattcctccccactggagta

SEQ ID NO: 3917939 - DNA, 25 bp, Homo sapien
ggtgacagattacaggataaaagga

SEQ ID NO: 3917940 - DNA, 25 bp, Homo sapien
tgacagattacaggataaaaggatg

SEQ ID NO: 3917941 - DNA, 25 bp, Homo sapien
gacagattacaggataaaaggatga

SEQ ID NO: 3917942 - DNA, 25 bp, Homo sapien
gtgacagattacaggataaaaggat

SEQ ID NO: 3917943 - DNA, 25 bp, Homo sapien
caccagcctggtaagtgtacactgc

SEQ ID NO: 3917944 - DNA, 25 bp, Homo sapien
tagatacattctaaaggccaccagc

SEQ ID NO: 3917945 - DNA, 25 bp, Homo sapien
caagcagacaagcagtggagaaggc

SEQ ID NO: 3917946 - DNA, 25 bp, Homo sapien
taagtgccaacttggatggcagaga

SEQ ID NO: 3917947 - DNA, 25 bp, Homo sapien
aaatatggggaaccaacactcaaag

SEQ ID NO: 3917948 - DNA, 25 bp, Homo sapien
gaaaatatggggaaccaacactcaa

SEQ ID NO: 3917949 - DNA, 25 bp, Homo sapien
atatggggaaccaacactcaaaggg

SEQ ID NO: 3917950 - DNA, 25 bp, Homo sapien
aatatggggaaccaacactcaaagg

SEQ ID NO: 3917951 - DNA, 25 bp, Homo sapien
tgatttttgatacagacaccaaaag

SEQ ID NO: 3917952 - DNA, 25 bp, Homo sapien
gaaatggtctaatgtgaaaacagct

SEQ ID NO: 3917953 - DNA, 25 bp, Homo sapien
gcgcccagccagaacataatgattt

SEQ ID NO: 3917954 - DNA, 25 bp, Homo sapien
acaccaaaagcccagaaatggtcta

SEQ ID NO: 3917955 - DNA, 25 bp, Homo sapien
agatatccgaggcaaggaccattat

SEQ ID NO: 3917956 - DNA, 25 bp, Homo sapien
tgagacgtgatgctggtacttgcca

SEQ ID NO: 3917957 - DNA, 25 bp, Homo sapien
tatctctcacacagaagatatccga

SEQ ID NO: 3917958 - DNA, 25 bp, Homo sapien
ctgggagctattttctgagacgtga

SEQ ID NO: 3917959 - DNA, 25 bp, Homo sapien
tccaccagtgagataaaggcgggct

SEQ ID NO: 3917960 - DNA, 25 bp, Homo sapien
agggtctaacgctcacacaggtctg

SEQ ID NO: 3917961 - DNA, 25 bp, Homo sapien
ccagggctggactccgatatagcag

SEQ ID NO: 3917962 - DNA, 25 bp, Homo sapien
gatgctagaatgcagggataccacc

SEQ ID NO: 3917963 - DNA, 25 bp, Homo sapien
cgatcacactctttcccggccccct

SEQ ID NO: 3917964 - DNA, 25 bp, Homo sapien
ctgaccgatcacactctttcccggc

SEQ ID NO: 3917965 - DNA, 25 bp, Homo sapien
gaccgatcacactctttcccggccc

SEQ ID NO: 3917966 - DNA, 25 bp, Homo sapien
gatcacactctttcccggccccctc

SEQ ID NO: 3917967 - DNA, 25 bp, Homo sapien
cagcgcctcggacttttcctctgat

SEQ ID NO: 3917968 - DNA, 25 bp, Homo sapien
cgtcacgcctggacgcagggttcca

SEQ ID NO: 3917969 - DNA, 25 bp, Homo sapien
agcgattgccccacttgacgccgcc

SEQ ID NO: 3917970 - DNA, 25 bp, Homo sapien
ccggcctttcgggatgaccgtcacg

SEQ ID NO: 3917971 - DNA, 25 bp, Homo sapien
cgaacccgggctgactatgtgaaag

SEQ ID NO: 3917972 - DNA, 25 bp, Homo sapien
tgggcgaccgcactgggtacaattc

SEQ ID NO: 3917973 - DNA, 25 bp, Homo sapien
ctgttacctaggcaaccgggagcaa

SEQ ID NO: 3917974 - DNA, 25 bp, Homo sapien
ccagaggccgtctagttgaaatggc

SEQ ID NO: 3917975 - DNA, 25 bp, Homo sapien
agctcaggagtgcgggaggcttgag

SEQ ID NO: 3917976 - DNA, 25 bp, Homo sapien
ttcgggaggccgcggcttgagctca

SEQ ID NO: 3917977 - DNA, 25 bp, Homo sapien
gctcaggagtgcgggaggcttgagc

SEQ ID NO: 3917978 - DNA, 25 bp, Homo sapien
gggagactccgtatctacagaagaa

SEQ ID NO: 3917979 - DNA, 25 bp, Homo sapien
ctcgggcgctcactttccgcaggtg

SEQ ID NO: 3917980 - DNA, 25 bp, Homo sapien
gcagccactgttggatcgggcccgg

SEQ ID NO: 3917981 - DNA, 25 bp, Homo sapien
tggacgagacgagcccactagtgtc

SEQ ID NO: 3917982 - DNA, 25 bp, Homo sapien
cagggccagacccaaaccgtggcgg

SEQ ID NO: 3917983 - DNA, 25 bp, Homo sapien
cagcggtcttctagcgagtcctaca

SEQ ID NO: 3917984 - DNA, 25 bp, Homo sapien
aaaattgatttgtaggcgtcctctc

SEQ ID NO: 3917985 - DNA, 25 bp, Homo sapien
ctttcagagccggaagcccttcttt

SEQ ID NO: 3917986 - DNA, 25 bp, Homo sapien
cctgtgattgtcgagacggcccgtt

SEQ ID NO: 3917987 - DNA, 25 bp, Homo sapien
taaatgcttgtagcagaaccccggg

SEQ ID NO: 3917988 - DNA, 25 bp, Homo sapien
tcaggaacagtgagtgctcctcgcc

SEQ ID NO: 3917989 - DNA, 25 bp, Homo sapien
tggagagcagcacctttaagagccc

SEQ ID NO: 3917990 - DNA, 25 bp, Homo sapien
gaaccccgggtcatctcatgtcaga

SEQ ID NO: 3917991 - DNA, 25 bp, Homo sapien
gggtttttgccaagcctcctccatc

SEQ ID NO: 3917992 - DNA, 25 bp, Homo sapien
tggatgactcgcagtaccacagcac

SEQ ID NO: 3917993 - DNA, 25 bp, Homo sapien
tggctgcaagcctcgaaacagttct

SEQ ID NO: 3917994 - DNA, 25 bp, Homo sapien
ttcctcccatgagccaaggtggtgt

SEQ ID NO: 3917995 - DNA, 25 bp, Homo sapien
taacaggacgtggattctgcctcat

SEQ ID NO: 3917996 - DNA, 25 bp, Homo sapien
ggacttttttctgtgctaccgctgc

SEQ ID NO: 3917997 - DNA, 25 bp, Homo sapien
tccaagaggacaggctattaggttc

SEQ ID NO: 3917998 - DNA, 25 bp, Homo sapien
tgtcttcgggagtgggtctctgcaa

SEQ ID NO: 3917999 - DNA, 25 bp, Homo sapien
caaagcaaagtacggcctcaggagg

SEQ ID NO: 3918000 - DNA, 25 bp, Homo sapien
gagccatttctacaccaaagcaaag

SEQ ID NO: 3918001 - DNA, 25 bp, Homo sapien
gcgattggtcagtcaacctcagaaa

SEQ ID NO: 3918002 - DNA, 25 bp, Homo sapien
agagaggccttcaaactgtcccagg

SEQ ID NO: 3918003 - DNA, 25 bp, Homo sapien
ggctgacaggaagaatttctgagag

SEQ ID NO: 3918004 - DNA, 25 bp, Homo sapien
tccacaccagatctccacattgtct

SEQ ID NO: 3918005 - DNA, 25 bp, Homo sapien
cacattgtcttgatccagaccagct

SEQ ID NO: 3918006 - DNA, 25 bp, Homo sapien
gatgattagtagcatgagtggtgaa

SEQ ID NO: 3918007 - DNA, 25 bp, Homo sapien
tcatgcagcccaggaatagtgttag

SEQ ID NO: 3918008 - DNA, 25 bp, Homo sapien
ccatggtttacagtagtagcaggta

SEQ ID NO: 3918009 - DNA, 25 bp, Homo sapien
gaatgggtcccacataatggagagc

SEQ ID NO: 3918010 - DNA, 25 bp, Homo sapien
tgctttcatttacccctttgggctg

SEQ ID NO: 3918011 - DNA, 25 bp, Homo sapien
tcaacagaagcatccagtcttgttc

SEQ ID NO: 3918012 - DNA, 25 bp, Homo sapien
gggctgcttgcctaaagtctctctt

SEQ ID NO: 3918013 - DNA, 25 bp, Homo sapien
gtcttgttctgaatggagcaggtca

SEQ ID NO: 3918014 - DNA, 25 bp, Homo sapien
tttcttcctagagtgcagatactgc

SEQ ID NO: 3918015 - DNA, 25 bp, Homo sapien
tccggcggatcctggcacttttctt

SEQ ID NO: 3918016 - DNA, 25 bp, Homo sapien
ctgtgggttggccagtgcagagtgg

SEQ ID NO: 3918017 - DNA, 25 bp, Homo sapien
tctgatctggtggaggtagcttgtg

SEQ ID NO: 3918018 - DNA, 25 bp, Homo sapien
gcgtcctggaagatgttggccgagg

SEQ ID NO: 3918019 - DNA, 25 bp, Homo sapien
agctggtccccgctgcgttgaaaca

SEQ ID NO: 3918020 - DNA, 25 bp, Homo sapien
ctgcagtggtgtagcgagtggccca

SEQ ID NO: 3918021 - DNA, 25 bp, Homo sapien
tcccagatgatctgtgcccgttcct

SEQ ID NO: 3918022 - DNA, 25 bp, Homo sapien
gagctaaactggaggaagtctcctg

SEQ ID NO: 3918023 - DNA, 25 bp, Homo sapien
cattctccaagagctaaactggagg

SEQ ID NO: 3918024 - DNA, 25 bp, Homo sapien
gacatcatcaactcagctggtcctt

SEQ ID NO: 3918025 - DNA, 25 bp, Homo sapien
gaggaagtctcctgccttaaaatca

SEQ ID NO: 3918026 - DNA, 25 bp, Homo sapien
ttctcatatatgacctggaaataaa

SEQ ID NO: 3918027 - DNA, 25 bp, Homo sapien
gacaactggatatacattggcctcc

SEQ ID NO: 3918028 - DNA, 25 bp, Homo sapien
ctggaaataaactgctactagatct

SEQ ID NO: 3918029 - DNA, 25 bp, Homo sapien
atccatgcccctggaggtggagaaa

SEQ ID NO: 3918030 - DNA, 25 bp, Homo sapien
tcctaagtggatctggcggtcgcgt

SEQ ID NO: 3918031 - DNA, 25 bp, Homo sapien
tctgcgaaggtgcttacaagggcca

SEQ ID NO: 3918032 - DNA, 25 bp, Homo sapien
taaggcgacatctgcagcacgagga

SEQ ID NO: 3918033 - DNA, 25 bp, Homo sapien
aaagcggagtgcgaagcttcctcaa

SEQ ID NO: 3918034 - DNA, 25 bp, Homo sapien
gccttgtgactgattactagcctgg

SEQ ID NO: 3918035 - DNA, 25 bp, Homo sapien
gggacttttttacatgctgcctcag

SEQ ID NO: 3918036 - DNA, 25 bp, Homo sapien
ccagccacctggactatagtagtag

SEQ ID NO: 3918037 - DNA, 25 bp, Homo sapien
cactcatctgcggttctagctaaaa

SEQ ID NO: 3918038 - DNA, 25 bp, Homo sapien
cgaggcgaaacctcgcggttcctct

SEQ ID NO: 3918039 - DNA, 25 bp, Homo sapien
gggctgacacacactcgcagacgag

SEQ ID NO: 3918040 - DNA, 25 bp, Homo sapien
ccctgctgagactaagacgtggaca

SEQ ID NO: 3918041 - DNA, 25 bp, Homo sapien
tctacctgctttcggcgctctatgg

SEQ ID NO: 3918042 - DNA, 25 bp, Homo sapien
ttatcaaagactgagaagtcccgct

SEQ ID NO: 3918043 - DNA, 25 bp, Homo sapien
cattaggagttccacgaccatggtg

SEQ ID NO: 3918044 - DNA, 25 bp, Homo sapien
gacttgcagtccagcgctgtttgca

SEQ ID NO: 3918045 - DNA, 25 bp, Homo sapien
ccaaatgggtttgtcaacggtgctg

SEQ ID NO: 3918046 - DNA, 25 bp, Homo sapien
ctttagctcaggtccatccttctca

SEQ ID NO: 3918047 - DNA, 25 bp, Homo sapien
cagatatctccttggccgccatgga

SEQ ID NO: 3918048 - DNA, 25 bp, Homo sapien
taagttacatctttagctcaggtcc

SEQ ID NO: 3918049 - DNA, 25 bp, Homo sapien
ggtcaggtgaccttactcaggagca

SEQ ID NO: 3918050 - DNA, 25 bp, Homo sapien
ttccagcggcttgtgctcactctgt

SEQ ID NO: 3918051 - DNA, 25 bp, Homo sapien
tagatgtgccttcccgcttggcttc

SEQ ID NO: 3918052 - DNA, 25 bp, Homo sapien
catccatccacacgtgcctgtagca

SEQ ID NO: 3918053 - DNA, 25 bp, Homo sapien
gcttccagcggcttgtgctcactct

SEQ ID NO: 3918054 - DNA, 25 bp, Homo sapien
tatgagaagaacacgtaagaccgcc

SEQ ID NO: 3918055 - DNA, 25 bp, Homo sapien
ggccatttgcagactcaggaaagga

SEQ ID NO: 3918056 - DNA, 25 bp, Homo sapien
gaccgatgtgcctcattgtttagtg

SEQ ID NO: 3918057 - DNA, 25 bp, Homo sapien
gcagttgcataggtctccctctctg

SEQ ID NO: 3918058 - DNA, 25 bp, Homo sapien
ctttcacccgattccccagagattc

SEQ ID NO: 3918059 - DNA, 25 bp, Homo sapien
cctttcacccgattccccagagatt

SEQ ID NO: 3918060 - DNA, 25 bp, Homo sapien
gcctttcacccgattccccagagat

SEQ ID NO: 3918061 - DNA, 25 bp, Homo sapien
ctccctgtgccctgggcgtgacatc

SEQ ID NO: 3918062 - DNA, 25 bp, Homo sapien
gtgccctgggcgtgacatctgcagc

SEQ ID NO: 3918063 - DNA, 25 bp, Homo sapien
cctgggcgtgacatctgcagccagg

SEQ ID NO: 3918064 - DNA, 25 bp, Homo sapien
ggaaacaggaagatttcaaaactca

SEQ ID NO: 3918065 - DNA, 25 bp, Homo sapien
gtgtgtgcgccacacccactgtctt

SEQ ID NO: 3918066 - DNA, 25 bp, Homo sapien
caggctgggatctgatgccacgtgt

SEQ ID NO: 3918067 - DNA, 25 bp, Homo sapien
gccacgtgtgtgtgcgccacaccca

SEQ ID NO: 3918068 - DNA, 25 bp, Homo sapien
agctccaggctgggatctgatgcca

SEQ ID NO: 3918069 - DNA, 25 bp, Homo sapien
tgttaactattaactctccttcctc

SEQ ID NO: 3918070 - DNA, 25 bp, Homo sapien
gatccatccaccaaaatctttgtta

SEQ ID NO: 3918071 - DNA, 25 bp, Homo sapien
ggtgatccatccaccaaaatctttg

SEQ ID NO: 3918072 - DNA, 25 bp, Homo sapien
atctttgttaactattaactctcct

SEQ ID NO: 3918073 - DNA, 25 bp, Homo sapien
tgccttgctctgtgaactcttttag

SEQ ID NO: 3918074 - DNA, 25 bp, Homo sapien
tgttgagtaagaatgtaactgcaga

SEQ ID NO: 3918075 - DNA, 25 bp, Homo sapien
gctgtgtttgtccaacaaccactgt

SEQ ID NO: 3918076 - DNA, 25 bp, Homo sapien
gtaactgcagacagtcatttccttg

SEQ ID NO: 3918077 - DNA, 25 bp, Homo sapien
gggctcatacctggcgccgctctgt

SEQ ID NO: 3918078 - DNA, 25 bp, Homo sapien
cagtgcgggcgtcgatatacctcgc

SEQ ID NO: 3918079 - DNA, 25 bp, Homo sapien
gagattttcggacctgcgacttccg

SEQ ID NO: 3918080 - DNA, 25 bp, Homo sapien
tctgtgccctttcgccttggctcgg

SEQ ID NO: 3918081 - DNA, 25 bp, Homo sapien
gatacttgctcaggtacagactttg

SEQ ID NO: 3918082 - DNA, 25 bp, Homo sapien
ggctggagatctacctggaaccctt

SEQ ID NO: 3918083 - DNA, 25 bp, Homo sapien
tggttctctcctacaagaggctgga

SEQ ID NO: 3918084 - DNA, 25 bp, Homo sapien
tcctttctgccctagtgaggagcag

SEQ ID NO: 3918085 - DNA, 25 bp, Homo sapien
cactacactgtggagaaacttcgta

SEQ ID NO: 3918086 - DNA, 25 bp, Homo sapien
aagtgttgagtagatattagttatc

SEQ ID NO: 3918087 - DNA, 25 bp, Homo sapien
cttcgtaaacatgacagagctggta

SEQ ID NO: 3918088 - DNA, 25 bp, Homo sapien
aacttcagtagcagtggacgtttac

SEQ ID NO: 3918089 - DNA, 25 bp, Homo sapien
ggcctaacaagaccatgggtgcttc

SEQ ID NO: 3918090 - DNA, 25 bp, Homo sapien
gggaagccccaatagctggacagac

SEQ ID NO: 3918091 - DNA, 25 bp, Homo sapien
tgaagttcccagattccctgagagg

SEQ ID NO: 3918092 - DNA, 25 bp, Homo sapien
atttccccatcagagggtgtggcca

SEQ ID NO: 3918093 - DNA, 25 bp, Homo sapien
gctttggtatcgtatcgcctctgtg

SEQ ID NO: 3918094 - DNA, 25 bp, Homo sapien
tttaagagaggagagttcagtaccc

SEQ ID NO: 3918095 - DNA, 25 bp, Homo sapien
tatctctcccttagccatgagctgg

SEQ ID NO: 3918096 - DNA, 25 bp, Homo sapien
tcttgccgagccaagcagcttagct

SEQ ID NO: 3918097 - DNA, 25 bp, Homo sapien
gtcacggagggattgtgcttcacaa

SEQ ID NO: 3918098 - DNA, 25 bp, Homo sapien
taaattgcaggtaccgctgggaagc

SEQ ID NO: 3918099 - DNA, 25 bp, Homo sapien
tccttgggtaacagcctccgagaag

SEQ ID NO: 3918100 - DNA, 25 bp, Homo sapien
cacgtgggtggcctacaagacaaac

SEQ ID NO: 3918101 - DNA, 25 bp, Homo sapien
tctataaaagctccctagatgattc

SEQ ID NO: 3918102 - DNA, 25 bp, Homo sapien
tataaaagctccctagatgattcta

SEQ ID NO: 3918103 - DNA, 25 bp, Homo sapien
gattctataaaagctccctagatga

SEQ ID NO: 3918104 - DNA, 25 bp, Homo sapien
ggattctataaaagctccctagatg

SEQ ID NO: 3918105 - DNA, 25 bp, Homo sapien
attcgtgaaaacaccctccagtagg

SEQ ID NO: 3918106 - DNA, 25 bp, Homo sapien
atgaatcccgggaatcgagccgcgg

SEQ ID NO: 3918107 - DNA, 25 bp, Homo sapien
tgagacttccctcttcaaggtgagg

SEQ ID NO: 3918108 - DNA, 25 bp, Homo sapien
tacctatggcctcacagcagtagca

SEQ ID NO: 3918109 - DNA, 25 bp, Homo sapien
agcccgcgccattcttcatgtgcag

SEQ ID NO: 3918110 - DNA, 25 bp, Homo sapien
tctgggctccaatcagcttccggtc

SEQ ID NO: 3918111 - DNA, 25 bp, Homo sapien
tcttcttgtcccagcggtagacggc

SEQ ID NO: 3918112 - DNA, 25 bp, Homo sapien
tttgcggcccatgaccaggaagctg

SEQ ID NO: 3918113 - DNA, 25 bp, Homo sapien
tccatgaggccgtcagcactgtgct

SEQ ID NO: 3918114 - DNA, 25 bp, Homo sapien
tcacactgggcgcagatcttggtca

SEQ ID NO: 3918115 - DNA, 25 bp, Homo sapien
caaagtcactggagcacatctgctc

SEQ ID NO: 3918116 - DNA, 25 bp, Homo sapien
tccatctcacactgggcgcagatct

SEQ ID NO: 3918117 - DNA, 25 bp, Homo sapien
ggaagacctgcgtatccgagtggca

SEQ ID NO: 3918118 - DNA, 25 bp, Homo sapien
ttgtagcccaccgtgtggcagagcg

SEQ ID NO: 3918119 - DNA, 25 bp, Homo sapien
cacggcgatgcagaggtcgttgtcc

SEQ ID NO: 3918120 - DNA, 25 bp, Homo sapien
ttgtggcagtgcagcatctcaggcc

SEQ ID NO: 3918121 - DNA, 25 bp, Homo sapien
gccagcgcggccgtccgcacgcccc

SEQ ID NO: 3918122 - DNA, 25 bp, Homo sapien
cgccagcgcggccgtccgcacgccc

SEQ ID NO: 3918123 - DNA, 25 bp, Homo sapien
cgcgccggcgcccagtgcagcgccc

SEQ ID NO: 3918124 - DNA, 25 bp, Homo sapien
gccggcgcccagtgcagcgccccca

SEQ ID NO: 3918125 - DNA, 25 bp, Homo sapien
gcggaggtcgcccaggtgggtggca

SEQ ID NO: 3918126 - DNA, 25 bp, Homo sapien
gtgcgccccagccaatctccggccg

SEQ ID NO: 3918127 - DNA, 25 bp, Homo sapien
ccggcggcccaggtgttccggcgtg

SEQ ID NO: 3918128 - DNA, 25 bp, Homo sapien
tgcgggcgccccgactgatcctggc

SEQ ID NO: 3918129 - DNA, 25 bp, Homo sapien
tggtggttatgtaagaactgcgcat

SEQ ID NO: 3918130 - DNA, 25 bp, Homo sapien
agctccgagggctgtaacgggcaga

SEQ ID NO: 3918131 - DNA, 25 bp, Homo sapien
taagaactgcgcatgatcagagagc

SEQ ID NO: 3918132 - DNA, 25 bp, Homo sapien
gtgagtccacacctgacagctccga

SEQ ID NO: 3918133 - DNA, 25 bp, Homo sapien
ctggcagctctgtcgtggggacccc

SEQ ID NO: 3918134 - DNA, 25 bp, Homo sapien
cagctctgtcgtggggacccccggg

SEQ ID NO: 3918135 - DNA, 25 bp, Homo sapien
tggcagctctgtcgtggggaccccc

SEQ ID NO: 3918136 - DNA, 25 bp, Homo sapien
ggcagctctgtcgtggggacccccg

SEQ ID NO: 3918137 - DNA, 25 bp, Homo sapien
ttgacaggaaccaagccgaggtgag

SEQ ID NO: 3918138 - DNA, 25 bp, Homo sapien
tgcaaggagggaaacttgacaggaa

SEQ ID NO: 3918139 - DNA, 25 bp, Homo sapien
aaccaagccgaggtgagggctgcac

SEQ ID NO: 3918140 - DNA, 25 bp, Homo sapien
acgggacagggtgaatgcaaggagg

SEQ ID NO: 3918141 - DNA, 25 bp, Homo sapien
tcttccagtattgactgaggcacga

SEQ ID NO: 3918142 - DNA, 25 bp, Homo sapien
cagtattgactgaggcacgaagaca

SEQ ID NO: 3918143 - DNA, 25 bp, Homo sapien
actgaggcacgaagacaaaggtgcc

SEQ ID NO: 3918144 - DNA, 25 bp, Homo sapien
tattgactgaggcacgaagacaaag

SEQ ID NO: 3918145 - DNA, 25 bp, Homo sapien
gtgtgcatgttctctgtggaccaga

SEQ ID NO: 3918146 - DNA, 25 bp, Homo sapien
ccagctcctcttctatggatggtga

SEQ ID NO: 3918147 - DNA, 25 bp, Homo sapien
ccatgagtgagggagatgcagtcta

SEQ ID NO: 3918148 - DNA, 25 bp, Homo sapien
gcagtctagagctgctttagtttca

SEQ ID NO: 3918149 - DNA, 25 bp, Homo sapien
catctggtttcctatcccggtcctt

SEQ ID NO: 3918150 - DNA, 25 bp, Homo sapien
ggtccttgcatatactcctctctac

SEQ ID NO: 3918151 - DNA, 25 bp, Homo sapien
tttcctatcccggtccttgcatata

SEQ ID NO: 3918152 - DNA, 25 bp, Homo sapien
tatcccggtccttgcatatactcct

SEQ ID NO: 3918153 - DNA, 25 bp, Homo sapien
ccgctgtccctccacaggccttcac

SEQ ID NO: 3918154 - DNA, 25 bp, Homo sapien
ggcccgctgtccctccacaggcctt

SEQ ID NO: 3918155 - DNA, 25 bp, Homo sapien
ctagtcccagcaggggcccgctgtc

SEQ ID NO: 3918156 - DNA, 25 bp, Homo sapien
agcaggggcccgctgtccctccaca

SEQ ID NO: 3918157 - DNA, 25 bp, Homo sapien
tcatctgtcatgatgcccttattag

SEQ ID NO: 3918158 - DNA, 25 bp, Homo sapien
gatgcccttattagtggctcccacg

SEQ ID NO: 3918159 - DNA, 25 bp, Homo sapien
ctgagaagctggcacgctggccttc

SEQ ID NO: 3918160 - DNA, 25 bp, Homo sapien
gtccatcggcgggacctcataagcg

SEQ ID NO: 3918161 - DNA, 25 bp, Homo sapien
ttggagcagcagatgctacatctgg

SEQ ID NO: 3918162 - DNA, 25 bp, Homo sapien
ctttggagcagcagatgctacatct

SEQ ID NO: 3918163 - DNA, 25 bp, Homo sapien
gcagcagatgctacatctggcaggg

SEQ ID NO: 3918164 - DNA, 25 bp, Homo sapien
gagcagcagatgctacatctggcag

SEQ ID NO: 3918165 - DNA, 25 bp, Homo sapien
tggcgagtggaccagtagcagccat

SEQ ID NO: 3918166 - DNA, 25 bp, Homo sapien
gtggcgagtggaccagtagcagcca

SEQ ID NO: 3918167 - DNA, 25 bp, Homo sapien
aggtggctgtggattggtgcttctc

SEQ ID NO: 3918168 - DNA, 25 bp, Homo sapien
ggtggctgtggattggtgcttctcc

SEQ ID NO: 3918169 - DNA, 25 bp, Homo sapien
ggtaatcgccgatgagagacatctg

SEQ ID NO: 3918170 - DNA, 25 bp, Homo sapien
tcctctgtccaaggttacagtatgt

SEQ ID NO: 3918171 - DNA, 25 bp, Homo sapien
cagcttcaggtaatcgccgatgaga

SEQ ID NO: 3918172 - DNA, 25 bp, Homo sapien
aaacccaggtccatgtaactctgtg

SEQ ID NO: 3918173 - DNA, 25 bp, Homo sapien
tcttggtgcccagcttgtaccttaa

SEQ ID NO: 3918174 - DNA, 25 bp, Homo sapien
agatctgtgacctgtccttgctctg

SEQ ID NO: 3918175 - DNA, 25 bp, Homo sapien
agacattttccaggcattgatagag

SEQ ID NO: 3918176 - DNA, 25 bp, Homo sapien
gaggacaggcttattcatctccttg

SEQ ID NO: 3918177 - DNA, 25 bp, Homo sapien
ctttataaataacctggcagaggga

SEQ ID NO: 3918178 - DNA, 25 bp, Homo sapien
gtcctgagggcttttgagatgtcca

SEQ ID NO: 3918179 - DNA, 25 bp, Homo sapien
gctccgtgcctgactcatctgaaaa

SEQ ID NO: 3918180 - DNA, 25 bp, Homo sapien
tagagatagaaatagctgggctcct

SEQ ID NO: 3918181 - DNA, 25 bp, Homo sapien
gtgtcctggtgctcggcggtgtctg

SEQ ID NO: 3918182 - DNA, 25 bp, Homo sapien
tctggcacagatgggcgtgtgtggg

SEQ ID NO: 3918183 - DNA, 25 bp, Homo sapien
gtctggcacagatgggcgtgtgtgg

SEQ ID NO: 3918184 - DNA, 25 bp, Homo sapien
ctggcacagatgggcgtgtgtgggt

SEQ ID NO: 3918185 - DNA, 25 bp, Homo sapien
ccccgggcaggaacagtatctgggc

SEQ ID NO: 3918186 - DNA, 25 bp, Homo sapien
cctgcgtgctggacacggagagtct

SEQ ID NO: 3918187 - DNA, 25 bp, Homo sapien
gcggccagcggttggacacagggct

SEQ ID NO: 3918188 - DNA, 25 bp, Homo sapien
caggaacagtatctgggcggccagc

SEQ ID NO: 3918189 - DNA, 25 bp, Homo sapien
cagaagctcagtgagcatcgcggga

SEQ ID NO: 3918190 - DNA, 25 bp, Homo sapien
gctcagtgagcatcgcgggaggatg

SEQ ID NO: 3918191 - DNA, 25 bp, Homo sapien
ctgccagaagctcagtgagcatcgc

SEQ ID NO: 3918192 - DNA, 25 bp, Homo sapien
tgccagaagctcagtgagcatcgcg

SEQ ID NO: 3918193 - DNA, 25 bp, Homo sapien
catgtcccacttgcttatagcctgg

SEQ ID NO: 3918194 - DNA, 25 bp, Homo sapien
gactgacagtccgataccttctcca

SEQ ID NO: 3918195 - DNA, 25 bp, Homo sapien
tccatttattgtgtccctctgggac

SEQ ID NO: 3918196 - DNA, 25 bp, Homo sapien
agcctggcctgttggagtgactgac

SEQ ID NO: 3918197 - DNA, 25 bp, Homo sapien
caaatggaattgcaggctggcagtg

SEQ ID NO: 3918198 - DNA, 25 bp, Homo sapien
gtgggattttggaataggctgggct

SEQ ID NO: 3918199 - DNA, 25 bp, Homo sapien
tcccactagaggagtggagactcct

SEQ ID NO: 3918200 - DNA, 25 bp, Homo sapien
tggattcccactagaggagtggaga

SEQ ID NO: 3918201 - DNA, 25 bp, Homo sapien
aatgggccggttacaagaacttgct

SEQ ID NO: 3918202 - DNA, 25 bp, Homo sapien
gctctttctgtagtctggactgctc

SEQ ID NO: 3918203 - DNA, 25 bp, Homo sapien
tgggccggttacaagaacttgctga

SEQ ID NO: 3918204 - DNA, 25 bp, Homo sapien
gggattggtgaggatcaggatggtc

SEQ ID NO: 3918205 - DNA, 25 bp, Homo sapien
cccacggtgccagtaaaaggctgga

SEQ ID NO: 3918206 - DNA, 25 bp, Homo sapien
tgtgcccacggtgccagtaaaaggc

SEQ ID NO: 3918207 - DNA, 25 bp, Homo sapien
ccacggtgccagtaaaaggctggag

SEQ ID NO: 3918208 - DNA, 25 bp, Homo sapien
ccttgtgcccacggtgccagtaaaa

SEQ ID NO: 3918209 - DNA, 25 bp, Homo sapien
ttttcatctgttataattattccat

SEQ ID NO: 3918210 - DNA, 25 bp, Homo sapien
cccagagtgtgcgtcttttcatctg

SEQ ID NO: 3918211 - DNA, 25 bp, Homo sapien
tgcttaacttggcaaagcccagagt

SEQ ID NO: 3918212 - DNA, 25 bp, Homo sapien
aattgcagggtaccctctggaacag

SEQ ID NO: 3918213 - DNA, 25 bp, Homo sapien
ctgttcatccaccttctggagggct

SEQ ID NO: 3918214 - DNA, 25 bp, Homo sapien
tctttttctccttacactgacttct

SEQ ID NO: 3918215 - DNA, 25 bp, Homo sapien
cagctgccatcgtctttttctcctt

SEQ ID NO: 3918216 - DNA, 25 bp, Homo sapien
tgttcatccaccttctggagggctt

SEQ ID NO: 3918217 - DNA, 25 bp, Homo sapien
ttactgcccgcataagcctttgtcc

SEQ ID NO: 3918218 - DNA, 25 bp, Homo sapien
tacccaagcttgcaatttagcaggc

SEQ ID NO: 3918219 - DNA, 25 bp, Homo sapien
gcagcggtgtgacccaagttctctt

SEQ ID NO: 3918220 - DNA, 25 bp, Homo sapien
ggtgatgagtgctacagaaaaggat

SEQ ID NO: 3918221 - DNA, 25 bp, Homo sapien
ctgaagcgtcttgccccggaaaaat

SEQ ID NO: 3918222 - DNA, 25 bp, Homo sapien
gcctgcgagcggctcgggagcggtc

SEQ ID NO: 3918223 - DNA, 25 bp, Homo sapien
ttgcaggctgaagcgtcttgccccg

SEQ ID NO: 3918224 - DNA, 25 bp, Homo sapien
gagcggctcgggagcggtcagcctt

SEQ ID NO: 3918225 - DNA, 25 bp, Homo sapien
gacagcctccgagcgcccccggatc

SEQ ID NO: 3918226 - DNA, 25 bp, Homo sapien
gcgacagcctccgagcgcccccgga

SEQ ID NO: 3918227 - DNA, 25 bp, Homo sapien
tcccggggtcagcaccgcggagacc

SEQ ID NO: 3918228 - DNA, 25 bp, Homo sapien
cccgcgacagcctccgagcgccccc

SEQ ID NO: 3918229 - DNA, 25 bp, Homo sapien
gtgattcaaggcagtgattcagtga

SEQ ID NO: 3918230 - DNA, 25 bp, Homo sapien
tagaagtttgtatcctgctcagtga

SEQ ID NO: 3918231 - DNA, 25 bp, Homo sapien
tgatcaacaggtattccaggcggtg

SEQ ID NO: 3918232 - DNA, 25 bp, Homo sapien
agggaccaaggctcttcccaacttg

SEQ ID NO: 3918233 - DNA, 25 bp, Homo sapien
gaatgtaagcgccatcagggcagcg

SEQ ID NO: 3918234 - DNA, 25 bp, Homo sapien
tgtgatcacagctatgtgcccagca

SEQ ID NO: 3918235 - DNA, 25 bp, Homo sapien
cgtgttgacaaagcccagtgagagg

SEQ ID NO: 3918236 - DNA, 25 bp, Homo sapien
ggagggtctagctcccaggccttta

SEQ ID NO: 3918237 - DNA, 25 bp, Homo sapien
cttaaccaccgaccccagattgaga

SEQ ID NO: 3918238 - DNA, 25 bp, Homo sapien
aaccaccgaccccagattgagatct

SEQ ID NO: 3918239 - DNA, 25 bp, Homo sapien
tccttaaccaccgaccccagattga

SEQ ID NO: 3918240 - DNA, 25 bp, Homo sapien
accgaccccagattgagatctccat

SEQ ID NO: 3918241 - DNA, 25 bp, Homo sapien
acgaggaccggtgcagcagtggcag

SEQ ID NO: 3918242 - DNA, 25 bp, Homo sapien
tacgaggaccggtgcagcagtggca

SEQ ID NO: 3918243 - DNA, 25 bp, Homo sapien
ctacgaggaccggtgcagcagtggc

SEQ ID NO: 3918244 - DNA, 25 bp, Homo sapien
tgagattagaacctgtgtgtatgca

SEQ ID NO: 3918245 - DNA, 25 bp, Homo sapien
ggtctgggaaactccgtgaagagac

SEQ ID NO: 3918246 - DNA, 25 bp, Homo sapien
ttcctgagattagaacctgtgtgta

SEQ ID NO: 3918247 - DNA, 25 bp, Homo sapien
ctccgtgaagagacatagccatgcg

SEQ ID NO: 3918248 - DNA, 25 bp, Homo sapien
ggctaccagggaacatactctactg

SEQ ID NO: 3918249 - DNA, 25 bp, Homo sapien
tgctgtcttcgctacctgagggtct

SEQ ID NO: 3918250 - DNA, 25 bp, Homo sapien
tatgttctagtggaagagaagccgg

SEQ ID NO: 3918251 - DNA, 25 bp, Homo sapien
gaaaggcaaactccctccttgcaag

SEQ ID NO: 3918252 - DNA, 25 bp, Homo sapien
tattttggagtaattcaagttatcg

SEQ ID NO: 3918253 - DNA, 25 bp, Homo sapien
gcaggggcatgaaggtactagttat

SEQ ID NO: 3918254 - DNA, 25 bp, Homo sapien
catgaaggtactagttattttggag

SEQ ID NO: 3918255 - DNA, 25 bp, Homo sapien
tttggagtaattcaagttatcgatt

SEQ ID NO: 3918256 - DNA, 25 bp, Homo sapien
catggtctccataagcagttgggga

SEQ ID NO: 3918257 - DNA, 25 bp, Homo sapien
tggcctaaacttgtccttctgccat

SEQ ID NO: 3918258 - DNA, 25 bp, Homo sapien
cctttggcctaaacttgtccttctg

SEQ ID NO: 3918259 - DNA, 25 bp, Homo sapien
tttggcctaaacttgtccttctgcc

SEQ ID NO: 3918260 - DNA, 25 bp, Homo sapien
caaagagtgttctggctacaggagc

SEQ ID NO: 3918261 - DNA, 25 bp, Homo sapien
tccaaggagattgcagagaccaagt

SEQ ID NO: 3918262 - DNA, 25 bp, Homo sapien
cactactgaggctggtcgtgagcat

SEQ ID NO: 3918263 - DNA, 25 bp, Homo sapien
cgtgagcatattctgtggcgttaca

SEQ ID NO: 3918264 - DNA, 25 bp, Homo sapien
gccagacattgaggagtcttagaaa

SEQ ID NO: 3918265 - DNA, 25 bp, Homo sapien
gaaaggcccttagggatataccagc

SEQ ID NO: 3918266 - DNA, 25 bp, Homo sapien
agcccaactctcttgtcatctacat

SEQ ID NO: 3918267 - DNA, 25 bp, Homo sapien
ttgaggagtcttagaaaggaaaggc

SEQ ID NO: 3918268 - DNA, 25 bp, Homo sapien
tacattatcggatcaaccggcaagc

SEQ ID NO: 3918269 - DNA, 25 bp, Homo sapien
gaggcggctgaagaatacccaccta

SEQ ID NO: 3918270 - DNA, 25 bp, Homo sapien
tagagaaagatatgaggcccgagag

SEQ ID NO: 3918271 - DNA, 25 bp, Homo sapien
aactaaggttgtgtcagtatcgccc

SEQ ID NO: 3918272 - DNA, 25 bp, Homo sapien
agaagaatgatagcctcaggccagg

SEQ ID NO: 3918273 - DNA, 25 bp, Homo sapien
ccttttgctactggcctatggctgg

SEQ ID NO: 3918274 - DNA, 25 bp, Homo sapien
tgaaaatacgggctgacctcaaggt

SEQ ID NO: 3918275 - DNA, 25 bp, Homo sapien
aggagactctatccagccaggagaa

SEQ ID NO: 3918276 - DNA, 25 bp, Homo sapien
tgtctcgagggcacacgaatgggaa

SEQ ID NO: 3918277 - DNA, 25 bp, Homo sapien
tccataggtgttgacacatacgggc

SEQ ID NO: 3918278 - DNA, 25 bp, Homo sapien
tcgtagccccgactgcacttcttgt

SEQ ID NO: 3918279 - DNA, 25 bp, Homo sapien
cacttcttgttggtccggcacctgt

SEQ ID NO: 3918280 - DNA, 25 bp, Homo sapien
catggcatgtggctattccccctgt

SEQ ID NO: 3918281 - DNA, 25 bp, Homo sapien
ggtactcatggcaggaaaacactgc

SEQ ID NO: 3918282 - DNA, 25 bp, Homo sapien
catctgcagtttctcggtactcatg

SEQ ID NO: 3918283 - DNA, 25 bp, Homo sapien
tttccagaaccgcagtgattcagcc

SEQ ID NO: 3918284 - DNA, 25 bp, Homo sapien
tgcaatggccattttcctgctggga

SEQ ID NO: 3918285 - DNA, 25 bp, Homo sapien
tcttgccatctggccacgtcacctc

SEQ ID NO: 3918286 - DNA, 25 bp, Homo sapien
acgttccggctcaccatcttgccat

SEQ ID NO: 3918287 - DNA, 25 bp, Homo sapien
gaagtgtgtcctcatcccgggggta

SEQ ID NO: 3918288 - DNA, 25 bp, Homo sapien
agcactgagttcatctccccgctgg

SEQ ID NO: 3918289 - DNA, 25 bp, Homo sapien
ccactcgcagccagttgttgttgaa

SEQ ID NO: 3918290 - DNA, 25 bp, Homo sapien
ttggtgtagagcacgaccttagctc

SEQ ID NO: 3918291 - DNA, 25 bp, Homo sapien
aggccaaagtgtgccacgggctcca

SEQ ID NO: 3918292 - DNA, 25 bp, Homo sapien
ccccgtcgatgatcctcaggtgggc

SEQ ID NO: 3918293 - DNA, 25 bp, Homo sapien
tggactctccatgggacaagatgag

SEQ ID NO: 3918294 - DNA, 25 bp, Homo sapien
gacaagatgaggtccagcatcccgt

SEQ ID NO: 3918295 - DNA, 25 bp, Homo sapien
ctgattgccccggaagacggacagc

SEQ ID NO: 3918296 - DNA, 25 bp, Homo sapien
gtctccgtcgaagtcggtcaccaca

SEQ ID NO: 3918297 - DNA, 25 bp, Homo sapien
gtctccgtgctctctacggatgacg

SEQ ID NO: 3918298 - DNA, 25 bp, Homo sapien
tcgccgggattgagctcctcgatga

SEQ ID NO: 3918299 - DNA, 25 bp, Homo sapien
gatgagggggtctccgtgctctcta

SEQ ID NO: 3918300 - DNA, 25 bp, Homo sapien
ctcaggctccaaggcgtcgccggga

SEQ ID NO: 3918301 - DNA, 25 bp, Homo sapien
gcgccttcagggggtgattacatcc

SEQ ID NO: 3918302 - DNA, 25 bp, Homo sapien
gccttcagggggtgattacatccag

SEQ ID NO: 3918303 - DNA, 25 bp, Homo sapien
attagtaaatctagcgccttcaggg

SEQ ID NO: 3918304 - DNA, 25 bp, Homo sapien
tctagcgccttcagggggtgattac

SEQ ID NO: 3918305 - DNA, 25 bp, Homo sapien
tcctggtagtgattggaccccgtag

SEQ ID NO: 3918306 - DNA, 25 bp, Homo sapien
tggtagtgattggaccccgtagccc

SEQ ID NO: 3918307 - DNA, 25 bp, Homo sapien
cctggtagtgattggaccccgtagc

SEQ ID NO: 3918308 - DNA, 25 bp, Homo sapien
tggtagtgattggagcccgtagccc

SEQ ID NO: 3918309 - DNA, 25 bp, Homo sapien
ctggtagtgattggaccctgtagcc

SEQ ID NO: 3918310 - DNA, 25 bp, Homo sapien
tggtagtgattggaccctgtagccc

SEQ ID NO: 3918311 - DNA, 25 bp, Homo sapien
tggcgcttgggttctgggcacactt

SEQ ID NO: 3918312 - DNA, 25 bp, Homo sapien
gcgcttgggttctgggcacactttg

SEQ ID NO: 3918313 - DNA, 25 bp, Homo sapien
tggctttgtatcttgtggcgcttgg

SEQ ID NO: 3918314 - DNA, 25 bp, Homo sapien
gtggtagtgtggctttgtatcttgt

SEQ ID NO: 3918315 - DNA, 25 bp, Homo sapien
atgaagagccacgagccaggatgga

SEQ ID NO: 3918316 - DNA, 25 bp, Homo sapien
tcccaccagctgtcaaggatgaaga

SEQ ID NO: 3918317 - DNA, 25 bp, Homo sapien
tgcaatagcagaggccggctccttg

SEQ ID NO: 3918318 - DNA, 25 bp, Homo sapien
ttctgattcttaaaccttctccctg

SEQ ID NO: 3918319 - DNA, 25 bp, Homo sapien
tgaggagctgcggtaggcaatgttg

SEQ ID NO: 3918320 - DNA, 25 bp, Homo sapien
ctggtcattgtcaaagtcggcggtg

SEQ ID NO: 3918321 - DNA, 25 bp, Homo sapien
ctgcggtaggcaatgttgttgaaga

SEQ ID NO: 3918322 - DNA, 25 bp, Homo sapien
tcaaagtcggcggtgatgaccgtgc

SEQ ID NO: 3918323 - DNA, 25 bp, Homo sapien
ttgaagtcagccagggcgacacctc

SEQ ID NO: 3918324 - DNA, 25 bp, Homo sapien
ttcccatgggtgctcatttgcagat

SEQ ID NO: 3918325 - DNA, 25 bp, Homo sapien
tccactttgccatcacggttgaagt

SEQ ID NO: 3918326 - DNA, 25 bp, Homo sapien
cagttgccatagacgatgtccactt

SEQ ID NO: 3918327 - DNA, 25 bp, Homo sapien
ttcagaggacaaatagctgtgggtc

SEQ ID NO: 3918328 - DNA, 25 bp, Homo sapien
ggatggcagaccacaggacaatgta

SEQ ID NO: 3918329 - DNA, 25 bp, Homo sapien
acaggacaatgtaataggcagtggg

SEQ ID NO: 3918330 - DNA, 25 bp, Homo sapien
ggatcagagaccccaggacacaggg

SEQ ID NO: 3918331 - DNA, 25 bp, Homo sapien
tccttgtaaagctcatagacaaacc

SEQ ID NO: 3918332 - DNA, 25 bp, Homo sapien
aagctcatagacaaaccatgatggc

SEQ ID NO: 3918333 - DNA, 25 bp, Homo sapien
gaatgaatagaaccgtgacccggtc

SEQ ID NO: 3918334 - DNA, 25 bp, Homo sapien
gcactggaggccaagccttgcgtca

SEQ ID NO: 3918335 - DNA, 25 bp, Homo sapien
tgccatcgccccggttgtggaaaag

SEQ ID NO: 3918336 - DNA, 25 bp, Homo sapien
ctcattgtcgcagaagatatccgag

SEQ ID NO: 3918337 - DNA, 25 bp, Homo sapien
gaaaaggaagttaggcccattctca

SEQ ID NO: 3918338 - DNA, 25 bp, Homo sapien
actggccgcagcgtccacaaaggtg

SEQ ID NO: 3918339 - DNA, 25 bp, Homo sapien
ggcttctttaatcaccaccttgcag

SEQ ID NO: 3918340 - DNA, 25 bp, Homo sapien
ctgacatcataaatccaccttcatt

SEQ ID NO: 3918341 - DNA, 25 bp, Homo sapien
tgacatcataaatccaccttcattt

SEQ ID NO: 3918342 - DNA, 25 bp, Homo sapien
tcttttaaggcttctttaatcacca

SEQ ID NO: 3918343 - DNA, 25 bp, Homo sapien
tagttcaatgtcctcagaaaagctg

SEQ ID NO: 3918344 - DNA, 25 bp, Homo sapien
aaagctgaggggcatgcccaaggtc

SEQ ID NO: 3918345 - DNA, 25 bp, Homo sapien
ctgctagttcaatgtcctcagaaaa

SEQ ID NO: 3918346 - DNA, 25 bp, Homo sapien
aaaagctgaggggcatgcccaaggt

SEQ ID NO: 3918347 - DNA, 25 bp, Homo sapien
ttttccatctggttccacgccaggg

SEQ ID NO: 3918348 - DNA, 25 bp, Homo sapien
tcccggcactgtcccggcttcaaga

SEQ ID NO: 3918349 - DNA, 25 bp, Homo sapien
ccggcactgtcccggcttcaagagg

SEQ ID NO: 3918350 - DNA, 25 bp, Homo sapien
ttccatctggttccacgccagggcc

SEQ ID NO: 3918351 - DNA, 25 bp, Homo sapien
atgggagagtggtcttcctactgcc

SEQ ID NO: 3918352 - DNA, 25 bp, Homo sapien
ggcactgtgacccagcggagcagct

SEQ ID NO: 3918353 - DNA, 25 bp, Homo sapien
tctctcccaatctctcgcttggcca

SEQ ID NO: 3918354 - DNA, 25 bp, Homo sapien
gggatgggagagtggtcttcctact

SEQ ID NO: 3918355 - DNA, 25 bp, Homo sapien
tccgggctagttttccagccagacg

SEQ ID NO: 3918356 - DNA, 25 bp, Homo sapien
ggacactccgggctagttttccagc

SEQ ID NO: 3918357 - DNA, 25 bp, Homo sapien
actccgggctagttttccagccaga

SEQ ID NO: 3918358 - DNA, 25 bp, Homo sapien
gctagttttccagccagacgtccat

SEQ ID NO: 3918359 - DNA, 25 bp, Homo sapien
ctgagtgacaaggggggctacaggg

SEQ ID NO: 3918360 - DNA, 25 bp, Homo sapien
agtgacaaggggggctacagggtag

SEQ ID NO: 3918361 - DNA, 25 bp, Homo sapien
tgacaaggggggctacagggtagtg

SEQ ID NO: 3918362 - DNA, 25 bp, Homo sapien
caaggggggctacagggtagtgttg

SEQ ID NO: 3918363 - DNA, 25 bp, Homo sapien
tagggatttagcactcaattcctgg

SEQ ID NO: 3918364 - DNA, 25 bp, Homo sapien
aattctttgagctcagttatccgag

SEQ ID NO: 3918365 - DNA, 25 bp, Homo sapien
agttatccgagacgggacccagctg

SEQ ID NO: 3918366 - DNA, 25 bp, Homo sapien
aaagtgctggagaggttttggaaca

SEQ ID NO: 3918367 - DNA, 25 bp, Homo sapien
caagccagatgtcccctcttgggta

SEQ ID NO: 3918368 - DNA, 25 bp, Homo sapien
cagatgtcccctcttgggtacccca

SEQ ID NO: 3918369 - DNA, 25 bp, Homo sapien
tttccagcaagccagatgtcccctc

SEQ ID NO: 3918370 - DNA, 25 bp, Homo sapien
atcccactttccagcaagccagatg

SEQ ID NO: 3918371 - DNA, 25 bp, Homo sapien
ctgccagatatctcaccaatgcttg

SEQ ID NO: 3918372 - DNA, 25 bp, Homo sapien
tgccagatatctcaccaatgcttgg

SEQ ID NO: 3918373 - DNA, 25 bp, Homo sapien
cagaatgccccgggagaggtcactg

SEQ ID NO: 3918374 - DNA, 25 bp, Homo sapien
cgccagaatgccccgggagaggtca

SEQ ID NO: 3918375 - DNA, 25 bp, Homo sapien
atgccccgggagaggtcactggcct

SEQ ID NO: 3918376 - DNA, 25 bp, Homo sapien
aatgccccgggagaggtcactggcc

SEQ ID NO: 3918377 - DNA, 25 bp, Homo sapien
cacattaccgtaggcgtaattggca

SEQ ID NO: 3918378 - DNA, 25 bp, Homo sapien
ccgtaggcgtaattggcaatgtaga

SEQ ID NO: 3918379 - DNA, 25 bp, Homo sapien
atcagggcccacattaccgtaggcg

SEQ ID NO: 3918380 - DNA, 25 bp, Homo sapien
tgtagatagagtagcgtccagagcc

SEQ ID NO: 3918381 - DNA, 25 bp, Homo sapien
aacaacttgtcggtgtacgtggcca

SEQ ID NO: 3918382 - DNA, 25 bp, Homo sapien
cacgttgacctcatcgctcaggatg

SEQ ID NO: 3918383 - DNA, 25 bp, Homo sapien
tcccaccggttattgcggaacttga

SEQ ID NO: 3918384 - DNA, 25 bp, Homo sapien
aggccacagagcgtccggcaaagag

SEQ ID NO: 3918385 - DNA, 25 bp, Homo sapien
tgcctgctgtccggagaagcctgac

SEQ ID NO: 3918386 - DNA, 25 bp, Homo sapien
gaggaaaagtcccttccgctgagtg

SEQ ID NO: 3918387 - DNA, 25 bp, Homo sapien
agtcccttccgctgagtggaggcag

SEQ ID NO: 3918388 - DNA, 25 bp, Homo sapien
gaaaagtcccttccgctgagtggag

SEQ ID NO: 3918389 - DNA, 25 bp, Homo sapien
gatggacacctctggattcagtgag

SEQ ID NO: 3918390 - DNA, 25 bp, Homo sapien
agtcggggagaaaatgggtgtggca

SEQ ID NO: 3918391 - DNA, 25 bp, Homo sapien
gacacctctggattcagtgagagaa

SEQ ID NO: 3918392 - DNA, 25 bp, Homo sapien
tctgatggacacctctggattcagt

SEQ ID NO: 3918393 - DNA, 25 bp, Homo sapien
aggaagtagatctcctcccggccgt

SEQ ID NO: 3918394 - DNA, 25 bp, Homo sapien
gcgatgttcaccagccgcttctggg

SEQ ID NO: 3918395 - DNA, 25 bp, Homo sapien
tccccgtcgatgtcgcaggctgtga

SEQ ID NO: 3918396 - DNA, 25 bp, Homo sapien
tgggcccggtcatacttcagaacca

SEQ ID NO: 3918397 - DNA, 25 bp, Homo sapien
tcatcccaagatgcagaagccagtg

SEQ ID NO: 3918398 - DNA, 25 bp, Homo sapien
tcccgagggaaatgcagatactgcc

SEQ ID NO: 3918399 - DNA, 25 bp, Homo sapien
tcagcgcccggtgatggaaggtcat

SEQ ID NO: 3918400 - DNA, 25 bp, Homo sapien
gaaacaaatccagtctggcccgctg

SEQ ID NO: 3918401 - DNA, 25 bp, Homo sapien
cttctaccctgaatctggagtagct

SEQ ID NO: 3918402 - DNA, 25 bp, Homo sapien
tccttctaccctgaatctggagtag

SEQ ID NO: 3918403 - DNA, 25 bp, Homo sapien
gtccttctaccctgaatctggagta

SEQ ID NO: 3918404 - DNA, 25 bp, Homo sapien
ccttctaccctgaatctggagtagc

SEQ ID NO: 3918405 - DNA, 25 bp, Homo sapien
cattacaaatcactgactcgacgtt

SEQ ID NO: 3918406 - DNA, 25 bp, Homo sapien
tgactcgacgttgtgattgctagag

SEQ ID NO: 3918407 - DNA, 25 bp, Homo sapien
tcactgactcgacgttgtgattgct

SEQ ID NO: 3918408 - DNA, 25 bp, Homo sapien
caaatcactgactcgacgttgtgat

SEQ ID NO: 3918409 - DNA, 25 bp, Homo sapien
gactctggcacatgccctaggcctt

SEQ ID NO: 3918410 - DNA, 25 bp, Homo sapien
ggactctggcacatgccctaggcct

SEQ ID NO: 3918411 - DNA, 25 bp, Homo sapien
ttcccatatatagcgcatgagctgg

SEQ ID NO: 3918412 - DNA, 25 bp, Homo sapien
aaataattcccatatatagcgcatg

SEQ ID NO: 3918413 - DNA, 25 bp, Homo sapien
caagacagggaccattatgatctcc

SEQ ID NO: 3918414 - DNA, 25 bp, Homo sapien
tataagccatgtgcactgtagctga

SEQ ID NO: 3918415 - DNA, 25 bp, Homo sapien
cagctggaaagtagcagagcccaat

SEQ ID NO: 3918416 - DNA, 25 bp, Homo sapien
ccatgggatcctagagctcacgttc

SEQ ID NO: 3918417 - DNA, 25 bp, Homo sapien
taacaactcgagttgtggagggctt

SEQ ID NO: 3918418 - DNA, 25 bp, Homo sapien
ttcacaaggagctttggcaatgccg

SEQ ID NO: 3918419 - DNA, 25 bp, Homo sapien
gggctttaagtgaaacagatgctct

SEQ ID NO: 3918420 - DNA, 25 bp, Homo sapien
tggtgccatgaggttcttataggtg

SEQ ID NO: 3918421 - DNA, 25 bp, Homo sapien
cagctgttggcacgtaagaaacaag

SEQ ID NO: 3918422 - DNA, 25 bp, Homo sapien
tttgggaaggcttgccgaccacaca

SEQ ID NO: 3918423 - DNA, 25 bp, Homo sapien
gaagacacatgttctgagccgcaaa

SEQ ID NO: 3918424 - DNA, 25 bp, Homo sapien
gaaacaagcttgagtgtgaacagaa

SEQ ID NO: 3918425 - DNA, 25 bp, Homo sapien
ctaatctggtgtcccgagaaggagg

SEQ ID NO: 3918426 - DNA, 25 bp, Homo sapien
atgatcagtctttaaaaccaaagta

SEQ ID NO: 3918427 - DNA, 25 bp, Homo sapien
cgcttgtcatgatttgtggtaagac

SEQ ID NO: 3918428 - DNA, 25 bp, Homo sapien
ccaaagtaagttggtcattagcata

SEQ ID NO: 3918429 - DNA, 25 bp, Homo sapien
ttggctcaatcccaggtcgcagagg

SEQ ID NO: 3918430 - DNA, 25 bp, Homo sapien
tgtcggcatttaacacaaaatgctc

SEQ ID NO: 3918431 - DNA, 25 bp, Homo sapien
cccggctgactgatgcggctgtcct

SEQ ID NO: 3918432 - DNA, 25 bp, Homo sapien
tatatgtcggcatttaacacaaaat

SEQ ID NO: 3918433 - DNA, 25 bp, Homo sapien
caggagctgaattgtgatgtctgga

SEQ ID NO: 3918434 - DNA, 25 bp, Homo sapien
atgtctggaatactatggccgggga

SEQ ID NO: 3918435 - DNA, 25 bp, Homo sapien
catgacaggagctgaattgtgatgt

SEQ ID NO: 3918436 - DNA, 25 bp, Homo sapien
ctgtaagtcctttggcaagctgctc

SEQ ID NO: 3918437 - DNA, 25 bp, Homo sapien
cacttccacaaaacgttacacttgg

SEQ ID NO: 3918438 - DNA, 25 bp, Homo sapien
caaaacgttacacttgggtgcttgg

SEQ ID NO: 3918439 - DNA, 25 bp, Homo sapien
tggcttttaatccaccatcagtagt

SEQ ID NO: 3918440 - DNA, 25 bp, Homo sapien
ctgctaactgtagggtggcttttaa

SEQ ID NO: 3918441 - DNA, 25 bp, Homo sapien
cctccctattgaggatctttgagaa

SEQ ID NO: 3918442 - DNA, 25 bp, Homo sapien
gcaccaatgcggaccacaatagctg

SEQ ID NO: 3918443 - DNA, 25 bp, Homo sapien
gttattccaagccagagcaccaatg

SEQ ID NO: 3918444 - DNA, 25 bp, Homo sapien
gggatcccatttgacctcagtgtcc

SEQ ID NO: 3918445 - DNA, 25 bp, Homo sapien
tcaaagctgcaatgtgtgggaaaag

SEQ ID NO: 3918446 - DNA, 25 bp, Homo sapien
cgatcaaagctgcaatgtgtgggaa

SEQ ID NO: 3918447 - DNA, 25 bp, Homo sapien
ctgagagcgatcaaagctgcaatgt

SEQ ID NO: 3918448 - DNA, 25 bp, Homo sapien
gagcgatcaaagctgcaatgtgtgg

SEQ ID NO: 3918449 - DNA, 25 bp, Homo sapien
ccaacgttaagatgtcatggcacag

SEQ ID NO: 3918450 - DNA, 25 bp, Homo sapien
cagcccttccttcgtgagatgtcaa

SEQ ID NO: 3918451 - DNA, 25 bp, Homo sapien
gagagcactcatgcaggattgcgag

SEQ ID NO: 3918452 - DNA, 25 bp, Homo sapien
aagacctttgcaagcactctcaggg

SEQ ID NO: 3918453 - DNA, 25 bp, Homo sapien
ttggtgccaaacaggccacaaccac

SEQ ID NO: 3918454 - DNA, 25 bp, Homo sapien
taactgggtgaccttcagcgagaga

SEQ ID NO: 3918455 - DNA, 25 bp, Homo sapien
ggccttggtgccaaacaggccacaa

SEQ ID NO: 3918456 - DNA, 25 bp, Homo sapien
gggtgaccttcagcgagagatctgc

SEQ ID NO: 3918457 - DNA, 25 bp, Homo sapien
catttgagagagtaaggttggagcc

SEQ ID NO: 3918458 - DNA, 25 bp, Homo sapien
aatactaatgccagagtgtcctgag

SEQ ID NO: 3918459 - DNA, 25 bp, Homo sapien
acagagtttggtacattgcaggtgc

SEQ ID NO: 3918460 - DNA, 25 bp, Homo sapien
ggttggagccagtagccccttggtc

SEQ ID NO: 3918461 - DNA, 25 bp, Homo sapien
tgaaataattaagtggacaggccaa

SEQ ID NO: 3918462 - DNA, 25 bp, Homo sapien
tatgccaggattgccagcagttttg

SEQ ID NO: 3918463 - DNA, 25 bp, Homo sapien
gaacgatctcatgggtagacacaag

SEQ ID NO: 3918464 - DNA, 25 bp, Homo sapien
catcttggatctaggaacagacccc

SEQ ID NO: 3918465 - DNA, 25 bp, Homo sapien
taatatctgagtactttccacatgt

SEQ ID NO: 3918466 - DNA, 25 bp, Homo sapien
catgtcagacataggaccaagcatt

SEQ ID NO: 3918467 - DNA, 25 bp, Homo sapien
cagtactggctaatatctgagtact

SEQ ID NO: 3918468 - DNA, 25 bp, Homo sapien
actttccacatgtcagacataggac

SEQ ID NO: 3918469 - DNA, 25 bp, Homo sapien
cgctctggtctacaaatgggcttct

SEQ ID NO: 3918470 - DNA, 25 bp, Homo sapien
agttttggcattagataaggaaagc

SEQ ID NO: 3918471 - DNA, 25 bp, Homo sapien
ggtttgcaacacagcaccagatagg

SEQ ID NO: 3918472 - DNA, 25 bp, Homo sapien
cagatagggtgctcgctctggtcta

SEQ ID NO: 3918473 - DNA, 25 bp, Homo sapien
ttctctgaagtaatggccatcacct

SEQ ID NO: 3918474 - DNA, 25 bp, Homo sapien
cattagaagtccagcattggtcctg

SEQ ID NO: 3918475 - DNA, 25 bp, Homo sapien
ctcgtgttttagttttccatggctg

SEQ ID NO: 3918476 - DNA, 25 bp, Homo sapien
taatggcttacaacaatacacactg

SEQ ID NO: 3918477 - DNA, 25 bp, Homo sapien
taaatactcaaagcaacagggctcc

SEQ ID NO: 3918478 - DNA, 25 bp, Homo sapien
tctgtgcgtgcacggaagttgccag

SEQ ID NO: 3918479 - DNA, 25 bp, Homo sapien
caaagaaagcctgacctggagctgg

SEQ ID NO: 3918480 - DNA, 25 bp, Homo sapien
agagtcagagacatgcacacgcctt

SEQ ID NO: 3918481 - DNA, 25 bp, Homo sapien
atttcagcatgcctttgagagagat

SEQ ID NO: 3918482 - DNA, 25 bp, Homo sapien
tatttcagcatgcctttgagagaga

SEQ ID NO: 3918483 - DNA, 25 bp, Homo sapien
tttcagcatgcctttgagagagatg

SEQ ID NO: 3918484 - DNA, 25 bp, Homo sapien
ctatttcagcatgcctttgagagag

SEQ ID NO: 3918485 - DNA, 25 bp, Homo sapien
gccccactggtaaagaagtaatatc

SEQ ID NO: 3918486 - DNA, 25 bp, Homo sapien
gagccccactggtaaagaagtaata

SEQ ID NO: 3918487 - DNA, 25 bp, Homo sapien
ccccactggtaaagaagtaatatct

SEQ ID NO: 3918488 - DNA, 25 bp, Homo sapien
aagaagtaatatctgcataatcaag

SEQ ID NO: 3918489 - DNA, 25 bp, Homo sapien
gccacgacgatctcaaagtccccat

SEQ ID NO: 3918490 - DNA, 25 bp, Homo sapien
aactgccacaccatagttgagctgg

SEQ ID NO: 3918491 - DNA, 25 bp, Homo sapien
tgagctgggtgggattactgtcata

SEQ ID NO: 3918492 - DNA, 25 bp, Homo sapien
ggtgggattactgtcatagtcagga

SEQ ID NO: 3918493 - DNA, 25 bp, Homo sapien
ggacccctcagtgatgggcagaaac

SEQ ID NO: 3918494 - DNA, 25 bp, Homo sapien
tcagtgatgggcagaaaccagagca

SEQ ID NO: 3918495 - DNA, 25 bp, Homo sapien
tgggacccctcagtgatgggcagaa

SEQ ID NO: 3918496 - DNA, 25 bp, Homo sapien
cctcagtgatgggcagaaaccagag

SEQ ID NO: 3918497 - DNA, 25 bp, Homo sapien
ccaaggccagagaggagcaagccat

SEQ ID NO: 3918498 - DNA, 25 bp, Homo sapien
aagggccaaggccagagaggagcaa

SEQ ID NO: 3918499 - DNA, 25 bp, Homo sapien
ggccaaggccagagaggagcaagcc

SEQ ID NO: 3918500 - DNA, 25 bp, Homo sapien
agggccaaggccagagaggagcaag

SEQ ID NO: 3918501 - DNA, 25 bp, Homo sapien
aagtagcctaggactccagtggggt

SEQ ID NO: 3918502 - DNA, 25 bp, Homo sapien
tccagtggggtgctaacactcctgg

SEQ ID NO: 3918503 - DNA, 25 bp, Homo sapien
tagcctaggactccagtggggtgct

SEQ ID NO: 3918504 - DNA, 25 bp, Homo sapien
tggggtgctaacactcctggctatt

SEQ ID NO: 3918505 - DNA, 25 bp, Homo sapien
catttgcagtacagggtgaggggtg

SEQ ID NO: 3918506 - DNA, 25 bp, Homo sapien
cactgtacttgtccggtgcaaacaa

SEQ ID NO: 3918507 - DNA, 25 bp, Homo sapien
acttgtccggtgcaaacaaagataa

SEQ ID NO: 3918508 - DNA, 25 bp, Homo sapien
cttgtcactgtacttgtccggtgca

SEQ ID NO: 3918509 - DNA, 25 bp, Homo sapien
tgtacttgtccggtgcaaacaaaga

SEQ ID NO: 3918510 - DNA, 25 bp, Homo sapien
cgccatcaccctttcttggagggag

SEQ ID NO: 3918511 - DNA, 25 bp, Homo sapien
tggaggagaagtcgccatcaccctt

SEQ ID NO: 3918512 - DNA, 25 bp, Homo sapien
ccaggagggttgagcaggaaaggat

SEQ ID NO: 3918513 - DNA, 25 bp, Homo sapien
tcccatccctcgttgaagttccttg

SEQ ID NO: 3918514 - DNA, 25 bp, Homo sapien
gaatctgggtaaaacggtctcagga

SEQ ID NO: 3918515 - DNA, 25 bp, Homo sapien
cacacacactcatagagaggcatgg

SEQ ID NO: 3918516 - DNA, 25 bp, Homo sapien
gagcagatctgaattgcagaccagc

SEQ ID NO: 3918517 - DNA, 25 bp, Homo sapien
tctggatctcagtgccctcggctgt

SEQ ID NO: 3918518 - DNA, 25 bp, Homo sapien
ggcaacaagcatccctttcgtgagt

SEQ ID NO: 3918519 - DNA, 25 bp, Homo sapien
tccatccagtgtgcaaagaagccag

SEQ ID NO: 3918520 - DNA, 25 bp, Homo sapien
cagcagtgggtttcttacgagggta

SEQ ID NO: 3918521 - DNA, 25 bp, Homo sapien
tacgagggtaggcttccgagtctgc

SEQ ID NO: 3918522 - DNA, 25 bp, Homo sapien
gacgccgcgcgctcgctttatacaa

SEQ ID NO: 3918523 - DNA, 25 bp, Homo sapien
cgagcgcgcccggtcttatgtaaag

SEQ ID NO: 3918524 - DNA, 25 bp, Homo sapien
tttatacaactccactcgagcgcgc

SEQ ID NO: 3918525 - DNA, 25 bp, Homo sapien
ccgcgctgatttaggagccgggatt

SEQ ID NO: 3918526 - DNA, 25 bp, Homo sapien
cagcgccgcttctaccccaccccgt

SEQ ID NO: 3918527 - DNA, 25 bp, Homo sapien
gagcagggctccgcgacggcccccg

SEQ ID NO: 3918528 - DNA, 25 bp, Homo sapien
gcggctgcgggcagcgccgcttcta

SEQ ID NO: 3918529 - DNA, 25 bp, Homo sapien
cgggcagcgccgcttctaccccacc

SEQ ID NO: 3918530 - DNA, 25 bp, Homo sapien
tttgcagagtcattctggccagagc

SEQ ID NO: 3918531 - DNA, 25 bp, Homo sapien
ctttctgtaactggatcctggttcc

SEQ ID NO: 3918532 - DNA, 25 bp, Homo sapien
cattgagcacgcaagggtatagaaa

SEQ ID NO: 3918533 - DNA, 25 bp, Homo sapien
cctttttgctgcatagctgttctca

SEQ ID NO: 3918534 - DNA, 25 bp, Homo sapien
gggacaccttcttgattagaagaga

SEQ ID NO: 3918535 - DNA, 25 bp, Homo sapien
tgccttctgggacaccttcttgatt

SEQ ID NO: 3918536 - DNA, 25 bp, Homo sapien
gagaagggtgtggtgttactgtcat

SEQ ID NO: 3918537 - DNA, 25 bp, Homo sapien
ccttcttgattagaagagaagggtg

SEQ ID NO: 3918538 - DNA, 25 bp, Homo sapien
tgcaagggatccagaaactcaaaat

SEQ ID NO: 3918539 - DNA, 25 bp, Homo sapien
atgcaagggatccagaaactcaaaa

SEQ ID NO: 3918540 - DNA, 25 bp, Homo sapien
gcaagggatccagaaactcaaaata

SEQ ID NO: 3918541 - DNA, 25 bp, Homo sapien
ctactcttggtgatggtgggtagtg

SEQ ID NO: 3918542 - DNA, 25 bp, Homo sapien
ctcttggtgatggtgggtagtgggt

SEQ ID NO: 3918543 - DNA, 25 bp, Homo sapien
tgatggtgggtagtgggtgtcagcc

SEQ ID NO: 3918544 - DNA, 25 bp, Homo sapien
gtgatggtgggtagtgggtgtcagc

SEQ ID NO: 3918545 - DNA, 25 bp, Homo sapien
tgggacagctgtaggcccccgagca

SEQ ID NO: 3918546 - DNA, 25 bp, Homo sapien
atctgcacagctgggttgtgggaca

SEQ ID NO: 3918547 - DNA, 25 bp, Homo sapien
ttgccagaatctgcacagctgggtt

SEQ ID NO: 3918548 - DNA, 25 bp, Homo sapien
ggttgtgggacagctgtaggccccc

SEQ ID NO: 3918549 - DNA, 25 bp, Homo sapien
ttttctgactccttgagtggttccc

SEQ ID NO: 3918550 - DNA, 25 bp, Homo sapien
tttctgactccttgagtggttccct

SEQ ID NO: 3918551 - DNA, 25 bp, Homo sapien
tctgactccttgagtggttcccttt

SEQ ID NO: 3918552 - DNA, 25 bp, Homo sapien
tggttttctgactccttgagtggtt

SEQ ID NO: 3918553 - DNA, 25 bp, Homo sapien
ctcagatcccagcttgcgttctcct

SEQ ID NO: 3918554 - DNA, 25 bp, Homo sapien
ccatcattgggacatacttctccct

SEQ ID NO: 3918555 - DNA, 25 bp, Homo sapien
tcctcagatcccagcttgcgttctc

SEQ ID NO: 3918556 - DNA, 25 bp, Homo sapien
cttcactggaagtggccatcattgg

SEQ ID NO: 3918557 - DNA, 25 bp, Homo sapien
ggtcaagtacatgcttggccatcag

SEQ ID NO: 3918558 - DNA, 25 bp, Homo sapien
catcagcagcagagcgtcataggtg

SEQ ID NO: 3918559 - DNA, 25 bp, Homo sapien
ctctggtcaagtacatgcttggcca

SEQ ID NO: 3918560 - DNA, 25 bp, Homo sapien
tggtcaagtacatgcttggccatca

SEQ ID NO: 3918561 - DNA, 25 bp, Homo sapien
cctgagacccctgcggttctaaata

SEQ ID NO: 3918562 - DNA, 25 bp, Homo sapien
gacccctgcggttctaaatagcagc

SEQ ID NO: 3918563 - DNA, 25 bp, Homo sapien
gcctgagacccctgcggttctaaat

SEQ ID NO: 3918564 - DNA, 25 bp, Homo sapien
gagacccctgcggttctaaatagca

SEQ ID NO: 3918565 - DNA, 25 bp, Homo sapien
tgggcgcggccgggcctcgcggaaa

SEQ ID NO: 3918566 - DNA, 25 bp, Homo sapien
gcggccgggcctcgcggaaactaca

SEQ ID NO: 3918567 - DNA, 25 bp, Homo sapien
ccacggcgttgggggcggagccgag

SEQ ID NO: 3918568 - DNA, 25 bp, Homo sapien
gtgacctgaactcagtgggcgcggc

SEQ ID NO: 3918569 - DNA, 25 bp, Homo sapien
gatttagtaagttgatatgacctgc

SEQ ID NO: 3918570 - DNA, 25 bp, Homo sapien
caaggaagatttagtaagttgatat

SEQ ID NO: 3918571 - DNA, 25 bp, Homo sapien
ttagtaagttgatatgacctgctgt

SEQ ID NO: 3918572 - DNA, 25 bp, Homo sapien
gaagatttagtaagttgatatgacc

SEQ ID NO: 3918573 - DNA, 25 bp, Homo sapien
gatgatcttttgagtatattccagc

SEQ ID NO: 3918574 - DNA, 25 bp, Homo sapien
gggccagccgatgtgcagggtgata

SEQ ID NO: 3918575 - DNA, 25 bp, Homo sapien
taaccagagggttggtcacagcaac

SEQ ID NO: 3918576 - DNA, 25 bp, Homo sapien
tgtagccagtgacgatgggccagcc

SEQ ID NO: 3918577 - DNA, 25 bp, Homo sapien
gacatgataatggtgatttgccgaa

SEQ ID NO: 3918578 - DNA, 25 bp, Homo sapien
tagttttgtgcagctaaacacagtg

SEQ ID NO: 3918579 - DNA, 25 bp, Homo sapien
aaataaatgttgatgttgagagctg

SEQ ID NO: 3918580 - DNA, 25 bp, Homo sapien
aattggatggaaactatgacatgat

SEQ ID NO: 3918581 - DNA, 25 bp, Homo sapien
ggaatcatgtatcttgtatcttttg

SEQ ID NO: 3918582 - DNA, 25 bp, Homo sapien
ttccagttgtgcaagctgtattctt

SEQ ID NO: 3918583 - DNA, 25 bp, Homo sapien
tcttccagttgtgcaagctgtattc

SEQ ID NO: 3918584 - DNA, 25 bp, Homo sapien
tcttttgttgtcttgatactcagtt

SEQ ID NO: 3918585 - DNA, 25 bp, Homo sapien
tgagcttctgccagggtgagaactg

SEQ ID NO: 3918586 - DNA, 25 bp, Homo sapien
gcttctgccagggtgagaactgtgt

SEQ ID NO: 3918587 - DNA, 25 bp, Homo sapien
gagcttctgccagggtgagaactgt

SEQ ID NO: 3918588 - DNA, 25 bp, Homo sapien
tctgccagggtgagaactgtgttac

SEQ ID NO: 3918589 - DNA, 25 bp, Homo sapien
cagtttcactggttggtggtcccat

SEQ ID NO: 3918590 - DNA, 25 bp, Homo sapien
ctgacagcgggctgtgataaatacc

SEQ ID NO: 3918591 - DNA, 25 bp, Homo sapien
tgacagcgggctgtgataaataccc

SEQ ID NO: 3918592 - DNA, 25 bp, Homo sapien
tcttctgagactccagagtcaccta

SEQ ID NO: 3918593 - DNA, 25 bp, Homo sapien
cttctgagactccagagtcacctaa

SEQ ID NO: 3918594 - DNA, 25 bp, Homo sapien
gtctaacaaggccattaatacgtcc

SEQ ID NO: 3918595 - DNA, 25 bp, Homo sapien
catggcaggtgctagagtttcagag

SEQ ID NO: 3918596 - DNA, 25 bp, Homo sapien
gctttagtgatagcaggcagcttgc

SEQ ID NO: 3918597 - DNA, 25 bp, Homo sapien
tagacagtctcattgccttagccca

SEQ ID NO: 3918598 - DNA, 25 bp, Homo sapien
ttagggtgtcagtcctgtaaggatc

SEQ ID NO: 3918599 - DNA, 25 bp, Homo sapien
tagcagtccataatgagcaactttt

SEQ ID NO: 3918600 - DNA, 25 bp, Homo sapien
cacttaagtgtgtctcagtggagaa

SEQ ID NO: 3918601 - DNA, 25 bp, Homo sapien
gtaaggatcatcacttaagtgtgtc

SEQ ID NO: 3918602 - DNA, 25 bp, Homo sapien
tgaatcccggatctctgtggcaaga

SEQ ID NO: 3918603 - DNA, 25 bp, Homo sapien
ccaatcctgagatgcgtggtgatcc

SEQ ID NO: 3918604 - DNA, 25 bp, Homo sapien
ggacatattccataggccacaggcc

SEQ ID NO: 3918605 - DNA, 25 bp, Homo sapien
tcttgctgctctgtaggaaggccct

SEQ ID NO: 3918606 - DNA, 25 bp, Homo sapien
agttctgcattggctgggtatgaat

SEQ ID NO: 3918607 - DNA, 25 bp, Homo sapien
gagttctgcattggctgggtatgaa

SEQ ID NO: 3918608 - DNA, 25 bp, Homo sapien
agagttctgcattggctgggtatga

SEQ ID NO: 3918609 - DNA, 25 bp, Homo sapien
ccatcatacttgcagcggcactgca

SEQ ID NO: 3918610 - DNA, 25 bp, Homo sapien
tgttggagaaatctgactctgccac

SEQ ID NO: 3918611 - DNA, 25 bp, Homo sapien
tctgccacttcatagtgggggttca

SEQ ID NO: 3918612 - DNA, 25 bp, Homo sapien
ttgtgcagccagacccggtgcccat

SEQ ID NO: 3918613 - DNA, 25 bp, Homo sapien
aagttggcacatgcgtagcgccgct

SEQ ID NO: 3918614 - DNA, 25 bp, Homo sapien
catctgtgatatccacccactggca

SEQ ID NO: 3918615 - DNA, 25 bp, Homo sapien
atgtcatgccggtaggtgtcccagc

SEQ ID NO: 3918616 - DNA, 25 bp, Homo sapien
gaagatataattcccggggcccaca

SEQ ID NO: 3918617 - DNA, 25 bp, Homo sapien
gagccattgagagtgaggaggtcgt

SEQ ID NO: 3918618 - DNA, 25 bp, Homo sapien
gaggaggtcgtagtgggtgaagacc

SEQ ID NO: 3918619 - DNA, 25 bp, Homo sapien
gaagacctcaatgctgtggtaatgc

SEQ ID NO: 3918620 - DNA, 25 bp, Homo sapien
gtttgtgtcctccagacagaagctg

SEQ ID NO: 3918621 - DNA, 25 bp, Homo sapien
cgtagggccagtccatgtgatccgc

SEQ ID NO: 3918622 - DNA, 25 bp, Homo sapien
tcctgcactagctgggcgttcatca

SEQ ID NO: 3918623 - DNA, 25 bp, Homo sapien
gaggcagttctcctcgtgggcacaa

SEQ ID NO: 3918624 - DNA, 25 bp, Homo sapien
tctttggacgaaagtcagtccggcc

SEQ ID NO: 3918625 - DNA, 25 bp, Homo sapien
ctggggcggcggagggcatggcagt

SEQ ID NO: 3918626 - DNA, 25 bp, Homo sapien
ggggcggcggagggcatggcagtga

SEQ ID NO: 3918627 - DNA, 25 bp, Homo sapien
tggggcggcggagggcatggcagtg

SEQ ID NO: 3918628 - DNA, 25 bp, Homo sapien
tgccccaggctggagccatctgcat

SEQ ID NO: 3918629 - DNA, 25 bp, Homo sapien
ggcaggccggccgcagcttgcccca

SEQ ID NO: 3918630 - DNA, 25 bp, Homo sapien
caggccggccgcagcttgccccagg

SEQ ID NO: 3918631 - DNA, 25 bp, Homo sapien
ctgggcaggccggccgcagcttgcc

SEQ ID NO: 3918632 - DNA, 25 bp, Homo sapien
tgcctgagcagcgcaccccactcat

SEQ ID NO: 3918633 - DNA, 25 bp, Homo sapien
ccgtgggagcagtgcaccggcccgt

SEQ ID NO: 3918634 - DNA, 25 bp, Homo sapien
gggagcagtgcaccggcccgtgcct

SEQ ID NO: 3918635 - DNA, 25 bp, Homo sapien
ggaagcgcccgccaccgtgggagca

SEQ ID NO: 3918636 - DNA, 25 bp, Homo sapien
tgggcccttggcgtccccgaccaga

SEQ ID NO: 3918637 - DNA, 25 bp, Homo sapien
ctttgagtgatcttgcccctgcctc

SEQ ID NO: 3918638 - DNA, 25 bp, Homo sapien
gagagagccacactacaatccctgg

SEQ ID NO: 3918639 - DNA, 25 bp, Homo sapien
catgtggattgcaagctttgagtga

SEQ ID NO: 3918640 - DNA, 25 bp, Homo sapien
catgtttgacagcactctcgagaga

SEQ ID NO: 3918641 - DNA, 25 bp, Homo sapien
aaaacccaggccgagctgtcggcag

SEQ ID NO: 3918642 - DNA, 25 bp, Homo sapien
cttgtaggcatggatggcaaaaccc

SEQ ID NO: 3918643 - DNA, 25 bp, Homo sapien
cagggatacgcccaccagccaagcg

SEQ ID NO: 3918644 - DNA, 25 bp, Homo sapien
tggcttcggtgagcccccagttttc

SEQ ID NO: 3918645 - DNA, 25 bp, Homo sapien
cacacagactccctcgtgccgacag

SEQ ID NO: 3918646 - DNA, 25 bp, Homo sapien
agtccatgttagcactgacactttg

SEQ ID NO: 3918647 - DNA, 25 bp, Homo sapien
gttagcactgacactttgccctgag

SEQ ID NO: 3918648 - DNA, 25 bp, Homo sapien
ctcgtgccgacagccctgtggccct

SEQ ID NO: 3918649 - DNA, 25 bp, Homo sapien
acccgagacgggtatgggagagcac

SEQ ID NO: 3918650 - DNA, 25 bp, Homo sapien
ggtatgggagagcacatccatctgc

SEQ ID NO: 3918651 - DNA, 25 bp, Homo sapien
agcttcacaggggacccgagacggg

SEQ ID NO: 3918652 - DNA, 25 bp, Homo sapien
agacgggtatgggagagcacatcca

SEQ ID NO: 3918653 - DNA, 25 bp, Homo sapien
tgagggtccgctcatatcccctgca

SEQ ID NO: 3918654 - DNA, 25 bp, Homo sapien
cccatgttagggacattgcacctga

SEQ ID NO: 3918655 - DNA, 25 bp, Homo sapien
tcatgttggcaaccattctgggacc

SEQ ID NO: 3918656 - DNA, 25 bp, Homo sapien
ttagggacattgcacctgacagcag

SEQ ID NO: 3918657 - DNA, 25 bp, Homo sapien
gcggttcatgagcacttccacccgg

SEQ ID NO: 3918658 - DNA, 25 bp, Homo sapien
agctgacgacacacgacactggcag

SEQ ID NO: 3918659 - DNA, 25 bp, Homo sapien
gccccactggcggttcatgagcact

SEQ ID NO: 3918660 - DNA, 25 bp, Homo sapien
tgtggtcacagaccgtgccccactg

SEQ ID NO: 3918661 - DNA, 25 bp, Homo sapien
gccccggagcgcaggcgcaccctcg

SEQ ID NO: 3918662 - DNA, 25 bp, Homo sapien
ctgggccccggagcgcaggcgcacc

SEQ ID NO: 3918663 - DNA, 25 bp, Homo sapien
cggagcgcaggcgcaccctcggctc

SEQ ID NO: 3918664 - DNA, 25 bp, Homo sapien
ccccggagcgcaggcgcaccctcgg

SEQ ID NO: 3918665 - DNA, 25 bp, Homo sapien
tgtggtgtgagtgcaggatgcccag

SEQ ID NO: 3918666 - DNA, 25 bp, Homo sapien
gtggtgtgagtgcaggatgcccagg

SEQ ID NO: 3918667 - DNA, 25 bp, Homo sapien
cgcccgtgcctccaagctgtggtgt

SEQ ID NO: 3918668 - DNA, 25 bp, Homo sapien
gtgtcccgcccgtgcctccaagctg

SEQ ID NO: 3918669 - DNA, 25 bp, Homo sapien
gctttgtcttcggtgggcggaagtg

SEQ ID NO: 3918670 - DNA, 25 bp, Homo sapien
ctttgtcttcggtgggcggaagtga

SEQ ID NO: 3918671 - DNA, 25 bp, Homo sapien
gaccctttgcgttgtggctttgtct

SEQ ID NO: 3918672 - DNA, 25 bp, Homo sapien
caggaccctttgcgttgtggctttg

SEQ ID NO: 3918673 - DNA, 25 bp, Homo sapien
aaggagttcttattcgtcaggctct

SEQ ID NO: 3918674 - DNA, 25 bp, Homo sapien
ggagttcttattcgtcaggctcttc

SEQ ID NO: 3918675 - DNA, 25 bp, Homo sapien
cacctggcagttggccatgtggggc

SEQ ID NO: 3918676 - DNA, 25 bp, Homo sapien
gttcttattcgtcaggctcttcagc

SEQ ID NO: 3918677 - DNA, 25 bp, Homo sapien
ctagacttagggtccctcatcttca

SEQ ID NO: 3918678 - DNA, 25 bp, Homo sapien
aggatgggcttgagccgcacctcct

SEQ ID NO: 3918679 - DNA, 25 bp, Homo sapien
tcactgggctatgctgcttggcact

SEQ ID NO: 3918680 - DNA, 25 bp, Homo sapien
cacaccaccctgctgttgttcatgg

SEQ ID NO: 3918681 - DNA, 25 bp, Homo sapien
tgtagtagtggctgtcgacaggcac

SEQ ID NO: 3918682 - DNA, 25 bp, Homo sapien
gtgactgcagtcactgactccccag

SEQ ID NO: 3918683 - DNA, 25 bp, Homo sapien
cccgcactggtccaaggagctctct

SEQ ID NO: 3918684 - DNA, 25 bp, Homo sapien
tatcacccctacgtcttctgagtga

SEQ ID NO: 3918685 - DNA, 25 bp, Homo sapien
cagtttcagaaaggtagccacgatg

SEQ ID NO: 3918686 - DNA, 25 bp, Homo sapien
caggtcaaggcagcttcgaagccca

SEQ ID NO: 3918687 - DNA, 25 bp, Homo sapien
cctggatagcaaagttgtcatcaca

SEQ ID NO: 3918688 - DNA, 25 bp, Homo sapien
cttagtggtgcccagtgactgtggc

SEQ ID NO: 3918689 - DNA, 25 bp, Homo sapien
ccttggccgtacttggcactgtggg

SEQ ID NO: 3918690 - DNA, 25 bp, Homo sapien
tcaaggacagctgaggccaagatac

SEQ ID NO: 3918691 - DNA, 25 bp, Homo sapien
gacttcaaggacagctgaggccaag

SEQ ID NO: 3918692 - DNA, 25 bp, Homo sapien
cttcaaggacagctgaggccaagat

SEQ ID NO: 3918693 - DNA, 25 bp, Homo sapien
ggtgacttcaaggacagctgaggcc

SEQ ID NO: 3918694 - DNA, 25 bp, Homo sapien
ccggtctggatagttggagagccca

SEQ ID NO: 3918695 - DNA, 25 bp, Homo sapien
agatcagccctggttcgttgtcccc

SEQ ID NO: 3918696 - DNA, 25 bp, Homo sapien
tcggtgtttctgtcacacgccgacc

SEQ ID NO: 3918697 - DNA, 25 bp, Homo sapien
ccaacataatcagctccggtctgga

SEQ ID NO: 3918698 - DNA, 25 bp, Homo sapien
gcggagcagcgctaacgggctccct

SEQ ID NO: 3918699 - DNA, 25 bp, Homo sapien
cgcggcggagcagcgctaacgggct

SEQ ID NO: 3918700 - DNA, 25 bp, Homo sapien
gatggagcgcggacagtccggggct

SEQ ID NO: 3918701 - DNA, 25 bp, Homo sapien
cgccgcggcggagcagcgctaacgg

SEQ ID NO: 3918702 - DNA, 25 bp, Homo sapien
cccaggactgtgtttgaaacgccaa

SEQ ID NO: 3918703 - DNA, 25 bp, Homo sapien
ccaggagcgagatgtagagccattg

SEQ ID NO: 3918704 - DNA, 25 bp, Homo sapien
caggtgcaattatccttggagtccc

SEQ ID NO: 3918705 - DNA, 25 bp, Homo sapien
tatcaaagtccaagcaagaagtcag

SEQ ID NO: 3918706 - DNA, 25 bp, Homo sapien
tcacatggccaaggcaaagtctaga

SEQ ID NO: 3918707 - DNA, 25 bp, Homo sapien
tgaagggccctttacctcacatggc

SEQ ID NO: 3918708 - DNA, 25 bp, Homo sapien
catacatgagttttcagagtccctc

SEQ ID NO: 3918709 - DNA, 25 bp, Homo sapien
tctcatgagttacagagagtccctg

SEQ ID NO: 3918710 - DNA, 25 bp, Homo sapien
tcgggtctccttaggcttgtagaac

SEQ ID NO: 3918711 - DNA, 25 bp, Homo sapien
gactgggagtacagaggagattcca

SEQ ID NO: 3918712 - DNA, 25 bp, Homo sapien
catgtttctgagtaggcagggtccc

SEQ ID NO: 3918713 - DNA, 25 bp, Homo sapien
cacatgcaacagttagggttgagct

SEQ ID NO: 3918714 - DNA, 25 bp, Homo sapien
catgaacaacggagagcacaatggg

SEQ ID NO: 3918715 - DNA, 25 bp, Homo sapien
tctcttccaataaattggagttggg

SEQ ID NO: 3918716 - DNA, 25 bp, Homo sapien
caataaattggagttgggactgaga

SEQ ID NO: 3918717 - DNA, 25 bp, Homo sapien
tacaatgtgatactcatgaacaacg

SEQ ID NO: 3918718 - DNA, 25 bp, Homo sapien
tgctgttgagccagatgtggaagtg

SEQ ID NO: 3918719 - DNA, 25 bp, Homo sapien
tgttgagccagatgtggaagtgttc

SEQ ID NO: 3918720 - DNA, 25 bp, Homo sapien
cagagggtgctgttgagccagatgt

SEQ ID NO: 3918721 - DNA, 25 bp, Homo sapien
gggtgctgttgagccagatgtggaa

SEQ ID NO: 3918722 - DNA, 25 bp, Homo sapien
tacaagggggttgactgcactgccc

SEQ ID NO: 3918723 - DNA, 25 bp, Homo sapien
tattctgcttcccagtatacaaggg

SEQ ID NO: 3918724 - DNA, 25 bp, Homo sapien
tggatcatgtctacacagcccgagg

SEQ ID NO: 3918725 - DNA, 25 bp, Homo sapien
ccccaggaaccagtgtgtgaactct

SEQ ID NO: 3918726 - DNA, 25 bp, Homo sapien
gagcaggcattggcaatggattgtg

SEQ ID NO: 3918727 - DNA, 25 bp, Homo sapien
ctgcagtcttgggagcaggcattgg

SEQ ID NO: 3918728 - DNA, 25 bp, Homo sapien
aggcattggcaatggattgtgagca

SEQ ID NO: 3918729 - DNA, 25 bp, Homo sapien
tgcagtcttgggagcaggcattggc

SEQ ID NO: 3918730 - DNA, 25 bp, Homo sapien
gtaatgccgaagaccagacctgttt

SEQ ID NO: 3918731 - DNA, 25 bp, Homo sapien
ctcccaagaatcctgtaggttgctt

SEQ ID NO: 3918732 - DNA, 25 bp, Homo sapien
tgtggcatggctgatactgcaagct

SEQ ID NO: 3918733 - DNA, 25 bp, Homo sapien
ttgcttgctgacaggaacagaagag

SEQ ID NO: 3918734 - DNA, 25 bp, Homo sapien
ccatcccgggtgacgtgggcggtca

SEQ ID NO: 3918735 - DNA, 25 bp, Homo sapien
cctgaagtacccaggcgagcaccat

SEQ ID NO: 3918736 - DNA, 25 bp, Homo sapien
ctgaagtacccaggcgagcaccatc

SEQ ID NO: 3918737 - DNA, 25 bp, Homo sapien
caggcgagcaccatcccgggtgacg

SEQ ID NO: 3918738 - DNA, 25 bp, Homo sapien
tagagggattcgcggccggcacata

SEQ ID NO: 3918739 - DNA, 25 bp, Homo sapien
ctagagggattcgcggccggcacat

SEQ ID NO: 3918740 - DNA, 25 bp, Homo sapien
agggattcgcggccggcacatagca

SEQ ID NO: 3918741 - DNA, 25 bp, Homo sapien
attcgcggccggcacatagcaagtg

SEQ ID NO: 3918742 - DNA, 25 bp, Homo sapien
gggacattatgagaggaccttcagc

SEQ ID NO: 3918743 - DNA, 25 bp, Homo sapien
cagagagtccttgccgagggaccgc

SEQ ID NO: 3918744 - DNA, 25 bp, Homo sapien
ggtggctccgaaagccgtggctgga

SEQ ID NO: 3918745 - DNA, 25 bp, Homo sapien
gtcacccgtgtcagacttgttgaag

SEQ ID NO: 3918746 - DNA, 25 bp, Homo sapien
caggatctaggacagtgtctggccc

SEQ ID NO: 3918747 - DNA, 25 bp, Homo sapien
tgacagcatgtgaggcagacgtgtc

SEQ ID NO: 3918748 - DNA, 25 bp, Homo sapien
aggcagacgtgtccctttcaaccac

SEQ ID NO: 3918749 - DNA, 25 bp, Homo sapien
taaaccagagctccatgacagcatg

SEQ ID NO: 3918750 - DNA, 25 bp, Homo sapien
ctccacgtcgggtgagagcacctgg

SEQ ID NO: 3918751 - DNA, 25 bp, Homo sapien
cctccacgtcgggtgagagcacctg

SEQ ID NO: 3918752 - DNA, 25 bp, Homo sapien
tcctccacgtcgggtgagagcacct

SEQ ID NO: 3918753 - DNA, 25 bp, Homo sapien
tgaacagtccctgcaaacacgaggg

SEQ ID NO: 3918754 - DNA, 25 bp, Homo sapien
aacacgagggattgatgtatgtcca

SEQ ID NO: 3918755 - DNA, 25 bp, Homo sapien
caggtatgtcatgaaaaggttccac

SEQ ID NO: 3918756 - DNA, 25 bp, Homo sapien
tatttggccctggtctaggtaactg

SEQ ID NO: 3918757 - DNA, 25 bp, Homo sapien
cttttgggttggcataagagtgttc

SEQ ID NO: 3918758 - DNA, 25 bp, Homo sapien
gcctctcccgtgtctccaggattca

SEQ ID NO: 3918759 - DNA, 25 bp, Homo sapien
cataagagtgttcgtctctcagcaa

SEQ ID NO: 3918760 - DNA, 25 bp, Homo sapien
tctccacggaattttgggatcacag

SEQ ID NO: 3918761 - DNA, 25 bp, Homo sapien
ttcgtgccgagaggaggctcttaaa

SEQ ID NO: 3918762 - DNA, 25 bp, Homo sapien
tcgtgccgagaggaggctcttaaac

SEQ ID NO: 3918763 - DNA, 25 bp, Homo sapien
cgtgccgagaggaggctcttaaaca

SEQ ID NO: 3918764 - DNA, 25 bp, Homo sapien
gtgccgagaggaggctcttaaacat

SEQ ID NO: 3918765 - DNA, 25 bp, Homo sapien
tagaaaaattggctgtgtgttagga

SEQ ID NO: 3918766 - DNA, 25 bp, Homo sapien
aatagaggaataaattagctagcct

SEQ ID NO: 3918767 - DNA, 25 bp, Homo sapien
tagctagcctttaaaactgagggaa

SEQ ID NO: 3918768 - DNA, 25 bp, Homo sapien
tcttgttattatcaggacacataag

SEQ ID NO: 3918769 - DNA, 25 bp, Homo sapien
tctgggccccagaggcaggtgtcgt

SEQ ID NO: 3918770 - DNA, 25 bp, Homo sapien
gctctgggccccagaggcaggtgtc

SEQ ID NO: 3918771 - DNA, 25 bp, Homo sapien
gggctctgggccccagaggcaggtg

SEQ ID NO: 3918772 - DNA, 25 bp, Homo sapien
ctggtttctggggctctgggcccca

SEQ ID NO: 3918773 - DNA, 25 bp, Homo sapien
aggttccacagccaggatccgtctt

SEQ ID NO: 3918774 - DNA, 25 bp, Homo sapien
ctaaagcttcccagatccaggttcc

SEQ ID NO: 3918775 - DNA, 25 bp, Homo sapien
cagatccaggttccacagccaggat

SEQ ID NO: 3918776 - DNA, 25 bp, Homo sapien
gttccacagccaggatccgtcttct

SEQ ID NO: 3918777 - DNA, 25 bp, Homo sapien
gcagaggtgaatgaggagctgtttg

SEQ ID NO: 3918778 - DNA, 25 bp, Homo sapien
ctgtggcagaggtgaatgaggagct

SEQ ID NO: 3918779 - DNA, 25 bp, Homo sapien
tgaatgaggagctgtttgcattgag

SEQ ID NO: 3918780 - DNA, 25 bp, Homo sapien
aggtgaatgaggagctgtttgcatt

SEQ ID NO: 3918781 - DNA, 25 bp, Homo sapien
ccaactcatgtccatatctcaactg

SEQ ID NO: 3918782 - DNA, 25 bp, Homo sapien
caactcatgtccatatctcaactgc

SEQ ID NO: 3918783 - DNA, 25 bp, Homo sapien
gacagaggggtgtagtagtctgaag

SEQ ID NO: 3918784 - DNA, 25 bp, Homo sapien
gtagtctgaagatctggctctagcc

SEQ ID NO: 3918785 - DNA, 25 bp, Homo sapien
tgttcaggaatctaggcacagctgg

SEQ ID NO: 3918786 - DNA, 25 bp, Homo sapien
ggttttcaacagggctacctgcctc

SEQ ID NO: 3918787 - DNA, 25 bp, Homo sapien
gactccctgttcagggtgtcacaag

SEQ ID NO: 3918788 - DNA, 25 bp, Homo sapien
cacagtgccggccaggctgtgttct

SEQ ID NO: 3918789 - DNA, 25 bp, Homo sapien
ccagacggcctcagtggaatccact

SEQ ID NO: 3918790 - DNA, 25 bp, Homo sapien
tgcccagcattgttcaggaccgtgg

SEQ ID NO: 3918791 - DNA, 25 bp, Homo sapien
tgcagtcacccttggctgctttttg

SEQ ID NO: 3918792 - DNA, 25 bp, Homo sapien
ctgactggaggattctgtggcttga

SEQ ID NO: 3918793 - DNA, 25 bp, Homo sapien
ggcatgggcataaggtcaacttgca

SEQ ID NO: 3918794 - DNA, 25 bp, Homo sapien
tgcactaaatgtaactcgtacgttt

SEQ ID NO: 3918795 - DNA, 25 bp, Homo sapien
cagtccatgtatggaggcatgggca

SEQ ID NO: 3918796 - DNA, 25 bp, Homo sapien
cattgtggtggccttatgtactaac

SEQ ID NO: 3918797 - DNA, 25 bp, Homo sapien
tgggaagctgatccaatggagcact

SEQ ID NO: 3918798 - DNA, 25 bp, Homo sapien
aaaggccacatgtgctgcatttcgc

SEQ ID NO: 3918799 - DNA, 25 bp, Homo sapien
aggccacatgtgctgcatttcgccc

SEQ ID NO: 3918800 - DNA, 25 bp, Homo sapien
aaggccacatgtgctgcatttcgcc

SEQ ID NO: 3918801 - DNA, 25 bp, Homo sapien
taaaggccacatgtgctgcatttcg

SEQ ID NO: 3918802 - DNA, 25 bp, Homo sapien
cccacagtctcaacggctgagggtg

SEQ ID NO: 3918803 - DNA, 25 bp, Homo sapien
aagacagccgctcaatagattctgg

SEQ ID NO: 3918804 - DNA, 25 bp, Homo sapien
ggaatcacctaagacagccgctcaa

SEQ ID NO: 3918805 - DNA, 25 bp, Homo sapien
tgctggatgggcacacgcttagtaa

SEQ ID NO: 3918806 - DNA, 25 bp, Homo sapien
tccgttaggcttggaatgcgcacaa

SEQ ID NO: 3918807 - DNA, 25 bp, Homo sapien
taggcgatagcgtgaagccctgtct

SEQ ID NO: 3918808 - DNA, 25 bp, Homo sapien
ggtgagatgcctccaccaggatgca

SEQ ID NO: 3918809 - DNA, 25 bp, Homo sapien
gaatttagggacatgggtctctcac

SEQ ID NO: 3918810 - DNA, 25 bp, Homo sapien
cggggcgggcgaagtagagctggtc

SEQ ID NO: 3918811 - DNA, 25 bp, Homo sapien
ttccacagagatacaggccctggag

SEQ ID NO: 3918812 - DNA, 25 bp, Homo sapien
gagagggcagcggtagccagaatgc

SEQ ID NO: 3918813 - DNA, 25 bp, Homo sapien
tggtccagggacatggcgcagtgga

SEQ ID NO: 3918814 - DNA, 25 bp, Homo sapien
gcacaggagagttacagcctttcct

SEQ ID NO: 3918815 - DNA, 25 bp, Homo sapien
cacaggagagttacagcctttcctg

SEQ ID NO: 3918816 - DNA, 25 bp, Homo sapien
aatgttcttctccttccaggatatt

SEQ ID NO: 3918817 - DNA, 25 bp, Homo sapien
tgttcttctccttccaggatatttt

SEQ ID NO: 3918818 - DNA, 25 bp, Homo sapien
caaatgttcttctccttccaggata

SEQ ID NO: 3918819 - DNA, 25 bp, Homo sapien
tcagcaaatgttcttctccttccag

SEQ ID NO: 3918820 - DNA, 25 bp, Homo sapien
gcaacggagcccgagcacggttctg

SEQ ID NO: 3918821 - DNA, 25 bp, Homo sapien
ttggcatgcgtctctgcgagaactc

SEQ ID NO: 3918822 - DNA, 25 bp, Homo sapien
gtctgacttattgtggctgttggca

SEQ ID NO: 3918823 - DNA, 25 bp, Homo sapien
gatgagacggaatgggcacatgccc

SEQ ID NO: 3918824 - DNA, 25 bp, Homo sapien
tctttcctctatacctggaccagtg

SEQ ID NO: 3918825 - DNA, 25 bp, Homo sapien
gactcctatgtgcacactgtcacca

SEQ ID NO: 3918826 - DNA, 25 bp, Homo sapien
ctgacgtctgttgggcatcctcaca

SEQ ID NO: 3918827 - DNA, 25 bp, Homo sapien
catcctcctgcataagtgaatgaca

SEQ ID NO: 3918828 - DNA, 25 bp, Homo sapien
catagttgtcaaggcagagggccac

SEQ ID NO: 3918829 - DNA, 25 bp, Homo sapien
tgaagtgtaatgacgcatcacagct

SEQ ID NO: 3918830 - DNA, 25 bp, Homo sapien
tgcaatgaggcgattgaacctggcc

SEQ ID NO: 3918831 - DNA, 25 bp, Homo sapien
gccacaatcctggtgaccttctcag

SEQ ID NO: 3918832 - DNA, 25 bp, Homo sapien
tccaggaagcccgaagattctctcc

SEQ ID NO: 3918833 - DNA, 25 bp, Homo sapien
gggcatagacctcgatgcaatcaaa

SEQ ID NO: 3918834 - DNA, 25 bp, Homo sapien
tctctccaaatctggtggtgtgagg

SEQ ID NO: 3918835 - DNA, 25 bp, Homo sapien
ggtgtgaggatgtctctgccaacca

SEQ ID NO: 3918836 - DNA, 25 bp, Homo sapien
aggaggcactatgggtgtacaactt

SEQ ID NO: 3918837 - DNA, 25 bp, Homo sapien
cactatgggtgtacaacttggcaaa

SEQ ID NO: 3918838 - DNA, 25 bp, Homo sapien
gaggcactatgggtgtacaacttgg

SEQ ID NO: 3918839 - DNA, 25 bp, Homo sapien
ggcactatgggtgtacaacttggca

SEQ ID NO: 3918840 - DNA, 25 bp, Homo sapien
gtctctctggctcatgcgtctcctt

SEQ ID NO: 3918841 - DNA, 25 bp, Homo sapien
catccttggaaacccagcttgacca

SEQ ID NO: 3918842 - DNA, 25 bp, Homo sapien
cctttggttcgtgcagtcagctgtg

SEQ ID NO: 3918843 - DNA, 25 bp, Homo sapien
ggccagctcctagtcatccttggaa

SEQ ID NO: 3918844 - DNA, 25 bp, Homo sapien
cccagttgggtcgcatgcccggctg

SEQ ID NO: 3918845 - DNA, 25 bp, Homo sapien
tgtcaatcctgaatggggcagtgag

SEQ ID NO: 3918846 - DNA, 25 bp, Homo sapien
ccagttgggtcgcatgcccggctgt

SEQ ID NO: 3918847 - DNA, 25 bp, Homo sapien
ctgcagttgtcaatcctgaatgggg

SEQ ID NO: 3918848 - DNA, 25 bp, Homo sapien
aggccttgcctccagccagcgtata

SEQ ID NO: 3918849 - DNA, 25 bp, Homo sapien
ctctgtctgcataagcgtctctctc

SEQ ID NO: 3918850 - DNA, 25 bp, Homo sapien
tatagggcatgtactgagtgaagag

SEQ ID NO: 3918851 - DNA, 25 bp, Homo sapien
tgaagagggagactacatggcagcc

SEQ ID NO: 3918852 - DNA, 25 bp, Homo sapien
ggcgattgtcgctctacagccacag

SEQ ID NO: 3918853 - DNA, 25 bp, Homo sapien
caaacgcaaatgtctcgaaggtcca

SEQ ID NO: 3918854 - DNA, 25 bp, Homo sapien
ttagcggctgctagcgtggtccaga

SEQ ID NO: 3918855 - DNA, 25 bp, Homo sapien
tgacttgggacacagtggaggccct

SEQ ID NO: 3918856 - DNA, 25 bp, Homo sapien
caagtgccacgttattagagaagcc

SEQ ID NO: 3918857 - DNA, 25 bp, Homo sapien
gcaggctctgcacaaactttcctgg

SEQ ID NO: 3918858 - DNA, 25 bp, Homo sapien
taacccattgcaacagatgccttaa

SEQ ID NO: 3918859 - DNA, 25 bp, Homo sapien
tctgcatacagtgtccaggttggtc

SEQ ID NO: 3918860 - DNA, 25 bp, Homo sapien
cacttcctgtccttaggagtatgga

SEQ ID NO: 3918861 - DNA, 25 bp, Homo sapien
cctcatcctcagatttttcacctgg

SEQ ID NO: 3918862 - DNA, 25 bp, Homo sapien
tgggatgcacttcctgtccttagga

SEQ ID NO: 3918863 - DNA, 25 bp, Homo sapien
tcacctgggatgcacttcctgtcct

SEQ ID NO: 3918864 - DNA, 25 bp, Homo sapien
catcttcaaaggcctgatgaaggag

SEQ ID NO: 3918865 - DNA, 25 bp, Homo sapien
tcacagttcaggtggatggagcatt

SEQ ID NO: 3918866 - DNA, 25 bp, Homo sapien
gtcttcacagttcaggtggatggag

SEQ ID NO: 3918867 - DNA, 25 bp, Homo sapien
ccctgggagcattgggggccgccag

SEQ ID NO: 3918868 - DNA, 25 bp, Homo sapien
agcctggaggtttctcactcagatg

SEQ ID NO: 3918869 - DNA, 25 bp, Homo sapien
ggagatgatgactgagttcagctgc

SEQ ID NO: 3918870 - DNA, 25 bp, Homo sapien
aaggagacagtgctgcaatgtggtg

SEQ ID NO: 3918871 - DNA, 25 bp, Homo sapien
cccagcctggaggtttctcactcag

SEQ ID NO: 3918872 - DNA, 25 bp, Homo sapien
gatcttggtgacaggcgaccgggtg

SEQ ID NO: 3918873 - DNA, 25 bp, Homo sapien
acaggcgaccgggtgtccagctgag

SEQ ID NO: 3918874 - DNA, 25 bp, Homo sapien
ttggtgacaggcgaccgggtgtcca

SEQ ID NO: 3918875 - DNA, 25 bp, Homo sapien
cgaccgggtgtccagctgagagatt

SEQ ID NO: 3918876 - DNA, 25 bp, Homo sapien
catgaaaggcctcagatgtccaagg

SEQ ID NO: 3918877 - DNA, 25 bp, Homo sapien
gctcttggaagcctcgacgatctca

SEQ ID NO: 3918878 - DNA, 25 bp, Homo sapien
aacatgcctggactaccgtgctgga

SEQ ID NO: 3918879 - DNA, 25 bp, Homo sapien
gacacatggagcatagccgagtccc

SEQ ID NO: 3918880 - DNA, 25 bp, Homo sapien
caggaaggtgatctgcggtgatgtg

SEQ ID NO: 3918881 - DNA, 25 bp, Homo sapien
cagcacaactccttgaacacagcct

SEQ ID NO: 3918882 - DNA, 25 bp, Homo sapien
gcacaactccttgaacacagccttc

SEQ ID NO: 3918883 - DNA, 25 bp, Homo sapien
agcacaactccttgaacacagcctt

SEQ ID NO: 3918884 - DNA, 25 bp, Homo sapien
agtgaagatgcttgctccatgtgtg

SEQ ID NO: 3918885 - DNA, 25 bp, Homo sapien
ttcagtgaagatgcttgctccatgt

SEQ ID NO: 3918886 - DNA, 25 bp, Homo sapien
gcttgcgatcgcatcagagagggca

SEQ ID NO: 3918887 - DNA, 25 bp, Homo sapien
ctgagcttgcgatcgcatcagagag

SEQ ID NO: 3918888 - DNA, 25 bp, Homo sapien
tatcctggagccctatcttaaagcc

SEQ ID NO: 3918889 - DNA, 25 bp, Homo sapien
gcctccaaagggctttcaaggtcat

SEQ ID NO: 3918890 - DNA, 25 bp, Homo sapien
catccacaaagcaacaccaactcag

SEQ ID NO: 3918891 - DNA, 25 bp, Homo sapien
tgctgcagtagtgcccctcattgga

SEQ ID NO: 3918892 - DNA, 25 bp, Homo sapien
gctcagactcgaaccactgatccag

SEQ ID NO: 3918893 - DNA, 25 bp, Homo sapien
tctgtggctagagtggcttttaaag

SEQ ID NO: 3918894 - DNA, 25 bp, Homo sapien
gtcatggctccaatcactgcatctg

SEQ ID NO: 3918895 - DNA, 25 bp, Homo sapien
tgcatctgtggctagagtggctttt

SEQ ID NO: 3918896 - DNA, 25 bp, Homo sapien
tgggagctgtgaggacctcataata

SEQ ID NO: 3918897 - DNA, 25 bp, Homo sapien
gctgtgaggacctcataatatcggg

SEQ ID NO: 3918898 - DNA, 25 bp, Homo sapien
acctcataatatcggggaagctggg

SEQ ID NO: 3918899 - DNA, 25 bp, Homo sapien
gtaatgggagctgtgaggacctcat

SEQ ID NO: 3918900 - DNA, 25 bp, Homo sapien
atgccaagcgatgcatgaactcctc

SEQ ID NO: 3918901 - DNA, 25 bp, Homo sapien
atgctggaaggccgccatgtccacg

SEQ ID NO: 3918902 - DNA, 25 bp, Homo sapien
cagagggtcaatggctaatgccaag

SEQ ID NO: 3918903 - DNA, 25 bp, Homo sapien
gagagcgacctcatcctttgcagca

SEQ ID NO: 3918904 - DNA, 25 bp, Homo sapien
ccatgtcagaatccactttcgaaag

SEQ ID NO: 3918905 - DNA, 25 bp, Homo sapien
tgtcagaatccactttcgaaagcct

SEQ ID NO: 3918906 - DNA, 25 bp, Homo sapien
accccacaagctcccatgtcagaat

SEQ ID NO: 3918907 - DNA, 25 bp, Homo sapien
cagaatccactttcgaaagcctggt

SEQ ID NO: 3918908 - DNA, 25 bp, Homo sapien
ctccacccgcttctcttcgcagtgc

SEQ ID NO: 3918909 - DNA, 25 bp, Homo sapien
cacccgcttctcttcgcagtgcctg

SEQ ID NO: 3918910 - DNA, 25 bp, Homo sapien
tccacccgcttctcttcgcagtgcc

SEQ ID NO: 3918911 - DNA, 25 bp, Homo sapien
actggagccctcctaggaacgtggg

SEQ ID NO: 3918912 - DNA, 25 bp, Homo sapien
cagaaggcacctgggcaccttgctg

SEQ ID NO: 3918913 - DNA, 25 bp, Homo sapien
tgccatgtctgtgcccagcagaagg

SEQ ID NO: 3918914 - DNA, 25 bp, Homo sapien
tctgggagaactgggcgatctgctt

SEQ ID NO: 3918915 - DNA, 25 bp, Homo sapien
gggtttcgaagatgaagcctcagcc

SEQ ID NO: 3918916 - DNA, 25 bp, Homo sapien
tccccaagtagaatgtaagccctgt

SEQ ID NO: 3918917 - DNA, 25 bp, Homo sapien
tttctgctgtcgagaggcttccttc

SEQ ID NO: 3918918 - DNA, 25 bp, Homo sapien
gactcgaggtcttggctggaatgcc

SEQ ID NO: 3918919 - DNA, 25 bp, Homo sapien
tggaatgccaccttatcagccaggc

SEQ ID NO: 3918920 - DNA, 25 bp, Homo sapien
tccaagccgccattttgggaaccgc

SEQ ID NO: 3918921 - DNA, 25 bp, Homo sapien
ggtcatccttgacatcccatccgct

SEQ ID NO: 3918922 - DNA, 25 bp, Homo sapien
aatctgtgcgcgtctctccaagccg

SEQ ID NO: 3918923 - DNA, 25 bp, Homo sapien
cccatccgctgcctccagaatctgt

SEQ ID NO: 3918924 - DNA, 25 bp, Homo sapien
tagagccctaccttagagagatttc

SEQ ID NO: 3918925 - DNA, 25 bp, Homo sapien
ttgtggccctgcaaattagagccct

SEQ ID NO: 3918926 - DNA, 25 bp, Homo sapien
tggattccatcatccagcgcagggc

SEQ ID NO: 3918927 - DNA, 25 bp, Homo sapien
gggccgctgcaaaagcaaactcatt

SEQ ID NO: 3918928 - DNA, 25 bp, Homo sapien
ttcagataggtgtcccacgtgggcc

SEQ ID NO: 3918929 - DNA, 25 bp, Homo sapien
gggagaccacgtgggatacacaaga

SEQ ID NO: 3918930 - DNA, 25 bp, Homo sapien
tcaagacactacatggacgagacaa

SEQ ID NO: 3918931 - DNA, 25 bp, Homo sapien
atcacctcgggcacagaacagggac

SEQ ID NO: 3918932 - DNA, 25 bp, Homo sapien
ccagatcagtgtaaatctgcggcct

SEQ ID NO: 3918933 - DNA, 25 bp, Homo sapien
aggctgagcaggtaggacgcgcggg

SEQ ID NO: 3918934 - DNA, 25 bp, Homo sapien
gagcaggtaggacgcgcgggagaac

SEQ ID NO: 3918935 - DNA, 25 bp, Homo sapien
cagtgtaaatctgcggcctcagcag

SEQ ID NO: 3918936 - DNA, 25 bp, Homo sapien
catggcgcctctcgaagacggcggt

SEQ ID NO: 3918937 - DNA, 25 bp, Homo sapien
atcacatggcgcctctcgaagacgg

SEQ ID NO: 3918938 - DNA, 25 bp, Homo sapien
gcctctcgaagacggcggtgttcac

SEQ ID NO: 3918939 - DNA, 25 bp, Homo sapien
ccgatcacatggcgcctctcgaaga

SEQ ID NO: 3918940 - DNA, 25 bp, Homo sapien
atattaatataaaatcaggccgggc

SEQ ID NO: 3918941 - DNA, 25 bp, Homo sapien
cgaggttcccctgatgtgagttccc

SEQ ID NO: 3918942 - DNA, 25 bp, Homo sapien
gactcggagaggctaagtgacacct

SEQ ID NO: 3918943 - DNA, 25 bp, Homo sapien
tgagttccctcgctgcaaagagcaa

SEQ ID NO: 3918944 - DNA, 25 bp, Homo sapien
ctcaaggcccttatcccacctgctt

SEQ ID NO: 3918945 - DNA, 25 bp, Homo sapien
ctgcagatgagcattcgacccagcc

SEQ ID NO: 3918946 - DNA, 25 bp, Homo sapien
gactccctcacaggccatggggaaa

SEQ ID NO: 3918947 - DNA, 25 bp, Homo sapien
gagagcatcgactaggctgcctttt

SEQ ID NO: 3918948 - DNA, 25 bp, Homo sapien
taaacaatccgccagtgggactcat

SEQ ID NO: 3918949 - DNA, 25 bp, Homo sapien
tgtaggtagttgctatcaagcgcgg

SEQ ID NO: 3918950 - DNA, 25 bp, Homo sapien
gaaggttgtataaatgtcgactccc

SEQ ID NO: 3918951 - DNA, 25 bp, Homo sapien
cacagtggtgccctagaaggcttta

SEQ ID NO: 3918952 - DNA, 25 bp, Homo sapien
tatctctgtatagacccagttggca

SEQ ID NO: 3918953 - DNA, 25 bp, Homo sapien
ttgagtatctaccagctcgcaactg

SEQ ID NO: 3918954 - DNA, 25 bp, Homo sapien
ggcatgccctcaaagctgcatgttg

SEQ ID NO: 3918955 - DNA, 25 bp, Homo sapien
tgcatgttgagtgccgtctgctttc

SEQ ID NO: 3918956 - DNA, 25 bp, Homo sapien
tagactgtgatactctgagcccagg

SEQ ID NO: 3918957 - DNA, 25 bp, Homo sapien
gatttcacttgtctgttggcccagg

SEQ ID NO: 3918958 - DNA, 25 bp, Homo sapien
ttgcaagagatatagggaaacccct

SEQ ID NO: 3918959 - DNA, 25 bp, Homo sapien
tctgcagacacgcagtaggaactct

SEQ ID NO: 3918960 - DNA, 25 bp, Homo sapien
agtcttcctgtcattctccatggga

SEQ ID NO: 3918961 - DNA, 25 bp, Homo sapien
gagccagcaccggaatcccaggtgc

SEQ ID NO: 3918962 - DNA, 25 bp, Homo sapien
tctccatgggaagatccaagcccag

SEQ ID NO: 3918963 - DNA, 25 bp, Homo sapien
gaaggcaagcatttgccccaggcca

SEQ ID NO: 3918964 - DNA, 25 bp, Homo sapien
tagcgtataaacttctggctgggtt

SEQ ID NO: 3918965 - DNA, 25 bp, Homo sapien
cccctgctagcgtataaacttctgg

SEQ ID NO: 3918966 - DNA, 25 bp, Homo sapien
atggaagggctttccattgcagccc

SEQ ID NO: 3918967 - DNA, 25 bp, Homo sapien
cttctggctgggttatgccagagga

SEQ ID NO: 3918968 - DNA, 25 bp, Homo sapien
ttcagacctcccctggcttccgtgt

SEQ ID NO: 3918969 - DNA, 25 bp, Homo sapien
atctcgtctccacgccgggaaggga

SEQ ID NO: 3918970 - DNA, 25 bp, Homo sapien
gctcctatcaccaccgcatcatact

SEQ ID NO: 3918971 - DNA, 25 bp, Homo sapien
ccctggcttccgtgttatctcgtct

SEQ ID NO: 3918972 - DNA, 25 bp, Homo sapien
gccgtcgggagtgttgcctattaac

SEQ ID NO: 3918973 - DNA, 25 bp, Homo sapien
gatggcaagtgctcgtgtcagactc

SEQ ID NO: 3918974 - DNA, 25 bp, Homo sapien
tggcattgtgctgaaccctgtaggc

SEQ ID NO: 3918975 - DNA, 25 bp, Homo sapien
tcagaactgaaacgcctgggatggc

SEQ ID NO: 3918976 - DNA, 25 bp, Homo sapien
ctgatatcgcagtgtgacggaaacc

SEQ ID NO: 3918977 - DNA, 25 bp, Homo sapien
gacggaaacctgctattggtaacga

SEQ ID NO: 3918978 - DNA, 25 bp, Homo sapien
ttggtaacgaatctcagaactggga

SEQ ID NO: 3918979 - DNA, 25 bp, Homo sapien
catggacagttaccccgcatgtgag

SEQ ID NO: 3918980 - DNA, 25 bp, Homo sapien
caccttctcagggtttagaccaaca

SEQ ID NO: 3918981 - DNA, 25 bp, Homo sapien
gactggttaaactagacatatcaca

SEQ ID NO: 3918982 - DNA, 25 bp, Homo sapien
agggaaatagtaggtgacaaaagca

SEQ ID NO: 3918983 - DNA, 25 bp, Homo sapien
tgccattccatcagatgatgttaag

SEQ ID NO: 3918984 - DNA, 25 bp, Homo sapien
cacggccatctgatcctgtgctgca

SEQ ID NO: 3918985 - DNA, 25 bp, Homo sapien
tgcagtggacgctgactttcgccac

SEQ ID NO: 3918986 - DNA, 25 bp, Homo sapien
ggccgccaagggaatccaaatctct

SEQ ID NO: 3918987 - DNA, 25 bp, Homo sapien
tagcaagggcttatcagcactgaca

SEQ ID NO: 3918988 - DNA, 25 bp, Homo sapien
gaggtgccatcgctttaaacgtggg

SEQ ID NO: 3918989 - DNA, 25 bp, Homo sapien
ctgggtaatcctcacaccaccctgg

SEQ ID NO: 3918990 - DNA, 25 bp, Homo sapien
acaccaccctgggacggaggtgcca

SEQ ID NO: 3918991 - DNA, 25 bp, Homo sapien
caaacccaggcaaaggagcaccttt

SEQ ID NO: 3918992 - DNA, 25 bp, Homo sapien
gagctgttgccaccgttgttttaca

SEQ ID NO: 3918993 - DNA, 25 bp, Homo sapien
tgttgccaccgttgttttacaaaca

SEQ ID NO: 3918994 - DNA, 25 bp, Homo sapien
agaggagctgttgccaccgttgttt

SEQ ID NO: 3918995 - DNA, 25 bp, Homo sapien
aggagctgttgccaccgttgtttta

SEQ ID NO: 3918996 - DNA, 25 bp, Homo sapien
caggaggctctcgtcatggggaaca

SEQ ID NO: 3918997 - DNA, 25 bp, Homo sapien
gcaaaggcagactgcggccaccttg

SEQ ID NO: 3918998 - DNA, 25 bp, Homo sapien
acagtggcaagcaagggtggctgga

SEQ ID NO: 3918999 - DNA, 25 bp, Homo sapien
gcactctgccctatcctcaggatgg

SEQ ID NO: 3919000 - DNA, 25 bp, Homo sapien
atacgggaggcctcccagaggcgcc

SEQ ID NO: 3919001 - DNA, 25 bp, Homo sapien
agaggcgccgggccagctggccggc

SEQ ID NO: 3919002 - DNA, 25 bp, Homo sapien
ctagagcagggggatacgggaggcc

SEQ ID NO: 3919003 - DNA, 25 bp, Homo sapien
gccgggccagctggccggcctgctg

SEQ ID NO: 3919004 - DNA, 25 bp, Homo sapien
acagcctcggttgggcggttcttgc

SEQ ID NO: 3919005 - DNA, 25 bp, Homo sapien
cacctgacagcctcggttgggcggt

SEQ ID NO: 3919006 - DNA, 25 bp, Homo sapien
ggcggttcttgctgtagtagcgcag

SEQ ID NO: 3919007 - DNA, 25 bp, Homo sapien
agcagctcgtagcacctgacagcct

SEQ ID NO: 3919008 - DNA, 25 bp, Homo sapien
cagtggcatcctggctacgaggtag

SEQ ID NO: 3919009 - DNA, 25 bp, Homo sapien
ctgggccgggcacagacgttccccg

SEQ ID NO: 3919010 - DNA, 25 bp, Homo sapien
ctaacagtggcatcctggctacgag

SEQ ID NO: 3919011 - DNA, 25 bp, Homo sapien
catcctggctacgaggtagcagtgg

SEQ ID NO: 3919012 - DNA, 25 bp, Homo sapien
ccgataggcactgagtcgtcggaga

SEQ ID NO: 3919013 - DNA, 25 bp, Homo sapien
cctcgatcatctggagtttgtaccc

SEQ ID NO: 3919014 - DNA, 25 bp, Homo sapien
ggagaggacgggcacctcgatcatc

SEQ ID NO: 3919015 - DNA, 25 bp, Homo sapien
tcccagcatgccgataggcactgag

SEQ ID NO: 3919016 - DNA, 25 bp, Homo sapien
ttagctgatgcttgcctgggcaccg

SEQ ID NO: 3919017 - DNA, 25 bp, Homo sapien
gagcagagcattcacaaaaggccca

SEQ ID NO: 3919018 - DNA, 25 bp, Homo sapien
gaattaagatctgctggacgtgccg

SEQ ID NO: 3919019 - DNA, 25 bp, Homo sapien
tatacaaagcttcaagggccggcag

SEQ ID NO: 3919020 - DNA, 25 bp, Homo sapien
acttctgttgtacacacgtcctggg

SEQ ID NO: 3919021 - DNA, 25 bp, Homo sapien
cacttctgagggcacggaggaaagc

SEQ ID NO: 3919022 - DNA, 25 bp, Homo sapien
tggccatggcgtctgatctccggat

SEQ ID NO: 3919023 - DNA, 25 bp, Homo sapien
attgtgtctccatccgtacaacggg

SEQ ID NO: 3919024 - DNA, 25 bp, Homo sapien
cacttatggtgacaagcgagatgca

SEQ ID NO: 3919025 - DNA, 25 bp, Homo sapien
ttatggtgacaagcgagatgcaaat

SEQ ID NO: 3919026 - DNA, 25 bp, Homo sapien
tggtgacaagcgagatgcaaataaa

SEQ ID NO: 3919027 - DNA, 25 bp, Homo sapien
ggtgacaagcgagatgcaaataaaa

SEQ ID NO: 3919028 - DNA, 25 bp, Homo sapien
atccctgaccccgttgtatggatgg

SEQ ID NO: 3919029 - DNA, 25 bp, Homo sapien
tccctgaccccgttgtatggatgga

SEQ ID NO: 3919030 - DNA, 25 bp, Homo sapien
ggctcactgcttcaagcaggggcct

SEQ ID NO: 3919031 - DNA, 25 bp, Homo sapien
aggcagcctggctcactgcttcaag

SEQ ID NO: 3919032 - DNA, 25 bp, Homo sapien
gcagcctggctcactgcttcaagca

SEQ ID NO: 3919033 - DNA, 25 bp, Homo sapien
gcctggctcactgcttcaagcaggg

SEQ ID NO: 3919034 - DNA, 25 bp, Homo sapien
gtgtgcctggatgccacgtggacaa

SEQ ID NO: 3919035 - DNA, 25 bp, Homo sapien
tcacatgtgtgcctggatgccacgt

SEQ ID NO: 3919036 - DNA, 25 bp, Homo sapien
gtgcctttctgctcacatgtgtgcc

SEQ ID NO: 3919037 - DNA, 25 bp, Homo sapien
cacagtggggcatgtgcctttctgc

SEQ ID NO: 3919038 - DNA, 25 bp, Homo sapien
tcacaaagcagttaaacgcccatgt

SEQ ID NO: 3919039 - DNA, 25 bp, Homo sapien
atcacaaagcagttaaacgcccatg

SEQ ID NO: 3919040 - DNA, 25 bp, Homo sapien
caaagcagttaaacgcccatgtgaa

SEQ ID NO: 3919041 - DNA, 25 bp, Homo sapien
acaaagcagttaaacgcccatgtga

SEQ ID NO: 3919042 - DNA, 25 bp, Homo sapien
ctgctgggcttaccagcaacaagaa

SEQ ID NO: 3919043 - DNA, 25 bp, Homo sapien
tacagagcgggaagtgtgtgtggcc

SEQ ID NO: 3919044 - DNA, 25 bp, Homo sapien
agaaaggaatccaagagttacagag

SEQ ID NO: 3919045 - DNA, 25 bp, Homo sapien
gacagacagacaacaattcagaaga

SEQ ID NO: 3919046 - DNA, 25 bp, Homo sapien
ggaagtaggagcagtagaaatcccc

SEQ ID NO: 3919047 - DNA, 25 bp, Homo sapien
tctgcaggtatctgcgcgccagctg

SEQ ID NO: 3919048 - DNA, 25 bp, Homo sapien
cttctgcaggtatctgcgcgccagc

SEQ ID NO: 3919049 - DNA, 25 bp, Homo sapien
catgtcattctcgaaccacaggaag

SEQ ID NO: 3919050 - DNA, 25 bp, Homo sapien
agccgagaagctccgtgagtgccag

SEQ ID NO: 3919051 - DNA, 25 bp, Homo sapien
caataaatcattattggatggatgg

SEQ ID NO: 3919052 - DNA, 25 bp, Homo sapien
gcagctctcacctccgaaggaagga

SEQ ID NO: 3919053 - DNA, 25 bp, Homo sapien
gagcaggaggctcaacaataaatca

SEQ ID NO: 3919054 - DNA, 25 bp, Homo sapien
actttactatacacatatgccataa

SEQ ID NO: 3919055 - DNA, 25 bp, Homo sapien
acacatatgccataaattagtgaac

SEQ ID NO: 3919056 - DNA, 25 bp, Homo sapien
acatatgccataaattagtgaactg

SEQ ID NO: 3919057 - DNA, 25 bp, Homo sapien
atacacatatgccataaattagtga

SEQ ID NO: 3919058 - DNA, 25 bp, Homo sapien
caggccagagaatagccagggacat

SEQ ID NO: 3919059 - DNA, 25 bp, Homo sapien
aactgcatcgccgtgtgattactca

SEQ ID NO: 3919060 - DNA, 25 bp, Homo sapien
tgggaagagactcgaggagccctct

SEQ ID NO: 3919061 - DNA, 25 bp, Homo sapien
tgacgcagggactgtcaccagtgct

SEQ ID NO: 3919062 - DNA, 25 bp, Homo sapien
gcctgagaaaccacgtgccttagct

SEQ ID NO: 3919063 - DNA, 25 bp, Homo sapien
ttaatggcatgagggaaagcatctg

SEQ ID NO: 3919064 - DNA, 25 bp, Homo sapien
cgtaccaagataaccccaactgtct

SEQ ID NO: 3919065 - DNA, 25 bp, Homo sapien
gaaaacatggtagcaaagttgcaca

SEQ ID NO: 3919066 - DNA, 25 bp, Homo sapien
aagttgcacatacagagtgatctca

SEQ ID NO: 3919067 - DNA, 25 bp, Homo sapien
tgacccttgggctaagtactgccca

SEQ ID NO: 3919068 - DNA, 25 bp, Homo sapien
tattttgtgctacgtgctatgctaa

SEQ ID NO: 3919069 - DNA, 25 bp, Homo sapien
tgatacgtatcctctcatgtactct

SEQ ID NO: 3919070 - DNA, 25 bp, Homo sapien
caaagccacataactggtgggagac

SEQ ID NO: 3919071 - DNA, 25 bp, Homo sapien
atcaaaaatacaactttgtcatgaa

SEQ ID NO: 3919072 - DNA, 25 bp, Homo sapien
gaataaaagaatttccagggaatgc

SEQ ID NO: 3919073 - DNA, 25 bp, Homo sapien
cagggaatgcttccttaacagaaat

SEQ ID NO: 3919074 - DNA, 25 bp, Homo sapien
ctttgtcatgaaaaacagtcagtta

SEQ ID NO: 3919075 - DNA, 25 bp, Homo sapien
ttttgacaaaggcagccagcggccc

SEQ ID NO: 3919076 - DNA, 25 bp, Homo sapien
tagttttgacaaaggcagccagcgg

SEQ ID NO: 3919077 - DNA, 25 bp, Homo sapien
agttttgacaaaggcagccagcggc

SEQ ID NO: 3919078 - DNA, 25 bp, Homo sapien
cttagttttgacaaaggcagccagc

SEQ ID NO: 3919079 - DNA, 25 bp, Homo sapien
ctgcagttgagggaaggcgccacca

SEQ ID NO: 3919080 - DNA, 25 bp, Homo sapien
catagatgaagtgcaccaagcctgg

SEQ ID NO: 3919081 - DNA, 25 bp, Homo sapien
tccgacgaggtcttttgactgcagt

SEQ ID NO: 3919082 - DNA, 25 bp, Homo sapien
cagtggtgcggtccacatagatgaa

SEQ ID NO: 3919083 - DNA, 25 bp, Homo sapien
gcacatttgacacgggcagttctgg

SEQ ID NO: 3919084 - DNA, 25 bp, Homo sapien
aacacttgcacatttgacacgggca

SEQ ID NO: 3919085 - DNA, 25 bp, Homo sapien
cacttgcacatttgacacgggcagt

SEQ ID NO: 3919086 - DNA, 25 bp, Homo sapien
cttgcacatttgacacgggcagttc

SEQ ID NO: 3919087 - DNA, 25 bp, Homo sapien
gcaagaagtccttccagtccgtcag

SEQ ID NO: 3919088 - DNA, 25 bp, Homo sapien
ccagcaagaagtccttccagtccgt

SEQ ID NO: 3919089 - DNA, 25 bp, Homo sapien
aagaagtccttccagtccgtcagct

SEQ ID NO: 3919090 - DNA, 25 bp, Homo sapien
aagtccttccagtccgtcagcttct

SEQ ID NO: 3919091 - DNA, 25 bp, Homo sapien
tgcgtgaaggaagtacgggccccag

SEQ ID NO: 3919092 - DNA, 25 bp, Homo sapien
gcgtgaaggaagtacgggccccaga

SEQ ID NO: 3919093 - DNA, 25 bp, Homo sapien
agggaagctcgggctgcgtgaagga

SEQ ID NO: 3919094 - DNA, 25 bp, Homo sapien
gaagctcgggctgcgtgaaggaagt

SEQ ID NO: 3919095 - DNA, 25 bp, Homo sapien
ttcagccggtagatggcgcagagct

SEQ ID NO: 3919096 - DNA, 25 bp, Homo sapien
gggggctgtggtcagaaagttcagc

SEQ ID NO: 3919097 - DNA, 25 bp, Homo sapien
gaaagttcagccggtagatggcgca

SEQ ID NO: 3919098 - DNA, 25 bp, Homo sapien
gggctgtggtcagaaagttcagccg

SEQ ID NO: 3919099 - DNA, 25 bp, Homo sapien
ggatccgggctcacttttggagaaa

SEQ ID NO: 3919100 - DNA, 25 bp, Homo sapien
gaggatccgggctcacttttggaga

SEQ ID NO: 3919101 - DNA, 25 bp, Homo sapien
tcccaggaggatccgggctcacttt

SEQ ID NO: 3919102 - DNA, 25 bp, Homo sapien
atccgggctcacttttggagaaagc

SEQ ID NO: 3919103 - DNA, 25 bp, Homo sapien
tgcccctcgattcttgacaaacttg

SEQ ID NO: 3919104 - DNA, 25 bp, Homo sapien
tgaatctcctgtgcccctcgattct

SEQ ID NO: 3919105 - DNA, 25 bp, Homo sapien
ctctggcgcaggtctcccacgaggg

SEQ ID NO: 3919106 - DNA, 25 bp, Homo sapien
cgggctccggcccttccttcagctt

SEQ ID NO: 3919107 - DNA, 25 bp, Homo sapien
ctccagcatggagaagccatccatc

SEQ ID NO: 3919108 - DNA, 25 bp, Homo sapien
ccagcatggagaagccatccatcag

SEQ ID NO: 3919109 - DNA, 25 bp, Homo sapien
tccagcatggagaagccatccatca

SEQ ID NO: 3919110 - DNA, 25 bp, Homo sapien
cagaaccagggccaggggcgcgctg

SEQ ID NO: 3919111 - DNA, 25 bp, Homo sapien
gaaccagggccaggggcgcgctggg

SEQ ID NO: 3919112 - DNA, 25 bp, Homo sapien
accagggccaggggcgcgctggggc

SEQ ID NO: 3919113 - DNA, 25 bp, Homo sapien
gggacagaaccagggccaggggcgc

SEQ ID NO: 3919114 - DNA, 25 bp, Homo sapien
caccaggttgatgccctgccacagg

SEQ ID NO: 3919115 - DNA, 25 bp, Homo sapien
actagggggcagtagctttccttca

SEQ ID NO: 3919116 - DNA, 25 bp, Homo sapien
caggcagtacatggtgtggggcact

SEQ ID NO: 3919117 - DNA, 25 bp, Homo sapien
gtcaggagcaccaggttgatgccct

SEQ ID NO: 3919118 - DNA, 25 bp, Homo sapien
tggggccggaaggcacagggcagtg

SEQ ID NO: 3919119 - DNA, 25 bp, Homo sapien
ctggggccggaaggcacagggcagt

SEQ ID NO: 3919120 - DNA, 25 bp, Homo sapien
cagtggggaaccagtgtttggaggg

SEQ ID NO: 3919121 - DNA, 25 bp, Homo sapien
gcagtggggaaccagtgtttggagg

SEQ ID NO: 3919122 - DNA, 25 bp, Homo sapien
cacccattgcggccctatctgtgaa

SEQ ID NO: 3919123 - DNA, 25 bp, Homo sapien
atccctaagttggacccacccattg

SEQ ID NO: 3919124 - DNA, 25 bp, Homo sapien
cagtgagaggtgggatccctaagtt

SEQ ID NO: 3919125 - DNA, 25 bp, Homo sapien
gccctatctgtgaaccacaagaaat

SEQ ID NO: 3919126 - DNA, 25 bp, Homo sapien
cagccttacagagggatctaagcaa

SEQ ID NO: 3919127 - DNA, 25 bp, Homo sapien
caaacactggacacatgacgcgatt

SEQ ID NO: 3919128 - DNA, 25 bp, Homo sapien
taaagtgaccaaatgggcaaggctc

SEQ ID NO: 3919129 - DNA, 25 bp, Homo sapien
tgtcatacctaacagcaaacactgg

SEQ ID NO: 3919130 - DNA, 25 bp, Homo sapien
tactcactgcggcatctcagatcag

SEQ ID NO: 3919131 - DNA, 25 bp, Homo sapien
aaattctattggactttcactccca

SEQ ID NO: 3919132 - DNA, 25 bp, Homo sapien
gtagagtcaccctggaggcgaaacc

SEQ ID NO: 3919133 - DNA, 25 bp, Homo sapien
caagaacaatggagctgagggacag

SEQ ID NO: 3919134 - DNA, 25 bp, Homo sapien
gaagggcatccatggggggggtgcc

SEQ ID NO: 3919135 - DNA, 25 bp, Homo sapien
aatgtaatgtttattcatagtgacc

SEQ ID NO: 3919136 - DNA, 25 bp, Homo sapien
ttcatagtgaccacaacagtctgga

SEQ ID NO: 3919137 - DNA, 25 bp, Homo sapien
acagtctggattttggtttatctac

SEQ ID NO: 3919138 - DNA, 25 bp, Homo sapien
ggtttatctacttctctaagcaagg

SEQ ID NO: 3919139 - DNA, 25 bp, Homo sapien
ttgtttacccacatactttggagaa

SEQ ID NO: 3919140 - DNA, 25 bp, Homo sapien
ttattgtttacccacatactttgga

SEQ ID NO: 3919141 - DNA, 25 bp, Homo sapien
ttttagaatgtatagaaattagatg

SEQ ID NO: 3919142 - DNA, 25 bp, Homo sapien
caaagtataaactacagatgctgaa

SEQ ID NO: 3919143 - DNA, 25 bp, Homo sapien
tgtgctctaggaacacgggtacctg

SEQ ID NO: 3919144 - DNA, 25 bp, Homo sapien
ggagtggtcttaacaatccttgagt

SEQ ID NO: 3919145 - DNA, 25 bp, Homo sapien
aacagctttagggatcagtggagtg

SEQ ID NO: 3919146 - DNA, 25 bp, Homo sapien
tccactggagcctaagacagatgtc

SEQ ID NO: 3919147 - DNA, 25 bp, Homo sapien
tgtttcctcctgctttcctccggtc

SEQ ID NO: 3919148 - DNA, 25 bp, Homo sapien
tagctattgtttcctcctgctttcc

SEQ ID NO: 3919149 - DNA, 25 bp, Homo sapien
ctagctattgtttcctcctgctttc

SEQ ID NO: 3919150 - DNA, 25 bp, Homo sapien
cctcctgctttcctccggtcctcac

SEQ ID NO: 3919151 - DNA, 25 bp, Homo sapien
aagtactcctcagggagggagaagc

SEQ ID NO: 3919152 - DNA, 25 bp, Homo sapien
gctctgatcgccaggggaaggagct

SEQ ID NO: 3919153 - DNA, 25 bp, Homo sapien
ctggtgtgaagtactcctcagggag

SEQ ID NO: 3919154 - DNA, 25 bp, Homo sapien
gaaggagctggtgtgaagtactcct

SEQ ID NO: 3919155 - DNA, 25 bp, Homo sapien
gtggctcaggttgagaggctctccc

SEQ ID NO: 3919156 - DNA, 25 bp, Homo sapien
ctgactccacgaagtgcacagcaca

SEQ ID NO: 3919157 - DNA, 25 bp, Homo sapien
ggctctcccagctggctcaaccctg

SEQ ID NO: 3919158 - DNA, 25 bp, Homo sapien
gagggatgggaaaggcctggtcgcc

SEQ ID NO: 3919159 - DNA, 25 bp, Homo sapien
ccccagttgggcccgtggagtgagg

SEQ ID NO: 3919160 - DNA, 25 bp, Homo sapien
agagctccccccagttgggcccgtg

SEQ ID NO: 3919161 - DNA, 25 bp, Homo sapien
gttgggcccgtggagtgagggctcc

SEQ ID NO: 3919162 - DNA, 25 bp, Homo sapien
cctgctgcacggggatgttctggct

SEQ ID NO: 3919163 - DNA, 25 bp, Homo sapien
acttcccagggattcgattctaggc

SEQ ID NO: 3919164 - DNA, 25 bp, Homo sapien
tacccctgagaagtagatgctttgt

SEQ ID NO: 3919165 - DNA, 25 bp, Homo sapien
cgaaccatggctgacttgaaaaatc

SEQ ID NO: 3919166 - DNA, 25 bp, Homo sapien
gattctaggcggtctgttctgtgga

SEQ ID NO: 3919167 - DNA, 25 bp, Homo sapien
tcttcaggcaggttttctgaactac

SEQ ID NO: 3919168 - DNA, 25 bp, Homo sapien
catcttcaggcaggttttctgaact

SEQ ID NO: 3919169 - DNA, 25 bp, Homo sapien
atcttcaggcaggttttctgaacta

SEQ ID NO: 3919170 - DNA, 25 bp, Homo sapien
tctgcccagaaagctgccctgagac

SEQ ID NO: 3919171 - DNA, 25 bp, Homo sapien
ctccctaatggcctccctctgccca

SEQ ID NO: 3919172 - DNA, 25 bp, Homo sapien
cctccctctgcccagaaagctgccc

SEQ ID NO: 3919173 - DNA, 25 bp, Homo sapien
tccctctgcccagaaagctgccctg

SEQ ID NO: 3919174 - DNA, 25 bp, Homo sapien
gctgtgctctcgctggggtagaggt

SEQ ID NO: 3919175 - DNA, 25 bp, Homo sapien
tgaatgtcgtcctctgctgtgctct

SEQ ID NO: 3919176 - DNA, 25 bp, Homo sapien
ctgtgctctcgctggggtagaggtc

SEQ ID NO: 3919177 - DNA, 25 bp, Homo sapien
atgagggcaagcaggtcggccgggc

SEQ ID NO: 3919178 - DNA, 25 bp, Homo sapien
ggagcatggccacccatcagcacat

SEQ ID NO: 3919179 - DNA, 25 bp, Homo sapien
cggggcaggcaggttaaaggagtgt

SEQ ID NO: 3919180 - DNA, 25 bp, Homo sapien
cagcacatgcccagcaggagacggg

SEQ ID NO: 3919181 - DNA, 25 bp, Homo sapien
taaaggagtgtggagcctggcccct

SEQ ID NO: 3919182 - DNA, 25 bp, Homo sapien
gcctggatgacgtgccgctccagcg

SEQ ID NO: 3919183 - DNA, 25 bp, Homo sapien
ctggtgttgacagcctggatgacgt

SEQ ID NO: 3919184 - DNA, 25 bp, Homo sapien
cttggagtgcacgagcaggaaggca

SEQ ID NO: 3919185 - DNA, 25 bp, Homo sapien
cagcagcttggagtgcacgagcagg

SEQ ID NO: 3919186 - DNA, 25 bp, Homo sapien
ctgggggtgaatcagtcgctccagg

SEQ ID NO: 3919187 - DNA, 25 bp, Homo sapien
gagctgggggtgaatcagtcgctcc

SEQ ID NO: 3919188 - DNA, 25 bp, Homo sapien
agagctgggggtgaatcagtcgctc

SEQ ID NO: 3919189 - DNA, 25 bp, Homo sapien
agctgggggtgaatcagtcgctcca

SEQ ID NO: 3919190 - DNA, 25 bp, Homo sapien
tgaggcttactgtctggtcactaga

SEQ ID NO: 3919191 - DNA, 25 bp, Homo sapien
cacagtgagcttggactctgcacca

SEQ ID NO: 3919192 - DNA, 25 bp, Homo sapien
gaagggagaggaagccatatcacca

SEQ ID NO: 3919193 - DNA, 25 bp, Homo sapien
cactagactccagtggatgaggcaa

SEQ ID NO: 3919194 - DNA, 25 bp, Homo sapien
taggcagcgatagatcacacagggc

SEQ ID NO: 3919195 - DNA, 25 bp, Homo sapien
tcatgtgactagcactcagtaagcg

SEQ ID NO: 3919196 - DNA, 25 bp, Homo sapien
tcagtaagcgtggacaagagaggca

SEQ ID NO: 3919197 - DNA, 25 bp, Homo sapien
gctaatggcattaggtcacctccta

SEQ ID NO: 3919198 - DNA, 25 bp, Homo sapien
tatccaggatcgagctgttttacca

SEQ ID NO: 3919199 - DNA, 25 bp, Homo sapien
gcttaacctagagttgcaggctcag

SEQ ID NO: 3919200 - DNA, 25 bp, Homo sapien
tcagggaatcttgcctttagcgctg

SEQ ID NO: 3919201 - DNA, 25 bp, Homo sapien
gctggtatcatttgcactcagggaa

SEQ ID NO: 3919202 - DNA, 25 bp, Homo sapien
cctgaggactcccgcgcccagtagt

SEQ ID NO: 3919203 - DNA, 25 bp, Homo sapien
tgaggactcccgcgcccagtagtca

SEQ ID NO: 3919204 - DNA, 25 bp, Homo sapien
ctgaggactcccgcgcccagtagtc

SEQ ID NO: 3919205 - DNA, 25 bp, Homo sapien
gaggactcccgcgcccagtagtcac

SEQ ID NO: 3919206 - DNA, 25 bp, Homo sapien
agctggacacgctgcgccaggtctg

SEQ ID NO: 3919207 - DNA, 25 bp, Homo sapien
ggctgtaggtccacagcaggctctg

SEQ ID NO: 3919208 - DNA, 25 bp, Homo sapien
tcccgcaggcggctgtaggtccaca

SEQ ID NO: 3919209 - DNA, 25 bp, Homo sapien
tccacggcgaagcactgctcctgct

SEQ ID NO: 3919210 - DNA, 25 bp, Homo sapien
gggtagttgctcatatcgccacaaa

SEQ ID NO: 3919211 - DNA, 25 bp, Homo sapien
gacaccatgacctatctgggctaaa

SEQ ID NO: 3919212 - DNA, 25 bp, Homo sapien
tcatcagggccctactcagggtcgc

SEQ ID NO: 3919213 - DNA, 25 bp, Homo sapien
catctcggatgctggcaacgtctgc

SEQ ID NO: 3919214 - DNA, 25 bp, Homo sapien
tgtttctctgacctagggacccagc

SEQ ID NO: 3919215 - DNA, 25 bp, Homo sapien
gagggtgctcggcaaaggacagagg

SEQ ID NO: 3919216 - DNA, 25 bp, Homo sapien
ctgggggcagtatgtgaaaaatggc

SEQ ID NO: 3919217 - DNA, 25 bp, Homo sapien
cccagcgagggtgctcggcaaagga

SEQ ID NO: 3919218 - DNA, 25 bp, Homo sapien
tcctttcggataagatgaccgtcca

SEQ ID NO: 3919219 - DNA, 25 bp, Homo sapien
taagatgaccgtccacagtcaccag

SEQ ID NO: 3919220 - DNA, 25 bp, Homo sapien
agcacatacagcttccgccgcaggt

SEQ ID NO: 3919221 - DNA, 25 bp, Homo sapien
aggtacttgagcacatacagcttcc

SEQ ID NO: 3919222 - DNA, 25 bp, Homo sapien
aagggcactcccttcacctgccctg

SEQ ID NO: 3919223 - DNA, 25 bp, Homo sapien
catgggccccagagctatagactca

SEQ ID NO: 3919224 - DNA, 25 bp, Homo sapien
cccaggcgggtttgataagatgccg

SEQ ID NO: 3919225 - DNA, 25 bp, Homo sapien
tctgccttctaaaggagtctaaagt

SEQ ID NO: 3919226 - DNA, 25 bp, Homo sapien
aagttgccattttccgtggagaagc

SEQ ID NO: 3919227 - DNA, 25 bp, Homo sapien
gttgccattttccgtggagaagcag

SEQ ID NO: 3919228 - DNA, 25 bp, Homo sapien
gagtgaaagcagtcaaaccaaaacc

SEQ ID NO: 3919229 - DNA, 25 bp, Homo sapien
catacacctacatgacctagccagt

SEQ ID NO: 3919230 - DNA, 25 bp, Homo sapien
tggtggcatcctgatacaatagatt

SEQ ID NO: 3919231 - DNA, 25 bp, Homo sapien
cagatcagcagttcctatgcgatgg

SEQ ID NO: 3919232 - DNA, 25 bp, Homo sapien
gatctgtccagtagaagaggacctc

SEQ ID NO: 3919233 - DNA, 25 bp, Homo sapien
cctgatctgtccagtagaagaggac

SEQ ID NO: 3919234 - DNA, 25 bp, Homo sapien
tagaagaggacctctgcgccctcag

SEQ ID NO: 3919235 - DNA, 25 bp, Homo sapien
tgtccagtagaagaggacctctgcg

SEQ ID NO: 3919236 - DNA, 25 bp, Homo sapien
ccagggaaaggcaaggtcaaggtca

SEQ ID NO: 3919237 - DNA, 25 bp, Homo sapien
agcctccagccccaacatctatgag

SEQ ID NO: 3919238 - DNA, 25 bp, Homo sapien
aaggcaaggtcaaggtcagcctcca

SEQ ID NO: 3919239 - DNA, 25 bp, Homo sapien
cagccccaacatctatgagctcagt

SEQ ID NO: 3919240 - DNA, 25 bp, Homo sapien
tggcctagacatggagccgaatgcc

SEQ ID NO: 3919241 - DNA, 25 bp, Homo sapien
tctgtggtatctggtccctctcagc

SEQ ID NO: 3919242 - DNA, 25 bp, Homo sapien
aggccatgctcacggcagccagtta

SEQ ID NO: 3919243 - DNA, 25 bp, Homo sapien
cagacctgtttgatgccaaggctgg

SEQ ID NO: 3919244 - DNA, 25 bp, Homo sapien
caggtcaaggtcatgaaggcggtca

SEQ ID NO: 3919245 - DNA, 25 bp, Homo sapien
taatgagtgctcaccccttggtggg

SEQ ID NO: 3919246 - DNA, 25 bp, Homo sapien
ggactcccaggtacatgtgacaaag

SEQ ID NO: 3919247 - DNA, 25 bp, Homo sapien
gctgtgatgacctgcctggattcga

SEQ ID NO: 3919248 - DNA, 25 bp, Homo sapien
cagaccgactcggtgactggctcat

SEQ ID NO: 3919249 - DNA, 25 bp, Homo sapien
agcagaccgactcggtgactggctc

SEQ ID NO: 3919250 - DNA, 25 bp, Homo sapien
gcagaccgactcggtgactggctca

SEQ ID NO: 3919251 - DNA, 25 bp, Homo sapien
agaccgactcggtgactggctcatg

SEQ ID NO: 3919252 - DNA, 25 bp, Homo sapien
tgactgacgggagacagcatagcac

SEQ ID NO: 3919253 - DNA, 25 bp, Homo sapien
tcctgcggagaaacagagcaacatc

SEQ ID NO: 3919254 - DNA, 25 bp, Homo sapien
cccagggagcttgctaggagtgact

SEQ ID NO: 3919255 - DNA, 25 bp, Homo sapien
gatgccctggtcttgactgctgccc

SEQ ID NO: 3919256 - DNA, 25 bp, Homo sapien
gtgaggctaggagtgggcccgctcc

SEQ ID NO: 3919257 - DNA, 25 bp, Homo sapien
aggaggcttgacttgtgacatccac

SEQ ID NO: 3919258 - DNA, 25 bp, Homo sapien
cacgcccggagtgggtgaggctagg

SEQ ID NO: 3919259 - DNA, 25 bp, Homo sapien
gctgaggaactttggccccgagcga

SEQ ID NO: 3919260 - DNA, 25 bp, Homo sapien
agggaggatcgccgcccccagaggg

SEQ ID NO: 3919261 - DNA, 25 bp, Homo sapien
cggagggaggatcgccgcccccaga

SEQ ID NO: 3919262 - DNA, 25 bp, Homo sapien
ggggctccggagggaggatcgccgc

SEQ ID NO: 3919263 - DNA, 25 bp, Homo sapien
ggctccggagggaggatcgccgccc

SEQ ID NO: 3919264 - DNA, 25 bp, Homo sapien
gcgcgcttccgggtaggaccgcgtg

SEQ ID NO: 3919265 - DNA, 25 bp, Homo sapien
ggaccgcgtgatcgcgcacgtgacc

SEQ ID NO: 3919266 - DNA, 25 bp, Homo sapien
gccgtcgccttccgcgggttcgagc

SEQ ID NO: 3919267 - DNA, 25 bp, Homo sapien
cttccgggtaggaccgcgtgatcgc

SEQ ID NO: 3919268 - DNA, 25 bp, Homo sapien
gagcagaacctacaaagatgtgaag

SEQ ID NO: 3919269 - DNA, 25 bp, Homo sapien
caggctctggattatttcgcgctcg

SEQ ID NO: 3919270 - DNA, 25 bp, Homo sapien
tctggacctgtggagccgctgagcc

SEQ ID NO: 3919271 - DNA, 25 bp, Homo sapien
aaacttaaatctcgtgagagcagca

SEQ ID NO: 3919272 - DNA, 25 bp, Homo sapien
tttcttgctcgctgtagtacatctg

SEQ ID NO: 3919273 - DNA, 25 bp, Homo sapien
tcttgctcgctgtagtacatctgct

SEQ ID NO: 3919274 - DNA, 25 bp, Homo sapien
ctccctttcttgctcgctgtagtac

SEQ ID NO: 3919275 - DNA, 25 bp, Homo sapien
gctcgctgtagtacatctgctgtat

SEQ ID NO: 3919276 - DNA, 25 bp, Homo sapien
gagcaagtctgtgttgattccagca

SEQ ID NO: 3919277 - DNA, 25 bp, Homo sapien
tcagccgggaaatcatacaaacagc

SEQ ID NO: 3919278 - DNA, 25 bp, Homo sapien
gatgccactgtcaggaacccagatg

SEQ ID NO: 3919279 - DNA, 25 bp, Homo sapien
gatgtgtcaaaaaactcagggcagc

SEQ ID NO: 3919280 - DNA, 25 bp, Homo sapien
tagcggcaggccaaagcattgacat

SEQ ID NO: 3919281 - DNA, 25 bp, Homo sapien
gcaggccaaagcattgacattcttg

SEQ ID NO: 3919282 - DNA, 25 bp, Homo sapien
tatcggtagcggcaggccaaagcat

SEQ ID NO: 3919283 - DNA, 25 bp, Homo sapien
caaagcattgacattcttgaccaca

SEQ ID NO: 3919284 - DNA, 25 bp, Homo sapien
gatgaccaatgtccggccggcccga

SEQ ID NO: 3919285 - DNA, 25 bp, Homo sapien
gggctggccattcagttgcactgac

SEQ ID NO: 3919286 - DNA, 25 bp, Homo sapien
ctggagggatgaccaatgtccggcc

SEQ ID NO: 3919287 - DNA, 25 bp, Homo sapien
tcccgtcgtccaccatcactaaggg

SEQ ID NO: 3919288 - DNA, 25 bp, Homo sapien
tgaggaaaaacagtatgggactcat

SEQ ID NO: 3919289 - DNA, 25 bp, Homo sapien
agtgaggaaaaacagtatgggactc

SEQ ID NO: 3919290 - DNA, 25 bp, Homo sapien
acagtgaggaaaaacagtatgggac

SEQ ID NO: 3919291 - DNA, 25 bp, Homo sapien
ctacagtgaggaaaaacagtatggg

SEQ ID NO: 3919292 - DNA, 25 bp, Homo sapien
cccacagtattgacatctttgggtt

SEQ ID NO: 3919293 - DNA, 25 bp, Homo sapien
taatgcccttttagattcagatgat

SEQ ID NO: 3919294 - DNA, 25 bp, Homo sapien
ttaggtaatgcccttttagattcag

SEQ ID NO: 3919295 - DNA, 25 bp, Homo sapien
agaattaggtaatgcccttttagat

SEQ ID NO: 3919296 - DNA, 25 bp, Homo sapien
tcccacaggacccagtacttcttgg

SEQ ID NO: 3919297 - DNA, 25 bp, Homo sapien
tcctgtcacacagtattgtgaccgc

SEQ ID NO: 3919298 - DNA, 25 bp, Homo sapien
tcttggatctcagctcctgtcacac

SEQ ID NO: 3919299 - DNA, 25 bp, Homo sapien
gacccagtacttcttggatctcagc

SEQ ID NO: 3919300 - DNA, 25 bp, Homo sapien
tggcctaatattaaggaaacgtgcg

SEQ ID NO: 3919301 - DNA, 25 bp, Homo sapien
gcgaaacgggactgcaattcctgca

SEQ ID NO: 3919302 - DNA, 25 bp, Homo sapien
ggtcggccccgcacctgtttgtgct

SEQ ID NO: 3919303 - DNA, 25 bp, Homo sapien
cctgtttgtgctttgcaggctcccg

SEQ ID NO: 3919304 - DNA, 25 bp, Homo sapien
gggctctgaatggcctttcaaaagg

SEQ ID NO: 3919305 - DNA, 25 bp, Homo sapien
tcttgccattcggtgctctcagcct

SEQ ID NO: 3919306 - DNA, 25 bp, Homo sapien
tgatcccaggcactttcttgccatt

SEQ ID NO: 3919307 - DNA, 25 bp, Homo sapien
tcgtaaatctccctgatcccaggca

SEQ ID NO: 3919308 - DNA, 25 bp, Homo sapien
gtactggtgaaccagcttgtctctg

SEQ ID NO: 3919309 - DNA, 25 bp, Homo sapien
ctttcttgatcgatgcaagttgatg

SEQ ID NO: 3919310 - DNA, 25 bp, Homo sapien
actttaggccctcctgcccataggg

SEQ ID NO: 3919311 - DNA, 25 bp, Homo sapien
tgatgataaaaagtgtaatggaccc

SEQ ID NO: 3919312 - DNA, 25 bp, Homo sapien
gccacatgcacagccaagactttgg

SEQ ID NO: 3919313 - DNA, 25 bp, Homo sapien
gcataaatccttagtttgtcccgga

SEQ ID NO: 3919314 - DNA, 25 bp, Homo sapien
gccgatcaggcgcttgtagaggaga

SEQ ID NO: 3919315 - DNA, 25 bp, Homo sapien
tggtggtttgtgcagtgagcataaa

SEQ ID NO: 3919316 - DNA, 25 bp, Homo sapien
aatttctgttgcatttgctattatc

SEQ ID NO: 3919317 - DNA, 25 bp, Homo sapien
taatttctgttgcatttgctattat

SEQ ID NO: 3919318 - DNA, 25 bp, Homo sapien
cttaatttctgttgcatttgctatt

SEQ ID NO: 3919319 - DNA, 25 bp, Homo sapien
tttctgttgcatttgctattatcat

SEQ ID NO: 3919320 - DNA, 25 bp, Homo sapien
gaggatttgctgtacatcatttcac

SEQ ID NO: 3919321 - DNA, 25 bp, Homo sapien
aagcccatccttatcacatactaag

SEQ ID NO: 3919322 - DNA, 25 bp, Homo sapien
tgaataacctatccgtaagcccatc

SEQ ID NO: 3919323 - DNA, 25 bp, Homo sapien
catactaagtaatagtaagtcttca

SEQ ID NO: 3919324 - DNA, 25 bp, Homo sapien
tctttgctgcacttggaatacctga

SEQ ID NO: 3919325 - DNA, 25 bp, Homo sapien
agaccttcacactgtgagtaggggc

SEQ ID NO: 3919326 - DNA, 25 bp, Homo sapien
acttggaatacctgaacagagccag

SEQ ID NO: 3919327 - DNA, 25 bp, Homo sapien
accagatgtgaagctcattgtccag

SEQ ID NO: 3919328 - DNA, 25 bp, Homo sapien
cagcctttccgagggaagtgctgtg

SEQ ID NO: 3919329 - DNA, 25 bp, Homo sapien
agccaagtgattgggaagcagcagc

SEQ ID NO: 3919330 - DNA, 25 bp, Homo sapien
acatggggagccaagtgattgggaa

SEQ ID NO: 3919331 - DNA, 25 bp, Homo sapien
gcagcctttccgagggaagtgctgt

SEQ ID NO: 3919332 - DNA, 25 bp, Homo sapien
ccaggacctcatctgattggaaaaa

SEQ ID NO: 3919333 - DNA, 25 bp, Homo sapien
ttcttttgagtcattggaacacagt

SEQ ID NO: 3919334 - DNA, 25 bp, Homo sapien
aacacagtgtttatgtttcgtaacg

SEQ ID NO: 3919335 - DNA, 25 bp, Homo sapien
agtttgaagatagaataatgcctta

SEQ ID NO: 3919336 - DNA, 25 bp, Homo sapien
ttcgtaacgttaatcacatgcaatt

SEQ ID NO: 3919337 - DNA, 25 bp, Homo sapien
caggaagtgtagtcatgtttgccat

SEQ ID NO: 3919338 - DNA, 25 bp, Homo sapien
tcaggaagtgtagtcatgtttgcca

SEQ ID NO: 3919339 - DNA, 25 bp, Homo sapien
cttttaacttccatactcattcctg

SEQ ID NO: 3919340 - DNA, 25 bp, Homo sapien
tattcgccctgcacccttcaacagt

SEQ ID NO: 3919341 - DNA, 25 bp, Homo sapien
cctcttgcagtttcttggcactctg

SEQ ID NO: 3919342 - DNA, 25 bp, Homo sapien
tgtcttctgctattcgccctgcacc

SEQ ID NO: 3919343 - DNA, 25 bp, Homo sapien
cataaattggcccatgaagtaaaga

SEQ ID NO: 3919344 - DNA, 25 bp, Homo sapien
agtaaagagcccatgaccgtgaccg

SEQ ID NO: 3919345 - DNA, 25 bp, Homo sapien
gcaaggtctgtgatctgtaaatggt

SEQ ID NO: 3919346 - DNA, 25 bp, Homo sapien
gtgaattttgagcaaggtcatgagc

SEQ ID NO: 3919347 - DNA, 25 bp, Homo sapien
aggtcatttgaccattctctaaagc

SEQ ID NO: 3919348 - DNA, 25 bp, Homo sapien
gatgtagtaggccaaatgcaattat

SEQ ID NO: 3919349 - DNA, 25 bp, Homo sapien
aaagatgtagtaggccaaatgcaat

SEQ ID NO: 3919350 - DNA, 25 bp, Homo sapien
ctaaagatgtagtaggccaaatgca

SEQ ID NO: 3919351 - DNA, 25 bp, Homo sapien
tcctgttggtatctcttctcaaccc

SEQ ID NO: 3919352 - DNA, 25 bp, Homo sapien
ctgttggtatctcttctcaacccat

SEQ ID NO: 3919353 - DNA, 25 bp, Homo sapien
cctgttggtatctcttctcaaccca

SEQ ID NO: 3919354 - DNA, 25 bp, Homo sapien
tgctaggggttgcaatcaggaaagt

SEQ ID NO: 3919355 - DNA, 25 bp, Homo sapien
accagttgcatgttttggaagatca

SEQ ID NO: 3919356 - DNA, 25 bp, Homo sapien
aggaaagtaagacaaccagttgcat

SEQ ID NO: 3919357 - DNA, 25 bp, Homo sapien
gcgttgttgggaagcttgatcttta

SEQ ID NO: 3919358 - DNA, 25 bp, Homo sapien
taataaccaggcaaacttggcaaac

SEQ ID NO: 3919359 - DNA, 25 bp, Homo sapien
gagagggacctgacttgagtgacta

SEQ ID NO: 3919360 - DNA, 25 bp, Homo sapien
gcaaacacctaactagggcaaagac

SEQ ID NO: 3919361 - DNA, 25 bp, Homo sapien
gggaacagcctaggaatctttatca

SEQ ID NO: 3919362 - DNA, 25 bp, Homo sapien
gttctctagaaggccacgctaaaga

SEQ ID NO: 3919363 - DNA, 25 bp, Homo sapien
tgttctctagaaggccacgctaaag

SEQ ID NO: 3919364 - DNA, 25 bp, Homo sapien
ctgttctctagaaggccacgctaaa

SEQ ID NO: 3919365 - DNA, 25 bp, Homo sapien
ttctctagaaggccacgctaaagac

SEQ ID NO: 3919366 - DNA, 25 bp, Homo sapien
tgtgctcagcttgctgtctgttgtt

SEQ ID NO: 3919367 - DNA, 25 bp, Homo sapien
gtctctgtgctcagcttgctgtctg

SEQ ID NO: 3919368 - DNA, 25 bp, Homo sapien
gctgtctgttgtttgcccttcctcc

SEQ ID NO: 3919369 - DNA, 25 bp, Homo sapien
tgtctgttgtttgcccttcctcctg

SEQ ID NO: 3919370 - DNA, 25 bp, Homo sapien
actgctagtgttgttgccgacatcc

SEQ ID NO: 3919371 - DNA, 25 bp, Homo sapien
gattttaggtctagagcgctttctg

SEQ ID NO: 3919372 - DNA, 25 bp, Homo sapien
catcggcgtgagctgttgcaactgc

SEQ ID NO: 3919373 - DNA, 25 bp, Homo sapien
gcttgcatcggcgtgagctgttgca

SEQ ID NO: 3919374 - DNA, 25 bp, Homo sapien
aacagcgatggcttggctcagagca

SEQ ID NO: 3919375 - DNA, 25 bp, Homo sapien
ggttcaatctcaccatagactagtg

SEQ ID NO: 3919376 - DNA, 25 bp, Homo sapien
ccatgaccaatgactatactccaga

SEQ ID NO: 3919377 - DNA, 25 bp, Homo sapien
tgctatgggaactgcaaccacaggt

SEQ ID NO: 3919378 - DNA, 25 bp, Homo sapien
tctgtgataaaggataacccgtgta

SEQ ID NO: 3919379 - DNA, 25 bp, Homo sapien
tctgataagcgtagcttttctggtc

SEQ ID NO: 3919380 - DNA, 25 bp, Homo sapien
taacccgtgtaatatttctgataag

SEQ ID NO: 3919381 - DNA, 25 bp, Homo sapien
tcatgaccatgacttctgtgataaa

SEQ ID NO: 3919382 - DNA, 25 bp, Homo sapien
gacatcaatgccctgattggccagc

SEQ ID NO: 3919383 - DNA, 25 bp, Homo sapien
cacgaggtgattgtatccatggtca

SEQ ID NO: 3919384 - DNA, 25 bp, Homo sapien
gttaaaattctggtccacgaggtga

SEQ ID NO: 3919385 - DNA, 25 bp, Homo sapien
tgagtgccgtatcacgacatcaatg

SEQ ID NO: 3919386 - DNA, 25 bp, Homo sapien
gtttgtgcctccagctgaggtggtc

SEQ ID NO: 3919387 - DNA, 25 bp, Homo sapien
atcctgcagcataggaatcggatag

SEQ ID NO: 3919388 - DNA, 25 bp, Homo sapien
accttcaagccaaatcttctttcct

SEQ ID NO: 3919389 - DNA, 25 bp, Homo sapien
gaatcggatagattgtttgtgcctc

SEQ ID NO: 3919390 - DNA, 25 bp, Homo sapien
tggtggtaggattctgaactaccat

SEQ ID NO: 3919391 - DNA, 25 bp, Homo sapien
ttggtggtaggattctgaactacca

SEQ ID NO: 3919392 - DNA, 25 bp, Homo sapien
gtttggtggtaggattctgaactac

SEQ ID NO: 3919393 - DNA, 25 bp, Homo sapien
tttggtggtaggattctgaactacc

SEQ ID NO: 3919394 - DNA, 25 bp, Homo sapien
cttgtccaaggcacataagcttgtg

SEQ ID NO: 3919395 - DNA, 25 bp, Homo sapien
tgataggtaatagcccagatgcatg

SEQ ID NO: 3919396 - DNA, 25 bp, Homo sapien
tgaataacatcagagttggttgttt

SEQ ID NO: 3919397 - DNA, 25 bp, Homo sapien
ccttcagacgtaggacttgtggtga

SEQ ID NO: 3919398 - DNA, 25 bp, Homo sapien
ggaatctgttatccagcaacacctc

SEQ ID NO: 3919399 - DNA, 25 bp, Homo sapien
cagcaacacctctagcgtatactca

SEQ ID NO: 3919400 - DNA, 25 bp, Homo sapien
atctcagggaatctgttatccagca

SEQ ID NO: 3919401 - DNA, 25 bp, Homo sapien
gcgtatactcacttaaggtaatatc

SEQ ID NO: 3919402 - DNA, 25 bp, Homo sapien
gagagtgtgtctaacaggcgagttt

SEQ ID NO: 3919403 - DNA, 25 bp, Homo sapien
tgaccacccggccatcaatgtagca

SEQ ID NO: 3919404 - DNA, 25 bp, Homo sapien
aacaggcgagttttcaggaagtcca

SEQ ID NO: 3919405 - DNA, 25 bp, Homo sapien
ttttcctaatctggtcagagagtgt

SEQ ID NO: 3919406 - DNA, 25 bp, Homo sapien
tttcaggttgtaagtaatggccaaa

SEQ ID NO: 3919407 - DNA, 25 bp, Homo sapien
ttcaggttgtaagtaatggccaaag

SEQ ID NO: 3919408 - DNA, 25 bp, Homo sapien
ccaggtaactgcatctactgtactt

SEQ ID NO: 3919409 - DNA, 25 bp, Homo sapien
caggtaactgcatctactgtacttc

SEQ ID NO: 3919410 - DNA, 25 bp, Homo sapien
aaatgatttgacctggctgtagagc

SEQ ID NO: 3919411 - DNA, 25 bp, Homo sapien
tcaagcaaagaaggctctaataacc

SEQ ID NO: 3919412 - DNA, 25 bp, Homo sapien
taataacctgaaatgatttgacctg

SEQ ID NO: 3919413 - DNA, 25 bp, Homo sapien
aagcaaagaaggctctaataacctg

SEQ ID NO: 3919414 - DNA, 25 bp, Homo sapien
tattagggccatataagctggctct

SEQ ID NO: 3919415 - DNA, 25 bp, Homo sapien
aataaatccggatgggctgcaacag

SEQ ID NO: 3919416 - DNA, 25 bp, Homo sapien
aactggctgccatttactgcccggc

SEQ ID NO: 3919417 - DNA, 25 bp, Homo sapien
gatgtaatcctttcccaactggctg

SEQ ID NO: 3919418 - DNA, 25 bp, Homo sapien
ggagtccagagcaatcagcaaagtt

SEQ ID NO: 3919419 - DNA, 25 bp, Homo sapien
tacttcaacagactcagggcactag

SEQ ID NO: 3919420 - DNA, 25 bp, Homo sapien
tacgacgcagtgcatttagagcaaa

SEQ ID NO: 3919421 - DNA, 25 bp, Homo sapien
ccaggagttattgggattacgacgc

SEQ ID NO: 3919422 - DNA, 25 bp, Homo sapien
tacttgcctgtctacttctagattc

SEQ ID NO: 3919423 - DNA, 25 bp, Homo sapien
gattcttcccatccggccaattcat

SEQ ID NO: 3919424 - DNA, 25 bp, Homo sapien
agattcttcccatccggccaattca

SEQ ID NO: 3919425 - DNA, 25 bp, Homo sapien
aatctctgtacttgcctgtctactt

SEQ ID NO: 3919426 - DNA, 25 bp, Homo sapien
cgaaagtgatttcgactttctctaa

SEQ ID NO: 3919427 - DNA, 25 bp, Homo sapien
caacctcccgaaagtgatttcgact

SEQ ID NO: 3919428 - DNA, 25 bp, Homo sapien
tgatttcgactttctctaaactcaa

SEQ ID NO: 3919429 - DNA, 25 bp, Homo sapien
aaactcaagagctataccatttttt

SEQ ID NO: 3919430 - DNA, 25 bp, Homo sapien
atgatctgtaatgaaggtgagtttc

SEQ ID NO: 3919431 - DNA, 25 bp, Homo sapien
ggacaatgatctgtaatgaaggtga

SEQ ID NO: 3919432 - DNA, 25 bp, Homo sapien
aatctggacaatgatctgtaatgaa

SEQ ID NO: 3919433 - DNA, 25 bp, Homo sapien
gatctgtaatgaaggtgagtttcat

SEQ ID NO: 3919434 - DNA, 25 bp, Homo sapien
tttgactaagataaggcccaagtgg

SEQ ID NO: 3919435 - DNA, 25 bp, Homo sapien
tacctccagtctttgactaagataa

SEQ ID NO: 3919436 - DNA, 25 bp, Homo sapien
aacagtgtgataggcgctaaaagta

SEQ ID NO: 3919437 - DNA, 25 bp, Homo sapien
caagtggcagaacagtgtgataggc

SEQ ID NO: 3919438 - DNA, 25 bp, Homo sapien
cttcatcgtgggactctttagagtt

SEQ ID NO: 3919439 - DNA, 25 bp, Homo sapien
cacactttagtgttgttggtgacct

SEQ ID NO: 3919440 - DNA, 25 bp, Homo sapien
gtggcaatagaatccacaagtgtca

SEQ ID NO: 3919441 - DNA, 25 bp, Homo sapien
ctgacatgattctaagtatgttgga

SEQ ID NO: 3919442 - DNA, 25 bp, Homo sapien
cttatctgggactgccttctgttac

SEQ ID NO: 3919443 - DNA, 25 bp, Homo sapien
gggactgccttctgttactttctga

SEQ ID NO: 3919444 - DNA, 25 bp, Homo sapien
ttacttaattctttgatctttccca

SEQ ID NO: 3919445 - DNA, 25 bp, Homo sapien
tacttaattctttgatctttcccat

SEQ ID NO: 3919446 - DNA, 25 bp, Homo sapien
tcagaggagtatagcgtcatcagct

SEQ ID NO: 3919447 - DNA, 25 bp, Homo sapien
tcatgccttagtggctcagaggagt

SEQ ID NO: 3919448 - DNA, 25 bp, Homo sapien
ttagctaagcctggtagtgcaggcc

SEQ ID NO: 3919449 - DNA, 25 bp, Homo sapien
tgcaggcctgtaatcatggctactt

SEQ ID NO: 3919450 - DNA, 25 bp, Homo sapien
gtcaaggatttactacggccataac

SEQ ID NO: 3919451 - DNA, 25 bp, Homo sapien
caaggatttactacggccataacct

SEQ ID NO: 3919452 - DNA, 25 bp, Homo sapien
aggatttactacggccataacctct

SEQ ID NO: 3919453 - DNA, 25 bp, Homo sapien
ggatttactacggccataacctctc

SEQ ID NO: 3919454 - DNA, 25 bp, Homo sapien
tactcctagatatacacacccagga

SEQ ID NO: 3919455 - DNA, 25 bp, Homo sapien
aaaaaatgtattcggtctctctgca

SEQ ID NO: 3919456 - DNA, 25 bp, Homo sapien
tgatggctagtgagtacaggtttca

SEQ ID NO: 3919457 - DNA, 25 bp, Homo sapien
gaagacagtcaccaaagattacata

SEQ ID NO: 3919458 - DNA, 25 bp, Homo sapien
aacaagtacttctaattggagcaca

SEQ ID NO: 3919459 - DNA, 25 bp, Homo sapien
cagcctataggtatggatataccca

SEQ ID NO: 3919460 - DNA, 25 bp, Homo sapien
gaaaaatacttacatgttcaggatc

SEQ ID NO: 3919461 - DNA, 25 bp, Homo sapien
catgttcaggatccagtgacttcta

SEQ ID NO: 3919462 - DNA, 25 bp, Homo sapien
ctagagagaagcagcataaggtggc

SEQ ID NO: 3919463 - DNA, 25 bp, Homo sapien
gagagaagcagcataaggtggcaga

SEQ ID NO: 3919464 - DNA, 25 bp, Homo sapien
gaggactgagttacactgagtttta

SEQ ID NO: 3919465 - DNA, 25 bp, Homo sapien
ctgaaaaagagatcaggtagagaga

SEQ ID NO: 3919466 - DNA, 25 bp, Homo sapien
tgacgaataccctgaatactctggc

SEQ ID NO: 3919467 - DNA, 25 bp, Homo sapien
tcctagaaagagtttagcacatgct

SEQ ID NO: 3919468 - DNA, 25 bp, Homo sapien
ccagtgaaccacgatttagaggaga

SEQ ID NO: 3919469 - DNA, 25 bp, Homo sapien
cctaagaagatcaccctctgccatg

SEQ ID NO: 3919470 - DNA, 25 bp, Homo sapien
agcatatgcttagttcacctgtggg

SEQ ID NO: 3919471 - DNA, 25 bp, Homo sapien
atacatatgactcacttactcctgg

SEQ ID NO: 3919472 - DNA, 25 bp, Homo sapien
ggatccccatagatacactgttcag

SEQ ID NO: 3919473 - DNA, 25 bp, Homo sapien
tttgcaaacaccctaagcatatgct

SEQ ID NO: 3919474 - DNA, 25 bp, Homo sapien
actgccaggttcgaagatatttaag

SEQ ID NO: 3919475 - DNA, 25 bp, Homo sapien
tgaacagtgtcatcgaaagctctct

SEQ ID NO: 3919476 - DNA, 25 bp, Homo sapien
gatgctctcttgtgaggaatctgga

SEQ ID NO: 3919477 - DNA, 25 bp, Homo sapien
cagtaagtaaccaagtgaagtccca

SEQ ID NO: 3919478 - DNA, 25 bp, Homo sapien
tttctggatgctagacctcaaatca

SEQ ID NO: 3919479 - DNA, 25 bp, Homo sapien
tgagaagaggtcagtagagataatc

SEQ ID NO: 3919480 - DNA, 25 bp, Homo sapien
tacaaagtctatgagaagaggtcag

SEQ ID NO: 3919481 - DNA, 25 bp, Homo sapien
gagataatctaatcttaagtcgtga

SEQ ID NO: 3919482 - DNA, 25 bp, Homo sapien
gaggtcagtagagataatctaatct

SEQ ID NO: 3919483 - DNA, 25 bp, Homo sapien
tcttaggtcctcatgtgctaacatt

SEQ ID NO: 3919484 - DNA, 25 bp, Homo sapien
gatttctgctacagttatgcatttt

SEQ ID NO: 3919485 - DNA, 25 bp, Homo sapien
aatccctcaccagttagagaacagc

SEQ ID NO: 3919486 - DNA, 25 bp, Homo sapien
tcagtaacccagcttttcttaggtc

SEQ ID NO: 3919487 - DNA, 25 bp, Homo sapien
caactatacagactctgtgttagta

SEQ ID NO: 3919488 - DNA, 25 bp, Homo sapien
tcacagcaactatacagactctgtg

SEQ ID NO: 3919489 - DNA, 25 bp, Homo sapien
tgttcacagcaactatacagactct

SEQ ID NO: 3919490 - DNA, 25 bp, Homo sapien
tgtactgttcacagcaactatacag

SEQ ID NO: 3919491 - DNA, 25 bp, Homo sapien
atcactatctcttttacattacttc

SEQ ID NO: 3919492 - DNA, 25 bp, Homo sapien
catgtattattaatcactatctctt

SEQ ID NO: 3919493 - DNA, 25 bp, Homo sapien
tattaatcactatctcttttacatt

SEQ ID NO: 3919494 - DNA, 25 bp, Homo sapien
acatgtattattaatcactatctct

SEQ ID NO: 3919495 - DNA, 25 bp, Homo sapien
cagcctgcaattgtgaagtttggtt

SEQ ID NO: 3919496 - DNA, 25 bp, Homo sapien
ggttgcaatgtgttagctgcttgct

SEQ ID NO: 3919497 - DNA, 25 bp, Homo sapien
ctaatcaatgtaaggaagcacatgt

SEQ ID NO: 3919498 - DNA, 25 bp, Homo sapien
gtaaggaagcacatgttcccagcct

SEQ ID NO: 3919499 - DNA, 25 bp, Homo sapien
aattctatagcttggtaagataccc

SEQ ID NO: 3919500 - DNA, 25 bp, Homo sapien
attatgccgttgcaaaacttttcca

SEQ ID NO: 3919501 - DNA, 25 bp, Homo sapien
gacatctccatatgaacaaatgcag

SEQ ID NO: 3919502 - DNA, 25 bp, Homo sapien
tacatgacaacagtaccaaaaagga

SEQ ID NO: 3919503 - DNA, 25 bp, Homo sapien
caaaggtttccgcatacccctgagg

SEQ ID NO: 3919504 - DNA, 25 bp, Homo sapien
ggaatgaagtccactaaatccggct

SEQ ID NO: 3919505 - DNA, 25 bp, Homo sapien
gagccaaggtaaagccatgccagac

SEQ ID NO: 3919506 - DNA, 25 bp, Homo sapien
cacaaggccagggtctaagtctcac

SEQ ID NO: 3919507 - DNA, 25 bp, Homo sapien
tttctcatggccctagctgttatgg

SEQ ID NO: 3919508 - DNA, 25 bp, Homo sapien
ttttttgtccagcttgtgacttgtc

SEQ ID NO: 3919509 - DNA, 25 bp, Homo sapien
ccacaccaagaacatgagaactttc

SEQ ID NO: 3919510 - DNA, 25 bp, Homo sapien
tttgagctaaacttcgtgtgtggtc

SEQ ID NO: 3919511 - DNA, 25 bp, Homo sapien
ttagtagaaagtaagcaagttgtca

SEQ ID NO: 3919512 - DNA, 25 bp, Homo sapien
acaatgttgattccaacagtttgaa

SEQ ID NO: 3919513 - DNA, 25 bp, Homo sapien
caagttgtcagggtaaaagttgaca

SEQ ID NO: 3919514 - DNA, 25 bp, Homo sapien
gacaatgttgattccaacagtttga

SEQ ID NO: 3919515 - DNA, 25 bp, Homo sapien
agcaattcctggtgacatgccaaga

SEQ ID NO: 3919516 - DNA, 25 bp, Homo sapien
aattcctggtgacatgccaagaagt

SEQ ID NO: 3919517 - DNA, 25 bp, Homo sapien
agagtcctgtgcttttctaaaagca

SEQ ID NO: 3919518 - DNA, 25 bp, Homo sapien
gagtcctgtgcttttctaaaagcaa

SEQ ID NO: 3919519 - DNA, 25 bp, Homo sapien
ggagctccagcataacatcagggtg

SEQ ID NO: 3919520 - DNA, 25 bp, Homo sapien
ctccctttggagctccagcataaca

SEQ ID NO: 3919521 - DNA, 25 bp, Homo sapien
actgtaagtattggagaattgctcc

SEQ ID NO: 3919522 - DNA, 25 bp, Homo sapien
tctgtttatctaaggcaacatcact

SEQ ID NO: 3919523 - DNA, 25 bp, Homo sapien
ttttgaatactggtaattatgaagg

SEQ ID NO: 3919524 - DNA, 25 bp, Homo sapien
acaattttgaatactggtaattatg

SEQ ID NO: 3919525 - DNA, 25 bp, Homo sapien
ttgaatactggtaattatgaaggtc

SEQ ID NO: 3919526 - DNA, 25 bp, Homo sapien
gaatactggtaattatgaaggtcat

SEQ ID NO: 3919527 - DNA, 25 bp, Homo sapien
aaatatgaagctatccatactcctc

SEQ ID NO: 3919528 - DNA, 25 bp, Homo sapien
agttccaaacttgggtccaaatatg

SEQ ID NO: 3919529 - DNA, 25 bp, Homo sapien
aacttgggtccaaatatgaagctat

SEQ ID NO: 3919530 - DNA, 25 bp, Homo sapien
tatgaagctatccatactcctcttc

SEQ ID NO: 3919531 - DNA, 25 bp, Homo sapien
ctggaagcaaaccaaaattcctcat

SEQ ID NO: 3919532 - DNA, 25 bp, Homo sapien
tatggtgatgaccattattctgtgc

SEQ ID NO: 3919533 - DNA, 25 bp, Homo sapien
gatgaccattattctgtgccctatc

SEQ ID NO: 3919534 - DNA, 25 bp, Homo sapien
aagcctccctgttatggtgatgacc

SEQ ID NO: 3919535 - DNA, 25 bp, Homo sapien
gcaagcctccctgttatggtgatga

SEQ ID NO: 3919536 - DNA, 25 bp, Homo sapien
gagcttgtttatcatacaaggaggc

SEQ ID NO: 3919537 - DNA, 25 bp, Homo sapien
gtaatgaatatcagaccacagatct

SEQ ID NO: 3919538 - DNA, 25 bp, Homo sapien
tctgcatgtctcatggataacttca

SEQ ID NO: 3919539 - DNA, 25 bp, Homo sapien
tgcagctgagcttgtttatcataca

SEQ ID NO: 3919540 - DNA, 25 bp, Homo sapien
tctgcatgtagcaaagcgataggca

SEQ ID NO: 3919541 - DNA, 25 bp, Homo sapien
ctgggcagctagtgacccattacta

SEQ ID NO: 3919542 - DNA, 25 bp, Homo sapien
ttagtaactgcctgactgaaatgtg

SEQ ID NO: 3919543 - DNA, 25 bp, Homo sapien
gctagtgacccattactattagtaa

SEQ ID NO: 3919544 - DNA, 25 bp, Homo sapien
aggtgatgaaaacttaaaacctgtg

SEQ ID NO: 3919545 - DNA, 25 bp, Homo sapien
accacatgtgtcctcgactctcttt

SEQ ID NO: 3919546 - DNA, 25 bp, Homo sapien
tgttccacatttaggtgatgaaaac

SEQ ID NO: 3919547 - DNA, 25 bp, Homo sapien
gagttttcaatcgttctgttccaca

SEQ ID NO: 3919548 - DNA, 25 bp, Homo sapien
acttctagcagtaggcacgtggcca

SEQ ID NO: 3919549 - DNA, 25 bp, Homo sapien
attaagccacctccacaagtaatgg

SEQ ID NO: 3919550 - DNA, 25 bp, Homo sapien
cacgtggccacaatgactacactgt

SEQ ID NO: 3919551 - DNA, 25 bp, Homo sapien
tgtgggtcagcattaaaaggtttat

SEQ ID NO: 3919552 - DNA, 25 bp, Homo sapien
gagaagcaaggtacagcaggtaatc

SEQ ID NO: 3919553 - DNA, 25 bp, Homo sapien
aagcaaggtacagcaggtaatcatc

SEQ ID NO: 3919554 - DNA, 25 bp, Homo sapien
gaagcaaggtacagcaggtaatcat

SEQ ID NO: 3919555 - DNA, 25 bp, Homo sapien
agagaagcaaggtacagcaggtaat

SEQ ID NO: 3919556 - DNA, 25 bp, Homo sapien
caattcctggggctcttacaagttt

SEQ ID NO: 3919557 - DNA, 25 bp, Homo sapien
agcaattcctggggctcttacaagt

SEQ ID NO: 3919558 - DNA, 25 bp, Homo sapien
tggggctcttacaagttttcccaca

SEQ ID NO: 3919559 - DNA, 25 bp, Homo sapien
cccagcaattcctggggctcttaca

SEQ ID NO: 3919560 - DNA, 25 bp, Homo sapien
cgcggcttttcgccgggttcctcag

SEQ ID NO: 3919561 - DNA, 25 bp, Homo sapien
tgcaggaagtcggtccttttgcccc

SEQ ID NO: 3919562 - DNA, 25 bp, Homo sapien
ttgagatagtaatccgggcccgggc

SEQ ID NO: 3919563 - DNA, 25 bp, Homo sapien
cttttgcccccgaagcgcagaaagg

SEQ ID NO: 3919564 - DNA, 25 bp, Homo sapien
ctctggcttccgaccgttgccaaaa

SEQ ID NO: 3919565 - DNA, 25 bp, Homo sapien
tctggcttccgaccgttgccaaaaa

SEQ ID NO: 3919566 - DNA, 25 bp, Homo sapien
acgtccgcgcgaatccggtcctggg

SEQ ID NO: 3919567 - DNA, 25 bp, Homo sapien
gaatggtcgtttggcagaagtctcc

SEQ ID NO: 3919568 - DNA, 25 bp, Homo sapien
tactgtggcaaaggagacgtccgcg

SEQ ID NO: 3919569 - DNA, 25 bp, Homo sapien
aagtctccgggaccgcactccagga

SEQ ID NO: 3919570 - DNA, 25 bp, Homo sapien
cttccccgaaaatctgccttccaga

SEQ ID NO: 3919571 - DNA, 25 bp, Homo sapien
aatgcgccccgccaggacttcttcc

SEQ ID NO: 3919572 - DNA, 25 bp, Homo sapien
ctgcacagccaatgcgaatgcgccc

SEQ ID NO: 3919573 - DNA, 25 bp, Homo sapien
tccccgaaaatctgccttccagact

SEQ ID NO: 3919574 - DNA, 25 bp, Homo sapien
ctcccgctacctgccgcgtccgcag

SEQ ID NO: 3919575 - DNA, 25 bp, Homo sapien
tccacgtggcgcctcccgctacctg

SEQ ID NO: 3919576 - DNA, 25 bp, Homo sapien
tacctgccgcgtccgcagacccgac

SEQ ID NO: 3919577 - DNA, 25 bp, Homo sapien
cgctccacgtggcgcctcccgctac

SEQ ID NO: 3919578 - DNA, 25 bp, Homo sapien
catcatgaatgatggacggatccag

SEQ ID NO: 3919579 - DNA, 25 bp, Homo sapien
cattgactgtcctgactgggttctt

SEQ ID NO: 3919580 - DNA, 25 bp, Homo sapien
tgctcacatcaagtagaatcagggt

SEQ ID NO: 3919581 - DNA, 25 bp, Homo sapien
ttaggaaatcgagccagccatcatg

SEQ ID NO: 3919582 - DNA, 25 bp, Homo sapien
gcaacagagccaagtagagagcccc

SEQ ID NO: 3919583 - DNA, 25 bp, Homo sapien
ggggggcgggagttgctggagggca

SEQ ID NO: 3919584 - DNA, 25 bp, Homo sapien
gatggagcaacagagccaagtagag

SEQ ID NO: 3919585 - DNA, 25 bp, Homo sapien
ggagagatggagcaacagagccaag

SEQ ID NO: 3919586 - DNA, 25 bp, Homo sapien
ttcagggaaggcacaaagcaccctc

SEQ ID NO: 3919587 - DNA, 25 bp, Homo sapien
tcagggaaggcacaaagcaccctca

SEQ ID NO: 3919588 - DNA, 25 bp, Homo sapien
cagggaaggcacaaagcaccctcat

SEQ ID NO: 3919589 - DNA, 25 bp, Homo sapien
aatccctctgatttaaacctctctt

SEQ ID NO: 3919590 - DNA, 25 bp, Homo sapien
caatccctctgatttaaacctctct

SEQ ID NO: 3919591 - DNA, 25 bp, Homo sapien
atccctctgatttaaacctctcttc

SEQ ID NO: 3919592 - DNA, 25 bp, Homo sapien
tcaatccctctgatttaaacctctc

SEQ ID NO: 3919593 - DNA, 25 bp, Homo sapien
gcttgtttctcctgacagcgtcagg

SEQ ID NO: 3919594 - DNA, 25 bp, Homo sapien
gtcaggcacttcgtccgctcagggc

SEQ ID NO: 3919595 - DNA, 25 bp, Homo sapien
gacagcgtcaggcacttcgtccgct

SEQ ID NO: 3919596 - DNA, 25 bp, Homo sapien
cgacagcacgcttgtttctcctgac

SEQ ID NO: 3919597 - DNA, 25 bp, Homo sapien
aaacatagtgacctggtcaagcagc

SEQ ID NO: 3919598 - DNA, 25 bp, Homo sapien
cagcttttccgatccgagggccaaa

SEQ ID NO: 3919599 - DNA, 25 bp, Homo sapien
tagtgacctggtcaagcagcttttc

SEQ ID NO: 3919600 - DNA, 25 bp, Homo sapien
tcaagcagcttttccgatccgaggg

SEQ ID NO: 3919601 - DNA, 25 bp, Homo sapien
taatactctaacaccaaccaagggc

SEQ ID NO: 3919602 - DNA, 25 bp, Homo sapien
cagtcggagatctgggagccacagt

SEQ ID NO: 3919603 - DNA, 25 bp, Homo sapien
ggcagtcggccagtgacagtcagta

SEQ ID NO: 3919604 - DNA, 25 bp, Homo sapien
cagtcagtagggcagtagtcaagga

SEQ ID NO: 3919605 - DNA, 25 bp, Homo sapien
gaccccaggctctcaatgaaaagcc

SEQ ID NO: 3919606 - DNA, 25 bp, Homo sapien
ccaggctctcaatgaaaagccatga

SEQ ID NO: 3919607 - DNA, 25 bp, Homo sapien
aggctctcaatgaaaagccatgaag

SEQ ID NO: 3919608 - DNA, 25 bp, Homo sapien
cccaggctctcaatgaaaagccatg

SEQ ID NO: 3919609 - DNA, 25 bp, Homo sapien
ccactgttgggtgccggcggctccg

SEQ ID NO: 3919610 - DNA, 25 bp, Homo sapien
ctcagcccactgttgggtgccggcg

SEQ ID NO: 3919611 - DNA, 25 bp, Homo sapien
cccactgttgggtgccggcggctcc

SEQ ID NO: 3919612 - DNA, 25 bp, Homo sapien
tccctcagcccactgttgggtgccg

SEQ ID NO: 3919613 - DNA, 25 bp, Homo sapien
tccctcttgtttggaagtagagcct

SEQ ID NO: 3919614 - DNA, 25 bp, Homo sapien
cctcttgtttggaagtagagccttc

SEQ ID NO: 3919615 - DNA, 25 bp, Homo sapien
ggctccctcttgtttggaagtagag

SEQ ID NO: 3919616 - DNA, 25 bp, Homo sapien
ttgtttggaagtagagccttctcac

SEQ ID NO: 3919617 - DNA, 25 bp, Homo sapien
cccagtgatagccagcaccatttca

SEQ ID NO: 3919618 - DNA, 25 bp, Homo sapien
cgggccccccagtgatagccagcac

SEQ ID NO: 3919619 - DNA, 25 bp, Homo sapien
acccgggccccccagtgatagccag

SEQ ID NO: 3919620 - DNA, 25 bp, Homo sapien
gccccccagtgatagccagcaccat

SEQ ID NO: 3919621 - DNA, 25 bp, Homo sapien
ccttggcagttgagctccatgggag

SEQ ID NO: 3919622 - DNA, 25 bp, Homo sapien
cagcagtcttcaatcgatcaataat

SEQ ID NO: 3919623 - DNA, 25 bp, Homo sapien
tggctcccaatcagcagtcttcaat

SEQ ID NO: 3919624 - DNA, 25 bp, Homo sapien
tcttcaatcgatcaataattctgct

SEQ ID NO: 3919625 - DNA, 25 bp, Homo sapien
atctgttttggctcccaatcagcag

SEQ ID NO: 3919626 - DNA, 25 bp, Homo sapien
gtggaactttcagcccagcgtttct

SEQ ID NO: 3919627 - DNA, 25 bp, Homo sapien
gatactgggcagttcgagacaggtt

SEQ ID NO: 3919628 - DNA, 25 bp, Homo sapien
gaaattctcggcacaccctagagta

SEQ ID NO: 3919629 - DNA, 25 bp, Homo sapien
tcagcagtgcatgacttctcgtaga

SEQ ID NO: 3919630 - DNA, 25 bp, Homo sapien
tacgcacatcacgagtaaatactgt

SEQ ID NO: 3919631 - DNA, 25 bp, Homo sapien
tagggacacaaccatgcagaaagag

SEQ ID NO: 3919632 - DNA, 25 bp, Homo sapien
gaaccaaagcttaggactagggaca

SEQ ID NO: 3919633 - DNA, 25 bp, Homo sapien
cagttaaatatgtacgtgtccgtgc

SEQ ID NO: 3919634 - DNA, 25 bp, Homo sapien
tgggttgagatgatgaatttaatgc

SEQ ID NO: 3919635 - DNA, 25 bp, Homo sapien
ttgagatgatgaatttaatgccgca

SEQ ID NO: 3919636 - DNA, 25 bp, Homo sapien
ggttgagatgatgaatttaatgccg

SEQ ID NO: 3919637 - DNA, 25 bp, Homo sapien
gttgagatgatgaatttaatgccgc

SEQ ID NO: 3919638 - DNA, 25 bp, Homo sapien
cacattcacactttggctccttcag

SEQ ID NO: 3919639 - DNA, 25 bp, Homo sapien
cttcagacaacttgatctttgggac

SEQ ID NO: 3919640 - DNA, 25 bp, Homo sapien
accacatagaagcacgtggccgcca

SEQ ID NO: 3919641 - DNA, 25 bp, Homo sapien
cactcctttttagtgagagggacaa

SEQ ID NO: 3919642 - DNA, 25 bp, Homo sapien
tgtgcaggcagggaacacacatgac

SEQ ID NO: 3919643 - DNA, 25 bp, Homo sapien
gctctaatcccagtctccaaattcg

SEQ ID NO: 3919644 - DNA, 25 bp, Homo sapien
agtgtctctaatccatggtatgtac

SEQ ID NO: 3919645 - DNA, 25 bp, Homo sapien
caaattcgtctcaagggatgttctc

SEQ ID NO: 3919646 - DNA, 25 bp, Homo sapien
gtggccacgtaatctagatttttgg

SEQ ID NO: 3919647 - DNA, 25 bp, Homo sapien
gatttttggtggttaagccactcac

SEQ ID NO: 3919648 - DNA, 25 bp, Homo sapien
ggccacgtaatctagatttttggtg

SEQ ID NO: 3919649 - DNA, 25 bp, Homo sapien
taatctagatttttggtggttaagc

SEQ ID NO: 3919650 - DNA, 25 bp, Homo sapien
gcagcaggtagatgtgcttttcatt

SEQ ID NO: 3919651 - DNA, 25 bp, Homo sapien
ttgaccagatactcaacctgcttgg

SEQ ID NO: 3919652 - DNA, 25 bp, Homo sapien
tttcattgaccagatactcaacctg

SEQ ID NO: 3919653 - DNA, 25 bp, Homo sapien
gttgattcgaccacttggcagcagg

SEQ ID NO: 3919654 - DNA, 25 bp, Homo sapien
caatatggctactactgatgggaat

SEQ ID NO: 3919655 - DNA, 25 bp, Homo sapien
gaatccccagaaaattcaatatggc

SEQ ID NO: 3919656 - DNA, 25 bp, Homo sapien
aaggcgctattttgtccaactgaca

SEQ ID NO: 3919657 - DNA, 25 bp, Homo sapien
cagtggaggctcagcaattatatga

SEQ ID NO: 3919658 - DNA, 25 bp, Homo sapien
ttacaatacattgggtaaggcccca

SEQ ID NO: 3919659 - DNA, 25 bp, Homo sapien
tgaggtacctgatcaatcctgtgtg

SEQ ID NO: 3919660 - DNA, 25 bp, Homo sapien
gacttgcattgagtacccgcggcag

SEQ ID NO: 3919661 - DNA, 25 bp, Homo sapien
tagttcttccctaacctggacttgc

SEQ ID NO: 3919662 - DNA, 25 bp, Homo sapien
aataaatttgcatgctggccaggca

SEQ ID NO: 3919663 - DNA, 25 bp, Homo sapien
taccgctattttctccgagggctgc

SEQ ID NO: 3919664 - DNA, 25 bp, Homo sapien
ggtataaaagcatcaatcatctggc

SEQ ID NO: 3919665 - DNA, 25 bp, Homo sapien
ctattttgtaagacacctgtgcaag

SEQ ID NO: 3919666 - DNA, 25 bp, Homo sapien
ggtcagaatccggtcagccattgtc

SEQ ID NO: 3919667 - DNA, 25 bp, Homo sapien
ccaatttgatcagtgatgtggttcc

SEQ ID NO: 3919668 - DNA, 25 bp, Homo sapien
gtgaagctgaacatgccaatttgat

SEQ ID NO: 3919669 - DNA, 25 bp, Homo sapien
gcttctagtcgtgccctgagttcag

SEQ ID NO: 3919670 - DNA, 25 bp, Homo sapien
ccacaattcgtgctccctgggcggg

SEQ ID NO: 3919671 - DNA, 25 bp, Homo sapien
gagggtgctggccacaattcgtgct

SEQ ID NO: 3919672 - DNA, 25 bp, Homo sapien
aatccgcacgatcttctccatctgg

SEQ ID NO: 3919673 - DNA, 25 bp, Homo sapien
gattggaccaagtaatccgcacgat

SEQ ID NO: 3919674 - DNA, 25 bp, Homo sapien
gctgctgaagcagggagtgatgcga

SEQ ID NO: 3919675 - DNA, 25 bp, Homo sapien
tgtaactcctcaggagagcactcac

SEQ ID NO: 3919676 - DNA, 25 bp, Homo sapien
gggaccagaatcagctgtggctgct

SEQ ID NO: 3919677 - DNA, 25 bp, Homo sapien
agcagggagtgatgcgaggaggtgg

SEQ ID NO: 3919678 - DNA, 25 bp, Homo sapien
ggcacagaagaactcgaagccttca

SEQ ID NO: 3919679 - DNA, 25 bp, Homo sapien
tgtagagcccgaagttcttggagaa

SEQ ID NO: 3919680 - DNA, 25 bp, Homo sapien
tcagacacaaaatagcgaatggccc

SEQ ID NO: 3919681 - DNA, 25 bp, Homo sapien
ttccagatgcgaagccctgataggc

SEQ ID NO: 3919682 - DNA, 25 bp, Homo sapien
ttgactatatgcacccaagctccac

SEQ ID NO: 3919683 - DNA, 25 bp, Homo sapien
tatttcttgactatatgcacccaag

SEQ ID NO: 3919684 - DNA, 25 bp, Homo sapien
ggcaccaacctcagacaccggcctt

SEQ ID NO: 3919685 - DNA, 25 bp, Homo sapien
caacctcagacaccggccttccttc

SEQ ID NO: 3919686 - DNA, 25 bp, Homo sapien
cactttcagctaggaattcccacct

SEQ ID NO: 3919687 - DNA, 25 bp, Homo sapien
cacagctgccttagtactcgtccat

SEQ ID NO: 3919688 - DNA, 25 bp, Homo sapien
gtgtccaatacacagcagttcctta

SEQ ID NO: 3919689 - DNA, 25 bp, Homo sapien
caatagtgtattcccacagtgtcca

SEQ ID NO: 3919690 - DNA, 25 bp, Homo sapien
tgctccggagttgggtcaatcccag

SEQ ID NO: 3919691 - DNA, 25 bp, Homo sapien
gacaacaatggagaactcaggagca

SEQ ID NO: 3919692 - DNA, 25 bp, Homo sapien
cccagttgggttgtgtgcacaggcg

SEQ ID NO: 3919693 - DNA, 25 bp, Homo sapien
tgcttccactgctccggagttgggt

SEQ ID NO: 3919694 - DNA, 25 bp, Homo sapien
aaaccagcagcggaaaacacagcat

SEQ ID NO: 3919695 - DNA, 25 bp, Homo sapien
ctctgcatcccagtagcgataggac

SEQ ID NO: 3919696 - DNA, 25 bp, Homo sapien
tggaggtccaatcctctcttctctg

SEQ ID NO: 3919697 - DNA, 25 bp, Homo sapien
ccagtagcgataggaccgaatgtct

SEQ ID NO: 3919698 - DNA, 25 bp, Homo sapien
gacacatagacaggtgtgttcttgt

SEQ ID NO: 3919699 - DNA, 25 bp, Homo sapien
tccaattcgaagtgcacctgttccc

SEQ ID NO: 3919700 - DNA, 25 bp, Homo sapien
tgtttgttccattgtaccaacgcgc

SEQ ID NO: 3919701 - DNA, 25 bp, Homo sapien
gcgctaagaaatcagctccaattcg

SEQ ID NO: 3919702 - DNA, 25 bp, Homo sapien
gacctagatcgtaccttgatactaa

SEQ ID NO: 3919703 - DNA, 25 bp, Homo sapien
taacattgctgctaaaagacaacaa

SEQ ID NO: 3919704 - DNA, 25 bp, Homo sapien
ctaaatcttttcaagaacctaacat

SEQ ID NO: 3919705 - DNA, 25 bp, Homo sapien
gaaaaaagtagaatgagagacctag

SEQ ID NO: 3919706 - DNA, 25 bp, Homo sapien
taacttctggaaacacgatagatgc

SEQ ID NO: 3919707 - DNA, 25 bp, Homo sapien
tgagcaagacctcccttgaacatgg

SEQ ID NO: 3919708 - DNA, 25 bp, Homo sapien
tgacttcacattgcagatacctaag

SEQ ID NO: 3919709 - DNA, 25 bp, Homo sapien
tagatgcatagataccagtggaaac

SEQ ID NO: 3919710 - DNA, 25 bp, Homo sapien
gaagcccgtcacactaacagctgat

SEQ ID NO: 3919711 - DNA, 25 bp, Homo sapien
acaagcaaaataagcagctaacatc

SEQ ID NO: 3919712 - DNA, 25 bp, Homo sapien
agggaagcccgtcacactaacagct

SEQ ID NO: 3919713 - DNA, 25 bp, Homo sapien
agcccgtcacactaacagctgatct

SEQ ID NO: 3919714 - DNA, 25 bp, Homo sapien
aagattctgatttacctggcctggc

SEQ ID NO: 3919715 - DNA, 25 bp, Homo sapien
aagggtggtgcctccaagattctga

SEQ ID NO: 3919716 - DNA, 25 bp, Homo sapien
agggcccagccacagtatgttttta

SEQ ID NO: 3919717 - DNA, 25 bp, Homo sapien
ttctctaagattcagctcaagtgcc

SEQ ID NO: 3919718 - DNA, 25 bp, Homo sapien
gagttggatctagaaccctggtgtc

SEQ ID NO: 3919719 - DNA, 25 bp, Homo sapien
caggttcctgaactcgcgctacaga

SEQ ID NO: 3919720 - DNA, 25 bp, Homo sapien
aaaagccgtgctttgtacatggcca

SEQ ID NO: 3919721 - DNA, 25 bp, Homo sapien
tctgatgatctactgggcaaaactg

SEQ ID NO: 3919722 - DNA, 25 bp, Homo sapien
cccaggattggcagatactcgtgat

SEQ ID NO: 3919723 - DNA, 25 bp, Homo sapien
gcaaaacccagggatggcagtcatc

SEQ ID NO: 3919724 - DNA, 25 bp, Homo sapien
tgtcatccccaagggcaagacgaga

SEQ ID NO: 3919725 - DNA, 25 bp, Homo sapien
aagacgagaagcacagctccggaac

SEQ ID NO: 3919726 - DNA, 25 bp, Homo sapien
aaagagttatacatagtggaggctc

SEQ ID NO: 3919727 - DNA, 25 bp, Homo sapien
catagtggaggctcatgctgtgtcc

SEQ ID NO: 3919728 - DNA, 25 bp, Homo sapien
gagaatggaaaagagttatacatag

SEQ ID NO: 3919729 - DNA, 25 bp, Homo sapien
tagtggaggctcatgctgtgtccaa

SEQ ID NO: 3919730 - DNA, 25 bp, Homo sapien
tctggctggtctttgcacgtggcaa

SEQ ID NO: 3919731 - DNA, 25 bp, Homo sapien
tgctatgcacagacaaaacgttatc

SEQ ID NO: 3919732 - DNA, 25 bp, Homo sapien
ccttaagggcaaaatcaagcctcag

SEQ ID NO: 3919733 - DNA, 25 bp, Homo sapien
gtccaaggtacagaagagaatcact

SEQ ID NO: 3919734 - DNA, 25 bp, Homo sapien
gcctgcggaacctcggcaaagactg

SEQ ID NO: 3919735 - DNA, 25 bp, Homo sapien
cggcaaagactgacggaggtgccat

SEQ ID NO: 3919736 - DNA, 25 bp, Homo sapien
cccactcccaggttgaccttgcggg

SEQ ID NO: 3919737 - DNA, 25 bp, Homo sapien
gatcctccctgaagtcggcagtgag

SEQ ID NO: 3919738 - DNA, 25 bp, Homo sapien
gatttcaccccacgcccggagctgg

SEQ ID NO: 3919739 - DNA, 25 bp, Homo sapien
atcaagagatttcaccccacgcccg

SEQ ID NO: 3919740 - DNA, 25 bp, Homo sapien
gcaggtcaggtctggccgttgcgac

SEQ ID NO: 3919741 - DNA, 25 bp, Homo sapien
tctggccgttgcgactggaggagac

SEQ ID NO: 3919742 - DNA, 25 bp, Homo sapien
tcgagccgcgtccaaagcttggcaa

SEQ ID NO: 3919743 - DNA, 25 bp, Homo sapien
gaaggaacgctattagccaatccaa

SEQ ID NO: 3919744 - DNA, 25 bp, Homo sapien
gaaaacaatttatcggctgccgaga

SEQ ID NO: 3919745 - DNA, 25 bp, Homo sapien
cagcttctgacgacgaaggcacagg

SEQ ID NO: 3919746 - DNA, 25 bp, Homo sapien
tggcagccaaatacccagcgtctgt

SEQ ID NO: 3919747 - DNA, 25 bp, Homo sapien
gagttcccgaacacaggtcttcctg

SEQ ID NO: 3919748 - DNA, 25 bp, Homo sapien
gttcgtccaggacgtgcagctccgg

SEQ ID NO: 3919749 - DNA, 25 bp, Homo sapien
gaccttgaccacctttgtcggctgt

SEQ ID NO: 3919750 - DNA, 25 bp, Homo sapien
gtatacctgtcctgccagccttggt

SEQ ID NO: 3919751 - DNA, 25 bp, Homo sapien
agggaagtatacctgtcctgccagc

SEQ ID NO: 3919752 - DNA, 25 bp, Homo sapien
ctgagggaagtatacctgtcctgcc

SEQ ID NO: 3919753 - DNA, 25 bp, Homo sapien
ggaagtatacctgtcctgccagcct

SEQ ID NO: 3919754 - DNA, 25 bp, Homo sapien
tttgatttaaaagtatgatcttcac

SEQ ID NO: 3919755 - DNA, 25 bp, Homo sapien
gatcttcacagcgttggccagcaat

SEQ ID NO: 3919756 - DNA, 25 bp, Homo sapien
tatgatcttcacagcgttggccagc

SEQ ID NO: 3919757 - DNA, 25 bp, Homo sapien
cttcacagcgttggccagcaatatc

SEQ ID NO: 3919758 - DNA, 25 bp, Homo sapien
ttaaatggatcaccagtacagtctc

SEQ ID NO: 3919759 - DNA, 25 bp, Homo sapien
tacagtctcttacttctagagccat

SEQ ID NO: 3919760 - DNA, 25 bp, Homo sapien
tgccccgtttctccttaaatggatc

SEQ ID NO: 3919761 - DNA, 25 bp, Homo sapien
ggatcaccagtacagtctcttactt

SEQ ID NO: 3919762 - DNA, 25 bp, Homo sapien
aaaaacataaaccacaagacataat

SEQ ID NO: 3919763 - DNA, 25 bp, Homo sapien
agtgtttactatatgcacattgttg

SEQ ID NO: 3919764 - DNA, 25 bp, Homo sapien
cacaataaggtatctaggtactcaa

SEQ ID NO: 3919765 - DNA, 25 bp, Homo sapien
aactgaaaccatcaattgcacttct

SEQ ID NO: 3919766 - DNA, 25 bp, Homo sapien
ggcacgttgttcagtttagaagcta

SEQ ID NO: 3919767 - DNA, 25 bp, Homo sapien
tcttgctctcgggaataaatcctac

SEQ ID NO: 3919768 - DNA, 25 bp, Homo sapien
ataggaagaggatgactggccagct

SEQ ID NO: 3919769 - DNA, 25 bp, Homo sapien
taatttttgaggacaggcagcgacg

SEQ ID NO: 3919770 - DNA, 25 bp, Homo sapien
ttgttggtgtggcatcatattctgg

SEQ ID NO: 3919771 - DNA, 25 bp, Homo sapien
tatttcttttgttggtgtggcatca

SEQ ID NO: 3919772 - DNA, 25 bp, Homo sapien
cttttgttggtgtggcatcatattc

SEQ ID NO: 3919773 - DNA, 25 bp, Homo sapien
tggtgtggcatcatattctgggccc

SEQ ID NO: 3919774 - DNA, 25 bp, Homo sapien
tgctcggtatcagacagtagtcgcc

SEQ ID NO: 3919775 - DNA, 25 bp, Homo sapien
acggagaggttgctcggtatcagac

SEQ ID NO: 3919776 - DNA, 25 bp, Homo sapien
agaattggttccaggtccacggaga

SEQ ID NO: 3919777 - DNA, 25 bp, Homo sapien
tcagacagtagtcgccattggaagc

SEQ ID NO: 3919778 - DNA, 25 bp, Homo sapien
gcagatgcccacactgagggattct

SEQ ID NO: 3919779 - DNA, 25 bp, Homo sapien
gatgcccacactgagggattctcag

SEQ ID NO: 3919780 - DNA, 25 bp, Homo sapien
ctgcagatgcccacactgagggatt

SEQ ID NO: 3919781 - DNA, 25 bp, Homo sapien
ccacactgagggattctcagccctg

SEQ ID NO: 3919782 - DNA, 25 bp, Homo sapien
cagacatcgccaccactttataaac

SEQ ID NO: 3919783 - DNA, 25 bp, Homo sapien
agtgtggagggcgttgctggagtct

SEQ ID NO: 3919784 - DNA, 25 bp, Homo sapien
ataaacagtgtggagggcgttgctg

SEQ ID NO: 3919785 - DNA, 25 bp, Homo sapien
catcgccaccactttataaacagtg

SEQ ID NO: 3919786 - DNA, 25 bp, Homo sapien
tcataatgtctttgacgtgtcaacc

SEQ ID NO: 3919787 - DNA, 25 bp, Homo sapien
tgtcaaccgtaaagcaaaccacaga

SEQ ID NO: 3919788 - DNA, 25 bp, Homo sapien
tcttcctcataatgtctttgacgtg

SEQ ID NO: 3919789 - DNA, 25 bp, Homo sapien
ctttgacgtgtcaaccgtaaagcaa

SEQ ID NO: 3919790 - DNA, 25 bp, Homo sapien
ctgctgctctcgttcaagtggctat

SEQ ID NO: 3919791 - DNA, 25 bp, Homo sapien
gcaaagatttaacgctgctgctctc

SEQ ID NO: 3919792 - DNA, 25 bp, Homo sapien
gaggcaaagatttaacgctgctgct

SEQ ID NO: 3919793 - DNA, 25 bp, Homo sapien
gctgctgctctcgttcaagtggcta

SEQ ID NO: 3919794 - DNA, 25 bp, Homo sapien
tggaaactcggacaatacctgctca

SEQ ID NO: 3919795 - DNA, 25 bp, Homo sapien
gaattcttccccgtataactggaca

SEQ ID NO: 3919796 - DNA, 25 bp, Homo sapien
tcaggaaagattccgagtggaaact

SEQ ID NO: 3919797 - DNA, 25 bp, Homo sapien
caaagaattcttccccgtataactg

SEQ ID NO: 3919798 - DNA, 25 bp, Homo sapien
gctctataaattgagtactaggtgg

SEQ ID NO: 3919799 - DNA, 25 bp, Homo sapien
ttgagtactaggtggagaatttggc

SEQ ID NO: 3919800 - DNA, 25 bp, Homo sapien
ttctcctggataagagcagtgctct

SEQ ID NO: 3919801 - DNA, 25 bp, Homo sapien
taagagcagtgctctataaattgag

SEQ ID NO: 3919802 - DNA, 25 bp, Homo sapien
taaaaaaggccttgtcagaggcacc

SEQ ID NO: 3919803 - DNA, 25 bp, Homo sapien
caaaccctcacgcaaatggcctata

SEQ ID NO: 3919804 - DNA, 25 bp, Homo sapien
tggtactctgattcccagcggccct

SEQ ID NO: 3919805 - DNA, 25 bp, Homo sapien
gagaaggtctggaaagcaatagcta

SEQ ID NO: 3919806 - DNA, 25 bp, Homo sapien
tcatttacaacaacgtgggtggaac

SEQ ID NO: 3919807 - DNA, 25 bp, Homo sapien
caacaaccagtagataaagaaagtg

SEQ ID NO: 3919808 - DNA, 25 bp, Homo sapien
ggcacaggaatacaaacttttcatg

SEQ ID NO: 3919809 - DNA, 25 bp, Homo sapien
tacggtaagcgaaacaaaccaggca

SEQ ID NO: 3919810 - DNA, 25 bp, Homo sapien
ctggcagtttatgaattcccaaggg

SEQ ID NO: 3919811 - DNA, 25 bp, Homo sapien
ggcagtttatgaattcccaagggat

SEQ ID NO: 3919812 - DNA, 25 bp, Homo sapien
tggcagtttatgaattcccaaggga

SEQ ID NO: 3919813 - DNA, 25 bp, Homo sapien
tgtttacttgttgacgcgcgctcac

SEQ ID NO: 3919814 - DNA, 25 bp, Homo sapien
gatttggaggccgaagcagtaagca

SEQ ID NO: 3919815 - DNA, 25 bp, Homo sapien
cgactgcgaggaaatcaaagcggcc

SEQ ID NO: 3919816 - DNA, 25 bp, Homo sapien
aagacgacctcgagtttggtatccg

SEQ ID NO: 3919817 - DNA, 25 bp, Homo sapien
cattagtataatcctctgtccaaac

SEQ ID NO: 3919818 - DNA, 25 bp, Homo sapien
cagacgtttggtgtaaacagacccg

SEQ ID NO: 3919819 - DNA, 25 bp, Homo sapien
cggtgtcctggagccccgtttccag

SEQ ID NO: 3919820 - DNA, 25 bp, Homo sapien
tgtccaaacagtgcagccgggacgg

SEQ ID NO: 3919821 - DNA, 25 bp, Homo sapien
aggcagcttcccgtcaatcctgtca

SEQ ID NO: 3919822 - DNA, 25 bp, Homo sapien
tcaaggcagcttcccgtcaatcctg

SEQ ID NO: 3919823 - DNA, 25 bp, Homo sapien
ttattttcaaggcagcttcccgtca

SEQ ID NO: 3919824 - DNA, 25 bp, Homo sapien
tcaatcctgtcaccggggcacattc

SEQ ID NO: 3919825 - DNA, 25 bp, Homo sapien
gagaggtcttaccagttggaacagg

SEQ ID NO: 3919826 - DNA, 25 bp, Homo sapien
gaacagggcacagagtagcttccct

SEQ ID NO: 3919827 - DNA, 25 bp, Homo sapien
gaaagtcagtttgctctcacctgtg

SEQ ID NO: 3919828 - DNA, 25 bp, Homo sapien
cagactgccacaatagaaggaaatg

SEQ ID NO: 3919829 - DNA, 25 bp, Homo sapien
gctgccctgattcccttcacatcaa

SEQ ID NO: 3919830 - DNA, 25 bp, Homo sapien
tcctgtgctgccctgattcccttca

SEQ ID NO: 3919831 - DNA, 25 bp, Homo sapien
tgtgctgccctgattcccttcacat

SEQ ID NO: 3919832 - DNA, 25 bp, Homo sapien
gccctgattcccttcacatcaaaca

SEQ ID NO: 3919833 - DNA, 25 bp, Homo sapien
cacaatcaaaaagcctgagagcatc

SEQ ID NO: 3919834 - DNA, 25 bp, Homo sapien
gccacaatcaaaaagcctgagagca

SEQ ID NO: 3919835 - DNA, 25 bp, Homo sapien
gggccacaatcaaaaagcctgagag

SEQ ID NO: 3919836 - DNA, 25 bp, Homo sapien
caatcaaaaagcctgagagcatcag

SEQ ID NO: 3919837 - DNA, 25 bp, Homo sapien
gggcacaatgaggcttggggccctt

SEQ ID NO: 3919838 - DNA, 25 bp, Homo sapien
gcagggcacaatgaggcttggggcc

SEQ ID NO: 3919839 - DNA, 25 bp, Homo sapien
gcacaatgaggcttggggcccttac

SEQ ID NO: 3919840 - DNA, 25 bp, Homo sapien
caggcagggcacaatgaggcttggg

SEQ ID NO: 3919841 - DNA, 25 bp, Homo sapien
cgctgcaacctggaggtaccgaacc

SEQ ID NO: 3919842 - DNA, 25 bp, Homo sapien
gctgcaacctggaggtaccgaaccg

SEQ ID NO: 3919843 - DNA, 25 bp, Homo sapien
ctgcaacctggaggtaccgaaccgg

SEQ ID NO: 3919844 - DNA, 25 bp, Homo sapien
taagagactcctgcggagcgactgc

SEQ ID NO: 3919845 - DNA, 25 bp, Homo sapien
cagatcccactctgataagagactc

SEQ ID NO: 3919846 - DNA, 25 bp, Homo sapien
tggataggcgttggaaccagatccc

SEQ ID NO: 3919847 - DNA, 25 bp, Homo sapien
tgctgtacaactacggctctcgagt

SEQ ID NO: 3919848 - DNA, 25 bp, Homo sapien
gatgcggtagcggatagaggttttc

SEQ ID NO: 3919849 - DNA, 25 bp, Homo sapien
agggatgcggtagcggatagaggtt

SEQ ID NO: 3919850 - DNA, 25 bp, Homo sapien
atgcggtagcggatagaggttttcc

SEQ ID NO: 3919851 - DNA, 25 bp, Homo sapien
cttagggatgcggtagcggatagag

SEQ ID NO: 3919852 - DNA, 25 bp, Homo sapien
ggagcggctggggcggcggaatttg

SEQ ID NO: 3919853 - DNA, 25 bp, Homo sapien
ccgggagcggctggggcggcggaat

SEQ ID NO: 3919854 - DNA, 25 bp, Homo sapien
agcggctggggcggcggaatttggg

SEQ ID NO: 3919855 - DNA, 25 bp, Homo sapien
gcccgggagcggctggggcggcgga

SEQ ID NO: 3919856 - DNA, 25 bp, Homo sapien
tggggaggagacagccccctgcatg

SEQ ID NO: 3919857 - DNA, 25 bp, Homo sapien
ggagacagccccctgcatgagctca

SEQ ID NO: 3919858 - DNA, 25 bp, Homo sapien
gggaggagacagccccctgcatgag

SEQ ID NO: 3919859 - DNA, 25 bp, Homo sapien
gaggagacagccccctgcatgagct

SEQ ID NO: 3919860 - DNA, 25 bp, Homo sapien
gaggcgccctggtgggctccggcgg

SEQ ID NO: 3919861 - DNA, 25 bp, Homo sapien
agaggcgccctggtgggctccggcg

SEQ ID NO: 3919862 - DNA, 25 bp, Homo sapien
ctggtgggctccggcggctgcagag

SEQ ID NO: 3919863 - DNA, 25 bp, Homo sapien
gtgggctccggcggctgcagagcgt

SEQ ID NO: 3919864 - DNA, 25 bp, Homo sapien
ctgtgggcgtgtattggcgatcagg

SEQ ID NO: 3919865 - DNA, 25 bp, Homo sapien
gtgggcgtgtattggcgatcaggcg

SEQ ID NO: 3919866 - DNA, 25 bp, Homo sapien
tgtgggcgtgtattggcgatcaggc

SEQ ID NO: 3919867 - DNA, 25 bp, Homo sapien
cagttttaagacctggattgttggg

SEQ ID NO: 3919868 - DNA, 25 bp, Homo sapien
gggcgctttgtcctggtcgcagttt

SEQ ID NO: 3919869 - DNA, 25 bp, Homo sapien
tgtcctggtcgcagttttaagacct

SEQ ID NO: 3919870 - DNA, 25 bp, Homo sapien
taagacctggattgttgggctagat

SEQ ID NO: 3919871 - DNA, 25 bp, Homo sapien
ggaggcaatgtccaccgtccctgca

SEQ ID NO: 3919872 - DNA, 25 bp, Homo sapien
cagccggtgtcttatgccgctcgga

SEQ ID NO: 3919873 - DNA, 25 bp, Homo sapien
ccttccaggtgagacgggtctcttt

SEQ ID NO: 3919874 - DNA, 25 bp, Homo sapien
acccactcctgtcgccgttgcggga

SEQ ID NO: 3919875 - DNA, 25 bp, Homo sapien
gctcatctgctaagaaacagccgcc

SEQ ID NO: 3919876 - DNA, 25 bp, Homo sapien
tagtctagctctgctgacagctatg

SEQ ID NO: 3919877 - DNA, 25 bp, Homo sapien
cagctatgccggcttcatctgaagg

SEQ ID NO: 3919878 - DNA, 25 bp, Homo sapien
aacagccgccttcacactgagagga

SEQ ID NO: 3919879 - DNA, 25 bp, Homo sapien
gaaggaagaagactgatcctctgga

SEQ ID NO: 3919880 - DNA, 25 bp, Homo sapien
tgaatccagggccaatgcttgtgtg

SEQ ID NO: 3919881 - DNA, 25 bp, Homo sapien
gaaccagagcctgattggtgccggt

SEQ ID NO: 3919882 - DNA, 25 bp, Homo sapien
tggtgccggtgatttcagaaatgaa

SEQ ID NO: 3919883 - DNA, 25 bp, Homo sapien
ttaggcagcctccaataagtaggcg

SEQ ID NO: 3919884 - DNA, 25 bp, Homo sapien
aaacatctatttggattaggcagcc

SEQ ID NO: 3919885 - DNA, 25 bp, Homo sapien
taagtaggcggattatccagcttcc

SEQ ID NO: 3919886 - DNA, 25 bp, Homo sapien
gactggacttgttcagcgacttcat

SEQ ID NO: 3919887 - DNA, 25 bp, Homo sapien
aagatgaacaattgtccaggcttgt

SEQ ID NO: 3919888 - DNA, 25 bp, Homo sapien
cttaaggactatgtttgacaacttc

SEQ ID NO: 3919889 - DNA, 25 bp, Homo sapien
agaccgagggccactggttgacctg

SEQ ID NO: 3919890 - DNA, 25 bp, Homo sapien
ggttgacctgctaaacatagcgtgc

SEQ ID NO: 3919891 - DNA, 25 bp, Homo sapien
cgtggctaatgtttcccttgtttgg

SEQ ID NO: 3919892 - DNA, 25 bp, Homo sapien
gtggctaatgtttcccttgtttgga

SEQ ID NO: 3919893 - DNA, 25 bp, Homo sapien
tggctaatgtttcccttgtttggac

SEQ ID NO: 3919894 - DNA, 25 bp, Homo sapien
cgtgaggcgagttactggatgaccc

SEQ ID NO: 3919895 - DNA, 25 bp, Homo sapien
taatgaatctcgtaaggcctggtgt

SEQ ID NO: 3919896 - DNA, 25 bp, Homo sapien
gacattcctcagaagacttcccgtg

SEQ ID NO: 3919897 - DNA, 25 bp, Homo sapien
caattggcgcagctgtgtcgggagc

SEQ ID NO: 3919898 - DNA, 25 bp, Homo sapien
ggtcattattccagagtacagaaac

SEQ ID NO: 3919899 - DNA, 25 bp, Homo sapien
tccagagtacagaaactccttccct

SEQ ID NO: 3919900 - DNA, 25 bp, Homo sapien
cttggtcattattccagagtacaga

SEQ ID NO: 3919901 - DNA, 25 bp, Homo sapien
tcaggctcacgcagtcacagaaggc

SEQ ID NO: 3919902 - DNA, 25 bp, Homo sapien
gccctggtgacatgcatggcaaccc

SEQ ID NO: 3919903 - DNA, 25 bp, Homo sapien
tctgcatttccgattccaagtcttt

SEQ ID NO: 3919904 - DNA, 25 bp, Homo sapien
aattctcacactgactgggtgggac

SEQ ID NO: 3919905 - DNA, 25 bp, Homo sapien
tgttttccctggctactgtttgcag

SEQ ID NO: 3919906 - DNA, 25 bp, Homo sapien
gatgtgcttaccctgcaagtaccca

SEQ ID NO: 3919907 - DNA, 25 bp, Homo sapien
aatttcatgtttagagctgctgcta

SEQ ID NO: 3919908 - DNA, 25 bp, Homo sapien
tgttttgagaatcaactgggcccag

SEQ ID NO: 3919909 - DNA, 25 bp, Homo sapien
gaactcaagagtaagaaaatcctcc

SEQ ID NO: 3919910 - DNA, 25 bp, Homo sapien
tttctgctctcaggatcaagccgcc

SEQ ID NO: 3919911 - DNA, 25 bp, Homo sapien
cctccaatttggtctttgaagcaag

SEQ ID NO: 3919912 - DNA, 25 bp, Homo sapien
tcctcctgaagaacaatgcctctta

SEQ ID NO: 3919913 - DNA, 25 bp, Homo sapien
gtccagccaggtaaatttttccatc

SEQ ID NO: 3919914 - DNA, 25 bp, Homo sapien
agtgtcatctgaacccctggcttcg

SEQ ID NO: 3919915 - DNA, 25 bp, Homo sapien
ggaatgagctgcttatccctctata

SEQ ID NO: 3919916 - DNA, 25 bp, Homo sapien
ctataacagtctagagcaggtcatc

SEQ ID NO: 3919917 - DNA, 25 bp, Homo sapien
ccttctaactccacttgaggtggga

SEQ ID NO: 3919918 - DNA, 25 bp, Homo sapien
tttagtgattaggtatttgaagaac

SEQ ID NO: 3919919 - DNA, 25 bp, Homo sapien
cactcttcttgccttttagtgatta

SEQ ID NO: 3919920 - DNA, 25 bp, Homo sapien
tagtgattaggtatttgaagaactc

SEQ ID NO: 3919921 - DNA, 25 bp, Homo sapien
cttcttgccttttagtgattaggta

SEQ ID NO: 3919922 - DNA, 25 bp, Homo sapien
tgatataccgtcctgaaggcactag

SEQ ID NO: 3919923 - DNA, 25 bp, Homo sapien
tgcacccctcggaaataggcggtca

SEQ ID NO: 3919924 - DNA, 25 bp, Homo sapien
gaaaggaacgttcatggtcagctgg

SEQ ID NO: 3919925 - DNA, 25 bp, Homo sapien
tcctgtaatgtgtgagttcaaagcc

SEQ ID NO: 3919926 - DNA, 25 bp, Homo sapien
aatctacgacaaaggaggctcccag

SEQ ID NO: 3919927 - DNA, 25 bp, Homo sapien
gccaaccggtgatggagagtatcca

SEQ ID NO: 3919928 - DNA, 25 bp, Homo sapien
catatctacagtttgggagcttcag

SEQ ID NO: 3919929 - DNA, 25 bp, Homo sapien
gtgaatctgcttcctgtccaagagg

SEQ ID NO: 3919930 - DNA, 25 bp, Homo sapien
gtaatgttgccacacacccggccgc

SEQ ID NO: 3919931 - DNA, 25 bp, Homo sapien
agtaatgttgccacacacccggccg

SEQ ID NO: 3919932 - DNA, 25 bp, Homo sapien
cacatgtaaggccaagagagctgac

SEQ ID NO: 3919933 - DNA, 25 bp, Homo sapien
tccacatccatgataggaaggccag

SEQ ID NO: 3919934 - DNA, 25 bp, Homo sapien
tacactgctgcctagggatgccagc

SEQ ID NO: 3919935 - DNA, 25 bp, Homo sapien
cgttaagagctagtccaaaagatgg

SEQ ID NO: 3919936 - DNA, 25 bp, Homo sapien
gatctcacagaacctcaccacagaa

SEQ ID NO: 3919937 - DNA, 25 bp, Homo sapien
cgcagaacccatttgcagagcctaa

SEQ ID NO: 3919938 - DNA, 25 bp, Homo sapien
tcaacttggtttccagccggtccta

SEQ ID NO: 3919939 - DNA, 25 bp, Homo sapien
tacaaagatctttcgttcaggtcct

SEQ ID NO: 3919940 - DNA, 25 bp, Homo sapien
ccttctggtttcttcatgcagttcc

SEQ ID NO: 3919941 - DNA, 25 bp, Homo sapien
cattttgtcatgaggctttgtcatg

SEQ ID NO: 3919942 - DNA, 25 bp, Homo sapien
tcaacacaaactgcctctggtgagt

SEQ ID NO: 3919943 - DNA, 25 bp, Homo sapien
gaggctttgtcatgttctcaacaca

SEQ ID NO: 3919944 - DNA, 25 bp, Homo sapien
agcaggggcttcattagtatcttcc

SEQ ID NO: 3919945 - DNA, 25 bp, Homo sapien
tcttccttgggtggctggctgggtc

SEQ ID NO: 3919946 - DNA, 25 bp, Homo sapien
tggctgggtcgcctccaatcctgcc

SEQ ID NO: 3919947 - DNA, 25 bp, Homo sapien
ctgaaaaggtgaggcaaaaagcagg

SEQ ID NO: 3919948 - DNA, 25 bp, Homo sapien
gcggcccgttgtctgagaacatcag

SEQ ID NO: 3919949 - DNA, 25 bp, Homo sapien
gaggatactgtaaccctttgttgag

SEQ ID NO: 3919950 - DNA, 25 bp, Homo sapien
gtgtgtctccacattaccagggcat

SEQ ID NO: 3919951 - DNA, 25 bp, Homo sapien
agaggaacaagtcaagctggtaggt

SEQ ID NO: 3919952 - DNA, 25 bp, Homo sapien
gacagcagcaaagcccaaagagttg

SEQ ID NO: 3919953 - DNA, 25 bp, Homo sapien
tgagactggaaagcactgacagcag

SEQ ID NO: 3919954 - DNA, 25 bp, Homo sapien
gggaaccagcacaggaaggctcaat

SEQ ID NO: 3919955 - DNA, 25 bp, Homo sapien
agctccaaaccatgctgagactgga

SEQ ID NO: 3919956 - DNA, 25 bp, Homo sapien
gcccccagggtggattacatcactc

SEQ ID NO: 3919957 - DNA, 25 bp, Homo sapien
gcaatatggctattgcccccagggt

SEQ ID NO: 3919958 - DNA, 25 bp, Homo sapien
cccagggtggattacatcactcaat

SEQ ID NO: 3919959 - DNA, 25 bp, Homo sapien
aatatggctattgcccccagggtgg

SEQ ID NO: 3919960 - DNA, 25 bp, Homo sapien
caggcaaaataaagggcgtgggcag

SEQ ID NO: 3919961 - DNA, 25 bp, Homo sapien
caacacattgcgatagcgggcagct

SEQ ID NO: 3919962 - DNA, 25 bp, Homo sapien
agggcctccaacacattgcgatagc

SEQ ID NO: 3919963 - DNA, 25 bp, Homo sapien
cctgcgcctgttgctgtgacgttca

SEQ ID NO: 3919964 - DNA, 25 bp, Homo sapien
taccctgaaactgcaaaggtgggag

SEQ ID NO: 3919965 - DNA, 25 bp, Homo sapien
tgtatacctaaagagtgcccctggc

SEQ ID NO: 3919966 - DNA, 25 bp, Homo sapien
tcactggtgagccaatggaagcaag

SEQ ID NO: 3919967 - DNA, 25 bp, Homo sapien
gctgggtctacacagagtcttggca

SEQ ID NO: 3919968 - DNA, 25 bp, Homo sapien
tgtccttagccaccaataaatcagg

SEQ ID NO: 3919969 - DNA, 25 bp, Homo sapien
gtagcattgcctcctgtataagtca

SEQ ID NO: 3919970 - DNA, 25 bp, Homo sapien
gccaaacaacccagtagagaggtaa

SEQ ID NO: 3919971 - DNA, 25 bp, Homo sapien
aatatacatgggcaactaactgtcc

SEQ ID NO: 3919972 - DNA, 25 bp, Homo sapien
taccttgtgttaaaatactcctgcc

SEQ ID NO: 3919973 - DNA, 25 bp, Homo sapien
gatatggcccttgttaggagttacc

SEQ ID NO: 3919974 - DNA, 25 bp, Homo sapien
taccccgttttcaatggatatggcc

SEQ ID NO: 3919975 - DNA, 25 bp, Homo sapien
tcacaaagcttaatgagcgctcccc

SEQ ID NO: 3919976 - DNA, 25 bp, Homo sapien
tagtagcacttacctgagcttcggg

SEQ ID NO: 3919977 - DNA, 25 bp, Homo sapien
gacagattttcgatcctgagtcccg

SEQ ID NO: 3919978 - DNA, 25 bp, Homo sapien
gagtttgtaaaagcactagcccaga

SEQ ID NO: 3919979 - DNA, 25 bp, Homo sapien
caagccgttagatccatttcagggt

SEQ ID NO: 3919980 - DNA, 25 bp, Homo sapien
gatcctggctccggacaagacccag

SEQ ID NO: 3919981 - DNA, 25 bp, Homo sapien
caggtcgggttcgaagccgggtgca

SEQ ID NO: 3919982 - DNA, 25 bp, Homo sapien
atcctggctccggacaagacccagg

SEQ ID NO: 3919983 - DNA, 25 bp, Homo sapien
gttcgaagccgggtgcaggtctcac

SEQ ID NO: 3919984 - DNA, 25 bp, Homo sapien
cgcctgccaccatgtgcgtggtgac

SEQ ID NO: 3919985 - DNA, 25 bp, Homo sapien
tggggtacatcacgcagtgctccag

SEQ ID NO: 3919986 - DNA, 25 bp, Homo sapien
ctgccaccatgtgcgtggtgacagt

SEQ ID NO: 3919987 - DNA, 25 bp, Homo sapien
gcagtcgatggggtacatcacgcag

SEQ ID NO: 3919988 - DNA, 25 bp, Homo sapien
cggagtccggatcttgtcgtaccgg

SEQ ID NO: 3919989 - DNA, 25 bp, Homo sapien
agcgcctcgtagtccgggccggagt

SEQ ID NO: 3919990 - DNA, 25 bp, Homo sapien
ggccggagtccggatcttgtcgtac

SEQ ID NO: 3919991 - DNA, 25 bp, Homo sapien
tccgggccggagtccggatcttgtc

SEQ ID NO: 3919992 - DNA, 25 bp, Homo sapien
cgccagcaccccgcccctccaactc

SEQ ID NO: 3919993 - DNA, 25 bp, Homo sapien
cagcagcgccgactccccggggctc

SEQ ID NO: 3919994 - DNA, 25 bp, Homo sapien
ccagcaccccgcccctccaactcca

SEQ ID NO: 3919995 - DNA, 25 bp, Homo sapien
gccagcaccccgcccctccaactcc

SEQ ID NO: 3919996 - DNA, 25 bp, Homo sapien
cggccccgtagtgtccgcctcaggc

SEQ ID NO: 3919997 - DNA, 25 bp, Homo sapien
ccccgtagtgtccgcctcaggcgcg

SEQ ID NO: 3919998 - DNA, 25 bp, Homo sapien
cccggccccgtagtgtccgcctcag

SEQ ID NO: 3919999 - DNA, 25 bp, Homo sapien
ggccccgtagtgtccgcctcaggcg

SEQ ID NO: 3920000 - DNA, 25 bp, Homo sapien
taaggctgaactttgataggctcaa

SEQ ID NO: 3920001 - DNA, 25 bp, Homo sapien
gattggccgacatgtgcgatcaacc

SEQ ID NO: 3920002 - DNA, 25 bp, Homo sapien
tcagccggtagtattagcgaagtcg

SEQ ID NO: 3920003 - DNA, 25 bp, Homo sapien
aaccactcttgatactttgaccgcg

SEQ ID NO: 3920004 - DNA, 25 bp, Homo sapien
ttggctacagaaagagcgacgcgcc

SEQ ID NO: 3920005 - DNA, 25 bp, Homo sapien
gctcctcaaattctgagacgcgtgg

SEQ ID NO: 3920006 - DNA, 25 bp, Homo sapien
tcactagcgcctgcagagctgcggt

SEQ ID NO: 3920007 - DNA, 25 bp, Homo sapien
ggcgacaggccttcaacgtcaaact

SEQ ID NO: 3920008 - DNA, 25 bp, Homo sapien
gcgcgacccgcagcctgtccgggaa

SEQ ID NO: 3920009 - DNA, 25 bp, Homo sapien
gagagccgtgttcccgcgggatctc

SEQ ID NO: 3920010 - DNA, 25 bp, Homo sapien
gcgggatctcgtcgcgggcgtgagg

SEQ ID NO: 3920011 - DNA, 25 bp, Homo sapien
tcatccctggctggcgcgacccgca

SEQ ID NO: 3920012 - DNA, 25 bp, Homo sapien
ccgctagactctggtcgggtctgga

SEQ ID NO: 3920013 - DNA, 25 bp, Homo sapien
gagtattgggccctctggccggact

SEQ ID NO: 3920014 - DNA, 25 bp, Homo sapien
gcagagtaaacccaacaagtgttga

SEQ ID NO: 3920015 - DNA, 25 bp, Homo sapien
tggccggactcggtgctcctcaggc

SEQ ID NO: 3920016 - DNA, 25 bp, Homo sapien
aatgggcgggatgattcacagatga

SEQ ID NO: 3920017 - DNA, 25 bp, Homo sapien
cgccaggccaagagccgaaggcggg

SEQ ID NO: 3920018 - DNA, 25 bp, Homo sapien
gaggaagatgtcgaaatgggcggga

SEQ ID NO: 3920019 - DNA, 25 bp, Homo sapien
attcacagatgacggccggtggcga

SEQ ID NO: 3920020 - DNA, 25 bp, Homo sapien
gcaactcctcaggtactatagtcat

SEQ ID NO: 3920021 - DNA, 25 bp, Homo sapien
tgcaactcctcaggtactatagtca

SEQ ID NO: 3920022 - DNA, 25 bp, Homo sapien
aaatcaatggcatcacatcacctaa

SEQ ID NO: 3920023 - DNA, 25 bp, Homo sapien
ggtcaactgtgagcaaggaactttt

SEQ ID NO: 3920024 - DNA, 25 bp, Homo sapien
caacttgttgctaaactacagcacc

SEQ ID NO: 3920025 - DNA, 25 bp, Homo sapien
tgtccatccaccatcatagaaatca

SEQ ID NO: 3920026 - DNA, 25 bp, Homo sapien
ctggtcttctgccttatccaatgct

SEQ ID NO: 3920027 - DNA, 25 bp, Homo sapien
tgccttatccaatgctgatttcttc

SEQ ID NO: 3920028 - DNA, 25 bp, Homo sapien
ggtcttctgccttatccaatgctga

SEQ ID NO: 3920029 - DNA, 25 bp, Homo sapien
tcttctgccttatccaatgctgatt

SEQ ID NO: 3920030 - DNA, 25 bp, Homo sapien
tctgtagaagtttctgcagctatgt

SEQ ID NO: 3920031 - DNA, 25 bp, Homo sapien
gctccagcccattcgagcttcccag

SEQ ID NO: 3920032 - DNA, 25 bp, Homo sapien
gaagtttctgcagctatgttcagct

SEQ ID NO: 3920033 - DNA, 25 bp, Homo sapien
aagtctgtagaagtttctgcagcta

SEQ ID NO: 3920034 - DNA, 25 bp, Homo sapien
tttagctcttacatccaggactatg

SEQ ID NO: 3920035 - DNA, 25 bp, Homo sapien
tacatccaggactatgatctatttc

SEQ ID NO: 3920036 - DNA, 25 bp, Homo sapien
tccaggactatgatctatttcaagt

SEQ ID NO: 3920037 - DNA, 25 bp, Homo sapien
tcttacatccaggactatgatctat

SEQ ID NO: 3920038 - DNA, 25 bp, Homo sapien
tatttctctgcgttcttatcatgtg

SEQ ID NO: 3920039 - DNA, 25 bp, Homo sapien
taatatttctctgcgttcttatcat

SEQ ID NO: 3920040 - DNA, 25 bp, Homo sapien
ttaatatttctctgcgttcttatca

SEQ ID NO: 3920041 - DNA, 25 bp, Homo sapien
tctctgcgttcttatcatgtgtgta

SEQ ID NO: 3920042 - DNA, 25 bp, Homo sapien
gaggaggggccttttacttctctga

SEQ ID NO: 3920043 - DNA, 25 bp, Homo sapien
tctgaggaggggccttttacttctc

SEQ ID NO: 3920044 - DNA, 25 bp, Homo sapien
ctctctgaggaggggccttttactt

SEQ ID NO: 3920045 - DNA, 25 bp, Homo sapien
tgaggaggggccttttacttctctg

SEQ ID NO: 3920046 - DNA, 25 bp, Homo sapien
taatttactttctgcagatgctgtc

SEQ ID NO: 3920047 - DNA, 25 bp, Homo sapien
tcaaattttcaatcatcctacttgt

SEQ ID NO: 3920048 - DNA, 25 bp, Homo sapien
aatttactttctgcagatgctgtca

SEQ ID NO: 3920049 - DNA, 25 bp, Homo sapien
tcaatcatcctacttgttaatttac

SEQ ID NO: 3920050 - DNA, 25 bp, Homo sapien
gcagccctgggaaagaaccatgtga

SEQ ID NO: 3920051 - DNA, 25 bp, Homo sapien
tggcatcaggtccagtcagacagct

SEQ ID NO: 3920052 - DNA, 25 bp, Homo sapien
tctcccatctagattaagcccaagg

SEQ ID NO: 3920053 - DNA, 25 bp, Homo sapien
ccagtctctagagggaatgctcaaa

SEQ ID NO: 3920054 - DNA, 25 bp, Homo sapien
tttatgacagtttacctaagggctg

SEQ ID NO: 3920055 - DNA, 25 bp, Homo sapien
taacctatcagtagcatgtaaatgc

SEQ ID NO: 3920056 - DNA, 25 bp, Homo sapien
cctaagggagaggtgtatacatggc

SEQ ID NO: 3920057 - DNA, 25 bp, Homo sapien
tgttttgggaagattcgaccacgag

SEQ ID NO: 3920058 - DNA, 25 bp, Homo sapien
gcagggcacaatggtatttttcaca

SEQ ID NO: 3920059 - DNA, 25 bp, Homo sapien
gaggctttgccatgataatgtggaa

SEQ ID NO: 3920060 - DNA, 25 bp, Homo sapien
cattgtatgaccaaccatgctgtat

SEQ ID NO: 3920061 - DNA, 25 bp, Homo sapien
ggttcagccatctcgtggtatgggt

SEQ ID NO: 3920062 - DNA, 25 bp, Homo sapien
agatcttatgatgatccacagagtt

SEQ ID NO: 3920063 - DNA, 25 bp, Homo sapien
tagatcttatgatgatccacagagt

SEQ ID NO: 3920064 - DNA, 25 bp, Homo sapien
atagatcttatgatgatccacagag

SEQ ID NO: 3920065 - DNA, 25 bp, Homo sapien
ccggcagcgctacgaagaccttgtt

SEQ ID NO: 3920066 - DNA, 25 bp, Homo sapien
tgctggctgagttcaacctgggctg

SEQ ID NO: 3920067 - DNA, 25 bp, Homo sapien
gaagcctcgtgtattagcaatgtca

SEQ ID NO: 3920068 - DNA, 25 bp, Homo sapien
tattgtattataggaagaagctgcc

SEQ ID NO: 3920069 - DNA, 25 bp, Homo sapien
aaagggcagggctgatactaagcaa

SEQ ID NO: 3920070 - DNA, 25 bp, Homo sapien
aacccagtcacggagagaaggacca

SEQ ID NO: 3920071 - DNA, 25 bp, Homo sapien
ccagcagtgctgagggtctagccta

SEQ ID NO: 3920072 - DNA, 25 bp, Homo sapien
gaacactagcttgaagaagtactgg

SEQ ID NO: 3920073 - DNA, 25 bp, Homo sapien
tccttgacaaagaagccatcatggg

SEQ ID NO: 3920074 - DNA, 25 bp, Homo sapien
tggagatccacaacctttaacaggg

SEQ ID NO: 3920075 - DNA, 25 bp, Homo sapien
catcatgggtgtgatccaagatccc

SEQ ID NO: 3920076 - DNA, 25 bp, Homo sapien
aagcaggcttcgactccttctgaga

SEQ ID NO: 3920077 - DNA, 25 bp, Homo sapien
tccgtgaaccttatgaatgctgctt

SEQ ID NO: 3920078 - DNA, 25 bp, Homo sapien
aacacggaagtagtggttggtccag

SEQ ID NO: 3920079 - DNA, 25 bp, Homo sapien
ttttagctgcctactcaggtaacgt

SEQ ID NO: 3920080 - DNA, 25 bp, Homo sapien
cagaagctacttcactggctaacag

SEQ ID NO: 3920081 - DNA, 25 bp, Homo sapien
ctagagcagttgtaatatgtgcaaa

SEQ ID NO: 3920082 - DNA, 25 bp, Homo sapien
caactactttgtcagctacaatgaa

SEQ ID NO: 3920083 - DNA, 25 bp, Homo sapien
tgcaaagtcatagtgactggcctcc

SEQ ID NO: 3920084 - DNA, 25 bp, Homo sapien
attcatttatgactgctttgctcac

SEQ ID NO: 3920085 - DNA, 25 bp, Homo sapien
gacttcaggctagcataaagacatg

SEQ ID NO: 3920086 - DNA, 25 bp, Homo sapien
tctaccttgatcaatggcctctgcg

SEQ ID NO: 3920087 - DNA, 25 bp, Homo sapien
aaggcagccctggtactttcctaag

SEQ ID NO: 3920088 - DNA, 25 bp, Homo sapien
gtttttctgcaagcagggatcccag

SEQ ID NO: 3920089 - DNA, 25 bp, Homo sapien
catgagttgctacttccttggaggc

SEQ ID NO: 3920090 - DNA, 25 bp, Homo sapien
gaatcacctgtgttagtcggcttgc

SEQ ID NO: 3920091 - DNA, 25 bp, Homo sapien
gacgtaagtgcagagagacctttga

SEQ ID NO: 3920092 - DNA, 25 bp, Homo sapien
ccagccagggtccagcatttatgaa

SEQ ID NO: 3920093 - DNA, 25 bp, Homo sapien
taaggccaggtttcttcagcccaaa

SEQ ID NO: 3920094 - DNA, 25 bp, Homo sapien
caaagtcatacataagggatccgcc

SEQ ID NO: 3920095 - DNA, 25 bp, Homo sapien
cagaactcagcagtatagtccgagc

SEQ ID NO: 3920096 - DNA, 25 bp, Homo sapien
taacaaccctggacctgtagagtgg

SEQ ID NO: 3920097 - DNA, 25 bp, Homo sapien
ttctgatgccttcatccaaatcact

SEQ ID NO: 3920098 - DNA, 25 bp, Homo sapien
gatgccttcatccaaatcactgatt

SEQ ID NO: 3920099 - DNA, 25 bp, Homo sapien
tgtttctgatgccttcatccaaatc

SEQ ID NO: 3920100 - DNA, 25 bp, Homo sapien
tcagatgtttctgatgccttcatcc

SEQ ID NO: 3920101 - DNA, 25 bp, Homo sapien
tgaagaccagctggctactttgggt

SEQ ID NO: 3920102 - DNA, 25 bp, Homo sapien
aaagctgttaggaaaccctctcagg

SEQ ID NO: 3920103 - DNA, 25 bp, Homo sapien
gaaatcatccacgtagaaccaagag

SEQ ID NO: 3920104 - DNA, 25 bp, Homo sapien
caaggtcatctcgtagaaaagccca

SEQ ID NO: 3920105 - DNA, 25 bp, Homo sapien
ggactcttcggagttcattcatcag

SEQ ID NO: 3920106 - DNA, 25 bp, Homo sapien
tttgggactcttcggagttcattca

SEQ ID NO: 3920107 - DNA, 25 bp, Homo sapien
tcattttgggactcttcggagttca

SEQ ID NO: 3920108 - DNA, 25 bp, Homo sapien
tgggactcttcggagttcattcatc

SEQ ID NO: 3920109 - DNA, 25 bp, Homo sapien
aagccaaggagcctgactggtgagt

SEQ ID NO: 3920110 - DNA, 25 bp, Homo sapien
atcagcagcgtgctgatgcccaagc

SEQ ID NO: 3920111 - DNA, 25 bp, Homo sapien
tgtattggggatactgtcagaacaa

SEQ ID NO: 3920112 - DNA, 25 bp, Homo sapien
tattggggatactgtcagaacaaaa

SEQ ID NO: 3920113 - DNA, 25 bp, Homo sapien
ttaactttgtattggggatactgtc

SEQ ID NO: 3920114 - DNA, 25 bp, Homo sapien
ctttgtattggggatactgtcagaa

SEQ ID NO: 3920115 - DNA, 25 bp, Homo sapien
gtgtatacgccaaagccagcagagt

SEQ ID NO: 3920116 - DNA, 25 bp, Homo sapien
tctaggaaggggaattctccgagag

SEQ ID NO: 3920117 - DNA, 25 bp, Homo sapien
tgccatcttggtccttctaggaagg

SEQ ID NO: 3920118 - DNA, 25 bp, Homo sapien
gaggaagtagagcactgtaatggca

SEQ ID NO: 3920119 - DNA, 25 bp, Homo sapien
tgtaccagtcacagagaacctccct

SEQ ID NO: 3920120 - DNA, 25 bp, Homo sapien
catgaagtactttcctgtaccagtc

SEQ ID NO: 3920121 - DNA, 25 bp, Homo sapien
tctagaaccactcagcaaccatgaa

SEQ ID NO: 3920122 - DNA, 25 bp, Homo sapien
tatcacattagatagaagtgccagg

SEQ ID NO: 3920123 - DNA, 25 bp, Homo sapien
tgctctaccctctcagtgttgccat

SEQ ID NO: 3920124 - DNA, 25 bp, Homo sapien
tctcagtgttgccatcagtgcttca

SEQ ID NO: 3920125 - DNA, 25 bp, Homo sapien
ctgacaccccaaagcctatgatagg

SEQ ID NO: 3920126 - DNA, 25 bp, Homo sapien
tgtgctctctggcaggtaaccacca

SEQ ID NO: 3920127 - DNA, 25 bp, Homo sapien
catggtgggattctcaaaaacattc

SEQ ID NO: 3920128 - DNA, 25 bp, Homo sapien
tggtgggattctcaaaaacattcct

SEQ ID NO: 3920129 - DNA, 25 bp, Homo sapien
ccatggtgggattctcaaaaacatt

SEQ ID NO: 3920130 - DNA, 25 bp, Homo sapien
ggtgggattctcaaaaacattcctc

SEQ ID NO: 3920131 - DNA, 25 bp, Homo sapien
agcatctagccctgccacaaaagcc

SEQ ID NO: 3920132 - DNA, 25 bp, Homo sapien
gaaaggagttataaacaagcccagc

SEQ ID NO: 3920133 - DNA, 25 bp, Homo sapien
ggagttataaacaagcccagcatct

SEQ ID NO: 3920134 - DNA, 25 bp, Homo sapien
aaaggagttataaacaagcccagca

SEQ ID NO: 3920135 - DNA, 25 bp, Homo sapien
caaatactagttctgatatagaaaa

SEQ ID NO: 3920136 - DNA, 25 bp, Homo sapien
acagtcagagaataatagacatatc

SEQ ID NO: 3920137 - DNA, 25 bp, Homo sapien
aacaggagttctccaacagagaaga

SEQ ID NO: 3920138 - DNA, 25 bp, Homo sapien
atagacatatctgcaacaggagttc

SEQ ID NO: 3920139 - DNA, 25 bp, Homo sapien
tataggtgcgccctttggtagagac

SEQ ID NO: 3920140 - DNA, 25 bp, Homo sapien
taggtgcgccctttggtagagacga

SEQ ID NO: 3920141 - DNA, 25 bp, Homo sapien
gactataggtgcgccctttggtaga

SEQ ID NO: 3920142 - DNA, 25 bp, Homo sapien
ggactataggtgcgccctttggtag

SEQ ID NO: 3920143 - DNA, 25 bp, Homo sapien
cagacctgctgttccatgagcaaat

SEQ ID NO: 3920144 - DNA, 25 bp, Homo sapien
gagcaaatcgtctcaactgtaggag

SEQ ID NO: 3920145 - DNA, 25 bp, Homo sapien
ctgagagggccgtaaggaacaccag

SEQ ID NO: 3920146 - DNA, 25 bp, Homo sapien
caactgtaggagttggtgggtttca

SEQ ID NO: 3920147 - DNA, 25 bp, Homo sapien
cggtactgactgacccgagggatgt

SEQ ID NO: 3920148 - DNA, 25 bp, Homo sapien
tccacaagctggcacaataaagaac

SEQ ID NO: 3920149 - DNA, 25 bp, Homo sapien
aaccagggctgatcccaggtgggca

SEQ ID NO: 3920150 - DNA, 25 bp, Homo sapien
ggatgtcatgggagtctgatttttc

SEQ ID NO: 3920151 - DNA, 25 bp, Homo sapien
tgtggcattctagcacagggatccc

SEQ ID NO: 3920152 - DNA, 25 bp, Homo sapien
gcattctagcacagggatccctctt

SEQ ID NO: 3920153 - DNA, 25 bp, Homo sapien
gcttctgtggcattctagcacaggg

SEQ ID NO: 3920154 - DNA, 25 bp, Homo sapien
cctgtatgcttctgtggcattctag

SEQ ID NO: 3920155 - DNA, 25 bp, Homo sapien
cacgtcctttcatgccacggctgag

SEQ ID NO: 3920156 - DNA, 25 bp, Homo sapien
tactccatgtaccagatgaacttga

SEQ ID NO: 3920157 - DNA, 25 bp, Homo sapien
aagcagacgaggccacagagggcaa

SEQ ID NO: 3920158 - DNA, 25 bp, Homo sapien
acaaggcgaccccacattcggtgtg

SEQ ID NO: 3920159 - DNA, 25 bp, Homo sapien
gaaattgctggtatctttggaattc

SEQ ID NO: 3920160 - DNA, 25 bp, Homo sapien
aaattgctggtatctttggaattct

SEQ ID NO: 3920161 - DNA, 25 bp, Homo sapien
ggaaattgctggtatctttggaatt

SEQ ID NO: 3920162 - DNA, 25 bp, Homo sapien
aattgctggtatctttggaattctg

SEQ ID NO: 3920163 - DNA, 25 bp, Homo sapien
cagccactgttccactgcagaccag

SEQ ID NO: 3920164 - DNA, 25 bp, Homo sapien
ccactgttccactgcagaccaggag

SEQ ID NO: 3920165 - DNA, 25 bp, Homo sapien
gagccatcggcccaccacccgctca

SEQ ID NO: 3920166 - DNA, 25 bp, Homo sapien
agccatcggcccaccacccgctcag

SEQ ID NO: 3920167 - DNA, 25 bp, Homo sapien
ccttccagattgcaaagctacttca

SEQ ID NO: 3920168 - DNA, 25 bp, Homo sapien
ttccagattgcaaagctacttcaga

SEQ ID NO: 3920169 - DNA, 25 bp, Homo sapien
gaagggacactgtaccccttccaga

SEQ ID NO: 3920170 - DNA, 25 bp, Homo sapien
taccccttccagattgcaaagctac

SEQ ID NO: 3920171 - DNA, 25 bp, Homo sapien
gcctcaaagggcgcctgatgcaatc

SEQ ID NO: 3920172 - DNA, 25 bp, Homo sapien
ctggcctcaaagggcgcctgatgca

SEQ ID NO: 3920173 - DNA, 25 bp, Homo sapien
ctcaaagggcgcctgatgcaatcac

SEQ ID NO: 3920174 - DNA, 25 bp, Homo sapien
tggcctcaaagggcgcctgatgcaa

SEQ ID NO: 3920175 - DNA, 25 bp, Homo sapien
ctaggcgctgccctaggagccagga

SEQ ID NO: 3920176 - DNA, 25 bp, Homo sapien
aacggcggaaagagcaatcgctgca

SEQ ID NO: 3920177 - DNA, 25 bp, Homo sapien
agccaggagcggcagatactgcctc

SEQ ID NO: 3920178 - DNA, 25 bp, Homo sapien
ttcaaggccctcaacggcggaaaga

SEQ ID NO: 3920179 - DNA, 25 bp, Homo sapien
cctctgagcgaaaacgagcgcggat

SEQ ID NO: 3920180 - DNA, 25 bp, Homo sapien
tttttccgtcgccacacgaggatgc

SEQ ID NO: 3920181 - DNA, 25 bp, Homo sapien
tagttaattgtcgagcgcggagccc

SEQ ID NO: 3920182 - DNA, 25 bp, Homo sapien
aaagtcacgcagctaccaagtggcc

SEQ ID NO: 3920183 - DNA, 25 bp, Homo sapien
ttagccaatggacagataagattct

SEQ ID NO: 3920184 - DNA, 25 bp, Homo sapien
taattgagggacaagcagggatagc

SEQ ID NO: 3920185 - DNA, 25 bp, Homo sapien
taatctcattctagctgggtaggga

SEQ ID NO: 3920186 - DNA, 25 bp, Homo sapien
cagggatagcattgttatattagcc

SEQ ID NO: 3920187 - DNA, 25 bp, Homo sapien
ttgctcagaatattccctaaaggta

SEQ ID NO: 3920188 - DNA, 25 bp, Homo sapien
agtaaggactttgaatgctatcgca

SEQ ID NO: 3920189 - DNA, 25 bp, Homo sapien
tgctatcgcaaagaacatcctggtg

SEQ ID NO: 3920190 - DNA, 25 bp, Homo sapien
ttacagaaattcatctgttgccatg

SEQ ID NO: 3920191 - DNA, 25 bp, Homo sapien
ccttctcctggatacatgatacaac

SEQ ID NO: 3920192 - DNA, 25 bp, Homo sapien
tccttctcctggatacatgatacaa

SEQ ID NO: 3920193 - DNA, 25 bp, Homo sapien
tacaacacagttgtctctcatgtca

SEQ ID NO: 3920194 - DNA, 25 bp, Homo sapien
atacaacacagttgtctctcatgtc

SEQ ID NO: 3920195 - DNA, 25 bp, Homo sapien
ttgaaacgcacatgaagagagagct

SEQ ID NO: 3920196 - DNA, 25 bp, Homo sapien
tgagcgcgctgcatgtttcaggcaa

SEQ ID NO: 3920197 - DNA, 25 bp, Homo sapien
caagggtacatcagcatcatggcga

SEQ ID NO: 3920198 - DNA, 25 bp, Homo sapien
tccagagacggcaggagaagagctc

SEQ ID NO: 3920199 - DNA, 25 bp, Homo sapien
gaatggcaagaagatccaggacagg

SEQ ID NO: 3920200 - DNA, 25 bp, Homo sapien
tttggcttgctcagggaatggcaag

SEQ ID NO: 3920201 - DNA, 25 bp, Homo sapien
gattaagctatgtggacccctgtgg

SEQ ID NO: 3920202 - DNA, 25 bp, Homo sapien
tgagaggggaacacatttggcttgc

SEQ ID NO: 3920203 - DNA, 25 bp, Homo sapien
catgcggatgacagggaacgtgaca

SEQ ID NO: 3920204 - DNA, 25 bp, Homo sapien
taaaggatccccacgaggctgttaa

SEQ ID NO: 3920205 - DNA, 25 bp, Homo sapien
taagggcatcgcagttaaagaacca

SEQ ID NO: 3920206 - DNA, 25 bp, Homo sapien
catctgtaaaatccgtaggcactgt

SEQ ID NO: 3920207 - DNA, 25 bp, Homo sapien
ggataagtgaacacccatgaaccta

SEQ ID NO: 3920208 - DNA, 25 bp, Homo sapien
gataagtgaacacccatgaacctac

SEQ ID NO: 3920209 - DNA, 25 bp, Homo sapien
aaggataagtgaacacccatgaacc

SEQ ID NO: 3920210 - DNA, 25 bp, Homo sapien
aaaaggataagtgaacacccatgaa

SEQ ID NO: 3920211 - DNA, 25 bp, Homo sapien
ttacttatgtaaatggactgactca

SEQ ID NO: 3920212 - DNA, 25 bp, Homo sapien
atttcacgataattattcctttgcc

SEQ ID NO: 3920213 - DNA, 25 bp, Homo sapien
gacaaccactgtcctgaatttcacg

SEQ ID NO: 3920214 - DNA, 25 bp, Homo sapien
tctgttttatcacctttgtatgtat

SEQ ID NO: 3920215 - DNA, 25 bp, Homo sapien
aggttacctgttaactctgatgatg

SEQ ID NO: 3920216 - DNA, 25 bp, Homo sapien
tacctgttaactctgatgatgattt

SEQ ID NO: 3920217 - DNA, 25 bp, Homo sapien
tattctgtaggttacctgttaactc

SEQ ID NO: 3920218 - DNA, 25 bp, Homo sapien
gttacctgttaactctgatgatgat

SEQ ID NO: 3920219 - DNA, 25 bp, Homo sapien
ctggccaaagttttagaccctcaat

SEQ ID NO: 3920220 - DNA, 25 bp, Homo sapien
tgtctatcttatgtcagtctcacat

SEQ ID NO: 3920221 - DNA, 25 bp, Homo sapien
cagtctcacatagtcttacttattg

SEQ ID NO: 3920222 - DNA, 25 bp, Homo sapien
agaccctcaatctatgtctatctta

SEQ ID NO: 3920223 - DNA, 25 bp, Homo sapien
gaaagcttacagactctcttgagga

SEQ ID NO: 3920224 - DNA, 25 bp, Homo sapien
tattttggacagaaccctgagcttc

SEQ ID NO: 3920225 - DNA, 25 bp, Homo sapien
ggtagatgccagtgcaagaactcag

SEQ ID NO: 3920226 - DNA, 25 bp, Homo sapien
taatgcagggtaagccttggcacag

SEQ ID NO: 3920227 - DNA, 25 bp, Homo sapien
gcatgcaacacccaggtgctgtcat

SEQ ID NO: 3920228 - DNA, 25 bp, Homo sapien
ggttgaatctgggactcgcttccct

SEQ ID NO: 3920229 - DNA, 25 bp, Homo sapien
tgttccgatgtgtgctgcgctgcct

SEQ ID NO: 3920230 - DNA, 25 bp, Homo sapien
ttggcacaggtcctgtgaacatgtc

SEQ ID NO: 3920231 - DNA, 25 bp, Homo sapien
aagcaattctcagccacttgattag

SEQ ID NO: 3920232 - DNA, 25 bp, Homo sapien
gctatcgcccgggctagggtacagt

SEQ ID NO: 3920233 - DNA, 25 bp, Homo sapien
gcaattctcagccacttgattagcc

SEQ ID NO: 3920234 - DNA, 25 bp, Homo sapien
aattctcagccacttgattagccag

SEQ ID NO: 3920235 - DNA, 25 bp, Homo sapien
tgcatacataggacactgggcttct

SEQ ID NO: 3920236 - DNA, 25 bp, Homo sapien
tagtgagcatcaaggtttacaaccc

SEQ ID NO: 3920237 - DNA, 25 bp, Homo sapien
catggttaagcaacgcagacagggc

SEQ ID NO: 3920238 - DNA, 25 bp, Homo sapien
cctcggcggactgaaagcaaaggca

SEQ ID NO: 3920239 - DNA, 25 bp, Homo sapien
caggtgtactcggttttgcggatat

SEQ ID NO: 3920240 - DNA, 25 bp, Homo sapien
gctcatttgggtttcgtgccttgaa

SEQ ID NO: 3920241 - DNA, 25 bp, Homo sapien
ccttgaaggtgtagacagcaaaata

SEQ ID NO: 3920242 - DNA, 25 bp, Homo sapien
tctgattggctgacacgctcagctc

SEQ ID NO: 3920243 - DNA, 25 bp, Homo sapien
taaataggtacatacggatgatggc

SEQ ID NO: 3920244 - DNA, 25 bp, Homo sapien
gaaaatgggaaattgctgggagcaa

SEQ ID NO: 3920245 - DNA, 25 bp, Homo sapien
gccatccaacagcttcgtgcggtgt

SEQ ID NO: 3920246 - DNA, 25 bp, Homo sapien
ggctaccataatagggatgattaaa

SEQ ID NO: 3920247 - DNA, 25 bp, Homo sapien
caaagctcggctatggcactgagga

SEQ ID NO: 3920248 - DNA, 25 bp, Homo sapien
gctgagactacaactacattccctg

SEQ ID NO: 3920249 - DNA, 25 bp, Homo sapien
ggaatgtgctatgggaagcctgaac

SEQ ID NO: 3920250 - DNA, 25 bp, Homo sapien
taaagggtggaagacgagcatactc

SEQ ID NO: 3920251 - DNA, 25 bp, Homo sapien
gaattactcggatttagggatgcac

SEQ ID NO: 3920252 - DNA, 25 bp, Homo sapien
gatgcactgagagttccttggtcac

SEQ ID NO: 3920253 - DNA, 25 bp, Homo sapien
tgaagttccggtagctcctcggcgt

SEQ ID NO: 3920254 - DNA, 25 bp, Homo sapien
ttcgtcctggtacggagtagccaac

SEQ ID NO: 3920255 - DNA, 25 bp, Homo sapien
tacccacggaggcatcggagtggct

SEQ ID NO: 3920256 - DNA, 25 bp, Homo sapien
ttaggaaagagctgtacacgaagcc

SEQ ID NO: 3920257 - DNA, 25 bp, Homo sapien
ctgcggcgaggattgtagggcttta

SEQ ID NO: 3920258 - DNA, 25 bp, Homo sapien
aaggtcagggtgctgccgctgttct

SEQ ID NO: 3920259 - DNA, 25 bp, Homo sapien
cccggagttcttctgactgtagcat

SEQ ID NO: 3920260 - DNA, 25 bp, Homo sapien
tccattgtcaatcagccagcggttc

SEQ ID NO: 3920261 - DNA, 25 bp, Homo sapien
ccaagtcttgagcagcattgaagtt

SEQ ID NO: 3920262 - DNA, 25 bp, Homo sapien
agcattgaagttccgttctgcctgg

SEQ ID NO: 3920263 - DNA, 25 bp, Homo sapien
gaactctgctgtgctcttcgtggaa

SEQ ID NO: 3920264 - DNA, 25 bp, Homo sapien
cccaggagtggctttcgagcagact

SEQ ID NO: 3920265 - DNA, 25 bp, Homo sapien
gcttcttggtagctggaagagactc

SEQ ID NO: 3920266 - DNA, 25 bp, Homo sapien
gactggcggtcaatggttttcctct

SEQ ID NO: 3920267 - DNA, 25 bp, Homo sapien
cagagcctggtgcacaaagtcacag

SEQ ID NO: 3920268 - DNA, 25 bp, Homo sapien
tgtacagttatagaagtccaggagc

SEQ ID NO: 3920269 - DNA, 25 bp, Homo sapien
catagccgtggacacagttggtgaa

SEQ ID NO: 3920270 - DNA, 25 bp, Homo sapien
gcctcatagttgttccgggccgact

SEQ ID NO: 3920271 - DNA, 25 bp, Homo sapien
agagctggtcactgatgtagcgatg

SEQ ID NO: 3920272 - DNA, 25 bp, Homo sapien
tagcgatgcaccctctcaaactgct

SEQ ID NO: 3920273 - DNA, 25 bp, Homo sapien
ctcaaactgctccaggtcccggtgt

SEQ ID NO: 3920274 - DNA, 25 bp, Homo sapien
gccaccactttcacacatgcggact

SEQ ID NO: 3920275 - DNA, 25 bp, Homo sapien
ggttcatgctgtcgccatctcaaag

SEQ ID NO: 3920276 - DNA, 25 bp, Homo sapien
gagccagttaggacagacacaagtc

SEQ ID NO: 3920277 - DNA, 25 bp, Homo sapien
tactgatcctcaaaacctggtttcc

SEQ ID NO: 3920278 - DNA, 25 bp, Homo sapien
ccagcttttgtcatacattccaaga

SEQ ID NO: 3920279 - DNA, 25 bp, Homo sapien
aacctactggcatctcaacaaaaag

SEQ ID NO: 3920280 - DNA, 25 bp, Homo sapien
taactacagtgatgttgatgctcac

SEQ ID NO: 3920281 - DNA, 25 bp, Homo sapien
ggcataatagtaatttgagtccaga

SEQ ID NO: 3920282 - DNA, 25 bp, Homo sapien
taaacaatatgactgatgaacagga

SEQ ID NO: 3920283 - DNA, 25 bp, Homo sapien
aatcaatctttcttgcattcggaag

SEQ ID NO: 3920284 - DNA, 25 bp, Homo sapien
aaagacttaatcaatctttcttgca

SEQ ID NO: 3920285 - DNA, 25 bp, Homo sapien
gacaggtctcggataaaagacttaa

SEQ ID NO: 3920286 - DNA, 25 bp, Homo sapien
gtagagagacaggtctcggataaaa

SEQ ID NO: 3920287 - DNA, 25 bp, Homo sapien
caggtgactgctaactcggttggat

SEQ ID NO: 3920288 - DNA, 25 bp, Homo sapien
tcatcacccttacggtacttgagga

SEQ ID NO: 3920289 - DNA, 25 bp, Homo sapien
tggatttcttgatgatggagtggat

SEQ ID NO: 3920290 - DNA, 25 bp, Homo sapien
aattttctccataaggctatcttca

SEQ ID NO: 3920291 - DNA, 25 bp, Homo sapien
ctagggagtaagtcagaaaagcact

SEQ ID NO: 3920292 - DNA, 25 bp, Homo sapien
gggagtaagtcagaaaagcactttc

SEQ ID NO: 3920293 - DNA, 25 bp, Homo sapien
agaaaagcactttcctcagcatggg

SEQ ID NO: 3920294 - DNA, 25 bp, Homo sapien
aaaagcactttcctcagcatgggca

SEQ ID NO: 3920295 - DNA, 25 bp, Homo sapien
ctccttttcagcaattatgctgttc

SEQ ID NO: 3920296 - DNA, 25 bp, Homo sapien
ccttttcagcaattatgctgttctt

SEQ ID NO: 3920297 - DNA, 25 bp, Homo sapien
tccttttcagcaattatgctgttct

SEQ ID NO: 3920298 - DNA, 25 bp, Homo sapien
ttttcagcaattatgctgttcttac

SEQ ID NO: 3920299 - DNA, 25 bp, Homo sapien
tccattagcaacagcgggtaacgca

SEQ ID NO: 3920300 - DNA, 25 bp, Homo sapien
aaggcactttatctgggtgggattc

SEQ ID NO: 3920301 - DNA, 25 bp, Homo sapien
taacgttgatttccttgaccgcaag

SEQ ID NO: 3920302 - DNA, 25 bp, Homo sapien
tctgtactggtttgatgaggaagga

SEQ ID NO: 3920303 - DNA, 25 bp, Homo sapien
tcatcccggtgaccaagaaacacag

SEQ ID NO: 3920304 - DNA, 25 bp, Homo sapien
ggcctcatcatgattctggcagtaa

SEQ ID NO: 3920305 - DNA, 25 bp, Homo sapien
gtatgttccctcaagctcatcccgg

SEQ ID NO: 3920306 - DNA, 25 bp, Homo sapien
tttcaagcagcgcaatggcctcatc

SEQ ID NO: 3920307 - DNA, 25 bp, Homo sapien
tctcagtgtatttggtgctcccttc

SEQ ID NO: 3920308 - DNA, 25 bp, Homo sapien
ctctcagtgtatttggtgctccctt

SEQ ID NO: 3920309 - DNA, 25 bp, Homo sapien
ctcagtgtatttggtgctcccttct

SEQ ID NO: 3920310 - DNA, 25 bp, Homo sapien
cctctcagtgtatttggtgctccct

SEQ ID NO: 3920311 - DNA, 25 bp, Homo sapien
tctgaaacaacacaggagctcatac

SEQ ID NO: 3920312 - DNA, 25 bp, Homo sapien
aaaaagctgcttctgaaacaacaca

SEQ ID NO: 3920313 - DNA, 25 bp, Homo sapien
aaaagctgcttctgaaacaacacag

SEQ ID NO: 3920314 - DNA, 25 bp, Homo sapien
gcttctgaaacaacacaggagctca

SEQ ID NO: 3920315 - DNA, 25 bp, Homo sapien
ctacagcatcgctgatttccagagc

SEQ ID NO: 3920316 - DNA, 25 bp, Homo sapien
gagaccttaatcaccatctgcatat

SEQ ID NO: 3920317 - DNA, 25 bp, Homo sapien
ttccagagcagccaataattgcttc

SEQ ID NO: 3920318 - DNA, 25 bp, Homo sapien
caaaaagtccctcaaaatcaatgtt

SEQ ID NO: 3920319 - DNA, 25 bp, Homo sapien
tggattttcggcagacacagaccca

SEQ ID NO: 3920320 - DNA, 25 bp, Homo sapien
gcatgggtaccatgatccgctcaat

SEQ ID NO: 3920321 - DNA, 25 bp, Homo sapien
gaagttcttctatgaccttggctct

SEQ ID NO: 3920322 - DNA, 25 bp, Homo sapien
tttccagatcccgaatgtagtctct

SEQ ID NO: 3920323 - DNA, 25 bp, Homo sapien
actcctttgaatagggtcggcattt

SEQ ID NO: 3920324 - DNA, 25 bp, Homo sapien
ccagagctctggaatgctccacaac

SEQ ID NO: 3920325 - DNA, 25 bp, Homo sapien
atagggtcggcatttcccccaggct

SEQ ID NO: 3920326 - DNA, 25 bp, Homo sapien
taagcaggcgggacagaatcttccc

SEQ ID NO: 3920327 - DNA, 25 bp, Homo sapien
ctatggcatgcccatataataaaat

SEQ ID NO: 3920328 - DNA, 25 bp, Homo sapien
gtaaataaactatggcatgcccata

SEQ ID NO: 3920329 - DNA, 25 bp, Homo sapien
aaaagcttagaagcaacctaaacag

SEQ ID NO: 3920330 - DNA, 25 bp, Homo sapien
taaaatactcttataaggccaggcg

SEQ ID NO: 3920331 - DNA, 25 bp, Homo sapien
taactggagttaaactagatggtct

SEQ ID NO: 3920332 - DNA, 25 bp, Homo sapien
catctgttggaacttcaggaatagc

SEQ ID NO: 3920333 - DNA, 25 bp, Homo sapien
ctgtagtttcagtcaagttgtttca

SEQ ID NO: 3920334 - DNA, 25 bp, Homo sapien
gaatgaatctagtctaacaggcaag

SEQ ID NO: 3920335 - DNA, 25 bp, Homo sapien
tccatgttggtcacagtggcctcaa

SEQ ID NO: 3920336 - DNA, 25 bp, Homo sapien
catgttggtcacagtggcctcaaac

SEQ ID NO: 3920337 - DNA, 25 bp, Homo sapien
ctccatgttggtcacagtggcctca

SEQ ID NO: 3920338 - DNA, 25 bp, Homo sapien
tctccatgttggtcacagtggcctc

SEQ ID NO: 3920339 - DNA, 25 bp, Homo sapien
aaattggccagaaccagaaaggccg

SEQ ID NO: 3920340 - DNA, 25 bp, Homo sapien
taagtcaagcccatgttggaagacc

SEQ ID NO: 3920341 - DNA, 25 bp, Homo sapien
gcctgttaggtccaaaatggtgccc

SEQ ID NO: 3920342 - DNA, 25 bp, Homo sapien
tggtggcccctagtacaaatctaac

SEQ ID NO: 3920343 - DNA, 25 bp, Homo sapien
tcttgctgttttgcacgaactctga

SEQ ID NO: 3920344 - DNA, 25 bp, Homo sapien
aactctgagcgcctcagggtgctgg

SEQ ID NO: 3920345 - DNA, 25 bp, Homo sapien
tgctgtgcggcggaggcaactattc

SEQ ID NO: 3920346 - DNA, 25 bp, Homo sapien
cggaggcaactattccttctccaag

SEQ ID NO: 3920347 - DNA, 25 bp, Homo sapien
ccatttgatggagagaatctgtccc

SEQ ID NO: 3920348 - DNA, 25 bp, Homo sapien
gtagtcttcatactcccagctggag

SEQ ID NO: 3920349 - DNA, 25 bp, Homo sapien
taatgacgagctctgaggaatcccc

SEQ ID NO: 3920350 - DNA, 25 bp, Homo sapien
tcgaatctgaaaagctcacaggctg

SEQ ID NO: 3920351 - DNA, 25 bp, Homo sapien
tcaggatccaatcagcgagctactc

SEQ ID NO: 3920352 - DNA, 25 bp, Homo sapien
gacaggtgcagtctagcctaaggct

SEQ ID NO: 3920353 - DNA, 25 bp, Homo sapien
cactcttctcgttgctctagtcgga

SEQ ID NO: 3920354 - DNA, 25 bp, Homo sapien
tgtcctgcttaaaatgtctcccaac

SEQ ID NO: 3920355 - DNA, 25 bp, Homo sapien
tctacagagagtgtccagagcaaat

SEQ ID NO: 3920356 - DNA, 25 bp, Homo sapien
tgggcacctctctctaagtctaaaa

SEQ ID NO: 3920357 - DNA, 25 bp, Homo sapien
cctccttgtgtggaatagggtctca

SEQ ID NO: 3920358 - DNA, 25 bp, Homo sapien
tcttttggtagctcagtaaacctct

SEQ ID NO: 3920359 - DNA, 25 bp, Homo sapien
ggaactgacccacaccgaaagtagc

SEQ ID NO: 3920360 - DNA, 25 bp, Homo sapien
ccgaaagtagccattggtcatgatt

SEQ ID NO: 3920361 - DNA, 25 bp, Homo sapien
tagccattggtcatgattccaaggc

SEQ ID NO: 3920362 - DNA, 25 bp, Homo sapien
cggaactgacccacaccgaaagtag

SEQ ID NO: 3920363 - DNA, 25 bp, Homo sapien
tgtgtcagcttcgagtccaggtcag

SEQ ID NO: 3920364 - DNA, 25 bp, Homo sapien
acagaacttgagatcctcgagggtc

SEQ ID NO: 3920365 - DNA, 25 bp, Homo sapien
caaactcgatcagctgttgtgtcag

SEQ ID NO: 3920366 - DNA, 25 bp, Homo sapien
tctaaggtctcacaggtaggacggt

SEQ ID NO: 3920367 - DNA, 25 bp, Homo sapien
gaagagcccctgtaaagagggagca

SEQ ID NO: 3920368 - DNA, 25 bp, Homo sapien
tgggcttgcggaccaggcttcatct

SEQ ID NO: 3920369 - DNA, 25 bp, Homo sapien
tgagatggagtaaacactggacgtg

SEQ ID NO: 3920370 - DNA, 25 bp, Homo sapien
tactgttctgagtgcgggtggctcc

SEQ ID NO: 3920371 - DNA, 25 bp, Homo sapien
cattgactacttctgtagggtcaga

SEQ ID NO: 3920372 - DNA, 25 bp, Homo sapien
ttcagaaataatgcagtcaggctcc

SEQ ID NO: 3920373 - DNA, 25 bp, Homo sapien
tgcggtgtcctcgtcctgataagag

SEQ ID NO: 3920374 - DNA, 25 bp, Homo sapien
ctcggcctcatggtcactggtttca

SEQ ID NO: 3920375 - DNA, 25 bp, Homo sapien
ttggaatctgtacagggcgacccca

SEQ ID NO: 3920376 - DNA, 25 bp, Homo sapien
tattccggaatctgaaacagggcgc

SEQ ID NO: 3920377 - DNA, 25 bp, Homo sapien
cagagctcgcggacacatgaagatg

SEQ ID NO: 3920378 - DNA, 25 bp, Homo sapien
ggaatgccatcgagaatcaccaggt

SEQ ID NO: 3920379 - DNA, 25 bp, Homo sapien
gaaaggataagagcacagtatatgt

SEQ ID NO: 3920380 - DNA, 25 bp, Homo sapien
gaagggtatggacaatgaatgttca

SEQ ID NO: 3920381 - DNA, 25 bp, Homo sapien
ccttcttgaactgtccctatcctga

SEQ ID NO: 3920382 - DNA, 25 bp, Homo sapien
tcaggttatcctcacaaaacgtaag

SEQ ID NO: 3920383 - DNA, 25 bp, Homo sapien
tctaagagacagacttgtttctcag

SEQ ID NO: 3920384 - DNA, 25 bp, Homo sapien
ccaactcttgggatgtgaattcaca

SEQ ID NO: 3920385 - DNA, 25 bp, Homo sapien
gatggaggggaagattatccaactc

SEQ ID NO: 3920386 - DNA, 25 bp, Homo sapien
tccacaaaactgctggggaattgtc

SEQ ID NO: 3920387 - DNA, 25 bp, Homo sapien
tctctccctcttttagactgggaat

SEQ ID NO: 3920388 - DNA, 25 bp, Homo sapien
aataatatctcccacaaagagcggc

SEQ ID NO: 3920389 - DNA, 25 bp, Homo sapien
aaagagcggcagttcttctgatacg

SEQ ID NO: 3920390 - DNA, 25 bp, Homo sapien
cacaaagagcggcagttcttctgat

SEQ ID NO: 3920391 - DNA, 25 bp, Homo sapien
tctcccacaaagagcggcagttctt

SEQ ID NO: 3920392 - DNA, 25 bp, Homo sapien
ctagggcagaagtcaaaaatggctc

SEQ ID NO: 3920393 - DNA, 25 bp, Homo sapien
gaagtcaaaaatggctcgaaccact

SEQ ID NO: 3920394 - DNA, 25 bp, Homo sapien
gggcagaagtcaaaaatggctcgaa

SEQ ID NO: 3920395 - DNA, 25 bp, Homo sapien
caaaaatggctcgaaccactgagcc

SEQ ID NO: 3920396 - DNA, 25 bp, Homo sapien
ttccaggtcaagcattaatgtcttg

SEQ ID NO: 3920397 - DNA, 25 bp, Homo sapien
acagtgccatagcaatgtcatagaa

SEQ ID NO: 3920398 - DNA, 25 bp, Homo sapien
gcattaatgtcttggacttcttcat

SEQ ID NO: 3920399 - DNA, 25 bp, Homo sapien
catagcaatgtcatagaaatcttcc

SEQ ID NO: 3920400 - DNA, 25 bp, Homo sapien
tggatgagaatttacaggtcctcct

SEQ ID NO: 3920401 - DNA, 25 bp, Homo sapien
ttatcaagccaaatggcatcaacca

SEQ ID NO: 3920402 - DNA, 25 bp, Homo sapien
tatatataacacagttggatgagaa

SEQ ID NO: 3920403 - DNA, 25 bp, Homo sapien
tccctactggccaaggaattacaaa

SEQ ID NO: 3920404 - DNA, 25 bp, Homo sapien
cggaggttccttcaaaagaatatgc

SEQ ID NO: 3920405 - DNA, 25 bp, Homo sapien
ggcagtccagcggaggttccttcaa

SEQ ID NO: 3920406 - DNA, 25 bp, Homo sapien
tttggaactgctttccagaaaacat

SEQ ID NO: 3920407 - DNA, 25 bp, Homo sapien
tccctttctgtaggggcagtccagc

SEQ ID NO: 3920408 - DNA, 25 bp, Homo sapien
gagtaattttttcccttcgcatgaa

SEQ ID NO: 3920409 - DNA, 25 bp, Homo sapien
caagacaacacgaaggctaaatgag

SEQ ID NO: 3920410 - DNA, 25 bp, Homo sapien
caacacgaaggctaaatgagtaatt

SEQ ID NO: 3920411 - DNA, 25 bp, Homo sapien
tcgcatgaaaggacgagaggtgtca

SEQ ID NO: 3920412 - DNA, 25 bp, Homo sapien
cattagcagggtaggtgattttaga

SEQ ID NO: 3920413 - DNA, 25 bp, Homo sapien
taaggagtaccaacatttgagcacc

SEQ ID NO: 3920414 - DNA, 25 bp, Homo sapien
caaaaactgcagtactgcttgcctt

SEQ ID NO: 3920415 - DNA, 25 bp, Homo sapien
tggaaaaccagggacgagcagcttt

SEQ ID NO: 3920416 - DNA, 25 bp, Homo sapien
caagacaacacgaaggctaaatgaa

SEQ ID NO: 3920417 - DNA, 25 bp, Homo sapien
aagacaacacgaaggctaaatgaat

SEQ ID NO: 3920418 - DNA, 25 bp, Homo sapien
ctctttgtatgaaaggatgagaggt

SEQ ID NO: 3920419 - DNA, 25 bp, Homo sapien
ttcttctctttgtatgaaaggatga

SEQ ID NO: 3920420 - DNA, 25 bp, Homo sapien
tcaaaaatacgggactctaacaggc

SEQ ID NO: 3920421 - DNA, 25 bp, Homo sapien
tgaacaacatctagacactggtagc

SEQ ID NO: 3920422 - DNA, 25 bp, Homo sapien
tgtgtctacagcagtccagatgtta

SEQ ID NO: 3920423 - DNA, 25 bp, Homo sapien
tcacagctgactagaaggtcaaggc

SEQ ID NO: 3920424 - DNA, 25 bp, Homo sapien
aaaggacaacctcagtaactgctgg

SEQ ID NO: 3920425 - DNA, 25 bp, Homo sapien
gctgtcagtgcagaatccagagagg

SEQ ID NO: 3920426 - DNA, 25 bp, Homo sapien
gagttagtctcgcataccctgaaaa

SEQ ID NO: 3920427 - DNA, 25 bp, Homo sapien
cactatggcaagacggttgagagca

SEQ ID NO: 3920428 - DNA, 25 bp, Homo sapien
gaatacttattgttcggaaatgaca

SEQ ID NO: 3920429 - DNA, 25 bp, Homo sapien
cttattgttcggaaatgacagaaaa

SEQ ID NO: 3920430 - DNA, 25 bp, Homo sapien
aaaaagtttccacattgcaggggag

SEQ ID NO: 3920431 - DNA, 25 bp, Homo sapien
cgttcagaatacttattgttcggaa

SEQ ID NO: 3920432 - DNA, 25 bp, Homo sapien
cacagttctagtagtcctggccaat

SEQ ID NO: 3920433 - DNA, 25 bp, Homo sapien
tgacacagttctagtagtcctggcc

SEQ ID NO: 3920434 - DNA, 25 bp, Homo sapien
tgtagcagctgttttgacacagttc

SEQ ID NO: 3920435 - DNA, 25 bp, Homo sapien
acaaagatgcccgttagtgtagcag

SEQ ID NO: 3920436 - DNA, 25 bp, Homo sapien
gacctgattacctcttgatttggga

SEQ ID NO: 3920437 - DNA, 25 bp, Homo sapien
tgacaatctgactgaaaaagacctg

SEQ ID NO: 3920438 - DNA, 25 bp, Homo sapien
tcagctacaggcaggttggtgtcaa

SEQ ID NO: 3920439 - DNA, 25 bp, Homo sapien
attcttgagctagagagggcccagt

SEQ ID NO: 3920440 - DNA, 25 bp, Homo sapien
ccctcggcgcggcaggcagttgcag

SEQ ID NO: 3920441 - DNA, 25 bp, Homo sapien
cctcggcgcggcaggcagttgcagc

SEQ ID NO: 3920442 - DNA, 25 bp, Homo sapien
tcttgctgttcccccactcccgaca

SEQ ID NO: 3920443 - DNA, 25 bp, Homo sapien
gctgttcccccactcccgacaccac

SEQ ID NO: 3920444 - DNA, 25 bp, Homo sapien
tgctgttcccccactcccgacacca

SEQ ID NO: 3920445 - DNA, 25 bp, Homo sapien
ttgctgttcccccactcccgacacc

SEQ ID NO: 3920446 - DNA, 25 bp, Homo sapien
catctgaagttagctatttgtagtc

SEQ ID NO: 3920447 - DNA, 25 bp, Homo sapien
tggcgttccggaccacttgcatcgg

SEQ ID NO: 3920448 - DNA, 25 bp, Homo sapien
tgtttgaagactggctctcagcagc

SEQ ID NO: 3920449 - DNA, 25 bp, Homo sapien
tgcacctgcctttttgacacccaag

SEQ ID NO: 3920450 - DNA, 25 bp, Homo sapien
tccaagcagagggtttcctcttcaa

SEQ ID NO: 3920451 - DNA, 25 bp, Homo sapien
gcattccaagcagagggtttcctct

SEQ ID NO: 3920452 - DNA, 25 bp, Homo sapien
tggcattccaagcagagggtttcct

SEQ ID NO: 3920453 - DNA, 25 bp, Homo sapien
tatccaggctggcattccaagcaga

SEQ ID NO: 3920454 - DNA, 25 bp, Homo sapien
cccctggaacagatggagaccattc

SEQ ID NO: 3920455 - DNA, 25 bp, Homo sapien
gttccgaactcttgaacttaggtga

SEQ ID NO: 3920456 - DNA, 25 bp, Homo sapien
tgatgacctagagatggcttacccc

SEQ ID NO: 3920457 - DNA, 25 bp, Homo sapien
gaaagaatgcttgatctgatctgag

SEQ ID NO: 3920458 - DNA, 25 bp, Homo sapien
tggctctgactccgtgccttctgct

SEQ ID NO: 3920459 - DNA, 25 bp, Homo sapien
gggatgcttcttttgaggtggaagt

SEQ ID NO: 3920460 - DNA, 25 bp, Homo sapien
ttgagggatgcttcttttgaggtgg

SEQ ID NO: 3920461 - DNA, 25 bp, Homo sapien
gatgcttcttttgaggtggaagtta

SEQ ID NO: 3920462 - DNA, 25 bp, Homo sapien
tgcttcttttgaggtggaagttaac

SEQ ID NO: 3920463 - DNA, 25 bp, Homo sapien
tgtgttacaataaggagctacaaac

SEQ ID NO: 3920464 - DNA, 25 bp, Homo sapien
gcctgatataggttcgaatcctgac

SEQ ID NO: 3920465 - DNA, 25 bp, Homo sapien
ctcaaaggacttaaagcatagttct

SEQ ID NO: 3920466 - DNA, 25 bp, Homo sapien
cacaggttgtacacttagtatgagt

SEQ ID NO: 3920467 - DNA, 25 bp, Homo sapien
cagcagccggaagtaatcaccatgg

SEQ ID NO: 3920468 - DNA, 25 bp, Homo sapien
caggtgctgtggcactaacagtgta

SEQ ID NO: 3920469 - DNA, 25 bp, Homo sapien
aacagtgtagatacctggaagcagc

SEQ ID NO: 3920470 - DNA, 25 bp, Homo sapien
cagccggaagtaatcaccatggtca

SEQ ID NO: 3920471 - DNA, 25 bp, Homo sapien
gtgacatcatggttaatcccactga

SEQ ID NO: 3920472 - DNA, 25 bp, Homo sapien
tcatcaagcaccattcccttgatgc

SEQ ID NO: 3920473 - DNA, 25 bp, Homo sapien
aatgacagcattggcgagattattg

SEQ ID NO: 3920474 - DNA, 25 bp, Homo sapien
gattattgtaattctcatcaagcac

SEQ ID NO: 3920475 - DNA, 25 bp, Homo sapien
gaaacttgtcgcaactcagttccag

SEQ ID NO: 3920476 - DNA, 25 bp, Homo sapien
tgttccaggaactggattagggctt

SEQ ID NO: 3920477 - DNA, 25 bp, Homo sapien
tcagttccagcgtgatctcaaagca

SEQ ID NO: 3920478 - DNA, 25 bp, Homo sapien
ttagggcttcccgattacccagcca

SEQ ID NO: 3920479 - DNA, 25 bp, Homo sapien
agggcagcagcagatttccataacc

SEQ ID NO: 3920480 - DNA, 25 bp, Homo sapien
gggcagcagcagatttccataacca

SEQ ID NO: 3920481 - DNA, 25 bp, Homo sapien
ttcactgtaaagagataatgattct

SEQ ID NO: 3920482 - DNA, 25 bp, Homo sapien
gagataatgattctcttagtcttta

SEQ ID NO: 3920483 - DNA, 25 bp, Homo sapien
aatgattctcttagtctttaactta

SEQ ID NO: 3920484 - DNA, 25 bp, Homo sapien
taaagagataatgattctcttagtc

SEQ ID NO: 3920485 - DNA, 25 bp, Homo sapien
actttttaagctgatgaatgcaagc

SEQ ID NO: 3920486 - DNA, 25 bp, Homo sapien
ttactttttaagctgatgaatgcaa

SEQ ID NO: 3920487 - DNA, 25 bp, Homo sapien
tttttaagctgatgaatgcaagcag

SEQ ID NO: 3920488 - DNA, 25 bp, Homo sapien
ctttttaagctgatgaatgcaagca

SEQ ID NO: 3920489 - DNA, 25 bp, Homo sapien
tctgggaagtaatctccgcagttcc

SEQ ID NO: 3920490 - DNA, 25 bp, Homo sapien
ccatgtgcataggagtagaccttgg

SEQ ID NO: 3920491 - DNA, 25 bp, Homo sapien
gtgcataggagtagaccttggccag

SEQ ID NO: 3920492 - DNA, 25 bp, Homo sapien
tccgcagttccaaccttggaacatc

SEQ ID NO: 3920493 - DNA, 25 bp, Homo sapien
tgtgccattttctagccgaattttg

SEQ ID NO: 3920494 - DNA, 25 bp, Homo sapien
tatttactatacagtggacaaagtg

SEQ ID NO: 3920495 - DNA, 25 bp, Homo sapien
caaggagtaagtaaggcaagacttc

SEQ ID NO: 3920496 - DNA, 25 bp, Homo sapien
tgctattcaccatgtagttcattaa

SEQ ID NO: 3920497 - DNA, 25 bp, Homo sapien
cctcctgagccccaagttcccctgg

SEQ ID NO: 3920498 - DNA, 25 bp, Homo sapien
ccaagttcccctggcgggacaagct

SEQ ID NO: 3920499 - DNA, 25 bp, Homo sapien
tcccctggcgggacaagctgcttct

SEQ ID NO: 3920500 - DNA, 25 bp, Homo sapien
agttcccctggcgggacaagctgct

SEQ ID NO: 3920501 - DNA, 25 bp, Homo sapien
aacaaagttgaaggagtgcatccac

SEQ ID NO: 3920502 - DNA, 25 bp, Homo sapien
tcatacgggtaattggccaccaccg

SEQ ID NO: 3920503 - DNA, 25 bp, Homo sapien
cggacccggtgctcaaaggacttgt

SEQ ID NO: 3920504 - DNA, 25 bp, Homo sapien
aaggagtgcatccaccggatcaccg

SEQ ID NO: 3920505 - DNA, 25 bp, Homo sapien
gatataggtattgagatcagggaag

SEQ ID NO: 3920506 - DNA, 25 bp, Homo sapien
gaagttgcggttcaggtccactcca

SEQ ID NO: 3920507 - DNA, 25 bp, Homo sapien
gtccactccatttgcattgttcctg

SEQ ID NO: 3920508 - DNA, 25 bp, Homo sapien
tgccaactagatacccaggcttgtt

SEQ ID NO: 3920509 - DNA, 25 bp, Homo sapien
tcagagagagcccatgtttattgcc

SEQ ID NO: 3920510 - DNA, 25 bp, Homo sapien
tgctgtaggactgaacccacctctt

SEQ ID NO: 3920511 - DNA, 25 bp, Homo sapien
acaataaaaccctgaggtcatctgg

SEQ ID NO: 3920512 - DNA, 25 bp, Homo sapien
taagaaggccttgatctctccccgg

SEQ ID NO: 3920513 - DNA, 25 bp, Homo sapien
tggcaggatgtgaatgcgcgtgtcc

SEQ ID NO: 3920514 - DNA, 25 bp, Homo sapien
acgatgcgctggttcctgttccgga

SEQ ID NO: 3920515 - DNA, 25 bp, Homo sapien
ggcccaacgcttcgttgccgtgcat

SEQ ID NO: 3920516 - DNA, 25 bp, Homo sapien
gttccccacatacttgacctctggt

SEQ ID NO: 3920517 - DNA, 25 bp, Homo sapien
agtgtcattgatgcctaaccttgca

SEQ ID NO: 3920518 - DNA, 25 bp, Homo sapien
gatgcctaaccttgcagaaggacct

SEQ ID NO: 3920519 - DNA, 25 bp, Homo sapien
ggaagcttggaagtgtcattgatgc

SEQ ID NO: 3920520 - DNA, 25 bp, Homo sapien
cattgatgcctaaccttgcagaagg

SEQ ID NO: 3920521 - DNA, 25 bp, Homo sapien
ttgggggcaggactgagctcgttct

SEQ ID NO: 3920522 - DNA, 25 bp, Homo sapien
catgaagaataggattgggggcagg

SEQ ID NO: 3920523 - DNA, 25 bp, Homo sapien
ggggcaggactgagctcgttctcca

SEQ ID NO: 3920524 - DNA, 25 bp, Homo sapien
gggcaggactgagctcgttctccat

SEQ ID NO: 3920525 - DNA, 25 bp, Homo sapien
caagatcatcatagcggtggtggcg

SEQ ID NO: 3920526 - DNA, 25 bp, Homo sapien
gctgaactccagcacgtagaggtgt

SEQ ID NO: 3920527 - DNA, 25 bp, Homo sapien
cattcgttttgcaccttgtacagcg

SEQ ID NO: 3920528 - DNA, 25 bp, Homo sapien
ccaatgctgtagacccgcgtgatgc

SEQ ID NO: 3920529 - DNA, 25 bp, Homo sapien
tggaggaagactgagagcaggtctg

SEQ ID NO: 3920530 - DNA, 25 bp, Homo sapien
gaggaagactgagagcaggtctgac

SEQ ID NO: 3920531 - DNA, 25 bp, Homo sapien
gtggaggaagactgagagcaggtct

SEQ ID NO: 3920532 - DNA, 25 bp, Homo sapien
ggaagactgagagcaggtctgacat

SEQ ID NO: 3920533 - DNA, 25 bp, Homo sapien
cagctgtccgtccaaggctggaaat

SEQ ID NO: 3920534 - DNA, 25 bp, Homo sapien
tatgtcgttctggaatagccactca

SEQ ID NO: 3920535 - DNA, 25 bp, Homo sapien
aaggtccacctagcttcccgcttgt

SEQ ID NO: 3920536 - DNA, 25 bp, Homo sapien
cagtccaaattggaagacgttccca

SEQ ID NO: 3920537 - DNA, 25 bp, Homo sapien
gcagccatttttatccagaaagtgt

SEQ ID NO: 3920538 - DNA, 25 bp, Homo sapien
ttgaagcagccatttttatccagaa

SEQ ID NO: 3920539 - DNA, 25 bp, Homo sapien
cagccatttttatccagaaagtgtc

SEQ ID NO: 3920540 - DNA, 25 bp, Homo sapien
cccaagacattttgggaaactgctt

SEQ ID NO: 3920541 - DNA, 25 bp, Homo sapien
ctaagtttgacccaagacattttgg

SEQ ID NO: 3920542 - DNA, 25 bp, Homo sapien
agacattttgggaaactgcttgtaa

SEQ ID NO: 3920543 - DNA, 25 bp, Homo sapien
ccaagacattttgggaaactgcttg

SEQ ID NO: 3920544 - DNA, 25 bp, Homo sapien
tgtctgatataagcccgcgctctct

SEQ ID NO: 3920545 - DNA, 25 bp, Homo sapien
cagtgtctgatataagcccgcgctc

SEQ ID NO: 3920546 - DNA, 25 bp, Homo sapien
tccagtgtctgatataagcccgcgc

SEQ ID NO: 3920547 - DNA, 25 bp, Homo sapien
agtgtctgatataagcccgcgctct

SEQ ID NO: 3920548 - DNA, 25 bp, Homo sapien
ctacaaattcagcacggatctcagc

SEQ ID NO: 3920549 - DNA, 25 bp, Homo sapien
tacaaattcagcacggatctcagcc

SEQ ID NO: 3920550 - DNA, 25 bp, Homo sapien
caaattcagcacggatctcagcctc

SEQ ID NO: 3920551 - DNA, 25 bp, Homo sapien
acaaattcagcacggatctcagcct

SEQ ID NO: 3920552 - DNA, 25 bp, Homo sapien
tcttgtccttcacggagcagctttg

SEQ ID NO: 3920553 - DNA, 25 bp, Homo sapien
cagcttcgtcttgtccttcacggag

SEQ ID NO: 3920554 - DNA, 25 bp, Homo sapien
ggagcagctttgattgcatccaatc

SEQ ID NO: 3920555 - DNA, 25 bp, Homo sapien
aggctggcccagcttcgtcttgtcc

SEQ ID NO: 3920556 - DNA, 25 bp, Homo sapien
tgatcaatttcttcatgaactttgt

SEQ ID NO: 3920557 - DNA, 25 bp, Homo sapien
atgatcaatttcttcatgaactttg

SEQ ID NO: 3920558 - DNA, 25 bp, Homo sapien
ctagtcattgtctgctgttgtggcc

SEQ ID NO: 3920559 - DNA, 25 bp, Homo sapien
catatcttttctgggcatcatcaat

SEQ ID NO: 3920560 - DNA, 25 bp, Homo sapien
gtcctctgccaagggatttatcacc

SEQ ID NO: 3920561 - DNA, 25 bp, Homo sapien
cttcactgctttatatccatggaag

SEQ ID NO: 3920562 - DNA, 25 bp, Homo sapien
agggatttatcaccctgatcaatca

SEQ ID NO: 3920563 - DNA, 25 bp, Homo sapien
cagggtgtaaacagagctgtactct

SEQ ID NO: 3920564 - DNA, 25 bp, Homo sapien
taaacagagctgtactctttggcca

SEQ ID NO: 3920565 - DNA, 25 bp, Homo sapien
gatccaaagtacagggtgtaaacag

SEQ ID NO: 3920566 - DNA, 25 bp, Homo sapien
tgggccaggatccaaagtacagggt

SEQ ID NO: 3920567 - DNA, 25 bp, Homo sapien
cttgacagtgaattgaggtattcga

SEQ ID NO: 3920568 - DNA, 25 bp, Homo sapien
caatgtagttacatgtacgatggaa

SEQ ID NO: 3920569 - DNA, 25 bp, Homo sapien
tctctcatcagttagaagtctcctg

SEQ ID NO: 3920570 - DNA, 25 bp, Homo sapien
tattattcacccttaaggagggatg

SEQ ID NO: 3920571 - DNA, 25 bp, Homo sapien
cccattgatgaaggccagctgccaa

SEQ ID NO: 3920572 - DNA, 25 bp, Homo sapien
ctgtgggccacaagaaagacgctct

SEQ ID NO: 3920573 - DNA, 25 bp, Homo sapien
tgtgggccacaagaaagacgctctt

SEQ ID NO: 3920574 - DNA, 25 bp, Homo sapien
gccaaaacgggcttggactcggcaa

SEQ ID NO: 3920575 - DNA, 25 bp, Homo sapien
atggccaaaacgggcttggactcgg

SEQ ID NO: 3920576 - DNA, 25 bp, Homo sapien
ggccaaaacgggcttggactcggca

SEQ ID NO: 3920577 - DNA, 25 bp, Homo sapien
tggccaaaacgggcttggactcggc

SEQ ID NO: 3920578 - DNA, 25 bp, Homo sapien
gtcgcgcagctgagaccaccgctgg

SEQ ID NO: 3920579 - DNA, 25 bp, Homo sapien
ggctactgcctgtcgcgcagctgag

SEQ ID NO: 3920580 - DNA, 25 bp, Homo sapien
tgaggctactgcctgtcgcgcagct

SEQ ID NO: 3920581 - DNA, 25 bp, Homo sapien
tgcttctcatccgtcttccacttag

SEQ ID NO: 3920582 - DNA, 25 bp, Homo sapien
ctaaccatttgtggtcctgtctcct

SEQ ID NO: 3920583 - DNA, 25 bp, Homo sapien
tgtcccagaggctattaattcttgt

SEQ ID NO: 3920584 - DNA, 25 bp, Homo sapien
tattaattcttgtgctcgagttgag

SEQ ID NO: 3920585 - DNA, 25 bp, Homo sapien
gcagcctccatagcgttggaggatc

SEQ ID NO: 3920586 - DNA, 25 bp, Homo sapien
agcatatgtttggactgactgcagc

SEQ ID NO: 3920587 - DNA, 25 bp, Homo sapien
taacccaaataaggggagctgctcc

SEQ ID NO: 3920588 - DNA, 25 bp, Homo sapien
ttactaagagcacctctgccaagtc

SEQ ID NO: 3920589 - DNA, 25 bp, Homo sapien
gtcataccgctcagcttactaagag

SEQ ID NO: 3920590 - DNA, 25 bp, Homo sapien
ctggaatcagctgtcataccgctca

SEQ ID NO: 3920591 - DNA, 25 bp, Homo sapien
gaagtaggtctcctaatgccacagg

SEQ ID NO: 3920592 - DNA, 25 bp, Homo sapien
tgggtcccaggtgcaatcagtcttc

SEQ ID NO: 3920593 - DNA, 25 bp, Homo sapien
ggtaccttagtcaagcatggcctgc

SEQ ID NO: 3920594 - DNA, 25 bp, Homo sapien
cacccaggactatcgcaggagaggt

SEQ ID NO: 3920595 - DNA, 25 bp, Homo sapien
tgaggagtccacgaacatgttaggg

SEQ ID NO: 3920596 - DNA, 25 bp, Homo sapien
aatggcctggtactttttgagctcc

SEQ ID NO: 3920597 - DNA, 25 bp, Homo sapien
catgttagggatgttgctgccaaaa

SEQ ID NO: 3920598 - DNA, 25 bp, Homo sapien
cttactgttagaagcaatggcctgg

SEQ ID NO: 3920599 - DNA, 25 bp, Homo sapien
ctgtgtgggagcaaacaagagcaaa

SEQ ID NO: 3920600 - DNA, 25 bp, Homo sapien
tgtgggagcaaacaagagcaaaggc

SEQ ID NO: 3920601 - DNA, 25 bp, Homo sapien
tgtgtgggagcaaacaagagcaaag

SEQ ID NO: 3920602 - DNA, 25 bp, Homo sapien
tgggagcaaacaagagcaaaggcat

SEQ ID NO: 3920603 - DNA, 25 bp, Homo sapien
tttgtgtgcagcataatattcagca

SEQ ID NO: 3920604 - DNA, 25 bp, Homo sapien
atttgtgtgcagcataatattcagc

SEQ ID NO: 3920605 - DNA, 25 bp, Homo sapien
tatttgtgtgcagcataatattcag

SEQ ID NO: 3920606 - DNA, 25 bp, Homo sapien
ttcgggacaggcagagcttcatcct

SEQ ID NO: 3920607 - DNA, 25 bp, Homo sapien
gcagagaggaggcagttcgggacag

SEQ ID NO: 3920608 - DNA, 25 bp, Homo sapien
gaggaggcagttcgggacaggcaga

SEQ ID NO: 3920609 - DNA, 25 bp, Homo sapien
gcagttcgggacaggcagagcttca

SEQ ID NO: 3920610 - DNA, 25 bp, Homo sapien
ctttctgctgaaaccgaatttttgc

SEQ ID NO: 3920611 - DNA, 25 bp, Homo sapien
tcactttctgctgaaaccgaatttt

SEQ ID NO: 3920612 - DNA, 25 bp, Homo sapien
gctgaaaccgaatttttgccacttg

SEQ ID NO: 3920613 - DNA, 25 bp, Homo sapien
tctgctgaaaccgaatttttgccac

SEQ ID NO: 3920614 - DNA, 25 bp, Homo sapien
taagaagacacattcaaaaccattt

SEQ ID NO: 3920615 - DNA, 25 bp, Homo sapien
ctataatcatacaacataagaagac

SEQ ID NO: 3920616 - DNA, 25 bp, Homo sapien
tataatcatacaacataagaagaca

SEQ ID NO: 3920617 - DNA, 25 bp, Homo sapien
aaccatttctacagtacctgaggca

SEQ ID NO: 3920618 - DNA, 25 bp, Homo sapien
taaatgcatggcaacacaggacaat

SEQ ID NO: 3920619 - DNA, 25 bp, Homo sapien
gatatgacctaagaagacatgccag

SEQ ID NO: 3920620 - DNA, 25 bp, Homo sapien
ttcatgcaactctgtagcaacggtc

SEQ ID NO: 3920621 - DNA, 25 bp, Homo sapien
gcaacggtccacaagctaatgggaa

SEQ ID NO: 3920622 - DNA, 25 bp, Homo sapien
ctgtgcagctataaggagttttgtc

SEQ ID NO: 3920623 - DNA, 25 bp, Homo sapien
tgtttctgtgcagctataaggagtt

SEQ ID NO: 3920624 - DNA, 25 bp, Homo sapien
tctgtgcagctataaggagttttgt

SEQ ID NO: 3920625 - DNA, 25 bp, Homo sapien
tttctgtgcagctataaggagtttt

SEQ ID NO: 3920626 - DNA, 25 bp, Homo sapien
taaggcttccagtgtctaatacagg

SEQ ID NO: 3920627 - DNA, 25 bp, Homo sapien
tagctactgggtaaccacgtggcag

SEQ ID NO: 3920628 - DNA, 25 bp, Homo sapien
tacagtgagtcagagaaccgttttg

SEQ ID NO: 3920629 - DNA, 25 bp, Homo sapien
taaacctgtaatggaaatggctggc

SEQ ID NO: 3920630 - DNA, 25 bp, Homo sapien
atggcttctgggattttgggttttg

SEQ ID NO: 3920631 - DNA, 25 bp, Homo sapien
ttttgggttttgtaacacgcacagc

SEQ ID NO: 3920632 - DNA, 25 bp, Homo sapien
cttcttatggcttctgggattttgg

SEQ ID NO: 3920633 - DNA, 25 bp, Homo sapien
tcaaaatttcttcttatggcttctg

SEQ ID NO: 3920634 - DNA, 25 bp, Homo sapien
tcatctggaagattaagctggcaga

SEQ ID NO: 3920635 - DNA, 25 bp, Homo sapien
tgccaatcttgggaaatctcacaga

SEQ ID NO: 3920636 - DNA, 25 bp, Homo sapien
cagataccatgagtaagttgcatca

SEQ ID NO: 3920637 - DNA, 25 bp, Homo sapien
tgtatatgaccacttaggtgcctga

SEQ ID NO: 3920638 - DNA, 25 bp, Homo sapien
caggacatagggactgattagatgc

SEQ ID NO: 3920639 - DNA, 25 bp, Homo sapien
ggaaagaagacaggcggctactgct

SEQ ID NO: 3920640 - DNA, 25 bp, Homo sapien
ggctactgctactgcacatgtcaag

SEQ ID NO: 3920641 - DNA, 25 bp, Homo sapien
ggagatctctaccactttaagaacg

SEQ ID NO: 3920642 - DNA, 25 bp, Homo sapien
tgaggtttaagtctttctgcagagc

SEQ ID NO: 3920643 - DNA, 25 bp, Homo sapien
tgtatagtgagacctggggccatga

SEQ ID NO: 3920644 - DNA, 25 bp, Homo sapien
ggccatgaggtttaagtctttctgc

SEQ ID NO: 3920645 - DNA, 25 bp, Homo sapien
catgaggtttaagtctttctgcaga

SEQ ID NO: 3920646 - DNA, 25 bp, Homo sapien
tattgaagattaaggtcttgtcata

SEQ ID NO: 3920647 - DNA, 25 bp, Homo sapien
ggtcttgtcataatctgcagtatag

SEQ ID NO: 3920648 - DNA, 25 bp, Homo sapien
gcagtatagttcctcacgatatcaa

SEQ ID NO: 3920649 - DNA, 25 bp, Homo sapien
aaacaattcaatgtaaacttcctga

SEQ ID NO: 3920650 - DNA, 25 bp, Homo sapien
tgcataaggagccaacatattaacc

SEQ ID NO: 3920651 - DNA, 25 bp, Homo sapien
gtcaatatagatcatgaccccacca

SEQ ID NO: 3920652 - DNA, 25 bp, Homo sapien
cacttctattcggtcaatatagatc

SEQ ID NO: 3920653 - DNA, 25 bp, Homo sapien
taaggagccaacatattaaccactt

SEQ ID NO: 3920654 - DNA, 25 bp, Homo sapien
ttccacaaggcacatttttaacttc

SEQ ID NO: 3920655 - DNA, 25 bp, Homo sapien
cttgttccacaaggcacatttttaa

SEQ ID NO: 3920656 - DNA, 25 bp, Homo sapien
taacttcatcagtttgtagtgttgt

SEQ ID NO: 3920657 - DNA, 25 bp, Homo sapien
ttttaacttcatcagtttgtagtgt

SEQ ID NO: 3920658 - DNA, 25 bp, Homo sapien
tgtagacacagcgtttgaccaggtt

SEQ ID NO: 3920659 - DNA, 25 bp, Homo sapien
tttgtagacacagcgtttgaccagg

SEQ ID NO: 3920660 - DNA, 25 bp, Homo sapien
tcctagaatgttaccgttttacaca

SEQ ID NO: 3920661 - DNA, 25 bp, Homo sapien
tagaatgttaccgttttacacataa

SEQ ID NO: 3920662 - DNA, 25 bp, Homo sapien
tctgaacgtagtaatgaaaggcaac

SEQ ID NO: 3920663 - DNA, 25 bp, Homo sapien
acatgatatgatagcctggtccact

SEQ ID NO: 3920664 - DNA, 25 bp, Homo sapien
tgcacagatctgaacgtagtaatga

SEQ ID NO: 3920665 - DNA, 25 bp, Homo sapien
tggggctagttagtaaagctcctcc

SEQ ID NO: 3920666 - DNA, 25 bp, Homo sapien
gcataagggcttgttaaccaaatcc

SEQ ID NO: 3920667 - DNA, 25 bp, Homo sapien
taagctcaaccaaccgtacctctgg

SEQ ID NO: 3920668 - DNA, 25 bp, Homo sapien
tctaatggctttcagtagaggtaca

SEQ ID NO: 3920669 - DNA, 25 bp, Homo sapien
gaaaactatgaaagcaagccctgga

SEQ ID NO: 3920670 - DNA, 25 bp, Homo sapien
tgtataggaataaccgtagggagac

SEQ ID NO: 3920671 - DNA, 25 bp, Homo sapien
tctccctagagatgggacatgcgcc

SEQ ID NO: 3920672 - DNA, 25 bp, Homo sapien
catctggagggtgctccgcaaaagc

SEQ ID NO: 3920673 - DNA, 25 bp, Homo sapien
tagagccctaactgactgcacatgc

SEQ ID NO: 3920674 - DNA, 25 bp, Homo sapien
tcctcaatcttgtggatggaggcgt

SEQ ID NO: 3920675 - DNA, 25 bp, Homo sapien
cagccaccagaacccgggcttgagt

SEQ ID NO: 3920676 - DNA, 25 bp, Homo sapien
gtagagcaggacagccaccaacccc

SEQ ID NO: 3920677 - DNA, 25 bp, Homo sapien
tcaatcttgtggatggaggcgtaga

SEQ ID NO: 3920678 - DNA, 25 bp, Homo sapien
aacttggcgctctctcgcaggctga

SEQ ID NO: 3920679 - DNA, 25 bp, Homo sapien
tgctcggtgagcttcctgaaactcc

SEQ ID NO: 3920680 - DNA, 25 bp, Homo sapien
gtcgctcccgggtggaaggcactaa

SEQ ID NO: 3920681 - DNA, 25 bp, Homo sapien
gagaaaaggaccctcagtcccgtga

SEQ ID NO: 3920682 - DNA, 25 bp, Homo sapien
aggctcgcgaggaaagccgacccct

SEQ ID NO: 3920683 - DNA, 25 bp, Homo sapien
cagccgcaggctcgcgaggaaagcc

SEQ ID NO: 3920684 - DNA, 25 bp, Homo sapien
ccgcaggctcgcgaggaaagccgac

SEQ ID NO: 3920685 - DNA, 25 bp, Homo sapien
gcaggctcgcgaggaaagccgaccc

SEQ ID NO: 3920686 - DNA, 25 bp, Homo sapien
tgcgcggggacgcacacggcgtagc

SEQ ID NO: 3920687 - DNA, 25 bp, Homo sapien
gccaaccgccgccaacagccggccc

SEQ ID NO: 3920688 - DNA, 25 bp, Homo sapien
cgatcagtgacgcatcgcccccgcc

SEQ ID NO: 3920689 - DNA, 25 bp, Homo sapien
acgtgcagccgactcccgcgccgag

SEQ ID NO: 3920690 - DNA, 25 bp, Homo sapien
ggacaaaattctcctagccgcgggc

SEQ ID NO: 3920691 - DNA, 25 bp, Homo sapien
taactgcttcggaagaggacagccc

SEQ ID NO: 3920692 - DNA, 25 bp, Homo sapien
tttctgtacactgctggttaactgc

SEQ ID NO: 3920693 - DNA, 25 bp, Homo sapien
ctcctttggaggcaagtcgctttct

SEQ ID NO: 3920694 - DNA, 25 bp, Homo sapien
tgaaggccatccagactacaggaac

SEQ ID NO: 3920695 - DNA, 25 bp, Homo sapien
gaactataactggacaaggtggact

SEQ ID NO: 3920696 - DNA, 25 bp, Homo sapien
ttttgcagtgtatgcggagccccac

SEQ ID NO: 3920697 - DNA, 25 bp, Homo sapien
ggagccggcaaacctcacatgtgca

SEQ ID NO: 3920698 - DNA, 25 bp, Homo sapien
ttattatctaggaatgtctgggacc

SEQ ID NO: 3920699 - DNA, 25 bp, Homo sapien
tattatctaggaatgtctgggacct

SEQ ID NO: 3920700 - DNA, 25 bp, Homo sapien
tatctaggaatgtctgggaccttat

SEQ ID NO: 3920701 - DNA, 25 bp, Homo sapien
ttttattatctaggaatgtctggga

SEQ ID NO: 3920702 - DNA, 25 bp, Homo sapien
cagtttatagggcaagaatcgagca

SEQ ID NO: 3920703 - DNA, 25 bp, Homo sapien
caaattatatagatcaggctgccct

SEQ ID NO: 3920704 - DNA, 25 bp, Homo sapien
tcagactcccagataagcactttta

SEQ ID NO: 3920705 - DNA, 25 bp, Homo sapien
gatggcttgtaatgttcagactccc

SEQ ID NO: 3920706 - DNA, 25 bp, Homo sapien
caaatgtgtcgtgatgatgcttcta

SEQ ID NO: 3920707 - DNA, 25 bp, Homo sapien
tacaccaactccttatgatgccagg

SEQ ID NO: 3920708 - DNA, 25 bp, Homo sapien
gatacacaatcccttcgatgagaag

SEQ ID NO: 3920709 - DNA, 25 bp, Homo sapien
tgttcagtgcaacacaaggaggtag

SEQ ID NO: 3920710 - DNA, 25 bp, Homo sapien
ctgttaaccaactccaatcaagatt

SEQ ID NO: 3920711 - DNA, 25 bp, Homo sapien
tctgttaaccaactccaatcaagat

SEQ ID NO: 3920712 - DNA, 25 bp, Homo sapien
attctgttaaccaactccaatcaag

SEQ ID NO: 3920713 - DNA, 25 bp, Homo sapien
tcattctgttaaccaactccaatca

SEQ ID NO: 3920714 - DNA, 25 bp, Homo sapien
tagtatatccctgagtaacggcaga

SEQ ID NO: 3920715 - DNA, 25 bp, Homo sapien
caggtacatgtcatatggctggcca

SEQ ID NO: 3920716 - DNA, 25 bp, Homo sapien
ttgcacccaacatagccaaagcagg

SEQ ID NO: 3920717 - DNA, 25 bp, Homo sapien
gtcacattgtgaagaagcttaccac

SEQ ID NO: 3920718 - DNA, 25 bp, Homo sapien
gcttaaatggccaaggcagttcaaa

SEQ ID NO: 3920719 - DNA, 25 bp, Homo sapien
aatggccaaggcagttcaaattttc

SEQ ID NO: 3920720 - DNA, 25 bp, Homo sapien
ataatagtgcttaaatggccaaggc

SEQ ID NO: 3920721 - DNA, 25 bp, Homo sapien
catcatactattgccctgttcctca

SEQ ID NO: 3920722 - DNA, 25 bp, Homo sapien
ttgaatctgggaggcggaggttgca

SEQ ID NO: 3920723 - DNA, 25 bp, Homo sapien
atgagccaagactgtgccactgcac

SEQ ID NO: 3920724 - DNA, 25 bp, Homo sapien
ccaagactgtgccactgcactccag

SEQ ID NO: 3920725 - DNA, 25 bp, Homo sapien
cgggaagctgaagcaggagaactgc

SEQ ID NO: 3920726 - DNA, 25 bp, Homo sapien
tgcaagcaactacacttcaaattgg

SEQ ID NO: 3920727 - DNA, 25 bp, Homo sapien
ttatagcctgtgctacagttgtagg

SEQ ID NO: 3920728 - DNA, 25 bp, Homo sapien
ggccacatgtataatgaccccaaga

SEQ ID NO: 3920729 - DNA, 25 bp, Homo sapien
taggtgtactgcattgggccacatg

SEQ ID NO: 3920730 - DNA, 25 bp, Homo sapien
gagccactggctttggatacggcac

SEQ ID NO: 3920731 - DNA, 25 bp, Homo sapien
aaatgctggtgctgtagaggtctcc

SEQ ID NO: 3920732 - DNA, 25 bp, Homo sapien
taattatgggcagagcttccaggaa

SEQ ID NO: 3920733 - DNA, 25 bp, Homo sapien
gatgtaacatggctgcacttctgca

SEQ ID NO: 3920734 - DNA, 25 bp, Homo sapien
gaagactaccttaacaactactgcc

SEQ ID NO: 3920735 - DNA, 25 bp, Homo sapien
tattacaaagggatagtcaggactc

SEQ ID NO: 3920736 - DNA, 25 bp, Homo sapien
caaccctggtctgaaggcacagaag

SEQ ID NO: 3920737 - DNA, 25 bp, Homo sapien
tacaggtgaggaaatatgaacatca

SEQ ID NO: 3920738 - DNA, 25 bp, Homo sapien
agaatgatcatgttctgctgaagtc

SEQ ID NO: 3920739 - DNA, 25 bp, Homo sapien
gccatgctgatgtctgaggggttac

SEQ ID NO: 3920740 - DNA, 25 bp, Homo sapien
gctgatgtctgaggggttactgcac

SEQ ID NO: 3920741 - DNA, 25 bp, Homo sapien
atgacagagaatgatcatgttctgc

SEQ ID NO: 3920742 - DNA, 25 bp, Homo sapien
atcctacaagggaccgggcagaact

SEQ ID NO: 3920743 - DNA, 25 bp, Homo sapien
cttctagactggatcctacaaggga

SEQ ID NO: 3920744 - DNA, 25 bp, Homo sapien
actggatcctacaagggaccgggca

SEQ ID NO: 3920745 - DNA, 25 bp, Homo sapien
tagactggatcctacaagggaccgg

SEQ ID NO: 3920746 - DNA, 25 bp, Homo sapien
ggcaggtacatctatccccaagtta

SEQ ID NO: 3920747 - DNA, 25 bp, Homo sapien
catctcaattgctagtctggacacc

SEQ ID NO: 3920748 - DNA, 25 bp, Homo sapien
tatacatgtcttcaagagggcccac

SEQ ID NO: 3920749 - DNA, 25 bp, Homo sapien
tggaataccacagtagtcaagggct

SEQ ID NO: 3920750 - DNA, 25 bp, Homo sapien
caattttaaggagatgccatatttc

SEQ ID NO: 3920751 - DNA, 25 bp, Homo sapien
ctttttccctgcatgaacatgacag

SEQ ID NO: 3920752 - DNA, 25 bp, Homo sapien
catgacagtattgtcagcttctttg

SEQ ID NO: 3920753 - DNA, 25 bp, Homo sapien
ggccacttccaccttagggagtaga

SEQ ID NO: 3920754 - DNA, 25 bp, Homo sapien
tgtacaccatattcccaaaacccag

SEQ ID NO: 3920755 - DNA, 25 bp, Homo sapien
tgcagatagctatggccaagctacc

SEQ ID NO: 3920756 - DNA, 25 bp, Homo sapien
gtcagacactttcacatgccccaag

SEQ ID NO: 3920757 - DNA, 25 bp, Homo sapien
gagggcttttgtactttgagaggaa

SEQ ID NO: 3920758 - DNA, 25 bp, Homo sapien
acagtgtgcacaatgattttcacca

SEQ ID NO: 3920759 - DNA, 25 bp, Homo sapien
ccttgagcacacggtcctgactctg

SEQ ID NO: 3920760 - DNA, 25 bp, Homo sapien
gcacagtgtgcacaatgattttcac

SEQ ID NO: 3920761 - DNA, 25 bp, Homo sapien
tgcacagtgtgcacaatgattttca

SEQ ID NO: 3920762 - DNA, 25 bp, Homo sapien
ctctgtgctgtcactgtaggagtga

SEQ ID NO: 3920763 - DNA, 25 bp, Homo sapien
tctgtgctgtcactgtaggagtgat

SEQ ID NO: 3920764 - DNA, 25 bp, Homo sapien
tataataggccccaatgacagacac

SEQ ID NO: 3920765 - DNA, 25 bp, Homo sapien
tcaaggtgacactcaaagaagctac

SEQ ID NO: 3920766 - DNA, 25 bp, Homo sapien
caaatgcaaggctccaaaaaggttc

SEQ ID NO: 3920767 - DNA, 25 bp, Homo sapien
taaataccatggaccaagccaagag

SEQ ID NO: 3920768 - DNA, 25 bp, Homo sapien
ggccataaggcagtaagaccctgat

SEQ ID NO: 3920769 - DNA, 25 bp, Homo sapien
tattcaaatctatgaggtcgtcacc

SEQ ID NO: 3920770 - DNA, 25 bp, Homo sapien
tacaaaccctgatggtacagcctgc

SEQ ID NO: 3920771 - DNA, 25 bp, Homo sapien
ccactgcaggataagaggccataag

SEQ ID NO: 3920772 - DNA, 25 bp, Homo sapien
gggaaacgcagatttgcctgaggta

SEQ ID NO: 3920773 - DNA, 25 bp, Homo sapien
gaactgctggtcagactaaactgaa

SEQ ID NO: 3920774 - DNA, 25 bp, Homo sapien
ggttctaacctcacagactctctga

SEQ ID NO: 3920775 - DNA, 25 bp, Homo sapien
gattctcacaggtccatatgccaca

SEQ ID NO: 3920776 - DNA, 25 bp, Homo sapien
ccccacatttgttaggctagtgata

SEQ ID NO: 3920777 - DNA, 25 bp, Homo sapien
aatttttctacctcacgttctctgt

SEQ ID NO: 3920778 - DNA, 25 bp, Homo sapien
tataccatgtctcaatggcaatacc

SEQ ID NO: 3920779 - DNA, 25 bp, Homo sapien
gctagtgatagttacctaaaatgcc

SEQ ID NO: 3920780 - DNA, 25 bp, Homo sapien
ggtctgtgttttaactgcttatata

SEQ ID NO: 3920781 - DNA, 25 bp, Homo sapien
aggtctgtgttttaactgcttatat

SEQ ID NO: 3920782 - DNA, 25 bp, Homo sapien
ttaactgcttatatagatcaatggc

SEQ ID NO: 3920783 - DNA, 25 bp, Homo sapien
tgttttaactgcttatatagatcaa

SEQ ID NO: 3920784 - DNA, 25 bp, Homo sapien
ctgatcctccaggtatccaatgaca

SEQ ID NO: 3920785 - DNA, 25 bp, Homo sapien
tcaagtctccctgacgtcttccata

SEQ ID NO: 3920786 - DNA, 25 bp, Homo sapien
aaagacataatctgatcctccaggt

SEQ ID NO: 3920787 - DNA, 25 bp, Homo sapien
gacgtcttccataggggctcttctg

SEQ ID NO: 3920788 - DNA, 25 bp, Homo sapien
ccatttctttccatgcttttagcat

SEQ ID NO: 3920789 - DNA, 25 bp, Homo sapien
tctttccatgcttttagcatttttt

SEQ ID NO: 3920790 - DNA, 25 bp, Homo sapien
agcatagtggatggccttttcttcc

SEQ ID NO: 3920791 - DNA, 25 bp, Homo sapien
ctcagcatagtggatggccttttct

SEQ ID NO: 3920792 - DNA, 25 bp, Homo sapien
ggatgagggatctcattcaggtctc

SEQ ID NO: 3920793 - DNA, 25 bp, Homo sapien
caagaacaaggcagatttgagggcc

SEQ ID NO: 3920794 - DNA, 25 bp, Homo sapien
cagcactggctaagaagtccagatt

SEQ ID NO: 3920795 - DNA, 25 bp, Homo sapien
gagcattaatcccaaacaggaaggc

SEQ ID NO: 3920796 - DNA, 25 bp, Homo sapien
tgttaagttagcattatatctaaga

SEQ ID NO: 3920797 - DNA, 25 bp, Homo sapien
gctcgctgtatctctccaagtcaag

SEQ ID NO: 3920798 - DNA, 25 bp, Homo sapien
tatcccatacgtcatctgctcgctg

SEQ ID NO: 3920799 - DNA, 25 bp, Homo sapien
tcagttgttgtgatgctgagatcaa

SEQ ID NO: 3920800 - DNA, 25 bp, Homo sapien
tgtataattggaagctgtattttgc

SEQ ID NO: 3920801 - DNA, 25 bp, Homo sapien
ttcagcccacactttacgcagctgt

SEQ ID NO: 3920802 - DNA, 25 bp, Homo sapien
gacacatagtgcactgcttcagccc

SEQ ID NO: 3920803 - DNA, 25 bp, Homo sapien
ccctgaaagagcctgctatagtctt

SEQ ID NO: 3920804 - DNA, 25 bp, Homo sapien
gcaaatggcccttcatatacagttt

SEQ ID NO: 3920805 - DNA, 25 bp, Homo sapien
caaataaaccatatagctatcacag

SEQ ID NO: 3920806 - DNA, 25 bp, Homo sapien
tcagataaacttctggaagcaaatg

SEQ ID NO: 3920807 - DNA, 25 bp, Homo sapien
taaaccatatagctatcacagcctc

SEQ ID NO: 3920808 - DNA, 25 bp, Homo sapien
gctggtttccgaggatccagagaaa

SEQ ID NO: 3920809 - DNA, 25 bp, Homo sapien
tctagaacacattgagaggctggtt

SEQ ID NO: 3920810 - DNA, 25 bp, Homo sapien
attccagtttcacgctcaatacgag

SEQ ID NO: 3920811 - DNA, 25 bp, Homo sapien
aactccatctagaacacattgagag

SEQ ID NO: 3920812 - DNA, 25 bp, Homo sapien
ttgcagaagtcatatttaggatgtg

SEQ ID NO: 3920813 - DNA, 25 bp, Homo sapien
gtgaatgaagactttcatcaggtgg

SEQ ID NO: 3920814 - DNA, 25 bp, Homo sapien
gaagtcatatttaggatgtgtacta

SEQ ID NO: 3920815 - DNA, 25 bp, Homo sapien
tgaatgaagactttcatcaggtggt

SEQ ID NO: 3920816 - DNA, 25 bp, Homo sapien
gccagttttccatgggttctactac

SEQ ID NO: 3920817 - DNA, 25 bp, Homo sapien
gctgagggtcccaattcaacatcaa

SEQ ID NO: 3920818 - DNA, 25 bp, Homo sapien
tcaaagtaaggtcaacaggtcctcc

SEQ ID NO: 3920819 - DNA, 25 bp, Homo sapien
tcaacatcaactgtagccagttttc

SEQ ID NO: 3920820 - DNA, 25 bp, Homo sapien
taaaccgaacttctcctgacatctc

SEQ ID NO: 3920821 - DNA, 25 bp, Homo sapien
ggctactaaaccgaacttctcctga

SEQ ID NO: 3920822 - DNA, 25 bp, Homo sapien
tactaaaccgaacttctcctgacat

SEQ ID NO: 3920823 - DNA, 25 bp, Homo sapien
atggctactaaaccgaacttctcct

SEQ ID NO: 3920824 - DNA, 25 bp, Homo sapien
cattcaaataccatggtcccaaagc

SEQ ID NO: 3920825 - DNA, 25 bp, Homo sapien
gctccaataatcaacagtggctgtg

SEQ ID NO: 3920826 - DNA, 25 bp, Homo sapien
taaggcttattctcaaagagctctg

SEQ ID NO: 3920827 - DNA, 25 bp, Homo sapien
gcaaaaaaggcctatatccagcaat

SEQ ID NO: 3920828 - DNA, 25 bp, Homo sapien
cagatactgcagtgttcccacaaaa

SEQ ID NO: 3920829 - DNA, 25 bp, Homo sapien
cacaaaagatgtacacagacttcct

SEQ ID NO: 3920830 - DNA, 25 bp, Homo sapien
tacacagacttccttgatcaacatc

SEQ ID NO: 3920831 - DNA, 25 bp, Homo sapien
caacatctttggcatatcccagatc

SEQ ID NO: 3920832 - DNA, 25 bp, Homo sapien
catcctgaagaactatgttttcagg

SEQ ID NO: 3920833 - DNA, 25 bp, Homo sapien
tccaccaacatcctgaagaactatg

SEQ ID NO: 3920834 - DNA, 25 bp, Homo sapien
caggttttagatctcgatgtataat

SEQ ID NO: 3920835 - DNA, 25 bp, Homo sapien
tcatgcaaatatcgaatcccagacc

SEQ ID NO: 3920836 - DNA, 25 bp, Homo sapien
ccacaacaattttctggtttgttga

SEQ ID NO: 3920837 - DNA, 25 bp, Homo sapien
ctggctttctttaagtccacaacaa

SEQ ID NO: 3920838 - DNA, 25 bp, Homo sapien
aacaattttctggtttgttgagcag

SEQ ID NO: 3920839 - DNA, 25 bp, Homo sapien
ctatatcacttagtaaagaaagtat

SEQ ID NO: 3920840 - DNA, 25 bp, Homo sapien
tcttcaggaacatcacaggccttta

SEQ ID NO: 3920841 - DNA, 25 bp, Homo sapien
ttccattgctagaagaggcacatca

SEQ ID NO: 3920842 - DNA, 25 bp, Homo sapien
caggcctttacaacattggcatggt

SEQ ID NO: 3920843 - DNA, 25 bp, Homo sapien
gatctcctccagaacagtattccat

SEQ ID NO: 3920844 - DNA, 25 bp, Homo sapien
gctctaggcgacaagacttaattgc

SEQ ID NO: 3920845 - DNA, 25 bp, Homo sapien
gcgacaagacttaattgctattttg

SEQ ID NO: 3920846 - DNA, 25 bp, Homo sapien
ctgtttttggtacttagctctaggc

SEQ ID NO: 3920847 - DNA, 25 bp, Homo sapien
tacttagctctaggcgacaagactt

SEQ ID NO: 3920848 - DNA, 25 bp, Homo sapien
gctggtacagacagacgttcccgaa

SEQ ID NO: 3920849 - DNA, 25 bp, Homo sapien
ccgatgctggtacagacagacgttc

SEQ ID NO: 3920850 - DNA, 25 bp, Homo sapien
gtacagacagacgttcccgaagccg

SEQ ID NO: 3920851 - DNA, 25 bp, Homo sapien
gatgctggtacagacagacgttccc

SEQ ID NO: 3920852 - DNA, 25 bp, Homo sapien
cacagttgttccaaggccggttccg

SEQ ID NO: 3920853 - DNA, 25 bp, Homo sapien
caaggccggttccgggccgccgatg

SEQ ID NO: 3920854 - DNA, 25 bp, Homo sapien
tatacacaagctgtacttggagctg

SEQ ID NO: 3920855 - DNA, 25 bp, Homo sapien
tgttgatatacacaagctgtacttg

SEQ ID NO: 3920856 - DNA, 25 bp, Homo sapien
acagacataggagctggatgacaga

SEQ ID NO: 3920857 - DNA, 25 bp, Homo sapien
cttggagctggataacagacatagg

SEQ ID NO: 3920858 - DNA, 25 bp, Homo sapien
tgctgtaggcaagttccatgggact

SEQ ID NO: 3920859 - DNA, 25 bp, Homo sapien
gcccggccttaacataggattttca

SEQ ID NO: 3920860 - DNA, 25 bp, Homo sapien
agattcaatcttaggcctcttgctg

SEQ ID NO: 3920861 - DNA, 25 bp, Homo sapien
gaaacagtccccatgggagattgta

SEQ ID NO: 3920862 - DNA, 25 bp, Homo sapien
aggaactctagagcccaggaggttg

SEQ ID NO: 3920863 - DNA, 25 bp, Homo sapien
gaggctacagtgagccacagttatg

SEQ ID NO: 3920864 - DNA, 25 bp, Homo sapien
aggctacagtgagccacagttatgc

SEQ ID NO: 3920865 - DNA, 25 bp, Homo sapien
tgaggtgggaggaactctagagccc

SEQ ID NO: 3920866 - DNA, 25 bp, Homo sapien
cctgtggagttcataaaaagttctt

SEQ ID NO: 3920867 - DNA, 25 bp, Homo sapien
tgtggagttcataaaaagttcttcc

SEQ ID NO: 3920868 - DNA, 25 bp, Homo sapien
tcctgtggagttcataaaaagttct

SEQ ID NO: 3920869 - DNA, 25 bp, Homo sapien
ctgtggagttcataaaaagttcttc

SEQ ID NO: 3920870 - DNA, 25 bp, Homo sapien
agtaaagtcatagggctcaaagtct

SEQ ID NO: 3920871 - DNA, 25 bp, Homo sapien
tagtcatccagagtaaagtcatagg

SEQ ID NO: 3920872 - DNA, 25 bp, Homo sapien
caggaacattaaggatggcttcact

SEQ ID NO: 3920873 - DNA, 25 bp, Homo sapien
aagtctttccggaagcggcgagcca

SEQ ID NO: 3920874 - DNA, 25 bp, Homo sapien
caaaatggaaactatcagcctgagc

SEQ ID NO: 3920875 - DNA, 25 bp, Homo sapien
gaagtcaaaatggaaactatcagcc

SEQ ID NO: 3920876 - DNA, 25 bp, Homo sapien
tggaaactatcagcctgagctctcc

SEQ ID NO: 3920877 - DNA, 25 bp, Homo sapien
aaatggaaactatcagcctgagctc

SEQ ID NO: 3920878 - DNA, 25 bp, Homo sapien
aactagacatgagtttgcagagtca

SEQ ID NO: 3920879 - DNA, 25 bp, Homo sapien
gctgtgattacaacctgccttaaac

SEQ ID NO: 3920880 - DNA, 25 bp, Homo sapien
tgcagagtcaggagcctagtcatac

SEQ ID NO: 3920881 - DNA, 25 bp, Homo sapien
caaataagaacacccaccatacagg

SEQ ID NO: 3920882 - DNA, 25 bp, Homo sapien
gctatataactataaattagtatct

SEQ ID NO: 3920883 - DNA, 25 bp, Homo sapien
tagaactacctttcttgtacagctg

SEQ ID NO: 3920884 - DNA, 25 bp, Homo sapien
tataagtcaaagaacctaagctccc

SEQ ID NO: 3920885 - DNA, 25 bp, Homo sapien
tgggcaaactttgagcctatttcaa

SEQ ID NO: 3920886 - DNA, 25 bp, Homo sapien
cataaaaatatgctgctcctggctg

SEQ ID NO: 3920887 - DNA, 25 bp, Homo sapien
cctgtgtcaagttcaacataaaaat

SEQ ID NO: 3920888 - DNA, 25 bp, Homo sapien
tttctcctgtgtcaagttcaacata

SEQ ID NO: 3920889 - DNA, 25 bp, Homo sapien
tcaacataaaaatatgctgctcctg

SEQ ID NO: 3920890 - DNA, 25 bp, Homo sapien
aaaaaccagatcttgccaggcgtgg

SEQ ID NO: 3920891 - DNA, 25 bp, Homo sapien
gtcaaaaaccttaggctcaacatgt

SEQ ID NO: 3920892 - DNA, 25 bp, Homo sapien
catgcccaacccattgcctatttaa

SEQ ID NO: 3920893 - DNA, 25 bp, Homo sapien
tgaatatcaccatcccctgtttcac

SEQ ID NO: 3920894 - DNA, 25 bp, Homo sapien
tttaatgtcatcagtagtagagcag

SEQ ID NO: 3920895 - DNA, 25 bp, Homo sapien
ggcatctttaatgtcatcagtagta

SEQ ID NO: 3920896 - DNA, 25 bp, Homo sapien
cctgggtaatgaaggcatctttaat

SEQ ID NO: 3920897 - DNA, 25 bp, Homo sapien
gctcctgtgcctgggtaatgaaggc

SEQ ID NO: 3920898 - DNA, 25 bp, Homo sapien
tcccagagaagttgtgcctgcacag

SEQ ID NO: 3920899 - DNA, 25 bp, Homo sapien
ggtcccagagaagttgtgcctgcac

SEQ ID NO: 3920900 - DNA, 25 bp, Homo sapien
caggagaaattccttgtgcaggtcc

SEQ ID NO: 3920901 - DNA, 25 bp, Homo sapien
ccagagaagttgtgcctgcacagtc

SEQ ID NO: 3920902 - DNA, 25 bp, Homo sapien
tatatatgtggcagagttaggccca

SEQ ID NO: 3920903 - DNA, 25 bp, Homo sapien
tcagcacagaatatcctcaggccag

SEQ ID NO: 3920904 - DNA, 25 bp, Homo sapien
gcctgacacatgtgggagccattct

SEQ ID NO: 3920905 - DNA, 25 bp, Homo sapien
gagaagtagcaaatccatcacaggg

SEQ ID NO: 3920906 - DNA, 25 bp, Homo sapien
ctgtagctggaggtgatggctctta

SEQ ID NO: 3920907 - DNA, 25 bp, Homo sapien
agctggaggtgatggctcttataat

SEQ ID NO: 3920908 - DNA, 25 bp, Homo sapien
ggaggtgatggctcttataatttct

SEQ ID NO: 3920909 - DNA, 25 bp, Homo sapien
ataatttctctcaaatacaacacac

SEQ ID NO: 3920910 - DNA, 25 bp, Homo sapien
tcttctaccacctctgctgaaagct

SEQ ID NO: 3920911 - DNA, 25 bp, Homo sapien
aggatgaggacatggtcatcagata

SEQ ID NO: 3920912 - DNA, 25 bp, Homo sapien
gaaccgtctcagagtggccttatac

SEQ ID NO: 3920913 - DNA, 25 bp, Homo sapien
tagtgtccaataggcaggatgagga

SEQ ID NO: 3920914 - DNA, 25 bp, Homo sapien
gcacacagaattgagacatcaatac

SEQ ID NO: 3920915 - DNA, 25 bp, Homo sapien
gacatcaatacagcatgtaggattc

SEQ ID NO: 3920916 - DNA, 25 bp, Homo sapien
cacagaattgagacatcaatacagc

SEQ ID NO: 3920917 - DNA, 25 bp, Homo sapien
aagcagcacacagaattgagacatc

SEQ ID NO: 3920918 - DNA, 25 bp, Homo sapien
ccttgatttgtttggcagagaggac

SEQ ID NO: 3920919 - DNA, 25 bp, Homo sapien
cagagaggactgagcatattgacaa

SEQ ID NO: 3920920 - DNA, 25 bp, Homo sapien
caaagttaaggctgaaggaaggaat

SEQ ID NO: 3920921 - DNA, 25 bp, Homo sapien
tatgctcttagtgtggtgggctcaa

SEQ ID NO: 3920922 - DNA, 25 bp, Homo sapien
aggctgaaatactcatgtggcctac

SEQ ID NO: 3920923 - DNA, 25 bp, Homo sapien
actctaggctgaaatactcatgtgg

SEQ ID NO: 3920924 - DNA, 25 bp, Homo sapien
gtagactctaggctgaaatactcat

SEQ ID NO: 3920925 - DNA, 25 bp, Homo sapien
gacagtgtagactctaggctgaaat

SEQ ID NO: 3920926 - DNA, 25 bp, Homo sapien
agtttcaggcctagatgagaagaaa

SEQ ID NO: 3920927 - DNA, 25 bp, Homo sapien
tagtttcaggcctagatgagaagaa

SEQ ID NO: 3920928 - DNA, 25 bp, Homo sapien
tctagtttcaggcctagatgagaag

SEQ ID NO: 3920929 - DNA, 25 bp, Homo sapien
cctctagtttcaggcctagatgaga

SEQ ID NO: 3920930 - DNA, 25 bp, Homo sapien
atgtgtgccgatgttgaccaccaaa

SEQ ID NO: 3920931 - DNA, 25 bp, Homo sapien
tgtgccgatgttgaccaccaaatgt

SEQ ID NO: 3920932 - DNA, 25 bp, Homo sapien
tgtgtgccgatgttgaccaccaaat

SEQ ID NO: 3920933 - DNA, 25 bp, Homo sapien
gccgatgttgaccaccaaatgtttt

SEQ ID NO: 3920934 - DNA, 25 bp, Homo sapien
ctagcaaggcaaaaccagcagggtc

SEQ ID NO: 3920935 - DNA, 25 bp, Homo sapien
tcatgtaaaagaaagccaggtgtta

SEQ ID NO: 3920936 - DNA, 25 bp, Homo sapien
cttcatgtaaaagaaagccaggtgt

SEQ ID NO: 3920937 - DNA, 25 bp, Homo sapien
ttcatgtaaaagaaagccaggtgtt

SEQ ID NO: 3920938 - DNA, 25 bp, Homo sapien
agaaaaactgacaggctgattcttc

SEQ ID NO: 3920939 - DNA, 25 bp, Homo sapien
tacctgtggatgaacgcttccttcc

SEQ ID NO: 3920940 - DNA, 25 bp, Homo sapien
tatctctacctgtggatgaacgctt

SEQ ID NO: 3920941 - DNA, 25 bp, Homo sapien
aggtttgcgaggctgctttggatga

SEQ ID NO: 3920942 - DNA, 25 bp, Homo sapien
agtagccgaccactcacatacaagg

SEQ ID NO: 3920943 - DNA, 25 bp, Homo sapien
tgccatgccatacctatctttcttc

SEQ ID NO: 3920944 - DNA, 25 bp, Homo sapien
tcaactaacctttagataagtagcc

SEQ ID NO: 3920945 - DNA, 25 bp, Homo sapien
tacaagggaacattcctgccatgcc

SEQ ID NO: 3920946 - DNA, 25 bp, Homo sapien
taagggttttcagtgacatccggag

SEQ ID NO: 3920947 - DNA, 25 bp, Homo sapien
caagaatttgctttcctatggatgc

SEQ ID NO: 3920948 - DNA, 25 bp, Homo sapien
gttctgctgcatccattagcttcat

SEQ ID NO: 3920949 - DNA, 25 bp, Homo sapien
catccggaggctgttttaccagttc

SEQ ID NO: 3920950 - DNA, 25 bp, Homo sapien
gctgtccatcactactgagatcctc

SEQ ID NO: 3920951 - DNA, 25 bp, Homo sapien
caaagtgttttgagtccgttggcaa

SEQ ID NO: 3920952 - DNA, 25 bp, Homo sapien
gaatgtcaacatcacggtgcacatg

SEQ ID NO: 3920953 - DNA, 25 bp, Homo sapien
ctgtggtacgggaagggactcactt

SEQ ID NO: 3920954 - DNA, 25 bp, Homo sapien
accgcagggaacagcctgatagagc

SEQ ID NO: 3920955 - DNA, 25 bp, Homo sapien
caccgcagggaacagcctgatagag

SEQ ID NO: 3920956 - DNA, 25 bp, Homo sapien
ccgcagggaacagcctgatagagct

SEQ ID NO: 3920957 - DNA, 25 bp, Homo sapien
tcttttctggatttccaacatttgc

SEQ ID NO: 3920958 - DNA, 25 bp, Homo sapien
tttctggatttccaacatttgccag

SEQ ID NO: 3920959 - DNA, 25 bp, Homo sapien
tctggatttccaacatttgccagag

SEQ ID NO: 3920960 - DNA, 25 bp, Homo sapien
ttttctggatttccaacatttgcca

SEQ ID NO: 3920961 - DNA, 25 bp, Homo sapien
aaccgggtggcatgctgtgcatttt

SEQ ID NO: 3920962 - DNA, 25 bp, Homo sapien
taaaccgggtggcatgctgtgcatt

SEQ ID NO: 3920963 - DNA, 25 bp, Homo sapien
ctataaaccgggtggcatgctgtgc

SEQ ID NO: 3920964 - DNA, 25 bp, Homo sapien
ccgggtggcatgctgtgcattttcc

SEQ ID NO: 3920965 - DNA, 25 bp, Homo sapien
tgatggacacatgaggtttcacttt

SEQ ID NO: 3920966 - DNA, 25 bp, Homo sapien
tatccgtctaatagggcaacaatcc

SEQ ID NO: 3920967 - DNA, 25 bp, Homo sapien
gaggtcctcagttcatcatcgccag

SEQ ID NO: 3920968 - DNA, 25 bp, Homo sapien
caatagttcaagctaagtgatggac

SEQ ID NO: 3920969 - DNA, 25 bp, Homo sapien
cttacttcagtgtctgagtaaccaa

SEQ ID NO: 3920970 - DNA, 25 bp, Homo sapien
tatatggttaaaaacgaacaagaga

SEQ ID NO: 3920971 - DNA, 25 bp, Homo sapien
cagtgtctgagtaaccaaatggaac

SEQ ID NO: 3920972 - DNA, 25 bp, Homo sapien
tggaaccaagatgttatatggttaa

SEQ ID NO: 3920973 - DNA, 25 bp, Homo sapien
cacattttttggtatccacttctcc

SEQ ID NO: 3920974 - DNA, 25 bp, Homo sapien
tatcttggtttcaagcccgtggcaa

SEQ ID NO: 3920975 - DNA, 25 bp, Homo sapien
gcagcaaaatggtatcttggtttca

SEQ ID NO: 3920976 - DNA, 25 bp, Homo sapien
tcaagcccgtggcaagactggaaac

SEQ ID NO: 3920977 - DNA, 25 bp, Homo sapien
tgcgcccagcctctagtttgttacg

SEQ ID NO: 3920978 - DNA, 25 bp, Homo sapien
tcaaagcgaaaagctaggcttcagg

SEQ ID NO: 3920979 - DNA, 25 bp, Homo sapien
tcacgggtccagacagtcatagtca

SEQ ID NO: 3920980 - DNA, 25 bp, Homo sapien
cagtttgaggaagggcataaccaca

SEQ ID NO: 3920981 - DNA, 25 bp, Homo sapien
tcaaaaaggaagagagcatcctcct

SEQ ID NO: 3920982 - DNA, 25 bp, Homo sapien
tattctacgtaaagagtaatcatgg

SEQ ID NO: 3920983 - DNA, 25 bp, Homo sapien
taatgcctggtatcctgttggcctt

SEQ ID NO: 3920984 - DNA, 25 bp, Homo sapien
gagtaatcatgggtttgtcaaaaag

SEQ ID NO: 3920985 - DNA, 25 bp, Homo sapien
tggcaaggggtggtatacaggctcc

SEQ ID NO: 3920986 - DNA, 25 bp, Homo sapien
aggggtggtatacaggctccacttc

SEQ ID NO: 3920987 - DNA, 25 bp, Homo sapien
gcaaggggtggtatacaggctccac

SEQ ID NO: 3920988 - DNA, 25 bp, Homo sapien
gggtggtatacaggctccacttctg

SEQ ID NO: 3920989 - DNA, 25 bp, Homo sapien
gggatgtgagcaagatatcaacacc

SEQ ID NO: 3920990 - DNA, 25 bp, Homo sapien
gatatcaacacccttaaactgggag

SEQ ID NO: 3920991 - DNA, 25 bp, Homo sapien
ggaggttgtacacagcatcattctc

SEQ ID NO: 3920992 - DNA, 25 bp, Homo sapien
tacacagcatcattctcagagaaga

SEQ ID NO: 3920993 - DNA, 25 bp, Homo sapien
catttaaggattctgtcccactgag

SEQ ID NO: 3920994 - DNA, 25 bp, Homo sapien
tgaggtacacaatctgcagccccga

SEQ ID NO: 3920995 - DNA, 25 bp, Homo sapien
cagccccgagcttccagtgaagata

SEQ ID NO: 3920996 - DNA, 25 bp, Homo sapien
tactggctcatttaaggattctgtc

SEQ ID NO: 3920997 - DNA, 25 bp, Homo sapien
cctggttattagcaccaagcacata

SEQ ID NO: 3920998 - DNA, 25 bp, Homo sapien
tggttattagcaccaagcacatatg

SEQ ID NO: 3920999 - DNA, 25 bp, Homo sapien
tattagcaccaagcacatatgtctg

SEQ ID NO: 3921000 - DNA, 25 bp, Homo sapien
tttcctggttattagcaccaagcac

SEQ ID NO: 3921001 - DNA, 25 bp, Homo sapien
gccactgcgccggatagtcttaata

SEQ ID NO: 3921002 - DNA, 25 bp, Homo sapien
actgcgccggatagtcttaataatg

SEQ ID NO: 3921003 - DNA, 25 bp, Homo sapien
cactgcgccggatagtcttaataat

SEQ ID NO: 3921004 - DNA, 25 bp, Homo sapien
ccactgcgccggatagtcttaataa

SEQ ID NO: 3921005 - DNA, 25 bp, Homo sapien
cagtcttatactcctcccattcagc

SEQ ID NO: 3921006 - DNA, 25 bp, Homo sapien
atcttgggtggagccaaagaaattt

SEQ ID NO: 3921007 - DNA, 25 bp, Homo sapien
tcttatactcctcccattcagcatc

SEQ ID NO: 3921008 - DNA, 25 bp, Homo sapien
agtcttatactcctcccattcagca

SEQ ID NO: 3921009 - DNA, 25 bp, Homo sapien
tacataattgatagtaatattcaac

SEQ ID NO: 3921010 - DNA, 25 bp, Homo sapien
tcaatttgcagatttcaatatacaa

SEQ ID NO: 3921011 - DNA, 25 bp, Homo sapien
acagttactgattctatgaattatt

SEQ ID NO: 3921012 - DNA, 25 bp, Homo sapien
tcaatatacaattctttagcagcaa

SEQ ID NO: 3921013 - DNA, 25 bp, Homo sapien
atatcaaactttccttcaacatctc

SEQ ID NO: 3921014 - DNA, 25 bp, Homo sapien
aatatcaaactttccttcaacatct

SEQ ID NO: 3921015 - DNA, 25 bp, Homo sapien
tatcaaactttccttcaacatctcc

SEQ ID NO: 3921016 - DNA, 25 bp, Homo sapien
cagtttatacatcaccaggtgcctc

SEQ ID NO: 3921017 - DNA, 25 bp, Homo sapien
agtttatacatcaccaggtgcctca

SEQ ID NO: 3921018 - DNA, 25 bp, Homo sapien
ccagtttatacatcaccaggtgcct

SEQ ID NO: 3921019 - DNA, 25 bp, Homo sapien
gtttatacatcaccaggtgcctcat

SEQ ID NO: 3921020 - DNA, 25 bp, Homo sapien
gcgcctggccctatcactatggtaa

SEQ ID NO: 3921021 - DNA, 25 bp, Homo sapien
gaggtgcagtgtcggctcactgtgc

SEQ ID NO: 3921022 - DNA, 25 bp, Homo sapien
ctgcgcctggccctatcactatggt

SEQ ID NO: 3921023 - DNA, 25 bp, Homo sapien
cctggccctatcactatggtaactt

SEQ ID NO: 3921024 - DNA, 25 bp, Homo sapien
tgttcctctagactctacgctccat

SEQ ID NO: 3921025 - DNA, 25 bp, Homo sapien
aggaactccatctgttgcaacacct

SEQ ID NO: 3921026 - DNA, 25 bp, Homo sapien
gactctacgctccattaaagcagga

SEQ ID NO: 3921027 - DNA, 25 bp, Homo sapien
tccatctgttgcaacacctagcaca

SEQ ID NO: 3921028 - DNA, 25 bp, Homo sapien
ggcaaagacatcacctaagctcccc

SEQ ID NO: 3921029 - DNA, 25 bp, Homo sapien
ttctcccttcccgtcatgggaaaga

SEQ ID NO: 3921030 - DNA, 25 bp, Homo sapien
atgggaaagactcccgcccgtgtcg

SEQ ID NO: 3921031 - DNA, 25 bp, Homo sapien
gcagccccgtgtctctccgcctttt

SEQ ID NO: 3921032 - DNA, 25 bp, Homo sapien
gggagagaggcttccattcacggtc

SEQ ID NO: 3921033 - DNA, 25 bp, Homo sapien
gagagaggcttccattcacggtcac

SEQ ID NO: 3921034 - DNA, 25 bp, Homo sapien
agagaggcttccattcacggtcact

SEQ ID NO: 3921035 - DNA, 25 bp, Homo sapien
agaggcttccattcacggtcactca

SEQ ID NO: 3921036 - DNA, 25 bp, Homo sapien
aatagtatgggttgcgactgccacc

SEQ ID NO: 3921037 - DNA, 25 bp, Homo sapien
taaccatatcggtctagtgggcaag

SEQ ID NO: 3921038 - DNA, 25 bp, Homo sapien
cacttacttacggagaccgccgagg

SEQ ID NO: 3921039 - DNA, 25 bp, Homo sapien
taaaattgggaatgcgaatccgcgc

SEQ ID NO: 3921040 - DNA, 25 bp, Homo sapien
actgttttgtagaccgaggtgtgat

SEQ ID NO: 3921041 - DNA, 25 bp, Homo sapien
aggactgttttgtagaccgaggtgt

SEQ ID NO: 3921042 - DNA, 25 bp, Homo sapien
gactgttttgtagaccgaggtgtga

SEQ ID NO: 3921043 - DNA, 25 bp, Homo sapien
cgcccggccacaatagttttatttg

SEQ ID NO: 3921044 - DNA, 25 bp, Homo sapien
tgtgttaactgaactaagccaagca

SEQ ID NO: 3921045 - DNA, 25 bp, Homo sapien
gatcaatacatgcacggaaaaggaa

SEQ ID NO: 3921046 - DNA, 25 bp, Homo sapien
gaaggacatcccaataactcttgat

SEQ ID NO: 3921047 - DNA, 25 bp, Homo sapien
aaaatagatcaacatggctgggtgc

SEQ ID NO: 3921048 - DNA, 25 bp, Homo sapien
tgtgttctgggtaaggctgcctatc

SEQ ID NO: 3921049 - DNA, 25 bp, Homo sapien
tctaagcaggagtaatagggccagt

SEQ ID NO: 3921050 - DNA, 25 bp, Homo sapien
gataagtcactacagggttctaagc

SEQ ID NO: 3921051 - DNA, 25 bp, Homo sapien
tagactggtcagtcagtatgtccca

SEQ ID NO: 3921052 - DNA, 25 bp, Homo sapien
tattttatgagtggcaatcgtcacc

SEQ ID NO: 3921053 - DNA, 25 bp, Homo sapien
cgttgagatgttcctgtgatgacca

SEQ ID NO: 3921054 - DNA, 25 bp, Homo sapien
caaactgatcgcatgtcaatgtgac

SEQ ID NO: 3921055 - DNA, 25 bp, Homo sapien
taagttaccgacattcacaaggtga

SEQ ID NO: 3921056 - DNA, 25 bp, Homo sapien
tcatcgcttctccagcttcttgtac

SEQ ID NO: 3921057 - DNA, 25 bp, Homo sapien
ttctccagcttcttgtacttggctt

SEQ ID NO: 3921058 - DNA, 25 bp, Homo sapien
tcgcttctccagcttcttgtacttg

SEQ ID NO: 3921059 - DNA, 25 bp, Homo sapien
cgcttctccagcttcttgtacttgg

SEQ ID NO: 3921060 - DNA, 25 bp, Homo sapien
taacacaggttcacgaagtcctcac

SEQ ID NO: 3921061 - DNA, 25 bp, Homo sapien
gggactctgtcacaaatggttactg

SEQ ID NO: 3921062 - DNA, 25 bp, Homo sapien
tgtcacttgacctatcgggagcctt

SEQ ID NO: 3921063 - DNA, 25 bp, Homo sapien
tacgcggtaaggttcacggtaatca

SEQ ID NO: 3921064 - DNA, 25 bp, Homo sapien
ggcaagaagcagtctttattacatc

SEQ ID NO: 3921065 - DNA, 25 bp, Homo sapien
ttatgtttactaagaatatgctggc

SEQ ID NO: 3921066 - DNA, 25 bp, Homo sapien
tactaagaatatgctggcaagaagc

SEQ ID NO: 3921067 - DNA, 25 bp, Homo sapien
agaagcagtctttattacatcaaaa

SEQ ID NO: 3921068 - DNA, 25 bp, Homo sapien
ccagtttttttgaatatgcatccaa

SEQ ID NO: 3921069 - DNA, 25 bp, Homo sapien
cagtttttttgaatatgcatccaac

SEQ ID NO: 3921070 - DNA, 25 bp, Homo sapien
atccagataaggctgcagtccagca

SEQ ID NO: 3921071 - DNA, 25 bp, Homo sapien
ttcaatgacattgatctgatccaga

SEQ ID NO: 3921072 - DNA, 25 bp, Homo sapien
tgatctgatccagataaggctgcag

SEQ ID NO: 3921073 - DNA, 25 bp, Homo sapien
tgctcaagagctgctacctgctctt

SEQ ID NO: 3921074 - DNA, 25 bp, Homo sapien
catttcaagatacttcaagctggtg

SEQ ID NO: 3921075 - DNA, 25 bp, Homo sapien
agcgtccaatcacaccactacgaaa

SEQ ID NO: 3921076 - DNA, 25 bp, Homo sapien
aagtgactccgaaatctgtttcttg

SEQ ID NO: 3921077 - DNA, 25 bp, Homo sapien
tgtttcttgtgctctgatcaatctc

SEQ ID NO: 3921078 - DNA, 25 bp, Homo sapien
tcttgtgctctgatcaatctctgag

SEQ ID NO: 3921079 - DNA, 25 bp, Homo sapien
agttccccagtcaggtaagtggcca

SEQ ID NO: 3921080 - DNA, 25 bp, Homo sapien
aggtaagtggccattttggagaaca

SEQ ID NO: 3921081 - DNA, 25 bp, Homo sapien
gtcagttccccagtcaggtaagtgg

SEQ ID NO: 3921082 - DNA, 25 bp, Homo sapien
ccgtcagttccccagtcaggtaagt

SEQ ID NO: 3921083 - DNA, 25 bp, Homo sapien
ggcagagctcagtgatgtcagcttc

SEQ ID NO: 3921084 - DNA, 25 bp, Homo sapien
ccggcagagctcagtgatgtcagct

SEQ ID NO: 3921085 - DNA, 25 bp, Homo sapien
gtcccggcagagctcagtgatgtca

SEQ ID NO: 3921086 - DNA, 25 bp, Homo sapien
tcccggcagagctcagtgatgtcag

SEQ ID NO: 3921087 - DNA, 25 bp, Homo sapien
gaatgactaagtgtcccgcctacac

SEQ ID NO: 3921088 - DNA, 25 bp, Homo sapien
agggagaatgactaagtgtcccgcc

SEQ ID NO: 3921089 - DNA, 25 bp, Homo sapien
gagaatgactaagtgtcccgcctac

SEQ ID NO: 3921090 - DNA, 25 bp, Homo sapien
ggagaatgactaagtgtcccgccta

SEQ ID NO: 3921091 - DNA, 25 bp, Homo sapien
tcaagtcggctccattctccatctg

SEQ ID NO: 3921092 - DNA, 25 bp, Homo sapien
taatccagccaaagcagcctgttcc

SEQ ID NO: 3921093 - DNA, 25 bp, Homo sapien
tctccatctgccataatttcaagtc

SEQ ID NO: 3921094 - DNA, 25 bp, Homo sapien
tttcaagtccttcactgcgtccctg

SEQ ID NO: 3921095 - DNA, 25 bp, Homo sapien
gccagtacgccctcggctgccgccg

SEQ ID NO: 3921096 - DNA, 25 bp, Homo sapien
gggctcatcactccgggtcgccagt

SEQ ID NO: 3921097 - DNA, 25 bp, Homo sapien
cgggctcatcactccgggtcgccag

SEQ ID NO: 3921098 - DNA, 25 bp, Homo sapien
ccgggtcgccagtacgccctcggct

SEQ ID NO: 3921099 - DNA, 25 bp, Homo sapien
ggaagaataatgtcagaacccacca

SEQ ID NO: 3921100 - DNA, 25 bp, Homo sapien
tcatagactttgctccgggagtgcc

SEQ ID NO: 3921101 - DNA, 25 bp, Homo sapien
gagttttattgatagccaccatgga

SEQ ID NO: 3921102 - DNA, 25 bp, Homo sapien
tccaggttcagtggaccaggaggca

SEQ ID NO: 3921103 - DNA, 25 bp, Homo sapien
aactcctctgcaacgttggaatctc

SEQ ID NO: 3921104 - DNA, 25 bp, Homo sapien
actcctctgcaacgttggaatctca

SEQ ID NO: 3921105 - DNA, 25 bp, Homo sapien
ctcctctgcaacgttggaatctcac

SEQ ID NO: 3921106 - DNA, 25 bp, Homo sapien
taactcctctgcaacgttggaatct

SEQ ID NO: 3921107 - DNA, 25 bp, Homo sapien
cacgggagagtctcctctcctctaa

SEQ ID NO: 3921108 - DNA, 25 bp, Homo sapien
tctcctctcctctaaggcttcctct

SEQ ID NO: 3921109 - DNA, 25 bp, Homo sapien
cgggagagtctcctctcctctaagg

SEQ ID NO: 3921110 - DNA, 25 bp, Homo sapien
ggagagtctcctctcctctaaggct

SEQ ID NO: 3921111 - DNA, 25 bp, Homo sapien
ggaagacatctagataccgcctact

SEQ ID NO: 3921112 - DNA, 25 bp, Homo sapien
gattcacaagcctaagcatgatgcc

SEQ ID NO: 3921113 - DNA, 25 bp, Homo sapien
ggtgcttaggaagagccattaccct

SEQ ID NO: 3921114 - DNA, 25 bp, Homo sapien
gcccagtggaagacgttatttcaca

SEQ ID NO: 3921115 - DNA, 25 bp, Homo sapien
agcagccatgatgggacctgttgtc

SEQ ID NO: 3921116 - DNA, 25 bp, Homo sapien
aggccagatgcagggtggggctcag

SEQ ID NO: 3921117 - DNA, 25 bp, Homo sapien
tcagcagcagccatgatgggacctg

SEQ ID NO: 3921118 - DNA, 25 bp, Homo sapien
gcagcagccatgatgggacctgttg

SEQ ID NO: 3921119 - DNA, 25 bp, Homo sapien
ctagaagtgcaggggatgtggcgag

SEQ ID NO: 3921120 - DNA, 25 bp, Homo sapien
agtgcaggggatgtggcgagggggc

SEQ ID NO: 3921121 - DNA, 25 bp, Homo sapien
agaagtgcaggggatgtggcgaggg

SEQ ID NO: 3921122 - DNA, 25 bp, Homo sapien
tagaagtgcaggggatgtggcgagg

SEQ ID NO: 3921123 - DNA, 25 bp, Homo sapien
agcctgctgtctgatgctttaggcc

SEQ ID NO: 3921124 - DNA, 25 bp, Homo sapien
gagggaagcctgctgtctgatgctt

SEQ ID NO: 3921125 - DNA, 25 bp, Homo sapien
cctgctgtctgatgctttaggcccc

SEQ ID NO: 3921126 - DNA, 25 bp, Homo sapien
ggaagcctgctgtctgatgctttag

SEQ ID NO: 3921127 - DNA, 25 bp, Homo sapien
ctggctgcgggtgcttccaaatagc

SEQ ID NO: 3921128 - DNA, 25 bp, Homo sapien
ggctgcgggtgcttccaaatagctt

SEQ ID NO: 3921129 - DNA, 25 bp, Homo sapien
tggctgcgggtgcttccaaatagct

SEQ ID NO: 3921130 - DNA, 25 bp, Homo sapien
tccaccatgaaagggcacagcaaga

SEQ ID NO: 3921131 - DNA, 25 bp, Homo sapien
agacagctctctatgaatcaggaag

SEQ ID NO: 3921132 - DNA, 25 bp, Homo sapien
ttaccccttccaccatgaaagggca

SEQ ID NO: 3921133 - DNA, 25 bp, Homo sapien
cccttccaccatgaaagggcacagc

SEQ ID NO: 3921134 - DNA, 25 bp, Homo sapien
gaggaactaggaggaccaggtgaag

SEQ ID NO: 3921135 - DNA, 25 bp, Homo sapien
aaagatggcagagttcagctgtgag

SEQ ID NO: 3921136 - DNA, 25 bp, Homo sapien
cacccactgagtggaaaagatggca

SEQ ID NO: 3921137 - DNA, 25 bp, Homo sapien
tcaaaaatgttcttgccccacccac

SEQ ID NO: 3921138 - DNA, 25 bp, Homo sapien
gagcctacagcatcaatctgggaca

SEQ ID NO: 3921139 - DNA, 25 bp, Homo sapien
tcagctttgagcctacagcatcaat

SEQ ID NO: 3921140 - DNA, 25 bp, Homo sapien
tctccagctgcagaactctccttgt

SEQ ID NO: 3921141 - DNA, 25 bp, Homo sapien
ccagctgcagaactctccttgtgag

SEQ ID NO: 3921142 - DNA, 25 bp, Homo sapien
gtgggatttgagagagacgaatgga

SEQ ID NO: 3921143 - DNA, 25 bp, Homo sapien
tgagagagacgaatggagcagaaat

SEQ ID NO: 3921144 - DNA, 25 bp, Homo sapien
ggatttgagagagacgaatggagca

SEQ ID NO: 3921145 - DNA, 25 bp, Homo sapien
tttgagagagacgaatggagcagaa

SEQ ID NO: 3921146 - DNA, 25 bp, Homo sapien
tgtgggctgctcacaatagatcggc

SEQ ID NO: 3921147 - DNA, 25 bp, Homo sapien
tagatcggcctagtttctcaatctc

SEQ ID NO: 3921148 - DNA, 25 bp, Homo sapien
tctcaatctcagtgttgagggccac

SEQ ID NO: 3921149 - DNA, 25 bp, Homo sapien
ctctggacccgatttgccttgtggg

SEQ ID NO: 3921150 - DNA, 25 bp, Homo sapien
ccagaatacgattcccatctctgtc

SEQ ID NO: 3921151 - DNA, 25 bp, Homo sapien
tgaaggtggccgtgagctcagtgat

SEQ ID NO: 3921152 - DNA, 25 bp, Homo sapien
gttccttctcatccagaatacgatt

SEQ ID NO: 3921153 - DNA, 25 bp, Homo sapien
acttggtgaaggtggccgtgagctc

SEQ ID NO: 3921154 - DNA, 25 bp, Homo sapien
tgcaggaccttctgcacatccgaaa

SEQ ID NO: 3921155 - DNA, 25 bp, Homo sapien
ccttaaggtgttggtgaaatcctca

SEQ ID NO: 3921156 - DNA, 25 bp, Homo sapien
gtcttagtagggtcttgttgtagcc

SEQ ID NO: 3921157 - DNA, 25 bp, Homo sapien
tctccttcctcagacgcagtcttag

SEQ ID NO: 3921158 - DNA, 25 bp, Homo sapien
gaccaggacacagagccttagactg

SEQ ID NO: 3921159 - DNA, 25 bp, Homo sapien
caatcagtcaggaacagaccaggac

SEQ ID NO: 3921160 - DNA, 25 bp, Homo sapien
gccaggcttccaaggataaatttaa

SEQ ID NO: 3921161 - DNA, 25 bp, Homo sapien
ctgatggaaatgtgtagctcaagga

SEQ ID NO: 3921162 - DNA, 25 bp, Homo sapien
tttcaggaggtcagaaagttgcagc

SEQ ID NO: 3921163 - DNA, 25 bp, Homo sapien
aagttgcagctcatccttctgtcca

SEQ ID NO: 3921164 - DNA, 25 bp, Homo sapien
gacctctgaatatgtgtcattgatg

SEQ ID NO: 3921165 - DNA, 25 bp, Homo sapien
tatgtgtcattgatgatggccagga

SEQ ID NO: 3921166 - DNA, 25 bp, Homo sapien
ccactgaccccattaatgtccaaga

SEQ ID NO: 3921167 - DNA, 25 bp, Homo sapien
tgctctcaaccccagttcggcagcc

SEQ ID NO: 3921168 - DNA, 25 bp, Homo sapien
ttaatgtccaagacacgtgttccaa

SEQ ID NO: 3921169 - DNA, 25 bp, Homo sapien
ccaaaggggtcagtgctctcaaccc

SEQ ID NO: 3921170 - DNA, 25 bp, Homo sapien
tcaaagtccccgaggattatccgga

SEQ ID NO: 3921171 - DNA, 25 bp, Homo sapien
tagtcaaagtccccgaggattatcc

SEQ ID NO: 3921172 - DNA, 25 bp, Homo sapien
cccaggatgcggttggcattgtcga

SEQ ID NO: 3921173 - DNA, 25 bp, Homo sapien
ggcattgtcgatagcattgtagtca

SEQ ID NO: 3921174 - DNA, 25 bp, Homo sapien
acagatgctttgaacacagacatgc

SEQ ID NO: 3921175 - DNA, 25 bp, Homo sapien
ttgaacacagacatgcagacacgca

SEQ ID NO: 3921176 - DNA, 25 bp, Homo sapien
gatgctttgaacacagacatgcaga

SEQ ID NO: 3921177 - DNA, 25 bp, Homo sapien
tgaacacagacatgcagacacgcac

SEQ ID NO: 3921178 - DNA, 25 bp, Homo sapien
tcttccccaaggatacatacacccg

SEQ ID NO: 3921179 - DNA, 25 bp, Homo sapien
ttccccaaggatacatacacccgtg

SEQ ID NO: 3921180 - DNA, 25 bp, Homo sapien
ccccaaggatacatacacccgtgga

SEQ ID NO: 3921181 - DNA, 25 bp, Homo sapien
catcttccccaaggatacatacacc

SEQ ID NO: 3921182 - DNA, 25 bp, Homo sapien
caatgaagaacatgacggcgaagcc

SEQ ID NO: 3921183 - DNA, 25 bp, Homo sapien
cccgaaaagcaggtagccgagttgg

SEQ ID NO: 3921184 - DNA, 25 bp, Homo sapien
ccgagttgggcataggcgaagaaaa

SEQ ID NO: 3921185 - DNA, 25 bp, Homo sapien
cacttgggtcccgaaaagcaggtag

SEQ ID NO: 3921186 - DNA, 25 bp, Homo sapien
ctggaaggaccatgttgaaccaagg

SEQ ID NO: 3921187 - DNA, 25 bp, Homo sapien
gaccatgttgaaccaagggatgaag

SEQ ID NO: 3921188 - DNA, 25 bp, Homo sapien
ccatgttgaaccaagggatgaagaa

SEQ ID NO: 3921189 - DNA, 25 bp, Homo sapien
gaaggaccatgttgaaccaagggat

SEQ ID NO: 3921190 - DNA, 25 bp, Homo sapien
tgagccgattcacctcgagggttcg

SEQ ID NO: 3921191 - DNA, 25 bp, Homo sapien
ggttcggaatatgtggaagcccaca

SEQ ID NO: 3921192 - DNA, 25 bp, Homo sapien
tgtctgccagaaggcgaggaactca

SEQ ID NO: 3921193 - DNA, 25 bp, Homo sapien
tgatccaggcgaagaagaggttgac

SEQ ID NO: 3921194 - DNA, 25 bp, Homo sapien
cagccaacgataaagaagtcccagt

SEQ ID NO: 3921195 - DNA, 25 bp, Homo sapien
gaagacgcagaagatgacctcacag

SEQ ID NO: 3921196 - DNA, 25 bp, Homo sapien
tcagcttgactgtgcggatttgcca

SEQ ID NO: 3921197 - DNA, 25 bp, Homo sapien
cgaagccggtgaatgtggagctcca

SEQ ID NO: 3921198 - DNA, 25 bp, Homo sapien
agtcgatgaacaccactcgagtgcc

SEQ ID NO: 3921199 - DNA, 25 bp, Homo sapien
tccgctgtagcttgtgagcctgccc

SEQ ID NO: 3921200 - DNA, 25 bp, Homo sapien
agcctctgcactaccctgtcgggat

SEQ ID NO: 3921201 - DNA, 25 bp, Homo sapien
ctggaaggtccaggtagtagccacc

SEQ ID NO: 3921202 - DNA, 25 bp, Homo sapien
gctcagaatgtcctcccggaagtct

SEQ ID NO: 3921203 - DNA, 25 bp, Homo sapien
gtagacatcatagcagctcagaatg

SEQ ID NO: 3921204 - DNA, 25 bp, Homo sapien
ccacacaggagtcattgcggacctt

SEQ ID NO: 3921205 - DNA, 25 bp, Homo sapien
ggaagtcttcatgcaccacacagga

SEQ ID NO: 3921206 - DNA, 25 bp, Homo sapien
aataagcactggagcttgtcattcc

SEQ ID NO: 3921207 - DNA, 25 bp, Homo sapien
gagctcagacatcactttggtgtag

SEQ ID NO: 3921208 - DNA, 25 bp, Homo sapien
cactttggtgtagtaataagcactg

SEQ ID NO: 3921209 - DNA, 25 bp, Homo sapien
tctgatggagtatgtaagaagagct

SEQ ID NO: 3921210 - DNA, 25 bp, Homo sapien
ctgtaattgtgcagtataagctacc

SEQ ID NO: 3921211 - DNA, 25 bp, Homo sapien
tgcagtataagctacctggatcaat

SEQ ID NO: 3921212 - DNA, 25 bp, Homo sapien
tataagctacctggatcaataagat

SEQ ID NO: 3921213 - DNA, 25 bp, Homo sapien
taattgtgcagtataagctacctgg

SEQ ID NO: 3921214 - DNA, 25 bp, Homo sapien
agtggccctcctgaggccattccaa

SEQ ID NO: 3921215 - DNA, 25 bp, Homo sapien
ccaggaccttggagagcaccgaagt

SEQ ID NO: 3921216 - DNA, 25 bp, Homo sapien
cattccaaggctccatgtcgcctga

SEQ ID NO: 3921217 - DNA, 25 bp, Homo sapien
caaggctccatgtcgcctgaaaata

SEQ ID NO: 3921218 - DNA, 25 bp, Homo sapien
aaggttgtcacttcagagagtaaca

SEQ ID NO: 3921219 - DNA, 25 bp, Homo sapien
ggaacacctcagtagttggcttaat

SEQ ID NO: 3921220 - DNA, 25 bp, Homo sapien
taacaggaacacctcagtagttggc

SEQ ID NO: 3921221 - DNA, 25 bp, Homo sapien
agagtaacaggaacacctcagtagt

SEQ ID NO: 3921222 - DNA, 25 bp, Homo sapien
tgatataaagttcccggttctcagc

SEQ ID NO: 3921223 - DNA, 25 bp, Homo sapien
ctgtgttctcagtcagggttgttcc

SEQ ID NO: 3921224 - DNA, 25 bp, Homo sapien
tgtgttctcagtcagggttgttccc

SEQ ID NO: 3921225 - DNA, 25 bp, Homo sapien
tcttgatataaagttcccggttctc

SEQ ID NO: 3921226 - DNA, 25 bp, Homo sapien
gacacctgggtcctgtatgccgtct

SEQ ID NO: 3921227 - DNA, 25 bp, Homo sapien
ccttgacagatatggaggcagcagc

SEQ ID NO: 3921228 - DNA, 25 bp, Homo sapien
tgggtcctgtatgccgtctcctggg

SEQ ID NO: 3921229 - DNA, 25 bp, Homo sapien
cttgacagatatggaggcagcagct

SEQ ID NO: 3921230 - DNA, 25 bp, Homo sapien
gactctcagcgtcccgtgtggggaa

SEQ ID NO: 3921231 - DNA, 25 bp, Homo sapien
gtgctggagatggtgcagactctca

SEQ ID NO: 3921232 - DNA, 25 bp, Homo sapien
ccccgtgctggagatggtgcagact

SEQ ID NO: 3921233 - DNA, 25 bp, Homo sapien
ggagatggtgcagactctcagcgtc

SEQ ID NO: 3921234 - DNA, 25 bp, Homo sapien
ctgcccctcaggacttcccacagca

SEQ ID NO: 3921235 - DNA, 25 bp, Homo sapien
cctcaggacttcccacagcattcat

SEQ ID NO: 3921236 - DNA, 25 bp, Homo sapien
gcccctcaggacttcccacagcatt

SEQ ID NO: 3921237 - DNA, 25 bp, Homo sapien
ccctcaggacttcccacagcattca

SEQ ID NO: 3921238 - DNA, 25 bp, Homo sapien
cagcctagccagcagagagcaaatg

SEQ ID NO: 3921239 - DNA, 25 bp, Homo sapien
ccaggtgcccactctcagctagagg

SEQ ID NO: 3921240 - DNA, 25 bp, Homo sapien
aaatggaaaggcgtctgagagcagc

SEQ ID NO: 3921241 - DNA, 25 bp, Homo sapien
gaaggaccatcaatcctgtcaggag

SEQ ID NO: 3921242 - DNA, 25 bp, Homo sapien
ctgaagcccaccttcacattcagca

SEQ ID NO: 3921243 - DNA, 25 bp, Homo sapien
tgaagcccaccttcacattcagcaa

SEQ ID NO: 3921244 - DNA, 25 bp, Homo sapien
gctattggcatacacaaacctggca

SEQ ID NO: 3921245 - DNA, 25 bp, Homo sapien
tgcagctgacgtgagaaaatcttga

SEQ ID NO: 3921246 - DNA, 25 bp, Homo sapien
ctcatttccattggtgaatggctat

SEQ ID NO: 3921247 - DNA, 25 bp, Homo sapien
taactatagaacacagcattccaga

SEQ ID NO: 3921248 - DNA, 25 bp, Homo sapien
cactcatatacagcaattcgtgggt

SEQ ID NO: 3921249 - DNA, 25 bp, Homo sapien
cattgtttctgagcgacacgggtcc

SEQ ID NO: 3921250 - DNA, 25 bp, Homo sapien
gtaatgtagataccttcagccagga

SEQ ID NO: 3921251 - DNA, 25 bp, Homo sapien
caccagtagaatggagtgataccat

SEQ ID NO: 3921252 - DNA, 25 bp, Homo sapien
gagaccttaagcttcatcaatatcc

SEQ ID NO: 3921253 - DNA, 25 bp, Homo sapien
ctgggcatgagaccttaagcttcat

SEQ ID NO: 3921254 - DNA, 25 bp, Homo sapien
aagcatcctgggcatgagaccttaa

SEQ ID NO: 3921255 - DNA, 25 bp, Homo sapien
taagcttcatcaatatcccgctagt

SEQ ID NO: 3921256 - DNA, 25 bp, Homo sapien
cctctggagcctatagctcaatcat

SEQ ID NO: 3921257 - DNA, 25 bp, Homo sapien
ttcctctggagcctatagctcaatc

SEQ ID NO: 3921258 - DNA, 25 bp, Homo sapien
cttaatggtcccttcggatttagca

SEQ ID NO: 3921259 - DNA, 25 bp, Homo sapien
ttagcaccgtctcctccgggaagtc

SEQ ID NO: 3921260 - DNA, 25 bp, Homo sapien
atgtcagtgtttcctgacggtttcc

SEQ ID NO: 3921261 - DNA, 25 bp, Homo sapien
cacatgtcagtgtttcctgacggtt

SEQ ID NO: 3921262 - DNA, 25 bp, Homo sapien
gggtgaaaacacatgtcagtgtttc

SEQ ID NO: 3921263 - DNA, 25 bp, Homo sapien
tgggtgaaaacacatgtcagtgttt

SEQ ID NO: 3921264 - DNA, 25 bp, Homo sapien
tccagataaccatggcataaggcag

SEQ ID NO: 3921265 - DNA, 25 bp, Homo sapien
tgagctaaaacacgaagcatgttcc

SEQ ID NO: 3921266 - DNA, 25 bp, Homo sapien
gcccaggccggtagcttagttctta

SEQ ID NO: 3921267 - DNA, 25 bp, Homo sapien
gcatgttccagcaatagagtccttt

SEQ ID NO: 3921268 - DNA, 25 bp, Homo sapien
tgctggaattataatagccgtgagc

SEQ ID NO: 3921269 - DNA, 25 bp, Homo sapien
attgctatcgccctcctttccctta

SEQ ID NO: 3921270 - DNA, 25 bp, Homo sapien
caactctgcctttatgatgctaagc

SEQ ID NO: 3921271 - DNA, 25 bp, Homo sapien
tctctctcttctaggcccattgtcc

SEQ ID NO: 3921272 - DNA, 25 bp, Homo sapien
agcagctggtcagtctttgctcagt

SEQ ID NO: 3921273 - DNA, 25 bp, Homo sapien
ggcttgagctagagataaaacagaa

SEQ ID NO: 3921274 - DNA, 25 bp, Homo sapien
tctgtagcctaaaacgaatggtctt

SEQ ID NO: 3921275 - DNA, 25 bp, Homo sapien
aaagcaacttcatttgacacaaagc

SEQ ID NO: 3921276 - DNA, 25 bp, Homo sapien
ggtagtcccctgttgattatcttca

SEQ ID NO: 3921277 - DNA, 25 bp, Homo sapien
cacactgatggctcaagacaaggct

SEQ ID NO: 3921278 - DNA, 25 bp, Homo sapien
tgagggacaggatctataggcagct

SEQ ID NO: 3921279 - DNA, 25 bp, Homo sapien
tttgaaagtagagctagctgccact

SEQ ID NO: 3921280 - DNA, 25 bp, Homo sapien
gaggcagtgatgacttgctgtccag

SEQ ID NO: 3921281 - DNA, 25 bp, Homo sapien
tcatgttgagccagtgggccagcca

SEQ ID NO: 3921282 - DNA, 25 bp, Homo sapien
ggaaacagttctcactgggaagaag

SEQ ID NO: 3921283 - DNA, 25 bp, Homo sapien
cagccaagccaagcgctcatgttga

SEQ ID NO: 3921284 - DNA, 25 bp, Homo sapien
ctgcttacttggtgagggtgccccg

SEQ ID NO: 3921285 - DNA, 25 bp, Homo sapien
ttgagaaccttggaccactcctgtc

SEQ ID NO: 3921286 - DNA, 25 bp, Homo sapien
tttgagataccacaaaccctgctga

SEQ ID NO: 3921287 - DNA, 25 bp, Homo sapien
cagcctagggcagacaatagtatag

SEQ ID NO: 3921288 - DNA, 25 bp, Homo sapien
gctcagtcatcaaagcagaagtctg

SEQ ID NO: 3921289 - DNA, 25 bp, Homo sapien
cctgtgcacctaccccttggaaatg

SEQ ID NO: 3921290 - DNA, 25 bp, Homo sapien
ttagcctggactaaaggcatccttg

SEQ ID NO: 3921291 - DNA, 25 bp, Homo sapien
tagtttagttctgttgacctgtgca

SEQ ID NO: 3921292 - DNA, 25 bp, Homo sapien
tctgtgttaattgcgtagaggctac

SEQ ID NO: 3921293 - DNA, 25 bp, Homo sapien
ttggagaagcggtggataactagcc

SEQ ID NO: 3921294 - DNA, 25 bp, Homo sapien
gatacgtccgtgtgtcccagatgct

SEQ ID NO: 3921295 - DNA, 25 bp, Homo sapien
tgccacggaaacatacagaggatgc

SEQ ID NO: 3921296 - DNA, 25 bp, Homo sapien
taatactgacctacctcaaagggca

SEQ ID NO: 3921297 - DNA, 25 bp, Homo sapien
tattgttaaggaggtcatactcccc

SEQ ID NO: 3921298 - DNA, 25 bp, Homo sapien
gaagaggcatctagattggaaagga

SEQ ID NO: 3921299 - DNA, 25 bp, Homo sapien
gatagttcctaaagatgtctgccag

SEQ ID NO: 3921300 - DNA, 25 bp, Homo sapien
tacttcaaagggtcagtaacgcaga

SEQ ID NO: 3921301 - DNA, 25 bp, Homo sapien
tccagacgggtggagatcgcgttcc

SEQ ID NO: 3921302 - DNA, 25 bp, Homo sapien
tcttatggaaaagccagagcgccag

SEQ ID NO: 3921303 - DNA, 25 bp, Homo sapien
tgtagaccttgctaaccaggacggc

SEQ ID NO: 3921304 - DNA, 25 bp, Homo sapien
ggaaaatgcggacatgccactcagt

SEQ ID NO: 3921305 - DNA, 25 bp, Homo sapien
gataacctactacaatggaaccagc

SEQ ID NO: 3921306 - DNA, 25 bp, Homo sapien
gagggtttgtataccactttaatga

SEQ ID NO: 3921307 - DNA, 25 bp, Homo sapien
ctgataacctactacaatggaacca

SEQ ID NO: 3921308 - DNA, 25 bp, Homo sapien
caaatttagcggtgagggtttgtat

SEQ ID NO: 3921309 - DNA, 25 bp, Homo sapien
aagaggacaatctggagacttcgga

SEQ ID NO: 3921310 - DNA, 25 bp, Homo sapien
gaagtgtagactttatcccaagggc

SEQ ID NO: 3921311 - DNA, 25 bp, Homo sapien
gagggcctctcaagccatggtaaga

SEQ ID NO: 3921312 - DNA, 25 bp, Homo sapien
gaaggtgacacgcagaattgcattt

SEQ ID NO: 3921313 - DNA, 25 bp, Homo sapien
gaacattggccagtactgcagtcat

SEQ ID NO: 3921314 - DNA, 25 bp, Homo sapien
tatatgggtgagaaattcgggcagc

SEQ ID NO: 3921315 - DNA, 25 bp, Homo sapien
cattgaagcataacaaatgaccccg

SEQ ID NO: 3921316 - DNA, 25 bp, Homo sapien
tgaccccgaaatttgatagcttaac

SEQ ID NO: 3921317 - DNA, 25 bp, Homo sapien
ccctccctgttccacatactgcagc

SEQ ID NO: 3921318 - DNA, 25 bp, Homo sapien
gaagacatctttgaggtcagccagt

SEQ ID NO: 3921319 - DNA, 25 bp, Homo sapien
gaacaaccaccattgctgcatcacg

SEQ ID NO: 3921320 - DNA, 25 bp, Homo sapien
ttctcatcttacactcaattgccag

SEQ ID NO: 3921321 - DNA, 25 bp, Homo sapien
tgtgtgctcttcaggagcccatctg

SEQ ID NO: 3921322 - DNA, 25 bp, Homo sapien
gaatcattccttaatatggctccaa

SEQ ID NO: 3921323 - DNA, 25 bp, Homo sapien
tagccctgagacatgtggtggctgc

SEQ ID NO: 3921324 - DNA, 25 bp, Homo sapien
tccaatcggagaaggtagccctgag

SEQ ID NO: 3921325 - DNA, 25 bp, Homo sapien
aattccagaactgggctttatcatc

SEQ ID NO: 3921326 - DNA, 25 bp, Homo sapien
gggcagttccccataggctgtggtt

SEQ ID NO: 3921327 - DNA, 25 bp, Homo sapien
acataggtggagtcaagggcagttc

SEQ ID NO: 3921328 - DNA, 25 bp, Homo sapien
ctccaacataggtggagtcaagggc

SEQ ID NO: 3921329 - DNA, 25 bp, Homo sapien
gtcaagggcagttccccataggctg

SEQ ID NO: 3921330 - DNA, 25 bp, Homo sapien
caggcactcagctggtttggagcca

SEQ ID NO: 3921331 - DNA, 25 bp, Homo sapien
ttatgtaacagcagaagtggcctcc

SEQ ID NO: 3921332 - DNA, 25 bp, Homo sapien
aaagggtgaacagcagtcagctcta

SEQ ID NO: 3921333 - DNA, 25 bp, Homo sapien
tggaaataccaagtcagaggcaggg

SEQ ID NO: 3921334 - DNA, 25 bp, Homo sapien
acacatcgggcaacctcatggagcc

SEQ ID NO: 3921335 - DNA, 25 bp, Homo sapien
gaagctggacacctcgctgaagctg

SEQ ID NO: 3921336 - DNA, 25 bp, Homo sapien
agcccagccacgacatgaggtgaga

SEQ ID NO: 3921337 - DNA, 25 bp, Homo sapien
tagaccagcagcttatgagcgatga

SEQ ID NO: 3921338 - DNA, 25 bp, Homo sapien
cagtgacacctatgggaagaaaaga

SEQ ID NO: 3921339 - DNA, 25 bp, Homo sapien
agctcctaccctggcagcatggaag

SEQ ID NO: 3921340 - DNA, 25 bp, Homo sapien
ttaggttagtgagcccaacccagct

SEQ ID NO: 3921341 - DNA, 25 bp, Homo sapien
ccagtccaggcaagatgcacgtatt

SEQ ID NO: 3921342 - DNA, 25 bp, Homo sapien
tactccagacgctgggctgcctctt

SEQ ID NO: 3921343 - DNA, 25 bp, Homo sapien
tcatatagatactccagacgctggg

SEQ ID NO: 3921344 - DNA, 25 bp, Homo sapien
cttctcatatagatactccagacgc

SEQ ID NO: 3921345 - DNA, 25 bp, Homo sapien
tagatactccagacgctgggctgcc

SEQ ID NO: 3921346 - DNA, 25 bp, Homo sapien
cagcccctaagtctaacaccacaca

SEQ ID NO: 3921347 - DNA, 25 bp, Homo sapien
aagaatcacagcatattaggccggg

SEQ ID NO: 3921348 - DNA, 25 bp, Homo sapien
gaatcacagcatattaggccgggca

SEQ ID NO: 3921349 - DNA, 25 bp, Homo sapien
accacacagggccataaagaatcac

SEQ ID NO: 3921350 - DNA, 25 bp, Homo sapien
gggcactgtgaagaaggttcagact

SEQ ID NO: 3921351 - DNA, 25 bp, Homo sapien
ctgggtcctaccaccaaggagctgg

SEQ ID NO: 3921352 - DNA, 25 bp, Homo sapien
catggacgtcaattaagtacaagat

SEQ ID NO: 3921353 - DNA, 25 bp, Homo sapien
caagatagagacagcatgtccaggg

SEQ ID NO: 3921354 - DNA, 25 bp, Homo sapien
gagcagcgttggagaagcgcctcaa

SEQ ID NO: 3921355 - DNA, 25 bp, Homo sapien
agcgttggagaagcgcctcaaagct

SEQ ID NO: 3921356 - DNA, 25 bp, Homo sapien
cagggagcagcgttggagaagcgcc

SEQ ID NO: 3921357 - DNA, 25 bp, Homo sapien
gcagacagggagcagcgttggagaa

SEQ ID NO: 3921358 - DNA, 25 bp, Homo sapien
aatgaggcccatctaccatgacctg

SEQ ID NO: 3921359 - DNA, 25 bp, Homo sapien
cagtcacactgttcccattacagca

SEQ ID NO: 3921360 - DNA, 25 bp, Homo sapien
tcatggcttccctaaggactagtcc

SEQ ID NO: 3921361 - DNA, 25 bp, Homo sapien
tctctgcagtaaggacacctggtac

SEQ ID NO: 3921362 - DNA, 25 bp, Homo sapien
ggaactcctgggggagcatgactca

SEQ ID NO: 3921363 - DNA, 25 bp, Homo sapien
gaactcctgggggagcatgactcac

SEQ ID NO: 3921364 - DNA, 25 bp, Homo sapien
tggaactcctgggggagcatgactc

SEQ ID NO: 3921365 - DNA, 25 bp, Homo sapien
ggtgaggctcataactggagcagta

SEQ ID NO: 3921366 - DNA, 25 bp, Homo sapien
taactggagcagtaattggtgctgg

SEQ ID NO: 3921367 - DNA, 25 bp, Homo sapien
tgtgagggaagaatcccttgtagct

SEQ ID NO: 3921368 - DNA, 25 bp, Homo sapien
gggaagaatcccttgtagctcaggg

SEQ ID NO: 3921369 - DNA, 25 bp, Homo sapien
gcaggaatgacagtgaacaaggaga

SEQ ID NO: 3921370 - DNA, 25 bp, Homo sapien
gggaaggactgactgaatcctccaa

SEQ ID NO: 3921371 - DNA, 25 bp, Homo sapien
ggaaagacatgagtctaacctgaga

SEQ ID NO: 3921372 - DNA, 25 bp, Homo sapien
tcctccaaggaattagaacgtggtc

SEQ ID NO: 3921373 - DNA, 25 bp, Homo sapien
ctctggaggtttcccctgggggctg

SEQ ID NO: 3921374 - DNA, 25 bp, Homo sapien
ggcttctttccaggaatcttgaggt

SEQ ID NO: 3921375 - DNA, 25 bp, Homo sapien
cttgttcctctggaggtttcccctg

SEQ ID NO: 3921376 - DNA, 25 bp, Homo sapien
ggctggggcttctttccaggaatct

SEQ ID NO: 3921377 - DNA, 25 bp, Homo sapien
ttcggcgcatagtgaaaaacactgg

SEQ ID NO: 3921378 - DNA, 25 bp, Homo sapien
tttgagttggagttcaccatacctc

SEQ ID NO: 3921379 - DNA, 25 bp, Homo sapien
taacccagaagagggatccatggaa

SEQ ID NO: 3921380 - DNA, 25 bp, Homo sapien
tgaggaaagactcccaaagtagtga

SEQ ID NO: 3921381 - DNA, 25 bp, Homo sapien
ggtagagccaggtcgcatgatgcct

SEQ ID NO: 3921382 - DNA, 25 bp, Homo sapien
ccatgcggccgggacctagtggtct

SEQ ID NO: 3921383 - DNA, 25 bp, Homo sapien
gggaacagtctaggagtctcaggca

SEQ ID NO: 3921384 - DNA, 25 bp, Homo sapien
ccctttgccctcctaatagctgtgg

SEQ ID NO: 3921385 - DNA, 25 bp, Homo sapien
gaccttcaaaacaatcccatagcat

SEQ ID NO: 3921386 - DNA, 25 bp, Homo sapien
cagagcatatcagggagaaacagga

SEQ ID NO: 3921387 - DNA, 25 bp, Homo sapien
taggtcatttgtcactaaacttcat

SEQ ID NO: 3921388 - DNA, 25 bp, Homo sapien
acttcatttcaggagcaactcagag

SEQ ID NO: 3921389 - DNA, 25 bp, Homo sapien
gggcatcgctggtgatgactgaggg

SEQ ID NO: 3921390 - DNA, 25 bp, Homo sapien
tgccctgtagtcacttatattctgt

SEQ ID NO: 3921391 - DNA, 25 bp, Homo sapien
ccaggtgccctgtagtcacttatat

SEQ ID NO: 3921392 - DNA, 25 bp, Homo sapien
taagggctaggatgggaaggtgcca

SEQ ID NO: 3921393 - DNA, 25 bp, Homo sapien
gaaactatccgaatgtccttcaaag

SEQ ID NO: 3921394 - DNA, 25 bp, Homo sapien
gaaacatgccacattcatggactga

SEQ ID NO: 3921395 - DNA, 25 bp, Homo sapien
catggactgaaagactgaacctagt

SEQ ID NO: 3921396 - DNA, 25 bp, Homo sapien
tacttagtaggcatgagctgacagg

SEQ ID NO: 3921397 - DNA, 25 bp, Homo sapien
ccatgcttggcacgtattattgaat

SEQ ID NO: 3921398 - DNA, 25 bp, Homo sapien
tgcacctttatgtcctaagagccta

SEQ ID NO: 3921399 - DNA, 25 bp, Homo sapien
cacgccaggcctactgtagctattt

SEQ ID NO: 3921400 - DNA, 25 bp, Homo sapien
tcgactacactatgagctacttgag

SEQ ID NO: 3921401 - DNA, 25 bp, Homo sapien
gaaaaagccgatctcttagctgctg

SEQ ID NO: 3921402 - DNA, 25 bp, Homo sapien
gctgggatcccaatctgtaagatga

SEQ ID NO: 3921403 - DNA, 25 bp, Homo sapien
cagaaccttgagcatgaaaaagccg

SEQ ID NO: 3921404 - DNA, 25 bp, Homo sapien
ctttagagtggagggtagctcccac

SEQ ID NO: 3921405 - DNA, 25 bp, Homo sapien
tgaccctgtaggttgtggcagggcc

SEQ ID NO: 3921406 - DNA, 25 bp, Homo sapien
atgaggaccccgcagttgctccaag

SEQ ID NO: 3921407 - DNA, 25 bp, Homo sapien
ccaggaggttggcatactgagtgac

SEQ ID NO: 3921408 - DNA, 25 bp, Homo sapien
agcacagtccctgggtagaaagctc

SEQ ID NO: 3921409 - DNA, 25 bp, Homo sapien
cttcggaggttagtgccctgctgcc

SEQ ID NO: 3921410 - DNA, 25 bp, Homo sapien
ggcattttgcccagcactccaccag

SEQ ID NO: 3921411 - DNA, 25 bp, Homo sapien
tgttccatgcgagttcccagcatgt

SEQ ID NO: 3921412 - DNA, 25 bp, Homo sapien
agtctggcttcggaggttagtgccc

SEQ ID NO: 3921413 - DNA, 25 bp, Homo sapien
aattcttttgcacaacacaggctag

SEQ ID NO: 3921414 - DNA, 25 bp, Homo sapien
tctgtgcctgagtatgtcagtagca

SEQ ID NO: 3921415 - DNA, 25 bp, Homo sapien
cagagctcgggaaatttctctgtgc

SEQ ID NO: 3921416 - DNA, 25 bp, Homo sapien
cagttcttcaggctacaggtacaca

SEQ ID NO: 3921417 - DNA, 25 bp, Homo sapien
caggataatggcatcagcaaagcgc

SEQ ID NO: 3921418 - DNA, 25 bp, Homo sapien
ttcagacacagctccacggccggac

SEQ ID NO: 3921419 - DNA, 25 bp, Homo sapien
tcttggccaagtagcgctcctgtgt

SEQ ID NO: 3921420 - DNA, 25 bp, Homo sapien
gagcctggcttaggagtccatcaat

SEQ ID NO: 3921421 - DNA, 25 bp, Homo sapien
gttctgagggaccagctcatcaaag

SEQ ID NO: 3921422 - DNA, 25 bp, Homo sapien
aggcttcctttgtggtgtgtttgga

SEQ ID NO: 3921423 - DNA, 25 bp, Homo sapien
gggatctcccaaggagtcatgttct

SEQ ID NO: 3921424 - DNA, 25 bp, Homo sapien
aagcagaggcttcctttgtggtgtg

SEQ ID NO: 3921425 - DNA, 25 bp, Homo sapien
gccccacgtcactcttcaaccatgt

SEQ ID NO: 3921426 - DNA, 25 bp, Homo sapien
atttcccttgggctgaggactctca

SEQ ID NO: 3921427 - DNA, 25 bp, Homo sapien
tctgtcactgttgaggtcatttccc

SEQ ID NO: 3921428 - DNA, 25 bp, Homo sapien
ttgggctgaggactctcacctagcc

SEQ ID NO: 3921429 - DNA, 25 bp, Homo sapien
tctcttcaacaagtacatgtttctg

SEQ ID NO: 3921430 - DNA, 25 bp, Homo sapien
tctgaggtggtttactctggcaaca

SEQ ID NO: 3921431 - DNA, 25 bp, Homo sapien
tatgcaataataaggccaggaagag

SEQ ID NO: 3921432 - DNA, 25 bp, Homo sapien
ggccaggaagaggtattctgaggtg

SEQ ID NO: 3921433 - DNA, 25 bp, Homo sapien
gctcatctttactgtatcctaaaag

SEQ ID NO: 3921434 - DNA, 25 bp, Homo sapien
tcatctttactgtatcctaaaagct

SEQ ID NO: 3921435 - DNA, 25 bp, Homo sapien
ttctgaagctcatctttactgtatc

SEQ ID NO: 3921436 - DNA, 25 bp, Homo sapien
gaagctcatctttactgtatcctaa

SEQ ID NO: 3921437 - DNA, 25 bp, Homo sapien
ttgcacctgagctgtctctggcggg

SEQ ID NO: 3921438 - DNA, 25 bp, Homo sapien
ctggctcttgttctgacagtaattc

SEQ ID NO: 3921439 - DNA, 25 bp, Homo sapien
agctcagctgatcgcatcaggaatt

SEQ ID NO: 3921440 - DNA, 25 bp, Homo sapien
aattcagattctgtggtgacttgac

SEQ ID NO: 3921441 - DNA, 25 bp, Homo sapien
tagatttcctgatcccaaggcctcc

SEQ ID NO: 3921442 - DNA, 25 bp, Homo sapien
gtgctggggaggccaaaagtaacca

SEQ ID NO: 3921443 - DNA, 25 bp, Homo sapien
ctggtgaggaaaagcaagaagggta

SEQ ID NO: 3921444 - DNA, 25 bp, Homo sapien
tggtgaggaaaagcaagaagggtaa

SEQ ID NO: 3921445 - DNA, 25 bp, Homo sapien
tatttaccgtgacttctgcagcaca

SEQ ID NO: 3921446 - DNA, 25 bp, Homo sapien
tttctgggcaggcatcactatccct

SEQ ID NO: 3921447 - DNA, 25 bp, Homo sapien
gcagcacaaaatctacaccacagat

SEQ ID NO: 3921448 - DNA, 25 bp, Homo sapien
tcctaatgaactctcccagtcagaa

SEQ ID NO: 3921449 - DNA, 25 bp, Homo sapien
acctgttggtcttctaatccatttg

SEQ ID NO: 3921450 - DNA, 25 bp, Homo sapien
cctgttggtcttctaatccatttgg

SEQ ID NO: 3921451 - DNA, 25 bp, Homo sapien
ctgttggtcttctaatccatttggg

SEQ ID NO: 3921452 - DNA, 25 bp, Homo sapien
tgttggtcttctaatccatttgggg

SEQ ID NO: 3921453 - DNA, 25 bp, Homo sapien
gaggctggcctttgctgaaggaaga

SEQ ID NO: 3921454 - DNA, 25 bp, Homo sapien
tgcagtggtgggagaggctggcctt

SEQ ID NO: 3921455 - DNA, 25 bp, Homo sapien
ggctggcctttgctgaaggaagagg

SEQ ID NO: 3921456 - DNA, 25 bp, Homo sapien
gtgggagaggctggcctttgctgaa

SEQ ID NO: 3921457 - DNA, 25 bp, Homo sapien
tgggactcccatgcaagtaggctct

SEQ ID NO: 3921458 - DNA, 25 bp, Homo sapien
tgaaatactacagggcccatccaat

SEQ ID NO: 3921459 - DNA, 25 bp, Homo sapien
tttgggaggaatccttgagacaccc

SEQ ID NO: 3921460 - DNA, 25 bp, Homo sapien
gagacacccaatttgacctagaaag

SEQ ID NO: 3921461 - DNA, 25 bp, Homo sapien
tgtcagcctgtctcatatgctggac

SEQ ID NO: 3921462 - DNA, 25 bp, Homo sapien
cttgtcagcctgtctcatatgctgg

SEQ ID NO: 3921463 - DNA, 25 bp, Homo sapien
tcagcctgtctcatatgctggactt

SEQ ID NO: 3921464 - DNA, 25 bp, Homo sapien
agcctgtctcatatgctggacttcc

SEQ ID NO: 3921465 - DNA, 25 bp, Homo sapien
tgctctgtgttggtagcttatatac

SEQ ID NO: 3921466 - DNA, 25 bp, Homo sapien
ctgctctgtgttggtagcttatata

SEQ ID NO: 3921467 - DNA, 25 bp, Homo sapien
tcacagagtacaaactgatccagcc

SEQ ID NO: 3921468 - DNA, 25 bp, Homo sapien
ccatcacagagtacaaactgatcca

SEQ ID NO: 3921469 - DNA, 25 bp, Homo sapien
tgctccccaggttccggcacaagat

SEQ ID NO: 3921470 - DNA, 25 bp, Homo sapien
ccttagcactagtgagcagcagctc

SEQ ID NO: 3921471 - DNA, 25 bp, Homo sapien
caggttccggcacaagatctggctg

SEQ ID NO: 3921472 - DNA, 25 bp, Homo sapien
tggctgtccttagcactagtgagca

SEQ ID NO: 3921473 - DNA, 25 bp, Homo sapien
gcaagtcccacagctgaatcacggg

SEQ ID NO: 3921474 - DNA, 25 bp, Homo sapien
ggaagtcgatcatcctctgagcaca

SEQ ID NO: 3921475 - DNA, 25 bp, Homo sapien
cagcaccttcaagggcgaggaggca

SEQ ID NO: 3921476 - DNA, 25 bp, Homo sapien
aactgggtggctatgtcaggatgcc

SEQ ID NO: 3921477 - DNA, 25 bp, Homo sapien
tgagatcccacacaactgccttgcc

SEQ ID NO: 3921478 - DNA, 25 bp, Homo sapien
gcttgccggttccaagacagtgcct

SEQ ID NO: 3921479 - DNA, 25 bp, Homo sapien
gcagaagacagaatgtgttgggctt

SEQ ID NO: 3921480 - DNA, 25 bp, Homo sapien
tgataggttcattcttcctgagatc

SEQ ID NO: 3921481 - DNA, 25 bp, Homo sapien
aagatgggcccagttacagattgac

SEQ ID NO: 3921482 - DNA, 25 bp, Homo sapien
ccaaccctgcgaaagctctactgtg

SEQ ID NO: 3921483 - DNA, 25 bp, Homo sapien
taaaaaggacaatggtatgtctggg

SEQ ID NO: 3921484 - DNA, 25 bp, Homo sapien
ctccctctttgctgggcccaatgcc

SEQ ID NO: 3921485 - DNA, 25 bp, Homo sapien
aagatttcagaatcgctggcccctg

SEQ ID NO: 3921486 - DNA, 25 bp, Homo sapien
tgaagatttcagaatcgctggcccc

SEQ ID NO: 3921487 - DNA, 25 bp, Homo sapien
agatttcagaatcgctggcccctga

SEQ ID NO: 3921488 - DNA, 25 bp, Homo sapien
gaagatttcagaatcgctggcccct

SEQ ID NO: 3921489 - DNA, 25 bp, Homo sapien
gaataaaaagtgtttggagacatac

SEQ ID NO: 3921490 - DNA, 25 bp, Homo sapien
tatgaataaaaagtgtttggagaca

SEQ ID NO: 3921491 - DNA, 25 bp, Homo sapien
ataaaaagtgtttggagacatacca

SEQ ID NO: 3921492 - DNA, 25 bp, Homo sapien
ctgtatgaataaaaagtgtttggag

SEQ ID NO: 3921493 - DNA, 25 bp, Homo sapien
caataaccccggagctttccagaag

SEQ ID NO: 3921494 - DNA, 25 bp, Homo sapien
cccgaagacaggatgtgggtcacat

SEQ ID NO: 3921495 - DNA, 25 bp, Homo sapien
tagaataagcatgccattgtccccg

SEQ ID NO: 3921496 - DNA, 25 bp, Homo sapien
gattcaagtcgagggctctgacagc

SEQ ID NO: 3921497 - DNA, 25 bp, Homo sapien
gtgctgaaggaggaatctagctgtt

SEQ ID NO: 3921498 - DNA, 25 bp, Homo sapien
tctgtgtttcaagtccagagaaggg

SEQ ID NO: 3921499 - DNA, 25 bp, Homo sapien
tcctctgtgtttcaagtccagagaa

SEQ ID NO: 3921500 - DNA, 25 bp, Homo sapien
gaatctagctgttgggcagatgttc

SEQ ID NO: 3921501 - DNA, 25 bp, Homo sapien
cctggacagctggccgctcaagttc

SEQ ID NO: 3921502 - DNA, 25 bp, Homo sapien
cagctggccgctcaagttccttcag

SEQ ID NO: 3921503 - DNA, 25 bp, Homo sapien
ctgtggccagatacaaagggtattg

SEQ ID NO: 3921504 - DNA, 25 bp, Homo sapien
cagatacaaagggtattggctggct

SEQ ID NO: 3921505 - DNA, 25 bp, Homo sapien
ctgtaggtggcagaaaactgacatg

SEQ ID NO: 3921506 - DNA, 25 bp, Homo sapien
tgtaggtggcagaaaactgacatgg

SEQ ID NO: 3921507 - DNA, 25 bp, Homo sapien
ccagcaaacttaacagccagatcca

SEQ ID NO: 3921508 - DNA, 25 bp, Homo sapien
accagcaaacttaacagccagatcc

SEQ ID NO: 3921509 - DNA, 25 bp, Homo sapien
agaccccggacaagggtcaggcgcg

SEQ ID NO: 3921510 - DNA, 25 bp, Homo sapien
ctgtgcggaagaccccggacaaggg

SEQ ID NO: 3921511 - DNA, 25 bp, Homo sapien
tgcggaagaccccggacaagggtca

SEQ ID NO: 3921512 - DNA, 25 bp, Homo sapien
ccccggacaagggtcaggcgcggcg

SEQ ID NO: 3921513 - DNA, 25 bp, Homo sapien
cattaaggttaaatttctaggaatg

SEQ ID NO: 3921514 - DNA, 25 bp, Homo sapien
tagaggacccaaaagcccacgaagc

SEQ ID NO: 3921515 - DNA, 25 bp, Homo sapien
tgaaccacccgctctggttctttgg

SEQ ID NO: 3921516 - DNA, 25 bp, Homo sapien
gtgaaccacccgctctggttctttg

SEQ ID NO: 3921517 - DNA, 25 bp, Homo sapien
catagtgaaccacccgctctggttc

SEQ ID NO: 3921518 - DNA, 25 bp, Homo sapien
tctcatagtgaaccacccgctctgg

SEQ ID NO: 3921519 - DNA, 25 bp, Homo sapien
tacattcagtcaatacctggctaca

SEQ ID NO: 3921520 - DNA, 25 bp, Homo sapien
cacaggtcagcaagaacatacattc

SEQ ID NO: 3921521 - DNA, 25 bp, Homo sapien
caatcacgcatggtaaatgggtaca

SEQ ID NO: 3921522 - DNA, 25 bp, Homo sapien
aattgtaagagaagtggtgcctaca

SEQ ID NO: 3921523 - DNA, 25 bp, Homo sapien
caatgcagccggttatttaggaacg

SEQ ID NO: 3921524 - DNA, 25 bp, Homo sapien
gacataccagctaccttcaggacat

SEQ ID NO: 3921525 - DNA, 25 bp, Homo sapien
gaagttagtgctcaccctagcccta

SEQ ID NO: 3921526 - DNA, 25 bp, Homo sapien
tctgttcgaaaacccaaaatggctc

SEQ ID NO: 3921527 - DNA, 25 bp, Homo sapien
taagggagcacttctcggatactca

SEQ ID NO: 3921528 - DNA, 25 bp, Homo sapien
ctaagcaagcgtgcctaagggagca

SEQ ID NO: 3921529 - DNA, 25 bp, Homo sapien
caaatggcaactctggtgactagct

SEQ ID NO: 3921530 - DNA, 25 bp, Homo sapien
tactacaggacgtgcccttcacaag

SEQ ID NO: 3921531 - DNA, 25 bp, Homo sapien
gaaagccaggaaaccgaagagctgc

SEQ ID NO: 3921532 - DNA, 25 bp, Homo sapien
tgggggatgtatccacacggttcct

SEQ ID NO: 3921533 - DNA, 25 bp, Homo sapien
cggttcctgttgtacatgtctaggt

SEQ ID NO: 3921534 - DNA, 25 bp, Homo sapien
tgtatccacacggttcctgttgtac

SEQ ID NO: 3921535 - DNA, 25 bp, Homo sapien
ctctctcatgctgtgagcggtcagg

SEQ ID NO: 3921536 - DNA, 25 bp, Homo sapien
gttcaacctcaggcccggctggtcc

SEQ ID NO: 3921537 - DNA, 25 bp, Homo sapien
cggtcagggagcttcgggtagtcgc

SEQ ID NO: 3921538 - DNA, 25 bp, Homo sapien
gagcggtcagggagcttcgggtagt

SEQ ID NO: 3921539 - DNA, 25 bp, Homo sapien
acgcatattatacttcttggcggcg

SEQ ID NO: 3921540 - DNA, 25 bp, Homo sapien
gccatcatccgggtaaggttcgtag

SEQ ID NO: 3921541 - DNA, 25 bp, Homo sapien
ggttcgtagtcttccacacgcatat

SEQ ID NO: 3921542 - DNA, 25 bp, Homo sapien
cacgcatattatacttcttggcggc

SEQ ID NO: 3921543 - DNA, 25 bp, Homo sapien
atagggccccgggaacatgtccttg

SEQ ID NO: 3921544 - DNA, 25 bp, Homo sapien
ctaggatagggccccgggaacatgt

SEQ ID NO: 3921545 - DNA, 25 bp, Homo sapien
gccccgggaacatgtccttggtcat

SEQ ID NO: 3921546 - DNA, 25 bp, Homo sapien
ggccccgggaacatgtccttggtca

SEQ ID NO: 3921547 - DNA, 25 bp, Homo sapien
ccagcggcatcacgttccgggatgc

SEQ ID NO: 3921548 - DNA, 25 bp, Homo sapien
acgttccgggatgccctttgcagcc

SEQ ID NO: 3921549 - DNA, 25 bp, Homo sapien
tccgtgcgcccagcggcatcacgtt

SEQ ID NO: 3921550 - DNA, 25 bp, Homo sapien
agccactggactcccaagaccccgg

SEQ ID NO: 3921551 - DNA, 25 bp, Homo sapien
ctgcacatgcgcaaaggcctgtcac

SEQ ID NO: 3921552 - DNA, 25 bp, Homo sapien
aaaggcctgtcacggcggctgagcc

SEQ ID NO: 3921553 - DNA, 25 bp, Homo sapien
ctgagccgggccaaacgtgacggag

SEQ ID NO: 3921554 - DNA, 25 bp, Homo sapien
caaacgtgacggaggaagccgggag

SEQ ID NO: 3921555 - DNA, 25 bp, Homo sapien
tctccttcacgggcacttccttcca

SEQ ID NO: 3921556 - DNA, 25 bp, Homo sapien
cctctccttcacgggcacttccttc

SEQ ID NO: 3921557 - DNA, 25 bp, Homo sapien
ttcctctccttcacgggcacttcct

SEQ ID NO: 3921558 - DNA, 25 bp, Homo sapien
ctccttcacgggcacttccttccat

SEQ ID NO: 3921559 - DNA, 25 bp, Homo sapien
gtactatgatgagaagaagatggcc

SEQ ID NO: 3921560 - DNA, 25 bp, Homo sapien
caaatcttgtgtatcctgccctgaa

SEQ ID NO: 3921561 - DNA, 25 bp, Homo sapien
cctgaaatgggaccttgaatacctg

SEQ ID NO: 3921562 - DNA, 25 bp, Homo sapien
taagccgaggtccaacagggaagaa

SEQ ID NO: 3921563 - DNA, 25 bp, Homo sapien
tcctttgctgctggtactaataaag

SEQ ID NO: 3921564 - DNA, 25 bp, Homo sapien
gccatgtggcttgtgaattgatacc

SEQ ID NO: 3921565 - DNA, 25 bp, Homo sapien
tgaataacctgggttgaacaaggaa

SEQ ID NO: 3921566 - DNA, 25 bp, Homo sapien
gaagttatttattgtcattcaccac

SEQ ID NO: 3921567 - DNA, 25 bp, Homo sapien
gattagatagggttccaactgggcc

SEQ ID NO: 3921568 - DNA, 25 bp, Homo sapien
tttgcgtagtcaagctctaggcggt

SEQ ID NO: 3921569 - DNA, 25 bp, Homo sapien
tatgggaatggctaccgggactcta

SEQ ID NO: 3921570 - DNA, 25 bp, Homo sapien
tctgggtcaggctgtcacttccggc

SEQ ID NO: 3921571 - DNA, 25 bp, Homo sapien
gattgcagtgatctctatctctcca

SEQ ID NO: 3921572 - DNA, 25 bp, Homo sapien
cctgaagctcagttatagtgcactg

SEQ ID NO: 3921573 - DNA, 25 bp, Homo sapien
ggagcggaggaaaaacttggccaca

SEQ ID NO: 3921574 - DNA, 25 bp, Homo sapien
cacttcttttgggaaagaggagcac

SEQ ID NO: 3921575 - DNA, 25 bp, Homo sapien
gacaattaggaatgagcgatcatta

SEQ ID NO: 3921576 - DNA, 25 bp, Homo sapien
tcactggtgattagacacaggatga

SEQ ID NO: 3921577 - DNA, 25 bp, Homo sapien
cactggtgattagacacaggatgaa

SEQ ID NO: 3921578 - DNA, 25 bp, Homo sapien
agaaatttgacaattaggaatgagc

SEQ ID NO: 3921579 - DNA, 25 bp, Homo sapien
tctggtccttatcaaatcccaggag

SEQ ID NO: 3921580 - DNA, 25 bp, Homo sapien
ttacattccagcactgtagggcgtg

SEQ ID NO: 3921581 - DNA, 25 bp, Homo sapien
aattacatgaagcaaccagaggtta

SEQ ID NO: 3921582 - DNA, 25 bp, Homo sapien
taaggccacacttgtatatcgtgca

SEQ ID NO: 3921583 - DNA, 25 bp, Homo sapien
gccactcttctgacgcaagggtctg

SEQ ID NO: 3921584 - DNA, 25 bp, Homo sapien
gcccagcacgtgtagaatccagatg

SEQ ID NO: 3921585 - DNA, 25 bp, Homo sapien
ctgtggtgtggaagaacctcgcccg

SEQ ID NO: 3921586 - DNA, 25 bp, Homo sapien
gagttccttcgctgttcaaagcaga

SEQ ID NO: 3921587 - DNA, 25 bp, Homo sapien
taagtgaaggccgagcttcgtaagc

SEQ ID NO: 3921588 - DNA, 25 bp, Homo sapien
cgagcttcgtaagcctctgaggatc

SEQ ID NO: 3921589 - DNA, 25 bp, Homo sapien
ctgaggatcccagtacctggtgtgg

SEQ ID NO: 3921590 - DNA, 25 bp, Homo sapien
ctctgaggatcccagtacctggtgt

SEQ ID NO: 3921591 - DNA, 25 bp, Homo sapien
gagtgttaaaagtggccattcatac

SEQ ID NO: 3921592 - DNA, 25 bp, Homo sapien
caggagtgttaaaagtggccattca

SEQ ID NO: 3921593 - DNA, 25 bp, Homo sapien
agccaggagtgttaaaagtggccat

SEQ ID NO: 3921594 - DNA, 25 bp, Homo sapien
ggagccaggagtgttaaaagtggcc

SEQ ID NO: 3921595 - DNA, 25 bp, Homo sapien
ttgcagctccagctattggagcagc

SEQ ID NO: 3921596 - DNA, 25 bp, Homo sapien
agaagagttgcagctccagctattg

SEQ ID NO: 3921597 - DNA, 25 bp, Homo sapien
agggtgcttgggatttaactcctca

SEQ ID NO: 3921598 - DNA, 25 bp, Homo sapien
aaagaatcagacttaggagggggca

SEQ ID NO: 3921599 - DNA, 25 bp, Homo sapien
gatgattaatgcaggcagtggagcc

SEQ ID NO: 3921600 - DNA, 25 bp, Homo sapien
ggcgctcttcatggcccctgggatg

SEQ ID NO: 3921601 - DNA, 25 bp, Homo sapien
tctctgcatgggatgttggagatca

SEQ ID NO: 3921602 - DNA, 25 bp, Homo sapien
taaatccggagctgaatgagctccc

SEQ ID NO: 3921603 - DNA, 25 bp, Homo sapien
gggtcagctgctagaagtgggtttt

SEQ ID NO: 3921604 - DNA, 25 bp, Homo sapien
ggagcgggccgggtcagctgctaga

SEQ ID NO: 3921605 - DNA, 25 bp, Homo sapien
gggcgagaggcacgcgtaggtgtaa

SEQ ID NO: 3921606 - DNA, 25 bp, Homo sapien
cacgcgtaggtgtaactgagaggaa

SEQ ID NO: 3921607 - DNA, 25 bp, Homo sapien
ttaagcacctttcgaatacattggc

SEQ ID NO: 3921608 - DNA, 25 bp, Homo sapien
agcacctttcgaatacattggccac

SEQ ID NO: 3921609 - DNA, 25 bp, Homo sapien
cattgaatcctttaacaatccgact

SEQ ID NO: 3921610 - DNA, 25 bp, Homo sapien
ctttaacaatccgactctgctcttc

SEQ ID NO: 3921611 - DNA, 25 bp, Homo sapien
ctgccggcaaccaaggttgacatca

SEQ ID NO: 3921612 - DNA, 25 bp, Homo sapien
ggttgacatcagtaccaacaagttc

SEQ ID NO: 3921613 - DNA, 25 bp, Homo sapien
tcagtaccaacaagttcatggccat

SEQ ID NO: 3921614 - DNA, 25 bp, Homo sapien
ccggcaaccaaggttgacatcagta

SEQ ID NO: 3921615 - DNA, 25 bp, Homo sapien
caagaccctgaggaagcggcattta

SEQ ID NO: 3921616 - DNA, 25 bp, Homo sapien
gatgctccgaatgacacttttacag

SEQ ID NO: 3921617 - DNA, 25 bp, Homo sapien
gagccacagtcgaagggctgtctag

SEQ ID NO: 3921618 - DNA, 25 bp, Homo sapien
tctctgggagctacattcctgggag

SEQ ID NO: 3921619 - DNA, 25 bp, Homo sapien
ttttccatgtggtagatacaggcat

SEQ ID NO: 3921620 - DNA, 25 bp, Homo sapien
cagaaggtccctgatcactaaggct

SEQ ID NO: 3921621 - DNA, 25 bp, Homo sapien
tgtcagtattcgaagcgagtgctgt

SEQ ID NO: 3921622 - DNA, 25 bp, Homo sapien
tgggagactgtcagtattcgaagcg

SEQ ID NO: 3921623 - DNA, 25 bp, Homo sapien
tggtaccacatcgatggattgagag

SEQ ID NO: 3921624 - DNA, 25 bp, Homo sapien
ggtggtaccacatcgatggattgag

SEQ ID NO: 3921625 - DNA, 25 bp, Homo sapien
tattggtggtaccacatcgatggat

SEQ ID NO: 3921626 - DNA, 25 bp, Homo sapien
ctatattggtggtaccacatcgatg

SEQ ID NO: 3921627 - DNA, 25 bp, Homo sapien
tattcaaactcggtgcctgacagtg

SEQ ID NO: 3921628 - DNA, 25 bp, Homo sapien
aatgggaagcaaggttctgggacct

SEQ ID NO: 3921629 - DNA, 25 bp, Homo sapien
cctcctaaatgggaagcaaggttct

SEQ ID NO: 3921630 - DNA, 25 bp, Homo sapien
gcccaagtgcttggagtatgaccaa

SEQ ID NO: 3921631 - DNA, 25 bp, Homo sapien
ttcacacttacacagcgacgtagca

SEQ ID NO: 3921632 - DNA, 25 bp, Homo sapien
gcgacgtagcaacaagatcaacaca

SEQ ID NO: 3921633 - DNA, 25 bp, Homo sapien
gaatctgtcactaatcacatgaacc

SEQ ID NO: 3921634 - DNA, 25 bp, Homo sapien
gcttgtccaccccaggacttctgtg

SEQ ID NO: 3921635 - DNA, 25 bp, Homo sapien
cagagaccttggtgaagtagacaga

SEQ ID NO: 3921636 - DNA, 25 bp, Homo sapien
acctcagagaccttggtgaagtaga

SEQ ID NO: 3921637 - DNA, 25 bp, Homo sapien
agaccttggtgaagtagacagaacc

SEQ ID NO: 3921638 - DNA, 25 bp, Homo sapien
tggggtcccactgttggacctcaga

SEQ ID NO: 3921639 - DNA, 25 bp, Homo sapien
gaccttgaaggtctcactgatcctc

SEQ ID NO: 3921640 - DNA, 25 bp, Homo sapien
gatcctctcaaagtcataagccaga

SEQ ID NO: 3921641 - DNA, 25 bp, Homo sapien
tgtccatgcgacaaagccagttaca

SEQ ID NO: 3921642 - DNA, 25 bp, Homo sapien
taaggagggctcctatgtccatgcg

SEQ ID NO: 3921643 - DNA, 25 bp, Homo sapien
ctcgcagctaaacaccgggtcgttt

SEQ ID NO: 3921644 - DNA, 25 bp, Homo sapien
agcaggcagtcctcgcagctaaaca

SEQ ID NO: 3921645 - DNA, 25 bp, Homo sapien
aatgtccccatatgggaagcagacg

SEQ ID NO: 3921646 - DNA, 25 bp, Homo sapien
gtcgtttgtatccaggaagatgggc

SEQ ID NO: 3921647 - DNA, 25 bp, Homo sapien
ttggcaggacgacacggagccacgc

SEQ ID NO: 3921648 - DNA, 25 bp, Homo sapien
ctttggcaggacgacacggagccac

SEQ ID NO: 3921649 - DNA, 25 bp, Homo sapien
gactttggcaggacgacacggagcc

SEQ ID NO: 3921650 - DNA, 25 bp, Homo sapien
aggacgacacggagccacgcgtgca

SEQ ID NO: 3921651 - DNA, 25 bp, Homo sapien
taagatcactttctgctttttctaa

SEQ ID NO: 3921652 - DNA, 25 bp, Homo sapien
agatcactttctgctttttctaaat

SEQ ID NO: 3921653 - DNA, 25 bp, Homo sapien
gtgcacccacagtaagatcactttc

SEQ ID NO: 3921654 - DNA, 25 bp, Homo sapien
gcgtgcacccacagtaagatcactt

SEQ ID NO: 3921655 - DNA, 25 bp, Homo sapien
aaagtcatttccataagtaagtgca

SEQ ID NO: 3921656 - DNA, 25 bp, Homo sapien
atcctcgaagaatttcagcgcgggc

SEQ ID NO: 3921657 - DNA, 25 bp, Homo sapien
tttccataagtaagtgcaatttctc

SEQ ID NO: 3921658 - DNA, 25 bp, Homo sapien
cgcgggcagtgccagtaaatgctgt

SEQ ID NO: 3921659 - DNA, 25 bp, Homo sapien
tctctaaggctttcatgctggacct

SEQ ID NO: 3921660 - DNA, 25 bp, Homo sapien
atgactaccggcagcacagtgactc

SEQ ID NO: 3921661 - DNA, 25 bp, Homo sapien
gcccatcaagccagatttaatgcca

SEQ ID NO: 3921662 - DNA, 25 bp, Homo sapien
cagtgactcctggagcatgatttct

SEQ ID NO: 3921663 - DNA, 25 bp, Homo sapien
aattattctcaagtcatttactttt

SEQ ID NO: 3921664 - DNA, 25 bp, Homo sapien
gacgctgggtaatagagagtaatta

SEQ ID NO: 3921665 - DNA, 25 bp, Homo sapien
ctgctaaatcccattttttgtagcc

SEQ ID NO: 3921666 - DNA, 25 bp, Homo sapien
ccctgggacgctgggtaatagagag

SEQ ID NO: 3921667 - DNA, 25 bp, Homo sapien
cggctgcgagataaccattagcgca

SEQ ID NO: 3921668 - DNA, 25 bp, Homo sapien
accattagcgcagccgccgataaag

SEQ ID NO: 3921669 - DNA, 25 bp, Homo sapien
agataaccattagcgcagccgccga

SEQ ID NO: 3921670 - DNA, 25 bp, Homo sapien
gggcacggctgcgagataaccatta

SEQ ID NO: 3921671 - DNA, 25 bp, Homo sapien
gggcggccgcgtgcggcccgagcct

SEQ ID NO: 3921672 - DNA, 25 bp, Homo sapien
agggggcggccgcgtgcggcccgag

SEQ ID NO: 3921673 - DNA, 25 bp, Homo sapien
gcggccgcgtgcggcccgagcctcg

SEQ ID NO: 3921674 - DNA, 25 bp, Homo sapien
ggccgcgtgcggcccgagcctcggt

SEQ ID NO: 3921675 - DNA, 25 bp, Homo sapien
tgcagttacccagagaatcttacaa

SEQ ID NO: 3921676 - DNA, 25 bp, Homo sapien
gaagtgtagtcatgagttcctttca

SEQ ID NO: 3921677 - DNA, 25 bp, Homo sapien
caaatctcttgaacacatgcagtta

SEQ ID NO: 3921678 - DNA, 25 bp, Homo sapien
ttcgtacattctcacagtccaacag

SEQ ID NO: 3921679 - DNA, 25 bp, Homo sapien
tcggggcgctaatggaaacacatgg

SEQ ID NO: 3921680 - DNA, 25 bp, Homo sapien
ggcgctgccattcccgtctgataat

SEQ ID NO: 3921681 - DNA, 25 bp, Homo sapien
gccggctgcgggcttgtcagcttcc

SEQ ID NO: 3921682 - DNA, 25 bp, Homo sapien
aatcaagataaaagactgaagtgga

SEQ ID NO: 3921683 - DNA, 25 bp, Homo sapien
attttccttggggagcacggctatc

SEQ ID NO: 3921684 - DNA, 25 bp, Homo sapien
aagataaatagtgccattaatctcc

SEQ ID NO: 3921685 - DNA, 25 bp, Homo sapien
ggagcacggctatcacagagaaaga

SEQ ID NO: 3921686 - DNA, 25 bp, Homo sapien
gtgccattaatctccaacatttctc

SEQ ID NO: 3921687 - DNA, 25 bp, Homo sapien
tcgtatgggtcacggcgcctgcaaa

SEQ ID NO: 3921688 - DNA, 25 bp, Homo sapien
ccggccaggtggtgatgatgcggcc

SEQ ID NO: 3921689 - DNA, 25 bp, Homo sapien
tgcgcgtgtcgggaacaatcctgcg

SEQ ID NO: 3921690 - DNA, 25 bp, Homo sapien
gcgctggtcactcttggccgctccc

SEQ ID NO: 3921691 - DNA, 25 bp, Homo sapien
gcagcggcgaatggcacattacaga

SEQ ID NO: 3921692 - DNA, 25 bp, Homo sapien
gatgttttactgtcgcgggcgctcg

SEQ ID NO: 3921693 - DNA, 25 bp, Homo sapien
tttaatccatgagcaatcagcgagc

SEQ ID NO: 3921694 - DNA, 25 bp, Homo sapien
gggcgacggcactcagaattgcgct

SEQ ID NO: 3921695 - DNA, 25 bp, Homo sapien
tccgcgccggggtaggcgagcaggt

SEQ ID NO: 3921696 - DNA, 25 bp, Homo sapien
tgccagtctccgacccggccgtcca

SEQ ID NO: 3921697 - DNA, 25 bp, Homo sapien
agctgtaggccggtgaggaacagct

SEQ ID NO: 3921698 - DNA, 25 bp, Homo sapien
tgcgcagccgagcatcaggctccgc

SEQ ID NO: 3921699 - DNA, 25 bp, Homo sapien
aaccccgagcctgggactggcgcaa

SEQ ID NO: 3921700 - DNA, 25 bp, Homo sapien
tcccaactcccacaggtgtcgagga

SEQ ID NO: 3921701 - DNA, 25 bp, Homo sapien
caagtgcgggctgcttgaaaggcat

SEQ ID NO: 3921702 - DNA, 25 bp, Homo sapien
gtgtcgaggattgccgtgaaccccg

SEQ ID NO: 3921703 - DNA, 25 bp, Homo sapien
cttcctgggctaggattgcgccgtc

SEQ ID NO: 3921704 - DNA, 25 bp, Homo sapien
gccccggaacgagagaacagatttc

SEQ ID NO: 3921705 - DNA, 25 bp, Homo sapien
cggaatcaggtgctgaaccgagccc

SEQ ID NO: 3921706 - DNA, 25 bp, Homo sapien
gatttattcgcttcacccggcggaa

SEQ ID NO: 3921707 - DNA, 25 bp, Homo sapien
gaaggccttcgcttccagtaagcag

SEQ ID NO: 3921708 - DNA, 25 bp, Homo sapien
tacaacttcgcttgcagaacttggc

SEQ ID NO: 3921709 - DNA, 25 bp, Homo sapien
ctcgttctactttgggctacagata

SEQ ID NO: 3921710 - DNA, 25 bp, Homo sapien
tagatgagcctaacctctgtaggga

SEQ ID NO: 3921711 - DNA, 25 bp, Homo sapien
tgcctttgtctgacaagtcatccat

SEQ ID NO: 3921712 - DNA, 25 bp, Homo sapien
tagccggcaccggagtgacaggctc

SEQ ID NO: 3921713 - DNA, 25 bp, Homo sapien
acagagtggtggaatctattgcctt

SEQ ID NO: 3921714 - DNA, 25 bp, Homo sapien
tccagcgctggcgaatcacagagtg

SEQ ID NO: 3921715 - DNA, 25 bp, Homo sapien
tgcatattcaatctccatccatgaa

SEQ ID NO: 3921716 - DNA, 25 bp, Homo sapien
agccctaattcatcacagcccaagt

SEQ ID NO: 3921717 - DNA, 25 bp, Homo sapien
cagatcgggtagtaaaacaaaagca

SEQ ID NO: 3921718 - DNA, 25 bp, Homo sapien
tgcccgcctcctgcttgaaaacaat

SEQ ID NO: 3921719 - DNA, 25 bp, Homo sapien
tgtgttgttattgcaaattaaaagt

SEQ ID NO: 3921720 - DNA, 25 bp, Homo sapien
ctggccgcccgcgatcgcctccttt

SEQ ID NO: 3921721 - DNA, 25 bp, Homo sapien
gctctgctcctggccgcccgcgatc

SEQ ID NO: 3921722 - DNA, 25 bp, Homo sapien
gcccgcgatcgcctccttttgtagg

SEQ ID NO: 3921723 - DNA, 25 bp, Homo sapien
gccgcccgcgatcgcctccttttgt

SEQ ID NO: 3921724 - DNA, 25 bp, Homo sapien
gctttccgcaccaaagacttcataa

SEQ ID NO: 3921725 - DNA, 25 bp, Homo sapien
taaacaagcatacttagggcggcct

SEQ ID NO: 3921726 - DNA, 25 bp, Homo sapien
gcggcctggtatgtaatttttcgcc

SEQ ID NO: 3921727 - DNA, 25 bp, Homo sapien
tgtgtcctttgagctaacaaagccc

SEQ ID NO: 3921728 - DNA, 25 bp, Homo sapien
agatttgtcaagatctgaagggccc

SEQ ID NO: 3921729 - DNA, 25 bp, Homo sapien
gggagagagcaccataatctctcgc

SEQ ID NO: 3921730 - DNA, 25 bp, Homo sapien
tagagtgacagatttgtcaagatct

SEQ ID NO: 3921731 - DNA, 25 bp, Homo sapien
gcaccataatctctcgcaaatttag

SEQ ID NO: 3921732 - DNA, 25 bp, Homo sapien
ctttcaactcatatgttgatgcata

SEQ ID NO: 3921733 - DNA, 25 bp, Homo sapien
actttcaactcatatgttgatgcat

SEQ ID NO: 3921734 - DNA, 25 bp, Homo sapien
aactttcaactcatatgttgatgca

SEQ ID NO: 3921735 - DNA, 25 bp, Homo sapien
ggagattaatactccaccccatgga

SEQ ID NO: 3921736 - DNA, 25 bp, Homo sapien
ggagctgcacttagattctccaaag

SEQ ID NO: 3921737 - DNA, 25 bp, Homo sapien
gcagttgaactgagaagacatcctc

SEQ ID NO: 3921738 - DNA, 25 bp, Homo sapien
tgtctgacgaaagtgcactgtctga

SEQ ID NO: 3921739 - DNA, 25 bp, Homo sapien
ggcagtgtggtataaacatggcttc

SEQ ID NO: 3921740 - DNA, 25 bp, Homo sapien
ccttgaaacaaggaagttacctcat

SEQ ID NO: 3921741 - DNA, 25 bp, Homo sapien
gaaaactgtgatgcatctttgtgcc

SEQ ID NO: 3921742 - DNA, 25 bp, Homo sapien
gagtatctggcttcgtgttattaaa

SEQ ID NO: 3921743 - DNA, 25 bp, Homo sapien
gaaagataagcaagatgatagaggt

SEQ ID NO: 3921744 - DNA, 25 bp, Homo sapien
aagataagcaagatgatagaggtcc

SEQ ID NO: 3921745 - DNA, 25 bp, Homo sapien
aaagataagcaagatgatagaggtc

SEQ ID NO: 3921746 - DNA, 25 bp, Homo sapien
gatagaggtccatttggctgctgga

SEQ ID NO: 3921747 - DNA, 25 bp, Homo sapien
gggcgtcaccagatcgggtccctct

SEQ ID NO: 3921748 - DNA, 25 bp, Homo sapien
tctcatgccccgtgaacgcaactat

SEQ ID NO: 3921749 - DNA, 25 bp, Homo sapien
cctccctggtcgctcgaaggctctg

SEQ ID NO: 3921750 - DNA, 25 bp, Homo sapien
gacaggcttgttagtgcagcactga

SEQ ID NO: 3921751 - DNA, 25 bp, Homo sapien
tcagtacttgcttaaaaatttccac

SEQ ID NO: 3921752 - DNA, 25 bp, Homo sapien
ttccaccaaatctccctctcctctt

SEQ ID NO: 3921753 - DNA, 25 bp, Homo sapien
tcctcttcatcacttcctgtcaaag

SEQ ID NO: 3921754 - DNA, 25 bp, Homo sapien
aatttccaccaaatctccctctcct

SEQ ID NO: 3921755 - DNA, 25 bp, Homo sapien
agagccatggatacacggccacacg

SEQ ID NO: 3921756 - DNA, 25 bp, Homo sapien
caaacacctcgagggcacacttcat

SEQ ID NO: 3921757 - DNA, 25 bp, Homo sapien
tggatacacggccacacgtacagct

SEQ ID NO: 3921758 - DNA, 25 bp, Homo sapien
tacagctccaaacacctcgagggca

SEQ ID NO: 3921759 - DNA, 25 bp, Homo sapien
tcagcagattaatggcactaacgaa

SEQ ID NO: 3921760 - DNA, 25 bp, Homo sapien
cgggcagcggaggtaggaaacgcca

SEQ ID NO: 3921761 - DNA, 25 bp, Homo sapien
atgactggggattgatcaggctgaa

SEQ ID NO: 3921762 - DNA, 25 bp, Homo sapien
cgaagtttccgagagcatggtgaat

SEQ ID NO: 3921763 - DNA, 25 bp, Homo sapien
cagctggtatcgacccgtaatttgg

SEQ ID NO: 3921764 - DNA, 25 bp, Homo sapien
tttaacataaaaagatcagctggta

SEQ ID NO: 3921765 - DNA, 25 bp, Homo sapien
taaaaagatcagctggtatcgaccc

SEQ ID NO: 3921766 - DNA, 25 bp, Homo sapien
gacccgtaatttggacccatgccac

SEQ ID NO: 3921767 - DNA, 25 bp, Homo sapien
ggctggtgcctcaaccgataaagga

SEQ ID NO: 3921768 - DNA, 25 bp, Homo sapien
gggtgcgtaataacccagccgcgct

SEQ ID NO: 3921769 - DNA, 25 bp, Homo sapien
gatcaatgctaataccaggaggccc

SEQ ID NO: 3921770 - DNA, 25 bp, Homo sapien
caggaaccttgaaatcccgacacgg

SEQ ID NO: 3921771 - DNA, 25 bp, Homo sapien
ggtccatcttttcgatttcttgttc

SEQ ID NO: 3921772 - DNA, 25 bp, Homo sapien
tataaattagagactcgttaagaga

SEQ ID NO: 3921773 - DNA, 25 bp, Homo sapien
cagtaacagctttcggggtccatct

SEQ ID NO: 3921774 - DNA, 25 bp, Homo sapien
tcttgttcggtttgtttattgctat

SEQ ID NO: 3921775 - DNA, 25 bp, Homo sapien
taccacgccgctgcgatttgtacca

SEQ ID NO: 3921776 - DNA, 25 bp, Homo sapien
aagttctagagctgggatttctcag

SEQ ID NO: 3921777 - DNA, 25 bp, Homo sapien
gatttctcaggcaatttggccagtg

SEQ ID NO: 3921778 - DNA, 25 bp, Homo sapien
tttgccagggaaacggatatgagtc

SEQ ID NO: 3921779 - DNA, 25 bp, Homo sapien
ggcagtcaacactgtgggacatgtc

SEQ ID NO: 3921780 - DNA, 25 bp, Homo sapien
cctcacattgaactggaaagcagtg

SEQ ID NO: 3921781 - DNA, 25 bp, Homo sapien
taggaatgtcctccaggagcatcag

SEQ ID NO: 3921782 - DNA, 25 bp, Homo sapien
tgagtggtgggttaggaatgtcctc

SEQ ID NO: 3921783 - DNA, 25 bp, Homo sapien
cataaacccagggtttctcattgac

SEQ ID NO: 3921784 - DNA, 25 bp, Homo sapien
gcacataaacccagggtttctcatt

SEQ ID NO: 3921785 - DNA, 25 bp, Homo sapien
acataaacccagggtttctcattga

SEQ ID NO: 3921786 - DNA, 25 bp, Homo sapien
cacataaacccagggtttctcattg

SEQ ID NO: 3921787 - DNA, 25 bp, Homo sapien
agggagtctgagctcgctggtccag

SEQ ID NO: 3921788 - DNA, 25 bp, Homo sapien
agattccagattgcaatagcccagc

SEQ ID NO: 3921789 - DNA, 25 bp, Homo sapien
aatactgtagtccatcaagattttt

SEQ ID NO: 3921790 - DNA, 25 bp, Homo sapien
tgttgcttttccacaatactgtagt

SEQ ID NO: 3921791 - DNA, 25 bp, Homo sapien
taaggttactcaagtgaagtagtgg

SEQ ID NO: 3921792 - DNA, 25 bp, Homo sapien
taactggttgtgatcaattagctgt

SEQ ID NO: 3921793 - DNA, 25 bp, Homo sapien
ctgtaactggttgtgatcaattagc

SEQ ID NO: 3921794 - DNA, 25 bp, Homo sapien
gagtggagaaggaacaaagaaatct

SEQ ID NO: 3921795 - DNA, 25 bp, Homo sapien
tactgtgtgaaccaatctgcccaag

SEQ ID NO: 3921796 - DNA, 25 bp, Homo sapien
tgtgtgactgcttaagatctctggc

SEQ ID NO: 3921797 - DNA, 25 bp, Homo sapien
tgttctcagtccctgcctgcttaag

SEQ ID NO: 3921798 - DNA, 25 bp, Homo sapien
gagttatactgtcactcctctcagg

SEQ ID NO: 3921799 - DNA, 25 bp, Homo sapien
ttctgctgctgtcccattccttctc

SEQ ID NO: 3921800 - DNA, 25 bp, Homo sapien
ctgctgctgtcccattccttctcat

SEQ ID NO: 3921801 - DNA, 25 bp, Homo sapien
tgtttctgctgctgtcccattcctt

SEQ ID NO: 3921802 - DNA, 25 bp, Homo sapien
gtttctgctgctgtcccattccttc

SEQ ID NO: 3921803 - DNA, 25 bp, Homo sapien
cgtagatgtgctctgttatagtaca

SEQ ID NO: 3921804 - DNA, 25 bp, Homo sapien
tgcaaggaaatgaatcggattaaat

SEQ ID NO: 3921805 - DNA, 25 bp, Homo sapien
tgcaaatgtgtaagtcattcaacac

SEQ ID NO: 3921806 - DNA, 25 bp, Homo sapien
aacatccaacagaaagcactaagag

SEQ ID NO: 3921807 - DNA, 25 bp, Homo sapien
tgttggccatcctcaacgaaggcag

SEQ ID NO: 3921808 - DNA, 25 bp, Homo sapien
aagtcttcggatcgcgctgtgcaga

SEQ ID NO: 3921809 - DNA, 25 bp, Homo sapien
tcacttccgaagagagaaccgccat

SEQ ID NO: 3921810 - DNA, 25 bp, Homo sapien
gaacagctgcggatttctgaggcac

SEQ ID NO: 3921811 - DNA, 25 bp, Homo sapien
ggcgccgacatgacaaggcgctgca

SEQ ID NO: 3921812 - DNA, 25 bp, Homo sapien
gtcgccagcggcgccgacatgacaa

SEQ ID NO: 3921813 - DNA, 25 bp, Homo sapien
tgcatgcccgctaggccaggtttcc

SEQ ID NO: 3921814 - DNA, 25 bp, Homo sapien
gctgcatgcccgctaggccaggttt

SEQ ID NO: 3921815 - DNA, 25 bp, Homo sapien
ggggtcgtcgcccccgcgctgccat

SEQ ID NO: 3921816 - DNA, 25 bp, Homo sapien
cggggtcgtcgcccccgcgctgcca

SEQ ID NO: 3921817 - DNA, 25 bp, Homo sapien
tcatccccagccccggggtcgtcgc

SEQ ID NO: 3921818 - DNA, 25 bp, Homo sapien
catcctccgcgagctcaggcgttgg

SEQ ID NO: 3921819 - DNA, 25 bp, Homo sapien
cgctcttccagttcccgccatcctc

SEQ ID NO: 3921820 - DNA, 25 bp, Homo sapien
cctccgcgagctcaggcgttggcat

SEQ ID NO: 3921821 - DNA, 25 bp, Homo sapien
agacccggtagtaccgcccatgctg

SEQ ID NO: 3921822 - DNA, 25 bp, Homo sapien
ttttcaggaagcagtcaattataga

SEQ ID NO: 3921823 - DNA, 25 bp, Homo sapien
ctccatttaatctgagttatgaagg

SEQ ID NO: 3921824 - DNA, 25 bp, Homo sapien
tagtaaacgtagtgttcaaaattga

SEQ ID NO: 3921825 - DNA, 25 bp, Homo sapien
cttcaaaccagcttcaaaacaaggt

SEQ ID NO: 3921826 - DNA, 25 bp, Homo sapien
ctcctataccccccaataaagtgtg

SEQ ID NO: 3921827 - DNA, 25 bp, Homo sapien
aatttttgtggtaacattagtatag

SEQ ID NO: 3921828 - DNA, 25 bp, Homo sapien
tgtggtaacattagtatagtttaat

SEQ ID NO: 3921829 - DNA, 25 bp, Homo sapien
tataccccccaataaagtgtgtatc

SEQ ID NO: 3921830 - DNA, 25 bp, Homo sapien
attagtgtttgccttgagtcaggga

SEQ ID NO: 3921831 - DNA, 25 bp, Homo sapien
taaattatacctcgataaaacatag

SEQ ID NO: 3921832 - DNA, 25 bp, Homo sapien
ggatagtaccatataaaaagtagct

SEQ ID NO: 3921833 - DNA, 25 bp, Homo sapien
gatagcagattgacttggatttggc

SEQ ID NO: 3921834 - DNA, 25 bp, Homo sapien
aatgagtctttttagatcatagagc

SEQ ID NO: 3921835 - DNA, 25 bp, Homo sapien
gattagaaattgcaaaacccttgta

SEQ ID NO: 3921836 - DNA, 25 bp, Homo sapien
tagttgccctctagtacttgttcag

SEQ ID NO: 3921837 - DNA, 25 bp, Homo sapien
tattgaattagttcagcttttccaa

SEQ ID NO: 3921838 - DNA, 25 bp, Homo sapien
gatagcactaatggggctgcccttg

SEQ ID NO: 3921839 - DNA, 25 bp, Homo sapien
ttgatagcactaatggggctgccct

SEQ ID NO: 3921840 - DNA, 25 bp, Homo sapien
tataaacattgatagcactaatggg

SEQ ID NO: 3921841 - DNA, 25 bp, Homo sapien
cattgatagcactaatggggctgcc

SEQ ID NO: 3921842 - DNA, 25 bp, Homo sapien
aaaaaggctgaacaaccagatggca

SEQ ID NO: 3921843 - DNA, 25 bp, Homo sapien
agtcctacatcgctatcttgtgcag

SEQ ID NO: 3921844 - DNA, 25 bp, Homo sapien
gatggcattattgatgacagtcttc

SEQ ID NO: 3921845 - DNA, 25 bp, Homo sapien
tcttgtgcagatgaagccttctgat

SEQ ID NO: 3921846 - DNA, 25 bp, Homo sapien
aaatgggccagtgttgtgctagcga

SEQ ID NO: 3921847 - DNA, 25 bp, Homo sapien
taaccattataccttggcagcagta

SEQ ID NO: 3921848 - DNA, 25 bp, Homo sapien
catgcatttgacactagccttggca

SEQ ID NO: 3921849 - DNA, 25 bp, Homo sapien
gatagtggtcttgtaatcatgtcat

SEQ ID NO: 3921850 - DNA, 25 bp, Homo sapien
aaacatcttctcatatgcctattgg

SEQ ID NO: 3921851 - DNA, 25 bp, Homo sapien
tagggaagtagaatctcattgtggt

SEQ ID NO: 3921852 - DNA, 25 bp, Homo sapien
gaagtcaaattgctgggccatatgg

SEQ ID NO: 3921853 - DNA, 25 bp, Homo sapien
taaagccatagtagggagtagggaa

SEQ ID NO: 3921854 - DNA, 25 bp, Homo sapien
tcaagcattggcagtcagagatttt

SEQ ID NO: 3921855 - DNA, 25 bp, Homo sapien
gaacctaaactgattgaggctccaa

SEQ ID NO: 3921856 - DNA, 25 bp, Homo sapien
agtgctctagtgtctccagttgtgg

SEQ ID NO: 3921857 - DNA, 25 bp, Homo sapien
tggcatctatctgcccaacgatggg

SEQ ID NO: 3921858 - DNA, 25 bp, Homo sapien
tatttctttggataccgggagctgg

SEQ ID NO: 3921859 - DNA, 25 bp, Homo sapien
taagtacttactagagggcaggcag

SEQ ID NO: 3921860 - DNA, 25 bp, Homo sapien
tctgactccaagacgactggctggg

SEQ ID NO: 3921861 - DNA, 25 bp, Homo sapien
tgaccttatggatgagtgacagcct

SEQ ID NO: 3921862 - DNA, 25 bp, Homo sapien
tgcaagagtcaatcacatatgttcc

SEQ ID NO: 3921863 - DNA, 25 bp, Homo sapien
taggctgtgacctattaaaggaggc

SEQ ID NO: 3921864 - DNA, 25 bp, Homo sapien
gttctgactcctaggcacatgcaag

SEQ ID NO: 3921865 - DNA, 25 bp, Homo sapien
gaaccaagtttgcacagaaggacca

SEQ ID NO: 3921866 - DNA, 25 bp, Homo sapien
tggaatatccccacgccagatggag

SEQ ID NO: 3921867 - DNA, 25 bp, Homo sapien
gaatctctaggttggccacttgcag

SEQ ID NO: 3921868 - DNA, 25 bp, Homo sapien
cagccactaggtatgaattccggag

SEQ ID NO: 3921869 - DNA, 25 bp, Homo sapien
gaagtgtccttatgacccagcccgt

SEQ ID NO: 3921870 - DNA, 25 bp, Homo sapien
caatgaggatgagataggatccact

SEQ ID NO: 3921871 - DNA, 25 bp, Homo sapien
gggacaatcgggaggcaagaaactg

SEQ ID NO: 3921872 - DNA, 25 bp, Homo sapien
tgagcacacagtggtcagtgcaggg

SEQ ID NO: 3921873 - DNA, 25 bp, Homo sapien
gaggcaagaaactgcggacagcata

SEQ ID NO: 3921874 - DNA, 25 bp, Homo sapien
ttggccagggtaacagtgagcttca

SEQ ID NO: 3921875 - DNA, 25 bp, Homo sapien
taagcacatcaagctaggctagagc

SEQ ID NO: 3921876 - DNA, 25 bp, Homo sapien
tccactgactcacaggagaggccct

SEQ ID NO: 3921877 - DNA, 25 bp, Homo sapien
gagaatgaatgcagtggtccactga

SEQ ID NO: 3921878 - DNA, 25 bp, Homo sapien
tgaattataaactaggaaacatatt

SEQ ID NO: 3921879 - DNA, 25 bp, Homo sapien
atgaattataaactaggaaacatat

SEQ ID NO: 3921880 - DNA, 25 bp, Homo sapien
atatttaagatgtgaagtgtcttgt

SEQ ID NO: 3921881 - DNA, 25 bp, Homo sapien
tgaagtgtcttgtcacttctggagc

SEQ ID NO: 3921882 - DNA, 25 bp, Homo sapien
tagccaagtagtggatgacaagggt

SEQ ID NO: 3921883 - DNA, 25 bp, Homo sapien
atagccaagtagtggatgacaaggg

SEQ ID NO: 3921884 - DNA, 25 bp, Homo sapien
ttatagccaagtagtggatgacaag

SEQ ID NO: 3921885 - DNA, 25 bp, Homo sapien
tatagccaagtagtggatgacaagg

SEQ ID NO: 3921886 - DNA, 25 bp, Homo sapien
ccccaaggaagatcggatgactgaa

SEQ ID NO: 3921887 - DNA, 25 bp, Homo sapien
ttccccaaggaagatcggatgactg

SEQ ID NO: 3921888 - DNA, 25 bp, Homo sapien
caaggaagatcggatgactgaactg

SEQ ID NO: 3921889 - DNA, 25 bp, Homo sapien
gaagatcggatgactgaactgatat

SEQ ID NO: 3921890 - DNA, 25 bp, Homo sapien
ggatctgcggtgcaactgcagacag

SEQ ID NO: 3921891 - DNA, 25 bp, Homo sapien
agggcagctgtctccagatcatccc

SEQ ID NO: 3921892 - DNA, 25 bp, Homo sapien
ctggagggcagctgtctccagatca

SEQ ID NO: 3921893 - DNA, 25 bp, Homo sapien
cagctgtctccagatcatccctggg

SEQ ID NO: 3921894 - DNA, 25 bp, Homo sapien
cccccaccgccaccggctgagctga

SEQ ID NO: 3921895 - DNA, 25 bp, Homo sapien
ctgcggaggatgaatggcaatagct

SEQ ID NO: 3921896 - DNA, 25 bp, Homo sapien
agggccctgctccttcgccgaggaa

SEQ ID NO: 3921897 - DNA, 25 bp, Homo sapien
aatagctatgtgcttctgaggcaga

SEQ ID NO: 3921898 - DNA, 25 bp, Homo sapien
aacaatggagtaccagcagggccct

SEQ ID NO: 3921899 - DNA, 25 bp, Homo sapien
ggtccatatgggctcaatgtcacca

SEQ ID NO: 3921900 - DNA, 25 bp, Homo sapien
caactttttgatgtccctgtagggc

SEQ ID NO: 3921901 - DNA, 25 bp, Homo sapien
taaacacttataggtgaggactcca

SEQ ID NO: 3921902 - DNA, 25 bp, Homo sapien
taagccctgcgtacattcacatgca

SEQ ID NO: 3921903 - DNA, 25 bp, Homo sapien
cagagctctccgtagctcagtggtt

SEQ ID NO: 3921904 - DNA, 25 bp, Homo sapien
cacagcagagctctccgtagctcag

SEQ ID NO: 3921905 - DNA, 25 bp, Homo sapien
cacacagatataaagtgcctagccc

SEQ ID NO: 3921906 - DNA, 25 bp, Homo sapien
taaatctgtattcacacagatataa

SEQ ID NO: 3921907 - DNA, 25 bp, Homo sapien
cacaaggtcactgcccccagaagca

SEQ ID NO: 3921908 - DNA, 25 bp, Homo sapien
tcacaaggtcactgcccccagaagc

SEQ ID NO: 3921909 - DNA, 25 bp, Homo sapien
tcttcattatcccaagcagaacctc

SEQ ID NO: 3921910 - DNA, 25 bp, Homo sapien
cttcattatcccaagcagaacctct

SEQ ID NO: 3921911 - DNA, 25 bp, Homo sapien
ttgcctgggcttggaatcccaaagg

SEQ ID NO: 3921912 - DNA, 25 bp, Homo sapien
tttgcctgggcttggaatcccaaag

SEQ ID NO: 3921913 - DNA, 25 bp, Homo sapien
gggctgcagttggtggggcaactct

SEQ ID NO: 3921914 - DNA, 25 bp, Homo sapien
agcctggggctgcagttggtggggc

SEQ ID NO: 3921915 - DNA, 25 bp, Homo sapien
ctggggctgcagttggtggggcaac

SEQ ID NO: 3921916 - DNA, 25 bp, Homo sapien
cggagtaacagtccaaagcctgggg

SEQ ID NO: 3921917 - DNA, 25 bp, Homo sapien
gcaggatcctgaacctctcgggggc

SEQ ID NO: 3921918 - DNA, 25 bp, Homo sapien
gatcctgaacctctcgggggcgtag

SEQ ID NO: 3921919 - DNA, 25 bp, Homo sapien
gcgtagcccgcggaacgtggtcggc

SEQ ID NO: 3921920 - DNA, 25 bp, Homo sapien
aacgtggtcggcttgttggtgaagg

SEQ ID NO: 3921921 - DNA, 25 bp, Homo sapien
ttgcggatgcggatcacgtccaagc

SEQ ID NO: 3921922 - DNA, 25 bp, Homo sapien
gagatctcctcgaccgacttgcagt

SEQ ID NO: 3921923 - DNA, 25 bp, Homo sapien
ttctgcaccagcgtcgagatctcct

SEQ ID NO: 3921924 - DNA, 25 bp, Homo sapien
cactggccctggatgctagggttgt

SEQ ID NO: 3921925 - DNA, 25 bp, Homo sapien
gagaaggaggatagcgggtcgagcc

SEQ ID NO: 3921926 - DNA, 25 bp, Homo sapien
gtgcgaccaagcgagaaggaggata

SEQ ID NO: 3921927 - DNA, 25 bp, Homo sapien
ggaagctggccggtgcgaccaagcg

SEQ ID NO: 3921928 - DNA, 25 bp, Homo sapien
atagcgggtcgagcccctgatcccg

SEQ ID NO: 3921929 - DNA, 25 bp, Homo sapien
ggtattcggccactactctgggcac

SEQ ID NO: 3921930 - DNA, 25 bp, Homo sapien
catatattacgacccctggattccg

SEQ ID NO: 3921931 - DNA, 25 bp, Homo sapien
cagcacggacgcgagtttacatata

SEQ ID NO: 3921932 - DNA, 25 bp, Homo sapien
ttccgtcgggcgaagtcgatcacct

SEQ ID NO: 3921933 - DNA, 25 bp, Homo sapien
tgacccctgactgggggcgacctac

SEQ ID NO: 3921934 - DNA, 25 bp, Homo sapien
gacagtgagcagtatgacccctgac

SEQ ID NO: 3921935 - DNA, 25 bp, Homo sapien
acccgggacagtgagcagtatgacc

SEQ ID NO: 3921936 - DNA, 25 bp, Homo sapien
taagcgacccgggacagtgagcagt

SEQ ID NO: 3921937 - DNA, 25 bp, Homo sapien
ctgacgctgaagctcagacgctgca

SEQ ID NO: 3921938 - DNA, 25 bp, Homo sapien
cagtccgttgtggagaacgctggcc

SEQ ID NO: 3921939 - DNA, 25 bp, Homo sapien
agaacgctggccaagaagcggctcg

SEQ ID NO: 3921940 - DNA, 25 bp, Homo sapien
agctgctgcacatagcgacccagtc

SEQ ID NO: 3921941 - DNA, 25 bp, Homo sapien
ggccgcggagcctaagcagcgagga

SEQ ID NO: 3921942 - DNA, 25 bp, Homo sapien
aggccgcggagcctaagcagcgagg

SEQ ID NO: 3921943 - DNA, 25 bp, Homo sapien
taaacaactagaaggagagagccac

SEQ ID NO: 3921944 - DNA, 25 bp, Homo sapien
gatacagtgggtaccaagctcctct

SEQ ID NO: 3921945 - DNA, 25 bp, Homo sapien
caatatcagggcctcactggtggga

SEQ ID NO: 3921946 - DNA, 25 bp, Homo sapien
tctgaaaaggtgtctctgagccgag

SEQ ID NO: 3921947 - DNA, 25 bp, Homo sapien
cctgaaagagtcgtgagaatgcaat

SEQ ID NO: 3921948 - DNA, 25 bp, Homo sapien
tgtaaaataggtgacccagagggac

SEQ ID NO: 3921949 - DNA, 25 bp, Homo sapien
ttttaacaagccgtggaggagactg

SEQ ID NO: 3921950 - DNA, 25 bp, Homo sapien
gctaatgcgtgccagaactcctggg

SEQ ID NO: 3921951 - DNA, 25 bp, Homo sapien
gatacctgtagaccttcctacatgc

SEQ ID NO: 3921952 - DNA, 25 bp, Homo sapien
tctcctgtagcccatatgggccaga

SEQ ID NO: 3921953 - DNA, 25 bp, Homo sapien
tacctgtagaccttcctacatgctg

SEQ ID NO: 3921954 - DNA, 25 bp, Homo sapien
catatgggccagatacctgtagacc

SEQ ID NO: 3921955 - DNA, 25 bp, Homo sapien
tcttctcgcctgcaggcatacgagg

SEQ ID NO: 3921956 - DNA, 25 bp, Homo sapien
ttcctgagccctcggaagtgggctg

SEQ ID NO: 3921957 - DNA, 25 bp, Homo sapien
gcaggacgacttcgcacagctgctg

SEQ ID NO: 3921958 - DNA, 25 bp, Homo sapien
tgcagcaggagaagcggcaattgca

SEQ ID NO: 3921959 - DNA, 25 bp, Homo sapien
gtaccggcgcaaccggcagctagag

SEQ ID NO: 3921960 - DNA, 25 bp, Homo sapien
catccagatgtaccggcgcaaccgg

SEQ ID NO: 3921961 - DNA, 25 bp, Homo sapien
ctacatccagatgtaccggcgcaac

SEQ ID NO: 3921962 - DNA, 25 bp, Homo sapien
gatgtaccggcgcaaccggcagcta

SEQ ID NO: 3921963 - DNA, 25 bp, Homo sapien
tcggttcccaggtttgagctctgca

SEQ ID NO: 3921964 - DNA, 25 bp, Homo sapien
tcccttcacccaggtttatggcctc

SEQ ID NO: 3921965 - DNA, 25 bp, Homo sapien
ttcccaggtttgagctctgcagcct

SEQ ID NO: 3921966 - DNA, 25 bp, Homo sapien
tctctcctggagtgagggggctgaa

SEQ ID NO: 3921967 - DNA, 25 bp, Homo sapien
tgtgctggataaagagtacaggaac

SEQ ID NO: 3921968 - DNA, 25 bp, Homo sapien
tgtgaatgtgctggataaagagtac

SEQ ID NO: 3921969 - DNA, 25 bp, Homo sapien
taaagagtacaggaacttgtttgac

SEQ ID NO: 3921970 - DNA, 25 bp, Homo sapien
accatttgctggctattctcctccc

SEQ ID NO: 3921971 - DNA, 25 bp, Homo sapien
ggacagcatgtgagaaagtgcccac

SEQ ID NO: 3921972 - DNA, 25 bp, Homo sapien
caaatccagtagaatgtctgaggtc

SEQ ID NO: 3921973 - DNA, 25 bp, Homo sapien
aggcttgggcgactcataagggaca

SEQ ID NO: 3921974 - DNA, 25 bp, Homo sapien
tagtggaccccaacgtgaaatgatc

SEQ ID NO: 3921975 - DNA, 25 bp, Homo sapien
tgcccactagcaccttgtccttgga

SEQ ID NO: 3921976 - DNA, 25 bp, Homo sapien
ggtgacacaggctgcccactagcac

SEQ ID NO: 3921977 - DNA, 25 bp, Homo sapien
ttgtccttggacactaaggcagagc

SEQ ID NO: 3921978 - DNA, 25 bp, Homo sapien
gacactaaggcagagccttaatgac

SEQ ID NO: 3921979 - DNA, 25 bp, Homo sapien
ggtgcgggcttagaatcaggagtct

SEQ ID NO: 3921980 - DNA, 25 bp, Homo sapien
ctggagagtcctgaagaagttggta

SEQ ID NO: 3921981 - DNA, 25 bp, Homo sapien
aggaaggcccccatcagtaagggct

SEQ ID NO: 3921982 - DNA, 25 bp, Homo sapien
ggataacgggatgctggagtcagtg

SEQ ID NO: 3921983 - DNA, 25 bp, Homo sapien
tcgataagcccgacggatggtgtct

SEQ ID NO: 3921984 - DNA, 25 bp, Homo sapien
tctactgcacgctggtgggtcacct

SEQ ID NO: 3921985 - DNA, 25 bp, Homo sapien
gctcccgggccttgtttcgataagc

SEQ ID NO: 3921986 - DNA, 25 bp, Homo sapien
tctagattctctccgtccactgcca

SEQ ID NO: 3921987 - DNA, 25 bp, Homo sapien
cactgaggaaagcggcccccccagg

SEQ ID NO: 3921988 - DNA, 25 bp, Homo sapien
ccactgaggaaagcggcccccccag

SEQ ID NO: 3921989 - DNA, 25 bp, Homo sapien
ctctatcttcaccatgggctgcacc

SEQ ID NO: 3921990 - DNA, 25 bp, Homo sapien
gggctgcaccttggactcaatgccc

SEQ ID NO: 3921991 - DNA, 25 bp, Homo sapien
aggcttgtggtagcgcccattggtc

SEQ ID NO: 3921992 - DNA, 25 bp, Homo sapien
ttggccgtcccctcagttccactct

SEQ ID NO: 3921993 - DNA, 25 bp, Homo sapien
gtctggccttccgaggcttgtggta

SEQ ID NO: 3921994 - DNA, 25 bp, Homo sapien
gccttccgaggcttgtggtagcgcc

SEQ ID NO: 3921995 - DNA, 25 bp, Homo sapien
aggcaccggggatggggagcgtcta

SEQ ID NO: 3921996 - DNA, 25 bp, Homo sapien
taggcaccggggatggggagcgtct

SEQ ID NO: 3921997 - DNA, 25 bp, Homo sapien
gtaggcaccggggatggggagcgtc

SEQ ID NO: 3921998 - DNA, 25 bp, Homo sapien
ggcaccggggatggggagcgtctac

SEQ ID NO: 3921999 - DNA, 25 bp, Homo sapien
ctggctctgcggagggtgctctcgg

SEQ ID NO: 3922000 - DNA, 25 bp, Homo sapien
ctcggctcaggggttctgtcagcag

SEQ ID NO: 3922001 - DNA, 25 bp, Homo sapien
tctggctctgcggagggtgctctcg

SEQ ID NO: 3922002 - DNA, 25 bp, Homo sapien
gtgctctcggctcaggggttctgtc

SEQ ID NO: 3922003 - DNA, 25 bp, Homo sapien
aaggcatctactggcacgtcttgta

SEQ ID NO: 3922004 - DNA, 25 bp, Homo sapien
tgaaggcatctactggcacgtcttg

SEQ ID NO: 3922005 - DNA, 25 bp, Homo sapien
gcatctactggcacgtcttgtagag

SEQ ID NO: 3922006 - DNA, 25 bp, Homo sapien
cacgtcttgtagaggggggatccct

SEQ ID NO: 3922007 - DNA, 25 bp, Homo sapien
ttccgggaagccgttcaccggcagc

SEQ ID NO: 3922008 - DNA, 25 bp, Homo sapien
cgttcaccggcagcaggtagaagcc

SEQ ID NO: 3922009 - DNA, 25 bp, Homo sapien
ggagaccttgagggcccccagccgc

SEQ ID NO: 3922010 - DNA, 25 bp, Homo sapien
tcttccgggaagccgttcaccggca

SEQ ID NO: 3922011 - DNA, 25 bp, Homo sapien
agtgagtgggtttcaaaccaactat

SEQ ID NO: 3922012 - DNA, 25 bp, Homo sapien
cagggaaccacaatgtgcctggaag

SEQ ID NO: 3922013 - DNA, 25 bp, Homo sapien
tcaaaccaactattaagtaatagta

SEQ ID NO: 3922014 - DNA, 25 bp, Homo sapien
agggaaccacaatgtgcctggaagc

SEQ ID NO: 3922015 - DNA, 25 bp, Homo sapien
gaagtagaaggcccatcctcctttc

SEQ ID NO: 3922016 - DNA, 25 bp, Homo sapien
cctttccctaatctccccagggctg

SEQ ID NO: 3922017 - DNA, 25 bp, Homo sapien
ctttccctaatctccccagggctgt

SEQ ID NO: 3922018 - DNA, 25 bp, Homo sapien
ggcacgggggtgataaggtgacgct

SEQ ID NO: 3922019 - DNA, 25 bp, Homo sapien
ggtgataaggtgacgcttgggtggc

SEQ ID NO: 3922020 - DNA, 25 bp, Homo sapien
tgacgcttgggtggcgtgtcctgcc

SEQ ID NO: 3922021 - DNA, 25 bp, Homo sapien
cttgggtggcgtgtcctgccgggct

SEQ ID NO: 3922022 - DNA, 25 bp, Homo sapien
tccacaagcatcaccatgctgtcga

SEQ ID NO: 3922023 - DNA, 25 bp, Homo sapien
caccatgctgtcgaagcggcccagg

SEQ ID NO: 3922024 - DNA, 25 bp, Homo sapien
gcccaggtctgtgggggccaccaca

SEQ ID NO: 3922025 - DNA, 25 bp, Homo sapien
tgagggcctcaaaagcctccagctc

SEQ ID NO: 3922026 - DNA, 25 bp, Homo sapien
agcttctccggcctgtcgaggatgg

SEQ ID NO: 3922027 - DNA, 25 bp, Homo sapien
ttctccggcctgtcgaggatggcca

SEQ ID NO: 3922028 - DNA, 25 bp, Homo sapien
ggtcctctatgcctccctcgtgcac

SEQ ID NO: 3922029 - DNA, 25 bp, Homo sapien
tccggcctgtcgaggatggccagca

SEQ ID NO: 3922030 - DNA, 25 bp, Homo sapien
ggtcagacagcagtgggggcttcca

SEQ ID NO: 3922031 - DNA, 25 bp, Homo sapien
gtcagacagcagtgggggcttccag

SEQ ID NO: 3922032 - DNA, 25 bp, Homo sapien
aggtcagacagcagtgggggcttcc

SEQ ID NO: 3922033 - DNA, 25 bp, Homo sapien
acagacatacaacacagccccactt

SEQ ID NO: 3922034 - DNA, 25 bp, Homo sapien
tgtgcagactcctcacaaagagccc

SEQ ID NO: 3922035 - DNA, 25 bp, Homo sapien
ccccactttgagtaagatgaagggt

SEQ ID NO: 3922036 - DNA, 25 bp, Homo sapien
tcctcacaaagagcccagtgtacac

SEQ ID NO: 3922037 - DNA, 25 bp, Homo sapien
gcaggcgactgcagggactcacttt

SEQ ID NO: 3922038 - DNA, 25 bp, Homo sapien
tgtgactcatcaccatgggcgttta

SEQ ID NO: 3922039 - DNA, 25 bp, Homo sapien
tctaatgtgtgtctcctgggttacc

SEQ ID NO: 3922040 - DNA, 25 bp, Homo sapien
aaggattacttacttgggcaacagg

SEQ ID NO: 3922041 - DNA, 25 bp, Homo sapien
gagcagtggcgggtgacagccagca

SEQ ID NO: 3922042 - DNA, 25 bp, Homo sapien
cctgaacctgctcatccacattagg

SEQ ID NO: 3922043 - DNA, 25 bp, Homo sapien
tcatccacattaggcagctggctgg

SEQ ID NO: 3922044 - DNA, 25 bp, Homo sapien
gacagccagcacctcgtcatcagtc

SEQ ID NO: 3922045 - DNA, 25 bp, Homo sapien
tccaggtgacaaacttctgtaccgg

SEQ ID NO: 3922046 - DNA, 25 bp, Homo sapien
gtgacaaacttctgtaccgggccca

SEQ ID NO: 3922047 - DNA, 25 bp, Homo sapien
caggtgacaaacttctgtaccgggc

SEQ ID NO: 3922048 - DNA, 25 bp, Homo sapien
gtctccaggtgacaaacttctgtac

SEQ ID NO: 3922049 - DNA, 25 bp, Homo sapien
tgtttagacccagcttaaatcagca

SEQ ID NO: 3922050 - DNA, 25 bp, Homo sapien
gatgtttagacccagcttaaatcag

SEQ ID NO: 3922051 - DNA, 25 bp, Homo sapien
gtttagacccagcttaaatcagcag

SEQ ID NO: 3922052 - DNA, 25 bp, Homo sapien
cagatgtttagacccagcttaaatc

SEQ ID NO: 3922053 - DNA, 25 bp, Homo sapien
gagccaagacgtgctttatttttct

SEQ ID NO: 3922054 - DNA, 25 bp, Homo sapien
agccaagacgtgctttatttttctt

SEQ ID NO: 3922055 - DNA, 25 bp, Homo sapien
tgagccaagacgtgctttatttttc

SEQ ID NO: 3922056 - DNA, 25 bp, Homo sapien
taaggcgggtagatagcttcagtcc

SEQ ID NO: 3922057 - DNA, 25 bp, Homo sapien
cgggtagatagcttcagtccaggaa

SEQ ID NO: 3922058 - DNA, 25 bp, Homo sapien
agactaaggcgggtagatagcttca

SEQ ID NO: 3922059 - DNA, 25 bp, Homo sapien
aggcgggtagatagcttcagtccag

SEQ ID NO: 3922060 - DNA, 25 bp, Homo sapien
ttcatcagcgtcttggagcgctgca

SEQ ID NO: 3922061 - DNA, 25 bp, Homo sapien
cccttgaagaagaggttcatcagcg

SEQ ID NO: 3922062 - DNA, 25 bp, Homo sapien
ctttctctatgtccaggcgagggta

SEQ ID NO: 3922063 - DNA, 25 bp, Homo sapien
tccaggcgagggtaagttttggcca

SEQ ID NO: 3922064 - DNA, 25 bp, Homo sapien
caaagccgtcttgggagactcagag

SEQ ID NO: 3922065 - DNA, 25 bp, Homo sapien
cgaggcagatgtccatgcggtccga

SEQ ID NO: 3922066 - DNA, 25 bp, Homo sapien
cgcacgaagagacgctggagctgct

SEQ ID NO: 3922067 - DNA, 25 bp, Homo sapien
caaggtcagatagctctgggagcgc

SEQ ID NO: 3922068 - DNA, 25 bp, Homo sapien
tccttgtaggcaggataccggccgg

SEQ ID NO: 3922069 - DNA, 25 bp, Homo sapien
cttgtaggcaggataccggccggtc

SEQ ID NO: 3922070 - DNA, 25 bp, Homo sapien
ctccttgtaggcaggataccggccg

SEQ ID NO: 3922071 - DNA, 25 bp, Homo sapien
tgtaggcaggataccggccggtctc

SEQ ID NO: 3922072 - DNA, 25 bp, Homo sapien
gcctggctgtggctgatgtcgtcaa

SEQ ID NO: 3922073 - DNA, 25 bp, Homo sapien
gtcagcatgatgtgcgtttggccct

SEQ ID NO: 3922074 - DNA, 25 bp, Homo sapien
aacctgacaccgttggctgccagga

SEQ ID NO: 3922075 - DNA, 25 bp, Homo sapien
gcatgatgtgcgtttggcccttcag

SEQ ID NO: 3922076 - DNA, 25 bp, Homo sapien
ctcggccagcccaccatggtccact

SEQ ID NO: 3922077 - DNA, 25 bp, Homo sapien
cctcggccagcccaccatggtccac

SEQ ID NO: 3922078 - DNA, 25 bp, Homo sapien
tcctcggccagcccaccatggtcca

SEQ ID NO: 3922079 - DNA, 25 bp, Homo sapien
ttctcttggacacaagactgcacca

SEQ ID NO: 3922080 - DNA, 25 bp, Homo sapien
cctcactgagacaggtggttggcca

SEQ ID NO: 3922081 - DNA, 25 bp, Homo sapien
cattctcagttctacccgaagacac

SEQ ID NO: 3922082 - DNA, 25 bp, Homo sapien
ggcgtcagtctgataggcccctggc

SEQ ID NO: 3922083 - DNA, 25 bp, Homo sapien
ggacacatagatgcccaggccaaac

SEQ ID NO: 3922084 - DNA, 25 bp, Homo sapien
tataggtggacgatgcgccggacac

SEQ ID NO: 3922085 - DNA, 25 bp, Homo sapien
catcttctgagctggtgtcggaggg

SEQ ID NO: 3922086 - DNA, 25 bp, Homo sapien
cagaagtcgtcggaggttgtgtata

SEQ ID NO: 3922087 - DNA, 25 bp, Homo sapien
gcagcagaaccactgggatctggga

SEQ ID NO: 3922088 - DNA, 25 bp, Homo sapien
tgcgtttcctgagccagcgagcagg

SEQ ID NO: 3922089 - DNA, 25 bp, Homo sapien
gggaaagatgcagcctctccttatt

SEQ ID NO: 3922090 - DNA, 25 bp, Homo sapien
cttacagcacccctgtagagaggtg

SEQ ID NO: 3922091 - DNA, 25 bp, Homo sapien
gcgctacccatggtggtgctctcca

SEQ ID NO: 3922092 - DNA, 25 bp, Homo sapien
ttggagaacttgatgcccggcacac

SEQ ID NO: 3922093 - DNA, 25 bp, Homo sapien
catgcgccgaaccatcatgtgcagg

SEQ ID NO: 3922094 - DNA, 25 bp, Homo sapien
gctggtcagcacctttacggcgcta

SEQ ID NO: 3922095 - DNA, 25 bp, Homo sapien
catcctaagcgtggacttcagcctg

SEQ ID NO: 3922096 - DNA, 25 bp, Homo sapien
ggactcttccgtctgtccctgacag

SEQ ID NO: 3922097 - DNA, 25 bp, Homo sapien
cattctgacttgagggttggccctg

SEQ ID NO: 3922098 - DNA, 25 bp, Homo sapien
tgttcccagtgcctagggatctgtc

SEQ ID NO: 3922099 - DNA, 25 bp, Homo sapien
tggactcttctccacccggactgaa

SEQ ID NO: 3922100 - DNA, 25 bp, Homo sapien
ttctccacccggactgaatggatga

SEQ ID NO: 3922101 - DNA, 25 bp, Homo sapien
gactgaatggatgatgtcactttca

SEQ ID NO: 3922102 - DNA, 25 bp, Homo sapien
ccacccggactgaatggatgatgtc

SEQ ID NO: 3922103 - DNA, 25 bp, Homo sapien
ggtgaagcatagactggtgtatgac

SEQ ID NO: 3922104 - DNA, 25 bp, Homo sapien
cagagggtgaagcatagactggtgt

SEQ ID NO: 3922105 - DNA, 25 bp, Homo sapien
cctgagcaacatgccccaccctgct

SEQ ID NO: 3922106 - DNA, 25 bp, Homo sapien
aagcatagactggtgtatgacaggg

SEQ ID NO: 3922107 - DNA, 25 bp, Homo sapien
ttgatgaggatgacgcgtcccatgg

SEQ ID NO: 3922108 - DNA, 25 bp, Homo sapien
ccttagcaggtatcgcgttgcggtg

SEQ ID NO: 3922109 - DNA, 25 bp, Homo sapien
cccatgggcgatgaggctcggattc

SEQ ID NO: 3922110 - DNA, 25 bp, Homo sapien
cagccgttgttgcttccttagcagg

SEQ ID NO: 3922111 - DNA, 25 bp, Homo sapien
gaaggaatctgctagctctggagag

SEQ ID NO: 3922112 - DNA, 25 bp, Homo sapien
ggtctcagtaacgtgaaggccctcg

SEQ ID NO: 3922113 - DNA, 25 bp, Homo sapien
ggcaccctacaggtccagaaggaat

SEQ ID NO: 3922114 - DNA, 25 bp, Homo sapien
tgcgtgcttcgagctccatgagcct

SEQ ID NO: 3922115 - DNA, 25 bp, Homo sapien
tgtggcgccgccagccttgtcaaac

SEQ ID NO: 3922116 - DNA, 25 bp, Homo sapien
cagccttgtcaaaccacccgcaggc

SEQ ID NO: 3922117 - DNA, 25 bp, Homo sapien
ctggtcgctggtgtggcgccgccag

SEQ ID NO: 3922118 - DNA, 25 bp, Homo sapien
tcgctggtgtggcgccgccagcctt

SEQ ID NO: 3922119 - DNA, 25 bp, Homo sapien
cctagggcctatctccaaggatggg

SEQ ID NO: 3922120 - DNA, 25 bp, Homo sapien
tgccatccaggagattcatgcccat

SEQ ID NO: 3922121 - DNA, 25 bp, Homo sapien
tggtatttgcaacccccctgtgctg

SEQ ID NO: 3922122 - DNA, 25 bp, Homo sapien
ccatggaaatgtaccttttggtgcc

SEQ ID NO: 3922123 - DNA, 25 bp, Homo sapien
gatcagagcacataacccctcctgt

SEQ ID NO: 3922124 - DNA, 25 bp, Homo sapien
gagacttatagacactagtaggaca

SEQ ID NO: 3922125 - DNA, 25 bp, Homo sapien
gcttgagtgtccatgcatatacata

SEQ ID NO: 3922126 - DNA, 25 bp, Homo sapien
catgctagcctagtatgttctgaca

SEQ ID NO: 3922127 - DNA, 25 bp, Homo sapien
tcagtggctagtccaaataaaatat

SEQ ID NO: 3922128 - DNA, 25 bp, Homo sapien
ggcccgggcatcagtggctagtcca

SEQ ID NO: 3922129 - DNA, 25 bp, Homo sapien
tggtggtaagttcacagagtgtagt

SEQ ID NO: 3922130 - DNA, 25 bp, Homo sapien
tagttagatcccaactcccatgacc

SEQ ID NO: 3922131 - DNA, 25 bp, Homo sapien
gatacatttttctgggcgtcctaag

SEQ ID NO: 3922132 - DNA, 25 bp, Homo sapien
tgcaggtaacctttggagtgagcca

SEQ ID NO: 3922133 - DNA, 25 bp, Homo sapien
gacacaccgggtcataaaggaacta

SEQ ID NO: 3922134 - DNA, 25 bp, Homo sapien
tagccgggagctgtttatggacttc

SEQ ID NO: 3922135 - DNA, 25 bp, Homo sapien
gaagcagtaattccaatcctaggca

SEQ ID NO: 3922136 - DNA, 25 bp, Homo sapien
caacaataccaactcttggcaagga

SEQ ID NO: 3922137 - DNA, 25 bp, Homo sapien
ggactagcccagatagagtgagacc

SEQ ID NO: 3922138 - DNA, 25 bp, Homo sapien
tatgttatcaccagggtaggctagg

SEQ ID NO: 3922139 - DNA, 25 bp, Homo sapien
ttatctttgtgcctacctggatgca

SEQ ID NO: 3922140 - DNA, 25 bp, Homo sapien
tctacttaataacagcggatcccct

SEQ ID NO: 3922141 - DNA, 25 bp, Homo sapien
cctggatgcacggttccagcatgtt

SEQ ID NO: 3922142 - DNA, 25 bp, Homo sapien
catcagcgactcagaaaatccaggt

SEQ ID NO: 3922143 - DNA, 25 bp, Homo sapien
tcgacacttattccaaggaccaggg

SEQ ID NO: 3922144 - DNA, 25 bp, Homo sapien
taccgagaatttgacgtgccaccag

SEQ ID NO: 3922145 - DNA, 25 bp, Homo sapien
cctatttcgaatttgagaccgggag

SEQ ID NO: 3922146 - DNA, 25 bp, Homo sapien
tgttgttgaatatctgctccaggcc

SEQ ID NO: 3922147 - DNA, 25 bp, Homo sapien
tattcaccgcaaataaatgagagcg

SEQ ID NO: 3922148 - DNA, 25 bp, Homo sapien
tatagttcgcttgaaatccctggaa

SEQ ID NO: 3922149 - DNA, 25 bp, Homo sapien
tgtcctaggttgctcacacccgaga

SEQ ID NO: 3922150 - DNA, 25 bp, Homo sapien
taataaacgtgctgagatgccgagg

SEQ ID NO: 3922151 - DNA, 25 bp, Homo sapien
tttttactcacaatcactggtcctg

SEQ ID NO: 3922152 - DNA, 25 bp, Homo sapien
acctggtactctattctgagcatga

SEQ ID NO: 3922153 - DNA, 25 bp, Homo sapien
tgcgaggagtagataggcctaaact

SEQ ID NO: 3922154 - DNA, 25 bp, Homo sapien
tctggtaggcctggagattccctgg

SEQ ID NO: 3922155 - DNA, 25 bp, Homo sapien
ggaggcctgggtaatcaatcttgca

SEQ ID NO: 3922156 - DNA, 25 bp, Homo sapien
ggccgacagccagagattaattcaa

SEQ ID NO: 3922157 - DNA, 25 bp, Homo sapien
caactgatcgagttataaagagcgg

SEQ ID NO: 3922158 - DNA, 25 bp, Homo sapien
agcgggaggcctgggtaatcaatct

SEQ ID NO: 3922159 - DNA, 25 bp, Homo sapien
tttaatgttcgcaaagagccctatg

SEQ ID NO: 3922160 - DNA, 25 bp, Homo sapien
tcctcagtgttctccgtaggcggat

SEQ ID NO: 3922161 - DNA, 25 bp, Homo sapien
gagagagtgctgacttgcccatgcc

SEQ ID NO: 3922162 - DNA, 25 bp, Homo sapien
tggtgtcagagaacactcatccggg

SEQ ID NO: 3922163 - DNA, 25 bp, Homo sapien
tcaagtggttgcttccaggatgacg

SEQ ID NO: 3922164 - DNA, 25 bp, Homo sapien
tggttgcttccaggatgacgcagcc

SEQ ID NO: 3922165 - DNA, 25 bp, Homo sapien
caagtggttgcttccaggatgacgc

SEQ ID NO: 3922166 - DNA, 25 bp, Homo sapien
agtggttgcttccaggatgacgcag

SEQ ID NO: 3922167 - DNA, 25 bp, Homo sapien
tagtcctctcaacccatcaaggtgg

SEQ ID NO: 3922168 - DNA, 25 bp, Homo sapien
gcctgtttccaagcaaaggttcaag

SEQ ID NO: 3922169 - DNA, 25 bp, Homo sapien
ttatctgagaccaaagccgatggag

SEQ ID NO: 3922170 - DNA, 25 bp, Homo sapien
gatcccgagggctgtcttgtcatga

SEQ ID NO: 3922171 - DNA, 25 bp, Homo sapien
cttcagcatgtcctcccaccatgga

SEQ ID NO: 3922172 - DNA, 25 bp, Homo sapien
ccttcagcatgtcctcccaccatgg

SEQ ID NO: 3922173 - DNA, 25 bp, Homo sapien
tggactggaattccgaagcactggt

SEQ ID NO: 3922174 - DNA, 25 bp, Homo sapien
tccttcagcatgtcctcccaccatg

SEQ ID NO: 3922175 - DNA, 25 bp, Homo sapien
tgttcctgcactcctagcagcgtgg

SEQ ID NO: 3922176 - DNA, 25 bp, Homo sapien
cctgcactcctagcagcgtggccat

SEQ ID NO: 3922177 - DNA, 25 bp, Homo sapien
tgatgttcctgcactcctagcagcg

SEQ ID NO: 3922178 - DNA, 25 bp, Homo sapien
gttcctgcactcctagcagcgtggc

SEQ ID NO: 3922179 - DNA, 25 bp, Homo sapien
actccaggcccataattgaatataa

SEQ ID NO: 3922180 - DNA, 25 bp, Homo sapien
tagatcttttccacgcgtagaatag

SEQ ID NO: 3922181 - DNA, 25 bp, Homo sapien
tataaaggcccagaagctagtgcaa

SEQ ID NO: 3922182 - DNA, 25 bp, Homo sapien
tcctgccatagatcttttccacgcg

SEQ ID NO: 3922183 - DNA, 25 bp, Homo sapien
cagagttattgggaggccagtcctc

SEQ ID NO: 3922184 - DNA, 25 bp, Homo sapien
catctgtccctgacttagaaggagg

SEQ ID NO: 3922185 - DNA, 25 bp, Homo sapien
ccactggatgcttggtctgcaccaa

SEQ ID NO: 3922186 - DNA, 25 bp, Homo sapien
tctgtcccgtaagacatgcctgcag

SEQ ID NO: 3922187 - DNA, 25 bp, Homo sapien
gaggctcccggcgtcggtgaggctg

SEQ ID NO: 3922188 - DNA, 25 bp, Homo sapien
ggtaagggtgccgatgaggctcccg

SEQ ID NO: 3922189 - DNA, 25 bp, Homo sapien
ttagcaccagctgggactaaactgc

SEQ ID NO: 3922190 - DNA, 25 bp, Homo sapien
cagaaatagacgataaatggaggta

SEQ ID NO: 3922191 - DNA, 25 bp, Homo sapien
tcactgagccttgggcagcagtgga

SEQ ID NO: 3922192 - DNA, 25 bp, Homo sapien
ggcagcagtggaggatgtgccggca

SEQ ID NO: 3922193 - DNA, 25 bp, Homo sapien
gatgtgccggcaggggcagcaacca

SEQ ID NO: 3922194 - DNA, 25 bp, Homo sapien
cagtggaggatgtgccggcaggggc

SEQ ID NO: 3922195 - DNA, 25 bp, Homo sapien
cagtgtttgcgtctggtctgcccct

SEQ ID NO: 3922196 - DNA, 25 bp, Homo sapien
cagcttgtagtgagtggagtcaaga

SEQ ID NO: 3922197 - DNA, 25 bp, Homo sapien
gaaagcagtgtttgcgtctggtctg

SEQ ID NO: 3922198 - DNA, 25 bp, Homo sapien
ttgtagtgagtggagtcaagaaagc

SEQ ID NO: 3922199 - DNA, 25 bp, Homo sapien
ctgcctcagggcctgggctccatac

SEQ ID NO: 3922200 - DNA, 25 bp, Homo sapien
cgtcctgcctcagggcctgggctcc

SEQ ID NO: 3922201 - DNA, 25 bp, Homo sapien
tcctgcctcagggcctgggctccat

SEQ ID NO: 3922202 - DNA, 25 bp, Homo sapien
gtcctgcctcagggcctgggctcca

SEQ ID NO: 3922203 - DNA, 25 bp, Homo sapien
tcagacgccttgtgggctggactcc

SEQ ID NO: 3922204 - DNA, 25 bp, Homo sapien
tgacaggtgtttcgcagctgagccc

SEQ ID NO: 3922205 - DNA, 25 bp, Homo sapien
tctgtccgtctctgggaatggtcgc

SEQ ID NO: 3922206 - DNA, 25 bp, Homo sapien
ccaacaggccgggaagacagttgac

SEQ ID NO: 3922207 - DNA, 25 bp, Homo sapien
gaatctgcagccgtggtctgacgac

SEQ ID NO: 3922208 - DNA, 25 bp, Homo sapien
cagtttatctcctgggaacgcacca

SEQ ID NO: 3922209 - DNA, 25 bp, Homo sapien
taacggcttgttcccggtgcagacg

SEQ ID NO: 3922210 - DNA, 25 bp, Homo sapien
aatcactagcgtcacgtcggtggcg

SEQ ID NO: 3922211 - DNA, 25 bp, Homo sapien
gaagtcgtctccctctacctgggca

SEQ ID NO: 3922212 - DNA, 25 bp, Homo sapien
aaatagcctccagcacctcagaagt

SEQ ID NO: 3922213 - DNA, 25 bp, Homo sapien
gccaggccgcgcaaaatccagaaat

SEQ ID NO: 3922214 - DNA, 25 bp, Homo sapien
tcagggtccgaagacagcagccagc

SEQ ID NO: 3922215 - DNA, 25 bp, Homo sapien
taaggacctctagccagctgaagca

SEQ ID NO: 3922216 - DNA, 25 bp, Homo sapien
tctttggcttcagaaccgacggcaa

SEQ ID NO: 3922217 - DNA, 25 bp, Homo sapien
tgggtggcacacagagaatctggct

SEQ ID NO: 3922218 - DNA, 25 bp, Homo sapien
gacggcaatcaccaaattcctgcgg

SEQ ID NO: 3922219 - DNA, 25 bp, Homo sapien
tcacactgcagaaggtgacacccag

SEQ ID NO: 3922220 - DNA, 25 bp, Homo sapien
tggatgggtcctcagtcctgaactg

SEQ ID NO: 3922221 - DNA, 25 bp, Homo sapien
tgttggggatgctgccctcacactg

SEQ ID NO: 3922222 - DNA, 25 bp, Homo sapien
taagagtggcctctacccaagaacg

SEQ ID NO: 3922223 - DNA, 25 bp, Homo sapien
tttgaagttgggataagcaactcca

SEQ ID NO: 3922224 - DNA, 25 bp, Homo sapien
ccaggaatttgaagttgggataagc

SEQ ID NO: 3922225 - DNA, 25 bp, Homo sapien
caggaatttgaagttgggataagca

SEQ ID NO: 3922226 - DNA, 25 bp, Homo sapien
agttgggataagcaactccagcttg

SEQ ID NO: 3922227 - DNA, 25 bp, Homo sapien
agtcattgtactctatctttgttac

SEQ ID NO: 3922228 - DNA, 25 bp, Homo sapien
gagtcattgtactctatctttgtta

SEQ ID NO: 3922229 - DNA, 25 bp, Homo sapien
atagagtcattgtactctatctttg

SEQ ID NO: 3922230 - DNA, 25 bp, Homo sapien
cttcatagagtcattgtactctatc

SEQ ID NO: 3922231 - DNA, 25 bp, Homo sapien
aggtccgtattggaagccttgactc

SEQ ID NO: 3922232 - DNA, 25 bp, Homo sapien
tcaggtccgtattggaagccttgac

SEQ ID NO: 3922233 - DNA, 25 bp, Homo sapien
ccatcaatttcaggtccgtattgga

SEQ ID NO: 3922234 - DNA, 25 bp, Homo sapien
aatttcaggtccgtattggaagcct

SEQ ID NO: 3922235 - DNA, 25 bp, Homo sapien
catcactaactttacccagcgcagg

SEQ ID NO: 3922236 - DNA, 25 bp, Homo sapien
gctcacactggtaattaatgcgata

SEQ ID NO: 3922237 - DNA, 25 bp, Homo sapien
ggcctcgaaccatttgcagctcaca

SEQ ID NO: 3922238 - DNA, 25 bp, Homo sapien
tctttaacaacagctacataattag

SEQ ID NO: 3922239 - DNA, 25 bp, Homo sapien
cgtctgggtaggctattaagagtaa

SEQ ID NO: 3922240 - DNA, 25 bp, Homo sapien
ctgggtttccagtctcggggcgtct

SEQ ID NO: 3922241 - DNA, 25 bp, Homo sapien
taagagtaattagcatcttttgcgc

SEQ ID NO: 3922242 - DNA, 25 bp, Homo sapien
tgcgcatgcagatttacttcgctca

SEQ ID NO: 3922243 - DNA, 25 bp, Homo sapien
tacaaattgtgaagaaaattcaaaa

SEQ ID NO: 3922244 - DNA, 25 bp, Homo sapien
tccatcaaattgtctacaaattgtg

SEQ ID NO: 3922245 - DNA, 25 bp, Homo sapien
ctaatccatcaaattgtctacaaat

SEQ ID NO: 3922246 - DNA, 25 bp, Homo sapien
catcaaattgtctacaaattgtgaa

SEQ ID NO: 3922247 - DNA, 25 bp, Homo sapien
atatggtcgccagcgccggcgcgct

SEQ ID NO: 3922248 - DNA, 25 bp, Homo sapien
gggcccggctattgtcgcctgtcag

SEQ ID NO: 3922249 - DNA, 25 bp, Homo sapien
tgggctgcggagggccgcggccgtg

SEQ ID NO: 3922250 - DNA, 25 bp, Homo sapien
gctattgtcgcctgtcagcggccgc

SEQ ID NO: 3922251 - DNA, 25 bp, Homo sapien
ccagcctgggtttattgcttcgaga

SEQ ID NO: 3922252 - DNA, 25 bp, Homo sapien
cggcagcccgagagctttgaaaaca

SEQ ID NO: 3922253 - DNA, 25 bp, Homo sapien
tatagaagccatacagaattgcacg

SEQ ID NO: 3922254 - DNA, 25 bp, Homo sapien
gctgcggtgggaagaacccgctata

SEQ ID NO: 3922255 - DNA, 25 bp, Homo sapien
tccacgtcgatctcttcgtcttcct

SEQ ID NO: 3922256 - DNA, 25 bp, Homo sapien
cgtcctccgagcagtcctggctgct

SEQ ID NO: 3922257 - DNA, 25 bp, Homo sapien
gctggtccgtgagcggagaggcagg

SEQ ID NO: 3922258 - DNA, 25 bp, Homo sapien
ctggccggctggtccgtgagcggag

SEQ ID NO: 3922259 - DNA, 25 bp, Homo sapien
tccgagttctgctcgagttcggcca

SEQ ID NO: 3922260 - DNA, 25 bp, Homo sapien
ttctgctcgagttcggccagcgcca

SEQ ID NO: 3922261 - DNA, 25 bp, Homo sapien
cgagttctgctcgagttcggccagc

SEQ ID NO: 3922262 - DNA, 25 bp, Homo sapien
gcctccgagttctgctcgagttcgg

SEQ ID NO: 3922263 - DNA, 25 bp, Homo sapien
cttagcgcgccgattctggaaccag

SEQ ID NO: 3922264 - DNA, 25 bp, Homo sapien
agtttcttggcggactctacgtcgg

SEQ ID NO: 3922265 - DNA, 25 bp, Homo sapien
cagctgctgcgcgatttggtcgcga

SEQ ID NO: 3922266 - DNA, 25 bp, Homo sapien
ccaaagatggtcataccgtcgcggc

SEQ ID NO: 3922267 - DNA, 25 bp, Homo sapien
cagacagagacaccctaattgcggt

SEQ ID NO: 3922268 - DNA, 25 bp, Homo sapien
cagactgcggaaagagcttggccac

SEQ ID NO: 3922269 - DNA, 25 bp, Homo sapien
caagtcttggctatggcaaaccatc

SEQ ID NO: 3922270 - DNA, 25 bp, Homo sapien
tgtccggcctgcagtctaccaatgt

SEQ ID NO: 3922271 - DNA, 25 bp, Homo sapien
cccttaaacgtcttgctggcgagct

SEQ ID NO: 3922272 - DNA, 25 bp, Homo sapien
gaggatgtcctcgatgctgaacggc

SEQ ID NO: 3922273 - DNA, 25 bp, Homo sapien
gcgagtaacttctccgcacagacgg

SEQ ID NO: 3922274 - DNA, 25 bp, Homo sapien
tgctgaacggcgtcagtggcttgtt

SEQ ID NO: 3922275 - DNA, 25 bp, Homo sapien
ccgcggggacccagcccgcgggcag

SEQ ID NO: 3922276 - DNA, 25 bp, Homo sapien
gccgcggggacccagcccgcgggca

SEQ ID NO: 3922277 - DNA, 25 bp, Homo sapien
gcggctcgggccgcggggacccagc

SEQ ID NO: 3922278 - DNA, 25 bp, Homo sapien
gggtggaaaggaggccgcactgggc

SEQ ID NO: 3922279 - DNA, 25 bp, Homo sapien
aggcagcggcgggtggaaaggaggc

SEQ ID NO: 3922280 - DNA, 25 bp, Homo sapien
tcgggcgccggacggcgcgggcagg

SEQ ID NO: 3922281 - DNA, 25 bp, Homo sapien
cggcgggtggaaaggaggccgcact

SEQ ID NO: 3922282 - DNA, 25 bp, Homo sapien
cgcggggccgattagcgcggcggct

SEQ ID NO: 3922283 - DNA, 25 bp, Homo sapien
gcggggccgattagcgcggcggctg

SEQ ID NO: 3922284 - DNA, 25 bp, Homo sapien
cggggccgattagcgcggcggctga

SEQ ID NO: 3922285 - DNA, 25 bp, Homo sapien
tgcgcggggctccagtttcgccaac

SEQ ID NO: 3922286 - DNA, 25 bp, Homo sapien
gcgctgcgcggggctccagtttcgc

SEQ ID NO: 3922287 - DNA, 25 bp, Homo sapien
gctgcgcggggctccagtttcgcca

SEQ ID NO: 3922288 - DNA, 25 bp, Homo sapien
ctggggcttccagcaatccggggcc

SEQ ID NO: 3922289 - DNA, 25 bp, Homo sapien
tggccccgggtcctggcggccgcag

SEQ ID NO: 3922290 - DNA, 25 bp, Homo sapien
caggtggctcggcagtggctcctgg

SEQ ID NO: 3922291 - DNA, 25 bp, Homo sapien
aaaggtgtcaggtggctcggcagtg

SEQ ID NO: 3922292 - DNA, 25 bp, Homo sapien
cctggcggccgcagttggaagagcc

SEQ ID NO: 3922293 - DNA, 25 bp, Homo sapien
gggcaattgactattgctaacaagt

SEQ ID NO: 3922294 - DNA, 25 bp, Homo sapien
taacaagttagccttgatcgcggtg

SEQ ID NO: 3922295 - DNA, 25 bp, Homo sapien
gagacggggcaattgactattgcta

SEQ ID NO: 3922296 - DNA, 25 bp, Homo sapien
gatcgcggtgtaatcaattatctgc

SEQ ID NO: 3922297 - DNA, 25 bp, Homo sapien
tacctcctccggcaatcttgctcac

SEQ ID NO: 3922298 - DNA, 25 bp, Homo sapien
tgctcactttcctccggcagccgct

SEQ ID NO: 3922299 - DNA, 25 bp, Homo sapien
ctggggccaccaacggcctgatgat

SEQ ID NO: 3922300 - DNA, 25 bp, Homo sapien
ccaccaacggcctgatgatgggcgt

SEQ ID NO: 3922301 - DNA, 25 bp, Homo sapien
ttcagttgtttgtttggaattgtgg

SEQ ID NO: 3922302 - DNA, 25 bp, Homo sapien
ttgtttggaattgtggctggcagct

SEQ ID NO: 3922303 - DNA, 25 bp, Homo sapien
tgtttgtttggaattgtggctggca

SEQ ID NO: 3922304 - DNA, 25 bp, Homo sapien
agttgtttgtttggaattgtggctg

SEQ ID NO: 3922305 - DNA, 25 bp, Homo sapien
cttcgctgctgaaaaaccgcattgt

SEQ ID NO: 3922306 - DNA, 25 bp, Homo sapien
ctcctgggaccccaatccgcttgcc

SEQ ID NO: 3922307 - DNA, 25 bp, Homo sapien
gaccccaatccgcttgcctcttgta

SEQ ID NO: 3922308 - DNA, 25 bp, Homo sapien
gctgctgaaaaaccgcattgtgtgg

SEQ ID NO: 3922309 - DNA, 25 bp, Homo sapien
aacggcccagaaacatcaaagtctg

SEQ ID NO: 3922310 - DNA, 25 bp, Homo sapien
tcacagaggtctcactactgtcggg

SEQ ID NO: 3922311 - DNA, 25 bp, Homo sapien
tccctttcacagaggtctcactact

SEQ ID NO: 3922312 - DNA, 25 bp, Homo sapien
actcaaacggcccagaaacatcaaa

SEQ ID NO: 3922313 - DNA, 25 bp, Homo sapien
tgtggaaaacccagcatctgcagtg

SEQ ID NO: 3922314 - DNA, 25 bp, Homo sapien
gcggcgtggttccaagcacagtgaa

SEQ ID NO: 3922315 - DNA, 25 bp, Homo sapien
tctgtgctcagagccgggatccctc

SEQ ID NO: 3922316 - DNA, 25 bp, Homo sapien
aagacgccaggctcggatctgtgct

SEQ ID NO: 3922317 - DNA, 25 bp, Homo sapien
cactgggggaacaagaaccacctct

SEQ ID NO: 3922318 - DNA, 25 bp, Homo sapien
gccatctgctttccgggctgtgacc

SEQ ID NO: 3922319 - DNA, 25 bp, Homo sapien
gggggaacaagaaccacctctgcag

SEQ ID NO: 3922320 - DNA, 25 bp, Homo sapien
ctgtgaccgacagagccactagggt

SEQ ID NO: 3922321 - DNA, 25 bp, Homo sapien
cggcgcacaaatgctcaactttatg

SEQ ID NO: 3922322 - DNA, 25 bp, Homo sapien
cagtgccaaacgagccagcgtgtag

SEQ ID NO: 3922323 - DNA, 25 bp, Homo sapien
cgtgtaggcgttactgcgccggcct

SEQ ID NO: 3922324 - DNA, 25 bp, Homo sapien
gggtggtattgtcggcgcacaaatg

SEQ ID NO: 3922325 - DNA, 25 bp, Homo sapien
cccgtttctgtccaagccagggaga

SEQ ID NO: 3922326 - DNA, 25 bp, Homo sapien
tccggctgcagccaatcaatcccgt

SEQ ID NO: 3922327 - DNA, 25 bp, Homo sapien
caatcaatcccgtcactctgggggg

SEQ ID NO: 3922328 - DNA, 25 bp, Homo sapien
gcctggagccagcaattgcgcaagg

SEQ ID NO: 3922329 - DNA, 25 bp, Homo sapien
tatgtgtacaacctctgacttctaa

SEQ ID NO: 3922330 - DNA, 25 bp, Homo sapien
atcaaggcgccaagagattcagtgt

SEQ ID NO: 3922331 - DNA, 25 bp, Homo sapien
taagctatgtgtacaacctctgact

SEQ ID NO: 3922332 - DNA, 25 bp, Homo sapien
ctgggcttaagctatgtgtacaacc

SEQ ID NO: 3922333 - DNA, 25 bp, Homo sapien
gtttccccgctaaatgacagaggag

SEQ ID NO: 3922334 - DNA, 25 bp, Homo sapien
ggaccggctcaggaattcagttgac

SEQ ID NO: 3922335 - DNA, 25 bp, Homo sapien
ggcatggcctagtccctaagaagga

SEQ ID NO: 3922336 - DNA, 25 bp, Homo sapien
gctcctagctttgggaaaccacacg

SEQ ID NO: 3922337 - DNA, 25 bp, Homo sapien
ctttgctcttggactgagacaaggc

SEQ ID NO: 3922338 - DNA, 25 bp, Homo sapien
tctcagcaagggtcagataaggaga

SEQ ID NO: 3922339 - DNA, 25 bp, Homo sapien
gtcagataaggagaccgcaatccgc

SEQ ID NO: 3922340 - DNA, 25 bp, Homo sapien
tttgctcttggactgagacaaggct

SEQ ID NO: 3922341 - DNA, 25 bp, Homo sapien
gcccaaaggcttcaaagggcccaga

SEQ ID NO: 3922342 - DNA, 25 bp, Homo sapien
cctcctccggtttgttttccagctg

SEQ ID NO: 3922343 - DNA, 25 bp, Homo sapien
tcctccgcttgtggcccaaaggctt

SEQ ID NO: 3922344 - DNA, 25 bp, Homo sapien
cccagagtggaatgccgcggccaga

SEQ ID NO: 3922345 - DNA, 25 bp, Homo sapien
caaggctctctcgatgaatgtgcag

SEQ ID NO: 3922346 - DNA, 25 bp, Homo sapien
caggccagaatgtagtagtaaactc

SEQ ID NO: 3922347 - DNA, 25 bp, Homo sapien
gatttctagcccaaggaatatgtgg

SEQ ID NO: 3922348 - DNA, 25 bp, Homo sapien
tgactcgaacgtgggagacaggcca

SEQ ID NO: 3922349 - DNA, 25 bp, Homo sapien
atgatacactctcaccattggtcat

SEQ ID NO: 3922350 - DNA, 25 bp, Homo sapien
gatgtgcactaccttgcctagctaa

SEQ ID NO: 3922351 - DNA, 25 bp, Homo sapien
cagatgtgcactaccttgcctagct

SEQ ID NO: 3922352 - DNA, 25 bp, Homo sapien
caccattggtcattgcatggttttc

SEQ ID NO: 3922353 - DNA, 25 bp, Homo sapien
gggaattttgattgggctgggggca

SEQ ID NO: 3922354 - DNA, 25 bp, Homo sapien
aagagggaattttgattgggctggg

SEQ ID NO: 3922355 - DNA, 25 bp, Homo sapien
agagggaattttgattgggctgggg

SEQ ID NO: 3922356 - DNA, 25 bp, Homo sapien
ggaattttgattgggctgggggcag

SEQ ID NO: 3922357 - DNA, 25 bp, Homo sapien
gcaggaactggccgttctctgcaat

SEQ ID NO: 3922358 - DNA, 25 bp, Homo sapien
caggaactggccgttctctgcaata

SEQ ID NO: 3922359 - DNA, 25 bp, Homo sapien
ggaactggccgttctctgcaataac

SEQ ID NO: 3922360 - DNA, 25 bp, Homo sapien
aagtgcaggaactggccgttctctg

SEQ ID NO: 3922361 - DNA, 25 bp, Homo sapien
ggattaggagccgataatactgttg

SEQ ID NO: 3922362 - DNA, 25 bp, Homo sapien
taatactgttgacctttcttaatgt

SEQ ID NO: 3922363 - DNA, 25 bp, Homo sapien
gacctttcttaatgtctactggctg

SEQ ID NO: 3922364 - DNA, 25 bp, Homo sapien
ccaaataaacagtaactaattggat

SEQ ID NO: 3922365 - DNA, 25 bp, Homo sapien
gccgctcctcggatggagctgttaa

SEQ ID NO: 3922366 - DNA, 25 bp, Homo sapien
cagatgttgccgctcctcggatgga

SEQ ID NO: 3922367 - DNA, 25 bp, Homo sapien
caatggtaattaggagggccctcat

SEQ ID NO: 3922368 - DNA, 25 bp, Homo sapien
agccggctgagagccgataaagccg

SEQ ID NO: 3922369 - DNA, 25 bp, Homo sapien
gggtttcgcactgcgccgcgggtcg

SEQ ID NO: 3922370 - DNA, 25 bp, Homo sapien
actgcgccgcgggtcgaagtaccgc

SEQ ID NO: 3922371 - DNA, 25 bp, Homo sapien
agtaccgcgagttggccctgactgt

SEQ ID NO: 3922372 - DNA, 25 bp, Homo sapien
tggagcccggcgagagggccgcgga

SEQ ID NO: 3922373 - DNA, 25 bp, Homo sapien
tggccaggaaccgaatgagttaaaa

SEQ ID NO: 3922374 - DNA, 25 bp, Homo sapien
gtgactctggctggcctcgttagcg

SEQ ID NO: 3922375 - DNA, 25 bp, Homo sapien
ccctggtgactctggctggcctcgt

SEQ ID NO: 3922376 - DNA, 25 bp, Homo sapien
gaactgaaaaaaggacagtcaatgg

SEQ ID NO: 3922377 - DNA, 25 bp, Homo sapien
acgctccctagccgggctgcgaagg

SEQ ID NO: 3922378 - DNA, 25 bp, Homo sapien
agaaggacccttcgcgcaggatgtc

SEQ ID NO: 3922379 - DNA, 25 bp, Homo sapien
ggtgacctagcctttgggcgcttcc

SEQ ID NO: 3922380 - DNA, 25 bp, Homo sapien
aggatgtcccggagactcgtccacg

SEQ ID NO: 3922381 - DNA, 25 bp, Homo sapien
caatcatcggcggcgaccggtcact

SEQ ID NO: 3922382 - DNA, 25 bp, Homo sapien
atcatcggcggcgaccggtcactcg

SEQ ID NO: 3922383 - DNA, 25 bp, Homo sapien
agggaccaatcatcggcggcgaccg

SEQ ID NO: 3922384 - DNA, 25 bp, Homo sapien
gcagggaccaatcatcggcggcgac

SEQ ID NO: 3922385 - DNA, 25 bp, Homo sapien
gcacgagcgagggtcccagcggccg

SEQ ID NO: 3922386 - DNA, 25 bp, Homo sapien
caggcacgagcgagggtcccagcgg

SEQ ID NO: 3922387 - DNA, 25 bp, Homo sapien
acgagcgagggtcccagcggccggc

SEQ ID NO: 3922388 - DNA, 25 bp, Homo sapien
gagcgagggtcccagcggccggcgc

SEQ ID NO: 3922389 - DNA, 25 bp, Homo sapien
gcgcggaaaatagcatcactgacat

SEQ ID NO: 3922390 - DNA, 25 bp, Homo sapien
cagtgtgcgaaatgactgcgcggaa

SEQ ID NO: 3922391 - DNA, 25 bp, Homo sapien
taatcagcagtgtgcgaaatgactg

SEQ ID NO: 3922392 - DNA, 25 bp, Homo sapien
ttatacgttaatgtaatcagcagtg

SEQ ID NO: 3922393 - DNA, 25 bp, Homo sapien
ataagccatcagagaggactcaggg

SEQ ID NO: 3922394 - DNA, 25 bp, Homo sapien
cgataagccatcagagaggactcag

SEQ ID NO: 3922395 - DNA, 25 bp, Homo sapien
tgcccgataagccatcagagaggac

SEQ ID NO: 3922396 - DNA, 25 bp, Homo sapien
atctgcccgataagccatcagagag

SEQ ID NO: 3922397 - DNA, 25 bp, Homo sapien
cagaggtaattgcagggccagcggg

SEQ ID NO: 3922398 - DNA, 25 bp, Homo sapien
cagcggggcctgacattcatcagag

SEQ ID NO: 3922399 - DNA, 25 bp, Homo sapien
aagagggatgaacagaggtaattgc

SEQ ID NO: 3922400 - DNA, 25 bp, Homo sapien
gatgaacagaggtaattgcagggcc

SEQ ID NO: 3922401 - DNA, 25 bp, Homo sapien
tttcctaatacggtttcctgcttga

SEQ ID NO: 3922402 - DNA, 25 bp, Homo sapien
tgtgctttagaagggaatgagtggg

SEQ ID NO: 3922403 - DNA, 25 bp, Homo sapien
gttctgtgctttagaagggaatgag

SEQ ID NO: 3922404 - DNA, 25 bp, Homo sapien
cagagtttcctaatacggtttcctg

SEQ ID NO: 3922405 - DNA, 25 bp, Homo sapien
ctccttaagacttcactagaggagc

SEQ ID NO: 3922406 - DNA, 25 bp, Homo sapien
gctggtggttggcagaagcggcacc

SEQ ID NO: 3922407 - DNA, 25 bp, Homo sapien
actagaggagcacgggataaagtgt

SEQ ID NO: 3922408 - DNA, 25 bp, Homo sapien
tcagggcgcccctagtggtggaggc

SEQ ID NO: 3922409 - DNA, 25 bp, Homo sapien
ttcctggatatgaggaccaggtctg

SEQ ID NO: 3922410 - DNA, 25 bp, Homo sapien
tcctggatatgaggaccaggtctgg

SEQ ID NO: 3922411 - DNA, 25 bp, Homo sapien
cttcctggatatgaggaccaggtct

SEQ ID NO: 3922412 - DNA, 25 bp, Homo sapien
tagatagagccccagaactgctgag

SEQ ID NO: 3922413 - DNA, 25 bp, Homo sapien
gaatctctgcagctttgtggttctg

SEQ ID NO: 3922414 - DNA, 25 bp, Homo sapien
tggtaattgagttgtgctccctagt

SEQ ID NO: 3922415 - DNA, 25 bp, Homo sapien
gggctgtgttcctggtaattgagtt

SEQ ID NO: 3922416 - DNA, 25 bp, Homo sapien
aggtggtgccccaggatttcagaga

SEQ ID NO: 3922417 - DNA, 25 bp, Homo sapien
tcccctgaagacacccctgtctgaa

SEQ ID NO: 3922418 - DNA, 25 bp, Homo sapien
gaagacacccctgtctgaaggttca

SEQ ID NO: 3922419 - DNA, 25 bp, Homo sapien
tccatgaaggtgagaggtggtgccc

SEQ ID NO: 3922420 - DNA, 25 bp, Homo sapien
tcatatcaccaaactgccccatccc

SEQ ID NO: 3922421 - DNA, 25 bp, Homo sapien
gtgtagcctctcaggtaggcagagc

SEQ ID NO: 3922422 - DNA, 25 bp, Homo sapien
gtgtcatatcaccaaactgccccat

SEQ ID NO: 3922423 - DNA, 25 bp, Homo sapien
tgtagcctctcaggtaggcagagcc

SEQ ID NO: 3922424 - DNA, 25 bp, Homo sapien
catcagcctgagcgagcaagcaccc

SEQ ID NO: 3922425 - DNA, 25 bp, Homo sapien
ttcatcagcctgagcgagcaagcac

SEQ ID NO: 3922426 - DNA, 25 bp, Homo sapien
gcattcatcagcctgagcgagcaag

SEQ ID NO: 3922427 - DNA, 25 bp, Homo sapien
cattcatcagcctgagcgagcaagc

SEQ ID NO: 3922428 - DNA, 25 bp, Homo sapien
cataaagaattgctgcatctcgtca

SEQ ID NO: 3922429 - DNA, 25 bp, Homo sapien
tcataaagaattgctgcatctcgtc

SEQ ID NO: 3922430 - DNA, 25 bp, Homo sapien
ataaagaattgctgcatctcgtcac

SEQ ID NO: 3922431 - DNA, 25 bp, Homo sapien
taactgcggcccggggctctgaggc

SEQ ID NO: 3922432 - DNA, 25 bp, Homo sapien
actgcggcccggggctctgaggcat

SEQ ID NO: 3922433 - DNA, 25 bp, Homo sapien
aactgcggcccggggctctgaggca

SEQ ID NO: 3922434 - DNA, 25 bp, Homo sapien
cttaactgcggcccggggctctgag

SEQ ID NO: 3922435 - DNA, 25 bp, Homo sapien
tctggaggccgttgttataaattac

SEQ ID NO: 3922436 - DNA, 25 bp, Homo sapien
ctcaaagccttaccgaaacaaattg

SEQ ID NO: 3922437 - DNA, 25 bp, Homo sapien
tagttaccatgtaagtcaacagtat

SEQ ID NO: 3922438 - DNA, 25 bp, Homo sapien
tgattgttcactaagtaaacccttg

SEQ ID NO: 3922439 - DNA, 25 bp, Homo sapien
atacaatttttctcttcagaggttt

SEQ ID NO: 3922440 - DNA, 25 bp, Homo sapien
tacaatttttctcttcagaggttta

SEQ ID NO: 3922441 - DNA, 25 bp, Homo sapien
catacaatttttctcttcagaggtt

SEQ ID NO: 3922442 - DNA, 25 bp, Homo sapien
tcatacaatttttctcttcagaggt

SEQ ID NO: 3922443 - DNA, 25 bp, Homo sapien
tgtgctggcttctaaaattgacccg

SEQ ID NO: 3922444 - DNA, 25 bp, Homo sapien
cccgaattatcagcagcccaatggc

SEQ ID NO: 3922445 - DNA, 25 bp, Homo sapien
gcagcgtcttctcttgggccgtatc

SEQ ID NO: 3922446 - DNA, 25 bp, Homo sapien
acccctggatgtgatggcaatgcag

SEQ ID NO: 3922447 - DNA, 25 bp, Homo sapien
tatgaataatccgtctctaggccca

SEQ ID NO: 3922448 - DNA, 25 bp, Homo sapien
tacaatcacattttgcagcggatga

SEQ ID NO: 3922449 - DNA, 25 bp, Homo sapien
aaaatcatgcacctcgttcgcctga

SEQ ID NO: 3922450 - DNA, 25 bp, Homo sapien
gtcattagtcatagctccgttccca

SEQ ID NO: 3922451 - DNA, 25 bp, Homo sapien
cccagagccatgaatattgcctctc

SEQ ID NO: 3922452 - DNA, 25 bp, Homo sapien
tcatttgatgaacctttgccttctg

SEQ ID NO: 3922453 - DNA, 25 bp, Homo sapien
ctctgaccttcaaggtcatttgatg

SEQ ID NO: 3922454 - DNA, 25 bp, Homo sapien
aaggtcatttgatgaacctttgcct

SEQ ID NO: 3922455 - DNA, 25 bp, Homo sapien
tggaacaatgaatttggtccttctc

SEQ ID NO: 3922456 - DNA, 25 bp, Homo sapien
ctttaggctttttctcagatggacc

SEQ ID NO: 3922457 - DNA, 25 bp, Homo sapien
ttcttgtctttaggctttttctcag

SEQ ID NO: 3922458 - DNA, 25 bp, Homo sapien
taggctttttctcagatggacccat

SEQ ID NO: 3922459 - DNA, 25 bp, Homo sapien
tttcttgtctttaggctttttctca

SEQ ID NO: 3922460 - DNA, 25 bp, Homo sapien
gaatactcttttccagtggctgcac

SEQ ID NO: 3922461 - DNA, 25 bp, Homo sapien
gcctggaatactcttttccagtggc

SEQ ID NO: 3922462 - DNA, 25 bp, Homo sapien
ctggaatactcttttccagtggctg

SEQ ID NO: 3922463 - DNA, 25 bp, Homo sapien
ggaatactcttttccagtggctgca

SEQ ID NO: 3922464 - DNA, 25 bp, Homo sapien
gaggccattatattccaccgttgaa

SEQ ID NO: 3922465 - DNA, 25 bp, Homo sapien
gctactctgggtcgcaaacctgcag

SEQ ID NO: 3922466 - DNA, 25 bp, Homo sapien
taaatctggcttgtgggcaaccgca

SEQ ID NO: 3922467 - DNA, 25 bp, Homo sapien
taggacccgtgattcttgccacagt

SEQ ID NO: 3922468 - DNA, 25 bp, Homo sapien
ggacatatcagatactaaactgatg

SEQ ID NO: 3922469 - DNA, 25 bp, Homo sapien
cagatagaggacatatcagatacta

SEQ ID NO: 3922470 - DNA, 25 bp, Homo sapien
cgagtgcaccgttcctggaggtact

SEQ ID NO: 3922471 - DNA, 25 bp, Homo sapien
catatcagatactaaactgatgaga

SEQ ID NO: 3922472 - DNA, 25 bp, Homo sapien
ggcacacctcacacatgaggctgaa

SEQ ID NO: 3922473 - DNA, 25 bp, Homo sapien
caatcgtcatgcttacaaactacaa

SEQ ID NO: 3922474 - DNA, 25 bp, Homo sapien
tgaggctgaaaacccaatcgtcatg

SEQ ID NO: 3922475 - DNA, 25 bp, Homo sapien
aatcgtcatgcttacaaactacaaa

SEQ ID NO: 3922476 - DNA, 25 bp, Homo sapien
tggattacgacagcaaaatatgtgg

SEQ ID NO: 3922477 - DNA, 25 bp, Homo sapien
gatttcagcagatattcgtcagggt

SEQ ID NO: 3922478 - DNA, 25 bp, Homo sapien
gaaacatcagtcactactaacggta

SEQ ID NO: 3922479 - DNA, 25 bp, Homo sapien
cttaggacaggtattaatggacact

SEQ ID NO: 3922480 - DNA, 25 bp, Homo sapien
ggattacacgccagtatcttgcaga

SEQ ID NO: 3922481 - DNA, 25 bp, Homo sapien
ccaaattaggtatcttcgacaggaa

SEQ ID NO: 3922482 - DNA, 25 bp, Homo sapien
tagtagtcatacctctttagtctcg

SEQ ID NO: 3922483 - DNA, 25 bp, Homo sapien
gaataaggttctgacatgatgtccc

SEQ ID NO: 3922484 - DNA, 25 bp, Homo sapien
ggcggacagcatgccttcgctgcga

SEQ ID NO: 3922485 - DNA, 25 bp, Homo sapien
tgtcccatctcatagttgtcctctc

SEQ ID NO: 3922486 - DNA, 25 bp, Homo sapien
tgcagtgctctatgcccaggtctct

SEQ ID NO: 3922487 - DNA, 25 bp, Homo sapien
cctgtataacccagggactggcgca

SEQ ID NO: 3922488 - DNA, 25 bp, Homo sapien
cagcctgagggccttagaagctttt

SEQ ID NO: 3922489 - DNA, 25 bp, Homo sapien
cctccaagtttgaatggcagcctga

SEQ ID NO: 3922490 - DNA, 25 bp, Homo sapien
ttggatgtgtgcctgagcgcttcat

SEQ ID NO: 3922491 - DNA, 25 bp, Homo sapien
aaatgtcagcctccaagtttgaatg

SEQ ID NO: 3922492 - DNA, 25 bp, Homo sapien
catgcacctctatagatggagactt

SEQ ID NO: 3922493 - DNA, 25 bp, Homo sapien
ccatgcacctctatagatggagact

SEQ ID NO: 3922494 - DNA, 25 bp, Homo sapien
ccccatgcacctctatagatggaga

SEQ ID NO: 3922495 - DNA, 25 bp, Homo sapien
tcccccatgcacctctatagatgga

SEQ ID NO: 3922496 - DNA, 25 bp, Homo sapien
tagaaggaataagtagctgttttcc

SEQ ID NO: 3922497 - DNA, 25 bp, Homo sapien
actacataagtcttttagaaggaat

SEQ ID NO: 3922498 - DNA, 25 bp, Homo sapien
aatgtcacaattgtcagctgaaaga

SEQ ID NO: 3922499 - DNA, 25 bp, Homo sapien
tcatcttctgttaatgactgggcct

SEQ ID NO: 3922500 - DNA, 25 bp, Homo sapien
tgtgcttgaactttactatttttgt

SEQ ID NO: 3922501 - DNA, 25 bp, Homo sapien
aatgtgggcttgtatggaactcccg

SEQ ID NO: 3922502 - DNA, 25 bp, Homo sapien
tatagcaatggttctcgaagagtgt

SEQ ID NO: 3922503 - DNA, 25 bp, Homo sapien
gttactgttggttttgagtgtctta

SEQ ID NO: 3922504 - DNA, 25 bp, Homo sapien
cattgtggcctgaatctgtaaccat

SEQ ID NO: 3922505 - DNA, 25 bp, Homo sapien
tacaagtgtctgttgttgattcaga

SEQ ID NO: 3922506 - DNA, 25 bp, Homo sapien
gattcagattgtactccattgtggc

SEQ ID NO: 3922507 - DNA, 25 bp, Homo sapien
tcacctttagcccttaactgaatag

SEQ ID NO: 3922508 - DNA, 25 bp, Homo sapien
ccgcattgattaggcacgttggcca

SEQ ID NO: 3922509 - DNA, 25 bp, Homo sapien
taaaactttgccctgagtgggcatc

SEQ ID NO: 3922510 - DNA, 25 bp, Homo sapien
gattaggcacgttggccatcagcat

SEQ ID NO: 3922511 - DNA, 25 bp, Homo sapien
gaagtccagccgcattgattaggca

SEQ ID NO: 3922512 - DNA, 25 bp, Homo sapien
cgttttggctctgtacttaatgcac

SEQ ID NO: 3922513 - DNA, 25 bp, Homo sapien
acaaggctgtgccttttcagcagac

SEQ ID NO: 3922514 - DNA, 25 bp, Homo sapien
aaagtcaaacgatcaattcgcctcg

SEQ ID NO: 3922515 - DNA, 25 bp, Homo sapien
taatgcacaaacagtgcgatctgcg

SEQ ID NO: 3922516 - DNA, 25 bp, Homo sapien
gcaagcggctgttgtaatccaatta

SEQ ID NO: 3922517 - DNA, 25 bp, Homo sapien
gggagcaagcggctgttgtaatcca

SEQ ID NO: 3922518 - DNA, 25 bp, Homo sapien
tgtaatccaattatagcagcataag

SEQ ID NO: 3922519 - DNA, 25 bp, Homo sapien
caattatagcagcataagcaatttg

SEQ ID NO: 3922520 - DNA, 25 bp, Homo sapien
ccgcataaatctgcccgaatggtgg

SEQ ID NO: 3922521 - DNA, 25 bp, Homo sapien
atgtaacaatttcccaataaactct

SEQ ID NO: 3922522 - DNA, 25 bp, Homo sapien
caataaactctgacttgtaataacg

SEQ ID NO: 3922523 - DNA, 25 bp, Homo sapien
taataacgtcggcaagagtccgcat

SEQ ID NO: 3922524 - DNA, 25 bp, Homo sapien
ttctcaacaggggatttctcctcct

SEQ ID NO: 3922525 - DNA, 25 bp, Homo sapien
caacaggggatttctcctcctttgg

SEQ ID NO: 3922526 - DNA, 25 bp, Homo sapien
aattctcaacaggggatttctcctc

SEQ ID NO: 3922527 - DNA, 25 bp, Homo sapien
tcaacaggggatttctcctcctttg

SEQ ID NO: 3922528 - DNA, 25 bp, Homo sapien
gtgtctcagctgccctagtagctag

SEQ ID NO: 3922529 - DNA, 25 bp, Homo sapien
gaaagctctgtcacccaatctagag

SEQ ID NO: 3922530 - DNA, 25 bp, Homo sapien
ttcttgtgtctcagctgccctagta

SEQ ID NO: 3922531 - DNA, 25 bp, Homo sapien
ataggcgtgtgccatgatgtccagc

SEQ ID NO: 3922532 - DNA, 25 bp, Homo sapien
ctgtatgtatttctggactcactat

SEQ ID NO: 3922533 - DNA, 25 bp, Homo sapien
tatgtatttctggactcactattcc

SEQ ID NO: 3922534 - DNA, 25 bp, Homo sapien
gtatgtatttctggactcactattc

SEQ ID NO: 3922535 - DNA, 25 bp, Homo sapien
ggctgtatgtatttctggactcact

SEQ ID NO: 3922536 - DNA, 25 bp, Homo sapien
tacacttgtgtccttacaccaaagc

SEQ ID NO: 3922537 - DNA, 25 bp, Homo sapien
gatattgcactaactctataggttg

SEQ ID NO: 3922538 - DNA, 25 bp, Homo sapien
gaatcagcgagttaatttgcctgct

SEQ ID NO: 3922539 - DNA, 25 bp, Homo sapien
actgctcccaggctaaactttatca

SEQ ID NO: 3922540 - DNA, 25 bp, Homo sapien
ttcaaccttttttctctgtctgctt

SEQ ID NO: 3922541 - DNA, 25 bp, Homo sapien
cccttcaaccttttttctctgtctg

SEQ ID NO: 3922542 - DNA, 25 bp, Homo sapien
caaccttttttctctgtctgcttca

SEQ ID NO: 3922543 - DNA, 25 bp, Homo sapien
aaccttttttctctgtctgcttcac

SEQ ID NO: 3922544 - DNA, 25 bp, Homo sapien
tggcaacagtggattctcagacatg

SEQ ID NO: 3922545 - DNA, 25 bp, Homo sapien
tccccacacccaagaggaggattgg

SEQ ID NO: 3922546 - DNA, 25 bp, Homo sapien
tctcacatgagccagatcagccaga

SEQ ID NO: 3922547 - DNA, 25 bp, Homo sapien
aaagtgtacgaagagagtgtcctcc

SEQ ID NO: 3922548 - DNA, 25 bp, Homo sapien
tcttctgtacagtctaaagctacag

SEQ ID NO: 3922549 - DNA, 25 bp, Homo sapien
tgaacagctgtagttggtctactcc

SEQ ID NO: 3922550 - DNA, 25 bp, Homo sapien
cccttgccggctcctggtaccattg

SEQ ID NO: 3922551 - DNA, 25 bp, Homo sapien
ggtctactccttacttagcacttga

SEQ ID NO: 3922552 - DNA, 25 bp, Homo sapien
tcaacatagtatcggaaagagagcc

SEQ ID NO: 3922553 - DNA, 25 bp, Homo sapien
gtccaacccagattagtgcagcccg

SEQ ID NO: 3922554 - DNA, 25 bp, Homo sapien
ggcaacaccctccagtctgtagcag

SEQ ID NO: 3922555 - DNA, 25 bp, Homo sapien
aaaacagtttcgcttctttagctca

SEQ ID NO: 3922556 - DNA, 25 bp, Homo sapien
tgtgatctaaaatgtcctggaggca

SEQ ID NO: 3922557 - DNA, 25 bp, Homo sapien
cccagacaaatctgagggatggcca

SEQ ID NO: 3922558 - DNA, 25 bp, Homo sapien
ttctcaaagcggtgaccactcaggc

SEQ ID NO: 3922559 - DNA, 25 bp, Homo sapien
tgggcaccaaggaaactaacagctt

SEQ ID NO: 3922560 - DNA, 25 bp, Homo sapien
ggacgccccacggagcactccccat

SEQ ID NO: 3922561 - DNA, 25 bp, Homo sapien
ttcgccggtcctcgcgcgccctctg

SEQ ID NO: 3922562 - DNA, 25 bp, Homo sapien
gaagcgcgcccgtggcccccaatac

SEQ ID NO: 3922563 - DNA, 25 bp, Homo sapien
tccccaaggacgccccacggagcac

SEQ ID NO: 3922564 - DNA, 25 bp, Homo sapien
ctagagtggcgagtgaggctcctcc

SEQ ID NO: 3922565 - DNA, 25 bp, Homo sapien
gaatttattcttcgcagggaggtag

SEQ ID NO: 3922566 - DNA, 25 bp, Homo sapien
gaagctggcgctcaggactgttgcc

SEQ ID NO: 3922567 - DNA, 25 bp, Homo sapien
tgaggctcccgtgggcacaaggtaa

SEQ ID NO: 3922568 - DNA, 25 bp, Homo sapien
gattataggcaccactaggtctggc

SEQ ID NO: 3922569 - DNA, 25 bp, Homo sapien
tgactgtagctcttaagaactcatg

SEQ ID NO: 3922570 - DNA, 25 bp, Homo sapien
catcacaactgcaaagtccctctag

SEQ ID NO: 3922571 - DNA, 25 bp, Homo sapien
gggcccacaggattactcagcataa

SEQ ID NO: 3922572 - DNA, 25 bp, Homo sapien
tcagcgctaaagtgcctgggaaccc

SEQ ID NO: 3922573 - DNA, 25 bp, Homo sapien
tccattcaggatgaatgggagactg

SEQ ID NO: 3922574 - DNA, 25 bp, Homo sapien
gctgaaagcctgttcgagaacctgg

SEQ ID NO: 3922575 - DNA, 25 bp, Homo sapien
gcttacttggactcagagaacctca

SEQ ID NO: 3922576 - DNA, 25 bp, Homo sapien
caatgtcaaatgcactttactgggc

SEQ ID NO: 3922577 - DNA, 25 bp, Homo sapien
gtggaatggctgttctcctacccca

SEQ ID NO: 3922578 - DNA, 25 bp, Homo sapien
cggatgatgttgacagcacggctgc

SEQ ID NO: 3922579 - DNA, 25 bp, Homo sapien
taccccagagggtgccggatgatgt

SEQ ID NO: 3922580 - DNA, 25 bp, Homo sapien
cctgaagacatccttctcagtggga

SEQ ID NO: 3922581 - DNA, 25 bp, Homo sapien
taagagcctgaagacatccttctca

SEQ ID NO: 3922582 - DNA, 25 bp, Homo sapien
tctcggtaggggaggcctaagagcc

SEQ ID NO: 3922583 - DNA, 25 bp, Homo sapien
agagcctgaagacatccttctcagt

SEQ ID NO: 3922584 - DNA, 25 bp, Homo sapien
ccagggctcgcatggagcggttgaa

SEQ ID NO: 3922585 - DNA, 25 bp, Homo sapien
tgttctgacagactcatgcccttgg

SEQ ID NO: 3922586 - DNA, 25 bp, Homo sapien
tgaagtgtgcagagccggtgaagta

SEQ ID NO: 3922587 - DNA, 25 bp, Homo sapien
gtgttccggaccacagcagtgctga

SEQ ID NO: 3922588 - DNA, 25 bp, Homo sapien
cacaggcaaactcgctatagggcac

SEQ ID NO: 3922589 - DNA, 25 bp, Homo sapien
cccaagtacttctgttgctgaccat

SEQ ID NO: 3922590 - DNA, 25 bp, Homo sapien
ctatagggcaccacgatgatgtcca

SEQ ID NO: 3922591 - DNA, 25 bp, Homo sapien
gaccattctcctcttggctcaccaa

SEQ ID NO: 3922592 - DNA, 25 bp, Homo sapien
tttccccgtcggtatgaaccacatg

SEQ ID NO: 3922593 - DNA, 25 bp, Homo sapien
gtcgacatcaccacaggtcgccttt

SEQ ID NO: 3922594 - DNA, 25 bp, Homo sapien
ataccccggtgggaccggccatctg

SEQ ID NO: 3922595 - DNA, 25 bp, Homo sapien
gtgagtgatgagcacgtcgacatca

SEQ ID NO: 3922596 - DNA, 25 bp, Homo sapien
ttccaatgggctgggtactgactga

SEQ ID NO: 3922597 - DNA, 25 bp, Homo sapien
tctttaagagtagggagacacagac

SEQ ID NO: 3922598 - DNA, 25 bp, Homo sapien
gacacctcaagtatcctgacaggag

SEQ ID NO: 3922599 - DNA, 25 bp, Homo sapien
tctcccacagcagtacaagggcctt

SEQ ID NO: 3922600 - DNA, 25 bp, Homo sapien
tgctcaatctctgtagcctcctccc

SEQ ID NO: 3922601 - DNA, 25 bp, Homo sapien
ctgctcaatctctgtagcctcctcc

SEQ ID NO: 3922602 - DNA, 25 bp, Homo sapien
gctcaatctctgtagcctcctccct

SEQ ID NO: 3922603 - DNA, 25 bp, Homo sapien
cgatggcctgctgggttgtcaggga

SEQ ID NO: 3922604 - DNA, 25 bp, Homo sapien
gcggatgtcttccagacttcggaag

SEQ ID NO: 3922605 - DNA, 25 bp, Homo sapien
tgtaatgcttcaggccgatggcctg

SEQ ID NO: 3922606 - DNA, 25 bp, Homo sapien
agtcactgtaatgcttcaggccgat

SEQ ID NO: 3922607 - DNA, 25 bp, Homo sapien
tccaggaccaatgaagaggcatgag

SEQ ID NO: 3922608 - DNA, 25 bp, Homo sapien
tcatccttaccaagctgccctggtg

SEQ ID NO: 3922609 - DNA, 25 bp, Homo sapien
cagttgggtctgtactcagcaggac

SEQ ID NO: 3922610 - DNA, 25 bp, Homo sapien
tgggaagctgtaaggatccaggacc

SEQ ID NO: 3922611 - DNA, 25 bp, Homo sapien
ccaagacaggcacgctctcactgat

SEQ ID NO: 3922612 - DNA, 25 bp, Homo sapien
gatatggtccagcttccgcaaatgc

SEQ ID NO: 3922613 - DNA, 25 bp, Homo sapien
caggatctctatgattttctcagcc

SEQ ID NO: 3922614 - DNA, 25 bp, Homo sapien
tcccagctccccagatgttggagaa

SEQ ID NO: 3922615 - DNA, 25 bp, Homo sapien
gcttactctatgtcaggtcctgtgc

SEQ ID NO: 3922616 - DNA, 25 bp, Homo sapien
ttttaggcgggacacaagggctcat

SEQ ID NO: 3922617 - DNA, 25 bp, Homo sapien
caaaccctggtctgttaggcttcag

SEQ ID NO: 3922618 - DNA, 25 bp, Homo sapien
tagtgaatgacaggaaccagagttc

SEQ ID NO: 3922619 - DNA, 25 bp, Homo sapien
ttactaaccactggccagtaaagac

SEQ ID NO: 3922620 - DNA, 25 bp, Homo sapien
tgtgcaagtcctagaccccataaaa

SEQ ID NO: 3922621 - DNA, 25 bp, Homo sapien
agtatcgtacatctcccagcttcaa

SEQ ID NO: 3922622 - DNA, 25 bp, Homo sapien
cagcttcaacaactatcaagatttt

SEQ ID NO: 3922623 - DNA, 25 bp, Homo sapien
gacccacttatccaggacagcaggg

SEQ ID NO: 3922624 - DNA, 25 bp, Homo sapien
gaacactgtaggctttggccagaac

SEQ ID NO: 3922625 - DNA, 25 bp, Homo sapien
gctgggctaggctcacaatctccct

SEQ ID NO: 3922626 - DNA, 25 bp, Homo sapien
ggttgtgattggtcgccttctggct

SEQ ID NO: 3922627 - DNA, 25 bp, Homo sapien
catcactggcttcatcatcagagat

SEQ ID NO: 3922628 - DNA, 25 bp, Homo sapien
ccatcactggcttcatcatcagaga

SEQ ID NO: 3922629 - DNA, 25 bp, Homo sapien
cccatcactggcttcatcatcagag

SEQ ID NO: 3922630 - DNA, 25 bp, Homo sapien
tcactggcttcatcatcagagatgg

SEQ ID NO: 3922631 - DNA, 25 bp, Homo sapien
tgggatagagaagaaaagaaaacaa

SEQ ID NO: 3922632 - DNA, 25 bp, Homo sapien
ttgggatagagaagaaaagaaaaca

SEQ ID NO: 3922633 - DNA, 25 bp, Homo sapien
tgggcttgggtgtttggtgcctctt

SEQ ID NO: 3922634 - DNA, 25 bp, Homo sapien
gcttgggtgtttggtgcctcttttg

SEQ ID NO: 3922635 - DNA, 25 bp, Homo sapien
tgtttggtgcctcttttgccttttg

SEQ ID NO: 3922636 - DNA, 25 bp, Homo sapien
tgggtgtttggtgcctcttttgcct

SEQ ID NO: 3922637 - DNA, 25 bp, Homo sapien
atgggtgccaggaggaatagaagca

SEQ ID NO: 3922638 - DNA, 25 bp, Homo sapien
gcctcatgggtgccaggaggaatag

SEQ ID NO: 3922639 - DNA, 25 bp, Homo sapien
ctcatgggtgccaggaggaatagaa

SEQ ID NO: 3922640 - DNA, 25 bp, Homo sapien
catgggtgccaggaggaatagaagc

SEQ ID NO: 3922641 - DNA, 25 bp, Homo sapien
gaaaagagctcaagatgctactaga

SEQ ID NO: 3922642 - DNA, 25 bp, Homo sapien
caagaaaagagctcaagatgctact

SEQ ID NO: 3922643 - DNA, 25 bp, Homo sapien
tcccacctaaacctcttatagctgg

SEQ ID NO: 3922644 - DNA, 25 bp, Homo sapien
gagctcaagatgctactagaaaaca

SEQ ID NO: 3922645 - DNA, 25 bp, Homo sapien
gatgctgaatccagctacatccacc

SEQ ID NO: 3922646 - DNA, 25 bp, Homo sapien
tgaagatgctgaatccagctacatc

SEQ ID NO: 3922647 - DNA, 25 bp, Homo sapien
aagatgctgaatccagctacatcca

SEQ ID NO: 3922648 - DNA, 25 bp, Homo sapien
tgctgaatccagctacatccaccag

SEQ ID NO: 3922649 - DNA, 25 bp, Homo sapien
gagggctcgctcatagtccatgcct

SEQ ID NO: 3922650 - DNA, 25 bp, Homo sapien
gcagggcatagctggccgccatgct

SEQ ID NO: 3922651 - DNA, 25 bp, Homo sapien
caatgtgagtgacacctgggccctg

SEQ ID NO: 3922652 - DNA, 25 bp, Homo sapien
tccaatgccagtgcgcacaacatgg

SEQ ID NO: 3922653 - DNA, 25 bp, Homo sapien
gaacatccagatgactactgttgta

SEQ ID NO: 3922654 - DNA, 25 bp, Homo sapien
tggaaggaacatccagatgactact

SEQ ID NO: 3922655 - DNA, 25 bp, Homo sapien
gatgactactgttgtaactttttaa

SEQ ID NO: 3922656 - DNA, 25 bp, Homo sapien
catccagatgactactgttgtaact

SEQ ID NO: 3922657 - DNA, 25 bp, Homo sapien
ctccaatatctgattctggacataa

SEQ ID NO: 3922658 - DNA, 25 bp, Homo sapien
caatatctgattctggacataaaca

SEQ ID NO: 3922659 - DNA, 25 bp, Homo sapien
cataaacaacgtagggctgaagcac

SEQ ID NO: 3922660 - DNA, 25 bp, Homo sapien
ctggacataaacaacgtagggctga

SEQ ID NO: 3922661 - DNA, 25 bp, Homo sapien
ccctcttccctcctaggaatctttg

SEQ ID NO: 3922662 - DNA, 25 bp, Homo sapien
ttccctcctaggaatctttgcaagt

SEQ ID NO: 3922663 - DNA, 25 bp, Homo sapien
ctcttccctcctaggaatctttgca

SEQ ID NO: 3922664 - DNA, 25 bp, Homo sapien
cttccctcctaggaatctttgcaag

SEQ ID NO: 3922665 - DNA, 25 bp, Homo sapien
gaattttctgccgcttgggaaatgc

SEQ ID NO: 3922666 - DNA, 25 bp, Homo sapien
ccttcaagatacccctgggatccat

SEQ ID NO: 3922667 - DNA, 25 bp, Homo sapien
attttctgccgcttgggaaatgcct

SEQ ID NO: 3922668 - DNA, 25 bp, Homo sapien
gcatgaattttctgccgcttgggaa

SEQ ID NO: 3922669 - DNA, 25 bp, Homo sapien
caacccctttgcctatggaggtagg

SEQ ID NO: 3922670 - DNA, 25 bp, Homo sapien
taccaaatgggatgctgggctagga

SEQ ID NO: 3922671 - DNA, 25 bp, Homo sapien
ttttgaggagtaggaaacgacacca

SEQ ID NO: 3922672 - DNA, 25 bp, Homo sapien
tgcgctaaagattcagcacagccct

SEQ ID NO: 3922673 - DNA, 25 bp, Homo sapien
aacacagactcgcagaggaaggagg

SEQ ID NO: 3922674 - DNA, 25 bp, Homo sapien
tcagcctctcgacatgggggtgctc

SEQ ID NO: 3922675 - DNA, 25 bp, Homo sapien
tctcagcctctcgacatgggggtgc

SEQ ID NO: 3922676 - DNA, 25 bp, Homo sapien
gcctctcgacatgggggtgctcagc

SEQ ID NO: 3922677 - DNA, 25 bp, Homo sapien
tggtctcagcctctcgacatggggg

SEQ ID NO: 3922678 - DNA, 25 bp, Homo sapien
tgtactcgccgtgtacgcagctggc

SEQ ID NO: 3922679 - DNA, 25 bp, Homo sapien
gggtcgactactggccaagctagtc

SEQ ID NO: 3922680 - DNA, 25 bp, Homo sapien
gaaagctggagtgcccgaccccggc

SEQ ID NO: 3922681 - DNA, 25 bp, Homo sapien
agtctcgcagctgcgggtgaagtcc

SEQ ID NO: 3922682 - DNA, 25 bp, Homo sapien
aaggagggcaaatggccagaatagc

SEQ ID NO: 3922683 - DNA, 25 bp, Homo sapien
agaatagcttccgagtcagccggaa

SEQ ID NO: 3922684 - DNA, 25 bp, Homo sapien
agcttccgagtcagccggaagtgac

SEQ ID NO: 3922685 - DNA, 25 bp, Homo sapien
ggccagaatagcttccgagtcagcc

SEQ ID NO: 3922686 - DNA, 25 bp, Homo sapien
tttctaaagccacaccaggagcaag

SEQ ID NO: 3922687 - DNA, 25 bp, Homo sapien
tgttcccaggtgtgcacatcagcat

SEQ ID NO: 3922688 - DNA, 25 bp, Homo sapien
gcaagcgagtatcagaggcagagct

SEQ ID NO: 3922689 - DNA, 25 bp, Homo sapien
gaagaacatctcagtcaaagagggt

SEQ ID NO: 3922690 - DNA, 25 bp, Homo sapien
gagggtttcttgactccacttggct

SEQ ID NO: 3922691 - DNA, 25 bp, Homo sapien
ttgcttgaagccacacctgagggtt

SEQ ID NO: 3922692 - DNA, 25 bp, Homo sapien
tttgcctgagcacccatgagatgcg

SEQ ID NO: 3922693 - DNA, 25 bp, Homo sapien
tacctagtgtggtgccggtgattca

SEQ ID NO: 3922694 - DNA, 25 bp, Homo sapien
tgtggttactaaccaaagccagagt

SEQ ID NO: 3922695 - DNA, 25 bp, Homo sapien
gcatgatgaaccagcttgctgaaag

SEQ ID NO: 3922696 - DNA, 25 bp, Homo sapien
tcagaaatgcacatcatggcatttc

SEQ ID NO: 3922697 - DNA, 25 bp, Homo sapien
tgaaagttagtgactgtctctcctg

SEQ ID NO: 3922698 - DNA, 25 bp, Homo sapien
tcctggagcctgctaggactactca

SEQ ID NO: 3922699 - DNA, 25 bp, Homo sapien
agcagcacatacaaccctgagcttg

SEQ ID NO: 3922700 - DNA, 25 bp, Homo sapien
tcagcagcacatacaaccctgagct

SEQ ID NO: 3922701 - DNA, 25 bp, Homo sapien
taggactactcagccagtgaggaac

SEQ ID NO: 3922702 - DNA, 25 bp, Homo sapien
gttcagccgcactctaaagcagcag

SEQ ID NO: 3922703 - DNA, 25 bp, Homo sapien
gactgcatctctggtaagctccaaa

SEQ ID NO: 3922704 - DNA, 25 bp, Homo sapien
ttgtagcatgtctcaacagccagcc

SEQ ID NO: 3922705 - DNA, 25 bp, Homo sapien
gaagcctctagtgcaaggtgcctga

SEQ ID NO: 3922706 - DNA, 25 bp, Homo sapien
tgtaagacagggcagcatagagatg

SEQ ID NO: 3922707 - DNA, 25 bp, Homo sapien
catagagatgcttggtggtgagacg

SEQ ID NO: 3922708 - DNA, 25 bp, Homo sapien
tgagacgcaggcagtacacagggct

SEQ ID NO: 3922709 - DNA, 25 bp, Homo sapien
catgggttttgaaaatccaggacgt

SEQ ID NO: 3922710 - DNA, 25 bp, Homo sapien
aggggagtcgacgtcagcgggaagg

SEQ ID NO: 3922711 - DNA, 25 bp, Homo sapien
ggggagtcgacgtcagcgggaaggc

SEQ ID NO: 3922712 - DNA, 25 bp, Homo sapien
tgaggggagtcgacgtcagcgggaa

SEQ ID NO: 3922713 - DNA, 25 bp, Homo sapien
ctgaggggagtcgacgtcagcggga

SEQ ID NO: 3922714 - DNA, 25 bp, Homo sapien
tccaagtgggacatgggtgtgccct

SEQ ID NO: 3922715 - DNA, 25 bp, Homo sapien
tgggtgtgccctaacccaggatccc

SEQ ID NO: 3922716 - DNA, 25 bp, Homo sapien
agggacgtgtgccattgtaggcttc

SEQ ID NO: 3922717 - DNA, 25 bp, Homo sapien
cgtgtgccattgtaggcttcttcca

SEQ ID NO: 3922718 - DNA, 25 bp, Homo sapien
ccacagccgtacaacaccgtagtag

SEQ ID NO: 3922719 - DNA, 25 bp, Homo sapien
acaccgtagtaggaggaacctgtgg

SEQ ID NO: 3922720 - DNA, 25 bp, Homo sapien
acaacaccgtagtaggaggaacctg

SEQ ID NO: 3922721 - DNA, 25 bp, Homo sapien
tgcaggcaggccctttgacgccggt

SEQ ID NO: 3922722 - DNA, 25 bp, Homo sapien
gtagcgaacataggtgtcatagcca

SEQ ID NO: 3922723 - DNA, 25 bp, Homo sapien
agtagcgaacataggtgtcatagcc

SEQ ID NO: 3922724 - DNA, 25 bp, Homo sapien
tagcgaacataggtgtcatagccac

SEQ ID NO: 3922725 - DNA, 25 bp, Homo sapien
cagtagcgaacataggtgtcatagc

SEQ ID NO: 3922726 - DNA, 25 bp, Homo sapien
tcctcagctagaatgagactcaagg

SEQ ID NO: 3922727 - DNA, 25 bp, Homo sapien
ctgggaagggaaggacggagtgaga

SEQ ID NO: 3922728 - DNA, 25 bp, Homo sapien
agaggctgctccacgtgggtcatac

SEQ ID NO: 3922729 - DNA, 25 bp, Homo sapien
cacattcgttccaccttcagaaggc

SEQ ID NO: 3922730 - DNA, 25 bp, Homo sapien
tgcaaccagtcccaggccccacccc

SEQ ID NO: 3922731 - DNA, 25 bp, Homo sapien
cctctgcaaccagtcccaggcccca

SEQ ID NO: 3922732 - DNA, 25 bp, Homo sapien
tctgcaaccagtcccaggccccacc

SEQ ID NO: 3922733 - DNA, 25 bp, Homo sapien
ggcctctgcaaccagtcccaggccc

SEQ ID NO: 3922734 - DNA, 25 bp, Homo sapien
gatgccttagcttcctttacccgtg

SEQ ID NO: 3922735 - DNA, 25 bp, Homo sapien
tttacccgtgagacgctgggctttc

SEQ ID NO: 3922736 - DNA, 25 bp, Homo sapien
aagcagcttagcgagctgtccctgg

SEQ ID NO: 3922737 - DNA, 25 bp, Homo sapien
gtgtaattccctccgtgaccgcggc

SEQ ID NO: 3922738 - DNA, 25 bp, Homo sapien
gcccaagtagcatgtcagcaaaggg

SEQ ID NO: 3922739 - DNA, 25 bp, Homo sapien
taaggaatgattgaggagctctccc

SEQ ID NO: 3922740 - DNA, 25 bp, Homo sapien
ttcctctcagtagcccagagctggg

SEQ ID NO: 3922741 - DNA, 25 bp, Homo sapien
tcacaggtatactgggtgcatgctg

SEQ ID NO: 3922742 - DNA, 25 bp, Homo sapien
ttagagactgctaaccttggctccc

SEQ ID NO: 3922743 - DNA, 25 bp, Homo sapien
tctgtgtgagcctgatgaatgagac

SEQ ID NO: 3922744 - DNA, 25 bp, Homo sapien
ggctggccctaaaaacctggatagc

SEQ ID NO: 3922745 - DNA, 25 bp, Homo sapien
agaccctatgctccagagacctatg

SEQ ID NO: 3922746 - DNA, 25 bp, Homo sapien
gcctgtactagagcactcctgagtc

SEQ ID NO: 3922747 - DNA, 25 bp, Homo sapien
caaactccgtgagtggcagacagcc

SEQ ID NO: 3922748 - DNA, 25 bp, Homo sapien
gtccaggccccgattgtagataagg

SEQ ID NO: 3922749 - DNA, 25 bp, Homo sapien
caaccaggctgttttggcggcagct

SEQ ID NO: 3922750 - DNA, 25 bp, Homo sapien
aaacagtgattgtcctagtccaggc

SEQ ID NO: 3922751 - DNA, 25 bp, Homo sapien
acagcagaggcctcctactagacca

SEQ ID NO: 3922752 - DNA, 25 bp, Homo sapien
cagcatgggctcatgaatctcttac

SEQ ID NO: 3922753 - DNA, 25 bp, Homo sapien
tataaattacttcagcagtctcctc

SEQ ID NO: 3922754 - DNA, 25 bp, Homo sapien
agtctcctccagctaaccctgaatg

SEQ ID NO: 3922755 - DNA, 25 bp, Homo sapien
caacaagccgtccctgtcacaaaag

SEQ ID NO: 3922756 - DNA, 25 bp, Homo sapien
aacaagccgtccctgtcacaaaaga

SEQ ID NO: 3922757 - DNA, 25 bp, Homo sapien
gctaacaatgggaaatgccgtgctc

SEQ ID NO: 3922758 - DNA, 25 bp, Homo sapien
tataaaggatccacgcagtgggcca

SEQ ID NO: 3922759 - DNA, 25 bp, Homo sapien
ggaatcccaagagcacaatggcagg

SEQ ID NO: 3922760 - DNA, 25 bp, Homo sapien
tagaacttgaacctatgagccagac

SEQ ID NO: 3922761 - DNA, 25 bp, Homo sapien
cttaactgcctagatgtgacatcta

SEQ ID NO: 3922762 - DNA, 25 bp, Homo sapien
actgcctagatgtgacatctataaa

SEQ ID NO: 3922763 - DNA, 25 bp, Homo sapien
gcctagatgtgacatctataaatgt

SEQ ID NO: 3922764 - DNA, 25 bp, Homo sapien
tgaagtgctttcttaactgcctaga

SEQ ID NO: 3922765 - DNA, 25 bp, Homo sapien
taaccactatgaatcaaggagaaaa

SEQ ID NO: 3922766 - DNA, 25 bp, Homo sapien
cacctaaccactatgaatcaaggag

SEQ ID NO: 3922767 - DNA, 25 bp, Homo sapien
cttttctctcacctaaccactatga

SEQ ID NO: 3922768 - DNA, 25 bp, Homo sapien
tctcacctaaccactatgaatcaag

SEQ ID NO: 3922769 - DNA, 25 bp, Homo sapien
gtggaactgaactaagagggccttc

SEQ ID NO: 3922770 - DNA, 25 bp, Homo sapien
gtggctccccaggtaggctgaccat

SEQ ID NO: 3922771 - DNA, 25 bp, Homo sapien
aaattcaaacggcttttgccctcag

SEQ ID NO: 3922772 - DNA, 25 bp, Homo sapien
tcagaatcctttagaggctcttggg

SEQ ID NO: 3922773 - DNA, 25 bp, Homo sapien
cacaggtagcaactagtggactgga

SEQ ID NO: 3922774 - DNA, 25 bp, Homo sapien
cctcgcccagaagttctcatgtggg

SEQ ID NO: 3922775 - DNA, 25 bp, Homo sapien
ggaattggaacccagtcagtcttga

SEQ ID NO: 3922776 - DNA, 25 bp, Homo sapien
aatttgctctagctcacacaggtag

SEQ ID NO: 3922777 - DNA, 25 bp, Homo sapien
gaggccaccagagctgtcacatcat

SEQ ID NO: 3922778 - DNA, 25 bp, Homo sapien
tttggcaagggaggccaccagagct

SEQ ID NO: 3922779 - DNA, 25 bp, Homo sapien
cagagctgtcacatcattcaccaac

SEQ ID NO: 3922780 - DNA, 25 bp, Homo sapien
gctgtcacatcattcaccaacatgc

SEQ ID NO: 3922781 - DNA, 25 bp, Homo sapien
acaggaggtcaacagaagtcaggaa

SEQ ID NO: 3922782 - DNA, 25 bp, Homo sapien
ccagttcctaagatccagccaacag

SEQ ID NO: 3922783 - DNA, 25 bp, Homo sapien
tcctaagatccagccaacagggcac

SEQ ID NO: 3922784 - DNA, 25 bp, Homo sapien
aacaggcaaatcttgttatctgtcc

SEQ ID NO: 3922785 - DNA, 25 bp, Homo sapien
gggccatgcttgtggaacctaccat

SEQ ID NO: 3922786 - DNA, 25 bp, Homo sapien
ctccagaagctgctcgagtcacatc

SEQ ID NO: 3922787 - DNA, 25 bp, Homo sapien
cacctgaatgccctctagagcgcag

SEQ ID NO: 3922788 - DNA, 25 bp, Homo sapien
catctgtgatgagtggacagggcca

SEQ ID NO: 3922789 - DNA, 25 bp, Homo sapien
caagatgcctagctaaagcttgaat

SEQ ID NO: 3922790 - DNA, 25 bp, Homo sapien
aggccctaggaccaaagctgcaaga

SEQ ID NO: 3922791 - DNA, 25 bp, Homo sapien
ttcaaaagcttagccaacttcacgg

SEQ ID NO: 3922792 - DNA, 25 bp, Homo sapien
taaagccgaataagaacaagatgcc

SEQ ID NO: 3922793 - DNA, 25 bp, Homo sapien
tacagccagagaatgcctacagaga

SEQ ID NO: 3922794 - DNA, 25 bp, Homo sapien
taaccaaggataggagagcctagcc

SEQ ID NO: 3922795 - DNA, 25 bp, Homo sapien
taaagaaatggcaaggtgtccctgt

SEQ ID NO: 3922796 - DNA, 25 bp, Homo sapien
taacgaagggtacaaggtcagccta

SEQ ID NO: 3922797 - DNA, 25 bp, Homo sapien
tctgacagtgctttcccccaaactt

SEQ ID NO: 3922798 - DNA, 25 bp, Homo sapien
aattccagttttccggcagctctga

SEQ ID NO: 3922799 - DNA, 25 bp, Homo sapien
atgagaattccagttttccggcagc

SEQ ID NO: 3922800 - DNA, 25 bp, Homo sapien
ctgggaacagctgcctatgagaatt

SEQ ID NO: 3922801 - DNA, 25 bp, Homo sapien
caggccctcctttaaagtgccaaga

SEQ ID NO: 3922802 - DNA, 25 bp, Homo sapien
gccaaacacatcatgagccacaggg

SEQ ID NO: 3922803 - DNA, 25 bp, Homo sapien
cagggctgggcgtgatgcctacact

SEQ ID NO: 3922804 - DNA, 25 bp, Homo sapien
cagtgcctgaatcaatgccatgccc

SEQ ID NO: 3922805 - DNA, 25 bp, Homo sapien
tgccaactgtccaaggtggaaagct

SEQ ID NO: 3922806 - DNA, 25 bp, Homo sapien
tagcccaggcccagtaggtggctgc

SEQ ID NO: 3922807 - DNA, 25 bp, Homo sapien
aagctgtgctatggctcaactccca

SEQ ID NO: 3922808 - DNA, 25 bp, Homo sapien
gagccttcagttgccaactgtccaa

SEQ ID NO: 3922809 - DNA, 25 bp, Homo sapien
gtttggcacatggtttgtaggtggt

SEQ ID NO: 3922810 - DNA, 25 bp, Homo sapien
cacatacagaggagtctctgacagc

SEQ ID NO: 3922811 - DNA, 25 bp, Homo sapien
tggtcaggtcacactttttgcctgt

SEQ ID NO: 3922812 - DNA, 25 bp, Homo sapien
acagcctaggtgagctatattcagg

SEQ ID NO: 3922813 - DNA, 25 bp, Homo sapien
tggaatttgagccccctcaaactga

SEQ ID NO: 3922814 - DNA, 25 bp, Homo sapien
ggagattctgagccaaccaggggcc

SEQ ID NO: 3922815 - DNA, 25 bp, Homo sapien
ttagctgtctcccaaccctcactcc

SEQ ID NO: 3922816 - DNA, 25 bp, Homo sapien
gaatttgagccccctcaaactgacc

SEQ ID NO: 3922817 - DNA, 25 bp, Homo sapien
agttctagggaatggatctctcacc

SEQ ID NO: 3922818 - DNA, 25 bp, Homo sapien
gactaccaccttagagagatgaggg

SEQ ID NO: 3922819 - DNA, 25 bp, Homo sapien
agtgctgaccctgtaccttccttgg

SEQ ID NO: 3922820 - DNA, 25 bp, Homo sapien
tacacataggcacttaaggagttgc

SEQ ID NO: 3922821 - DNA, 25 bp, Homo sapien
gacaagccctgtggaattactaccc

SEQ ID NO: 3922822 - DNA, 25 bp, Homo sapien
tatggctctgatgctaaaccactcc

SEQ ID NO: 3922823 - DNA, 25 bp, Homo sapien
ggaggaacaactgggatccacgata

SEQ ID NO: 3922824 - DNA, 25 bp, Homo sapien
aaatggcaacatccgtggtcagtag

SEQ ID NO: 3922825 - DNA, 25 bp, Homo sapien
tagctcagttgctgaccctccaaat

SEQ ID NO: 3922826 - DNA, 25 bp, Homo sapien
aaatcccactgcctggttttgtgag

SEQ ID NO: 3922827 - DNA, 25 bp, Homo sapien
catctctagctcagttgctgaccct

SEQ ID NO: 3922828 - DNA, 25 bp, Homo sapien
tctagctcagttgctgaccctccaa

SEQ ID NO: 3922829 - DNA, 25 bp, Homo sapien
tacatccataagacaggcactcggg

SEQ ID NO: 3922830 - DNA, 25 bp, Homo sapien
aaccccacgtgtgagttccaggcaa

SEQ ID NO: 3922831 - DNA, 25 bp, Homo sapien
cagctcaccctggatactagtaaga

SEQ ID NO: 3922832 - DNA, 25 bp, Homo sapien
tgtattcctggaaaagaacagcctg

SEQ ID NO: 3922833 - DNA, 25 bp, Homo sapien
tttctctaggacagctaaagctgca

SEQ ID NO: 3922834 - DNA, 25 bp, Homo sapien
caggaggaaagacccaggtttctct

SEQ ID NO: 3922835 - DNA, 25 bp, Homo sapien
ttgttctcttctcattcaggcacag

SEQ ID NO: 3922836 - DNA, 25 bp, Homo sapien
tcattcaggcacaggaggaaagacc

SEQ ID NO: 3922837 - DNA, 25 bp, Homo sapien
cataatcaaagtggtggtcacccca

SEQ ID NO: 3922838 - DNA, 25 bp, Homo sapien
gaaacaccctgcatgagtcgagtcc

SEQ ID NO: 3922839 - DNA, 25 bp, Homo sapien
taatcattttactagggcaccccag

SEQ ID NO: 3922840 - DNA, 25 bp, Homo sapien
gcctacccgctgatcttaagagaga

SEQ ID NO: 3922841 - DNA, 25 bp, Homo sapien
gcccattatcaagtggagccacgtg

SEQ ID NO: 3922842 - DNA, 25 bp, Homo sapien
tgtactgccgcttggaagtcctggg

SEQ ID NO: 3922843 - DNA, 25 bp, Homo sapien
ccacgtgtgattgtcctgaactcag

SEQ ID NO: 3922844 - DNA, 25 bp, Homo sapien
ggccttaagcccattatcaagtgga

SEQ ID NO: 3922845 - DNA, 25 bp, Homo sapien
tcatgacaaggccactggaacggat

SEQ ID NO: 3922846 - DNA, 25 bp, Homo sapien
gatcagtgccataagtcagacaggg

SEQ ID NO: 3922847 - DNA, 25 bp, Homo sapien
tcagacagggctacaagtttccgct

SEQ ID NO: 3922848 - DNA, 25 bp, Homo sapien
tctgaaaatctgctccaagtggcct

SEQ ID NO: 3922849 - DNA, 25 bp, Homo sapien
cacctgttcacaaggttacctggca

SEQ ID NO: 3922850 - DNA, 25 bp, Homo sapien
cctggcatagaagggcaaaacactc

SEQ ID NO: 3922851 - DNA, 25 bp, Homo sapien
actcagccatcttgaaccctgcaga

SEQ ID NO: 3922852 - DNA, 25 bp, Homo sapien
ggcatgagggtgtccacctgttcac

SEQ ID NO: 3922853 - DNA, 25 bp, Homo sapien
gaagtccacaagcaaccattaaggc

SEQ ID NO: 3922854 - DNA, 25 bp, Homo sapien
catatgaaggaagcgcacagaccat

SEQ ID NO: 3922855 - DNA, 25 bp, Homo sapien
agaggtagcctaacacattccagag

SEQ ID NO: 3922856 - DNA, 25 bp, Homo sapien
caggtcctgctatatcagccgtcaa

SEQ ID NO: 3922857 - DNA, 25 bp, Homo sapien
tggatggtgtgtaagcactgcccca

SEQ ID NO: 3922858 - DNA, 25 bp, Homo sapien
taatgggctgatagcaatggaccag

SEQ ID NO: 3922859 - DNA, 25 bp, Homo sapien
aatgggctgatagcaatggaccaga

SEQ ID NO: 3922860 - DNA, 25 bp, Homo sapien
tgctctcgttggcattgcctgggat

SEQ ID NO: 3922861 - DNA, 25 bp, Homo sapien
gagatgctctcgttggcattgcctg

SEQ ID NO: 3922862 - DNA, 25 bp, Homo sapien
ctcgttggcattgcctgggatcagt

SEQ ID NO: 3922863 - DNA, 25 bp, Homo sapien
gaggagatgctctcgttggcattgc

SEQ ID NO: 3922864 - DNA, 25 bp, Homo sapien
ggagaaatggggaatcctttatgcc

SEQ ID NO: 3922865 - DNA, 25 bp, Homo sapien
gtggagaaatggggaatcctttatg

SEQ ID NO: 3922866 - DNA, 25 bp, Homo sapien
ttggaggtggagaaatggggaatcc

SEQ ID NO: 3922867 - DNA, 25 bp, Homo sapien
ctgttggaggtggagaaatggggaa

SEQ ID NO: 3922868 - DNA, 25 bp, Homo sapien
caatactattcacgtcagcagggaa

SEQ ID NO: 3922869 - DNA, 25 bp, Homo sapien
tgtttgttgataatgcccaggatcc

SEQ ID NO: 3922870 - DNA, 25 bp, Homo sapien
cattcctcagcggagacttgactga

SEQ ID NO: 3922871 - DNA, 25 bp, Homo sapien
gaagaagatcaaggcatagtatagg

SEQ ID NO: 3922872 - DNA, 25 bp, Homo sapien
aaaagcagactggtgatacgcatca

SEQ ID NO: 3922873 - DNA, 25 bp, Homo sapien
ggctttggcatctgatcaatctgga

SEQ ID NO: 3922874 - DNA, 25 bp, Homo sapien
ccggccgggagtggacatttataca

SEQ ID NO: 3922875 - DNA, 25 bp, Homo sapien
tctagcacagcagcaaagtatttgg

SEQ ID NO: 3922876 - DNA, 25 bp, Homo sapien
gttcatgagccgagtacttgacagt

SEQ ID NO: 3922877 - DNA, 25 bp, Homo sapien
tgagccgagtacttgacagtgaagg

SEQ ID NO: 3922878 - DNA, 25 bp, Homo sapien
gtgctgtgaatcttatgaatgccaa

SEQ ID NO: 3922879 - DNA, 25 bp, Homo sapien
tgtgaatcttatgaatgccaatctt

SEQ ID NO: 3922880 - DNA, 25 bp, Homo sapien
caaagactcccagaggccgacgatt

SEQ ID NO: 3922881 - DNA, 25 bp, Homo sapien
aagactcccagaggccgacgattca

SEQ ID NO: 3922882 - DNA, 25 bp, Homo sapien
agcaaagactcccagaggccgacga

SEQ ID NO: 3922883 - DNA, 25 bp, Homo sapien
ccagcaaagactcccagaggccgac

SEQ ID NO: 3922884 - DNA, 25 bp, Homo sapien
gagacaccttcactcgttccttcac

SEQ ID NO: 3922885 - DNA, 25 bp, Homo sapien
acaccttcactcgttccttcactgg

SEQ ID NO: 3922886 - DNA, 25 bp, Homo sapien
tcggcagcgccccagtctccagttc

SEQ ID NO: 3922887 - DNA, 25 bp, Homo sapien
gacaccttcactcgttccttcactg

SEQ ID NO: 3922888 - DNA, 25 bp, Homo sapien
aatttcatgggcttactgagtcagg

SEQ ID NO: 3922889 - DNA, 25 bp, Homo sapien
ggagcatccagaatacaagtaaaga

SEQ ID NO: 3922890 - DNA, 25 bp, Homo sapien
gaccaggaaggagtaactgttctct

SEQ ID NO: 3922891 - DNA, 25 bp, Homo sapien
gagaatgcatgacaatcctggaacc

SEQ ID NO: 3922892 - DNA, 25 bp, Homo sapien
tcaggctgaacaattaggacttggc

SEQ ID NO: 3922893 - DNA, 25 bp, Homo sapien
aaaagatacttaacaggatgggcca

SEQ ID NO: 3922894 - DNA, 25 bp, Homo sapien
ccctgagggtttgatcatagcacca

SEQ ID NO: 3922895 - DNA, 25 bp, Homo sapien
ttagaagctgctaccaaacagcagg

SEQ ID NO: 3922896 - DNA, 25 bp, Homo sapien
aaaagtgagaaccatggtcctagca

SEQ ID NO: 3922897 - DNA, 25 bp, Homo sapien
gggatttctatcagacactaagcca

SEQ ID NO: 3922898 - DNA, 25 bp, Homo sapien
cagggctgcaaacaatactgttcaa

SEQ ID NO: 3922899 - DNA, 25 bp, Homo sapien
ttcaaacagtaacacaccagagggt

SEQ ID NO: 3922900 - DNA, 25 bp, Homo sapien
gcaatatctctctttgctgaggaga

SEQ ID NO: 3922901 - DNA, 25 bp, Homo sapien
aagaagtccatgaatgtcaactggg

SEQ ID NO: 3922902 - DNA, 25 bp, Homo sapien
tgacagccagggttgagtgaagacc

SEQ ID NO: 3922903 - DNA, 25 bp, Homo sapien
tggagacaacctccagcatcattcc

SEQ ID NO: 3922904 - DNA, 25 bp, Homo sapien
aactaatccagtgccagggtcaacc

SEQ ID NO: 3922905 - DNA, 25 bp, Homo sapien
agttccatggttacaagtcaggacc

SEQ ID NO: 3922906 - DNA, 25 bp, Homo sapien
ggttaagttgtcacacacacgtaat

SEQ ID NO: 3922907 - DNA, 25 bp, Homo sapien
tcaacccagagctaaggttaagttg

SEQ ID NO: 3922908 - DNA, 25 bp, Homo sapien
ggaatgaatgtacatgccaggacaa

SEQ ID NO: 3922909 - DNA, 25 bp, Homo sapien
aaacacctcaggagcctcactccct

SEQ ID NO: 3922910 - DNA, 25 bp, Homo sapien
cataggcaaatgcaagacagcaccc

SEQ ID NO: 3922911 - DNA, 25 bp, Homo sapien
ttccaggcaaatctatcataggcaa

SEQ ID NO: 3922912 - DNA, 25 bp, Homo sapien
cagatcgcagctggtgaagcgccgc

SEQ ID NO: 3922913 - DNA, 25 bp, Homo sapien
tatccggcgccagagcagatcgcag

SEQ ID NO: 3922914 - DNA, 25 bp, Homo sapien
atcgcagctggtgaagcgccgcagc

SEQ ID NO: 3922915 - DNA, 25 bp, Homo sapien
gaggcccgggctatccggcgccaga

SEQ ID NO: 3922916 - DNA, 25 bp, Homo sapien
cgggcgggcagccgactcccgagcc

SEQ ID NO: 3922917 - DNA, 25 bp, Homo sapien
gcgggcagccgactcccgagccgcc

SEQ ID NO: 3922918 - DNA, 25 bp, Homo sapien
gggcgggcagccgactcccgagccg

SEQ ID NO: 3922919 - DNA, 25 bp, Homo sapien
gccgggcgggcagccgactcccgag

SEQ ID NO: 3922920 - DNA, 25 bp, Homo sapien
tcgactcccttgacgatgcctctcg

SEQ ID NO: 3922921 - DNA, 25 bp, Homo sapien
ctcccctcgactcccttgacgatgc

SEQ ID NO: 3922922 - DNA, 25 bp, Homo sapien
gcgatgtcggcccaagcctgacccc

SEQ ID NO: 3922923 - DNA, 25 bp, Homo sapien
cctgtccccgcgatgtcggcccaag

SEQ ID NO: 3922924 - DNA, 25 bp, Homo sapien
gaagcacaggagttcgcgctgcaaa

SEQ ID NO: 3922925 - DNA, 25 bp, Homo sapien
tttccacgggccacatgtgagggcc

SEQ ID NO: 3922926 - DNA, 25 bp, Homo sapien
cccgagagcgcttggtggaagcaca

SEQ ID NO: 3922927 - DNA, 25 bp, Homo sapien
gcgctgcaaacacgtgaggccggtt

SEQ ID NO: 3922928 - DNA, 25 bp, Homo sapien
gagcaactcgacagtggagaagcct

SEQ ID NO: 3922929 - DNA, 25 bp, Homo sapien
gactaaaggtaatgtattctggatg

SEQ ID NO: 3922930 - DNA, 25 bp, Homo sapien
catattgatagtaggtcttggtaca

SEQ ID NO: 3922931 - DNA, 25 bp, Homo sapien
ggtcagcaccactagtcataagtca

SEQ ID NO: 3922932 - DNA, 25 bp, Homo sapien
gagcaattatagtctttggaccaaa

SEQ ID NO: 3922933 - DNA, 25 bp, Homo sapien
catacagtatcttcaacagatggtg

SEQ ID NO: 3922934 - DNA, 25 bp, Homo sapien
ggaagaagttcaagctagcccctgg

SEQ ID NO: 3922935 - DNA, 25 bp, Homo sapien
tatcctttgagaaactatgtcactg

SEQ ID NO: 3922936 - DNA, 25 bp, Homo sapien
gagaccacctgctcctaacacagga

SEQ ID NO: 3922937 - DNA, 25 bp, Homo sapien
caagcactggtcagagaaatttcca

SEQ ID NO: 3922938 - DNA, 25 bp, Homo sapien
cacatggagcttagcgagaccacct

SEQ ID NO: 3922939 - DNA, 25 bp, Homo sapien
caacagatgacaggctttccgctag

SEQ ID NO: 3922940 - DNA, 25 bp, Homo sapien
tcggcatacaccaaagactccatgg

SEQ ID NO: 3922941 - DNA, 25 bp, Homo sapien
tcagtctccaatcagagacaggcgg

SEQ ID NO: 3922942 - DNA, 25 bp, Homo sapien
gacaggcggaaacataggtacagat

SEQ ID NO: 3922943 - DNA, 25 bp, Homo sapien
tcatgcttcaaggattctgtgtccc

SEQ ID NO: 3922944 - DNA, 25 bp, Homo sapien
atattaataaaaccatcagccgggc

SEQ ID NO: 3922945 - DNA, 25 bp, Homo sapien
tagaagtcctgagcaaagggttaaa

SEQ ID NO: 3922946 - DNA, 25 bp, Homo sapien
cttatattaataaaaccatcagccg

SEQ ID NO: 3922947 - DNA, 25 bp, Homo sapien
agcagcaagtagaagtcctgagcaa

SEQ ID NO: 3922948 - DNA, 25 bp, Homo sapien
gaacataattgtatatccgaaaaga

SEQ ID NO: 3922949 - DNA, 25 bp, Homo sapien
tctgttgcaacgtcacatattgtgt

SEQ ID NO: 3922950 - DNA, 25 bp, Homo sapien
gattccatagaagatatgattctca

SEQ ID NO: 3922951 - DNA, 25 bp, Homo sapien
tatatccgaaaagaatagtgagaag

SEQ ID NO: 3922952 - DNA, 25 bp, Homo sapien
actgagtctcagagagctaaactca

SEQ ID NO: 3922953 - DNA, 25 bp, Homo sapien
ctgagtctcagagagctaaactcac

SEQ ID NO: 3922954 - DNA, 25 bp, Homo sapien
catattgcatttgaggaaactgagt

SEQ ID NO: 3922955 - DNA, 25 bp, Homo sapien
cttatcatattgcatttgaggaaac

SEQ ID NO: 3922956 - DNA, 25 bp, Homo sapien
cacgttgcagtgaagaggttccaaa

SEQ ID NO: 3922957 - DNA, 25 bp, Homo sapien
gagtaatggtgagactatccggcag

SEQ ID NO: 3922958 - DNA, 25 bp, Homo sapien
aaacaaggtcacgttgcagtgaaga

SEQ ID NO: 3922959 - DNA, 25 bp, Homo sapien
tccaaataacgggagtaatggtgag

SEQ ID NO: 3922960 - DNA, 25 bp, Homo sapien
tcattctgggaagcctgagcttggg

SEQ ID NO: 3922961 - DNA, 25 bp, Homo sapien
cattctgggaagcctgagcttgggg

SEQ ID NO: 3922962 - DNA, 25 bp, Homo sapien
gctggcggccccatgactgactgct

SEQ ID NO: 3922963 - DNA, 25 bp, Homo sapien
cagcccattggagtaagtggaagca

SEQ ID NO: 3922964 - DNA, 25 bp, Homo sapien
cagcagcccattggagtaagtggaa

SEQ ID NO: 3922965 - DNA, 25 bp, Homo sapien
attgctgctggcggccccatgactg

SEQ ID NO: 3922966 - DNA, 25 bp, Homo sapien
cagtgctttgcaagttttccctccc

SEQ ID NO: 3922967 - DNA, 25 bp, Homo sapien
cctgggagctttgttccaaatggaa

SEQ ID NO: 3922968 - DNA, 25 bp, Homo sapien
tccgctggctggtcgtttgtcttca

SEQ ID NO: 3922969 - DNA, 25 bp, Homo sapien
tcttagtggcagctcgggtttcatt

SEQ ID NO: 3922970 - DNA, 25 bp, Homo sapien
taggaagtgctcagtaaacccttcg

SEQ ID NO: 3922971 - DNA, 25 bp, Homo sapien
tcaggaaggcctgtctaaccatggc

SEQ ID NO: 3922972 - DNA, 25 bp, Homo sapien
gccttaggagtcagggatctatcca

SEQ ID NO: 3922973 - DNA, 25 bp, Homo sapien
cgtgaatcaacgcaaggcactaggg

SEQ ID NO: 3922974 - DNA, 25 bp, Homo sapien
gagtgtgctcagacccgaagttatc

SEQ ID NO: 3922975 - DNA, 25 bp, Homo sapien
cctgatggagtgtgctcagacccga

SEQ ID NO: 3922976 - DNA, 25 bp, Homo sapien
tgtttaaaatcgccaccacccttca

SEQ ID NO: 3922977 - DNA, 25 bp, Homo sapien
tcagacccgaagttatccacaaggt

SEQ ID NO: 3922978 - DNA, 25 bp, Homo sapien
aacagcaaacaatatcaacaaccgg

SEQ ID NO: 3922979 - DNA, 25 bp, Homo sapien
tatcaacaaccggaacccagggctc

SEQ ID NO: 3922980 - DNA, 25 bp, Homo sapien
tacaggatgagcctctctgcggtct

SEQ ID NO: 3922981 - DNA, 25 bp, Homo sapien
ttttgggtgccctacaggatgagcc

SEQ ID NO: 3922982 - DNA, 25 bp, Homo sapien
caatctccgtgaagacgcagtcctt

SEQ ID NO: 3922983 - DNA, 25 bp, Homo sapien
cccttgcgggtgaaggccatgtacc

SEQ ID NO: 3922984 - DNA, 25 bp, Homo sapien
catgaagtggacctcacgctggtgc

SEQ ID NO: 3922985 - DNA, 25 bp, Homo sapien
tagttgaggaactcgaagcgcaggc

SEQ ID NO: 3922986 - DNA, 25 bp, Homo sapien
tgcagatgtagaggcccgtctcggc

SEQ ID NO: 3922987 - DNA, 25 bp, Homo sapien
cttccaaaggtgtccgtctccacga

SEQ ID NO: 3922988 - DNA, 25 bp, Homo sapien
ggctcctcggactcgaactctgctt

SEQ ID NO: 3922989 - DNA, 25 bp, Homo sapien
ggcgatcagcttccccttcttgttc

SEQ ID NO: 3922990 - DNA, 25 bp, Homo sapien
gtagcaggatggctattggcagatc

SEQ ID NO: 3922991 - DNA, 25 bp, Homo sapien
agagaaggtagcaggatggctattg

SEQ ID NO: 3922992 - DNA, 25 bp, Homo sapien
aggatggctattggcagatccctga

SEQ ID NO: 3922993 - DNA, 25 bp, Homo sapien
gcaggatggctattggcagatccct

SEQ ID NO: 3922994 - DNA, 25 bp, Homo sapien
tagagttggtaggtccggatgaggc

SEQ ID NO: 3922995 - DNA, 25 bp, Homo sapien
tgcttcccgctggtgcggctgtaga

SEQ ID NO: 3922996 - DNA, 25 bp, Homo sapien
tgagctgatccgtcaccaggctctg

SEQ ID NO: 3922997 - DNA, 25 bp, Homo sapien
tgccatggcgttgatgcgcttgttg

SEQ ID NO: 3922998 - DNA, 25 bp, Homo sapien
gtaaaattaggtgaggactgaacag

SEQ ID NO: 3922999 - DNA, 25 bp, Homo sapien
ctgtgtaaaattaggtgaggactga

SEQ ID NO: 3923000 - DNA, 25 bp, Homo sapien
gtgtaaaattaggtgaggactgaac

SEQ ID NO: 3923001 - DNA, 25 bp, Homo sapien
tgtaaaattaggtgaggactgaaca

SEQ ID NO: 3923002 - DNA, 25 bp, Homo sapien
ctgttgggagacaccctggggctcc

SEQ ID NO: 3923003 - DNA, 25 bp, Homo sapien
ggccagcccggaacagggaagcgag

SEQ ID NO: 3923004 - DNA, 25 bp, Homo sapien
tgttgggagacaccctggggctccc

SEQ ID NO: 3923005 - DNA, 25 bp, Homo sapien
tcaggaggggtgctacctctctgtg

SEQ ID NO: 3923006 - DNA, 25 bp, Homo sapien
gggctgggtttctaaggtgccctca

SEQ ID NO: 3923007 - DNA, 25 bp, Homo sapien
ggtttctaaggtgccctcagccctc

SEQ ID NO: 3923008 - DNA, 25 bp, Homo sapien
tgcccacccgggtctcacaccggcg

SEQ ID NO: 3923009 - DNA, 25 bp, Homo sapien
gcagaggaccagcaagtgcaacagc

SEQ ID NO: 3923010 - DNA, 25 bp, Homo sapien
ggcttggaggcagaggaccagcaag

SEQ ID NO: 3923011 - DNA, 25 bp, Homo sapien
ttggaggcagaggaccagcaagtgc

SEQ ID NO: 3923012 - DNA, 25 bp, Homo sapien
tggaggcagaggaccagcaagtgca

SEQ ID NO: 3923013 - DNA, 25 bp, Homo sapien
gcagctcagcgcggagcgggggctg

SEQ ID NO: 3923014 - DNA, 25 bp, Homo sapien
agctcagcgcggagcgggggctgcc

SEQ ID NO: 3923015 - DNA, 25 bp, Homo sapien
cagctcagcgcggagcgggggctgc

SEQ ID NO: 3923016 - DNA, 25 bp, Homo sapien
gtcccgtggaacgtcgtgctcgccg

SEQ ID NO: 3923017 - DNA, 25 bp, Homo sapien
ggccggcggcgatcacgacgcggct

SEQ ID NO: 3923018 - DNA, 25 bp, Homo sapien
gcgcgagcggagagggtgcgggtgc

SEQ ID NO: 3923019 - DNA, 25 bp, Homo sapien
cgggaggacgcgctgagcagggcgc

SEQ ID NO: 3923020 - DNA, 25 bp, Homo sapien
tagtgagcacttgtatctgccacag

SEQ ID NO: 3923021 - DNA, 25 bp, Homo sapien
ggaacaccaccagttagtgagcact

SEQ ID NO: 3923022 - DNA, 25 bp, Homo sapien
ccaccagttagtgagcacttgtatc

SEQ ID NO: 3923023 - DNA, 25 bp, Homo sapien
gagcacttgtatctgccacaggctt

SEQ ID NO: 3923024 - DNA, 25 bp, Homo sapien
tagttcgttgaaattctcatctccc

SEQ ID NO: 3923025 - DNA, 25 bp, Homo sapien
ctagttcgttgaaattctcatctcc

SEQ ID NO: 3923026 - DNA, 25 bp, Homo sapien
tgagcttcaggcactaacctccaat

SEQ ID NO: 3923027 - DNA, 25 bp, Homo sapien
aaaaccacggctgtgtggagcacag

SEQ ID NO: 3923028 - DNA, 25 bp, Homo sapien
taaaaatgtgtagctctgagcttca

SEQ ID NO: 3923029 - DNA, 25 bp, Homo sapien
ggccccgggcatggtgaaaatcaga

SEQ ID NO: 3923030 - DNA, 25 bp, Homo sapien
tggggcacagctcaacttcttcctc

SEQ ID NO: 3923031 - DNA, 25 bp, Homo sapien
ggaaggatggggcacagctcaactt

SEQ ID NO: 3923032 - DNA, 25 bp, Homo sapien
ctagggcctgcccccctgctttttg

SEQ ID NO: 3923033 - DNA, 25 bp, Homo sapien
gatggggcacagctcaacttcttcc

SEQ ID NO: 3923034 - DNA, 25 bp, Homo sapien
cagtgatccgcacagggccagagcc

SEQ ID NO: 3923035 - DNA, 25 bp, Homo sapien
caatctggtgccgcccagtgatccg

SEQ ID NO: 3923036 - DNA, 25 bp, Homo sapien
cggaaggttacaggtggttggagct

SEQ ID NO: 3923037 - DNA, 25 bp, Homo sapien
gagcccgacttcaggcggaaggtta

SEQ ID NO: 3923038 - DNA, 25 bp, Homo sapien
ttctaccacattacactcgtctttg

SEQ ID NO: 3923039 - DNA, 25 bp, Homo sapien
agggactgcgatctcctgatggtca

SEQ ID NO: 3923040 - DNA, 25 bp, Homo sapien
gttggccacagggactgcgatctcc

SEQ ID NO: 3923041 - DNA, 25 bp, Homo sapien
cgatctcctgatggtcatggttccg

SEQ ID NO: 3923042 - DNA, 25 bp, Homo sapien
gttagtgccagcacgtgctccgcat

SEQ ID NO: 3923043 - DNA, 25 bp, Homo sapien
agtgccagcacgtgctccgcatcat

SEQ ID NO: 3923044 - DNA, 25 bp, Homo sapien
gtgaaggagcgggtgtggccggaga

SEQ ID NO: 3923045 - DNA, 25 bp, Homo sapien
catggttagtgccagcacgtgctcc

SEQ ID NO: 3923046 - DNA, 25 bp, Homo sapien
cgttcggctctcctgactcaaaaac

SEQ ID NO: 3923047 - DNA, 25 bp, Homo sapien
tgtccatagtgaccggggccgggac

SEQ ID NO: 3923048 - DNA, 25 bp, Homo sapien
cgaagaaaaaactgtccatagtgac

SEQ ID NO: 3923049 - DNA, 25 bp, Homo sapien
ggcccgcgttcggctctcctgactc

SEQ ID NO: 3923050 - DNA, 25 bp, Homo sapien
aactccgcccccgacacgcacaaag

SEQ ID NO: 3923051 - DNA, 25 bp, Homo sapien
ggccccgcccattaaaggagacgca

SEQ ID NO: 3923052 - DNA, 25 bp, Homo sapien
cgacacgcacaaagccggggaccct

SEQ ID NO: 3923053 - DNA, 25 bp, Homo sapien
cgcccattaaaggagacgcacagtc

SEQ ID NO: 3923054 - DNA, 25 bp, Homo sapien
tttctacaggaactgagctctgatc

SEQ ID NO: 3923055 - DNA, 25 bp, Homo sapien
ctcttgcatggtcttttacagttcg

SEQ ID NO: 3923056 - DNA, 25 bp, Homo sapien
tgagctctgatccaaacaatcaata

SEQ ID NO: 3923057 - DNA, 25 bp, Homo sapien
tacagttcgttttctacaggaactg

SEQ ID NO: 3923058 - DNA, 25 bp, Homo sapien
taatattcataaccaggaaatagca

SEQ ID NO: 3923059 - DNA, 25 bp, Homo sapien
ggaaatagcatagcacttcatgatc

SEQ ID NO: 3923060 - DNA, 25 bp, Homo sapien
taaccaggaaatagcatagcacttc

SEQ ID NO: 3923061 - DNA, 25 bp, Homo sapien
cttaatattcataaccaggaaatag

SEQ ID NO: 3923062 - DNA, 25 bp, Homo sapien
taggctctcgtaccccaaatggtca

SEQ ID NO: 3923063 - DNA, 25 bp, Homo sapien
tgccatgtcccctaagactgagagg

SEQ ID NO: 3923064 - DNA, 25 bp, Homo sapien
ggtacaatgctttagggctctctca

SEQ ID NO: 3923065 - DNA, 25 bp, Homo sapien
cacaaaggatagtcaggttacagct

SEQ ID NO: 3923066 - DNA, 25 bp, Homo sapien
taagcccatgtaaaaggtctcagca

SEQ ID NO: 3923067 - DNA, 25 bp, Homo sapien
tcaactaccattcacaaggtgcagt

SEQ ID NO: 3923068 - DNA, 25 bp, Homo sapien
tcttccaaccagtgagtagtctcaa

SEQ ID NO: 3923069 - DNA, 25 bp, Homo sapien
ctagaggctgaactgtatgaagacc

SEQ ID NO: 3923070 - DNA, 25 bp, Homo sapien
caaaacatcctaacttgctgtaaaa

SEQ ID NO: 3923071 - DNA, 25 bp, Homo sapien
tccagaattcttttatcatctggtc

SEQ ID NO: 3923072 - DNA, 25 bp, Homo sapien
ttcaaaacatcctaacttgctgtaa

SEQ ID NO: 3923073 - DNA, 25 bp, Homo sapien
ttcttttatcatctggtctcacttc

SEQ ID NO: 3923074 - DNA, 25 bp, Homo sapien
tattaatacacatgcgattcttcac

SEQ ID NO: 3923075 - DNA, 25 bp, Homo sapien
gattcttcaccactaattaattcag

SEQ ID NO: 3923076 - DNA, 25 bp, Homo sapien
gcagtataaatttacaattcacttc

SEQ ID NO: 3923077 - DNA, 25 bp, Homo sapien
aaataccaccaactccacaaatatg

SEQ ID NO: 3923078 - DNA, 25 bp, Homo sapien
tttggccacacttgggtcagttact

SEQ ID NO: 3923079 - DNA, 25 bp, Homo sapien
ttggccacacttgggtcagttactt

SEQ ID NO: 3923080 - DNA, 25 bp, Homo sapien
ttttggccacacttgggtcagttac

SEQ ID NO: 3923081 - DNA, 25 bp, Homo sapien
gaaagtttctggcagtacttcctgt

SEQ ID NO: 3923082 - DNA, 25 bp, Homo sapien
gaaattagcaaggaaagtttctggc

SEQ ID NO: 3923083 - DNA, 25 bp, Homo sapien
aaagtttctggcagtacttcctgtt

SEQ ID NO: 3923084 - DNA, 25 bp, Homo sapien
gactttcacaatagttacgcattag

SEQ ID NO: 3923085 - DNA, 25 bp, Homo sapien
cctatttatatcgtcagggctggtc

SEQ ID NO: 3923086 - DNA, 25 bp, Homo sapien
tacagaacttagcaacaagaaagca

SEQ ID NO: 3923087 - DNA, 25 bp, Homo sapien
gggcaggcattctccctcgcgtgca

SEQ ID NO: 3923088 - DNA, 25 bp, Homo sapien
gacttattaagaagtgctcctatca

SEQ ID NO: 3923089 - DNA, 25 bp, Homo sapien
gcattagtcagaaggcaagttatta

SEQ ID NO: 3923090 - DNA, 25 bp, Homo sapien
taatcacgtaatgtgttggccaaca

SEQ ID NO: 3923091 - DNA, 25 bp, Homo sapien
tcacaaagtagactctcaagagctc

SEQ ID NO: 3923092 - DNA, 25 bp, Homo sapien
gtctttattgtgttttcacctgagg

SEQ ID NO: 3923093 - DNA, 25 bp, Homo sapien
gaccataacatctttaagtatgaaa

SEQ ID NO: 3923094 - DNA, 25 bp, Homo sapien
tgtgcctgaccaagaccataacatc

SEQ ID NO: 3923095 - DNA, 25 bp, Homo sapien
gaggaaatattacaatagtactccc

SEQ ID NO: 3923096 - DNA, 25 bp, Homo sapien
agtgcccaaggcataaccacatatg

SEQ ID NO: 3923097 - DNA, 25 bp, Homo sapien
taaagggggtcacatctacagtgcc

SEQ ID NO: 3923098 - DNA, 25 bp, Homo sapien
tggtatacttctcctgcatgaaggg

SEQ ID NO: 3923099 - DNA, 25 bp, Homo sapien
agttccttgtcaccatttggcttgg

SEQ ID NO: 3923100 - DNA, 25 bp, Homo sapien
tcaaatccaaatacttatcacatac

SEQ ID NO: 3923101 - DNA, 25 bp, Homo sapien
cctacatttggtgtaagaaactaga

SEQ ID NO: 3923102 - DNA, 25 bp, Homo sapien
gataagcctcactatgaaaggtcta

SEQ ID NO: 3923103 - DNA, 25 bp, Homo sapien
gacccactgtacttgcatgaactta

SEQ ID NO: 3923104 - DNA, 25 bp, Homo sapien
aagggtaaacccactccatcgtcat

SEQ ID NO: 3923105 - DNA, 25 bp, Homo sapien
cactccatcgtcatacatttctctg

SEQ ID NO: 3923106 - DNA, 25 bp, Homo sapien
tcaggctgactttgaaagggtaaac

SEQ ID NO: 3923107 - DNA, 25 bp, Homo sapien
ctctgcaaatcttgtacacggatgc

SEQ ID NO: 3923108 - DNA, 25 bp, Homo sapien
tggcagcagaatctaacaatataac

SEQ ID NO: 3923109 - DNA, 25 bp, Homo sapien
tgagtcagatttgtaaaaccagcaa

SEQ ID NO: 3923110 - DNA, 25 bp, Homo sapien
gaaacatctatcagaaatatcacct

SEQ ID NO: 3923111 - DNA, 25 bp, Homo sapien
cagcaaggttttaggaatactgaga

SEQ ID NO: 3923112 - DNA, 25 bp, Homo sapien
tagctgattgtcaacagcctgtaga

SEQ ID NO: 3923113 - DNA, 25 bp, Homo sapien
caccaagttggtaggtagagagaca

SEQ ID NO: 3923114 - DNA, 25 bp, Homo sapien
gttttaagtgtgcaccatacccata

SEQ ID NO: 3923115 - DNA, 25 bp, Homo sapien
ttgcagttttaagacagaaggattc

SEQ ID NO: 3923116 - DNA, 25 bp, Homo sapien
tccttaggaaaataaggtctgatag

SEQ ID NO: 3923117 - DNA, 25 bp, Homo sapien
tataaactttggaggtaggagtcag

SEQ ID NO: 3923118 - DNA, 25 bp, Homo sapien
taaggtctgatagtataaactttgg

SEQ ID NO: 3923119 - DNA, 25 bp, Homo sapien
taaactttggaggtaggagtcagtg

SEQ ID NO: 3923120 - DNA, 25 bp, Homo sapien
tttgccccatcaattggcagcaaac

SEQ ID NO: 3923121 - DNA, 25 bp, Homo sapien
ttgccccatcaattggcagcaaacg

SEQ ID NO: 3923122 - DNA, 25 bp, Homo sapien
atttgccccatcaattggcagcaaa

SEQ ID NO: 3923123 - DNA, 25 bp, Homo sapien
catttgccccatcaattggcagcaa

SEQ ID NO: 3923124 - DNA, 25 bp, Homo sapien
gattaaaatgctgtgcgacctgcaa

SEQ ID NO: 3923125 - DNA, 25 bp, Homo sapien
gaagagggttatctgtccaggagac

SEQ ID NO: 3923126 - DNA, 25 bp, Homo sapien
tggcagacaagcatgcgcgcattgt

SEQ ID NO: 3923127 - DNA, 25 bp, Homo sapien
tccctacgataagatggcagaacag

SEQ ID NO: 3923128 - DNA, 25 bp, Homo sapien
ggattggcagcatctccttcagaaa

SEQ ID NO: 3923129 - DNA, 25 bp, Homo sapien
ctgcgcttcgcaggcgcggggggga

SEQ ID NO: 3923130 - DNA, 25 bp, Homo sapien
ttggcagcatctccttcagaaatta

SEQ ID NO: 3923131 - DNA, 25 bp, Homo sapien
cgcgggggggattggcagcatctcc

SEQ ID NO: 3923132 - DNA, 25 bp, Homo sapien
ttcagttgtgaattcatattgatac

SEQ ID NO: 3923133 - DNA, 25 bp, Homo sapien
catctgatgcgcaacataaggtttc

SEQ ID NO: 3923134 - DNA, 25 bp, Homo sapien
aaagccttcggcagaccaatccttc

SEQ ID NO: 3923135 - DNA, 25 bp, Homo sapien
atttgggactagaaagccttcggca

SEQ ID NO: 3923136 - DNA, 25 bp, Homo sapien
tgtgctgaagaatgactacgacacc

SEQ ID NO: 3923137 - DNA, 25 bp, Homo sapien
ggtctccaattaagaattgtgctga

SEQ ID NO: 3923138 - DNA, 25 bp, Homo sapien
cagggttcttggtctccaattaaga

SEQ ID NO: 3923139 - DNA, 25 bp, Homo sapien
ctagaccacctctaaaggcccaggg

SEQ ID NO: 3923140 - DNA, 25 bp, Homo sapien
caacaaactgacaaacacttcgtgg

SEQ ID NO: 3923141 - DNA, 25 bp, Homo sapien
caagcggagaacgttacgagaaagg

SEQ ID NO: 3923142 - DNA, 25 bp, Homo sapien
tgttgagatcagatccaagcggaga

SEQ ID NO: 3923143 - DNA, 25 bp, Homo sapien
tttcctggggtctcaaatgtccaac

SEQ ID NO: 3923144 - DNA, 25 bp, Homo sapien
tattatacaaatcaagctagctgct

SEQ ID NO: 3923145 - DNA, 25 bp, Homo sapien
taagtcccaagtttgtctgagtcaa

SEQ ID NO: 3923146 - DNA, 25 bp, Homo sapien
tacacatggaatacagaagtctcta

SEQ ID NO: 3923147 - DNA, 25 bp, Homo sapien
gaagtctctatttaaggtcaccagt

SEQ ID NO: 3923148 - DNA, 25 bp, Homo sapien
aattcaggcccattaagagtttgta

SEQ ID NO: 3923149 - DNA, 25 bp, Homo sapien
tagtcagacagtcccaaagcaaacc

SEQ ID NO: 3923150 - DNA, 25 bp, Homo sapien
tgtcccattccgtaactcagtgtaa

SEQ ID NO: 3923151 - DNA, 25 bp, Homo sapien
gctgcatgtacgaagagctgtgtaa

SEQ ID NO: 3923152 - DNA, 25 bp, Homo sapien
tcagttcatgtctaccgcccttaaa

SEQ ID NO: 3923153 - DNA, 25 bp, Homo sapien
gccgctgtccatccaatagtagtag

SEQ ID NO: 3923154 - DNA, 25 bp, Homo sapien
tgcgcaaacgtgacttcagttcatg

SEQ ID NO: 3923155 - DNA, 25 bp, Homo sapien
catgacgcgctgtgaacatctgccg

SEQ ID NO: 3923156 - DNA, 25 bp, Homo sapien
ataatagaagtcattagtaatcaaa

SEQ ID NO: 3923157 - DNA, 25 bp, Homo sapien
gtaatcaaaagtactgcatagccac

SEQ ID NO: 3923158 - DNA, 25 bp, Homo sapien
aatcaaaagtactgcatagccacat

SEQ ID NO: 3923159 - DNA, 25 bp, Homo sapien
agataatagaagtcattagtaatca

SEQ ID NO: 3923160 - DNA, 25 bp, Homo sapien
aaacttgtgttgagccacaggctgg

SEQ ID NO: 3923161 - DNA, 25 bp, Homo sapien
agaaaatactctccctgtcgtgagc

SEQ ID NO: 3923162 - DNA, 25 bp, Homo sapien
caccataaatgctcagtgcagagat

SEQ ID NO: 3923163 - DNA, 25 bp, Homo sapien
caggctggacaagcttgctgtaaga

SEQ ID NO: 3923164 - DNA, 25 bp, Homo sapien
tacttatgctgaattagcccaaggg

SEQ ID NO: 3923165 - DNA, 25 bp, Homo sapien
gagctcaaaggtatacaggcagaaa

SEQ ID NO: 3923166 - DNA, 25 bp, Homo sapien
ccttatagctggattgaaaacctga

SEQ ID NO: 3923167 - DNA, 25 bp, Homo sapien
ctaaagctcgcatgcgcacagggct

SEQ ID NO: 3923168 - DNA, 25 bp, Homo sapien
tatttgaggagaagagattattcct

SEQ ID NO: 3923169 - DNA, 25 bp, Homo sapien
ttaaagggacaatatatttgaggag

SEQ ID NO: 3923170 - DNA, 25 bp, Homo sapien
aagagattattcctggtgcacctac

SEQ ID NO: 3923171 - DNA, 25 bp, Homo sapien
taaagggacaatatatttgaggaga

SEQ ID NO: 3923172 - DNA, 25 bp, Homo sapien
tactcttgatatcccaaacatagga

SEQ ID NO: 3923173 - DNA, 25 bp, Homo sapien
tgaacattcccatcactagtccaca

SEQ ID NO: 3923174 - DNA, 25 bp, Homo sapien
aattggagagccgagtgaacattcc

SEQ ID NO: 3923175 - DNA, 25 bp, Homo sapien
cataaagaattgtcctgttggcaca

SEQ ID NO: 3923176 - DNA, 25 bp, Homo sapien
gagggtgctgcaactaaaggagtcc

SEQ ID NO: 3923177 - DNA, 25 bp, Homo sapien
tgctcgaagccattgaaattcccgt

SEQ ID NO: 3923178 - DNA, 25 bp, Homo sapien
gtaacatctgtgctcctttgggtcc

SEQ ID NO: 3923179 - DNA, 25 bp, Homo sapien
tggttccgcagtgtacaaaggcttt

SEQ ID NO: 3923180 - DNA, 25 bp, Homo sapien
ttattctctagatcccccaatttca

SEQ ID NO: 3923181 - DNA, 25 bp, Homo sapien
aaatccttattctctagatccccca

SEQ ID NO: 3923182 - DNA, 25 bp, Homo sapien
tccttattctctagatcccccaatt

SEQ ID NO: 3923183 - DNA, 25 bp, Homo sapien
aatccttattctctagatcccccaa

SEQ ID NO: 3923184 - DNA, 25 bp, Homo sapien
tgcctcccaggttgaggcgactgtc

SEQ ID NO: 3923185 - DNA, 25 bp, Homo sapien
cctcccaggttgaggcgactgtcct

SEQ ID NO: 3923186 - DNA, 25 bp, Homo sapien
ccaggttgaggcgactgtcctgcct

SEQ ID NO: 3923187 - DNA, 25 bp, Homo sapien
tcccaggttgaggcgactgtcctgc

SEQ ID NO: 3923188 - DNA, 25 bp, Homo sapien
catctgtggactatagagtacatca

SEQ ID NO: 3923189 - DNA, 25 bp, Homo sapien
ggatggacacagtactatcttcact

SEQ ID NO: 3923190 - DNA, 25 bp, Homo sapien
caaactcttgcaaccattctgttaa

SEQ ID NO: 3923191 - DNA, 25 bp, Homo sapien
aatgctagctttagagccatctgtg

SEQ ID NO: 3923192 - DNA, 25 bp, Homo sapien
gaaacctcttcgatggactctactg

SEQ ID NO: 3923193 - DNA, 25 bp, Homo sapien
cacaatttggattagtgaggactcc

SEQ ID NO: 3923194 - DNA, 25 bp, Homo sapien
ggatcttcctttgtacgggcccaga

SEQ ID NO: 3923195 - DNA, 25 bp, Homo sapien
ccttttaaccgtgggatgagttctg

SEQ ID NO: 3923196 - DNA, 25 bp, Homo sapien
ggtagaagcttttcacccacagtcc

SEQ ID NO: 3923197 - DNA, 25 bp, Homo sapien
aagcacttcaattccaggtagaagc

SEQ ID NO: 3923198 - DNA, 25 bp, Homo sapien
caaagcacttcaattccaggtagaa

SEQ ID NO: 3923199 - DNA, 25 bp, Homo sapien
cccacagtccttaaatatggagact

SEQ ID NO: 3923200 - DNA, 25 bp, Homo sapien
cagaattaaaatgctcatgggtttt

SEQ ID NO: 3923201 - DNA, 25 bp, Homo sapien
taaaatgctcatgggttttctcttt

SEQ ID NO: 3923202 - DNA, 25 bp, Homo sapien
tataccaatggctattagtactcaa

SEQ ID NO: 3923203 - DNA, 25 bp, Homo sapien
atggctattagtactcaactgcaac

SEQ ID NO: 3923204 - DNA, 25 bp, Homo sapien
caatggctattagtactcaactgca

SEQ ID NO: 3923205 - DNA, 25 bp, Homo sapien
aaaggcatataccaatggctattag

SEQ ID NO: 3923206 - DNA, 25 bp, Homo sapien
aaatgatctgcacccaaactgagaa

SEQ ID NO: 3923207 - DNA, 25 bp, Homo sapien
aatacctctttgtctgctgcacaca

SEQ ID NO: 3923208 - DNA, 25 bp, Homo sapien
tctggctctcctaggtactgataga

SEQ ID NO: 3923209 - DNA, 25 bp, Homo sapien
cacacatattatggtctatatcatc

SEQ ID NO: 3923210 - DNA, 25 bp, Homo sapien
ccctacattggaccaaaggaagtct

SEQ ID NO: 3923211 - DNA, 25 bp, Homo sapien
ccaggtatgaatcagaaagaataga

SEQ ID NO: 3923212 - DNA, 25 bp, Homo sapien
tttacactcaattaggttcacctag

SEQ ID NO: 3923213 - DNA, 25 bp, Homo sapien
aatgccacccatataaatctttgcc

SEQ ID NO: 3923214 - DNA, 25 bp, Homo sapien
ttgagaagaactagtacctccagta

SEQ ID NO: 3923215 - DNA, 25 bp, Homo sapien
agaactagtacctccagtaaagctc

SEQ ID NO: 3923216 - DNA, 25 bp, Homo sapien
tcctctatcagaaggattcaaggct

SEQ ID NO: 3923217 - DNA, 25 bp, Homo sapien
aaatattcctctatcagaaggattc

SEQ ID NO: 3923218 - DNA, 25 bp, Homo sapien
gtttcaatgtggatacttccttggg

SEQ ID NO: 3923219 - DNA, 25 bp, Homo sapien
caggtgagatcgcatagatgaactc

SEQ ID NO: 3923220 - DNA, 25 bp, Homo sapien
ctggtccaatttacgtttcaatgtg

SEQ ID NO: 3923221 - DNA, 25 bp, Homo sapien
tctatctcatattctcgtgcagcag

SEQ ID NO: 3923222 - DNA, 25 bp, Homo sapien
tacaaattgtcatgtccaacttaac

SEQ ID NO: 3923223 - DNA, 25 bp, Homo sapien
gaaaggcataaaatgcagccgctgc

SEQ ID NO: 3923224 - DNA, 25 bp, Homo sapien
ggaaacaggctaaaatcaataaaca

SEQ ID NO: 3923225 - DNA, 25 bp, Homo sapien
tacaaaatggtacaagcctgaagtg

SEQ ID NO: 3923226 - DNA, 25 bp, Homo sapien
tagtaaaccacaacactagatggag

SEQ ID NO: 3923227 - DNA, 25 bp, Homo sapien
taacaaagtgacaaacgctgtctcc

SEQ ID NO: 3923228 - DNA, 25 bp, Homo sapien
gaaaagcacctctctaatttggcgg

SEQ ID NO: 3923229 - DNA, 25 bp, Homo sapien
gaaccagagttaagtcatggcctta

SEQ ID NO: 3923230 - DNA, 25 bp, Homo sapien
ggagggcgaggtttgcagttagccg

SEQ ID NO: 3923231 - DNA, 25 bp, Homo sapien
gggagggcgaggtttgcagttagcc

SEQ ID NO: 3923232 - DNA, 25 bp, Homo sapien
tatggtcatgaccttgctagcgcag

SEQ ID NO: 3923233 - DNA, 25 bp, Homo sapien
ctggcagaagtaagcagcacaatct

SEQ ID NO: 3923234 - DNA, 25 bp, Homo sapien
caatctatgaccacagaacagatgg

SEQ ID NO: 3923235 - DNA, 25 bp, Homo sapien
gaacagatggagtcagcctagcacg

SEQ ID NO: 3923236 - DNA, 25 bp, Homo sapien
tcgccaaaacatcctatgtttgtag

SEQ ID NO: 3923237 - DNA, 25 bp, Homo sapien
catcttttggggcatacaagtatgt

SEQ ID NO: 3923238 - DNA, 25 bp, Homo sapien
gccaaaacatcctatgtttgtagtc

SEQ ID NO: 3923239 - DNA, 25 bp, Homo sapien
ctctcgccaaaacatcctatgtttg

SEQ ID NO: 3923240 - DNA, 25 bp, Homo sapien
tctgttccataacccaaggtcttcc

SEQ ID NO: 3923241 - DNA, 25 bp, Homo sapien
ctctgttccataacccaaggtcttc

SEQ ID NO: 3923242 - DNA, 25 bp, Homo sapien
ttccataacccaaggtcttccataa

SEQ ID NO: 3923243 - DNA, 25 bp, Homo sapien
tgttccataacccaaggtcttccat

SEQ ID NO: 3923244 - DNA, 25 bp, Homo sapien
gacttaattttatgatcgtgctcct

SEQ ID NO: 3923245 - DNA, 25 bp, Homo sapien
tctcacgcaatcttaattacagagc

SEQ ID NO: 3923246 - DNA, 25 bp, Homo sapien
taactggcccaaacaacaaactctc

SEQ ID NO: 3923247 - DNA, 25 bp, Homo sapien
aatcaaagggaccaaaaaatgcctg

SEQ ID NO: 3923248 - DNA, 25 bp, Homo sapien
gactcattccagtctagctccgaaa

SEQ ID NO: 3923249 - DNA, 25 bp, Homo sapien
taactgaaggtataatggactggca

SEQ ID NO: 3923250 - DNA, 25 bp, Homo sapien
taaaatctccctgcactcaagccaa

SEQ ID NO: 3923251 - DNA, 25 bp, Homo sapien
ggaataaacgagagaatggcagaca

SEQ ID NO: 3923252 - DNA, 25 bp, Homo sapien
cgctcctccaacgtcgcttgactct

SEQ ID NO: 3923253 - DNA, 25 bp, Homo sapien
cagggttggagctgagctcgctctc

SEQ ID NO: 3923254 - DNA, 25 bp, Homo sapien
accacaccgcagaggaaccgccgag

SEQ ID NO: 3923255 - DNA, 25 bp, Homo sapien
tcttctccgggtgccggagctgccg

SEQ ID NO: 3923256 - DNA, 25 bp, Homo sapien
cctcgacctctgtccgttggggcac

SEQ ID NO: 3923257 - DNA, 25 bp, Homo sapien
gacctctgtccgttggggcaccggc

SEQ ID NO: 3923258 - DNA, 25 bp, Homo sapien
ctctgtccgttggggcaccggcccg

SEQ ID NO: 3923259 - DNA, 25 bp, Homo sapien
tcgacctctgtccgttggggcaccg

SEQ ID NO: 3923260 - DNA, 25 bp, Homo sapien
cgccagaagcctaagcggagagcga

SEQ ID NO: 3923261 - DNA, 25 bp, Homo sapien
gctgtgacctctcgttccctggaag

SEQ ID NO: 3923262 - DNA, 25 bp, Homo sapien
agggacccgaatgcccggatgagaa

SEQ ID NO: 3923263 - DNA, 25 bp, Homo sapien
gaagaagacggccaagggtcctgtc

SEQ ID NO: 3923264 - DNA, 25 bp, Homo sapien
gccaccctccgaaacaagcctggca

SEQ ID NO: 3923265 - DNA, 25 bp, Homo sapien
tggcaccctgggacggacggaccat

SEQ ID NO: 3923266 - DNA, 25 bp, Homo sapien
cttgccaccctccgaaacaagcctg

SEQ ID NO: 3923267 - DNA, 25 bp, Homo sapien
ctggcaccctgggacggacggacca

SEQ ID NO: 3923268 - DNA, 25 bp, Homo sapien
ctttagccgtagcccaacttgtagt

SEQ ID NO: 3923269 - DNA, 25 bp, Homo sapien
tagcccaacttgtagtttcagggac

SEQ ID NO: 3923270 - DNA, 25 bp, Homo sapien
tagccgtagcccaacttgtagtttc

SEQ ID NO: 3923271 - DNA, 25 bp, Homo sapien
cgtagcccaacttgtagtttcaggg

SEQ ID NO: 3923272 - DNA, 25 bp, Homo sapien
tgccacgcaggctagtgcaatcata

SEQ ID NO: 3923273 - DNA, 25 bp, Homo sapien
tcatagcttaagtatcgaattcctg

SEQ ID NO: 3923274 - DNA, 25 bp, Homo sapien
cccgccaccacactcttttaatttg

SEQ ID NO: 3923275 - DNA, 25 bp, Homo sapien
agaagaggtctcattttgccacgca

SEQ ID NO: 3923276 - DNA, 25 bp, Homo sapien
cactgggttcagatgctatgcctgc

SEQ ID NO: 3923277 - DNA, 25 bp, Homo sapien
tggaacctgggtcctatggtccctg

SEQ ID NO: 3923278 - DNA, 25 bp, Homo sapien
tggccaactgggagggtaagctaaa

SEQ ID NO: 3923279 - DNA, 25 bp, Homo sapien
caagcaagaagagaccctagggaac

SEQ ID NO: 3923280 - DNA, 25 bp, Homo sapien
ggagtgataggccccaagttcagga

SEQ ID NO: 3923281 - DNA, 25 bp, Homo sapien
tgataggccccaagttcaggaaggt

SEQ ID NO: 3923282 - DNA, 25 bp, Homo sapien
tggggagtgataggccccaagttca

SEQ ID NO: 3923283 - DNA, 25 bp, Homo sapien
cactgtggggagtgataggccccaa

SEQ ID NO: 3923284 - DNA, 25 bp, Homo sapien
aattttggcaggcatcagccaggac

SEQ ID NO: 3923285 - DNA, 25 bp, Homo sapien
caaaacagggacgataagcaaggag

SEQ ID NO: 3923286 - DNA, 25 bp, Homo sapien
gcatttctaaggagacaaggtcttc

SEQ ID NO: 3923287 - DNA, 25 bp, Homo sapien
gcctgtggtagcagacctgtggaac

SEQ ID NO: 3923288 - DNA, 25 bp, Homo sapien
gcctgagcaatcataatctgtccag

SEQ ID NO: 3923289 - DNA, 25 bp, Homo sapien
tgcctgagcaatcataatctgtcca

SEQ ID NO: 3923290 - DNA, 25 bp, Homo sapien
cctgagcaatcataatctgtccagg

SEQ ID NO: 3923291 - DNA, 25 bp, Homo sapien
caccatagcaggagacatctgtcta

SEQ ID NO: 3923292 - DNA, 25 bp, Homo sapien
gaatggagcattctctctgagaggg

SEQ ID NO: 3923293 - DNA, 25 bp, Homo sapien
cactctcaacactgggtgtcaggca

SEQ ID NO: 3923294 - DNA, 25 bp, Homo sapien
ggactactgaatccccaagctcttg

SEQ ID NO: 3923295 - DNA, 25 bp, Homo sapien
gtccgcctggactagggttagagca

SEQ ID NO: 3923296 - DNA, 25 bp, Homo sapien
gaagagaagggtgaggtccgcctgg

SEQ ID NO: 3923297 - DNA, 25 bp, Homo sapien
gaagggtgaggtccgcctggactag

SEQ ID NO: 3923298 - DNA, 25 bp, Homo sapien
ggactagggttagagcatggtcccc

SEQ ID NO: 3923299 - DNA, 25 bp, Homo sapien
tagatgacattgtcaaagagctgca

SEQ ID NO: 3923300 - DNA, 25 bp, Homo sapien
gcatggacctcatgatgttctcatc

SEQ ID NO: 3923301 - DNA, 25 bp, Homo sapien
gacattgtcaaagagctgcatggac

SEQ ID NO: 3923302 - DNA, 25 bp, Homo sapien
ttgtcaaagagctgcatggacctca

SEQ ID NO: 3923303 - DNA, 25 bp, Homo sapien
caggtcagggtaatgtagagggcag

SEQ ID NO: 3923304 - DNA, 25 bp, Homo sapien
caggcctgagtccaggtcagggtaa

SEQ ID NO: 3923305 - DNA, 25 bp, Homo sapien
aggtcagggtaatgtagagggcagg

SEQ ID NO: 3923306 - DNA, 25 bp, Homo sapien
gtcagggtaatgtagagggcaggga

SEQ ID NO: 3923307 - DNA, 25 bp, Homo sapien
gaattcctcaatggtcaccacacca

SEQ ID NO: 3923308 - DNA, 25 bp, Homo sapien
ggtcaccacaccatccttgtttctg

SEQ ID NO: 3923309 - DNA, 25 bp, Homo sapien
tcaatgaattcctcaatggtcacca

SEQ ID NO: 3923310 - DNA, 25 bp, Homo sapien
tcaatggtcaccacaccatccttgt

SEQ ID NO: 3923311 - DNA, 25 bp, Homo sapien
gaagaagctctccacgtgttccctt

SEQ ID NO: 3923312 - DNA, 25 bp, Homo sapien
gtgcagggtacgtgtacttgcccat

SEQ ID NO: 3923313 - DNA, 25 bp, Homo sapien
ctcccggagtgcagggtacgtgtac

SEQ ID NO: 3923314 - DNA, 25 bp, Homo sapien
tggacttcatgatgtcaagcatttc

SEQ ID NO: 3923315 - DNA, 25 bp, Homo sapien
catatgtgggtcatatttccctccc

SEQ ID NO: 3923316 - DNA, 25 bp, Homo sapien
gcctcccttgatcccttgcttgtgg

SEQ ID NO: 3923317 - DNA, 25 bp, Homo sapien
gtgggcatatgtgggtcatatttcc

SEQ ID NO: 3923318 - DNA, 25 bp, Homo sapien
cttgcttgtgggcatatgtgggtca

SEQ ID NO: 3923319 - DNA, 25 bp, Homo sapien
ggtcatacaggttgaaggcccaatt

SEQ ID NO: 3923320 - DNA, 25 bp, Homo sapien
gttaaggtcatacaggttgaaggcc

SEQ ID NO: 3923321 - DNA, 25 bp, Homo sapien
ttgaaggcccaattaagcctgtcat

SEQ ID NO: 3923322 - DNA, 25 bp, Homo sapien
catacaggttgaaggcccaattaag

SEQ ID NO: 3923323 - DNA, 25 bp, Homo sapien
tccccgaagaatcacggacaaacca

SEQ ID NO: 3923324 - DNA, 25 bp, Homo sapien
ctacagttccccgaagaatcacgga

SEQ ID NO: 3923325 - DNA, 25 bp, Homo sapien
cgaagaatcacggacaaaccagcca

SEQ ID NO: 3923326 - DNA, 25 bp, Homo sapien
cagttccccgaagaatcacggacaa

SEQ ID NO: 3923327 - DNA, 25 bp, Homo sapien
tgtcctcgggtactcttcacccaac

SEQ ID NO: 3923328 - DNA, 25 bp, Homo sapien
actccaggaaacaggcttccctggc

SEQ ID NO: 3923329 - DNA, 25 bp, Homo sapien
aactccttctctgggtttggcctgg

SEQ ID NO: 3923330 - DNA, 25 bp, Homo sapien
ggcctggagatcctggccctgaact

SEQ ID NO: 3923331 - DNA, 25 bp, Homo sapien
agaaaagtggcataggtgctggagt

SEQ ID NO: 3923332 - DNA, 25 bp, Homo sapien
gccatcatggttggtgtcaaaggca

SEQ ID NO: 3923333 - DNA, 25 bp, Homo sapien
gagaaaagtggcataggtgctggag

SEQ ID NO: 3923334 - DNA, 25 bp, Homo sapien
cgagccatcatggttggtgtcaaag

SEQ ID NO: 3923335 - DNA, 25 bp, Homo sapien
gaaagaactgggagtaaatctgctt

SEQ ID NO: 3923336 - DNA, 25 bp, Homo sapien
gaactgggagtaaatctgcttgaag

SEQ ID NO: 3923337 - DNA, 25 bp, Homo sapien
agaactgggagtaaatctgcttgaa

SEQ ID NO: 3923338 - DNA, 25 bp, Homo sapien
aagaactgggagtaaatctgcttga

SEQ ID NO: 3923339 - DNA, 25 bp, Homo sapien
tcattgacaattccgctgggacatt

SEQ ID NO: 3923340 - DNA, 25 bp, Homo sapien
cattgacaattccgctgggacattc

SEQ ID NO: 3923341 - DNA, 25 bp, Homo sapien
gagggggataatcttcaagcctcca

SEQ ID NO: 3923342 - DNA, 25 bp, Homo sapien
cccaccctccatggcccaagactcc

SEQ ID NO: 3923343 - DNA, 25 bp, Homo sapien
gataatcttcaagcctccagaggac

SEQ ID NO: 3923344 - DNA, 25 bp, Homo sapien
cagagacaaaatccccttccgttca

SEQ ID NO: 3923345 - DNA, 25 bp, Homo sapien
acgtggctcatgtgatgggagggaa

SEQ ID NO: 3923346 - DNA, 25 bp, Homo sapien
cgtggctcatgtgatgggagggaag

SEQ ID NO: 3923347 - DNA, 25 bp, Homo sapien
cacgtggctcatgtgatgggaggga

SEQ ID NO: 3923348 - DNA, 25 bp, Homo sapien
gtggctcatgtgatgggagggaaga

SEQ ID NO: 3923349 - DNA, 25 bp, Homo sapien
ctcgctgagtttggcctcgccttgc

SEQ ID NO: 3923350 - DNA, 25 bp, Homo sapien
cccaccctcgctgagtttggcctcg

SEQ ID NO: 3923351 - DNA, 25 bp, Homo sapien
cacacctcaagcatccaagccatgc

SEQ ID NO: 3923352 - DNA, 25 bp, Homo sapien
gctgtggaccggcttgggtcctcct

SEQ ID NO: 3923353 - DNA, 25 bp, Homo sapien
cttgcgcgtgaatttggtttgctcc

SEQ ID NO: 3923354 - DNA, 25 bp, Homo sapien
ggacaattcaaattcatcgtccacg

SEQ ID NO: 3923355 - DNA, 25 bp, Homo sapien
ggacctgcaactccttgcgcgtgaa

SEQ ID NO: 3923356 - DNA, 25 bp, Homo sapien
accctcaggccggtgacacacggtg

SEQ ID NO: 3923357 - DNA, 25 bp, Homo sapien
tcttcgaggtctatcagcgggccaa

SEQ ID NO: 3923358 - DNA, 25 bp, Homo sapien
gcggccctcgatccctcgttggagg

SEQ ID NO: 3923359 - DNA, 25 bp, Homo sapien
cagccgcatcttcgttttagaaagg

SEQ ID NO: 3923360 - DNA, 25 bp, Homo sapien
agagccagggatccgactcagtgct

SEQ ID NO: 3923361 - DNA, 25 bp, Homo sapien
gtccagcaggcggggtctgtggggg

SEQ ID NO: 3923362 - DNA, 25 bp, Homo sapien
aagggagcgaactgtcaccgagaaa

SEQ ID NO: 3923363 - DNA, 25 bp, Homo sapien
gagcgaactgtcaccgagaaagcgg

SEQ ID NO: 3923364 - DNA, 25 bp, Homo sapien
ctgaagggagcgaactgtcaccgag

SEQ ID NO: 3923365 - DNA, 25 bp, Homo sapien
actgtcaccgagaaagcggaagacc

SEQ ID NO: 3923366 - DNA, 25 bp, Homo sapien
cacagacacacacgaaacggacccc

SEQ ID NO: 3923367 - DNA, 25 bp, Homo sapien
atgcacacaagcttgcgggactcac

SEQ ID NO: 3923368 - DNA, 25 bp, Homo sapien
agcccgtgcaaaggcacacccaacc

SEQ ID NO: 3923369 - DNA, 25 bp, Homo sapien
agacacacacgaaacggaccccatg

SEQ ID NO: 3923370 - DNA, 25 bp, Homo sapien
ccgtgtgggacccatctaagtccaa

SEQ ID NO: 3923371 - DNA, 25 bp, Homo sapien
gtccaacacaacagcatgctcaaat

SEQ ID NO: 3923372 - DNA, 25 bp, Homo sapien
tctaagtccaacacaacagcatgct

SEQ ID NO: 3923373 - DNA, 25 bp, Homo sapien
gacccatctaagtccaacacaacag

SEQ ID NO: 3923374 - DNA, 25 bp, Homo sapien
tcccacagttttgcgggagcggtga

SEQ ID NO: 3923375 - DNA, 25 bp, Homo sapien
caaagcgaggtcactcaactggaga

SEQ ID NO: 3923376 - DNA, 25 bp, Homo sapien
gccgcacggagttgaagacactaac

SEQ ID NO: 3923377 - DNA, 25 bp, Homo sapien
cagtatgatcctatgaggtgggcaa

SEQ ID NO: 3923378 - DNA, 25 bp, Homo sapien
acacgccggcctggggcacgctcgc

SEQ ID NO: 3923379 - DNA, 25 bp, Homo sapien
cacacacgccggcctggggcacgct

SEQ ID NO: 3923380 - DNA, 25 bp, Homo sapien
cgccggcctggggcacgctcgcgcg

SEQ ID NO: 3923381 - DNA, 25 bp, Homo sapien
acacacgccggcctggggcacgctc

SEQ ID NO: 3923382 - DNA, 25 bp, Homo sapien
cctggggcacgcccccccacacatg

SEQ ID NO: 3923383 - DNA, 25 bp, Homo sapien
ggggcacgcccccccacacatgcag

SEQ ID NO: 3923384 - DNA, 25 bp, Homo sapien
tggggcacgcccccccacacatgca

SEQ ID NO: 3923385 - DNA, 25 bp, Homo sapien
ggcctggggcacgcccccccacaca

SEQ ID NO: 3923386 - DNA, 25 bp, Homo sapien
gcacgcacacatcgagccccgcccc

SEQ ID NO: 3923387 - DNA, 25 bp, Homo sapien
cacgcacgcacacatcgagccccgc

SEQ ID NO: 3923388 - DNA, 25 bp, Homo sapien
gcccccggaagcacatgagaggcac

SEQ ID NO: 3923389 - DNA, 25 bp, Homo sapien
ccgcccccggaagcacatgagaggc

SEQ ID NO: 3923390 - DNA, 25 bp, Homo sapien
cttcagcgcttttttagtgggccct

SEQ ID NO: 3923391 - DNA, 25 bp, Homo sapien
cagcgcttttttagtgggccctgga

SEQ ID NO: 3923392 - DNA, 25 bp, Homo sapien
gctgcttcagcgcttttttagtggg

SEQ ID NO: 3923393 - DNA, 25 bp, Homo sapien
tgcttcagcgcttttttagtgggcc

SEQ ID NO: 3923394 - DNA, 25 bp, Homo sapien
cctgggatttccagatgccctctct

SEQ ID NO: 3923395 - DNA, 25 bp, Homo sapien
tctcctctaaaggtgagaacagaat

SEQ ID NO: 3923396 - DNA, 25 bp, Homo sapien
tcctctaaaggtgagaacagaatgg

SEQ ID NO: 3923397 - DNA, 25 bp, Homo sapien
tgtctcctctaaaggtgagaacaga

SEQ ID NO: 3923398 - DNA, 25 bp, Homo sapien
ggcaattcatgcaccttcctcttgt

SEQ ID NO: 3923399 - DNA, 25 bp, Homo sapien
cctccatcatggttctagtctgtct

SEQ ID NO: 3923400 - DNA, 25 bp, Homo sapien
tgaaccctagagcaggcaattcatg

SEQ ID NO: 3923401 - DNA, 25 bp, Homo sapien
agttcttccaggtatctaccctgca

SEQ ID NO: 3923402 - DNA, 25 bp, Homo sapien
tgctccaggaccttgacaaacagag

SEQ ID NO: 3923403 - DNA, 25 bp, Homo sapien
aggaccacgagcacagcaaccatct

SEQ ID NO: 3923404 - DNA, 25 bp, Homo sapien
agagcgaggaccacgagcacagcaa

SEQ ID NO: 3923405 - DNA, 25 bp, Homo sapien
ttgacaaacagagcgaggaccacga

SEQ ID NO: 3923406 - DNA, 25 bp, Homo sapien
cctgcaatgactgagagctggccct

SEQ ID NO: 3923407 - DNA, 25 bp, Homo sapien
tggaagtcatgcctgcaatgactga

SEQ ID NO: 3923408 - DNA, 25 bp, Homo sapien
ttgggtcctggaagtcatgcctgca

SEQ ID NO: 3923409 - DNA, 25 bp, Homo sapien
tcatgcctgcaatgactgagagctg

SEQ ID NO: 3923410 - DNA, 25 bp, Homo sapien
tggggacagcgacccagtcaccagc

SEQ ID NO: 3923411 - DNA, 25 bp, Homo sapien
agagggatcgcgctgcctgccccag

SEQ ID NO: 3923412 - DNA, 25 bp, Homo sapien
agctggtagagggatcgcgctgcct

SEQ ID NO: 3923413 - DNA, 25 bp, Homo sapien
ctggggacagcgacccagtcaccag

SEQ ID NO: 3923414 - DNA, 25 bp, Homo sapien
gcggcgagctcggcgtctaagctcc

SEQ ID NO: 3923415 - DNA, 25 bp, Homo sapien
cggcgagctcggcgtctaagctcca

SEQ ID NO: 3923416 - DNA, 25 bp, Homo sapien
cagggccggagggactccactgaga

SEQ ID NO: 3923417 - DNA, 25 bp, Homo sapien
gaccgagctcagggctagccagcca

SEQ ID NO: 3923418 - DNA, 25 bp, Homo sapien
agacagggccgctgctaaacgcggc

SEQ ID NO: 3923419 - DNA, 25 bp, Homo sapien
actgagatcccagtcgggggaccga

SEQ ID NO: 3923420 - DNA, 25 bp, Homo sapien
aataagccgcccttcgagaggagag

SEQ ID NO: 3923421 - DNA, 25 bp, Homo sapien
gcttaggcatctctcagcgctcaga

SEQ ID NO: 3923422 - DNA, 25 bp, Homo sapien
gagctgcagactaccctaaatccga

SEQ ID NO: 3923423 - DNA, 25 bp, Homo sapien
tgtagacccggaccacaattcttga

SEQ ID NO: 3923424 - DNA, 25 bp, Homo sapien
tccccatgtgggaaagagaggatgc

SEQ ID NO: 3923425 - DNA, 25 bp, Homo sapien
ctccccatgtgggaaagagaggatg

SEQ ID NO: 3923426 - DNA, 25 bp, Homo sapien
cctccccatgtgggaaagagaggat

SEQ ID NO: 3923427 - DNA, 25 bp, Homo sapien
ccgtgagctggtcgtaggagccgtc

SEQ ID NO: 3923428 - DNA, 25 bp, Homo sapien
agccgtccaggtctcgggaatcgga

SEQ ID NO: 3923429 - DNA, 25 bp, Homo sapien
tccaggtctcgggaatcggacaaac

SEQ ID NO: 3923430 - DNA, 25 bp, Homo sapien
tcgggaatcggacaaactctccttg

SEQ ID NO: 3923431 - DNA, 25 bp, Homo sapien
ctctttggcgctgccgggattggct

SEQ ID NO: 3923432 - DNA, 25 bp, Homo sapien
gctgagcgcggagccgagccgagct

SEQ ID NO: 3923433 - DNA, 25 bp, Homo sapien
cagagccggaggcagagcggagctg

SEQ ID NO: 3923434 - DNA, 25 bp, Homo sapien
ccctggcggcctactgtgctgtcgg

SEQ ID NO: 3923435 - DNA, 25 bp, Homo sapien
cctgtttcagatggagggcacccta

SEQ ID NO: 3923436 - DNA, 25 bp, Homo sapien
gggaggatctcgaagcagcagctat

SEQ ID NO: 3923437 - DNA, 25 bp, Homo sapien
gacccagcctgtgatctcttaagaa

SEQ ID NO: 3923438 - DNA, 25 bp, Homo sapien
ggaaaacactaaatgccccaggctg

SEQ ID NO: 3923439 - DNA, 25 bp, Homo sapien
tctgagccaaaggtcccgatgactg

SEQ ID NO: 3923440 - DNA, 25 bp, Homo sapien
ccaggcccaaaggaagcaggatgta

SEQ ID NO: 3923441 - DNA, 25 bp, Homo sapien
catgatcctcatgggtaagggcagt

SEQ ID NO: 3923442 - DNA, 25 bp, Homo sapien
aaagctaacggtactcctggtgcca

SEQ ID NO: 3923443 - DNA, 25 bp, Homo sapien
cggacgttggtgctaatggatcgaa

SEQ ID NO: 3923444 - DNA, 25 bp, Homo sapien
tgagcaggacttcttggctgagtgt

SEQ ID NO: 3923445 - DNA, 25 bp, Homo sapien
caggtttctccggacgttggtgcta

SEQ ID NO: 3923446 - DNA, 25 bp, Homo sapien
tcaggagatagtggagaactccttg

SEQ ID NO: 3923447 - DNA, 25 bp, Homo sapien
aggaataatgagccagatctgctgc

SEQ ID NO: 3923448 - DNA, 25 bp, Homo sapien
gccagatctgctgctgggaacacac

SEQ ID NO: 3923449 - DNA, 25 bp, Homo sapien
ttaaggaataatgagccagatctgc

SEQ ID NO: 3923450 - DNA, 25 bp, Homo sapien
agccagatctgctgctgggaacaca

SEQ ID NO: 3923451 - DNA, 25 bp, Homo sapien
aaaggagaagtaggcaatactacct

SEQ ID NO: 3923452 - DNA, 25 bp, Homo sapien
tactacctcgaatagcatcttctct

SEQ ID NO: 3923453 - DNA, 25 bp, Homo sapien
gtaggcaatactacctcgaatagca

SEQ ID NO: 3923454 - DNA, 25 bp, Homo sapien
ctggagctgtgcaagggctgtctcc

SEQ ID NO: 3923455 - DNA, 25 bp, Homo sapien
tgcagcttcagcgtgagcgtgtcat

SEQ ID NO: 3923456 - DNA, 25 bp, Homo sapien
ctgagtagcgctcatactggtccag

SEQ ID NO: 3923457 - DNA, 25 bp, Homo sapien
gagtagcgctcatactggtccaggc

SEQ ID NO: 3923458 - DNA, 25 bp, Homo sapien
tgtcatagttggctctcaccacctc

SEQ ID NO: 3923459 - DNA, 25 bp, Homo sapien
gccaggcagggcttaggccatgcaa

SEQ ID NO: 3923460 - DNA, 25 bp, Homo sapien
ggcttaggccatgcaaatcccacaa

SEQ ID NO: 3923461 - DNA, 25 bp, Homo sapien
cagggcttaggccatgcaaatccca

SEQ ID NO: 3923462 - DNA, 25 bp, Homo sapien
aggcagggcttaggccatgcaaatc

SEQ ID NO: 3923463 - DNA, 25 bp, Homo sapien
acttcacttggtagcaaacactctg

SEQ ID NO: 3923464 - DNA, 25 bp, Homo sapien
atttgtgccaggcagacttcacttg

SEQ ID NO: 3923465 - DNA, 25 bp, Homo sapien
gtagcaaacactctggctgccaaaa

SEQ ID NO: 3923466 - DNA, 25 bp, Homo sapien
gtgccaggcagacttcacttggtag

SEQ ID NO: 3923467 - DNA, 25 bp, Homo sapien
tatcagccgttgtctatggcccaga

SEQ ID NO: 3923468 - DNA, 25 bp, Homo sapien
aaaagacagatctactctacagtga

SEQ ID NO: 3923469 - DNA, 25 bp, Homo sapien
cacccaaggagtgtcatgatgtata

SEQ ID NO: 3923470 - DNA, 25 bp, Homo sapien
taaataataccgctatgaacatctg

SEQ ID NO: 3923471 - DNA, 25 bp, Homo sapien
tctgtaaaggtctgctatgaagccc

SEQ ID NO: 3923472 - DNA, 25 bp, Homo sapien
aatcttctgtaaaggtctgctatga

SEQ ID NO: 3923473 - DNA, 25 bp, Homo sapien
agaaaatcttctgtaaaggtctgct

SEQ ID NO: 3923474 - DNA, 25 bp, Homo sapien
tcttctgtaaaggtctgctatgaag

SEQ ID NO: 3923475 - DNA, 25 bp, Homo sapien
taaatcttccagtctgaccccttag

SEQ ID NO: 3923476 - DNA, 25 bp, Homo sapien
aaatgattctaccaggtagggatgc

SEQ ID NO: 3923477 - DNA, 25 bp, Homo sapien
ggctgatcaattttcctggacatat

SEQ ID NO: 3923478 - DNA, 25 bp, Homo sapien
gaatccttattccttggctgatcaa

SEQ ID NO: 3923479 - DNA, 25 bp, Homo sapien
gatatgtgattcacagcagcgtagg

SEQ ID NO: 3923480 - DNA, 25 bp, Homo sapien
tgacagttgggatatgtgattcaca

SEQ ID NO: 3923481 - DNA, 25 bp, Homo sapien
tgggatatgtgattcacagcagcgt

SEQ ID NO: 3923482 - DNA, 25 bp, Homo sapien
cagttgggatatgtgattcacagca

SEQ ID NO: 3923483 - DNA, 25 bp, Homo sapien
gaattcgtattaatatggtgccaga

SEQ ID NO: 3923484 - DNA, 25 bp, Homo sapien
acaaagaattcgtattaatatggtg

SEQ ID NO: 3923485 - DNA, 25 bp, Homo sapien
aagaattcgtattaatatggtgcca

SEQ ID NO: 3923486 - DNA, 25 bp, Homo sapien
aatatggtgccagatagaagaggtg

SEQ ID NO: 3923487 - DNA, 25 bp, Homo sapien
tgaacatgaggtagtcacaaatggg

SEQ ID NO: 3923488 - DNA, 25 bp, Homo sapien
aaaataaggatcaagtaccctctgg

SEQ ID NO: 3923489 - DNA, 25 bp, Homo sapien
gaccgattgtgactgggtaacttcc

SEQ ID NO: 3923490 - DNA, 25 bp, Homo sapien
tttagagtactagagcatgggaccg

SEQ ID NO: 3923491 - DNA, 25 bp, Homo sapien
gctcctgacgctgactggtagtttc

SEQ ID NO: 3923492 - DNA, 25 bp, Homo sapien
cctgacgctgactggtagtttcttt

SEQ ID NO: 3923493 - DNA, 25 bp, Homo sapien
agttgagaaattgtcacaaatcact

SEQ ID NO: 3923494 - DNA, 25 bp, Homo sapien
tgtcacaaatcactggggagatatg

SEQ ID NO: 3923495 - DNA, 25 bp, Homo sapien
tgcagtaactgaattacgtcgcttc

SEQ ID NO: 3923496 - DNA, 25 bp, Homo sapien
ctttgcagtaactgaattacgtcgc

SEQ ID NO: 3923497 - DNA, 25 bp, Homo sapien
tccccaggaagtctgacggctacca

SEQ ID NO: 3923498 - DNA, 25 bp, Homo sapien
actgaattacgtcgcttctccttcc

SEQ ID NO: 3923499 - DNA, 25 bp, Homo sapien
gcctaggtgagagcacagaccctgt

SEQ ID NO: 3923500 - DNA, 25 bp, Homo sapien
ttataccagaaaacatgaactgtac

SEQ ID NO: 3923501 - DNA, 25 bp, Homo sapien
ggtacagctacttcaatttatagga

SEQ ID NO: 3923502 - DNA, 25 bp, Homo sapien
tgtacaaccctatgattataccaga

SEQ ID NO: 3923503 - DNA, 25 bp, Homo sapien
aggatgatttgagccagggatgtca

SEQ ID NO: 3923504 - DNA, 25 bp, Homo sapien
tataaagctaaagcaaatcctccaa

SEQ ID NO: 3923505 - DNA, 25 bp, Homo sapien
atgatttgagccagggatgtcaagg

SEQ ID NO: 3923506 - DNA, 25 bp, Homo sapien
aatataaagctaaagcaaatcctcc

SEQ ID NO: 3923507 - DNA, 25 bp, Homo sapien
gccaagagcagtaaggcgtccaaac

SEQ ID NO: 3923508 - DNA, 25 bp, Homo sapien
cgccaagagcagtaaggcgtccaaa

SEQ ID NO: 3923509 - DNA, 25 bp, Homo sapien
ccaagagcagtaaggcgtccaaaca

SEQ ID NO: 3923510 - DNA, 25 bp, Homo sapien
catttcaagttgaccatgagaagca

SEQ ID NO: 3923511 - DNA, 25 bp, Homo sapien
tgagcacactaagttgcagccacag

SEQ ID NO: 3923512 - DNA, 25 bp, Homo sapien
gctgcaagtaatgcaatactactat

SEQ ID NO: 3923513 - DNA, 25 bp, Homo sapien
gcaactgaatagagatagtttggca

SEQ ID NO: 3923514 - DNA, 25 bp, Homo sapien
gaccaagagctataatattctgcag

SEQ ID NO: 3923515 - DNA, 25 bp, Homo sapien
ctgggaccaagagctataatattct

SEQ ID NO: 3923516 - DNA, 25 bp, Homo sapien
caagagctataatattctgcagcaa

SEQ ID NO: 3923517 - DNA, 25 bp, Homo sapien
gagctataatattctgcagcaaact

SEQ ID NO: 3923518 - DNA, 25 bp, Homo sapien
tgatattaaccaatgcatgggtcac

SEQ ID NO: 3923519 - DNA, 25 bp, Homo sapien
ctgatattaaccaatgcatgggtca

SEQ ID NO: 3923520 - DNA, 25 bp, Homo sapien
ttccactggcctgcattggtagaaa

SEQ ID NO: 3923521 - DNA, 25 bp, Homo sapien
gactagttacatatggcccagttga

SEQ ID NO: 3923522 - DNA, 25 bp, Homo sapien
tgtgcgtagacaaaggaggtgacct

SEQ ID NO: 3923523 - DNA, 25 bp, Homo sapien
ggcagatgcaaaccacactagggta

SEQ ID NO: 3923524 - DNA, 25 bp, Homo sapien
tgagcacatctagccaacgtgaagt

SEQ ID NO: 3923525 - DNA, 25 bp, Homo sapien
tgcggataatctcatagtaaagttc

SEQ ID NO: 3923526 - DNA, 25 bp, Homo sapien
aaatgtgtcgccatatgtgataaac

SEQ ID NO: 3923527 - DNA, 25 bp, Homo sapien
tgtcaaagctctggtgcatgcggat

SEQ ID NO: 3923528 - DNA, 25 bp, Homo sapien
tagtaaagttcatcatagctgctgg

SEQ ID NO: 3923529 - DNA, 25 bp, Homo sapien
gtctcatttgacataaggaacttca

SEQ ID NO: 3923530 - DNA, 25 bp, Homo sapien
gttgtgtttggccaaaagtacagtc

SEQ ID NO: 3923531 - DNA, 25 bp, Homo sapien
agtctcatttgacataaggaacttc

SEQ ID NO: 3923532 - DNA, 25 bp, Homo sapien
ctcccctacttgatgggatactata

SEQ ID NO: 3923533 - DNA, 25 bp, Homo sapien
ctacttgatgggatactataaaggg

SEQ ID NO: 3923534 - DNA, 25 bp, Homo sapien
ggcaatctgtggtccttctgtcttc

SEQ ID NO: 3923535 - DNA, 25 bp, Homo sapien
gcagctgcaggcaatctgtggtcct

SEQ ID NO: 3923536 - DNA, 25 bp, Homo sapien
cttccacagacccaagaaaaggctt

SEQ ID NO: 3923537 - DNA, 25 bp, Homo sapien
gagctcatgctaacaggctcctgac

SEQ ID NO: 3923538 - DNA, 25 bp, Homo sapien
tattatggaccgagctttgcacagg

SEQ ID NO: 3923539 - DNA, 25 bp, Homo sapien
gaaaatgccctgtgtcaggagcagt

SEQ ID NO: 3923540 - DNA, 25 bp, Homo sapien
tagaaaactgcccttgatccacttg

SEQ ID NO: 3923541 - DNA, 25 bp, Homo sapien
tatgaaactgtattggatccaccca

SEQ ID NO: 3923542 - DNA, 25 bp, Homo sapien
taaattacccaaagccaatatgctg

SEQ ID NO: 3923543 - DNA, 25 bp, Homo sapien
tgaactcccactgctgaggtctatg

SEQ ID NO: 3923544 - DNA, 25 bp, Homo sapien
ggatacaggagctatctagggccaa

SEQ ID NO: 3923545 - DNA, 25 bp, Homo sapien
gttcctagcattaatacacaatgag

SEQ ID NO: 3923546 - DNA, 25 bp, Homo sapien
cccacaaggaaccttttttgcagag

SEQ ID NO: 3923547 - DNA, 25 bp, Homo sapien
taggaagagttgaatacgatccatc

SEQ ID NO: 3923548 - DNA, 25 bp, Homo sapien
attaatacacaatgagaactttccc

SEQ ID NO: 3923549 - DNA, 25 bp, Homo sapien
gcctccaggagagcacaaactaata

SEQ ID NO: 3923550 - DNA, 25 bp, Homo sapien
acacaattaagtggtagctcaggcc

SEQ ID NO: 3923551 - DNA, 25 bp, Homo sapien
cagcaaattgtgttgccatgtagca

SEQ ID NO: 3923552 - DNA, 25 bp, Homo sapien
agagaggaacaagccaaccacagga

SEQ ID NO: 3923553 - DNA, 25 bp, Homo sapien
tttccttgcagtcaatgtgtatctg

SEQ ID NO: 3923554 - DNA, 25 bp, Homo sapien
attttccttgcagtcaatgtgtatc

SEQ ID NO: 3923555 - DNA, 25 bp, Homo sapien
ttttccttgcagtcaatgtgtatct

SEQ ID NO: 3923556 - DNA, 25 bp, Homo sapien
cattttccttgcagtcaatgtgtat

SEQ ID NO: 3923557 - DNA, 25 bp, Homo sapien
gaacgctgtgatactccctgggttt

SEQ ID NO: 3923558 - DNA, 25 bp, Homo sapien
cagctggatccagaacgctgtgata

SEQ ID NO: 3923559 - DNA, 25 bp, Homo sapien
ctaaccaagaagtcataggcctctg

SEQ ID NO: 3923560 - DNA, 25 bp, Homo sapien
cagtaataggagagccagctggatc

SEQ ID NO: 3923561 - DNA, 25 bp, Homo sapien
ttaatggcttagaaaccatcaaagt

SEQ ID NO: 3923562 - DNA, 25 bp, Homo sapien
taatggcttagaaaccatcaaagtt

SEQ ID NO: 3923563 - DNA, 25 bp, Homo sapien
gtacccgacacttcttctggtagca

SEQ ID NO: 3923564 - DNA, 25 bp, Homo sapien
agagctcccgccaggtgtaatgcag

SEQ ID NO: 3923565 - DNA, 25 bp, Homo sapien
cagtttgtgtactacctggatgcag

SEQ ID NO: 3923566 - DNA, 25 bp, Homo sapien
tttgtgtactacctggatgcagcgt

SEQ ID NO: 3923567 - DNA, 25 bp, Homo sapien
gaagcaggaagttcacctgataagg

SEQ ID NO: 3923568 - DNA, 25 bp, Homo sapien
ggctttgagtattaagtctttccaa

SEQ ID NO: 3923569 - DNA, 25 bp, Homo sapien
ttctgctgtatactgccgaaaaggg

SEQ ID NO: 3923570 - DNA, 25 bp, Homo sapien
aattcagcctgagggtgggaccttc

SEQ ID NO: 3923571 - DNA, 25 bp, Homo sapien
tcatccacttaatcttgggcaagct

SEQ ID NO: 3923572 - DNA, 25 bp, Homo sapien
ggtcaaatgcaaccttccgatatct

SEQ ID NO: 3923573 - DNA, 25 bp, Homo sapien
tctagcctccaagcacctaaacatg

SEQ ID NO: 3923574 - DNA, 25 bp, Homo sapien
taaacatgctggtcccctacgtggt

SEQ ID NO: 3923575 - DNA, 25 bp, Homo sapien
cggcgaggccactggagacataatc

SEQ ID NO: 3923576 - DNA, 25 bp, Homo sapien
tctttgattacaacagacccctgcg

SEQ ID NO: 3923577 - DNA, 25 bp, Homo sapien
gaatggatcagaagcgctatctctc

SEQ ID NO: 3923578 - DNA, 25 bp, Homo sapien
cgtcctacctaatgcgaaagctcag

SEQ ID NO: 3923579 - DNA, 25 bp, Homo sapien
tatagagatccataggaaactcctt

SEQ ID NO: 3923580 - DNA, 25 bp, Homo sapien
tagagatccataggaaactccttca

SEQ ID NO: 3923581 - DNA, 25 bp, Homo sapien
agagatccataggaaactccttcat

SEQ ID NO: 3923582 - DNA, 25 bp, Homo sapien
atatagagatccataggaaactcct

SEQ ID NO: 3923583 - DNA, 25 bp, Homo sapien
actgcacatactaaaggacggcagg

SEQ ID NO: 3923584 - DNA, 25 bp, Homo sapien
gacggcagggaagattcttgtctgc

SEQ ID NO: 3923585 - DNA, 25 bp, Homo sapien
ggacggcagggaagattcttgtctg

SEQ ID NO: 3923586 - DNA, 25 bp, Homo sapien
gcacatactaaaggacggcagggaa

SEQ ID NO: 3923587 - DNA, 25 bp, Homo sapien
cgaaaattcatgttgtcatcatgca

SEQ ID NO: 3923588 - DNA, 25 bp, Homo sapien
tgtaagtttactcgaaaattcatgt

SEQ ID NO: 3923589 - DNA, 25 bp, Homo sapien
gtttactcgaaaattcatgttgtca

SEQ ID NO: 3923590 - DNA, 25 bp, Homo sapien
tctatgtaagtttactcgaaaattc

SEQ ID NO: 3923591 - DNA, 25 bp, Homo sapien
catgtaaggataatcagacagagtt

SEQ ID NO: 3923592 - DNA, 25 bp, Homo sapien
taaggataatcagacagagtttgcc

SEQ ID NO: 3923593 - DNA, 25 bp, Homo sapien
gataatcagacagagtttgccactg

SEQ ID NO: 3923594 - DNA, 25 bp, Homo sapien
ctctgcaatacatgtaaggataatc

SEQ ID NO: 3923595 - DNA, 25 bp, Homo sapien
gctaatacaatatgtctgagtgtaa

SEQ ID NO: 3923596 - DNA, 25 bp, Homo sapien
ggtcttctcctcctatgcagttctt

SEQ ID NO: 3923597 - DNA, 25 bp, Homo sapien
actctaaaagtctccgaatcctggt

SEQ ID NO: 3923598 - DNA, 25 bp, Homo sapien
cctttctgctctggcaattcttcat

SEQ ID NO: 3923599 - DNA, 25 bp, Homo sapien
cactggatcaatctgtaggtaccaa

SEQ ID NO: 3923600 - DNA, 25 bp, Homo sapien
taataatggtattctggatatctag

SEQ ID NO: 3923601 - DNA, 25 bp, Homo sapien
tctggatatctaggaaaatgtcctt

SEQ ID NO: 3923602 - DNA, 25 bp, Homo sapien
tgtccttaactttaggtgatacatg

SEQ ID NO: 3923603 - DNA, 25 bp, Homo sapien
gtgtcctgcatgacaattgagctat

SEQ ID NO: 3923604 - DNA, 25 bp, Homo sapien
tctgcatccagtgggagttccacag

SEQ ID NO: 3923605 - DNA, 25 bp, Homo sapien
caattgagctatactttaaaaaggt

SEQ ID NO: 3923606 - DNA, 25 bp, Homo sapien
tatcagtagattactggtctgtaca

SEQ ID NO: 3923607 - DNA, 25 bp, Homo sapien
tcacttgaacctgggaggtggaggt

SEQ ID NO: 3923608 - DNA, 25 bp, Homo sapien
ctgtagtcccagggaggctgaggca

SEQ ID NO: 3923609 - DNA, 25 bp, Homo sapien
ggagaatcacttgaacctgggaggt

SEQ ID NO: 3923610 - DNA, 25 bp, Homo sapien
catcagaggaaggcggtgtggtccc

SEQ ID NO: 3923611 - DNA, 25 bp, Homo sapien
gaaggcggtgtggtcccaagtggtg

SEQ ID NO: 3923612 - DNA, 25 bp, Homo sapien
ggttgtaggagcaggactgacaggg

SEQ ID NO: 3923613 - DNA, 25 bp, Homo sapien
tgtggtcccaagtggtgtgactggg

SEQ ID NO: 3923614 - DNA, 25 bp, Homo sapien
agcagggtttaaacaagtacagcca

SEQ ID NO: 3923615 - DNA, 25 bp, Homo sapien
tacagccagataggcttttcaatgg

SEQ ID NO: 3923616 - DNA, 25 bp, Homo sapien
cagggtttaaacaagtacagccaga

SEQ ID NO: 3923617 - DNA, 25 bp, Homo sapien
gcttttcaatggaattaatcggtat

SEQ ID NO: 3923618 - DNA, 25 bp, Homo sapien
taaagtgccagaagaatggcctcat

SEQ ID NO: 3923619 - DNA, 25 bp, Homo sapien
tcataaagtgccagaagaatggcct

SEQ ID NO: 3923620 - DNA, 25 bp, Homo sapien
cataaagtgccagaagaatggcctc

SEQ ID NO: 3923621 - DNA, 25 bp, Homo sapien
cttcataaagtgccagaagaatggc

SEQ ID NO: 3923622 - DNA, 25 bp, Homo sapien
gtactgagattttctcatgggcatc

SEQ ID NO: 3923623 - DNA, 25 bp, Homo sapien
actgagattttctcatgggcatctg

SEQ ID NO: 3923624 - DNA, 25 bp, Homo sapien
ctgagattttctcatgggcatctgc

SEQ ID NO: 3923625 - DNA, 25 bp, Homo sapien
tactgagattttctcatgggcatct

SEQ ID NO: 3923626 - DNA, 25 bp, Homo sapien
catatttgttaaagcagagaaaaaa

SEQ ID NO: 3923627 - DNA, 25 bp, Homo sapien
ttcttcttccttgtctttatactgc

SEQ ID NO: 3923628 - DNA, 25 bp, Homo sapien
agcagagaaaaaaccactttggtgt

SEQ ID NO: 3923629 - DNA, 25 bp, Homo sapien
accactttggtgttcttcttccttg

SEQ ID NO: 3923630 - DNA, 25 bp, Homo sapien
ctgttgtactcagataaagcctgag

SEQ ID NO: 3923631 - DNA, 25 bp, Homo sapien
gttgtactcagataaagcctgagca

SEQ ID NO: 3923632 - DNA, 25 bp, Homo sapien
tgttgtactcagataaagcctgagc

SEQ ID NO: 3923633 - DNA, 25 bp, Homo sapien
ttgtactcagataaagcctgagcaa

SEQ ID NO: 3923634 - DNA, 25 bp, Homo sapien
ggcctcatcatccacgatagacagc

SEQ ID NO: 3923635 - DNA, 25 bp, Homo sapien
catcatccacgatagacagcttcac

SEQ ID NO: 3923636 - DNA, 25 bp, Homo sapien
cctcatcatccacgatagacagctt

SEQ ID NO: 3923637 - DNA, 25 bp, Homo sapien
tcatcatccacgatagacagcttca

SEQ ID NO: 3923638 - DNA, 25 bp, Homo sapien
tgggtttttccagacccaatctcag

SEQ ID NO: 3923639 - DNA, 25 bp, Homo sapien
cccatcacttagagcactggaagag

SEQ ID NO: 3923640 - DNA, 25 bp, Homo sapien
caacaatctggtcaggacactggaa

SEQ ID NO: 3923641 - DNA, 25 bp, Homo sapien
atctcagttgggcagcataaatggt

SEQ ID NO: 3923642 - DNA, 25 bp, Homo sapien
gtggctagaatgctattctccccag

SEQ ID NO: 3923643 - DNA, 25 bp, Homo sapien
tgtgcctcggtacctttctggaaag

SEQ ID NO: 3923644 - DNA, 25 bp, Homo sapien
catgagattgattgtactggtggct

SEQ ID NO: 3923645 - DNA, 25 bp, Homo sapien
tctctgtgcttagttgggtacccaa

SEQ ID NO: 3923646 - DNA, 25 bp, Homo sapien
tttctatagttcaccagcaaagcca

SEQ ID NO: 3923647 - DNA, 25 bp, Homo sapien
gcaaagccaagaggacgacagcatc

SEQ ID NO: 3923648 - DNA, 25 bp, Homo sapien
catacccatgctccctacgacttgg

SEQ ID NO: 3923649 - DNA, 25 bp, Homo sapien
agaggacgacagcatcatacccatg

SEQ ID NO: 3923650 - DNA, 25 bp, Homo sapien
ctgtaacaagaaccaaaaatgcatg

SEQ ID NO: 3923651 - DNA, 25 bp, Homo sapien
gaaccaaaaatgcatgagactgcta

SEQ ID NO: 3923652 - DNA, 25 bp, Homo sapien
aaatgcatgagactgctaactcctg

SEQ ID NO: 3923653 - DNA, 25 bp, Homo sapien
gcatgagactgctaactcctggttc

SEQ ID NO: 3923654 - DNA, 25 bp, Homo sapien
attgcttcaaatatgctgttgatca

SEQ ID NO: 3923655 - DNA, 25 bp, Homo sapien
tgttctggctgatgttatctgtcac

SEQ ID NO: 3923656 - DNA, 25 bp, Homo sapien
gatcattacatactcgagaatagtg

SEQ ID NO: 3923657 - DNA, 25 bp, Homo sapien
ttacatactcgagaatagtgttctg

SEQ ID NO: 3923658 - DNA, 25 bp, Homo sapien
ggtcactaagcaaaggagaagtttc

SEQ ID NO: 3923659 - DNA, 25 bp, Homo sapien
gtcactaagcaaaggagaagtttca

SEQ ID NO: 3923660 - DNA, 25 bp, Homo sapien
tcactaagcaaaggagaagtttcag

SEQ ID NO: 3923661 - DNA, 25 bp, Homo sapien
gatgtgtcagtgagtacactcagca

SEQ ID NO: 3923662 - DNA, 25 bp, Homo sapien
caagaagtacttatgggatgtgtca

SEQ ID NO: 3923663 - DNA, 25 bp, Homo sapien
caagtacttgcagaggatacaactc

SEQ ID NO: 3923664 - DNA, 25 bp, Homo sapien
gagacattaaggctaaagacagaca

SEQ ID NO: 3923665 - DNA, 25 bp, Homo sapien
gaacagctgtcagaagctgccatcc

SEQ ID NO: 3923666 - DNA, 25 bp, Homo sapien
tacatttgtctgctgatagtgtcca

SEQ ID NO: 3923667 - DNA, 25 bp, Homo sapien
gtctgctgatagtgtccaggaacag

SEQ ID NO: 3923668 - DNA, 25 bp, Homo sapien
gcaaggccaaattcaatcatctgta

SEQ ID NO: 3923669 - DNA, 25 bp, Homo sapien
cccagaggtagacttattcttttga

SEQ ID NO: 3923670 - DNA, 25 bp, Homo sapien
ctcctcgaatgagtgcgcacagggt

SEQ ID NO: 3923671 - DNA, 25 bp, Homo sapien
cttattcttttgatggactcctcga

SEQ ID NO: 3923672 - DNA, 25 bp, Homo sapien
gttgataatgtcaaacccagaggta

SEQ ID NO: 3923673 - DNA, 25 bp, Homo sapien
tctgggacatcaactcaagaggtaa

SEQ ID NO: 3923674 - DNA, 25 bp, Homo sapien
cctggaactctgttagagctcagta

SEQ ID NO: 3923675 - DNA, 25 bp, Homo sapien
taaaacagtctacaattcatgccca

SEQ ID NO: 3923676 - DNA, 25 bp, Homo sapien
ttcatgcccacacaatgagcactgc

SEQ ID NO: 3923677 - DNA, 25 bp, Homo sapien
acagatgtgttacaattcctttctc

SEQ ID NO: 3923678 - DNA, 25 bp, Homo sapien
tgttaaacaagacttccccagtctc

SEQ ID NO: 3923679 - DNA, 25 bp, Homo sapien
tctcctgttaaacaagacttcccca

SEQ ID NO: 3923680 - DNA, 25 bp, Homo sapien
tctaggttcctcagttcaaacagat

SEQ ID NO: 3923681 - DNA, 25 bp, Homo sapien
taactcctcaccatcaagagattcc

SEQ ID NO: 3923682 - DNA, 25 bp, Homo sapien
gacaacccgaattggatgctcctct

SEQ ID NO: 3923683 - DNA, 25 bp, Homo sapien
tggatgcagtgttggaataagcaat

SEQ ID NO: 3923684 - DNA, 25 bp, Homo sapien
caattaatattgtccttgatcttca

SEQ ID NO: 3923685 - DNA, 25 bp, Homo sapien
ctcccaaaaccgaggactgcactta

SEQ ID NO: 3923686 - DNA, 25 bp, Homo sapien
ccaaaaccgaggactgcacttactg

SEQ ID NO: 3923687 - DNA, 25 bp, Homo sapien
gagctcctcccaaaaccgaggactg

SEQ ID NO: 3923688 - DNA, 25 bp, Homo sapien
aaaaccgaggactgcacttactggg

SEQ ID NO: 3923689 - DNA, 25 bp, Homo sapien
agaatactatacatagtcaacctta

SEQ ID NO: 3923690 - DNA, 25 bp, Homo sapien
tacaatataggcttggaccaatcag

SEQ ID NO: 3923691 - DNA, 25 bp, Homo sapien
tgtatagctgcttgtactggcctgg

SEQ ID NO: 3923692 - DNA, 25 bp, Homo sapien
gatacatttagaatgctccaggcac

SEQ ID NO: 3923693 - DNA, 25 bp, Homo sapien
gccatggctttggaatcaggcacca

SEQ ID NO: 3923694 - DNA, 25 bp, Homo sapien
ggacaacacaataacaacctatatt

SEQ ID NO: 3923695 - DNA, 25 bp, Homo sapien
gcagaggtaagggtatttctcatct

SEQ ID NO: 3923696 - DNA, 25 bp, Homo sapien
aactaaagactcaagctgtacacaa

SEQ ID NO: 3923697 - DNA, 25 bp, Homo sapien
tgtacacaacaaggccgcaggcctt

SEQ ID NO: 3923698 - DNA, 25 bp, Homo sapien
ggctgaagatttccggagcaaacct

SEQ ID NO: 3923699 - DNA, 25 bp, Homo sapien
ttttggaggctgaagatttccggag

SEQ ID NO: 3923700 - DNA, 25 bp, Homo sapien
tggaggctgaagatttccggagcaa

SEQ ID NO: 3923701 - DNA, 25 bp, Homo sapien
gaggctgaagatttccggagcaaac

SEQ ID NO: 3923702 - DNA, 25 bp, Homo sapien
aagttgcagcagatcagtaatgtga

SEQ ID NO: 3923703 - DNA, 25 bp, Homo sapien
acaggtctcccaaccaactcggtga

SEQ ID NO: 3923704 - DNA, 25 bp, Homo sapien
cggtgacatggacaagttactgtgc

SEQ ID NO: 3923705 - DNA, 25 bp, Homo sapien
ggcataatggaacaagcaaccagca

SEQ ID NO: 3923706 - DNA, 25 bp, Homo sapien
ggactgtcaccaagtatcaccctct

SEQ ID NO: 3923707 - DNA, 25 bp, Homo sapien
tagctagatgctaaggtaaacatcc

SEQ ID NO: 3923708 - DNA, 25 bp, Homo sapien
aaacatcctaaaatacttcaaccag

SEQ ID NO: 3923709 - DNA, 25 bp, Homo sapien
cacatttgtaatggactgtcaccaa

SEQ ID NO: 3923710 - DNA, 25 bp, Homo sapien
taaaagccccaggtatttagctcac

SEQ ID NO: 3923711 - DNA, 25 bp, Homo sapien
tctgcagtctctaaaaagggcgttg

SEQ ID NO: 3923712 - DNA, 25 bp, Homo sapien
tacctggaggtaaacattagcacta

SEQ ID NO: 3923713 - DNA, 25 bp, Homo sapien
gagaagtactcatcccagccttaaa

SEQ ID NO: 3923714 - DNA, 25 bp, Homo sapien
gaagagtgggttaaagcctgtcaga

SEQ ID NO: 3923715 - DNA, 25 bp, Homo sapien
cagtagcttcactgattccgtgtga

SEQ ID NO: 3923716 - DNA, 25 bp, Homo sapien
actggagcccttccgggacacctga

SEQ ID NO: 3923717 - DNA, 25 bp, Homo sapien
tgaagacttcgcacaaacccgcttt

SEQ ID NO: 3923718 - DNA, 25 bp, Homo sapien
ggagaggaagctctcggggcagctg

SEQ ID NO: 3923719 - DNA, 25 bp, Homo sapien
agaggaagctctcggggcagctggc

SEQ ID NO: 3923720 - DNA, 25 bp, Homo sapien
ggaagctctcggggcagctggcggg

SEQ ID NO: 3923721 - DNA, 25 bp, Homo sapien
gaggaagctctcggggcagctggcg

SEQ ID NO: 3923722 - DNA, 25 bp, Homo sapien
gccgctggaagagcgaagccgtttc

SEQ ID NO: 3923723 - DNA, 25 bp, Homo sapien
agagggacgtgaccgggaccgtgtg

SEQ ID NO: 3923724 - DNA, 25 bp, Homo sapien
tcaaaggtcagcacctcggaagcca

SEQ ID NO: 3923725 - DNA, 25 bp, Homo sapien
ggcatacgcagcttcagcagccgtc

SEQ ID NO: 3923726 - DNA, 25 bp, Homo sapien
gacccgcagggttggtcaggttcga

SEQ ID NO: 3923727 - DNA, 25 bp, Homo sapien
cagggttggtcaggttcgaggaccg

SEQ ID NO: 3923728 - DNA, 25 bp, Homo sapien
caggacccgcagggttggtcaggtt

SEQ ID NO: 3923729 - DNA, 25 bp, Homo sapien
ccgcagggttggtcaggttcgagga

SEQ ID NO: 3923730 - DNA, 25 bp, Homo sapien
ggcccgctcgctctcgacgccaccg

SEQ ID NO: 3923731 - DNA, 25 bp, Homo sapien
tgctccgggctcacgggcgcgctcc

SEQ ID NO: 3923732 - DNA, 25 bp, Homo sapien
gctctcgacgccaccgacgctgccg

SEQ ID NO: 3923733 - DNA, 25 bp, Homo sapien
ccgacgctgccgctgctccgggctc

SEQ ID NO: 3923734 - DNA, 25 bp, Homo sapien
tgggtcgcaatagcagttttccgaa

SEQ ID NO: 3923735 - DNA, 25 bp, Homo sapien
ggtcgcaatagcagttttccgaaac

SEQ ID NO: 3923736 - DNA, 25 bp, Homo sapien
tcgcaatagcagttttccgaaacat

SEQ ID NO: 3923737 - DNA, 25 bp, Homo sapien
gggtcgcaatagcagttttccgaaa

SEQ ID NO: 3923738 - DNA, 25 bp, Homo sapien
taagagtctgaatcctggacgaggg

SEQ ID NO: 3923739 - DNA, 25 bp, Homo sapien
actgtgtgtgcgtccggactctgga

SEQ ID NO: 3923740 - DNA, 25 bp, Homo sapien
tggcccacgttctactcatctggag

SEQ ID NO: 3923741 - DNA, 25 bp, Homo sapien
tgtgagcctattgcagtcccacggt

SEQ ID NO: 3923742 - DNA, 25 bp, Homo sapien
tgaccatgttgaggaccgagcttcg

SEQ ID NO: 3923743 - DNA, 25 bp, Homo sapien
gttgataggagaccagctagcccag

SEQ ID NO: 3923744 - DNA, 25 bp, Homo sapien
ttgaggaggcctgcgggtactacca

SEQ ID NO: 3923745 - DNA, 25 bp, Homo sapien
gattaccgaggcttagaacagctga

SEQ ID NO: 3923746 - DNA, 25 bp, Homo sapien
catttctaggacacagtgatcaggg

SEQ ID NO: 3923747 - DNA, 25 bp, Homo sapien
tgggcggcctaaagctgtgctccaa

SEQ ID NO: 3923748 - DNA, 25 bp, Homo sapien
cagtcccctgcttcgaagtgaaatc

SEQ ID NO: 3923749 - DNA, 25 bp, Homo sapien
tatgaggacatcctatgggacccca

SEQ ID NO: 3923750 - DNA, 25 bp, Homo sapien
cctgtgtctgaagctcttggtccag

SEQ ID NO: 3923751 - DNA, 25 bp, Homo sapien
ccctgtgtctgaagctcttggtcca

SEQ ID NO: 3923752 - DNA, 25 bp, Homo sapien
gccctgtgtctgaagctcttggtcc

SEQ ID NO: 3923753 - DNA, 25 bp, Homo sapien
agctgaagggcaaggtccctgatgc

SEQ ID NO: 3923754 - DNA, 25 bp, Homo sapien
tgaagggcaaggtccctgatgctct

SEQ ID NO: 3923755 - DNA, 25 bp, Homo sapien
agggcaaggtccctgatgctctgca

SEQ ID NO: 3923756 - DNA, 25 bp, Homo sapien
gaagggcaaggtccctgatgctctg

SEQ ID NO: 3923757 - DNA, 25 bp, Homo sapien
gccagaataaattcaaaaagtgttc

SEQ ID NO: 3923758 - DNA, 25 bp, Homo sapien
tattctcattatcctcagaaggagg

SEQ ID NO: 3923759 - DNA, 25 bp, Homo sapien
ggagtttgcagccagaataaattca

SEQ ID NO: 3923760 - DNA, 25 bp, Homo sapien
aaacagagatatcatctgttcgctt

SEQ ID NO: 3923761 - DNA, 25 bp, Homo sapien
tcaagtagccttgtcctctgccttt

SEQ ID NO: 3923762 - DNA, 25 bp, Homo sapien
aagtagccttgtcctctgcctttgt

SEQ ID NO: 3923763 - DNA, 25 bp, Homo sapien
cctttgtcttctgtgttgatgccac

SEQ ID NO: 3923764 - DNA, 25 bp, Homo sapien
tgcctttgtcttctgtgttgatgcc

SEQ ID NO: 3923765 - DNA, 25 bp, Homo sapien
aacaatccgtgactatcaaaaccat

SEQ ID NO: 3923766 - DNA, 25 bp, Homo sapien
ctccttgggaccaaacagcgtgcct

SEQ ID NO: 3923767 - DNA, 25 bp, Homo sapien
caattaaggtgcagagttctgatgg

SEQ ID NO: 3923768 - DNA, 25 bp, Homo sapien
acagcgtgccttcaattaaggtgca

SEQ ID NO: 3923769 - DNA, 25 bp, Homo sapien
tcctgacctcaggttttgaactgct

SEQ ID NO: 3923770 - DNA, 25 bp, Homo sapien
tgacctcaggttttgaactgctgac

SEQ ID NO: 3923771 - DNA, 25 bp, Homo sapien
cctgacctcaggttttgaactgctg

SEQ ID NO: 3923772 - DNA, 25 bp, Homo sapien
ctgacctcaggttttgaactgctga

SEQ ID NO: 3923773 - DNA, 25 bp, Homo sapien
cagcaatgtgctaaggcttgggact

SEQ ID NO: 3923774 - DNA, 25 bp, Homo sapien
gcaatgtgctaaggcttgggactgg

SEQ ID NO: 3923775 - DNA, 25 bp, Homo sapien
cttcagcaatgtgctaaggcttggg

SEQ ID NO: 3923776 - DNA, 25 bp, Homo sapien
tcagcaatgtgctaaggcttgggac

SEQ ID NO: 3923777 - DNA, 25 bp, Homo sapien
ccagtaattcctcttcaccaggggt

SEQ ID NO: 3923778 - DNA, 25 bp, Homo sapien
cagtaattcctcttcaccaggggtt

SEQ ID NO: 3923779 - DNA, 25 bp, Homo sapien
cccagtaattcctcttcaccagggg

SEQ ID NO: 3923780 - DNA, 25 bp, Homo sapien
ctggcactctcagggtgagttgctg

SEQ ID NO: 3923781 - DNA, 25 bp, Homo sapien
gcagttggctggtaaatgtccttca

SEQ ID NO: 3923782 - DNA, 25 bp, Homo sapien
gttggctggtaaatgtccttcaggc

SEQ ID NO: 3923783 - DNA, 25 bp, Homo sapien
gggtgagttgctggtggcagttggc

SEQ ID NO: 3923784 - DNA, 25 bp, Homo sapien
gattggtaccatacatgactcaaat

SEQ ID NO: 3923785 - DNA, 25 bp, Homo sapien
tggtaccatacatgactcaaatggc

SEQ ID NO: 3923786 - DNA, 25 bp, Homo sapien
ttggtaccatacatgactcaaatgg

SEQ ID NO: 3923787 - DNA, 25 bp, Homo sapien
gtaccatacatgactcaaatggccc

SEQ ID NO: 3923788 - DNA, 25 bp, Homo sapien
ttccctcagctcctgactcaatacc

SEQ ID NO: 3923789 - DNA, 25 bp, Homo sapien
aatacccttccaaaagtggcagctg

SEQ ID NO: 3923790 - DNA, 25 bp, Homo sapien
agttgggatgggatgtccaccttcc

SEQ ID NO: 3923791 - DNA, 25 bp, Homo sapien
ctggagtggaggaaatacggtgtgg

SEQ ID NO: 3923792 - DNA, 25 bp, Homo sapien
ttctctccacgctccctaagggaag

SEQ ID NO: 3923793 - DNA, 25 bp, Homo sapien
atactggcaggtgaagaccctctac

SEQ ID NO: 3923794 - DNA, 25 bp, Homo sapien
gagctggaccagctgcgtgaaaccc

SEQ ID NO: 3923795 - DNA, 25 bp, Homo sapien
tcccctctatgaaggacagagtagg

SEQ ID NO: 3923796 - DNA, 25 bp, Homo sapien
taaaatggtatgcacacctccctcc

SEQ ID NO: 3923797 - DNA, 25 bp, Homo sapien
gggagagatggtgaaatgtctcctt

SEQ ID NO: 3923798 - DNA, 25 bp, Homo sapien
gatggtgaaatgtctccttggtctg

SEQ ID NO: 3923799 - DNA, 25 bp, Homo sapien
ataaaatggtatgcacacctccctc

SEQ ID NO: 3923800 - DNA, 25 bp, Homo sapien
agggaggtagctggacttttaatag

SEQ ID NO: 3923801 - DNA, 25 bp, Homo sapien
ggggaagagggggggacatgagtga

SEQ ID NO: 3923802 - DNA, 25 bp, Homo sapien
tggaggctgcccattttagatgctc

SEQ ID NO: 3923803 - DNA, 25 bp, Homo sapien
aagtaggcatccacatgagtacccc

SEQ ID NO: 3923804 - DNA, 25 bp, Homo sapien
agagctttacccctctattaccagc

SEQ ID NO: 3923805 - DNA, 25 bp, Homo sapien
ggagcattcaacgaagccccgtaac

SEQ ID NO: 3923806 - DNA, 25 bp, Homo sapien
ctttcttggctggacggaggcttgc

SEQ ID NO: 3923807 - DNA, 25 bp, Homo sapien
gggtgatgagcctctcgtcctcgtc

SEQ ID NO: 3923808 - DNA, 25 bp, Homo sapien
ggagttgttaaagctgtcctcgtcg

SEQ ID NO: 3923809 - DNA, 25 bp, Homo sapien
cgtcaatgccgttggctgcgtcaaa

SEQ ID NO: 3923810 - DNA, 25 bp, Homo sapien
tgagagtggcggaggtccccaaaca

SEQ ID NO: 3923811 - DNA, 25 bp, Homo sapien
gagagtggcggaggtccccaaacat

SEQ ID NO: 3923812 - DNA, 25 bp, Homo sapien
gaatatccgtatgtcctcatgggtg

SEQ ID NO: 3923813 - DNA, 25 bp, Homo sapien
taaaagcagttagcccatgctggca

SEQ ID NO: 3923814 - DNA, 25 bp, Homo sapien
tgtgctggatggtctgtgagcccca

SEQ ID NO: 3923815 - DNA, 25 bp, Homo sapien
tgtgatcacacccatgcaagtgcct

SEQ ID NO: 3923816 - DNA, 25 bp, Homo sapien
ctgttgttggtgttgccaccaccag

SEQ ID NO: 3923817 - DNA, 25 bp, Homo sapien
cgaaggtgctagctgggctcttctt

SEQ ID NO: 3923818 - DNA, 25 bp, Homo sapien
catcttccgtttccgccgtttgctg

SEQ ID NO: 3923819 - DNA, 25 bp, Homo sapien
accagagctcatggtgctgccccct

SEQ ID NO: 3923820 - DNA, 25 bp, Homo sapien
aaaaggcaggtcttgaggcagtcgc

SEQ ID NO: 3923821 - DNA, 25 bp, Homo sapien
tgcatgggctcgagtatcacacaga

SEQ ID NO: 3923822 - DNA, 25 bp, Homo sapien
cttgtggcgtgacatgagctcttgc

SEQ ID NO: 3923823 - DNA, 25 bp, Homo sapien
ctgtaggtcttgtggcgtgacatga

SEQ ID NO: 3923824 - DNA, 25 bp, Homo sapien
tggacagcccacaccgagtgatgtt

SEQ ID NO: 3923825 - DNA, 25 bp, Homo sapien
ttggagagctgatccaacatctggg

SEQ ID NO: 3923826 - DNA, 25 bp, Homo sapien
tcggaggtagttgagagtggaattg

SEQ ID NO: 3923827 - DNA, 25 bp, Homo sapien
gagagtggaattggacagcccacac

SEQ ID NO: 3923828 - DNA, 25 bp, Homo sapien
gccggatgctgaagtgccacgtctt

SEQ ID NO: 3923829 - DNA, 25 bp, Homo sapien
gatgagctctcggtgctgccggatg

SEQ ID NO: 3923830 - DNA, 25 bp, Homo sapien
aacatgaactccaggtacaaccggc

SEQ ID NO: 3923831 - DNA, 25 bp, Homo sapien
cgtctttatccgcatcatgtcgtca

SEQ ID NO: 3923832 - DNA, 25 bp, Homo sapien
catttgcttacaactctcccattgc

SEQ ID NO: 3923833 - DNA, 25 bp, Homo sapien
catacctgaaggtatgtctattaca

SEQ ID NO: 3923834 - DNA, 25 bp, Homo sapien
tgtctattacagtctcccatttgct

SEQ ID NO: 3923835 - DNA, 25 bp, Homo sapien
cacctgcacattaaatctgggtgca

SEQ ID NO: 3923836 - DNA, 25 bp, Homo sapien
tgccagttcacattatgcctccctg

SEQ ID NO: 3923837 - DNA, 25 bp, Homo sapien
gagagaggatgggaatcaaacccag

SEQ ID NO: 3923838 - DNA, 25 bp, Homo sapien
aggtgccatggtgttccacatccag

SEQ ID NO: 3923839 - DNA, 25 bp, Homo sapien
aaacccaggtgccatggtgttccac

SEQ ID NO: 3923840 - DNA, 25 bp, Homo sapien
gaacatagtacagctccgtagcacc

SEQ ID NO: 3923841 - DNA, 25 bp, Homo sapien
cctcaaagatgctgcggaagtagcg

SEQ ID NO: 3923842 - DNA, 25 bp, Homo sapien
gaacatgggcttgccatgctgggtc

SEQ ID NO: 3923843 - DNA, 25 bp, Homo sapien
cacagtcgagggacacaaagttgct

SEQ ID NO: 3923844 - DNA, 25 bp, Homo sapien
cctcaaagaactcagtcgtgaatgc

SEQ ID NO: 3923845 - DNA, 25 bp, Homo sapien
caaagaactcagtcgtgaatgcatc

SEQ ID NO: 3923846 - DNA, 25 bp, Homo sapien
actcagtcgtgaatgcatcccacca

SEQ ID NO: 3923847 - DNA, 25 bp, Homo sapien
tggtcaacatggcatcatcctcaaa

SEQ ID NO: 3923848 - DNA, 25 bp, Homo sapien
taagctcaaatattctgtagtcagt

SEQ ID NO: 3923849 - DNA, 25 bp, Homo sapien
tctgaagccgtttgttaagctcaaa

SEQ ID NO: 3923850 - DNA, 25 bp, Homo sapien
ttggttgccatatggtgtgtgcctc

SEQ ID NO: 3923851 - DNA, 25 bp, Homo sapien
tccagttctgaagccgtttgttaag

SEQ ID NO: 3923852 - DNA, 25 bp, Homo sapien
cctggctccaggtatgtaggcggat

SEQ ID NO: 3923853 - DNA, 25 bp, Homo sapien
tccaggtatgtaggcggatacatgg

SEQ ID NO: 3923854 - DNA, 25 bp, Homo sapien
ggctccaggtatgtaggcggataca

SEQ ID NO: 3923855 - DNA, 25 bp, Homo sapien
tccctggctccaggtatgtaggcgg

SEQ ID NO: 3923856 - DNA, 25 bp, Homo sapien
gctccttcggcgagtacagcttgaa

SEQ ID NO: 3923857 - DNA, 25 bp, Homo sapien
ccttcggcgagtacagcttgaatga

SEQ ID NO: 3923858 - DNA, 25 bp, Homo sapien
gggctccttcggcgagtacagcttg

SEQ ID NO: 3923859 - DNA, 25 bp, Homo sapien
tccttcggcgagtacagcttgaatg

SEQ ID NO: 3923860 - DNA, 25 bp, Homo sapien
caagagtagtccaccctaatcccag

SEQ ID NO: 3923861 - DNA, 25 bp, Homo sapien
acaagagtagtccaccctaatccca

SEQ ID NO: 3923862 - DNA, 25 bp, Homo sapien
gaaacaagagtagtccaccctaatc

SEQ ID NO: 3923863 - DNA, 25 bp, Homo sapien
ctgtctctccttctaattctggctc

SEQ ID NO: 3923864 - DNA, 25 bp, Homo sapien
tgtggcctaccagataaccagttgg

SEQ ID NO: 3923865 - DNA, 25 bp, Homo sapien
tgagggctcaaaggaccttgccaag

SEQ ID NO: 3923866 - DNA, 25 bp, Homo sapien
aaccttatgaggtagcagggctgac

SEQ ID NO: 3923867 - DNA, 25 bp, Homo sapien
gaagcctatgttcctcagtctaggg

SEQ ID NO: 3923868 - DNA, 25 bp, Homo sapien
tactgttttctgactggaaaaagtg

SEQ ID NO: 3923869 - DNA, 25 bp, Homo sapien
tgttttctgactggaaaaagtgtta

SEQ ID NO: 3923870 - DNA, 25 bp, Homo sapien
actgttttctgactggaaaaagtgt

SEQ ID NO: 3923871 - DNA, 25 bp, Homo sapien
atactgttttctgactggaaaaagt

SEQ ID NO: 3923872 - DNA, 25 bp, Homo sapien
ggcaaaaggagggtcccagactgca

SEQ ID NO: 3923873 - DNA, 25 bp, Homo sapien
acgtgtgcctcatcctgcctagcag

SEQ ID NO: 3923874 - DNA, 25 bp, Homo sapien
cctaacatgcctatcaagggctgga

SEQ ID NO: 3923875 - DNA, 25 bp, Homo sapien
tgtcctcacaatgcaggcaaaagga

SEQ ID NO: 3923876 - DNA, 25 bp, Homo sapien
cagcccgcagatcaggcccgggccg

SEQ ID NO: 3923877 - DNA, 25 bp, Homo sapien
ccacccccaacaggctcgcagggtg

SEQ ID NO: 3923878 - DNA, 25 bp, Homo sapien
caacaggctcgcagggtgcccagac

SEQ ID NO: 3923879 - DNA, 25 bp, Homo sapien
ccagcccgcagatcaggcccgggcc

SEQ ID NO: 3923880 - DNA, 25 bp, Homo sapien
gactgcaagcccagaggagtcctgg

SEQ ID NO: 3923881 - DNA, 25 bp, Homo sapien
gaaagttacaatggccactgggccg

SEQ ID NO: 3923882 - DNA, 25 bp, Homo sapien
caaggtttccctcaacaatggctgc

SEQ ID NO: 3923883 - DNA, 25 bp, Homo sapien
agcagctcatgtcccgagtgggacg

SEQ ID NO: 3923884 - DNA, 25 bp, Homo sapien
agcctgaggccccgcgtagcccttc

SEQ ID NO: 3923885 - DNA, 25 bp, Homo sapien
cctgaggccccgcgtagcccttcca

SEQ ID NO: 3923886 - DNA, 25 bp, Homo sapien
cagcctgaggccccgcgtagccctt

SEQ ID NO: 3923887 - DNA, 25 bp, Homo sapien
gccagcctgaggccccgcgtagccc

SEQ ID NO: 3923888 - DNA, 25 bp, Homo sapien
ccactgacatcttcacatcgcccgc

SEQ ID NO: 3923889 - DNA, 25 bp, Homo sapien
actgacatcttcacatcgcccgcct

SEQ ID NO: 3923890 - DNA, 25 bp, Homo sapien
acatcttcacatcgcccgcctctgg

SEQ ID NO: 3923891 - DNA, 25 bp, Homo sapien
tgacatcttcacatcgcccgcctct

SEQ ID NO: 3923892 - DNA, 25 bp, Homo sapien
ctcgcggggacaggccgggcatgag

SEQ ID NO: 3923893 - DNA, 25 bp, Homo sapien
gctgcggcgaggggcctgtcaggcg

SEQ ID NO: 3923894 - DNA, 25 bp, Homo sapien
gaggggcctgtcaggcgcggagcag

SEQ ID NO: 3923895 - DNA, 25 bp, Homo sapien
cggcgaggggcctgtcaggcgcgga

SEQ ID NO: 3923896 - DNA, 25 bp, Homo sapien
tgcgcgcgggtgtgagtccgcggag

SEQ ID NO: 3923897 - DNA, 25 bp, Homo sapien
gtgcgtgtctgtgcgctcccgccgc

SEQ ID NO: 3923898 - DNA, 25 bp, Homo sapien
gagtccgcggagtgtgtgtccgtgt

SEQ ID NO: 3923899 - DNA, 25 bp, Homo sapien
gtgtgcgcgcgggtgtgagtccgcg

SEQ ID NO: 3923900 - DNA, 25 bp, Homo sapien
cctgtccgtgctccctgctgagacg

SEQ ID NO: 3923901 - DNA, 25 bp, Homo sapien
gctccgggagggaaaagggactgca

SEQ ID NO: 3923902 - DNA, 25 bp, Homo sapien
cgtcctccgggtgccgccggatggg

SEQ ID NO: 3923903 - DNA, 25 bp, Homo sapien
tctggaggccccttgtttcgcgtcc

SEQ ID NO: 3923904 - DNA, 25 bp, Homo sapien
ctttgagggcttcggagatgagaac

SEQ ID NO: 3923905 - DNA, 25 bp, Homo sapien
tggaagctgctgtcctttgagggct

SEQ ID NO: 3923906 - DNA, 25 bp, Homo sapien
agctgctgtcctttgagggcttcgg

SEQ ID NO: 3923907 - DNA, 25 bp, Homo sapien
tcctttgagggcttcggagatgaga

SEQ ID NO: 3923908 - DNA, 25 bp, Homo sapien
gaaaaaactgccttacttgagcatg

SEQ ID NO: 3923909 - DNA, 25 bp, Homo sapien
catgctgaccaacacaatggtgatc

SEQ ID NO: 3923910 - DNA, 25 bp, Homo sapien
cttgagcatgcactaatgccaggca

SEQ ID NO: 3923911 - DNA, 25 bp, Homo sapien
caaacaactagcttggtcagattcc

SEQ ID NO: 3923912 - DNA, 25 bp, Homo sapien
gcagttcccttttcggagccacgtg

SEQ ID NO: 3923913 - DNA, 25 bp, Homo sapien
gccgcacggctctctgggattcgta

SEQ ID NO: 3923914 - DNA, 25 bp, Homo sapien
tccatgtaaggatgcccagtgaggc

SEQ ID NO: 3923915 - DNA, 25 bp, Homo sapien
aagtcgaagccaagcgccgtatggg

SEQ ID NO: 3923916 - DNA, 25 bp, Homo sapien
caaccgggaagactttgacccagca

SEQ ID NO: 3923917 - DNA, 25 bp, Homo sapien
gagatagctagccatttgcagaccc

SEQ ID NO: 3923918 - DNA, 25 bp, Homo sapien
gacccagcacctgtaaagagcaaat

SEQ ID NO: 3923919 - DNA, 25 bp, Homo sapien
tagagcagttttcactccatccgtt

SEQ ID NO: 3923920 - DNA, 25 bp, Homo sapien
tggtacctgggagcaattgacatgc

SEQ ID NO: 3923921 - DNA, 25 bp, Homo sapien
gagcagtagcggtactcagccagac

SEQ ID NO: 3923922 - DNA, 25 bp, Homo sapien
tctggtggtagaaaagtgtgcccca

SEQ ID NO: 3923923 - DNA, 25 bp, Homo sapien
gccccaagccttcatggacgagtta

SEQ ID NO: 3923924 - DNA, 25 bp, Homo sapien
tgtggccgatgccagccaggtagcc

SEQ ID NO: 3923925 - DNA, 25 bp, Homo sapien
acttcgttcctgtacatccagctcg

SEQ ID NO: 3923926 - DNA, 25 bp, Homo sapien
actgagtccctagaagcctggaccc

SEQ ID NO: 3923927 - DNA, 25 bp, Homo sapien
cctgagaccacgaggtggcgccgca

SEQ ID NO: 3923928 - DNA, 25 bp, Homo sapien
gacagtccgcgcacgtttatttcat

SEQ ID NO: 3923929 - DNA, 25 bp, Homo sapien
acagtccgcgcacgtttatttcatt

SEQ ID NO: 3923930 - DNA, 25 bp, Homo sapien
cagctgcccaaacacccctttcaga

SEQ ID NO: 3923931 - DNA, 25 bp, Homo sapien
tggagaaggcgggatgggccaaggg

SEQ ID NO: 3923932 - DNA, 25 bp, Homo sapien
tgtgtgtagggcctagtccacccct

SEQ ID NO: 3923933 - DNA, 25 bp, Homo sapien
cgggatgggccaagggtgagttggc

SEQ ID NO: 3923934 - DNA, 25 bp, Homo sapien
ggcgggagcaagccagtcaaaatga

SEQ ID NO: 3923935 - DNA, 25 bp, Homo sapien
tcaaaatgaccccagtccgcggagg

SEQ ID NO: 3923936 - DNA, 25 bp, Homo sapien
aatgaccccagtccgcggaggctgt

SEQ ID NO: 3923937 - DNA, 25 bp, Homo sapien
cgggagcaagccagtcaaaatgacc

SEQ ID NO: 3923938 - DNA, 25 bp, Homo sapien
ggggatgatctacgggcggggccgc

SEQ ID NO: 3923939 - DNA, 25 bp, Homo sapien
tcggggatgatctacgggcggggcc

SEQ ID NO: 3923940 - DNA, 25 bp, Homo sapien
cctcggggatgatctacgggcgggg

SEQ ID NO: 3923941 - DNA, 25 bp, Homo sapien
ctcggggatgatctacgggcggggc

SEQ ID NO: 3923942 - DNA, 25 bp, Homo sapien
gctgaaggaggcgtgctgtttggct

SEQ ID NO: 3923943 - DNA, 25 bp, Homo sapien
gctcgagttacacgggtcccgatag

SEQ ID NO: 3923944 - DNA, 25 bp, Homo sapien
tcatacgggcctttccacggcgtac

SEQ ID NO: 3923945 - DNA, 25 bp, Homo sapien
tactggcacggactaaggttggctg

SEQ ID NO: 3923946 - DNA, 25 bp, Homo sapien
gagaagacgggctgcgaagccagag

SEQ ID NO: 3923947 - DNA, 25 bp, Homo sapien
ctgggtggcgagaagacgggctgcg

SEQ ID NO: 3923948 - DNA, 25 bp, Homo sapien
cgagaagacgggctgcgaagccaga

SEQ ID NO: 3923949 - DNA, 25 bp, Homo sapien
gtggcgagaagacgggctgcgaagc

SEQ ID NO: 3923950 - DNA, 25 bp, Homo sapien
ccttgggcggccagttgccgtacga

SEQ ID NO: 3923951 - DNA, 25 bp, Homo sapien
ggtacacctcctcgtagggcggcac

SEQ ID NO: 3923952 - DNA, 25 bp, Homo sapien
gaagctgcctttgcatagctcggcc

SEQ ID NO: 3923953 - DNA, 25 bp, Homo sapien
tgaccgagttgaaggcgaatggaaa

SEQ ID NO: 3923954 - DNA, 25 bp, Homo sapien
ctggctggtgaagtgcgtgcgctgc

SEQ ID NO: 3923955 - DNA, 25 bp, Homo sapien
ctctggaaggtcgcctctagctcct

SEQ ID NO: 3923956 - DNA, 25 bp, Homo sapien
tctcctcgcgcgtgctcatgtcggg

SEQ ID NO: 3923957 - DNA, 25 bp, Homo sapien
ctttttcagcgaaccgtcctctggg

SEQ ID NO: 3923958 - DNA, 25 bp, Homo sapien
tggcccttgcagccgtgctctggga

SEQ ID NO: 3923959 - DNA, 25 bp, Homo sapien
agtgccagcgtctgacagcgacagg

SEQ ID NO: 3923960 - DNA, 25 bp, Homo sapien
agggctccgggcctctgcctcgctg

SEQ ID NO: 3923961 - DNA, 25 bp, Homo sapien
tctgcctcgctgagcaggccgaact

SEQ ID NO: 3923962 - DNA, 25 bp, Homo sapien
cttagtatccccctatactcataca

SEQ ID NO: 3923963 - DNA, 25 bp, Homo sapien
ttagtatccccctatactcatacat

SEQ ID NO: 3923964 - DNA, 25 bp, Homo sapien
aatgcttagtatccccctatactca

SEQ ID NO: 3923965 - DNA, 25 bp, Homo sapien
ctgaatgcttagtatccccctatac

SEQ ID NO: 3923966 - DNA, 25 bp, Homo sapien
cgctcagccaccagggtggtgttgg

SEQ ID NO: 3923967 - DNA, 25 bp, Homo sapien
agccgaccccatcgcacacgcagca

SEQ ID NO: 3923968 - DNA, 25 bp, Homo sapien
gcagccgaccccatcgcacacgcag

SEQ ID NO: 3923969 - DNA, 25 bp, Homo sapien
gcaggcgctgctgggtagacggaca

SEQ ID NO: 3923970 - DNA, 25 bp, Homo sapien
gaccccatcgcacacgcagcagctg

SEQ ID NO: 3923971 - DNA, 25 bp, Homo sapien
aacaggcagactcccagtagcggcg

SEQ ID NO: 3923972 - DNA, 25 bp, Homo sapien
gcggcgatctagagggcaggcaggg

SEQ ID NO: 3923973 - DNA, 25 bp, Homo sapien
agtgcgtcctgcaacaggcagactc

SEQ ID NO: 3923974 - DNA, 25 bp, Homo sapien
ggctgcggcggcgatctagagggca

SEQ ID NO: 3923975 - DNA, 25 bp, Homo sapien
tactctcagaatctccacaggggga

SEQ ID NO: 3923976 - DNA, 25 bp, Homo sapien
tgtaaacggtttttgagatactctc

SEQ ID NO: 3923977 - DNA, 25 bp, Homo sapien
tttgagatactctcagaatctccac

SEQ ID NO: 3923978 - DNA, 25 bp, Homo sapien
aacggtttttgagatactctcagaa

SEQ ID NO: 3923979 - DNA, 25 bp, Homo sapien
tcactcaattgaaacagcttggaaa

SEQ ID NO: 3923980 - DNA, 25 bp, Homo sapien
ttctttaaaggagcaaatttcactc

SEQ ID NO: 3923981 - DNA, 25 bp, Homo sapien
tggcctcccaaccatattttcttta

SEQ ID NO: 3923982 - DNA, 25 bp, Homo sapien
gaaacagcttggaaatgttagctaa

SEQ ID NO: 3923983 - DNA, 25 bp, Homo sapien
tgttataagtgactgggaataccct

SEQ ID NO: 3923984 - DNA, 25 bp, Homo sapien
taattggaaacacttggtaaacatc

SEQ ID NO: 3923985 - DNA, 25 bp, Homo sapien
tgaggtggtgctgctatcctgacag

SEQ ID NO: 3923986 - DNA, 25 bp, Homo sapien
ttctgcaaaccttgaggagctgagg

SEQ ID NO: 3923987 - DNA, 25 bp, Homo sapien
aggaattaggtcacttttattgtct

SEQ ID NO: 3923988 - DNA, 25 bp, Homo sapien
aataggaattaggtcacttttattg

SEQ ID NO: 3923989 - DNA, 25 bp, Homo sapien
taggaattaggtcacttttattgtc

SEQ ID NO: 3923990 - DNA, 25 bp, Homo sapien
tgaaataggaattaggtcactttta

SEQ ID NO: 3923991 - DNA, 25 bp, Homo sapien
aggtcctcacagtcatgggccacat

SEQ ID NO: 3923992 - DNA, 25 bp, Homo sapien
ggccacatcgtatgtaattttgaaa

SEQ ID NO: 3923993 - DNA, 25 bp, Homo sapien
gttttatagctaaagaggtcctcac

SEQ ID NO: 3923994 - DNA, 25 bp, Homo sapien
caaagacttcgaatgccgtatgtgg

SEQ ID NO: 3923995 - DNA, 25 bp, Homo sapien
tccttgccatggacaaatgggagaa

SEQ ID NO: 3923996 - DNA, 25 bp, Homo sapien
gctgacattttgatggccacatcat

SEQ ID NO: 3923997 - DNA, 25 bp, Homo sapien
tatttcagggatctatgagaaggtc

SEQ ID NO: 3923998 - DNA, 25 bp, Homo sapien
tctgtaatgaccatggaaagccagc

SEQ ID NO: 3923999 - DNA, 25 bp, Homo sapien
tgttcccagactatgaaactgctgc

SEQ ID NO: 3924000 - DNA, 25 bp, Homo sapien
tttgcctcgggtacctgtaaagtca

SEQ ID NO: 3924001 - DNA, 25 bp, Homo sapien
ctgcaggtagaaacaactgtttgtt

SEQ ID NO: 3924002 - DNA, 25 bp, Homo sapien
tcttcagcagatagagctttgccca

SEQ ID NO: 3924003 - DNA, 25 bp, Homo sapien
atttgcaggcagaatgtagaagccc

SEQ ID NO: 3924004 - DNA, 25 bp, Homo sapien
tcttgtcggcctgagctcctgttgg

SEQ ID NO: 3924005 - DNA, 25 bp, Homo sapien
taatccccttaatgctgcagttcat

SEQ ID NO: 3924006 - DNA, 25 bp, Homo sapien
ggcagaatgtagaagccctcattaa

SEQ ID NO: 3924007 - DNA, 25 bp, Homo sapien
tttattttttacgtcatccagtagc

SEQ ID NO: 3924008 - DNA, 25 bp, Homo sapien
cttgatttactgtctcacattggtt

SEQ ID NO: 3924009 - DNA, 25 bp, Homo sapien
ttgcttatctgaagctatcttttta

SEQ ID NO: 3924010 - DNA, 25 bp, Homo sapien
gtagcttctaggaaaggacacctgg

SEQ ID NO: 3924011 - DNA, 25 bp, Homo sapien
ccaggctggccttgtctaatttaga

SEQ ID NO: 3924012 - DNA, 25 bp, Homo sapien
cagaggttgctcagtggctccgaga

SEQ ID NO: 3924013 - DNA, 25 bp, Homo sapien
gcagctgctaatcactggcacagag

SEQ ID NO: 3924014 - DNA, 25 bp, Homo sapien
agctttttagctgaccaactgtggg

SEQ ID NO: 3924015 - DNA, 25 bp, Homo sapien
catgccactgtgatagagctgtgat

SEQ ID NO: 3924016 - DNA, 25 bp, Homo sapien
atagagtgagatagagtgagataga

SEQ ID NO: 3924017 - DNA, 25 bp, Homo sapien
agtgagatagagtgagatcatgcca

SEQ ID NO: 3924018 - DNA, 25 bp, Homo sapien
gatcatgccactgtgatagagtgag

SEQ ID NO: 3924019 - DNA, 25 bp, Homo sapien
taccaagctcttggagaacatcagc

SEQ ID NO: 3924020 - DNA, 25 bp, Homo sapien
caagataggacaggcttagctaccc

SEQ ID NO: 3924021 - DNA, 25 bp, Homo sapien
catacctgccttttcccgaggaggg

SEQ ID NO: 3924022 - DNA, 25 bp, Homo sapien
cagctatggacactaagcaggacct

SEQ ID NO: 3924023 - DNA, 25 bp, Homo sapien
ctgaagcgggggaaagccaggccgt

SEQ ID NO: 3924024 - DNA, 25 bp, Homo sapien
caaagggcaaggcccactgaagcgg

SEQ ID NO: 3924025 - DNA, 25 bp, Homo sapien
gaggctgtacaaagggcaaggccca

SEQ ID NO: 3924026 - DNA, 25 bp, Homo sapien
ctgtacaaagggcaaggcccactga

SEQ ID NO: 3924027 - DNA, 25 bp, Homo sapien
cgcccaccctgtacgaaaaagtgca

SEQ ID NO: 3924028 - DNA, 25 bp, Homo sapien
gcagaaagcagaaacggcatcaggc

SEQ ID NO: 3924029 - DNA, 25 bp, Homo sapien
gccttggcatggacgcccttcctcc

SEQ ID NO: 3924030 - DNA, 25 bp, Homo sapien
cctggtctctgtccaagccaggccc

SEQ ID NO: 3924031 - DNA, 25 bp, Homo sapien
agcttgacccgaagcagcgctgcat

SEQ ID NO: 3924032 - DNA, 25 bp, Homo sapien
ccgaagcagcgctgcataggtgctg

SEQ ID NO: 3924033 - DNA, 25 bp, Homo sapien
ctgcataggtgctgtagcgggattt

SEQ ID NO: 3924034 - DNA, 25 bp, Homo sapien
gctctgagctgtgacgctgagcccg

SEQ ID NO: 3924035 - DNA, 25 bp, Homo sapien
cccgcagctcacttgccatggcctt

SEQ ID NO: 3924036 - DNA, 25 bp, Homo sapien
ttggcctcgtgggtccgcacctgct

SEQ ID NO: 3924037 - DNA, 25 bp, Homo sapien
gtgctcccgcagctcacttgccatg

SEQ ID NO: 3924038 - DNA, 25 bp, Homo sapien
agcttggcctcgtgggtccgcacct

SEQ ID NO: 3924039 - DNA, 25 bp, Homo sapien
gggcgcagagaacatagcggctact

SEQ ID NO: 3924040 - DNA, 25 bp, Homo sapien
caggagagggcggctgaacttcttt

SEQ ID NO: 3924041 - DNA, 25 bp, Homo sapien
cattgatgcgagtgatccaggactg

SEQ ID NO: 3924042 - DNA, 25 bp, Homo sapien
tttgggagctaacagcagctgggaa

SEQ ID NO: 3924043 - DNA, 25 bp, Homo sapien
ggatgccagtcctggctcaagtgtg

SEQ ID NO: 3924044 - DNA, 25 bp, Homo sapien
agcacagccctttgggacctgggcc

SEQ ID NO: 3924045 - DNA, 25 bp, Homo sapien
cctgggcccagggtttctgtcccag

SEQ ID NO: 3924046 - DNA, 25 bp, Homo sapien
ctgtcccaggatgccagtcctggct

SEQ ID NO: 3924047 - DNA, 25 bp, Homo sapien
ctgagaaggaatgaaaaaatccagg

SEQ ID NO: 3924048 - DNA, 25 bp, Homo sapien
aggaatgaaaaaatccagggacagg

SEQ ID NO: 3924049 - DNA, 25 bp, Homo sapien
ccgggatgggcaggaggagggcact

SEQ ID NO: 3924050 - DNA, 25 bp, Homo sapien
gaaggaatgaaaaaatccagggaca

SEQ ID NO: 3924051 - DNA, 25 bp, Homo sapien
ggcattcttgagctccgtctctgaa

SEQ ID NO: 3924052 - DNA, 25 bp, Homo sapien
gccagtcagctgtgcgcaggtagaa

SEQ ID NO: 3924053 - DNA, 25 bp, Homo sapien
tgtagtcactggcacgagtggccag

SEQ ID NO: 3924054 - DNA, 25 bp, Homo sapien
ctggaagaggaagacccgccagtca

SEQ ID NO: 3924055 - DNA, 25 bp, Homo sapien
ggccccaaatgcagcctggcccagc

SEQ ID NO: 3924056 - DNA, 25 bp, Homo sapien
caggggtgtccatcttgtcctggcc

SEQ ID NO: 3924057 - DNA, 25 bp, Homo sapien
gtgtccatcttgtcctggccccaaa

SEQ ID NO: 3924058 - DNA, 25 bp, Homo sapien
ctgcaggggtgtccatcttgtcctg

SEQ ID NO: 3924059 - DNA, 25 bp, Homo sapien
gaggatcccgtggaagctcttccag

SEQ ID NO: 3924060 - DNA, 25 bp, Homo sapien
gaggatcatgcccttgaggatcccg

SEQ ID NO: 3924061 - DNA, 25 bp, Homo sapien
tcatgcccttgaggatcccgtggaa

SEQ ID NO: 3924062 - DNA, 25 bp, Homo sapien
tgcccttgaggatcccgtggaagct

SEQ ID NO: 3924063 - DNA, 25 bp, Homo sapien
tcagggtctgcgtgcacctttcgca

SEQ ID NO: 3924064 - DNA, 25 bp, Homo sapien
tcgcaccagggccccgtgcttgtag

SEQ ID NO: 3924065 - DNA, 25 bp, Homo sapien
tcgggagtcaggtccaggaaagggc

SEQ ID NO: 3924066 - DNA, 25 bp, Homo sapien
tgcccccgctgatccgcttgatgac

SEQ ID NO: 3924067 - DNA, 25 bp, Homo sapien
gacagagagcgtctcagctcctcct

SEQ ID NO: 3924068 - DNA, 25 bp, Homo sapien
ttggggtcggccaactcagacagag

SEQ ID NO: 3924069 - DNA, 25 bp, Homo sapien
tcggccaactcagacagagagcgtc

SEQ ID NO: 3924070 - DNA, 25 bp, Homo sapien
actcagacagagagcgtctcagctc

SEQ ID NO: 3924071 - DNA, 25 bp, Homo sapien
ctgcaggtgtgatcacctcagaggg

SEQ ID NO: 3924072 - DNA, 25 bp, Homo sapien
ggtgtgatcacctcagagggggctg

SEQ ID NO: 3924073 - DNA, 25 bp, Homo sapien
aggtgtgatcacctcagagggggct

SEQ ID NO: 3924074 - DNA, 25 bp, Homo sapien
ggctggccatggagccgcggccccc

SEQ ID NO: 3924075 - DNA, 25 bp, Homo sapien
cccttgctcaagaacctgtggtagt

SEQ ID NO: 3924076 - DNA, 25 bp, Homo sapien
gcaagtagggccagcactatcctct

SEQ ID NO: 3924077 - DNA, 25 bp, Homo sapien
cagatcaggcctccacaatgtgtag

SEQ ID NO: 3924078 - DNA, 25 bp, Homo sapien
caacagtgtttttctccgtcccagc

SEQ ID NO: 3924079 - DNA, 25 bp, Homo sapien
aaccccaaatccaggcagacatctc

SEQ ID NO: 3924080 - DNA, 25 bp, Homo sapien
aagtgaggcagcctcactgcctctc

SEQ ID NO: 3924081 - DNA, 25 bp, Homo sapien
aacccacttgtcataacaacccagc

SEQ ID NO: 3924082 - DNA, 25 bp, Homo sapien
acaacccagctagagacaagataca

SEQ ID NO: 3924083 - DNA, 25 bp, Homo sapien
ctgcagcttctcattcttgatggag

SEQ ID NO: 3924084 - DNA, 25 bp, Homo sapien
gcccactgcagcttctcattcttga

SEQ ID NO: 3924085 - DNA, 25 bp, Homo sapien
atggcccactgcagcttctcattct

SEQ ID NO: 3924086 - DNA, 25 bp, Homo sapien
actgcagcttctcattcttgatgga

SEQ ID NO: 3924087 - DNA, 25 bp, Homo sapien
ggaagtggccaccaagatccaacct

SEQ ID NO: 3924088 - DNA, 25 bp, Homo sapien
ggtacttccgtcagcctgtccgtga

SEQ ID NO: 3924089 - DNA, 25 bp, Homo sapien
tgcagtggtgacgtaggcaccttcc

SEQ ID NO: 3924090 - DNA, 25 bp, Homo sapien
tctggaatatgggtccacgccagca

SEQ ID NO: 3924091 - DNA, 25 bp, Homo sapien
ccaggtcggtgtagagcacgggctt

SEQ ID NO: 3924092 - DNA, 25 bp, Homo sapien
tagcacagggtctccgcgccgcggt

SEQ ID NO: 3924093 - DNA, 25 bp, Homo sapien
acgggcttgaggctgcgcgagcgct

SEQ ID NO: 3924094 - DNA, 25 bp, Homo sapien
gagcgctgcggccagccgtagcaca

SEQ ID NO: 3924095 - DNA, 25 bp, Homo sapien
gcgccgcggcccccggccatgcccc

SEQ ID NO: 3924096 - DNA, 25 bp, Homo sapien
cggcgcgccgcggcccccggccatg

SEQ ID NO: 3924097 - DNA, 25 bp, Homo sapien
gcgcgccgcggcccccggccatgcc

SEQ ID NO: 3924098 - DNA, 25 bp, Homo sapien
gctggcccggccggcgcgccgcggc

SEQ ID NO: 3924099 - DNA, 25 bp, Homo sapien
ctctcacggacgcacggagtgcgcg

SEQ ID NO: 3924100 - DNA, 25 bp, Homo sapien
cggctctcacggacgcacggagtgc

SEQ ID NO: 3924101 - DNA, 25 bp, Homo sapien
ccggcccggctctcacggacgcacg

SEQ ID NO: 3924102 - DNA, 25 bp, Homo sapien
gcccggctctcacggacgcacggag

SEQ ID NO: 3924103 - DNA, 25 bp, Homo sapien
tgaagtccccgcaggtcatgcgctt

SEQ ID NO: 3924104 - DNA, 25 bp, Homo sapien
gagcagctccctagggaagtcgccg

SEQ ID NO: 3924105 - DNA, 25 bp, Homo sapien
gccctccaggttcccgatgaagtcc

SEQ ID NO: 3924106 - DNA, 25 bp, Homo sapien
gaagtcgccgccatcattgaggccc

SEQ ID NO: 3924107 - DNA, 25 bp, Homo sapien
gaacggaggcctgtgagtttggagg

SEQ ID NO: 3924108 - DNA, 25 bp, Homo sapien
ttgagcagcatgagcgcacaggtca

SEQ ID NO: 3924109 - DNA, 25 bp, Homo sapien
tgagcagcatgagcgcacaggtcag

SEQ ID NO: 3924110 - DNA, 25 bp, Homo sapien
agcatgagcgcacaggtcagcgtgt

SEQ ID NO: 3924111 - DNA, 25 bp, Homo sapien
agcagcatgagcgcacaggtcagcg

SEQ ID NO: 3924112 - DNA, 25 bp, Homo sapien
tgaggacagggcttcaggattgcac

SEQ ID NO: 3924113 - DNA, 25 bp, Homo sapien
agcacgcgctctcgttcctgggtct

SEQ ID NO: 3924114 - DNA, 25 bp, Homo sapien
tgggtctcacccattaaggccagct

SEQ ID NO: 3924115 - DNA, 25 bp, Homo sapien
cactggaagtatcgctgggagaagt

SEQ ID NO: 3924116 - DNA, 25 bp, Homo sapien
aagaacttgaggtactccccagcca

SEQ ID NO: 3924117 - DNA, 25 bp, Homo sapien
ttggtccagagtcatgcccgtgaag

SEQ ID NO: 3924118 - DNA, 25 bp, Homo sapien
gtcatgcccgtgaagacaaagaact

SEQ ID NO: 3924119 - DNA, 25 bp, Homo sapien
gtactccccagccaccagtttgctg

SEQ ID NO: 3924120 - DNA, 25 bp, Homo sapien
tctgagtcggacaccagctggctca

SEQ ID NO: 3924121 - DNA, 25 bp, Homo sapien
gaagccatctagtcggtacagcctc

SEQ ID NO: 3924122 - DNA, 25 bp, Homo sapien
ttcctgaagccatctagtcggtaca

SEQ ID NO: 3924123 - DNA, 25 bp, Homo sapien
ccgctttctgcccattggacaaggt

SEQ ID NO: 3924124 - DNA, 25 bp, Homo sapien
gagctggacgagagatgcctgatta

SEQ ID NO: 3924125 - DNA, 25 bp, Homo sapien
cggaaactcctggttgctaggcaac

SEQ ID NO: 3924126 - DNA, 25 bp, Homo sapien
gaatagatgggctaccacggaggaa

SEQ ID NO: 3924127 - DNA, 25 bp, Homo sapien
tctcttagactatggacaaagctgg

SEQ ID NO: 3924128 - DNA, 25 bp, Homo sapien
aaagggccctccaggagagcaagaa

SEQ ID NO: 3924129 - DNA, 25 bp, Homo sapien
tctcctgggatccttcaatgctgaa

SEQ ID NO: 3924130 - DNA, 25 bp, Homo sapien
tccaaataggaaaacaggatctgca

SEQ ID NO: 3924131 - DNA, 25 bp, Homo sapien
caagccactggacttgagaccaaga

SEQ ID NO: 3924132 - DNA, 25 bp, Homo sapien
tggcagggactagggggctccctcc

SEQ ID NO: 3924133 - DNA, 25 bp, Homo sapien
aggctgtcctctgagtggcagggac

SEQ ID NO: 3924134 - DNA, 25 bp, Homo sapien
ctctgagtggcagggactagggggc

SEQ ID NO: 3924135 - DNA, 25 bp, Homo sapien
ctgccaaggggtgctgcccccagcc

SEQ ID NO: 3924136 - DNA, 25 bp, Homo sapien
gagctggtaccagaatccggttcaa

SEQ ID NO: 3924137 - DNA, 25 bp, Homo sapien
ctgaaagagtcaggcccatcagccg

SEQ ID NO: 3924138 - DNA, 25 bp, Homo sapien
ggatggcttcgaacacacaactgaa

SEQ ID NO: 3924139 - DNA, 25 bp, Homo sapien
cctttggcccggtgtgactccagga

SEQ ID NO: 3924140 - DNA, 25 bp, Homo sapien
gtccaggtctgtctcggagtacttg

SEQ ID NO: 3924141 - DNA, 25 bp, Homo sapien
cagccagcacctcatcgatgtcagt

SEQ ID NO: 3924142 - DNA, 25 bp, Homo sapien
cgatgtcagtctcgcggtagcacct

SEQ ID NO: 3924143 - DNA, 25 bp, Homo sapien
agagctgggctgactttcgatggcc

SEQ ID NO: 3924144 - DNA, 25 bp, Homo sapien
aggaggttatccacgtcagctccct

SEQ ID NO: 3924145 - DNA, 25 bp, Homo sapien
gtcaggaggttatccacgtcagctc

SEQ ID NO: 3924146 - DNA, 25 bp, Homo sapien
ggtcaggaggttatccacgtcagct

SEQ ID NO: 3924147 - DNA, 25 bp, Homo sapien
tcaggaggttatccacgtcagctcc

SEQ ID NO: 3924148 - DNA, 25 bp, Homo sapien
tcctgctacatacttagcttgttcc

SEQ ID NO: 3924149 - DNA, 25 bp, Homo sapien
cttagcttgttcctggtgccagtgg

SEQ ID NO: 3924150 - DNA, 25 bp, Homo sapien
ctttcactgtctagccaccattcct

SEQ ID NO: 3924151 - DNA, 25 bp, Homo sapien
ctggtgccagtggagctcattttaa

SEQ ID NO: 3924152 - DNA, 25 bp, Homo sapien
tgaaggagggctccctactgagcct

SEQ ID NO: 3924153 - DNA, 25 bp, Homo sapien
gggagacattggctgactcaagagc

SEQ ID NO: 3924154 - DNA, 25 bp, Homo sapien
tagcgcagatggaaagattgaggcc

SEQ ID NO: 3924155 - DNA, 25 bp, Homo sapien
ttttctactccatggaatgcccctc

SEQ ID NO: 3924156 - DNA, 25 bp, Homo sapien
gagccatagaagaattcccatttgg

SEQ ID NO: 3924157 - DNA, 25 bp, Homo sapien
ggagccatagaagaattcccatttg

SEQ ID NO: 3924158 - DNA, 25 bp, Homo sapien
ggcatgagaggagacttcccggggg

SEQ ID NO: 3924159 - DNA, 25 bp, Homo sapien
gcatgagaggagacttcccgggggg

SEQ ID NO: 3924160 - DNA, 25 bp, Homo sapien
gggcatgagaggagacttcccgggg

SEQ ID NO: 3924161 - DNA, 25 bp, Homo sapien
catgagaggagacttcccgggggga

SEQ ID NO: 3924162 - DNA, 25 bp, Homo sapien
ctgagccaacgagggagacacaggc

SEQ ID NO: 3924163 - DNA, 25 bp, Homo sapien
tacaaggacacaagaatatgggaca

SEQ ID NO: 3924164 - DNA, 25 bp, Homo sapien
gcatcgacagagatggaggttcaga

SEQ ID NO: 3924165 - DNA, 25 bp, Homo sapien
tgaacagcagacaagcccatgtctg

SEQ ID NO: 3924166 - DNA, 25 bp, Homo sapien
caggtcctccgaagagtgtggccag

SEQ ID NO: 3924167 - DNA, 25 bp, Homo sapien
agcaggtcctccgaagagtgtggcc

SEQ ID NO: 3924168 - DNA, 25 bp, Homo sapien
gtgtcagcaggtcctccgaagagtg

SEQ ID NO: 3924169 - DNA, 25 bp, Homo sapien
tcagcaggtcctccgaagagtgtgg

SEQ ID NO: 3924170 - DNA, 25 bp, Homo sapien
cagccgtaacttccggttggagcca

SEQ ID NO: 3924171 - DNA, 25 bp, Homo sapien
tgatgtggatgcttccagccgtaac

SEQ ID NO: 3924172 - DNA, 25 bp, Homo sapien
ccatgtacaaggttccggctgccag

SEQ ID NO: 3924173 - DNA, 25 bp, Homo sapien
agagaggagtaaaggccatctgctc

SEQ ID NO: 3924174 - DNA, 25 bp, Homo sapien
cattcagtggcctcacactggcctt

SEQ ID NO: 3924175 - DNA, 25 bp, Homo sapien
tccacaaagcggaagatgaccacag

SEQ ID NO: 3924176 - DNA, 25 bp, Homo sapien
cactcgccgtagcaaggagcctgtg

SEQ ID NO: 3924177 - DNA, 25 bp, Homo sapien
cagggtgctgtcacacgtcccagtt

SEQ ID NO: 3924178 - DNA, 25 bp, Homo sapien
cgagcagaagcgcatggcaccctgg

SEQ ID NO: 3924179 - DNA, 25 bp, Homo sapien
gggagatggcacagtcgccttccga

SEQ ID NO: 3924180 - DNA, 25 bp, Homo sapien
ggcacagtcgccttccgagcagaag

SEQ ID NO: 3924181 - DNA, 25 bp, Homo sapien
gccttccgagcagaagcgcatggca

SEQ ID NO: 3924182 - DNA, 25 bp, Homo sapien
agggggctgcatgctcttcagacag

SEQ ID NO: 3924183 - DNA, 25 bp, Homo sapien
gagtaagggggctgcatgctcttca

SEQ ID NO: 3924184 - DNA, 25 bp, Homo sapien
ccaggcggggagtaagggggctgca

SEQ ID NO: 3924185 - DNA, 25 bp, Homo sapien
taagggggctgcatgctcttcagac

SEQ ID NO: 3924186 - DNA, 25 bp, Homo sapien
tgccaaggagttagatggataggac

SEQ ID NO: 3924187 - DNA, 25 bp, Homo sapien
gactacttccatagaggcctgacga

SEQ ID NO: 3924188 - DNA, 25 bp, Homo sapien
ggacctagcacaccctggtaatatg

SEQ ID NO: 3924189 - DNA, 25 bp, Homo sapien
gcctctgagtatcagggacctagca

SEQ ID NO: 3924190 - DNA, 25 bp, Homo sapien
gagaggaagcaacttcaaagttgag

SEQ ID NO: 3924191 - DNA, 25 bp, Homo sapien
gagtgagcccggagttcttatggca

SEQ ID NO: 3924192 - DNA, 25 bp, Homo sapien
cggagttcttatggcactttggagc

SEQ ID NO: 3924193 - DNA, 25 bp, Homo sapien
caacttcaaagttgagtgagcccgg

SEQ ID NO: 3924194 - DNA, 25 bp, Homo sapien
gggaagaggaacaggtgttatatag

SEQ ID NO: 3924195 - DNA, 25 bp, Homo sapien
acccctatagtctctcttatggagg

SEQ ID NO: 3924196 - DNA, 25 bp, Homo sapien
cctgtgacccctatagtctctctta

SEQ ID NO: 3924197 - DNA, 25 bp, Homo sapien
gtgacccctatagtctctcttatgg

SEQ ID NO: 3924198 - DNA, 25 bp, Homo sapien
gtacagacaggcacctacacacaca

SEQ ID NO: 3924199 - DNA, 25 bp, Homo sapien
acaggtacagacaggcacctacaca

SEQ ID NO: 3924200 - DNA, 25 bp, Homo sapien
ttttcttcatacaggtacagacagg

SEQ ID NO: 3924201 - DNA, 25 bp, Homo sapien
ttcttttcttcatacaggtacagac

SEQ ID NO: 3924202 - DNA, 25 bp, Homo sapien
cgcccaggagagaccataaccaggt

SEQ ID NO: 3924203 - DNA, 25 bp, Homo sapien
gacactcacagagacctactgctca

SEQ ID NO: 3924204 - DNA, 25 bp, Homo sapien
cacagaggtccaggtgtatcagaca

SEQ ID NO: 3924205 - DNA, 25 bp, Homo sapien
gaacacacaaagaggtacccaaata

SEQ ID NO: 3924206 - DNA, 25 bp, Homo sapien
agagctgagaccgaggagagacaga

SEQ ID NO: 3924207 - DNA, 25 bp, Homo sapien
cgctgctcgcccagagctgagaccg

SEQ ID NO: 3924208 - DNA, 25 bp, Homo sapien
gctcgcccagagctgagaccgagga

SEQ ID NO: 3924209 - DNA, 25 bp, Homo sapien
ctgctcgcccagagctgagaccgag

SEQ ID NO: 3924210 - DNA, 25 bp, Homo sapien
agaccccacgcgtgtccctaggagg

SEQ ID NO: 3924211 - DNA, 25 bp, Homo sapien
tacgcgccgctcaggcaacgctaat

SEQ ID NO: 3924212 - DNA, 25 bp, Homo sapien
cttgtcgctaggtccccgctgggct

SEQ ID NO: 3924213 - DNA, 25 bp, Homo sapien
gtaaggcccggctgcacacgcgtgt

SEQ ID NO: 3924214 - DNA, 25 bp, Homo sapien
tattttaagaaagagccgctggagt

SEQ ID NO: 3924215 - DNA, 25 bp, Homo sapien
gatctagggaacaccgtcttgaacc

SEQ ID NO: 3924216 - DNA, 25 bp, Homo sapien
tgagttaggtgtcgtcacgcctgcc

SEQ ID NO: 3924217 - DNA, 25 bp, Homo sapien
caactactctctttgggagggccag

SEQ ID NO: 3924218 - DNA, 25 bp, Homo sapien
aggggacagcgccagatttgtcgca

SEQ ID NO: 3924219 - DNA, 25 bp, Homo sapien
gggcggcgcggactccgcgtggtgc

SEQ ID NO: 3924220 - DNA, 25 bp, Homo sapien
gggacagcgccagatttgtcgcact

SEQ ID NO: 3924221 - DNA, 25 bp, Homo sapien
gcggactccgcgtggtgctgaaggg

SEQ ID NO: 3924222 - DNA, 25 bp, Homo sapien
caaagggcaaatactcggtagcgac

SEQ ID NO: 3924223 - DNA, 25 bp, Homo sapien
tcagatcggatcctcggtgagacgg

SEQ ID NO: 3924224 - DNA, 25 bp, Homo sapien
cgagaaaatcttactgcgcacgcgc

SEQ ID NO: 3924225 - DNA, 25 bp, Homo sapien
taagagcctggatagtttctccccg

SEQ ID NO: 3924226 - DNA, 25 bp, Homo sapien
tgtgtagggacggaaaaagtatgcc

SEQ ID NO: 3924227 - DNA, 25 bp, Homo sapien
cactgagctgtagggaaactgaact

SEQ ID NO: 3924228 - DNA, 25 bp, Homo sapien
ggtcagacaggcatagtatcccagt

SEQ ID NO: 3924229 - DNA, 25 bp, Homo sapien
gattttgccggagccagtccgaggc

SEQ ID NO: 3924230 - DNA, 25 bp, Homo sapien
ggccacctttactgtgcccatggag

SEQ ID NO: 3924231 - DNA, 25 bp, Homo sapien
tgtaggggtatagggctcctgcatc

SEQ ID NO: 3924232 - DNA, 25 bp, Homo sapien
aggcagctccgagagtaggttaaca

SEQ ID NO: 3924233 - DNA, 25 bp, Homo sapien
ggttaacactatggagcaaaggagt

SEQ ID NO: 3924234 - DNA, 25 bp, Homo sapien
cagggttccgcacatctttgaatcg

SEQ ID NO: 3924235 - DNA, 25 bp, Homo sapien
tcaatggaagcggtactttctggct

SEQ ID NO: 3924236 - DNA, 25 bp, Homo sapien
cttgaggttgatgtatgtggccttc

SEQ ID NO: 3924237 - DNA, 25 bp, Homo sapien
tttggtgctcactacctggttgtcg

SEQ ID NO: 3924238 - DNA, 25 bp, Homo sapien
ctccttgggagccatgggccggtga

SEQ ID NO: 3924239 - DNA, 25 bp, Homo sapien
agccatgggccggtgaatcttctga

SEQ ID NO: 3924240 - DNA, 25 bp, Homo sapien
ccatgggccggtgaatcttctgatc

SEQ ID NO: 3924241 - DNA, 25 bp, Homo sapien
ggagccatgggccggtgaatcttct

SEQ ID NO: 3924242 - DNA, 25 bp, Homo sapien
ctctgcgctatccaccatcatgtac

SEQ ID NO: 3924243 - DNA, 25 bp, Homo sapien
gtcaaaaactggctgggtgaagctc

SEQ ID NO: 3924244 - DNA, 25 bp, Homo sapien
ctgtcaaaaactggctgggtgaagc

SEQ ID NO: 3924245 - DNA, 25 bp, Homo sapien
caaaaactggctgggtgaagctcct

SEQ ID NO: 3924246 - DNA, 25 bp, Homo sapien
tcaaaaactggctgggtgaagctcc

SEQ ID NO: 3924247 - DNA, 25 bp, Homo sapien
ttctgcaggatgaaggacttcagct

SEQ ID NO: 3924248 - DNA, 25 bp, Homo sapien
tgcaggatgaaggacttcagctcat

SEQ ID NO: 3924249 - DNA, 25 bp, Homo sapien
tctgcaggatgaaggacttcagctc

SEQ ID NO: 3924250 - DNA, 25 bp, Homo sapien
ctgcaggatgaaggacttcagctca

SEQ ID NO: 3924251 - DNA, 25 bp, Homo sapien
ccttttgggggcctctgaggcgtct

SEQ ID NO: 3924252 - DNA, 25 bp, Homo sapien
ggcctctgaggcgtctgggcaggtc

SEQ ID NO: 3924253 - DNA, 25 bp, Homo sapien
tgggggcctctgaggcgtctgggca

SEQ ID NO: 3924254 - DNA, 25 bp, Homo sapien
tttgggggcctctgaggcgtctggg

SEQ ID NO: 3924255 - DNA, 25 bp, Homo sapien
ctacatggtagagggtgctgggaaa

SEQ ID NO: 3924256 - DNA, 25 bp, Homo sapien
taacaccaaggtggaatgtagctga

SEQ ID NO: 3924257 - DNA, 25 bp, Homo sapien
gggcttaacaccaaggtggaatgta

SEQ ID NO: 3924258 - DNA, 25 bp, Homo sapien
caaggtggaatgtagctgaggctac

SEQ ID NO: 3924259 - DNA, 25 bp, Homo sapien
ctggttggggccctcccaggctgca

SEQ ID NO: 3924260 - DNA, 25 bp, Homo sapien
ccaggctgcaggcccctcttccttt

SEQ ID NO: 3924261 - DNA, 25 bp, Homo sapien
ggctgcaggcccctcttcctttccc

SEQ ID NO: 3924262 - DNA, 25 bp, Homo sapien
gcaggcccctcttcctttccctcta

SEQ ID NO: 3924263 - DNA, 25 bp, Homo sapien
caggagtacatccacccctggcaga

SEQ ID NO: 3924264 - DNA, 25 bp, Homo sapien
tgggcctgctccaccgaacaggtag

SEQ ID NO: 3924265 - DNA, 25 bp, Homo sapien
gctccaccgaacaggtagggaacac

SEQ ID NO: 3924266 - DNA, 25 bp, Homo sapien
ggagtacatccacccctggcagaag

SEQ ID NO: 3924267 - DNA, 25 bp, Homo sapien
ctgggtccctcatcggtaccctcct

SEQ ID NO: 3924268 - DNA, 25 bp, Homo sapien
gtacaaacgttaacaagaggcaata

SEQ ID NO: 3924269 - DNA, 25 bp, Homo sapien
ggtccctcatcggtaccctcctcta

SEQ ID NO: 3924270 - DNA, 25 bp, Homo sapien
caaacgttaacaagaggcaatactc

SEQ ID NO: 3924271 - DNA, 25 bp, Homo sapien
gcacctgaccttggacaccagagct

SEQ ID NO: 3924272 - DNA, 25 bp, Homo sapien
agcagcagccgaagacctagtctct

SEQ ID NO: 3924273 - DNA, 25 bp, Homo sapien
tctttgagcatttcgggccgctgca

SEQ ID NO: 3924274 - DNA, 25 bp, Homo sapien
gagatgggcacctgaccttggacac

SEQ ID NO: 3924275 - DNA, 25 bp, Homo sapien
cctgagagcttctgcatcatgtccc

SEQ ID NO: 3924276 - DNA, 25 bp, Homo sapien
tggcatcgctcagctgccctgagag

SEQ ID NO: 3924277 - DNA, 25 bp, Homo sapien
gccctgagagcttctgcatcatgtc

SEQ ID NO: 3924278 - DNA, 25 bp, Homo sapien
ctttgttcctggcatcgctcagctg

SEQ ID NO: 3924279 - DNA, 25 bp, Homo sapien
gaagttctcctctgatgggcccgag

SEQ ID NO: 3924280 - DNA, 25 bp, Homo sapien
ggcacataggcctccatcatctcag

SEQ ID NO: 3924281 - DNA, 25 bp, Homo sapien
ccaggaccccaagcacataggagaa

SEQ ID NO: 3924282 - DNA, 25 bp, Homo sapien
tcagtgaaagcctccatatcgaagt

SEQ ID NO: 3924283 - DNA, 25 bp, Homo sapien
gaggtcggcctccgggaggtgtgtc

SEQ ID NO: 3924284 - DNA, 25 bp, Homo sapien
gggctgcactgacgatcctctccag

SEQ ID NO: 3924285 - DNA, 25 bp, Homo sapien
ggtcggcctccgggaggtgtgtctg

SEQ ID NO: 3924286 - DNA, 25 bp, Homo sapien
ctgaggtcggcctccgggaggtgtg

SEQ ID NO: 3924287 - DNA, 25 bp, Homo sapien
ctgaaacctggggattacccttgat

SEQ ID NO: 3924288 - DNA, 25 bp, Homo sapien
acttctccctatcctgagtctggct

SEQ ID NO: 3924289 - DNA, 25 bp, Homo sapien
ttcacccctaccagtcaatcaccaa

SEQ ID NO: 3924290 - DNA, 25 bp, Homo sapien
accaagtctgtcaattctatttcct

SEQ ID NO: 3924291 - DNA, 25 bp, Homo sapien
taccacctgcgccagagccctcatg

SEQ ID NO: 3924292 - DNA, 25 bp, Homo sapien
acctgcgccagagccctcatgggcc

SEQ ID NO: 3924293 - DNA, 25 bp, Homo sapien
tcataccacctgcgccagagccctc

SEQ ID NO: 3924294 - DNA, 25 bp, Homo sapien
cacctgcgccagagccctcatgggc

SEQ ID NO: 3924295 - DNA, 25 bp, Homo sapien
gctgtcagttgcatggtagcctctg

SEQ ID NO: 3924296 - DNA, 25 bp, Homo sapien
ggttacatcaccctcgaatcctggg

SEQ ID NO: 3924297 - DNA, 25 bp, Homo sapien
agcctctgccgggacaaaggcccat

SEQ ID NO: 3924298 - DNA, 25 bp, Homo sapien
atcctgggctgtcagttgcatggta

SEQ ID NO: 3924299 - DNA, 25 bp, Homo sapien
gagagcccagtttctagggaagaag

SEQ ID NO: 3924300 - DNA, 25 bp, Homo sapien
tggtctacccaaacttcacccaggc

SEQ ID NO: 3924301 - DNA, 25 bp, Homo sapien
ataaaaagacttgctcccctaagct

SEQ ID NO: 3924302 - DNA, 25 bp, Homo sapien
ccctaagcttttctctagtttgtat

SEQ ID NO: 3924303 - DNA, 25 bp, Homo sapien
gcctaaatgcctccgatgatggtaa

SEQ ID NO: 3924304 - DNA, 25 bp, Homo sapien
cctgtcatgagtcctgcctaaatgc

SEQ ID NO: 3924305 - DNA, 25 bp, Homo sapien
gatcattggttgatggtgtctacca

SEQ ID NO: 3924306 - DNA, 25 bp, Homo sapien
agatgtagcccacagaaccccattg

SEQ ID NO: 3924307 - DNA, 25 bp, Homo sapien
gatgatggacgacccctgaagcagc

SEQ ID NO: 3924308 - DNA, 25 bp, Homo sapien
gctagcgggacacccgtaagcgtcc

SEQ ID NO: 3924309 - DNA, 25 bp, Homo sapien
taagcgtccagaatagtgggcccga

SEQ ID NO: 3924310 - DNA, 25 bp, Homo sapien
ccttggaggacacatgacgaggcag

SEQ ID NO: 3924311 - DNA, 25 bp, Homo sapien
tgatacaggccacggcgagaatcag

SEQ ID NO: 3924312 - DNA, 25 bp, Homo sapien
caggccacggcgagaatcagagatg

SEQ ID NO: 3924313 - DNA, 25 bp, Homo sapien
tacaggccacggcgagaatcagaga

SEQ ID NO: 3924314 - DNA, 25 bp, Homo sapien
cttgatacaggccacggcgagaatc

SEQ ID NO: 3924315 - DNA, 25 bp, Homo sapien
ggtcagcgctctccgcgactctcct

SEQ ID NO: 3924316 - DNA, 25 bp, Homo sapien
cctgggtcagcgctctccgcgactc

SEQ ID NO: 3924317 - DNA, 25 bp, Homo sapien
tgggtcagcgctctccgcgactctc

SEQ ID NO: 3924318 - DNA, 25 bp, Homo sapien
agcgctctccgcgactctcctagcc

SEQ ID NO: 3924319 - DNA, 25 bp, Homo sapien
ttgtcccgcgcggtgcagctctcat

SEQ ID NO: 3924320 - DNA, 25 bp, Homo sapien
ccccaccaacgagatcaaaggcggg

SEQ ID NO: 3924321 - DNA, 25 bp, Homo sapien
ccgccggcgacttgtcccgcgcggt

SEQ ID NO: 3924322 - DNA, 25 bp, Homo sapien
ccagagcggttcccttccagaggcg

SEQ ID NO: 3924323 - DNA, 25 bp, Homo sapien
gcaggaagcgacagatggatccctg

SEQ ID NO: 3924324 - DNA, 25 bp, Homo sapien
cacatctgggcaggaagcgacagat

SEQ ID NO: 3924325 - DNA, 25 bp, Homo sapien
aggaagcgacagatggatccctgcc

SEQ ID NO: 3924326 - DNA, 25 bp, Homo sapien
gaagcgacagatggatccctgccat

SEQ ID NO: 3924327 - DNA, 25 bp, Homo sapien
gagcttatgccctcagcatctcgga

SEQ ID NO: 3924328 - DNA, 25 bp, Homo sapien
gacatccctctcctagtgaagcctt

SEQ ID NO: 3924329 - DNA, 25 bp, Homo sapien
gctgggcccagcgatcagacacatg

SEQ ID NO: 3924330 - DNA, 25 bp, Homo sapien
taaactcaggtctcagacatccctc

SEQ ID NO: 3924331 - DNA, 25 bp, Homo sapien
gaggtgccctcgattccgtcttgca

SEQ ID NO: 3924332 - DNA, 25 bp, Homo sapien
tcccaccgtccagcaataaagcgag

SEQ ID NO: 3924333 - DNA, 25 bp, Homo sapien
cgcagtgtatacttgacttcgctca

SEQ ID NO: 3924334 - DNA, 25 bp, Homo sapien
tacagtagtgtatcagcacacccgg

SEQ ID NO: 3924335 - DNA, 25 bp, Homo sapien
gggcggccgcgctccgcggcttccc

SEQ ID NO: 3924336 - DNA, 25 bp, Homo sapien
cgggctgggctgctgtcgccgctgt

SEQ ID NO: 3924337 - DNA, 25 bp, Homo sapien
tcgccgctgtcgggccggcgccgca

SEQ ID NO: 3924338 - DNA, 25 bp, Homo sapien
tcaggcccttgctcttcctggggcg

SEQ ID NO: 3924339 - DNA, 25 bp, Homo sapien
tcccggcgcacgaagtccggtagct

SEQ ID NO: 3924340 - DNA, 25 bp, Homo sapien
tgcagcgacagtcccgagatgccgg

SEQ ID NO: 3924341 - DNA, 25 bp, Homo sapien
ccgtagaagcggtggtattcccgtg

SEQ ID NO: 3924342 - DNA, 25 bp, Homo sapien
gcgcagctcggtttgcaggctcccg

SEQ ID NO: 3924343 - DNA, 25 bp, Homo sapien
tgttcttactgggggctcctgcgga

SEQ ID NO: 3924344 - DNA, 25 bp, Homo sapien
gctgttcttactgggggctcctgcg

SEQ ID NO: 3924345 - DNA, 25 bp, Homo sapien
ttcttactgggggctcctgcggatc

SEQ ID NO: 3924346 - DNA, 25 bp, Homo sapien
tgctgttcttactgggggctcctgc

SEQ ID NO: 3924347 - DNA, 25 bp, Homo sapien
taaggagccttttcaagccctccgc

SEQ ID NO: 3924348 - DNA, 25 bp, Homo sapien
tcttgtcccaaggtcgggcagagcc

SEQ ID NO: 3924349 - DNA, 25 bp, Homo sapien
cccgggacgccggttcatggctttg

SEQ ID NO: 3924350 - DNA, 25 bp, Homo sapien
gacagactttctacttaaccgcctc

SEQ ID NO: 3924351 - DNA, 25 bp, Homo sapien
ggctcctctccgcactttgtagctg

SEQ ID NO: 3924352 - DNA, 25 bp, Homo sapien
tctccgcactttgtagctgcgttgc

SEQ ID NO: 3924353 - DNA, 25 bp, Homo sapien
cactttgtagctgcgttgctccgct

SEQ ID NO: 3924354 - DNA, 25 bp, Homo sapien
ttgtagctgcgttgctccgctccat

SEQ ID NO: 3924355 - DNA, 25 bp, Homo sapien
tcctcctggttaccaggcaaaagga

SEQ ID NO: 3924356 - DNA, 25 bp, Homo sapien
cccagtctgtctcaagactcaggct

SEQ ID NO: 3924357 - DNA, 25 bp, Homo sapien
gactggagcttatgtaggttaaata

SEQ ID NO: 3924358 - DNA, 25 bp, Homo sapien
ggttaaataactcatcccaactcac

SEQ ID NO: 3924359 - DNA, 25 bp, Homo sapien
cacagctggctatagtaagggcaaa

SEQ ID NO: 3924360 - DNA, 25 bp, Homo sapien
ctctctgctgtaaggactggttcca

SEQ ID NO: 3924361 - DNA, 25 bp, Homo sapien
ggttagcacgtgcaagcaagcatcg

SEQ ID NO: 3924362 - DNA, 25 bp, Homo sapien
tcaccccggaaacctgcgaatatgt

SEQ ID NO: 3924363 - DNA, 25 bp, Homo sapien
cggctttgaatacggaagacggtca

SEQ ID NO: 3924364 - DNA, 25 bp, Homo sapien
tgctctactatgtggacacctttgt

SEQ ID NO: 3924365 - DNA, 25 bp, Homo sapien
ggctctgatccctgttgctcactgg

SEQ ID NO: 3924366 - DNA, 25 bp, Homo sapien
ggaagaccgcctgtggccatgagcc

SEQ ID NO: 3924367 - DNA, 25 bp, Homo sapien
cacagctgtggtctatggctccctg

SEQ ID NO: 3924368 - DNA, 25 bp, Homo sapien
tccctgtcgggttgcaggtcttcca

SEQ ID NO: 3924369 - DNA, 25 bp, Homo sapien
caaagttagatagcaccaggaatgt

SEQ ID NO: 3924370 - DNA, 25 bp, Homo sapien
ggaaaaaggcctgctctcgctcttg

SEQ ID NO: 3924371 - DNA, 25 bp, Homo sapien
tccacgggctccatcctgttgggtg

SEQ ID NO: 3924372 - DNA, 25 bp, Homo sapien
gcagcctcaggtgggttagttcatc

SEQ ID NO: 3924373 - DNA, 25 bp, Homo sapien
ccagtgcatcgctagtgtacaggaa

SEQ ID NO: 3924374 - DNA, 25 bp, Homo sapien
tgtacaggaatgcagtcggctgtga

SEQ ID NO: 3924375 - DNA, 25 bp, Homo sapien
cagaggaatatcatctgatgggcct

SEQ ID NO: 3924376 - DNA, 25 bp, Homo sapien
ggcgtcccctcaacatggctagagt

SEQ ID NO: 3924377 - DNA, 25 bp, Homo sapien
tctgggtccagtgacggaaggtggc

SEQ ID NO: 3924378 - DNA, 25 bp, Homo sapien
ggcaactggcgtcccctcaacatgg

SEQ ID NO: 3924379 - DNA, 25 bp, Homo sapien
cggaaggtggcaactggcgtcccct

SEQ ID NO: 3924380 - DNA, 25 bp, Homo sapien
ggaaagctgactgtaagtcccacct

SEQ ID NO: 3924381 - DNA, 25 bp, Homo sapien
ctgtgcttgaagtggcatgcctcct

SEQ ID NO: 3924382 - DNA, 25 bp, Homo sapien
cacttttaatactgcaactgctccc

SEQ ID NO: 3924383 - DNA, 25 bp, Homo sapien
cccttttgcccagtcagggaaagct

SEQ ID NO: 3924384 - DNA, 25 bp, Homo sapien
tagttcatcgtcctttctgggccca

SEQ ID NO: 3924385 - DNA, 25 bp, Homo sapien
taaccaagcaggtccaaggtcaaga

SEQ ID NO: 3924386 - DNA, 25 bp, Homo sapien
gaatggcacaagatcagcccagagg

SEQ ID NO: 3924387 - DNA, 25 bp, Homo sapien
gaaaatctaaccagcaaccagcctg

SEQ ID NO: 3924388 - DNA, 25 bp, Homo sapien
tctgtggatggatcgggcaccgtct

SEQ ID NO: 3924389 - DNA, 25 bp, Homo sapien
ttctgtggatggatcgggcaccgtc

SEQ ID NO: 3924390 - DNA, 25 bp, Homo sapien
acagtctctcctgaggtgcagatat

SEQ ID NO: 3924391 - DNA, 25 bp, Homo sapien
ccaatccacgtggaatacagtctct

SEQ ID NO: 3924392 - DNA, 25 bp, Homo sapien
tccacgtggaatacagtctctcctg

SEQ ID NO: 3924393 - DNA, 25 bp, Homo sapien
acgtggaatacagtctctcctgagg

SEQ ID NO: 3924394 - DNA, 25 bp, Homo sapien
cagggtcagtgtacaggctgggaac

SEQ ID NO: 3924395 - DNA, 25 bp, Homo sapien
ctcagggtcagtgtacaggctggga

SEQ ID NO: 3924396 - DNA, 25 bp, Homo sapien
tcagggtcagtgtacaggctgggaa

SEQ ID NO: 3924397 - DNA, 25 bp, Homo sapien
tacgccaggtggcactctgtccatg

SEQ ID NO: 3924398 - DNA, 25 bp, Homo sapien
gcttgaagagcttgggcaaagctag

SEQ ID NO: 3924399 - DNA, 25 bp, Homo sapien
caaagctagagggaagctacgccag

SEQ ID NO: 3924400 - DNA, 25 bp, Homo sapien
gcttgtagagccatggctgcttgaa

SEQ ID NO: 3924401 - DNA, 25 bp, Homo sapien
acatcttttggagctagtttcttca

SEQ ID NO: 3924402 - DNA, 25 bp, Homo sapien
tcactcaggagcctgtcaccaaaac

SEQ ID NO: 3924403 - DNA, 25 bp, Homo sapien
acttcactcaggagcctgtcaccaa

SEQ ID NO: 3924404 - DNA, 25 bp, Homo sapien
ggagctagtttcttcacttcactca

SEQ ID NO: 3924405 - DNA, 25 bp, Homo sapien
aagcgtgcgccgcaggtccatgtct

SEQ ID NO: 3924406 - DNA, 25 bp, Homo sapien
ttagagaaaagcgtgcgccgcaggt

SEQ ID NO: 3924407 - DNA, 25 bp, Homo sapien
aggacaatgttagagaaaagcgtgc

SEQ ID NO: 3924408 - DNA, 25 bp, Homo sapien
gcctcctgagaggacaatgttagag

SEQ ID NO: 3924409 - DNA, 25 bp, Homo sapien
agtgggaatggaagacgcccctctg

SEQ ID NO: 3924410 - DNA, 25 bp, Homo sapien
ggaacaaagataggcctcctggaaa

SEQ ID NO: 3924411 - DNA, 25 bp, Homo sapien
tacgactttgtgttgggccttactg

SEQ ID NO: 3924412 - DNA, 25 bp, Homo sapien
caagcttggtgtaaagggactggcc

SEQ ID NO: 3924413 - DNA, 25 bp, Homo sapien
gtctctagcgtctcatccttttggg

SEQ ID NO: 3924414 - DNA, 25 bp, Homo sapien
ctgtctctagcgtctcatccttttg

SEQ ID NO: 3924415 - DNA, 25 bp, Homo sapien
tctctagcgtctcatccttttgggg

SEQ ID NO: 3924416 - DNA, 25 bp, Homo sapien
ctctgtctctagcgtctcatccttt

SEQ ID NO: 3924417 - DNA, 25 bp, Homo sapien
gcagatccaagcaagacagtcaggc

SEQ ID NO: 3924418 - DNA, 25 bp, Homo sapien
gagttttccctatagccacaggtgg

SEQ ID NO: 3924419 - DNA, 25 bp, Homo sapien
gccccaatggtcactatagctgctg

SEQ ID NO: 3924420 - DNA, 25 bp, Homo sapien
tctaaacgttgtgatggccccaatg

SEQ ID NO: 3924421 - DNA, 25 bp, Homo sapien
ggtcctgggtgctatgctcccaacc

SEQ ID NO: 3924422 - DNA, 25 bp, Homo sapien
aaggtcctgggtgctatgctcccaa

SEQ ID NO: 3924423 - DNA, 25 bp, Homo sapien
accaaggtcctgggtgctatgctcc

SEQ ID NO: 3924424 - DNA, 25 bp, Homo sapien
caaggtcctgggtgctatgctccca

SEQ ID NO: 3924425 - DNA, 25 bp, Homo sapien
aggatgagtggaagtcgtagccctc

SEQ ID NO: 3924426 - DNA, 25 bp, Homo sapien
caggaagcgagagacgtcccggccc

SEQ ID NO: 3924427 - DNA, 25 bp, Homo sapien
ccgcgatgtcgatgcgcatgatgga

SEQ ID NO: 3924428 - DNA, 25 bp, Homo sapien
agtcgtagccctccttacgcaggta

SEQ ID NO: 3924429 - DNA, 25 bp, Homo sapien
gaagaaaacttcggcagctcgttcc

SEQ ID NO: 3924430 - DNA, 25 bp, Homo sapien
atgaaaagagcgggcacattgaagg

SEQ ID NO: 3924431 - DNA, 25 bp, Homo sapien
aaaagagcgggcacattgaaggtct

SEQ ID NO: 3924432 - DNA, 25 bp, Homo sapien
cgaagaaaacttcggcagctcgttc

SEQ ID NO: 3924433 - DNA, 25 bp, Homo sapien
ctccatgggatagcggattgaaagc

SEQ ID NO: 3924434 - DNA, 25 bp, Homo sapien
tgctccatgggatagcggattgaaa

SEQ ID NO: 3924435 - DNA, 25 bp, Homo sapien
atgctccatgggatagcggattgaa

SEQ ID NO: 3924436 - DNA, 25 bp, Homo sapien
ccatgggatagcggattgaaagcag

SEQ ID NO: 3924437 - DNA, 25 bp, Homo sapien
ccatgacacgaacgtgcttgggtcg

SEQ ID NO: 3924438 - DNA, 25 bp, Homo sapien
acacgaacgtgcttgggtcggccca

SEQ ID NO: 3924439 - DNA, 25 bp, Homo sapien
gctcctgccatgacacgaacgtgct

SEQ ID NO: 3924440 - DNA, 25 bp, Homo sapien
gggccaatgaagatgtcgccttcaa

SEQ ID NO: 3924441 - DNA, 25 bp, Homo sapien
gggatctgatcaccagcaaaaccag

SEQ ID NO: 3924442 - DNA, 25 bp, Homo sapien
aaccagctttaatcacaccggatcc

SEQ ID NO: 3924443 - DNA, 25 bp, Homo sapien
tttggaaagcagtatttggggatct

SEQ ID NO: 3924444 - DNA, 25 bp, Homo sapien
agcaaaaccagctttaatcacaccg

SEQ ID NO: 3924445 - DNA, 25 bp, Homo sapien
tatgatgatggttgttttgcggatt

SEQ ID NO: 3924446 - DNA, 25 bp, Homo sapien
tcttccagagtataaaaggaggaca

SEQ ID NO: 3924447 - DNA, 25 bp, Homo sapien
ggctggccttgaacaacacaattct

SEQ ID NO: 3924448 - DNA, 25 bp, Homo sapien
acagagagaaaggatagggttgcca

SEQ ID NO: 3924449 - DNA, 25 bp, Homo sapien
ggctgaagcagcacaacatccaaag

SEQ ID NO: 3924450 - DNA, 25 bp, Homo sapien
taagtttgacaggaatgttgatcca

SEQ ID NO: 3924451 - DNA, 25 bp, Homo sapien
gcatttaggtccatatagtcacaaa

SEQ ID NO: 3924452 - DNA, 25 bp, Homo sapien
tagacacatgctacctgggtgcttg

SEQ ID NO: 3924453 - DNA, 25 bp, Homo sapien
ggttggcgatcacatcgtaggactc

SEQ ID NO: 3924454 - DNA, 25 bp, Homo sapien
tggcgatcacatcgtaggactccat

SEQ ID NO: 3924455 - DNA, 25 bp, Homo sapien
ggaactgcccagccgggtccgccgc

SEQ ID NO: 3924456 - DNA, 25 bp, Homo sapien
ctggggaaggaactgcccagccggg

SEQ ID NO: 3924457 - DNA, 25 bp, Homo sapien
gccgggtccgccgctagcgccactg

SEQ ID NO: 3924458 - DNA, 25 bp, Homo sapien
ccgggtccgccgctagcgccactga

SEQ ID NO: 3924459 - DNA, 25 bp, Homo sapien
acgcatgcgcagtctagccgccggt

SEQ ID NO: 3924460 - DNA, 25 bp, Homo sapien
agggagcggcccgacctcgcctctg

SEQ ID NO: 3924461 - DNA, 25 bp, Homo sapien
gccgccggttcagggcggcgaggga

SEQ ID NO: 3924462 - DNA, 25 bp, Homo sapien
gcggcccgacctcgcctctgaagaa

SEQ ID NO: 3924463 - DNA, 25 bp, Homo sapien
tgggcggacagtgcgccgtgcgcag

SEQ ID NO: 3924464 - DNA, 25 bp, Homo sapien
gcgcggagctagacctcgctgcagc

SEQ ID NO: 3924465 - DNA, 25 bp, Homo sapien
cgcaggcgcggagctagacctcgct

SEQ ID NO: 3924466 - DNA, 25 bp, Homo sapien
ctctggcagactcggcggcggcgac

SEQ ID NO: 3924467 - DNA, 25 bp, Homo sapien
gtactggtatgctctgggccgcggg

SEQ ID NO: 3924468 - DNA, 25 bp, Homo sapien
tgaccagccgaacccgctccaggtt

SEQ ID NO: 3924469 - DNA, 25 bp, Homo sapien
cgctccaggttaccgctatcgtcaa

SEQ ID NO: 3924470 - DNA, 25 bp, Homo sapien
cgctatcgtcaagtactggtatgct

SEQ ID NO: 3924471 - DNA, 25 bp, Homo sapien
caggcattgtgtaagatgatcttca

SEQ ID NO: 3924472 - DNA, 25 bp, Homo sapien
tgtgtaagatgatcttcaatgagtc

SEQ ID NO: 3924473 - DNA, 25 bp, Homo sapien
tgtaagatgatcttcaatgagtctt

SEQ ID NO: 3924474 - DNA, 25 bp, Homo sapien
taagatgatcttcaatgagtcttga

SEQ ID NO: 3924475 - DNA, 25 bp, Homo sapien
acaccttgtgggagacttggtgaga

SEQ ID NO: 3924476 - DNA, 25 bp, Homo sapien
ctggcctctgagtagtaagtaaaca

SEQ ID NO: 3924477 - DNA, 25 bp, Homo sapien
cagttggagtttgaaggttaagctt

SEQ ID NO: 3924478 - DNA, 25 bp, Homo sapien
tctctccttgatgtgacaccttgtg

SEQ ID NO: 3924479 - DNA, 25 bp, Homo sapien
ggtacttctccgtggaacctctgca

SEQ ID NO: 3924480 - DNA, 25 bp, Homo sapien
gtgacaatgtcatagtgctgtgagc

SEQ ID NO: 3924481 - DNA, 25 bp, Homo sapien
agtgctgtgagcatggtacttctcc

SEQ ID NO: 3924482 - DNA, 25 bp, Homo sapien
tttatccagagccttattcctgagg

SEQ ID NO: 3924483 - DNA, 25 bp, Homo sapien
ctgccaagtgctgtcggagcttgca

SEQ ID NO: 3924484 - DNA, 25 bp, Homo sapien
tgccaagtgctgtcggagcttgcag

SEQ ID NO: 3924485 - DNA, 25 bp, Homo sapien
gctgccaagtgctgtcggagcttgc

SEQ ID NO: 3924486 - DNA, 25 bp, Homo sapien
taggcattactctacccctgtgtgg

SEQ ID NO: 3924487 - DNA, 25 bp, Homo sapien
taagtccggtagagcctatgcagtt

SEQ ID NO: 3924488 - DNA, 25 bp, Homo sapien
ggaggcattatcttactcacacgga

SEQ ID NO: 3924489 - DNA, 25 bp, Homo sapien
tgaatcagatatgcagcctcagctg

SEQ ID NO: 3924490 - DNA, 25 bp, Homo sapien
gaagtatttgagactctagctgcat

SEQ ID NO: 3924491 - DNA, 25 bp, Homo sapien
atttgaagtatttgagactctagct

SEQ ID NO: 3924492 - DNA, 25 bp, Homo sapien
tgaagtatttgagactctagctgca

SEQ ID NO: 3924493 - DNA, 25 bp, Homo sapien
ttgaagtatttgagactctagctgc

SEQ ID NO: 3924494 - DNA, 25 bp, Homo sapien
tgcagcagttggagcgcagccctca

SEQ ID NO: 3924495 - DNA, 25 bp, Homo sapien
agcagttggagcgcagccctcaggg

SEQ ID NO: 3924496 - DNA, 25 bp, Homo sapien
gcagcagttggagcgcagccctcag

SEQ ID NO: 3924497 - DNA, 25 bp, Homo sapien
ctgcagcagttggagcgcagccctc

SEQ ID NO: 3924498 - DNA, 25 bp, Homo sapien
gtcttgaactcagcagaatcctgtc

SEQ ID NO: 3924499 - DNA, 25 bp, Homo sapien
gtccctggggtcttgaactcagcag

SEQ ID NO: 3924500 - DNA, 25 bp, Homo sapien
tgtctcaagcctgctctatcctgag

SEQ ID NO: 3924501 - DNA, 25 bp, Homo sapien
ctcagctctgccattccagtccctg

SEQ ID NO: 3924502 - DNA, 25 bp, Homo sapien
ggagatcaggctttgcctcctcttc

SEQ ID NO: 3924503 - DNA, 25 bp, Homo sapien
tcttgggggtgttagcagcctcagc

SEQ ID NO: 3924504 - DNA, 25 bp, Homo sapien
agggagatcaggctttgcctcctct

SEQ ID NO: 3924505 - DNA, 25 bp, Homo sapien
ctaagaaggggaccctcttatcttg

SEQ ID NO: 3924506 - DNA, 25 bp, Homo sapien
ggagttcagagtacgtccccaggta

SEQ ID NO: 3924507 - DNA, 25 bp, Homo sapien
aagatgttactaggctgcaggcagc

SEQ ID NO: 3924508 - DNA, 25 bp, Homo sapien
gtgaggagttcagagtacgtcccca

SEQ ID NO: 3924509 - DNA, 25 bp, Homo sapien
ccaggtaagatgttactaggctgca

SEQ ID NO: 3924510 - DNA, 25 bp, Homo sapien
cccaaatgtatgtggtcttaatatc

SEQ ID NO: 3924511 - DNA, 25 bp, Homo sapien
acctcctaggttcatactgttctca

SEQ ID NO: 3924512 - DNA, 25 bp, Homo sapien
ttaccaatgagagctgtcaagctgt

SEQ ID NO: 3924513 - DNA, 25 bp, Homo sapien
catcattaccaatgagagctgtcaa

SEQ ID NO: 3924514 - DNA, 25 bp, Homo sapien
ctctccatcacgctgaatcagggtg

SEQ ID NO: 3924515 - DNA, 25 bp, Homo sapien
tcttctctccatcacgctgaatcag

SEQ ID NO: 3924516 - DNA, 25 bp, Homo sapien
ccatcacgctgaatcagggtgttga

SEQ ID NO: 3924517 - DNA, 25 bp, Homo sapien
ttgaccttggtcacatcagtgtcat

SEQ ID NO: 3924518 - DNA, 25 bp, Homo sapien
tcaagcttgttctccggggttggtc

SEQ ID NO: 3924519 - DNA, 25 bp, Homo sapien
caagcttgttctccggggttggtct

SEQ ID NO: 3924520 - DNA, 25 bp, Homo sapien
tccagaatcgcagtgtcttgggccg

SEQ ID NO: 3924521 - DNA, 25 bp, Homo sapien
tgcctccagaatcgcagtgtcttgg

SEQ ID NO: 3924522 - DNA, 25 bp, Homo sapien
ctgcctccagaatcgcagtgtcttg

SEQ ID NO: 3924523 - DNA, 25 bp, Homo sapien
cctccagaatcgcagtgtcttgggc

SEQ ID NO: 3924524 - DNA, 25 bp, Homo sapien
cttcaaagcctttgctttggcttcg

SEQ ID NO: 3924525 - DNA, 25 bp, Homo sapien
gcttcggctttaggaggagcaggag

SEQ ID NO: 3924526 - DNA, 25 bp, Homo sapien
caaagcctttgctttggcttcggct

SEQ ID NO: 3924527 - DNA, 25 bp, Homo sapien
ggcttcggctttaggaggagcagga

SEQ ID NO: 3924528 - DNA, 25 bp, Homo sapien
acttgtattccagtttactgagcat

SEQ ID NO: 3924529 - DNA, 25 bp, Homo sapien
gacttgtattccagtttactgagca

SEQ ID NO: 3924530 - DNA, 25 bp, Homo sapien
tgacttgtattccagtttactgagc

SEQ ID NO: 3924531 - DNA, 25 bp, Homo sapien
cctcctctcactggggagtcatgaa

SEQ ID NO: 3924532 - DNA, 25 bp, Homo sapien
gaagccaacaggactaactttgaac

SEQ ID NO: 3924533 - DNA, 25 bp, Homo sapien
ggcagtaggcagactgagtggcccc

SEQ ID NO: 3924534 - DNA, 25 bp, Homo sapien
tggggagtcatgaagctcccaggcc

SEQ ID NO: 3924535 - DNA, 25 bp, Homo sapien
tcgtgggccttctgttgacttgaga

SEQ ID NO: 3924536 - DNA, 25 bp, Homo sapien
ttctgcccccgtaaatatatttctg

SEQ ID NO: 3924537 - DNA, 25 bp, Homo sapien
aatatatttctgctcgtgggccttc

SEQ ID NO: 3924538 - DNA, 25 bp, Homo sapien
ctgtagttctgcccccgtaaatata

SEQ ID NO: 3924539 - DNA, 25 bp, Homo sapien
gtgttactggggacatgtctggcac

SEQ ID NO: 3924540 - DNA, 25 bp, Homo sapien
tttcctcctcagcagtctgtgttac

SEQ ID NO: 3924541 - DNA, 25 bp, Homo sapien
ctggggacatgtctggcacatctga

SEQ ID NO: 3924542 - DNA, 25 bp, Homo sapien
ctcctcagcagtctgtgttactggg

SEQ ID NO: 3924543 - DNA, 25 bp, Homo sapien
agaacagcaccttgactccgtctgc

SEQ ID NO: 3924544 - DNA, 25 bp, Homo sapien
agcaccttgactccgtctgccctgc

SEQ ID NO: 3924545 - DNA, 25 bp, Homo sapien
ttgactccgtctgccctgccatttg

SEQ ID NO: 3924546 - DNA, 25 bp, Homo sapien
tttctggagaacagcaccttgactc

SEQ ID NO: 3924547 - DNA, 25 bp, Homo sapien
tggagacctttgcttggactgcccc

SEQ ID NO: 3924548 - DNA, 25 bp, Homo sapien
gagaatattgttttaggccccgcaa

SEQ ID NO: 3924549 - DNA, 25 bp, Homo sapien
ctgttagtcttctgagcgggagccc

SEQ ID NO: 3924550 - DNA, 25 bp, Homo sapien
tgtctgacagctcacccaggttgcg

SEQ ID NO: 3924551 - DNA, 25 bp, Homo sapien
agcaggagtctgagcccgcttctgg

SEQ ID NO: 3924552 - DNA, 25 bp, Homo sapien
ccgcccactaagaacaggaaatgag

SEQ ID NO: 3924553 - DNA, 25 bp, Homo sapien
agagccaacttttcaccgcccacta

SEQ ID NO: 3924554 - DNA, 25 bp, Homo sapien
agcgagacctgtgccccaactgcag

SEQ ID NO: 3924555 - DNA, 25 bp, Homo sapien
tgggaagcaagtacaacgtgtcaac

SEQ ID NO: 3924556 - DNA, 25 bp, Homo sapien
tccactgccatcgtgggtgccagag

SEQ ID NO: 3924557 - DNA, 25 bp, Homo sapien
gggcaggcactgacacaagatcact

SEQ ID NO: 3924558 - DNA, 25 bp, Homo sapien
tctgaatcggcgtcagatctgcagc

SEQ ID NO: 3924559 - DNA, 25 bp, Homo sapien
cagccagcctgggacttttgtaaga

SEQ ID NO: 3924560 - DNA, 25 bp, Homo sapien
ggtgactcacttagatgtcgtttcc

SEQ ID NO: 3924561 - DNA, 25 bp, Homo sapien
agtgcattaaacatctttgcagaag

SEQ ID NO: 3924562 - DNA, 25 bp, Homo sapien
tcctctctgtaatctaagtgcatta

SEQ ID NO: 3924563 - DNA, 25 bp, Homo sapien
gcccgccgatcgtttttattatcga

SEQ ID NO: 3924564 - DNA, 25 bp, Homo sapien
ataaagctctgaggcgacagcggct

SEQ ID NO: 3924565 - DNA, 25 bp, Homo sapien
tcctaatttgttggaggccgccagc

SEQ ID NO: 3924566 - DNA, 25 bp, Homo sapien
tgaaataataatacgcgcaagatgg

SEQ ID NO: 3924567 - DNA, 25 bp, Homo sapien
cacgttttcgtggagccagtgcagc

SEQ ID NO: 3924568 - DNA, 25 bp, Homo sapien
tcaatgccctgcacgtggagaagcc

SEQ ID NO: 3924569 - DNA, 25 bp, Homo sapien
tgcttcgaggaggagctcatctgcc

SEQ ID NO: 3924570 - DNA, 25 bp, Homo sapien
tatatggaatttggaccccggcgct

SEQ ID NO: 3924571 - DNA, 25 bp, Homo sapien
caatacttccgtccccttcagtgga

SEQ ID NO: 3924572 - DNA, 25 bp, Homo sapien
cagtcagaatgagtcactgtttagc

SEQ ID NO: 3924573 - DNA, 25 bp, Homo sapien
gcctgacaccgaggagtcctctctg

SEQ ID NO: 3924574 - DNA, 25 bp, Homo sapien
gctggctatgaggaagctctgttca

SEQ ID NO: 3924575 - DNA, 25 bp, Homo sapien
gaagttgagtgtgccttcctgacag

SEQ ID NO: 3924576 - DNA, 25 bp, Homo sapien
gtgagtgcccgctcaggtgatcctt

SEQ ID NO: 3924577 - DNA, 25 bp, Homo sapien
tgtgctgctgtgtgagtgcccgctc

SEQ ID NO: 3924578 - DNA, 25 bp, Homo sapien
tgcctgccgggcttgctgagcgcct

SEQ ID NO: 3924579 - DNA, 25 bp, Homo sapien
ctgatttgctcattcggtgaactgg

SEQ ID NO: 3924580 - DNA, 25 bp, Homo sapien
atttgctcattcggtgaactggggt

SEQ ID NO: 3924581 - DNA, 25 bp, Homo sapien
tgatttgctcattcggtgaactggg

SEQ ID NO: 3924582 - DNA, 25 bp, Homo sapien
gatttgctcattcggtgaactgggg

SEQ ID NO: 3924583 - DNA, 25 bp, Homo sapien
cctggtgggtttggtcgtggagaag

SEQ ID NO: 3924584 - DNA, 25 bp, Homo sapien
cagctcctggtgggtttggtcgtgg

SEQ ID NO: 3924585 - DNA, 25 bp, Homo sapien
ctcctggtgggtttggtcgtggaga

SEQ ID NO: 3924586 - DNA, 25 bp, Homo sapien
agctcctggtgggtttggtcgtgga

SEQ ID NO: 3924587 - DNA, 25 bp, Homo sapien
ggctcaggtggcaaggtattcccat

SEQ ID NO: 3924588 - DNA, 25 bp, Homo sapien
cggggctcaggtggcaaggtattcc

SEQ ID NO: 3924589 - DNA, 25 bp, Homo sapien
ctcggggctcaggtggcaaggtatt

SEQ ID NO: 3924590 - DNA, 25 bp, Homo sapien
gggctcaggtggcaaggtattccca

SEQ ID NO: 3924591 - DNA, 25 bp, Homo sapien
acagccccaccccgtagccaggaca

SEQ ID NO: 3924592 - DNA, 25 bp, Homo sapien
cagccccaccccgtagccaggacag

SEQ ID NO: 3924593 - DNA, 25 bp, Homo sapien
gacagccccaccccgtagccaggac

SEQ ID NO: 3924594 - DNA, 25 bp, Homo sapien
gacaggacccctatgtccaggaaag

SEQ ID NO: 3924595 - DNA, 25 bp, Homo sapien
tcttcccagacggagttcaaaggcc

SEQ ID NO: 3924596 - DNA, 25 bp, Homo sapien
cccgggctcgggagttatgcatcca

SEQ ID NO: 3924597 - DNA, 25 bp, Homo sapien
tctacagggtgtatgggcagccgtc

SEQ ID NO: 3924598 - DNA, 25 bp, Homo sapien
actgggtgtaaaggtggtatgaact

SEQ ID NO: 3924599 - DNA, 25 bp, Homo sapien
gaactgggtgtaaaggtggtatgaa

SEQ ID NO: 3924600 - DNA, 25 bp, Homo sapien
caagaactgggtgtaaaggtggtat

SEQ ID NO: 3924601 - DNA, 25 bp, Homo sapien
ctgggtgtaaaggtggtatgaactt

SEQ ID NO: 3924602 - DNA, 25 bp, Homo sapien
ctctgtgcagccctcgtggcccccg

SEQ ID NO: 3924603 - DNA, 25 bp, Homo sapien
tctgtgcagccctcgtggcccccgc

SEQ ID NO: 3924604 - DNA, 25 bp, Homo sapien
tgtgcagccctcgtggcccccgccc

SEQ ID NO: 3924605 - DNA, 25 bp, Homo sapien
tgcagccctcgtggcccccgccccc

SEQ ID NO: 3924606 - DNA, 25 bp, Homo sapien
tcacagggagagggttagagggtac

SEQ ID NO: 3924607 - DNA, 25 bp, Homo sapien
cctcttagggaggtaggacttgaag

SEQ ID NO: 3924608 - DNA, 25 bp, Homo sapien
gctgtcctcttagggaggtaggact

SEQ ID NO: 3924609 - DNA, 25 bp, Homo sapien
cccggctgtcctcttagggaggtag

SEQ ID NO: 3924610 - DNA, 25 bp, Homo sapien
ctcctggcataggggatggcagcag

SEQ ID NO: 3924611 - DNA, 25 bp, Homo sapien
cctcctggcataggggatggcagca

SEQ ID NO: 3924612 - DNA, 25 bp, Homo sapien
accccagggcagggtcttctggatc

SEQ ID NO: 3924613 - DNA, 25 bp, Homo sapien
tctactggtggcatccagagcagca

SEQ ID NO: 3924614 - DNA, 25 bp, Homo sapien
tgccccctctactggtggcatccag

SEQ ID NO: 3924615 - DNA, 25 bp, Homo sapien
agctgactctgggaccccagggcag

SEQ ID NO: 3924616 - DNA, 25 bp, Homo sapien
cagatgcaattgtgcgcagggcaaa

SEQ ID NO: 3924617 - DNA, 25 bp, Homo sapien
gaaagcctgtttacgctagcctgag

SEQ ID NO: 3924618 - DNA, 25 bp, Homo sapien
gagtttaattcaggagccgggcaat

SEQ ID NO: 3924619 - DNA, 25 bp, Homo sapien
tacagaggccgttatcagaggagtg

SEQ ID NO: 3924620 - DNA, 25 bp, Homo sapien
cattacagtcaaaagtcataagaat

SEQ ID NO: 3924621 - DNA, 25 bp, Homo sapien
tgtcattacagtcaaaagtcataag

SEQ ID NO: 3924622 - DNA, 25 bp, Homo sapien
gtcattacagtcaaaagtcataaga

SEQ ID NO: 3924623 - DNA, 25 bp, Homo sapien
agtcataagaatttgcttctctgtg

SEQ ID NO: 3924624 - DNA, 25 bp, Homo sapien
gattacatacgtagtctccgacctg

SEQ ID NO: 3924625 - DNA, 25 bp, Homo sapien
tccgacctgcaagacgatgagatgg

SEQ ID NO: 3924626 - DNA, 25 bp, Homo sapien
gctgggctagtgacggtaaaaatca

SEQ ID NO: 3924627 - DNA, 25 bp, Homo sapien
ttctgtccaaagagtgaggattaca

SEQ ID NO: 3924628 - DNA, 25 bp, Homo sapien
aatgatactgaacctcagagatcag

SEQ ID NO: 3924629 - DNA, 25 bp, Homo sapien
acagctggagctgtacacagatgga

SEQ ID NO: 3924630 - DNA, 25 bp, Homo sapien
gagatcagttaaatctactgctgga

SEQ ID NO: 3924631 - DNA, 25 bp, Homo sapien
tttcaggaccgaattcggctcccgc

SEQ ID NO: 3924632 - DNA, 25 bp, Homo sapien
ttcttctttgcattgacatttttgc

SEQ ID NO: 3924633 - DNA, 25 bp, Homo sapien
ttgacatttttgcagacccagttca

SEQ ID NO: 3924634 - DNA, 25 bp, Homo sapien
tttttgcagacccagttcatgccat

SEQ ID NO: 3924635 - DNA, 25 bp, Homo sapien
gacatttttgcagacccagttcatg

SEQ ID NO: 3924636 - DNA, 25 bp, Homo sapien
cagcgcctgaacttgagatgggtcc

SEQ ID NO: 3924637 - DNA, 25 bp, Homo sapien
gccccatgtgtttacagtgtgacag

SEQ ID NO: 3924638 - DNA, 25 bp, Homo sapien
gcctgcatccaaagcctgactgaag

SEQ ID NO: 3924639 - DNA, 25 bp, Homo sapien
gcagtgagtgttgcgaggcacacac

SEQ ID NO: 3924640 - DNA, 25 bp, Homo sapien
gaaggttcccttaaaggcacaatga

SEQ ID NO: 3924641 - DNA, 25 bp, Homo sapien
tatagctttaagcaccagcatccag

SEQ ID NO: 3924642 - DNA, 25 bp, Homo sapien
ccttaaaggcacaatgaccttgaaa

SEQ ID NO: 3924643 - DNA, 25 bp, Homo sapien
gggtctggcccgcttcttatagctt

SEQ ID NO: 3924644 - DNA, 25 bp, Homo sapien
ccttcaagagtgtgtggagttccct

SEQ ID NO: 3924645 - DNA, 25 bp, Homo sapien
taattcctacggatgccaggcctgt

SEQ ID NO: 3924646 - DNA, 25 bp, Homo sapien
catggatctagctgccgaacctgaa

SEQ ID NO: 3924647 - DNA, 25 bp, Homo sapien
tcacacaatgcctacagctacctgg

SEQ ID NO: 3924648 - DNA, 25 bp, Homo sapien
tagataatctgacggctgtcccaga

SEQ ID NO: 3924649 - DNA, 25 bp, Homo sapien
gagccgacatctgacctttgccaag

SEQ ID NO: 3924650 - DNA, 25 bp, Homo sapien
gccgaaagcccgaaggtggacagca

SEQ ID NO: 3924651 - DNA, 25 bp, Homo sapien
aactctgccagttgctgtcagtgca

SEQ ID NO: 3924652 - DNA, 25 bp, Homo sapien
cagagaaatcaaggacagtgtgccc

SEQ ID NO: 3924653 - DNA, 25 bp, Homo sapien
tgtgcccacactatgtgaatagcgc

SEQ ID NO: 3924654 - DNA, 25 bp, Homo sapien
gaaatgaggactccaaacgcatctc

SEQ ID NO: 3924655 - DNA, 25 bp, Homo sapien
tcttctctcgcctgggaagctgaat

SEQ ID NO: 3924656 - DNA, 25 bp, Homo sapien
ctgccgggtgaagggttctgcccca

SEQ ID NO: 3924657 - DNA, 25 bp, Homo sapien
ccccaagcttaaagaggagctggga

SEQ ID NO: 3924658 - DNA, 25 bp, Homo sapien
cagttctccacggatgtgggtacct

SEQ ID NO: 3924659 - DNA, 25 bp, Homo sapien
tctccacggatgtgggtacctgccg

SEQ ID NO: 3924660 - DNA, 25 bp, Homo sapien
acatgcacactcagagtattttaga

SEQ ID NO: 3924661 - DNA, 25 bp, Homo sapien
gatttctcgatacctttctctggct

SEQ ID NO: 3924662 - DNA, 25 bp, Homo sapien
tgcacactcagagtattttagagag

SEQ ID NO: 3924663 - DNA, 25 bp, Homo sapien
gaggagggatggatttctcgatacc

SEQ ID NO: 3924664 - DNA, 25 bp, Homo sapien
agaggggcgtggcttgccatctagc

SEQ ID NO: 3924665 - DNA, 25 bp, Homo sapien
gcgtggcttgccatctagcagctcc

SEQ ID NO: 3924666 - DNA, 25 bp, Homo sapien
gggcgtggcttgccatctagcagct

SEQ ID NO: 3924667 - DNA, 25 bp, Homo sapien
gtggcttgccatctagcagctccat

SEQ ID NO: 3924668 - DNA, 25 bp, Homo sapien
tccttaactcgcccccgtgaggcta

SEQ ID NO: 3924669 - DNA, 25 bp, Homo sapien
gagcactggcacacaacttagtttt

SEQ ID NO: 3924670 - DNA, 25 bp, Homo sapien
ctgaacgccctctcctgtgagagct

SEQ ID NO: 3924671 - DNA, 25 bp, Homo sapien
tcgcggatggtatgcaggttcagtc

SEQ ID NO: 3924672 - DNA, 25 bp, Homo sapien
gcaagactggatctgccagactcgg

SEQ ID NO: 3924673 - DNA, 25 bp, Homo sapien
tgtctgcactgtcgattacatatat

SEQ ID NO: 3924674 - DNA, 25 bp, Homo sapien
tttctgtctgcactgtcgattacat

SEQ ID NO: 3924675 - DNA, 25 bp, Homo sapien
ttttctgtctgcactgtcgattaca

SEQ ID NO: 3924676 - DNA, 25 bp, Homo sapien
tcctctgtccaccaatgtcccatac

SEQ ID NO: 3924677 - DNA, 25 bp, Homo sapien
ttcctctgtccaccaatgtcccata

SEQ ID NO: 3924678 - DNA, 25 bp, Homo sapien
acttgcgcaaaattgagagcaagcc

SEQ ID NO: 3924679 - DNA, 25 bp, Homo sapien
tcctggtctggtgcacttttcaact

SEQ ID NO: 3924680 - DNA, 25 bp, Homo sapien
caggagaagtattctcacctcctgg

SEQ ID NO: 3924681 - DNA, 25 bp, Homo sapien
agaagtattctcacctcctggtctg

SEQ ID NO: 3924682 - DNA, 25 bp, Homo sapien
cgtggtaagggctatacttgtccca

SEQ ID NO: 3924683 - DNA, 25 bp, Homo sapien
tctcctgggagtgtgaactctaccc

SEQ ID NO: 3924684 - DNA, 25 bp, Homo sapien
gccctttacatacacttagagcaga

SEQ ID NO: 3924685 - DNA, 25 bp, Homo sapien
taggatgacacacccaagttaacac

SEQ ID NO: 3924686 - DNA, 25 bp, Homo sapien
agtttgttcactaagatcaaaggat

SEQ ID NO: 3924687 - DNA, 25 bp, Homo sapien
aaataattcgggactgaggaagcgc

SEQ ID NO: 3924688 - DNA, 25 bp, Homo sapien
gaaattctagagacggagcagctaa

SEQ ID NO: 3924689 - DNA, 25 bp, Homo sapien
tggtcctggtatggtcacacgcaag

SEQ ID NO: 3924690 - DNA, 25 bp, Homo sapien
gagaaaagccttgccccggattgaa

SEQ ID NO: 3924691 - DNA, 25 bp, Homo sapien
cgcagacaccaagacggcgtaaaat

SEQ ID NO: 3924692 - DNA, 25 bp, Homo sapien
agacggcgtaaaatccaccaggcat

SEQ ID NO: 3924693 - DNA, 25 bp, Homo sapien
caccaagacggcgtaaaatccacca

SEQ ID NO: 3924694 - DNA, 25 bp, Homo sapien
cagacaccaagacggcgtaaaatcc

SEQ ID NO: 3924695 - DNA, 25 bp, Homo sapien
tgtgtcgtgggacttacttccctac

SEQ ID NO: 3924696 - DNA, 25 bp, Homo sapien
agcggcacccctttgtgtcgtggga

SEQ ID NO: 3924697 - DNA, 25 bp, Homo sapien
ttccaagcggcacccctttgtgtcg

SEQ ID NO: 3924698 - DNA, 25 bp, Homo sapien
gcacccctttgtgtcgtgggactta

SEQ ID NO: 3924699 - DNA, 25 bp, Homo sapien
ttgcccgggaagtctaagcctgcta

SEQ ID NO: 3924700 - DNA, 25 bp, Homo sapien
atcagtccacaacccagatagcagg

SEQ ID NO: 3924701 - DNA, 25 bp, Homo sapien
cagagtaatgatggagcccgggctc

SEQ ID NO: 3924702 - DNA, 25 bp, Homo sapien
tggctttaagcgcagtgctccgccc

SEQ ID NO: 3924703 - DNA, 25 bp, Homo sapien
gtccctcgcacgcacagctgaggag

SEQ ID NO: 3924704 - DNA, 25 bp, Homo sapien
tgcgcaagtgcgctaaggcgcccgc

SEQ ID NO: 3924705 - DNA, 25 bp, Homo sapien
tgcagctccgctttccccagagtgc

SEQ ID NO: 3924706 - DNA, 25 bp, Homo sapien
cctcgcacgcacagctgaggagctg

SEQ ID NO: 3924707 - DNA, 25 bp, Homo sapien
tctcacccgggccagttttcaaggc

SEQ ID NO: 3924708 - DNA, 25 bp, Homo sapien
gcctcccggcctgggattggtcgaa

SEQ ID NO: 3924709 - DNA, 25 bp, Homo sapien
gagcctcccggcctgggattggtcg

SEQ ID NO: 3924710 - DNA, 25 bp, Homo sapien
tggagaaagcctgcccacgtggctg

SEQ ID NO: 3924711 - DNA, 25 bp, Homo sapien
gcagcagagttacatggttcttcaa

SEQ ID NO: 3924712 - DNA, 25 bp, Homo sapien
cccggacagcttctttgggagtgct

SEQ ID NO: 3924713 - DNA, 25 bp, Homo sapien
gggagtgctgctaaccttgaaatta

SEQ ID NO: 3924714 - DNA, 25 bp, Homo sapien
taatgggtataatttcctggctgcc

SEQ ID NO: 3924715 - DNA, 25 bp, Homo sapien
aagttactgggcatctcttcaatgg

SEQ ID NO: 3924716 - DNA, 25 bp, Homo sapien
acattgatcaagctctggttgagcc

SEQ ID NO: 3924717 - DNA, 25 bp, Homo sapien
ccaggcacgcagatataagtgttac

SEQ ID NO: 3924718 - DNA, 25 bp, Homo sapien
gaagtagacagggacgaagtcacag

SEQ ID NO: 3924719 - DNA, 25 bp, Homo sapien
ttgctggttgctggaaatggtgata

SEQ ID NO: 3924720 - DNA, 25 bp, Homo sapien
tggttgctggaaatggtgataaaat

SEQ ID NO: 3924721 - DNA, 25 bp, Homo sapien
ctattgctggttgctggaaatggtg

SEQ ID NO: 3924722 - DNA, 25 bp, Homo sapien
ggttgctggaaatggtgataaaatc

SEQ ID NO: 3924723 - DNA, 25 bp, Homo sapien
aaggttccagattcatgggccaggc

SEQ ID NO: 3924724 - DNA, 25 bp, Homo sapien
gagccacggttcattctcgcactgg

SEQ ID NO: 3924725 - DNA, 25 bp, Homo sapien
tgtaaaccaggatgagagagccaca

SEQ ID NO: 3924726 - DNA, 25 bp, Homo sapien
ttgtaccatgtagctaagaggcacg

SEQ ID NO: 3924727 - DNA, 25 bp, Homo sapien
ggtgaaagagtggtccatgaaccag

SEQ ID NO: 3924728 - DNA, 25 bp, Homo sapien
gtccagtgcctctgtagcctgccag

SEQ ID NO: 3924729 - DNA, 25 bp, Homo sapien
tgcttttccttctaagtgtccaggg

SEQ ID NO: 3924730 - DNA, 25 bp, Homo sapien
gagtggtccatgaaccagggtccag

SEQ ID NO: 3924731 - DNA, 25 bp, Homo sapien
ttctgtgtagagactcggtggccca

SEQ ID NO: 3924732 - DNA, 25 bp, Homo sapien
caaatccaagggtgtgaggtaaacg

SEQ ID NO: 3924733 - DNA, 25 bp, Homo sapien
gaaccacacgtctggagcacagaca

SEQ ID NO: 3924734 - DNA, 25 bp, Homo sapien
cccggccctgtgcatatgaagtctt

SEQ ID NO: 3924735 - DNA, 25 bp, Homo sapien
taactcactgaagtgtctcaaaggc

SEQ ID NO: 3924736 - DNA, 25 bp, Homo sapien
ggcaagtgttaactgtgggactcac

SEQ ID NO: 3924737 - DNA, 25 bp, Homo sapien
aggtagccggagtgtgtcacagccc

SEQ ID NO: 3924738 - DNA, 25 bp, Homo sapien
tctggtgagtccaacaggcacaagc

SEQ ID NO: 3924739 - DNA, 25 bp, Homo sapien
gaaatgcaacctgcggagctgggct

SEQ ID NO: 3924740 - DNA, 25 bp, Homo sapien
gcttggttcccaggtcacagtttgg

SEQ ID NO: 3924741 - DNA, 25 bp, Homo sapien
tcctgtgtgaggcacgttacccttt

SEQ ID NO: 3924742 - DNA, 25 bp, Homo sapien
ttttctgggcagtctcagtgacgca

SEQ ID NO: 3924743 - DNA, 25 bp, Homo sapien
gggacggagtgggcaggtggcaggc

SEQ ID NO: 3924744 - DNA, 25 bp, Homo sapien
ctgcggggacggagtgggcaggtgg

SEQ ID NO: 3924745 - DNA, 25 bp, Homo sapien
ggtggcaggccaggggctgtagtgg

SEQ ID NO: 3924746 - DNA, 25 bp, Homo sapien
gacggagtgggcaggtggcaggcca

SEQ ID NO: 3924747 - DNA, 25 bp, Homo sapien
ggagactcaggggaactgcttttct

SEQ ID NO: 3924748 - DNA, 25 bp, Homo sapien
ggatttccctcctgtcaacaaggag

SEQ ID NO: 3924749 - DNA, 25 bp, Homo sapien
caacaaggagactcaggggaactgc

SEQ ID NO: 3924750 - DNA, 25 bp, Homo sapien
ttccctcctgtcaacaaggagactc

SEQ ID NO: 3924751 - DNA, 25 bp, Homo sapien
tcgtggcaacgacctgatgacctgg

SEQ ID NO: 3924752 - DNA, 25 bp, Homo sapien
gaagcagctttccatgacatgcctg

SEQ ID NO: 3924753 - DNA, 25 bp, Homo sapien
tgccatggcaaaacctaggagttac

SEQ ID NO: 3924754 - DNA, 25 bp, Homo sapien
gtagatgtccatatgagtgcagccc

SEQ ID NO: 3924755 - DNA, 25 bp, Homo sapien
ttgtggggccacatagggtggacag

SEQ ID NO: 3924756 - DNA, 25 bp, Homo sapien
ctctaaatctgtgttgtggggccac

SEQ ID NO: 3924757 - DNA, 25 bp, Homo sapien
aaggcagagtgggttgggagtaggg

SEQ ID NO: 3924758 - DNA, 25 bp, Homo sapien
ggagtagggaagaatggcggagaag

SEQ ID NO: 3924759 - DNA, 25 bp, Homo sapien
gggcttccctccaggcctggcgcac

SEQ ID NO: 3924760 - DNA, 25 bp, Homo sapien
taggtgctaccctcagcctgggctt

SEQ ID NO: 3924761 - DNA, 25 bp, Homo sapien
ttaggtgctaccctcagcctgggct

SEQ ID NO: 3924762 - DNA, 25 bp, Homo sapien
cctgggcttccctccaggcctggcg

SEQ ID NO: 3924763 - DNA, 25 bp, Homo sapien
tcctggcgggccaggatctcaccta

SEQ ID NO: 3924764 - DNA, 25 bp, Homo sapien
catcatctggcacctccaggtcgaa

SEQ ID NO: 3924765 - DNA, 25 bp, Homo sapien
tgaaagagtcgatcagaaagaccac

SEQ ID NO: 3924766 - DNA, 25 bp, Homo sapien
ggatctcacctatacaggagcgagg

SEQ ID NO: 3924767 - DNA, 25 bp, Homo sapien
gtccccgctggattcaagaaacgct

SEQ ID NO: 3924768 - DNA, 25 bp, Homo sapien
gctgggtccccgctggattcaagaa

SEQ ID NO: 3924769 - DNA, 25 bp, Homo sapien
aatagcttactgacggtgagatgag

SEQ ID NO: 3924770 - DNA, 25 bp, Homo sapien
tgctccgaagggcaaatagcttact

SEQ ID NO: 3924771 - DNA, 25 bp, Homo sapien
actgatccggctggtgccactcctt

SEQ ID NO: 3924772 - DNA, 25 bp, Homo sapien
tgcagcgcccacagattgatgataa

SEQ ID NO: 3924773 - DNA, 25 bp, Homo sapien
cttctcattgtgatgcagcgcccac

SEQ ID NO: 3924774 - DNA, 25 bp, Homo sapien
gattgatgataacttctgtgccctt

SEQ ID NO: 3924775 - DNA, 25 bp, Homo sapien
cttcgtactcccttccttgctcagc

SEQ ID NO: 3924776 - DNA, 25 bp, Homo sapien
tgggacttcgtactcccttccttgc

SEQ ID NO: 3924777 - DNA, 25 bp, Homo sapien
ggacttcgtactcccttccttgctc

SEQ ID NO: 3924778 - DNA, 25 bp, Homo sapien
ctgggacttcgtactcccttccttg

SEQ ID NO: 3924779 - DNA, 25 bp, Homo sapien
caagcagtgttgaatgcatcatggg

SEQ ID NO: 3924780 - DNA, 25 bp, Homo sapien
tgactgactttaggttggccagcag

SEQ ID NO: 3924781 - DNA, 25 bp, Homo sapien
ttttagtagttgatggttgactgac

SEQ ID NO: 3924782 - DNA, 25 bp, Homo sapien
gcccggccggcaggatgatttttag

SEQ ID NO: 3924783 - DNA, 25 bp, Homo sapien
tctggtcaatctcctcgtagagctt

SEQ ID NO: 3924784 - DNA, 25 bp, Homo sapien
gcctgaggcgaagcacctctcggat

SEQ ID NO: 3924785 - DNA, 25 bp, Homo sapien
gcggctgaaacccacattctggtca

SEQ ID NO: 3924786 - DNA, 25 bp, Homo sapien
cactgatagttggtgtgcggctgaa

SEQ ID NO: 3924787 - DNA, 25 bp, Homo sapien
tccacgccagccccaaagatgtccc

SEQ ID NO: 3924788 - DNA, 25 bp, Homo sapien
ggtccatttaaccacagaggtggtg

SEQ ID NO: 3924789 - DNA, 25 bp, Homo sapien
ccagggtccatttaaccacagaggt

SEQ ID NO: 3924790 - DNA, 25 bp, Homo sapien
gtctccacgccagccccaaagatgt

SEQ ID NO: 3924791 - DNA, 25 bp, Homo sapien
gcattgccattatctgagttcatct

SEQ ID NO: 3924792 - DNA, 25 bp, Homo sapien
tgggccagcattgccattatctgag

SEQ ID NO: 3924793 - DNA, 25 bp, Homo sapien
tgatagagtcactccggaatttctc

SEQ ID NO: 3924794 - DNA, 25 bp, Homo sapien
ttgcatcagtgtgtccagcatgttg

SEQ ID NO: 3924795 - DNA, 25 bp, Homo sapien
agtgtgtagaatggactccaccctg

SEQ ID NO: 3924796 - DNA, 25 bp, Homo sapien
tctacagtgtgtagaatggactcca

SEQ ID NO: 3924797 - DNA, 25 bp, Homo sapien
caccctgctcttgtgattactttta

SEQ ID NO: 3924798 - DNA, 25 bp, Homo sapien
agcttctacagtgtgtagaatggac

SEQ ID NO: 3924799 - DNA, 25 bp, Homo sapien
gtattttattcagcagatcatttcg

SEQ ID NO: 3924800 - DNA, 25 bp, Homo sapien
ttcaagtattttattcagcagatca

SEQ ID NO: 3924801 - DNA, 25 bp, Homo sapien
caagtattttattcagcagatcatt

SEQ ID NO: 3924802 - DNA, 25 bp, Homo sapien
tttcaagtattttattcagcagatc

SEQ ID NO: 3924803 - DNA, 25 bp, Homo sapien
acatggctctttaatttttccaggg

SEQ ID NO: 3924804 - DNA, 25 bp, Homo sapien
catggctctttaatttttccagggt

SEQ ID NO: 3924805 - DNA, 25 bp, Homo sapien
aacatggctctttaatttttccagg

SEQ ID NO: 3924806 - DNA, 25 bp, Homo sapien
ttaacatggctctttaatttttcca

SEQ ID NO: 3924807 - DNA, 25 bp, Homo sapien
cagaacgggtttatcatgacgacga

SEQ ID NO: 3924808 - DNA, 25 bp, Homo sapien
caattctaaacaagggaggagggcg

SEQ ID NO: 3924809 - DNA, 25 bp, Homo sapien
cctggaggcggatcttagctttctg

SEQ ID NO: 3924810 - DNA, 25 bp, Homo sapien
aaaaagatgggtcattgcggctgga

SEQ ID NO: 3924811 - DNA, 25 bp, Homo sapien
tccgttgtgggtggccagcatatca

SEQ ID NO: 3924812 - DNA, 25 bp, Homo sapien
tatgacattcaactcagggtcccca

SEQ ID NO: 3924813 - DNA, 25 bp, Homo sapien
gagatgacattggttaccgccacga

SEQ ID NO: 3924814 - DNA, 25 bp, Homo sapien
gggactaggtccaccaggctgtctt

SEQ ID NO: 3924815 - DNA, 25 bp, Homo sapien
cagagtcagcgaaggcgataccctt

SEQ ID NO: 3924816 - DNA, 25 bp, Homo sapien
acccttacggttgttggacgcgatg

SEQ ID NO: 3924817 - DNA, 25 bp, Homo sapien
tctgatcgccatccttgaacagggc

SEQ ID NO: 3924818 - DNA, 25 bp, Homo sapien
tgaacagggcaaaggtggccatcgc

SEQ ID NO: 3924819 - DNA, 25 bp, Homo sapien
ctttagagagcaggcaaggctgtag

SEQ ID NO: 3924820 - DNA, 25 bp, Homo sapien
ggctgtaggaatctcacaccatcca

SEQ ID NO: 3924821 - DNA, 25 bp, Homo sapien
tgcaaggacttggtaggacagaccc

SEQ ID NO: 3924822 - DNA, 25 bp, Homo sapien
gcactccaccatgactgcaaggact

SEQ ID NO: 3924823 - DNA, 25 bp, Homo sapien
tgaggccgcccagagaagtccttgc

SEQ ID NO: 3924824 - DNA, 25 bp, Homo sapien
tggtggtggccgacaatcactgtag

SEQ ID NO: 3924825 - DNA, 25 bp, Homo sapien
tgttatgcatatggccgtgtctggg

SEQ ID NO: 3924826 - DNA, 25 bp, Homo sapien
ttggtgcccatacgaaccgaataga

SEQ ID NO: 3924827 - DNA, 25 bp, Homo sapien
taagctagggtaagcagcaagagag

SEQ ID NO: 3924828 - DNA, 25 bp, Homo sapien
aaaacaaataagctagggtaagcag

SEQ ID NO: 3924829 - DNA, 25 bp, Homo sapien
gcaagagagccacgagctcccacat

SEQ ID NO: 3924830 - DNA, 25 bp, Homo sapien
agggtaagcagcaagagagccacga

SEQ ID NO: 3924831 - DNA, 25 bp, Homo sapien
tgtggcaactctagggcacaaggag

SEQ ID NO: 3924832 - DNA, 25 bp, Homo sapien
tgccggcaggcaagatagacagcag

SEQ ID NO: 3924833 - DNA, 25 bp, Homo sapien
gccttgtggaaagattctcctggag

SEQ ID NO: 3924834 - DNA, 25 bp, Homo sapien
tagacagcagtggagtagaagagct

SEQ ID NO: 3924835 - DNA, 25 bp, Homo sapien
gcttgacgttgatgaaggttttccc

SEQ ID NO: 3924836 - DNA, 25 bp, Homo sapien
ggtataaagataggtcagttcccca

SEQ ID NO: 3924837 - DNA, 25 bp, Homo sapien
ggctccatcggtgctcttggtataa

SEQ ID NO: 3924838 - DNA, 25 bp, Homo sapien
ctgcagcagtaggtcccagatcaca

SEQ ID NO: 3924839 - DNA, 25 bp, Homo sapien
ggaacgccagagtctcaagcgcggt

SEQ ID NO: 3924840 - DNA, 25 bp, Homo sapien
tgccgcaggctttccgattctgaac

SEQ ID NO: 3924841 - DNA, 25 bp, Homo sapien
aaggtcaacctccatcaggcgcatg

SEQ ID NO: 3924842 - DNA, 25 bp, Homo sapien
taactgaaatgatggcgactggaac

SEQ ID NO: 3924843 - DNA, 25 bp, Homo sapien
aagcaggtgctgaaaggctcccgga

SEQ ID NO: 3924844 - DNA, 25 bp, Homo sapien
aggtgagctggaagtggactctccc

SEQ ID NO: 3924845 - DNA, 25 bp, Homo sapien
cgcagtctttcgttgctgtgggaag

SEQ ID NO: 3924846 - DNA, 25 bp, Homo sapien
gactctcccggcctgatagtccggg

SEQ ID NO: 3924847 - DNA, 25 bp, Homo sapien
tatgcattaaagtacagatagcttg

SEQ ID NO: 3924848 - DNA, 25 bp, Homo sapien
gatagcttgtacaggacaggtgtag

SEQ ID NO: 3924849 - DNA, 25 bp, Homo sapien
cccagagtttgagattgccttgtgc

SEQ ID NO: 3924850 - DNA, 25 bp, Homo sapien
gattgccttgtgcagcatagtgaga

SEQ ID NO: 3924851 - DNA, 25 bp, Homo sapien
tctagtaactcagaggagatacgtg

SEQ ID NO: 3924852 - DNA, 25 bp, Homo sapien
taccatgagtctgttgtcaaaccta

SEQ ID NO: 3924853 - DNA, 25 bp, Homo sapien
ggtatcattatcaggccagctgcag

SEQ ID NO: 3924854 - DNA, 25 bp, Homo sapien
cggattaacccatgctcttattgaa

SEQ ID NO: 3924855 - DNA, 25 bp, Homo sapien
gaagcagtgattgcttacaatgtat

SEQ ID NO: 3924856 - DNA, 25 bp, Homo sapien
acagatggactcaatgtacctttga

SEQ ID NO: 3924857 - DNA, 25 bp, Homo sapien
taattgcagtattattaaatacaga

SEQ ID NO: 3924858 - DNA, 25 bp, Homo sapien
aagctaagtgcagtcattacaagaa

SEQ ID NO: 3924859 - DNA, 25 bp, Homo sapien
aggtgagccatcatccagtcattca

SEQ ID NO: 3924860 - DNA, 25 bp, Homo sapien
gaagtagctgaatccaatccatttg

SEQ ID NO: 3924861 - DNA, 25 bp, Homo sapien
tatgcatagaaacaagggtgccacc

SEQ ID NO: 3924862 - DNA, 25 bp, Homo sapien
cactgagcttgatggtaggtctttt

SEQ ID NO: 3924863 - DNA, 25 bp, Homo sapien
ttaagttcctgatcactcatttgcc

SEQ ID NO: 3924864 - DNA, 25 bp, Homo sapien
gctgtcatagaactcaaatacaaat

SEQ ID NO: 3924865 - DNA, 25 bp, Homo sapien
ctattatagaatctagatctccagg

SEQ ID NO: 3924866 - DNA, 25 bp, Homo sapien
gttagtatgtcattttacacgccag

SEQ ID NO: 3924867 - DNA, 25 bp, Homo sapien
ggactgcttatatctgggtacccca

SEQ ID NO: 3924868 - DNA, 25 bp, Homo sapien
catagaatcacaggatgttggtgca

SEQ ID NO: 3924869 - DNA, 25 bp, Homo sapien
ttaaggcaccctgtcatttagtcct

SEQ ID NO: 3924870 - DNA, 25 bp, Homo sapien
gtggtgaatttgcacccacatctga

SEQ ID NO: 3924871 - DNA, 25 bp, Homo sapien
acaaatggcagagagccaccatatt

SEQ ID NO: 3924872 - DNA, 25 bp, Homo sapien
tggcagagagccaccatattccaaa

SEQ ID NO: 3924873 - DNA, 25 bp, Homo sapien
gagccaccatattccaaatcactga

SEQ ID NO: 3924874 - DNA, 25 bp, Homo sapien
gcagagagccaccatattccaaatc

SEQ ID NO: 3924875 - DNA, 25 bp, Homo sapien
tgtcctgttgtagctttctctgaaa

SEQ ID NO: 3924876 - DNA, 25 bp, Homo sapien
aatgtctgtagggttggcaagctcc

SEQ ID NO: 3924877 - DNA, 25 bp, Homo sapien
tactttcagcatttgagagcctgtc

SEQ ID NO: 3924878 - DNA, 25 bp, Homo sapien
gccattcttataaatgcatgccaag

SEQ ID NO: 3924879 - DNA, 25 bp, Homo sapien
tcatttatttaacattctacatata

SEQ ID NO: 3924880 - DNA, 25 bp, Homo sapien
tttatttaacattctacatatattg

SEQ ID NO: 3924881 - DNA, 25 bp, Homo sapien
atattgttttgaatatctatcattg

SEQ ID NO: 3924882 - DNA, 25 bp, Homo sapien
tatttaacattctacatatattgtt

SEQ ID NO: 3924883 - DNA, 25 bp, Homo sapien
acatagtgtattagaaagtgatctt

SEQ ID NO: 3924884 - DNA, 25 bp, Homo sapien
caagggaaaatccctggagtgatgg

SEQ ID NO: 3924885 - DNA, 25 bp, Homo sapien
caaagcactaaaggaggtgaacaac

SEQ ID NO: 3924886 - DNA, 25 bp, Homo sapien
tgcaaaggctcgcaagggaaaatcc

SEQ ID NO: 3924887 - DNA, 25 bp, Homo sapien
caacaaggctatgctgacatctggg

SEQ ID NO: 3924888 - DNA, 25 bp, Homo sapien
tcagccaagggagcaacagaatctc

SEQ ID NO: 3924889 - DNA, 25 bp, Homo sapien
gatgcatttacaaaagcggtggtag

SEQ ID NO: 3924890 - DNA, 25 bp, Homo sapien
gcagaccttcgagcctagtaggatg

SEQ ID NO: 3924891 - DNA, 25 bp, Homo sapien
gaagccaatggaggcgtttcagcca

SEQ ID NO: 3924892 - DNA, 25 bp, Homo sapien
cacctccaggtgacgttgggagtac

SEQ ID NO: 3924893 - DNA, 25 bp, Homo sapien
tgagtgacctaagaccctagcagag

SEQ ID NO: 3924894 - DNA, 25 bp, Homo sapien
gggcccttcccactctgtaaatatg

SEQ ID NO: 3924895 - DNA, 25 bp, Homo sapien
taacttgcctgaattcctgctggga

SEQ ID NO: 3924896 - DNA, 25 bp, Homo sapien
gtaccctaggagtctcgaggcgcga

SEQ ID NO: 3924897 - DNA, 25 bp, Homo sapien
cagagagcccgtaccctaggagtct

SEQ ID NO: 3924898 - DNA, 25 bp, Homo sapien
cctggaaagcgttgcagggcgctca

SEQ ID NO: 3924899 - DNA, 25 bp, Homo sapien
acgtgatcgcgagccgcagagagcc

SEQ ID NO: 3924900 - DNA, 25 bp, Homo sapien
gagtcacgcgcctttcagttggaaa

SEQ ID NO: 3924901 - DNA, 25 bp, Homo sapien
ggactgcttcatgatcaccggcgaa

SEQ ID NO: 3924902 - DNA, 25 bp, Homo sapien
tctataaccgggaaaaactgctgga

SEQ ID NO: 3924903 - DNA, 25 bp, Homo sapien
gagatcaaaccgctacgcaagatgg

SEQ ID NO: 3924904 - DNA, 25 bp, Homo sapien
tagatgcgtagttacttataaagtg

SEQ ID NO: 3924905 - DNA, 25 bp, Homo sapien
agtggatcactaggattgaatacag

SEQ ID NO: 3924906 - DNA, 25 bp, Homo sapien
cttttaagagcaaacctgtagagtg

SEQ ID NO: 3924907 - DNA, 25 bp, Homo sapien
catcacagacattggcaactctagg

SEQ ID NO: 3924908 - DNA, 25 bp, Homo sapien
aataaaagtttggtgaaagccagca

SEQ ID NO: 3924909 - DNA, 25 bp, Homo sapien
tgaaccacctgtgcttgaagctcag

SEQ ID NO: 3924910 - DNA, 25 bp, Homo sapien
taaagcccgtaatgtgtgtgagtac

SEQ ID NO: 3924911 - DNA, 25 bp, Homo sapien
tgtgagtacacacgtgacatcttag

SEQ ID NO: 3924912 - DNA, 25 bp, Homo sapien
caggtatgagtagcaaattcgaaga

SEQ ID NO: 3924913 - DNA, 25 bp, Homo sapien
gcaaattcgaagatttgttgccttt

SEQ ID NO: 3924914 - DNA, 25 bp, Homo sapien
caaaccaggtatgagtagcaaattc

SEQ ID NO: 3924915 - DNA, 25 bp, Homo sapien
gtagcaaattcgaagatttgttgcc

SEQ ID NO: 3924916 - DNA, 25 bp, Homo sapien
gaaactttatggacatgacttgaga

SEQ ID NO: 3924917 - DNA, 25 bp, Homo sapien
ctagcacaatgggagagttttcagg

SEQ ID NO: 3924918 - DNA, 25 bp, Homo sapien
tctgggctggaaacatatagggtgt

SEQ ID NO: 3924919 - DNA, 25 bp, Homo sapien
gctaataaggttggtaagaactctg

SEQ ID NO: 3924920 - DNA, 25 bp, Homo sapien
agtgcacaatgctgctaggcatttg

SEQ ID NO: 3924921 - DNA, 25 bp, Homo sapien
tttgtggacaatgcaaagatgatga

SEQ ID NO: 3924922 - DNA, 25 bp, Homo sapien
tgggtgatccaggaatttacagcaa

SEQ ID NO: 3924923 - DNA, 25 bp, Homo sapien
cagaagcgtttgttgagccactgta

SEQ ID NO: 3924924 - DNA, 25 bp, Homo sapien
ttaaaaggatcacaatatagaatat

SEQ ID NO: 3924925 - DNA, 25 bp, Homo sapien
tgccgtggggcatattgaagttgct

SEQ ID NO: 3924926 - DNA, 25 bp, Homo sapien
tagatgccgtggggcatattgaagt

SEQ ID NO: 3924927 - DNA, 25 bp, Homo sapien
ccgtggggcatattgaagttgctta

SEQ ID NO: 3924928 - DNA, 25 bp, Homo sapien
gatgccgtggggcatattgaagttg

SEQ ID NO: 3924929 - DNA, 25 bp, Homo sapien
gattgccagtagatggcttttaatt

SEQ ID NO: 3924930 - DNA, 25 bp, Homo sapien
tcattgaagattgccagtagatggc

SEQ ID NO: 3924931 - DNA, 25 bp, Homo sapien
ttcttcattgaagattgccagtaga

SEQ ID NO: 3924932 - DNA, 25 bp, Homo sapien
gaagattgccagtagatggctttta

SEQ ID NO: 3924933 - DNA, 25 bp, Homo sapien
ctgttcacaggcacagtaccagtac

SEQ ID NO: 3924934 - DNA, 25 bp, Homo sapien
ggctgaagtagagtggctgttcaca

SEQ ID NO: 3924935 - DNA, 25 bp, Homo sapien
gttcacaggcacagtaccagtactg

SEQ ID NO: 3924936 - DNA, 25 bp, Homo sapien
aggcacagtaccagtactgatcagc

SEQ ID NO: 3924937 - DNA, 25 bp, Homo sapien
tcaaacatccaccacaatgcgtagc

SEQ ID NO: 3924938 - DNA, 25 bp, Homo sapien
caaacatccaccacaatgcgtagca

SEQ ID NO: 3924939 - DNA, 25 bp, Homo sapien
atccaccacaatgcgtagcatgtgg

SEQ ID NO: 3924940 - DNA, 25 bp, Homo sapien
cacaatgcgtagcatgtggaagatg

SEQ ID NO: 3924941 - DNA, 25 bp, Homo sapien
gaaacagagtcctgccgagagttgg

SEQ ID NO: 3924942 - DNA, 25 bp, Homo sapien
ccgaaacgccagagttctggcgctt

SEQ ID NO: 3924943 - DNA, 25 bp, Homo sapien
acctgtagggtgatagtcttgctcc

SEQ ID NO: 3924944 - DNA, 25 bp, Homo sapien
cgattttgacaatgagtgagacctg

SEQ ID NO: 3924945 - DNA, 25 bp, Homo sapien
tttttctcctctataatgaagatga

SEQ ID NO: 3924946 - DNA, 25 bp, Homo sapien
tttctcctctataatgaagatgaag

SEQ ID NO: 3924947 - DNA, 25 bp, Homo sapien
ctcctctataatgaagatgaagtgc

SEQ ID NO: 3924948 - DNA, 25 bp, Homo sapien
aagttgtttgcatcttttttctcct

SEQ ID NO: 3924949 - DNA, 25 bp, Homo sapien
ggaacatgagaaggttcccatcatc

SEQ ID NO: 3924950 - DNA, 25 bp, Homo sapien
gaacatgagaaggttcccatcatct

SEQ ID NO: 3924951 - DNA, 25 bp, Homo sapien
gacctttcggctgcatttgatactt

SEQ ID NO: 3924952 - DNA, 25 bp, Homo sapien
tcgccaaaatcacctttcgtgacct

SEQ ID NO: 3924953 - DNA, 25 bp, Homo sapien
cagcatcttctgtcgccaaaatcac

SEQ ID NO: 3924954 - DNA, 25 bp, Homo sapien
tttgactgctttctgctatttggga

SEQ ID NO: 3924955 - DNA, 25 bp, Homo sapien
agcagaacagagttgttagcagcag

SEQ ID NO: 3924956 - DNA, 25 bp, Homo sapien
cagaacagagttgttagcagcaggt

SEQ ID NO: 3924957 - DNA, 25 bp, Homo sapien
ctttgtccctgtctcgtacctttgt

SEQ ID NO: 3924958 - DNA, 25 bp, Homo sapien
cgtacctttgttgtcagcagaacag

SEQ ID NO: 3924959 - DNA, 25 bp, Homo sapien
gaagaccgtgttactgcagaacctg

SEQ ID NO: 3924960 - DNA, 25 bp, Homo sapien
tgaactctgctgtgatcccatgatg

SEQ ID NO: 3924961 - DNA, 25 bp, Homo sapien
tatcattggcaagaggcaagttgac

SEQ ID NO: 3924962 - DNA, 25 bp, Homo sapien
tctcgctggctgaatgaagaagacc

SEQ ID NO: 3924963 - DNA, 25 bp, Homo sapien
tctgttcaccctgctagcagatgtg

SEQ ID NO: 3924964 - DNA, 25 bp, Homo sapien
catgccattgtattcagcttggctg

SEQ ID NO: 3924965 - DNA, 25 bp, Homo sapien
tcagcatgacaacatagaagagcat

SEQ ID NO: 3924966 - DNA, 25 bp, Homo sapien
ttcatctgtgcaacaccaaccatgc

SEQ ID NO: 3924967 - DNA, 25 bp, Homo sapien
gggaaggtgtccttctttgcaagga

SEQ ID NO: 3924968 - DNA, 25 bp, Homo sapien
cattcggagtatccagtcaaattgc

SEQ ID NO: 3924969 - DNA, 25 bp, Homo sapien
ccatcagttactctctacataagaa

SEQ ID NO: 3924970 - DNA, 25 bp, Homo sapien
tccaagtcacagcctggtacagcca

SEQ ID NO: 3924971 - DNA, 25 bp, Homo sapien
tctgctatgctaagcctgggaggaa

SEQ ID NO: 3924972 - DNA, 25 bp, Homo sapien
aaaacatccggcctgagtgtggcga

SEQ ID NO: 3924973 - DNA, 25 bp, Homo sapien
aataacaacacacagtgccgctggg

SEQ ID NO: 3924974 - DNA, 25 bp, Homo sapien
taagccggcatttcctaggtaagac

SEQ ID NO: 3924975 - DNA, 25 bp, Homo sapien
atatcctgcattccccagtaatcgg

SEQ ID NO: 3924976 - DNA, 25 bp, Homo sapien
tcctgcattccccagtaatcggtgt

SEQ ID NO: 3924977 - DNA, 25 bp, Homo sapien
tgcattccccagtaatcggtgtgta

SEQ ID NO: 3924978 - DNA, 25 bp, Homo sapien
ttccccagtaatcggtgtgtatgat

SEQ ID NO: 3924979 - DNA, 25 bp, Homo sapien
gggaccctctgtgatccattcctaa

SEQ ID NO: 3924980 - DNA, 25 bp, Homo sapien
ttacggtggagcttcagggaccctc

SEQ ID NO: 3924981 - DNA, 25 bp, Homo sapien
tcacatgagaccagtccctgaagaa

SEQ ID NO: 3924982 - DNA, 25 bp, Homo sapien
ttcttaccctcatcactcacatgag

SEQ ID NO: 3924983 - DNA, 25 bp, Homo sapien
cattccaaagaggatcgtgctctga

SEQ ID NO: 3924984 - DNA, 25 bp, Homo sapien
tgaaatgctgtcttcgaaccctgct

SEQ ID NO: 3924985 - DNA, 25 bp, Homo sapien
gaatgaggtgtatcttagcccagtg

SEQ ID NO: 3924986 - DNA, 25 bp, Homo sapien
cacttggtctagatgagcccttagc

SEQ ID NO: 3924987 - DNA, 25 bp, Homo sapien
aaactgacctttttatagcctggag

SEQ ID NO: 3924988 - DNA, 25 bp, Homo sapien
ggaaacaaatattgatcagagggtc

SEQ ID NO: 3924989 - DNA, 25 bp, Homo sapien
tccaagggcctcatatctgtgctct

SEQ ID NO: 3924990 - DNA, 25 bp, Homo sapien
gctcttattttcaagcagtcccagg

SEQ ID NO: 3924991 - DNA, 25 bp, Homo sapien
taaaaagcccagttacagctgccct

SEQ ID NO: 3924992 - DNA, 25 bp, Homo sapien
taacacgggcaacagtctagtctaa

SEQ ID NO: 3924993 - DNA, 25 bp, Homo sapien
taagaataatatacagagaggcacc

SEQ ID NO: 3924994 - DNA, 25 bp, Homo sapien
tctttggacccagagaatcatttgc

SEQ ID NO: 3924995 - DNA, 25 bp, Homo sapien
taagagaatatcaaactgatgtcac

SEQ ID NO: 3924996 - DNA, 25 bp, Homo sapien
cagttgtactacagaataggtcaaa

SEQ ID NO: 3924997 - DNA, 25 bp, Homo sapien
ttgaagaccaatagctattacagtt

SEQ ID NO: 3924998 - DNA, 25 bp, Homo sapien
gatgtcaccaaatctaaacccactt

SEQ ID NO: 3924999 - DNA, 25 bp, Homo sapien
gccatatacatgcagttcagcctga

SEQ ID NO: 3925000 - DNA, 25 bp, Homo sapien
ccagatacactgacatacggatgat

SEQ ID NO: 3925001 - DNA, 25 bp, Homo sapien
taaagcaacgcaagtagagcatact

SEQ ID NO: 3925002 - DNA, 25 bp, Homo sapien
aaatctggaattgggtagcatgagc

SEQ ID NO: 3925003 - DNA, 25 bp, Homo sapien
ctgcagagagtacagatacacaaaa

SEQ ID NO: 3925004 - DNA, 25 bp, Homo sapien
tgccaggacttgtttaatgggtgct

SEQ ID NO: 3925005 - DNA, 25 bp, Homo sapien
tcgtttgttcctgtgagtcctgcca

SEQ ID NO: 3925006 - DNA, 25 bp, Homo sapien
tcagacgtacctttcatggagcccc

SEQ ID NO: 3925007 - DNA, 25 bp, Homo sapien
tcttcgtcatggcagtgtgtaattt

SEQ ID NO: 3925008 - DNA, 25 bp, Homo sapien
gtcatggcagtgtgtaatttcctgg

SEQ ID NO: 3925009 - DNA, 25 bp, Homo sapien
tcgtcatggcagtgtgtaatttcct

SEQ ID NO: 3925010 - DNA, 25 bp, Homo sapien
catcttcgtcatggcagtgtgtaat

SEQ ID NO: 3925011 - DNA, 25 bp, Homo sapien
gctggtgccgcttgtagtcagtgtc

SEQ ID NO: 3925012 - DNA, 25 bp, Homo sapien
tacgtgtgtgtgctccaccgttgat

SEQ ID NO: 3925013 - DNA, 25 bp, Homo sapien
taattgaccgtgtcagctggtgccg

SEQ ID NO: 3925014 - DNA, 25 bp, Homo sapien
aaatccactgatgtgcggttccggg

SEQ ID NO: 3925015 - DNA, 25 bp, Homo sapien
gaggtcagcataacgcatcacttga

SEQ ID NO: 3925016 - DNA, 25 bp, Homo sapien
ccgggagccactgcgaaacaggctt

SEQ ID NO: 3925017 - DNA, 25 bp, Homo sapien
tgaaagatgctgcatagaggtcagc

SEQ ID NO: 3925018 - DNA, 25 bp, Homo sapien
taatacagcaggttgatgaaagatg

SEQ ID NO: 3925019 - DNA, 25 bp, Homo sapien
gtctggacgctcattgctactgctg

SEQ ID NO: 3925020 - DNA, 25 bp, Homo sapien
taatacgtctctggatggaactgat

SEQ ID NO: 3925021 - DNA, 25 bp, Homo sapien
cttaatacgtctctggatggaactg

SEQ ID NO: 3925022 - DNA, 25 bp, Homo sapien
tggaactgatgtctggacgctcatt

SEQ ID NO: 3925023 - DNA, 25 bp, Homo sapien
taagtgattcctgagtaagtttttg

SEQ ID NO: 3925024 - DNA, 25 bp, Homo sapien
ttcttatatctaagtgattcctgag

SEQ ID NO: 3925025 - DNA, 25 bp, Homo sapien
tatctaagtgattcctgagtaagtt

SEQ ID NO: 3925026 - DNA, 25 bp, Homo sapien
gtgattcctgagtaagtttttggga

SEQ ID NO: 3925027 - DNA, 25 bp, Homo sapien
ttgtagagttcagccaagaaaatat

SEQ ID NO: 3925028 - DNA, 25 bp, Homo sapien
agaaaatatccaagctctgaagttc

SEQ ID NO: 3925029 - DNA, 25 bp, Homo sapien
gtagagttcagccaagaaaatatcc

SEQ ID NO: 3925030 - DNA, 25 bp, Homo sapien
tcagccaagaaaatatccaagctct

SEQ ID NO: 3925031 - DNA, 25 bp, Homo sapien
ggcaggctgagtttccggagtcacc

SEQ ID NO: 3925032 - DNA, 25 bp, Homo sapien
caggtaatgcgcatcaaggctggct

SEQ ID NO: 3925033 - DNA, 25 bp, Homo sapien
cctgggactaacatgctgagtgtac

SEQ ID NO: 3925034 - DNA, 25 bp, Homo sapien
gaaactaaggcacagggtatctcat

SEQ ID NO: 3925035 - DNA, 25 bp, Homo sapien
tgtcagtccagacatgtagctcctg

SEQ ID NO: 3925036 - DNA, 25 bp, Homo sapien
tagctcctgtgcgagttcaggaatc

SEQ ID NO: 3925037 - DNA, 25 bp, Homo sapien
tcaggaatcaccaaaaaagttcgcc

SEQ ID NO: 3925038 - DNA, 25 bp, Homo sapien
gctcccaacaggtcacagatcgtat

SEQ ID NO: 3925039 - DNA, 25 bp, Homo sapien
gactcctattgcattaagaggtgac

SEQ ID NO: 3925040 - DNA, 25 bp, Homo sapien
ctttcactgtgaggtctgagcaaag

SEQ ID NO: 3925041 - DNA, 25 bp, Homo sapien
taggatatactaacaactgctcaaa

SEQ ID NO: 3925042 - DNA, 25 bp, Homo sapien
tagactactaaacagtatatgtggc

SEQ ID NO: 3925043 - DNA, 25 bp, Homo sapien
ctcctgagtagacgataccatgctg

SEQ ID NO: 3925044 - DNA, 25 bp, Homo sapien
gagtagacgataccatgctgtaggg

SEQ ID NO: 3925045 - DNA, 25 bp, Homo sapien
ggccctgtgtaggtaccaattttca

SEQ ID NO: 3925046 - DNA, 25 bp, Homo sapien
ggtaccaattttcagcttgccagtt

SEQ ID NO: 3925047 - DNA, 25 bp, Homo sapien
gtatccacctgacgcagtactgtgc

SEQ ID NO: 3925048 - DNA, 25 bp, Homo sapien
gcagtactgtgccttctccaaaaaa

SEQ ID NO: 3925049 - DNA, 25 bp, Homo sapien
aaaagagtggtttccgtgcatccac

SEQ ID NO: 3925050 - DNA, 25 bp, Homo sapien
caaagtaggactgccatggtcgatg

SEQ ID NO: 3925051 - DNA, 25 bp, Homo sapien
cactccttaccttaaggcattacta

SEQ ID NO: 3925052 - DNA, 25 bp, Homo sapien
gaaacatcactccttaccttaaggc

SEQ ID NO: 3925053 - DNA, 25 bp, Homo sapien
aacatcactccttaccttaaggcat

SEQ ID NO: 3925054 - DNA, 25 bp, Homo sapien
catcactccttaccttaaggcatta

SEQ ID NO: 3925055 - DNA, 25 bp, Homo sapien
tgtattataagccatatcctttggg

SEQ ID NO: 3925056 - DNA, 25 bp, Homo sapien
gatgcaaatcaatacccaagggaca

SEQ ID NO: 3925057 - DNA, 25 bp, Homo sapien
tcctttgggaagcagacaagatata

SEQ ID NO: 3925058 - DNA, 25 bp, Homo sapien
tacagcactttatgaaagtgtgctc

SEQ ID NO: 3925059 - DNA, 25 bp, Homo sapien
tgactaagttgcaaggagtattcct

SEQ ID NO: 3925060 - DNA, 25 bp, Homo sapien
tctgggtgggttctgaccaattctt

SEQ ID NO: 3925061 - DNA, 25 bp, Homo sapien
ttaaacctaagtgcagccgtactgc

SEQ ID NO: 3925062 - DNA, 25 bp, Homo sapien
tctgctaaatatcaaggctgagtgc

SEQ ID NO: 3925063 - DNA, 25 bp, Homo sapien
aagtcaaacaggtaagtcataattt

SEQ ID NO: 3925064 - DNA, 25 bp, Homo sapien
gaagtcaaacaggtaagtcataatt

SEQ ID NO: 3925065 - DNA, 25 bp, Homo sapien
tatagtcactgttggtagcaagaaa

SEQ ID NO: 3925066 - DNA, 25 bp, Homo sapien
tagtcactgttggtagcaagaaata

SEQ ID NO: 3925067 - DNA, 25 bp, Homo sapien
ctacttccttcatccggctcagaag

SEQ ID NO: 3925068 - DNA, 25 bp, Homo sapien
cactgttggtagcaagaaatacttt

SEQ ID NO: 3925069 - DNA, 25 bp, Homo sapien
gatttctgtccacaacaggaatggg

SEQ ID NO: 3925070 - DNA, 25 bp, Homo sapien
aaattctaacccctcatgtgcctgg

SEQ ID NO: 3925071 - DNA, 25 bp, Homo sapien
cacccacgtgcgcttaaatgaggaa

SEQ ID NO: 3925072 - DNA, 25 bp, Homo sapien
tgtgcagatgctacctagaaatacc

SEQ ID NO: 3925073 - DNA, 25 bp, Homo sapien
tactctctgttgacaggttaaaggc

SEQ ID NO: 3925074 - DNA, 25 bp, Homo sapien
gatgtgcatacagtaaacctctaac

SEQ ID NO: 3925075 - DNA, 25 bp, Homo sapien
cacttagcatggtgatgatgtgcat

SEQ ID NO: 3925076 - DNA, 25 bp, Homo sapien
gattatacccgacacatactatgcc

SEQ ID NO: 3925077 - DNA, 25 bp, Homo sapien
ttgactacatacttctcaagatttt

SEQ ID NO: 3925078 - DNA, 25 bp, Homo sapien
caagattttcaactgtcttttcctt

SEQ ID NO: 3925079 - DNA, 25 bp, Homo sapien
atctttgactacatacttctcaaga

SEQ ID NO: 3925080 - DNA, 25 bp, Homo sapien
tcaactgtcttttccttaagggagc

SEQ ID NO: 3925081 - DNA, 25 bp, Homo sapien
tctcttacatcctggaacatactcc

SEQ ID NO: 3925082 - DNA, 25 bp, Homo sapien
tcaacagcatctcttacatcctgga

SEQ ID NO: 3925083 - DNA, 25 bp, Homo sapien
aagaggtccccatctttaaatcctg

SEQ ID NO: 3925084 - DNA, 25 bp, Homo sapien
catactccggtaggacatgaagagg

SEQ ID NO: 3925085 - DNA, 25 bp, Homo sapien
tgtaattctgcttggacagataatc

SEQ ID NO: 3925086 - DNA, 25 bp, Homo sapien
aattctgcttggacagataatcatc

SEQ ID NO: 3925087 - DNA, 25 bp, Homo sapien
gtaattctgcttggacagataatca

SEQ ID NO: 3925088 - DNA, 25 bp, Homo sapien
ttctgcttggacagataatcatcac

SEQ ID NO: 3925089 - DNA, 25 bp, Homo sapien
tctgctggccgtcttcattcccagg

SEQ ID NO: 3925090 - DNA, 25 bp, Homo sapien
tgctggccgtcttcattcccaggag

SEQ ID NO: 3925091 - DNA, 25 bp, Homo sapien
gctggccgtcttcattcccaggaga

SEQ ID NO: 3925092 - DNA, 25 bp, Homo sapien
gtcacaattagcacctctgctggcc

SEQ ID NO: 3925093 - DNA, 25 bp, Homo sapien
aaatctactaggcaggccaacaggt

SEQ ID NO: 3925094 - DNA, 25 bp, Homo sapien
ttggatactgttctctagtttctgg

SEQ ID NO: 3925095 - DNA, 25 bp, Homo sapien
tttcagtatcatctcgctggataaa

SEQ ID NO: 3925096 - DNA, 25 bp, Homo sapien
catctcgctggataaatttatttgg

SEQ ID NO: 3925097 - DNA, 25 bp, Homo sapien
ctggtaggttgaatagtgtgttcag

SEQ ID NO: 3925098 - DNA, 25 bp, Homo sapien
caggtgtgatgtccagcttaggttc

SEQ ID NO: 3925099 - DNA, 25 bp, Homo sapien
taggaaggattcatgcacgtgctgg

SEQ ID NO: 3925100 - DNA, 25 bp, Homo sapien
gcttaggttccagctcttaaaagag

SEQ ID NO: 3925101 - DNA, 25 bp, Homo sapien
cacgtgctggtatatgagctgggcc

SEQ ID NO: 3925102 - DNA, 25 bp, Homo sapien
catgtagaaatgaagcactcggcca

SEQ ID NO: 3925103 - DNA, 25 bp, Homo sapien
gccaacagcctgtgaatgccagaca

SEQ ID NO: 3925104 - DNA, 25 bp, Homo sapien
tgtagatcagatgccaggtcaccca

SEQ ID NO: 3925105 - DNA, 25 bp, Homo sapien
tcttgcagcacttggaaccatggac

SEQ ID NO: 3925106 - DNA, 25 bp, Homo sapien
gatgtccatgctaaggtgtctctga

SEQ ID NO: 3925107 - DNA, 25 bp, Homo sapien
agagtgacctggattaattcctgcc

SEQ ID NO: 3925108 - DNA, 25 bp, Homo sapien
taagacccggcaaactgagcagatt

SEQ ID NO: 3925109 - DNA, 25 bp, Homo sapien
tttaactctaaagactgcacagtgc

SEQ ID NO: 3925110 - DNA, 25 bp, Homo sapien
tgtatacatggaaatctctgagcct

SEQ ID NO: 3925111 - DNA, 25 bp, Homo sapien
gatgtaatcactggcctgctcagat

SEQ ID NO: 3925112 - DNA, 25 bp, Homo sapien
caaatctaaaggaagctctggtaca

SEQ ID NO: 3925113 - DNA, 25 bp, Homo sapien
caagatgggtgtttacttcacaccg

SEQ ID NO: 3925114 - DNA, 25 bp, Homo sapien
cgactttcaaaagatttccatacag

SEQ ID NO: 3925115 - DNA, 25 bp, Homo sapien
gcacagaccaagaggtttccatagg

SEQ ID NO: 3925116 - DNA, 25 bp, Homo sapien
ggtttccataggcatcgactttcaa

SEQ ID NO: 3925117 - DNA, 25 bp, Homo sapien
catacagtgtgtcaaagacaagtcc

SEQ ID NO: 3925118 - DNA, 25 bp, Homo sapien
tgtagaatcataagcaaagctgagc

SEQ ID NO: 3925119 - DNA, 25 bp, Homo sapien
cagtaagctcaaaaccaagggactc

SEQ ID NO: 3925120 - DNA, 25 bp, Homo sapien
tgagcaactcctggggatagccaat

SEQ ID NO: 3925121 - DNA, 25 bp, Homo sapien
ccaatagaaactaatctctccacag

SEQ ID NO: 3925122 - DNA, 25 bp, Homo sapien
atgcagtgtgtgtcactccagtctt

SEQ ID NO: 3925123 - DNA, 25 bp, Homo sapien
gatgcagtgtgtgtcactccagtct

SEQ ID NO: 3925124 - DNA, 25 bp, Homo sapien
ctgacaactctctgaaattcagatt

SEQ ID NO: 3925125 - DNA, 25 bp, Homo sapien
gacaactctctgaaattcagattca

SEQ ID NO: 3925126 - DNA, 25 bp, Homo sapien
acaactctctgaaattcagattcaa

SEQ ID NO: 3925127 - DNA, 25 bp, Homo sapien
tgacaactctctgaaattcagattc

SEQ ID NO: 3925128 - DNA, 25 bp, Homo sapien
tgaaatgggttttattaagcaatct

SEQ ID NO: 3925129 - DNA, 25 bp, Homo sapien
catgtaatggagatgaaatgggttt

SEQ ID NO: 3925130 - DNA, 25 bp, Homo sapien
atgaaatgggttttattaagcaatc

SEQ ID NO: 3925131 - DNA, 25 bp, Homo sapien
gtaatggagatgaaatgggttttat

SEQ ID NO: 3925132 - DNA, 25 bp, Homo sapien
acaaactacaaatgacgagtatttt

SEQ ID NO: 3925133 - DNA, 25 bp, Homo sapien
caaactacaaatgacgagtattttt

SEQ ID NO: 3925134 - DNA, 25 bp, Homo sapien
ctaacgatcaatggatttgctccaa

SEQ ID NO: 3925135 - DNA, 25 bp, Homo sapien
atttgctccaaaataagctgtctct

SEQ ID NO: 3925136 - DNA, 25 bp, Homo sapien
acgatcaatggatttgctccaaaat

SEQ ID NO: 3925137 - DNA, 25 bp, Homo sapien
tttgctccaaaataagctgtctctc

SEQ ID NO: 3925138 - DNA, 25 bp, Homo sapien
atttatccagaagcaatatgtattt

SEQ ID NO: 3925139 - DNA, 25 bp, Homo sapien
ggttatagtaaactacaattgcacc

SEQ ID NO: 3925140 - DNA, 25 bp, Homo sapien
tagaacttacacatcgaaatgagcc

SEQ ID NO: 3925141 - DNA, 25 bp, Homo sapien
agccttcacccattcaaaacaatca

SEQ ID NO: 3925142 - DNA, 25 bp, Homo sapien
gccagtgggatgaggtaatgcacaa

SEQ ID NO: 3925143 - DNA, 25 bp, Homo sapien
aaaggcgtggccagttgcagtctca

SEQ ID NO: 3925144 - DNA, 25 bp, Homo sapien
cagagacctctcgtcacagtaagaa

SEQ ID NO: 3925145 - DNA, 25 bp, Homo sapien
tacaggttggtagctttcactgact

SEQ ID NO: 3925146 - DNA, 25 bp, Homo sapien
ctcagcaggctgtggtaaggattaa

SEQ ID NO: 3925147 - DNA, 25 bp, Homo sapien
tatagcccaggatagaggcacaatc

SEQ ID NO: 3925148 - DNA, 25 bp, Homo sapien
tacccctgtgagcaatcatgcctgg

SEQ ID NO: 3925149 - DNA, 25 bp, Homo sapien
actatgttgcacagagggatctcga

SEQ ID NO: 3925150 - DNA, 25 bp, Homo sapien
tggtatcaccagtcagacaaagagt

SEQ ID NO: 3925151 - DNA, 25 bp, Homo sapien
tattagaagcataatgacacctctg

SEQ ID NO: 3925152 - DNA, 25 bp, Homo sapien
gacaaagagtgcactagtcactgca

SEQ ID NO: 3925153 - DNA, 25 bp, Homo sapien
gctcatggaaacatgctctgttgcc

SEQ ID NO: 3925154 - DNA, 25 bp, Homo sapien
aatgatttcaaattcgccaatggaa

SEQ ID NO: 3925155 - DNA, 25 bp, Homo sapien
tcaatgatttcaaattcgccaatgg

SEQ ID NO: 3925156 - DNA, 25 bp, Homo sapien
gaggttcactacaattttcccagct

SEQ ID NO: 3925157 - DNA, 25 bp, Homo sapien
tgatttcaaattcgccaatggaacc

SEQ ID NO: 3925158 - DNA, 25 bp, Homo sapien
ggcatcagccaagtcgttcatgtgc

SEQ ID NO: 3925159 - DNA, 25 bp, Homo sapien
cagccaagtcgttcatgtgcaccat

SEQ ID NO: 3925160 - DNA, 25 bp, Homo sapien
tttgcctgtcttttcgacattgctg

SEQ ID NO: 3925161 - DNA, 25 bp, Homo sapien
gtcttttcgacattgctgatgctct

SEQ ID NO: 3925162 - DNA, 25 bp, Homo sapien
catatcatgtgcaaagaacgtcgct

SEQ ID NO: 3925163 - DNA, 25 bp, Homo sapien
taaaacatagttggccggatgcagt

SEQ ID NO: 3925164 - DNA, 25 bp, Homo sapien
taaattaggaaactagagcacccga

SEQ ID NO: 3925165 - DNA, 25 bp, Homo sapien
gactgtgtgctcagataaggaccac

SEQ ID NO: 3925166 - DNA, 25 bp, Homo sapien
tatttaaaatgatccggtctctccc

SEQ ID NO: 3925167 - DNA, 25 bp, Homo sapien
gtatttaaaatgatccggtctctcc

SEQ ID NO: 3925168 - DNA, 25 bp, Homo sapien
tttaaaatgatccggtctctccctc

SEQ ID NO: 3925169 - DNA, 25 bp, Homo sapien
taaaatgatccggtctctccctctc

SEQ ID NO: 3925170 - DNA, 25 bp, Homo sapien
gcttgatgtctcagagtcatatgta

SEQ ID NO: 3925171 - DNA, 25 bp, Homo sapien
tgtccttggacaaagtgcttgatgt

SEQ ID NO: 3925172 - DNA, 25 bp, Homo sapien
tgatagtagtaactgcttcacaggg

SEQ ID NO: 3925173 - DNA, 25 bp, Homo sapien
atgcatgcttaggtttgaatcttgg

SEQ ID NO: 3925174 - DNA, 25 bp, Homo sapien
attgctaaacttcggttcacaaaca

SEQ ID NO: 3925175 - DNA, 25 bp, Homo sapien
tccattgctaaacttcggttcacaa

SEQ ID NO: 3925176 - DNA, 25 bp, Homo sapien
cattgctaaacttcggttcacaaac

SEQ ID NO: 3925177 - DNA, 25 bp, Homo sapien
ttttccattgctaaacttcggttca

SEQ ID NO: 3925178 - DNA, 25 bp, Homo sapien
aggcacacgtcagcaagcccggata

SEQ ID NO: 3925179 - DNA, 25 bp, Homo sapien
gcacacgtcagcaagcccggataat

SEQ ID NO: 3925180 - DNA, 25 bp, Homo sapien
acacgtcagcaagcccggataattt

SEQ ID NO: 3925181 - DNA, 25 bp, Homo sapien
acaggcacacgtcagcaagcccgga

SEQ ID NO: 3925182 - DNA, 25 bp, Homo sapien
gggctcaagcaaccctcctatctcg

SEQ ID NO: 3925183 - DNA, 25 bp, Homo sapien
cctgggctcaagcaaccctcctatc

SEQ ID NO: 3925184 - DNA, 25 bp, Homo sapien
atgttgctctggctcatcttgaact

SEQ ID NO: 3925185 - DNA, 25 bp, Homo sapien
ctatgttgctctggctcatcttgaa

SEQ ID NO: 3925186 - DNA, 25 bp, Homo sapien
gaagattttgtaagccacattaggg

SEQ ID NO: 3925187 - DNA, 25 bp, Homo sapien
atcccagtactttacaaggcaggca

SEQ ID NO: 3925188 - DNA, 25 bp, Homo sapien
gactttatcccgcatttaagaccaa

SEQ ID NO: 3925189 - DNA, 25 bp, Homo sapien
tcagcatgatggtctttcagggtaa

SEQ ID NO: 3925190 - DNA, 25 bp, Homo sapien
tgcttgagcctagacccgggaggca

SEQ ID NO: 3925191 - DNA, 25 bp, Homo sapien
gcttggtagccaaagttaaaactgc

SEQ ID NO: 3925192 - DNA, 25 bp, Homo sapien
ctgcttgagcctagacccgggaggc

SEQ ID NO: 3925193 - DNA, 25 bp, Homo sapien
ccaaagttaaaactgcatggcttct

SEQ ID NO: 3925194 - DNA, 25 bp, Homo sapien
gattcttaattcaggctagagagcc

SEQ ID NO: 3925195 - DNA, 25 bp, Homo sapien
cagtctcagccaagtaccagcttct

SEQ ID NO: 3925196 - DNA, 25 bp, Homo sapien
tacaatccaggagagaagtatgcgg

SEQ ID NO: 3925197 - DNA, 25 bp, Homo sapien
gagattaagcttgtactgtcatgaa

SEQ ID NO: 3925198 - DNA, 25 bp, Homo sapien
taagggcaagtaaagaccacaatga

SEQ ID NO: 3925199 - DNA, 25 bp, Homo sapien
taccattactggtcataagggcaag

SEQ ID NO: 3925200 - DNA, 25 bp, Homo sapien
taataggcaaaacacctaaacagac

SEQ ID NO: 3925201 - DNA, 25 bp, Homo sapien
gaacatgaaaacacgcttaccatta

SEQ ID NO: 3925202 - DNA, 25 bp, Homo sapien
cctggtattatgatgcaatttgccc

SEQ ID NO: 3925203 - DNA, 25 bp, Homo sapien
tatgatgcaatttgcccgtctcacc

SEQ ID NO: 3925204 - DNA, 25 bp, Homo sapien
tcaaactcctggtattatgatgcaa

SEQ ID NO: 3925205 - DNA, 25 bp, Homo sapien
aatttgcccgtctcacctaccagga

SEQ ID NO: 3925206 - DNA, 25 bp, Homo sapien
taatttggagtaattgtagattcac

SEQ ID NO: 3925207 - DNA, 25 bp, Homo sapien
ttaatttggagtaattgtagattca

SEQ ID NO: 3925208 - DNA, 25 bp, Homo sapien
accgtgcctggcttacccaagagaa

SEQ ID NO: 3925209 - DNA, 25 bp, Homo sapien
gtgcctggcttacccaagagaattt

SEQ ID NO: 3925210 - DNA, 25 bp, Homo sapien
ggcacagtcaatgtagagagcagat

SEQ ID NO: 3925211 - DNA, 25 bp, Homo sapien
acctgacttcggtatcctgggcaca

SEQ ID NO: 3925212 - DNA, 25 bp, Homo sapien
ccactgaaaggtttggcctgatgac

SEQ ID NO: 3925213 - DNA, 25 bp, Homo sapien
gcagctcagcttgtcttctaaccat

SEQ ID NO: 3925214 - DNA, 25 bp, Homo sapien
ttgttctaaaagcacacatatactt

SEQ ID NO: 3925215 - DNA, 25 bp, Homo sapien
tgtttttattgttctaaaagcacac

SEQ ID NO: 3925216 - DNA, 25 bp, Homo sapien
tttattgttctaaaagcacacatat

SEQ ID NO: 3925217 - DNA, 25 bp, Homo sapien
tattgttctaaaagcacacatatac

SEQ ID NO: 3925218 - DNA, 25 bp, Homo sapien
cgttagtacccatttgacaggaatc

SEQ ID NO: 3925219 - DNA, 25 bp, Homo sapien
cacacagaagagaatcgttagtacc

SEQ ID NO: 3925220 - DNA, 25 bp, Homo sapien
tcagggtttaaggagtaacagcatc

SEQ ID NO: 3925221 - DNA, 25 bp, Homo sapien
taccatgaggcaaatatcaccagcc

SEQ ID NO: 3925222 - DNA, 25 bp, Homo sapien
tataccagcacctgtacttactgcc

SEQ ID NO: 3925223 - DNA, 25 bp, Homo sapien
tagacttcctgtagttcccatgcaa

SEQ ID NO: 3925224 - DNA, 25 bp, Homo sapien
ttttagcactgccaatataccagca

SEQ ID NO: 3925225 - DNA, 25 bp, Homo sapien
tgtagcccagaaacagctaagtgat

SEQ ID NO: 3925226 - DNA, 25 bp, Homo sapien
aggcaaagatggttctagtagggcc

SEQ ID NO: 3925227 - DNA, 25 bp, Homo sapien
tgggaggcaaagatggttctagtag

SEQ ID NO: 3925228 - DNA, 25 bp, Homo sapien
tctagtagggcccagatttttctac

SEQ ID NO: 3925229 - DNA, 25 bp, Homo sapien
gatggttctagtagggcccagattt

SEQ ID NO: 3925230 - DNA, 25 bp, Homo sapien
cgatgataggcttctcgacgatact

SEQ ID NO: 3925231 - DNA, 25 bp, Homo sapien
taggcttctcgacgatactttttca

SEQ ID NO: 3925232 - DNA, 25 bp, Homo sapien
gcttctcgacgatactttttcaggg

SEQ ID NO: 3925233 - DNA, 25 bp, Homo sapien
ctcgacgatactttttcagggcatg

SEQ ID NO: 3925234 - DNA, 25 bp, Homo sapien
tatctgctgcattctgtaaccgatc

SEQ ID NO: 3925235 - DNA, 25 bp, Homo sapien
gctgcattctgtaaccgatcactcc

SEQ ID NO: 3925236 - DNA, 25 bp, Homo sapien
cattctgtaaccgatcactccagga

SEQ ID NO: 3925237 - DNA, 25 bp, Homo sapien
tgtaaccgatcactccaggaggttg

SEQ ID NO: 3925238 - DNA, 25 bp, Homo sapien
ggcacttgggctgaaaaggccactg

SEQ ID NO: 3925239 - DNA, 25 bp, Homo sapien
tatcttactcatgtggaaacctcca

SEQ ID NO: 3925240 - DNA, 25 bp, Homo sapien
cagcctcccgccgttgagttttagt

SEQ ID NO: 3925241 - DNA, 25 bp, Homo sapien
gaaacctccagcttgtacatcaaat

SEQ ID NO: 3925242 - DNA, 25 bp, Homo sapien
ggcggaggttgaagcagagcttgca

SEQ ID NO: 3925243 - DNA, 25 bp, Homo sapien
gttgggcatggtggtccgtatctgt

SEQ ID NO: 3925244 - DNA, 25 bp, Homo sapien
agaggaagacctgtggctcatgcct

SEQ ID NO: 3925245 - DNA, 25 bp, Homo sapien
gacagaggaagacctgtggctcatg

SEQ ID NO: 3925246 - DNA, 25 bp, Homo sapien
tccagtaacaatactgtaggtagga

SEQ ID NO: 3925247 - DNA, 25 bp, Homo sapien
cagtaacaatactgtaggtaggaaa

SEQ ID NO: 3925248 - DNA, 25 bp, Homo sapien
attctttattacatcagatccaaga

SEQ ID NO: 3925249 - DNA, 25 bp, Homo sapien
ggaaaaccatggaaggcctctttga

SEQ ID NO: 3925250 - DNA, 25 bp, Homo sapien
tagattatctctgcaaccttgtttg

SEQ ID NO: 3925251 - DNA, 25 bp, Homo sapien
cctgaattctactacactgctggaa

SEQ ID NO: 3925252 - DNA, 25 bp, Homo sapien
taagtccctcttcatggctaacaga

SEQ ID NO: 3925253 - DNA, 25 bp, Homo sapien
aaagacaagctatggtttgggacaa

SEQ ID NO: 3925254 - DNA, 25 bp, Homo sapien
taatggccagaaactacaaacaacc

SEQ ID NO: 3925255 - DNA, 25 bp, Homo sapien
gaggaggtattacaaaggagcccag

SEQ ID NO: 3925256 - DNA, 25 bp, Homo sapien
gaacacagaccagtggttccctggg

SEQ ID NO: 3925257 - DNA, 25 bp, Homo sapien
tcgtaataactacactgagtgaaag

SEQ ID NO: 3925258 - DNA, 25 bp, Homo sapien
cacaataagactttttcagccagtg

SEQ ID NO: 3925259 - DNA, 25 bp, Homo sapien
caattatgccacaataagacttttt

SEQ ID NO: 3925260 - DNA, 25 bp, Homo sapien
atgccacaataagactttttcagcc

SEQ ID NO: 3925261 - DNA, 25 bp, Homo sapien
attatgccacaataagactttttca

SEQ ID NO: 3925262 - DNA, 25 bp, Homo sapien
tactccagcctgggcagcagagcga

SEQ ID NO: 3925263 - DNA, 25 bp, Homo sapien
ccagcctgggcagcagagcgaaact

SEQ ID NO: 3925264 - DNA, 25 bp, Homo sapien
cgaggcgaatggatcacttgacgtc

SEQ ID NO: 3925265 - DNA, 25 bp, Homo sapien
ttgacgtcaggagatcacatcactg

SEQ ID NO: 3925266 - DNA, 25 bp, Homo sapien
ggctctaacaccaactagctctacg

SEQ ID NO: 3925267 - DNA, 25 bp, Homo sapien
aacaaggatgtaaggtgctaagaac

SEQ ID NO: 3925268 - DNA, 25 bp, Homo sapien
tggttaagagtacggattctggagc

SEQ ID NO: 3925269 - DNA, 25 bp, Homo sapien
tcttccattgcaaaacaggtagagt

SEQ ID NO: 3925270 - DNA, 25 bp, Homo sapien
aaaagagtgtgggatgaaagagcct

SEQ ID NO: 3925271 - DNA, 25 bp, Homo sapien
tcagcatgcctgtagtactcgggag

SEQ ID NO: 3925272 - DNA, 25 bp, Homo sapien
cagaaaattctgtataacatacgaa

SEQ ID NO: 3925273 - DNA, 25 bp, Homo sapien
agcctgcttgtactatgtgcttgga

SEQ ID NO: 3925274 - DNA, 25 bp, Homo sapien
cctggccggtttgccgcattaattt

SEQ ID NO: 3925275 - DNA, 25 bp, Homo sapien
cggtttgccgcattaattttgtggc

SEQ ID NO: 3925276 - DNA, 25 bp, Homo sapien
ttgccgcattaattttgtggctttc

SEQ ID NO: 3925277 - DNA, 25 bp, Homo sapien
cgcacctggccggtttgccgcatta

SEQ ID NO: 3925278 - DNA, 25 bp, Homo sapien
tctgggtcaatgagagtaatgcagc

SEQ ID NO: 3925279 - DNA, 25 bp, Homo sapien
tctgaaaacttgtagctgatggtaa

SEQ ID NO: 3925280 - DNA, 25 bp, Homo sapien
tatgctagtatcaaccctgcatgtg

SEQ ID NO: 3925281 - DNA, 25 bp, Homo sapien
tcttctggttaagggtggcaggtac

SEQ ID NO: 3925282 - DNA, 25 bp, Homo sapien
gcattcgttgcttgaagaggcgaaa

SEQ ID NO: 3925283 - DNA, 25 bp, Homo sapien
gaaacctaaagccttctctacgcaa

SEQ ID NO: 3925284 - DNA, 25 bp, Homo sapien
tccctttcacattatggtcagtagt

SEQ ID NO: 3925285 - DNA, 25 bp, Homo sapien
ttctaaccgttgttgaaaagccatg

SEQ ID NO: 3925286 - DNA, 25 bp, Homo sapien
tgtggcggcttgcaattcgctgtga

SEQ ID NO: 3925287 - DNA, 25 bp, Homo sapien
cctgaccaggagctgtccggatgtt

SEQ ID NO: 3925288 - DNA, 25 bp, Homo sapien
tccaggaagtgttgcacacgggcgt

SEQ ID NO: 3925289 - DNA, 25 bp, Homo sapien
aaaggagaagaataggccgccactg

SEQ ID NO: 3925290 - DNA, 25 bp, Homo sapien
gggccggaggcgtcgcggcggcgcg

SEQ ID NO: 3925291 - DNA, 25 bp, Homo sapien
gtgggccggaggcgtcgcggcggcg

SEQ ID NO: 3925292 - DNA, 25 bp, Homo sapien
tgggccggaggcgtcgcggcggcgc

SEQ ID NO: 3925293 - DNA, 25 bp, Homo sapien
gaggcgtgcggcgtccgcgagcgcg

SEQ ID NO: 3925294 - DNA, 25 bp, Homo sapien
agggagttgggaggcgtgcggcgtc

SEQ ID NO: 3925295 - DNA, 25 bp, Homo sapien
tgcggcgtccgcgagcgcgctggcg

SEQ ID NO: 3925296 - DNA, 25 bp, Homo sapien
gttgggaggcgtgcggcgtccgcga

SEQ ID NO: 3925297 - DNA, 25 bp, Homo sapien
gtcccgcgggtctggagatcttcaa

SEQ ID NO: 3925298 - DNA, 25 bp, Homo sapien
gagttcggcgaagccgacgctccct

SEQ ID NO: 3925299 - DNA, 25 bp, Homo sapien
atggaacaccggctttgcccttctg

SEQ ID NO: 3925300 - DNA, 25 bp, Homo sapien
cagctccgccgcagagttcggcgaa

SEQ ID NO: 3925301 - DNA, 25 bp, Homo sapien
gattatgttgttttctctcagtgat

SEQ ID NO: 3925302 - DNA, 25 bp, Homo sapien
gactacagggaaatatgtaattgat

SEQ ID NO: 3925303 - DNA, 25 bp, Homo sapien
actgcacacgcaaaagactacaggg

SEQ ID NO: 3925304 - DNA, 25 bp, Homo sapien
cagtgataagatggggtggtttctt

SEQ ID NO: 3925305 - DNA, 25 bp, Homo sapien
aaataggcactcaaacggatacttg

SEQ ID NO: 3925306 - DNA, 25 bp, Homo sapien
tgttgtcattcctcgaaaaaattaa

SEQ ID NO: 3925307 - DNA, 25 bp, Homo sapien
tgtacacaaatattcgtatcaccat

SEQ ID NO: 3925308 - DNA, 25 bp, Homo sapien
tcaccattttcacaatgcccaaaag

SEQ ID NO: 3925309 - DNA, 25 bp, Homo sapien
cctgccaggtattttgctaggctct

SEQ ID NO: 3925310 - DNA, 25 bp, Homo sapien
ctgatttagactatgacctggtctc

SEQ ID NO: 3925311 - DNA, 25 bp, Homo sapien
ctccctgccaggtattttgctaggc

SEQ ID NO: 3925312 - DNA, 25 bp, Homo sapien
tacttttctgatttagactatgacc

SEQ ID NO: 3925313 - DNA, 25 bp, Homo sapien
gacccctgcatgatttgttagaagt

SEQ ID NO: 3925314 - DNA, 25 bp, Homo sapien
gaagtgcaccactaaatcagcccac

SEQ ID NO: 3925315 - DNA, 25 bp, Homo sapien
tatttcctatttgggtctacgctga

SEQ ID NO: 3925316 - DNA, 25 bp, Homo sapien
tcatcagtggactttatctgcagca

SEQ ID NO: 3925317 - DNA, 25 bp, Homo sapien
cacttccgaagcagtcgattcttgg

SEQ ID NO: 3925318 - DNA, 25 bp, Homo sapien
tttagtgccctaacgatgagcccca

SEQ ID NO: 3925319 - DNA, 25 bp, Homo sapien
tgtaactggaaaaacacgacctcgc

SEQ ID NO: 3925320 - DNA, 25 bp, Homo sapien
ttgctgaacatctttccgcccggag

SEQ ID NO: 3925321 - DNA, 25 bp, Homo sapien
tctgtagctcgcgttgaagccgcac

SEQ ID NO: 3925322 - DNA, 25 bp, Homo sapien
catgagcttcggctcggagcactac

SEQ ID NO: 3925323 - DNA, 25 bp, Homo sapien
ggcgcgcaccaacgagtacaagatc

SEQ ID NO: 3925324 - DNA, 25 bp, Homo sapien
gtacaagatcatccgcaccaacgag

SEQ ID NO: 3925325 - DNA, 25 bp, Homo sapien
ccttttacgagtgctaagtgtagga

SEQ ID NO: 3925326 - DNA, 25 bp, Homo sapien
cactagcctaggtcataaagaggcg

SEQ ID NO: 3925327 - DNA, 25 bp, Homo sapien
gaggcgttgctttcactctcctatg

SEQ ID NO: 3925328 - DNA, 25 bp, Homo sapien
tggtcaatcaacactaccagcgtat

SEQ ID NO: 3925329 - DNA, 25 bp, Homo sapien
aagatgactgcccaactgatgccat

SEQ ID NO: 3925330 - DNA, 25 bp, Homo sapien
gagtacaccctgcagtttaacaaag

SEQ ID NO: 3925331 - DNA, 25 bp, Homo sapien
tatcccaaccaccaacttgaaatgg

SEQ ID NO: 3925332 - DNA, 25 bp, Homo sapien
atcccagagagcagatatcccaacc

SEQ ID NO: 3925333 - DNA, 25 bp, Homo sapien
cagaggagaaaccacaagaccataa

SEQ ID NO: 3925334 - DNA, 25 bp, Homo sapien
cataatgaaggacaagcagaccatc

SEQ ID NO: 3925335 - DNA, 25 bp, Homo sapien
aagaccataatgaaggacaagcaga

SEQ ID NO: 3925336 - DNA, 25 bp, Homo sapien
ttatcttcagaggagaaaccacaag

SEQ ID NO: 3925337 - DNA, 25 bp, Homo sapien
acaggaccaatgatcaccagctgcc

SEQ ID NO: 3925338 - DNA, 25 bp, Homo sapien
caaacgatgccctatgtgtgccact

SEQ ID NO: 3925339 - DNA, 25 bp, Homo sapien
gcaccaagagcaaacgatgccctat

SEQ ID NO: 3925340 - DNA, 25 bp, Homo sapien
ctcttgatgttgattctggcaccaa

SEQ ID NO: 3925341 - DNA, 25 bp, Homo sapien
tattgcacgtcggatttcccttaga

SEQ ID NO: 3925342 - DNA, 25 bp, Homo sapien
gctccaacaggtgatcaccacagat

SEQ ID NO: 3925343 - DNA, 25 bp, Homo sapien
gcattgctgcatcacctattgcacg

SEQ ID NO: 3925344 - DNA, 25 bp, Homo sapien
tagagtttgatactgctccaacagg

SEQ ID NO: 3925345 - DNA, 25 bp, Homo sapien
tccaaagcctaaatgccatctcagg

SEQ ID NO: 3925346 - DNA, 25 bp, Homo sapien
tcggcaaaccgtttctgcaaagggc

SEQ ID NO: 3925347 - DNA, 25 bp, Homo sapien
taagcagccactatgtacaataagt

SEQ ID NO: 3925348 - DNA, 25 bp, Homo sapien
cacggtgtggctgtgctttcaattc

SEQ ID NO: 3925349 - DNA, 25 bp, Homo sapien
tgtaataatatattgtaggctgggc

SEQ ID NO: 3925350 - DNA, 25 bp, Homo sapien
gtaataatatattgtaggctgggcg

SEQ ID NO: 3925351 - DNA, 25 bp, Homo sapien
ctatatgtaataatatattgtaggc

SEQ ID NO: 3925352 - DNA, 25 bp, Homo sapien
tatgtaataatatattgtaggctgg

SEQ ID NO: 3925353 - DNA, 25 bp, Homo sapien
tattgctgtcgctcaggctcagtgc

SEQ ID NO: 3925354 - DNA, 25 bp, Homo sapien
cagtgtattgctgtcgctcaggctc

SEQ ID NO: 3925355 - DNA, 25 bp, Homo sapien
taggagctaggactactaggattac

SEQ ID NO: 3925356 - DNA, 25 bp, Homo sapien
tccctaggagctaggactactagga

SEQ ID NO: 3925357 - DNA, 25 bp, Homo sapien
tctcctgaaactcgaacaaacttct

SEQ ID NO: 3925358 - DNA, 25 bp, Homo sapien
caagctggatcaagacccatttttc

SEQ ID NO: 3925359 - DNA, 25 bp, Homo sapien
atttttctacatgtccaatagttgc

SEQ ID NO: 3925360 - DNA, 25 bp, Homo sapien
ctgacaagctggatcaagacccatt

SEQ ID NO: 3925361 - DNA, 25 bp, Homo sapien
gtttcactgttagccagcatggtct

SEQ ID NO: 3925362 - DNA, 25 bp, Homo sapien
ttcactgttagccagcatggtctca

SEQ ID NO: 3925363 - DNA, 25 bp, Homo sapien
gggtttcactgttagccagcatggt

SEQ ID NO: 3925364 - DNA, 25 bp, Homo sapien
atagggtttcactgttagccagcat

SEQ ID NO: 3925365 - DNA, 25 bp, Homo sapien
ttaaaatgtcccgtgccttcattag

SEQ ID NO: 3925366 - DNA, 25 bp, Homo sapien
taaaatgtcccgtgccttcattagc

SEQ ID NO: 3925367 - DNA, 25 bp, Homo sapien
aaaatgtcccgtgccttcattagca

SEQ ID NO: 3925368 - DNA, 25 bp, Homo sapien
cttaaaatgtcccgtgccttcatta

SEQ ID NO: 3925369 - DNA, 25 bp, Homo sapien
actccagtaataaagacatatcaag

SEQ ID NO: 3925370 - DNA, 25 bp, Homo sapien
ccagtaataaagacatatcaagttc

SEQ ID NO: 3925371 - DNA, 25 bp, Homo sapien
tccagtaataaagacatatcaagtt

SEQ ID NO: 3925372 - DNA, 25 bp, Homo sapien
ctccagtaataaagacatatcaagt

SEQ ID NO: 3925373 - DNA, 25 bp, Homo sapien
caggtttaggtacttctagacctct

SEQ ID NO: 3925374 - DNA, 25 bp, Homo sapien
tcctctagattgatcactaatttgt

SEQ ID NO: 3925375 - DNA, 25 bp, Homo sapien
taatttgtacactatgtcttgtaac

SEQ ID NO: 3925376 - DNA, 25 bp, Homo sapien
ctaatttgtacactatgtcttgtaa

SEQ ID NO: 3925377 - DNA, 25 bp, Homo sapien
ctagattgatcactaatttgtacac

SEQ ID NO: 3925378 - DNA, 25 bp, Homo sapien
cactcctggctaatagtggagatgg

SEQ ID NO: 3925379 - DNA, 25 bp, Homo sapien
ttattccaactatataacttcaagc

SEQ ID NO: 3925380 - DNA, 25 bp, Homo sapien
cattagccactgaacccatcctgag

SEQ ID NO: 3925381 - DNA, 25 bp, Homo sapien
agccactgaacccatcctgagaggt

SEQ ID NO: 3925382 - DNA, 25 bp, Homo sapien
gtagtaaaaatgtcttacgatgcag

SEQ ID NO: 3925383 - DNA, 25 bp, Homo sapien
tgatgtactactatattgcattttg

SEQ ID NO: 3925384 - DNA, 25 bp, Homo sapien
tggacatctgttgctgtagtaaaaa

SEQ ID NO: 3925385 - DNA, 25 bp, Homo sapien
cttatgttataaagaggttgtgtct

SEQ ID NO: 3925386 - DNA, 25 bp, Homo sapien
ggtagttgcatctattaagtaacct

SEQ ID NO: 3925387 - DNA, 25 bp, Homo sapien
atggtagttgcatctattaagtaac

SEQ ID NO: 3925388 - DNA, 25 bp, Homo sapien
tatggggtcagctcagagagattaa

SEQ ID NO: 3925389 - DNA, 25 bp, Homo sapien
tgtgatggtagttgcatctattaag

SEQ ID NO: 3925390 - DNA, 25 bp, Homo sapien
tcctcgaagcggcctctgaagcggc

SEQ ID NO: 3925391 - DNA, 25 bp, Homo sapien
aacgagaagtgactcatgtcctcct

SEQ ID NO: 3925392 - DNA, 25 bp, Homo sapien
agcggcctctgaagcggcccaggct

SEQ ID NO: 3925393 - DNA, 25 bp, Homo sapien
tccctccagcctcaacgagaagtga

SEQ ID NO: 3925394 - DNA, 25 bp, Homo sapien
cggaggcggcaaggctgcagctccc

SEQ ID NO: 3925395 - DNA, 25 bp, Homo sapien
ctccctcggttttggcagcgcctac

SEQ ID NO: 3925396 - DNA, 25 bp, Homo sapien
gcggaggcggcaaggctgcagctcc

SEQ ID NO: 3925397 - DNA, 25 bp, Homo sapien
cagctccctcggttttggcagcgcc

SEQ ID NO: 3925398 - DNA, 25 bp, Homo sapien
gccgtcaccaccgcgaccccctcca

SEQ ID NO: 3925399 - DNA, 25 bp, Homo sapien
ccgtcaccaccgcgaccccctccat

SEQ ID NO: 3925400 - DNA, 25 bp, Homo sapien
cgggagagacaccaggcgaggcgag

SEQ ID NO: 3925401 - DNA, 25 bp, Homo sapien
tcgggagagacaccaggcgaggcga

SEQ ID NO: 3925402 - DNA, 25 bp, Homo sapien
gcggggcgcaaaccctgcagctccg

SEQ ID NO: 3925403 - DNA, 25 bp, Homo sapien
ctccgcggggcgcaaaccctgcagc

SEQ ID NO: 3925404 - DNA, 25 bp, Homo sapien
ccgcggggcgcaaaccctgcagctc

SEQ ID NO: 3925405 - DNA, 25 bp, Homo sapien
gggcgcaaaccctgcagctccgggg

SEQ ID NO: 3925406 - DNA, 25 bp, Homo sapien
taaaaatatggccaagcgaggtggc

SEQ ID NO: 3925407 - DNA, 25 bp, Homo sapien
ttaaaaatatggccaagcgaggtgg

SEQ ID NO: 3925408 - DNA, 25 bp, Homo sapien
ggtattacaccatcatattcttcag

SEQ ID NO: 3925409 - DNA, 25 bp, Homo sapien
gcgcatacctgataattacttccat

SEQ ID NO: 3925410 - DNA, 25 bp, Homo sapien
cagaggacaaccctgtgaaagccag

SEQ ID NO: 3925411 - DNA, 25 bp, Homo sapien
tacctggtattacaccatcatattc

SEQ ID NO: 3925412 - DNA, 25 bp, Homo sapien
gcacccaaacactcgataaaccagg

SEQ ID NO: 3925413 - DNA, 25 bp, Homo sapien
gtacacttgaagtcagacagacatt

SEQ ID NO: 3925414 - DNA, 25 bp, Homo sapien
agacatttcagttgcttacctccag

SEQ ID NO: 3925415 - DNA, 25 bp, Homo sapien
gctacatacaacctagtacacttga

SEQ ID NO: 3925416 - DNA, 25 bp, Homo sapien
acaaattgaattatcacatgatgag

SEQ ID NO: 3925417 - DNA, 25 bp, Homo sapien
cacatgatgagttggcattagcttc

SEQ ID NO: 3925418 - DNA, 25 bp, Homo sapien
ccaggcatgggaacttaacagatga

SEQ ID NO: 3925419 - DNA, 25 bp, Homo sapien
ggcattagcttctccaggcatggga

SEQ ID NO: 3925420 - DNA, 25 bp, Homo sapien
tcggatatgcactccctaaggtcaa

SEQ ID NO: 3925421 - DNA, 25 bp, Homo sapien
tacctgttcgtcaggaataagccag

SEQ ID NO: 3925422 - DNA, 25 bp, Homo sapien
aattgggcaaaatactacctgttcg

SEQ ID NO: 3925423 - DNA, 25 bp, Homo sapien
gatactaccacccttctgaagttag

SEQ ID NO: 3925424 - DNA, 25 bp, Homo sapien
aatcaatgcaatgcttccatatgtg

SEQ ID NO: 3925425 - DNA, 25 bp, Homo sapien
aagacaatcaatgcaatgcttccat

SEQ ID NO: 3925426 - DNA, 25 bp, Homo sapien
aatgcaatgcttccatatgtggcca

SEQ ID NO: 3925427 - DNA, 25 bp, Homo sapien
tgcaatgcttccatatgtggccagt

SEQ ID NO: 3925428 - DNA, 25 bp, Homo sapien
taaaatataactgcttaaagttatc

SEQ ID NO: 3925429 - DNA, 25 bp, Homo sapien
taataccagtgaactggtattgcgc

SEQ ID NO: 3925430 - DNA, 25 bp, Homo sapien
tgaactggtattgcgcatcactttc

SEQ ID NO: 3925431 - DNA, 25 bp, Homo sapien
tattgcgcatcactttctggacctg

SEQ ID NO: 3925432 - DNA, 25 bp, Homo sapien
ctgtgagagtataagagttgaaata

SEQ ID NO: 3925433 - DNA, 25 bp, Homo sapien
gacaagacgtattcaaaaggtcacc

SEQ ID NO: 3925434 - DNA, 25 bp, Homo sapien
gacgccacgccgagtcgattggcaa

SEQ ID NO: 3925435 - DNA, 25 bp, Homo sapien
gattggcaacacagacgagccggtc

SEQ ID NO: 3925436 - DNA, 25 bp, Homo sapien
tgaaaattcgtatgcatgaccgcct

SEQ ID NO: 3925437 - DNA, 25 bp, Homo sapien
ggccttcccactgatcgtctataga

SEQ ID NO: 3925438 - DNA, 25 bp, Homo sapien
aaggctgcagcgcacctaaaggagg

SEQ ID NO: 3925439 - DNA, 25 bp, Homo sapien
gccgggccacattcactcgctttga

SEQ ID NO: 3925440 - DNA, 25 bp, Homo sapien
cctaaagcacagctcggtgggaaca

SEQ ID NO: 3925441 - DNA, 25 bp, Homo sapien
ctatggacatacagaagaaaagagg

SEQ ID NO: 3925442 - DNA, 25 bp, Homo sapien
tatggacatacagaagaaaagaggt

SEQ ID NO: 3925443 - DNA, 25 bp, Homo sapien
atggacatacagaagaaaagaggtt

SEQ ID NO: 3925444 - DNA, 25 bp, Homo sapien
tccgcagctggtgtccttcaacgaa

SEQ ID NO: 3925445 - DNA, 25 bp, Homo sapien
tgccaaagccgcaaattccgcagct

SEQ ID NO: 3925446 - DNA, 25 bp, Homo sapien
tcaacgaatgtaaccacctctcggc

SEQ ID NO: 3925447 - DNA, 25 bp, Homo sapien
ggtgtccttcaacgaatgtaaccac

SEQ ID NO: 3925448 - DNA, 25 bp, Homo sapien
tgtgtgacataaaggcacctgggag

SEQ ID NO: 3925449 - DNA, 25 bp, Homo sapien
gagcttttggcccatgttcctctcg

SEQ ID NO: 3925450 - DNA, 25 bp, Homo sapien
gggtacctcttaaggtgtgtgtgac

SEQ ID NO: 3925451 - DNA, 25 bp, Homo sapien
atgttcctctcgcccagctgtgtga

SEQ ID NO: 3925452 - DNA, 25 bp, Homo sapien
ctggtagagctgtctttcctccccg

SEQ ID NO: 3925453 - DNA, 25 bp, Homo sapien
cttcaggcttcgcttggaatgtggg

SEQ ID NO: 3925454 - DNA, 25 bp, Homo sapien
tgagaagccacaccaagccacggtg

SEQ ID NO: 3925455 - DNA, 25 bp, Homo sapien
tcagacagcgaggaggatgagaagc

SEQ ID NO: 3925456 - DNA, 25 bp, Homo sapien
tggaatgtgggactagactctctga

SEQ ID NO: 3925457 - DNA, 25 bp, Homo sapien
caacagctccattctgtggctgcag

SEQ ID NO: 3925458 - DNA, 25 bp, Homo sapien
ccagagtccgcggatgattttgacc

SEQ ID NO: 3925459 - DNA, 25 bp, Homo sapien
acctgcaggccacggagatcgagaa

SEQ ID NO: 3925460 - DNA, 25 bp, Homo sapien
gaactgtcccgcattgaggaggcgc

SEQ ID NO: 3925461 - DNA, 25 bp, Homo sapien
agaagctgaacgtgtgggtggctct

SEQ ID NO: 3925462 - DNA, 25 bp, Homo sapien
gagaagctgaacgtgtgggtggctc

SEQ ID NO: 3925463 - DNA, 25 bp, Homo sapien
gcaggagaagctgaacgtgtgggtg

SEQ ID NO: 3925464 - DNA, 25 bp, Homo sapien
ggagaagctgaacgtgtgggtggct

SEQ ID NO: 3925465 - DNA, 25 bp, Homo sapien
agttgttgaagccagttcttttttg

SEQ ID NO: 3925466 - DNA, 25 bp, Homo sapien
gaactgatgatgtctcatcccacgc

SEQ ID NO: 3925467 - DNA, 25 bp, Homo sapien
aaagccacgggtgttggcgtgaact

SEQ ID NO: 3925468 - DNA, 25 bp, Homo sapien
gcacagacccagctagttgttgaag

SEQ ID NO: 3925469 - DNA, 25 bp, Homo sapien
tagagtaccataaaggagcccactg

SEQ ID NO: 3925470 - DNA, 25 bp, Homo sapien
gattgccttgtggtcctttcccctg

SEQ ID NO: 3925471 - DNA, 25 bp, Homo sapien
ccattgtctactgggtctgtccaca

SEQ ID NO: 3925472 - DNA, 25 bp, Homo sapien
ggaccaagtagtgccatttacaaag

SEQ ID NO: 3925473 - DNA, 25 bp, Homo sapien
ttctcacggtacaagtagacgccgg

SEQ ID NO: 3925474 - DNA, 25 bp, Homo sapien
gcccacttgtgcaggcggctgtaga

SEQ ID NO: 3925475 - DNA, 25 bp, Homo sapien
gctggtcctcattggcgcggtactg

SEQ ID NO: 3925476 - DNA, 25 bp, Homo sapien
aagaagcggcgcacattgttggcag

SEQ ID NO: 3925477 - DNA, 25 bp, Homo sapien
aggatggccaccacgccgatgagca

SEQ ID NO: 3925478 - DNA, 25 bp, Homo sapien
ggatggccaccacgccgatgagcag

SEQ ID NO: 3925479 - DNA, 25 bp, Homo sapien
cgccgatgagcagccatccaaagag

SEQ ID NO: 3925480 - DNA, 25 bp, Homo sapien
ccacgccgatgagcagccatccaaa

SEQ ID NO: 3925481 - DNA, 25 bp, Homo sapien
tgatacctaacgctagtgctttccc

SEQ ID NO: 3925482 - DNA, 25 bp, Homo sapien
taatttggtcatatacaactgagat

SEQ ID NO: 3925483 - DNA, 25 bp, Homo sapien
accagttaaccagccctgataccta

SEQ ID NO: 3925484 - DNA, 25 bp, Homo sapien
aaactgtcttatttgtgtctggaac

SEQ ID NO: 3925485 - DNA, 25 bp, Homo sapien
actcggccacgaggttccaggtgtg

SEQ ID NO: 3925486 - DNA, 25 bp, Homo sapien
aagggtccacgaactcactgagagc

SEQ ID NO: 3925487 - DNA, 25 bp, Homo sapien
agtgctcttccctggccgtgagtga

SEQ ID NO: 3925488 - DNA, 25 bp, Homo sapien
gccaccaggccgttgaaaatcatca

SEQ ID NO: 3925489 - DNA, 25 bp, Homo sapien
acgggattgatggttgctggtggta

SEQ ID NO: 3925490 - DNA, 25 bp, Homo sapien
ggcgatagtcgtggcggggtggatt

SEQ ID NO: 3925491 - DNA, 25 bp, Homo sapien
ggaggagacgggattgatggttgct

SEQ ID NO: 3925492 - DNA, 25 bp, Homo sapien
tggcggggtggattgcaggagagga

SEQ ID NO: 3925493 - DNA, 25 bp, Homo sapien
agggtgtggttgtgctattttatcc

SEQ ID NO: 3925494 - DNA, 25 bp, Homo sapien
gctgggaggcgctggacggcagggt

SEQ ID NO: 3925495 - DNA, 25 bp, Homo sapien
ggtgtggttgtgctattttatcccc

SEQ ID NO: 3925496 - DNA, 25 bp, Homo sapien
ggctgggaggcgctggacggcaggg

SEQ ID NO: 3925497 - DNA, 25 bp, Homo sapien
gcagatgaccgataagtgtttccct

SEQ ID NO: 3925498 - DNA, 25 bp, Homo sapien
cttcctgaggacgagtggctcgcca

SEQ ID NO: 3925499 - DNA, 25 bp, Homo sapien
agtcccacgttgagctgtgtgcccg

SEQ ID NO: 3925500 - DNA, 25 bp, Homo sapien
cccgccgtgcactagggaaagtgaa

SEQ ID NO: 3925501 - DNA, 25 bp, Homo sapien
ttaggttctttttgccaccacgagc

SEQ ID NO: 3925502 - DNA, 25 bp, Homo sapien
gtccaggtggcgcatattagcagag

SEQ ID NO: 3925503 - DNA, 25 bp, Homo sapien
gaatccctggagttcgcaaggacat

SEQ ID NO: 3925504 - DNA, 25 bp, Homo sapien
tccttggatccagggcgtgtcctta

SEQ ID NO: 3925505 - DNA, 25 bp, Homo sapien
cttgccgtgtccatccacgggtgtc

SEQ ID NO: 3925506 - DNA, 25 bp, Homo sapien
catccacgggtgtcccgaagaacct

SEQ ID NO: 3925507 - DNA, 25 bp, Homo sapien
gtccatccacgggtgtcccgaagaa

SEQ ID NO: 3925508 - DNA, 25 bp, Homo sapien
cgtgtccatccacgggtgtcccgaa

SEQ ID NO: 3925509 - DNA, 25 bp, Homo sapien
ccttggtctgggctgtagcgacgct

SEQ ID NO: 3925510 - DNA, 25 bp, Homo sapien
cagctcatccggagattattctgcc

SEQ ID NO: 3925511 - DNA, 25 bp, Homo sapien
gaccaaaggctcagcggtgccacca

SEQ ID NO: 3925512 - DNA, 25 bp, Homo sapien
gtgccaccagctcatccggagatta

SEQ ID NO: 3925513 - DNA, 25 bp, Homo sapien
ccatgcttcatggagggatcacccc

SEQ ID NO: 3925514 - DNA, 25 bp, Homo sapien
ttctgtccctgccaaggaaggctgc

SEQ ID NO: 3925515 - DNA, 25 bp, Homo sapien
gggtgagcgccaaacacagacctag

SEQ ID NO: 3925516 - DNA, 25 bp, Homo sapien
catggcctcgggcaacagcgaagtt

SEQ ID NO: 3925517 - DNA, 25 bp, Homo sapien
cggggccggactctccaagtggcct

SEQ ID NO: 3925518 - DNA, 25 bp, Homo sapien
ctcggggccggactctccaagtggc

SEQ ID NO: 3925519 - DNA, 25 bp, Homo sapien
ggcctcctcggggccggactctcca

SEQ ID NO: 3925520 - DNA, 25 bp, Homo sapien
tcctcggggccggactctccaagtg

SEQ ID NO: 3925521 - DNA, 25 bp, Homo sapien
gggctggtggcggcttcagactaat

SEQ ID NO: 3925522 - DNA, 25 bp, Homo sapien
agtgggatggagtctgcgcgccagt

SEQ ID NO: 3925523 - DNA, 25 bp, Homo sapien
gggatggagtctgcgcgccagtgag

SEQ ID NO: 3925524 - DNA, 25 bp, Homo sapien
ggagtctgcgcgccagtgagtggaa

SEQ ID NO: 3925525 - DNA, 25 bp, Homo sapien
gagtctgcgcgccagtgagtggaaa

SEQ ID NO: 3925526 - DNA, 25 bp, Homo sapien
aggcattggggagatctgacccaga

SEQ ID NO: 3925527 - DNA, 25 bp, Homo sapien
ccaatgggaccagtcgggagggcca

SEQ ID NO: 3925528 - DNA, 25 bp, Homo sapien
gcccagacccggaccgggccatgct

SEQ ID NO: 3925529 - DNA, 25 bp, Homo sapien
acagtttcaagagcaccccacgtac

SEQ ID NO: 3925530 - DNA, 25 bp, Homo sapien
tccctcagagttgtccattgactgg

SEQ ID NO: 3925531 - DNA, 25 bp, Homo sapien
tggacaaaccatccccaatgctgac

SEQ ID NO: 3925532 - DNA, 25 bp, Homo sapien
gacctatagtcagctaactccccgg

SEQ ID NO: 3925533 - DNA, 25 bp, Homo sapien
cctgcttcggatccctggagggctg

SEQ ID NO: 3925534 - DNA, 25 bp, Homo sapien
tgaactcaggtgtgcctgacccaaa

SEQ ID NO: 3925535 - DNA, 25 bp, Homo sapien
catttgtacctcctgatacctccgg

SEQ ID NO: 3925536 - DNA, 25 bp, Homo sapien
ggcggtgctgagaaacctatctgta

SEQ ID NO: 3925537 - DNA, 25 bp, Homo sapien
ccttagatgcttgggacttatgtct

SEQ ID NO: 3925538 - DNA, 25 bp, Homo sapien
atggaagctcgagtgtttgtgttgc

SEQ ID NO: 3925539 - DNA, 25 bp, Homo sapien
agatggaagctcgagtgtttgtgtt

SEQ ID NO: 3925540 - DNA, 25 bp, Homo sapien
agctcgagtgtttgtgttgctgtct

SEQ ID NO: 3925541 - DNA, 25 bp, Homo sapien
gaagctcgagtgtttgtgttgctgt

SEQ ID NO: 3925542 - DNA, 25 bp, Homo sapien
taaataaacatgcagtccacctgga

SEQ ID NO: 3925543 - DNA, 25 bp, Homo sapien
tcccctggagacctggatgtgacgg

SEQ ID NO: 3925544 - DNA, 25 bp, Homo sapien
aaatacattagccaccctgtgctgg

SEQ ID NO: 3925545 - DNA, 25 bp, Homo sapien
tgtgtctaacttctcaagccttggg

SEQ ID NO: 3925546 - DNA, 25 bp, Homo sapien
ttcatgagacgcctgatgattccca

SEQ ID NO: 3925547 - DNA, 25 bp, Homo sapien
cagagggctcccacttcatgagacg

SEQ ID NO: 3925548 - DNA, 25 bp, Homo sapien
ctacgacacgcttgcccaaatcaga

SEQ ID NO: 3925549 - DNA, 25 bp, Homo sapien
acagccacagacgagggtggaccct

SEQ ID NO: 3925550 - DNA, 25 bp, Homo sapien
gggaggagacagtgaacatcagcct

SEQ ID NO: 3925551 - DNA, 25 bp, Homo sapien
agacagtgaacatcagcctgggaag

SEQ ID NO: 3925552 - DNA, 25 bp, Homo sapien
cagaggggagccattggtccctgta

SEQ ID NO: 3925553 - DNA, 25 bp, Homo sapien
agaggggagccattggtccctgtac

SEQ ID NO: 3925554 - DNA, 25 bp, Homo sapien
tgccatgacagttccgaccccttta

SEQ ID NO: 3925555 - DNA, 25 bp, Homo sapien
tgacagttccgacccctttagacta

SEQ ID NO: 3925556 - DNA, 25 bp, Homo sapien
ccctttagactaatactgctcatgg

SEQ ID NO: 3925557 - DNA, 25 bp, Homo sapien
ctaatactgctcatgggcccactgc

SEQ ID NO: 3925558 - DNA, 25 bp, Homo sapien
tagggccatccagggcagtgtcaca

SEQ ID NO: 3925559 - DNA, 25 bp, Homo sapien
gggagtactgcccagcactgaaacc

SEQ ID NO: 3925560 - DNA, 25 bp, Homo sapien
gctgtgggctcagatccccgttcct

SEQ ID NO: 3925561 - DNA, 25 bp, Homo sapien
gcctccaatgggcaggcgagtgcta

SEQ ID NO: 3925562 - DNA, 25 bp, Homo sapien
tgctccgtgcacgtctcgtcgaaga

SEQ ID NO: 3925563 - DNA, 25 bp, Homo sapien
catggtgccttgatccgtgatgcca

SEQ ID NO: 3925564 - DNA, 25 bp, Homo sapien
catggcctcgaagaactgctggatg

SEQ ID NO: 3925565 - DNA, 25 bp, Homo sapien
gcatttgtgccagctcgtgagcagc

SEQ ID NO: 3925566 - DNA, 25 bp, Homo sapien
tgccgttgcccagtgcgctcacggg

SEQ ID NO: 3925567 - DNA, 25 bp, Homo sapien
aagcatttgccgtcgagtagcgtga

SEQ ID NO: 3925568 - DNA, 25 bp, Homo sapien
gccagtcgccatcgtagatctcagg

SEQ ID NO: 3925569 - DNA, 25 bp, Homo sapien
cgctcacgggcacggcagtgcagaa

SEQ ID NO: 3925570 - DNA, 25 bp, Homo sapien
taggctgcattgtagcccggcaggc

SEQ ID NO: 3925571 - DNA, 25 bp, Homo sapien
aggatgcccgcgctgtaggctgcat

SEQ ID NO: 3925572 - DNA, 25 bp, Homo sapien
aagtcgaaggccgagtacatctggg

SEQ ID NO: 3925573 - DNA, 25 bp, Homo sapien
caggaactggaagatcatccggaac

SEQ ID NO: 3925574 - DNA, 25 bp, Homo sapien
tgggtgcccacctcatgactcgggc

SEQ ID NO: 3925575 - DNA, 25 bp, Homo sapien
gggtgcccacctcatgactcgggct

SEQ ID NO: 3925576 - DNA, 25 bp, Homo sapien
cactgggtgcccacctcatgactcg

SEQ ID NO: 3925577 - DNA, 25 bp, Homo sapien
ctcatgactcgggctctcctggctg

SEQ ID NO: 3925578 - DNA, 25 bp, Homo sapien
actccagaactttgtcagcgcggca

SEQ ID NO: 3925579 - DNA, 25 bp, Homo sapien
taacaagacttagggtgcctgccgt

SEQ ID NO: 3925580 - DNA, 25 bp, Homo sapien
tcggtgaaccgagtccacattaaag

SEQ ID NO: 3925581 - DNA, 25 bp, Homo sapien
cattaaagtttgtgaagcgcgctgg

SEQ ID NO: 3925582 - DNA, 25 bp, Homo sapien
tacacgtcggtgtgttgtgacagcc

SEQ ID NO: 3925583 - DNA, 25 bp, Homo sapien
tagttgctccagtatctgcgctgca

SEQ ID NO: 3925584 - DNA, 25 bp, Homo sapien
actgtctggtcgaagcagggcctca

SEQ ID NO: 3925585 - DNA, 25 bp, Homo sapien
taccacgtgcttaggaggcggtcca

SEQ ID NO: 3925586 - DNA, 25 bp, Homo sapien
cacgaagcacttcccgtcaaggagg

SEQ ID NO: 3925587 - DNA, 25 bp, Homo sapien
ccttgcagggaaccttggccaggaa

SEQ ID NO: 3925588 - DNA, 25 bp, Homo sapien
gagacactgccttccgagcagggct

SEQ ID NO: 3925589 - DNA, 25 bp, Homo sapien
aggcaccgcaggtagcgagacactg

SEQ ID NO: 3925590 - DNA, 25 bp, Homo sapien
cccaggccgtagagtgcattgtagt

SEQ ID NO: 3925591 - DNA, 25 bp, Homo sapien
agtacagcttgacggtgaccgcagc

SEQ ID NO: 3925592 - DNA, 25 bp, Homo sapien
tcaccgactccgagcttgactggaa

SEQ ID NO: 3925593 - DNA, 25 bp, Homo sapien
gcattgtagtgcaccaggcagggac

SEQ ID NO: 3925594 - DNA, 25 bp, Homo sapien
cgtcggttcggctcagtgaggctct

SEQ ID NO: 3925595 - DNA, 25 bp, Homo sapien
tgggatctgcaagaggttctctctc

SEQ ID NO: 3925596 - DNA, 25 bp, Homo sapien
tgctggggacgagcctgggatctgc

SEQ ID NO: 3925597 - DNA, 25 bp, Homo sapien
ggtgggcggccgtcggttcggctca

SEQ ID NO: 3925598 - DNA, 25 bp, Homo sapien
cagtaggcacttaaggcagggacag

SEQ ID NO: 3925599 - DNA, 25 bp, Homo sapien
ggctcccgggatccagtaggcactt

SEQ ID NO: 3925600 - DNA, 25 bp, Homo sapien
ccagtaggcacttaaggcagggaca

SEQ ID NO: 3925601 - DNA, 25 bp, Homo sapien
gcccaggctcccgggatccagtagg

SEQ ID NO: 3925602 - DNA, 25 bp, Homo sapien
cccagatgtttgagggacccctgaa

SEQ ID NO: 3925603 - DNA, 25 bp, Homo sapien
ctattcctgaccgaaggcttcctgg

SEQ ID NO: 3925604 - DNA, 25 bp, Homo sapien
cagttccagtctctccgaaggatga

SEQ ID NO: 3925605 - DNA, 25 bp, Homo sapien
tccctgggcgacgtgctaaacattg

SEQ ID NO: 3925606 - DNA, 25 bp, Homo sapien
tgtgacactacatgttgggccaaat

SEQ ID NO: 3925607 - DNA, 25 bp, Homo sapien
ctaggagatcctgcgaccatcgcat

SEQ ID NO: 3925608 - DNA, 25 bp, Homo sapien
gatcctgcgaccatcgcatgtgaca

SEQ ID NO: 3925609 - DNA, 25 bp, Homo sapien
tgcgaccatcgcatgtgacactaca

SEQ ID NO: 3925610 - DNA, 25 bp, Homo sapien
tgagtagcggtgctctggaggactg

SEQ ID NO: 3925611 - DNA, 25 bp, Homo sapien
gggcatcccggtgtgagtagcggtg

SEQ ID NO: 3925612 - DNA, 25 bp, Homo sapien
ccatactgggtaactggacacagcc

SEQ ID NO: 3925613 - DNA, 25 bp, Homo sapien
gatgcccatactgggtaactggaca

SEQ ID NO: 3925614 - DNA, 25 bp, Homo sapien
taccatgaagtagccaatggaaact

SEQ ID NO: 3925615 - DNA, 25 bp, Homo sapien
tgtcctacggtcaccatgacaggga

SEQ ID NO: 3925616 - DNA, 25 bp, Homo sapien
gaaaagagcaatccgtaaacattta

SEQ ID NO: 3925617 - DNA, 25 bp, Homo sapien
tcagtgaagggcacatactcagagg

SEQ ID NO: 3925618 - DNA, 25 bp, Homo sapien
attctctggtctttgtaacgttctt

SEQ ID NO: 3925619 - DNA, 25 bp, Homo sapien
aagggccatcctgccaagtaaaggc

SEQ ID NO: 3925620 - DNA, 25 bp, Homo sapien
tcctgccaagtaaaggccacttaaa

SEQ ID NO: 3925621 - DNA, 25 bp, Homo sapien
ttgtaacgttcttggaagggccatc

SEQ ID NO: 3925622 - DNA, 25 bp, Homo sapien
gtgtgagtgtgttgccattaagagc

SEQ ID NO: 3925623 - DNA, 25 bp, Homo sapien
tgagtgtgtgagatagtgtagcggt

SEQ ID NO: 3925624 - DNA, 25 bp, Homo sapien
agtgacttcattccggcagatttca

SEQ ID NO: 3925625 - DNA, 25 bp, Homo sapien
tagcggtgtgttagcacatgtgtga

SEQ ID NO: 3925626 - DNA, 25 bp, Homo sapien
taacagaaccactcagttcagagct

SEQ ID NO: 3925627 - DNA, 25 bp, Homo sapien
cagaaccactcagttcagagctggt

SEQ ID NO: 3925628 - DNA, 25 bp, Homo sapien
tagctaacagaaccactcagttcag

SEQ ID NO: 3925629 - DNA, 25 bp, Homo sapien
gttatagctaacagaaccactcagt

SEQ ID NO: 3925630 - DNA, 25 bp, Homo sapien
agcgccgaacctcctggggccggat

SEQ ID NO: 3925631 - DNA, 25 bp, Homo sapien
ggccggatgccatgggtaacaactt

SEQ ID NO: 3925632 - DNA, 25 bp, Homo sapien
cagaacctcaaaggtaggctccccg

SEQ ID NO: 3925633 - DNA, 25 bp, Homo sapien
cctcgctgccccgaggaaacccgag

SEQ ID NO: 3925634 - DNA, 25 bp, Homo sapien
cagggaggtgtggttggggagggcg

SEQ ID NO: 3925635 - DNA, 25 bp, Homo sapien
tgtggttggggagggcgggcagacg

SEQ ID NO: 3925636 - DNA, 25 bp, Homo sapien
gaggtgtggttggggagggcgggca

SEQ ID NO: 3925637 - DNA, 25 bp, Homo sapien
gttggggagggcgggcagacgccac

SEQ ID NO: 3925638 - DNA, 25 bp, Homo sapien
gagatgcacctctggccgtggagtg

SEQ ID NO: 3925639 - DNA, 25 bp, Homo sapien
gagggcagccggcgatgatggtgat

SEQ ID NO: 3925640 - DNA, 25 bp, Homo sapien
tgctggcactgggaacgtcactgga

SEQ ID NO: 3925641 - DNA, 25 bp, Homo sapien
cggggtctgcgcagttctgtctgct

SEQ ID NO: 3925642 - DNA, 25 bp, Homo sapien
ccttggttgtcatgacgcttgcaga

SEQ ID NO: 3925643 - DNA, 25 bp, Homo sapien
gattaggtgagctcatccagctctc

SEQ ID NO: 3925644 - DNA, 25 bp, Homo sapien
tccttcgatgctgccggagtgattc

SEQ ID NO: 3925645 - DNA, 25 bp, Homo sapien
tcatcccagatattgccacagctgc

SEQ ID NO: 3925646 - DNA, 25 bp, Homo sapien
tgtcagccttctgtcctaggccacg

SEQ ID NO: 3925647 - DNA, 25 bp, Homo sapien
gagaggttcacagaggctgtcagcc

SEQ ID NO: 3925648 - DNA, 25 bp, Homo sapien
aaagggctgggcgtgacagccaagc

SEQ ID NO: 3925649 - DNA, 25 bp, Homo sapien
tcctaggccacgctgaaagggctgg

SEQ ID NO: 3925650 - DNA, 25 bp, Homo sapien
atctggagttcccatgggcaagtct

SEQ ID NO: 3925651 - DNA, 25 bp, Homo sapien
gagttcccatgggcaagtctgaaag

SEQ ID NO: 3925652 - DNA, 25 bp, Homo sapien
ttcccatgggcaagtctgaaagcat

SEQ ID NO: 3925653 - DNA, 25 bp, Homo sapien
tggagttcccatgggcaagtctgaa

SEQ ID NO: 3925654 - DNA, 25 bp, Homo sapien
ccactgctcataggcaggaaaaaaa

SEQ ID NO: 3925655 - DNA, 25 bp, Homo sapien
tgggcagcaggaccactgctcatag

SEQ ID NO: 3925656 - DNA, 25 bp, Homo sapien
gggcagcaggaccactgctcatagg

SEQ ID NO: 3925657 - DNA, 25 bp, Homo sapien
aagcaccctagacggggcagtacta

SEQ ID NO: 3925658 - DNA, 25 bp, Homo sapien
ctaccccagttgagctgggtatgga

SEQ ID NO: 3925659 - DNA, 25 bp, Homo sapien
gacggggcagtactaccccagttga

SEQ ID NO: 3925660 - DNA, 25 bp, Homo sapien
gctgggtatggaggccacatgaagg

SEQ ID NO: 3925661 - DNA, 25 bp, Homo sapien
ttctgtataagaagaggccagatcg

SEQ ID NO: 3925662 - DNA, 25 bp, Homo sapien
ggccagatcggcttttgaagagaga

SEQ ID NO: 3925663 - DNA, 25 bp, Homo sapien
gaacgaaatgtcattgtgcggctca

SEQ ID NO: 3925664 - DNA, 25 bp, Homo sapien
gctacgacatcactgggtgatagga

SEQ ID NO: 3925665 - DNA, 25 bp, Homo sapien
gcctctggaattctccagcagcatc

SEQ ID NO: 3925666 - DNA, 25 bp, Homo sapien
atgctgacgctggtgcagcccagca

SEQ ID NO: 3925667 - DNA, 25 bp, Homo sapien
agcccagcaggcctctggaattctc

SEQ ID NO: 3925668 - DNA, 25 bp, Homo sapien
tgctgacgctggtgcagcccagcag

SEQ ID NO: 3925669 - DNA, 25 bp, Homo sapien
gccgcagccacatccagttagttct

SEQ ID NO: 3925670 - DNA, 25 bp, Homo sapien
tttgggtgctctttaggtgtcaggc

SEQ ID NO: 3925671 - DNA, 25 bp, Homo sapien
cagacatggttctgcccttatagaa

SEQ ID NO: 3925672 - DNA, 25 bp, Homo sapien
tgaaattaatgcaagaatgggctga

SEQ ID NO: 3925673 - DNA, 25 bp, Homo sapien
gctgggacgtaggaggctgtaactg

SEQ ID NO: 3925674 - DNA, 25 bp, Homo sapien
acaggaaacgcacagctgggacgta

SEQ ID NO: 3925675 - DNA, 25 bp, Homo sapien
caggaaacgcacagctgggacgtag

SEQ ID NO: 3925676 - DNA, 25 bp, Homo sapien
acgcacagctgggacgtaggaggct

SEQ ID NO: 3925677 - DNA, 25 bp, Homo sapien
gtttaatgacctcctactgtgtacc

SEQ ID NO: 3925678 - DNA, 25 bp, Homo sapien
tttaatgacctcctactgtgtacca

SEQ ID NO: 3925679 - DNA, 25 bp, Homo sapien
tgtttaatgacctcctactgtgtac

SEQ ID NO: 3925680 - DNA, 25 bp, Homo sapien
ttaatgacctcctactgtgtaccag

SEQ ID NO: 3925681 - DNA, 25 bp, Homo sapien
aaagttggccaattgatgctgcaat

SEQ ID NO: 3925682 - DNA, 25 bp, Homo sapien
gccttggtaaaagaaccagtctcca

SEQ ID NO: 3925683 - DNA, 25 bp, Homo sapien
tctcttcagtatcatccctttgtga

SEQ ID NO: 3925684 - DNA, 25 bp, Homo sapien
tgatgctgcaatctattttctttgg

SEQ ID NO: 3925685 - DNA, 25 bp, Homo sapien
gtttaattatggtcagaaatgatag

SEQ ID NO: 3925686 - DNA, 25 bp, Homo sapien
ttgtttaattatggtcagaaatgat

SEQ ID NO: 3925687 - DNA, 25 bp, Homo sapien
gtacaatttcacaaattgttgttac

SEQ ID NO: 3925688 - DNA, 25 bp, Homo sapien
tttaattatggtcagaaatgatagt

SEQ ID NO: 3925689 - DNA, 25 bp, Homo sapien
tcaagtttagggacaacacggcttc

SEQ ID NO: 3925690 - DNA, 25 bp, Homo sapien
ctgtcatcaagtttagggacaacac

SEQ ID NO: 3925691 - DNA, 25 bp, Homo sapien
gcttctcattatgggtggcagttca

SEQ ID NO: 3925692 - DNA, 25 bp, Homo sapien
ttagggacaacacggcttctcatta

SEQ ID NO: 3925693 - DNA, 25 bp, Homo sapien
gagctaaagcgaccctctcatctca

SEQ ID NO: 3925694 - DNA, 25 bp, Homo sapien
cctgagctaaagcgaccctctcatc

SEQ ID NO: 3925695 - DNA, 25 bp, Homo sapien
agctaaagcgaccctctcatctcag

SEQ ID NO: 3925696 - DNA, 25 bp, Homo sapien
tgagctaaagcgaccctctcatctc

SEQ ID NO: 3925697 - DNA, 25 bp, Homo sapien
cacaggctagtgctgccaatagtac

SEQ ID NO: 3925698 - DNA, 25 bp, Homo sapien
ccaatagtactgcaggaacaaggag

SEQ ID NO: 3925699 - DNA, 25 bp, Homo sapien
gctctttctgctcgagtgagcacag

SEQ ID NO: 3925700 - DNA, 25 bp, Homo sapien
ccccactggtgctgcgaggtcacgg

SEQ ID NO: 3925701 - DNA, 25 bp, Homo sapien
tagagcggtgggtttctgtcattgc

SEQ ID NO: 3925702 - DNA, 25 bp, Homo sapien
tctcaatgatgaccctgcacagtcc

SEQ ID NO: 3925703 - DNA, 25 bp, Homo sapien
tgtcattgcagtcaccctgtggtgg

SEQ ID NO: 3925704 - DNA, 25 bp, Homo sapien
caatgagccacggatgaatgtgcaa

SEQ ID NO: 3925705 - DNA, 25 bp, Homo sapien
ctctgggctctaggtcatggcccat

SEQ ID NO: 3925706 - DNA, 25 bp, Homo sapien
gcagctggcatggccggtgtcctct

SEQ ID NO: 3925707 - DNA, 25 bp, Homo sapien
tcctctgggctctaggtcatggccc

SEQ ID NO: 3925708 - DNA, 25 bp, Homo sapien
tgtcctctgggctctaggtcatggc

SEQ ID NO: 3925709 - DNA, 25 bp, Homo sapien
cccgaggacgccctctgggctccct

SEQ ID NO: 3925710 - DNA, 25 bp, Homo sapien
ccgaggacgccctctgggctccctg

SEQ ID NO: 3925711 - DNA, 25 bp, Homo sapien
ctctgcagcacttggcttgcactct

SEQ ID NO: 3925712 - DNA, 25 bp, Homo sapien
gcagcacttggcttgcactctccat

SEQ ID NO: 3925713 - DNA, 25 bp, Homo sapien
ggtcatatatgggtctgtgttcttc

SEQ ID NO: 3925714 - DNA, 25 bp, Homo sapien
aggtcatatatgggtctgtgttctt

SEQ ID NO: 3925715 - DNA, 25 bp, Homo sapien
ccaggtcatatatgggtctgtgttc

SEQ ID NO: 3925716 - DNA, 25 bp, Homo sapien
caggtcatatatgggtctgtgttct

SEQ ID NO: 3925717 - DNA, 25 bp, Homo sapien
cactggagtcagacttgggcaagcc

SEQ ID NO: 3925718 - DNA, 25 bp, Homo sapien
gcagagggtctggagccgactggca

SEQ ID NO: 3925719 - DNA, 25 bp, Homo sapien
tctggagccgactggcattttccac

SEQ ID NO: 3925720 - DNA, 25 bp, Homo sapien
gcattttccactggagtcagacttg

SEQ ID NO: 3925721 - DNA, 25 bp, Homo sapien
acattttcaaagtgatgtagtacat

SEQ ID NO: 3925722 - DNA, 25 bp, Homo sapien
ttattggcacggagaggtgttcaga

SEQ ID NO: 3925723 - DNA, 25 bp, Homo sapien
catgtagttcatgaatgccgagaaa

SEQ ID NO: 3925724 - DNA, 25 bp, Homo sapien
tgttggaaacagttattggcacgga

SEQ ID NO: 3925725 - DNA, 25 bp, Homo sapien
tgtctcccgcgcagatagcgagctg

SEQ ID NO: 3925726 - DNA, 25 bp, Homo sapien
caagcatcgtgtgcgccattagcca

SEQ ID NO: 3925727 - DNA, 25 bp, Homo sapien
catggtttcagtttcggtgcttccc

SEQ ID NO: 3925728 - DNA, 25 bp, Homo sapien
catccgggattgtaacggtgcgcgc

SEQ ID NO: 3925729 - DNA, 25 bp, Homo sapien
gacttggtcatcttgtcagtggccc

SEQ ID NO: 3925730 - DNA, 25 bp, Homo sapien
cagtggcccttatatgtcacctggg

SEQ ID NO: 3925731 - DNA, 25 bp, Homo sapien
cagatccgcatcctcggtgagtgcc

SEQ ID NO: 3925732 - DNA, 25 bp, Homo sapien
cgcggattattgagtttgatgccca

SEQ ID NO: 3925733 - DNA, 25 bp, Homo sapien
gagcttgcagtgagccaagatcgtg

SEQ ID NO: 3925734 - DNA, 25 bp, Homo sapien
ggagaatggctgagcccaggaggcg

SEQ ID NO: 3925735 - DNA, 25 bp, Homo sapien
cttgcagtgagccaagatcgtgcca

SEQ ID NO: 3925736 - DNA, 25 bp, Homo sapien
gcagtgagccaagatcgtgccactg

SEQ ID NO: 3925737 - DNA, 25 bp, Homo sapien
cggtcatctacacatgtggccacat

SEQ ID NO: 3925738 - DNA, 25 bp, Homo sapien
gtggacacggtcatctacacatgtg

SEQ ID NO: 3925739 - DNA, 25 bp, Homo sapien
gacacggtcatctacacatgtggcc

SEQ ID NO: 3925740 - DNA, 25 bp, Homo sapien
cacggtcatctacacatgtggccac

SEQ ID NO: 3925741 - DNA, 25 bp, Homo sapien
agaggcaaatcaccgggcagaggga

SEQ ID NO: 3925742 - DNA, 25 bp, Homo sapien
ggacatcatcaagacctaccgcagc

SEQ ID NO: 3925743 - DNA, 25 bp, Homo sapien
gagaggaggccgcactctccctgtc

SEQ ID NO: 3925744 - DNA, 25 bp, Homo sapien
gagggctaaattgggatctcagcct

SEQ ID NO: 3925745 - DNA, 25 bp, Homo sapien
tgtggctgaggcagtcataatgcag

SEQ ID NO: 3925746 - DNA, 25 bp, Homo sapien
agagccatagagcacccttcctcct

SEQ ID NO: 3925747 - DNA, 25 bp, Homo sapien
aaagctcatacccagccctaccaat

SEQ ID NO: 3925748 - DNA, 25 bp, Homo sapien
cataatgcagtatcttcccctgact

SEQ ID NO: 3925749 - DNA, 25 bp, Homo sapien
tataaaatggttgtttcgggagaga

SEQ ID NO: 3925750 - DNA, 25 bp, Homo sapien
aagtcactgtcccactatgggtctc

SEQ ID NO: 3925751 - DNA, 25 bp, Homo sapien
tgtgactcgggagttcttccgtgag

SEQ ID NO: 3925752 - DNA, 25 bp, Homo sapien
gcatgggttttagtcctggccactg

SEQ ID NO: 3925753 - DNA, 25 bp, Homo sapien
acttgggtcgctgtgattgtgaata

SEQ ID NO: 3925754 - DNA, 25 bp, Homo sapien
gatttcgtaccagcctgagggcggt

SEQ ID NO: 3925755 - DNA, 25 bp, Homo sapien
gaataaaagtgatttcgtaccagcc

SEQ ID NO: 3925756 - DNA, 25 bp, Homo sapien
tgagggcggtgctgtgcgcagagca

SEQ ID NO: 3925757 - DNA, 25 bp, Homo sapien
agggaaatataagatgcatgtaaac

SEQ ID NO: 3925758 - DNA, 25 bp, Homo sapien
aacatggagatagtttagcaccacc

SEQ ID NO: 3925759 - DNA, 25 bp, Homo sapien
tggagctccagagacatccaccagt

SEQ ID NO: 3925760 - DNA, 25 bp, Homo sapien
ccaaagagtcccgtcaaagtgataa

SEQ ID NO: 3925761 - DNA, 25 bp, Homo sapien
tatttcagcactcaaatcgactgca

SEQ ID NO: 3925762 - DNA, 25 bp, Homo sapien
gctgtgaggcccaatctgtccgaaa

SEQ ID NO: 3925763 - DNA, 25 bp, Homo sapien
tagaaactgaactgagggcacccag

SEQ ID NO: 3925764 - DNA, 25 bp, Homo sapien
taattcataccaggtggcaggctca

SEQ ID NO: 3925765 - DNA, 25 bp, Homo sapien
gaaactaggtttggacactgcggag

SEQ ID NO: 3925766 - DNA, 25 bp, Homo sapien
cattggtgaagtccctatggtgcac

SEQ ID NO: 3925767 - DNA, 25 bp, Homo sapien
gatggtctttgctggcacctgggaa

SEQ ID NO: 3925768 - DNA, 25 bp, Homo sapien
gaaacatgcaaaggaactgcccgcc

SEQ ID NO: 3925769 - DNA, 25 bp, Homo sapien
tctgtgcagattaggaagagaccgg

SEQ ID NO: 3925770 - DNA, 25 bp, Homo sapien
ggcagtaccaccagccattagggtt

SEQ ID NO: 3925771 - DNA, 25 bp, Homo sapien
agtaccaccagccattagggttcct

SEQ ID NO: 3925772 - DNA, 25 bp, Homo sapien
taccaccagccattagggttcctct

SEQ ID NO: 3925773 - DNA, 25 bp, Homo sapien
tcctcatccccctcgtagtctgcga

SEQ ID NO: 3925774 - DNA, 25 bp, Homo sapien
actgagacttctcgatgggcttggg

SEQ ID NO: 3925775 - DNA, 25 bp, Homo sapien
cgcctcggaggccatcagtggccgt

SEQ ID NO: 3925776 - DNA, 25 bp, Homo sapien
gtggccgtgagtgactcattcctcc

SEQ ID NO: 3925777 - DNA, 25 bp, Homo sapien
tacacatctttgaggttattgtgga

SEQ ID NO: 3925778 - DNA, 25 bp, Homo sapien
cggtgttcagtgcttggacgcgcct

SEQ ID NO: 3925779 - DNA, 25 bp, Homo sapien
gcttggacgcgcctctcgatcttct

SEQ ID NO: 3925780 - DNA, 25 bp, Homo sapien
tcagtgcttggacgcgcctctcgat

SEQ ID NO: 3925781 - DNA, 25 bp, Homo sapien
gtgttcagtgcttggacgcgcctct

SEQ ID NO: 3925782 - DNA, 25 bp, Homo sapien
gggaagctgatctccgagtcctgga

SEQ ID NO: 3925783 - DNA, 25 bp, Homo sapien
gaccttctggtaggcgctgcatgtc

SEQ ID NO: 3925784 - DNA, 25 bp, Homo sapien
gatgaggtcggatgagcttctccta

SEQ ID NO: 3925785 - DNA, 25 bp, Homo sapien
ggtcaggttgctcgttctcatccag

SEQ ID NO: 3925786 - DNA, 25 bp, Homo sapien
ctgcgtccgaagcagagcggggctt

SEQ ID NO: 3925787 - DNA, 25 bp, Homo sapien
gagcagcaagtggtgttgatggtga

SEQ ID NO: 3925788 - DNA, 25 bp, Homo sapien
ctctgccttgagctttaggagtgat

SEQ ID NO: 3925789 - DNA, 25 bp, Homo sapien
gccttgagctttaggagtgatgatg

SEQ ID NO: 3925790 - DNA, 25 bp, Homo sapien
ctgccttgagctttaggagtgatga

SEQ ID NO: 3925791 - DNA, 25 bp, Homo sapien
tggtcagggacagcgaggagctgcc

SEQ ID NO: 3925792 - DNA, 25 bp, Homo sapien
gggtgtcctctgcatatggccggaa

SEQ ID NO: 3925793 - DNA, 25 bp, Homo sapien
ctctggctgacagggtgtcctctgc

SEQ ID NO: 3925794 - DNA, 25 bp, Homo sapien
ggccggaagccctcattctcataga

SEQ ID NO: 3925795 - DNA, 25 bp, Homo sapien
gcagggatgtcatactcaggctcct

SEQ ID NO: 3925796 - DNA, 25 bp, Homo sapien
gctcaggttgggcttcttgcgctta

SEQ ID NO: 3925797 - DNA, 25 bp, Homo sapien
tcttgcgcttatcgatgtatgatgc

SEQ ID NO: 3925798 - DNA, 25 bp, Homo sapien
ggctctgagtcaaagccgaatgcag

SEQ ID NO: 3925799 - DNA, 25 bp, Homo sapien
ggatctagtttaggccatggcactg

SEQ ID NO: 3925800 - DNA, 25 bp, Homo sapien
cagtatctcagtctacctgcctggt

SEQ ID NO: 3925801 - DNA, 25 bp, Homo sapien
tattctagaccccttgtaggtgaca

SEQ ID NO: 3925802 - DNA, 25 bp, Homo sapien
tgttgtgagacaagccctgtgagct

SEQ ID NO: 3925803 - DNA, 25 bp, Homo sapien
tgtccaccccgaaagctgatgccat

SEQ ID NO: 3925804 - DNA, 25 bp, Homo sapien
gtagtactccacctcaacagaaggg

SEQ ID NO: 3925805 - DNA, 25 bp, Homo sapien
gaattcggcaatggtgtagtactcc

SEQ ID NO: 3925806 - DNA, 25 bp, Homo sapien
gatgccatcggaaatgcacgactgg

SEQ ID NO: 3925807 - DNA, 25 bp, Homo sapien
agacctggaaagacctcaaccttgg

SEQ ID NO: 3925808 - DNA, 25 bp, Homo sapien
gacgggaagaagcttggtgtagcag

SEQ ID NO: 3925809 - DNA, 25 bp, Homo sapien
gggctggactccaatcatagcaatt

SEQ ID NO: 3925810 - DNA, 25 bp, Homo sapien
aaaatggaactaataccagcatcct

SEQ ID NO: 3925811 - DNA, 25 bp, Homo sapien
tggtggaggtcttgtccgtaggttc

SEQ ID NO: 3925812 - DNA, 25 bp, Homo sapien
cgtggtggaggtcttgtccgtaggt

SEQ ID NO: 3925813 - DNA, 25 bp, Homo sapien
gattctctgcgtggtggaggtcttg

SEQ ID NO: 3925814 - DNA, 25 bp, Homo sapien
tctctgcgtggtggaggtcttgtcc

SEQ ID NO: 3925815 - DNA, 25 bp, Homo sapien
gcagagtgaccattgctggctctcc

SEQ ID NO: 3925816 - DNA, 25 bp, Homo sapien
tccactagaggagggaacgctacca

SEQ ID NO: 3925817 - DNA, 25 bp, Homo sapien
ttcttgctcttggaacgcgtgtatc

SEQ ID NO: 3925818 - DNA, 25 bp, Homo sapien
cacatcctcatgtgatctagcttcc

SEQ ID NO: 3925819 - DNA, 25 bp, Homo sapien
gtggagtttccttgtccccagacgc

SEQ ID NO: 3925820 - DNA, 25 bp, Homo sapien
cttcttccgggttggcaggtcatcc

SEQ ID NO: 3925821 - DNA, 25 bp, Homo sapien
ttcttcaggtaggatgctggcgccc

SEQ ID NO: 3925822 - DNA, 25 bp, Homo sapien
tgatgttcccaatgatctccactgg

SEQ ID NO: 3925823 - DNA, 25 bp, Homo sapien
tgatataccaccagccttccagatt

SEQ ID NO: 3925824 - DNA, 25 bp, Homo sapien
aaagccaatctcgtccttgctttgg

SEQ ID NO: 3925825 - DNA, 25 bp, Homo sapien
taaggctgcacggtgacatacttct

SEQ ID NO: 3925826 - DNA, 25 bp, Homo sapien
actgtgacgcccttctcaaagccaa

SEQ ID NO: 3925827 - DNA, 25 bp, Homo sapien
cagttctggccggtaaagttgagct

SEQ ID NO: 3925828 - DNA, 25 bp, Homo sapien
tggccggtaaagttgagctgctcct

SEQ ID NO: 3925829 - DNA, 25 bp, Homo sapien
gggatatcagttctggccggtaaag

SEQ ID NO: 3925830 - DNA, 25 bp, Homo sapien
ggcagaaccagggatatcagttctg

SEQ ID NO: 3925831 - DNA, 25 bp, Homo sapien
ccaaccccactgagagaggcctttt

SEQ ID NO: 3925832 - DNA, 25 bp, Homo sapien
cccactgagagaggccttttggttc

SEQ ID NO: 3925833 - DNA, 25 bp, Homo sapien
tgagagaggccttttggttccaagg

SEQ ID NO: 3925834 - DNA, 25 bp, Homo sapien
caaccccactgagagaggccttttg

SEQ ID NO: 3925835 - DNA, 25 bp, Homo sapien
tgagaagaaagcctggcccgtgaat

SEQ ID NO: 3925836 - DNA, 25 bp, Homo sapien
tttcagggaacccacaactgtgttc

SEQ ID NO: 3925837 - DNA, 25 bp, Homo sapien
caccagctgcagtaggtgagaagaa

SEQ ID NO: 3925838 - DNA, 25 bp, Homo sapien
tacccaggaggttgacaaagccaga

SEQ ID NO: 3925839 - DNA, 25 bp, Homo sapien
gcccagggtccaccggcgatccagg

SEQ ID NO: 3925840 - DNA, 25 bp, Homo sapien
accggcgatccaggcgccgcagatg

SEQ ID NO: 3925841 - DNA, 25 bp, Homo sapien
tccaggcgccgcagatgggccttgc

SEQ ID NO: 3925842 - DNA, 25 bp, Homo sapien
atcccgcccagggtccaccggcgat

SEQ ID NO: 3925843 - DNA, 25 bp, Homo sapien
catacacgcactgccctagagctgc

SEQ ID NO: 3925844 - DNA, 25 bp, Homo sapien
gtgctccacacctctcgtgcgcttt

SEQ ID NO: 3925845 - DNA, 25 bp, Homo sapien
tccgctctgaccttcctggtgcagc

SEQ ID NO: 3925846 - DNA, 25 bp, Homo sapien
aggtcctccataatcgacccaacag

SEQ ID NO: 3925847 - DNA, 25 bp, Homo sapien
gcaccgggtggtggcctcaatccct

SEQ ID NO: 3925848 - DNA, 25 bp, Homo sapien
agggaaagaattcccgcagccaggc

SEQ ID NO: 3925849 - DNA, 25 bp, Homo sapien
ttggaagccattaggagcaggcagc

SEQ ID NO: 3925850 - DNA, 25 bp, Homo sapien
ggtggcccgagcaccgggtggtggc

SEQ ID NO: 3925851 - DNA, 25 bp, Homo sapien
gagtgagagagctgcctccagaggc

SEQ ID NO: 3925852 - DNA, 25 bp, Homo sapien
agagtgagagagctgcctccagagg

SEQ ID NO: 3925853 - DNA, 25 bp, Homo sapien
aagagtgagagagctgcctccagag

SEQ ID NO: 3925854 - DNA, 25 bp, Homo sapien
ggagtcatcccgagtaccattctgg

SEQ ID NO: 3925855 - DNA, 25 bp, Homo sapien
tccagtcttagaggtgttgatgtcg

SEQ ID NO: 3925856 - DNA, 25 bp, Homo sapien
gagtaccattctgggcctccaggta

SEQ ID NO: 3925857 - DNA, 25 bp, Homo sapien
tgttgatgtcggagtcatcccgagt

SEQ ID NO: 3925858 - DNA, 25 bp, Homo sapien
aacaggactgtgagattctgcaggg

SEQ ID NO: 3925859 - DNA, 25 bp, Homo sapien
tggaaggagaggcacaagaagcgga

SEQ ID NO: 3925860 - DNA, 25 bp, Homo sapien
aggagaggcacaagaagcggagcat

SEQ ID NO: 3925861 - DNA, 25 bp, Homo sapien
ggtggctcgggggccaggacaagga

SEQ ID NO: 3925862 - DNA, 25 bp, Homo sapien
gccgctggcaggtcagagacttctg

SEQ ID NO: 3925863 - DNA, 25 bp, Homo sapien
tcttaggagcgaatagctgaagtca

SEQ ID NO: 3925864 - DNA, 25 bp, Homo sapien
gcatcatcggcaggctggatagttc

SEQ ID NO: 3925865 - DNA, 25 bp, Homo sapien
actgagcagctcgtggtgacaggca

SEQ ID NO: 3925866 - DNA, 25 bp, Homo sapien
tgccacccctaacaatcactaagga

SEQ ID NO: 3925867 - DNA, 25 bp, Homo sapien
ctaaggatcatgattgaaggtcccc

SEQ ID NO: 3925868 - DNA, 25 bp, Homo sapien
ggactactgtatctggagctgggtt

SEQ ID NO: 3925869 - DNA, 25 bp, Homo sapien
gaaatttacaagttaggcacaggag

SEQ ID NO: 3925870 - DNA, 25 bp, Homo sapien
ggttttgcttgctcctcagtggtgc

SEQ ID NO: 3925871 - DNA, 25 bp, Homo sapien
cacaattgacgtctgagctgctggc

SEQ ID NO: 3925872 - DNA, 25 bp, Homo sapien
caccagtgactttggtcaggagccc

SEQ ID NO: 3925873 - DNA, 25 bp, Homo sapien
tcaggagccctggttgccacaattg

SEQ ID NO: 3925874 - DNA, 25 bp, Homo sapien
atccagtcaagacacttacattctc

SEQ ID NO: 3925875 - DNA, 25 bp, Homo sapien
agtaagaaagggctaagtcggccag

SEQ ID NO: 3925876 - DNA, 25 bp, Homo sapien
gttttccctgctgttccagcaagag

SEQ ID NO: 3925877 - DNA, 25 bp, Homo sapien
cagtcaagacacttacattctcaga

SEQ ID NO: 3925878 - DNA, 25 bp, Homo sapien
gaagggtcccaagagcatttgacaa

SEQ ID NO: 3925879 - DNA, 25 bp, Homo sapien
aggagttctgaggaccatgtgttca

SEQ ID NO: 3925880 - DNA, 25 bp, Homo sapien
caaaatcttaggtgcaagctgggag

SEQ ID NO: 3925881 - DNA, 25 bp, Homo sapien
taggctgccttaggaaactcagaat

SEQ ID NO: 3925882 - DNA, 25 bp, Homo sapien
tccccaggtccgtgaaatcttaggc

SEQ ID NO: 3925883 - DNA, 25 bp, Homo sapien
tgaataaacaacgaggaccactggc

SEQ ID NO: 3925884 - DNA, 25 bp, Homo sapien
ttaggaagccaacgtcagactagtg

SEQ ID NO: 3925885 - DNA, 25 bp, Homo sapien
aagatcctcccctgtatcatggtgt

SEQ ID NO: 3925886 - DNA, 25 bp, Homo sapien
tatgtagtacatttgaaccgtgcca

SEQ ID NO: 3925887 - DNA, 25 bp, Homo sapien
cagctctctgacaacgtggattctt

SEQ ID NO: 3925888 - DNA, 25 bp, Homo sapien
tagcagctctctgacaacgtggatt

SEQ ID NO: 3925889 - DNA, 25 bp, Homo sapien
gcagctctctgacaacgtggattct

SEQ ID NO: 3925890 - DNA, 25 bp, Homo sapien
ttagcagctctctgacaacgtggat

SEQ ID NO: 3925891 - DNA, 25 bp, Homo sapien
cgaatgccgatgcttttccaggctc

SEQ ID NO: 3925892 - DNA, 25 bp, Homo sapien
gaatgccgatgcttttccaggctcc

SEQ ID NO: 3925893 - DNA, 25 bp, Homo sapien
acgaatgccgatgcttttccaggct

SEQ ID NO: 3925894 - DNA, 25 bp, Homo sapien
cacgaatgccgatgcttttccaggc

SEQ ID NO: 3925895 - DNA, 25 bp, Homo sapien
acatgtttgcacgacccactctcgg

SEQ ID NO: 3925896 - DNA, 25 bp, Homo sapien
caatgccactcaatgctgtgtccgc

SEQ ID NO: 3925897 - DNA, 25 bp, Homo sapien
tgtgaaccacggacatggagcttgc

SEQ ID NO: 3925898 - DNA, 25 bp, Homo sapien
gaaccactgatcttcttcaggtgaa

SEQ ID NO: 3925899 - DNA, 25 bp, Homo sapien
gattttctccttcaagggccttgag

SEQ ID NO: 3925900 - DNA, 25 bp, Homo sapien
ggattttctccttcaagggccttga

SEQ ID NO: 3925901 - DNA, 25 bp, Homo sapien
cagggaagctcaagactatgtctca

SEQ ID NO: 3925902 - DNA, 25 bp, Homo sapien
gatgcatttggctgcacaaagccca

SEQ ID NO: 3925903 - DNA, 25 bp, Homo sapien
aaatttaatctgtgatgcatttggc

SEQ ID NO: 3925904 - DNA, 25 bp, Homo sapien
tcagggaagctcaagactatgtctc

SEQ ID NO: 3925905 - DNA, 25 bp, Homo sapien
cgtttgtagccagtgacccatttgg

SEQ ID NO: 3925906 - DNA, 25 bp, Homo sapien
cacgatccctgtgatcatcattaca

SEQ ID NO: 3925907 - DNA, 25 bp, Homo sapien
tcaggagtccacgatccctgtgatc

SEQ ID NO: 3925908 - DNA, 25 bp, Homo sapien
caaacccaaagacgtttgtagccag

SEQ ID NO: 3925909 - DNA, 25 bp, Homo sapien
ggtcaaattcccctcgcctgctccc

SEQ ID NO: 3925910 - DNA, 25 bp, Homo sapien
agctggctgaaggcttgccaacatg

SEQ ID NO: 3925911 - DNA, 25 bp, Homo sapien
gctgaaactggcccgttttcaggtc

SEQ ID NO: 3925912 - DNA, 25 bp, Homo sapien
agctgaaactggcccgttttcaggt

SEQ ID NO: 3925913 - DNA, 25 bp, Homo sapien
gagagcaggcatctccccctttgtc

SEQ ID NO: 3925914 - DNA, 25 bp, Homo sapien
cgggcagggacgtggcaccatgagc

SEQ ID NO: 3925915 - DNA, 25 bp, Homo sapien
gcatgacaaaggctgaggacaaagc

SEQ ID NO: 3925916 - DNA, 25 bp, Homo sapien
tgagcatgacaaaggctgaggacaa

SEQ ID NO: 3925917 - DNA, 25 bp, Homo sapien
gacgtggcaccatgagcatgacaaa

SEQ ID NO: 3925918 - DNA, 25 bp, Homo sapien
ctgggacgaaaggttgaggcctcac

SEQ ID NO: 3925919 - DNA, 25 bp, Homo sapien
cttggtgatgactccaggcacaagg

SEQ ID NO: 3925920 - DNA, 25 bp, Homo sapien
ctccaggcacaagggcagacacagt

SEQ ID NO: 3925921 - DNA, 25 bp, Homo sapien
gctctgccagggaggactgtcactg

SEQ ID NO: 3925922 - DNA, 25 bp, Homo sapien
gactgtcactgctgaccaccttggt

SEQ ID NO: 3925923 - DNA, 25 bp, Homo sapien
cgagcaaggagacattcttccacca

SEQ ID NO: 3925924 - DNA, 25 bp, Homo sapien
ccgagcaaggagacattcttccacc

SEQ ID NO: 3925925 - DNA, 25 bp, Homo sapien
cccgagcaaggagacattcttccac

SEQ ID NO: 3925926 - DNA, 25 bp, Homo sapien
tgcttcttatagttggacaccacca

SEQ ID NO: 3925927 - DNA, 25 bp, Homo sapien
tctcctgcttcttatagttggacac

SEQ ID NO: 3925928 - DNA, 25 bp, Homo sapien
gttggacaccaccacgtactgttcc

SEQ ID NO: 3925929 - DNA, 25 bp, Homo sapien
agttctcctgcttcttatagttgga

SEQ ID NO: 3925930 - DNA, 25 bp, Homo sapien
aaagcacgcggtgagccagcggcca

SEQ ID NO: 3925931 - DNA, 25 bp, Homo sapien
gggcagaaagcacgcggtgagccag

SEQ ID NO: 3925932 - DNA, 25 bp, Homo sapien
tggcgagggcagaaagcacgcggtg

SEQ ID NO: 3925933 - DNA, 25 bp, Homo sapien
gcgagggcagaaagcacgcggtgag

SEQ ID NO: 3925934 - DNA, 25 bp, Homo sapien
cgcggccagggcgccccctgtccat

SEQ ID NO: 3925935 - DNA, 25 bp, Homo sapien
ccgcggccagggcgccccctgtcca

SEQ ID NO: 3925936 - DNA, 25 bp, Homo sapien
gagttagtcacagcccggcatgagg

SEQ ID NO: 3925937 - DNA, 25 bp, Homo sapien
ccctgcaaacccgagagaaaaggca

SEQ ID NO: 3925938 - DNA, 25 bp, Homo sapien
gacaggccatatagcaaggccccag

SEQ ID NO: 3925939 - DNA, 25 bp, Homo sapien
gccttgtgctgcgatgagttagtca

SEQ ID NO: 3925940 - DNA, 25 bp, Homo sapien
cgggtacttgccagctggattgaga

SEQ ID NO: 3925941 - DNA, 25 bp, Homo sapien
ggtaacgggtacttgccagctggat

SEQ ID NO: 3925942 - DNA, 25 bp, Homo sapien
cttcagcaggtaacgggtacttgcc

SEQ ID NO: 3925943 - DNA, 25 bp, Homo sapien
agcaggtaacgggtacttgccagct

SEQ ID NO: 3925944 - DNA, 25 bp, Homo sapien
gtccttcttgggcgactcagcccag

SEQ ID NO: 3925945 - DNA, 25 bp, Homo sapien
cgtccttcttgggcgactcagccca

SEQ ID NO: 3925946 - DNA, 25 bp, Homo sapien
tcacgtccttcttgggcgactcagc

SEQ ID NO: 3925947 - DNA, 25 bp, Homo sapien
ctgtcacgtccttcttgggcgactc

SEQ ID NO: 3925948 - DNA, 25 bp, Homo sapien
gtgaggcatgatcacgccactgcaa

SEQ ID NO: 3925949 - DNA, 25 bp, Homo sapien
gaggcatgatcacgccactgcaatc

SEQ ID NO: 3925950 - DNA, 25 bp, Homo sapien
gcatgatcacgccactgcaatccag

SEQ ID NO: 3925951 - DNA, 25 bp, Homo sapien
ggcatgatcacgccactgcaatcca

SEQ ID NO: 3925952 - DNA, 25 bp, Homo sapien
gaagctgaggcgtaacagtgaaagc

SEQ ID NO: 3925953 - DNA, 25 bp, Homo sapien
gaggcgtaacagtgaaagccacgtg

SEQ ID NO: 3925954 - DNA, 25 bp, Homo sapien
agcagaagctgaggcgtaacagtga

SEQ ID NO: 3925955 - DNA, 25 bp, Homo sapien
gctgaggcgtaacagtgaaagccac

SEQ ID NO: 3925956 - DNA, 25 bp, Homo sapien
cagtgactttctggccgtgggccac

SEQ ID NO: 3925957 - DNA, 25 bp, Homo sapien
tgaggaaccagtgactttctggccg

SEQ ID NO: 3925958 - DNA, 25 bp, Homo sapien
tctttgctggaccacaatttgggta

SEQ ID NO: 3925959 - DNA, 25 bp, Homo sapien
ctataaaccaaacgctgaagtgagg

SEQ ID NO: 3925960 - DNA, 25 bp, Homo sapien
actccaagggtaaaatcaggctgag

SEQ ID NO: 3925961 - DNA, 25 bp, Homo sapien
gttgccaaatcaatcaggctccttt

SEQ ID NO: 3925962 - DNA, 25 bp, Homo sapien
catttccaattagatggctttgaac

SEQ ID NO: 3925963 - DNA, 25 bp, Homo sapien
ccgcagagttgccaaatcaatcagg

SEQ ID NO: 3925964 - DNA, 25 bp, Homo sapien
tgccacattctctaagtagcctggg

SEQ ID NO: 3925965 - DNA, 25 bp, Homo sapien
gctgacgccttcaaaagacacgctc

SEQ ID NO: 3925966 - DNA, 25 bp, Homo sapien
ggacaagaacgcctcggaaattgct

SEQ ID NO: 3925967 - DNA, 25 bp, Homo sapien
taagatgtgccagaagctgacgcct

SEQ ID NO: 3925968 - DNA, 25 bp, Homo sapien
tctctagggtagaaaggcacgttcc

SEQ ID NO: 3925969 - DNA, 25 bp, Homo sapien
tatagcctcgacaccttgcgcagtg

SEQ ID NO: 3925970 - DNA, 25 bp, Homo sapien
caagttgtcggcctaagagtgggac

SEQ ID NO: 3925971 - DNA, 25 bp, Homo sapien
gatgctcagttaggtcagtctccca

SEQ ID NO: 3925972 - DNA, 25 bp, Homo sapien
atttcctcttggaactgccatagtc

SEQ ID NO: 3925973 - DNA, 25 bp, Homo sapien
tttcctcttggaactgccatagtcc

SEQ ID NO: 3925974 - DNA, 25 bp, Homo sapien
gatttcctcttggaactgccatagt

SEQ ID NO: 3925975 - DNA, 25 bp, Homo sapien
tgatttcctcttggaactgccatag

SEQ ID NO: 3925976 - DNA, 25 bp, Homo sapien
ctacccagcgctgggagcccgctct

SEQ ID NO: 3925977 - DNA, 25 bp, Homo sapien
tccgggatggcgctcgccggaaccc

SEQ ID NO: 3925978 - DNA, 25 bp, Homo sapien
ccggcccctacccagcgctgggagc

SEQ ID NO: 3925979 - DNA, 25 bp, Homo sapien
cgggatggcgctcgccggaacccgg

SEQ ID NO: 3925980 - DNA, 25 bp, Homo sapien
ctcagttgctacacaggtggcaaag

SEQ ID NO: 3925981 - DNA, 25 bp, Homo sapien
tgctacacaggtggcaaagacctgt

SEQ ID NO: 3925982 - DNA, 25 bp, Homo sapien
cagttgctacacaggtggcaaagac

SEQ ID NO: 3925983 - DNA, 25 bp, Homo sapien
ctgtttaaacctgggtcctacagag

SEQ ID NO: 3925984 - DNA, 25 bp, Homo sapien
ccctcgctggggaatggagattgcc

SEQ ID NO: 3925985 - DNA, 25 bp, Homo sapien
catcctgccgttcagagttcccaga

SEQ ID NO: 3925986 - DNA, 25 bp, Homo sapien
gttcagagttcccagagtgagaggt

SEQ ID NO: 3925987 - DNA, 25 bp, Homo sapien
ggaatggagattgccatcctgccgt

SEQ ID NO: 3925988 - DNA, 25 bp, Homo sapien
tcactggggacatgggcactatcta

SEQ ID NO: 3925989 - DNA, 25 bp, Homo sapien
ggggtgaccttcagagcccagcagt

SEQ ID NO: 3925990 - DNA, 25 bp, Homo sapien
ttctgtctgccagctgacattggct

SEQ ID NO: 3925991 - DNA, 25 bp, Homo sapien
aactgctcaagaggccggctgggct

SEQ ID NO: 3925992 - DNA, 25 bp, Homo sapien
gaagaaacctggctggtgacccgca

SEQ ID NO: 3925993 - DNA, 25 bp, Homo sapien
gtcacagcgtccatgaccacatgct

SEQ ID NO: 3925994 - DNA, 25 bp, Homo sapien
cccgcacagtgggtcacagtgtcac

SEQ ID NO: 3925995 - DNA, 25 bp, Homo sapien
tttccgatggtgatggagcatcccc

SEQ ID NO: 3925996 - DNA, 25 bp, Homo sapien
cgcgccaggctgtatttcaatattt

SEQ ID NO: 3925997 - DNA, 25 bp, Homo sapien
ccgcgccaggctgtatttcaatatt

SEQ ID NO: 3925998 - DNA, 25 bp, Homo sapien
caccatatgggaggactgcatctgg

SEQ ID NO: 3925999 - DNA, 25 bp, Homo sapien
tttagattccttatttccactggat

SEQ ID NO: 3926000 - DNA, 25 bp, Homo sapien
acgcagttgaccacgtggtgagtcc

SEQ ID NO: 3926001 - DNA, 25 bp, Homo sapien
cctgtttgcccttgttgacaccata

SEQ ID NO: 3926002 - DNA, 25 bp, Homo sapien
taagctcctgatggttcacagtgct

SEQ ID NO: 3926003 - DNA, 25 bp, Homo sapien
taaatgtagaaacttcggccagcac

SEQ ID NO: 3926004 - DNA, 25 bp, Homo sapien
tagcatgcgtgaagacagaagggtc

SEQ ID NO: 3926005 - DNA, 25 bp, Homo sapien
tactttgcatcctataccctgtggc

SEQ ID NO: 3926006 - DNA, 25 bp, Homo sapien
tcctcgggtcgagcctcgaagaacc

SEQ ID NO: 3926007 - DNA, 25 bp, Homo sapien
tcgaagaaccggaagacttcgtcac

SEQ ID NO: 3926008 - DNA, 25 bp, Homo sapien
cttttggagggttgacatcctcggg

SEQ ID NO: 3926009 - DNA, 25 bp, Homo sapien
acttcgtcacactgtgagatgtggg

SEQ ID NO: 3926010 - DNA, 25 bp, Homo sapien
ggccacgagggcctcagacaaagag

SEQ ID NO: 3926011 - DNA, 25 bp, Homo sapien
ttccggaggcagaggacgcgtgggc

SEQ ID NO: 3926012 - DNA, 25 bp, Homo sapien
ccacgagggcctcagacaaagaggc

SEQ ID NO: 3926013 - DNA, 25 bp, Homo sapien
tcttcatgccgacagagacccacat

SEQ ID NO: 3926014 - DNA, 25 bp, Homo sapien
aggcaaatgggcccctctcctccct

SEQ ID NO: 3926015 - DNA, 25 bp, Homo sapien
tcccccagccccagatacactctca

SEQ ID NO: 3926016 - DNA, 25 bp, Homo sapien
tctcctccctgaagccctccccgag

SEQ ID NO: 3926017 - DNA, 25 bp, Homo sapien
tcctccctgaagccctccccgagcc

SEQ ID NO: 3926018 - DNA, 25 bp, Homo sapien
ccggcagtattcatcgatgggcttc

SEQ ID NO: 3926019 - DNA, 25 bp, Homo sapien
gtattcatcgatgggcttcagtctc

SEQ ID NO: 3926020 - DNA, 25 bp, Homo sapien
cttcacagctacgtcccggatgtgg

SEQ ID NO: 3926021 - DNA, 25 bp, Homo sapien
gcagtattcatcgatgggcttcagt

SEQ ID NO: 3926022 - DNA, 25 bp, Homo sapien
ggcaggaggcgccctaggctgagag

SEQ ID NO: 3926023 - DNA, 25 bp, Homo sapien
ccgtccacggtcaaggaaacaagag

SEQ ID NO: 3926024 - DNA, 25 bp, Homo sapien
cgtccacggtcaaggaaacaagaga

SEQ ID NO: 3926025 - DNA, 25 bp, Homo sapien
gtccacggtcaaggaaacaagagag

SEQ ID NO: 3926026 - DNA, 25 bp, Homo sapien
tacatggagcactaggctttgcatt

SEQ ID NO: 3926027 - DNA, 25 bp, Homo sapien
catggagcactaggctttgcattca

SEQ ID NO: 3926028 - DNA, 25 bp, Homo sapien
cccacactacatggagcactaggct

SEQ ID NO: 3926029 - DNA, 25 bp, Homo sapien
cactacatggagcactaggctttgc

SEQ ID NO: 3926030 - DNA, 25 bp, Homo sapien
tgaagccagagggccgggccatctc

SEQ ID NO: 3926031 - DNA, 25 bp, Homo sapien
ttgctcaagctctccttcatcatct

SEQ ID NO: 3926032 - DNA, 25 bp, Homo sapien
tcttgttcctctcctggactcttgc

SEQ ID NO: 3926033 - DNA, 25 bp, Homo sapien
tctcctggactcttgctcaagctct

SEQ ID NO: 3926034 - DNA, 25 bp, Homo sapien
aaactagttaaggagcactgaggcc

SEQ ID NO: 3926035 - DNA, 25 bp, Homo sapien
aagtgctgggaagaactcattttaa

SEQ ID NO: 3926036 - DNA, 25 bp, Homo sapien
ttaaaaactagttaaggagcactga

SEQ ID NO: 3926037 - DNA, 25 bp, Homo sapien
aaaactagttaaggagcactgaggc

SEQ ID NO: 3926038 - DNA, 25 bp, Homo sapien
caggtgggtcctctaactgcagtca

SEQ ID NO: 3926039 - DNA, 25 bp, Homo sapien
ctcgactataacctcatgagagatt

SEQ ID NO: 3926040 - DNA, 25 bp, Homo sapien
ccagcgagatgagcaagccgtcttg

SEQ ID NO: 3926041 - DNA, 25 bp, Homo sapien
gccttcagctgaatctcgactataa

SEQ ID NO: 3926042 - DNA, 25 bp, Homo sapien
aacggactttttctaccactgagct

SEQ ID NO: 3926043 - DNA, 25 bp, Homo sapien
caatgagggcctaatgctaagaagg

SEQ ID NO: 3926044 - DNA, 25 bp, Homo sapien
ttgtcagcactacccacaatgaggg

SEQ ID NO: 3926045 - DNA, 25 bp, Homo sapien
tgccgcagaacaccacagcgggaaa

SEQ ID NO: 3926046 - DNA, 25 bp, Homo sapien
tgagcctgggggaatcagcagggtc

SEQ ID NO: 3926047 - DNA, 25 bp, Homo sapien
ggggaatcagcagggtcccttcaga

SEQ ID NO: 3926048 - DNA, 25 bp, Homo sapien
tgggggaatcagcagggtcccttca

SEQ ID NO: 3926049 - DNA, 25 bp, Homo sapien
cctgggggaatcagcagggtccctt

SEQ ID NO: 3926050 - DNA, 25 bp, Homo sapien
ctggcagtgtgccaggggttagcaa

SEQ ID NO: 3926051 - DNA, 25 bp, Homo sapien
ttgccaaggtctgactgatcactgt

SEQ ID NO: 3926052 - DNA, 25 bp, Homo sapien
tcttgccaaggtctgactgatcact

SEQ ID NO: 3926053 - DNA, 25 bp, Homo sapien
tgtgccaggggttagcaaggtgcag

SEQ ID NO: 3926054 - DNA, 25 bp, Homo sapien
gccaccttcaatgggaaacttatcc

SEQ ID NO: 3926055 - DNA, 25 bp, Homo sapien
ggccaccttcaatgggaaacttatc

SEQ ID NO: 3926056 - DNA, 25 bp, Homo sapien
tggccaccttcaatgggaaacttat

SEQ ID NO: 3926057 - DNA, 25 bp, Homo sapien
caccttcaatgggaaacttatccaa

SEQ ID NO: 3926058 - DNA, 25 bp, Homo sapien
accgtgctgtggaaacagaaccagc

SEQ ID NO: 3926059 - DNA, 25 bp, Homo sapien
cagaaccgtgctgtggaaacagaac

SEQ ID NO: 3926060 - DNA, 25 bp, Homo sapien
ttccagaaccgtgctgtggaaacag

SEQ ID NO: 3926061 - DNA, 25 bp, Homo sapien
gaaccgtgctgtggaaacagaacca

SEQ ID NO: 3926062 - DNA, 25 bp, Homo sapien
ttcccaccctgaggtcgctgctgtt

SEQ ID NO: 3926063 - DNA, 25 bp, Homo sapien
ggtcgctgctgtttttccaaggacg

SEQ ID NO: 3926064 - DNA, 25 bp, Homo sapien
tcgctgctgtttttccaaggacgga

SEQ ID NO: 3926065 - DNA, 25 bp, Homo sapien
tgctgtttttccaaggacggaccca

SEQ ID NO: 3926066 - DNA, 25 bp, Homo sapien
gaagtgtttggaatagccgctgagc

SEQ ID NO: 3926067 - DNA, 25 bp, Homo sapien
tgggcaaactgtgcaggagaataat

SEQ ID NO: 3926068 - DNA, 25 bp, Homo sapien
cttagaagccctctcgggaacctga

SEQ ID NO: 3926069 - DNA, 25 bp, Homo sapien
gaacctgacctggtttccagaagaa

SEQ ID NO: 3926070 - DNA, 25 bp, Homo sapien
tgttcagatgacagagcacccttca

SEQ ID NO: 3926071 - DNA, 25 bp, Homo sapien
ggatcgctttgcacgtggttcccgg

SEQ ID NO: 3926072 - DNA, 25 bp, Homo sapien
agagggtccatgtgctgttccgaat

SEQ ID NO: 3926073 - DNA, 25 bp, Homo sapien
tatggccctcaactcatgaccagag

SEQ ID NO: 3926074 - DNA, 25 bp, Homo sapien
tgaccctgacagctctcttgggggc

SEQ ID NO: 3926075 - DNA, 25 bp, Homo sapien
gaccctgacagctctcttgggggct

SEQ ID NO: 3926076 - DNA, 25 bp, Homo sapien
ctggactctgaccctgacagctctc

SEQ ID NO: 3926077 - DNA, 25 bp, Homo sapien
gactctgaccctgacagctctcttg

SEQ ID NO: 3926078 - DNA, 25 bp, Homo sapien
gaggtggagtcagaccaggtcacat

SEQ ID NO: 3926079 - DNA, 25 bp, Homo sapien
gagtcagaccaggtcacattgatta

SEQ ID NO: 3926080 - DNA, 25 bp, Homo sapien
ctgcaggtcaaagaacttgctgtac

SEQ ID NO: 3926081 - DNA, 25 bp, Homo sapien
tgtacctccggtagatagtctggga

SEQ ID NO: 3926082 - DNA, 25 bp, Homo sapien
tccccctgctgactcctagctccat

SEQ ID NO: 3926083 - DNA, 25 bp, Homo sapien
tggtccccctgctgactcctagctc

SEQ ID NO: 3926084 - DNA, 25 bp, Homo sapien
cctggtccccctgctgactcctagc

SEQ ID NO: 3926085 - DNA, 25 bp, Homo sapien
gtccccctgctgactcctagctcca

SEQ ID NO: 3926086 - DNA, 25 bp, Homo sapien
ttggtggcatgctagtgcccagcac

SEQ ID NO: 3926087 - DNA, 25 bp, Homo sapien
tcgcgcctggtttagagacaagcta

SEQ ID NO: 3926088 - DNA, 25 bp, Homo sapien
tctccttgttagaatggaagcctcc

SEQ ID NO: 3926089 - DNA, 25 bp, Homo sapien
gaggaagcctccctactgctggagc

SEQ ID NO: 3926090 - DNA, 25 bp, Homo sapien
gcctagcaatgtgcaaagtggccca

SEQ ID NO: 3926091 - DNA, 25 bp, Homo sapien
agaggccgtcttggcttcacacagg

SEQ ID NO: 3926092 - DNA, 25 bp, Homo sapien
catacatgtccctgctacgtgggct

SEQ ID NO: 3926093 - DNA, 25 bp, Homo sapien
gtctcgttaaatgtggtgataccca

SEQ ID NO: 3926094 - DNA, 25 bp, Homo sapien
aataattgagtcctcttagccagtc

SEQ ID NO: 3926095 - DNA, 25 bp, Homo sapien
tttcaggttcaatgctgagctcttg

SEQ ID NO: 3926096 - DNA, 25 bp, Homo sapien
gcctggccaacatttctatattatt

SEQ ID NO: 3926097 - DNA, 25 bp, Homo sapien
gctcctggatgttgtgctgacatcc

SEQ ID NO: 3926098 - DNA, 25 bp, Homo sapien
gctaggtgctagaaacgaaggcagt

SEQ ID NO: 3926099 - DNA, 25 bp, Homo sapien
tccatgaggccagagacacttacaa

SEQ ID NO: 3926100 - DNA, 25 bp, Homo sapien
cgaaggcagtaagctagacagggtc

SEQ ID NO: 3926101 - DNA, 25 bp, Homo sapien
tatgggaggcaacagacaacatgtc

SEQ ID NO: 3926102 - DNA, 25 bp, Homo sapien
caggacgatgaagcaggcttggcaa

SEQ ID NO: 3926103 - DNA, 25 bp, Homo sapien
ggcaggacgatgaagcaggcttggc

SEQ ID NO: 3926104 - DNA, 25 bp, Homo sapien
atagatgagcatgtgagggagccca

SEQ ID NO: 3926105 - DNA, 25 bp, Homo sapien
ctaagggctgaaggaggaatagatg

SEQ ID NO: 3926106 - DNA, 25 bp, Homo sapien
ttgattgagactggctttaaccact

SEQ ID NO: 3926107 - DNA, 25 bp, Homo sapien
ttgagactggctttaaccactgccc

SEQ ID NO: 3926108 - DNA, 25 bp, Homo sapien
gattgagactggctttaaccactgc

SEQ ID NO: 3926109 - DNA, 25 bp, Homo sapien
cttgattgagactggctttaaccac

SEQ ID NO: 3926110 - DNA, 25 bp, Homo sapien
gagcattattctggctggcctcatc

SEQ ID NO: 3926111 - DNA, 25 bp, Homo sapien
agggttgggagcattattctggctg

SEQ ID NO: 3926112 - DNA, 25 bp, Homo sapien
tgggagcattattctggctggcctc

SEQ ID NO: 3926113 - DNA, 25 bp, Homo sapien
gttgggagcattattctggctggcc

SEQ ID NO: 3926114 - DNA, 25 bp, Homo sapien
cctgctctcataaaatgtacaccag

SEQ ID NO: 3926115 - DNA, 25 bp, Homo sapien
ataaaatgtacaccaggacctgaat

SEQ ID NO: 3926116 - DNA, 25 bp, Homo sapien
tctcataaaatgtacaccaggacct

SEQ ID NO: 3926117 - DNA, 25 bp, Homo sapien
cataaaatgtacaccaggacctgaa

SEQ ID NO: 3926118 - DNA, 25 bp, Homo sapien
ccaagtgaggatacttgggctcaga

SEQ ID NO: 3926119 - DNA, 25 bp, Homo sapien
tatttttcaaacctaagaggagctc

SEQ ID NO: 3926120 - DNA, 25 bp, Homo sapien
aaagatgcccatgtttgctcaggtc

SEQ ID NO: 3926121 - DNA, 25 bp, Homo sapien
tcaggtcaccatgtgttgggctcct

SEQ ID NO: 3926122 - DNA, 25 bp, Homo sapien
tgcaaagctccatgaagcaaggcag

SEQ ID NO: 3926123 - DNA, 25 bp, Homo sapien
tctgtgctcctaacccacttctggg

SEQ ID NO: 3926124 - DNA, 25 bp, Homo sapien
tctgtaggataccacacactgctgt

SEQ ID NO: 3926125 - DNA, 25 bp, Homo sapien
gggtgcaaacaaaggagccatctag

SEQ ID NO: 3926126 - DNA, 25 bp, Homo sapien
tgctttcaagcagttgtttggagtc

SEQ ID NO: 3926127 - DNA, 25 bp, Homo sapien
caagctggctaggtaccaggaagcc

SEQ ID NO: 3926128 - DNA, 25 bp, Homo sapien
gtcacaagctggctaggtaccagga

SEQ ID NO: 3926129 - DNA, 25 bp, Homo sapien
cagttgtttggagtcacaagctggc

SEQ ID NO: 3926130 - DNA, 25 bp, Homo sapien
agcacacctgcaccactctatagtt

SEQ ID NO: 3926131 - DNA, 25 bp, Homo sapien
tgggtcacaacaacttttccctgaa

SEQ ID NO: 3926132 - DNA, 25 bp, Homo sapien
acacctgcaccactctatagttcat

SEQ ID NO: 3926133 - DNA, 25 bp, Homo sapien
cagtctcccgtgcagctctaccctc

SEQ ID NO: 3926134 - DNA, 25 bp, Homo sapien
ctaatgggggttcccagtacaatct

SEQ ID NO: 3926135 - DNA, 25 bp, Homo sapien
gaggccaaaatgagctggccccagc

SEQ ID NO: 3926136 - DNA, 25 bp, Homo sapien
gcaagagtttcccagagcacagagc

SEQ ID NO: 3926137 - DNA, 25 bp, Homo sapien
aaagcaaggaaaagccaaagacagc

SEQ ID NO: 3926138 - DNA, 25 bp, Homo sapien
caaaagtcaggtcaggagaacagca

SEQ ID NO: 3926139 - DNA, 25 bp, Homo sapien
caaattagctcggtagtacagaccc

SEQ ID NO: 3926140 - DNA, 25 bp, Homo sapien
agataaatggtcaaccccgcgtggg

SEQ ID NO: 3926141 - DNA, 25 bp, Homo sapien
taatcacaggttcgacacgaggcca

SEQ ID NO: 3926142 - DNA, 25 bp, Homo sapien
gggcaagttccccatgaggagcacc

SEQ ID NO: 3926143 - DNA, 25 bp, Homo sapien
ggcaagttccccatgaggagcacct

SEQ ID NO: 3926144 - DNA, 25 bp, Homo sapien
gcaagttccccatgaggagcacctt

SEQ ID NO: 3926145 - DNA, 25 bp, Homo sapien
cagggcaagttccccatgaggagca

SEQ ID NO: 3926146 - DNA, 25 bp, Homo sapien
ttagatatcacttcctccgctcagg

SEQ ID NO: 3926147 - DNA, 25 bp, Homo sapien
agatgggactgggaataactctgtc

SEQ ID NO: 3926148 - DNA, 25 bp, Homo sapien
tccgctcaggtaacagcagggagag

SEQ ID NO: 3926149 - DNA, 25 bp, Homo sapien
ccagaggccgttttctagaagagat

SEQ ID NO: 3926150 - DNA, 25 bp, Homo sapien
ccaggagcctgggtgcaatcaactt

SEQ ID NO: 3926151 - DNA, 25 bp, Homo sapien
caagctagttaagacccaaagcagc

SEQ ID NO: 3926152 - DNA, 25 bp, Homo sapien
cccctaggagtgagagctgtaaaca

SEQ ID NO: 3926153 - DNA, 25 bp, Homo sapien
gacccagctggccaactaaagagtc

SEQ ID NO: 3926154 - DNA, 25 bp, Homo sapien
taagtaacttgcactgtatcccacg

SEQ ID NO: 3926155 - DNA, 25 bp, Homo sapien
aggatatcccaatgctcagccaagg

SEQ ID NO: 3926156 - DNA, 25 bp, Homo sapien
tctctgcggctgatatggtgacttg

SEQ ID NO: 3926157 - DNA, 25 bp, Homo sapien
tagaatgatacgaaccctccgagct

SEQ ID NO: 3926158 - DNA, 25 bp, Homo sapien
ttagggtacattcaatgacctgcag

SEQ ID NO: 3926159 - DNA, 25 bp, Homo sapien
gacctgcaggaatcacacgaaaaca

SEQ ID NO: 3926160 - DNA, 25 bp, Homo sapien
ccccacattagggtacattcaatga

SEQ ID NO: 3926161 - DNA, 25 bp, Homo sapien
cacgaaaacacgagtgttaagtatg

SEQ ID NO: 3926162 - DNA, 25 bp, Homo sapien
tcaccatcgatggtaactgctaaac

SEQ ID NO: 3926163 - DNA, 25 bp, Homo sapien
caccatcgatggtaactgctaaact

SEQ ID NO: 3926164 - DNA, 25 bp, Homo sapien
aacgaaggaatctgcattctgcatc

SEQ ID NO: 3926165 - DNA, 25 bp, Homo sapien
tgtgagcacaaagaacccggtggac

SEQ ID NO: 3926166 - DNA, 25 bp, Homo sapien
caactgtgaaagtgcaatacctccc

SEQ ID NO: 3926167 - DNA, 25 bp, Homo sapien
ctgcagaggatcagaacattcatga

SEQ ID NO: 3926168 - DNA, 25 bp, Homo sapien
aactctctaagggtgtcagggactg

SEQ ID NO: 3926169 - DNA, 25 bp, Homo sapien
tcagagctacactggtgacaaaggc

SEQ ID NO: 3926170 - DNA, 25 bp, Homo sapien
gatcaatgtacaatccagggcagca

SEQ ID NO: 3926171 - DNA, 25 bp, Homo sapien
taatgctttgagcactggaactgct

SEQ ID NO: 3926172 - DNA, 25 bp, Homo sapien
ccagcagggtcggcgggggctgtac

SEQ ID NO: 3926173 - DNA, 25 bp, Homo sapien
cagcagggtcggcgggggctgtact

SEQ ID NO: 3926174 - DNA, 25 bp, Homo sapien
cccagcagggtcggcgggggctgta

SEQ ID NO: 3926175 - DNA, 25 bp, Homo sapien
cacggtggcatcctgcacgcagtag

SEQ ID NO: 3926176 - DNA, 25 bp, Homo sapien
gtccaccacggtggcatcctgcacg

SEQ ID NO: 3926177 - DNA, 25 bp, Homo sapien
tccacgtccaccacggtggcatcct

SEQ ID NO: 3926178 - DNA, 25 bp, Homo sapien
accacggtggcatcctgcacgcagt

SEQ ID NO: 3926179 - DNA, 25 bp, Homo sapien
cttcccccacaaagcgagtggcgcc

SEQ ID NO: 3926180 - DNA, 25 bp, Homo sapien
cacaaagcgagtggcgcccccggcg

SEQ ID NO: 3926181 - DNA, 25 bp, Homo sapien
ccccggcggcgtcaccttctcatcc

SEQ ID NO: 3926182 - DNA, 25 bp, Homo sapien
gtcaccttctcatcccggccgggct

SEQ ID NO: 3926183 - DNA, 25 bp, Homo sapien
cggactcccggcgcccacaggtccg

SEQ ID NO: 3926184 - DNA, 25 bp, Homo sapien
gcgcccacaggtccggcccagggac

SEQ ID NO: 3926185 - DNA, 25 bp, Homo sapien
cggcgcgccgaacgctgcccggact

SEQ ID NO: 3926186 - DNA, 25 bp, Homo sapien
gcgccccttcactcccgcgcggccg

SEQ ID NO: 3926187 - DNA, 25 bp, Homo sapien
tcgggctccggggggatcggcgctg

SEQ ID NO: 3926188 - DNA, 25 bp, Homo sapien
ggcggctccccttcgccgctctccg

SEQ ID NO: 3926189 - DNA, 25 bp, Homo sapien
cgggctccggggggatcggcgctgg

SEQ ID NO: 3926190 - DNA, 25 bp, Homo sapien
ggctctcggataactcgtcttctgt

SEQ ID NO: 3926191 - DNA, 25 bp, Homo sapien
cggataactcgtcttctgtggatgg

SEQ ID NO: 3926192 - DNA, 25 bp, Homo sapien
ctgtggatggcaaagtcttctggaa

SEQ ID NO: 3926193 - DNA, 25 bp, Homo sapien
tcatggctctcggataactcgtctt

SEQ ID NO: 3926194 - DNA, 25 bp, Homo sapien
gagcaactgagtgctccccactcaa

SEQ ID NO: 3926195 - DNA, 25 bp, Homo sapien
tattggagggagcaactgagtgctc

SEQ ID NO: 3926196 - DNA, 25 bp, Homo sapien
gagggagcaactgagtgctccccac

SEQ ID NO: 3926197 - DNA, 25 bp, Homo sapien
ctttattggagggagcaactgagtg

SEQ ID NO: 3926198 - DNA, 25 bp, Homo sapien
gatgtgaataatagcacacttgtaa

SEQ ID NO: 3926199 - DNA, 25 bp, Homo sapien
cttgtaagttgacttaaaattctga

SEQ ID NO: 3926200 - DNA, 25 bp, Homo sapien
gacagggtttctatatcaaagacaa

SEQ ID NO: 3926201 - DNA, 25 bp, Homo sapien
tctatatcaaagacaagagtcatga

SEQ ID NO: 3926202 - DNA, 25 bp, Homo sapien
tttgtccagttctgatgagtagtgc

SEQ ID NO: 3926203 - DNA, 25 bp, Homo sapien
gctccagaagaaatacagggagcct

SEQ ID NO: 3926204 - DNA, 25 bp, Homo sapien
agtgctccagaagaaatacagggag

SEQ ID NO: 3926205 - DNA, 25 bp, Homo sapien
gaaatacagggagcctcaggaacac

SEQ ID NO: 3926206 - DNA, 25 bp, Homo sapien
aaattaattgatggtgctggaggtc

SEQ ID NO: 3926207 - DNA, 25 bp, Homo sapien
tgtcaagaacagaggactaaggcca

SEQ ID NO: 3926208 - DNA, 25 bp, Homo sapien
catgcaacacactggatgaggctca

SEQ ID NO: 3926209 - DNA, 25 bp, Homo sapien
gacacactcaaagggtacatatgtg

SEQ ID NO: 3926210 - DNA, 25 bp, Homo sapien
tggaccaagcttctccaactttttg

SEQ ID NO: 3926211 - DNA, 25 bp, Homo sapien
tctccaactttaatgtgcacacaag

SEQ ID NO: 3926212 - DNA, 25 bp, Homo sapien
taccagggagcagacctggaccaag

SEQ ID NO: 3926213 - DNA, 25 bp, Homo sapien
tctcggcgcactgtagcctcggctt

SEQ ID NO: 3926214 - DNA, 25 bp, Homo sapien
tatgccattcatcaccagaagtgtg

SEQ ID NO: 3926215 - DNA, 25 bp, Homo sapien
cagcctcaactgtgggaaaaataac

SEQ ID NO: 3926216 - DNA, 25 bp, Homo sapien
ggttcatagtttaaagctaccagag

SEQ ID NO: 3926217 - DNA, 25 bp, Homo sapien
cagaagtgtgtcctcggtgcagcct

SEQ ID NO: 3926218 - DNA, 25 bp, Homo sapien
cttccttgtcttttaagccacatgc

SEQ ID NO: 3926219 - DNA, 25 bp, Homo sapien
gcttccttgtcttttaagccacatg

SEQ ID NO: 3926220 - DNA, 25 bp, Homo sapien
ttccttgtcttttaagccacatgca

SEQ ID NO: 3926221 - DNA, 25 bp, Homo sapien
tccttgtcttttaagccacatgcat

SEQ ID NO: 3926222 - DNA, 25 bp, Homo sapien
tctctggtaaacccgtgaaacgctc

SEQ ID NO: 3926223 - DNA, 25 bp, Homo sapien
ttgcagtctccggaggccattttct

SEQ ID NO: 3926224 - DNA, 25 bp, Homo sapien
gcagtctccggaggccattttctct

SEQ ID NO: 3926225 - DNA, 25 bp, Homo sapien
taaacccgtgaaacgctctcggagc

SEQ ID NO: 3926226 - DNA, 25 bp, Homo sapien
tacctgggacgataccttgcacaca

SEQ ID NO: 3926227 - DNA, 25 bp, Homo sapien
tccgctgggttgtagatcacacagg

SEQ ID NO: 3926228 - DNA, 25 bp, Homo sapien
tggaatcctcttcggtacctgggac

SEQ ID NO: 3926229 - DNA, 25 bp, Homo sapien
gcatgtgccttatgatccgctgggt

SEQ ID NO: 3926230 - DNA, 25 bp, Homo sapien
tcccctctggcaacaggtgtcatgg

SEQ ID NO: 3926231 - DNA, 25 bp, Homo sapien
ggtggaccccactgaggaattgcaa

SEQ ID NO: 3926232 - DNA, 25 bp, Homo sapien
gatgtccaatcctgtgtcagcagtg

SEQ ID NO: 3926233 - DNA, 25 bp, Homo sapien
ggcaatgtccctgtaactgtacggt

SEQ ID NO: 3926234 - DNA, 25 bp, Homo sapien
gcaatttctagccaagaggatgatc

SEQ ID NO: 3926235 - DNA, 25 bp, Homo sapien
taagctatgttgagtcaatggcagc

SEQ ID NO: 3926236 - DNA, 25 bp, Homo sapien
caaaaatggtgttgcccaatgcccc

SEQ ID NO: 3926237 - DNA, 25 bp, Homo sapien
gagagtctgcgcaaacaacttctga

SEQ ID NO: 3926238 - DNA, 25 bp, Homo sapien
gcagtagataccactgctagaacac

SEQ ID NO: 3926239 - DNA, 25 bp, Homo sapien
gggctggttccgcagtagataccac

SEQ ID NO: 3926240 - DNA, 25 bp, Homo sapien
tccgcagtagataccactgctagaa

SEQ ID NO: 3926241 - DNA, 25 bp, Homo sapien
tggttccgcagtagataccactgct

SEQ ID NO: 3926242 - DNA, 25 bp, Homo sapien
aatatacacagtaagctgggcacag

SEQ ID NO: 3926243 - DNA, 25 bp, Homo sapien
tgttaacatggttattttcctaaca

SEQ ID NO: 3926244 - DNA, 25 bp, Homo sapien
aaaaatatacacagtaagctgggca

SEQ ID NO: 3926245 - DNA, 25 bp, Homo sapien
tattgttaacatggttattttccta

SEQ ID NO: 3926246 - DNA, 25 bp, Homo sapien
ctatgctgtggtcttcaaaatccct

SEQ ID NO: 3926247 - DNA, 25 bp, Homo sapien
ctctatgcaaaaacccagggctatg

SEQ ID NO: 3926248 - DNA, 25 bp, Homo sapien
aaaaacccagggctatgctgtggtc

SEQ ID NO: 3926249 - DNA, 25 bp, Homo sapien
tatgctgtggtcttcaaaatccctc

SEQ ID NO: 3926250 - DNA, 25 bp, Homo sapien
tctggattacaatgaaaactcactt

SEQ ID NO: 3926251 - DNA, 25 bp, Homo sapien
agtagaggttaacagatgatagtgc

SEQ ID NO: 3926252 - DNA, 25 bp, Homo sapien
caagttcaatagaagtagggtgatt

SEQ ID NO: 3926253 - DNA, 25 bp, Homo sapien
cacttatgtgggagtttgagctcac

SEQ ID NO: 3926254 - DNA, 25 bp, Homo sapien
gcaggcatctctggcgagccttatc

SEQ ID NO: 3926255 - DNA, 25 bp, Homo sapien
acagtctttctgagtttgcctgtat

SEQ ID NO: 3926256 - DNA, 25 bp, Homo sapien
agtctttctgagtttgcctgtatgc

SEQ ID NO: 3926257 - DNA, 25 bp, Homo sapien
tttctgagtttgcctgtatgcttca

SEQ ID NO: 3926258 - DNA, 25 bp, Homo sapien
gcatcctggcacaccatcagaggag

SEQ ID NO: 3926259 - DNA, 25 bp, Homo sapien
gcaactgctgtagaggccactaatg

SEQ ID NO: 3926260 - DNA, 25 bp, Homo sapien
aaaaacaatgagacgcttctttggg

SEQ ID NO: 3926261 - DNA, 25 bp, Homo sapien
tggtttcagtccttggcactaagtc

SEQ ID NO: 3926262 - DNA, 25 bp, Homo sapien
gagtctggcttacacaccggttgaa

SEQ ID NO: 3926263 - DNA, 25 bp, Homo sapien
tgcttagaagacagaggcctacctc

SEQ ID NO: 3926264 - DNA, 25 bp, Homo sapien
tggctggtcttcagtacatgagcag

SEQ ID NO: 3926265 - DNA, 25 bp, Homo sapien
tcctgaaacatgtgcacactaagag

SEQ ID NO: 3926266 - DNA, 25 bp, Homo sapien
tcagcaatgcttacctgagggcgag

SEQ ID NO: 3926267 - DNA, 25 bp, Homo sapien
caaacagcgaaagaggaatgagggc

SEQ ID NO: 3926268 - DNA, 25 bp, Homo sapien
gaggcacttcacatggttacctggg

SEQ ID NO: 3926269 - DNA, 25 bp, Homo sapien
gagtatggaacgtgtgcctcagcaa

SEQ ID NO: 3926270 - DNA, 25 bp, Homo sapien
ggcaggctgtaggtattactggaaa

SEQ ID NO: 3926271 - DNA, 25 bp, Homo sapien
cagaagttcccactctgcgtggtgg

SEQ ID NO: 3926272 - DNA, 25 bp, Homo sapien
aggcaacattcgattggttaaggcg

SEQ ID NO: 3926273 - DNA, 25 bp, Homo sapien
gcctcatgtcactatcaggagcaag

SEQ ID NO: 3926274 - DNA, 25 bp, Homo sapien
tgtctgggcacataccgagtctttg

SEQ ID NO: 3926275 - DNA, 25 bp, Homo sapien
catgactccatcacctgtctgggca

SEQ ID NO: 3926276 - DNA, 25 bp, Homo sapien
aaaataacatctaccacctgccagg

SEQ ID NO: 3926277 - DNA, 25 bp, Homo sapien
gcaattggctgactgcctccgtgat

SEQ ID NO: 3926278 - DNA, 25 bp, Homo sapien
aaccccactgctggtaactgagcca

SEQ ID NO: 3926279 - DNA, 25 bp, Homo sapien
caggcctgtaaagagcatcgaccca

SEQ ID NO: 3926280 - DNA, 25 bp, Homo sapien
taaaccggttcttagccagcaagag

SEQ ID NO: 3926281 - DNA, 25 bp, Homo sapien
aactgtaagcactcatccagggaga

SEQ ID NO: 3926282 - DNA, 25 bp, Homo sapien
agaagggagccaacaacatttatgc

SEQ ID NO: 3926283 - DNA, 25 bp, Homo sapien
gacagaagggagccaacaacattta

SEQ ID NO: 3926284 - DNA, 25 bp, Homo sapien
acagaagggagccaacaacatttat

SEQ ID NO: 3926285 - DNA, 25 bp, Homo sapien
cagaagggagccaacaacatttatg

SEQ ID NO: 3926286 - DNA, 25 bp, Homo sapien
tagtttattatgaggtaactgcctc

SEQ ID NO: 3926287 - DNA, 25 bp, Homo sapien
ggtgaatgccaccttatctttgtcc

SEQ ID NO: 3926288 - DNA, 25 bp, Homo sapien
ccagacagataagcccctgcatgat

SEQ ID NO: 3926289 - DNA, 25 bp, Homo sapien
cctcagctggtctgcgtgtctctgc

SEQ ID NO: 3926290 - DNA, 25 bp, Homo sapien
gcacaggccaagatgtgcaggaagt

SEQ ID NO: 3926291 - DNA, 25 bp, Homo sapien
tcgctcaggcccgggcggatgctca

SEQ ID NO: 3926292 - DNA, 25 bp, Homo sapien
aggcccgggcggatgctcaggcgag

SEQ ID NO: 3926293 - DNA, 25 bp, Homo sapien
ggcggatgctcaggcgagcacaggc

SEQ ID NO: 3926294 - DNA, 25 bp, Homo sapien
catacctgacttggcatctgcattc

SEQ ID NO: 3926295 - DNA, 25 bp, Homo sapien
ggagccctcttgaaactcacagcag

SEQ ID NO: 3926296 - DNA, 25 bp, Homo sapien
agtgtaacgtattcagtgccaaacc

SEQ ID NO: 3926297 - DNA, 25 bp, Homo sapien
tgtggacacaactgtcaggccctcc

SEQ ID NO: 3926298 - DNA, 25 bp, Homo sapien
catgttcaacatagagctcttttgg

SEQ ID NO: 3926299 - DNA, 25 bp, Homo sapien
taccacttgtgccattaggaaagag

SEQ ID NO: 3926300 - DNA, 25 bp, Homo sapien
tgttgtacccatactgaaagccaaa

SEQ ID NO: 3926301 - DNA, 25 bp, Homo sapien
caagtagagggtgagccttcaggcc

SEQ ID NO: 3926302 - DNA, 25 bp, Homo sapien
gcatatctgtatagtttatccctga

SEQ ID NO: 3926303 - DNA, 25 bp, Homo sapien
gcaggttccaacacagtccttataa

SEQ ID NO: 3926304 - DNA, 25 bp, Homo sapien
tatcgtcggctaaacttcacttgtg

SEQ ID NO: 3926305 - DNA, 25 bp, Homo sapien
tactgttgacctctagaaggcaatg

SEQ ID NO: 3926306 - DNA, 25 bp, Homo sapien
tcagagggctccaaggttgaatctt

SEQ ID NO: 3926307 - DNA, 25 bp, Homo sapien
gcaagcatgaaataggaaataacac

SEQ ID NO: 3926308 - DNA, 25 bp, Homo sapien
aaacgtcctagtgtggtgacctcac

SEQ ID NO: 3926309 - DNA, 25 bp, Homo sapien
gacctcactgtatcagaattccttg

SEQ ID NO: 3926310 - DNA, 25 bp, Homo sapien
agggcaccagggcatcacttgtaca

SEQ ID NO: 3926311 - DNA, 25 bp, Homo sapien
caccagggcatcacttgtacattat

SEQ ID NO: 3926312 - DNA, 25 bp, Homo sapien
ggcaggtactttgactatcaccttt

SEQ ID NO: 3926313 - DNA, 25 bp, Homo sapien
agtgctccccgggagacagtatccc

SEQ ID NO: 3926314 - DNA, 25 bp, Homo sapien
gatccggtggatctttctgtgcagg

SEQ ID NO: 3926315 - DNA, 25 bp, Homo sapien
cagtcctgctgaatgatccggtgga

SEQ ID NO: 3926316 - DNA, 25 bp, Homo sapien
tcctgctgaatgatccggtggatct

SEQ ID NO: 3926317 - DNA, 25 bp, Homo sapien
aatgatccggtggatctttctgtgc

SEQ ID NO: 3926318 - DNA, 25 bp, Homo sapien
gatacttggcctagtgtcaaaccag

SEQ ID NO: 3926319 - DNA, 25 bp, Homo sapien
cacgtccttgggagttggttcattg

SEQ ID NO: 3926320 - DNA, 25 bp, Homo sapien
gttcttaggtaacacagcagttgtg

SEQ ID NO: 3926321 - DNA, 25 bp, Homo sapien
gacacctgtcttgtgttgcatcagt

SEQ ID NO: 3926322 - DNA, 25 bp, Homo sapien
atagtataggttatcaaaaccatca

SEQ ID NO: 3926323 - DNA, 25 bp, Homo sapien
tagtataggttatcaaaaccatcat

SEQ ID NO: 3926324 - DNA, 25 bp, Homo sapien
tactatgaattgccttggaagtggt

SEQ ID NO: 3926325 - DNA, 25 bp, Homo sapien
aaatatactatgaattgccttggaa

SEQ ID NO: 3926326 - DNA, 25 bp, Homo sapien
aatatactatgaattgccttggaag

SEQ ID NO: 3926327 - DNA, 25 bp, Homo sapien
tatactatgaattgccttggaagtg

SEQ ID NO: 3926328 - DNA, 25 bp, Homo sapien
gcacctgagaacaactcctagacca

SEQ ID NO: 3926329 - DNA, 25 bp, Homo sapien
gagaacaactcctagaccaactggt

SEQ ID NO: 3926330 - DNA, 25 bp, Homo sapien
cttacggcacctgagaacaactcct

SEQ ID NO: 3926331 - DNA, 25 bp, Homo sapien
gaccaactggttcatgaatttgtcc

SEQ ID NO: 3926332 - DNA, 25 bp, Homo sapien
tatccccgaggaagctaggctatca

SEQ ID NO: 3926333 - DNA, 25 bp, Homo sapien
caaggctgaaggtagacagcagtcc

SEQ ID NO: 3926334 - DNA, 25 bp, Homo sapien
cacctagaagggacctctgctgctg

SEQ ID NO: 3926335 - DNA, 25 bp, Homo sapien
ggtcatcctgcttcttatccccgag

SEQ ID NO: 3926336 - DNA, 25 bp, Homo sapien
ggagaggaaagagcctccacagggt

SEQ ID NO: 3926337 - DNA, 25 bp, Homo sapien
gcactctgttctccatgaggaattc

SEQ ID NO: 3926338 - DNA, 25 bp, Homo sapien
atcacaggctgattggcaagggaca

SEQ ID NO: 3926339 - DNA, 25 bp, Homo sapien
ttggtcggaggaggcactgtgaatc

SEQ ID NO: 3926340 - DNA, 25 bp, Homo sapien
actgtgaatcacaggctgattggca

SEQ ID NO: 3926341 - DNA, 25 bp, Homo sapien
cagagttcttttatgcacatattag

SEQ ID NO: 3926342 - DNA, 25 bp, Homo sapien
ctcagagttcttttatgcacatatt

SEQ ID NO: 3926343 - DNA, 25 bp, Homo sapien
gagttcttttatgcacatattagca

SEQ ID NO: 3926344 - DNA, 25 bp, Homo sapien
tctcagagttcttttatgcacatat

SEQ ID NO: 3926345 - DNA, 25 bp, Homo sapien
tggtcataaactttcctgtagatag

SEQ ID NO: 3926346 - DNA, 25 bp, Homo sapien
ggctggtcataaactttcctgtaga

SEQ ID NO: 3926347 - DNA, 25 bp, Homo sapien
tctagggctgagctgtgaaaaggct

SEQ ID NO: 3926348 - DNA, 25 bp, Homo sapien
ttcctgtagatagtgggcagctcaa

SEQ ID NO: 3926349 - DNA, 25 bp, Homo sapien
atgttccacactgggtcgtccactt

SEQ ID NO: 3926350 - DNA, 25 bp, Homo sapien
ttccacactgggtcgtccactttat

SEQ ID NO: 3926351 - DNA, 25 bp, Homo sapien
tgaatgttccacactgggtcgtcca

SEQ ID NO: 3926352 - DNA, 25 bp, Homo sapien
gaatgttccacactgggtcgtccac

SEQ ID NO: 3926353 - DNA, 25 bp, Homo sapien
ttaagttgtgaggttaagctgagct

SEQ ID NO: 3926354 - DNA, 25 bp, Homo sapien
taagtggtggcatgaatctctcgct

SEQ ID NO: 3926355 - DNA, 25 bp, Homo sapien
ttctctgtatgtgcggatactgcct

SEQ ID NO: 3926356 - DNA, 25 bp, Homo sapien
gatactgcctctgactcggatcgtg

SEQ ID NO: 3926357 - DNA, 25 bp, Homo sapien
caaccatgtgagagaaacagtcttc

SEQ ID NO: 3926358 - DNA, 25 bp, Homo sapien
ggaccatggcagcacagaagttagt

SEQ ID NO: 3926359 - DNA, 25 bp, Homo sapien
gacctgacttgcaattaggctaaga

SEQ ID NO: 3926360 - DNA, 25 bp, Homo sapien
tctttggtcaagtgatatggctggg

SEQ ID NO: 3926361 - DNA, 25 bp, Homo sapien
cagtttataactccagtgctgtcat

SEQ ID NO: 3926362 - DNA, 25 bp, Homo sapien
ctgatacagactcagtattcaactt

SEQ ID NO: 3926363 - DNA, 25 bp, Homo sapien
gtattcaactttttccagcagatgc

SEQ ID NO: 3926364 - DNA, 25 bp, Homo sapien
gcagtttataactccagtgctgtca

SEQ ID NO: 3926365 - DNA, 25 bp, Homo sapien
tggacccacaaatctccatcagtgg

SEQ ID NO: 3926366 - DNA, 25 bp, Homo sapien
gaacacactggagtcagtaaacaga

SEQ ID NO: 3926367 - DNA, 25 bp, Homo sapien
tataccacagtgtactgcccatagc

SEQ ID NO: 3926368 - DNA, 25 bp, Homo sapien
gcccatagctggatacactgtagga

SEQ ID NO: 3926369 - DNA, 25 bp, Homo sapien
acatatatatatgctgagaaaaagc

SEQ ID NO: 3926370 - DNA, 25 bp, Homo sapien
atatatatgctgagaaaaagcagaa

SEQ ID NO: 3926371 - DNA, 25 bp, Homo sapien
atatatgctgagaaaaagcagaaaa

SEQ ID NO: 3926372 - DNA, 25 bp, Homo sapien
atatatatatgctgagaaaaagcag

SEQ ID NO: 3926373 - DNA, 25 bp, Homo sapien
gactgccaatgaaacgctcttggtc

SEQ ID NO: 3926374 - DNA, 25 bp, Homo sapien
caaaatatctagcttgggctcttga

SEQ ID NO: 3926375 - DNA, 25 bp, Homo sapien
ctttattaagcttccatcatgaggg

SEQ ID NO: 3926376 - DNA, 25 bp, Homo sapien
gagaagcttggagttgtacaaggca

SEQ ID NO: 3926377 - DNA, 25 bp, Homo sapien
atgacagttcccaagacatctacct

SEQ ID NO: 3926378 - DNA, 25 bp, Homo sapien
tacctgttttattggatgtccattg

SEQ ID NO: 3926379 - DNA, 25 bp, Homo sapien
caagacatctacctgttttattgga

SEQ ID NO: 3926380 - DNA, 25 bp, Homo sapien
ggatgtccattgtacaaaaatacac

SEQ ID NO: 3926381 - DNA, 25 bp, Homo sapien
gggacctgtggcctgaatcccgacg

SEQ ID NO: 3926382 - DNA, 25 bp, Homo sapien
ccttgtagacaaagggactgagaaa

SEQ ID NO: 3926383 - DNA, 25 bp, Homo sapien
ttaagaaacaatgatcacctcaggc

SEQ ID NO: 3926384 - DNA, 25 bp, Homo sapien
tccaaagaatgaacaaggagcttct

SEQ ID NO: 3926385 - DNA, 25 bp, Homo sapien
gaactatacgtatcagatgcacagc

SEQ ID NO: 3926386 - DNA, 25 bp, Homo sapien
tactcaagtcacctgtgatggaggc

SEQ ID NO: 3926387 - DNA, 25 bp, Homo sapien
tgggctaatggcacaaaccaatgaa

SEQ ID NO: 3926388 - DNA, 25 bp, Homo sapien
tcacggactgacaacaatgacttgc

SEQ ID NO: 3926389 - DNA, 25 bp, Homo sapien
ccttcatgtccaggatatccctgat

SEQ ID NO: 3926390 - DNA, 25 bp, Homo sapien
cacaggatccaaaccccacaagagg

SEQ ID NO: 3926391 - DNA, 25 bp, Homo sapien
acacaggatccaaaccccacaagag

SEQ ID NO: 3926392 - DNA, 25 bp, Homo sapien
caggatccaaaccccacaagaggga

SEQ ID NO: 3926393 - DNA, 25 bp, Homo sapien
acaggatccaaaccccacaagaggg

SEQ ID NO: 3926394 - DNA, 25 bp, Homo sapien
cagctaactctgaaaggttctgcat

SEQ ID NO: 3926395 - DNA, 25 bp, Homo sapien
gatgcaatgcgtttaacgtgggtca

SEQ ID NO: 3926396 - DNA, 25 bp, Homo sapien
gtcaaagtggcacggccctgacgct

SEQ ID NO: 3926397 - DNA, 25 bp, Homo sapien
gatccagggccctgtcaaactccat

SEQ ID NO: 3926398 - DNA, 25 bp, Homo sapien
aggtgggcgtccaggactccaggag

SEQ ID NO: 3926399 - DNA, 25 bp, Homo sapien
gggcatagtggatgggtctgactgt

SEQ ID NO: 3926400 - DNA, 25 bp, Homo sapien
ctctgccctaaactttccgcttttg

SEQ ID NO: 3926401 - DNA, 25 bp, Homo sapien
gactgtcgctctgccctaaactttc

SEQ ID NO: 3926402 - DNA, 25 bp, Homo sapien
cagccctgcacgtgttggggcatag

SEQ ID NO: 3926403 - DNA, 25 bp, Homo sapien
ggagcagttggctgaggtcgtctct

SEQ ID NO: 3926404 - DNA, 25 bp, Homo sapien
ctgaggtcgtctctggagttccggc

SEQ ID NO: 3926405 - DNA, 25 bp, Homo sapien
ggtcgtctctggagttccggcctga

SEQ ID NO: 3926406 - DNA, 25 bp, Homo sapien
tgagacctggcccttccggcgctcg

SEQ ID NO: 3926407 - DNA, 25 bp, Homo sapien
ccttgttcggtctacagtctggaag

SEQ ID NO: 3926408 - DNA, 25 bp, Homo sapien
taagaactttgaaaagctggcattt

SEQ ID NO: 3926409 - DNA, 25 bp, Homo sapien
ctggaaggttgtacacttaagaact

SEQ ID NO: 3926410 - DNA, 25 bp, Homo sapien
ggcattttggtaaatcatggccacc

SEQ ID NO: 3926411 - DNA, 25 bp, Homo sapien
ccagtaggacaggtgcttcctgctg

SEQ ID NO: 3926412 - DNA, 25 bp, Homo sapien
agtaggacaggtgcttcctgctgac

SEQ ID NO: 3926413 - DNA, 25 bp, Homo sapien
cagtaggacaggtgcttcctgctga

SEQ ID NO: 3926414 - DNA, 25 bp, Homo sapien
gcctcatggactttgaaggagattc

SEQ ID NO: 3926415 - DNA, 25 bp, Homo sapien
tagataacagttacagcccatcccg

SEQ ID NO: 3926416 - DNA, 25 bp, Homo sapien
tagttgtagataacagttacagccc

SEQ ID NO: 3926417 - DNA, 25 bp, Homo sapien
atcccgcctcatggactttgaagga

SEQ ID NO: 3926418 - DNA, 25 bp, Homo sapien
tagttatttcaggaatgtgtaccat

SEQ ID NO: 3926419 - DNA, 25 bp, Homo sapien
aatagttatttcaggaatgtgtacc

SEQ ID NO: 3926420 - DNA, 25 bp, Homo sapien
atagttatttcaggaatgtgtacca

SEQ ID NO: 3926421 - DNA, 25 bp, Homo sapien
caatagttatttcaggaatgtgtac

SEQ ID NO: 3926422 - DNA, 25 bp, Homo sapien
tttccaacatacagtaaagtcagag

SEQ ID NO: 3926423 - DNA, 25 bp, Homo sapien
gcccagcacctagatcttaccaata

SEQ ID NO: 3926424 - DNA, 25 bp, Homo sapien
tacagcaaacacttttatgcccagc

SEQ ID NO: 3926425 - DNA, 25 bp, Homo sapien
tttatcacacagctttatcacgcag

SEQ ID NO: 3926426 - DNA, 25 bp, Homo sapien
ccctacctgtcatggcttcttaagg

SEQ ID NO: 3926427 - DNA, 25 bp, Homo sapien
tctgggctgagacaacttctcagac

SEQ ID NO: 3926428 - DNA, 25 bp, Homo sapien
caccgcgccctacctgtcatggctt

SEQ ID NO: 3926429 - DNA, 25 bp, Homo sapien
gctgagacaacttctcagactttcc

SEQ ID NO: 3926430 - DNA, 25 bp, Homo sapien
cctgagagtgagcatgtaccagcca

SEQ ID NO: 3926431 - DNA, 25 bp, Homo sapien
gaaatcaagatatgggcacgagatg

SEQ ID NO: 3926432 - DNA, 25 bp, Homo sapien
ggtatactctctgacccagtcttag

SEQ ID NO: 3926433 - DNA, 25 bp, Homo sapien
cagtagaagatgtgccagcgtcatc

SEQ ID NO: 3926434 - DNA, 25 bp, Homo sapien
catgcatttaatattcgtccatgct

SEQ ID NO: 3926435 - DNA, 25 bp, Homo sapien
caacaactggctgatttgtttctgt

SEQ ID NO: 3926436 - DNA, 25 bp, Homo sapien
tttaatattcgtccatgctgtatga

SEQ ID NO: 3926437 - DNA, 25 bp, Homo sapien
agcaacaactggctgatttgtttct

SEQ ID NO: 3926438 - DNA, 25 bp, Homo sapien
aagctcagtctgtttaattgggtta

SEQ ID NO: 3926439 - DNA, 25 bp, Homo sapien
ctgagaacggcactggattttggct

SEQ ID NO: 3926440 - DNA, 25 bp, Homo sapien
tgagaacggcactggattttggctc

SEQ ID NO: 3926441 - DNA, 25 bp, Homo sapien
agctgagaacggcactggattttgg

SEQ ID NO: 3926442 - DNA, 25 bp, Homo sapien
gcagctgagaacggcactggatttt

SEQ ID NO: 3926443 - DNA, 25 bp, Homo sapien
cattgcctaggtcattctgaattgt

SEQ ID NO: 3926444 - DNA, 25 bp, Homo sapien
tccttgaagacacctctgttaaaca

SEQ ID NO: 3926445 - DNA, 25 bp, Homo sapien
ggaattaccccattgcctaggtcat

SEQ ID NO: 3926446 - DNA, 25 bp, Homo sapien
cttaggaattaccccattgcctagg

SEQ ID NO: 3926447 - DNA, 25 bp, Homo sapien
attatatgccaggaatgttgccggg

SEQ ID NO: 3926448 - DNA, 25 bp, Homo sapien
tacttggatatcttgatgaacaaca

SEQ ID NO: 3926449 - DNA, 25 bp, Homo sapien
ctctgctccagataccgccattcat

SEQ ID NO: 3926450 - DNA, 25 bp, Homo sapien
cattcattcaccagatctgccttcc

SEQ ID NO: 3926451 - DNA, 25 bp, Homo sapien
tgtgtaccttatcaatatactgaag

SEQ ID NO: 3926452 - DNA, 25 bp, Homo sapien
ttatttgaatatagggacatacttg

SEQ ID NO: 3926453 - DNA, 25 bp, Homo sapien
gatatatagaacaatcttatcccca

SEQ ID NO: 3926454 - DNA, 25 bp, Homo sapien
tatccccaagaaccatataatagat

SEQ ID NO: 3926455 - DNA, 25 bp, Homo sapien
aactttgtgggaacactgattcata

SEQ ID NO: 3926456 - DNA, 25 bp, Homo sapien
gtgggaacactgattcatatttaga

SEQ ID NO: 3926457 - DNA, 25 bp, Homo sapien
tattacttttgaggctggtgaaaaa

SEQ ID NO: 3926458 - DNA, 25 bp, Homo sapien
taaatgtaactttgtgggaacactg

SEQ ID NO: 3926459 - DNA, 25 bp, Homo sapien
catttaattgataccctgtgcgcta

SEQ ID NO: 3926460 - DNA, 25 bp, Homo sapien
gaccataatcgtgtgggtgcaagac

SEQ ID NO: 3926461 - DNA, 25 bp, Homo sapien
aatacgctgtttgtacccataccag

SEQ ID NO: 3926462 - DNA, 25 bp, Homo sapien
gaatacctcaggcagtagacatttt

SEQ ID NO: 3926463 - DNA, 25 bp, Homo sapien
ttttgttgctgtggcagaatatgcc

SEQ ID NO: 3926464 - DNA, 25 bp, Homo sapien
ctatctttcctgcatgaagtgtagg

SEQ ID NO: 3926465 - DNA, 25 bp, Homo sapien
cgaagggtacagtcaaatctactgc

SEQ ID NO: 3926466 - DNA, 25 bp, Homo sapien
gggcgcagacttctttgaaatcgaa

SEQ ID NO: 3926467 - DNA, 25 bp, Homo sapien
ttttctatggggaagctatagggtg

SEQ ID NO: 3926468 - DNA, 25 bp, Homo sapien
tattctatgtggagtcacattaagc

SEQ ID NO: 3926469 - DNA, 25 bp, Homo sapien
tgtggagtcacattaagctttttct

SEQ ID NO: 3926470 - DNA, 25 bp, Homo sapien
gaattagctgctattctatgtggag

SEQ ID NO: 3926471 - DNA, 25 bp, Homo sapien
tatgagacccaccttaatgaagggt

SEQ ID NO: 3926472 - DNA, 25 bp, Homo sapien
gcggagagtgtttgccaggtttcaa

SEQ ID NO: 3926473 - DNA, 25 bp, Homo sapien
taaattaccagaaccagagctacct

SEQ ID NO: 3926474 - DNA, 25 bp, Homo sapien
tcttgagcatcagcgagtttcagaa

SEQ ID NO: 3926475 - DNA, 25 bp, Homo sapien
tccccagattgagttcatagttgca

SEQ ID NO: 3926476 - DNA, 25 bp, Homo sapien
tcacaaagtggctaagtagagtctc

SEQ ID NO: 3926477 - DNA, 25 bp, Homo sapien
tagttgcaggtatctaaagatttgc

SEQ ID NO: 3926478 - DNA, 25 bp, Homo sapien
gacctcagggattgaatgaaatacc

SEQ ID NO: 3926479 - DNA, 25 bp, Homo sapien
tcttgagctgatgctgtgtccccag

SEQ ID NO: 3926480 - DNA, 25 bp, Homo sapien
gatgtttcatcttatagaccacaaa

SEQ ID NO: 3926481 - DNA, 25 bp, Homo sapien
ggttaaagaccaactgcgcccagtc

SEQ ID NO: 3926482 - DNA, 25 bp, Homo sapien
ggcctggttcagtataacatatcca

SEQ ID NO: 3926483 - DNA, 25 bp, Homo sapien
aacaaatgttgctagctaggttggc

SEQ ID NO: 3926484 - DNA, 25 bp, Homo sapien
tcagtaggacattgacagactccag

SEQ ID NO: 3926485 - DNA, 25 bp, Homo sapien
tagccaactgactagagaatgcaga

SEQ ID NO: 3926486 - DNA, 25 bp, Homo sapien
tactgttagagtccaccccatgaag

SEQ ID NO: 3926487 - DNA, 25 bp, Homo sapien
tccaggagctgtcctgccatggcta

SEQ ID NO: 3926488 - DNA, 25 bp, Homo sapien
caggagctgtcctgccatggctagc

SEQ ID NO: 3926489 - DNA, 25 bp, Homo sapien
ctggtccaggagctgtcctgccatg

SEQ ID NO: 3926490 - DNA, 25 bp, Homo sapien
ggtccaggagctgtcctgccatggc

SEQ ID NO: 3926491 - DNA, 25 bp, Homo sapien
tctccttctccgcccagcatagact

SEQ ID NO: 3926492 - DNA, 25 bp, Homo sapien
tccttctccgcccagcatagacttg

SEQ ID NO: 3926493 - DNA, 25 bp, Homo sapien
cttctccgcccagcatagacttggt

SEQ ID NO: 3926494 - DNA, 25 bp, Homo sapien
tctccgcccagcatagacttggtca

SEQ ID NO: 3926495 - DNA, 25 bp, Homo sapien
tctcccttgtgtcctcgagggccag

SEQ ID NO: 3926496 - DNA, 25 bp, Homo sapien
aggtggcccaggatgacctggtggc

SEQ ID NO: 3926497 - DNA, 25 bp, Homo sapien
tcccttgtgtcctcgagggccaggt

SEQ ID NO: 3926498 - DNA, 25 bp, Homo sapien
ttttctcccttgtgtcctcgagggc

SEQ ID NO: 3926499 - DNA, 25 bp, Homo sapien
cagggggtccttgaatggctccata

SEQ ID NO: 3926500 - DNA, 25 bp, Homo sapien
ctttgggtcctggagtgcccatctc

SEQ ID NO: 3926501 - DNA, 25 bp, Homo sapien
gggtcctggagtgcccatctctcct

SEQ ID NO: 3926502 - DNA, 25 bp, Homo sapien
catctctcctttttgcccagggggt

SEQ ID NO: 3926503 - DNA, 25 bp, Homo sapien
gaaacactggccttagagtcttgat

SEQ ID NO: 3926504 - DNA, 25 bp, Homo sapien
aagcaaggaaacactggccttagag

SEQ ID NO: 3926505 - DNA, 25 bp, Homo sapien
ggaaacactggccttagagtcttga

SEQ ID NO: 3926506 - DNA, 25 bp, Homo sapien
caaggaaacactggccttagagtct

SEQ ID NO: 3926507 - DNA, 25 bp, Homo sapien
gatttctcatgagactggtgtctct

SEQ ID NO: 3926508 - DNA, 25 bp, Homo sapien
agacccgtgggaacctatgcagtga

SEQ ID NO: 3926509 - DNA, 25 bp, Homo sapien
gagtttggacgtgtaagaggaaaca

SEQ ID NO: 3926510 - DNA, 25 bp, Homo sapien
gggacatcaagtcatttgttcagag

SEQ ID NO: 3926511 - DNA, 25 bp, Homo sapien
aagtccatgaggtccgcagtcacgt

SEQ ID NO: 3926512 - DNA, 25 bp, Homo sapien
aagaccttgctgatgccgggtggcc

SEQ ID NO: 3926513 - DNA, 25 bp, Homo sapien
cagtcacgttgctgtaggcagagaa

SEQ ID NO: 3926514 - DNA, 25 bp, Homo sapien
agtgtaggccatcccttgcagtagg

SEQ ID NO: 3926515 - DNA, 25 bp, Homo sapien
cagttgaactagatcaagccgcagc

SEQ ID NO: 3926516 - DNA, 25 bp, Homo sapien
tgtgggccggcatcaaaagcttgtt

SEQ ID NO: 3926517 - DNA, 25 bp, Homo sapien
agcacagtgccctccgagtgtcaaa

SEQ ID NO: 3926518 - DNA, 25 bp, Homo sapien
gagtgtcaaactcccaaagcagttg

SEQ ID NO: 3926519 - DNA, 25 bp, Homo sapien
cgatgtcagtgccatagggacccct

SEQ ID NO: 3926520 - DNA, 25 bp, Homo sapien
ttgccagcatacatgccgccttctg

SEQ ID NO: 3926521 - DNA, 25 bp, Homo sapien
aaagtcagctcccaatagtccgcca

SEQ ID NO: 3926522 - DNA, 25 bp, Homo sapien
agctcattgtaatccagatctccag

SEQ ID NO: 3926523 - DNA, 25 bp, Homo sapien
ctgctaccccgactgtgggaggcat

SEQ ID NO: 3926524 - DNA, 25 bp, Homo sapien
gaggagctgctaccccgactgtggg

SEQ ID NO: 3926525 - DNA, 25 bp, Homo sapien
tgtgggaggcatccgtggacaggag

SEQ ID NO: 3926526 - DNA, 25 bp, Homo sapien
agctgctaccccgactgtgggaggc

SEQ ID NO: 3926527 - DNA, 25 bp, Homo sapien
agggcctggggggccaacaatgaag

SEQ ID NO: 3926528 - DNA, 25 bp, Homo sapien
ggccaacaatgaagctgcgcacatc

SEQ ID NO: 3926529 - DNA, 25 bp, Homo sapien
caacaatgaagctgcgcacatcagg

SEQ ID NO: 3926530 - DNA, 25 bp, Homo sapien
aacaatgaagctgcgcacatcagga

SEQ ID NO: 3926531 - DNA, 25 bp, Homo sapien
gcggggtgcctggtggggcatcacc

SEQ ID NO: 3926532 - DNA, 25 bp, Homo sapien
ggggtgcctggtggggcatcaccgt

SEQ ID NO: 3926533 - DNA, 25 bp, Homo sapien
ctgcggggtgcctggtggggcatca

SEQ ID NO: 3926534 - DNA, 25 bp, Homo sapien
tgcctggtggggcatcaccgtcggg

SEQ ID NO: 3926535 - DNA, 25 bp, Homo sapien
gctgcataggttgccagggctcctg

SEQ ID NO: 3926536 - DNA, 25 bp, Homo sapien
gctcgctccggaagctgtcgctgtt

SEQ ID NO: 3926537 - DNA, 25 bp, Homo sapien
gctgttttcagctgcataggttgcc

SEQ ID NO: 3926538 - DNA, 25 bp, Homo sapien
tgtgaggtagctgatcagctcgctc

SEQ ID NO: 3926539 - DNA, 25 bp, Homo sapien
ctgggggaccaggaggtcctggagg

SEQ ID NO: 3926540 - DNA, 25 bp, Homo sapien
tgatgctggaccacacattgcctgg

SEQ ID NO: 3926541 - DNA, 25 bp, Homo sapien
gtaagacgagaggtcctccacgctg

SEQ ID NO: 3926542 - DNA, 25 bp, Homo sapien
gggtccaacgatgcctctgaattca

SEQ ID NO: 3926543 - DNA, 25 bp, Homo sapien
tatgtaagtaagacgagaggtcctc

SEQ ID NO: 3926544 - DNA, 25 bp, Homo sapien
ataggaggttcccggcaagccaggg

SEQ ID NO: 3926545 - DNA, 25 bp, Homo sapien
ggggaccaggaagcccaatgctgat

SEQ ID NO: 3926546 - DNA, 25 bp, Homo sapien
gaccaggaagcccaatgctgatccc

SEQ ID NO: 3926547 - DNA, 25 bp, Homo sapien
ccaggaagcccaatgctgatcccag

SEQ ID NO: 3926548 - DNA, 25 bp, Homo sapien
cttgccatgcttcttgacctgctcc

SEQ ID NO: 3926549 - DNA, 25 bp, Homo sapien
gaagttcacgctgcgagtcctcatc

SEQ ID NO: 3926550 - DNA, 25 bp, Homo sapien
cacaggtttgaacggctctgagcac

SEQ ID NO: 3926551 - DNA, 25 bp, Homo sapien
gcaatcacagggaagttcacgctgc

SEQ ID NO: 3926552 - DNA, 25 bp, Homo sapien
gagaatgcgactactcagctctgca

SEQ ID NO: 3926553 - DNA, 25 bp, Homo sapien
cgagggcccatcaagtactgacgta

SEQ ID NO: 3926554 - DNA, 25 bp, Homo sapien
cagctctgcatagtccaaagacagg

SEQ ID NO: 3926555 - DNA, 25 bp, Homo sapien
tactgacgtaggtactgacgcacgt

SEQ ID NO: 3926556 - DNA, 25 bp, Homo sapien
ctgccaggttcccaaagggacacct

SEQ ID NO: 3926557 - DNA, 25 bp, Homo sapien
caaactggctcctgcgtgacatttg

SEQ ID NO: 3926558 - DNA, 25 bp, Homo sapien
tgttcaggggggacaccagcaagct

SEQ ID NO: 3926559 - DNA, 25 bp, Homo sapien
catttgtgagttctgggtccgcagg

SEQ ID NO: 3926560 - DNA, 25 bp, Homo sapien
agtaagtggctctttgtccaaagga

SEQ ID NO: 3926561 - DNA, 25 bp, Homo sapien
caaggtttgcatgacgagtgaggcc

SEQ ID NO: 3926562 - DNA, 25 bp, Homo sapien
ttccagccggtttgctgactcagca

SEQ ID NO: 3926563 - DNA, 25 bp, Homo sapien
ccttccaaggctcagacgaggacaa

SEQ ID NO: 3926564 - DNA, 25 bp, Homo sapien
aacaagctgacaccgtaccccgaag

SEQ ID NO: 3926565 - DNA, 25 bp, Homo sapien
ttcagaagagatggaggacgagaac

SEQ ID NO: 3926566 - DNA, 25 bp, Homo sapien
gacgagaacaagctgacaccgtacc

SEQ ID NO: 3926567 - DNA, 25 bp, Homo sapien
ggaggacgagaacaagctgacaccg

SEQ ID NO: 3926568 - DNA, 25 bp, Homo sapien
cttagcaggtactgaagcaacaccc

SEQ ID NO: 3926569 - DNA, 25 bp, Homo sapien
cagaatctgaaaggcccggtcaccg

SEQ ID NO: 3926570 - DNA, 25 bp, Homo sapien
aaggcccggtcaccgagctgtttgt

SEQ ID NO: 3926571 - DNA, 25 bp, Homo sapien
ggtactgaagcaacaccctcactat

SEQ ID NO: 3926572 - DNA, 25 bp, Homo sapien
tgctgccaaccttcatgcacaggtg

SEQ ID NO: 3926573 - DNA, 25 bp, Homo sapien
cacattagtcaattgccggaaggct

SEQ ID NO: 3926574 - DNA, 25 bp, Homo sapien
aaggctcactcggtgtctctccagc

SEQ ID NO: 3926575 - DNA, 25 bp, Homo sapien
gacccttgttgacactgtatcccag

SEQ ID NO: 3926576 - DNA, 25 bp, Homo sapien
cgaaagtctcgcctgtgatggtggt

SEQ ID NO: 3926577 - DNA, 25 bp, Homo sapien
gataggtaagatctaatactgtcac

SEQ ID NO: 3926578 - DNA, 25 bp, Homo sapien
ctctgagtagtcgaaagtctcgcct

SEQ ID NO: 3926579 - DNA, 25 bp, Homo sapien
ccctgaactccggataggtaagatc

SEQ ID NO: 3926580 - DNA, 25 bp, Homo sapien
gacacgtacatggtacttgatgatc

SEQ ID NO: 3926581 - DNA, 25 bp, Homo sapien
tcagagatgtactgctgaatctcct

SEQ ID NO: 3926582 - DNA, 25 bp, Homo sapien
gccctggcgggcctgacacgtacat

SEQ ID NO: 3926583 - DNA, 25 bp, Homo sapien
tggccagagctgctgatagagcccg

SEQ ID NO: 3926584 - DNA, 25 bp, Homo sapien
agaaagcgtcctgtgtcggtttctc

SEQ ID NO: 3926585 - DNA, 25 bp, Homo sapien
caaagagaaagcgtcctgtgtcggt

SEQ ID NO: 3926586 - DNA, 25 bp, Homo sapien
ctgcagcaaagagaaagcgtcctgt

SEQ ID NO: 3926587 - DNA, 25 bp, Homo sapien
agcaaagagaaagcgtcctgtgtcg

SEQ ID NO: 3926588 - DNA, 25 bp, Homo sapien
cagaaggaccactaggaatgccaag

SEQ ID NO: 3926589 - DNA, 25 bp, Homo sapien
agaaggaccactaggaatgccaaga

SEQ ID NO: 3926590 - DNA, 25 bp, Homo sapien
tcagaaggaccactaggaatgccaa

SEQ ID NO: 3926591 - DNA, 25 bp, Homo sapien
gaaggttgagtccgaaagaactgga

SEQ ID NO: 3926592 - DNA, 25 bp, Homo sapien
tgaaggttgagtccgaaagaactgg

SEQ ID NO: 3926593 - DNA, 25 bp, Homo sapien
ctgaaggttgagtccgaaagaactg

SEQ ID NO: 3926594 - DNA, 25 bp, Homo sapien
ctgaggttgagaaacctgggaggcc

SEQ ID NO: 3926595 - DNA, 25 bp, Homo sapien
tgagaaacctgggaggccttgctcg

SEQ ID NO: 3926596 - DNA, 25 bp, Homo sapien
aggttgagaaacctgggaggccttg

SEQ ID NO: 3926597 - DNA, 25 bp, Homo sapien
gttgagaaacctgggaggccttgct

SEQ ID NO: 3926598 - DNA, 25 bp, Homo sapien
cttggtgtcctctggggcctggggg

SEQ ID NO: 3926599 - DNA, 25 bp, Homo sapien
ttggtgtcctctggggcctggggga

SEQ ID NO: 3926600 - DNA, 25 bp, Homo sapien
tggtgtcctctggggcctgggggac

SEQ ID NO: 3926601 - DNA, 25 bp, Homo sapien
caggaacgatcctggtgggcctggt

SEQ ID NO: 3926602 - DNA, 25 bp, Homo sapien
ctgagttggacaggaacgatcctgg

SEQ ID NO: 3926603 - DNA, 25 bp, Homo sapien
tgagttggacaggaacgatcctggt

SEQ ID NO: 3926604 - DNA, 25 bp, Homo sapien
tggacaggaacgatcctggtgggcc

SEQ ID NO: 3926605 - DNA, 25 bp, Homo sapien
ctcccagtggtaagctcggctctca

SEQ ID NO: 3926606 - DNA, 25 bp, Homo sapien
tcccagtggtaagctcggctctcac

SEQ ID NO: 3926607 - DNA, 25 bp, Homo sapien
cctggtgggcctggaatggaaggcc

SEQ ID NO: 3926608 - DNA, 25 bp, Homo sapien
gggtcctggtgggcctggaatggaa

SEQ ID NO: 3926609 - DNA, 25 bp, Homo sapien
ctggtgggcctcggggtcctggtgg

SEQ ID NO: 3926610 - DNA, 25 bp, Homo sapien
gtcctggtgggcctggaatggaagg

SEQ ID NO: 3926611 - DNA, 25 bp, Homo sapien
cttccaaaggtctccaagatactca

SEQ ID NO: 3926612 - DNA, 25 bp, Homo sapien
ttccaaaggtctccaagatactcac

SEQ ID NO: 3926613 - DNA, 25 bp, Homo sapien
ctggtggcccgcgtgggccgggtgg

SEQ ID NO: 3926614 - DNA, 25 bp, Homo sapien
ctatagagagaagaaaatagaaatg

SEQ ID NO: 3926615 - DNA, 25 bp, Homo sapien
tagagagaagaaaatagaaatgagc

SEQ ID NO: 3926616 - DNA, 25 bp, Homo sapien
gagagaagaaaatagaaatgagcaa

SEQ ID NO: 3926617 - DNA, 25 bp, Homo sapien
agaagaaaatagaaatgagcaaaag

SEQ ID NO: 3926618 - DNA, 25 bp, Homo sapien
caagaccccggtgaagagccctggc

SEQ ID NO: 3926619 - DNA, 25 bp, Homo sapien
cttgcaagaccccggtgaagagccc

SEQ ID NO: 3926620 - DNA, 25 bp, Homo sapien
gagccctggccctgtcctccttttc

SEQ ID NO: 3926621 - DNA, 25 bp, Homo sapien
tgcaagaccccggtgaagagccctg

SEQ ID NO: 3926622 - DNA, 25 bp, Homo sapien
ccgactgggcccatcgctttgcatt

SEQ ID NO: 3926623 - DNA, 25 bp, Homo sapien
tgcattcttgcagggtgtgacatac

SEQ ID NO: 3926624 - DNA, 25 bp, Homo sapien
gagaggaaagtcctcccgactgggc

SEQ ID NO: 3926625 - DNA, 25 bp, Homo sapien
gggcccatcgctttgcattcttgca

SEQ ID NO: 3926626 - DNA, 25 bp, Homo sapien
tgatgtcctgggagaccagctgggc

SEQ ID NO: 3926627 - DNA, 25 bp, Homo sapien
atgtcctgggagaccagctgggccg

SEQ ID NO: 3926628 - DNA, 25 bp, Homo sapien
tcctgggagaccagctgggccggca

SEQ ID NO: 3926629 - DNA, 25 bp, Homo sapien
cttgatgtcctgggagaccagctgg

SEQ ID NO: 3926630 - DNA, 25 bp, Homo sapien
gggtcccatggctccaggaggtcct

SEQ ID NO: 3926631 - DNA, 25 bp, Homo sapien
gtcccatggctccaggaggtcctgg

SEQ ID NO: 3926632 - DNA, 25 bp, Homo sapien
ggtcctgggggtcccatggctccag

SEQ ID NO: 3926633 - DNA, 25 bp, Homo sapien
tgggggtcccatggctccaggaggt

SEQ ID NO: 3926634 - DNA, 25 bp, Homo sapien
ctgggacagtgagcatcgatgaccc

SEQ ID NO: 3926635 - DNA, 25 bp, Homo sapien
aacagaaggcacatggaacattgag

SEQ ID NO: 3926636 - DNA, 25 bp, Homo sapien
cagaaggcacatggaacattgagcc

SEQ ID NO: 3926637 - DNA, 25 bp, Homo sapien
aaaacagaaggcacatggaacattg

SEQ ID NO: 3926638 - DNA, 25 bp, Homo sapien
acagaaggcacatggaacattgagc

SEQ ID NO: 3926639 - DNA, 25 bp, Homo sapien
atcttgcctggagctcctggttcac

SEQ ID NO: 3926640 - DNA, 25 bp, Homo sapien
gatcttgcctggagctcctggttca

SEQ ID NO: 3926641 - DNA, 25 bp, Homo sapien
aggaaaagccctggcccaagcagtt

SEQ ID NO: 3926642 - DNA, 25 bp, Homo sapien
gagtgtgtgccagggagttggtgga

SEQ ID NO: 3926643 - DNA, 25 bp, Homo sapien
aactctggtgactgcaggaaaagcc

SEQ ID NO: 3926644 - DNA, 25 bp, Homo sapien
actcatagtgaaagggagtgtgtgc

SEQ ID NO: 3926645 - DNA, 25 bp, Homo sapien
caggtgggaatgatccagcgactca

SEQ ID NO: 3926646 - DNA, 25 bp, Homo sapien
agcaggtgggaatgatccagcgact

SEQ ID NO: 3926647 - DNA, 25 bp, Homo sapien
gcaggtgggaatgatccagcgactc

SEQ ID NO: 3926648 - DNA, 25 bp, Homo sapien
aggtgggaatgatccagcgactcac

SEQ ID NO: 3926649 - DNA, 25 bp, Homo sapien
tgaggtccctggggtcctgtgagac

SEQ ID NO: 3926650 - DNA, 25 bp, Homo sapien
cctgaggtccctggggtcctgtgag

SEQ ID NO: 3926651 - DNA, 25 bp, Homo sapien
ctgaggtccctggggtcctgtgaga

SEQ ID NO: 3926652 - DNA, 25 bp, Homo sapien
agggccatggctccctcttcctgct

SEQ ID NO: 3926653 - DNA, 25 bp, Homo sapien
catggctccctcttcctgctctgtt

SEQ ID NO: 3926654 - DNA, 25 bp, Homo sapien
tggctccctcttcctgctctgttac

SEQ ID NO: 3926655 - DNA, 25 bp, Homo sapien
gcagggccatggctccctcttcctg

SEQ ID NO: 3926656 - DNA, 25 bp, Homo sapien
ggcatcccagtaagaccttgttcac

SEQ ID NO: 3926657 - DNA, 25 bp, Homo sapien
tccaggcatcccagtaagaccttgt

SEQ ID NO: 3926658 - DNA, 25 bp, Homo sapien
ccacggattccaggcatcccagtaa

SEQ ID NO: 3926659 - DNA, 25 bp, Homo sapien
gattccaggcatcccagtaagacct

SEQ ID NO: 3926660 - DNA, 25 bp, Homo sapien
atgctatatgctcctctgcactatg

SEQ ID NO: 3926661 - DNA, 25 bp, Homo sapien
tatgctcctctgcactatggttaag

SEQ ID NO: 3926662 - DNA, 25 bp, Homo sapien
gctatatgctcctctgcactatggt

SEQ ID NO: 3926663 - DNA, 25 bp, Homo sapien
tgctcctctgcactatggttaaggg

SEQ ID NO: 3926664 - DNA, 25 bp, Homo sapien
tggtgtccgtctgggccagcaggac

SEQ ID NO: 3926665 - DNA, 25 bp, Homo sapien
ttggtgtccgtctgggccagcagga

SEQ ID NO: 3926666 - DNA, 25 bp, Homo sapien
caaggtctctcagttgctcctggag

SEQ ID NO: 3926667 - DNA, 25 bp, Homo sapien
agccatcagccacgggacagccctg

SEQ ID NO: 3926668 - DNA, 25 bp, Homo sapien
ctggtaaagtagaagcaaggtctct

SEQ ID NO: 3926669 - DNA, 25 bp, Homo sapien
tcctggagtgatttctgcgattcct

SEQ ID NO: 3926670 - DNA, 25 bp, Homo sapien
tggaacacttgaggctcctaaggac

SEQ ID NO: 3926671 - DNA, 25 bp, Homo sapien
tttggccatgagactagccctggga

SEQ ID NO: 3926672 - DNA, 25 bp, Homo sapien
ggcacctcaggtgaacaaaagggta

SEQ ID NO: 3926673 - DNA, 25 bp, Homo sapien
caagcgatcatcctgagtcccaggg

SEQ ID NO: 3926674 - DNA, 25 bp, Homo sapien
aaaggatgcccagacacagaaatga

SEQ ID NO: 3926675 - DNA, 25 bp, Homo sapien
tccccagaaaggatgcccagacaca

SEQ ID NO: 3926676 - DNA, 25 bp, Homo sapien
cagaaatgactggtcaagggagact

SEQ ID NO: 3926677 - DNA, 25 bp, Homo sapien
tgcccagacacagaaatgactggtc

SEQ ID NO: 3926678 - DNA, 25 bp, Homo sapien
gcaccaggcaaacctctcatgccag

SEQ ID NO: 3926679 - DNA, 25 bp, Homo sapien
tgctcctttagccccgggctcacca

SEQ ID NO: 3926680 - DNA, 25 bp, Homo sapien
aggcaaacctctcatgccaggctcg

SEQ ID NO: 3926681 - DNA, 25 bp, Homo sapien
ctttagccccgggctcaccaacagc

SEQ ID NO: 3926682 - DNA, 25 bp, Homo sapien
ctgatggatttacaaaagtcgtgga

SEQ ID NO: 3926683 - DNA, 25 bp, Homo sapien
tcgtggatagattaaagtagattcc

SEQ ID NO: 3926684 - DNA, 25 bp, Homo sapien
aaagtagattcccatgacagactga

SEQ ID NO: 3926685 - DNA, 25 bp, Homo sapien
ccaacctagtgactgatggatttac

SEQ ID NO: 3926686 - DNA, 25 bp, Homo sapien
cgaggtcctttctcaccctggtcac

SEQ ID NO: 3926687 - DNA, 25 bp, Homo sapien
ctcgaggtcctttctcaccctggtc

SEQ ID NO: 3926688 - DNA, 25 bp, Homo sapien
ctgtgaggcctcgaggtcctttctc

SEQ ID NO: 3926689 - DNA, 25 bp, Homo sapien
gtgaggcctcgaggtcctttctcac

SEQ ID NO: 3926690 - DNA, 25 bp, Homo sapien
ggtggtcccattggtcctttgtcac

SEQ ID NO: 3926691 - DNA, 25 bp, Homo sapien
tggtggtcccattggtcctttgtca

SEQ ID NO: 3926692 - DNA, 25 bp, Homo sapien
ttgggtcctggtggtcccattggtc

SEQ ID NO: 3926693 - DNA, 25 bp, Homo sapien
tcctggtggtcccattggtcctttg

SEQ ID NO: 3926694 - DNA, 25 bp, Homo sapien
ttgacaccaggaagtcctacttcac

SEQ ID NO: 3926695 - DNA, 25 bp, Homo sapien
ggaagtcctacttcacctcggagcc

SEQ ID NO: 3926696 - DNA, 25 bp, Homo sapien
accaggaagtcctacttcacctcgg

SEQ ID NO: 3926697 - DNA, 25 bp, Homo sapien
caggaagtcctacttcacctcggag

SEQ ID NO: 3926698 - DNA, 25 bp, Homo sapien
gaaacagaacctatttacaagaagc

SEQ ID NO: 3926699 - DNA, 25 bp, Homo sapien
aacagaacctatttacaagaagcag

SEQ ID NO: 3926700 - DNA, 25 bp, Homo sapien
tggaaacagaacctatttacaagaa

SEQ ID NO: 3926701 - DNA, 25 bp, Homo sapien
acagaacctatttacaagaagcagc

SEQ ID NO: 3926702 - DNA, 25 bp, Homo sapien
cctgtgggccaggagagccgctgga

SEQ ID NO: 3926703 - DNA, 25 bp, Homo sapien
gccctgtgggccaggagagccgctg

SEQ ID NO: 3926704 - DNA, 25 bp, Homo sapien
tgtgggccaggagagccgctggaac

SEQ ID NO: 3926705 - DNA, 25 bp, Homo sapien
ctggagggccctgtgggccaggaga

SEQ ID NO: 3926706 - DNA, 25 bp, Homo sapien
ggcctcttctctgtgatccatcctg

SEQ ID NO: 3926707 - DNA, 25 bp, Homo sapien
tctctgtgatccatcctgaatgtgg

SEQ ID NO: 3926708 - DNA, 25 bp, Homo sapien
tgtgatccatcctgaatgtggcttc

SEQ ID NO: 3926709 - DNA, 25 bp, Homo sapien
gatccatcctgaatgtggcttctcc

SEQ ID NO: 3926710 - DNA, 25 bp, Homo sapien
tgaggacctggttcaccagcagccc

SEQ ID NO: 3926711 - DNA, 25 bp, Homo sapien
ttgggacccacagaacctgggacac

SEQ ID NO: 3926712 - DNA, 25 bp, Homo sapien
tttgggacccacagaacctgggaca

SEQ ID NO: 3926713 - DNA, 25 bp, Homo sapien
caggtgggccatgaggacctggttc

SEQ ID NO: 3926714 - DNA, 25 bp, Homo sapien
ccctgcctcaccacgaggtcccatg

SEQ ID NO: 3926715 - DNA, 25 bp, Homo sapien
ccacgctgcctttttgaccctttgg

SEQ ID NO: 3926716 - DNA, 25 bp, Homo sapien
cacgctgcctttttgaccctttggt

SEQ ID NO: 3926717 - DNA, 25 bp, Homo sapien
tgtggacctgggtggcccaagggcc

SEQ ID NO: 3926718 - DNA, 25 bp, Homo sapien
tgaccctttggtccttgtggacctg

SEQ ID NO: 3926719 - DNA, 25 bp, Homo sapien
tggagtcccagggaaccctcgatct

SEQ ID NO: 3926720 - DNA, 25 bp, Homo sapien
ctggagtcccagggaaccctcgatc

SEQ ID NO: 3926721 - DNA, 25 bp, Homo sapien
ggagtcccagggaaccctcgatctc

SEQ ID NO: 3926722 - DNA, 25 bp, Homo sapien
ctttagggcctggacttcccatgtc

SEQ ID NO: 3926723 - DNA, 25 bp, Homo sapien
ttagggcctggacttcccatgtcac

SEQ ID NO: 3926724 - DNA, 25 bp, Homo sapien
tttagggcctggacttcccatgtca

SEQ ID NO: 3926725 - DNA, 25 bp, Homo sapien
gatattctgactctaaaaccaacag

SEQ ID NO: 3926726 - DNA, 25 bp, Homo sapien
gaaaaaggcttctaatctacccaga

SEQ ID NO: 3926727 - DNA, 25 bp, Homo sapien
gatacctcccaacagataccataag

SEQ ID NO: 3926728 - DNA, 25 bp, Homo sapien
tcagagacaaggttcaatccatggc

SEQ ID NO: 3926729 - DNA, 25 bp, Homo sapien
tagggccagggcttcctcggagatt

SEQ ID NO: 3926730 - DNA, 25 bp, Homo sapien
gggccagggcttcctcggagatttc

SEQ ID NO: 3926731 - DNA, 25 bp, Homo sapien
ttagggccagggcttcctcggagat

SEQ ID NO: 3926732 - DNA, 25 bp, Homo sapien
ctttagggccagggcttcctcggag

SEQ ID NO: 3926733 - DNA, 25 bp, Homo sapien
gctggccctgtgcccggcgatgctc

SEQ ID NO: 3926734 - DNA, 25 bp, Homo sapien
agctggccctgtgcccggcgatgct

SEQ ID NO: 3926735 - DNA, 25 bp, Homo sapien
catagggcagtatgctcctcctgat

SEQ ID NO: 3926736 - DNA, 25 bp, Homo sapien
gcttcttcctcacgaacatccagag

SEQ ID NO: 3926737 - DNA, 25 bp, Homo sapien
ccatgccctggaggcggtccttttc

SEQ ID NO: 3926738 - DNA, 25 bp, Homo sapien
caattttgtccaggtctgctcccgc

SEQ ID NO: 3926739 - DNA, 25 bp, Homo sapien
ccaccactgctgccgtagctgtgga

SEQ ID NO: 3926740 - DNA, 25 bp, Homo sapien
cgctggtccccaagggccgccgcca

SEQ ID NO: 3926741 - DNA, 25 bp, Homo sapien
ccactgctgccgtagctgtggatat

SEQ ID NO: 3926742 - DNA, 25 bp, Homo sapien
gctggtccccaagggccgccgccag

SEQ ID NO: 3926743 - DNA, 25 bp, Homo sapien
tggtcttgccctttgtggacacagt

SEQ ID NO: 3926744 - DNA, 25 bp, Homo sapien
tcttgccctttgtggacacagtctt

SEQ ID NO: 3926745 - DNA, 25 bp, Homo sapien
ggtggtcttgccctttgtggacaca

SEQ ID NO: 3926746 - DNA, 25 bp, Homo sapien
ttgccctttgtggacacagtcttca

SEQ ID NO: 3926747 - DNA, 25 bp, Homo sapien
taggcctgagtcagcattgtaggca

SEQ ID NO: 3926748 - DNA, 25 bp, Homo sapien
gtcagcattgtaggcagcttgcttt

SEQ ID NO: 3926749 - DNA, 25 bp, Homo sapien
cggcttttaggcctgagtcagcatt

SEQ ID NO: 3926750 - DNA, 25 bp, Homo sapien
tagcttcggcttttaggcctgagtc

SEQ ID NO: 3926751 - DNA, 25 bp, Homo sapien
ttcttggcaggtgtgttgtctttct

SEQ ID NO: 3926752 - DNA, 25 bp, Homo sapien
agaccttcccgctgtccttggtcat

SEQ ID NO: 3926753 - DNA, 25 bp, Homo sapien
tgcagcgatgctggcaggggaggct

SEQ ID NO: 3926754 - DNA, 25 bp, Homo sapien
tgtaaagaccttcccgctgtccttg

SEQ ID NO: 3926755 - DNA, 25 bp, Homo sapien
ctaggatcaggaacttgcagtcctt

SEQ ID NO: 3926756 - DNA, 25 bp, Homo sapien
cttgcagtccttgtgcaaaaggtca

SEQ ID NO: 3926757 - DNA, 25 bp, Homo sapien
gtgcaaaaggtcatcgctctgcaca

SEQ ID NO: 3926758 - DNA, 25 bp, Homo sapien
taggatcaggaacttgcagtccttg

SEQ ID NO: 3926759 - DNA, 25 bp, Homo sapien
cggaggtggaaacgccagtgttcac

SEQ ID NO: 3926760 - DNA, 25 bp, Homo sapien
cggcggaggtggaaacgccagtgtt

SEQ ID NO: 3926761 - DNA, 25 bp, Homo sapien
gccagtgttcacagccgcaggactc

SEQ ID NO: 3926762 - DNA, 25 bp, Homo sapien
tggaaacgccagtgttcacagccgc

SEQ ID NO: 3926763 - DNA, 25 bp, Homo sapien
ctgggggccagattgttctgcatgc

SEQ ID NO: 3926764 - DNA, 25 bp, Homo sapien
tgggggccagattgttctgcatgcc

SEQ ID NO: 3926765 - DNA, 25 bp, Homo sapien
tggttgaaggcaggttctgtgcaac

SEQ ID NO: 3926766 - DNA, 25 bp, Homo sapien
aaggcaggttctgtgcaaccctgtg

SEQ ID NO: 3926767 - DNA, 25 bp, Homo sapien
tcaatgtgggctcacgtcccctcgc

SEQ ID NO: 3926768 - DNA, 25 bp, Homo sapien
gctcacgtcccctcgcctgagactt

SEQ ID NO: 3926769 - DNA, 25 bp, Homo sapien
tgagcaggacgccatgttgtttgga

SEQ ID NO: 3926770 - DNA, 25 bp, Homo sapien
gctgagtccagggtgcaaagtgggt

SEQ ID NO: 3926771 - DNA, 25 bp, Homo sapien
cagggtgcaaagtgggtgagcagga

SEQ ID NO: 3926772 - DNA, 25 bp, Homo sapien
gccatgttgtttggaactccgaaga

SEQ ID NO: 3926773 - DNA, 25 bp, Homo sapien
ggatgtttggccacagaaagcctct

SEQ ID NO: 3926774 - DNA, 25 bp, Homo sapien
cctgggatgtttggccacagaaagc

SEQ ID NO: 3926775 - DNA, 25 bp, Homo sapien
cttctagattgaattgaactgaagt

SEQ ID NO: 3926776 - DNA, 25 bp, Homo sapien
actgaagttccagggggaatctcct

SEQ ID NO: 3926777 - DNA, 25 bp, Homo sapien
gtcatgttgttgtgataggtcccca

SEQ ID NO: 3926778 - DNA, 25 bp, Homo sapien
tggaggaccacacatgggagggaag

SEQ ID NO: 3926779 - DNA, 25 bp, Homo sapien
ccaggatcgttgcatcgtaggtgcc

SEQ ID NO: 3926780 - DNA, 25 bp, Homo sapien
tgatcccgcagagtaggcattggtg

SEQ ID NO: 3926781 - DNA, 25 bp, Homo sapien
gcttcttcatatttggggccagttc

SEQ ID NO: 3926782 - DNA, 25 bp, Homo sapien
cttcttcatatttggggccagttct

SEQ ID NO: 3926783 - DNA, 25 bp, Homo sapien
tgccgatcgactccccttgagcaaa

SEQ ID NO: 3926784 - DNA, 25 bp, Homo sapien
gagcaaacgcttaacatcatccaat

SEQ ID NO: 3926785 - DNA, 25 bp, Homo sapien
ccgactgggagctcgctgtcacaat

SEQ ID NO: 3926786 - DNA, 25 bp, Homo sapien
ggtggggctcacacttgccgatcga

SEQ ID NO: 3926787 - DNA, 25 bp, Homo sapien
tgcctcacacattggaactttttgc

SEQ ID NO: 3926788 - DNA, 25 bp, Homo sapien
ccctgtgcaactggggggaacattt

SEQ ID NO: 3926789 - DNA, 25 bp, Homo sapien
gactactggggagaatggcatctgc

SEQ ID NO: 3926790 - DNA, 25 bp, Homo sapien
catttgtggcattctgactactggg

SEQ ID NO: 3926791 - DNA, 25 bp, Homo sapien
ggacgcactctgcagtcgaactcga

SEQ ID NO: 3926792 - DNA, 25 bp, Homo sapien
gatggggacgcactctgcagtcgaa

SEQ ID NO: 3926793 - DNA, 25 bp, Homo sapien
gggacgcactctgcagtcgaactcg

SEQ ID NO: 3926794 - DNA, 25 bp, Homo sapien
tggggacgcactctgcagtcgaact

SEQ ID NO: 3926795 - DNA, 25 bp, Homo sapien
ctcgtgtttgactccgtcctctggt

SEQ ID NO: 3926796 - DNA, 25 bp, Homo sapien
tgtggctgatagtccccttaatatg

SEQ ID NO: 3926797 - DNA, 25 bp, Homo sapien
gcaaaggcttatgacagcaagttaa

SEQ ID NO: 3926798 - DNA, 25 bp, Homo sapien
gcaagttaatgtggctgatagtccc

SEQ ID NO: 3926799 - DNA, 25 bp, Homo sapien
catttctatagtgccacgagcaaag

SEQ ID NO: 3926800 - DNA, 25 bp, Homo sapien
cttccgagggtactccggagaagag

SEQ ID NO: 3926801 - DNA, 25 bp, Homo sapien
ccgagggtactccggagaagagttg

SEQ ID NO: 3926802 - DNA, 25 bp, Homo sapien
gagggtactccggagaagagttgcc

SEQ ID NO: 3926803 - DNA, 25 bp, Homo sapien
gggtactccggagaagagttgccac

SEQ ID NO: 3926804 - DNA, 25 bp, Homo sapien
tcccaacagcccagcagctcttgtc

SEQ ID NO: 3926805 - DNA, 25 bp, Homo sapien
ctggatttggggcttcccaacagcc

SEQ ID NO: 3926806 - DNA, 25 bp, Homo sapien
ggcttcccaacagcccagcagctct

SEQ ID NO: 3926807 - DNA, 25 bp, Homo sapien
cttcccaacagcccagcagctcttg

SEQ ID NO: 3926808 - DNA, 25 bp, Homo sapien
catggcgggtaacgtgagttttcct

SEQ ID NO: 3926809 - DNA, 25 bp, Homo sapien
gcatggcgggtaacgtgagttttcc

SEQ ID NO: 3926810 - DNA, 25 bp, Homo sapien
acgcatggcgggtaacgtgagtttt

SEQ ID NO: 3926811 - DNA, 25 bp, Homo sapien
cgcatggcgggtaacgtgagttttc

SEQ ID NO: 3926812 - DNA, 25 bp, Homo sapien
ggaggcatggcctcgtgtgcttcca

SEQ ID NO: 3926813 - DNA, 25 bp, Homo sapien
tggaggcatggcctcgtgtgcttcc

SEQ ID NO: 3926814 - DNA, 25 bp, Homo sapien
gaggcatggcctcgtgtgcttccag

SEQ ID NO: 3926815 - DNA, 25 bp, Homo sapien
caccaagagaggctgttttagcata

SEQ ID NO: 3926816 - DNA, 25 bp, Homo sapien
ttagcatagccattgctggtcccgc

SEQ ID NO: 3926817 - DNA, 25 bp, Homo sapien
gctgttttagcatagccattgctgg

SEQ ID NO: 3926818 - DNA, 25 bp, Homo sapien
caagagaggctgttttagcatagcc

SEQ ID NO: 3926819 - DNA, 25 bp, Homo sapien
taaggatgtaagtcttgtggttact

SEQ ID NO: 3926820 - DNA, 25 bp, Homo sapien
tcttgtggttactgtttcagtgaca

SEQ ID NO: 3926821 - DNA, 25 bp, Homo sapien
ttggtggtaaggatgtaagtcttgt

SEQ ID NO: 3926822 - DNA, 25 bp, Homo sapien
gtaagtcttgtggttactgtttcag

SEQ ID NO: 3926823 - DNA, 25 bp, Homo sapien
ttcagttccatctcgtttgtttttc

SEQ ID NO: 3926824 - DNA, 25 bp, Homo sapien
tcagttccatctcgtttgtttttct

SEQ ID NO: 3926825 - DNA, 25 bp, Homo sapien
gacttcagttccatctcgtttgttt

SEQ ID NO: 3926826 - DNA, 25 bp, Homo sapien
acttcagttccatctcgtttgtttt

SEQ ID NO: 3926827 - DNA, 25 bp, Homo sapien
aaagttgctgctgacagctatacat

SEQ ID NO: 3926828 - DNA, 25 bp, Homo sapien
tttgatctttcagtgaaagttgctg

SEQ ID NO: 3926829 - DNA, 25 bp, Homo sapien
tgatctttcagtgaaagttgctgct

SEQ ID NO: 3926830 - DNA, 25 bp, Homo sapien
atctttcagtgaaagttgctgctga

SEQ ID NO: 3926831 - DNA, 25 bp, Homo sapien
tttgtctctgtaacaccccagagat

SEQ ID NO: 3926832 - DNA, 25 bp, Homo sapien
cagccaaggtgtgttaaagctgagt

SEQ ID NO: 3926833 - DNA, 25 bp, Homo sapien
ttaaagctgagtgatctttcaaaaa

SEQ ID NO: 3926834 - DNA, 25 bp, Homo sapien
catgtcctgacaaaggtgtgtcatg

SEQ ID NO: 3926835 - DNA, 25 bp, Homo sapien
tcatggtttacagcgttactccacc

SEQ ID NO: 3926836 - DNA, 25 bp, Homo sapien
tatagatgtcttcgtcctctgttcc

SEQ ID NO: 3926837 - DNA, 25 bp, Homo sapien
gtgactcaagccaggtcaagcccat

SEQ ID NO: 3926838 - DNA, 25 bp, Homo sapien
cttgtttcccctatagatgtctttg

SEQ ID NO: 3926839 - DNA, 25 bp, Homo sapien
tttcccctcttgtgactcaagccag

SEQ ID NO: 3926840 - DNA, 25 bp, Homo sapien
tgggacccagcatcacactgggatt

SEQ ID NO: 3926841 - DNA, 25 bp, Homo sapien
aatgggaagtctgaacctggaactc

SEQ ID NO: 3926842 - DNA, 25 bp, Homo sapien
gaacctggaactcactcaggcagtc

SEQ ID NO: 3926843 - DNA, 25 bp, Homo sapien
acactgggattcccagttctgaggc

SEQ ID NO: 3926844 - DNA, 25 bp, Homo sapien
agcatagcaccgatgtgcaactgca

SEQ ID NO: 3926845 - DNA, 25 bp, Homo sapien
gcatagcaccgatgtgcaactgcac

SEQ ID NO: 3926846 - DNA, 25 bp, Homo sapien
cttgctattgtgggcactgcatccc

SEQ ID NO: 3926847 - DNA, 25 bp, Homo sapien
ggtagcagaccacaacaacagctgt

SEQ ID NO: 3926848 - DNA, 25 bp, Homo sapien
acagctgtggggctcttgctcctaa

SEQ ID NO: 3926849 - DNA, 25 bp, Homo sapien
tcttgctcctaagctgcccatattc

SEQ ID NO: 3926850 - DNA, 25 bp, Homo sapien
ttcatcaatgttacgtgaaacagca

SEQ ID NO: 3926851 - DNA, 25 bp, Homo sapien
catttcatcaatgttacgtgaaaca

SEQ ID NO: 3926852 - DNA, 25 bp, Homo sapien
caatgttacgtgaaacagcaacagc

SEQ ID NO: 3926853 - DNA, 25 bp, Homo sapien
catcaatgttacgtgaaacagcaac

SEQ ID NO: 3926854 - DNA, 25 bp, Homo sapien
ggtctcttcttgctgaaccctcaga

SEQ ID NO: 3926855 - DNA, 25 bp, Homo sapien
cctattggtatgaagagttttacta

SEQ ID NO: 3926856 - DNA, 25 bp, Homo sapien
tcaatctatacaccacagcttctgg

SEQ ID NO: 3926857 - DNA, 25 bp, Homo sapien
gagtttgtgaactaactccctcagt

SEQ ID NO: 3926858 - DNA, 25 bp, Homo sapien
ctgtgaaacaccttagaccagttca

SEQ ID NO: 3926859 - DNA, 25 bp, Homo sapien
gcccttggagcacaatttgagacat

SEQ ID NO: 3926860 - DNA, 25 bp, Homo sapien
agttcatagaaccattgtgcccttg

SEQ ID NO: 3926861 - DNA, 25 bp, Homo sapien
tgtgcccttggagcacaatttgaga

SEQ ID NO: 3926862 - DNA, 25 bp, Homo sapien
tgcttgttactgaacaaatgttcct

SEQ ID NO: 3926863 - DNA, 25 bp, Homo sapien
taattctgaagcacctggagtacta

SEQ ID NO: 3926864 - DNA, 25 bp, Homo sapien
cacttttggaaaggtgttgatcttg

SEQ ID NO: 3926865 - DNA, 25 bp, Homo sapien
tccttgattactgggataaacttct

SEQ ID NO: 3926866 - DNA, 25 bp, Homo sapien
gaatctcagctctgatttaatatgc

SEQ ID NO: 3926867 - DNA, 25 bp, Homo sapien
ctctagtttctagcccacagcaata

SEQ ID NO: 3926868 - DNA, 25 bp, Homo sapien
taatatgcagttaaacttttctctc

SEQ ID NO: 3926869 - DNA, 25 bp, Homo sapien
attcaactccagatttagagtagaa

SEQ ID NO: 3926870 - DNA, 25 bp, Homo sapien
taggagtattgaatgttgaaaaaat

SEQ ID NO: 3926871 - DNA, 25 bp, Homo sapien
tgctattttgcacagtgtagtcttg

SEQ ID NO: 3926872 - DNA, 25 bp, Homo sapien
tcttgctattttgcacagtgtagtc

SEQ ID NO: 3926873 - DNA, 25 bp, Homo sapien
ctattttgcacagtgtagtcttgaa

SEQ ID NO: 3926874 - DNA, 25 bp, Homo sapien
tttggatagatttgtcaaaacgaca

SEQ ID NO: 3926875 - DNA, 25 bp, Homo sapien
ccaatgaatatcaattaagggcact

SEQ ID NO: 3926876 - DNA, 25 bp, Homo sapien
tgggcagttctggaaactagtttta

SEQ ID NO: 3926877 - DNA, 25 bp, Homo sapien
ggctcagaggaaggtatcccaatga

SEQ ID NO: 3926878 - DNA, 25 bp, Homo sapien
caagtcttgtttattcttgaataaa

SEQ ID NO: 3926879 - DNA, 25 bp, Homo sapien
tactttctgacttcaagtcttgttt

SEQ ID NO: 3926880 - DNA, 25 bp, Homo sapien
ctttctgacttcaagtcttgtttat

SEQ ID NO: 3926881 - DNA, 25 bp, Homo sapien
gacttcaagtcttgtttattcttga

SEQ ID NO: 3926882 - DNA, 25 bp, Homo sapien
aaatgattgatttggccttgtgttt

SEQ ID NO: 3926883 - DNA, 25 bp, Homo sapien
ttttttatctaaaacatgcaactca

SEQ ID NO: 3926884 - DNA, 25 bp, Homo sapien
ttgtatacaattaaggctaaaatta

SEQ ID NO: 3926885 - DNA, 25 bp, Homo sapien
tacacatttattcatgcaggacaaa

SEQ ID NO: 3926886 - DNA, 25 bp, Homo sapien
caatcttttcacaagtcagtttaga

SEQ ID NO: 3926887 - DNA, 25 bp, Homo sapien
cagtctgtagtattgaaatctgttc

SEQ ID NO: 3926888 - DNA, 25 bp, Homo sapien
gttgcatcatgttttcataccgttc

SEQ ID NO: 3926889 - DNA, 25 bp, Homo sapien
cataccgttctttgacaatcttttc

SEQ ID NO: 3926890 - DNA, 25 bp, Homo sapien
tctctctgagacagctaccaactct

SEQ ID NO: 3926891 - DNA, 25 bp, Homo sapien
gctatatctttttgattgctgaact

SEQ ID NO: 3926892 - DNA, 25 bp, Homo sapien
gcagcttagggcataatttgctata

SEQ ID NO: 3926893 - DNA, 25 bp, Homo sapien
taccaactcttctcgtagattgcag

SEQ ID NO: 3926894 - DNA, 25 bp, Homo sapien
actaatcagagcctcatagtttggt

SEQ ID NO: 3926895 - DNA, 25 bp, Homo sapien
aatcagagcctcatagtttggttca

SEQ ID NO: 3926896 - DNA, 25 bp, Homo sapien
atactaatcagagcctcatagtttg

SEQ ID NO: 3926897 - DNA, 25 bp, Homo sapien
gaatactaatcagagcctcatagtt

SEQ ID NO: 3926898 - DNA, 25 bp, Homo sapien
ttttgtgccataatatttccctgta

SEQ ID NO: 3926899 - DNA, 25 bp, Homo sapien
gtatttagccatcaatacattcatg

SEQ ID NO: 3926900 - DNA, 25 bp, Homo sapien
cactaattattacatcaaagcacca

SEQ ID NO: 3926901 - DNA, 25 bp, Homo sapien
taagattgatttggcttggccaggc

SEQ ID NO: 3926902 - DNA, 25 bp, Homo sapien
tattttgaaacactcctggcttaga

SEQ ID NO: 3926903 - DNA, 25 bp, Homo sapien
acagaggcttcttattaaatactgg

SEQ ID NO: 3926904 - DNA, 25 bp, Homo sapien
tatgcttgatatcacagaggcttct

SEQ ID NO: 3926905 - DNA, 25 bp, Homo sapien
gcttagaatatgcttgatatcacag

SEQ ID NO: 3926906 - DNA, 25 bp, Homo sapien
cttttgacgatctcttgaaaaaaat

SEQ ID NO: 3926907 - DNA, 25 bp, Homo sapien
tcttttgtgtacatctttactttcc

SEQ ID NO: 3926908 - DNA, 25 bp, Homo sapien
ttcttttgtgtacatctttactttc

SEQ ID NO: 3926909 - DNA, 25 bp, Homo sapien
cattttcttatgttcccactcaatc

SEQ ID NO: 3926910 - DNA, 25 bp, Homo sapien
tttcttatgttcccactcaatctga

SEQ ID NO: 3926911 - DNA, 25 bp, Homo sapien
tggattgtcaaattcaactggaatc

SEQ ID NO: 3926912 - DNA, 25 bp, Homo sapien
aattgcatcagaatactccagtact

SEQ ID NO: 3926913 - DNA, 25 bp, Homo sapien
tctacttgtccttgtttaagaagaa

SEQ ID NO: 3926914 - DNA, 25 bp, Homo sapien
cacagaattcaagtcttcaattatg

SEQ ID NO: 3926915 - DNA, 25 bp, Homo sapien
gaacactctctcaatctcctgttgc

SEQ ID NO: 3926916 - DNA, 25 bp, Homo sapien
aggatgagttcatggaacactctct

SEQ ID NO: 3926917 - DNA, 25 bp, Homo sapien
ttccaataagtcagctgctttctgc

SEQ ID NO: 3926918 - DNA, 25 bp, Homo sapien
agttgccatttccaataagtcagct

SEQ ID NO: 3926919 - DNA, 25 bp, Homo sapien
tgccatttccaataagtcagctgct

SEQ ID NO: 3926920 - DNA, 25 bp, Homo sapien
catttccaataagtcagctgctttc

SEQ ID NO: 3926921 - DNA, 25 bp, Homo sapien
gctcgtcttgtcatgcagaaatgat

SEQ ID NO: 3926922 - DNA, 25 bp, Homo sapien
catagctttcattaactgggcaaag

SEQ ID NO: 3926923 - DNA, 25 bp, Homo sapien
caaagggtccaagccttctggcatg

SEQ ID NO: 3926924 - DNA, 25 bp, Homo sapien
tattcaacttgccagatcctggtag

SEQ ID NO: 3926925 - DNA, 25 bp, Homo sapien
gttgtttctgagtgcgttttctgtt

SEQ ID NO: 3926926 - DNA, 25 bp, Homo sapien
ctggttgtttctgagtgcgttttct

SEQ ID NO: 3926927 - DNA, 25 bp, Homo sapien
aagggacaacgctggttgtttctga

SEQ ID NO: 3926928 - DNA, 25 bp, Homo sapien
ctccgaaagggacaacgctggttgt

SEQ ID NO: 3926929 - DNA, 25 bp, Homo sapien
gtagagtatatccacttgatgacca

SEQ ID NO: 3926930 - DNA, 25 bp, Homo sapien
agtttgtagagtatatccacttgat

SEQ ID NO: 3926931 - DNA, 25 bp, Homo sapien
ttaaaaagtttgtagagtatatcca

SEQ ID NO: 3926932 - DNA, 25 bp, Homo sapien
gagtatatccacttgatgaccagga

SEQ ID NO: 3926933 - DNA, 25 bp, Homo sapien
tcacccatagctgagaattaagtgg

SEQ ID NO: 3926934 - DNA, 25 bp, Homo sapien
tataaaactgctggtcataacctac

SEQ ID NO: 3926935 - DNA, 25 bp, Homo sapien
caatggcatagaatgaagttcaccc

SEQ ID NO: 3926936 - DNA, 25 bp, Homo sapien
gccttaaaggctagatgatttccct

SEQ ID NO: 3926937 - DNA, 25 bp, Homo sapien
agatttccgaacagcttctgaagtc

SEQ ID NO: 3926938 - DNA, 25 bp, Homo sapien
catagtgctccttgcacacatccag

SEQ ID NO: 3926939 - DNA, 25 bp, Homo sapien
gatttccgaacagcttctgaagtct

SEQ ID NO: 3926940 - DNA, 25 bp, Homo sapien
gccagtaagttgtcatagtgctcct

SEQ ID NO: 3926941 - DNA, 25 bp, Homo sapien
tcgtgctgtttccttgtaaggtagt

SEQ ID NO: 3926942 - DNA, 25 bp, Homo sapien
tgctgtttccttgtaaggtagttgt

SEQ ID NO: 3926943 - DNA, 25 bp, Homo sapien
gaatttttctctagagcttaattct

SEQ ID NO: 3926944 - DNA, 25 bp, Homo sapien
cgtgctgtttccttgtaaggtagtt

SEQ ID NO: 3926945 - DNA, 25 bp, Homo sapien
caaatgttcatcaaaggcctgtgtg

SEQ ID NO: 3926946 - DNA, 25 bp, Homo sapien
aaatgttcatcaaaggcctgtgtgc

SEQ ID NO: 3926947 - DNA, 25 bp, Homo sapien
atgttcatcaaaggcctgtgtgctt

SEQ ID NO: 3926948 - DNA, 25 bp, Homo sapien
tcaaatgttcatcaaaggcctgtgt

SEQ ID NO: 3926949 - DNA, 25 bp, Homo sapien
tggtgtaaacttggcgatgtctctg

SEQ ID NO: 3926950 - DNA, 25 bp, Homo sapien
gtagtggtgtaaacttggcgatgtc

SEQ ID NO: 3926951 - DNA, 25 bp, Homo sapien
taaacttggcgatgtctctggacat

SEQ ID NO: 3926952 - DNA, 25 bp, Homo sapien
agggtagtggtgtaaacttggcgat

SEQ ID NO: 3926953 - DNA, 25 bp, Homo sapien
tccaagggcaacaacattccagaga

SEQ ID NO: 3926954 - DNA, 25 bp, Homo sapien
catccaagggcaacaacattccaga

SEQ ID NO: 3926955 - DNA, 25 bp, Homo sapien
atcatccaagggcaacaacattcca

SEQ ID NO: 3926956 - DNA, 25 bp, Homo sapien
tcatccaagggcaacaacattccag

SEQ ID NO: 3926957 - DNA, 25 bp, Homo sapien
tctttcttcttcagtccacacagca

SEQ ID NO: 3926958 - DNA, 25 bp, Homo sapien
tacttttttctcataatctttgaat

SEQ ID NO: 3926959 - DNA, 25 bp, Homo sapien
ctttctatacttatctctttcttca

SEQ ID NO: 3926960 - DNA, 25 bp, Homo sapien
tctatacttatctctttcttcattt

SEQ ID NO: 3926961 - DNA, 25 bp, Homo sapien
gccatgaaagcaggttgaggaatca

SEQ ID NO: 3926962 - DNA, 25 bp, Homo sapien
tgccatgaaagcaggttgaggaatc

SEQ ID NO: 3926963 - DNA, 25 bp, Homo sapien
ccatgaaagcaggttgaggaatcac

SEQ ID NO: 3926964 - DNA, 25 bp, Homo sapien
tttgccatgaaagcaggttgaggaa

SEQ ID NO: 3926965 - DNA, 25 bp, Homo sapien
ttccagaactcctcccatcatgtcc

SEQ ID NO: 3926966 - DNA, 25 bp, Homo sapien
tgacttccagaactcctcccatcat

SEQ ID NO: 3926967 - DNA, 25 bp, Homo sapien
tccagaactcctcccatcatgtcca

SEQ ID NO: 3926968 - DNA, 25 bp, Homo sapien
gacttccagaactcctcccatcatg

SEQ ID NO: 3926969 - DNA, 25 bp, Homo sapien
cagagctcggagtcttgtactggca

SEQ ID NO: 3926970 - DNA, 25 bp, Homo sapien
gagctcggagtcttgtactggcatc

SEQ ID NO: 3926971 - DNA, 25 bp, Homo sapien
agagctcggagtcttgtactggcat

SEQ ID NO: 3926972 - DNA, 25 bp, Homo sapien
ggaaagagccagaatcagagaggaa

SEQ ID NO: 3926973 - DNA, 25 bp, Homo sapien
cagcttcccacccaacattagaatg

SEQ ID NO: 3926974 - DNA, 25 bp, Homo sapien
gaatactgagacagagacctgacat

SEQ ID NO: 3926975 - DNA, 25 bp, Homo sapien
cacccaacattagaatgactgcatt

SEQ ID NO: 3926976 - DNA, 25 bp, Homo sapien
tgctccttttcatgattcacgatca

SEQ ID NO: 3926977 - DNA, 25 bp, Homo sapien
ttgtgccacggcttaatgtgtttgt

SEQ ID NO: 3926978 - DNA, 25 bp, Homo sapien
gattcacgatcaattctttggcttt

SEQ ID NO: 3926979 - DNA, 25 bp, Homo sapien
tctttggctttgtgccacggcttaa

SEQ ID NO: 3926980 - DNA, 25 bp, Homo sapien
gcagcgtcaaactcattattgaaaa

SEQ ID NO: 3926981 - DNA, 25 bp, Homo sapien
tgcacaacaagcgttctctctggct

SEQ ID NO: 3926982 - DNA, 25 bp, Homo sapien
caaattctggttgccagactgcttc

SEQ ID NO: 3926983 - DNA, 25 bp, Homo sapien
catttctttccttcacgcgtgcaat

SEQ ID NO: 3926984 - DNA, 25 bp, Homo sapien
atgaagctccaattggcttgacaat

SEQ ID NO: 3926985 - DNA, 25 bp, Homo sapien
gaagctccaattggcttgacaataa

SEQ ID NO: 3926986 - DNA, 25 bp, Homo sapien
taatataatttggttgattttctct

SEQ ID NO: 3926987 - DNA, 25 bp, Homo sapien
ctccaattggcttgacaataaagag

SEQ ID NO: 3926988 - DNA, 25 bp, Homo sapien
catgacgctgtttaatcaacttaac

SEQ ID NO: 3926989 - DNA, 25 bp, Homo sapien
caaaatcagtactcagactaccaag

SEQ ID NO: 3926990 - DNA, 25 bp, Homo sapien
taccaagcaggtaattgggcaaatt

SEQ ID NO: 3926991 - DNA, 25 bp, Homo sapien
catcatcctcttcatgacgctgttt

SEQ ID NO: 3926992 - DNA, 25 bp, Homo sapien
gagcctctacaatttccttccgtag

SEQ ID NO: 3926993 - DNA, 25 bp, Homo sapien
tgagcctctacaatttccttccgta

SEQ ID NO: 3926994 - DNA, 25 bp, Homo sapien
ctgagcctctacaatttccttccgt

SEQ ID NO: 3926995 - DNA, 25 bp, Homo sapien
tttcagctcttcaaccgtgcgcgct

SEQ ID NO: 3926996 - DNA, 25 bp, Homo sapien
gaagttttcaaccacacaggggata

SEQ ID NO: 3926997 - DNA, 25 bp, Homo sapien
tttaagacactctgcttcaatcttc

SEQ ID NO: 3926998 - DNA, 25 bp, Homo sapien
gcgcgctttcatcgggaagttttca

SEQ ID NO: 3926999 - DNA, 25 bp, Homo sapien
ttaagagctcgacctttcacagcca

SEQ ID NO: 3927000 - DNA, 25 bp, Homo sapien
catcgaattccaacattcttctttg

SEQ ID NO: 3927001 - DNA, 25 bp, Homo sapien
tagctcttggctaagttatgcatct

SEQ ID NO: 3927002 - DNA, 25 bp, Homo sapien
gataagttcagccaaatagctcttg

SEQ ID NO: 3927003 - DNA, 25 bp, Homo sapien
cactttcgggaaacacatctctgcc

SEQ ID NO: 3927004 - DNA, 25 bp, Homo sapien
tacctctacctctaaggatggtcgg

SEQ ID NO: 3927005 - DNA, 25 bp, Homo sapien
gagctgcgtagctaatgtgcacaaa

SEQ ID NO: 3927006 - DNA, 25 bp, Homo sapien
acactttgagccaccttgcactgag

SEQ ID NO: 3927007 - DNA, 25 bp, Homo sapien
tcttcctgactttcatcatgaagcc

SEQ ID NO: 3927008 - DNA, 25 bp, Homo sapien
atcatgaagcctttctagttcctca

SEQ ID NO: 3927009 - DNA, 25 bp, Homo sapien
aattcctgttggtctaattttgcaa

SEQ ID NO: 3927010 - DNA, 25 bp, Homo sapien
ttcctcaagatccagaccaaattcc

SEQ ID NO: 3927011 - DNA, 25 bp, Homo sapien
ctgaatgttgaaataaaaaagagtg

SEQ ID NO: 3927012 - DNA, 25 bp, Homo sapien
ccctagggtccagcagtagtaactg

SEQ ID NO: 3927013 - DNA, 25 bp, Homo sapien
ctggtgaagttccctagggtccagc

SEQ ID NO: 3927014 - DNA, 25 bp, Homo sapien
agttccctagggtccagcagtagta

SEQ ID NO: 3927015 - DNA, 25 bp, Homo sapien
tgaagttccctagggtccagcagta

SEQ ID NO: 3927016 - DNA, 25 bp, Homo sapien
aaacagattaacctcctttttgatg

SEQ ID NO: 3927017 - DNA, 25 bp, Homo sapien
aacagattaacctcctttttgatgg

SEQ ID NO: 3927018 - DNA, 25 bp, Homo sapien
acagattaacctcctttttgatggc

SEQ ID NO: 3927019 - DNA, 25 bp, Homo sapien
acatcggttagaactaattcatctt

SEQ ID NO: 3927020 - DNA, 25 bp, Homo sapien
taacatcggttagaactaattcatc

SEQ ID NO: 3927021 - DNA, 25 bp, Homo sapien
tccttcttaacatcggttagaacta

SEQ ID NO: 3927022 - DNA, 25 bp, Homo sapien
tcttaacatcggttagaactaattc

SEQ ID NO: 3927023 - DNA, 25 bp, Homo sapien
ctggttctcctgtaacctcactggc

SEQ ID NO: 3927024 - DNA, 25 bp, Homo sapien
cggcccaccaccctgtttctatgct

SEQ ID NO: 3927025 - DNA, 25 bp, Homo sapien
aaagagtttgggatgccatgttctc

SEQ ID NO: 3927026 - DNA, 25 bp, Homo sapien
gggatgccatgttctcctggttctc

SEQ ID NO: 3927027 - DNA, 25 bp, Homo sapien
cttttggtgttgtgcttaaataatg

SEQ ID NO: 3927028 - DNA, 25 bp, Homo sapien
ggtgttgtgcttaaataatgattct

SEQ ID NO: 3927029 - DNA, 25 bp, Homo sapien
gaatcggatcccaaatctacggaaa

SEQ ID NO: 3927030 - DNA, 25 bp, Homo sapien
tgtgttcagaatcggatcccaaatc

SEQ ID NO: 3927031 - DNA, 25 bp, Homo sapien
cactttaggtagacaagggtgccat

SEQ ID NO: 3927032 - DNA, 25 bp, Homo sapien
ttccactttaggtagacaagggtgc

SEQ ID NO: 3927033 - DNA, 25 bp, Homo sapien
ttaggtagacaagggtgccatcatc

SEQ ID NO: 3927034 - DNA, 25 bp, Homo sapien
ggtagacaagggtgccatcatctct

SEQ ID NO: 3927035 - DNA, 25 bp, Homo sapien
ggtgagaatgactccgacaccaagc

SEQ ID NO: 3927036 - DNA, 25 bp, Homo sapien
tggtgagaatgactccgacaccaag

SEQ ID NO: 3927037 - DNA, 25 bp, Homo sapien
gtgagaatgactccgacaccaagca

SEQ ID NO: 3927038 - DNA, 25 bp, Homo sapien
ctggtgagaatgactccgacaccaa

SEQ ID NO: 3927039 - DNA, 25 bp, Homo sapien
caaagtataaacgtctcggatacac

SEQ ID NO: 3927040 - DNA, 25 bp, Homo sapien
cagaattccacatttagctattgtt

SEQ ID NO: 3927041 - DNA, 25 bp, Homo sapien
aaacgtctcggatacacagaattcc

SEQ ID NO: 3927042 - DNA, 25 bp, Homo sapien
gtataaacgtctcggatacacagaa

SEQ ID NO: 3927043 - DNA, 25 bp, Homo sapien
atagaaaagatcaggtaaacagcac

SEQ ID NO: 3927044 - DNA, 25 bp, Homo sapien
cattatagaaaagatcaggtaaaca

SEQ ID NO: 3927045 - DNA, 25 bp, Homo sapien
acattatagaaaagatcaggtaaac

SEQ ID NO: 3927046 - DNA, 25 bp, Homo sapien
ttatagaaaagatcaggtaaacagc

SEQ ID NO: 3927047 - DNA, 25 bp, Homo sapien
tggcacaagtatcaggttgctcaaa

SEQ ID NO: 3927048 - DNA, 25 bp, Homo sapien
caaagatgatgtatgtggcacaagt

SEQ ID NO: 3927049 - DNA, 25 bp, Homo sapien
tagcccttggcatatgtagaataga

SEQ ID NO: 3927050 - DNA, 25 bp, Homo sapien
ttaaagtggtcaagaggatcacatc

SEQ ID NO: 3927051 - DNA, 25 bp, Homo sapien
ttcttcaggaagaaggtagctacag

SEQ ID NO: 3927052 - DNA, 25 bp, Homo sapien
gcgtgctccaactcatacaggtact

SEQ ID NO: 3927053 - DNA, 25 bp, Homo sapien
cagatgtatggcacttgactacaga

SEQ ID NO: 3927054 - DNA, 25 bp, Homo sapien
ttgactacagaagccatatatttgg

SEQ ID NO: 3927055 - DNA, 25 bp, Homo sapien
ctttcatcagcaaaggttgtggaaa

SEQ ID NO: 3927056 - DNA, 25 bp, Homo sapien
ctctttcatcagcaaaggttgtgga

SEQ ID NO: 3927057 - DNA, 25 bp, Homo sapien
tctttcatcagcaaaggttgtggaa

SEQ ID NO: 3927058 - DNA, 25 bp, Homo sapien
tgtggcagtaatgtaggcagtgtga

SEQ ID NO: 3927059 - DNA, 25 bp, Homo sapien
tggcagtaatgtaggcagtgtgaac

SEQ ID NO: 3927060 - DNA, 25 bp, Homo sapien
cttgtggcagtaatgtaggcagtgt

SEQ ID NO: 3927061 - DNA, 25 bp, Homo sapien
gtggcagtaatgtaggcagtgtgaa

SEQ ID NO: 3927062 - DNA, 25 bp, Homo sapien
ctggaagcgaggaaagcaccatcac

SEQ ID NO: 3927063 - DNA, 25 bp, Homo sapien
tgtttctaaaagagacactgtggat

SEQ ID NO: 3927064 - DNA, 25 bp, Homo sapien
gcgaggaaagcaccatcacttccac

SEQ ID NO: 3927065 - DNA, 25 bp, Homo sapien
cacttccactatgtctgtttctaaa

SEQ ID NO: 3927066 - DNA, 25 bp, Homo sapien
aggtgcccactttctcaggcccttc

SEQ ID NO: 3927067 - DNA, 25 bp, Homo sapien
aggcccttccccaggcggtcagcag

SEQ ID NO: 3927068 - DNA, 25 bp, Homo sapien
gcggtcagcagatgaccttccctct

SEQ ID NO: 3927069 - DNA, 25 bp, Homo sapien
cggtcagcagatgaccttccctctt

SEQ ID NO: 3927070 - DNA, 25 bp, Homo sapien
tctgaaatgagcttgaggagttggc

SEQ ID NO: 3927071 - DNA, 25 bp, Homo sapien
aatgagcttgaggagttggcattga

SEQ ID NO: 3927072 - DNA, 25 bp, Homo sapien
ataatctgaaatgagcttgaggagt

SEQ ID NO: 3927073 - DNA, 25 bp, Homo sapien
tgagcttgaggagttggcattgata

SEQ ID NO: 3927074 - DNA, 25 bp, Homo sapien
aatgaaacatgtctgtcggtagagc

SEQ ID NO: 3927075 - DNA, 25 bp, Homo sapien
tcaacagacgggtgtgacacggagc

SEQ ID NO: 3927076 - DNA, 25 bp, Homo sapien
taagagcaaaggcagtgactctgca

SEQ ID NO: 3927077 - DNA, 25 bp, Homo sapien
ggatcacatgccacaagctacagtg

SEQ ID NO: 3927078 - DNA, 25 bp, Homo sapien
ggattccttatcatatacgctgatg

SEQ ID NO: 3927079 - DNA, 25 bp, Homo sapien
tacgctgatgaagtagaccgagcca

SEQ ID NO: 3927080 - DNA, 25 bp, Homo sapien
aaaggccttgtgcacgacctgaggg

SEQ ID NO: 3927081 - DNA, 25 bp, Homo sapien
cgacgtgctgcacggacgattccga

SEQ ID NO: 3927082 - DNA, 25 bp, Homo sapien
gggaggatggacagcaagccagaac

SEQ ID NO: 3927083 - DNA, 25 bp, Homo sapien
gaggatggacagcaagccagaaccg

SEQ ID NO: 3927084 - DNA, 25 bp, Homo sapien
gagagggaggatggacagcaagcca

SEQ ID NO: 3927085 - DNA, 25 bp, Homo sapien
gatggacagcaagccagaaccgttg

SEQ ID NO: 3927086 - DNA, 25 bp, Homo sapien
aggtatcttgacactgtgctgctgg

SEQ ID NO: 3927087 - DNA, 25 bp, Homo sapien
tcagcggatgctgctagtgtccagg

SEQ ID NO: 3927088 - DNA, 25 bp, Homo sapien
tgctgctagtgtccaggtatcttga

SEQ ID NO: 3927089 - DNA, 25 bp, Homo sapien
ccttgcaggtaccatcagcggatgc

SEQ ID NO: 3927090 - DNA, 25 bp, Homo sapien
caaacacaaatttcccctgaatatg

SEQ ID NO: 3927091 - DNA, 25 bp, Homo sapien
tccagccaccaaacacaaatttccc

SEQ ID NO: 3927092 - DNA, 25 bp, Homo sapien
ttgcttacacaagcacaatcctcca

SEQ ID NO: 3927093 - DNA, 25 bp, Homo sapien
tagggtattcagataaatcttgctt

SEQ ID NO: 3927094 - DNA, 25 bp, Homo sapien
cccatcacaagcatctaggacttta

SEQ ID NO: 3927095 - DNA, 25 bp, Homo sapien
gaaatttcccatcacaagcatctag

SEQ ID NO: 3927096 - DNA, 25 bp, Homo sapien
ccaaaagtgtagatataaacagatc

SEQ ID NO: 3927097 - DNA, 25 bp, Homo sapien
gttggctccttaccaaaagtgtaga

SEQ ID NO: 3927098 - DNA, 25 bp, Homo sapien
gcctggtctcccagacatttatttt

SEQ ID NO: 3927099 - DNA, 25 bp, Homo sapien
accacgcctggtctcccagacattt

SEQ ID NO: 3927100 - DNA, 25 bp, Homo sapien
cacgcctggtctcccagacatttat

SEQ ID NO: 3927101 - DNA, 25 bp, Homo sapien
tatctatttatgtagaaaatttgga

SEQ ID NO: 3927102 - DNA, 25 bp, Homo sapien
cttctgctgggagattcagacaata

SEQ ID NO: 3927103 - DNA, 25 bp, Homo sapien
ctgtaagttaaacagtgataattgt

SEQ ID NO: 3927104 - DNA, 25 bp, Homo sapien
gagaaggagaacattatatagcaaa

SEQ ID NO: 3927105 - DNA, 25 bp, Homo sapien
tgccctcacggaacttaccttctgc

SEQ ID NO: 3927106 - DNA, 25 bp, Homo sapien
catcatagaccttcccacctgggat

SEQ ID NO: 3927107 - DNA, 25 bp, Homo sapien
cctcctgggttatatgagatccttg

SEQ ID NO: 3927108 - DNA, 25 bp, Homo sapien
gagatccttggaacactttattcta

SEQ ID NO: 3927109 - DNA, 25 bp, Homo sapien
tttattctatataccctgctctgcc

SEQ ID NO: 3927110 - DNA, 25 bp, Homo sapien
ccaatagctctttgtaatttaggcc

SEQ ID NO: 3927111 - DNA, 25 bp, Homo sapien
gcatcatggtagctcttttattcag

SEQ ID NO: 3927112 - DNA, 25 bp, Homo sapien
tacaacctagagtcttgacaagtag

SEQ ID NO: 3927113 - DNA, 25 bp, Homo sapien
gacaagtagagtaccactgtgcagc

SEQ ID NO: 3927114 - DNA, 25 bp, Homo sapien
caatctcaagaaaatcctcgatcat

SEQ ID NO: 3927115 - DNA, 25 bp, Homo sapien
gcaacactgtataattgggagaaaa

SEQ ID NO: 3927116 - DNA, 25 bp, Homo sapien
cgatcatgtaacttctatctttaat

SEQ ID NO: 3927117 - DNA, 25 bp, Homo sapien
ttgtctgtttgaatcagcaacactg

SEQ ID NO: 3927118 - DNA, 25 bp, Homo sapien
agagcaaatgctataatagttactt

SEQ ID NO: 3927119 - DNA, 25 bp, Homo sapien
atgctataatagttactttaaaggg

SEQ ID NO: 3927120 - DNA, 25 bp, Homo sapien
aatgctataatagttactttaaagg

SEQ ID NO: 3927121 - DNA, 25 bp, Homo sapien
gcaaatgctataatagttactttaa

SEQ ID NO: 3927122 - DNA, 25 bp, Homo sapien
ttgaagaggacaagagtcataaaag

SEQ ID NO: 3927123 - DNA, 25 bp, Homo sapien
cttgaagaggacaagagtcataaaa

SEQ ID NO: 3927124 - DNA, 25 bp, Homo sapien
taccaaggttactggactgataaaa

SEQ ID NO: 3927125 - DNA, 25 bp, Homo sapien
agcacgccctccttctgatatacca

SEQ ID NO: 3927126 - DNA, 25 bp, Homo sapien
cgccctccttctgatataccaaggt

SEQ ID NO: 3927127 - DNA, 25 bp, Homo sapien
accaaggttactggactgataaaat

SEQ ID NO: 3927128 - DNA, 25 bp, Homo sapien
cttctatcttattaagtacagtcac

SEQ ID NO: 3927129 - DNA, 25 bp, Homo sapien
tcttctatcttattaagtacagtca

SEQ ID NO: 3927130 - DNA, 25 bp, Homo sapien
caagtcacttgttggagtccagcaa

SEQ ID NO: 3927131 - DNA, 25 bp, Homo sapien
tccagcaatgcatagtcgggtgaag

SEQ ID NO: 3927132 - DNA, 25 bp, Homo sapien
gatgaccctcttcacagccaatgta

SEQ ID NO: 3927133 - DNA, 25 bp, Homo sapien
tgcaaggtgtctccattaatcatta

SEQ ID NO: 3927134 - DNA, 25 bp, Homo sapien
catttgcacaataccagtgaatctg

SEQ ID NO: 3927135 - DNA, 25 bp, Homo sapien
ttgcacaataccagtgaatctgtgt

SEQ ID NO: 3927136 - DNA, 25 bp, Homo sapien
tttgcacaataccagtgaatctgtg

SEQ ID NO: 3927137 - DNA, 25 bp, Homo sapien
atttgcacaataccagtgaatctgt

SEQ ID NO: 3927138 - DNA, 25 bp, Homo sapien
gagatcaggcttcctagacctcaac

SEQ ID NO: 3927139 - DNA, 25 bp, Homo sapien
ggaaagtctctgcctctttgcctac

SEQ ID NO: 3927140 - DNA, 25 bp, Homo sapien
ccggaaagtctctgcctctttgcct

SEQ ID NO: 3927141 - DNA, 25 bp, Homo sapien
cggaaagtctctgcctctttgccta

SEQ ID NO: 3927142 - DNA, 25 bp, Homo sapien
cagcccggcaatggctgacagtggc

SEQ ID NO: 3927143 - DNA, 25 bp, Homo sapien
gatgagatctttcggcaacgactgg

SEQ ID NO: 3927144 - DNA, 25 bp, Homo sapien
aaaaaatgacccatcttctagaggt

SEQ ID NO: 3927145 - DNA, 25 bp, Homo sapien
ggcagcacgggaccatagatgagat

SEQ ID NO: 3927146 - DNA, 25 bp, Homo sapien
tctctttgacccagttctatttaaa

SEQ ID NO: 3927147 - DNA, 25 bp, Homo sapien
tttctcaacaaaagcacccattatc

SEQ ID NO: 3927148 - DNA, 25 bp, Homo sapien
cttgagtctccgagctctttctcaa

SEQ ID NO: 3927149 - DNA, 25 bp, Homo sapien
ctttgacccagttctatttaaacag

SEQ ID NO: 3927150 - DNA, 25 bp, Homo sapien
tctttcaatggtccacacgctcact

SEQ ID NO: 3927151 - DNA, 25 bp, Homo sapien
tttcaatggtccacacgctcactgt

SEQ ID NO: 3927152 - DNA, 25 bp, Homo sapien
tgtacttggacttgataagcacagc

SEQ ID NO: 3927153 - DNA, 25 bp, Homo sapien
tggacttgataagcacagctggcgc

SEQ ID NO: 3927154 - DNA, 25 bp, Homo sapien
ggttaaaagacatttggttcacatc

SEQ ID NO: 3927155 - DNA, 25 bp, Homo sapien
ttaaaagacatttggttcacatcca

SEQ ID NO: 3927156 - DNA, 25 bp, Homo sapien
taaaagacatttggttcacatccat

SEQ ID NO: 3927157 - DNA, 25 bp, Homo sapien
gttaaaagacatttggttcacatcc

SEQ ID NO: 3927158 - DNA, 25 bp, Homo sapien
cacaaaatgatactcgattcccagt

SEQ ID NO: 3927159 - DNA, 25 bp, Homo sapien
caaaatgatactcgattcccagttc

SEQ ID NO: 3927160 - DNA, 25 bp, Homo sapien
acaaaatgatactcgattcccagtt

SEQ ID NO: 3927161 - DNA, 25 bp, Homo sapien
catggcctccactgcgaatgaaaac

SEQ ID NO: 3927162 - DNA, 25 bp, Homo sapien
acacactttgtagcttcgatcccgg

SEQ ID NO: 3927163 - DNA, 25 bp, Homo sapien
tggaccttccgttgcttgacatggc

SEQ ID NO: 3927164 - DNA, 25 bp, Homo sapien
tgtagcttcgatcccggtacatttc

SEQ ID NO: 3927165 - DNA, 25 bp, Homo sapien
tatgcctaaacatagcaactgtatt

SEQ ID NO: 3927166 - DNA, 25 bp, Homo sapien
tatttccttcgataaaatccagaag

SEQ ID NO: 3927167 - DNA, 25 bp, Homo sapien
aactgtattaaaacttgtgattggc

SEQ ID NO: 3927168 - DNA, 25 bp, Homo sapien
tagtttttgctctgactgccaaatt

SEQ ID NO: 3927169 - DNA, 25 bp, Homo sapien
gaggagtaactagccaggtaggtgc

SEQ ID NO: 3927170 - DNA, 25 bp, Homo sapien
gggagagaggagtaactagccaggt

SEQ ID NO: 3927171 - DNA, 25 bp, Homo sapien
cacagtaactgaatgaaagtaaagt

SEQ ID NO: 3927172 - DNA, 25 bp, Homo sapien
aatgaaagtaaagtgtagtccagga

SEQ ID NO: 3927173 - DNA, 25 bp, Homo sapien
tgcagaactgagcataccgcaccat

SEQ ID NO: 3927174 - DNA, 25 bp, Homo sapien
ccagcatggtctgaaatgacccaag

SEQ ID NO: 3927175 - DNA, 25 bp, Homo sapien
gcttagagcaaagctaagatccatt

SEQ ID NO: 3927176 - DNA, 25 bp, Homo sapien
tactgtctctagacttcaatgcaga

SEQ ID NO: 3927177 - DNA, 25 bp, Homo sapien
gcagaggaagggttctctagaatac

SEQ ID NO: 3927178 - DNA, 25 bp, Homo sapien
atgggcagaggaagggttctctaga

SEQ ID NO: 3927179 - DNA, 25 bp, Homo sapien
ggcagaggaagggttctctagaata

SEQ ID NO: 3927180 - DNA, 25 bp, Homo sapien
tcaattatgggcagaggaagggttc

SEQ ID NO: 3927181 - DNA, 25 bp, Homo sapien
tcctggaaagctgtatacgtagatg

SEQ ID NO: 3927182 - DNA, 25 bp, Homo sapien
cttccggtcagaaaaagccacaact

SEQ ID NO: 3927183 - DNA, 25 bp, Homo sapien
gagaggttttagcttccggtcagaa

SEQ ID NO: 3927184 - DNA, 25 bp, Homo sapien
acttcacaggggatgttagttgcca

SEQ ID NO: 3927185 - DNA, 25 bp, Homo sapien
ccattactacactgcagtacagtct

SEQ ID NO: 3927186 - DNA, 25 bp, Homo sapien
taattcccacaagggtagcaaatgg

SEQ ID NO: 3927187 - DNA, 25 bp, Homo sapien
tctgcttagggaatccttgcaccca

SEQ ID NO: 3927188 - DNA, 25 bp, Homo sapien
actacactgcagtacagtctttttc

SEQ ID NO: 3927189 - DNA, 25 bp, Homo sapien
gcttgatctcaacacagtggcatcc

SEQ ID NO: 3927190 - DNA, 25 bp, Homo sapien
tacacagatgaagagtatgtggcca

SEQ ID NO: 3927191 - DNA, 25 bp, Homo sapien
tgaagtcgacgtgaatgaaaggcta

SEQ ID NO: 3927192 - DNA, 25 bp, Homo sapien
ttgcataggacagcctgctttgtgg

SEQ ID NO: 3927193 - DNA, 25 bp, Homo sapien
cttcgtcgcgctcccggccttgcgc

SEQ ID NO: 3927194 - DNA, 25 bp, Homo sapien
tgggcagtgttttcctcaggcggga

SEQ ID NO: 3927195 - DNA, 25 bp, Homo sapien
ccggccttgcgccatgggcagtgtt

SEQ ID NO: 3927196 - DNA, 25 bp, Homo sapien
gagtgggggccttcgtcgcgctccc

SEQ ID NO: 3927197 - DNA, 25 bp, Homo sapien
tgtgtacacccgtatcccggagacc

SEQ ID NO: 3927198 - DNA, 25 bp, Homo sapien
attggctctgcgctttggcccgctc

SEQ ID NO: 3927199 - DNA, 25 bp, Homo sapien
cggagaccgtaagccccgcgcccat

SEQ ID NO: 3927200 - DNA, 25 bp, Homo sapien
gacgccgctgctgtgtacacccgta

SEQ ID NO: 3927201 - DNA, 25 bp, Homo sapien
ccacaactaagaaagaaaggccact

SEQ ID NO: 3927202 - DNA, 25 bp, Homo sapien
cacaactaagaaagaaaggccactc

SEQ ID NO: 3927203 - DNA, 25 bp, Homo sapien
acaactaagaaagaaaggccactca

SEQ ID NO: 3927204 - DNA, 25 bp, Homo sapien
caactaagaaagaaaggccactcat

SEQ ID NO: 3927205 - DNA, 25 bp, Homo sapien
cattcatcccatagcattgtcctct

SEQ ID NO: 3927206 - DNA, 25 bp, Homo sapien
cctctgtgccaagaagatcatttaa

SEQ ID NO: 3927207 - DNA, 25 bp, Homo sapien
actcttgtgcaagtataaaaaggaa

SEQ ID NO: 3927208 - DNA, 25 bp, Homo sapien
tccataatgcagcaagaatgttctg

SEQ ID NO: 3927209 - DNA, 25 bp, Homo sapien
gatacatattatcagttcaatgaag

SEQ ID NO: 3927210 - DNA, 25 bp, Homo sapien
aataagtgagcaaagtaatttcaga

SEQ ID NO: 3927211 - DNA, 25 bp, Homo sapien
tattactatgaacagatacacaaga

SEQ ID NO: 3927212 - DNA, 25 bp, Homo sapien
gatcccacctttcgtgaagcttaca

SEQ ID NO: 3927213 - DNA, 25 bp, Homo sapien
ttgcaaagggactgaagtatgcaaa

SEQ ID NO: 3927214 - DNA, 25 bp, Homo sapien
caactaagcgttggggctcaaataa

SEQ ID NO: 3927215 - DNA, 25 bp, Homo sapien
taaatttttagaggagcaagaatta

SEQ ID NO: 3927216 - DNA, 25 bp, Homo sapien
tgtgaggaaaaacagacgaaagacc

SEQ ID NO: 3927217 - DNA, 25 bp, Homo sapien
gatgagtggacttctgcgtcttgca

SEQ ID NO: 3927218 - DNA, 25 bp, Homo sapien
catcaagtctttaggtagtcggtcc

SEQ ID NO: 3927219 - DNA, 25 bp, Homo sapien
tgacctaggctcttcctgtcagaca

SEQ ID NO: 3927220 - DNA, 25 bp, Homo sapien
tagtcggtcccttttgaacagtctc

SEQ ID NO: 3927221 - DNA, 25 bp, Homo sapien
gaaccatcataagctgcagactgtg

SEQ ID NO: 3927222 - DNA, 25 bp, Homo sapien
tgtgggttcatctctgctgtgtgta

SEQ ID NO: 3927223 - DNA, 25 bp, Homo sapien
tttcacaaagcgaacacagccatgg

SEQ ID NO: 3927224 - DNA, 25 bp, Homo sapien
tgcaccgtcgtaaagttgaaaagaa

SEQ ID NO: 3927225 - DNA, 25 bp, Homo sapien
ccctggtttgaacggctggaagcaa

SEQ ID NO: 3927226 - DNA, 25 bp, Homo sapien
ggaatcttggactatcccaggcatg

SEQ ID NO: 3927227 - DNA, 25 bp, Homo sapien
tctgactaataagaagacgaccttc

SEQ ID NO: 3927228 - DNA, 25 bp, Homo sapien
caactggtctgaatgagaacaagca

SEQ ID NO: 3927229 - DNA, 25 bp, Homo sapien
aggcctgtgactatgggctctgaag

SEQ ID NO: 3927230 - DNA, 25 bp, Homo sapien
gcaaggtttcctagagctctactta

SEQ ID NO: 3927231 - DNA, 25 bp, Homo sapien
gctctacttacagaacagccctgag

SEQ ID NO: 3927232 - DNA, 25 bp, Homo sapien
ccctgaggcctgtgactatgggctc

SEQ ID NO: 3927233 - DNA, 25 bp, Homo sapien
gcatcagtcaattctgcctacaagg

SEQ ID NO: 3927234 - DNA, 25 bp, Homo sapien
tgagtaataggtaagagccccactg

SEQ ID NO: 3927235 - DNA, 25 bp, Homo sapien
tcaaatcccatgttgggcacatagg

SEQ ID NO: 3927236 - DNA, 25 bp, Homo sapien
aagaccagacgcacattacccgaaa

SEQ ID NO: 3927237 - DNA, 25 bp, Homo sapien
gatgcaactaaggtcccgaggttaa

SEQ ID NO: 3927238 - DNA, 25 bp, Homo sapien
catttcattctatagatgatgcaac

SEQ ID NO: 3927239 - DNA, 25 bp, Homo sapien
ggtaggtcggagagcaatcatttca

SEQ ID NO: 3927240 - DNA, 25 bp, Homo sapien
taagtgaggccttaaggtgctggca

SEQ ID NO: 3927241 - DNA, 25 bp, Homo sapien
tgtcggtccgctccaattgtctggt

SEQ ID NO: 3927242 - DNA, 25 bp, Homo sapien
tattttcaagttcgccattgagaga

SEQ ID NO: 3927243 - DNA, 25 bp, Homo sapien
aatttaagggtgcataataatcacc

SEQ ID NO: 3927244 - DNA, 25 bp, Homo sapien
gaaacctccgaatgactaattctta

SEQ ID NO: 3927245 - DNA, 25 bp, Homo sapien
aggagcctgtaaggaggccgcccat

SEQ ID NO: 3927246 - DNA, 25 bp, Homo sapien
ttggctcagccgcactgctgggcag

SEQ ID NO: 3927247 - DNA, 25 bp, Homo sapien
tagtgctttccagcggatttcccct

SEQ ID NO: 3927248 - DNA, 25 bp, Homo sapien
tcaacccaggtgacgcaggcggtgt

SEQ ID NO: 3927249 - DNA, 25 bp, Homo sapien
catgaccgaagatccaaacattttc

SEQ ID NO: 3927250 - DNA, 25 bp, Homo sapien
atgaccgaagatccaaacattttca

SEQ ID NO: 3927251 - DNA, 25 bp, Homo sapien
gcttctgaattggttctgcactctg

SEQ ID NO: 3927252 - DNA, 25 bp, Homo sapien
cctgttctgaacattggcatgagtt

SEQ ID NO: 3927253 - DNA, 25 bp, Homo sapien
ttattatcaaactagcagcctgctc

SEQ ID NO: 3927254 - DNA, 25 bp, Homo sapien
tagtcaaatcaagtccaagtgcagt

SEQ ID NO: 3927255 - DNA, 25 bp, Homo sapien
actgaagccttcgtctgcccgtggc

SEQ ID NO: 3927256 - DNA, 25 bp, Homo sapien
cattgccaaacttgatcatgtgcct

SEQ ID NO: 3927257 - DNA, 25 bp, Homo sapien
ttgtcattcaaccacctgccttggg

SEQ ID NO: 3927258 - DNA, 25 bp, Homo sapien
cacgcagagtttcccgcattgccaa

SEQ ID NO: 3927259 - DNA, 25 bp, Homo sapien
aaggatagtttgcagaggctaggaa

SEQ ID NO: 3927260 - DNA, 25 bp, Homo sapien
ctaggaagggtagtgtgagctggca

SEQ ID NO: 3927261 - DNA, 25 bp, Homo sapien
gcttattgcatactgcatgcctgga

SEQ ID NO: 3927262 - DNA, 25 bp, Homo sapien
actatctgatagcaccacatggtga

SEQ ID NO: 3927263 - DNA, 25 bp, Homo sapien
tcaaaacgctgacgttctccttcgt

SEQ ID NO: 3927264 - DNA, 25 bp, Homo sapien
tgttccagggcgcacttcaaaacgc

SEQ ID NO: 3927265 - DNA, 25 bp, Homo sapien
catcctccggttgaacgttcttggg

SEQ ID NO: 3927266 - DNA, 25 bp, Homo sapien
cgcagaagatgaggtgcctttccag

SEQ ID NO: 3927267 - DNA, 25 bp, Homo sapien
cctaccaagcagtcccttcctcttc

SEQ ID NO: 3927268 - DNA, 25 bp, Homo sapien
ctaccaagcagtcccttcctcttca

SEQ ID NO: 3927269 - DNA, 25 bp, Homo sapien
taccaagcagtcccttcctcttcat

SEQ ID NO: 3927270 - DNA, 25 bp, Homo sapien
gaaccaatccttggctgtagagaag

SEQ ID NO: 3927271 - DNA, 25 bp, Homo sapien
gactatgttggaatgtctcatccct

SEQ ID NO: 3927272 - DNA, 25 bp, Homo sapien
gcctgaagatctgctcatcagtgga

SEQ ID NO: 3927273 - DNA, 25 bp, Homo sapien
tttaaagctggaacagaaggtcaag

SEQ ID NO: 3927274 - DNA, 25 bp, Homo sapien
gcctttgactttgggctgtgctgag

SEQ ID NO: 3927275 - DNA, 25 bp, Homo sapien
cagcttgttgggagtctacgtcacg

SEQ ID NO: 3927276 - DNA, 25 bp, Homo sapien
gatatcagccatgaagtgggacccc

SEQ ID NO: 3927277 - DNA, 25 bp, Homo sapien
tacgtcacggcttgtcttgggaacc

SEQ ID NO: 3927278 - DNA, 25 bp, Homo sapien
cacctggcctgcctagcctgtagct

SEQ ID NO: 3927279 - DNA, 25 bp, Homo sapien
ccatctcctggccgcaagccatcca

SEQ ID NO: 3927280 - DNA, 25 bp, Homo sapien
acctggcctgcctagcctgtagctt

SEQ ID NO: 3927281 - DNA, 25 bp, Homo sapien
taaagatttaaaggtgagagcctgt

SEQ ID NO: 3927282 - DNA, 25 bp, Homo sapien
cacttttagtaattggtgtctacct

SEQ ID NO: 3927283 - DNA, 25 bp, Homo sapien
cttccattatcttgtgtcctagaga

SEQ ID NO: 3927284 - DNA, 25 bp, Homo sapien
aaaggtgagagcctgtattaggcca

SEQ ID NO: 3927285 - DNA, 25 bp, Homo sapien
tatggcaactgcaggtctaggctct

SEQ ID NO: 3927286 - DNA, 25 bp, Homo sapien
tctggctctgtcgttgctatggcaa

SEQ ID NO: 3927287 - DNA, 25 bp, Homo sapien
cacagggatgccctgccttgtactc

SEQ ID NO: 3927288 - DNA, 25 bp, Homo sapien
ctctctctggctctgtcgttgctat

SEQ ID NO: 3927289 - DNA, 25 bp, Homo sapien
ggcttcagagccacacaatttcact

SEQ ID NO: 3927290 - DNA, 25 bp, Homo sapien
cacattgtgcaggaggaaataaacc

SEQ ID NO: 3927291 - DNA, 25 bp, Homo sapien
tgttttcacattccgctcatgcggg

SEQ ID NO: 3927292 - DNA, 25 bp, Homo sapien
tctgtaagggagcaaaagaggttac

SEQ ID NO: 3927293 - DNA, 25 bp, Homo sapien
tgttccccacatagagccggaccta

SEQ ID NO: 3927294 - DNA, 25 bp, Homo sapien
tccccacatagagccggacctaggc

SEQ ID NO: 3927295 - DNA, 25 bp, Homo sapien
gttccccacatagagccggacctag

SEQ ID NO: 3927296 - DNA, 25 bp, Homo sapien
ttgttccccacatagagccggacct

SEQ ID NO: 3927297 - DNA, 25 bp, Homo sapien
tggagacaacttaagtgttcctcag

SEQ ID NO: 3927298 - DNA, 25 bp, Homo sapien
taataagatgctggtggtgaatcca

SEQ ID NO: 3927299 - DNA, 25 bp, Homo sapien
cgatgattgactaaatcccaggcaa

SEQ ID NO: 3927300 - DNA, 25 bp, Homo sapien
cagtgagatagtaagcagccatata

SEQ ID NO: 3927301 - DNA, 25 bp, Homo sapien
gggccctgttgaaggcacacattgc

SEQ ID NO: 3927302 - DNA, 25 bp, Homo sapien
gagacggaccacgaaaatgttctga

SEQ ID NO: 3927303 - DNA, 25 bp, Homo sapien
tggctccctctgctttcggtcgctg

SEQ ID NO: 3927304 - DNA, 25 bp, Homo sapien
gaagtcagaagtgggaccgttagtc

SEQ ID NO: 3927305 - DNA, 25 bp, Homo sapien
ggtaagtcagttgccccttcagtgc

SEQ ID NO: 3927306 - DNA, 25 bp, Homo sapien
ggtaccagtggttcttggacatcca

SEQ ID NO: 3927307 - DNA, 25 bp, Homo sapien
aaggctttgcatggttcagccccac

SEQ ID NO: 3927308 - DNA, 25 bp, Homo sapien
acaaatgtgtgtgcggaacggtgcc

SEQ ID NO: 3927309 - DNA, 25 bp, Homo sapien
tctcgctgacattagctctgtgaaa

SEQ ID NO: 3927310 - DNA, 25 bp, Homo sapien
tggaatccaccctacagccagcttt

SEQ ID NO: 3927311 - DNA, 25 bp, Homo sapien
gaaataaggtcttaggctggaatcc

SEQ ID NO: 3927312 - DNA, 25 bp, Homo sapien
tgcgggcagcacacaagttgcctca

SEQ ID NO: 3927313 - DNA, 25 bp, Homo sapien
ccgcaactgcgtctagggagaggca

SEQ ID NO: 3927314 - DNA, 25 bp, Homo sapien
aggcccaagcacatgttcagtctaa

SEQ ID NO: 3927315 - DNA, 25 bp, Homo sapien
cctggtgggcaaagggtccatcttc

SEQ ID NO: 3927316 - DNA, 25 bp, Homo sapien
ttagggacacacttgagctggttca

SEQ ID NO: 3927317 - DNA, 25 bp, Homo sapien
ggaaatctcaaagggccagtgaagc

SEQ ID NO: 3927318 - DNA, 25 bp, Homo sapien
aactgggcacccctgtcaagttggt

SEQ ID NO: 3927319 - DNA, 25 bp, Homo sapien
tggaggaacacggtatattcttgac

SEQ ID NO: 3927320 - DNA, 25 bp, Homo sapien
tcaagttggttatgctctcgggaag

SEQ ID NO: 3927321 - DNA, 25 bp, Homo sapien
gactggagctaggtttccatagttc

SEQ ID NO: 3927322 - DNA, 25 bp, Homo sapien
tgcagactggagctaggtttccata

SEQ ID NO: 3927323 - DNA, 25 bp, Homo sapien
agttcttgcttccatgcacaccctg

SEQ ID NO: 3927324 - DNA, 25 bp, Homo sapien
cagactggagctaggtttccatagt

SEQ ID NO: 3927325 - DNA, 25 bp, Homo sapien
caccccgggtagcatttttgagcac

SEQ ID NO: 3927326 - DNA, 25 bp, Homo sapien
gaactgggccagactgcaagccaga

SEQ ID NO: 3927327 - DNA, 25 bp, Homo sapien
tctctgcaactttctctgaactggg

SEQ ID NO: 3927328 - DNA, 25 bp, Homo sapien
tggggctatgacatccttggcccct

SEQ ID NO: 3927329 - DNA, 25 bp, Homo sapien
ctactgtcttacagcagagacttcg

SEQ ID NO: 3927330 - DNA, 25 bp, Homo sapien
aggcttggctctgcgcacagcctct

SEQ ID NO: 3927331 - DNA, 25 bp, Homo sapien
gaggcttggctctgcgcacagcctc

SEQ ID NO: 3927332 - DNA, 25 bp, Homo sapien
ggcttggctctgcgcacagcctctg

SEQ ID NO: 3927333 - DNA, 25 bp, Homo sapien
agaggcttggctctgcgcacagcct

SEQ ID NO: 3927334 - DNA, 25 bp, Homo sapien
ggtcagcttccacctttagcatctg

SEQ ID NO: 3927335 - DNA, 25 bp, Homo sapien
cctcaggtgccttgtggttgccaat

SEQ ID NO: 3927336 - DNA, 25 bp, Homo sapien
tcagaaagaccagctttggagagaa

SEQ ID NO: 3927337 - DNA, 25 bp, Homo sapien
gctggcacccagtgtggcaaatacc

SEQ ID NO: 3927338 - DNA, 25 bp, Homo sapien
tcagaaggcgtagcgggtccggata

SEQ ID NO: 3927339 - DNA, 25 bp, Homo sapien
aactgctcacagaggtctccatcaa

SEQ ID NO: 3927340 - DNA, 25 bp, Homo sapien
tgggttccatggaattgaactgctc

SEQ ID NO: 3927341 - DNA, 25 bp, Homo sapien
cgagtttcttggacacttcgggtgg

SEQ ID NO: 3927342 - DNA, 25 bp, Homo sapien
ctggcaagccccaccgggaaaggag

SEQ ID NO: 3927343 - DNA, 25 bp, Homo sapien
taatgcagtcttaattatccagtca

SEQ ID NO: 3927344 - DNA, 25 bp, Homo sapien
gcaaatctcagtgccaatttgaggg

SEQ ID NO: 3927345 - DNA, 25 bp, Homo sapien
aaaacacacagtctctggcaagccc

SEQ ID NO: 3927346 - DNA, 25 bp, Homo sapien
gagtcaagacatatcaatgcaggga

SEQ ID NO: 3927347 - DNA, 25 bp, Homo sapien
taagggtgtgtgcaaaagtagacag

SEQ ID NO: 3927348 - DNA, 25 bp, Homo sapien
gacatatcaatgcagggatggcttt

SEQ ID NO: 3927349 - DNA, 25 bp, Homo sapien
aggagagtcaagacatatcaatgca

SEQ ID NO: 3927350 - DNA, 25 bp, Homo sapien
caatggaacaggatggaagcaaacc

SEQ ID NO: 3927351 - DNA, 25 bp, Homo sapien
gattcgattcctggcaaaacctggg

SEQ ID NO: 3927352 - DNA, 25 bp, Homo sapien
tcacttctccaggttcaaggcgcaa

SEQ ID NO: 3927353 - DNA, 25 bp, Homo sapien
gaatttatgaccaggcgcaatggct

SEQ ID NO: 3927354 - DNA, 25 bp, Homo sapien
tgggcaccgccagagatgctgcata

SEQ ID NO: 3927355 - DNA, 25 bp, Homo sapien
agggcccctcagctattccagatgg

SEQ ID NO: 3927356 - DNA, 25 bp, Homo sapien
tcccactaggattatgagccacaac

SEQ ID NO: 3927357 - DNA, 25 bp, Homo sapien
cgtgtgaataattgggagcagaccc

SEQ ID NO: 3927358 - DNA, 25 bp, Homo sapien
tgccaggcccagtaaatcagtctta

SEQ ID NO: 3927359 - DNA, 25 bp, Homo sapien
caatagtgcgctttattccgagtgc

SEQ ID NO: 3927360 - DNA, 25 bp, Homo sapien
gctggaaaactctgccaaggcgttg

SEQ ID NO: 3927361 - DNA, 25 bp, Homo sapien
tcagtcatgtgcgtttgtgctacca

SEQ ID NO: 3927362 - DNA, 25 bp, Homo sapien
caaagcctcaaactatccaagaggg

SEQ ID NO: 3927363 - DNA, 25 bp, Homo sapien
catttggattcattagggatgggcc

SEQ ID NO: 3927364 - DNA, 25 bp, Homo sapien
gagaacggctgtgttcaaagcctca

SEQ ID NO: 3927365 - DNA, 25 bp, Homo sapien
ctgaatgtgagcacagaatcctgga

SEQ ID NO: 3927366 - DNA, 25 bp, Homo sapien
ctgttcacgtgccaagactcggtct

SEQ ID NO: 3927367 - DNA, 25 bp, Homo sapien
aggaccccaagcaggtgcctaaggg

SEQ ID NO: 3927368 - DNA, 25 bp, Homo sapien
gcctaagggccacgggcagtgggtg

SEQ ID NO: 3927369 - DNA, 25 bp, Homo sapien
ctcctaggatttgctggtggcctta

SEQ ID NO: 3927370 - DNA, 25 bp, Homo sapien
cgaagccgcaagaacaggcatctca

SEQ ID NO: 3927371 - DNA, 25 bp, Homo sapien
gcttcgtccctcgaagccgcaagaa

SEQ ID NO: 3927372 - DNA, 25 bp, Homo sapien
acatcagctgctaacactcgcttcg

SEQ ID NO: 3927373 - DNA, 25 bp, Homo sapien
catcagctgctaacactcgcttcgt

SEQ ID NO: 3927374 - DNA, 25 bp, Homo sapien
taataacacagttcacatgcgttgc

SEQ ID NO: 3927375 - DNA, 25 bp, Homo sapien
gcagaaagccttgtattcccacaga

SEQ ID NO: 3927376 - DNA, 25 bp, Homo sapien
tcatgagttctctagcgtgagccca

SEQ ID NO: 3927377 - DNA, 25 bp, Homo sapien
aaagcagcctctgttcctcatgcag

SEQ ID NO: 3927378 - DNA, 25 bp, Homo sapien
caagcctgttcagcttaacacagca

SEQ ID NO: 3927379 - DNA, 25 bp, Homo sapien
ctgggtcccatcagagaggtgcaca

SEQ ID NO: 3927380 - DNA, 25 bp, Homo sapien
aggtgcacagcgtcggaggtacaca

SEQ ID NO: 3927381 - DNA, 25 bp, Homo sapien
cactattgggctagacctgggacaa

SEQ ID NO: 3927382 - DNA, 25 bp, Homo sapien
actgagcgtgcctataccctgggtg

SEQ ID NO: 3927383 - DNA, 25 bp, Homo sapien
ccacatacaaacaggttgagctggg

SEQ ID NO: 3927384 - DNA, 25 bp, Homo sapien
gggacggcctctactgagcgtgcct

SEQ ID NO: 3927385 - DNA, 25 bp, Homo sapien
caagtgatccacatacaaacaggtt

SEQ ID NO: 3927386 - DNA, 25 bp, Homo sapien
ttgtctccggccaggcagccaactg

SEQ ID NO: 3927387 - DNA, 25 bp, Homo sapien
aagctggaaagtgtgtggcccttgc

SEQ ID NO: 3927388 - DNA, 25 bp, Homo sapien
aaaagctggaaagtgtgtggccctt

SEQ ID NO: 3927389 - DNA, 25 bp, Homo sapien
tccggccaggcagccaactggacaa

SEQ ID NO: 3927390 - DNA, 25 bp, Homo sapien
cttgagcttgtcagggcagtccact

SEQ ID NO: 3927391 - DNA, 25 bp, Homo sapien
cttgtcagggcagtccactccagct

SEQ ID NO: 3927392 - DNA, 25 bp, Homo sapien
gtcagggcagtccactccagctgta

SEQ ID NO: 3927393 - DNA, 25 bp, Homo sapien
ttgagcttgtcagggcagtccactc

SEQ ID NO: 3927394 - DNA, 25 bp, Homo sapien
aaagctaaggctacctccgctggaa

SEQ ID NO: 3927395 - DNA, 25 bp, Homo sapien
tttgggggccgtgaaacatggactc

SEQ ID NO: 3927396 - DNA, 25 bp, Homo sapien
ccccaggacaaagctaaggctacct

SEQ ID NO: 3927397 - DNA, 25 bp, Homo sapien
ggctacctccgctggaatagaataa

SEQ ID NO: 3927398 - DNA, 25 bp, Homo sapien
tctgcaccgtattccagcttgggcc

SEQ ID NO: 3927399 - DNA, 25 bp, Homo sapien
cttggcctctgcaccgtattccagc

SEQ ID NO: 3927400 - DNA, 25 bp, Homo sapien
ggcctctgcaccgtattccagcttg

SEQ ID NO: 3927401 - DNA, 25 bp, Homo sapien
ttggcctctgcaccgtattccagct

SEQ ID NO: 3927402 - DNA, 25 bp, Homo sapien
gggactcaagagcacaagaacagac

SEQ ID NO: 3927403 - DNA, 25 bp, Homo sapien
tgtgactagcaaggggactcaagag

SEQ ID NO: 3927404 - DNA, 25 bp, Homo sapien
ggacagtagacaaagggcctccaac

SEQ ID NO: 3927405 - DNA, 25 bp, Homo sapien
gtggagcatccacactggtactggg

SEQ ID NO: 3927406 - DNA, 25 bp, Homo sapien
tgagttatgatgacaccagctggca

SEQ ID NO: 3927407 - DNA, 25 bp, Homo sapien
gtgagttatgatgacaccagctggc

SEQ ID NO: 3927408 - DNA, 25 bp, Homo sapien
gagttatgatgacaccagctggcag

SEQ ID NO: 3927409 - DNA, 25 bp, Homo sapien
gagtgagttatgatgacaccagctg

SEQ ID NO: 3927410 - DNA, 25 bp, Homo sapien
gacttcaggatgtccgaacggccct

SEQ ID NO: 3927411 - DNA, 25 bp, Homo sapien
tgacttcaggatgtccgaacggccc

SEQ ID NO: 3927412 - DNA, 25 bp, Homo sapien
acttcaggatgtccgaacggccctg

SEQ ID NO: 3927413 - DNA, 25 bp, Homo sapien
ttatctgcccggcagcgtggaggac

SEQ ID NO: 3927414 - DNA, 25 bp, Homo sapien
cagcagaggtggtcactcagtcagg

SEQ ID NO: 3927415 - DNA, 25 bp, Homo sapien
taagcacggcctacatggcctcggg

SEQ ID NO: 3927416 - DNA, 25 bp, Homo sapien
gctgggtgacgctttctctgatttc

SEQ ID NO: 3927417 - DNA, 25 bp, Homo sapien
gcgcagccaggtgaagccccggggc

SEQ ID NO: 3927418 - DNA, 25 bp, Homo sapien
gcagccaggtgaagccccggggcat

SEQ ID NO: 3927419 - DNA, 25 bp, Homo sapien
agcgcagccaggtgaagccccgggg

SEQ ID NO: 3927420 - DNA, 25 bp, Homo sapien
cgcagccaggtgaagccccggggca

SEQ ID NO: 3927421 - DNA, 25 bp, Homo sapien
acgcaaagccgagcacaaccatcat

SEQ ID NO: 3927422 - DNA, 25 bp, Homo sapien
catcatccatttgcataggagacaa

SEQ ID NO: 3927423 - DNA, 25 bp, Homo sapien
acacccgacaagagcacatgagcac

SEQ ID NO: 3927424 - DNA, 25 bp, Homo sapien
caggcactagcagtgcagagagtcc

SEQ ID NO: 3927425 - DNA, 25 bp, Homo sapien
gaaaacccgtgacagtgcactcctc

SEQ ID NO: 3927426 - DNA, 25 bp, Homo sapien
agcttgtcccgcagaaaacccgtga

SEQ ID NO: 3927427 - DNA, 25 bp, Homo sapien
attccccaaggccacgccaaggaag

SEQ ID NO: 3927428 - DNA, 25 bp, Homo sapien
tcattctgcgtcaagggccacatct

SEQ ID NO: 3927429 - DNA, 25 bp, Homo sapien
cccctcgtaaggcacactgatcttg

SEQ ID NO: 3927430 - DNA, 25 bp, Homo sapien
tgacgttggcgattctgaacacccc

SEQ ID NO: 3927431 - DNA, 25 bp, Homo sapien
cagcctggtgacgttggcgattctg

SEQ ID NO: 3927432 - DNA, 25 bp, Homo sapien
cctcgtaaggcacactgatcttgta

SEQ ID NO: 3927433 - DNA, 25 bp, Homo sapien
atagggagcagacgcgggccgtccg

SEQ ID NO: 3927434 - DNA, 25 bp, Homo sapien
ctgcatagggagcagacgcgggccg

SEQ ID NO: 3927435 - DNA, 25 bp, Homo sapien
ttgcccctgcatagggagcagacgc

SEQ ID NO: 3927436 - DNA, 25 bp, Homo sapien
agggacttgcccctgcatagggagc

SEQ ID NO: 3927437 - DNA, 25 bp, Homo sapien
cctgcaccgactcagtggcactgag

SEQ ID NO: 3927438 - DNA, 25 bp, Homo sapien
ggtggccctcgagcagcacgtcctg

SEQ ID NO: 3927439 - DNA, 25 bp, Homo sapien
agcacgtcctgcaccgactcagtgg

SEQ ID NO: 3927440 - DNA, 25 bp, Homo sapien
tgggtggccctcgagcagcacgtcc

SEQ ID NO: 3927441 - DNA, 25 bp, Homo sapien
agcagctccatgacccggaagcagt

SEQ ID NO: 3927442 - DNA, 25 bp, Homo sapien
agggacaacacggattccaccttgg

SEQ ID NO: 3927443 - DNA, 25 bp, Homo sapien
gggcattcaagagggacaacacgga

SEQ ID NO: 3927444 - DNA, 25 bp, Homo sapien
gcaccagcttcaggtttggccctgg

SEQ ID NO: 3927445 - DNA, 25 bp, Homo sapien
cccaggcgccatcccctgagagctc

SEQ ID NO: 3927446 - DNA, 25 bp, Homo sapien
ccccaggcgccatcccctgagagct

SEQ ID NO: 3927447 - DNA, 25 bp, Homo sapien
ggcgccatcccctgagagctcctta

SEQ ID NO: 3927448 - DNA, 25 bp, Homo sapien
caggcgccatcccctgagagctcct

SEQ ID NO: 3927449 - DNA, 25 bp, Homo sapien
gtacagctgggtggccgcatactgc

SEQ ID NO: 3927450 - DNA, 25 bp, Homo sapien
tcacagtcctgccagtttaggacgg

SEQ ID NO: 3927451 - DNA, 25 bp, Homo sapien
tgccagtttaggacggagctttgtt

SEQ ID NO: 3927452 - DNA, 25 bp, Homo sapien
gctgggtggccgcatactgcaatga

SEQ ID NO: 3927453 - DNA, 25 bp, Homo sapien
ggccctcgccctgtgccctgaccgg

SEQ ID NO: 3927454 - DNA, 25 bp, Homo sapien
ctatccgcagtcaccatccagggtg

SEQ ID NO: 3927455 - DNA, 25 bp, Homo sapien
gacccagttgaactcctgtgggagc

SEQ ID NO: 3927456 - DNA, 25 bp, Homo sapien
tggctgcccctatccgcagtcacca

SEQ ID NO: 3927457 - DNA, 25 bp, Homo sapien
gtggcacagaatccccctcaaagga

SEQ ID NO: 3927458 - DNA, 25 bp, Homo sapien
ctccgctccaggtgaggccatgaca

SEQ ID NO: 3927459 - DNA, 25 bp, Homo sapien
cccaggtcccctccgctccaggtga

SEQ ID NO: 3927460 - DNA, 25 bp, Homo sapien
ggtcccctccgctccaggtgaggcc

SEQ ID NO: 3927461 - DNA, 25 bp, Homo sapien
tgtgtccccatccaccttcaggtcc

SEQ ID NO: 3927462 - DNA, 25 bp, Homo sapien
gggtcatagaatggccacgccgtgc

SEQ ID NO: 3927463 - DNA, 25 bp, Homo sapien
tatggcaagatgtggcacttggcac

SEQ ID NO: 3927464 - DNA, 25 bp, Homo sapien
acagctgtgccctcactgctgcggg

SEQ ID NO: 3927465 - DNA, 25 bp, Homo sapien
cagctccccagtctgccaggctggg

SEQ ID NO: 3927466 - DNA, 25 bp, Homo sapien
aaaaaagaaactggaagagcatcca

SEQ ID NO: 3927467 - DNA, 25 bp, Homo sapien
gaaaaaagaaactggaagagcatcc

SEQ ID NO: 3927468 - DNA, 25 bp, Homo sapien
tagaaaaaagaaactggaagagcat

SEQ ID NO: 3927469 - DNA, 25 bp, Homo sapien
atagaaaaaagaaactggaagagca

SEQ ID NO: 3927470 - DNA, 25 bp, Homo sapien
ggcaccgttttcagatgtccacttc

SEQ ID NO: 3927471 - DNA, 25 bp, Homo sapien
tgactggagcagtaggaggtgtggg

SEQ ID NO: 3927472 - DNA, 25 bp, Homo sapien
tgggtacatcaatcttttaactttg

SEQ ID NO: 3927473 - DNA, 25 bp, Homo sapien
gtccacttctcattgggtacatcaa

SEQ ID NO: 3927474 - DNA, 25 bp, Homo sapien
ctccaccaagcccaccgtgcgccgc

SEQ ID NO: 3927475 - DNA, 25 bp, Homo sapien
caagcccaccgtgcgccgcgccctg

SEQ ID NO: 3927476 - DNA, 25 bp, Homo sapien
tggccaccatccgccgcacaccctc

SEQ ID NO: 3927477 - DNA, 25 bp, Homo sapien
ccaccgtgcgccgcgccctgtccag

SEQ ID NO: 3927478 - DNA, 25 bp, Homo sapien
ccacgccctcctgctctgaggacac

SEQ ID NO: 3927479 - DNA, 25 bp, Homo sapien
caccacgccctcctgctctgaggac

SEQ ID NO: 3927480 - DNA, 25 bp, Homo sapien
ctacagcacgcagaccaccacgccc

SEQ ID NO: 3927481 - DNA, 25 bp, Homo sapien
acagcacgcagaccaccacgccctc

SEQ ID NO: 3927482 - DNA, 25 bp, Homo sapien
ctcaggcgccactctgcagcggagg

SEQ ID NO: 3927483 - DNA, 25 bp, Homo sapien
gtccaaggtcggctcccatgagcag

SEQ ID NO: 3927484 - DNA, 25 bp, Homo sapien
gctgtgattgcgaaccagagacccc

SEQ ID NO: 3927485 - DNA, 25 bp, Homo sapien
catcgcagccaaggtaggctggcca

SEQ ID NO: 3927486 - DNA, 25 bp, Homo sapien
cagcttgtcagttcctaccaaaagg

SEQ ID NO: 3927487 - DNA, 25 bp, Homo sapien
tgaatggaattgcagatatccctct

SEQ ID NO: 3927488 - DNA, 25 bp, Homo sapien
gaaaatcttgatatctggtcatgga

SEQ ID NO: 3927489 - DNA, 25 bp, Homo sapien
tggtcatggaagtcccctagcttgg

SEQ ID NO: 3927490 - DNA, 25 bp, Homo sapien
gactacagaaatgtagcgctcacag

SEQ ID NO: 3927491 - DNA, 25 bp, Homo sapien
tcttagtcaatttggactgccgtaa

SEQ ID NO: 3927492 - DNA, 25 bp, Homo sapien
cttagtcaatttggactgccgtaac

SEQ ID NO: 3927493 - DNA, 25 bp, Homo sapien
gcttagactacagaaatgtagcgct

SEQ ID NO: 3927494 - DNA, 25 bp, Homo sapien
catgacccaattcaggaccctacat

SEQ ID NO: 3927495 - DNA, 25 bp, Homo sapien
caggaccctacataatgttcccggg

SEQ ID NO: 3927496 - DNA, 25 bp, Homo sapien
gacatcttactttatgtaaccacca

SEQ ID NO: 3927497 - DNA, 25 bp, Homo sapien
taatactaagtaacgtacagtcttc

SEQ ID NO: 3927498 - DNA, 25 bp, Homo sapien
gagacggcggagaaggagtgcggcg

SEQ ID NO: 3927499 - DNA, 25 bp, Homo sapien
agccccgctgcgacatggcccgcgc

SEQ ID NO: 3927500 - DNA, 25 bp, Homo sapien
cccggcccagccagagcatggagac

SEQ ID NO: 3927501 - DNA, 25 bp, Homo sapien
cccggcctcggagcgagcgcccgcg

SEQ ID NO: 3927502 - DNA, 25 bp, Homo sapien
ggctggaacggcctgcctactgttt

SEQ ID NO: 3927503 - DNA, 25 bp, Homo sapien
tgagtccagcgacctaggaggagat

SEQ ID NO: 3927504 - DNA, 25 bp, Homo sapien
tactgtttgcgctttgtggtctggc

SEQ ID NO: 3927505 - DNA, 25 bp, Homo sapien
ttcaggcctcccaccaagaaatgtg

SEQ ID NO: 3927506 - DNA, 25 bp, Homo sapien
caagggcttgggcacttctcagcac

SEQ ID NO: 3927507 - DNA, 25 bp, Homo sapien
gattatcatggagacaacaggattt

SEQ ID NO: 3927508 - DNA, 25 bp, Homo sapien
gaggaaatccctgtggcaagagagg

SEQ ID NO: 3927509 - DNA, 25 bp, Homo sapien
tggtgattccagcttggaggaaatc

SEQ ID NO: 3927510 - DNA, 25 bp, Homo sapien
actccaccgcatacgcgtcttccat

SEQ ID NO: 3927511 - DNA, 25 bp, Homo sapien
cccgactccaccgcatacgcgtctt

SEQ ID NO: 3927512 - DNA, 25 bp, Homo sapien
gactccaccgcatacgcgtcttcca

SEQ ID NO: 3927513 - DNA, 25 bp, Homo sapien
cgactccaccgcatacgcgtcttcc

SEQ ID NO: 3927514 - DNA, 25 bp, Homo sapien
tttgatctttcataagtccgtagcc

SEQ ID NO: 3927515 - DNA, 25 bp, Homo sapien
tgcagatgggttttgatctttcata

SEQ ID NO: 3927516 - DNA, 25 bp, Homo sapien
ccagaatgcagatgggttttgatct

SEQ ID NO: 3927517 - DNA, 25 bp, Homo sapien
tccgtagccgtatcgattgggcccc

SEQ ID NO: 3927518 - DNA, 25 bp, Homo sapien
gtatggccctaggtgctgtccagcc

SEQ ID NO: 3927519 - DNA, 25 bp, Homo sapien
tttctagagtagtccgtatggccct

SEQ ID NO: 3927520 - DNA, 25 bp, Homo sapien
tcagccctgcaggttagatcactgg

SEQ ID NO: 3927521 - DNA, 25 bp, Homo sapien
cctggtgaaagctagagcagggcac

SEQ ID NO: 3927522 - DNA, 25 bp, Homo sapien
gaagaaggttgccccttcatactgg

SEQ ID NO: 3927523 - DNA, 25 bp, Homo sapien
agaaggttgccccttcatactggtt

SEQ ID NO: 3927524 - DNA, 25 bp, Homo sapien
aaatgaagaaggttgccccttcata

SEQ ID NO: 3927525 - DNA, 25 bp, Homo sapien
atgaagaaggttgccccttcatact

SEQ ID NO: 3927526 - DNA, 25 bp, Homo sapien
tgttttctagctgggacacgcgtca

SEQ ID NO: 3927527 - DNA, 25 bp, Homo sapien
aagggatggtggtatctgtacctcg

SEQ ID NO: 3927528 - DNA, 25 bp, Homo sapien
gataccaacgggcatacagatacgc

SEQ ID NO: 3927529 - DNA, 25 bp, Homo sapien
cacgcgtcagagacatttgtgctcc

SEQ ID NO: 3927530 - DNA, 25 bp, Homo sapien
agaccagggcgtttctcaggatgcc

SEQ ID NO: 3927531 - DNA, 25 bp, Homo sapien
agacaaaacgttttctatcaaggca

SEQ ID NO: 3927532 - DNA, 25 bp, Homo sapien
aaaatgggtctaggcctaagtagtg

SEQ ID NO: 3927533 - DNA, 25 bp, Homo sapien
gctaagcgttcttttaggcaacact

SEQ ID NO: 3927534 - DNA, 25 bp, Homo sapien
tgcagggtggtgtagaagccgcctg

SEQ ID NO: 3927535 - DNA, 25 bp, Homo sapien
tgtagaagccgcctgggtgcagatc

SEQ ID NO: 3927536 - DNA, 25 bp, Homo sapien
ggtggtgtagaagccgcctgggtgc

SEQ ID NO: 3927537 - DNA, 25 bp, Homo sapien
tagaagccgcctgggtgcagatcag

SEQ ID NO: 3927538 - DNA, 25 bp, Homo sapien
tccagggctcagtccagaagccctc

SEQ ID NO: 3927539 - DNA, 25 bp, Homo sapien
ggctcagtccagaagccctctccat

SEQ ID NO: 3927540 - DNA, 25 bp, Homo sapien
ctggtggcccctagcccccctccag

SEQ ID NO: 3927541 - DNA, 25 bp, Homo sapien
cagggctcagtccagaagccctctc

SEQ ID NO: 3927542 - DNA, 25 bp, Homo sapien
ccttgtcaccgtggtcaggtgggtt

SEQ ID NO: 3927543 - DNA, 25 bp, Homo sapien
gtcaccgtggtcaggtgggttggcc

SEQ ID NO: 3927544 - DNA, 25 bp, Homo sapien
accgtggtcaggtgggttggccagc

SEQ ID NO: 3927545 - DNA, 25 bp, Homo sapien
tccttgtcaccgtggtcaggtgggt

SEQ ID NO: 3927546 - DNA, 25 bp, Homo sapien
gtatcaacctctaggtcctctgagg

SEQ ID NO: 3927547 - DNA, 25 bp, Homo sapien
gaaatggacaggcaggtatcaacct

SEQ ID NO: 3927548 - DNA, 25 bp, Homo sapien
ggtcctctgaggttttctgtattac

SEQ ID NO: 3927549 - DNA, 25 bp, Homo sapien
cctctgaggttttctgtattaccag

SEQ ID NO: 3927550 - DNA, 25 bp, Homo sapien
tcagtcttccctgggctggtgccag

SEQ ID NO: 3927551 - DNA, 25 bp, Homo sapien
ctgaatttgctttcccgaacctggg

SEQ ID NO: 3927552 - DNA, 25 bp, Homo sapien
ccccatggagtgaggctcctcagtc

SEQ ID NO: 3927553 - DNA, 25 bp, Homo sapien
ctgtcctgcagcctgaatttgcttt

SEQ ID NO: 3927554 - DNA, 25 bp, Homo sapien
ccttgggctgtagggcggcatctct

SEQ ID NO: 3927555 - DNA, 25 bp, Homo sapien
ccagcccaaaaagtgtgtggaacag

SEQ ID NO: 3927556 - DNA, 25 bp, Homo sapien
gcttctctagccaggggattcttcc

SEQ ID NO: 3927557 - DNA, 25 bp, Homo sapien
tggaacagaacgcaagggaaggagc

SEQ ID NO: 3927558 - DNA, 25 bp, Homo sapien
tggagctgccgttctgctgcccctc

SEQ ID NO: 3927559 - DNA, 25 bp, Homo sapien
aggatacagtggaggcgatgccacc

SEQ ID NO: 3927560 - DNA, 25 bp, Homo sapien
tggaggcgatgccaccagggactct

SEQ ID NO: 3927561 - DNA, 25 bp, Homo sapien
gatgccaccagggactctctctgag

SEQ ID NO: 3927562 - DNA, 25 bp, Homo sapien
gatatgctgccgttctttggccctg

SEQ ID NO: 3927563 - DNA, 25 bp, Homo sapien
gctgccgttctttggccctgacaca

SEQ ID NO: 3927564 - DNA, 25 bp, Homo sapien
tatgctgccgttctttggccctgac

SEQ ID NO: 3927565 - DNA, 25 bp, Homo sapien
ctgccgttctttggccctgacacag

SEQ ID NO: 3927566 - DNA, 25 bp, Homo sapien
taccttcaggttcgctgtgttcagg

SEQ ID NO: 3927567 - DNA, 25 bp, Homo sapien
tagcagcctgaagatgccctatacc

SEQ ID NO: 3927568 - DNA, 25 bp, Homo sapien
ggttccttttagtgatgaggttctg

SEQ ID NO: 3927569 - DNA, 25 bp, Homo sapien
ttgagtgcggcaggaccgcctcagt

SEQ ID NO: 3927570 - DNA, 25 bp, Homo sapien
gtcccgtactgcctctggacctggg

SEQ ID NO: 3927571 - DNA, 25 bp, Homo sapien
tgggtcccgtactgcctctggacct

SEQ ID NO: 3927572 - DNA, 25 bp, Homo sapien
tctggacctgggcttgctcatccgt

SEQ ID NO: 3927573 - DNA, 25 bp, Homo sapien
tggacctgggcttgctcatccgtac

SEQ ID NO: 3927574 - DNA, 25 bp, Homo sapien
ctgagcatgtgcagagctcagcagc

SEQ ID NO: 3927575 - DNA, 25 bp, Homo sapien
ctaggaagagtgcagggtcccagag

SEQ ID NO: 3927576 - DNA, 25 bp, Homo sapien
taggaagagtgcagggtcccagagc

SEQ ID NO: 3927577 - DNA, 25 bp, Homo sapien
ccagagccccagttcccctgctgag

SEQ ID NO: 3927578 - DNA, 25 bp, Homo sapien
catttggaaactgtagtacgcgtat

SEQ ID NO: 3927579 - DNA, 25 bp, Homo sapien
tgtagtacgcgtatgtgtaagacat

SEQ ID NO: 3927580 - DNA, 25 bp, Homo sapien
gacattcattataagatgctttatg

SEQ ID NO: 3927581 - DNA, 25 bp, Homo sapien
taagacattcattataagatgcttt

SEQ ID NO: 3927582 - DNA, 25 bp, Homo sapien
ggaagcatgcttgccagctgaggaa

SEQ ID NO: 3927583 - DNA, 25 bp, Homo sapien
tgaaggaacccggttggaggaagca

SEQ ID NO: 3927584 - DNA, 25 bp, Homo sapien
agcatgcttgccagctgaggaaagg

SEQ ID NO: 3927585 - DNA, 25 bp, Homo sapien
ggaacccggttggaggaagcatgct

SEQ ID NO: 3927586 - DNA, 25 bp, Homo sapien
ggagaattaactgactaaacctgag

SEQ ID NO: 3927587 - DNA, 25 bp, Homo sapien
cacttggaccgaaacacagggagaa

SEQ ID NO: 3927588 - DNA, 25 bp, Homo sapien
tgcgatactcgggaagcccctggtg

SEQ ID NO: 3927589 - DNA, 25 bp, Homo sapien
tatgaaagatttctcacttggaccg

SEQ ID NO: 3927590 - DNA, 25 bp, Homo sapien
gattaaggataaatcaccggcccca

SEQ ID NO: 3927591 - DNA, 25 bp, Homo sapien
tagtattactttcatggcagggacg

SEQ ID NO: 3927592 - DNA, 25 bp, Homo sapien
tgagcatgttttccaagcacgcagg

SEQ ID NO: 3927593 - DNA, 25 bp, Homo sapien
tgaacttgacagtgaacctgggccc

SEQ ID NO: 3927594 - DNA, 25 bp, Homo sapien
aggcaaattctactcgcggctgctg

SEQ ID NO: 3927595 - DNA, 25 bp, Homo sapien
cagagccatggtccttttgaagagc

SEQ ID NO: 3927596 - DNA, 25 bp, Homo sapien
gcgagcggcctagatctttcctgga

SEQ ID NO: 3927597 - DNA, 25 bp, Homo sapien
tcctggatgcgggagactacagcaa

SEQ ID NO: 3927598 - DNA, 25 bp, Homo sapien
tggccaggaatcgaagcccggccgc

SEQ ID NO: 3927599 - DNA, 25 bp, Homo sapien
cggccgcccgcatggcaggcgagaa

SEQ ID NO: 3927600 - DNA, 25 bp, Homo sapien
attggccaggaatcgaagcccggcc

SEQ ID NO: 3927601 - DNA, 25 bp, Homo sapien
gcattggccaggaatcgaagcccgg

SEQ ID NO: 3927602 - DNA, 25 bp, Homo sapien
cgaacccgggcctcccgcgtggcag

SEQ ID NO: 3927603 - DNA, 25 bp, Homo sapien
tcgaacccgggcctcccgcgtggca

SEQ ID NO: 3927604 - DNA, 25 bp, Homo sapien
attctaccactgaaccaccaatgcc

SEQ ID NO: 3927605 - DNA, 25 bp, Homo sapien
cgcgtggcaggcgagaattctacca

SEQ ID NO: 3927606 - DNA, 25 bp, Homo sapien
tctcctaactcagctcttaagtagc

SEQ ID NO: 3927607 - DNA, 25 bp, Homo sapien
gcaattctcctaactcagctcttaa

SEQ ID NO: 3927608 - DNA, 25 bp, Homo sapien
ttctcctaactcagctcttaagtag

SEQ ID NO: 3927609 - DNA, 25 bp, Homo sapien
aattctcctaactcagctcttaagt

SEQ ID NO: 3927610 - DNA, 25 bp, Homo sapien
tcttccatcattgtcaagggaagtg

SEQ ID NO: 3927611 - DNA, 25 bp, Homo sapien
tctgtatgtgtgttgtcaggcctga

SEQ ID NO: 3927612 - DNA, 25 bp, Homo sapien
tcattgtcaagggaagtgctaacct

SEQ ID NO: 3927613 - DNA, 25 bp, Homo sapien
tttctgtatgtgtgttgtcaggcct

SEQ ID NO: 3927614 - DNA, 25 bp, Homo sapien
caccaggcacgtatcagttgaggac

SEQ ID NO: 3927615 - DNA, 25 bp, Homo sapien
tgctggaatggtgtcagaggacccc

SEQ ID NO: 3927616 - DNA, 25 bp, Homo sapien
tcccatgggtggtaacaagtgtccc

SEQ ID NO: 3927617 - DNA, 25 bp, Homo sapien
tggcatcaacagaacagtaacaggc

SEQ ID NO: 3927618 - DNA, 25 bp, Homo sapien
tcttgaagctctcataaagcatgag

SEQ ID NO: 3927619 - DNA, 25 bp, Homo sapien
cagggagatggcgattggtcttctt

SEQ ID NO: 3927620 - DNA, 25 bp, Homo sapien
agatggcgattggtcttcttgaagc

SEQ ID NO: 3927621 - DNA, 25 bp, Homo sapien
gcatgagttttccaatgactgatat

SEQ ID NO: 3927622 - DNA, 25 bp, Homo sapien
ctttctaagatcatgtagcagtggg

SEQ ID NO: 3927623 - DNA, 25 bp, Homo sapien
gacaccttctggagcgttatagaag

SEQ ID NO: 3927624 - DNA, 25 bp, Homo sapien
tatagaagtggcctttttacacaga

SEQ ID NO: 3927625 - DNA, 25 bp, Homo sapien
ccatctagactagagagcttcgagg

SEQ ID NO: 3927626 - DNA, 25 bp, Homo sapien
cagagttatcaggaacctcagggat

SEQ ID NO: 3927627 - DNA, 25 bp, Homo sapien
cccaccagggagcatgttggcagca

SEQ ID NO: 3927628 - DNA, 25 bp, Homo sapien
tcaggaacctcagggatcctcttag

SEQ ID NO: 3927629 - DNA, 25 bp, Homo sapien
gcttcctgctactctttcccattga

SEQ ID NO: 3927630 - DNA, 25 bp, Homo sapien
gctttgtacctctcagaacgctgtg

SEQ ID NO: 3927631 - DNA, 25 bp, Homo sapien
tgagctcaagtatttgcgtttttct

SEQ ID NO: 3927632 - DNA, 25 bp, Homo sapien
tctcagaacgctgtgagctcaagta

SEQ ID NO: 3927633 - DNA, 25 bp, Homo sapien
ttggattggagccaaaagtaagcat

SEQ ID NO: 3927634 - DNA, 25 bp, Homo sapien
cctgggcctgagcattggagtctgc

SEQ ID NO: 3927635 - DNA, 25 bp, Homo sapien
taccacggtaacgatggctcgctct

SEQ ID NO: 3927636 - DNA, 25 bp, Homo sapien
ggctcgctctgaatgttttccgtag

SEQ ID NO: 3927637 - DNA, 25 bp, Homo sapien
taacgatgacctagcgaagcactga

SEQ ID NO: 3927638 - DNA, 25 bp, Homo sapien
gatccatcctcgatttcctaacagg

SEQ ID NO: 3927639 - DNA, 25 bp, Homo sapien
tgaaagtcccaatcaccaccgaatt

SEQ ID NO: 3927640 - DNA, 25 bp, Homo sapien
gcatatctttcatgatagcaggaga

SEQ ID NO: 3927641 - DNA, 25 bp, Homo sapien
tagaacttatcttgctgcactgaaa

SEQ ID NO: 3927642 - DNA, 25 bp, Homo sapien
tgtgggccccaacatcagaatgaga

SEQ ID NO: 3927643 - DNA, 25 bp, Homo sapien
gaaataatgtgggccccaacatcag

SEQ ID NO: 3927644 - DNA, 25 bp, Homo sapien
tcgagattcatttctgatgccttct

SEQ ID NO: 3927645 - DNA, 25 bp, Homo sapien
tggccagaaactctcaactcgagat

SEQ ID NO: 3927646 - DNA, 25 bp, Homo sapien
gaggcggctcacattcctggattcc

SEQ ID NO: 3927647 - DNA, 25 bp, Homo sapien
cttcttctgtgttcaaagccaggtt

SEQ ID NO: 3927648 - DNA, 25 bp, Homo sapien
ttttggctttctgaggcggctcaca

SEQ ID NO: 3927649 - DNA, 25 bp, Homo sapien
tgtgttcaaagccaggttgagttct

SEQ ID NO: 3927650 - DNA, 25 bp, Homo sapien
tccaagcattgtaaacacgttgctc

SEQ ID NO: 3927651 - DNA, 25 bp, Homo sapien
tggtaactgctagcaagacctccct

SEQ ID NO: 3927652 - DNA, 25 bp, Homo sapien
ccacagcagcaggttgttaattacc

SEQ ID NO: 3927653 - DNA, 25 bp, Homo sapien
acacgttgctctgactctatttgga

SEQ ID NO: 3927654 - DNA, 25 bp, Homo sapien
tttctacgtggtctctttaaacgca

SEQ ID NO: 3927655 - DNA, 25 bp, Homo sapien
tttaaacgcaatgaagggtgaagcc

SEQ ID NO: 3927656 - DNA, 25 bp, Homo sapien
gagtcgctggccataatcacttttc

SEQ ID NO: 3927657 - DNA, 25 bp, Homo sapien
caggcagtttggcttcagagtcgct

SEQ ID NO: 3927658 - DNA, 25 bp, Homo sapien
agcaatatgagaagttagtagtact

SEQ ID NO: 3927659 - DNA, 25 bp, Homo sapien
cagcaatatgagaagttagtagtac

SEQ ID NO: 3927660 - DNA, 25 bp, Homo sapien
aatatgagaagttagtagtacttac

SEQ ID NO: 3927661 - DNA, 25 bp, Homo sapien
gcaatatgagaagttagtagtactt

SEQ ID NO: 3927662 - DNA, 25 bp, Homo sapien
tcatgaggggaacaacttttttatc

SEQ ID NO: 3927663 - DNA, 25 bp, Homo sapien
gagccaccgccctgaacttaaatag

SEQ ID NO: 3927664 - DNA, 25 bp, Homo sapien
aatagtccgcttggtacattactgc

SEQ ID NO: 3927665 - DNA, 25 bp, Homo sapien
acctgtgaatccaatgttagacctg

SEQ ID NO: 3927666 - DNA, 25 bp, Homo sapien
tgtgctgcatagctgtagctctccg

SEQ ID NO: 3927667 - DNA, 25 bp, Homo sapien
ccctgagggtagttgctgttctgcc

SEQ ID NO: 3927668 - DNA, 25 bp, Homo sapien
gaacggcagctacccttatggagcc

SEQ ID NO: 3927669 - DNA, 25 bp, Homo sapien
ccttgccagttgagtctagccatga

SEQ ID NO: 3927670 - DNA, 25 bp, Homo sapien
tgaagattgaagcttccctgagggt

SEQ ID NO: 3927671 - DNA, 25 bp, Homo sapien
tttgggcaaaaatcgcaatatggga

SEQ ID NO: 3927672 - DNA, 25 bp, Homo sapien
gaactgtggccatcgagtcacttgg

SEQ ID NO: 3927673 - DNA, 25 bp, Homo sapien
tccgtgtccagagatatttaataat

SEQ ID NO: 3927674 - DNA, 25 bp, Homo sapien
taaagatcccctgtaagtattgctg

SEQ ID NO: 3927675 - DNA, 25 bp, Homo sapien
tagcagccagctctaattctagatt

SEQ ID NO: 3927676 - DNA, 25 bp, Homo sapien
ggtcacagccgttttctcaatagca

SEQ ID NO: 3927677 - DNA, 25 bp, Homo sapien
tgtattcagagacttggcatgggct

SEQ ID NO: 3927678 - DNA, 25 bp, Homo sapien
cctcagagtggtcagcatggattta

SEQ ID NO: 3927679 - DNA, 25 bp, Homo sapien
ggaaaaggatccagtactgcttcct

SEQ ID NO: 3927680 - DNA, 25 bp, Homo sapien
gtacccattgtaagagggaaagcca

SEQ ID NO: 3927681 - DNA, 25 bp, Homo sapien
tgctcaccagcgatcaaaatggccc

SEQ ID NO: 3927682 - DNA, 25 bp, Homo sapien
tggttccccgactcacatgtgctca

SEQ ID NO: 3927683 - DNA, 25 bp, Homo sapien
cagttcattttgtaatttgaggctt

SEQ ID NO: 3927684 - DNA, 25 bp, Homo sapien
tctgtaatagttgaagcaaattctc

SEQ ID NO: 3927685 - DNA, 25 bp, Homo sapien
tgatggctgtagtaacaaaaggtgt

SEQ ID NO: 3927686 - DNA, 25 bp, Homo sapien
gcaaattctccaaatgaacattcgt

SEQ ID NO: 3927687 - DNA, 25 bp, Homo sapien
tgaacattcgtcatgtgtgatggct

SEQ ID NO: 3927688 - DNA, 25 bp, Homo sapien
gagcctgctggctgtaaaactcttt

SEQ ID NO: 3927689 - DNA, 25 bp, Homo sapien
ttttgtaggacaagagttgagccca

SEQ ID NO: 3927690 - DNA, 25 bp, Homo sapien
ttcctgtgccaaacctgtgagcctg

SEQ ID NO: 3927691 - DNA, 25 bp, Homo sapien
tgtccaaaaggtacctactgctatc

SEQ ID NO: 3927692 - DNA, 25 bp, Homo sapien
tgaaagtgtacacctttggagtgga

SEQ ID NO: 3927693 - DNA, 25 bp, Homo sapien
gagtggagtcaactatcagtctccc

SEQ ID NO: 3927694 - DNA, 25 bp, Homo sapien
gtgccaaggaatcgtcccctgcatt

SEQ ID NO: 3927695 - DNA, 25 bp, Homo sapien
aatggtgggataggaaggctttatt

SEQ ID NO: 3927696 - DNA, 25 bp, Homo sapien
tgagaatctacagctatggaccatc

SEQ ID NO: 3927697 - DNA, 25 bp, Homo sapien
tctgaccgggtaaatggccacaaac

SEQ ID NO: 3927698 - DNA, 25 bp, Homo sapien
actcttgcgccgtctcgggcatggg

SEQ ID NO: 3927699 - DNA, 25 bp, Homo sapien
gatgtgggatttatactcttgcgcc

SEQ ID NO: 3927700 - DNA, 25 bp, Homo sapien
tgagtcagcctaaaccaatcagatt

SEQ ID NO: 3927701 - DNA, 25 bp, Homo sapien
ctctctggcagaagataattggacc

SEQ ID NO: 3927702 - DNA, 25 bp, Homo sapien
tccatactttaggtgtcagcatggc

SEQ ID NO: 3927703 - DNA, 25 bp, Homo sapien
aaagccctcctgagatagaaggcca

SEQ ID NO: 3927704 - DNA, 25 bp, Homo sapien
ctcaggaagtgtggccaaggtgcta

SEQ ID NO: 3927705 - DNA, 25 bp, Homo sapien
taaactggaactaacctcacttgcc

SEQ ID NO: 3927706 - DNA, 25 bp, Homo sapien
tggcctttggacctgtggactgcaa

SEQ ID NO: 3927707 - DNA, 25 bp, Homo sapien
cccaaagtgagttgtaaggatgacc

SEQ ID NO: 3927708 - DNA, 25 bp, Homo sapien
cctggctttcgcttcctattattca

SEQ ID NO: 3927709 - DNA, 25 bp, Homo sapien
tcacctggctttcgcttcctattat

SEQ ID NO: 3927710 - DNA, 25 bp, Homo sapien
ggctttcgcttcctattattcagca

SEQ ID NO: 3927711 - DNA, 25 bp, Homo sapien
tttcacctggctttcgcttcctatt

SEQ ID NO: 3927712 - DNA, 25 bp, Homo sapien
gggagctggcctctagcctctacag

SEQ ID NO: 3927713 - DNA, 25 bp, Homo sapien
gcggccatagttcagcagtgcttat

SEQ ID NO: 3927714 - DNA, 25 bp, Homo sapien
gaactgttgctggtttgagcacagg

SEQ ID NO: 3927715 - DNA, 25 bp, Homo sapien
gccgatatagacataaggacatctg

SEQ ID NO: 3927716 - DNA, 25 bp, Homo sapien
cagactttcagaatgatggttcaga

SEQ ID NO: 3927717 - DNA, 25 bp, Homo sapien
tgtatgaatcttttactgaccacac

SEQ ID NO: 3927718 - DNA, 25 bp, Homo sapien
gaatactaaagaaaacgcttcagac

SEQ ID NO: 3927719 - DNA, 25 bp, Homo sapien
ctataaaaatataacgggacagctt

SEQ ID NO: 3927720 - DNA, 25 bp, Homo sapien
cacgtggtggaatctatgcaatgat

SEQ ID NO: 3927721 - DNA, 25 bp, Homo sapien
aaaccatccattctgatctctaggg

SEQ ID NO: 3927722 - DNA, 25 bp, Homo sapien
ggtatatacacccacaggcatagag

SEQ ID NO: 3927723 - DNA, 25 bp, Homo sapien
cactctaaatatgaggtgtgtgtat

SEQ ID NO: 3927724 - DNA, 25 bp, Homo sapien
ggtccctgtctgccggcattcgcgg

SEQ ID NO: 3927725 - DNA, 25 bp, Homo sapien
agggcgcgtgcgcagtgggacttga

SEQ ID NO: 3927726 - DNA, 25 bp, Homo sapien
tggcttcccggtgccgcgagggcgg

SEQ ID NO: 3927727 - DNA, 25 bp, Homo sapien
tgggacttgagtgcctcctggtccc

SEQ ID NO: 3927728 - DNA, 25 bp, Homo sapien
ggtgagggcggtgtaggtagcttcc

SEQ ID NO: 3927729 - DNA, 25 bp, Homo sapien
tttcctgtcttaaggtcaggcacag

SEQ ID NO: 3927730 - DNA, 25 bp, Homo sapien
ttctccatccattcacaccgctgtg

SEQ ID NO: 3927731 - DNA, 25 bp, Homo sapien
tgtaggtagcttccttagctcccct

SEQ ID NO: 3927732 - DNA, 25 bp, Homo sapien
ggctgtgtgttcgttccaggagcca

SEQ ID NO: 3927733 - DNA, 25 bp, Homo sapien
atggctgtgtgttcgttccaggagc

SEQ ID NO: 3927734 - DNA, 25 bp, Homo sapien
gttcgttccaggagccaggggctca

SEQ ID NO: 3927735 - DNA, 25 bp, Homo sapien
ctgtgtgttcgttccaggagccagg

SEQ ID NO: 3927736 - DNA, 25 bp, Homo sapien
catacaggtatttcatgattggaga

SEQ ID NO: 3927737 - DNA, 25 bp, Homo sapien
cctgctcctaagctgctaaatattg

SEQ ID NO: 3927738 - DNA, 25 bp, Homo sapien
ccttgcttcatcatgtaccagctgt

SEQ ID NO: 3927739 - DNA, 25 bp, Homo sapien
ctcttgaggtcagatgcccgtgtct

SEQ ID NO: 3927740 - DNA, 25 bp, Homo sapien
cctgtcctatctggtgttagctaca

SEQ ID NO: 3927741 - DNA, 25 bp, Homo sapien
agctacatgcttgtggatgttgcac

SEQ ID NO: 3927742 - DNA, 25 bp, Homo sapien
gcacttaagatcaagggattttcct

SEQ ID NO: 3927743 - DNA, 25 bp, Homo sapien
caaacactggctcttgcactttttt

SEQ ID NO: 3927744 - DNA, 25 bp, Homo sapien
tttcaactggctgtcggcatctgtg

SEQ ID NO: 3927745 - DNA, 25 bp, Homo sapien
tggtctcggaaacccaagctcatta

SEQ ID NO: 3927746 - DNA, 25 bp, Homo sapien
gcctctgctggtctcggaaacccaa

SEQ ID NO: 3927747 - DNA, 25 bp, Homo sapien
atttcaactggctgtcggcatctgt

SEQ ID NO: 3927748 - DNA, 25 bp, Homo sapien
gaactccaagcacactgccatctgg

SEQ ID NO: 3927749 - DNA, 25 bp, Homo sapien
cacgtgatgctgagtatgggtgact

SEQ ID NO: 3927750 - DNA, 25 bp, Homo sapien
aacactgatgactgagccttgctga

SEQ ID NO: 3927751 - DNA, 25 bp, Homo sapien
ccagagctgctggtggattgtcaga

SEQ ID NO: 3927752 - DNA, 25 bp, Homo sapien
aatataaggaaggcaaagaggttgg

SEQ ID NO: 3927753 - DNA, 25 bp, Homo sapien
taaggaaggcaaagaggttgggcat

SEQ ID NO: 3927754 - DNA, 25 bp, Homo sapien
ctggtaatataaggaaggcaaagag

SEQ ID NO: 3927755 - DNA, 25 bp, Homo sapien
tataaggaaggcaaagaggttgggc

SEQ ID NO: 3927756 - DNA, 25 bp, Homo sapien
cacattgagtatgtttggacagatg

SEQ ID NO: 3927757 - DNA, 25 bp, Homo sapien
gatgggaagtaacagtgacctttta

SEQ ID NO: 3927758 - DNA, 25 bp, Homo sapien
atttccacattgagtatgtttggac

SEQ ID NO: 3927759 - DNA, 25 bp, Homo sapien
ccaattccacgatgggaagtaacag

SEQ ID NO: 3927760 - DNA, 25 bp, Homo sapien
gccagaactgtacttgtggaacttc

SEQ ID NO: 3927761 - DNA, 25 bp, Homo sapien
ccagaactgtacttgtggaacttca

SEQ ID NO: 3927762 - DNA, 25 bp, Homo sapien
ccaaggccagaactgtacttgtgga

SEQ ID NO: 3927763 - DNA, 25 bp, Homo sapien
tttgccaaggccagaactgtacttg

SEQ ID NO: 3927764 - DNA, 25 bp, Homo sapien
ggatctccaggctgaaccatggtaa

SEQ ID NO: 3927765 - DNA, 25 bp, Homo sapien
caggctgaaccatggtaaaccaaac

SEQ ID NO: 3927766 - DNA, 25 bp, Homo sapien
catcatcttgttcactcctggatct

SEQ ID NO: 3927767 - DNA, 25 bp, Homo sapien
tctccaggctgaaccatggtaaacc

SEQ ID NO: 3927768 - DNA, 25 bp, Homo sapien
caggccaggaacttgttgtctctcc

SEQ ID NO: 3927769 - DNA, 25 bp, Homo sapien
tgtgacttcgatagctcttctttat

SEQ ID NO: 3927770 - DNA, 25 bp, Homo sapien
actgggcctatcaaagctgcctgga

SEQ ID NO: 3927771 - DNA, 25 bp, Homo sapien
ttctgttcaagagctgagaactgca

SEQ ID NO: 3927772 - DNA, 25 bp, Homo sapien
cggctgcagtagctcttgaacttgc

SEQ ID NO: 3927773 - DNA, 25 bp, Homo sapien
ccctgctgcaagagcccttgaacgt

SEQ ID NO: 3927774 - DNA, 25 bp, Homo sapien
gagcccttgaacgtgctgctgtcct

SEQ ID NO: 3927775 - DNA, 25 bp, Homo sapien
gctgttccccggctgcagtagctct

SEQ ID NO: 3927776 - DNA, 25 bp, Homo sapien
tcaataggagtaaattggttagacc

SEQ ID NO: 3927777 - DNA, 25 bp, Homo sapien
ataggagtaaattggttagacccag

SEQ ID NO: 3927778 - DNA, 25 bp, Homo sapien
tctgaaaatcaataggagtaaattg

SEQ ID NO: 3927779 - DNA, 25 bp, Homo sapien
aaatcaataggagtaaattggttag

SEQ ID NO: 3927780 - DNA, 25 bp, Homo sapien
gcagggagggaaaaccatcttttga

SEQ ID NO: 3927781 - DNA, 25 bp, Homo sapien
gcagcagggagggaaaaccatcttt

SEQ ID NO: 3927782 - DNA, 25 bp, Homo sapien
ccatcttttgatttgtgagctgaac

SEQ ID NO: 3927783 - DNA, 25 bp, Homo sapien
ttagcagcagggagggaaaaccatc

SEQ ID NO: 3927784 - DNA, 25 bp, Homo sapien
atctggtacaacatccgaagctgtc

SEQ ID NO: 3927785 - DNA, 25 bp, Homo sapien
aattgattatttgcctgtgctggtg

SEQ ID NO: 3927786 - DNA, 25 bp, Homo sapien
gaagctgtctgtaactcatgctact

SEQ ID NO: 3927787 - DNA, 25 bp, Homo sapien
tgctttgtctggtctccttacccct

SEQ ID NO: 3927788 - DNA, 25 bp, Homo sapien
gagtgacatcctctgctcagcgaca

SEQ ID NO: 3927789 - DNA, 25 bp, Homo sapien
gggagtgacatcctctgctcagcga

SEQ ID NO: 3927790 - DNA, 25 bp, Homo sapien
agtgacatcctctgctcagcgacag

SEQ ID NO: 3927791 - DNA, 25 bp, Homo sapien
tgacatcctctgctcagcgacagac

SEQ ID NO: 3927792 - DNA, 25 bp, Homo sapien
tgcctgttcatagtgcattggtggc

SEQ ID NO: 3927793 - DNA, 25 bp, Homo sapien
ggtgggatgcctgttcatagtgcat

SEQ ID NO: 3927794 - DNA, 25 bp, Homo sapien
gatgcctgttcatagtgcattggtg

SEQ ID NO: 3927795 - DNA, 25 bp, Homo sapien
tgggatgcctgttcatagtgcattg

SEQ ID NO: 3927796 - DNA, 25 bp, Homo sapien
gagaaggtgcttgatgttatctagt

SEQ ID NO: 3927797 - DNA, 25 bp, Homo sapien
gaccacgggaacacagcattcgtca

SEQ ID NO: 3927798 - DNA, 25 bp, Homo sapien
tattatttaaatcacaccgggttgc

SEQ ID NO: 3927799 - DNA, 25 bp, Homo sapien
gcattcgtcaccatttaacctcagt

SEQ ID NO: 3927800 - DNA, 25 bp, Homo sapien
taatggtgatgtgcagaacttcatt

SEQ ID NO: 3927801 - DNA, 25 bp, Homo sapien
tgaatgggactttaatggtgatgtg

SEQ ID NO: 3927802 - DNA, 25 bp, Homo sapien
agtggccggccaacctggaaagctt

SEQ ID NO: 3927803 - DNA, 25 bp, Homo sapien
tcattttctgcacacgttggagcgt

SEQ ID NO: 3927804 - DNA, 25 bp, Homo sapien
gcagcaggggtttagtacgctgtgg

SEQ ID NO: 3927805 - DNA, 25 bp, Homo sapien
gggtttagtacgctgtggtccgtga

SEQ ID NO: 3927806 - DNA, 25 bp, Homo sapien
ccaggtgtctccaatgatgaaagaa

SEQ ID NO: 3927807 - DNA, 25 bp, Homo sapien
acgctgtggtccgtgagtggctcca

SEQ ID NO: 3927808 - DNA, 25 bp, Homo sapien
cactgtgcgggtctttggtgccctg

SEQ ID NO: 3927809 - DNA, 25 bp, Homo sapien
ggccttgatgctcactgtgcgggtc

SEQ ID NO: 3927810 - DNA, 25 bp, Homo sapien
ccagcggtgcacttttgtcctcttc

SEQ ID NO: 3927811 - DNA, 25 bp, Homo sapien
cccagcggtgcacttttgtcctctt

SEQ ID NO: 3927812 - DNA, 25 bp, Homo sapien
ctcccttgatagcactgggaggtct

SEQ ID NO: 3927813 - DNA, 25 bp, Homo sapien
atttgtcaccctgtcatcacctcca

SEQ ID NO: 3927814 - DNA, 25 bp, Homo sapien
tcacctccacacttgaaagcagatc

SEQ ID NO: 3927815 - DNA, 25 bp, Homo sapien
aagcagatccccagggattgtggac

SEQ ID NO: 3927816 - DNA, 25 bp, Homo sapien
agcagatccccagggattgtggaca

SEQ ID NO: 3927817 - DNA, 25 bp, Homo sapien
gtgtgaaccctacggccactgttct

SEQ ID NO: 3927818 - DNA, 25 bp, Homo sapien
aactggtgtgaaccctacggccact

SEQ ID NO: 3927819 - DNA, 25 bp, Homo sapien
gaaccctacggccactgttctgcgg

SEQ ID NO: 3927820 - DNA, 25 bp, Homo sapien
agtcaactggtgtgaaccctacggc

SEQ ID NO: 3927821 - DNA, 25 bp, Homo sapien
gccgagctcggaagaagccaaactg

SEQ ID NO: 3927822 - DNA, 25 bp, Homo sapien
tgccgatggtctgatacgagagcca

SEQ ID NO: 3927823 - DNA, 25 bp, Homo sapien
gagcacgtcagtgggaatcccctga

SEQ ID NO: 3927824 - DNA, 25 bp, Homo sapien
gcagattggccgtcattgccgatgg

SEQ ID NO: 3927825 - DNA, 25 bp, Homo sapien
cctggatttaaaccccatgcaccaa

SEQ ID NO: 3927826 - DNA, 25 bp, Homo sapien
ttcctggatttaaaccccatgcacc

SEQ ID NO: 3927827 - DNA, 25 bp, Homo sapien
gggaggaggtgagcattcctggatt

SEQ ID NO: 3927828 - DNA, 25 bp, Homo sapien
gatttaaaccccatgcaccaaggct

SEQ ID NO: 3927829 - DNA, 25 bp, Homo sapien
tcagcagcgggagccaaagcctggg

SEQ ID NO: 3927830 - DNA, 25 bp, Homo sapien
agcagcgggagccaaagcctgggat

SEQ ID NO: 3927831 - DNA, 25 bp, Homo sapien
cagcgggagccaaagcctgggatgc

SEQ ID NO: 3927832 - DNA, 25 bp, Homo sapien
gcgggagccaaagcctgggatgctc

SEQ ID NO: 3927833 - DNA, 25 bp, Homo sapien
tgggctctggcactcgcgctggggt

SEQ ID NO: 3927834 - DNA, 25 bp, Homo sapien
gggctctggcactcgcgctggggtt

SEQ ID NO: 3927835 - DNA, 25 bp, Homo sapien
ctcagcctgcaccgctcccgctccg

SEQ ID NO: 3927836 - DNA, 25 bp, Homo sapien
agcctgcaccgctcccgctccgcgc

SEQ ID NO: 3927837 - DNA, 25 bp, Homo sapien
tcagctcggccaggtgcaggtaagg

SEQ ID NO: 3927838 - DNA, 25 bp, Homo sapien
cagctcggccaggtgcaggtaaggg

SEQ ID NO: 3927839 - DNA, 25 bp, Homo sapien
gaactgggacgccgtcagctcggcc

SEQ ID NO: 3927840 - DNA, 25 bp, Homo sapien
gacgccgtcagctcggccaggtgca

SEQ ID NO: 3927841 - DNA, 25 bp, Homo sapien
tacgtaaggccacgtcagggccact

SEQ ID NO: 3927842 - DNA, 25 bp, Homo sapien
tcagatacgtaaggccacgtcaggg

SEQ ID NO: 3927843 - DNA, 25 bp, Homo sapien
aatgggctcagatacgtaaggccac

SEQ ID NO: 3927844 - DNA, 25 bp, Homo sapien
gaagcaacagagcaatgggctcaga

SEQ ID NO: 3927845 - DNA, 25 bp, Homo sapien
gttgcccaggttcccgttcatctct

SEQ ID NO: 3927846 - DNA, 25 bp, Homo sapien
agttgcccaggttcccgttcatctc

SEQ ID NO: 3927847 - DNA, 25 bp, Homo sapien
agcgtagagctgctgcacgtggaca

SEQ ID NO: 3927848 - DNA, 25 bp, Homo sapien
gaagcagagccatagcaggcaagag

SEQ ID NO: 3927849 - DNA, 25 bp, Homo sapien
ctgagaagcagagccatagcaggca

SEQ ID NO: 3927850 - DNA, 25 bp, Homo sapien
gagcccacctggaggtacccagcgt

SEQ ID NO: 3927851 - DNA, 25 bp, Homo sapien
gccatttcttctctggccccttcac

SEQ ID NO: 3927852 - DNA, 25 bp, Homo sapien
catttcttctctggccccttcacct

SEQ ID NO: 3927853 - DNA, 25 bp, Homo sapien
cttctctggccccttcacctaccat

SEQ ID NO: 3927854 - DNA, 25 bp, Homo sapien
ttcttctctggccccttcacctacc

SEQ ID NO: 3927855 - DNA, 25 bp, Homo sapien
tctgaacagggtccgtcatccctct

SEQ ID NO: 3927856 - DNA, 25 bp, Homo sapien
ttagctctgaacagggtccgtcatc

SEQ ID NO: 3927857 - DNA, 25 bp, Homo sapien
aacagggtccgtcatccctctgtgg

SEQ ID NO: 3927858 - DNA, 25 bp, Homo sapien
agggtccgtcatccctctgtggagc

SEQ ID NO: 3927859 - DNA, 25 bp, Homo sapien
tgagcctggatggtctactagagac

SEQ ID NO: 3927860 - DNA, 25 bp, Homo sapien
gatggtctactagagaccaggactg

SEQ ID NO: 3927861 - DNA, 25 bp, Homo sapien
tggatggtctactagagaccaggac

SEQ ID NO: 3927862 - DNA, 25 bp, Homo sapien
gcctggatggtctactagagaccag

SEQ ID NO: 3927863 - DNA, 25 bp, Homo sapien
gctctttaccttcaatatacccatt

SEQ ID NO: 3927864 - DNA, 25 bp, Homo sapien
gttttctagctctttaccttcaata

SEQ ID NO: 3927865 - DNA, 25 bp, Homo sapien
ttctagctctttaccttcaatatac

SEQ ID NO: 3927866 - DNA, 25 bp, Homo sapien
tctccagctcttggaaaaagttttc

SEQ ID NO: 3927867 - DNA, 25 bp, Homo sapien
catctgagtttttatcatacttctg

SEQ ID NO: 3927868 - DNA, 25 bp, Homo sapien
agtttttatcatacttctgcatgaa

SEQ ID NO: 3927869 - DNA, 25 bp, Homo sapien
ttttctccaaagttgtcactctttg

SEQ ID NO: 3927870 - DNA, 25 bp, Homo sapien
cttttctccaaagttgtcactcttt

SEQ ID NO: 3927871 - DNA, 25 bp, Homo sapien
agttctcttcggttggcaggatctg

SEQ ID NO: 3927872 - DNA, 25 bp, Homo sapien
tccataaactcggcgctggagccca

SEQ ID NO: 3927873 - DNA, 25 bp, Homo sapien
ctcttcggttggcaggatctgcgcc

SEQ ID NO: 3927874 - DNA, 25 bp, Homo sapien
ataaactcggcgctggagcccacgt

SEQ ID NO: 3927875 - DNA, 25 bp, Homo sapien
tgtctgtgtcgtacttccgccaagc

SEQ ID NO: 3927876 - DNA, 25 bp, Homo sapien
gatgtagccactcctgtctgtgtcg

SEQ ID NO: 3927877 - DNA, 25 bp, Homo sapien
tcctgtctgtgtcgtacttccgcca

SEQ ID NO: 3927878 - DNA, 25 bp, Homo sapien
agctcattggcttcgatgtagccac

SEQ ID NO: 3927879 - DNA, 25 bp, Homo sapien
ggccggttcgccttcttcagcaggt

SEQ ID NO: 3927880 - DNA, 25 bp, Homo sapien
tatggtttgggtgtattcctggagc

SEQ ID NO: 3927881 - DNA, 25 bp, Homo sapien
ttgggctcatcgtacggccggttcg

SEQ ID NO: 3927882 - DNA, 25 bp, Homo sapien
tggagcttgggctcatcgtacggcc

SEQ ID NO: 3927883 - DNA, 25 bp, Homo sapien
gcacaccagagcccaagtggcttgg

SEQ ID NO: 3927884 - DNA, 25 bp, Homo sapien
agtggcttggggcacaagtcctgca

SEQ ID NO: 3927885 - DNA, 25 bp, Homo sapien
tgcacaccagagcccaagtggcttg

SEQ ID NO: 3927886 - DNA, 25 bp, Homo sapien
ccaagtggcttggggcacaagtcct

SEQ ID NO: 3927887 - DNA, 25 bp, Homo sapien
cactgtgaatcacttcccttgggcc

SEQ ID NO: 3927888 - DNA, 25 bp, Homo sapien
aaagggtatgtgaagccacgaagta

SEQ ID NO: 3927889 - DNA, 25 bp, Homo sapien
agctgccactgtgaatcacttccct

SEQ ID NO: 3927890 - DNA, 25 bp, Homo sapien
acgaagtagcatccctttttgccag

SEQ ID NO: 3927891 - DNA, 25 bp, Homo sapien
gctgtgaatttctctgacctgacat

SEQ ID NO: 3927892 - DNA, 25 bp, Homo sapien
ctgtgaatttctctgacctgacatc

SEQ ID NO: 3927893 - DNA, 25 bp, Homo sapien
gtgaatttctctgacctgacatccc

SEQ ID NO: 3927894 - DNA, 25 bp, Homo sapien
tgtgaatttctctgacctgacatcc

SEQ ID NO: 3927895 - DNA, 25 bp, Homo sapien
cccaatttgccatccccgttcaagt

SEQ ID NO: 3927896 - DNA, 25 bp, Homo sapien
ccccgttcaagtcaaacatccgtag

SEQ ID NO: 3927897 - DNA, 25 bp, Homo sapien
atccccgttcaagtcaaacatccgt

SEQ ID NO: 3927898 - DNA, 25 bp, Homo sapien
tgagaggcccaatttgccatccccg

SEQ ID NO: 3927899 - DNA, 25 bp, Homo sapien
gaagttttcctggacaggcaggagt

SEQ ID NO: 3927900 - DNA, 25 bp, Homo sapien
tttaagcaggaagttttcctggaca

SEQ ID NO: 3927901 - DNA, 25 bp, Homo sapien
aggaagttttcctggacaggcagga

SEQ ID NO: 3927902 - DNA, 25 bp, Homo sapien
gcaggaagttttcctggacaggcag

SEQ ID NO: 3927903 - DNA, 25 bp, Homo sapien
tgtcgtaaaatgtgaagatcgcgtt

SEQ ID NO: 3927904 - DNA, 25 bp, Homo sapien
tcgcgttaaactcctctgaggtcag

SEQ ID NO: 3927905 - DNA, 25 bp, Homo sapien
aaatgtgaagatcgcgttaaactcc

SEQ ID NO: 3927906 - DNA, 25 bp, Homo sapien
gaagatcgcgttaaactcctctgag

SEQ ID NO: 3927907 - DNA, 25 bp, Homo sapien
gaagcatttggttaactccctgagt

SEQ ID NO: 3927908 - DNA, 25 bp, Homo sapien
ttaaccagtcatggcaggaaggtgg

SEQ ID NO: 3927909 - DNA, 25 bp, Homo sapien
tccagggatgtctaagagtctagcc

SEQ ID NO: 3927910 - DNA, 25 bp, Homo sapien
aaaccaccggagtcatgtgggcagg

SEQ ID NO: 3927911 - DNA, 25 bp, Homo sapien
gctcgtcaatgtagccgcttctatc

SEQ ID NO: 3927912 - DNA, 25 bp, Homo sapien
tcatgctcgtcaatgtagccgcttc

SEQ ID NO: 3927913 - DNA, 25 bp, Homo sapien
aaaagggcatccagctcatgctcgt

SEQ ID NO: 3927914 - DNA, 25 bp, Homo sapien
atccagctcatgctcgtcaatgtag

SEQ ID NO: 3927915 - DNA, 25 bp, Homo sapien
ggacagtggccgggcctcaggcttg

SEQ ID NO: 3927916 - DNA, 25 bp, Homo sapien
ctggggacagtggccgggcctcagg

SEQ ID NO: 3927917 - DNA, 25 bp, Homo sapien
gggacagtggccgggcctcaggctt

SEQ ID NO: 3927918 - DNA, 25 bp, Homo sapien
tggcagatcagaggggagtagagag

SEQ ID NO: 3927919 - DNA, 25 bp, Homo sapien
ggtccttgcggtagagcttccctgc

SEQ ID NO: 3927920 - DNA, 25 bp, Homo sapien
tctgtagttggtgagctgttgaata

SEQ ID NO: 3927921 - DNA, 25 bp, Homo sapien
ggctcgctgcagagcacaatctcca

SEQ ID NO: 3927922 - DNA, 25 bp, Homo sapien
tgccaaggacatgacgctctttctg

SEQ ID NO: 3927923 - DNA, 25 bp, Homo sapien
gagttctgagaggacagctacacca

SEQ ID NO: 3927924 - DNA, 25 bp, Homo sapien
tctgggtagacgcatcagggcagca

SEQ ID NO: 3927925 - DNA, 25 bp, Homo sapien
cctaaatcatacagcgagggagctc

SEQ ID NO: 3927926 - DNA, 25 bp, Homo sapien
tcacagcgaagagaattagggaccc

SEQ ID NO: 3927927 - DNA, 25 bp, Homo sapien
gcaggttcacttacatacatgccaa

SEQ ID NO: 3927928 - DNA, 25 bp, Homo sapien
acatatgcaccccatcttccatatg

SEQ ID NO: 3927929 - DNA, 25 bp, Homo sapien
acatgtccatgtgttgacatatgca

SEQ ID NO: 3927930 - DNA, 25 bp, Homo sapien
tacatgccaacatgttgacataggc

SEQ ID NO: 3927931 - DNA, 25 bp, Homo sapien
ctgtgcacgcattgacatatgcatc

SEQ ID NO: 3927932 - DNA, 25 bp, Homo sapien
ccctcttgcaggttcgtttacatat

SEQ ID NO: 3927933 - DNA, 25 bp, Homo sapien
gcattgacatatgcatcccaggccc

SEQ ID NO: 3927934 - DNA, 25 bp, Homo sapien
tatgcccacgtgttgacatatgcat

SEQ ID NO: 3927935 - DNA, 25 bp, Homo sapien
ccaccgtcagtcctgcgtggtctcc

SEQ ID NO: 3927936 - DNA, 25 bp, Homo sapien
cgtcagtcctgcgtggtctcccaga

SEQ ID NO: 3927937 - DNA, 25 bp, Homo sapien
accgtcagtcctgcgtggtctccca

SEQ ID NO: 3927938 - DNA, 25 bp, Homo sapien
gtcagtcctgcgtggtctcccagac

SEQ ID NO: 3927939 - DNA, 25 bp, Homo sapien
tgctcaacttttagccaccaattac

SEQ ID NO: 3927940 - DNA, 25 bp, Homo sapien
gctcaacttttagccaccaattacc

SEQ ID NO: 3927941 - DNA, 25 bp, Homo sapien
ctgctcaacttttagccaccaatta

SEQ ID NO: 3927942 - DNA, 25 bp, Homo sapien
tgggggagccgccaaaacctgtctc

SEQ ID NO: 3927943 - DNA, 25 bp, Homo sapien
gcttctactgggggagccgccaaaa

SEQ ID NO: 3927944 - DNA, 25 bp, Homo sapien
tcagccacccttgtgggcttctact

SEQ ID NO: 3927945 - DNA, 25 bp, Homo sapien
agccacccttgtgggcttctactgg

SEQ ID NO: 3927946 - DNA, 25 bp, Homo sapien
tctctaggagtgcacgacacccttc

SEQ ID NO: 3927947 - DNA, 25 bp, Homo sapien
ctttctctaggagtgcacgacaccc

SEQ ID NO: 3927948 - DNA, 25 bp, Homo sapien
cccattaggaagcccatttttcaat

SEQ ID NO: 3927949 - DNA, 25 bp, Homo sapien
gcacgacacccttcccccacaactc

SEQ ID NO: 3927950 - DNA, 25 bp, Homo sapien
cttgtttactgatggataccacctg

SEQ ID NO: 3927951 - DNA, 25 bp, Homo sapien
tgtttactgatggataccacctgag

SEQ ID NO: 3927952 - DNA, 25 bp, Homo sapien
ttttagtaaaatctgcttgcctcct

SEQ ID NO: 3927953 - DNA, 25 bp, Homo sapien
tactgatggataccacctgagagag

SEQ ID NO: 3927954 - DNA, 25 bp, Homo sapien
ggcctctgatcagtgtgctcgcctc

SEQ ID NO: 3927955 - DNA, 25 bp, Homo sapien
gggtctctggatggcgtcagctctg

SEQ ID NO: 3927956 - DNA, 25 bp, Homo sapien
tcctttagtcaatgtcagtggcctc

SEQ ID NO: 3927957 - DNA, 25 bp, Homo sapien
ggccttccctatcctgcaatgctgc

SEQ ID NO: 3927958 - DNA, 25 bp, Homo sapien
ggtgttgtgagtcctgccatccact

SEQ ID NO: 3927959 - DNA, 25 bp, Homo sapien
tcatgctggcttcttcgtgtgtcgc

SEQ ID NO: 3927960 - DNA, 25 bp, Homo sapien
tctgcattgcttgtcgtgcttccca

SEQ ID NO: 3927961 - DNA, 25 bp, Homo sapien
gggctgtctaatgcatgcaccttga

SEQ ID NO: 3927962 - DNA, 25 bp, Homo sapien
ccctctgggttcatcatgaatggat

SEQ ID NO: 3927963 - DNA, 25 bp, Homo sapien
taaaccacggtggacagtgttttgc

SEQ ID NO: 3927964 - DNA, 25 bp, Homo sapien
gatgtgtcagactttgttctcaccc

SEQ ID NO: 3927965 - DNA, 25 bp, Homo sapien
accctgagattcaactgctttctga

SEQ ID NO: 3927966 - DNA, 25 bp, Homo sapien
cctcccttgttctcccggctgtggc

SEQ ID NO: 3927967 - DNA, 25 bp, Homo sapien
ctcccttgttctcccggctgtggct

SEQ ID NO: 3927968 - DNA, 25 bp, Homo sapien
ggcctcccttgttctcccggctgtg

SEQ ID NO: 3927969 - DNA, 25 bp, Homo sapien
gcctcccttgttctcccggctgtgg

SEQ ID NO: 3927970 - DNA, 25 bp, Homo sapien
cttgaattttcaggagagcgttggc

SEQ ID NO: 3927971 - DNA, 25 bp, Homo sapien
tagacggcgtcctgaaggcttgtgt

SEQ ID NO: 3927972 - DNA, 25 bp, Homo sapien
aaggcttgtgtgaggttcctcttga

SEQ ID NO: 3927973 - DNA, 25 bp, Homo sapien
tttgcattgcagaaccatgacttgc

SEQ ID NO: 3927974 - DNA, 25 bp, Homo sapien
gggcctggaaggccgcattgttttc

SEQ ID NO: 3927975 - DNA, 25 bp, Homo sapien
gcctggaaggccgcattgttttcaa

SEQ ID NO: 3927976 - DNA, 25 bp, Homo sapien
ctggaaggccgcattgttttcaaac

SEQ ID NO: 3927977 - DNA, 25 bp, Homo sapien
tcgggcctggaaggccgcattgttt

SEQ ID NO: 3927978 - DNA, 25 bp, Homo sapien
ttttgccagtgaccttcttggaggc

SEQ ID NO: 3927979 - DNA, 25 bp, Homo sapien
tgctcttgccccttgctgatcaggt

SEQ ID NO: 3927980 - DNA, 25 bp, Homo sapien
gctgatcaggtgtctgtccaccagt

SEQ ID NO: 3927981 - DNA, 25 bp, Homo sapien
ccagtgggacgttttgccagtgacc

SEQ ID NO: 3927982 - DNA, 25 bp, Homo sapien
catgtgggtgtagggccagaactct

SEQ ID NO: 3927983 - DNA, 25 bp, Homo sapien
ccagaactctggtggtcgagggtat

SEQ ID NO: 3927984 - DNA, 25 bp, Homo sapien
ccatgtgggtgtagggccagaactc

SEQ ID NO: 3927985 - DNA, 25 bp, Homo sapien
ctctggtggtcgagggtatcttctg

SEQ ID NO: 3927986 - DNA, 25 bp, Homo sapien
tgttggtggtgggaggaagacctca

SEQ ID NO: 3927987 - DNA, 25 bp, Homo sapien
aggttggctgttggtggtgggagga

SEQ ID NO: 3927988 - DNA, 25 bp, Homo sapien
gttggtggtgggaggaagacctcac

SEQ ID NO: 3927989 - DNA, 25 bp, Homo sapien
ggctgttggtggtgggaggaagacc

SEQ ID NO: 3927990 - DNA, 25 bp, Homo sapien
caccttgcgatagcatggttgtgcc

SEQ ID NO: 3927991 - DNA, 25 bp, Homo sapien
gctggtcctgtgaactcggtgctta

SEQ ID NO: 3927992 - DNA, 25 bp, Homo sapien
taagattccaattagcaccttgcga

SEQ ID NO: 3927993 - DNA, 25 bp, Homo sapien
gcagaggtggctattatccccggac

SEQ ID NO: 3927994 - DNA, 25 bp, Homo sapien
tctagttttgccctgagttggttga

SEQ ID NO: 3927995 - DNA, 25 bp, Homo sapien
gttgatggccccaggtatcacatgg

SEQ ID NO: 3927996 - DNA, 25 bp, Homo sapien
gctggtacaacaaggagcgcctcta

SEQ ID NO: 3927997 - DNA, 25 bp, Homo sapien
gagcgcctctatgccttggcgtaga

SEQ ID NO: 3927998 - DNA, 25 bp, Homo sapien
tgaatgtctccagagcttgcttcgg

SEQ ID NO: 3927999 - DNA, 25 bp, Homo sapien
ctccagagcttgcttcggagcagcc

SEQ ID NO: 3928000 - DNA, 25 bp, Homo sapien
gaatgtctccagagcttgcttcgga

SEQ ID NO: 3928001 - DNA, 25 bp, Homo sapien
tgtctccagagcttgcttcggagca

SEQ ID NO: 3928002 - DNA, 25 bp, Homo sapien
tcctctatggatggttcggctcttc

SEQ ID NO: 3928003 - DNA, 25 bp, Homo sapien
gatgtgaggagggtctccaacactg

SEQ ID NO: 3928004 - DNA, 25 bp, Homo sapien
ttggcttcttatacacctgctctaa

SEQ ID NO: 3928005 - DNA, 25 bp, Homo sapien
ctccttttggcaccccggatgtgag

SEQ ID NO: 3928006 - DNA, 25 bp, Homo sapien
aagatcctggggagtgggtgggcac

SEQ ID NO: 3928007 - DNA, 25 bp, Homo sapien
aaagatcctggggagtgggtgggca

SEQ ID NO: 3928008 - DNA, 25 bp, Homo sapien
ctaaaagatcctggggagtgggtgg

SEQ ID NO: 3928009 - DNA, 25 bp, Homo sapien
ggcagtgtgatagtacctctgatgg

SEQ ID NO: 3928010 - DNA, 25 bp, Homo sapien
gagattcagggtatggttggcttcc

SEQ ID NO: 3928011 - DNA, 25 bp, Homo sapien
acctggccaggagagtgactgtcac

SEQ ID NO: 3928012 - DNA, 25 bp, Homo sapien
gctcgaggagtgcgctgcctctgtt

SEQ ID NO: 3928013 - DNA, 25 bp, Homo sapien
tccaggaaaggagctagggccctcc

SEQ ID NO: 3928014 - DNA, 25 bp, Homo sapien
tgatcccgaatagggcccagctgtg

SEQ ID NO: 3928015 - DNA, 25 bp, Homo sapien
aaagccacccttgttcaatcatggg

SEQ ID NO: 3928016 - DNA, 25 bp, Homo sapien
ggccctcctaagagatgatcccgaa

SEQ ID NO: 3928017 - DNA, 25 bp, Homo sapien
ggtgggcgctgaacccaaccctcag

SEQ ID NO: 3928018 - DNA, 25 bp, Homo sapien
aggtgggcgctgaacccaaccctca

SEQ ID NO: 3928019 - DNA, 25 bp, Homo sapien
gagaaggtgggcgctgaacccaacc

SEQ ID NO: 3928020 - DNA, 25 bp, Homo sapien
ctaggagaaggtgggcgctgaaccc

SEQ ID NO: 3928021 - DNA, 25 bp, Homo sapien
tctgccgtgatgctgaagacgattc

SEQ ID NO: 3928022 - DNA, 25 bp, Homo sapien
gattccttaaacaagggcctcgctc

SEQ ID NO: 3928023 - DNA, 25 bp, Homo sapien
ccctgtagtcggcagctgagataga

SEQ ID NO: 3928024 - DNA, 25 bp, Homo sapien
gggtagcccacatgagtaggaaaaa

SEQ ID NO: 3928025 - DNA, 25 bp, Homo sapien
tgatgaactagacttccggagagaa

SEQ ID NO: 3928026 - DNA, 25 bp, Homo sapien
gacttccggagagaatgaactcagt

SEQ ID NO: 3928027 - DNA, 25 bp, Homo sapien
aaccagcagggccttgatgaactag

SEQ ID NO: 3928028 - DNA, 25 bp, Homo sapien
ggccttgatgaactagacttccgga

SEQ ID NO: 3928029 - DNA, 25 bp, Homo sapien
cgaagtgcatttggaaggctgcgtc

SEQ ID NO: 3928030 - DNA, 25 bp, Homo sapien
cagcccctgtcttgcggatgctctt

SEQ ID NO: 3928031 - DNA, 25 bp, Homo sapien
tacttttcactatggcagttgctct

SEQ ID NO: 3928032 - DNA, 25 bp, Homo sapien
gcttggtcccatgaagtaagtcaat

SEQ ID NO: 3928033 - DNA, 25 bp, Homo sapien
tgcttgcatgtcctcatagcccgca

SEQ ID NO: 3928034 - DNA, 25 bp, Homo sapien
aaatgcttgcatgtcctcatagccc

SEQ ID NO: 3928035 - DNA, 25 bp, Homo sapien
aatgcttgcatgtcctcatagcccg

SEQ ID NO: 3928036 - DNA, 25 bp, Homo sapien
gcttgcatgtcctcatagcccgcat

SEQ ID NO: 3928037 - DNA, 25 bp, Homo sapien
tgtctctactgtatccatcccagtg

SEQ ID NO: 3928038 - DNA, 25 bp, Homo sapien
aagtcatcacttttgtgaggacaga

SEQ ID NO: 3928039 - DNA, 25 bp, Homo sapien
gacagcgccatccactcaggttttg

SEQ ID NO: 3928040 - DNA, 25 bp, Homo sapien
tcccagtgtctctgacatggaaagc

SEQ ID NO: 3928041 - DNA, 25 bp, Homo sapien
cagttctacgtaggaagcagagatc

SEQ ID NO: 3928042 - DNA, 25 bp, Homo sapien
gcagagatccaagcgttcagtgtta

SEQ ID NO: 3928043 - DNA, 25 bp, Homo sapien
tccttgcagcaggtatgcaggaaga

SEQ ID NO: 3928044 - DNA, 25 bp, Homo sapien
cctctttccgtgagctgacttctct

SEQ ID NO: 3928045 - DNA, 25 bp, Homo sapien
gcactgcccgaagtctgtgtcctgg

SEQ ID NO: 3928046 - DNA, 25 bp, Homo sapien
cccagatgctttgaagagctgctca

SEQ ID NO: 3928047 - DNA, 25 bp, Homo sapien
gggctcccctcatgttcatcttggg

SEQ ID NO: 3928048 - DNA, 25 bp, Homo sapien
tgtgtcctgggtgcgtttctctctg

SEQ ID NO: 3928049 - DNA, 25 bp, Homo sapien
ctggtttccggtgatttcttgcaca

SEQ ID NO: 3928050 - DNA, 25 bp, Homo sapien
cttctgatcggggtttcggtgctcc

SEQ ID NO: 3928051 - DNA, 25 bp, Homo sapien
ctgctcttctgatcggggtttcggt

SEQ ID NO: 3928052 - DNA, 25 bp, Homo sapien
gaactggtttccggtgatttcttgc

SEQ ID NO: 3928053 - DNA, 25 bp, Homo sapien
actgaggctggagcgtgcgacctca

SEQ ID NO: 3928054 - DNA, 25 bp, Homo sapien
cagggcgacggcctcttgattgggc

SEQ ID NO: 3928055 - DNA, 25 bp, Homo sapien
gggctctcgtggctgccaaatgcag

SEQ ID NO: 3928056 - DNA, 25 bp, Homo sapien
aggcagactctgagcacggccaggt

SEQ ID NO: 3928057 - DNA, 25 bp, Homo sapien
gcttgtgcgcacacctggggacatg

SEQ ID NO: 3928058 - DNA, 25 bp, Homo sapien
agccccgcgccgggaagaaagctgc

SEQ ID NO: 3928059 - DNA, 25 bp, Homo sapien
gcggccactgagcggcctggcctca

SEQ ID NO: 3928060 - DNA, 25 bp, Homo sapien
tgggaaggtcgctcttgcggccact

SEQ ID NO: 3928061 - DNA, 25 bp, Homo sapien
cgctgcccactgcgctaagagggcc

SEQ ID NO: 3928062 - DNA, 25 bp, Homo sapien
gacgcgctgcccactgcgctaagag

SEQ ID NO: 3928063 - DNA, 25 bp, Homo sapien
cgcgctgcccactgcgctaagaggg

SEQ ID NO: 3928064 - DNA, 25 bp, Homo sapien
attatgagactgacgcgctgcccac

SEQ ID NO: 3928065 - DNA, 25 bp, Homo sapien
gagtgctttgctgggttacatccga

SEQ ID NO: 3928066 - DNA, 25 bp, Homo sapien
tttgcccatagttcagagtgctttg

SEQ ID NO: 3928067 - DNA, 25 bp, Homo sapien
ttgagggacacacctactctttgcc

SEQ ID NO: 3928068 - DNA, 25 bp, Homo sapien
gagcactttgctgggtgacatccgc

SEQ ID NO: 3928069 - DNA, 25 bp, Homo sapien
ttcatggctcggagttttccctggg

SEQ ID NO: 3928070 - DNA, 25 bp, Homo sapien
ggtgtttgtatagctgagactgcca

SEQ ID NO: 3928071 - DNA, 25 bp, Homo sapien
tatatatctgggcttcaccaggctg

SEQ ID NO: 3928072 - DNA, 25 bp, Homo sapien
gccatataggcctgctttctagtct

SEQ ID NO: 3928073 - DNA, 25 bp, Homo sapien
tggttgtgtggccacgtctggtgat

SEQ ID NO: 3928074 - DNA, 25 bp, Homo sapien
tgtggccacgtctggtgattgattg

SEQ ID NO: 3928075 - DNA, 25 bp, Homo sapien
gccacgtctggtgattgattgacag

SEQ ID NO: 3928076 - DNA, 25 bp, Homo sapien
ttgtgtggccacgtctggtgattga

SEQ ID NO: 3928077 - DNA, 25 bp, Homo sapien
ccaccagctaaagtgcctggagttt

SEQ ID NO: 3928078 - DNA, 25 bp, Homo sapien
aaaccaccagctaaagtgcctggag

SEQ ID NO: 3928079 - DNA, 25 bp, Homo sapien
aaaaccaccagctaaagtgcctgga

SEQ ID NO: 3928080 - DNA, 25 bp, Homo sapien
aaccaccagctaaagtgcctggagt

SEQ ID NO: 3928081 - DNA, 25 bp, Homo sapien
tttgacgacagctacccatagcctc

SEQ ID NO: 3928082 - DNA, 25 bp, Homo sapien
caccagccatttgacgacagctacc

SEQ ID NO: 3928083 - DNA, 25 bp, Homo sapien
tacccatagcctccgggctgggaca

SEQ ID NO: 3928084 - DNA, 25 bp, Homo sapien
gctacccatagcctccgggctggga

SEQ ID NO: 3928085 - DNA, 25 bp, Homo sapien
gaggcggaaagttgccggcgggctc

SEQ ID NO: 3928086 - DNA, 25 bp, Homo sapien
gttgccggcgggctcctgagagtga

SEQ ID NO: 3928087 - DNA, 25 bp, Homo sapien
cattgtagagttgctgtcgaggact

SEQ ID NO: 3928088 - DNA, 25 bp, Homo sapien
tgaaatcctgctgcgaggcccacat

SEQ ID NO: 3928089 - DNA, 25 bp, Homo sapien
cccagccttcccagttgatggacag

SEQ ID NO: 3928090 - DNA, 25 bp, Homo sapien
tcccgcagggtccacagtttctttg

SEQ ID NO: 3928091 - DNA, 25 bp, Homo sapien
tcccagttgatggacagcctctgca

SEQ ID NO: 3928092 - DNA, 25 bp, Homo sapien
cagtggcaggatcaaggctcggact

SEQ ID NO: 3928093 - DNA, 25 bp, Homo sapien
tgtcacgtggcacgggaccttggta

SEQ ID NO: 3928094 - DNA, 25 bp, Homo sapien
tgtccgaaagcttgtcacgtggcac

SEQ ID NO: 3928095 - DNA, 25 bp, Homo sapien
aggagtgctgccttgagtattgcaa

SEQ ID NO: 3928096 - DNA, 25 bp, Homo sapien
ggagccattcctgtccgaaagcttg

SEQ ID NO: 3928097 - DNA, 25 bp, Homo sapien
gtttgctgtaagtctgctctacgtt

SEQ ID NO: 3928098 - DNA, 25 bp, Homo sapien
ttgctgtaagtctgctctacgttca

SEQ ID NO: 3928099 - DNA, 25 bp, Homo sapien
gctgtaagtctgctctacgttcaca

SEQ ID NO: 3928100 - DNA, 25 bp, Homo sapien
gtaagtctgctctacgttcacagga

SEQ ID NO: 3928101 - DNA, 25 bp, Homo sapien
gaaaagccttccatgttaatgccca

SEQ ID NO: 3928102 - DNA, 25 bp, Homo sapien
tccagctcagtcagcatcagagtgt

SEQ ID NO: 3928103 - DNA, 25 bp, Homo sapien
tttaattcggcatcagagaagccac

SEQ ID NO: 3928104 - DNA, 25 bp, Homo sapien
cctccaagagggcatgaatatggca

SEQ ID NO: 3928105 - DNA, 25 bp, Homo sapien
gcttcctaatttgcgtgactttgag

SEQ ID NO: 3928106 - DNA, 25 bp, Homo sapien
ttagaggagacttttctgaggtcca

SEQ ID NO: 3928107 - DNA, 25 bp, Homo sapien
tcacatagtgtggaggatacagaat

SEQ ID NO: 3928108 - DNA, 25 bp, Homo sapien
cacagatagaagtgcttaaaagcac

SEQ ID NO: 3928109 - DNA, 25 bp, Homo sapien
tggaactggtatgcactgttgatcc

SEQ ID NO: 3928110 - DNA, 25 bp, Homo sapien
caaatgccaagccttttgtaggcct

SEQ ID NO: 3928111 - DNA, 25 bp, Homo sapien
tatataggactttgcttggaactgg

SEQ ID NO: 3928112 - DNA, 25 bp, Homo sapien
tactgagtgagaaccccagagctgt

SEQ ID NO: 3928113 - DNA, 25 bp, Homo sapien
tcagggacttcacggatcccctgaa

SEQ ID NO: 3928114 - DNA, 25 bp, Homo sapien
cggaatgtctcattgtgcttgtgaa

SEQ ID NO: 3928115 - DNA, 25 bp, Homo sapien
ggatgcagactttaggtctctgaga

SEQ ID NO: 3928116 - DNA, 25 bp, Homo sapien
atgggacggaatgtctcattgtgct

SEQ ID NO: 3928117 - DNA, 25 bp, Homo sapien
agctttcaaagtttaggatgcagac

SEQ ID NO: 3928118 - DNA, 25 bp, Homo sapien
atgtagagaagaggaatagcaggac

SEQ ID NO: 3928119 - DNA, 25 bp, Homo sapien
ctgtggtggggatgtagagaagagg

SEQ ID NO: 3928120 - DNA, 25 bp, Homo sapien
ggatgtagagaagaggaatagcagg

SEQ ID NO: 3928121 - DNA, 25 bp, Homo sapien
ggggatgtagagaagaggaatagca

SEQ ID NO: 3928122 - DNA, 25 bp, Homo sapien
ggtggcttgcctcacacttgtctct

SEQ ID NO: 3928123 - DNA, 25 bp, Homo sapien
tggtcttctgcacactgagggtctc

SEQ ID NO: 3928124 - DNA, 25 bp, Homo sapien
acagatcattcccttcttgggcagc

SEQ ID NO: 3928125 - DNA, 25 bp, Homo sapien
gagcacagtcgcagaggattggact

SEQ ID NO: 3928126 - DNA, 25 bp, Homo sapien
agccgacagggatgcggccacagct

SEQ ID NO: 3928127 - DNA, 25 bp, Homo sapien
gtcaccgtgggccagacccgagcta

SEQ ID NO: 3928128 - DNA, 25 bp, Homo sapien
agacccgagctagccgacagggatg

SEQ ID NO: 3928129 - DNA, 25 bp, Homo sapien
tggccgggcgtgaccaccaccgagg

SEQ ID NO: 3928130 - DNA, 25 bp, Homo sapien
ccagtgcagcagcgttggatggatc

SEQ ID NO: 3928131 - DNA, 25 bp, Homo sapien
gtgcagcagcgttggatggatcaga

SEQ ID NO: 3928132 - DNA, 25 bp, Homo sapien
tgcagcagcgttggatggatcagag

SEQ ID NO: 3928133 - DNA, 25 bp, Homo sapien
cagtgcagcagcgttggatggatca

SEQ ID NO: 3928134 - DNA, 25 bp, Homo sapien
gctggagcctttggaccattgtcaa

SEQ ID NO: 3928135 - DNA, 25 bp, Homo sapien
tgacaagagcaacgtaatccccagc

SEQ ID NO: 3928136 - DNA, 25 bp, Homo sapien
gaacagcatttttagcatgtagggc

SEQ ID NO: 3928137 - DNA, 25 bp, Homo sapien
gcataagacatatcctacccttggg

SEQ ID NO: 3928138 - DNA, 25 bp, Homo sapien
gagctgtcatgtcccttgctagaga

SEQ ID NO: 3928139 - DNA, 25 bp, Homo sapien
cactttgccttaaagaatgctggga

SEQ ID NO: 3928140 - DNA, 25 bp, Homo sapien
gggctgacagacaagaactgatctc

SEQ ID NO: 3928141 - DNA, 25 bp, Homo sapien
gacctaccatagagcttttgaaact

SEQ ID NO: 3928142 - DNA, 25 bp, Homo sapien
tatcatcagaaagtaagccatctgg

SEQ ID NO: 3928143 - DNA, 25 bp, Homo sapien
aactgacactacatggctgcaggcc

SEQ ID NO: 3928144 - DNA, 25 bp, Homo sapien
gaagaagcaggcaaagccatcttta

SEQ ID NO: 3928145 - DNA, 25 bp, Homo sapien
tgagaataagaccttgccctaccct

SEQ ID NO: 3928146 - DNA, 25 bp, Homo sapien
catcatgcattaagtccctgtaggg

SEQ ID NO: 3928147 - DNA, 25 bp, Homo sapien
gaaggccattgtagctaaactaaga

SEQ ID NO: 3928148 - DNA, 25 bp, Homo sapien
gaaacagcaggtatgaaggtcctga

SEQ ID NO: 3928149 - DNA, 25 bp, Homo sapien
caagatgaggctcgcagaaaacagc

SEQ ID NO: 3928150 - DNA, 25 bp, Homo sapien
agtggagtgtttaacagagacacct

SEQ ID NO: 3928151 - DNA, 25 bp, Homo sapien
tacggtgcgagtggagtgtttaaca

SEQ ID NO: 3928152 - DNA, 25 bp, Homo sapien
tatataggaaaaggagtacggtgcg

SEQ ID NO: 3928153 - DNA, 25 bp, Homo sapien
taagtggtatataggaaaaggagta

SEQ ID NO: 3928154 - DNA, 25 bp, Homo sapien
ctctgttctcgacgccgcccaaacc

SEQ ID NO: 3928155 - DNA, 25 bp, Homo sapien
ctggatggaagggacgcctctgttc

SEQ ID NO: 3928156 - DNA, 25 bp, Homo sapien
cggctggatggaagggacgcctctg

SEQ ID NO: 3928157 - DNA, 25 bp, Homo sapien
ggatggaagggacgcctctgttctc

SEQ ID NO: 3928158 - DNA, 25 bp, Homo sapien
actgcacctctagagaaggctgtcg

SEQ ID NO: 3928159 - DNA, 25 bp, Homo sapien
tgtttttcctgaggtgagtgttggg

SEQ ID NO: 3928160 - DNA, 25 bp, Homo sapien
acctctagagaaggctgtcggcttc

SEQ ID NO: 3928161 - DNA, 25 bp, Homo sapien
cttgctaggctcaggcactgcacct

SEQ ID NO: 3928162 - DNA, 25 bp, Homo sapien
tgcccatctcagtctgacattctcc

SEQ ID NO: 3928163 - DNA, 25 bp, Homo sapien
gcccatctcagtctgacattctcca

SEQ ID NO: 3928164 - DNA, 25 bp, Homo sapien
cccatctcagtctgacattctccat

SEQ ID NO: 3928165 - DNA, 25 bp, Homo sapien
catagtaggtacaccagatggctgc

SEQ ID NO: 3928166 - DNA, 25 bp, Homo sapien
tagtgggagtgcaccaggaaagaca

SEQ ID NO: 3928167 - DNA, 25 bp, Homo sapien
tctaggaaagcggagaacaccgtga

SEQ ID NO: 3928168 - DNA, 25 bp, Homo sapien
gtgctccctaacacggaatctggcg

SEQ ID NO: 3928169 - DNA, 25 bp, Homo sapien
gatcctggagtagacctttctccca

SEQ ID NO: 3928170 - DNA, 25 bp, Homo sapien
tttctcccaactttctatactgtct

SEQ ID NO: 3928171 - DNA, 25 bp, Homo sapien
cttgatcctggagtagacctttctc

SEQ ID NO: 3928172 - DNA, 25 bp, Homo sapien
ccaactttctatactgtcttacaga

SEQ ID NO: 3928173 - DNA, 25 bp, Homo sapien
ggcattacaggaaaatgcaatccta

SEQ ID NO: 3928174 - DNA, 25 bp, Homo sapien
caaagtgtggtccaggaaccattgg

SEQ ID NO: 3928175 - DNA, 25 bp, Homo sapien
cctaaattattttcagatccatagt

SEQ ID NO: 3928176 - DNA, 25 bp, Homo sapien
aggtcacattgctaagacgcggcat

SEQ ID NO: 3928177 - DNA, 25 bp, Homo sapien
taatagtcatctagtttgttgcccg

SEQ ID NO: 3928178 - DNA, 25 bp, Homo sapien
tgcctttgatactctcccttgggtc

SEQ ID NO: 3928179 - DNA, 25 bp, Homo sapien
cttaaagtctagattgatgcgagga

SEQ ID NO: 3928180 - DNA, 25 bp, Homo sapien
tgttgcccgttgtgaatccatgaat

SEQ ID NO: 3928181 - DNA, 25 bp, Homo sapien
gcatcctctggtcactagtatacgg

SEQ ID NO: 3928182 - DNA, 25 bp, Homo sapien
cacctgaaacgtgctagtgcaacca

SEQ ID NO: 3928183 - DNA, 25 bp, Homo sapien
caagcagctgaagaaaggcatcctc

SEQ ID NO: 3928184 - DNA, 25 bp, Homo sapien
caaccatattggatcgtgcagtcaa

SEQ ID NO: 3928185 - DNA, 25 bp, Homo sapien
tgtgaaagtaacagctttaacactg

SEQ ID NO: 3928186 - DNA, 25 bp, Homo sapien
ctttaacactgctgagactcaaggg

SEQ ID NO: 3928187 - DNA, 25 bp, Homo sapien
ttgagaaagcactcgctcccaggaa

SEQ ID NO: 3928188 - DNA, 25 bp, Homo sapien
ttgcaagacgggcttgagaaagcac

SEQ ID NO: 3928189 - DNA, 25 bp, Homo sapien
agaggctcactgctagccgggccat

SEQ ID NO: 3928190 - DNA, 25 bp, Homo sapien
gcttttgagaggctcactgctagcc

SEQ ID NO: 3928191 - DNA, 25 bp, Homo sapien
ttgagaggctcactgctagccgggc

SEQ ID NO: 3928192 - DNA, 25 bp, Homo sapien
ttttgagaggctcactgctagccgg

SEQ ID NO: 3928193 - DNA, 25 bp, Homo sapien
agtacagaaatttgagctccaaagc

SEQ ID NO: 3928194 - DNA, 25 bp, Homo sapien
tacagaaatttgagctccaaagcca

SEQ ID NO: 3928195 - DNA, 25 bp, Homo sapien
ctgaacgagtcagttggcaccaggg

SEQ ID NO: 3928196 - DNA, 25 bp, Homo sapien
agccaggatctgaacgagtcagttg

SEQ ID NO: 3928197 - DNA, 25 bp, Homo sapien
catccggtataaatagccttttctg

SEQ ID NO: 3928198 - DNA, 25 bp, Homo sapien
tttcaatgatcacactgtccctctc

SEQ ID NO: 3928199 - DNA, 25 bp, Homo sapien
tctcctgagctagagaaaacctaca

SEQ ID NO: 3928200 - DNA, 25 bp, Homo sapien
gctgagaattttcaatgatcacact

SEQ ID NO: 3928201 - DNA, 25 bp, Homo sapien
ctgcccatttctcaacttgccgcac

SEQ ID NO: 3928202 - DNA, 25 bp, Homo sapien
gcccatttctcaacttgccgcacat

SEQ ID NO: 3928203 - DNA, 25 bp, Homo sapien
tgcccatttctcaacttgccgcaca

SEQ ID NO: 3928204 - DNA, 25 bp, Homo sapien
aaacagaaagggtggagttgggctg

SEQ ID NO: 3928205 - DNA, 25 bp, Homo sapien
caaacagaaagggtggagttgggct

SEQ ID NO: 3928206 - DNA, 25 bp, Homo sapien
cagcaggagcttcatttttttaggc

SEQ ID NO: 3928207 - DNA, 25 bp, Homo sapien
gaaaccagaaacagcaggagcttca

SEQ ID NO: 3928208 - DNA, 25 bp, Homo sapien
ggaagaatagagccaagatggccat

SEQ ID NO: 3928209 - DNA, 25 bp, Homo sapien
tgtgccttcatagacagggagctga

SEQ ID NO: 3928210 - DNA, 25 bp, Homo sapien
atgttgtggctgtacatgtggaaga

SEQ ID NO: 3928211 - DNA, 25 bp, Homo sapien
gtgccttcatagacagggagctgat

SEQ ID NO: 3928212 - DNA, 25 bp, Homo sapien
cactgaaagaggctggactgtctcc

SEQ ID NO: 3928213 - DNA, 25 bp, Homo sapien
ttgaaggtcatccacacgtgccagg

SEQ ID NO: 3928214 - DNA, 25 bp, Homo sapien
catcacatagtagggttggtcctcc

SEQ ID NO: 3928215 - DNA, 25 bp, Homo sapien
ttttcatagggcaaagaccagcgcc

SEQ ID NO: 3928216 - DNA, 25 bp, Homo sapien
gaagatccagcaacaggtttctctg

SEQ ID NO: 3928217 - DNA, 25 bp, Homo sapien
acaggtttctctgttcttgttcaga

SEQ ID NO: 3928218 - DNA, 25 bp, Homo sapien
ttagtggatttgctcagggacagtc

SEQ ID NO: 3928219 - DNA, 25 bp, Homo sapien
cagtccaggtagacagaagatccag

SEQ ID NO: 3928220 - DNA, 25 bp, Homo sapien
caaaagtccttctgcttgagcacgt

SEQ ID NO: 3928221 - DNA, 25 bp, Homo sapien
gatactgtgtcgtgcttaataggcc

SEQ ID NO: 3928222 - DNA, 25 bp, Homo sapien
tggtcaagctcataagtaggcatcc

SEQ ID NO: 3928223 - DNA, 25 bp, Homo sapien
gaactccaagggctcagaatttgca

SEQ ID NO: 3928224 - DNA, 25 bp, Homo sapien
gacctcattggatatctcagacttg

SEQ ID NO: 3928225 - DNA, 25 bp, Homo sapien
tggacctcattggatatctcagact

SEQ ID NO: 3928226 - DNA, 25 bp, Homo sapien
tctggacctcattggatatctcaga

SEQ ID NO: 3928227 - DNA, 25 bp, Homo sapien
acctcattggatatctcagacttgg

SEQ ID NO: 3928228 - DNA, 25 bp, Homo sapien
tattttgagaaacatattatggaca

SEQ ID NO: 3928229 - DNA, 25 bp, Homo sapien
gcttgggtctaaatcacataataaa

SEQ ID NO: 3928230 - DNA, 25 bp, Homo sapien
tgaaagtaattcaacagtgtcatga

SEQ ID NO: 3928231 - DNA, 25 bp, Homo sapien
tagcaactgctctcattctatagaa

SEQ ID NO: 3928232 - DNA, 25 bp, Homo sapien
acaccaacatcccaaccctgggcga

SEQ ID NO: 3928233 - DNA, 25 bp, Homo sapien
agccgacaccaacatcccaaccctg

SEQ ID NO: 3928234 - DNA, 25 bp, Homo sapien
cccagccgacaccaacatcccaacc

SEQ ID NO: 3928235 - DNA, 25 bp, Homo sapien
acatcccaaccctgggcgacccgcg

SEQ ID NO: 3928236 - DNA, 25 bp, Homo sapien
ggtcatacttccagattatactgtg

SEQ ID NO: 3928237 - DNA, 25 bp, Homo sapien
tctcccctgagggaatcagttatca

SEQ ID NO: 3928238 - DNA, 25 bp, Homo sapien
tatactgtgcctatgtaagtgtgtg

SEQ ID NO: 3928239 - DNA, 25 bp, Homo sapien
cgatacaaacaaacgcaactgtcct

SEQ ID NO: 3928240 - DNA, 25 bp, Homo sapien
tcttagacttcttaaattcctgatt

SEQ ID NO: 3928241 - DNA, 25 bp, Homo sapien
aataaacaggaagactcagtgattt

SEQ ID NO: 3928242 - DNA, 25 bp, Homo sapien
agaaataaacaggaagactcagtga

SEQ ID NO: 3928243 - DNA, 25 bp, Homo sapien
aaattctacccagcattacagaatt

SEQ ID NO: 3928244 - DNA, 25 bp, Homo sapien
caccgctgccgccaattttccaaaa

SEQ ID NO: 3928245 - DNA, 25 bp, Homo sapien
tcagcaaatccaagacgaatataca

SEQ ID NO: 3928246 - DNA, 25 bp, Homo sapien
acaaaggatgagattagataaagat

SEQ ID NO: 3928247 - DNA, 25 bp, Homo sapien
aaagatttcagtttcccgtatgcca

SEQ ID NO: 3928248 - DNA, 25 bp, Homo sapien
tcttcagcccttcccttagaggagg

SEQ ID NO: 3928249 - DNA, 25 bp, Homo sapien
gaacttcaggtctcaaccctgccag

SEQ ID NO: 3928250 - DNA, 25 bp, Homo sapien
tcaatttgagttcagtgagctcaca

SEQ ID NO: 3928251 - DNA, 25 bp, Homo sapien
cctgccagtcacacccaattaatgt

SEQ ID NO: 3928252 - DNA, 25 bp, Homo sapien
ctagagcaagcaggaatcagagacc

SEQ ID NO: 3928253 - DNA, 25 bp, Homo sapien
ccagcggcatcaggctttcttaaag

SEQ ID NO: 3928254 - DNA, 25 bp, Homo sapien
tcttaaagtgagagcacgcctgtac

SEQ ID NO: 3928255 - DNA, 25 bp, Homo sapien
gaaatactactgtgtaagggccaga

SEQ ID NO: 3928256 - DNA, 25 bp, Homo sapien
catgtcaagggttcaagattgttcc

SEQ ID NO: 3928257 - DNA, 25 bp, Homo sapien
taccagaaagcagttgagacaagaa

SEQ ID NO: 3928258 - DNA, 25 bp, Homo sapien
ttttcttgaaagtaccaggtgaaca

SEQ ID NO: 3928259 - DNA, 25 bp, Homo sapien
gctctgcgctgctagagtgactcac

SEQ ID NO: 3928260 - DNA, 25 bp, Homo sapien
cccttgagataagtgaggattcccc

SEQ ID NO: 3928261 - DNA, 25 bp, Homo sapien
gcaggtacgtccagcagacttcaca

SEQ ID NO: 3928262 - DNA, 25 bp, Homo sapien
tactgtgccataggagtggtaggcc

SEQ ID NO: 3928263 - DNA, 25 bp, Homo sapien
caataatccatcaaacccctgtggg

SEQ ID NO: 3928264 - DNA, 25 bp, Homo sapien
ctgtaaaaaatatatgaacattact

SEQ ID NO: 3928265 - DNA, 25 bp, Homo sapien
aaaaaatatatgaacattacttcag

SEQ ID NO: 3928266 - DNA, 25 bp, Homo sapien
aaatatatgaacattacttcagcag

SEQ ID NO: 3928267 - DNA, 25 bp, Homo sapien
ttacttcagcagaggaaggtctcaa

SEQ ID NO: 3928268 - DNA, 25 bp, Homo sapien
tgtattcaaccccactggaggcttg

SEQ ID NO: 3928269 - DNA, 25 bp, Homo sapien
tattcaaccccactggaggcttgac

SEQ ID NO: 3928270 - DNA, 25 bp, Homo sapien
tggaggtcttggagtgtgctccctg

SEQ ID NO: 3928271 - DNA, 25 bp, Homo sapien
ctggaggtcttggagtgtgctccct

SEQ ID NO: 3928272 - DNA, 25 bp, Homo sapien
tgtcggagcactttcggctcactgc

SEQ ID NO: 3928273 - DNA, 25 bp, Homo sapien
tctgtcggagcactttcggctcact

SEQ ID NO: 3928274 - DNA, 25 bp, Homo sapien
gctctgtcggagcactttcggctca

SEQ ID NO: 3928275 - DNA, 25 bp, Homo sapien
ctcgctctgtcggagcactttcggc

SEQ ID NO: 3928276 - DNA, 25 bp, Homo sapien
tttggagcattctatgattcttggc

SEQ ID NO: 3928277 - DNA, 25 bp, Homo sapien
ctttggagcattctatgattcttgg

SEQ ID NO: 3928278 - DNA, 25 bp, Homo sapien
ttggagcattctatgattcttggct

SEQ ID NO: 3928279 - DNA, 25 bp, Homo sapien
gaactctgactctaagagccagttt

SEQ ID NO: 3928280 - DNA, 25 bp, Homo sapien
ccaaggagggtggaactctggaact

SEQ ID NO: 3928281 - DNA, 25 bp, Homo sapien
tcccaacgtgggtttcacaatctcc

SEQ ID NO: 3928282 - DNA, 25 bp, Homo sapien
cactgatgttcgctgtgtgccctat

SEQ ID NO: 3928283 - DNA, 25 bp, Homo sapien
ccatagcagattggagtcctgtgta

SEQ ID NO: 3928284 - DNA, 25 bp, Homo sapien
tgcacagtgccctctgaacatcgtt

SEQ ID NO: 3928285 - DNA, 25 bp, Homo sapien
tgtcatagcacccatggatgaagtc

SEQ ID NO: 3928286 - DNA, 25 bp, Homo sapien
tacatctgaaacatagccatagcag

SEQ ID NO: 3928287 - DNA, 25 bp, Homo sapien
ctagatttggacaaaggagggcttc

SEQ ID NO: 3928288 - DNA, 25 bp, Homo sapien
cacacagctaacccctttcaaacct

SEQ ID NO: 3928289 - DNA, 25 bp, Homo sapien
cctagatttggacaaaggagggctt

SEQ ID NO: 3928290 - DNA, 25 bp, Homo sapien
ggagaatactcattctggagccctg

SEQ ID NO: 3928291 - DNA, 25 bp, Homo sapien
agtggagaatactcattctggagcc

SEQ ID NO: 3928292 - DNA, 25 bp, Homo sapien
tccctcgagtggagaatactcattc

SEQ ID NO: 3928293 - DNA, 25 bp, Homo sapien
cctcgagtggagaatactcattctg

SEQ ID NO: 3928294 - DNA, 25 bp, Homo sapien
gctagtccgggagctcacctgagaa

SEQ ID NO: 3928295 - DNA, 25 bp, Homo sapien
tccgggagctcacctgagaacgggc

SEQ ID NO: 3928296 - DNA, 25 bp, Homo sapien
cgcatgcgcgctagtccgggagctc

SEQ ID NO: 3928297 - DNA, 25 bp, Homo sapien
gagctcacctgagaacgggcgccct

SEQ ID NO: 3928298 - DNA, 25 bp, Homo sapien
tgagggcaacaaccaacaagtttct

SEQ ID NO: 3928299 - DNA, 25 bp, Homo sapien
cctgagggcaacaaccaacaagttt

SEQ ID NO: 3928300 - DNA, 25 bp, Homo sapien
ctgagggcaacaaccaacaagtttc

SEQ ID NO: 3928301 - DNA, 25 bp, Homo sapien
agggcaacaaccaacaagtttcttg

SEQ ID NO: 3928302 - DNA, 25 bp, Homo sapien
tcggtcccgcggtcgatcgtgggtg

SEQ ID NO: 3928303 - DNA, 25 bp, Homo sapien
ctgcttcgcttcctgcgcgggtccc

SEQ ID NO: 3928304 - DNA, 25 bp, Homo sapien
cgcgagcccccgacggatcttccat

SEQ ID NO: 3928305 - DNA, 25 bp, Homo sapien
ccttcgccggttcccgtcgctgctt

SEQ ID NO: 3928306 - DNA, 25 bp, Homo sapien
cgcgagggcccgcgtccctgtgtgt

SEQ ID NO: 3928307 - DNA, 25 bp, Homo sapien
cgagggcccgcgtccctgtgtgtgt

SEQ ID NO: 3928308 - DNA, 25 bp, Homo sapien
ctgcgcgagggcccgcgtccctgtg

SEQ ID NO: 3928309 - DNA, 25 bp, Homo sapien
agggcccgcgtccctgtgtgtgtcc

SEQ ID NO: 3928310 - DNA, 25 bp, Homo sapien
gctccgtcccgcgtccggctttggc

SEQ ID NO: 3928311 - DNA, 25 bp, Homo sapien
tccgtcccgcgtccggctttggcgc

SEQ ID NO: 3928312 - DNA, 25 bp, Homo sapien
cggctgcgtcccaggtcagtccccg

SEQ ID NO: 3928313 - DNA, 25 bp, Homo sapien
ggaggcgcggctgcgtcccaggtca

SEQ ID NO: 3928314 - DNA, 25 bp, Homo sapien
gccactgctcacaggggtggttttt

SEQ ID NO: 3928315 - DNA, 25 bp, Homo sapien
ttgttagttgggttcaggccacgag

SEQ ID NO: 3928316 - DNA, 25 bp, Homo sapien
ttagttgggttcaggccacgagaag

SEQ ID NO: 3928317 - DNA, 25 bp, Homo sapien
tttgctttgttagttgggttcaggc

SEQ ID NO: 3928318 - DNA, 25 bp, Homo sapien
ttcatcgggcttcccaagtgggcgg

SEQ ID NO: 3928319 - DNA, 25 bp, Homo sapien
caaggcgcagtcctgtgaccatgcg

SEQ ID NO: 3928320 - DNA, 25 bp, Homo sapien
acaagggtctgaaccccaaggcgca

SEQ ID NO: 3928321 - DNA, 25 bp, Homo sapien
gctctggaacacgggacaagggtct

SEQ ID NO: 3928322 - DNA, 25 bp, Homo sapien
gagctgcagaccacggattttgaca

SEQ ID NO: 3928323 - DNA, 25 bp, Homo sapien
actctccaggagcatgggagctgca

SEQ ID NO: 3928324 - DNA, 25 bp, Homo sapien
tggaaagtgttgagtcagcaataac

SEQ ID NO: 3928325 - DNA, 25 bp, Homo sapien
gggagctgcagaccacggattttga

SEQ ID NO: 3928326 - DNA, 25 bp, Homo sapien
gacagatgctgtgattggtaccgct

SEQ ID NO: 3928327 - DNA, 25 bp, Homo sapien
aactcttgactcctcgtgctgggcc

SEQ ID NO: 3928328 - DNA, 25 bp, Homo sapien
tgggagctgtctcaccaggtagctg

SEQ ID NO: 3928329 - DNA, 25 bp, Homo sapien
gagaattctctggtttagtggcccc

SEQ ID NO: 3928330 - DNA, 25 bp, Homo sapien
cctgggggtcgagggcagatatctc

SEQ ID NO: 3928331 - DNA, 25 bp, Homo sapien
gggtcgagggcagatatctctccga

SEQ ID NO: 3928332 - DNA, 25 bp, Homo sapien
cgagggcagatatctctccgaaggg

SEQ ID NO: 3928333 - DNA, 25 bp, Homo sapien
gcagatatctctccgaagggggttc

SEQ ID NO: 3928334 - DNA, 25 bp, Homo sapien
aggagtccttccgcctctgactggt

SEQ ID NO: 3928335 - DNA, 25 bp, Homo sapien
ctctcccagtgcacaagtatttgca

SEQ ID NO: 3928336 - DNA, 25 bp, Homo sapien
gagtccttccgcctctgactggtaa

SEQ ID NO: 3928337 - DNA, 25 bp, Homo sapien
ctcccagtgcacaagtatttgcatt

SEQ ID NO: 3928338 - DNA, 25 bp, Homo sapien
tgaaaatgctaggaacccacaaggg

SEQ ID NO: 3928339 - DNA, 25 bp, Homo sapien
ttttgcttcaccagctcagaccatc

SEQ ID NO: 3928340 - DNA, 25 bp, Homo sapien
tccagaaccaccagtgacagtaaat

SEQ ID NO: 3928341 - DNA, 25 bp, Homo sapien
gatcaaacagcctgcaaaacggctc

SEQ ID NO: 3928342 - DNA, 25 bp, Homo sapien
tggcagctcatagccagttccacct

SEQ ID NO: 3928343 - DNA, 25 bp, Homo sapien
agaagcacaggaaatctagcagcac

SEQ ID NO: 3928344 - DNA, 25 bp, Homo sapien
gagtctgaaagctgcaaacatggct

SEQ ID NO: 3928345 - DNA, 25 bp, Homo sapien
agctgcctcgccagaagatccctcc

SEQ ID NO: 3928346 - DNA, 25 bp, Homo sapien
cttcattgctggcaaggccaagacc

SEQ ID NO: 3928347 - DNA, 25 bp, Homo sapien
cattgctggcaaggccaagaccgct

SEQ ID NO: 3928348 - DNA, 25 bp, Homo sapien
tggcaaggccaagaccgctagaatg

SEQ ID NO: 3928349 - DNA, 25 bp, Homo sapien
aggccaagaccgctagaatgggaac

SEQ ID NO: 3928350 - DNA, 25 bp, Homo sapien
caaatcatgtgaactataagctctc

SEQ ID NO: 3928351 - DNA, 25 bp, Homo sapien
aatcatgtgaactataagctctcac

SEQ ID NO: 3928352 - DNA, 25 bp, Homo sapien
aaatcatgtgaactataagctctca

SEQ ID NO: 3928353 - DNA, 25 bp, Homo sapien
tcaggccagtgagcaggaacaaagc

SEQ ID NO: 3928354 - DNA, 25 bp, Homo sapien
ggccagtgagcaggaacaaagccat

SEQ ID NO: 3928355 - DNA, 25 bp, Homo sapien
tgatgggagagatcaggccagtgag

SEQ ID NO: 3928356 - DNA, 25 bp, Homo sapien
tgagagagcggcaggaggatgatgg

SEQ ID NO: 3928357 - DNA, 25 bp, Homo sapien
tctcaaaagagcaaagcggtgtgcc

SEQ ID NO: 3928358 - DNA, 25 bp, Homo sapien
caaagcagcgcgattaaaactaggg

SEQ ID NO: 3928359 - DNA, 25 bp, Homo sapien
gcttctggccctgtggaagacccga

SEQ ID NO: 3928360 - DNA, 25 bp, Homo sapien
ccagaaatactatggactcagaggg

SEQ ID NO: 3928361 - DNA, 25 bp, Homo sapien
ccaagctggtgatgcccgtgtagcc

SEQ ID NO: 3928362 - DNA, 25 bp, Homo sapien
tatctgctccgtggaaactgcagcc

SEQ ID NO: 3928363 - DNA, 25 bp, Homo sapien
caggccaggatcagcaagttcagga

SEQ ID NO: 3928364 - DNA, 25 bp, Homo sapien
taagcccctccgaactgatagtagt

SEQ ID NO: 3928365 - DNA, 25 bp, Homo sapien
ctggcttctcttttagcttcctaac

SEQ ID NO: 3928366 - DNA, 25 bp, Homo sapien
aaaattcaaacatttctgctggctt

SEQ ID NO: 3928367 - DNA, 25 bp, Homo sapien
tctgctggcttctcttttagcttcc

SEQ ID NO: 3928368 - DNA, 25 bp, Homo sapien
tgctggcttctcttttagcttccta

SEQ ID NO: 3928369 - DNA, 25 bp, Homo sapien
tgaacaccgctccatgcgactggga

SEQ ID NO: 3928370 - DNA, 25 bp, Homo sapien
gccagggtctgttgcatccatgaac

SEQ ID NO: 3928371 - DNA, 25 bp, Homo sapien
ggcagtggctcagactaccttccac

SEQ ID NO: 3928372 - DNA, 25 bp, Homo sapien
aattttgattggtccctcactcaca

SEQ ID NO: 3928373 - DNA, 25 bp, Homo sapien
ctttactgaatgaagaggtgcactc

SEQ ID NO: 3928374 - DNA, 25 bp, Homo sapien
caatggcacatttacaagaggtaca

SEQ ID NO: 3928375 - DNA, 25 bp, Homo sapien
aaacacttattgagctttcagggcc

SEQ ID NO: 3928376 - DNA, 25 bp, Homo sapien
gagtaatctgcttgagacaactgtg

SEQ ID NO: 3928377 - DNA, 25 bp, Homo sapien
ttggaccgagaatatattgtaatgt

SEQ ID NO: 3928378 - DNA, 25 bp, Homo sapien
taaggaccgagaatatattgcaatg

SEQ ID NO: 3928379 - DNA, 25 bp, Homo sapien
tgttccataagtcataacttaagga

SEQ ID NO: 3928380 - DNA, 25 bp, Homo sapien
gcagtaagaacccatgaagttgtct

SEQ ID NO: 3928381 - DNA, 25 bp, Homo sapien
ttattggattcacataaagcaaaga

SEQ ID NO: 3928382 - DNA, 25 bp, Homo sapien
ttttccaatcatatacaagcatgta

SEQ ID NO: 3928383 - DNA, 25 bp, Homo sapien
tcaaatggaactcaccttttaaatg

SEQ ID NO: 3928384 - DNA, 25 bp, Homo sapien
atgtattgtaaagaggacatcaact

SEQ ID NO: 3928385 - DNA, 25 bp, Homo sapien
aaattaatacatgtgcagtcaagcc

SEQ ID NO: 3928386 - DNA, 25 bp, Homo sapien
tatgaagacttagcacagggatgtc

SEQ ID NO: 3928387 - DNA, 25 bp, Homo sapien
tacaaatgaaccgagagcaggacca

SEQ ID NO: 3928388 - DNA, 25 bp, Homo sapien
gaagatcttcttgtccgaggtcagc

SEQ ID NO: 3928389 - DNA, 25 bp, Homo sapien
gatatttggactgaaaggaacccac

SEQ ID NO: 3928390 - DNA, 25 bp, Homo sapien
tccggcaaggacaaagtaggaggcc

SEQ ID NO: 3928391 - DNA, 25 bp, Homo sapien
tctgttctcggtagctacgcagggc

SEQ ID NO: 3928392 - DNA, 25 bp, Homo sapien
tcagtgccctcgaacggtgagtagt

SEQ ID NO: 3928393 - DNA, 25 bp, Homo sapien
aaagctggcactgaatccggcaagg

SEQ ID NO: 3928394 - DNA, 25 bp, Homo sapien
gaaaaccatagttgtctaatgcgga

SEQ ID NO: 3928395 - DNA, 25 bp, Homo sapien
tgcgttcacatttaggttccggaag

SEQ ID NO: 3928396 - DNA, 25 bp, Homo sapien
ctaatgcggagttttaaaagacctg

SEQ ID NO: 3928397 - DNA, 25 bp, Homo sapien
tttgcctcagtccaaagagagcatt

SEQ ID NO: 3928398 - DNA, 25 bp, Homo sapien
tatgagaacagtccagggtaatgag

SEQ ID NO: 3928399 - DNA, 25 bp, Homo sapien
cagggtctaataaaatctactgtcc

SEQ ID NO: 3928400 - DNA, 25 bp, Homo sapien
gacctactctatggagcactgtcag

SEQ ID NO: 3928401 - DNA, 25 bp, Homo sapien
gcctccagtatgcttcagggtctaa

SEQ ID NO: 3928402 - DNA, 25 bp, Homo sapien
caggttccataagaattcactacta

SEQ ID NO: 3928403 - DNA, 25 bp, Homo sapien
ccataacgagaatgtatatttctag

SEQ ID NO: 3928404 - DNA, 25 bp, Homo sapien
tataagaataggtataaaacacgta

SEQ ID NO: 3928405 - DNA, 25 bp, Homo sapien
caattagcaaaaagaccataacgag

SEQ ID NO: 3928406 - DNA, 25 bp, Homo sapien
taatctagatcttttccgcttaggt

SEQ ID NO: 3928407 - DNA, 25 bp, Homo sapien
gcttaggtaggaggcttagcttcga

SEQ ID NO: 3928408 - DNA, 25 bp, Homo sapien
tagcgatgtagatctccagttgatt

SEQ ID NO: 3928409 - DNA, 25 bp, Homo sapien
cacaacttttaacctagcgatgtag

SEQ ID NO: 3928410 - DNA, 25 bp, Homo sapien
gagcagctggctgttatcgataaat

SEQ ID NO: 3928411 - DNA, 25 bp, Homo sapien
gagacctccataagggagcagctgg

SEQ ID NO: 3928412 - DNA, 25 bp, Homo sapien
caaaagccggtacttggaagccaca

SEQ ID NO: 3928413 - DNA, 25 bp, Homo sapien
taattagtctccaagccattcagtg

SEQ ID NO: 3928414 - DNA, 25 bp, Homo sapien
tcattctctatatgagcatggagtg

SEQ ID NO: 3928415 - DNA, 25 bp, Homo sapien
atcattctctatatgagcatggagt

SEQ ID NO: 3928416 - DNA, 25 bp, Homo sapien
gagtgcggggacttcggctctttca

SEQ ID NO: 3928417 - DNA, 25 bp, Homo sapien
ttcggctctttcaaaagcctgtggg

SEQ ID NO: 3928418 - DNA, 25 bp, Homo sapien
cacctacctggcctataataccatt

SEQ ID NO: 3928419 - DNA, 25 bp, Homo sapien
gaaaagtgtagtttcatgccttaag

SEQ ID NO: 3928420 - DNA, 25 bp, Homo sapien
gccttaagaaagacgagaatactat

SEQ ID NO: 3928421 - DNA, 25 bp, Homo sapien
taatgaagtagcattaaaagatttt

SEQ ID NO: 3928422 - DNA, 25 bp, Homo sapien
gaccaacaatctcctgacggatcag

SEQ ID NO: 3928423 - DNA, 25 bp, Homo sapien
ttaccatccgcctgcactggagagg

SEQ ID NO: 3928424 - DNA, 25 bp, Homo sapien
gcatacctgtcctggtagggcacct

SEQ ID NO: 3928425 - DNA, 25 bp, Homo sapien
taaacttaaaggaggtgatgatctg

SEQ ID NO: 3928426 - DNA, 25 bp, Homo sapien
atacggaatggttcacaaatttgcc

SEQ ID NO: 3928427 - DNA, 25 bp, Homo sapien
ctgtcatccttgctcagggtccatg

SEQ ID NO: 3928428 - DNA, 25 bp, Homo sapien
tgcctgtcatccttgctcagggtcc

SEQ ID NO: 3928429 - DNA, 25 bp, Homo sapien
tacggaatggttcacaaatttgcct

SEQ ID NO: 3928430 - DNA, 25 bp, Homo sapien
gttaaataggctaggacagcctcag

SEQ ID NO: 3928431 - DNA, 25 bp, Homo sapien
caggcacttgtcagtgagtatacaa

SEQ ID NO: 3928432 - DNA, 25 bp, Homo sapien
taggtaaacatatggtcatagctgc

SEQ ID NO: 3928433 - DNA, 25 bp, Homo sapien
tctcagaatgaccttaatgacttcc

SEQ ID NO: 3928434 - DNA, 25 bp, Homo sapien
catcttctacctaagagtatttcac

SEQ ID NO: 3928435 - DNA, 25 bp, Homo sapien
gaaacatcttctacctaagagtatt

SEQ ID NO: 3928436 - DNA, 25 bp, Homo sapien
gcagaaacatcttctacctaagagt

SEQ ID NO: 3928437 - DNA, 25 bp, Homo sapien
acatcttctacctaagagtatttca

SEQ ID NO: 3928438 - DNA, 25 bp, Homo sapien
ccggaggccggctccggagggctcg

SEQ ID NO: 3928439 - DNA, 25 bp, Homo sapien
gctccggagggctcggagggccgcc

SEQ ID NO: 3928440 - DNA, 25 bp, Homo sapien
cgccgcgctcggggcccggaggccg

SEQ ID NO: 3928441 - DNA, 25 bp, Homo sapien
gccggctccggagggctcggagggc

SEQ ID NO: 3928442 - DNA, 25 bp, Homo sapien
ggcgcctcggtaccccgctgctgcc

SEQ ID NO: 3928443 - DNA, 25 bp, Homo sapien
gcctcggcgcctcggtaccccgctg

SEQ ID NO: 3928444 - DNA, 25 bp, Homo sapien
tcggcgcctcggtaccccgctgctg

SEQ ID NO: 3928445 - DNA, 25 bp, Homo sapien
ctcggcgcctcggtaccccgctgct

SEQ ID NO: 3928446 - DNA, 25 bp, Homo sapien
tgaggaggcggatggaccagcgagc

SEQ ID NO: 3928447 - DNA, 25 bp, Homo sapien
aggtgaggaggcggatggaccagcg

SEQ ID NO: 3928448 - DNA, 25 bp, Homo sapien
ctgaaggtgaggaggcggatggacc

SEQ ID NO: 3928449 - DNA, 25 bp, Homo sapien
gcgagcgggcgagcgggcaagcgga

SEQ ID NO: 3928450 - DNA, 25 bp, Homo sapien
ctctgcggtggtgccaggttccgcc

SEQ ID NO: 3928451 - DNA, 25 bp, Homo sapien
actcggcgccggcagctgcttaggt

SEQ ID NO: 3928452 - DNA, 25 bp, Homo sapien
tgcgctctagtcctccaagcctagg

SEQ ID NO: 3928453 - DNA, 25 bp, Homo sapien
aagcagcaaatacccctccttgcgc

SEQ ID NO: 3928454 - DNA, 25 bp, Homo sapien
ttttgtaatgatgaacctgcagtga

SEQ ID NO: 3928455 - DNA, 25 bp, Homo sapien
ggatcactggagtgcgtactagata

SEQ ID NO: 3928456 - DNA, 25 bp, Homo sapien
cctattggtagaataacaagggatt

SEQ ID NO: 3928457 - DNA, 25 bp, Homo sapien
tcccaacatctgataggcatgagct

SEQ ID NO: 3928458 - DNA, 25 bp, Homo sapien
tgtgcgtgtgtacataccagagagg

SEQ ID NO: 3928459 - DNA, 25 bp, Homo sapien
gagagtgtgatagtcccgattgaaa

SEQ ID NO: 3928460 - DNA, 25 bp, Homo sapien
ctgacagtcccttgattgagaaagg

SEQ ID NO: 3928461 - DNA, 25 bp, Homo sapien
cactgcctgtttatttggaaccaaa

SEQ ID NO: 3928462 - DNA, 25 bp, Homo sapien
ttatctagtttatgcagaagtgccc

SEQ ID NO: 3928463 - DNA, 25 bp, Homo sapien
tccaagtgggacagctaatgaagct

SEQ ID NO: 3928464 - DNA, 25 bp, Homo sapien
ttagaattctgctgtgtgtactgtc

SEQ ID NO: 3928465 - DNA, 25 bp, Homo sapien
tcccactgtgttcctataaaggccc

SEQ ID NO: 3928466 - DNA, 25 bp, Homo sapien
cctcaaagaacctgcggttgcgctt

SEQ ID NO: 3928467 - DNA, 25 bp, Homo sapien
taacagaaggaaatgccgaagcagc

SEQ ID NO: 3928468 - DNA, 25 bp, Homo sapien
caagcaatatcagtgagtgggtccc

SEQ ID NO: 3928469 - DNA, 25 bp, Homo sapien
ttgaccagctttggctcgggagagt

SEQ ID NO: 3928470 - DNA, 25 bp, Homo sapien
gctgcttgtagaactggaagtgaat

SEQ ID NO: 3928471 - DNA, 25 bp, Homo sapien
tcgtttctattctagtttctgcccc

SEQ ID NO: 3928472 - DNA, 25 bp, Homo sapien
caagagtcgtttctattctagtttc

SEQ ID NO: 3928473 - DNA, 25 bp, Homo sapien
tatttccctcttcaagagtcgtttc

SEQ ID NO: 3928474 - DNA, 25 bp, Homo sapien
tttcacatgcacttgtacttcatta

SEQ ID NO: 3928475 - DNA, 25 bp, Homo sapien
gagtcaagaacaggataatatctcc

SEQ ID NO: 3928476 - DNA, 25 bp, Homo sapien
gtgtggactagtgcatatttcagac

SEQ ID NO: 3928477 - DNA, 25 bp, Homo sapien
ctgggtaaatggttgactgagtcaa

SEQ ID NO: 3928478 - DNA, 25 bp, Homo sapien
ttttcagtaatgtaagtgtggacta

SEQ ID NO: 3928479 - DNA, 25 bp, Homo sapien
cagggagtcaactcacgtgctgtga

SEQ ID NO: 3928480 - DNA, 25 bp, Homo sapien
tttttacaaataccacagggagtca

SEQ ID NO: 3928481 - DNA, 25 bp, Homo sapien
taccattaagtgaagttgccagaag

SEQ ID NO: 3928482 - DNA, 25 bp, Homo sapien
tcatgatcaaagaaccgaacagtgg

SEQ ID NO: 3928483 - DNA, 25 bp, Homo sapien
gaacccagactttccagcacgtgaa

SEQ ID NO: 3928484 - DNA, 25 bp, Homo sapien
taacacctgttattccaactgcgcc

SEQ ID NO: 3928485 - DNA, 25 bp, Homo sapien
tgctgggagacatcaaccttacagg

SEQ ID NO: 3928486 - DNA, 25 bp, Homo sapien
aggcagtctggagctatttaatacc

SEQ ID NO: 3928487 - DNA, 25 bp, Homo sapien
tacacatggttaggactggtctcag

SEQ ID NO: 3928488 - DNA, 25 bp, Homo sapien
gcactctgctttacggaaggatgta

SEQ ID NO: 3928489 - DNA, 25 bp, Homo sapien
taggaatgggagattgaccaaggtt

SEQ ID NO: 3928490 - DNA, 25 bp, Homo sapien
ggagtgacctgataaaaccctgatc

SEQ ID NO: 3928491 - DNA, 25 bp, Homo sapien
tacaggcacctaacacccatgtgcc

SEQ ID NO: 3928492 - DNA, 25 bp, Homo sapien
ctacaggcacctaacacccatgtgc

SEQ ID NO: 3928493 - DNA, 25 bp, Homo sapien
acaggcacctaacacccatgtgccc

SEQ ID NO: 3928494 - DNA, 25 bp, Homo sapien
tgtaggagatccatcgaaccactcg

SEQ ID NO: 3928495 - DNA, 25 bp, Homo sapien
tttcaacctacctgcgagtatactg

SEQ ID NO: 3928496 - DNA, 25 bp, Homo sapien
gaaccactcgctcagggtaatgttt

SEQ ID NO: 3928497 - DNA, 25 bp, Homo sapien
ccctgcggacgtcagcgtctaataa

SEQ ID NO: 3928498 - DNA, 25 bp, Homo sapien
tcagcgttcttgtgtcttgtacccg

SEQ ID NO: 3928499 - DNA, 25 bp, Homo sapien
aaatgcccagttaatcgctgcctgc

SEQ ID NO: 3928500 - DNA, 25 bp, Homo sapien
caggtctgtcagataactcccagca

SEQ ID NO: 3928501 - DNA, 25 bp, Homo sapien
tcttctctgagccacgtatcagcgt

SEQ ID NO: 3928502 - DNA, 25 bp, Homo sapien
cccggagctgctggtttcattcgag

SEQ ID NO: 3928503 - DNA, 25 bp, Homo sapien
ggcgctcgaccggaagcttcctttc

SEQ ID NO: 3928504 - DNA, 25 bp, Homo sapien
ttcattcgaggtttcgggccggtga

SEQ ID NO: 3928505 - DNA, 25 bp, Homo sapien
tcccggcgctgagagcatattgctg

SEQ ID NO: 3928506 - DNA, 25 bp, Homo sapien
gctgctgatactgaccgaatcattt

SEQ ID NO: 3928507 - DNA, 25 bp, Homo sapien
gctctaaaggtcacatgggcttcag

SEQ ID NO: 3928508 - DNA, 25 bp, Homo sapien
catttaagaaactcactgtgccgga

SEQ ID NO: 3928509 - DNA, 25 bp, Homo sapien
tgtatttcttacacggctgtgcccc

SEQ ID NO: 3928510 - DNA, 25 bp, Homo sapien
tgttgttccctgagttggcctccag

SEQ ID NO: 3928511 - DNA, 25 bp, Homo sapien
ttaacacttcttggacgtcccaggc

SEQ ID NO: 3928512 - DNA, 25 bp, Homo sapien
tggcacatacttgggtcctagacca

SEQ ID NO: 3928513 - DNA, 25 bp, Homo sapien
gaagatctttaggtccagggccagc

SEQ ID NO: 3928514 - DNA, 25 bp, Homo sapien
gcactgtacccggtctgatctttgc

SEQ ID NO: 3928515 - DNA, 25 bp, Homo sapien
tgtacccggtctgatctttgcaatg

SEQ ID NO: 3928516 - DNA, 25 bp, Homo sapien
tacccggtctgatctttgcaatgtt

SEQ ID NO: 3928517 - DNA, 25 bp, Homo sapien
atgaggcactgtacccggtctgatc

SEQ ID NO: 3928518 - DNA, 25 bp, Homo sapien
tgtcttaggacaagagagattttcc

SEQ ID NO: 3928519 - DNA, 25 bp, Homo sapien
tagtgcaggcatgaagcaaaaagtc

SEQ ID NO: 3928520 - DNA, 25 bp, Homo sapien
cacatcattccatgtagggagctac

SEQ ID NO: 3928521 - DNA, 25 bp, Homo sapien
gggtgaattaagcttccagaagatg

SEQ ID NO: 3928522 - DNA, 25 bp, Homo sapien
gctctggaagaattgtaaagcaggt

SEQ ID NO: 3928523 - DNA, 25 bp, Homo sapien
catgtccggcccatggtaagtactt

SEQ ID NO: 3928524 - DNA, 25 bp, Homo sapien
catgtggcttctagagtagctctgg

SEQ ID NO: 3928525 - DNA, 25 bp, Homo sapien
gatgggaaaattgacttaaagctga

SEQ ID NO: 3928526 - DNA, 25 bp, Homo sapien
atgttatgtgaccttgccagattcc

SEQ ID NO: 3928527 - DNA, 25 bp, Homo sapien
tagagataggcaattctcaagcttc

SEQ ID NO: 3928528 - DNA, 25 bp, Homo sapien
gcttctgttttagctacttctctga

SEQ ID NO: 3928529 - DNA, 25 bp, Homo sapien
gtaagtgactactatttcctctggg

SEQ ID NO: 3928530 - DNA, 25 bp, Homo sapien
ggatccactcactcgtcccggagcc

SEQ ID NO: 3928531 - DNA, 25 bp, Homo sapien
atccactcactcgtcccggagccgc

SEQ ID NO: 3928532 - DNA, 25 bp, Homo sapien
caggatccactcactcgtcccggag

SEQ ID NO: 3928533 - DNA, 25 bp, Homo sapien
cttcccaggatccactcactcgtcc

SEQ ID NO: 3928534 - DNA, 25 bp, Homo sapien
gctgtagtaagtgtcctcccggctg

SEQ ID NO: 3928535 - DNA, 25 bp, Homo sapien
gcagctgtagtaagtgtcctcccgg

SEQ ID NO: 3928536 - DNA, 25 bp, Homo sapien
gagcagctgtagtaagtgtcctccc

SEQ ID NO: 3928537 - DNA, 25 bp, Homo sapien
ttctgagcagctgtagtaagtgtcc

SEQ ID NO: 3928538 - DNA, 25 bp, Homo sapien
ggttccattcctctaaacatgcctg

SEQ ID NO: 3928539 - DNA, 25 bp, Homo sapien
caaccaggttccagttctttggatc

SEQ ID NO: 3928540 - DNA, 25 bp, Homo sapien
tgaaacaaggaattcaaagtgccgg

SEQ ID NO: 3928541 - DNA, 25 bp, Homo sapien
cagtgcacatgaactttgctgccta

SEQ ID NO: 3928542 - DNA, 25 bp, Homo sapien
ttcttttaccaatagctccttctcc

SEQ ID NO: 3928543 - DNA, 25 bp, Homo sapien
tacacttccggttccctagtctcaa

SEQ ID NO: 3928544 - DNA, 25 bp, Homo sapien
tcaatgatcaccttcaatttgcctt

SEQ ID NO: 3928545 - DNA, 25 bp, Homo sapien
cttctcaatgatcaccttcaatttg

SEQ ID NO: 3928546 - DNA, 25 bp, Homo sapien
ttctctgtagcttccctgtacccct

SEQ ID NO: 3928547 - DNA, 25 bp, Homo sapien
gtagcttccctgtacccctctctgc

SEQ ID NO: 3928548 - DNA, 25 bp, Homo sapien
ctggaaggagtcgacttgctccctg

SEQ ID NO: 3928549 - DNA, 25 bp, Homo sapien
tggaaggagtcgacttgctccctgg

SEQ ID NO: 3928550 - DNA, 25 bp, Homo sapien
gacttgatgctaccaggatctccga

SEQ ID NO: 3928551 - DNA, 25 bp, Homo sapien
taaggagacccaatgaactgcagcg

SEQ ID NO: 3928552 - DNA, 25 bp, Homo sapien
taataaatgggcatccgacctggag

SEQ ID NO: 3928553 - DNA, 25 bp, Homo sapien
gatagtcctgagaagctaaagcgcc

SEQ ID NO: 3928554 - DNA, 25 bp, Homo sapien
ttttcccgcattggaacgcccttca

SEQ ID NO: 3928555 - DNA, 25 bp, Homo sapien
cccgcattggaacgcccttcaatgg

SEQ ID NO: 3928556 - DNA, 25 bp, Homo sapien
cattggaacgcccttcaatggacag

SEQ ID NO: 3928557 - DNA, 25 bp, Homo sapien
gaacgcccttcaatggacagcttta

SEQ ID NO: 3928558 - DNA, 25 bp, Homo sapien
gcatctctcacaagaagggttctgg

SEQ ID NO: 3928559 - DNA, 25 bp, Homo sapien
tcactgccaagaaagccattccctg

SEQ ID NO: 3928560 - DNA, 25 bp, Homo sapien
gctactataagctgtggatcatcat

SEQ ID NO: 3928561 - DNA, 25 bp, Homo sapien
gaacaacagatcctgccttgggagg

SEQ ID NO: 3928562 - DNA, 25 bp, Homo sapien
ggtagtacttcactctgaaccctga

SEQ ID NO: 3928563 - DNA, 25 bp, Homo sapien
ccgtgctgctagaagccttgtaggc

SEQ ID NO: 3928564 - DNA, 25 bp, Homo sapien
tgcctagaacccagtcagcctggct

SEQ ID NO: 3928565 - DNA, 25 bp, Homo sapien
aagtcccctgactgagtccctggca

SEQ ID NO: 3928566 - DNA, 25 bp, Homo sapien
tatctggttagacataggtttgccc

SEQ ID NO: 3928567 - DNA, 25 bp, Homo sapien
tggaaccccacggtctgagctgatg

SEQ ID NO: 3928568 - DNA, 25 bp, Homo sapien
tgcagctacaaatgaggcccaggtc

SEQ ID NO: 3928569 - DNA, 25 bp, Homo sapien
agagctgcgtggacaataccctgag

SEQ ID NO: 3928570 - DNA, 25 bp, Homo sapien
gcaacttcccactaaaatactcgct

SEQ ID NO: 3928571 - DNA, 25 bp, Homo sapien
aaaatactcgctaaaaactgctctc

SEQ ID NO: 3928572 - DNA, 25 bp, Homo sapien
tcatgtctcctgcaaactcaggaaa

SEQ ID NO: 3928573 - DNA, 25 bp, Homo sapien
ttggcaacttcccactaaaatactc

SEQ ID NO: 3928574 - DNA, 25 bp, Homo sapien
tatagaaggaccagcccagattggc

SEQ ID NO: 3928575 - DNA, 25 bp, Homo sapien
catttttatacagcgccagacagtc

SEQ ID NO: 3928576 - DNA, 25 bp, Homo sapien
tgagttcgcaatctaccagggaggg

SEQ ID NO: 3928577 - DNA, 25 bp, Homo sapien
tattgcataatgtgggagaccttcc

SEQ ID NO: 3928578 - DNA, 25 bp, Homo sapien
catagtccacaagttaaatgcaggt

SEQ ID NO: 3928579 - DNA, 25 bp, Homo sapien
aaatgcaggtatccataagaagagc

SEQ ID NO: 3928580 - DNA, 25 bp, Homo sapien
tagatattgtgtttacatagtccac

SEQ ID NO: 3928581 - DNA, 25 bp, Homo sapien
tgtgtagccaagtacagagacttaa

SEQ ID NO: 3928582 - DNA, 25 bp, Homo sapien
gtcttttgatcatatactggccctg

SEQ ID NO: 3928583 - DNA, 25 bp, Homo sapien
gatcagagccgttctcacacagaga

SEQ ID NO: 3928584 - DNA, 25 bp, Homo sapien
ctcatggtatgaaggaaacactaac

SEQ ID NO: 3928585 - DNA, 25 bp, Homo sapien
taactcatgatgtggtatcagaacc

SEQ ID NO: 3928586 - DNA, 25 bp, Homo sapien
tccaagagcctgcttagatttgagg

SEQ ID NO: 3928587 - DNA, 25 bp, Homo sapien
tgatggtgtgattgtagtaaggcca

SEQ ID NO: 3928588 - DNA, 25 bp, Homo sapien
cgtagcatatatccataagctgcat

SEQ ID NO: 3928589 - DNA, 25 bp, Homo sapien
tggccaatgtctatgcccacgtagc

SEQ ID NO: 3928590 - DNA, 25 bp, Homo sapien
ttgttttcaacagtgtcacatgcat

SEQ ID NO: 3928591 - DNA, 25 bp, Homo sapien
tgtgttgttttcaacagtgtcacat

SEQ ID NO: 3928592 - DNA, 25 bp, Homo sapien
cttgtgttgttttcaacagtgtcac

SEQ ID NO: 3928593 - DNA, 25 bp, Homo sapien
tgttgttttcaacagtgtcacatgc

SEQ ID NO: 3928594 - DNA, 25 bp, Homo sapien
gaaacatgtcccgtcggaaacagac

SEQ ID NO: 3928595 - DNA, 25 bp, Homo sapien
gaggtagtaacatatccagtcgtga

SEQ ID NO: 3928596 - DNA, 25 bp, Homo sapien
tcactgtgagtatcgggctttgtct

SEQ ID NO: 3928597 - DNA, 25 bp, Homo sapien
ggttagcatcttgcaaggaggtagt

SEQ ID NO: 3928598 - DNA, 25 bp, Homo sapien
tgccaaagtctgtggtgtgccctag

SEQ ID NO: 3928599 - DNA, 25 bp, Homo sapien
tggaggtgggaacgcactctctttt

SEQ ID NO: 3928600 - DNA, 25 bp, Homo sapien
caaagtctgtggtgtgccctagacg

SEQ ID NO: 3928601 - DNA, 25 bp, Homo sapien
tgggaacgcactctcttttcatcaa

SEQ ID NO: 3928602 - DNA, 25 bp, Homo sapien
gtcgagtttgctttgctccgtggga

SEQ ID NO: 3928603 - DNA, 25 bp, Homo sapien
gtcaggtgaacagccaggcggctaa

SEQ ID NO: 3928604 - DNA, 25 bp, Homo sapien
atctcggctgattagacacgcccca

SEQ ID NO: 3928605 - DNA, 25 bp, Homo sapien
tacagatcacttggattcagtcgag

SEQ ID NO: 3928606 - DNA, 25 bp, Homo sapien
ttggctttgtccgtctgcagcgccg

SEQ ID NO: 3928607 - DNA, 25 bp, Homo sapien
tgctgttggctttgtccgtctgcag

SEQ ID NO: 3928608 - DNA, 25 bp, Homo sapien
ctgctgttggctttgtccgtctgca

SEQ ID NO: 3928609 - DNA, 25 bp, Homo sapien
tgttggctttgtccgtctgcagcgc

SEQ ID NO: 3928610 - DNA, 25 bp, Homo sapien
gctgcgggtgcgcgagccgcgcgct

SEQ ID NO: 3928611 - DNA, 25 bp, Homo sapien
agctgcgggtgcgcgagccgcgcgc

SEQ ID NO: 3928612 - DNA, 25 bp, Homo sapien
tagctgcgggtgcgcgagccgcgcg

SEQ ID NO: 3928613 - DNA, 25 bp, Homo sapien
tagggtggcgtttacacgtccagga

SEQ ID NO: 3928614 - DNA, 25 bp, Homo sapien
ttttgtggctgaactcgatggtggg

SEQ ID NO: 3928615 - DNA, 25 bp, Homo sapien
gtgcctgcggcggagctgtggttgg

SEQ ID NO: 3928616 - DNA, 25 bp, Homo sapien
tcgggagccgaagccaccgcgaagc

SEQ ID NO: 3928617 - DNA, 25 bp, Homo sapien
aatgaggcgaagagggtttgtgacg

SEQ ID NO: 3928618 - DNA, 25 bp, Homo sapien
cttctccaggtaagcgatgccaggg

SEQ ID NO: 3928619 - DNA, 25 bp, Homo sapien
gcttctccaggtaagcgatgccagg

SEQ ID NO: 3928620 - DNA, 25 bp, Homo sapien
ttctccaggtaagcgatgccagggc

SEQ ID NO: 3928621 - DNA, 25 bp, Homo sapien
ctgcttctccaggtaagcgatgcca

SEQ ID NO: 3928622 - DNA, 25 bp, Homo sapien
agcattttgggagggtaaggcaggg

SEQ ID NO: 3928623 - DNA, 25 bp, Homo sapien
ttgaggtcaggagttcgagaccagc

SEQ ID NO: 3928624 - DNA, 25 bp, Homo sapien
tgggagggtaaggcagggggatcac

SEQ ID NO: 3928625 - DNA, 25 bp, Homo sapien
agaccagcctggtcaacattgcgaa

SEQ ID NO: 3928626 - DNA, 25 bp, Homo sapien
gatcctgtaatatatcaactgtgaa

SEQ ID NO: 3928627 - DNA, 25 bp, Homo sapien
caagccaattattcgaaacagtatc

SEQ ID NO: 3928628 - DNA, 25 bp, Homo sapien
caactgtgaattgtaccccaacaag

SEQ ID NO: 3928629 - DNA, 25 bp, Homo sapien
gtctatttagatcctgtaatatatc

SEQ ID NO: 3928630 - DNA, 25 bp, Homo sapien
ttaacttgaaaaccattatcgctgc

SEQ ID NO: 3928631 - DNA, 25 bp, Homo sapien
tgaaaaccattatcgctgcttaagc

SEQ ID NO: 3928632 - DNA, 25 bp, Homo sapien
aaaccattatcgctgcttaagcctg

SEQ ID NO: 3928633 - DNA, 25 bp, Homo sapien
acttgaaaaccattatcgctgctta

SEQ ID NO: 3928634 - DNA, 25 bp, Homo sapien
gattcttccataaccggctgccagt

SEQ ID NO: 3928635 - DNA, 25 bp, Homo sapien
tctgacgccgggagttgctccctaa

SEQ ID NO: 3928636 - DNA, 25 bp, Homo sapien
ctaagatctgctgccgcctttcgct

SEQ ID NO: 3928637 - DNA, 25 bp, Homo sapien
gcgcccagtgccttggttccggatt

SEQ ID NO: 3928638 - DNA, 25 bp, Homo sapien
tgttgattctcggactctgcgccca

SEQ ID NO: 3928639 - DNA, 25 bp, Homo sapien
ttgattctcggactctgcgcccacg

SEQ ID NO: 3928640 - DNA, 25 bp, Homo sapien
acagctgttgattctcggactctgc

SEQ ID NO: 3928641 - DNA, 25 bp, Homo sapien
gctgttgattctcggactctgcgcc

SEQ ID NO: 3928642 - DNA, 25 bp, Homo sapien
gacttcagggttcaccatccaaaat

SEQ ID NO: 3928643 - DNA, 25 bp, Homo sapien
ctcagcacaacaagcgcgggcggag

SEQ ID NO: 3928644 - DNA, 25 bp, Homo sapien
gtgaacgcagcagacaccgacttca

SEQ ID NO: 3928645 - DNA, 25 bp, Homo sapien
tcctttccagggattggctgcgcga

SEQ ID NO: 3928646 - DNA, 25 bp, Homo sapien
ctcgccgaggccgcggcgtttccgc

SEQ ID NO: 3928647 - DNA, 25 bp, Homo sapien
gggtgtcgccgaggagccctcgccg

SEQ ID NO: 3928648 - DNA, 25 bp, Homo sapien
agtctctccgggccagaaaagacgg

SEQ ID NO: 3928649 - DNA, 25 bp, Homo sapien
tcccgaagtctctccgggccagaaa

SEQ ID NO: 3928650 - DNA, 25 bp, Homo sapien
tggactatagatgcgggcctccacg

SEQ ID NO: 3928651 - DNA, 25 bp, Homo sapien
tctgaggaagcaaatttcccacaaa

SEQ ID NO: 3928652 - DNA, 25 bp, Homo sapien
gtggcacgattaccgactcactata

SEQ ID NO: 3928653 - DNA, 25 bp, Homo sapien
cccacaaactattggcttgtaggta

SEQ ID NO: 3928654 - DNA, 25 bp, Homo sapien
ccagcttggacaatgtagcaagacc

SEQ ID NO: 3928655 - DNA, 25 bp, Homo sapien
ttggacaatgtagcaagaccccatt

SEQ ID NO: 3928656 - DNA, 25 bp, Homo sapien
agcttggacaatgtagcaagacccc

SEQ ID NO: 3928657 - DNA, 25 bp, Homo sapien
gaccagcttggacaatgtagcaaga

SEQ ID NO: 3928658 - DNA, 25 bp, Homo sapien
ttgcccttatgaagtacagtagtac

SEQ ID NO: 3928659 - DNA, 25 bp, Homo sapien
tattaatacataaccacccttgccc

SEQ ID NO: 3928660 - DNA, 25 bp, Homo sapien
gaagggaagcctcagtattttctct

SEQ ID NO: 3928661 - DNA, 25 bp, Homo sapien
aatggtgttaactctggaaagtaga

SEQ ID NO: 3928662 - DNA, 25 bp, Homo sapien
agggaggagctccaagatgtgttac

SEQ ID NO: 3928663 - DNA, 25 bp, Homo sapien
aaggtaacgtagcattctaaaacat

SEQ ID NO: 3928664 - DNA, 25 bp, Homo sapien
aataactgccgaacaaatgaaaggg

SEQ ID NO: 3928665 - DNA, 25 bp, Homo sapien
ctggctgaactttgtatagcaatag

SEQ ID NO: 3928666 - DNA, 25 bp, Homo sapien
cactgctctacaaaattctacaaca

SEQ ID NO: 3928667 - DNA, 25 bp, Homo sapien
aaaacactgctctacaaaattctac

SEQ ID NO: 3928668 - DNA, 25 bp, Homo sapien
aacactgctctacaaaattctacaa

SEQ ID NO: 3928669 - DNA, 25 bp, Homo sapien
gaaaacactgctctacaaaattcta

SEQ ID NO: 3928670 - DNA, 25 bp, Homo sapien
aaggcgatttatgactaatctcaaa

SEQ ID NO: 3928671 - DNA, 25 bp, Homo sapien
gctcagctttaaatccagagcccag

SEQ ID NO: 3928672 - DNA, 25 bp, Homo sapien
tagtcttcccggataatgtgctcca

SEQ ID NO: 3928673 - DNA, 25 bp, Homo sapien
gcagccagatagtcagcaatctcct

SEQ ID NO: 3928674 - DNA, 25 bp, Homo sapien
gataatgtgctccacacggatccga

SEQ ID NO: 3928675 - DNA, 25 bp, Homo sapien
cgagctcgttcatctttcccagcag

SEQ ID NO: 3928676 - DNA, 25 bp, Homo sapien
gatcaatgtagacacagattcagcc

SEQ ID NO: 3928677 - DNA, 25 bp, Homo sapien
gagtcgaggagcagcccagatcaat

SEQ ID NO: 3928678 - DNA, 25 bp, Homo sapien
gcagcccagatcaatgtagacacag

SEQ ID NO: 3928679 - DNA, 25 bp, Homo sapien
caatgtagacacagattcagccaga

SEQ ID NO: 3928680 - DNA, 25 bp, Homo sapien
gaaacgacagtagcattggaccaga

SEQ ID NO: 3928681 - DNA, 25 bp, Homo sapien
taaagcaagaggtcgtgacaggatc

SEQ ID NO: 3928682 - DNA, 25 bp, Homo sapien
aagtgggagccagacaatgcaggac

SEQ ID NO: 3928683 - DNA, 25 bp, Homo sapien
tcaagcctgcaatcagccagtgagc

SEQ ID NO: 3928684 - DNA, 25 bp, Homo sapien
caactacagtaagtgataccaaggg

SEQ ID NO: 3928685 - DNA, 25 bp, Homo sapien
ttagccaaacgggtgtagcccagac

SEQ ID NO: 3928686 - DNA, 25 bp, Homo sapien
cctttgttcagtgtgcgctcgccat

SEQ ID NO: 3928687 - DNA, 25 bp, Homo sapien
gataaaggtacaactgcaactacag

SEQ ID NO: 3928688 - DNA, 25 bp, Homo sapien
tcattcacagttccaatctggttgg

SEQ ID NO: 3928689 - DNA, 25 bp, Homo sapien
ggttggtcctacatagcttgccata

SEQ ID NO: 3928690 - DNA, 25 bp, Homo sapien
ttcacagttccaatctggttggtcc

SEQ ID NO: 3928691 - DNA, 25 bp, Homo sapien
cagttccaatctggttggtcctaca

SEQ ID NO: 3928692 - DNA, 25 bp, Homo sapien
cacacactgccttcatgtttaccaa

SEQ ID NO: 3928693 - DNA, 25 bp, Homo sapien
agaattgccacaagcagtacaataa

SEQ ID NO: 3928694 - DNA, 25 bp, Homo sapien
ccttcatgtttaccaagtatgttca

SEQ ID NO: 3928695 - DNA, 25 bp, Homo sapien
caagcagtacaataaactgctccca

SEQ ID NO: 3928696 - DNA, 25 bp, Homo sapien
gcgaagttagctcctctcattttac

SEQ ID NO: 3928697 - DNA, 25 bp, Homo sapien
taaaaagacccagggctaagatgca

SEQ ID NO: 3928698 - DNA, 25 bp, Homo sapien
tgtataccaaccagcctaatcctca

SEQ ID NO: 3928699 - DNA, 25 bp, Homo sapien
tcacctcactatgcgaagttagctc

SEQ ID NO: 3928700 - DNA, 25 bp, Homo sapien
aggtatctctccaccaggattttgg

SEQ ID NO: 3928701 - DNA, 25 bp, Homo sapien
gcaatttcaatcaggtatctctcca

SEQ ID NO: 3928702 - DNA, 25 bp, Homo sapien
tttcaatcaggtatctctccaccag

SEQ ID NO: 3928703 - DNA, 25 bp, Homo sapien
caatcaggtatctctccaccaggat

SEQ ID NO: 3928704 - DNA, 25 bp, Homo sapien
atcaataagatctgtctctacccca

SEQ ID NO: 3928705 - DNA, 25 bp, Homo sapien
tctgtgaatccaacatcaataagat

SEQ ID NO: 3928706 - DNA, 25 bp, Homo sapien
gaatccaacatcaataagatctgtc

SEQ ID NO: 3928707 - DNA, 25 bp, Homo sapien
acatcaataagatctgtctctaccc

SEQ ID NO: 3928708 - DNA, 25 bp, Homo sapien
tggtgctgtgaagccaccactccct

SEQ ID NO: 3928709 - DNA, 25 bp, Homo sapien
tgctgtgaagccaccactccctcct

SEQ ID NO: 3928710 - DNA, 25 bp, Homo sapien
cctcttccagggcctcctttcttca

SEQ ID NO: 3928711 - DNA, 25 bp, Homo sapien
ctcttccagggcctcctttcttcac

SEQ ID NO: 3928712 - DNA, 25 bp, Homo sapien
tccctttggcagtggatatgagaaa

SEQ ID NO: 3928713 - DNA, 25 bp, Homo sapien
ggtccctttggcagtggatatgaga

SEQ ID NO: 3928714 - DNA, 25 bp, Homo sapien
ccctttggcagtggatatgagaaag

SEQ ID NO: 3928715 - DNA, 25 bp, Homo sapien
cctttggcagtggatatgagaaagg

SEQ ID NO: 3928716 - DNA, 25 bp, Homo sapien
tctaaagcttacatccacacttata

SEQ ID NO: 3928717 - DNA, 25 bp, Homo sapien
tttctaaagcttacatccacactta

SEQ ID NO: 3928718 - DNA, 25 bp, Homo sapien
agcttacatccacacttatatatac

SEQ ID NO: 3928719 - DNA, 25 bp, Homo sapien
taaagcttacatccacacttatata

SEQ ID NO: 3928720 - DNA, 25 bp, Homo sapien
ccattggcagtccattgaaatctga

SEQ ID NO: 3928721 - DNA, 25 bp, Homo sapien
taagtccccattggcagtccattga

SEQ ID NO: 3928722 - DNA, 25 bp, Homo sapien
gatgggggagttgctggtatctgag

SEQ ID NO: 3928723 - DNA, 25 bp, Homo sapien
tccccattggcagtccattgaaatc

SEQ ID NO: 3928724 - DNA, 25 bp, Homo sapien
caacggctgtgggttatgtgacgca

SEQ ID NO: 3928725 - DNA, 25 bp, Homo sapien
tgatactttcacctttgggcaaagg

SEQ ID NO: 3928726 - DNA, 25 bp, Homo sapien
gaagattttcgacctcattcctacc

SEQ ID NO: 3928727 - DNA, 25 bp, Homo sapien
aaactcaggcccaaggtagaacaca

SEQ ID NO: 3928728 - DNA, 25 bp, Homo sapien
ggtctcgaacgcctgcctaagcctc

SEQ ID NO: 3928729 - DNA, 25 bp, Homo sapien
agccccatgttgaactcttaactgc

SEQ ID NO: 3928730 - DNA, 25 bp, Homo sapien
cccatgttgaactcttaactgccaa

SEQ ID NO: 3928731 - DNA, 25 bp, Homo sapien
ttgaactcttaactgccaagcagag

SEQ ID NO: 3928732 - DNA, 25 bp, Homo sapien
agaaactgcccctgcattttttcca

SEQ ID NO: 3928733 - DNA, 25 bp, Homo sapien
aactgcccctgcattttttccaatc

SEQ ID NO: 3928734 - DNA, 25 bp, Homo sapien
aagttaagttgctcaccaaatgcaa

SEQ ID NO: 3928735 - DNA, 25 bp, Homo sapien
taagttgctcaccaaatgcaacaga

SEQ ID NO: 3928736 - DNA, 25 bp, Homo sapien
ctggagaaagtactggtgtaagccc

SEQ ID NO: 3928737 - DNA, 25 bp, Homo sapien
cacaaagattgttaccagaggagac

SEQ ID NO: 3928738 - DNA, 25 bp, Homo sapien
tagtgtcactggagaaagtactggt

SEQ ID NO: 3928739 - DNA, 25 bp, Homo sapien
cagaggagacagcaatagtgtcact

SEQ ID NO: 3928740 - DNA, 25 bp, Homo sapien
gatattcttatcagcattaatgtca

SEQ ID NO: 3928741 - DNA, 25 bp, Homo sapien
ttgactggcaacaagggaactttga

SEQ ID NO: 3928742 - DNA, 25 bp, Homo sapien
aaatagtgctctgactctggaggga

SEQ ID NO: 3928743 - DNA, 25 bp, Homo sapien
ttaccaactaagtccaaggagtgat

SEQ ID NO: 3928744 - DNA, 25 bp, Homo sapien
gttgtataccttgatcagagagtgg

SEQ ID NO: 3928745 - DNA, 25 bp, Homo sapien
gagaaatgactcagatcccctttgg

SEQ ID NO: 3928746 - DNA, 25 bp, Homo sapien
gagcacaacgttacaaataccagag

SEQ ID NO: 3928747 - DNA, 25 bp, Homo sapien
ctaattagggcaaggagcacaacgt

SEQ ID NO: 3928748 - DNA, 25 bp, Homo sapien
agttaattctagaggctaataaaca

SEQ ID NO: 3928749 - DNA, 25 bp, Homo sapien
ggcaactctggtaggacaaagttgt

SEQ ID NO: 3928750 - DNA, 25 bp, Homo sapien
cacagatggcaactctggtaggaca

SEQ ID NO: 3928751 - DNA, 25 bp, Homo sapien
gaatccagtacaactaagcgaggcc

SEQ ID NO: 3928752 - DNA, 25 bp, Homo sapien
tctggaacctcaacacgaggctggg

SEQ ID NO: 3928753 - DNA, 25 bp, Homo sapien
ctcccaaaacgtgaaagttgcctgg

SEQ ID NO: 3928754 - DNA, 25 bp, Homo sapien
gcgaggccttcaactgtcaagacaa

SEQ ID NO: 3928755 - DNA, 25 bp, Homo sapien
ccactgaggaagaccaaggaaattc

SEQ ID NO: 3928756 - DNA, 25 bp, Homo sapien
ttatatcactgggaaagctccactg

SEQ ID NO: 3928757 - DNA, 25 bp, Homo sapien
gacaaactagctctgctgccaagca

SEQ ID NO: 3928758 - DNA, 25 bp, Homo sapien
cacgacagcagtgggcagtgacact

SEQ ID NO: 3928759 - DNA, 25 bp, Homo sapien
taagcccagaacttgatatttatgt

SEQ ID NO: 3928760 - DNA, 25 bp, Homo sapien
gtaaagaatggcagaactcaatgct

SEQ ID NO: 3928761 - DNA, 25 bp, Homo sapien
ttatgtatgcagaaaagtaaagaat

SEQ ID NO: 3928762 - DNA, 25 bp, Homo sapien
caacagtttttgttatgggaaccat

SEQ ID NO: 3928763 - DNA, 25 bp, Homo sapien
aataatgttagatgtcagcctgggc

SEQ ID NO: 3928764 - DNA, 25 bp, Homo sapien
tactatgccttcatacaggtgagtc

SEQ ID NO: 3928765 - DNA, 25 bp, Homo sapien
tttgggaagctctacaatgacatgt

SEQ ID NO: 3928766 - DNA, 25 bp, Homo sapien
gaagggctgtgtctggtctatcatc

SEQ ID NO: 3928767 - DNA, 25 bp, Homo sapien
aacctactgccaagtgatcctactg

SEQ ID NO: 3928768 - DNA, 25 bp, Homo sapien
ctctgccaacctactgccaagtgat

SEQ ID NO: 3928769 - DNA, 25 bp, Homo sapien
tgccaacctactgccaagtgatcct

SEQ ID NO: 3928770 - DNA, 25 bp, Homo sapien
tgcaacctctgccaacctactgcca

SEQ ID NO: 3928771 - DNA, 25 bp, Homo sapien
tctgggctggcacttttcactgcct

SEQ ID NO: 3928772 - DNA, 25 bp, Homo sapien
ttccttatctgaaccttcccagcag

SEQ ID NO: 3928773 - DNA, 25 bp, Homo sapien
tcctctgtcgagatgtccatttcat

SEQ ID NO: 3928774 - DNA, 25 bp, Homo sapien
tccaaaagctggaagtaatttcttc

SEQ ID NO: 3928775 - DNA, 25 bp, Homo sapien
gattgttggcttcagtattcacgtt

SEQ ID NO: 3928776 - DNA, 25 bp, Homo sapien
ttgttggcttcagtattcacgttcc

SEQ ID NO: 3928777 - DNA, 25 bp, Homo sapien
agattgttggcttcagtattcacgt

SEQ ID NO: 3928778 - DNA, 25 bp, Homo sapien
gttggcttcagtattcacgttccat

SEQ ID NO: 3928779 - DNA, 25 bp, Homo sapien
tgcccgcttgatcgccggctgttgg

SEQ ID NO: 3928780 - DNA, 25 bp, Homo sapien
ggtgtttgtccgtactaccgcagcc

SEQ ID NO: 3928781 - DNA, 25 bp, Homo sapien
gatgagatgccgctgcacggtgttt

SEQ ID NO: 3928782 - DNA, 25 bp, Homo sapien
taccgcagcctcgaatccaagagtc

SEQ ID NO: 3928783 - DNA, 25 bp, Homo sapien
atggtggcggcccctcttgtctccg

SEQ ID NO: 3928784 - DNA, 25 bp, Homo sapien
ttccgtcattaagcccgcccctgtc

SEQ ID NO: 3928785 - DNA, 25 bp, Homo sapien
ttgtctccgccccttagccgccaac

SEQ ID NO: 3928786 - DNA, 25 bp, Homo sapien
gctccttccgtcattaagcccgccc

SEQ ID NO: 3928787 - DNA, 25 bp, Homo sapien
aaatgcacacgcacgagcatttgca

SEQ ID NO: 3928788 - DNA, 25 bp, Homo sapien
aggagaccccggaaacacgcacacg

SEQ ID NO: 3928789 - DNA, 25 bp, Homo sapien
atccacactgctcactcgcgggact

SEQ ID NO: 3928790 - DNA, 25 bp, Homo sapien
cggagccgccttcggtccatgcctc

SEQ ID NO: 3928791 - DNA, 25 bp, Homo sapien
gcaggcgctgtctgcacacgcctga

SEQ ID NO: 3928792 - DNA, 25 bp, Homo sapien
caggcgctgtctgcacacgcctgac

SEQ ID NO: 3928793 - DNA, 25 bp, Homo sapien
ctgcaggcgctgtctgcacacgcct

SEQ ID NO: 3928794 - DNA, 25 bp, Homo sapien
tgcaggcgctgtctgcacacgcctg

SEQ ID NO: 3928795 - DNA, 25 bp, Homo sapien
tatgtagtcatagcaactgtgatga

SEQ ID NO: 3928796 - DNA, 25 bp, Homo sapien
tgcccctaccctcatggagagtgtg

SEQ ID NO: 3928797 - DNA, 25 bp, Homo sapien
acaatgcttttctctatcactgcca

SEQ ID NO: 3928798 - DNA, 25 bp, Homo sapien
tgatcttatgaagcgacagacagaa

SEQ ID NO: 3928799 - DNA, 25 bp, Homo sapien
tcctgagcccttcacacccaggtac

SEQ ID NO: 3928800 - DNA, 25 bp, Homo sapien
gcccttcacacccaggtacacagag

SEQ ID NO: 3928801 - DNA, 25 bp, Homo sapien
ccttcacacccaggtacacagaggg

SEQ ID NO: 3928802 - DNA, 25 bp, Homo sapien
tcacacccaggtacacagagggcat

SEQ ID NO: 3928803 - DNA, 25 bp, Homo sapien
taggaggcgaagagaagtcctcctc

SEQ ID NO: 3928804 - DNA, 25 bp, Homo sapien
tctcccgtggccatcaggtaggagg

SEQ ID NO: 3928805 - DNA, 25 bp, Homo sapien
agcccctgcagagtcggcatcaggt

SEQ ID NO: 3928806 - DNA, 25 bp, Homo sapien
caggtgttcagcatagaaacgctca

SEQ ID NO: 3928807 - DNA, 25 bp, Homo sapien
agctgagaagtttaggggactgcag

SEQ ID NO: 3928808 - DNA, 25 bp, Homo sapien
tgtatagggtgtctgggagcactac

SEQ ID NO: 3928809 - DNA, 25 bp, Homo sapien
gagaagtttaggggactgcagcctt

SEQ ID NO: 3928810 - DNA, 25 bp, Homo sapien
ttcaaaaagatcagtcccagctgag

SEQ ID NO: 3928811 - DNA, 25 bp, Homo sapien
cctccaggaccgtggttctcagctc

SEQ ID NO: 3928812 - DNA, 25 bp, Homo sapien
tcaggagactggtaggcaagatgtg

SEQ ID NO: 3928813 - DNA, 25 bp, Homo sapien
tttcaggtcctgctctcagatgtgg

SEQ ID NO: 3928814 - DNA, 25 bp, Homo sapien
tggcggtgaaactggtctggcacca

SEQ ID NO: 3928815 - DNA, 25 bp, Homo sapien
gatttcggaatttatggcccagaac

SEQ ID NO: 3928816 - DNA, 25 bp, Homo sapien
catcttataaagtccgtccacggct

SEQ ID NO: 3928817 - DNA, 25 bp, Homo sapien
cagcaattcctactggatttcggaa

SEQ ID NO: 3928818 - DNA, 25 bp, Homo sapien
tccccatgcttgtcaaatcctgcag

SEQ ID NO: 3928819 - DNA, 25 bp, Homo sapien
taacttgatctctaatgctggagaa

SEQ ID NO: 3928820 - DNA, 25 bp, Homo sapien
tcaataacttgatctctaatgctgg

SEQ ID NO: 3928821 - DNA, 25 bp, Homo sapien
gaaagatcaataacttgatctctaa

SEQ ID NO: 3928822 - DNA, 25 bp, Homo sapien
gatcaataacttgatctctaatgct

SEQ ID NO: 3928823 - DNA, 25 bp, Homo sapien
cactgggactcctagagaacttgcc

SEQ ID NO: 3928824 - DNA, 25 bp, Homo sapien
tcttcttgagggtgagcaacatctc

SEQ ID NO: 3928825 - DNA, 25 bp, Homo sapien
cataatacttgcagccgaggtcgct

SEQ ID NO: 3928826 - DNA, 25 bp, Homo sapien
caagggaagcgtaagtgtatgccaa

SEQ ID NO: 3928827 - DNA, 25 bp, Homo sapien
aagcccgtgactgttaaatccatac

SEQ ID NO: 3928828 - DNA, 25 bp, Homo sapien
gctgtctggcccgtaacctgtgttc

SEQ ID NO: 3928829 - DNA, 25 bp, Homo sapien
tgtctggcccgtaacctgtgttcca

SEQ ID NO: 3928830 - DNA, 25 bp, Homo sapien
ccaccactgaaagcccgtgactgtt

SEQ ID NO: 3928831 - DNA, 25 bp, Homo sapien
agaaaggcccactgacacaacccca

SEQ ID NO: 3928832 - DNA, 25 bp, Homo sapien
ataagaaaggcccactgacacaacc

SEQ ID NO: 3928833 - DNA, 25 bp, Homo sapien
ctaataaataagaaaggcccactga

SEQ ID NO: 3928834 - DNA, 25 bp, Homo sapien
taaataagaaaggcccactgacaca

SEQ ID NO: 3928835 - DNA, 25 bp, Homo sapien
gacacatccgtgcagagcactgctg

SEQ ID NO: 3928836 - DNA, 25 bp, Homo sapien
ttcactccgtagaccaggagggcca

SEQ ID NO: 3928837 - DNA, 25 bp, Homo sapien
tgcaggctccgcttcactccgtaga

SEQ ID NO: 3928838 - DNA, 25 bp, Homo sapien
tgccatgaaggcccctaagctgctg

SEQ ID NO: 3928839 - DNA, 25 bp, Homo sapien
ccgcacaccctttcctgtgccacct

SEQ ID NO: 3928840 - DNA, 25 bp, Homo sapien
tgccaccttctgaggctgcccttga

SEQ ID NO: 3928841 - DNA, 25 bp, Homo sapien
ccttgaccaaaccacctgtggacag

SEQ ID NO: 3928842 - DNA, 25 bp, Homo sapien
gctggtcaggcctgcaccccgcaca

SEQ ID NO: 3928843 - DNA, 25 bp, Homo sapien
agtacgcgcaccccttctgcgtagt

SEQ ID NO: 3928844 - DNA, 25 bp, Homo sapien
ctccgcggcgtccactgaggtcttg

SEQ ID NO: 3928845 - DNA, 25 bp, Homo sapien
cttctgcgtagtcctccgcggcgtc

SEQ ID NO: 3928846 - DNA, 25 bp, Homo sapien
ggcgtccactgaggtcttgttcttc

SEQ ID NO: 3928847 - DNA, 25 bp, Homo sapien
gagacgtggtgtctgctcttacaga

SEQ ID NO: 3928848 - DNA, 25 bp, Homo sapien
gatgctgaaggttcgccctggagaa

SEQ ID NO: 3928849 - DNA, 25 bp, Homo sapien
tcagagtgacaaatgagagagacgt

SEQ ID NO: 3928850 - DNA, 25 bp, Homo sapien
gggtcctactggtctaggtgctaag

SEQ ID NO: 3928851 - DNA, 25 bp, Homo sapien
ttcaccaggactgccggcctgtgca

SEQ ID NO: 3928852 - DNA, 25 bp, Homo sapien
ggcctgtgcactctccgcaagccat

SEQ ID NO: 3928853 - DNA, 25 bp, Homo sapien
ggtgaggtcaggagcgatcttcacc

SEQ ID NO: 3928854 - DNA, 25 bp, Homo sapien
ggcaatgtcctccttatcctggctg

SEQ ID NO: 3928855 - DNA, 25 bp, Homo sapien
cttacaacaacccaattacagtgtc

SEQ ID NO: 3928856 - DNA, 25 bp, Homo sapien
cccaattacagtgtcttgtctgagg

SEQ ID NO: 3928857 - DNA, 25 bp, Homo sapien
ttacaacaacccaattacagtgtct

SEQ ID NO: 3928858 - DNA, 25 bp, Homo sapien
aattacagtgtcttgtctgaggccc

SEQ ID NO: 3928859 - DNA, 25 bp, Homo sapien
aatgagccataacatgacgacagca

SEQ ID NO: 3928860 - DNA, 25 bp, Homo sapien
acacgctgaccacccacaacattcc

SEQ ID NO: 3928861 - DNA, 25 bp, Homo sapien
agaatgagccataacatgacgacag

SEQ ID NO: 3928862 - DNA, 25 bp, Homo sapien
cacgctgaccacccacaacattccc

SEQ ID NO: 3928863 - DNA, 25 bp, Homo sapien
tgcagtgcgagatagagaaaaagcc

SEQ ID NO: 3928864 - DNA, 25 bp, Homo sapien
gaaaaagccatgagtcatagcaccg

SEQ ID NO: 3928865 - DNA, 25 bp, Homo sapien
aaagcaagagctacaccagacctca

SEQ ID NO: 3928866 - DNA, 25 bp, Homo sapien
gacccagaggcgcttctctggaggt

SEQ ID NO: 3928867 - DNA, 25 bp, Homo sapien
ggtggtgttcgtaacaatcagccca

SEQ ID NO: 3928868 - DNA, 25 bp, Homo sapien
taacaatcagcccatcgatgcccaa

SEQ ID NO: 3928869 - DNA, 25 bp, Homo sapien
ggtgttcgtaacaatcagcccatcg

SEQ ID NO: 3928870 - DNA, 25 bp, Homo sapien
gttcgtaacaatcagcccatcgatg

SEQ ID NO: 3928871 - DNA, 25 bp, Homo sapien
ctcccgaatggtttgagttgataaa

SEQ ID NO: 3928872 - DNA, 25 bp, Homo sapien
ctcctgtttcagagcgcagggcacc

SEQ ID NO: 3928873 - DNA, 25 bp, Homo sapien
tcctgtttcagagcgcagggcaccc

SEQ ID NO: 3928874 - DNA, 25 bp, Homo sapien
tggtttgagttgataaatcccggag

SEQ ID NO: 3928875 - DNA, 25 bp, Homo sapien
caccaaccccaattatgggaactcg

SEQ ID NO: 3928876 - DNA, 25 bp, Homo sapien
cacaccaccaaccccaattatggga

SEQ ID NO: 3928877 - DNA, 25 bp, Homo sapien
tcacaccaccaaccccaattatggg

SEQ ID NO: 3928878 - DNA, 25 bp, Homo sapien
gtgagggccgtgtacagctgcacca

SEQ ID NO: 3928879 - DNA, 25 bp, Homo sapien
tgactttgcccacaacgggtggccc

SEQ ID NO: 3928880 - DNA, 25 bp, Homo sapien
gcctccagttcccgcttgactttgc

SEQ ID NO: 3928881 - DNA, 25 bp, Homo sapien
ccggatcttctccagcgcgtcctgc

SEQ ID NO: 3928882 - DNA, 25 bp, Homo sapien
cactcttcacccagagacctaggga

SEQ ID NO: 3928883 - DNA, 25 bp, Homo sapien
gttcacccagaaacgcatcatcccg

SEQ ID NO: 3928884 - DNA, 25 bp, Homo sapien
gaagcccacgttcacccagaaacgc

SEQ ID NO: 3928885 - DNA, 25 bp, Homo sapien
tcttcacccagagacctagggatat

SEQ ID NO: 3928886 - DNA, 25 bp, Homo sapien
aacagtggagaacaggccctgctct

SEQ ID NO: 3928887 - DNA, 25 bp, Homo sapien
aagcaatttcagcaaacagtggaga

SEQ ID NO: 3928888 - DNA, 25 bp, Homo sapien
acagtggagaacaggccctgctctt

SEQ ID NO: 3928889 - DNA, 25 bp, Homo sapien
caatttcagcaaacagtggagaaca

SEQ ID NO: 3928890 - DNA, 25 bp, Homo sapien
tccaatggcatctgtgactccgcca

SEQ ID NO: 3928891 - DNA, 25 bp, Homo sapien
tggcatctgtgactccgccaaagcc

SEQ ID NO: 3928892 - DNA, 25 bp, Homo sapien
ctccgatgatctgctccaatggcat

SEQ ID NO: 3928893 - DNA, 25 bp, Homo sapien
cgatgatctgctccaatggcatctg

SEQ ID NO: 3928894 - DNA, 25 bp, Homo sapien
atcaggcttcccgtcagacgctgtc

SEQ ID NO: 3928895 - DNA, 25 bp, Homo sapien
cagccacaaaggcttgcctgagtcc

SEQ ID NO: 3928896 - DNA, 25 bp, Homo sapien
tgagtccttgggaaggttccagatc

SEQ ID NO: 3928897 - DNA, 25 bp, Homo sapien
cagatcaggcttcccgtcagacgct

SEQ ID NO: 3928898 - DNA, 25 bp, Homo sapien
gatcctagggtttgaatccacaaag

SEQ ID NO: 3928899 - DNA, 25 bp, Homo sapien
aaatgcagtttatggtctgaccaag

SEQ ID NO: 3928900 - DNA, 25 bp, Homo sapien
ccccgattggcgtttacagtgcagc

SEQ ID NO: 3928901 - DNA, 25 bp, Homo sapien
tccttgcaagactgatggatcctag

SEQ ID NO: 3928902 - DNA, 25 bp, Homo sapien
aagagtgctgtaccgtttgaattgc

SEQ ID NO: 3928903 - DNA, 25 bp, Homo sapien
cagatgcagatagcagaggcctgga

SEQ ID NO: 3928904 - DNA, 25 bp, Homo sapien
tggatggacctgcagtatcttggca

SEQ ID NO: 3928905 - DNA, 25 bp, Homo sapien
tcttggcagggcctatggcaaacca

SEQ ID NO: 3928906 - DNA, 25 bp, Homo sapien
tgagccggcttttagagcagccaag

SEQ ID NO: 3928907 - DNA, 25 bp, Homo sapien
gaacgaatccggagaagcagaaggc

SEQ ID NO: 3928908 - DNA, 25 bp, Homo sapien
atgctctatgaccacaccgctgggc

SEQ ID NO: 3928909 - DNA, 25 bp, Homo sapien
gagccattcagcacaacatgctcta

SEQ ID NO: 3928910 - DNA, 25 bp, Homo sapien
aagtgaccccgcaggggtctggcca

SEQ ID NO: 3928911 - DNA, 25 bp, Homo sapien
tatgtgcgctggcacctgacgtggc

SEQ ID NO: 3928912 - DNA, 25 bp, Homo sapien
acctgacgtggcatgtcggagccca

SEQ ID NO: 3928913 - DNA, 25 bp, Homo sapien
gtgtccagagtatgtgcgctggcac

SEQ ID NO: 3928914 - DNA, 25 bp, Homo sapien
gggaaagggagggcagatgactcac

SEQ ID NO: 3928915 - DNA, 25 bp, Homo sapien
gagggcagatgactcacagagagca

SEQ ID NO: 3928916 - DNA, 25 bp, Homo sapien
aaagggagggcagatgactcacaga

SEQ ID NO: 3928917 - DNA, 25 bp, Homo sapien
ggagggcagatgactcacagagagc

SEQ ID NO: 3928918 - DNA, 25 bp, Homo sapien
taacatttggaattctgcacaccct

SEQ ID NO: 3928919 - DNA, 25 bp, Homo sapien
gcggtcatcatcagtctcccaggat

SEQ ID NO: 3928920 - DNA, 25 bp, Homo sapien
gagtgtggcttccagcattaagaaa

SEQ ID NO: 3928921 - DNA, 25 bp, Homo sapien
tatgcactccacacaagagtgagtg

SEQ ID NO: 3928922 - DNA, 25 bp, Homo sapien
gtggtgcatgtaggaacctcagccc

SEQ ID NO: 3928923 - DNA, 25 bp, Homo sapien
aggtggtgcatgtaggaacctcagc

SEQ ID NO: 3928924 - DNA, 25 bp, Homo sapien
gaaggtggtgcatgtaggaacctca

SEQ ID NO: 3928925 - DNA, 25 bp, Homo sapien
ggtggtgcatgtaggaacctcagcc

SEQ ID NO: 3928926 - DNA, 25 bp, Homo sapien
gagggtaccagcaaaagccctttga

SEQ ID NO: 3928927 - DNA, 25 bp, Homo sapien
cctgagggtaccagcaaaagccctt

SEQ ID NO: 3928928 - DNA, 25 bp, Homo sapien
tgagggtaccagcaaaagccctttg

SEQ ID NO: 3928929 - DNA, 25 bp, Homo sapien
agggtaccagcaaaagccctttgag

SEQ ID NO: 3928930 - DNA, 25 bp, Homo sapien
aagctcaagcagtcctcccgccttg

SEQ ID NO: 3928931 - DNA, 25 bp, Homo sapien
gctcactgcaaacttctgccccctg

SEQ ID NO: 3928932 - DNA, 25 bp, Homo sapien
actgcaaacttctgccccctgggtt

SEQ ID NO: 3928933 - DNA, 25 bp, Homo sapien
ccctgggttcaagtgattctcctgc

SEQ ID NO: 3928934 - DNA, 25 bp, Homo sapien
tggcaggcggttcttctgagagact

SEQ ID NO: 3928935 - DNA, 25 bp, Homo sapien
ggcttgtcgtaggatgtgacccact

SEQ ID NO: 3928936 - DNA, 25 bp, Homo sapien
tccccttccactgaagaggtgctgg

SEQ ID NO: 3928937 - DNA, 25 bp, Homo sapien
aaatcagggacttgcataaacttgc

SEQ ID NO: 3928938 - DNA, 25 bp, Homo sapien
tggttggtcttgcctctggaagagc

SEQ ID NO: 3928939 - DNA, 25 bp, Homo sapien
ttggtcttgcctctggaagagcagt

SEQ ID NO: 3928940 - DNA, 25 bp, Homo sapien
ggttggtcttgcctctggaagagca

SEQ ID NO: 3928941 - DNA, 25 bp, Homo sapien
gttggtcttgcctctggaagagcag

SEQ ID NO: 3928942 - DNA, 25 bp, Homo sapien
agatttaacacactaagccctttgg

SEQ ID NO: 3928943 - DNA, 25 bp, Homo sapien
taaaatagtttctaggccagacacg

SEQ ID NO: 3928944 - DNA, 25 bp, Homo sapien
tcccaggtattagtgtgtatcccag

SEQ ID NO: 3928945 - DNA, 25 bp, Homo sapien
cctaccacgggagctgatgacatac

SEQ ID NO: 3928946 - DNA, 25 bp, Homo sapien
ctggaagagaactggtgtccaaaag

SEQ ID NO: 3928947 - DNA, 25 bp, Homo sapien
tggtgtccaaaagcaggacggtggc

SEQ ID NO: 3928948 - DNA, 25 bp, Homo sapien
tggaagagaactggtgtccaaaagc

SEQ ID NO: 3928949 - DNA, 25 bp, Homo sapien
tgtccaaaagcaggacggtggccat

SEQ ID NO: 3928950 - DNA, 25 bp, Homo sapien
cattggcaataatacaggagccctc

SEQ ID NO: 3928951 - DNA, 25 bp, Homo sapien
tcagacaccgcaaagatagtggtaa

SEQ ID NO: 3928952 - DNA, 25 bp, Homo sapien
ggaaagagaaacctccctcagacac

SEQ ID NO: 3928953 - DNA, 25 bp, Homo sapien
gagatgggaactttgggcttactgt

SEQ ID NO: 3928954 - DNA, 25 bp, Homo sapien
tccagcaagccctgtcctgctggga

SEQ ID NO: 3928955 - DNA, 25 bp, Homo sapien
tgtcctgctgggaattctgcagaag

SEQ ID NO: 3928956 - DNA, 25 bp, Homo sapien
caagcttccagcaagccctgtcctg

SEQ ID NO: 3928957 - DNA, 25 bp, Homo sapien
agcaagccctgtcctgctgggaatt

SEQ ID NO: 3928958 - DNA, 25 bp, Homo sapien
ggaggagtggaaagctagtctccct

SEQ ID NO: 3928959 - DNA, 25 bp, Homo sapien
gaaagtcgatatatggaagtgctag

SEQ ID NO: 3928960 - DNA, 25 bp, Homo sapien
tcctcccacttagcagccagaaaag

SEQ ID NO: 3928961 - DNA, 25 bp, Homo sapien
agtgctaggaccaagaaattgcccc

SEQ ID NO: 3928962 - DNA, 25 bp, Homo sapien
ctgagtccactgcaaaaagctgtcc

SEQ ID NO: 3928963 - DNA, 25 bp, Homo sapien
gtccactgcaaaaagctgtccccag

SEQ ID NO: 3928964 - DNA, 25 bp, Homo sapien
tgcctgagtccactgcaaaaagctg

SEQ ID NO: 3928965 - DNA, 25 bp, Homo sapien
cattgcctgagtccactgcaaaaag

SEQ ID NO: 3928966 - DNA, 25 bp, Homo sapien
gaaaggcaagctcccctcatttctg

SEQ ID NO: 3928967 - DNA, 25 bp, Homo sapien
caccccgaatagaagccaatggaaa

SEQ ID NO: 3928968 - DNA, 25 bp, Homo sapien
ctcagagagagtgcagacccgagag

SEQ ID NO: 3928969 - DNA, 25 bp, Homo sapien
tcctgaaagcccagaggtcgagata

SEQ ID NO: 3928970 - DNA, 25 bp, Homo sapien
cccagtgaaccgtgaaaagtcagat

SEQ ID NO: 3928971 - DNA, 25 bp, Homo sapien
ggaaattgttcccagtgaaccgtga

SEQ ID NO: 3928972 - DNA, 25 bp, Homo sapien
accgtgaaaagtcagatgagcggga

SEQ ID NO: 3928973 - DNA, 25 bp, Homo sapien
gagaagccagagagtttgctatttg

SEQ ID NO: 3928974 - DNA, 25 bp, Homo sapien
gctccacatagccatgtgcaatctc

SEQ ID NO: 3928975 - DNA, 25 bp, Homo sapien
tctcggggggcttcgggcagccgtc

SEQ ID NO: 3928976 - DNA, 25 bp, Homo sapien
gaaccgagtgctccacatagccatg

SEQ ID NO: 3928977 - DNA, 25 bp, Homo sapien
gagtgctccacatagccatgtgcaa

SEQ ID NO: 3928978 - DNA, 25 bp, Homo sapien
gcaacgaactttctggcgaatcacc

SEQ ID NO: 3928979 - DNA, 25 bp, Homo sapien
ggctactggcgacaaaacgcttatt

SEQ ID NO: 3928980 - DNA, 25 bp, Homo sapien
aaggagagcaacgaactttctggcg

SEQ ID NO: 3928981 - DNA, 25 bp, Homo sapien
gggttgtatgtagggcatggagaca

SEQ ID NO: 3928982 - DNA, 25 bp, Homo sapien
aggaagtttatctccaacagcctta

SEQ ID NO: 3928983 - DNA, 25 bp, Homo sapien
tcacattcaggaagtttatctccaa

SEQ ID NO: 3928984 - DNA, 25 bp, Homo sapien
tatccactgcttcttatcatttaag

SEQ ID NO: 3928985 - DNA, 25 bp, Homo sapien
tatttatccactgcttcttatcatt

SEQ ID NO: 3928986 - DNA, 25 bp, Homo sapien
tacactggtagcgaaccgagtgctc

SEQ ID NO: 3928987 - DNA, 25 bp, Homo sapien
ccttctgtgcgcagtttgtagtagt

SEQ ID NO: 3928988 - DNA, 25 bp, Homo sapien
ttgtagtagttcttacactggtagc

SEQ ID NO: 3928989 - DNA, 25 bp, Homo sapien
gagtgctccacatagccatgtgcaa

SEQ ID NO: 3928990 - DNA, 25 bp, Homo sapien
ggtaggctgcatggcatcgcctccc

SEQ ID NO: 3928991 - DNA, 25 bp, Homo sapien
tttacatgaggtaggctgcatggca

SEQ ID NO: 3928992 - DNA, 25 bp, Homo sapien
tctgctggagatgtaaatgtgactc

SEQ ID NO: 3928993 - DNA, 25 bp, Homo sapien
gtgactctgagatttacatgaggta

SEQ ID NO: 3928994 - DNA, 25 bp, Homo sapien
aagtcaagtctagaccccgtgcaga

SEQ ID NO: 3928995 - DNA, 25 bp, Homo sapien
agaagtcaagtctagaccccgtgca

SEQ ID NO: 3928996 - DNA, 25 bp, Homo sapien
aaggagaagtcaagtctagaccccg

SEQ ID NO: 3928997 - DNA, 25 bp, Homo sapien
gagccaaaggagaagtcaagtctag

SEQ ID NO: 3928998 - DNA, 25 bp, Homo sapien
ttctcattgtttaaggtgtacactc

SEQ ID NO: 3928999 - DNA, 25 bp, Homo sapien
aggaagtttatctccaacagcctta

SEQ ID NO: 3929000 - DNA, 25 bp, Homo sapien
tcacattcaggaagtttatctccaa

SEQ ID NO: 3929001 - DNA, 25 bp, Homo sapien
acattcaggaagtttatctccaaca

SEQ ID NO: 3929002 - DNA, 25 bp, Homo sapien
gggagtcatcacctaactgcttaag

SEQ ID NO: 3929003 - DNA, 25 bp, Homo sapien
taatgaacaagacccttggtgaccc

SEQ ID NO: 3929004 - DNA, 25 bp, Homo sapien
cagttaatacgaggcaggttggcat

SEQ ID NO: 3929005 - DNA, 25 bp, Homo sapien
tccacaccagtaagagcagaagagg

SEQ ID NO: 3929006 - DNA, 25 bp, Homo sapien
tttgccggattcttgggcttcccac

SEQ ID NO: 3929007 - DNA, 25 bp, Homo sapien
gccggattcttgggcttcccacata

SEQ ID NO: 3929008 - DNA, 25 bp, Homo sapien
tgccggattcttgggcttcccacat

SEQ ID NO: 3929009 - DNA, 25 bp, Homo sapien
gtttgccggattcttgggcttccca

SEQ ID NO: 3929010 - DNA, 25 bp, Homo sapien
tggtgagattatggtgggaaaccat

SEQ ID NO: 3929011 - DNA, 25 bp, Homo sapien
cagccattgttcattgatcagcgtg

SEQ ID NO: 3929012 - DNA, 25 bp, Homo sapien
gaagagatttttagccgtggtcagc

SEQ ID NO: 3929013 - DNA, 25 bp, Homo sapien
agatttttagccgtggtcagcagcc

SEQ ID NO: 3929014 - DNA, 25 bp, Homo sapien
gtggtcagcagccattgttcattga

SEQ ID NO: 3929015 - DNA, 25 bp, Homo sapien
tgacatacttcagatggtcagtaaa

SEQ ID NO: 3929016 - DNA, 25 bp, Homo sapien
tacagggctcttcggtgtcttcttt

SEQ ID NO: 3929017 - DNA, 25 bp, Homo sapien
ccttatgcattggtcttggtcagcc

SEQ ID NO: 3929018 - DNA, 25 bp, Homo sapien
ttgatgagcccaatatctacctggg

SEQ ID NO: 3929019 - DNA, 25 bp, Homo sapien
ttggtacttagacatgccagcacag

SEQ ID NO: 3929020 - DNA, 25 bp, Homo sapien
catcgccatagcaggtgtcttcttg

SEQ ID NO: 3929021 - DNA, 25 bp, Homo sapien
ttcttggtacttagacatgccagca

SEQ ID NO: 3929022 - DNA, 25 bp, Homo sapien
cgcatcgccatagcaggtgtcttct

SEQ ID NO: 3929023 - DNA, 25 bp, Homo sapien
cagcacagctcttatcaaagcttaa

SEQ ID NO: 3929024 - DNA, 25 bp, Homo sapien
atcaaagcttaagatcccagtcgca

SEQ ID NO: 3929025 - DNA, 25 bp, Homo sapien
gctcttatcaaagcttaagatccca

SEQ ID NO: 3929026 - DNA, 25 bp, Homo sapien
aaagcttaagatcccagtcgcatac

SEQ ID NO: 3929027 - DNA, 25 bp, Homo sapien
tagttctcagctatggtcttctgaa

SEQ ID NO: 3929028 - DNA, 25 bp, Homo sapien
agttctcagctatggtcttctgaac

SEQ ID NO: 3929029 - DNA, 25 bp, Homo sapien
ttagttctcagctatggtcttctga

SEQ ID NO: 3929030 - DNA, 25 bp, Homo sapien
gttctcagctatggtcttctgaacc

SEQ ID NO: 3929031 - DNA, 25 bp, Homo sapien
cttgctttcaggcaagggcttccgg

SEQ ID NO: 3929032 - DNA, 25 bp, Homo sapien
aaaccacatcttatcgcatccactc

SEQ ID NO: 3929033 - DNA, 25 bp, Homo sapien
tgtccactcccgtccactttgccct

SEQ ID NO: 3929034 - DNA, 25 bp, Homo sapien
gaaatcttgctttcaggcaagggct

SEQ ID NO: 3929035 - DNA, 25 bp, Homo sapien
cagcaatgcagggctggcacccatc

SEQ ID NO: 3929036 - DNA, 25 bp, Homo sapien
tcacctttaggaaatggtatctcaa

SEQ ID NO: 3929037 - DNA, 25 bp, Homo sapien
ttaaaatagtttctaggcagggtgc

SEQ ID NO: 3929038 - DNA, 25 bp, Homo sapien
agttcaccatctcgctaacagacgc

SEQ ID NO: 3929039 - DNA, 25 bp, Homo sapien
agacgcccaccattcaggcactatt

SEQ ID NO: 3929040 - DNA, 25 bp, Homo sapien
acaaggcagtgggatgtgtctcctc

SEQ ID NO: 3929041 - DNA, 25 bp, Homo sapien
caagaggtgatcaaagaccctttcc

SEQ ID NO: 3929042 - DNA, 25 bp, Homo sapien
tgtgtctcctcacaagaggtgatca

SEQ ID NO: 3929043 - DNA, 25 bp, Homo sapien
gattccttactcatgaggccactgc

SEQ ID NO: 3929044 - DNA, 25 bp, Homo sapien
agaaggagcggaaagctggtctccc

SEQ ID NO: 3929045 - DNA, 25 bp, Homo sapien
aaggagcggaaagctggtctccctg

SEQ ID NO: 3929046 - DNA, 25 bp, Homo sapien
gcttcacagcacatgcatgcatcca

SEQ ID NO: 3929047 - DNA, 25 bp, Homo sapien
gagaaaacaagaaggagcggaaagc

SEQ ID NO: 3929048 - DNA, 25 bp, Homo sapien
ctgaaatatccgtgacatcattgcc

SEQ ID NO: 3929049 - DNA, 25 bp, Homo sapien
cagtgcaaaaagctgtcgtccccag

SEQ ID NO: 3929050 - DNA, 25 bp, Homo sapien
gtacagtgcaaaaagctgtcgtccc

SEQ ID NO: 3929051 - DNA, 25 bp, Homo sapien
catcattgcctgagtacagtgcaaa

SEQ ID NO: 3929052 - DNA, 25 bp, Homo sapien
atctccttctgtgcgcagtctgtag

SEQ ID NO: 3929053 - DNA, 25 bp, Homo sapien
catctccttctgtgcgcagtctgta

SEQ ID NO: 3929054 - DNA, 25 bp, Homo sapien
acaagtgctccacatagccatttgc

SEQ ID NO: 3929055 - DNA, 25 bp, Homo sapien
gaaacaagtgctccacatagccatt

SEQ ID NO: 3929056 - DNA, 25 bp, Homo sapien
ggctactggcgacaaaacgcttatc

SEQ ID NO: 3929057 - DNA, 25 bp, Homo sapien
cacagagatagttgtccaggtctta

SEQ ID NO: 3929058 - DNA, 25 bp, Homo sapien
catgaggtaggctgcatggcatcac

SEQ ID NO: 3929059 - DNA, 25 bp, Homo sapien
aaggagagcaacgaactttctggca

SEQ ID NO: 3929060 - DNA, 25 bp, Homo sapien
aggaagtttatctccaacagcctta

SEQ ID NO: 3929061 - DNA, 25 bp, Homo sapien
tatttatccactgcttcttatcatt

SEQ ID NO: 3929062 - DNA, 25 bp, Homo sapien
tcacattcaggaagtttatctccaa

SEQ ID NO: 3929063 - DNA, 25 bp, Homo sapien
tatccactgcttcttatcatttaag

SEQ ID NO: 3929064 - DNA, 25 bp, Homo sapien
tgacatacttcagatggtcagtaag

SEQ ID NO: 3929065 - DNA, 25 bp, Homo sapien
tggtggtagttagggtgtagaacca

SEQ ID NO: 3929066 - DNA, 25 bp, Homo sapien
ttgatgagcccaatatctacctggt

SEQ ID NO: 3929067 - DNA, 25 bp, Homo sapien
gtccccagccagacacgtaacccac

SEQ ID NO: 3929068 - DNA, 25 bp, Homo sapien
ctacagggctcttcggtgccttcca

SEQ ID NO: 3929069 - DNA, 25 bp, Homo sapien
cagggctcttcggtgccttccattt

SEQ ID NO: 3929070 - DNA, 25 bp, Homo sapien
gcgttatgcaatcgtattggtcagc

SEQ ID NO: 3929071 - DNA, 25 bp, Homo sapien
gtgctgccttcataatgcgttatgc

SEQ ID NO: 3929072 - DNA, 25 bp, Homo sapien
gcatcgccatagcaggtgtcttcct

SEQ ID NO: 3929073 - DNA, 25 bp, Homo sapien
cttaggatcccagccgcgtaccagg

SEQ ID NO: 3929074 - DNA, 25 bp, Homo sapien
tcctggtacttagacatgccgacac

SEQ ID NO: 3929075 - DNA, 25 bp, Homo sapien
cagcacagctcttatcaaagcttag

SEQ ID NO: 3929076 - DNA, 25 bp, Homo sapien
agggctggcacccatcagcttcaaa

SEQ ID NO: 3929077 - DNA, 25 bp, Homo sapien
aaaccacatcttatcgcatccactc

SEQ ID NO: 3929078 - DNA, 25 bp, Homo sapien
attgattgactcagcaatgcagggc

SEQ ID NO: 3929079 - DNA, 25 bp, Homo sapien
gaaatcttgctttcaggcaagggct

SEQ ID NO: 3929080 - DNA, 25 bp, Homo sapien
cagaaaattggattactaaggctca

SEQ ID NO: 3929081 - DNA, 25 bp, Homo sapien
ttgtgacctgcctagcagccgctga

SEQ ID NO: 3929082 - DNA, 25 bp, Homo sapien
gcaaccgtgggcaagttactgctcc

SEQ ID NO: 3929083 - DNA, 25 bp, Homo sapien
aatgtcacctatatgggatttgcct

SEQ ID NO: 3929084 - DNA, 25 bp, Homo sapien
gcccgattcctggatccaagtgtgg

SEQ ID NO: 3929085 - DNA, 25 bp, Homo sapien
ttagcctaagagactacatcccgcc

SEQ ID NO: 3929086 - DNA, 25 bp, Homo sapien
tatccgcccaaagctaccatagaga

SEQ ID NO: 3929087 - DNA, 25 bp, Homo sapien
ccaagtgtggaacggtacgccaaca

SEQ ID NO: 3929088 - DNA, 25 bp, Homo sapien
gctggccgcacttttggacttgcaa

SEQ ID NO: 3929089 - DNA, 25 bp, Homo sapien
agatcagtgccttccaatcgatgga

SEQ ID NO: 3929090 - DNA, 25 bp, Homo sapien
caagtccagtccgagtaatgaaggg

SEQ ID NO: 3929091 - DNA, 25 bp, Homo sapien
ttgaagacatgctgctcgctggccg

SEQ ID NO: 3929092 - DNA, 25 bp, Homo sapien
ggtcatagtctcgatcccgcgattt

SEQ ID NO: 3929093 - DNA, 25 bp, Homo sapien
tcttctttggacgaggcatagacac

SEQ ID NO: 3929094 - DNA, 25 bp, Homo sapien
gaggcatagacaccatgttcccgcc

SEQ ID NO: 3929095 - DNA, 25 bp, Homo sapien
tgggatggagtctctacccgagcag

SEQ ID NO: 3929096 - DNA, 25 bp, Homo sapien
taaaaacatgcatcccatcctaagg

SEQ ID NO: 3929097 - DNA, 25 bp, Homo sapien
tactagtgcgagtttacagtgaatc

SEQ ID NO: 3929098 - DNA, 25 bp, Homo sapien
ggtatacacatcttcaccctagaga

SEQ ID NO: 3929099 - DNA, 25 bp, Homo sapien
ctgctcgaatgtgatccgtggactc

SEQ ID NO: 3929100 - DNA, 25 bp, Homo sapien
ttcttctgctgctacgctctgaccc

SEQ ID NO: 3929101 - DNA, 25 bp, Homo sapien
ctttaggtcgatgtcgtgggctctc

SEQ ID NO: 3929102 - DNA, 25 bp, Homo sapien
acgctctgaccctccatctcgctct

SEQ ID NO: 3929103 - DNA, 25 bp, Homo sapien
ctcgctctgatctgctgctgtgcct

SEQ ID NO: 3929104 - DNA, 25 bp, Homo sapien
gagggcgattcccactgtgagcgcc

SEQ ID NO: 3929105 - DNA, 25 bp, Homo sapien
gatctcgagtggacagccgatggct

SEQ ID NO: 3929106 - DNA, 25 bp, Homo sapien
tcagaatcccgataggaaggcgtcg

SEQ ID NO: 3929107 - DNA, 25 bp, Homo sapien
tgtgagcgccttgaggagccatagc

SEQ ID NO: 3929108 - DNA, 25 bp, Homo sapien
ttggcagaggcgtgtcatccgagta

SEQ ID NO: 3929109 - DNA, 25 bp, Homo sapien
gtgtcatccgagtacttgcccctca

SEQ ID NO: 3929110 - DNA, 25 bp, Homo sapien
atcggcccactcgttatatttgtag

SEQ ID NO: 3929111 - DNA, 25 bp, Homo sapien
ccaagtgtcttctgtcatcggccca

SEQ ID NO: 3929112 - DNA, 25 bp, Homo sapien
aatgaaattccttcttcgccctcct

SEQ ID NO: 3929113 - DNA, 25 bp, Homo sapien
cctcctccgtgtcaaatgaaattcc

SEQ ID NO: 3929114 - DNA, 25 bp, Homo sapien
cgctcctcctccgtgtcaaatgaaa

SEQ ID NO: 3929115 - DNA, 25 bp, Homo sapien
aaattccttcttcgccctcctcacg

SEQ ID NO: 3929116 - DNA, 25 bp, Homo sapien
cattgatctgtctccgctgagctga

SEQ ID NO: 3929117 - DNA, 25 bp, Homo sapien
tcatgtaccaatcccgatcggcttg

SEQ ID NO: 3929118 - DNA, 25 bp, Homo sapien
tgtggaactcgtcatagccctcgtc

SEQ ID NO: 3929119 - DNA, 25 bp, Homo sapien
gcttctgtttatgcaggtgctgctc

SEQ ID NO: 3929120 - DNA, 25 bp, Homo sapien
cacgtgctctacctccagctctgaa

SEQ ID NO: 3929121 - DNA, 25 bp, Homo sapien
tgaatctgctccaacttctgcaggc

SEQ ID NO: 3929122 - DNA, 25 bp, Homo sapien
tgctctacctccagctctgaatctg

SEQ ID NO: 3929123 - DNA, 25 bp, Homo sapien
gggataacctgctgcttccccacgt

SEQ ID NO: 3929124 - DNA, 25 bp, Homo sapien
caaatcacctgcaggagtttgttcc

SEQ ID NO: 3929125 - DNA, 25 bp, Homo sapien
acacatcaagtcctgacagaaggcc

SEQ ID NO: 3929126 - DNA, 25 bp, Homo sapien
gaaaggttatgaggtaagtccacac

SEQ ID NO: 3929127 - DNA, 25 bp, Homo sapien
gcagcagcacctttcatctaaatca

SEQ ID NO: 3929128 - DNA, 25 bp, Homo sapien
tgcttggtgaagacaatgcgcccat

SEQ ID NO: 3929129 - DNA, 25 bp, Homo sapien
ggtttgtctcccagcgctcgttatc

SEQ ID NO: 3929130 - DNA, 25 bp, Homo sapien
ccactggtgagcatgcggtttgtct

SEQ ID NO: 3929131 - DNA, 25 bp, Homo sapien
accatcagatgcaccttggccgcgt

SEQ ID NO: 3929132 - DNA, 25 bp, Homo sapien
caagaaggccatgttcataagatcc

SEQ ID NO: 3929133 - DNA, 25 bp, Homo sapien
agagcgatgcccgttaaaatcagca

SEQ ID NO: 3929134 - DNA, 25 bp, Homo sapien
gaaagagcgatgcccgttaaaatca

SEQ ID NO: 3929135 - DNA, 25 bp, Homo sapien
gcccgttaaaatcagcaagaaggcc

SEQ ID NO: 3929136 - DNA, 25 bp, Homo sapien
tgtgcttccgcactgtctggctgcc

SEQ ID NO: 3929137 - DNA, 25 bp, Homo sapien
gaagtagcatccttcactggaatca

SEQ ID NO: 3929138 - DNA, 25 bp, Homo sapien
atgatggccaggtcagaagtagcat

SEQ ID NO: 3929139 - DNA, 25 bp, Homo sapien
ggtcagaagtagcatccttcactgg

SEQ ID NO: 3929140 - DNA, 25 bp, Homo sapien
gaaaaggaaaaaggtcagtctgctc

SEQ ID NO: 3929141 - DNA, 25 bp, Homo sapien
ccgtcacagctttatctggctcttc

SEQ ID NO: 3929142 - DNA, 25 bp, Homo sapien
tcctccttcttgacgcccattatat

SEQ ID NO: 3929143 - DNA, 25 bp, Homo sapien
tcctccgtcacagctttatctggct

SEQ ID NO: 3929144 - DNA, 25 bp, Homo sapien
ttatatctcccagtttggtccccgc

SEQ ID NO: 3929145 - DNA, 25 bp, Homo sapien
caggactgaaactgctacttgagaa

SEQ ID NO: 3929146 - DNA, 25 bp, Homo sapien
gaatgaggacttcggcaagagtctg

SEQ ID NO: 3929147 - DNA, 25 bp, Homo sapien
gagatggttctcatcgacctcagga

SEQ ID NO: 3929148 - DNA, 25 bp, Homo sapien
gtctgagacaccaaagcagccaggg

SEQ ID NO: 3929149 - DNA, 25 bp, Homo sapien
gcaaattcactgctggcttcgctct

SEQ ID NO: 3929150 - DNA, 25 bp, Homo sapien
tgcaaattcactgctggcttcgctc

SEQ ID NO: 3929151 - DNA, 25 bp, Homo sapien
ttgcaaattcactgctggcttcgct

SEQ ID NO: 3929152 - DNA, 25 bp, Homo sapien
tttgcaaattcactgctggcttcgc

SEQ ID NO: 3929153 - DNA, 25 bp, Homo sapien
aaccacgatcacgatgctgttgtct

SEQ ID NO: 3929154 - DNA, 25 bp, Homo sapien
gacatggcagctacacgccggggct

SEQ ID NO: 3929155 - DNA, 25 bp, Homo sapien
tcatcccatagtccgtgtaaccatc

SEQ ID NO: 3929156 - DNA, 25 bp, Homo sapien
catcttcatgcaggtactgcgtcag

SEQ ID NO: 3929157 - DNA, 25 bp, Homo sapien
ggtccgagtcttagcagatcacacc

SEQ ID NO: 3929158 - DNA, 25 bp, Homo sapien
gggaataactacatggctcagcccc

SEQ ID NO: 3929159 - DNA, 25 bp, Homo sapien
tgggtggaagctactagggaataac

SEQ ID NO: 3929160 - DNA, 25 bp, Homo sapien
gatcacaccctttagcaaaaatggg

SEQ ID NO: 3929161 - DNA, 25 bp, Homo sapien
gagcaggatcccgtcagtcatgtat

SEQ ID NO: 3929162 - DNA, 25 bp, Homo sapien
tgtagtgatccaggtcggcttcccg

SEQ ID NO: 3929163 - DNA, 25 bp, Homo sapien
caaagagcacgtcagtgttgaggga

SEQ ID NO: 3929164 - DNA, 25 bp, Homo sapien
tcttcaaagcggatggcatagccca

SEQ ID NO: 3929165 - DNA, 25 bp, Homo sapien
tgaagactgaagcaatggagccact

SEQ ID NO: 3929166 - DNA, 25 bp, Homo sapien
tggagcaacccactagctactggtg

SEQ ID NO: 3929167 - DNA, 25 bp, Homo sapien
gctactggtggtgcactggtcaaca

SEQ ID NO: 3929168 - DNA, 25 bp, Homo sapien
agaacagcatgaactacaacccgag

SEQ ID NO: 3929169 - DNA, 25 bp, Homo sapien
gatgtcaacagggaaggtacggcca

SEQ ID NO: 3929170 - DNA, 25 bp, Homo sapien
gatgtgacgatgagcttcaggtctg

SEQ ID NO: 3929171 - DNA, 25 bp, Homo sapien
cttcaggtctgagcgccgagccact

SEQ ID NO: 3929172 - DNA, 25 bp, Homo sapien
aaacttctccgcatccatcgtggct

SEQ ID NO: 3929173 - DNA, 25 bp, Homo sapien
caggcactgctctggaatggagcca

SEQ ID NO: 3929174 - DNA, 25 bp, Homo sapien
tcagttcgtaacatggtggcctcaa

SEQ ID NO: 3929175 - DNA, 25 bp, Homo sapien
tgactgcgaggcctctacaagaggg

SEQ ID NO: 3929176 - DNA, 25 bp, Homo sapien
cttcgcatcagagaagtgcgtggca

SEQ ID NO: 3929177 - DNA, 25 bp, Homo sapien
ggcccccgacaggtgcacctgcaag

SEQ ID NO: 3929178 - DNA, 25 bp, Homo sapien
tcttggccaggcatgaagataagga

SEQ ID NO: 3929179 - DNA, 25 bp, Homo sapien
cctgcaaggactgcttcactgcagc

SEQ ID NO: 3929180 - DNA, 25 bp, Homo sapien
aagataaggatgtctccaggggccc

SEQ ID NO: 3929181 - DNA, 25 bp, Homo sapien
gccagggcaggcgcgttctccagtt

SEQ ID NO: 3929182 - DNA, 25 bp, Homo sapien
taaccagaatcgataacaaacatga

SEQ ID NO: 3929183 - DNA, 25 bp, Homo sapien
aacatgatgccgtcaacagtgagag

SEQ ID NO: 3929184 - DNA, 25 bp, Homo sapien
gacgtctcggcaatattggtggcaa

SEQ ID NO: 3929185 - DNA, 25 bp, Homo sapien
tgcacttccgaacgccatctggagc

SEQ ID NO: 3929186 - DNA, 25 bp, Homo sapien
cgccctgaccgctggttggcattgg

SEQ ID NO: 3929187 - DNA, 25 bp, Homo sapien
ggctcgccctgaccgctggttggca

SEQ ID NO: 3929188 - DNA, 25 bp, Homo sapien
ggcctggctaatgggatagatctgc

SEQ ID NO: 3929189 - DNA, 25 bp, Homo sapien
gcagagcatccatgccaatcctggg

SEQ ID NO: 3929190 - DNA, 25 bp, Homo sapien
ttcttgtaggcgctctgggtgtaga

SEQ ID NO: 3929191 - DNA, 25 bp, Homo sapien
gccccgaggatccagagctgataca

SEQ ID NO: 3929192 - DNA, 25 bp, Homo sapien
ttggccaggttagtcctctggatct

SEQ ID NO: 3929193 - DNA, 25 bp, Homo sapien
tagagttgagcatgttgtcctccgg

SEQ ID NO: 3929194 - DNA, 25 bp, Homo sapien
tgagcaaacccggatatttgacggg

SEQ ID NO: 3929195 - DNA, 25 bp, Homo sapien
aagaaggaagtcaagcgccagcacc

SEQ ID NO: 3929196 - DNA, 25 bp, Homo sapien
ctaggagagatgagcaaacccggat

SEQ ID NO: 3929197 - DNA, 25 bp, Homo sapien
ccggatatttgacgggacagtagag

SEQ ID NO: 3929198 - DNA, 25 bp, Homo sapien
cgatgagcaggatctcggagctgca

SEQ ID NO: 3929199 - DNA, 25 bp, Homo sapien
tgcagcccatgtcacaggacacgat

SEQ ID NO: 3929200 - DNA, 25 bp, Homo sapien
cacgatgagcatcttggacagggca

SEQ ID NO: 3929201 - DNA, 25 bp, Homo sapien
ctgggaccgagagcatggaaacgat

SEQ ID NO: 3929202 - DNA, 25 bp, Homo sapien
tgaaatgatcgttacaccagatggt

SEQ ID NO: 3929203 - DNA, 25 bp, Homo sapien
taggtcaaatgatcgctctcaggaa

SEQ ID NO: 3929204 - DNA, 25 bp, Homo sapien
tcaggaacagcgaacttctcccgga

SEQ ID NO: 3929205 - DNA, 25 bp, Homo sapien
ccagatggtggagtaattattgttc

SEQ ID NO: 3929206 - DNA, 25 bp, Homo sapien
cctttcctctcgaccctcccctcat

SEQ ID NO: 3929207 - DNA, 25 bp, Homo sapien
ctttcctctcgaccctcccctcatc

SEQ ID NO: 3929208 - DNA, 25 bp, Homo sapien
tttcctctcgaccctcccctcatcc

SEQ ID NO: 3929209 - DNA, 25 bp, Homo sapien
ggcagcacagatgcacttcctgacg

SEQ ID NO: 3929210 - DNA, 25 bp, Homo sapien
agtgccacacgaggccaggctcatc

SEQ ID NO: 3929211 - DNA, 25 bp, Homo sapien
tgatgtccttgagttgagctcgcac

SEQ ID NO: 3929212 - DNA, 25 bp, Homo sapien
tgacgatgtcccagtcagtgccaca

SEQ ID NO: 3929213 - DNA, 25 bp, Homo sapien
tggcggaagcccagatctgcagaac

SEQ ID NO: 3929214 - DNA, 25 bp, Homo sapien
gcgaccccatcccttaacactcttg

SEQ ID NO: 3929215 - DNA, 25 bp, Homo sapien
aacaacacccatttgggcagcgacc

SEQ ID NO: 3929216 - DNA, 25 bp, Homo sapien
tgacacagcctttggcggaagccca

SEQ ID NO: 3929217 - DNA, 25 bp, Homo sapien
ggatgttcacgtactccccgattcc

SEQ ID NO: 3929218 - DNA, 25 bp, Homo sapien
ggtggtcatgaccaactcgtgatac

SEQ ID NO: 3929219 - DNA, 25 bp, Homo sapien
ctcgtgatacactatgtaatctggg

SEQ ID NO: 3929220 - DNA, 25 bp, Homo sapien
agggcatccctgtgcggatgttcac

SEQ ID NO: 3929221 - DNA, 25 bp, Homo sapien
cgctatagaacatggggcccagctc

SEQ ID NO: 3929222 - DNA, 25 bp, Homo sapien
tgcccgcctgtttcacgctatagaa

SEQ ID NO: 3929223 - DNA, 25 bp, Homo sapien
gtccacagcggtcacacactgcata

SEQ ID NO: 3929224 - DNA, 25 bp, Homo sapien
tgccgtgacttgcccgcctgtttca

SEQ ID NO: 3929225 - DNA, 25 bp, Homo sapien
gaggcaaggcaacgaattcatggtg

SEQ ID NO: 3929226 - DNA, 25 bp, Homo sapien
cacagcctttatgtttgcagagaga

SEQ ID NO: 3929227 - DNA, 25 bp, Homo sapien
taagtgggttggatgaccgcaagtc

SEQ ID NO: 3929228 - DNA, 25 bp, Homo sapien
caagtcttcaataccaagcggaggg

SEQ ID NO: 3929229 - DNA, 25 bp, Homo sapien
cagttaacacacataagcagttgca

SEQ ID NO: 3929230 - DNA, 25 bp, Homo sapien
caatgcctggatcctaattcaagca

SEQ ID NO: 3929231 - DNA, 25 bp, Homo sapien
tcaagcaaatcgatcataagaagtt

SEQ ID NO: 3929232 - DNA, 25 bp, Homo sapien
ggagaaatccaaatgcggactggag

SEQ ID NO: 3929233 - DNA, 25 bp, Homo sapien
tcctccatggcagaggcttcctctt

SEQ ID NO: 3929234 - DNA, 25 bp, Homo sapien
tgctcctgccgccgggctcgcagct

SEQ ID NO: 3929235 - DNA, 25 bp, Homo sapien
agggggctgcgcttctcctgctcct

SEQ ID NO: 3929236 - DNA, 25 bp, Homo sapien
gctcgcagctgctcctcggccagcg

SEQ ID NO: 3929237 - DNA, 25 bp, Homo sapien
gcttcgcatttgagaccctcccaga

SEQ ID NO: 3929238 - DNA, 25 bp, Homo sapien
tcctgaggacaaacgaggcttcgca

SEQ ID NO: 3929239 - DNA, 25 bp, Homo sapien
tactgtcatgcatcagtgtgccacg

SEQ ID NO: 3929240 - DNA, 25 bp, Homo sapien
taacaacatgactcaaggcaggctg

SEQ ID NO: 3929241 - DNA, 25 bp, Homo sapien
tgccgtccccatgttcgactggcga

SEQ ID NO: 3929242 - DNA, 25 bp, Homo sapien
gagagatcaggaaacaccgtgccct

SEQ ID NO: 3929243 - DNA, 25 bp, Homo sapien
gacttactgttcctaacccatggtg

SEQ ID NO: 3929244 - DNA, 25 bp, Homo sapien
cgtgcgccactccaactgtgtagca

SEQ ID NO: 3929245 - DNA, 25 bp, Homo sapien
gcctggagtgtagatcttcgtagac

SEQ ID NO: 3929246 - DNA, 25 bp, Homo sapien
ctggcgtgcggcgaggggtcatggg

SEQ ID NO: 3929247 - DNA, 25 bp, Homo sapien
ttgctctttccggcctggagtgtag

SEQ ID NO: 3929248 - DNA, 25 bp, Homo sapien
cgaggggtcatgggctccccttgct

SEQ ID NO: 3929249 - DNA, 25 bp, Homo sapien
tgctgccatcctctctggggacagc

SEQ ID NO: 3929250 - DNA, 25 bp, Homo sapien
gccatcctctctggggacagcctca

SEQ ID NO: 3929251 - DNA, 25 bp, Homo sapien
ctgccatcctctctggggacagcct

SEQ ID NO: 3929252 - DNA, 25 bp, Homo sapien
ctgctgccatcctctctggggacag

SEQ ID NO: 3929253 - DNA, 25 bp, Homo sapien
aagggctttgtccgcagcctcaggg

SEQ ID NO: 3929254 - DNA, 25 bp, Homo sapien
gatatgcacagatgaaagtcctcag

SEQ ID NO: 3929255 - DNA, 25 bp, Homo sapien
gatgaaagtcctcagatgaaagggc

SEQ ID NO: 3929256 - DNA, 25 bp, Homo sapien
gggccgtgatatgcacagatgaaag

SEQ ID NO: 3929257 - DNA, 25 bp, Homo sapien
ctcccgccatgccgtgctcctgcat

SEQ ID NO: 3929258 - DNA, 25 bp, Homo sapien
cgtgctcctgcatggaagaactcca

SEQ ID NO: 3929259 - DNA, 25 bp, Homo sapien
ctgccccggcagcacctcggatact

SEQ ID NO: 3929260 - DNA, 25 bp, Homo sapien
ccggcagcacctcggatactctgca

SEQ ID NO: 3929261 - DNA, 25 bp, Homo sapien
agtgtcctgggccagttttagatgc

SEQ ID NO: 3929262 - DNA, 25 bp, Homo sapien
gtcacgcatacaccaagtgtcctgg

SEQ ID NO: 3929263 - DNA, 25 bp, Homo sapien
acagccaagtcacgcatacaccaag

SEQ ID NO: 3929264 - DNA, 25 bp, Homo sapien
tcctgggccagttttagatgcgatg

SEQ ID NO: 3929265 - DNA, 25 bp, Homo sapien
gtcctccaacctagggccaagatta

SEQ ID NO: 3929266 - DNA, 25 bp, Homo sapien
ggcagccctctcttcactacagagc

SEQ ID NO: 3929267 - DNA, 25 bp, Homo sapien
acagagccctgagaagcccatttcc

SEQ ID NO: 3929268 - DNA, 25 bp, Homo sapien
tagtcctccaacctagggccaagat

SEQ ID NO: 3929269 - DNA, 25 bp, Homo sapien
agtctttactagagtccagaatcat

SEQ ID NO: 3929270 - DNA, 25 bp, Homo sapien
cattcgtattgatctttctcccgta

SEQ ID NO: 3929271 - DNA, 25 bp, Homo sapien
gcattcatgtaaggtggactcaggg

SEQ ID NO: 3929272 - DNA, 25 bp, Homo sapien
ttgttctgtggatccaaaagagcat

SEQ ID NO: 3929273 - DNA, 25 bp, Homo sapien
gatctttctcccgtatctgggagca

SEQ ID NO: 3929274 - DNA, 25 bp, Homo sapien
ggttagatttttagtcccactcagc

SEQ ID NO: 3929275 - DNA, 25 bp, Homo sapien
ttttagtcccactcagcagctttgc

SEQ ID NO: 3929276 - DNA, 25 bp, Homo sapien
taccactctttggagtgtgagtgaa

SEQ ID NO: 3929277 - DNA, 25 bp, Homo sapien
agataccactctttggagtgtgagt

SEQ ID NO: 3929278 - DNA, 25 bp, Homo sapien
tgctccacaacaggagtgccgtgca

SEQ ID NO: 3929279 - DNA, 25 bp, Homo sapien
gctccacaacaggagtgccgtgcat

SEQ ID NO: 3929280 - DNA, 25 bp, Homo sapien
ccagctgctccacaacaggagtgcc

SEQ ID NO: 3929281 - DNA, 25 bp, Homo sapien
gctgctccacaacaggagtgccgtg

SEQ ID NO: 3929282 - DNA, 25 bp, Homo sapien
ttgtccatgacagagttccatgtgg

SEQ ID NO: 3929283 - DNA, 25 bp, Homo sapien
gggacataacgtggcagactgctct

SEQ ID NO: 3929284 - DNA, 25 bp, Homo sapien
actgctatttaagtgtgtatatgcc

SEQ ID NO: 3929285 - DNA, 25 bp, Homo sapien
gtggctttctctgtactcctcccag

SEQ ID NO: 3929286 - DNA, 25 bp, Homo sapien
cctcagccacaaagaaggggtggag

SEQ ID NO: 3929287 - DNA, 25 bp, Homo sapien
cagcagggaaagagctgcactctct

SEQ ID NO: 3929288 - DNA, 25 bp, Homo sapien
tctctcctcagccacaaagaagggg

SEQ ID NO: 3929289 - DNA, 25 bp, Homo sapien
tcagcagggaaagagctgcactctc

SEQ ID NO: 3929290 - DNA, 25 bp, Homo sapien
tcaaaggtgagaacctgagatattt

SEQ ID NO: 3929291 - DNA, 25 bp, Homo sapien
ttaagtgaccagacatgctccaggg

SEQ ID NO: 3929292 - DNA, 25 bp, Homo sapien
tcaggagacagcactcatataagtg

SEQ ID NO: 3929293 - DNA, 25 bp, Homo sapien
cagggtgtttagagcaactttcaaa

SEQ ID NO: 3929294 - DNA, 25 bp, Homo sapien
ttcattcgttcaggaatgtcatcgt

SEQ ID NO: 3929295 - DNA, 25 bp, Homo sapien
cattcgttcaggaatgtcatcgtgt

SEQ ID NO: 3929296 - DNA, 25 bp, Homo sapien
tcattcattcgttcaggaatgtcat

SEQ ID NO: 3929297 - DNA, 25 bp, Homo sapien
ttcgttcaggaatgtcatcgtgtac

SEQ ID NO: 3929298 - DNA, 25 bp, Homo sapien
aagtcagagtcacagcctagacaca

SEQ ID NO: 3929299 - DNA, 25 bp, Homo sapien
gcctccccatgaagcttccacatct

SEQ ID NO: 3929300 - DNA, 25 bp, Homo sapien
tctttctcctgcactgtaaggccct

SEQ ID NO: 3929301 - DNA, 25 bp, Homo sapien
tttctcctgcactgtaaggccctgg

SEQ ID NO: 3929302 - DNA, 25 bp, Homo sapien
tgatgtcatggccacgagtgagcat

SEQ ID NO: 3929303 - DNA, 25 bp, Homo sapien
gtcatggccacgagtgagcatccca

SEQ ID NO: 3929304 - DNA, 25 bp, Homo sapien
catggccacgagtgagcatcccagt

SEQ ID NO: 3929305 - DNA, 25 bp, Homo sapien
atgtcatggccacgagtgagcatcc

SEQ ID NO: 3929306 - DNA, 25 bp, Homo sapien
tgcctgaaaggtgtacttccctgta

SEQ ID NO: 3929307 - DNA, 25 bp, Homo sapien
cacaactgcgggttctttggctcct

SEQ ID NO: 3929308 - DNA, 25 bp, Homo sapien
ttttaagtgaacactaaggcggtca

SEQ ID NO: 3929309 - DNA, 25 bp, Homo sapien
taaggcggtcaagacgctgacagga

SEQ ID NO: 3929310 - DNA, 25 bp, Homo sapien
gctgagtgtccaggcccactggcta

SEQ ID NO: 3929311 - DNA, 25 bp, Homo sapien
gtccaggcccactggctatgtggga

SEQ ID NO: 3929312 - DNA, 25 bp, Homo sapien
ggctgagtgtccaggcccactggct

SEQ ID NO: 3929313 - DNA, 25 bp, Homo sapien
ggcccactggctatgtgggatctgt

SEQ ID NO: 3929314 - DNA, 25 bp, Homo sapien
catgctgtgcatgtcgctttctgga

SEQ ID NO: 3929315 - DNA, 25 bp, Homo sapien
tttctggacacaagcgctatttgag

SEQ ID NO: 3929316 - DNA, 25 bp, Homo sapien
gatacaggcatgctgtgcatgtcgc

SEQ ID NO: 3929317 - DNA, 25 bp, Homo sapien
gggctatttgtacgctcttctttaa

SEQ ID NO: 3929318 - DNA, 25 bp, Homo sapien
ctcaatgtgtctgcagagcctaggg

SEQ ID NO: 3929319 - DNA, 25 bp, Homo sapien
gcagagcctagggcaccagatccac

SEQ ID NO: 3929320 - DNA, 25 bp, Homo sapien
tgcagagcctagggcaccagatcca

SEQ ID NO: 3929321 - DNA, 25 bp, Homo sapien
ccctcaatgtgtctgcagagcctag

SEQ ID NO: 3929322 - DNA, 25 bp, Homo sapien
taagaagcccttaatatgtgcaaag

SEQ ID NO: 3929323 - DNA, 25 bp, Homo sapien
gaccagtgcacgtattgcaaccaat

SEQ ID NO: 3929324 - DNA, 25 bp, Homo sapien
gaatctcgggaggtgacagaccagt

SEQ ID NO: 3929325 - DNA, 25 bp, Homo sapien
tatgagcaagttgattcagtcactc

SEQ ID NO: 3929326 - DNA, 25 bp, Homo sapien
ctccatggatgctgaattgtctgcc

SEQ ID NO: 3929327 - DNA, 25 bp, Homo sapien
ccatggatgctgaattgtctgccat

SEQ ID NO: 3929328 - DNA, 25 bp, Homo sapien
tccatggatgctgaattgtctgcca

SEQ ID NO: 3929329 - DNA, 25 bp, Homo sapien
tctccatggatgctgaattgtctgc

SEQ ID NO: 3929330 - DNA, 25 bp, Homo sapien
ctagcaaggggactgtcagctcttc

SEQ ID NO: 3929331 - DNA, 25 bp, Homo sapien
agcaaggggactgtcagctcttcta

SEQ ID NO: 3929332 - DNA, 25 bp, Homo sapien
gcaaggggactgtcagctcttctag

SEQ ID NO: 3929333 - DNA, 25 bp, Homo sapien
tagcaaggggactgtcagctcttct

SEQ ID NO: 3929334 - DNA, 25 bp, Homo sapien
cctccaacagtaagtaccgaataat

SEQ ID NO: 3929335 - DNA, 25 bp, Homo sapien
atggttcctgttggccctatcagct

SEQ ID NO: 3929336 - DNA, 25 bp, Homo sapien
tcttcccgtagtttcaagccctcca

SEQ ID NO: 3929337 - DNA, 25 bp, Homo sapien
cctgttggccctatcagctgatgac

SEQ ID NO: 3929338 - DNA, 25 bp, Homo sapien
tatggtattattcaattcgtcttta

SEQ ID NO: 3929339 - DNA, 25 bp, Homo sapien
cgtctttatactggagaacctcaag

SEQ ID NO: 3929340 - DNA, 25 bp, Homo sapien
tactggagaacctcaagagttgaag

SEQ ID NO: 3929341 - DNA, 25 bp, Homo sapien
gttgaagatttgtaagtttgaaaca

SEQ ID NO: 3929342 - DNA, 25 bp, Homo sapien
tgcatctcctcggatttccttggca

SEQ ID NO: 3929343 - DNA, 25 bp, Homo sapien
tgtgacagatcgagctgcatctcct

SEQ ID NO: 3929344 - DNA, 25 bp, Homo sapien
ctgccttaacaaagacagaagatgt

SEQ ID NO: 3929345 - DNA, 25 bp, Homo sapien
tttatcagagctgccttaacaaaga

SEQ ID NO: 3929346 - DNA, 25 bp, Homo sapien
agaaggtttatgacctgggcttgca

SEQ ID NO: 3929347 - DNA, 25 bp, Homo sapien
aatgccaggcaccagaaatctttcc

SEQ ID NO: 3929348 - DNA, 25 bp, Homo sapien
aaatctttcccctaacaatccagtg

SEQ ID NO: 3929349 - DNA, 25 bp, Homo sapien
tcagtcggtagctgctgtgcaacca

SEQ ID NO: 3929350 - DNA, 25 bp, Homo sapien
ctcacgcttcaagttggcggctttg

SEQ ID NO: 3929351 - DNA, 25 bp, Homo sapien
tgctcacgcttcaagttggcggctt

SEQ ID NO: 3929352 - DNA, 25 bp, Homo sapien
ctgctcacgcttcaagttggcggct

SEQ ID NO: 3929353 - DNA, 25 bp, Homo sapien
gctcacgcttcaagttggcggcttt

SEQ ID NO: 3929354 - DNA, 25 bp, Homo sapien
tggtcagtgtgtccagcacccctga

SEQ ID NO: 3929355 - DNA, 25 bp, Homo sapien
cttggtcagtgtgtccagcacccct

SEQ ID NO: 3929356 - DNA, 25 bp, Homo sapien
ggtcagtgtgtccagcacccctgac

SEQ ID NO: 3929357 - DNA, 25 bp, Homo sapien
ttggtcagtgtgtccagcacccctg

SEQ ID NO: 3929358 - DNA, 25 bp, Homo sapien
aagcactgttaggtttctctggttc

SEQ ID NO: 3929359 - DNA, 25 bp, Homo sapien
caaagcactgttaggtttctctggt

SEQ ID NO: 3929360 - DNA, 25 bp, Homo sapien
ccaaagcactgttaggtttctctgg

SEQ ID NO: 3929361 - DNA, 25 bp, Homo sapien
tccaaagcactgttaggtttctctg

SEQ ID NO: 3929362 - DNA, 25 bp, Homo sapien
ttttcgccagttctaggcacagcag

SEQ ID NO: 3929363 - DNA, 25 bp, Homo sapien
ctctttcgttttcgccagttctagg

SEQ ID NO: 3929364 - DNA, 25 bp, Homo sapien
tcgttttcgccagttctaggcacag

SEQ ID NO: 3929365 - DNA, 25 bp, Homo sapien
tatatttctctttcgttttcgccag

SEQ ID NO: 3929366 - DNA, 25 bp, Homo sapien
attaaaagagttctatagcatctgt

SEQ ID NO: 3929367 - DNA, 25 bp, Homo sapien
tattaaaagagttctatagcatctg

SEQ ID NO: 3929368 - DNA, 25 bp, Homo sapien
catattaaaagagttctatagcatc

SEQ ID NO: 3929369 - DNA, 25 bp, Homo sapien
atattaaaagagttctatagcatct

SEQ ID NO: 3929370 - DNA, 25 bp, Homo sapien
tcaactgcagaccaagcacagggag

SEQ ID NO: 3929371 - DNA, 25 bp, Homo sapien
aattgctccgacagtacttggtggc

SEQ ID NO: 3929372 - DNA, 25 bp, Homo sapien
ccagagagtcggcagcagaaagcat

SEQ ID NO: 3929373 - DNA, 25 bp, Homo sapien
ggccgtgaagcaggaaatcgactct

SEQ ID NO: 3929374 - DNA, 25 bp, Homo sapien
tactgaactttcataccactttgta

SEQ ID NO: 3929375 - DNA, 25 bp, Homo sapien
gaagttctctctcctaatactgaac

SEQ ID NO: 3929376 - DNA, 25 bp, Homo sapien
tctccatagggtggaaattgtgttc

SEQ ID NO: 3929377 - DNA, 25 bp, Homo sapien
cataccactttgtatctccataggg

SEQ ID NO: 3929378 - DNA, 25 bp, Homo sapien
caggcttaaaactctgctgcagatt

SEQ ID NO: 3929379 - DNA, 25 bp, Homo sapien
cttccaggcaattatgaattcctct

SEQ ID NO: 3929380 - DNA, 25 bp, Homo sapien
catgactaagttgattagccatcca

SEQ ID NO: 3929381 - DNA, 25 bp, Homo sapien
caagatcaggcttaaaactctgctg

SEQ ID NO: 3929382 - DNA, 25 bp, Homo sapien
cattttccagcattaaatgtgaggg

SEQ ID NO: 3929383 - DNA, 25 bp, Homo sapien
cattaaatgtgagggaaatttgggt

SEQ ID NO: 3929384 - DNA, 25 bp, Homo sapien
catacattttccagcattaaatgtg

SEQ ID NO: 3929385 - DNA, 25 bp, Homo sapien
ccagcattaaatgtgagggaaattt

SEQ ID NO: 3929386 - DNA, 25 bp, Homo sapien
tctatactttcaggacaagggcttg

SEQ ID NO: 3929387 - DNA, 25 bp, Homo sapien
tatactttcaggacaagggcttgcc

SEQ ID NO: 3929388 - DNA, 25 bp, Homo sapien
ctatactttcaggacaagggcttgc

SEQ ID NO: 3929389 - DNA, 25 bp, Homo sapien
tttctatactttcaggacaagggct

SEQ ID NO: 3929390 - DNA, 25 bp, Homo sapien
gacccatgggctagtgacaaccttt

SEQ ID NO: 3929391 - DNA, 25 bp, Homo sapien
catgggctagtgacaaccttttggg

SEQ ID NO: 3929392 - DNA, 25 bp, Homo sapien
cccatgggctagtgacaaccttttg

SEQ ID NO: 3929393 - DNA, 25 bp, Homo sapien
tgacccatgggctagtgacaacctt

SEQ ID NO: 3929394 - DNA, 25 bp, Homo sapien
ttcttttctcgtatactatactctg

SEQ ID NO: 3929395 - DNA, 25 bp, Homo sapien
ttctcgtatactatactctgcacat

SEQ ID NO: 3929396 - DNA, 25 bp, Homo sapien
tcgtatactatactctgcacatttt

SEQ ID NO: 3929397 - DNA, 25 bp, Homo sapien
ttttctcgtatactatactctgcac

SEQ ID NO: 3929398 - DNA, 25 bp, Homo sapien
aaagctgtcttgagccactcataaa

SEQ ID NO: 3929399 - DNA, 25 bp, Homo sapien
ttaaagctgtcttgagccactcata

SEQ ID NO: 3929400 - DNA, 25 bp, Homo sapien
tattaaagctgtcttgagccactca

SEQ ID NO: 3929401 - DNA, 25 bp, Homo sapien
gtgtattaaagctgtcttgagccac

SEQ ID NO: 3929402 - DNA, 25 bp, Homo sapien
tctcttgaatgtgtgggacgtggca

SEQ ID NO: 3929403 - DNA, 25 bp, Homo sapien
tgtgggacgtggcagtctagagtgg

SEQ ID NO: 3929404 - DNA, 25 bp, Homo sapien
aatgtgtgggacgtggcagtctaga

SEQ ID NO: 3929405 - DNA, 25 bp, Homo sapien
tgaatgtgtgggacgtggcagtcta

SEQ ID NO: 3929406 - DNA, 25 bp, Homo sapien
tgggaggatagcacaaccacatgcc

SEQ ID NO: 3929407 - DNA, 25 bp, Homo sapien
gggaggatagcacaaccacatgcct

SEQ ID NO: 3929408 - DNA, 25 bp, Homo sapien
gccataggttctgtcggccacttcc

SEQ ID NO: 3929409 - DNA, 25 bp, Homo sapien
cataggttctgtcggccacttcctt

SEQ ID NO: 3929410 - DNA, 25 bp, Homo sapien
ttcttccgcatgtagccgcctgcac

SEQ ID NO: 3929411 - DNA, 25 bp, Homo sapien
cttccgcatgtagccgcctgcacca

SEQ ID NO: 3929412 - DNA, 25 bp, Homo sapien
ttttgccgattgaggttatggtctt

SEQ ID NO: 3929413 - DNA, 25 bp, Homo sapien
attttgccgattgaggttatggtct

SEQ ID NO: 3929414 - DNA, 25 bp, Homo sapien
ttgccgattgaggttatggtctttc

SEQ ID NO: 3929415 - DNA, 25 bp, Homo sapien
tgccgattgaggttatggtctttcc

SEQ ID NO: 3929416 - DNA, 25 bp, Homo sapien
taatgaaccaagagcaattctgagc

SEQ ID NO: 3929417 - DNA, 25 bp, Homo sapien
ccgaggcagtgtctttccaagggct

SEQ ID NO: 3929418 - DNA, 25 bp, Homo sapien
agaaaatgcctctctgcgtgaacag

SEQ ID NO: 3929419 - DNA, 25 bp, Homo sapien
aagggctgcctggacatatcgtgtg

SEQ ID NO: 3929420 - DNA, 25 bp, Homo sapien
gagaatttctttgcttgctttgcca

SEQ ID NO: 3929421 - DNA, 25 bp, Homo sapien
ttaacaagcacaacagcatgctgct

SEQ ID NO: 3929422 - DNA, 25 bp, Homo sapien
ttaaactgagaatttctttgcttgc

SEQ ID NO: 3929423 - DNA, 25 bp, Homo sapien
ttgccatatccttgcttggcttttc

SEQ ID NO: 3929424 - DNA, 25 bp, Homo sapien
ggccatgctaatcatgctaatcttc

SEQ ID NO: 3929425 - DNA, 25 bp, Homo sapien
tcacccagcaaggtgtttctggtac

SEQ ID NO: 3929426 - DNA, 25 bp, Homo sapien
accacttctcacccagcaaggtgtt

SEQ ID NO: 3929427 - DNA, 25 bp, Homo sapien
ccactggtaagaccacttctcaccc

SEQ ID NO: 3929428 - DNA, 25 bp, Homo sapien
cacttctcacccagcaaggtgtttc

SEQ ID NO: 3929429 - DNA, 25 bp, Homo sapien
taatctatggatagtggaaggccca

SEQ ID NO: 3929430 - DNA, 25 bp, Homo sapien
taacctagggcatgtagagcaggct

SEQ ID NO: 3929431 - DNA, 25 bp, Homo sapien
gctggaatctctcggtcctgtagca

SEQ ID NO: 3929432 - DNA, 25 bp, Homo sapien
ggaaggcccatttcttaagtacaca

SEQ ID NO: 3929433 - DNA, 25 bp, Homo sapien
ttcagcctggaaacactcaagatgt

SEQ ID NO: 3929434 - DNA, 25 bp, Homo sapien
ttggaatttagccttgaaagtgccc

SEQ ID NO: 3929435 - DNA, 25 bp, Homo sapien
gaaagtgcccagttgtaggaaatga

SEQ ID NO: 3929436 - DNA, 25 bp, Homo sapien
tcgtagatggcagtatggtagccca

SEQ ID NO: 3929437 - DNA, 25 bp, Homo sapien
cagaactgacctgtaagtctgaata

SEQ ID NO: 3929438 - DNA, 25 bp, Homo sapien
taagcatccttagaggtcttgaagt

SEQ ID NO: 3929439 - DNA, 25 bp, Homo sapien
aataagcatccttagaggtcttgaa

SEQ ID NO: 3929440 - DNA, 25 bp, Homo sapien
gcatccttagaggtcttgaagttgt

SEQ ID NO: 3929441 - DNA, 25 bp, Homo sapien
ctgctttggtgaaagttttggattc

SEQ ID NO: 3929442 - DNA, 25 bp, Homo sapien
ttataacacagctctttcaacatct

SEQ ID NO: 3929443 - DNA, 25 bp, Homo sapien
tgctttggtgaaagttttggattct

SEQ ID NO: 3929444 - DNA, 25 bp, Homo sapien
ggagcgttgcctgcttattggagta

SEQ ID NO: 3929445 - DNA, 25 bp, Homo sapien
tattggagtagagccgatagaagtc

SEQ ID NO: 3929446 - DNA, 25 bp, Homo sapien
tagaagtcgacgtggcattgcctca

SEQ ID NO: 3929447 - DNA, 25 bp, Homo sapien
caaagctagcaactgctgagggagc

SEQ ID NO: 3929448 - DNA, 25 bp, Homo sapien
tacagggccccgtatcatatacccg

SEQ ID NO: 3929449 - DNA, 25 bp, Homo sapien
gctgctgctatcacacgaaactgtg

SEQ ID NO: 3929450 - DNA, 25 bp, Homo sapien
gaaactgtggcgttgcccctgaatg

SEQ ID NO: 3929451 - DNA, 25 bp, Homo sapien
cccctgaatggatggcacggtgcca

SEQ ID NO: 3929452 - DNA, 25 bp, Homo sapien
ttgcgccttcggttgctgcttgctg

SEQ ID NO: 3929453 - DNA, 25 bp, Homo sapien
ctcctgggggtctggataatctccc

SEQ ID NO: 3929454 - DNA, 25 bp, Homo sapien
gggggtctggataatctcccttggc

SEQ ID NO: 3929455 - DNA, 25 bp, Homo sapien
ttgctgcttgctgttcgctcctggg

SEQ ID NO: 3929456 - DNA, 25 bp, Homo sapien
ggtgtgaaaacatccgctgtgctgg

SEQ ID NO: 3929457 - DNA, 25 bp, Homo sapien
ttttcgaggagtccagaatcccggc

SEQ ID NO: 3929458 - DNA, 25 bp, Homo sapien
tcatggcggagacgacggcctttgt

SEQ ID NO: 3929459 - DNA, 25 bp, Homo sapien
tcatagttggagcagcctaggctgt

SEQ ID NO: 3929460 - DNA, 25 bp, Homo sapien
gcatgtattcatgccgcttcctatg

SEQ ID NO: 3929461 - DNA, 25 bp, Homo sapien
aggttttccgagtggcaagtggcac

SEQ ID NO: 3929462 - DNA, 25 bp, Homo sapien
ggcatttctcttccgatgtctgctt

SEQ ID NO: 3929463 - DNA, 25 bp, Homo sapien
caccggctgtggcatgtattcatgc

SEQ ID NO: 3929464 - DNA, 25 bp, Homo sapien
gcaatccaggattatacaagcagta

SEQ ID NO: 3929465 - DNA, 25 bp, Homo sapien
gaggctgtgtgcaattgcaatccag

SEQ ID NO: 3929466 - DNA, 25 bp, Homo sapien
tacaagcagtattctttccttatga

SEQ ID NO: 3929467 - DNA, 25 bp, Homo sapien
ccttatgatttctagttgtagacct

SEQ ID NO: 3929468 - DNA, 25 bp, Homo sapien
cactggagacattaacagcggaggc

SEQ ID NO: 3929469 - DNA, 25 bp, Homo sapien
gaagaatatgcccaaaagatgccag

SEQ ID NO: 3929470 - DNA, 25 bp, Homo sapien
ctaatcctgagtcccgtaactgggc

SEQ ID NO: 3929471 - DNA, 25 bp, Homo sapien
gaaacccatagcagttggcagagag

SEQ ID NO: 3929472 - DNA, 25 bp, Homo sapien
cctttaattgtctagtgcaggaaca

SEQ ID NO: 3929473 - DNA, 25 bp, Homo sapien
aagagctactagtttcagcccactg

SEQ ID NO: 3929474 - DNA, 25 bp, Homo sapien
gtatttgtagaagcctctgctactg

SEQ ID NO: 3929475 - DNA, 25 bp, Homo sapien
cactgctctgcaggaattagaagaa

SEQ ID NO: 3929476 - DNA, 25 bp, Homo sapien
caacggcgacagaataaaaatgaag

SEQ ID NO: 3929477 - DNA, 25 bp, Homo sapien
gagtcaccagtagtggctaaccagc

SEQ ID NO: 3929478 - DNA, 25 bp, Homo sapien
gcccattgagggagctttaaaagcc

SEQ ID NO: 3929479 - DNA, 25 bp, Homo sapien
agttagactgtgcaccaggactcag

SEQ ID NO: 3929480 - DNA, 25 bp, Homo sapien
taaacatgcattaagccacactggt

SEQ ID NO: 3929481 - DNA, 25 bp, Homo sapien
tatccgtgcccttgtttagttccag

SEQ ID NO: 3929482 - DNA, 25 bp, Homo sapien
tattatcaggcctccttaagcagcc

SEQ ID NO: 3929483 - DNA, 25 bp, Homo sapien
cagcaaatttcgcagattggatcca

SEQ ID NO: 3929484 - DNA, 25 bp, Homo sapien
tgctatttaatagtgaaagtaaagg

SEQ ID NO: 3929485 - DNA, 25 bp, Homo sapien
gaactctttcatgggtctagtgtgc

SEQ ID NO: 3929486 - DNA, 25 bp, Homo sapien
aataatgagcacctttcagttccca

SEQ ID NO: 3929487 - DNA, 25 bp, Homo sapien
cataccaaccacgatagaactctct

SEQ ID NO: 3929488 - DNA, 25 bp, Homo sapien
tctagtgtgcattgacataagctgt

SEQ ID NO: 3929489 - DNA, 25 bp, Homo sapien
ctactgaaagcccagtagagctttc

SEQ ID NO: 3929490 - DNA, 25 bp, Homo sapien
cagagtttcggtttgtcttttccag

SEQ ID NO: 3929491 - DNA, 25 bp, Homo sapien
tagagctttcagtaatctcatagtg

SEQ ID NO: 3929492 - DNA, 25 bp, Homo sapien
tccagaataagatcctaaggcgaaa

SEQ ID NO: 3929493 - DNA, 25 bp, Homo sapien
catcgtactgtagggaaaatgttgt

SEQ ID NO: 3929494 - DNA, 25 bp, Homo sapien
ttgacattgacaacaaaggttttag

SEQ ID NO: 3929495 - DNA, 25 bp, Homo sapien
gagagtggtttcttaacatggaatc

SEQ ID NO: 3929496 - DNA, 25 bp, Homo sapien
gcctgttctctacaaatggaataac

SEQ ID NO: 3929497 - DNA, 25 bp, Homo sapien
agtctattacggtgttctgtggtca

SEQ ID NO: 3929498 - DNA, 25 bp, Homo sapien
tgttttgggatgctatgaactatgc

SEQ ID NO: 3929499 - DNA, 25 bp, Homo sapien
tgaactatgctcatataagatggct

SEQ ID NO: 3929500 - DNA, 25 bp, Homo sapien
gaccatatggatgttagacacaaca

SEQ ID NO: 3929501 - DNA, 25 bp, Homo sapien
taaatcagcgctacaccagaattgt

SEQ ID NO: 3929502 - DNA, 25 bp, Homo sapien
tcataaagagcacataagaagaggt

SEQ ID NO: 3929503 - DNA, 25 bp, Homo sapien
taagtatgcgatcatttgccttcag

SEQ ID NO: 3929504 - DNA, 25 bp, Homo sapien
tgttatggcgtaaatagctagtcac

SEQ ID NO: 3929505 - DNA, 25 bp, Homo sapien
gagtgcgggttggtcctgcctttcc

SEQ ID NO: 3929506 - DNA, 25 bp, Homo sapien
gctattgatttgtagccgcttgtca

SEQ ID NO: 3929507 - DNA, 25 bp, Homo sapien
tctttatcacttggtgagtgcgggt

SEQ ID NO: 3929508 - DNA, 25 bp, Homo sapien
ggctattagcaaatcggggctgaga

SEQ ID NO: 3929509 - DNA, 25 bp, Homo sapien
tatttaattacgtaacacagactga

SEQ ID NO: 3929510 - DNA, 25 bp, Homo sapien
ttgaggtgccagctctttaactgac

SEQ ID NO: 3929511 - DNA, 25 bp, Homo sapien
tgcagattaaagaaagcctccaggc

SEQ ID NO: 3929512 - DNA, 25 bp, Homo sapien
gcctccaggcttagattttaagact

SEQ ID NO: 3929513 - DNA, 25 bp, Homo sapien
ttttttagggtatgcagtggtgttc

SEQ ID NO: 3929514 - DNA, 25 bp, Homo sapien
tattgtatgctgtgtactaccacca

SEQ ID NO: 3929515 - DNA, 25 bp, Homo sapien
gatggttccccacaaattagttcta

SEQ ID NO: 3929516 - DNA, 25 bp, Homo sapien
tcaagtactgtgcagcctaaaagaa

SEQ ID NO: 3929517 - DNA, 25 bp, Homo sapien
taaaatctcttttagctgggaaaga

SEQ ID NO: 3929518 - DNA, 25 bp, Homo sapien
ataaccaagtgtttgttactgactg

SEQ ID NO: 3929519 - DNA, 25 bp, Homo sapien
gagattctttatcatgcctattgag

SEQ ID NO: 3929520 - DNA, 25 bp, Homo sapien
ccattctctgttaagtggacaatga

SEQ ID NO: 3929521 - DNA, 25 bp, Homo sapien
gaaatgttgtcagccaaaaatagga

SEQ ID NO: 3929522 - DNA, 25 bp, Homo sapien
taggaataggtgactagagacgaca

SEQ ID NO: 3929523 - DNA, 25 bp, Homo sapien
taaactgacaagcaagttatcttgg

SEQ ID NO: 3929524 - DNA, 25 bp, Homo sapien
caggccctttaatcacaaacgatgg

SEQ ID NO: 3929525 - DNA, 25 bp, Homo sapien
aacaactcgtattttccctgcacta

SEQ ID NO: 3929526 - DNA, 25 bp, Homo sapien
taatagtctcacataaacattcttt

SEQ ID NO: 3929527 - DNA, 25 bp, Homo sapien
cagtgtaataacaactcgtattttc

SEQ ID NO: 3929528 - DNA, 25 bp, Homo sapien
ccctgcactatttaatagtctcaca

SEQ ID NO: 3929529 - DNA, 25 bp, Homo sapien
aagtcccagctgtgcattagcattg

SEQ ID NO: 3929530 - DNA, 25 bp, Homo sapien
ccagccggcaggattcatgatccat

SEQ ID NO: 3929531 - DNA, 25 bp, Homo sapien
tttgtctaaaaatacccagccggca

SEQ ID NO: 3929532 - DNA, 25 bp, Homo sapien
ccagctgtgcattagcattgcttgg

SEQ ID NO: 3929533 - DNA, 25 bp, Homo sapien
catggtccggcatttcggtgaggac

SEQ ID NO: 3929534 - DNA, 25 bp, Homo sapien
tgaaatatctcttagcttcaaggta

SEQ ID NO: 3929535 - DNA, 25 bp, Homo sapien
tcaaggtaaaaagtcgaccattctc

SEQ ID NO: 3929536 - DNA, 25 bp, Homo sapien
tgcttaagtatgcaacatggtccgg

SEQ ID NO: 3929537 - DNA, 25 bp, Homo sapien
ctattcctcattttgaatgctgcca

SEQ ID NO: 3929538 - DNA, 25 bp, Homo sapien
tattcctcattttgaatgctgccat

SEQ ID NO: 3929539 - DNA, 25 bp, Homo sapien
ttctctattcctcattttgaatgct

SEQ ID NO: 3929540 - DNA, 25 bp, Homo sapien
ctctattcctcattttgaatgctgc

SEQ ID NO: 3929541 - DNA, 25 bp, Homo sapien
tcaccaagaaagtaggggcaatctg

SEQ ID NO: 3929542 - DNA, 25 bp, Homo sapien
ttgctcctgctaggcacccttatcg

SEQ ID NO: 3929543 - DNA, 25 bp, Homo sapien
gtgcttcttactattttcctgttag

SEQ ID NO: 3929544 - DNA, 25 bp, Homo sapien
ccttatcgctcctcaatatttagaa

SEQ ID NO: 3929545 - DNA, 25 bp, Homo sapien
ctctttgtgcttcaactgtatcttc

SEQ ID NO: 3929546 - DNA, 25 bp, Homo sapien
ctggtgatcatggccttctctttgt

SEQ ID NO: 3929547 - DNA, 25 bp, Homo sapien
tgtatcttctacaacatatatgtgg

SEQ ID NO: 3929548 - DNA, 25 bp, Homo sapien
caacatatatgtggttaataggcat

SEQ ID NO: 3929549 - DNA, 25 bp, Homo sapien
gttctgaataacctgcacttccttc

SEQ ID NO: 3929550 - DNA, 25 bp, Homo sapien
ttctgaataacctgcacttccttca

SEQ ID NO: 3929551 - DNA, 25 bp, Homo sapien
tctgaataacctgcacttccttcat

SEQ ID NO: 3929552 - DNA, 25 bp, Homo sapien
gaacgtcaatctgacacttccactt

SEQ ID NO: 3929553 - DNA, 25 bp, Homo sapien
gtcaatctgacacttccacttggct

SEQ ID NO: 3929554 - DNA, 25 bp, Homo sapien
ctgacacttccacttggctttagct

SEQ ID NO: 3929555 - DNA, 25 bp, Homo sapien
caatctgacacttccacttggcttt

SEQ ID NO: 3929556 - DNA, 25 bp, Homo sapien
ccttcttcttgaaatccaggtggaa

SEQ ID NO: 3929557 - DNA, 25 bp, Homo sapien
tcttcttgaaatccaggtggaagct

SEQ ID NO: 3929558 - DNA, 25 bp, Homo sapien
ttcaccccttcttcttgaaatccag

SEQ ID NO: 3929559 - DNA, 25 bp, Homo sapien
tgaaatccaggtggaagctgtgctc

SEQ ID NO: 3929560 - DNA, 25 bp, Homo sapien
cagttctgccaggtcagatggtgca

SEQ ID NO: 3929561 - DNA, 25 bp, Homo sapien
tgcaattatcgtgcatgctgccaag

SEQ ID NO: 3929562 - DNA, 25 bp, Homo sapien
tgccaggtcagatggtgcaattatc

SEQ ID NO: 3929563 - DNA, 25 bp, Homo sapien
cagatggtgcaattatcgtgcatgc

SEQ ID NO: 3929564 - DNA, 25 bp, Homo sapien
gaggcagcttacacagtgatttgct

SEQ ID NO: 3929565 - DNA, 25 bp, Homo sapien
tagcaggaatgctgttattgaggca

SEQ ID NO: 3929566 - DNA, 25 bp, Homo sapien
cagtgatttgctaagtatagcctcc

SEQ ID NO: 3929567 - DNA, 25 bp, Homo sapien
cattgcaagtaaacttgatagcagg

SEQ ID NO: 3929568 - DNA, 25 bp, Homo sapien
taacagacagctttagtctcctgtg

SEQ ID NO: 3929569 - DNA, 25 bp, Homo sapien
ttaacagacagctttagtctcctgt

SEQ ID NO: 3929570 - DNA, 25 bp, Homo sapien
cgcgcacccactggcctgcgcccac

SEQ ID NO: 3929571 - DNA, 25 bp, Homo sapien
ccggtacctcagatggaaatgcagc

SEQ ID NO: 3929572 - DNA, 25 bp, Homo sapien
tcggcttgcgcacggtgcgcgcacc

SEQ ID NO: 3929573 - DNA, 25 bp, Homo sapien
atattcgggtgggagtgacccgctt

SEQ ID NO: 3929574 - DNA, 25 bp, Homo sapien
aatgtgagcattggcctcccttgct

SEQ ID NO: 3929575 - DNA, 25 bp, Homo sapien
gaatgtgagcattggcctcccttgc

SEQ ID NO: 3929576 - DNA, 25 bp, Homo sapien
tgaatgtgagcattggcctcccttg

SEQ ID NO: 3929577 - DNA, 25 bp, Homo sapien
ctgaatgtgagcattggcctccctt

SEQ ID NO: 3929578 - DNA, 25 bp, Homo sapien
ccagtaagctgtctgctatacagag

SEQ ID NO: 3929579 - DNA, 25 bp, Homo sapien
tcttggccagtgttcgcttttttcc

SEQ ID NO: 3929580 - DNA, 25 bp, Homo sapien
ggtattgtacactcataaaagaatg

SEQ ID NO: 3929581 - DNA, 25 bp, Homo sapien
tacagaggtgtataaccctaatggc

SEQ ID NO: 3929582 - DNA, 25 bp, Homo sapien
gctgaaagttgaggttacttccctg

SEQ ID NO: 3929583 - DNA, 25 bp, Homo sapien
gattttggacccttgagtcttggct

SEQ ID NO: 3929584 - DNA, 25 bp, Homo sapien
taatcttccataacctctccagtga

SEQ ID NO: 3929585 - DNA, 25 bp, Homo sapien
cccctagtctgtgatactgctaaca

SEQ ID NO: 3929586 - DNA, 25 bp, Homo sapien
gaaatactgcttgggaatctctctg

SEQ ID NO: 3929587 - DNA, 25 bp, Homo sapien
tgaaagattctcctgggttacagtc

SEQ ID NO: 3929588 - DNA, 25 bp, Homo sapien
ggcactttgctctaacgtaacttgt

SEQ ID NO: 3929589 - DNA, 25 bp, Homo sapien
tatgagcagatgcagaactgccacc

SEQ ID NO: 3929590 - DNA, 25 bp, Homo sapien
tcctgatgcttactactctacttca

SEQ ID NO: 3929591 - DNA, 25 bp, Homo sapien
ttttcctgatgcttactactctact

SEQ ID NO: 3929592 - DNA, 25 bp, Homo sapien
ttcctgatgcttactactctacttc

SEQ ID NO: 3929593 - DNA, 25 bp, Homo sapien
ctgatgcttactactctacttcatt

SEQ ID NO: 3929594 - DNA, 25 bp, Homo sapien
gagacagccactgcaaggcaagtgt

SEQ ID NO: 3929595 - DNA, 25 bp, Homo sapien
cagactataggtacatccaagaggg

SEQ ID NO: 3929596 - DNA, 25 bp, Homo sapien
gggcttgttgcagaagctgacatca

SEQ ID NO: 3929597 - DNA, 25 bp, Homo sapien
gactgaagtccaggataaacctgcc

SEQ ID NO: 3929598 - DNA, 25 bp, Homo sapien
tcacctgacccctgaaatagatttc

SEQ ID NO: 3929599 - DNA, 25 bp, Homo sapien
actgaaatccatcataggaaagaca

SEQ ID NO: 3929600 - DNA, 25 bp, Homo sapien
ttactaacctgaacatacagagggc

SEQ ID NO: 3929601 - DNA, 25 bp, Homo sapien
gatttccattagacagttttcaagc

SEQ ID NO: 3929602 - DNA, 25 bp, Homo sapien
ttagacgtctgaggtcagccgagcc

SEQ ID NO: 3929603 - DNA, 25 bp, Homo sapien
gttgccgaatgaagctgagcgtctc

SEQ ID NO: 3929604 - DNA, 25 bp, Homo sapien
tgagcgtctcagtggaaccagggat

SEQ ID NO: 3929605 - DNA, 25 bp, Homo sapien
tcactctgggagacgtttgagaccc

SEQ ID NO: 3929606 - DNA, 25 bp, Homo sapien
cagtcccgtgggtgctccggaggaa

SEQ ID NO: 3929607 - DNA, 25 bp, Homo sapien
taaatcgttgggtgagaaagaagaa

SEQ ID NO: 3929608 - DNA, 25 bp, Homo sapien
cgtgcactttataaccgttcaggta

SEQ ID NO: 3929609 - DNA, 25 bp, Homo sapien
gaagaataaaggacacagccggtgg

SEQ ID NO: 3929610 - DNA, 25 bp, Homo sapien
gtatcagcatatttcgcatcagaaa

SEQ ID NO: 3929611 - DNA, 25 bp, Homo sapien
gcagtgggccaatatactcaaagtg

SEQ ID NO: 3929612 - DNA, 25 bp, Homo sapien
agtatcagcatatttcgcatcagaa

SEQ ID NO: 3929613 - DNA, 25 bp, Homo sapien
caacaaatatcttacagatgctcaa

SEQ ID NO: 3929614 - DNA, 25 bp, Homo sapien
ccttccaacaaatatcttacagatg

SEQ ID NO: 3929615 - DNA, 25 bp, Homo sapien
ttccaacaaatatcttacagatgct

SEQ ID NO: 3929616 - DNA, 25 bp, Homo sapien
aaaccttccaacaaatatcttacag

SEQ ID NO: 3929617 - DNA, 25 bp, Homo sapien
aactgttccctctccaatttcattt

SEQ ID NO: 3929618 - DNA, 25 bp, Homo sapien
tccagccatggcgaaatccttgctg

SEQ ID NO: 3929619 - DNA, 25 bp, Homo sapien
tcatgtccctccagccatggcgaaa

SEQ ID NO: 3929620 - DNA, 25 bp, Homo sapien
cagccatggcgaaatccttgctgct

SEQ ID NO: 3929621 - DNA, 25 bp, Homo sapien
tgactcaaggaaattatgtatttct

SEQ ID NO: 3929622 - DNA, 25 bp, Homo sapien
cacttacatttcaccttttggaggg

SEQ ID NO: 3929623 - DNA, 25 bp, Homo sapien
tttaggctcttatatatcttcacct

SEQ ID NO: 3929624 - DNA, 25 bp, Homo sapien
ggagggcatcttaagatatcaatta

SEQ ID NO: 3929625 - DNA, 25 bp, Homo sapien
taatcttatggttgggtgttgcaca

SEQ ID NO: 3929626 - DNA, 25 bp, Homo sapien
tacagtagagatgagactgctgaat

SEQ ID NO: 3929627 - DNA, 25 bp, Homo sapien
gattctatgtgaataagacaggcac

SEQ ID NO: 3929628 - DNA, 25 bp, Homo sapien
tgaatagaaggttagggagagtcct

SEQ ID NO: 3929629 - DNA, 25 bp, Homo sapien
acaaagggagactgcggcttcctgc

SEQ ID NO: 3929630 - DNA, 25 bp, Homo sapien
tcctgcccatcacatgcagccactg

SEQ ID NO: 3929631 - DNA, 25 bp, Homo sapien
tgatggatctaaattgctgaataag

SEQ ID NO: 3929632 - DNA, 25 bp, Homo sapien
tgaatgcagaacaaaagcttcggcc

SEQ ID NO: 3929633 - DNA, 25 bp, Homo sapien
gactcgatcaaacttgcgaaattgg

SEQ ID NO: 3929634 - DNA, 25 bp, Homo sapien
tgccagagattttccccgtgaaact

SEQ ID NO: 3929635 - DNA, 25 bp, Homo sapien
cacacctctaattagtcatagcaga

SEQ ID NO: 3929636 - DNA, 25 bp, Homo sapien
taagagggcctgaaaaatccagttc

SEQ ID NO: 3929637 - DNA, 25 bp, Homo sapien
ggaagtaacggctccagtctctgaa

SEQ ID NO: 3929638 - DNA, 25 bp, Homo sapien
catctccaggttcctcactgtgttc

SEQ ID NO: 3929639 - DNA, 25 bp, Homo sapien
aggtcaggcagtacttcaggctttg

SEQ ID NO: 3929640 - DNA, 25 bp, Homo sapien
actggccgggcactgtagctgggcg

SEQ ID NO: 3929641 - DNA, 25 bp, Homo sapien
agctgcaagacgggcactgtcaatc

SEQ ID NO: 3929642 - DNA, 25 bp, Homo sapien
tgcaagacgggcactgtcaatctgc

SEQ ID NO: 3929643 - DNA, 25 bp, Homo sapien
atcagctgcaagacgggcactgtca

SEQ ID NO: 3929644 - DNA, 25 bp, Homo sapien
tcagctgcaagacgggcactgtcaa

SEQ ID NO: 3929645 - DNA, 25 bp, Homo sapien
ccttgcagagcccatggatgtcatt

SEQ ID NO: 3929646 - DNA, 25 bp, Homo sapien
agagcccatggatgtcattctccac

SEQ ID NO: 3929647 - DNA, 25 bp, Homo sapien
gcagagcccatggatgtcattctcc

SEQ ID NO: 3929648 - DNA, 25 bp, Homo sapien
ttgcagagcccatggatgtcattct

SEQ ID NO: 3929649 - DNA, 25 bp, Homo sapien
cagctcttccttgcgagccttgatc

SEQ ID NO: 3929650 - DNA, 25 bp, Homo sapien
agcagctcttccttgcgagccttga

SEQ ID NO: 3929651 - DNA, 25 bp, Homo sapien
ctcttccttgcgagccttgatctct

SEQ ID NO: 3929652 - DNA, 25 bp, Homo sapien
gctcttccttgcgagccttgatctc

SEQ ID NO: 3929653 - DNA, 25 bp, Homo sapien
tatctcagctccgtgagtgtcgtct

SEQ ID NO: 3929654 - DNA, 25 bp, Homo sapien
ttctcattgagtccaggtcagtctc

SEQ ID NO: 3929655 - DNA, 25 bp, Homo sapien
agctccaaccttgacggactgcgtg

SEQ ID NO: 3929656 - DNA, 25 bp, Homo sapien
ccaaccttgacggactgcgtggtga

SEQ ID NO: 3929657 - DNA, 25 bp, Homo sapien
ccatctgcagggtgtagcgggcctc

SEQ ID NO: 3929658 - DNA, 25 bp, Homo sapien
tgactccaggtaaagcaggatcccg

SEQ ID NO: 3929659 - DNA, 25 bp, Homo sapien
tgctccatctgcagggtgtagcggg

SEQ ID NO: 3929660 - DNA, 25 bp, Homo sapien
gactccaggtaaagcaggatcccgt

SEQ ID NO: 3929661 - DNA, 25 bp, Homo sapien
aagtttcagaactttggggtcattg

SEQ ID NO: 3929662 - DNA, 25 bp, Homo sapien
ggcgatctcatcctccaggttgacc

SEQ ID NO: 3929663 - DNA, 25 bp, Homo sapien
cgatctcatcctccaggttgacctt

SEQ ID NO: 3929664 - DNA, 25 bp, Homo sapien
gtggcgatctcatcctccaggttga

SEQ ID NO: 3929665 - DNA, 25 bp, Homo sapien
ctgctccccaaagggtaccctgctt

SEQ ID NO: 3929666 - DNA, 25 bp, Homo sapien
ctccccaaagggtaccctgcttctg

SEQ ID NO: 3929667 - DNA, 25 bp, Homo sapien
cccaaagggtaccctgcttctgctg

SEQ ID NO: 3929668 - DNA, 25 bp, Homo sapien
caaagggtaccctgcttctgctggc

SEQ ID NO: 3929669 - DNA, 25 bp, Homo sapien
tagttttcacgagccatgaagaaga

SEQ ID NO: 3929670 - DNA, 25 bp, Homo sapien
gactctaatagttttcacgagccat

SEQ ID NO: 3929671 - DNA, 25 bp, Homo sapien
taatagttttcacgagccatgaaga

SEQ ID NO: 3929672 - DNA, 25 bp, Homo sapien
tttcacgagccatgaagaagagcaa

SEQ ID NO: 3929673 - DNA, 25 bp, Homo sapien
gctattaacaattcactggcacacc

SEQ ID NO: 3929674 - DNA, 25 bp, Homo sapien
tactgaattaagatccatgggagga

SEQ ID NO: 3929675 - DNA, 25 bp, Homo sapien
gcaatcagaacatatggtcatccga

SEQ ID NO: 3929676 - DNA, 25 bp, Homo sapien
tcatccgagttgtggatcaccatct

SEQ ID NO: 3929677 - DNA, 25 bp, Homo sapien
gaagggtttgagtgaaggcagtgga

SEQ ID NO: 3929678 - DNA, 25 bp, Homo sapien
aagggtttgagtgaaggcagtggat

SEQ ID NO: 3929679 - DNA, 25 bp, Homo sapien
agaagggtttgagtgaaggcagtgg

SEQ ID NO: 3929680 - DNA, 25 bp, Homo sapien
gggtttgagtgaaggcagtggatgt

SEQ ID NO: 3929681 - DNA, 25 bp, Homo sapien
agactgctctgcctcacttggcggt

SEQ ID NO: 3929682 - DNA, 25 bp, Homo sapien
gtaaaggttcacaacagtaagattc

SEQ ID NO: 3929683 - DNA, 25 bp, Homo sapien
ggcggtgctcctttctgtctccaaa

SEQ ID NO: 3929684 - DNA, 25 bp, Homo sapien
ctgggtgtaaaggttcacaacagta

SEQ ID NO: 3929685 - DNA, 25 bp, Homo sapien
ttagctagattgactaaggaaacca

SEQ ID NO: 3929686 - DNA, 25 bp, Homo sapien
aaggattataagagccagcagagtg

SEQ ID NO: 3929687 - DNA, 25 bp, Homo sapien
gcaatagagcatcaaaacataggaa

SEQ ID NO: 3929688 - DNA, 25 bp, Homo sapien
aatatttacacaccagcaatagagc

SEQ ID NO: 3929689 - DNA, 25 bp, Homo sapien
tatcattttcttgatccaaacctcc

SEQ ID NO: 3929690 - DNA, 25 bp, Homo sapien
tcttatcattttcttgatccaaacc

SEQ ID NO: 3929691 - DNA, 25 bp, Homo sapien
ttatcattttcttgatccaaacctc

SEQ ID NO: 3929692 - DNA, 25 bp, Homo sapien
tcattttcttgatccaaacctccca

SEQ ID NO: 3929693 - DNA, 25 bp, Homo sapien
ttaataacttcaacatgtggccctt

SEQ ID NO: 3929694 - DNA, 25 bp, Homo sapien
ggcagagcctttgatcagtgaactc

SEQ ID NO: 3929695 - DNA, 25 bp, Homo sapien
catgtggcccttcggcccagctgca

SEQ ID NO: 3929696 - DNA, 25 bp, Homo sapien
gcctttgatcagtgaactcagtggg

SEQ ID NO: 3929697 - DNA, 25 bp, Homo sapien
agacatatagtctgagacatctagg

SEQ ID NO: 3929698 - DNA, 25 bp, Homo sapien
taatgtgatagttcttataatgaga

SEQ ID NO: 3929699 - DNA, 25 bp, Homo sapien
aacccagtaaagacatatagtctga

SEQ ID NO: 3929700 - DNA, 25 bp, Homo sapien
gacatctaggacatccactttgtat

SEQ ID NO: 3929701 - DNA, 25 bp, Homo sapien
tacagacaggcgagattcaaaggcc

SEQ ID NO: 3929702 - DNA, 25 bp, Homo sapien
tgtaagtaacgaccttgttcctgtc

SEQ ID NO: 3929703 - DNA, 25 bp, Homo sapien
caattttaggtttggactcagcact

SEQ ID NO: 3929704 - DNA, 25 bp, Homo sapien
taaaggtaagcactcaagatcagat

SEQ ID NO: 3929705 - DNA, 25 bp, Homo sapien
ttttctggactgatagtagccacag

SEQ ID NO: 3929706 - DNA, 25 bp, Homo sapien
cagtctgagttccaattcaccagga

SEQ ID NO: 3929707 - DNA, 25 bp, Homo sapien
tgaggtagcctcaacgggtaatcca

SEQ ID NO: 3929708 - DNA, 25 bp, Homo sapien
gaacaggcctcatccagattgacag

SEQ ID NO: 3929709 - DNA, 25 bp, Homo sapien
aggcttatctaatatcatttgttcc

SEQ ID NO: 3929710 - DNA, 25 bp, Homo sapien
tctacctttacaggcttatctaata

SEQ ID NO: 3929711 - DNA, 25 bp, Homo sapien
tcccctctacctttacaggcttatc

SEQ ID NO: 3929712 - DNA, 25 bp, Homo sapien
ggcttatctaatatcatttgttcca

SEQ ID NO: 3929713 - DNA, 25 bp, Homo sapien
acatctggtctctattattccatct

SEQ ID NO: 3929714 - DNA, 25 bp, Homo sapien
ggtatgttttcttgacacccagtta

SEQ ID NO: 3929715 - DNA, 25 bp, Homo sapien
gatggcttcaatctcggtatgtttt

SEQ ID NO: 3929716 - DNA, 25 bp, Homo sapien
ttcggtgttcctgcagaagtggatg

SEQ ID NO: 3929717 - DNA, 25 bp, Homo sapien
tgacacccagttaacgttgctgatc

SEQ ID NO: 3929718 - DNA, 25 bp, Homo sapien
attgtcactgtccctaatgaaatcc

SEQ ID NO: 3929719 - DNA, 25 bp, Homo sapien
tgtcactgtccctaatgaaatccag

SEQ ID NO: 3929720 - DNA, 25 bp, Homo sapien
gtattgtcactgtccctaatgaaat

SEQ ID NO: 3929721 - DNA, 25 bp, Homo sapien
gtcactgtccctaatgaaatccagt

SEQ ID NO: 3929722 - DNA, 25 bp, Homo sapien
gagactaacaaacagaaccacatgg

SEQ ID NO: 3929723 - DNA, 25 bp, Homo sapien
tactgtaacaatgctgatctcgaac

SEQ ID NO: 3929724 - DNA, 25 bp, Homo sapien
tgtttgttggcgctgagatactgcc

SEQ ID NO: 3929725 - DNA, 25 bp, Homo sapien
agcataaatgaacgtgaccctgagg

SEQ ID NO: 3929726 - DNA, 25 bp, Homo sapien
tatgccatgccttgagctgtgggtg

SEQ ID NO: 3929727 - DNA, 25 bp, Homo sapien
gacagccatcgtggctatgaccagt

SEQ ID NO: 3929728 - DNA, 25 bp, Homo sapien
cctggagtgggttgcacccttaatg

SEQ ID NO: 3929729 - DNA, 25 bp, Homo sapien
ctaacccagaagtagcaaagcagtc

SEQ ID NO: 3929730 - DNA, 25 bp, Homo sapien
tctatactaaaggatttgtttccat

SEQ ID NO: 3929731 - DNA, 25 bp, Homo sapien
aagacacaccctttcactgctgatg

SEQ ID NO: 3929732 - DNA, 25 bp, Homo sapien
tccatttgtgtaattggctgtgtac

SEQ ID NO: 3929733 - DNA, 25 bp, Homo sapien
cctccttgtttggtaggagcttcaa

SEQ ID NO: 3929734 - DNA, 25 bp, Homo sapien
tgttgaggacttgtagcttaaaaaa

SEQ ID NO: 3929735 - DNA, 25 bp, Homo sapien
tgactttctgtatttatgatagata

SEQ ID NO: 3929736 - DNA, 25 bp, Homo sapien
tgttgagtagattgttgcattggaa

SEQ ID NO: 3929737 - DNA, 25 bp, Homo sapien
gtatttatgatagatatgaccattt

SEQ ID NO: 3929738 - DNA, 25 bp, Homo sapien
tattctcaggtcaatcgctcacact

SEQ ID NO: 3929739 - DNA, 25 bp, Homo sapien
gcagggcctccctaatgtctttgga

SEQ ID NO: 3929740 - DNA, 25 bp, Homo sapien
cactgtatgggaaagcagtccacct

SEQ ID NO: 3929741 - DNA, 25 bp, Homo sapien
tgggaaacagaagtccgcagggcct

SEQ ID NO: 3929742 - DNA, 25 bp, Homo sapien
tattcggaggagtctgacacggatc

SEQ ID NO: 3929743 - DNA, 25 bp, Homo sapien
gatgccaacagacgactattcggag

SEQ ID NO: 3929744 - DNA, 25 bp, Homo sapien
tctgaccagtgtaggaacggacacc

SEQ ID NO: 3929745 - DNA, 25 bp, Homo sapien
ggatctcagccaaaagtccgacgga

SEQ ID NO: 3929746 - DNA, 25 bp, Homo sapien
cctggtgggatacttctgttggaaa

SEQ ID NO: 3929747 - DNA, 25 bp, Homo sapien
aaaatgtgaactagcgggtgtggca

SEQ ID NO: 3929748 - DNA, 25 bp, Homo sapien
gaagatggtcgtttctcccgcagat

SEQ ID NO: 3929749 - DNA, 25 bp, Homo sapien
gaaagcatccagtcagctgcagcaa

SEQ ID NO: 3929750 - DNA, 25 bp, Homo sapien
gagcagacccattgcctagtggaga

SEQ ID NO: 3929751 - DNA, 25 bp, Homo sapien
tgtgtgaccataatcccacagggtc

SEQ ID NO: 3929752 - DNA, 25 bp, Homo sapien
tatgtcaggcccaatgctaagcttt

SEQ ID NO: 3929753 - DNA, 25 bp, Homo sapien
tcaaaaacaccggatctggaatggg

SEQ ID NO: 3929754 - DNA, 25 bp, Homo sapien
gagggccagagaggtcaagaccatt

SEQ ID NO: 3929755 - DNA, 25 bp, Homo sapien
aacaagctagggtaggagccagagc

SEQ ID NO: 3929756 - DNA, 25 bp, Homo sapien
gccagtcagtcaacaggtatatgtt

SEQ ID NO: 3929757 - DNA, 25 bp, Homo sapien
gaccacttagagtggactcgagata

SEQ ID NO: 3929758 - DNA, 25 bp, Homo sapien
tcagtacaagaagactcgggctcag

SEQ ID NO: 3929759 - DNA, 25 bp, Homo sapien
gagatttgaaaccatcccctgctga

SEQ ID NO: 3929760 - DNA, 25 bp, Homo sapien
taatgaagtgcatgccaagaggcct

SEQ ID NO: 3929761 - DNA, 25 bp, Homo sapien
ttcaagaatcagcaaccggtcagcc

SEQ ID NO: 3929762 - DNA, 25 bp, Homo sapien
ttcccaccccatatcaggcaaaagg

SEQ ID NO: 3929763 - DNA, 25 bp, Homo sapien
ctttccattggatatcgagggctgc

SEQ ID NO: 3929764 - DNA, 25 bp, Homo sapien
tttgaaatatcatcgccacctaccc

SEQ ID NO: 3929765 - DNA, 25 bp, Homo sapien
taacttgtttggacaggcttctggc

SEQ ID NO: 3929766 - DNA, 25 bp, Homo sapien
tctataatgatgtgcagctgaggtg

SEQ ID NO: 3929767 - DNA, 25 bp, Homo sapien
ggaaaggactgatcttgcagctaca

SEQ ID NO: 3929768 - DNA, 25 bp, Homo sapien
gatccgtcgtactgagtctgttaga

SEQ ID NO: 3929769 - DNA, 25 bp, Homo sapien
gacttcaacctttcaagtgcaaaag

SEQ ID NO: 3929770 - DNA, 25 bp, Homo sapien
tcatggccaactagagcaggaaagt

SEQ ID NO: 3929771 - DNA, 25 bp, Homo sapien
cttggcctattggaaacagagctgc

SEQ ID NO: 3929772 - DNA, 25 bp, Homo sapien
tgagttcggttcagtcccactaaaa

SEQ ID NO: 3929773 - DNA, 25 bp, Homo sapien
ccaaatagatgattcctggcagaca

SEQ ID NO: 3929774 - DNA, 25 bp, Homo sapien
cagctgaggagatcaaaccggagca

SEQ ID NO: 3929775 - DNA, 25 bp, Homo sapien
tgctcaaagcagtgggtgtgttccc

SEQ ID NO: 3929776 - DNA, 25 bp, Homo sapien
taatgccgatgtcaaccggctccgg

SEQ ID NO: 3929777 - DNA, 25 bp, Homo sapien
tcttcgaagcgaccaaaaacagctg

SEQ ID NO: 3929778 - DNA, 25 bp, Homo sapien
gcaacgcgacgttccataggatcag

SEQ ID NO: 3929779 - DNA, 25 bp, Homo sapien
catactgtgtttaagctggaggagc

SEQ ID NO: 3929780 - DNA, 25 bp, Homo sapien
tatatgccagataactagacagggt

SEQ ID NO: 3929781 - DNA, 25 bp, Homo sapien
gcacctagttaatcggcagccattc

SEQ ID NO: 3929782 - DNA, 25 bp, Homo sapien
catctatagcgcattcagtcgcatg

SEQ ID NO: 3929783 - DNA, 25 bp, Homo sapien
gcattcagtcgcatgattccttacc

SEQ ID NO: 3929784 - DNA, 25 bp, Homo sapien
agtttgtcatctatagcgcattcag

SEQ ID NO: 3929785 - DNA, 25 bp, Homo sapien
gtcgcatgattccttaccacatttt

SEQ ID NO: 3929786 - DNA, 25 bp, Homo sapien
cagaatttcagtgattcggatgtcg

SEQ ID NO: 3929787 - DNA, 25 bp, Homo sapien
gaagcctgtgttggcattaagtcca

SEQ ID NO: 3929788 - DNA, 25 bp, Homo sapien
gggattgcaagcacaactcttaagt

SEQ ID NO: 3929789 - DNA, 25 bp, Homo sapien
gcaaagattgggatcacatgagaat

SEQ ID NO: 3929790 - DNA, 25 bp, Homo sapien
aaagcagattctttaaaggaactgt

SEQ ID NO: 3929791 - DNA, 25 bp, Homo sapien
gaaagcagattctttaaaggaactg

SEQ ID NO: 3929792 - DNA, 25 bp, Homo sapien
agctgtggcctgaagaccgccccct

SEQ ID NO: 3929793 - DNA, 25 bp, Homo sapien
gtgcttggttggaggcagaatgaga

SEQ ID NO: 3929794 - DNA, 25 bp, Homo sapien
tcttcccctattcctcttggaaaca

SEQ ID NO: 3929795 - DNA, 25 bp, Homo sapien
ctgagtgaacatgtgcgtgcatctg

SEQ ID NO: 3929796 - DNA, 25 bp, Homo sapien
cagattgctgacttgtgcaaatggg

SEQ ID NO: 3929797 - DNA, 25 bp, Homo sapien
gggctagcatagatctgtgcatgct

SEQ ID NO: 3929798 - DNA, 25 bp, Homo sapien
ccattcccagattgctgacttgtgc

SEQ ID NO: 3929799 - DNA, 25 bp, Homo sapien
ggccccacagaatggtgcctgaacc

SEQ ID NO: 3929800 - DNA, 25 bp, Homo sapien
caggaatcaggtcaaaatcaaaatc

SEQ ID NO: 3929801 - DNA, 25 bp, Homo sapien
aaagtcaggaatcaggtcaaaatca

SEQ ID NO: 3929802 - DNA, 25 bp, Homo sapien
caaaatcaggaatatttagcaggcc

SEQ ID NO: 3929803 - DNA, 25 bp, Homo sapien
ggaatatttagcaggcctccaaatc

SEQ ID NO: 3929804 - DNA, 25 bp, Homo sapien
tagtgtgtccctggactgtggccac

SEQ ID NO: 3929805 - DNA, 25 bp, Homo sapien
gataccatggccatagctgcagtaa

SEQ ID NO: 3929806 - DNA, 25 bp, Homo sapien
cagggaagcgtaataagtgcagacc

SEQ ID NO: 3929807 - DNA, 25 bp, Homo sapien
tcctcacaagataccatggccatag

SEQ ID NO: 3929808 - DNA, 25 bp, Homo sapien
tcctctgttggtccaaaggtttctg

SEQ ID NO: 3929809 - DNA, 25 bp, Homo sapien
cctctgttggtccaaaggtttctga

SEQ ID NO: 3929810 - DNA, 25 bp, Homo sapien
catgcgactggttttgatctatgtc

SEQ ID NO: 3929811 - DNA, 25 bp, Homo sapien
gactcgcatgcgactggttttgatc

SEQ ID NO: 3929812 - DNA, 25 bp, Homo sapien
tagaatgactcgcatgcgactggtt

SEQ ID NO: 3929813 - DNA, 25 bp, Homo sapien
gcgactggttttgatctatgtcctg

SEQ ID NO: 3929814 - DNA, 25 bp, Homo sapien
tcctgaggagtacctgaaggtgctc

SEQ ID NO: 3929815 - DNA, 25 bp, Homo sapien
tatcctaggcctttggagcgctgtg

SEQ ID NO: 3929816 - DNA, 25 bp, Homo sapien
gctgaatgatgccttcgggtaaaga

SEQ ID NO: 3929817 - DNA, 25 bp, Homo sapien
aactcaatggagacggaaagcagca

SEQ ID NO: 3929818 - DNA, 25 bp, Homo sapien
gaactcgggtgtcagagttgcagtc

SEQ ID NO: 3929819 - DNA, 25 bp, Homo sapien
tcacagattgggaactcgggtgtca

SEQ ID NO: 3929820 - DNA, 25 bp, Homo sapien
actcgggtgtcagagttgcagtcaa

SEQ ID NO: 3929821 - DNA, 25 bp, Homo sapien
aactcgggtgtcagagttgcagtca

SEQ ID NO: 3929822 - DNA, 25 bp, Homo sapien
gttttgcagcctcgagaactaagcc

SEQ ID NO: 3929823 - DNA, 25 bp, Homo sapien
tcatcaaggtatagataaagggcag

SEQ ID NO: 3929824 - DNA, 25 bp, Homo sapien
ggtccaatgctaccttcgttttgca

SEQ ID NO: 3929825 - DNA, 25 bp, Homo sapien
aaataccattgtgcctttccatggg

SEQ ID NO: 3929826 - DNA, 25 bp, Homo sapien
tgtggtgtccagaagcctaaactcc

SEQ ID NO: 3929827 - DNA, 25 bp, Homo sapien
gagagggccatactgcagccgaatg

SEQ ID NO: 3929828 - DNA, 25 bp, Homo sapien
agtacaatagttcccagatatcggg

SEQ ID NO: 3929829 - DNA, 25 bp, Homo sapien
tgaatgggcagcacaccaggtggat

SEQ ID NO: 3929830 - DNA, 25 bp, Homo sapien
tctattgaaggtccagtcgctggtc

SEQ ID NO: 3929831 - DNA, 25 bp, Homo sapien
ccaggtaagtgccaagctgtgtgca

SEQ ID NO: 3929832 - DNA, 25 bp, Homo sapien
tgtggaacttgatcagggtcacccc

SEQ ID NO: 3929833 - DNA, 25 bp, Homo sapien
caagattctctaagggtcaggcaca

SEQ ID NO: 3929834 - DNA, 25 bp, Homo sapien
tggtctaggccagtaccaggaggct

SEQ ID NO: 3929835 - DNA, 25 bp, Homo sapien
tgtgactcttcgcaacctgcatgac

SEQ ID NO: 3929836 - DNA, 25 bp, Homo sapien
acccgtagtgagtgaaggatggaat

SEQ ID NO: 3929837 - DNA, 25 bp, Homo sapien
ggcatgttcacaagataccatttgg

SEQ ID NO: 3929838 - DNA, 25 bp, Homo sapien
tgcctgcaaagcatcgtgggcctga

SEQ ID NO: 3929839 - DNA, 25 bp, Homo sapien
cctgcctgcaaagcatcgtgggcct

SEQ ID NO: 3929840 - DNA, 25 bp, Homo sapien
gcaaagcatcgtgggcctgagctgt

SEQ ID NO: 3929841 - DNA, 25 bp, Homo sapien
ctgcaaagcatcgtgggcctgagct

SEQ ID NO: 3929842 - DNA, 25 bp, Homo sapien
attcccatggggctgccagttggca

SEQ ID NO: 3929843 - DNA, 25 bp, Homo sapien
tgctttcgcgaaccaatttccaggt

SEQ ID NO: 3929844 - DNA, 25 bp, Homo sapien
ctgcctggtgctgctttcgcgaacc

SEQ ID NO: 3929845 - DNA, 25 bp, Homo sapien
gttcataagattggtgcaaattccc

SEQ ID NO: 3929846 - DNA, 25 bp, Homo sapien
gactccacttgctcgaaagtcacag

SEQ ID NO: 3929847 - DNA, 25 bp, Homo sapien
ggtcactattcgatgagactccact

SEQ ID NO: 3929848 - DNA, 25 bp, Homo sapien
ctggcaggacttgtggtcactattc

SEQ ID NO: 3929849 - DNA, 25 bp, Homo sapien
gagtggcccacctccatcggtgtag

SEQ ID NO: 3929850 - DNA, 25 bp, Homo sapien
tttgacaaattgttcaaatggccaa

SEQ ID NO: 3929851 - DNA, 25 bp, Homo sapien
tgcagggggcaacccaggtgctttt

SEQ ID NO: 3929852 - DNA, 25 bp, Homo sapien
ttgttgcaatactggctctaggcgt

SEQ ID NO: 3929853 - DNA, 25 bp, Homo sapien
ccgtaattcttgtgcggttttgaca

SEQ ID NO: 3929854 - DNA, 25 bp, Homo sapien
tcgtcgcgctgacattgaagtgtaa

SEQ ID NO: 3929855 - DNA, 25 bp, Homo sapien
gagagatgggcctgcgattatttcc

SEQ ID NO: 3929856 - DNA, 25 bp, Homo sapien
agagagcgcgcctcctttgtcgtcg

SEQ ID NO: 3929857 - DNA, 25 bp, Homo sapien
cacgctctgctacagacatgctcgg

SEQ ID NO: 3929858 - DNA, 25 bp, Homo sapien
gcaggtctgctctgttgaaaaatgt

SEQ ID NO: 3929859 - DNA, 25 bp, Homo sapien
tgttaaaaagctttcaggcaggtct

SEQ ID NO: 3929860 - DNA, 25 bp, Homo sapien
tctgctctgttgaaaaatgtccctt

SEQ ID NO: 3929861 - DNA, 25 bp, Homo sapien
ctggaatgttaaaaagctttcaggc

SEQ ID NO: 3929862 - DNA, 25 bp, Homo sapien
tattgtcaaactgtgtctccccagc

SEQ ID NO: 3929863 - DNA, 25 bp, Homo sapien
tccttccctggctgtcgttcttgta

SEQ ID NO: 3929864 - DNA, 25 bp, Homo sapien
tctttgccccaaatagtccgtcatt

SEQ ID NO: 3929865 - DNA, 25 bp, Homo sapien
cgtcattcccattggtattgtcaaa

SEQ ID NO: 3929866 - DNA, 25 bp, Homo sapien
gtgtgccatttgtttcgatggtcag

SEQ ID NO: 3929867 - DNA, 25 bp, Homo sapien
catttgtttcgatggtcagacacaa

SEQ ID NO: 3929868 - DNA, 25 bp, Homo sapien
gtttcgatggtcagacacaaaatgt

SEQ ID NO: 3929869 - DNA, 25 bp, Homo sapien
tgccatttgtttcgatggtcagaca

SEQ ID NO: 3929870 - DNA, 25 bp, Homo sapien
ctgtaaatacgtagtgacctttgta

SEQ ID NO: 3929871 - DNA, 25 bp, Homo sapien
tgtaaatacgtagtgacctttgtat

SEQ ID NO: 3929872 - DNA, 25 bp, Homo sapien
taaatacgtagtgacctttgtatat

SEQ ID NO: 3929873 - DNA, 25 bp, Homo sapien
gtaaatacgtagtgacctttgtata

SEQ ID NO: 3929874 - DNA, 25 bp, Homo sapien
ggctccccacgatgcttgcagttgt

SEQ ID NO: 3929875 - DNA, 25 bp, Homo sapien
tttcttggccactccgggtgttcac

SEQ ID NO: 3929876 - DNA, 25 bp, Homo sapien
gggtgttcacacgtttctagcattg

SEQ ID NO: 3929877 - DNA, 25 bp, Homo sapien
gcagagttaggctcttctccgctgg

SEQ ID NO: 3929878 - DNA, 25 bp, Homo sapien
acggtcttatcttcagtgttgcact

SEQ ID NO: 3929879 - DNA, 25 bp, Homo sapien
tattctctcactgtccagtttctgt

SEQ ID NO: 3929880 - DNA, 25 bp, Homo sapien
tggccttacaaagtgaagcataacc

SEQ ID NO: 3929881 - DNA, 25 bp, Homo sapien
tgccctttgattagttcatcttcac

SEQ ID NO: 3929882 - DNA, 25 bp, Homo sapien
tggagggaagattcccgcagagcca

SEQ ID NO: 3929883 - DNA, 25 bp, Homo sapien
cacttcttccctacacagctgatgg

SEQ ID NO: 3929884 - DNA, 25 bp, Homo sapien
caacatcaccaccttgatggaggga

SEQ ID NO: 3929885 - DNA, 25 bp, Homo sapien
ttgactgtgtaagcgtcaccccgag

SEQ ID NO: 3929886 - DNA, 25 bp, Homo sapien
tgtcagcagtgccttggacctcacc

SEQ ID NO: 3929887 - DNA, 25 bp, Homo sapien
caccctgatccagaatatcgatgat

SEQ ID NO: 3929888 - DNA, 25 bp, Homo sapien
gcagtgccttggacctcaccctgat

SEQ ID NO: 3929889 - DNA, 25 bp, Homo sapien
ttgggagcagtacttctgggattcc

SEQ ID NO: 3929890 - DNA, 25 bp, Homo sapien
ccaggagtgtgcgtcctctaggcgt

SEQ ID NO: 3929891 - DNA, 25 bp, Homo sapien
cgggatgtccctgtgcatgcgatga

SEQ ID NO: 3929892 - DNA, 25 bp, Homo sapien
catgcgatgacttcattatggagcc

SEQ ID NO: 3929893 - DNA, 25 bp, Homo sapien
tcacagatgctttgcggtcagaaca

SEQ ID NO: 3929894 - DNA, 25 bp, Homo sapien
aaaggatagccactggtccgcttcc

SEQ ID NO: 3929895 - DNA, 25 bp, Homo sapien
gcttcagagcacgatggtcagatgg

SEQ ID NO: 3929896 - DNA, 25 bp, Homo sapien
ttcttcaccgtgaggccagctctac

SEQ ID NO: 3929897 - DNA, 25 bp, Homo sapien
ggtttatgggcgtccagactgtcca

SEQ ID NO: 3929898 - DNA, 25 bp, Homo sapien
ctaatttctgcatttgccattctga

SEQ ID NO: 3929899 - DNA, 25 bp, Homo sapien
ccattctgagccttgagtccttcac

SEQ ID NO: 3929900 - DNA, 25 bp, Homo sapien
gccattctgagccttgagtccttca

SEQ ID NO: 3929901 - DNA, 25 bp, Homo sapien
tctgcatttgccattctgagccttg

SEQ ID NO: 3929902 - DNA, 25 bp, Homo sapien
tgcagagctttcccacgcaagtctc

SEQ ID NO: 3929903 - DNA, 25 bp, Homo sapien
agctttcccacgcaagtctctcagg

SEQ ID NO: 3929904 - DNA, 25 bp, Homo sapien
gctttcccacgcaagtctctcaggg

SEQ ID NO: 3929905 - DNA, 25 bp, Homo sapien
agagctttcccacgcaagtctctca

SEQ ID NO: 3929906 - DNA, 25 bp, Homo sapien
tagtaatgcagcttggcttatatct

SEQ ID NO: 3929907 - DNA, 25 bp, Homo sapien
ccctctttagggctttagtaatgca

SEQ ID NO: 3929908 - DNA, 25 bp, Homo sapien
catcttctgccagtcgttcttggga

SEQ ID NO: 3929909 - DNA, 25 bp, Homo sapien
agagcccggatttgtaggcctcaga

SEQ ID NO: 3929910 - DNA, 25 bp, Homo sapien
cagttacatgcacgctgtgtcatca

SEQ ID NO: 3929911 - DNA, 25 bp, Homo sapien
gacagacaggtacagcgcctagctt

SEQ ID NO: 3929912 - DNA, 25 bp, Homo sapien
tgttctagaacatggcaggggagct

SEQ ID NO: 3929913 - DNA, 25 bp, Homo sapien
gtcagtctcattggcttttcctttg

SEQ ID NO: 3929914 - DNA, 25 bp, Homo sapien
tcatgcaggcataaattcggaaagt

SEQ ID NO: 3929915 - DNA, 25 bp, Homo sapien
aacttggctaccctgctgatgtaca

SEQ ID NO: 3929916 - DNA, 25 bp, Homo sapien
gatgtacagccagtgatattgattg

SEQ ID NO: 3929917 - DNA, 25 bp, Homo sapien
ccagaaaggtcattcataacttggc

SEQ ID NO: 3929918 - DNA, 25 bp, Homo sapien
cttgccatatttagtgcagcactca

SEQ ID NO: 3929919 - DNA, 25 bp, Homo sapien
ttgccatatttagtgcagcactcac

SEQ ID NO: 3929920 - DNA, 25 bp, Homo sapien
gagggctttcagaggcacagaagcc

SEQ ID NO: 3929921 - DNA, 25 bp, Homo sapien
ttggaaacatcaagctgtgacctgg

SEQ ID NO: 3929922 - DNA, 25 bp, Homo sapien
ctggttggaggagtccaatcaacgt

SEQ ID NO: 3929923 - DNA, 25 bp, Homo sapien
tccaatcaacgtggggagggctttc

SEQ ID NO: 3929924 - DNA, 25 bp, Homo sapien
gctgcctgtttctggagagcgtcat

SEQ ID NO: 3929925 - DNA, 25 bp, Homo sapien
gaactttctcgccttttggacatga

SEQ ID NO: 3929926 - DNA, 25 bp, Homo sapien
agaaagaggattggcccaacagttt

SEQ ID NO: 3929927 - DNA, 25 bp, Homo sapien
tcttttcggtagaaatgcccttctg

SEQ ID NO: 3929928 - DNA, 25 bp, Homo sapien
taaacatggctgtaaaagaggagtt

SEQ ID NO: 3929929 - DNA, 25 bp, Homo sapien
cggcctctctgggacgatagcggtt

SEQ ID NO: 3929930 - DNA, 25 bp, Homo sapien
acgtctttatttccctctatgggag

SEQ ID NO: 3929931 - DNA, 25 bp, Homo sapien
gacttccacatgtccaagttgggaa

SEQ ID NO: 3929932 - DNA, 25 bp, Homo sapien
catgctggcttagtgagacttgaca

SEQ ID NO: 3929933 - DNA, 25 bp, Homo sapien
gttgaggatgccgcctggacagtct

SEQ ID NO: 3929934 - DNA, 25 bp, Homo sapien
agacttgacactggacccaccacat

SEQ ID NO: 3929935 - DNA, 25 bp, Homo sapien
gcctggacagtctcatgctggctta

SEQ ID NO: 3929936 - DNA, 25 bp, Homo sapien
taaagtgcacgtttccagagttctg

SEQ ID NO: 3929937 - DNA, 25 bp, Homo sapien
cagagtgcacttctccattgcgtaa

SEQ ID NO: 3929938 - DNA, 25 bp, Homo sapien
actgacattattgacacctggtgga

SEQ ID NO: 3929939 - DNA, 25 bp, Homo sapien
cctgctcaggattagacagagtgca

SEQ ID NO: 3929940 - DNA, 25 bp, Homo sapien
gaatctatcccattcgtcagtggct

SEQ ID NO: 3929941 - DNA, 25 bp, Homo sapien
catcttgtcggagccccgtgggttc

SEQ ID NO: 3929942 - DNA, 25 bp, Homo sapien
tgtgcggctcttgatattgtcacca

SEQ ID NO: 3929943 - DNA, 25 bp, Homo sapien
cacaaacacccttttcagtgattgg

SEQ ID NO: 3929944 - DNA, 25 bp, Homo sapien
gaggtaattattcctgctttcatct

SEQ ID NO: 3929945 - DNA, 25 bp, Homo sapien
tggaggtaattattcctgctttcat

SEQ ID NO: 3929946 - DNA, 25 bp, Homo sapien
tctggaggtaattattcctgctttc

SEQ ID NO: 3929947 - DNA, 25 bp, Homo sapien
gtaattattcctgctttcatctcca

SEQ ID NO: 3929948 - DNA, 25 bp, Homo sapien
tttctccaagcatgcttttggagtc

SEQ ID NO: 3929949 - DNA, 25 bp, Homo sapien
tctccaagcatgcttttggagtcat

SEQ ID NO: 3929950 - DNA, 25 bp, Homo sapien
tccaagcatgcttttggagtcattc

SEQ ID NO: 3929951 - DNA, 25 bp, Homo sapien
caagcatgcttttggagtcattcag

SEQ ID NO: 3929952 - DNA, 25 bp, Homo sapien
tctcattgaaaagggaagtcgtgca

SEQ ID NO: 3929953 - DNA, 25 bp, Homo sapien
ctcattgaaaagggaagtcgtgcaa

SEQ ID NO: 3929954 - DNA, 25 bp, Homo sapien
catcatatgactgtcctcgggcaca

SEQ ID NO: 3929955 - DNA, 25 bp, Homo sapien
ttggctgagggtattgtgctttgaa

SEQ ID NO: 3929956 - DNA, 25 bp, Homo sapien
cctcgggcacaacagacaacaggtt

SEQ ID NO: 3929957 - DNA, 25 bp, Homo sapien
atctcattggctgggactgcatcat

SEQ ID NO: 3929958 - DNA, 25 bp, Homo sapien
accgggctgttttctctgagctttg

SEQ ID NO: 3929959 - DNA, 25 bp, Homo sapien
catttgattccctgcggacctgtgc

SEQ ID NO: 3929960 - DNA, 25 bp, Homo sapien
gacaggcctgatcgaattctgcagc

SEQ ID NO: 3929961 - DNA, 25 bp, Homo sapien
gaccctgggcggatctgaagacttc

SEQ ID NO: 3929962 - DNA, 25 bp, Homo sapien
cttcctcagaacacataagaccggg

SEQ ID NO: 3929963 - DNA, 25 bp, Homo sapien
gctatgatgactaaggcaaactgag

SEQ ID NO: 3929964 - DNA, 25 bp, Homo sapien
tgagattctcctcctacgctggaca

SEQ ID NO: 3929965 - DNA, 25 bp, Homo sapien
gatgcgtggtcactttccgcagacc

SEQ ID NO: 3929966 - DNA, 25 bp, Homo sapien
tccgcagaccatcttcatacagaag

SEQ ID NO: 3929967 - DNA, 25 bp, Homo sapien
tgtccttttaacttgaggacgagtc

SEQ ID NO: 3929968 - DNA, 25 bp, Homo sapien
cttttaacttgaggacgagtcgtct

SEQ ID NO: 3929969 - DNA, 25 bp, Homo sapien
ttttaacttgaggacgagtcgtctc

SEQ ID NO: 3929970 - DNA, 25 bp, Homo sapien
ttaacttgaggacgagtcgtctcta

SEQ ID NO: 3929971 - DNA, 25 bp, Homo sapien
tgatgaggatgtagcctggccatct

SEQ ID NO: 3929972 - DNA, 25 bp, Homo sapien
ttctagcctgtcaccggcactggca

SEQ ID NO: 3929973 - DNA, 25 bp, Homo sapien
tggagtggcttctagcctgtcaccg

SEQ ID NO: 3929974 - DNA, 25 bp, Homo sapien
caccagtgaagtgcgtgtgtgatga

SEQ ID NO: 3929975 - DNA, 25 bp, Homo sapien
acaccaagaggactgacagccggcc

SEQ ID NO: 3929976 - DNA, 25 bp, Homo sapien
cgaaaccttcttgctggcaaacacc

SEQ ID NO: 3929977 - DNA, 25 bp, Homo sapien
actgacagccggccacgtggaggaa

SEQ ID NO: 3929978 - DNA, 25 bp, Homo sapien
tcttagcatcgagaaaagctgcctt

SEQ ID NO: 3929979 - DNA, 25 bp, Homo sapien
tgggttgagcgtgcagcctcgtacc

SEQ ID NO: 3929980 - DNA, 25 bp, Homo sapien
gctgtttcactgctgtcagacgctg

SEQ ID NO: 3929981 - DNA, 25 bp, Homo sapien
gctaatgatctggtctgctggaagg

SEQ ID NO: 3929982 - DNA, 25 bp, Homo sapien
ctaggagccttgttgaactgagtaa

SEQ ID NO: 3929983 - DNA, 25 bp, Homo sapien
cgtaactccttgagaggcctcgtgg

SEQ ID NO: 3929984 - DNA, 25 bp, Homo sapien
catgtagcctgccaacccatgtgaa

SEQ ID NO: 3929985 - DNA, 25 bp, Homo sapien
gttgggcacgtacatctaagtcctg

SEQ ID NO: 3929986 - DNA, 25 bp, Homo sapien
cagtcggtccagttcatcatgtagc

SEQ ID NO: 3929987 - DNA, 25 bp, Homo sapien
tctgcaatagtttctgccctgtgga

SEQ ID NO: 3929988 - DNA, 25 bp, Homo sapien
ctctgcaatagtttctgccctgtgg

SEQ ID NO: 3929989 - DNA, 25 bp, Homo sapien
gtgaactctgcaatagtttctgccc

SEQ ID NO: 3929990 - DNA, 25 bp, Homo sapien
gaactctgcaatagtttctgccctg

SEQ ID NO: 3929991 - DNA, 25 bp, Homo sapien
aaggccactcctgatcctacagtct

SEQ ID NO: 3929992 - DNA, 25 bp, Homo sapien
aggccactcctgatcctacagtctc

SEQ ID NO: 3929993 - DNA, 25 bp, Homo sapien
ggccactcctgatcctacagtctcc

SEQ ID NO: 3929994 - DNA, 25 bp, Homo sapien
actggtcccacctcccagatgctga

SEQ ID NO: 3929995 - DNA, 25 bp, Homo sapien
tcttaatggcagcttgtctaacggc

SEQ ID NO: 3929996 - DNA, 25 bp, Homo sapien
ccagatgctgagcttcgtggacatc

SEQ ID NO: 3929997 - DNA, 25 bp, Homo sapien
agcttcgtggacatctcattggtcc

SEQ ID NO: 3929998 - DNA, 25 bp, Homo sapien
ggagggcgctgctgatctttgattg

SEQ ID NO: 3929999 - DNA, 25 bp, Homo sapien
accaagccactcttgggagggcgct

SEQ ID NO: 3930000 - DNA, 25 bp, Homo sapien
tcaacctcctacaacccatttcctc

SEQ ID NO: 3930001 - DNA, 25 bp, Homo sapien
tattccatgtctcaacctcctacaa

SEQ ID NO: 3930002 - DNA, 25 bp, Homo sapien
ctgtttgagggagacgttactgatc

SEQ ID NO: 3930003 - DNA, 25 bp, Homo sapien
ttgagggagacgttactgatccagc

SEQ ID NO: 3930004 - DNA, 25 bp, Homo sapien
gggagacgttactgatccagctggt

SEQ ID NO: 3930005 - DNA, 25 bp, Homo sapien
tgtttgagggagacgttactgatcc

SEQ ID NO: 3930006 - DNA, 25 bp, Homo sapien
tcacctccttgagacctccagagga

SEQ ID NO: 3930007 - DNA, 25 bp, Homo sapien
tgttcacctccttgagacctccaga

SEQ ID NO: 3930008 - DNA, 25 bp, Homo sapien
gttcacctccttgagacctccagag

SEQ ID NO: 3930009 - DNA, 25 bp, Homo sapien
gtgttcacctccttgagacctccag

SEQ ID NO: 3930010 - DNA, 25 bp, Homo sapien
agcatgtgcgctccatgaagcacca

SEQ ID NO: 3930011 - DNA, 25 bp, Homo sapien
gttctgtgcaactactccaccaagg

SEQ ID NO: 3930012 - DNA, 25 bp, Homo sapien
tgagagctgctactaccactgcgtt

SEQ ID NO: 3930013 - DNA, 25 bp, Homo sapien
agagcctgcgaaagctgcagcggct

SEQ ID NO: 3930014 - DNA, 25 bp, Homo sapien
tttccagctcctcggttttaggaca

SEQ ID NO: 3930015 - DNA, 25 bp, Homo sapien
aagggacgtgggctagctcatcttc

SEQ ID NO: 3930016 - DNA, 25 bp, Homo sapien
caggattgtaacctccagaaagcac

SEQ ID NO: 3930017 - DNA, 25 bp, Homo sapien
ggttttaggacaaactcttgctgcc

SEQ ID NO: 3930018 - DNA, 25 bp, Homo sapien
aatacattgtgatcccaattgaggg

SEQ ID NO: 3930019 - DNA, 25 bp, Homo sapien
gagggtattctaattagctgggtca

SEQ ID NO: 3930020 - DNA, 25 bp, Homo sapien
tgagtgcaccactgggatttgtgcc

SEQ ID NO: 3930021 - DNA, 25 bp, Homo sapien
ccttggtggattcttcatatattac

SEQ ID NO: 3930022 - DNA, 25 bp, Homo sapien
tctttgggtccccggttggcatgca

SEQ ID NO: 3930023 - DNA, 25 bp, Homo sapien
ctttgggtccccggttggcatgcat

SEQ ID NO: 3930024 - DNA, 25 bp, Homo sapien
ttctttgggtccccggttggcatgc

SEQ ID NO: 3930025 - DNA, 25 bp, Homo sapien
gggtagaatcccacaaagtcgcaca

SEQ ID NO: 3930026 - DNA, 25 bp, Homo sapien
tatccgaggtgcctctggttgcagg

SEQ ID NO: 3930027 - DNA, 25 bp, Homo sapien
tttgtgcttggtgttacgcgccagc

SEQ ID NO: 3930028 - DNA, 25 bp, Homo sapien
ggtgttacgcgccagcccctttatc

SEQ ID NO: 3930029 - DNA, 25 bp, Homo sapien
tgtttgacgaggctgaacaagcaca

SEQ ID NO: 3930030 - DNA, 25 bp, Homo sapien
gacgaggctgaacaagcacaacata

SEQ ID NO: 3930031 - DNA, 25 bp, Homo sapien
tcagtgtttgacgaggctgaacaag

SEQ ID NO: 3930032 - DNA, 25 bp, Homo sapien
ttgacgaggctgaacaagcacaaca

SEQ ID NO: 3930033 - DNA, 25 bp, Homo sapien
ctcgcatctcctggaatagccccct

SEQ ID NO: 3930034 - DNA, 25 bp, Homo sapien
gtgcacagcacagtgtgccgagagg

SEQ ID NO: 3930035 - DNA, 25 bp, Homo sapien
catctcctggaatagccccctggct

SEQ ID NO: 3930036 - DNA, 25 bp, Homo sapien
agtgtgccgagagggcggccacggg

SEQ ID NO: 3930037 - DNA, 25 bp, Homo sapien
gaagtctccgctctggccttggata

SEQ ID NO: 3930038 - DNA, 25 bp, Homo sapien
aagatagaggaacgggaagtctccg

SEQ ID NO: 3930039 - DNA, 25 bp, Homo sapien
caggaaatgtgattcgtgcaaggga

SEQ ID NO: 3930040 - DNA, 25 bp, Homo sapien
ccttggatacggagagtgagcaatc

SEQ ID NO: 3930041 - DNA, 25 bp, Homo sapien
catgggaggagttttaaagagcatt

SEQ ID NO: 3930042 - DNA, 25 bp, Homo sapien
tcctctcgcatttggttgaaattct

SEQ ID NO: 3930043 - DNA, 25 bp, Homo sapien
agagcattttcctctcgcatttggt

SEQ ID NO: 3930044 - DNA, 25 bp, Homo sapien
agcaacaaccagaaagttgaagagc

SEQ ID NO: 3930045 - DNA, 25 bp, Homo sapien
gaatgtatttgtcagcaaatagtag

SEQ ID NO: 3930046 - DNA, 25 bp, Homo sapien
gtatttgtcagcaaatagtaggaac

SEQ ID NO: 3930047 - DNA, 25 bp, Homo sapien
tcctgcttgtgttgcgccggctgcc

SEQ ID NO: 3930048 - DNA, 25 bp, Homo sapien
tgggtttgagcaccaaattcatgct

SEQ ID NO: 3930049 - DNA, 25 bp, Homo sapien
ctcttaaaggaacgaacagctgtaa

SEQ ID NO: 3930050 - DNA, 25 bp, Homo sapien
cattatcttgacagattgatcagac

SEQ ID NO: 3930051 - DNA, 25 bp, Homo sapien
ctcattaagctggtccgggctattg

SEQ ID NO: 3930052 - DNA, 25 bp, Homo sapien
ggaagagtcttacttactccatgca

SEQ ID NO: 3930053 - DNA, 25 bp, Homo sapien
gacgggtgccttgctgcttgctgaa

SEQ ID NO: 3930054 - DNA, 25 bp, Homo sapien
cccagggacgggtgccttgctgctt

SEQ ID NO: 3930055 - DNA, 25 bp, Homo sapien
catgcataactaatgtcctcattaa

SEQ ID NO: 3930056 - DNA, 25 bp, Homo sapien
agggacgggtgccttgctgcttgct

SEQ ID NO: 3930057 - DNA, 25 bp, Homo sapien
gctgtttggtgctaaggcccgtcca

SEQ ID NO: 3930058 - DNA, 25 bp, Homo sapien
tctttgcgctcaggcccattggaat

SEQ ID NO: 3930059 - DNA, 25 bp, Homo sapien
gagggtgctcatattcagggacagc

SEQ ID NO: 3930060 - DNA, 25 bp, Homo sapien
tttgtgctctgaaaacggtgtctca

SEQ ID NO: 3930061 - DNA, 25 bp, Homo sapien
tgaggaggttatccctactagaagc

SEQ ID NO: 3930062 - DNA, 25 bp, Homo sapien
gatccagaaaggtccaactccatgt

SEQ ID NO: 3930063 - DNA, 25 bp, Homo sapien
ccaagtgagcttgcctcagaatcgc

SEQ ID NO: 3930064 - DNA, 25 bp, Homo sapien
ggtgggctagaataatagttcctcc

SEQ ID NO: 3930065 - DNA, 25 bp, Homo sapien
taagtgacttggattatccgtgtca

SEQ ID NO: 3930066 - DNA, 25 bp, Homo sapien
cattcatgcagataattgagaattg

SEQ ID NO: 3930067 - DNA, 25 bp, Homo sapien
taattgagaattgacagtgtccttt

SEQ ID NO: 3930068 - DNA, 25 bp, Homo sapien
tccgtgtcactgagcgcttcattca

SEQ ID NO: 3930069 - DNA, 25 bp, Homo sapien
ccttcagccagcgtctgggctgcat

SEQ ID NO: 3930070 - DNA, 25 bp, Homo sapien
cagccagcgtctgggctgcatggcc

SEQ ID NO: 3930071 - DNA, 25 bp, Homo sapien
gccagcgtctgggctgcatggccat

SEQ ID NO: 3930072 - DNA, 25 bp, Homo sapien
ttcagccagcgtctgggctgcatgg

SEQ ID NO: 3930073 - DNA, 25 bp, Homo sapien
ttgttgggcctccttagcgctgtca

SEQ ID NO: 3930074 - DNA, 25 bp, Homo sapien
agggaggtccttagccaagctaatg

SEQ ID NO: 3930075 - DNA, 25 bp, Homo sapien
gttgaaaaccctccagaccatcttg

SEQ ID NO: 3930076 - DNA, 25 bp, Homo sapien
cacactatagagatgaaggcggact

SEQ ID NO: 3930077 - DNA, 25 bp, Homo sapien
gatggaagatctgctgtctgcccag

SEQ ID NO: 3930078 - DNA, 25 bp, Homo sapien
tctgcgagtctaggtgttgatggaa

SEQ ID NO: 3930079 - DNA, 25 bp, Homo sapien
ccacgctgatcccggacactgggtg

SEQ ID NO: 3930080 - DNA, 25 bp, Homo sapien
tgggtgtcgagagccttctgtttga

SEQ ID NO: 3930081 - DNA, 25 bp, Homo sapien
tgcaggggtagagatacttttgtcc

SEQ ID NO: 3930082 - DNA, 25 bp, Homo sapien
aggggtagagatacttttgtcctgt

SEQ ID NO: 3930083 - DNA, 25 bp, Homo sapien
ctgcaggggtagagatacttttgtc

SEQ ID NO: 3930084 - DNA, 25 bp, Homo sapien
gcaggggtagagatacttttgtcct

SEQ ID NO: 3930085 - DNA, 25 bp, Homo sapien
tcatttttccctggacagccttgcc

SEQ ID NO: 3930086 - DNA, 25 bp, Homo sapien
gaggcaggcctgctttcgttttgca

SEQ ID NO: 3930087 - DNA, 25 bp, Homo sapien
gcaggcctgctttcgttttgcatct

SEQ ID NO: 3930088 - DNA, 25 bp, Homo sapien
acagccttgcctggggtactgcctg

SEQ ID NO: 3930089 - DNA, 25 bp, Homo sapien
gcaggggcccctggtgcctccgcac

SEQ ID NO: 3930090 - DNA, 25 bp, Homo sapien
ctccaaggagtttggtgtgggagct

SEQ ID NO: 3930091 - DNA, 25 bp, Homo sapien
agtttggtgtgggagctgtctggca

SEQ ID NO: 3930092 - DNA, 25 bp, Homo sapien
caaggagtttggtgtgggagctgtc

SEQ ID NO: 3930093 - DNA, 25 bp, Homo sapien
ctgagtgcagaaccaaaccagaggg

SEQ ID NO: 3930094 - DNA, 25 bp, Homo sapien
cctaatgcggggatggttaggagag

SEQ ID NO: 3930095 - DNA, 25 bp, Homo sapien
agaggatggagggttaaagctcctt

SEQ ID NO: 3930096 - DNA, 25 bp, Homo sapien
agctgagtgcagaaccaaaccagag

SEQ ID NO: 3930097 - DNA, 25 bp, Homo sapien
tgcctggacagagttcagacttgcc

SEQ ID NO: 3930098 - DNA, 25 bp, Homo sapien
gggcgccggagtaagacccatctgc

SEQ ID NO: 3930099 - DNA, 25 bp, Homo sapien
cggagtaagacccatctgccttctc

SEQ ID NO: 3930100 - DNA, 25 bp, Homo sapien
tgtgtgtccccgttgtaaggccttc

SEQ ID NO: 3930101 - DNA, 25 bp, Homo sapien
cactggcattggcagttgaccgcaa

SEQ ID NO: 3930102 - DNA, 25 bp, Homo sapien
cattggcagttgaccgcaaatatga

SEQ ID NO: 3930103 - DNA, 25 bp, Homo sapien
agttgaccgcaaatatgaatgggac

SEQ ID NO: 3930104 - DNA, 25 bp, Homo sapien
ggcagttgaccgcaaatatgaatgg

SEQ ID NO: 3930105 - DNA, 25 bp, Homo sapien
taacttccacaagggcccgaatatg

SEQ ID NO: 3930106 - DNA, 25 bp, Homo sapien
caagtgtttggaaagtggagtcgct

SEQ ID NO: 3930107 - DNA, 25 bp, Homo sapien
tgttgatcagagacacttccagctc

SEQ ID NO: 3930108 - DNA, 25 bp, Homo sapien
gctcatttgagaaaggactggtaac

SEQ ID NO: 3930109 - DNA, 25 bp, Homo sapien
cctttgatttcgacatgcctcagtt

SEQ ID NO: 3930110 - DNA, 25 bp, Homo sapien
atgtggtatcccctttgatttcgac

SEQ ID NO: 3930111 - DNA, 25 bp, Homo sapien
gttagtgtacactccggaggcctca

SEQ ID NO: 3930112 - DNA, 25 bp, Homo sapien
gcttgtggttagtgtacactccgga

SEQ ID NO: 3930113 - DNA, 25 bp, Homo sapien
ggctaccctgacttcttctcctccc

SEQ ID NO: 3930114 - DNA, 25 bp, Homo sapien
gcattggctaccctgacttcttctc

SEQ ID NO: 3930115 - DNA, 25 bp, Homo sapien
ccttgcattggctaccctgacttct

SEQ ID NO: 3930116 - DNA, 25 bp, Homo sapien
tggctaccctgacttcttctcctcc

SEQ ID NO: 3930117 - DNA, 25 bp, Homo sapien
tcttctgtcgctggcagtatgctct

SEQ ID NO: 3930118 - DNA, 25 bp, Homo sapien
tcttggtggcacgtgtcacaccggg

SEQ ID NO: 3930119 - DNA, 25 bp, Homo sapien
acaccggggcatccgtgtcttcctg

SEQ ID NO: 3930120 - DNA, 25 bp, Homo sapien
gaggatgactggacctttctaaccc

SEQ ID NO: 3930121 - DNA, 25 bp, Homo sapien
cgtggaattcttcgcataaatgaca

SEQ ID NO: 3930122 - DNA, 25 bp, Homo sapien
ataaatgacatctgccgtcttaggg

SEQ ID NO: 3930123 - DNA, 25 bp, Homo sapien
taacccttaggagaattttgtgcaa

SEQ ID NO: 3930124 - DNA, 25 bp, Homo sapien
ccaggataatgcgttgtgttacggt

SEQ ID NO: 3930125 - DNA, 25 bp, Homo sapien
ttacggaatactgtcttcggagaca

SEQ ID NO: 3930126 - DNA, 25 bp, Homo sapien
acctcttgtgaatgatccacagatt

SEQ ID NO: 3930127 - DNA, 25 bp, Homo sapien
agaacctcttgtgaatgatccacag

SEQ ID NO: 3930128 - DNA, 25 bp, Homo sapien
gatccacagatttaggtaaatcaga

SEQ ID NO: 3930129 - DNA, 25 bp, Homo sapien
atgatccacagatttaggtaaatca

SEQ ID NO: 3930130 - DNA, 25 bp, Homo sapien
tgtaggattctaagccctgggcttg

SEQ ID NO: 3930131 - DNA, 25 bp, Homo sapien
gggagttttcacttgcctgtcatcc

SEQ ID NO: 3930132 - DNA, 25 bp, Homo sapien
ttctctgaggcatagttctcgaagg

SEQ ID NO: 3930133 - DNA, 25 bp, Homo sapien
ggattagcggatttgtaggattcta

SEQ ID NO: 3930134 - DNA, 25 bp, Homo sapien
tgggctcacgtgtcaaggtgtcagt

SEQ ID NO: 3930135 - DNA, 25 bp, Homo sapien
tgctccaagaccacgtatccagtgt

SEQ ID NO: 3930136 - DNA, 25 bp, Homo sapien
cagttccagtgttagagttaggtgc

SEQ ID NO: 3930137 - DNA, 25 bp, Homo sapien
agttaggtgcatacccagagatggg

SEQ ID NO: 3930138 - DNA, 25 bp, Homo sapien
cttgggccgcgaaaactgctgagaa

SEQ ID NO: 3930139 - DNA, 25 bp, Homo sapien
gggccataggaagtgtccaaaagac

SEQ ID NO: 3930140 - DNA, 25 bp, Homo sapien
ggagtccctggaaacctgtgccttc

SEQ ID NO: 3930141 - DNA, 25 bp, Homo sapien
cctttatgccagaagctcgagtggg

SEQ ID NO: 3930142 - DNA, 25 bp, Homo sapien
tagatcctggttagcggagccttcg

SEQ ID NO: 3930143 - DNA, 25 bp, Homo sapien
gaacgaaccacagccactttgagga

SEQ ID NO: 3930144 - DNA, 25 bp, Homo sapien
gatttggctctgttcaggctcccag

SEQ ID NO: 3930145 - DNA, 25 bp, Homo sapien
gctgctaatggacttcgtgggacca

SEQ ID NO: 3930146 - DNA, 25 bp, Homo sapien
ttagcagctgttgacccaaacgcag

SEQ ID NO: 3930147 - DNA, 25 bp, Homo sapien
ggccttggtggttcttcttagcagc

SEQ ID NO: 3930148 - DNA, 25 bp, Homo sapien
ggttcttcttagcagctgttgaccc

SEQ ID NO: 3930149 - DNA, 25 bp, Homo sapien
gacccaaacgcagcattgggagcag

SEQ ID NO: 3930150 - DNA, 25 bp, Homo sapien
gtccaagattagaactgctggctgg

SEQ ID NO: 3930151 - DNA, 25 bp, Homo sapien
tctggcgctgtccaagattagaact

SEQ ID NO: 3930152 - DNA, 25 bp, Homo sapien
gttgccaaaatttgttctggcgctg

SEQ ID NO: 3930153 - DNA, 25 bp, Homo sapien
tggaagttttggtggaatgagcaga

SEQ ID NO: 3930154 - DNA, 25 bp, Homo sapien
tgttgacatagtgaatcccagtggc

SEQ ID NO: 3930155 - DNA, 25 bp, Homo sapien
tagactctggaatgaggcgagcagt

SEQ ID NO: 3930156 - DNA, 25 bp, Homo sapien
tcccagtggccacgtggagtgctga

SEQ ID NO: 3930157 - DNA, 25 bp, Homo sapien
ggcgagcagtaacccagataattgt

SEQ ID NO: 3930158 - DNA, 25 bp, Homo sapien
gcacctcttcataagacctggggag

SEQ ID NO: 3930159 - DNA, 25 bp, Homo sapien
aggtgaggaagtgggaaaccagttg

SEQ ID NO: 3930160 - DNA, 25 bp, Homo sapien
gctggtcccagcttaaagaggaacc

SEQ ID NO: 3930161 - DNA, 25 bp, Homo sapien
cagacgctgcgtctggaacctgctg

SEQ ID NO: 3930162 - DNA, 25 bp, Homo sapien
gaggctccacgtatgcctgctgctt

SEQ ID NO: 3930163 - DNA, 25 bp, Homo sapien
aaaataatctcatcaggcgtgtgag

SEQ ID NO: 3930164 - DNA, 25 bp, Homo sapien
ccttgtagctgagtaacactttcca

SEQ ID NO: 3930165 - DNA, 25 bp, Homo sapien
aacccacaattaacaagaggccttg

SEQ ID NO: 3930166 - DNA, 25 bp, Homo sapien
tttcctatggcgaaatggcctgtgg

SEQ ID NO: 3930167 - DNA, 25 bp, Homo sapien
cattttaacagtgaagagttgtggg

SEQ ID NO: 3930168 - DNA, 25 bp, Homo sapien
taatttcggactgtgccctggttct

SEQ ID NO: 3930169 - DNA, 25 bp, Homo sapien
cctgtggaggtctggagagccacct

SEQ ID NO: 3930170 - DNA, 25 bp, Homo sapien
tcggtatatttgcagagccctgaag

SEQ ID NO: 3930171 - DNA, 25 bp, Homo sapien
ttcggtatatttgcagagccctgaa

SEQ ID NO: 3930172 - DNA, 25 bp, Homo sapien
cttcggtatatttgcagagccctga

SEQ ID NO: 3930173 - DNA, 25 bp, Homo sapien
cggtatatttgcagagccctgaagt

SEQ ID NO: 3930174 - DNA, 25 bp, Homo sapien
agcctgcatatcgacccctcgatgg

SEQ ID NO: 3930175 - DNA, 25 bp, Homo sapien
cagctaagcatgcacccttcagtca

SEQ ID NO: 3930176 - DNA, 25 bp, Homo sapien
tcagaaatgtttggcgggttccagc

SEQ ID NO: 3930177 - DNA, 25 bp, Homo sapien
gaaggatcttgggtccgtgtaccag

SEQ ID NO: 3930178 - DNA, 25 bp, Homo sapien
ggctggtggagtttgatagtgccat

SEQ ID NO: 3930179 - DNA, 25 bp, Homo sapien
gttcttagcctgcttctcgcattgg

SEQ ID NO: 3930180 - DNA, 25 bp, Homo sapien
cctgcttctcgcattggctggtgga

SEQ ID NO: 3930181 - DNA, 25 bp, Homo sapien
ctagtatgcgtgttcttagcctgct

SEQ ID NO: 3930182 - DNA, 25 bp, Homo sapien
gctaactcatttggcccatattctt

SEQ ID NO: 3930183 - DNA, 25 bp, Homo sapien
ttggcaattcttcctgggctgtaga

SEQ ID NO: 3930184 - DNA, 25 bp, Homo sapien
tctcctgttactgctaactcatttg

SEQ ID NO: 3930185 - DNA, 25 bp, Homo sapien
ttttggcaattcttcctgggctgta

SEQ ID NO: 3930186 - DNA, 25 bp, Homo sapien
tggctcagataaacattgactggct

SEQ ID NO: 3930187 - DNA, 25 bp, Homo sapien
catctagcccctggccagtgttgcg

SEQ ID NO: 3930188 - DNA, 25 bp, Homo sapien
tagcatcatcccgagcaattgtgtc

SEQ ID NO: 3930189 - DNA, 25 bp, Homo sapien
gaatcacaggctcgtgctggttgga

SEQ ID NO: 3930190 - DNA, 25 bp, Homo sapien
gagaagactgagtcgctgcctcctt

SEQ ID NO: 3930191 - DNA, 25 bp, Homo sapien
cccactggctgtgatctgactggaa

SEQ ID NO: 3930192 - DNA, 25 bp, Homo sapien
gaactctattgctcaactgtgggac

SEQ ID NO: 3930193 - DNA, 25 bp, Homo sapien
gaactttgtcagattgtgtcccact

SEQ ID NO: 3930194 - DNA, 25 bp, Homo sapien
ttctaggttcggaagccagccctgt

SEQ ID NO: 3930195 - DNA, 25 bp, Homo sapien
gggaacaaagcccagtgtcagccca

SEQ ID NO: 3930196 - DNA, 25 bp, Homo sapien
aaactctgtgcacaccttctcttgc

SEQ ID NO: 3930197 - DNA, 25 bp, Homo sapien
tctctgcatttctaggttcggaagc

SEQ ID NO: 3930198 - DNA, 25 bp, Homo sapien
gtgggagctgagtgccaccttccca

SEQ ID NO: 3930199 - DNA, 25 bp, Homo sapien
ggtgggagctgagtgccaccttccc

SEQ ID NO: 3930200 - DNA, 25 bp, Homo sapien
cttcgctgttaaagggccttgctct

SEQ ID NO: 3930201 - DNA, 25 bp, Homo sapien
cgtcttttgttttagcggcagtggc

SEQ ID NO: 3930202 - DNA, 25 bp, Homo sapien
aactccatttggcacacgggcgatg

SEQ ID NO: 3930203 - DNA, 25 bp, Homo sapien
ggcgagtagcagtgccctgcagcat

SEQ ID NO: 3930204 - DNA, 25 bp, Homo sapien
cgatgcaggtggcacagtttccttc

SEQ ID NO: 3930205 - DNA, 25 bp, Homo sapien
ttgtcttcaggagcccagcgtgcac

SEQ ID NO: 3930206 - DNA, 25 bp, Homo sapien
cccagcgtgcacgggccctggcttt

SEQ ID NO: 3930207 - DNA, 25 bp, Homo sapien
gccctggctttccagttcttcaggc

SEQ ID NO: 3930208 - DNA, 25 bp, Homo sapien
cctttgtcttcaggagcccagcgtg

SEQ ID NO: 3930209 - DNA, 25 bp, Homo sapien
tctcaggtgctgcggagacagcaag

SEQ ID NO: 3930210 - DNA, 25 bp, Homo sapien
agacagcaagatccagtggccccag

SEQ ID NO: 3930211 - DNA, 25 bp, Homo sapien
ggcagggtgccacggccttcccgag

SEQ ID NO: 3930212 - DNA, 25 bp, Homo sapien
agtggccccaggctaccacggaggc

SEQ ID NO: 3930213 - DNA, 25 bp, Homo sapien
gtcgtatctttcacaagcaggaggc

SEQ ID NO: 3930214 - DNA, 25 bp, Homo sapien
caacaaacatgcaggagtgggagaa

SEQ ID NO: 3930215 - DNA, 25 bp, Homo sapien
ggctgaatgagaaccctttgtgaaa

SEQ ID NO: 3930216 - DNA, 25 bp, Homo sapien
gaattaagtcatatctgggcctaga

SEQ ID NO: 3930217 - DNA, 25 bp, Homo sapien
tgacaatgagtgtgtgatacagcgg

SEQ ID NO: 3930218 - DNA, 25 bp, Homo sapien
tgagtgtgtgatacagcggagctct

SEQ ID NO: 3930219 - DNA, 25 bp, Homo sapien
gaatgatgcatcgagggatgtgaca

SEQ ID NO: 3930220 - DNA, 25 bp, Homo sapien
gtgatacagcggagctctgggcctc

SEQ ID NO: 3930221 - DNA, 25 bp, Homo sapien
gcctcgtagtgatagcttttgaaag

SEQ ID NO: 3930222 - DNA, 25 bp, Homo sapien
tttctgaaacgaactggccactcgg

SEQ ID NO: 3930223 - DNA, 25 bp, Homo sapien
tttcatccagtgacagccttgagga

SEQ ID NO: 3930224 - DNA, 25 bp, Homo sapien
caggatgaaaaggtgccggatgttt

SEQ ID NO: 3930225 - DNA, 25 bp, Homo sapien
taagcacagtgctgcctgtagcgca

SEQ ID NO: 3930226 - DNA, 25 bp, Homo sapien
aaggatgcattaggggtcttccggc

SEQ ID NO: 3930227 - DNA, 25 bp, Homo sapien
ggtcttccggctcctaggtgtgtga

SEQ ID NO: 3930228 - DNA, 25 bp, Homo sapien
tgtgtgacctgcgtaagcacagtgc

SEQ ID NO: 3930229 - DNA, 25 bp, Homo sapien
ctccagtgaccttgattcgatgcag

SEQ ID NO: 3930230 - DNA, 25 bp, Homo sapien
tccagtgaccttgattcgatgcaga

SEQ ID NO: 3930231 - DNA, 25 bp, Homo sapien
gcattcccagtcctcgagaaccagt

SEQ ID NO: 3930232 - DNA, 25 bp, Homo sapien
tggatctggctttactgagtgctgg

SEQ ID NO: 3930233 - DNA, 25 bp, Homo sapien
ttctgggaggcggaacccgactgac

SEQ ID NO: 3930234 - DNA, 25 bp, Homo sapien
tgagtgctggtgagatttcgtttta

SEQ ID NO: 3930235 - DNA, 25 bp, Homo sapien
gtctctctgcaaagtgtctggctgc

SEQ ID NO: 3930236 - DNA, 25 bp, Homo sapien
gagctgtgggatccggcacagccag

SEQ ID NO: 3930237 - DNA, 25 bp, Homo sapien
tctggctgcttgattgactgtgttt

SEQ ID NO: 3930238 - DNA, 25 bp, Homo sapien
tcttcgtggagtggagtctctctgc

SEQ ID NO: 3930239 - DNA, 25 bp, Homo sapien
tctgcccatgtgtgagtcctgcatg

SEQ ID NO: 3930240 - DNA, 25 bp, Homo sapien
cctctcttaacttgggtgtctgccc

SEQ ID NO: 3930241 - DNA, 25 bp, Homo sapien
tattgagaagccaatagcaatttac

SEQ ID NO: 3930242 - DNA, 25 bp, Homo sapien
gaggtggagctctgcaaaccaccat

SEQ ID NO: 3930243 - DNA, 25 bp, Homo sapien
tgggccctgacaatactctggctgg

SEQ ID NO: 3930244 - DNA, 25 bp, Homo sapien
ttcggttgggccctgacaatactct

SEQ ID NO: 3930245 - DNA, 25 bp, Homo sapien
cctgacaatactctggctgggatgt

SEQ ID NO: 3930246 - DNA, 25 bp, Homo sapien
cggttgggccctgacaatactctgg

SEQ ID NO: 3930247 - DNA, 25 bp, Homo sapien
gggtcttggcagagcttgagaatcc

SEQ ID NO: 3930248 - DNA, 25 bp, Homo sapien
cctccgagcggttgaggttattgga

SEQ ID NO: 3930249 - DNA, 25 bp, Homo sapien
tgtgtcttgagttctaacaatcgtc

SEQ ID NO: 3930250 - DNA, 25 bp, Homo sapien
agaagcaaagcctgtaccatgggct

SEQ ID NO: 3930251 - DNA, 25 bp, Homo sapien
aaggactcctgttcctagcagagac

SEQ ID NO: 3930252 - DNA, 25 bp, Homo sapien
tgttcctagcagagactttccgaac

SEQ ID NO: 3930253 - DNA, 25 bp, Homo sapien
ctagcagagactttccgaactgccc

SEQ ID NO: 3930254 - DNA, 25 bp, Homo sapien
ggagccattgaaaggactcctgttc

SEQ ID NO: 3930255 - DNA, 25 bp, Homo sapien
cgccagtgtggttcatcgatgctag

SEQ ID NO: 3930256 - DNA, 25 bp, Homo sapien
gaaggtgatggcgaacccaggtgag

SEQ ID NO: 3930257 - DNA, 25 bp, Homo sapien
aggaaatgtgggaaacacgccagtg

SEQ ID NO: 3930258 - DNA, 25 bp, Homo sapien
tgatggcgaacccaggtgaggaaat

SEQ ID NO: 3930259 - DNA, 25 bp, Homo sapien
tggaccctgtgaccaaggagcgttt

SEQ ID NO: 3930260 - DNA, 25 bp, Homo sapien
ccctttagtagaaggagcagcatgg

SEQ ID NO: 3930261 - DNA, 25 bp, Homo sapien
ttcagggaagggagctttaggaggc

SEQ ID NO: 3930262 - DNA, 25 bp, Homo sapien
aggctcttgtgtcccctttagtaga

SEQ ID NO: 3930263 - DNA, 25 bp, Homo sapien
tgaggtcacctgtccatggagggtg

SEQ ID NO: 3930264 - DNA, 25 bp, Homo sapien
aacttgagtgggttgggatgagagc

SEQ ID NO: 3930265 - DNA, 25 bp, Homo sapien
ggtgctttgcaaggccgttcctctt

SEQ ID NO: 3930266 - DNA, 25 bp, Homo sapien
tccaggtcattggtgggttatgtgg

SEQ ID NO: 3930267 - DNA, 25 bp, Homo sapien
aatagtagttgaggacgaaccctcg

SEQ ID NO: 3930268 - DNA, 25 bp, Homo sapien
taacaatagtagttgaggacgaacc

SEQ ID NO: 3930269 - DNA, 25 bp, Homo sapien
tagttgaggacgaaccctcggaggc

SEQ ID NO: 3930270 - DNA, 25 bp, Homo sapien
tgaataacaatagtagttgaggacg

SEQ ID NO: 3930271 - DNA, 25 bp, Homo sapien
gcagccccgcttcacttctgtcaag

SEQ ID NO: 3930272 - DNA, 25 bp, Homo sapien
tttagaggatatgatcaggccctgt

SEQ ID NO: 3930273 - DNA, 25 bp, Homo sapien
gaggatatgatcaggccctgtgctg

SEQ ID NO: 3930274 - DNA, 25 bp, Homo sapien
cgcttcacttctgtcaagacccagt

SEQ ID NO: 3930275 - DNA, 25 bp, Homo sapien
tgtgcccctggtaagctgagaagcg

SEQ ID NO: 3930276 - DNA, 25 bp, Homo sapien
tacgatttgaggctctcctctagga

SEQ ID NO: 3930277 - DNA, 25 bp, Homo sapien
agtgggatttgtgcccctggtaagc

SEQ ID NO: 3930278 - DNA, 25 bp, Homo sapien
gatttgaggctctcctctaggatgc

SEQ ID NO: 3930279 - DNA, 25 bp, Homo sapien
ataaactaaaaggtccagcaattct

SEQ ID NO: 3930280 - DNA, 25 bp, Homo sapien
aactaaaaggtccagcaattctctt

SEQ ID NO: 3930281 - DNA, 25 bp, Homo sapien
taaactaaaaggtccagcaattctc

SEQ ID NO: 3930282 - DNA, 25 bp, Homo sapien
aaactaaaaggtccagcaattctct

SEQ ID NO: 3930283 - DNA, 25 bp, Homo sapien
tctgctacctttcgtttcttaccac

SEQ ID NO: 3930284 - DNA, 25 bp, Homo sapien
tgaaaagcttctccggatattggct

SEQ ID NO: 3930285 - DNA, 25 bp, Homo sapien
cggatattggctgccatctccacgc

SEQ ID NO: 3930286 - DNA, 25 bp, Homo sapien
ttctccggatattggctgccatctc

SEQ ID NO: 3930287 - DNA, 25 bp, Homo sapien
tcagtgactgcctatacccgctgtt

SEQ ID NO: 3930288 - DNA, 25 bp, Homo sapien
ctgggagtgagacccctcgcccgat

SEQ ID NO: 3930289 - DNA, 25 bp, Homo sapien
ctcgcccgatgcttctagggcagga

SEQ ID NO: 3930290 - DNA, 25 bp, Homo sapien
gcttctagggcaggagtcagtgact

SEQ ID NO: 3930291 - DNA, 25 bp, Homo sapien
gaattcaggaggtgtcaaatcttca

SEQ ID NO: 3930292 - DNA, 25 bp, Homo sapien
tgccgtcaagcagcaggtgcgagtt

SEQ ID NO: 3930293 - DNA, 25 bp, Homo sapien
caaatcttcacgttcagttaatggc

SEQ ID NO: 3930294 - DNA, 25 bp, Homo sapien
gagtttgtagagttggcccctcgag

SEQ ID NO: 3930295 - DNA, 25 bp, Homo sapien
tgagctcggggctcgggtgccactg

SEQ ID NO: 3930296 - DNA, 25 bp, Homo sapien
gctcgggtgccactggaatttcccg

SEQ ID NO: 3930297 - DNA, 25 bp, Homo sapien
ctcggggctcgggtgccactggaat

SEQ ID NO: 3930298 - DNA, 25 bp, Homo sapien
gggctcgggtgccactggaatttcc

SEQ ID NO: 3930299 - DNA, 25 bp, Homo sapien
ggagagattgccagaggcatctctg

SEQ ID NO: 3930300 - DNA, 25 bp, Homo sapien
ggcatctctgcgttgtgggccacgt

SEQ ID NO: 3930301 - DNA, 25 bp, Homo sapien
aatcttcgtttttccggagagattg

SEQ ID NO: 3930302 - DNA, 25 bp, Homo sapien
catctctgcgttgtgggccacgttg

SEQ ID NO: 3930303 - DNA, 25 bp, Homo sapien
actcggagactttgattcagttgca

SEQ ID NO: 3930304 - DNA, 25 bp, Homo sapien
agttgcaaatctgaagctggcatta

SEQ ID NO: 3930305 - DNA, 25 bp, Homo sapien
aaccttgtaatgacgactcggagac

SEQ ID NO: 3930306 - DNA, 25 bp, Homo sapien
gaagctggcattagtggacctcatg

SEQ ID NO: 3930307 - DNA, 25 bp, Homo sapien
atcttttgggtttaggaagatggct

SEQ ID NO: 3930308 - DNA, 25 bp, Homo sapien
caattcgtctgctgtataggttctt

SEQ ID NO: 3930309 - DNA, 25 bp, Homo sapien
tccaattcgtctgctgtataggttc

SEQ ID NO: 3930310 - DNA, 25 bp, Homo sapien
ccctttccaattcgtctgctgtata

SEQ ID NO: 3930311 - DNA, 25 bp, Homo sapien
tcctcagggtcacattgagtttgaa

SEQ ID NO: 3930312 - DNA, 25 bp, Homo sapien
ctcagggtcacattgagtttgaatc

SEQ ID NO: 3930313 - DNA, 25 bp, Homo sapien
cctcagggtcacattgagtttgaat

SEQ ID NO: 3930314 - DNA, 25 bp, Homo sapien
tctcctcagggtcacattgagtttg

SEQ ID NO: 3930315 - DNA, 25 bp, Homo sapien
ctgagctcagagacatccgaggatg

SEQ ID NO: 3930316 - DNA, 25 bp, Homo sapien
ttttgctctcgcgaatctgggattg

SEQ ID NO: 3930317 - DNA, 25 bp, Homo sapien
gctccactcgatgcaaaaaccgtgt

SEQ ID NO: 3930318 - DNA, 25 bp, Homo sapien
ccgtctttttgcatatctattggag

SEQ ID NO: 3930319 - DNA, 25 bp, Homo sapien
tgtaaactccccgccaaccatgctg

SEQ ID NO: 3930320 - DNA, 25 bp, Homo sapien
ccgccgccgcttctcttccgtggcc

SEQ ID NO: 3930321 - DNA, 25 bp, Homo sapien
ggctgtaaactccccgccaaccatg

SEQ ID NO: 3930322 - DNA, 25 bp, Homo sapien
gccgccgcttctcttccgtggcccc

SEQ ID NO: 3930323 - DNA, 25 bp, Homo sapien
cccctccgaccgctgcagccgccac

SEQ ID NO: 3930324 - DNA, 25 bp, Homo sapien
gtcccctccgaccgctgcagccgcc

SEQ ID NO: 3930325 - DNA, 25 bp, Homo sapien
cgtcccctccgaccgctgcagccgc

SEQ ID NO: 3930326 - DNA, 25 bp, Homo sapien
tcccctccgaccgctgcagccgcca

SEQ ID NO: 3930327 - DNA, 25 bp, Homo sapien
tccaggtttcacacgagaaaattga

SEQ ID NO: 3930328 - DNA, 25 bp, Homo sapien
gtctagtctatggtatgtgttaaag

SEQ ID NO: 3930329 - DNA, 25 bp, Homo sapien
tctttcctgaagttatcccctttca

SEQ ID NO: 3930330 - DNA, 25 bp, Homo sapien
gaaccagagaagaccgattgcgtct

SEQ ID NO: 3930331 - DNA, 25 bp, Homo sapien
tctttgcaggctcctagagagttcc

SEQ ID NO: 3930332 - DNA, 25 bp, Homo sapien
aaataatctggtaggctagggcaac

SEQ ID NO: 3930333 - DNA, 25 bp, Homo sapien
cactgacctgccctttggactgaaa

SEQ ID NO: 3930334 - DNA, 25 bp, Homo sapien
gtttgaatggcaacccagatttggc

SEQ ID NO: 3930335 - DNA, 25 bp, Homo sapien
agcctttggaccaaataatagctgc

SEQ ID NO: 3930336 - DNA, 25 bp, Homo sapien
ggcacagtggcttaaccttagggca

SEQ ID NO: 3930337 - DNA, 25 bp, Homo sapien
gattccggacgctcagaagaagcgc

SEQ ID NO: 3930338 - DNA, 25 bp, Homo sapien
acttttgagatctggtggttgaggc

SEQ ID NO: 3930339 - DNA, 25 bp, Homo sapien
tgtctggcgcattgagagcaaactt

SEQ ID NO: 3930340 - DNA, 25 bp, Homo sapien
caaagtattccccagtccgcctgag

SEQ ID NO: 3930341 - DNA, 25 bp, Homo sapien
ttgaccaaagtattccccagtccgc

SEQ ID NO: 3930342 - DNA, 25 bp, Homo sapien
aaagtattccccagtccgcctgagt

SEQ ID NO: 3930343 - DNA, 25 bp, Homo sapien
gtattccccagtccgcctgagttgg

SEQ ID NO: 3930344 - DNA, 25 bp, Homo sapien
gaagctcgttctcaattaaagcgcc

SEQ ID NO: 3930345 - DNA, 25 bp, Homo sapien
taaatgccatcctcgtggagttgga

SEQ ID NO: 3930346 - DNA, 25 bp, Homo sapien
gaaagagctgtcgtcctaaatgcca

SEQ ID NO: 3930347 - DNA, 25 bp, Homo sapien
taaagcgccttttgtgggcacggtg

SEQ ID NO: 3930348 - DNA, 25 bp, Homo sapien
aaatttcgtgtcatgagcgcacggg

SEQ ID NO: 3930349 - DNA, 25 bp, Homo sapien
cagccttaaccaagtacgggctcca

SEQ ID NO: 3930350 - DNA, 25 bp, Homo sapien
tctgagaatgggaaaccaacgaatc

SEQ ID NO: 3930351 - DNA, 25 bp, Homo sapien
cgcacgggaagatcggattcgcatt

SEQ ID NO: 3930352 - DNA, 25 bp, Homo sapien
aactggcgtcgaatgtccctgcagc

SEQ ID NO: 3930353 - DNA, 25 bp, Homo sapien
gcctgaggaaactggcgtcgaatgt

SEQ ID NO: 3930354 - DNA, 25 bp, Homo sapien
ccgggcctgaggaaactggcgtcga

SEQ ID NO: 3930355 - DNA, 25 bp, Homo sapien
gaggaaactggcgtcgaatgtccct

SEQ ID NO: 3930356 - DNA, 25 bp, Homo sapien
tgccaagagccgtgatgtgaactgt

SEQ ID NO: 3930357 - DNA, 25 bp, Homo sapien
cgctgaagttcacaaatgccaagag

SEQ ID NO: 3930358 - DNA, 25 bp, Homo sapien
caaaggtgggtccattccaactgca

SEQ ID NO: 3930359 - DNA, 25 bp, Homo sapien
cacagcaggaactagttgggaccca

SEQ ID NO: 3930360 - DNA, 25 bp, Homo sapien
ggtccgtggaatagagactcccttg

SEQ ID NO: 3930361 - DNA, 25 bp, Homo sapien
cgtggaatagagactcccttggcta

SEQ ID NO: 3930362 - DNA, 25 bp, Homo sapien
agactcccttggctattcctttggg

SEQ ID NO: 3930363 - DNA, 25 bp, Homo sapien
aatagagactcccttggctattcct

SEQ ID NO: 3930364 - DNA, 25 bp, Homo sapien
cctgagacagctgttccctttgatt

SEQ ID NO: 3930365 - DNA, 25 bp, Homo sapien
gtccgctttcaaagcagtttccagg

SEQ ID NO: 3930366 - DNA, 25 bp, Homo sapien
ccttgctgtccgctttcaaagcagt

SEQ ID NO: 3930367 - DNA, 25 bp, Homo sapien
tgccttgtgccccttggcctgagac

SEQ ID NO: 3930368 - DNA, 25 bp, Homo sapien
catccccctgaggaagtctgctagg

SEQ ID NO: 3930369 - DNA, 25 bp, Homo sapien
tgcattcctcgtatttcagcaactt

SEQ ID NO: 3930370 - DNA, 25 bp, Homo sapien
gtctgctaggcacttgcattcctcg

SEQ ID NO: 3930371 - DNA, 25 bp, Homo sapien
tatggctggaacgaggtatatcagg

SEQ ID NO: 3930372 - DNA, 25 bp, Homo sapien
gacgatcattagtaaagcctgcagg

SEQ ID NO: 3930373 - DNA, 25 bp, Homo sapien
caagcacagcttcggttcaggaata

SEQ ID NO: 3930374 - DNA, 25 bp, Homo sapien
gcccggccccacagatatagtttaa

SEQ ID NO: 3930375 - DNA, 25 bp, Homo sapien
tgaacttggagagcacggattagga

SEQ ID NO: 3930376 - DNA, 25 bp, Homo sapien
taaactccgggtctgcatgagccgt

SEQ ID NO: 3930377 - DNA, 25 bp, Homo sapien
atgtgtaagccagcccgcgtgtgtg

SEQ ID NO: 3930378 - DNA, 25 bp, Homo sapien
tttctctgcaactagcatgggtggc

SEQ ID NO: 3930379 - DNA, 25 bp, Homo sapien
cacagagcataaacgaagggataca

SEQ ID NO: 3930380 - DNA, 25 bp, Homo sapien
ctctgcatgcgcgtggtcgtccaga

SEQ ID NO: 3930381 - DNA, 25 bp, Homo sapien
gcgtggtcgtccagagtttcccgaa

SEQ ID NO: 3930382 - DNA, 25 bp, Homo sapien
gcagctgtcggggttgttcttgttt

SEQ ID NO: 3930383 - DNA, 25 bp, Homo sapien
tgagggctcgtggtttgcagctgtc

SEQ ID NO: 3930384 - DNA, 25 bp, Homo sapien
caaacacgatgtgcaaagggtggca

SEQ ID NO: 3930385 - DNA, 25 bp, Homo sapien
gcctgggcacacttctggctttcaa

SEQ ID NO: 3930386 - DNA, 25 bp, Homo sapien
cagactttttcagggtcgtcccctg

SEQ ID NO: 3930387 - DNA, 25 bp, Homo sapien
ctttcagacgtctgttggcctgggc

SEQ ID NO: 3930388 - DNA, 25 bp, Homo sapien
tgtttgcaggagacgaccggttagc

SEQ ID NO: 3930389 - DNA, 25 bp, Homo sapien
taatcagcgctgtaatggcgaactg

SEQ ID NO: 3930390 - DNA, 25 bp, Homo sapien
ggacagggcgcagctatgactccat

SEQ ID NO: 3930391 - DNA, 25 bp, Homo sapien
aacgccgccaggagggcattatggt

SEQ ID NO: 3930392 - DNA, 25 bp, Homo sapien
tggcaaacgcccccaacaagggctg

SEQ ID NO: 3930393 - DNA, 25 bp, Homo sapien
agccccataacggccagagcccctc

SEQ ID NO: 3930394 - DNA, 25 bp, Homo sapien
caaacgcccccaacaagggctgctg

SEQ ID NO: 3930395 - DNA, 25 bp, Homo sapien
gcaccaccaaatcgctggcaaacgc

SEQ ID NO: 3930396 - DNA, 25 bp, Homo sapien
gtcgtgctgattttagtgcatgcgc

SEQ ID NO: 3930397 - DNA, 25 bp, Homo sapien
ttagtgcatgcgctggcagagcaag

SEQ ID NO: 3930398 - DNA, 25 bp, Homo sapien
gcttcacgagtttgtgtatccatcc

SEQ ID NO: 3930399 - DNA, 25 bp, Homo sapien
gcaggagccacgtaacctgtgtcgt

SEQ ID NO: 3930400 - DNA, 25 bp, Homo sapien
aacagcaaagcttggcagttgaaac

SEQ ID NO: 3930401 - DNA, 25 bp, Homo sapien
gagaatatggaatctgtaaagactt

SEQ ID NO: 3930402 - DNA, 25 bp, Homo sapien
tctgtaaagacttaggataaacagc

SEQ ID NO: 3930403 - DNA, 25 bp, Homo sapien
gacttaggataaacagcaaagcttg

SEQ ID NO: 3930404 - DNA, 25 bp, Homo sapien
aagacattggctaccccaagaattg

SEQ ID NO: 3930405 - DNA, 25 bp, Homo sapien
tggtcctgaacttcaagacattggc

SEQ ID NO: 3930406 - DNA, 25 bp, Homo sapien
aggatcagggtctggtttctccggc

SEQ ID NO: 3930407 - DNA, 25 bp, Homo sapien
ggtttctccggcagttggtcctgaa

SEQ ID NO: 3930408 - DNA, 25 bp, Homo sapien
gcatctgcggttgtgtctgttctac

SEQ ID NO: 3930409 - DNA, 25 bp, Homo sapien
gacaacctgaaccagtctgtggtgg

SEQ ID NO: 3930410 - DNA, 25 bp, Homo sapien
cacacatttgattactgagccacac

SEQ ID NO: 3930411 - DNA, 25 bp, Homo sapien
gaacccagggccatcttacttcaaa

SEQ ID NO: 3930412 - DNA, 25 bp, Homo sapien
gtttgggagatgtcttcttgaaatg

SEQ ID NO: 3930413 - DNA, 25 bp, Homo sapien
tcttgaaatgatgacggatccatgg

SEQ ID NO: 3930414 - DNA, 25 bp, Homo sapien
aaatgatgacggatccatggtagca

SEQ ID NO: 3930415 - DNA, 25 bp, Homo sapien
gatccatggtagcagttctctgaag

SEQ ID NO: 3930416 - DNA, 25 bp, Homo sapien
tccgcaacaactccagaatgaagcc

SEQ ID NO: 3930417 - DNA, 25 bp, Homo sapien
gggtaattccagcttggaccttgca

SEQ ID NO: 3930418 - DNA, 25 bp, Homo sapien
gcaaagacacattgccacaggcggg

SEQ ID NO: 3930419 - DNA, 25 bp, Homo sapien
cattttccatagaccaagtttgcca

SEQ ID NO: 3930420 - DNA, 25 bp, Homo sapien
cccttctgacttggcagatgaggag

SEQ ID NO: 3930421 - DNA, 25 bp, Homo sapien
tgatctcttaatggtagttgatgag

SEQ ID NO: 3930422 - DNA, 25 bp, Homo sapien
attgacattgatctcttaatggtag

SEQ ID NO: 3930423 - DNA, 25 bp, Homo sapien
tatttatggagtaattgcattgaca

SEQ ID NO: 3930424 - DNA, 25 bp, Homo sapien
ttggctggaaacaggaacgactggc

SEQ ID NO: 3930425 - DNA, 25 bp, Homo sapien
ccctgggtccaagagttggctggaa

SEQ ID NO: 3930426 - DNA, 25 bp, Homo sapien
ccaaagcctggatggattcggctgg

SEQ ID NO: 3930427 - DNA, 25 bp, Homo sapien
ctgtttatacagtttcccgtaggag

SEQ ID NO: 3930428 - DNA, 25 bp, Homo sapien
gcagatcagcaaatgatccaggtgg

SEQ ID NO: 3930429 - DNA, 25 bp, Homo sapien
gacatgtatctgcactcaactggag

SEQ ID NO: 3930430 - DNA, 25 bp, Homo sapien
tatggaaggaataggagagccatct

SEQ ID NO: 3930431 - DNA, 25 bp, Homo sapien
gaggacagctgatgttcagccagaa

SEQ ID NO: 3930432 - DNA, 25 bp, Homo sapien
gaacaaagaccaaagcagcttatgg

SEQ ID NO: 3930433 - DNA, 25 bp, Homo sapien
gactcttggcccaagcccatttgag

SEQ ID NO: 3930434 - DNA, 25 bp, Homo sapien
aagggttaaagatgaagcactgggc

SEQ ID NO: 3930435 - DNA, 25 bp, Homo sapien
tacagtttaggctttcatcccgact

SEQ ID NO: 3930436 - DNA, 25 bp, Homo sapien
catgaggagaacgtggactgcatcc

SEQ ID NO: 3930437 - DNA, 25 bp, Homo sapien
ctttttggtatgggtgagcctttct

SEQ ID NO: 3930438 - DNA, 25 bp, Homo sapien
gctttttggtatgggtgagcctttc

SEQ ID NO: 3930439 - DNA, 25 bp, Homo sapien
tgctttttggtatgggtgagccttt

SEQ ID NO: 3930440 - DNA, 25 bp, Homo sapien
tcgataacatcgacccatctgaggg

SEQ ID NO: 3930441 - DNA, 25 bp, Homo sapien
tcccctggaaatgacatggagcctt

SEQ ID NO: 3930442 - DNA, 25 bp, Homo sapien
tgaggcatacgaaggctgcagcagc

SEQ ID NO: 3930443 - DNA, 25 bp, Homo sapien
tcaaatcggacggtcatgttccact

SEQ ID NO: 3930444 - DNA, 25 bp, Homo sapien
ctccaagtgtgtaatacatacccat

SEQ ID NO: 3930445 - DNA, 25 bp, Homo sapien
ctctccaagtgtgtaatacataccc

SEQ ID NO: 3930446 - DNA, 25 bp, Homo sapien
tctccaagtgtgtaatacataccca

SEQ ID NO: 3930447 - DNA, 25 bp, Homo sapien
cgaagccgtttctgtgagtgatcca

SEQ ID NO: 3930448 - DNA, 25 bp, Homo sapien
gattcttagatgtaggacgaagccg

SEQ ID NO: 3930449 - DNA, 25 bp, Homo sapien
tgatccacttagagttccgcgctgt

SEQ ID NO: 3930450 - DNA, 25 bp, Homo sapien
gtcttattgcaggaaccagctccct

SEQ ID NO: 3930451 - DNA, 25 bp, Homo sapien
acgtgaaggcgctagaagatccctc

SEQ ID NO: 3930452 - DNA, 25 bp, Homo sapien
tcacgtgaaggcgctagaagatccc

SEQ ID NO: 3930453 - DNA, 25 bp, Homo sapien
cacgtgaaggcgctagaagatccct

SEQ ID NO: 3930454 - DNA, 25 bp, Homo sapien
actgcagtgctccacggccggagga

SEQ ID NO: 3930455 - DNA, 25 bp, Homo sapien
tgatctggggaaaatgtttgtaaat

SEQ ID NO: 3930456 - DNA, 25 bp, Homo sapien
gcagggaggctcgtggaggacgaca

SEQ ID NO: 3930457 - DNA, 25 bp, Homo sapien
taatcaatacggatattgatctggg

SEQ ID NO: 3930458 - DNA, 25 bp, Homo sapien
caaagctcttacgtaggagatacca

SEQ ID NO: 3930459 - DNA, 25 bp, Homo sapien
aaagtccattgcgtcctgcacgtaa

SEQ ID NO: 3930460 - DNA, 25 bp, Homo sapien
tgcctgtcagcaagccaaggaatcc

SEQ ID NO: 3930461 - DNA, 25 bp, Homo sapien
gcacgtaacagcagacccaagatgg

SEQ ID NO: 3930462 - DNA, 25 bp, Homo sapien
gagataaccactcacccataaagag

SEQ ID NO: 3930463 - DNA, 25 bp, Homo sapien
caaggcattgtgtgtgatctgtcag

SEQ ID NO: 3930464 - DNA, 25 bp, Homo sapien
caagtgccccttcatgagataacca

SEQ ID NO: 3930465 - DNA, 25 bp, Homo sapien
tcttctcccaaatcacaggcaaggc

SEQ ID NO: 3930466 - DNA, 25 bp, Homo sapien
ttgtctggtgtaggctcattggctc

SEQ ID NO: 3930467 - DNA, 25 bp, Homo sapien
cctcctagacgatgttcgagcgtga

SEQ ID NO: 3930468 - DNA, 25 bp, Homo sapien
tcccttgactgcaattgaatgacag

SEQ ID NO: 3930469 - DNA, 25 bp, Homo sapien
tgtgtcactccctgagatgtcatgg

SEQ ID NO: 3930470 - DNA, 25 bp, Homo sapien
tagaatagagcctgaactgctctcc

SEQ ID NO: 3930471 - DNA, 25 bp, Homo sapien
tgctctcctctatcaccaaacaaaa

SEQ ID NO: 3930472 - DNA, 25 bp, Homo sapien
taatgtccctatagaatagagcctg

SEQ ID NO: 3930473 - DNA, 25 bp, Homo sapien
aaaacgttgtgaatcgctgcagcca

SEQ ID NO: 3930474 - DNA, 25 bp, Homo sapien
tcatgaccacccgaagcttcgtcaa

SEQ ID NO: 3930475 - DNA, 25 bp, Homo sapien
cccctagtgaaagacgaccatgtga

SEQ ID NO: 3930476 - DNA, 25 bp, Homo sapien
caagtgatgcttctagattctgaga

SEQ ID NO: 3930477 - DNA, 25 bp, Homo sapien
cctagtgaaagacgaccatgtgatc

SEQ ID NO: 3930478 - DNA, 25 bp, Homo sapien
agaaaagcgtcttcagctatcagtg

SEQ ID NO: 3930479 - DNA, 25 bp, Homo sapien
aatctcgtcccttccattttgtaag

SEQ ID NO: 3930480 - DNA, 25 bp, Homo sapien
agcgtcttcagctatcagtgcaggg

SEQ ID NO: 3930481 - DNA, 25 bp, Homo sapien
tccattttgtaagtgcccatcagca

SEQ ID NO: 3930482 - DNA, 25 bp, Homo sapien
gagggcttgataacaggaacgttaa

SEQ ID NO: 3930483 - DNA, 25 bp, Homo sapien
tcggagccgccttttgtgtagagcg

SEQ ID NO: 3930484 - DNA, 25 bp, Homo sapien
tgcagaagcctcaaacgaagcagtc

SEQ ID NO: 3930485 - DNA, 25 bp, Homo sapien
gcatgtgcccgtaatgcactgaaga

SEQ ID NO: 3930486 - DNA, 25 bp, Homo sapien
ttccccttgaagataatagcagtct

SEQ ID NO: 3930487 - DNA, 25 bp, Homo sapien
aataatccatgtgaaaacgggcggt

SEQ ID NO: 3930488 - DNA, 25 bp, Homo sapien
gagccgctctccgattggtggctta

SEQ ID NO: 3930489 - DNA, 25 bp, Homo sapien
tggtggcttagaccccgcattgaca

SEQ ID NO: 3930490 - DNA, 25 bp, Homo sapien
cagtactttggggacttggtgacat

SEQ ID NO: 3930491 - DNA, 25 bp, Homo sapien
ctgtcagcagactgtctaccttctt

SEQ ID NO: 3930492 - DNA, 25 bp, Homo sapien
catggtagatgccatctctgaatcc

SEQ ID NO: 3930493 - DNA, 25 bp, Homo sapien
caaggcagttaggacaagctctctc

SEQ ID NO: 3930494 - DNA, 25 bp, Homo sapien
tctctgaatcccagatgtgttgact

SEQ ID NO: 3930495 - DNA, 25 bp, Homo sapien
tttcatctccgcttctttgcagagg

SEQ ID NO: 3930496 - DNA, 25 bp, Homo sapien
tttgtggcttgcatggactctgtcg

SEQ ID NO: 3930497 - DNA, 25 bp, Homo sapien
gcttgaggatgctcttgccggatca

SEQ ID NO: 3930498 - DNA, 25 bp, Homo sapien
gatcagattgaagccgtaagaaagg

SEQ ID NO: 3930499 - DNA, 25 bp, Homo sapien
ctttaccgctgaaggctcatataat

SEQ ID NO: 3930500 - DNA, 25 bp, Homo sapien
tgtatccttgactttcaggctgagc

SEQ ID NO: 3930501 - DNA, 25 bp, Homo sapien
tactttagtagcaacaccttcttcc

SEQ ID NO: 3930502 - DNA, 25 bp, Homo sapien
tgggttagactagaagcttccggat

SEQ ID NO: 3930503 - DNA, 25 bp, Homo sapien
cctgctgtctttgctagaacacctg

SEQ ID NO: 3930504 - DNA, 25 bp, Homo sapien
ggttccaattccaaccacgtggcga

SEQ ID NO: 3930505 - DNA, 25 bp, Homo sapien
catattcatcaacgttgcttggcct

SEQ ID NO: 3930506 - DNA, 25 bp, Homo sapien
tatctcgtctgcctgcccatattca

SEQ ID NO: 3930507 - DNA, 25 bp, Homo sapien
taaagggacatgtatctcgtctgcc

SEQ ID NO: 3930508 - DNA, 25 bp, Homo sapien
gactcgctttagcatacagcacact

SEQ ID NO: 3930509 - DNA, 25 bp, Homo sapien
gtactggatgccagtctctgtccag

SEQ ID NO: 3930510 - DNA, 25 bp, Homo sapien
cactttccttaatgcaaccgagttc

SEQ ID NO: 3930511 - DNA, 25 bp, Homo sapien
tctggagataaagactcgctttagc

SEQ ID NO: 3930512 - DNA, 25 bp, Homo sapien
taatattcttacatgccagcaaagg

SEQ ID NO: 3930513 - DNA, 25 bp, Homo sapien
ggtttgaattagtcccaggtccaca

SEQ ID NO: 3930514 - DNA, 25 bp, Homo sapien
tttttgctggtccagtggtcttccc

SEQ ID NO: 3930515 - DNA, 25 bp, Homo sapien
gactagatgaaaatcttgagaggac

SEQ ID NO: 3930516 - DNA, 25 bp, Homo sapien
ctccctccttcgtgagtgggtgcat

SEQ ID NO: 3930517 - DNA, 25 bp, Homo sapien
tccctccttcgtgagtgggtgcatc

SEQ ID NO: 3930518 - DNA, 25 bp, Homo sapien
tctccctccttcgtgagtgggtgca

SEQ ID NO: 3930519 - DNA, 25 bp, Homo sapien
ctctgtctgattgcatcctggacat

SEQ ID NO: 3930520 - DNA, 25 bp, Homo sapien
catcctcttctctgtctgattgcat

SEQ ID NO: 3930521 - DNA, 25 bp, Homo sapien
cttctctgtctgattgcatcctgga

SEQ ID NO: 3930522 - DNA, 25 bp, Homo sapien
ctcttctctgtctgattgcatcctg

SEQ ID NO: 3930523 - DNA, 25 bp, Homo sapien
ctcctctggccgtggcgactccatt

SEQ ID NO: 3930524 - DNA, 25 bp, Homo sapien
tggccgtggcgactccattctcctg

SEQ ID NO: 3930525 - DNA, 25 bp, Homo sapien
tctgctttcctagaacgctgtcctc

SEQ ID NO: 3930526 - DNA, 25 bp, Homo sapien
atggccctcccacggatcagcaaat

SEQ ID NO: 3930527 - DNA, 25 bp, Homo sapien
ctgaagtggtctcctggaggcaaaa

SEQ ID NO: 3930528 - DNA, 25 bp, Homo sapien
tcctggaggcaaaagtgcatttcat

SEQ ID NO: 3930529 - DNA, 25 bp, Homo sapien
gtctcctggaggcaaaagtgcattt

SEQ ID NO: 3930530 - DNA, 25 bp, Homo sapien
gtggtctcctggaggcaaaagtgca

SEQ ID NO: 3930531 - DNA, 25 bp, Homo sapien
gggaaggcacagagccccacttcct

SEQ ID NO: 3930532 - DNA, 25 bp, Homo sapien
gcccctctgccaacctcgggggctg

SEQ ID NO: 3930533 - DNA, 25 bp, Homo sapien
caaagaagagtgactgcgagtggcc

SEQ ID NO: 3930534 - DNA, 25 bp, Homo sapien
gggactctgaaacgcttccacttgc

SEQ ID NO: 3930535 - DNA, 25 bp, Homo sapien
cttgccccgagcgtctgtcttggag

SEQ ID NO: 3930536 - DNA, 25 bp, Homo sapien
tcgtttctaatctctccaggcacaa

SEQ ID NO: 3930537 - DNA, 25 bp, Homo sapien
gagagaagatagctccagacgttcc

SEQ ID NO: 3930538 - DNA, 25 bp, Homo sapien
tccagagagaagatagctccagacg

SEQ ID NO: 3930539 - DNA, 25 bp, Homo sapien
ctccagacgttccatgccacagctg

SEQ ID NO: 3930540 - DNA, 25 bp, Homo sapien
cacttccagagagaagatagctcca

SEQ ID NO: 3930541 - DNA, 25 bp, Homo sapien
aaacagggaggaacccattatgtct

SEQ ID NO: 3930542 - DNA, 25 bp, Homo sapien
aacagggaggaacccattatgtctg

SEQ ID NO: 3930543 - DNA, 25 bp, Homo sapien
aactccggatcacctgcagaaaatg

SEQ ID NO: 3930544 - DNA, 25 bp, Homo sapien
gaaaaattcgcgtgacatgtgcatg

SEQ ID NO: 3930545 - DNA, 25 bp, Homo sapien
cgcagcactgatgtttaggcttgaa

SEQ ID NO: 3930546 - DNA, 25 bp, Homo sapien
tcccagggaagactgctgagtataa

SEQ ID NO: 3930547 - DNA, 25 bp, Homo sapien
ccagtttaccccgtgcatgctgcat

SEQ ID NO: 3930548 - DNA, 25 bp, Homo sapien
tccctcattttctgcgctaactgct

SEQ ID NO: 3930549 - DNA, 25 bp, Homo sapien
cctctgcgtcgataggtgattctga

SEQ ID NO: 3930550 - DNA, 25 bp, Homo sapien
tctggcaaatctgccgcatcccagt

SEQ ID NO: 3930551 - DNA, 25 bp, Homo sapien
ggcaggaggcgtatgtaatcccacc

SEQ ID NO: 3930552 - DNA, 25 bp, Homo sapien
gatgccacccctgacaaaatagaag

SEQ ID NO: 3930553 - DNA, 25 bp, Homo sapien
cctaagccagttccaggtagcccat

SEQ ID NO: 3930554 - DNA, 25 bp, Homo sapien
cctaggttatgcgagggagatcact

SEQ ID NO: 3930555 - DNA, 25 bp, Homo sapien
tcgtcgtgatgtaaagacgccagcc

SEQ ID NO: 3930556 - DNA, 25 bp, Homo sapien
gaaaggctatgctaacaccgcacgt

SEQ ID NO: 3930557 - DNA, 25 bp, Homo sapien
tatgcgcgtctttgcacatagggac

SEQ ID NO: 3930558 - DNA, 25 bp, Homo sapien
aaacctctaagacgccgtggccata

SEQ ID NO: 3930559 - DNA, 25 bp, Homo sapien
tgcatgctccagtgcaccgtagcat

SEQ ID NO: 3930560 - DNA, 25 bp, Homo sapien
cactcaagcgtgcagggagattggc

SEQ ID NO: 3930561 - DNA, 25 bp, Homo sapien
gcaccgtagcatgtcaatactcctg

SEQ ID NO: 3930562 - DNA, 25 bp, Homo sapien
cacggcccactcaagcgtgcaggga

SEQ ID NO: 3930563 - DNA, 25 bp, Homo sapien
aaatctctatggagtcagaccctcg

SEQ ID NO: 3930564 - DNA, 25 bp, Homo sapien
tgccctctgcggaagaacacaaggt

SEQ ID NO: 3930565 - DNA, 25 bp, Homo sapien
tagatcagatgttcgggagcagccg

SEQ ID NO: 3930566 - DNA, 25 bp, Homo sapien
tatcggctggatcgtgactggagac

SEQ ID NO: 3930567 - DNA, 25 bp, Homo sapien
acaggagtctttcttccattttcgc

SEQ ID NO: 3930568 - DNA, 25 bp, Homo sapien
attccccacaggagtctttcttcca

SEQ ID NO: 3930569 - DNA, 25 bp, Homo sapien
cccacaggagtctttcttccatttt

SEQ ID NO: 3930570 - DNA, 25 bp, Homo sapien
tccccacaggagtctttcttccatt

SEQ ID NO: 3930571 - DNA, 25 bp, Homo sapien
tgtggttgttcccagtctcttcgga

SEQ ID NO: 3930572 - DNA, 25 bp, Homo sapien
ggtggccatccgtgacatattcaga

SEQ ID NO: 3930573 - DNA, 25 bp, Homo sapien
catttctgaagtcaactctagcttg

SEQ ID NO: 3930574 - DNA, 25 bp, Homo sapien
gaagtgctcaatgccatcggcagct

SEQ ID NO: 3930575 - DNA, 25 bp, Homo sapien
tcaggccatcggcagtcttaacact

SEQ ID NO: 3930576 - DNA, 25 bp, Homo sapien
tctaaagtccgatactaatagcagc

SEQ ID NO: 3930577 - DNA, 25 bp, Homo sapien
ggcagtcttaacactacagaccttg

SEQ ID NO: 3930578 - DNA, 25 bp, Homo sapien
ccaggggttcatcggcctcttctct

SEQ ID NO: 3930579 - DNA, 25 bp, Homo sapien
tatcattcataatcgccagtaatcc

SEQ ID NO: 3930580 - DNA, 25 bp, Homo sapien
ccttctctgatatcattcataatcg

SEQ ID NO: 3930581 - DNA, 25 bp, Homo sapien
gccagtaatccatctatttgcccca

SEQ ID NO: 3930582 - DNA, 25 bp, Homo sapien
taagaatgtctctagtcctgctatt

SEQ ID NO: 3930583 - DNA, 25 bp, Homo sapien
tcattagccggtctgtctcactcaa

SEQ ID NO: 3930584 - DNA, 25 bp, Homo sapien
tacagaacacagtggaaagcctacg

SEQ ID NO: 3930585 - DNA, 25 bp, Homo sapien
caaacgtcgctgaagttgtccaaaa

SEQ ID NO: 3930586 - DNA, 25 bp, Homo sapien
aaggtttgcactccccaacatctgg

SEQ ID NO: 3930587 - DNA, 25 bp, Homo sapien
agtatttgaaacatttcctggctgg

SEQ ID NO: 3930588 - DNA, 25 bp, Homo sapien
ctcaagtatttgaaacatttcctgg

SEQ ID NO: 3930589 - DNA, 25 bp, Homo sapien
gaggttgaggcaggctgatggcttg

SEQ ID NO: 3930590 - DNA, 25 bp, Homo sapien
caagtatttgaaacatttcctggct

SEQ ID NO: 3930591 - DNA, 25 bp, Homo sapien
tgaagagtttctgacctttcccgaa

SEQ ID NO: 3930592 - DNA, 25 bp, Homo sapien
cacttctgctgtggtatcaactggc

SEQ ID NO: 3930593 - DNA, 25 bp, Homo sapien
ccagcggtccttggtaatttagaca

SEQ ID NO: 3930594 - DNA, 25 bp, Homo sapien
tactgagtggaagcgtgaagacgac

SEQ ID NO: 3930595 - DNA, 25 bp, Homo sapien
tgtgatcactctgttaaaataccaa

SEQ ID NO: 3930596 - DNA, 25 bp, Homo sapien
tcaagccaagagatttggacggttg

SEQ ID NO: 3930597 - DNA, 25 bp, Homo sapien
aaatatctaatcacagtgccccgtg

SEQ ID NO: 3930598 - DNA, 25 bp, Homo sapien
cagtgccccgtgaaagctgcatttt

SEQ ID NO: 3930599 - DNA, 25 bp, Homo sapien
gctgcagccaagactccaacactct

SEQ ID NO: 3930600 - DNA, 25 bp, Homo sapien
ctttgtcagctgcagccaagactcc

SEQ ID NO: 3930601 - DNA, 25 bp, Homo sapien
cagctgcagccaagactccaacact

SEQ ID NO: 3930602 - DNA, 25 bp, Homo sapien
gtcagctgcagccaagactccaaca

SEQ ID NO: 3930603 - DNA, 25 bp, Homo sapien
agaccccagcttgtcccgtgaaggc

SEQ ID NO: 3930604 - DNA, 25 bp, Homo sapien
tgggagaccccagcttgtcccgtga

SEQ ID NO: 3930605 - DNA, 25 bp, Homo sapien
gcttgtcccgtgaaggccatcgcct

SEQ ID NO: 3930606 - DNA, 25 bp, Homo sapien
ccagcttgtcccgtgaaggccatcg

SEQ ID NO: 3930607 - DNA, 25 bp, Homo sapien
cagaattcatggcttcttgataacc

SEQ ID NO: 3930608 - DNA, 25 bp, Homo sapien
ggtagcagaattcatggcttcttga

SEQ ID NO: 3930609 - DNA, 25 bp, Homo sapien
agttgatggtagcagaattcatggc

SEQ ID NO: 3930610 - DNA, 25 bp, Homo sapien
ggcttccttgcatcaaagtcacaaa

SEQ ID NO: 3930611 - DNA, 25 bp, Homo sapien
tgtttgtagctgatttacaatgctc

SEQ ID NO: 3930612 - DNA, 25 bp, Homo sapien
ataagtcctttgaatgggttggagc

SEQ ID NO: 3930613 - DNA, 25 bp, Homo sapien
caatgctcatagtattcagcttttc

SEQ ID NO: 3930614 - DNA, 25 bp, Homo sapien
gaaattctaataagtcctttgaatg

SEQ ID NO: 3930615 - DNA, 25 bp, Homo sapien
gctggtgcttcatgatatgagggcc

SEQ ID NO: 3930616 - DNA, 25 bp, Homo sapien
ggtgcttcatgatatgagggccagc

SEQ ID NO: 3930617 - DNA, 25 bp, Homo sapien
cttcatgatatgagggccagcgaat

SEQ ID NO: 3930618 - DNA, 25 bp, Homo sapien
tgcttcatgatatgagggccagcga

SEQ ID NO: 3930619 - DNA, 25 bp, Homo sapien
aattgcaaagccaacagcactgcaa

SEQ ID NO: 3930620 - DNA, 25 bp, Homo sapien
ggcaattgcaaagccaacagcactg

SEQ ID NO: 3930621 - DNA, 25 bp, Homo sapien
aggcaattgcaaagccaacagcact

SEQ ID NO: 3930622 - DNA, 25 bp, Homo sapien
caattgcaaagccaacagcactgca

SEQ ID NO: 3930623 - DNA, 25 bp, Homo sapien
taggggtccctgtaagattggagaa

SEQ ID NO: 3930624 - DNA, 25 bp, Homo sapien
ggccgtttagaaggccaccatgcat

SEQ ID NO: 3930625 - DNA, 25 bp, Homo sapien
tctccccatgaagcttaggggtccc

SEQ ID NO: 3930626 - DNA, 25 bp, Homo sapien
cagagtggccgtttagaaggccacc

SEQ ID NO: 3930627 - DNA, 25 bp, Homo sapien
gggtcatcatgacaacagggctcaa

SEQ ID NO: 3930628 - DNA, 25 bp, Homo sapien
agggctcaagacctttctcaccctc

SEQ ID NO: 3930629 - DNA, 25 bp, Homo sapien
gctgacataacccatgaccgtgcat

SEQ ID NO: 3930630 - DNA, 25 bp, Homo sapien
gatttattggctatggggtcatcat

SEQ ID NO: 3930631 - DNA, 25 bp, Homo sapien
gaaatggcattgaaatttgaaatct

SEQ ID NO: 3930632 - DNA, 25 bp, Homo sapien
cagaaatggcattgaaatttgaaat

SEQ ID NO: 3930633 - DNA, 25 bp, Homo sapien
agaaatggcattgaaatttgaaatc

SEQ ID NO: 3930634 - DNA, 25 bp, Homo sapien
gttaccctccggatccacaatagcg

SEQ ID NO: 3930635 - DNA, 25 bp, Homo sapien
cgtggcctatttgttcagcgtcgag

SEQ ID NO: 3930636 - DNA, 25 bp, Homo sapien
gcccttgtaggcagctgacggattt

SEQ ID NO: 3930637 - DNA, 25 bp, Homo sapien
aatgagaacgcggagctacgtggcc

SEQ ID NO: 3930638 - DNA, 25 bp, Homo sapien
tctcttcacctaggactctgggcgg

SEQ ID NO: 3930639 - DNA, 25 bp, Homo sapien
gctcgggcaacagaaagcagctctt

SEQ ID NO: 3930640 - DNA, 25 bp, Homo sapien
gggaagtctttactgctgcacaact

SEQ ID NO: 3930641 - DNA, 25 bp, Homo sapien
gaaagagcgttttctttgagacgtc

SEQ ID NO: 3930642 - DNA, 25 bp, Homo sapien
aaagacatcgtatttccagagagcc

SEQ ID NO: 3930643 - DNA, 25 bp, Homo sapien
actggaggaacatagatgaaagaca

SEQ ID NO: 3930644 - DNA, 25 bp, Homo sapien
gccccttctcatcgaaggtgttcct

SEQ ID NO: 3930645 - DNA, 25 bp, Homo sapien
gtgttcctctggccaaaccaacaga

SEQ ID NO: 3930646 - DNA, 25 bp, Homo sapien
ttcttgcaagagttgaagtggtctt

SEQ ID NO: 3930647 - DNA, 25 bp, Homo sapien
tgagaccctaaagtgcagagtggac

SEQ ID NO: 3930648 - DNA, 25 bp, Homo sapien
ggattctttcttagcaacatttgca

SEQ ID NO: 3930649 - DNA, 25 bp, Homo sapien
cagagtggaccacggtacattgaac

SEQ ID NO: 3930650 - DNA, 25 bp, Homo sapien
tgcacaccaggtgggtatttgtacc

SEQ ID NO: 3930651 - DNA, 25 bp, Homo sapien
taaagctgcgtctctcatgtttgca

SEQ ID NO: 3930652 - DNA, 25 bp, Homo sapien
tgtgacttggaaagatccggtgttc

SEQ ID NO: 3930653 - DNA, 25 bp, Homo sapien
agaaagcccgtcagtcagttgccac

SEQ ID NO: 3930654 - DNA, 25 bp, Homo sapien
gagttttgtgacagttggatatttt

SEQ ID NO: 3930655 - DNA, 25 bp, Homo sapien
ttgtgacagttggatatttttcctg

SEQ ID NO: 3930656 - DNA, 25 bp, Homo sapien
gatttagtgtagagttttgtgacag

SEQ ID NO: 3930657 - DNA, 25 bp, Homo sapien
ttgatttagtgtagagttttgtgac

SEQ ID NO: 3930658 - DNA, 25 bp, Homo sapien
cttaggactgggatgctactgcatg

SEQ ID NO: 3930659 - DNA, 25 bp, Homo sapien
cataggagccctgctaagactgtgc

SEQ ID NO: 3930660 - DNA, 25 bp, Homo sapien
taatgaccgtttcctaaggctgtgc

SEQ ID NO: 3930661 - DNA, 25 bp, Homo sapien
tagagagcccctggttttcacagct

SEQ ID NO: 3930662 - DNA, 25 bp, Homo sapien
tgcttttgtctccgaacacactgct

SEQ ID NO: 3930663 - DNA, 25 bp, Homo sapien
ttgtctccgaacacactgctttcgc

SEQ ID NO: 3930664 - DNA, 25 bp, Homo sapien
ttttgtctccgaacacactgctttc

SEQ ID NO: 3930665 - DNA, 25 bp, Homo sapien
gcttttgtctccgaacacactgctt

SEQ ID NO: 3930666 - DNA, 25 bp, Homo sapien
cctggactggccacgctggccattg

SEQ ID NO: 3930667 - DNA, 25 bp, Homo sapien
cacgctggccattgtgcggcaatca

SEQ ID NO: 3930668 - DNA, 25 bp, Homo sapien
gcggcaatcattttcctggccaaga

SEQ ID NO: 3930669 - DNA, 25 bp, Homo sapien
caagaatggattgtgtgccggacag

SEQ ID NO: 3930670 - DNA, 25 bp, Homo sapien
tcatctggacatactgagcactggg

SEQ ID NO: 3930671 - DNA, 25 bp, Homo sapien
aagagaatcatctggacatactgag

SEQ ID NO: 3930672 - DNA, 25 bp, Homo sapien
ctgagcactggggatatatttagcg

SEQ ID NO: 3930673 - DNA, 25 bp, Homo sapien
gaatcatctggacatactgagcact

SEQ ID NO: 3930674 - DNA, 25 bp, Homo sapien
gagcctcctcctcacgtggtgattc

SEQ ID NO: 3930675 - DNA, 25 bp, Homo sapien
tcaggatcgcctgtgcaacccttct

SEQ ID NO: 3930676 - DNA, 25 bp, Homo sapien
gtgattcaggatcgcctgtgcaacc

SEQ ID NO: 3930677 - DNA, 25 bp, Homo sapien
cacgtggtgattcaggatcgcctgt

SEQ ID NO: 3930678 - DNA, 25 bp, Homo sapien
tctgttagagccgtgttgaaaaaca

SEQ ID NO: 3930679 - DNA, 25 bp, Homo sapien
agcagaggaatgttaatcacctgtg

SEQ ID NO: 3930680 - DNA, 25 bp, Homo sapien
gaggaatgttaatcacctgtgtgcg

SEQ ID NO: 3930681 - DNA, 25 bp, Homo sapien
cacctgtgtgcgctctgttagagcc

SEQ ID NO: 3930682 - DNA, 25 bp, Homo sapien
gccatttcccgctgatgctttgtgt

SEQ ID NO: 3930683 - DNA, 25 bp, Homo sapien
cacattgagttaataagccctttga

SEQ ID NO: 3930684 - DNA, 25 bp, Homo sapien
gccctttgattgattaggattcata

SEQ ID NO: 3930685 - DNA, 25 bp, Homo sapien
taaagattttaatctggcttcacat

SEQ ID NO: 3930686 - DNA, 25 bp, Homo sapien
ggtttgcaaacaaatgctccggctg

SEQ ID NO: 3930687 - DNA, 25 bp, Homo sapien
gcaaacaaatgctccggctgcttcc

SEQ ID NO: 3930688 - DNA, 25 bp, Homo sapien
ctagaacggtttgcaaacaaatgct

SEQ ID NO: 3930689 - DNA, 25 bp, Homo sapien
acggtttgcaaacaaatgctccggc

SEQ ID NO: 3930690 - DNA, 25 bp, Homo sapien
aataagcttccatctttggtgccgt

SEQ ID NO: 3930691 - DNA, 25 bp, Homo sapien
gatttttcttcagaggacaataagc

SEQ ID NO: 3930692 - DNA, 25 bp, Homo sapien
gcttccatctttggtgccgtccaga

SEQ ID NO: 3930693 - DNA, 25 bp, Homo sapien
tcttcagaggacaataagcttccat

SEQ ID NO: 3930694 - DNA, 25 bp, Homo sapien
cttaataacagcactgcagctttct

SEQ ID NO: 3930695 - DNA, 25 bp, Homo sapien
tcattgccgtgctgatactgcttaa

SEQ ID NO: 3930696 - DNA, 25 bp, Homo sapien
tccagccgtcattgccgtgctgata

SEQ ID NO: 3930697 - DNA, 25 bp, Homo sapien
ttctgtgtttaatcgacttgtcccc

SEQ ID NO: 3930698 - DNA, 25 bp, Homo sapien
taggtggcccagtatcttctaagct

SEQ ID NO: 3930699 - DNA, 25 bp, Homo sapien
cattgttcgctcttctgacaactca

SEQ ID NO: 3930700 - DNA, 25 bp, Homo sapien
gacaactcattaggtggcccagtat

SEQ ID NO: 3930701 - DNA, 25 bp, Homo sapien
tatcttctaagctgaacttggaagg

SEQ ID NO: 3930702 - DNA, 25 bp, Homo sapien
gccagagtccgccaaagacctcttt

SEQ ID NO: 3930703 - DNA, 25 bp, Homo sapien
aagttctgccgtgtcgtcttctatg

SEQ ID NO: 3930704 - DNA, 25 bp, Homo sapien
tgtcgtcttctatgtttgactcaaa

SEQ ID NO: 3930705 - DNA, 25 bp, Homo sapien
ctctttattccaagaagttctgccg

SEQ ID NO: 3930706 - DNA, 25 bp, Homo sapien
tctcttgcacattgcggtctctgaa

SEQ ID NO: 3930707 - DNA, 25 bp, Homo sapien
ttacttagcaatgagcatctcttgc

SEQ ID NO: 3930708 - DNA, 25 bp, Homo sapien
agcatctcttgcacattgcggtctc

SEQ ID NO: 3930709 - DNA, 25 bp, Homo sapien
cacattgcggtctctgaaatagtcc

SEQ ID NO: 3930710 - DNA, 25 bp, Homo sapien
ttaggataaaatggcgtcgacttct

SEQ ID NO: 3930711 - DNA, 25 bp, Homo sapien
ccggtagccagtccgaacacaaatg

SEQ ID NO: 3930712 - DNA, 25 bp, Homo sapien
acttctgaagggagccggtagccag

SEQ ID NO: 3930713 - DNA, 25 bp, Homo sapien
tacctgtatgtcagcggcggaagga

SEQ ID NO: 3930714 - DNA, 25 bp, Homo sapien
ctccagacctggatttacacccaaa

SEQ ID NO: 3930715 - DNA, 25 bp, Homo sapien
tgatcaggtagttcacagcctgctg

SEQ ID NO: 3930716 - DNA, 25 bp, Homo sapien
tgggccactcccttcgcacctggga

SEQ ID NO: 3930717 - DNA, 25 bp, Homo sapien
cactcccttcgcacctgggaattcc

SEQ ID NO: 3930718 - DNA, 25 bp, Homo sapien
tgaaccaaacccagaggtcaaatgt

SEQ ID NO: 3930719 - DNA, 25 bp, Homo sapien
ctgaaccaaacccagaggtcaaatg

SEQ ID NO: 3930720 - DNA, 25 bp, Homo sapien
caaacccagaggtcaaatgttttct

SEQ ID NO: 3930721 - DNA, 25 bp, Homo sapien
cagaggtcaaatgttttctacacat

SEQ ID NO: 3930722 - DNA, 25 bp, Homo sapien
atacgtggccgtctatttcccacaa

SEQ ID NO: 3930723 - DNA, 25 bp, Homo sapien
gatacgtggccgtctatttcccaca

SEQ ID NO: 3930724 - DNA, 25 bp, Homo sapien
tacgtggccgtctatttcccacaaa

SEQ ID NO: 3930725 - DNA, 25 bp, Homo sapien
tcaaagcatggaatcggcggaagct

SEQ ID NO: 3930726 - DNA, 25 bp, Homo sapien
atttgagcgtagagaaagcaaggcc

SEQ ID NO: 3930727 - DNA, 25 bp, Homo sapien
cattttggatgagaactgggatgta

SEQ ID NO: 3930728 - DNA, 25 bp, Homo sapien
gcccatcttgaagggatagaaccga

SEQ ID NO: 3930729 - DNA, 25 bp, Homo sapien
gttgaagaacgtaatttgaggactc

SEQ ID NO: 3930730 - DNA, 25 bp, Homo sapien
ggtgtttgtgacattcacttttcct

SEQ ID NO: 3930731 - DNA, 25 bp, Homo sapien
tctttttcctgccagaagagttggt

SEQ ID NO: 3930732 - DNA, 25 bp, Homo sapien
tttctgcggtgctttgaatggtgtt

SEQ ID NO: 3930733 - DNA, 25 bp, Homo sapien
tcggaggctttccaccggcagctca

SEQ ID NO: 3930734 - DNA, 25 bp, Homo sapien
ttagctgtgaagttgagtcgccgga

SEQ ID NO: 3930735 - DNA, 25 bp, Homo sapien
tctgtaatcttcttatctcggaggc

SEQ ID NO: 3930736 - DNA, 25 bp, Homo sapien
agtcgccggaggcacatgacattct

SEQ ID NO: 3930737 - DNA, 25 bp, Homo sapien
tcagatgaactgcctgggctggaga

SEQ ID NO: 3930738 - DNA, 25 bp, Homo sapien
gatgaactgcctgggctggagaagt

SEQ ID NO: 3930739 - DNA, 25 bp, Homo sapien
agatgaactgcctgggctggagaag

SEQ ID NO: 3930740 - DNA, 25 bp, Homo sapien
cagatgaactgcctgggctggagaa

SEQ ID NO: 3930741 - DNA, 25 bp, Homo sapien
gaccccaggacacactgcattttat

SEQ ID NO: 3930742 - DNA, 25 bp, Homo sapien
tattctttcagaggggaccccagga

SEQ ID NO: 3930743 - DNA, 25 bp, Homo sapien
tcacggagggataaaccatggcata

SEQ ID NO: 3930744 - DNA, 25 bp, Homo sapien
catggcataatccagcttcgaaagc

SEQ ID NO: 3930745 - DNA, 25 bp, Homo sapien
tccaatttatactggagtggccgca

SEQ ID NO: 3930746 - DNA, 25 bp, Homo sapien
gcagctcagtagacaggattccaat

SEQ ID NO: 3930747 - DNA, 25 bp, Homo sapien
cctacattctgatacaaagaacatc

SEQ ID NO: 3930748 - DNA, 25 bp, Homo sapien
gaattcccttacaaaatgttggcat

SEQ ID NO: 3930749 - DNA, 25 bp, Homo sapien
gcaaggcatcctacattctgataca

SEQ ID NO: 3930750 - DNA, 25 bp, Homo sapien
gcaactgcaaggcatcctacattct

SEQ ID NO: 3930751 - DNA, 25 bp, Homo sapien
cagcagcggctgacaaagcctccat

SEQ ID NO: 3930752 - DNA, 25 bp, Homo sapien
ctcgagttgaggttccagcagcggc

SEQ ID NO: 3930753 - DNA, 25 bp, Homo sapien
ttccagcagcggctgacaaagcctc

SEQ ID NO: 3930754 - DNA, 25 bp, Homo sapien
tttcagctgtttctgctcgagttga

SEQ ID NO: 3930755 - DNA, 25 bp, Homo sapien
cagaaagctcggattcattgtattg

SEQ ID NO: 3930756 - DNA, 25 bp, Homo sapien
cctctgttcacacctattctttttc

SEQ ID NO: 3930757 - DNA, 25 bp, Homo sapien
tggaggtagcagaaagctcggattc

SEQ ID NO: 3930758 - DNA, 25 bp, Homo sapien
tttagcgttacatttcaggcagcag

SEQ ID NO: 3930759 - DNA, 25 bp, Homo sapien
gaaagtaaaagcacattgttaccca

SEQ ID NO: 3930760 - DNA, 25 bp, Homo sapien
tgaagttaattctttctgatggcct

SEQ ID NO: 3930761 - DNA, 25 bp, Homo sapien
gcccttgtcaagtgggactgtctta

SEQ ID NO: 3930762 - DNA, 25 bp, Homo sapien
atcaaaaacaataccctccggatct

SEQ ID NO: 3930763 - DNA, 25 bp, Homo sapien
caaatgagccatagacttcagggtc

SEQ ID NO: 3930764 - DNA, 25 bp, Homo sapien
aaatgagccatagacttcagggtcc

SEQ ID NO: 3930765 - DNA, 25 bp, Homo sapien
aatgagccatagacttcagggtccc

SEQ ID NO: 3930766 - DNA, 25 bp, Homo sapien
atgagccatagacttcagggtccct

SEQ ID NO: 3930767 - DNA, 25 bp, Homo sapien
caagacaggaaagatgttcacattt

SEQ ID NO: 3930768 - DNA, 25 bp, Homo sapien
ttattttagggaaattcgcagagcg

SEQ ID NO: 3930769 - DNA, 25 bp, Homo sapien
tgaaatatgtctgctaggtagcgac

SEQ ID NO: 3930770 - DNA, 25 bp, Homo sapien
taggtagcgacaagacaagacagga

SEQ ID NO: 3930771 - DNA, 25 bp, Homo sapien
ggactcttgttttctggtgaagaaa

SEQ ID NO: 3930772 - DNA, 25 bp, Homo sapien
tgaagaaatcttatttaggataaaa

SEQ ID NO: 3930773 - DNA, 25 bp, Homo sapien
tcttgttttctggtgaagaaatctt

SEQ ID NO: 3930774 - DNA, 25 bp, Homo sapien
tatttaggataaaatataagctcat

SEQ ID NO: 3930775 - DNA, 25 bp, Homo sapien
ggagtcggaggagcatgtggaccag

SEQ ID NO: 3930776 - DNA, 25 bp, Homo sapien
gaggagcatgtggaccagcgtctcc

SEQ ID NO: 3930777 - DNA, 25 bp, Homo sapien
aaatttggtggaagcgtccctcaca

SEQ ID NO: 3930778 - DNA, 25 bp, Homo sapien
caccttccctctttaagcagctgcc

SEQ ID NO: 3930779 - DNA, 25 bp, Homo sapien
ctgatgtcctcgaggccacggacca

SEQ ID NO: 3930780 - DNA, 25 bp, Homo sapien
agagaaacaaatttggtggaagcgt

SEQ ID NO: 3930781 - DNA, 25 bp, Homo sapien
ccgctgagtttccaagctacgttca

SEQ ID NO: 3930782 - DNA, 25 bp, Homo sapien
gctgttactgtcttgccgctgagtt

SEQ ID NO: 3930783 - DNA, 25 bp, Homo sapien
cagacttcgaattgggctgttactg

SEQ ID NO: 3930784 - DNA, 25 bp, Homo sapien
cattttgggtctgccgttgatggat

SEQ ID NO: 3930785 - DNA, 25 bp, Homo sapien
tctattgttggctttggtgcagggc

SEQ ID NO: 3930786 - DNA, 25 bp, Homo sapien
caaattctattgttggctttggtgc

SEQ ID NO: 3930787 - DNA, 25 bp, Homo sapien
tattgttggctttggtgcagggcat

SEQ ID NO: 3930788 - DNA, 25 bp, Homo sapien
tggctttggtgcagggcatgaaata

SEQ ID NO: 3930789 - DNA, 25 bp, Homo sapien
gggtgctttgtagagggtaatgcgt

SEQ ID NO: 3930790 - DNA, 25 bp, Homo sapien
tttgtagagggtaatgcgtgcagtc

SEQ ID NO: 3930791 - DNA, 25 bp, Homo sapien
ggaggagttgagggtgctttgtaga

SEQ ID NO: 3930792 - DNA, 25 bp, Homo sapien
tgctttgtagagggtaatgcgtgca

SEQ ID NO: 3930793 - DNA, 25 bp, Homo sapien
taggtcttgagaatcttcgtgtcag

SEQ ID NO: 3930794 - DNA, 25 bp, Homo sapien
tcttgagaatcttcgtgtcagcctc

SEQ ID NO: 3930795 - DNA, 25 bp, Homo sapien
gaatcttcgtgtcagcctctgctgt

SEQ ID NO: 3930796 - DNA, 25 bp, Homo sapien
tcatcagataggtcttgagaatctt

SEQ ID NO: 3930797 - DNA, 25 bp, Homo sapien
tgcatactgcgggaaccatatatat

SEQ ID NO: 3930798 - DNA, 25 bp, Homo sapien
atccaaagtgcatactgcgggaacc

SEQ ID NO: 3930799 - DNA, 25 bp, Homo sapien
tactgcgggaaccatatatatttcg

SEQ ID NO: 3930800 - DNA, 25 bp, Homo sapien
cgggaaccatatatatttcggtaga

SEQ ID NO: 3930801 - DNA, 25 bp, Homo sapien
gaaagctaccgttcttctcagagcc

SEQ ID NO: 3930802 - DNA, 25 bp, Homo sapien
tgtacgtggcttctaatcgaacctg

SEQ ID NO: 3930803 - DNA, 25 bp, Homo sapien
cctccccagggacattaagacattg

SEQ ID NO: 3930804 - DNA, 25 bp, Homo sapien
gacattgtgagtgcgcatggtgccc

SEQ ID NO: 3930805 - DNA, 25 bp, Homo sapien
ccttgaattgcaggcgaaatgaaat

SEQ ID NO: 3930806 - DNA, 25 bp, Homo sapien
aattgcctttgaattttcgccttga

SEQ ID NO: 3930807 - DNA, 25 bp, Homo sapien
taaagattgtgatgtgtgcaggaaa

SEQ ID NO: 3930808 - DNA, 25 bp, Homo sapien
aggaaatgagggtctataaaattgt

SEQ ID NO: 3930809 - DNA, 25 bp, Homo sapien
catcctagagctagtgaaaagaaaa

SEQ ID NO: 3930810 - DNA, 25 bp, Homo sapien
gcctctataaagagtgttcttcact

SEQ ID NO: 3930811 - DNA, 25 bp, Homo sapien
gaccaggaaacaagcttagttgaaa

SEQ ID NO: 3930812 - DNA, 25 bp, Homo sapien
gctgccacggtctcagtagcactga

SEQ ID NO: 3930813 - DNA, 25 bp, Homo sapien
ctttgcagagctctggattctcgaa

SEQ ID NO: 3930814 - DNA, 25 bp, Homo sapien
tccgttgctgttctttcgctggtcc

SEQ ID NO: 3930815 - DNA, 25 bp, Homo sapien
gctgaggtggtgatggttcatcttt

SEQ ID NO: 3930816 - DNA, 25 bp, Homo sapien
gattctcgaaggccactgatgctgg

SEQ ID NO: 3930817 - DNA, 25 bp, Homo sapien
ttgccttgttcccagaacgatcttg

SEQ ID NO: 3930818 - DNA, 25 bp, Homo sapien
tgttcccagaacgatcttgttcctt

SEQ ID NO: 3930819 - DNA, 25 bp, Homo sapien
ggttgttgatgaaatctgattctga

SEQ ID NO: 3930820 - DNA, 25 bp, Homo sapien
tctcttttcctggttgttgatgaaa

SEQ ID NO: 3930821 - DNA, 25 bp, Homo sapien
aaatgatgtatgaaatgaaaaactc

SEQ ID NO: 3930822 - DNA, 25 bp, Homo sapien
gtaaatgatgtatgaaatgaaaaac

SEQ ID NO: 3930823 - DNA, 25 bp, Homo sapien
taaatgatgtatgaaatgaaaaact

SEQ ID NO: 3930824 - DNA, 25 bp, Homo sapien
ctgtaaatgatgtatgaaatgaaaa

SEQ ID NO: 3930825 - DNA, 25 bp, Homo sapien
cgagaacatcgggtgtttctcttgg

SEQ ID NO: 3930826 - DNA, 25 bp, Homo sapien
taatggtatggactgattttgcaga

SEQ ID NO: 3930827 - DNA, 25 bp, Homo sapien
gtttctcttggtgtgtgctaatggt

SEQ ID NO: 3930828 - DNA, 25 bp, Homo sapien
ccaacaacgagaacatcgggtgttt

SEQ ID NO: 3930829 - DNA, 25 bp, Homo sapien
gaagtcgatgtgcttgaccctagat

SEQ ID NO: 3930830 - DNA, 25 bp, Homo sapien
gatccctgttggtgattcttggtca

SEQ ID NO: 3930831 - DNA, 25 bp, Homo sapien
gaaccgcatctgcatagatagcact

SEQ ID NO: 3930832 - DNA, 25 bp, Homo sapien
tgtgatcctcgttagcagaaccgca

SEQ ID NO: 3930833 - DNA, 25 bp, Homo sapien
ttcaagcagattcctaggggaccat

SEQ ID NO: 3930834 - DNA, 25 bp, Homo sapien
tgcttcaagcagattcctaggggac

SEQ ID NO: 3930835 - DNA, 25 bp, Homo sapien
agcagattcctaggggaccatacca

SEQ ID NO: 3930836 - DNA, 25 bp, Homo sapien
ctagctgcttcaagcagattcctag

SEQ ID NO: 3930837 - DNA, 25 bp, Homo sapien
catgctcgcattgacagattgggaa

SEQ ID NO: 3930838 - DNA, 25 bp, Homo sapien
caataagtttgtagcctgaacagga

SEQ ID NO: 3930839 - DNA, 25 bp, Homo sapien
ctgaacaggatttgtatcgctcgct

SEQ ID NO: 3930840 - DNA, 25 bp, Homo sapien
tattcttctgatgcgaaagccttct

SEQ ID NO: 3930841 - DNA, 25 bp, Homo sapien
tcttctctccaaatagctcaccttt

SEQ ID NO: 3930842 - DNA, 25 bp, Homo sapien
ttaaatgtgtcatggtttatatccc

SEQ ID NO: 3930843 - DNA, 25 bp, Homo sapien
gtgtcatggtttatatccccactca

SEQ ID NO: 3930844 - DNA, 25 bp, Homo sapien
ctccaaatagctcacctttacaatt

SEQ ID NO: 3930845 - DNA, 25 bp, Homo sapien
aaggaacagtggggttctcaatgat

SEQ ID NO: 3930846 - DNA, 25 bp, Homo sapien
caaaggaacagtggggttctcaatg

SEQ ID NO: 3930847 - DNA, 25 bp, Homo sapien
caatgatgacacctggttgccccat

SEQ ID NO: 3930848 - DNA, 25 bp, Homo sapien
gaacagtggggttctcaatgatgac

SEQ ID NO: 3930849 - DNA, 25 bp, Homo sapien
actcggttaccccagttgtgtctgc

SEQ ID NO: 3930850 - DNA, 25 bp, Homo sapien
gcctgccaggattcacctgtatctg

SEQ ID NO: 3930851 - DNA, 25 bp, Homo sapien
gagggtccccagtatgcctgctgtc

SEQ ID NO: 3930852 - DNA, 25 bp, Homo sapien
gggccccagttgtgcagctctgctg

SEQ ID NO: 3930853 - DNA, 25 bp, Homo sapien
cttcttccctggctgaacacactgc

SEQ ID NO: 3930854 - DNA, 25 bp, Homo sapien
ttccctggctgaacacactgcctca

SEQ ID NO: 3930855 - DNA, 25 bp, Homo sapien
tcttccctggctgaacacactgcct

SEQ ID NO: 3930856 - DNA, 25 bp, Homo sapien
tccctggctgaacacactgcctcag

SEQ ID NO: 3930857 - DNA, 25 bp, Homo sapien
cagctccatactggcacttgctctc

SEQ ID NO: 3930858 - DNA, 25 bp, Homo sapien
aaaaaatggccggaaatatcacgct

SEQ ID NO: 3930859 - DNA, 25 bp, Homo sapien
ggaaatatcacgctttcaagttctt

SEQ ID NO: 3930860 - DNA, 25 bp, Homo sapien
gttccccagctccatactggcactt

SEQ ID NO: 3930861 - DNA, 25 bp, Homo sapien
ggctgtctttcctctcgaagacatg

SEQ ID NO: 3930862 - DNA, 25 bp, Homo sapien
aagacatggaatgttccgctaagcc

SEQ ID NO: 3930863 - DNA, 25 bp, Homo sapien
tctcgaagacatggaatgttccgct

SEQ ID NO: 3930864 - DNA, 25 bp, Homo sapien
tctttcctctcgaagacatggaatg

SEQ ID NO: 3930865 - DNA, 25 bp, Homo sapien
aattgtctgatttgagttttatctc

SEQ ID NO: 3930866 - DNA, 25 bp, Homo sapien
cagagctgctaaaaagtacctctac

SEQ ID NO: 3930867 - DNA, 25 bp, Homo sapien
cccctgggttctcaatatattcaac

SEQ ID NO: 3930868 - DNA, 25 bp, Homo sapien
cagcctgactgataaaattgtctga

SEQ ID NO: 3930869 - DNA, 25 bp, Homo sapien
gcaggaacaaccaaggtgtgcccat

SEQ ID NO: 3930870 - DNA, 25 bp, Homo sapien
caggcatggaagcaggaacaaccaa

SEQ ID NO: 3930871 - DNA, 25 bp, Homo sapien
aagcaggaacaaccaaggtgtgccc

SEQ ID NO: 3930872 - DNA, 25 bp, Homo sapien
ggcatggaagcaggaacaaccaagg

SEQ ID NO: 3930873 - DNA, 25 bp, Homo sapien
tcagaagatgatgtccctgagaggg

SEQ ID NO: 3930874 - DNA, 25 bp, Homo sapien
aatcagaagatgatgtccctgagag

SEQ ID NO: 3930875 - DNA, 25 bp, Homo sapien
cagaagatgatgtccctgagaggga

SEQ ID NO: 3930876 - DNA, 25 bp, Homo sapien
acaatcagaagatgatgtccctgag

SEQ ID NO: 3930877 - DNA, 25 bp, Homo sapien
ctgcaaggaaccgggctggcatgct

SEQ ID NO: 3930878 - DNA, 25 bp, Homo sapien
ccaggctgcaaggaaccgggctggc

SEQ ID NO: 3930879 - DNA, 25 bp, Homo sapien
gatggtgccggcagtaactttgtgc

SEQ ID NO: 3930880 - DNA, 25 bp, Homo sapien
aggaaccgggctggcatgctgtgct

SEQ ID NO: 3930881 - DNA, 25 bp, Homo sapien
ttcttgaaaaattgggttcctgctg

SEQ ID NO: 3930882 - DNA, 25 bp, Homo sapien
ttattctaccaagtccactgaagtt

SEQ ID NO: 3930883 - DNA, 25 bp, Homo sapien
tgtggttgcaacaatgaatttcctg

SEQ ID NO: 3930884 - DNA, 25 bp, Homo sapien
tcctgttgtgagatgcaaattgtgg

SEQ ID NO: 3930885 - DNA, 25 bp, Homo sapien
cttaagaagtgcgaacggttcaggc

SEQ ID NO: 3930886 - DNA, 25 bp, Homo sapien
atgtaataaggcctaggaaagtggc

SEQ ID NO: 3930887 - DNA, 25 bp, Homo sapien
gttcaggcgggaatgtaataaggcc

SEQ ID NO: 3930888 - DNA, 25 bp, Homo sapien
aagggatgacctttatttgcaatca

SEQ ID NO: 3930889 - DNA, 25 bp, Homo sapien
cttcctgtgatttgctgccctcacc

SEQ ID NO: 3930890 - DNA, 25 bp, Homo sapien
gccatctctccaaaacagccaggca

SEQ ID NO: 3930891 - DNA, 25 bp, Homo sapien
tgcctgccatctctccaaaacagcc

SEQ ID NO: 3930892 - DNA, 25 bp, Homo sapien
ttttgcctgccatctctccaaaaca

SEQ ID NO: 3930893 - DNA, 25 bp, Homo sapien
ccatctctccaaaacagccaggcat

SEQ ID NO: 3930894 - DNA, 25 bp, Homo sapien
cttgtggtgaccgagggagctcctt

SEQ ID NO: 3930895 - DNA, 25 bp, Homo sapien
tctgatgaaagcctgctccaatcac

SEQ ID NO: 3930896 - DNA, 25 bp, Homo sapien
tctcctcatggaagacactccttca

SEQ ID NO: 3930897 - DNA, 25 bp, Homo sapien
tccttcacaaccagccctcgatgtc

SEQ ID NO: 3930898 - DNA, 25 bp, Homo sapien
ttctgtaggacacctgtcatgtcgt

SEQ ID NO: 3930899 - DNA, 25 bp, Homo sapien
gaatgcaattctgggttagttaagg

SEQ ID NO: 3930900 - DNA, 25 bp, Homo sapien
agcagtggccacagtcgttgttctt

SEQ ID NO: 3930901 - DNA, 25 bp, Homo sapien
gatgatcaatgtcaaatcagggaac

SEQ ID NO: 3930902 - DNA, 25 bp, Homo sapien
agatccaaatctctaccagcccctg

SEQ ID NO: 3930903 - DNA, 25 bp, Homo sapien
tctttctccaccgtaccagtgtaga

SEQ ID NO: 3930904 - DNA, 25 bp, Homo sapien
taccgtggttggcttctgaatttca

SEQ ID NO: 3930905 - DNA, 25 bp, Homo sapien
ttgtcatacaatgaatcatacttga

SEQ ID NO: 3930906 - DNA, 25 bp, Homo sapien
tttcccccaagcatctctccaagaa

SEQ ID NO: 3930907 - DNA, 25 bp, Homo sapien
cccaagcatctctccaagaatatct

SEQ ID NO: 3930908 - DNA, 25 bp, Homo sapien
caagcatctctccaagaatatcttc

SEQ ID NO: 3930909 - DNA, 25 bp, Homo sapien
tcccccaagcatctctccaagaata

SEQ ID NO: 3930910 - DNA, 25 bp, Homo sapien
tgctgaatcggttgatgttggaaat

SEQ ID NO: 3930911 - DNA, 25 bp, Homo sapien
cccacacttgtgcttctgctgaatc

SEQ ID NO: 3930912 - DNA, 25 bp, Homo sapien
cggttgatgttggaaatggtcttga

SEQ ID NO: 3930913 - DNA, 25 bp, Homo sapien
aatggtcttgacgtccttctgtcat

SEQ ID NO: 3930914 - DNA, 25 bp, Homo sapien
gagatcgcctttggggttgattctg

SEQ ID NO: 3930915 - DNA, 25 bp, Homo sapien
ccttctgctcaggaggtttcaagga

SEQ ID NO: 3930916 - DNA, 25 bp, Homo sapien
tcaaaaagacaggagatcgcctttg

SEQ ID NO: 3930917 - DNA, 25 bp, Homo sapien
aaaaagacaggagatcgcctttggg

SEQ ID NO: 3930918 - DNA, 25 bp, Homo sapien
ccttcataaacaaggatgacttcag

SEQ ID NO: 3930919 - DNA, 25 bp, Homo sapien
gacacactgtccttcataaacaagg

SEQ ID NO: 3930920 - DNA, 25 bp, Homo sapien
ctgacacactgtccttcataaacaa

SEQ ID NO: 3930921 - DNA, 25 bp, Homo sapien
cactgtccttcataaacaaggatga

SEQ ID NO: 3930922 - DNA, 25 bp, Homo sapien
ttcatgtatccaaccatcttctgta

SEQ ID NO: 3930923 - DNA, 25 bp, Homo sapien
catgtatccaaccatcttctgtata

SEQ ID NO: 3930924 - DNA, 25 bp, Homo sapien
tattcatgtatccaaccatcttctg

SEQ ID NO: 3930925 - DNA, 25 bp, Homo sapien
ttgtattcatgtatccaaccatctt

SEQ ID NO: 3930926 - DNA, 25 bp, Homo sapien
gcagctgagctgccaagggacccat

SEQ ID NO: 3930927 - DNA, 25 bp, Homo sapien
gccaagggacccatctgatagccat

SEQ ID NO: 3930928 - DNA, 25 bp, Homo sapien
tccgctccgggaaggagttcttgag

SEQ ID NO: 3930929 - DNA, 25 bp, Homo sapien
tagccatgatctgtgtctccgctcc

SEQ ID NO: 3930930 - DNA, 25 bp, Homo sapien
cgtgccattacgctccagcctgggt

SEQ ID NO: 3930931 - DNA, 25 bp, Homo sapien
gccattacgctccagcctgggtgga

SEQ ID NO: 3930932 - DNA, 25 bp, Homo sapien
tgccattacgctccagcctgggtgg

SEQ ID NO: 3930933 - DNA, 25 bp, Homo sapien
cattacgctccagcctgggtggaca

SEQ ID NO: 3930934 - DNA, 25 bp, Homo sapien
agtcgtagctttccctaagtctcct

SEQ ID NO: 3930935 - DNA, 25 bp, Homo sapien
gcccacaaagtagtgagggtcaccc

SEQ ID NO: 3930936 - DNA, 25 bp, Homo sapien
aatgaagacacagctattgagccca

SEQ ID NO: 3930937 - DNA, 25 bp, Homo sapien
catcgtagtgtcttggaagaaatgc

SEQ ID NO: 3930938 - DNA, 25 bp, Homo sapien
catgtataatgatgctgcgttgatg

SEQ ID NO: 3930939 - DNA, 25 bp, Homo sapien
ggagctttggttgatatcatgtata

SEQ ID NO: 3930940 - DNA, 25 bp, Homo sapien
gacaggacctctcatatatgccatt

SEQ ID NO: 3930941 - DNA, 25 bp, Homo sapien
gcttagcgtgaaatccatccatctc

SEQ ID NO: 3930942 - DNA, 25 bp, Homo sapien
cagcttgacgattctggtgactttt

SEQ ID NO: 3930943 - DNA, 25 bp, Homo sapien
gggagatgtctttctatgtgactga

SEQ ID NO: 3930944 - DNA, 25 bp, Homo sapien
tgatgccaggggagatgtctttcta

SEQ ID NO: 3930945 - DNA, 25 bp, Homo sapien
gctggcattggatccagcttgacga

SEQ ID NO: 3930946 - DNA, 25 bp, Homo sapien
gagaaacttgagtgactcaagcaca

SEQ ID NO: 3930947 - DNA, 25 bp, Homo sapien
agaaacttgagtgactcaagcacat

SEQ ID NO: 3930948 - DNA, 25 bp, Homo sapien
ggagtactttgtcttatagcctcgc

SEQ ID NO: 3930949 - DNA, 25 bp, Homo sapien
ggagtcataacatagagtggcacct

SEQ ID NO: 3930950 - DNA, 25 bp, Homo sapien
gcacctttgctaccagaacaccttt

SEQ ID NO: 3930951 - DNA, 25 bp, Homo sapien
ttatagcctcgccaaccctgcagaa

SEQ ID NO: 3930952 - DNA, 25 bp, Homo sapien
ggctcataagacctctgcctgttct

SEQ ID NO: 3930953 - DNA, 25 bp, Homo sapien
gagatgtggaaagctaaacttgggc

SEQ ID NO: 3930954 - DNA, 25 bp, Homo sapien
gaaagctaaacttgggctcataaga

SEQ ID NO: 3930955 - DNA, 25 bp, Homo sapien
taaacttgggctcataagacctctg

SEQ ID NO: 3930956 - DNA, 25 bp, Homo sapien
ttccacaggatacccagcaaccagt

SEQ ID NO: 3930957 - DNA, 25 bp, Homo sapien
aaatactttccttgtgatgtaggag

SEQ ID NO: 3930958 - DNA, 25 bp, Homo sapien
caggatacccagcaaccagtaaata

SEQ ID NO: 3930959 - DNA, 25 bp, Homo sapien
gatacccagcaaccagtaaatactt

SEQ ID NO: 3930960 - DNA, 25 bp, Homo sapien
gagcctaggcattgtctttctattg

SEQ ID NO: 3930961 - DNA, 25 bp, Homo sapien
ttcaaaaccgggccttttgtgctga

SEQ ID NO: 3930962 - DNA, 25 bp, Homo sapien
tcttcacacgttttaaaacagagca

SEQ ID NO: 3930963 - DNA, 25 bp, Homo sapien
ctttctattggcgtgattgacttgt

SEQ ID NO: 3930964 - DNA, 25 bp, Homo sapien
ttgtttgaaagtatagtcgcttaga

SEQ ID NO: 3930965 - DNA, 25 bp, Homo sapien
ggcatctgtccttctgaaacacttg

SEQ ID NO: 3930966 - DNA, 25 bp, Homo sapien
tgcaggcatctgtccttctgaaaca

SEQ ID NO: 3930967 - DNA, 25 bp, Homo sapien
tagaactgcaccaggtaatatttca

SEQ ID NO: 3930968 - DNA, 25 bp, Homo sapien
atgagctcctcctggatatcaaaga

SEQ ID NO: 3930969 - DNA, 25 bp, Homo sapien
cctcctggatatcaaagacaggcag

SEQ ID NO: 3930970 - DNA, 25 bp, Homo sapien
tgtactagctcctttgcattccaga

SEQ ID NO: 3930971 - DNA, 25 bp, Homo sapien
ggaaggaaggtgcttcttgtactag

SEQ ID NO: 3930972 - DNA, 25 bp, Homo sapien
gaagagagtaaatagatctgctgac

SEQ ID NO: 3930973 - DNA, 25 bp, Homo sapien
gactcggaattgattgagggctagt

SEQ ID NO: 3930974 - DNA, 25 bp, Homo sapien
tagatctgctgactcggaattgatt

SEQ ID NO: 3930975 - DNA, 25 bp, Homo sapien
attgagggctagttatctggttttc

SEQ ID NO: 3930976 - DNA, 25 bp, Homo sapien
taggtacccttcaccctgaggaagc

SEQ ID NO: 3930977 - DNA, 25 bp, Homo sapien
ctcaaatcccctggagtctctttta

SEQ ID NO: 3930978 - DNA, 25 bp, Homo sapien
aatgtgacactcaaatcccctggag

SEQ ID NO: 3930979 - DNA, 25 bp, Homo sapien
ccataaaagtggctttgggcgaaga

SEQ ID NO: 3930980 - DNA, 25 bp, Homo sapien
tcctgatcccttctggatcaccctc

SEQ ID NO: 3930981 - DNA, 25 bp, Homo sapien
tgatcccttctggatcaccctccat

SEQ ID NO: 3930982 - DNA, 25 bp, Homo sapien
ctgatcccttctggatcaccctcca

SEQ ID NO: 3930983 - DNA, 25 bp, Homo sapien
atcccttctggatcaccctccatct

SEQ ID NO: 3930984 - DNA, 25 bp, Homo sapien
tctgagattgtgattgactccaagt

SEQ ID NO: 3930985 - DNA, 25 bp, Homo sapien
gattgtgattgactccaagtgaagg

SEQ ID NO: 3930986 - DNA, 25 bp, Homo sapien
ggctttgtctgagattgtgattgac

SEQ ID NO: 3930987 - DNA, 25 bp, Homo sapien
aagtgaaggtcacctccgtggtcct

SEQ ID NO: 3930988 - DNA, 25 bp, Homo sapien
tctgggaagtatcagaacgctgcca

SEQ ID NO: 3930989 - DNA, 25 bp, Homo sapien
tgccaattctcaaatgacagtgagg

SEQ ID NO: 3930990 - DNA, 25 bp, Homo sapien
caccttggtcaagctgaggccacag

SEQ ID NO: 3930991 - DNA, 25 bp, Homo sapien
gcccacctctgggaagtatcagaac

SEQ ID NO: 3930992 - DNA, 25 bp, Homo sapien
gttcttgtgttcaagatgcaaagtc

SEQ ID NO: 3930993 - DNA, 25 bp, Homo sapien
tctcctccgtaggactgaacagatg

SEQ ID NO: 3930994 - DNA, 25 bp, Homo sapien
agtgtgaagccgctttggctttttc

SEQ ID NO: 3930995 - DNA, 25 bp, Homo sapien
gacgcttcgtgattcccaggattgg

SEQ ID NO: 3930996 - DNA, 25 bp, Homo sapien
actgaacagatgcatggcacacatg

SEQ ID NO: 3930997 - DNA, 25 bp, Homo sapien
tcacaagctagagattgcagaaaag

SEQ ID NO: 3930998 - DNA, 25 bp, Homo sapien
gaccacgatggtagtctttcctatt

SEQ ID NO: 3930999 - DNA, 25 bp, Homo sapien
taacttggtcctcaagagaagttgg

SEQ ID NO: 3931000 - DNA, 25 bp, Homo sapien
gaggctttcgctggaaattaagaag

SEQ ID NO: 3931001 - DNA, 25 bp, Homo sapien
cagggcgaaccaaccagaatgaaag

SEQ ID NO: 3931002 - DNA, 25 bp, Homo sapien
gaagcgtgcaaatgagcaaaggaca

SEQ ID NO: 3931003 - DNA, 25 bp, Homo sapien
aaatcacagggcgaaccaaccagaa

SEQ ID NO: 3931004 - DNA, 25 bp, Homo sapien
taaaaatcacagggcgaaccaacca

SEQ ID NO: 3931005 - DNA, 25 bp, Homo sapien
tttttggggcaaatctgacagcgac

SEQ ID NO: 3931006 - DNA, 25 bp, Homo sapien
tgacagcgaccttccatgagccaac

SEQ ID NO: 3931007 - DNA, 25 bp, Homo sapien
ctgcctgccggaagatttcattttg

SEQ ID NO: 3931008 - DNA, 25 bp, Homo sapien
ctctgcctgccggaagatttcattt

SEQ ID NO: 3931009 - DNA, 25 bp, Homo sapien
catatttgaagagcggatgtagtac

SEQ ID NO: 3931010 - DNA, 25 bp, Homo sapien
cagggactgcatatttgaagagcgg

SEQ ID NO: 3931011 - DNA, 25 bp, Homo sapien
tagaaggtgctaccagggactgcat

SEQ ID NO: 3931012 - DNA, 25 bp, Homo sapien
agagcggatgtagtactttgtattc

SEQ ID NO: 3931013 - DNA, 25 bp, Homo sapien
gcaaagttgcctgttttggcttcat

SEQ ID NO: 3931014 - DNA, 25 bp, Homo sapien
tcttgcaaagttgcctgttttggct

SEQ ID NO: 3931015 - DNA, 25 bp, Homo sapien
aagcttcctcttgcaaagttgcctg

SEQ ID NO: 3931016 - DNA, 25 bp, Homo sapien
ttgcaaagttgcctgttttggcttc

SEQ ID NO: 3931017 - DNA, 25 bp, Homo sapien
cagaaggtggatctttttgcattcc

SEQ ID NO: 3931018 - DNA, 25 bp, Homo sapien
ccagagagcagcggaaacccttcat

SEQ ID NO: 3931019 - DNA, 25 bp, Homo sapien
gcaggtgacatttttagctgatatt

SEQ ID NO: 3931020 - DNA, 25 bp, Homo sapien
gtgacatttttagctgatattttct

SEQ ID NO: 3931021 - DNA, 25 bp, Homo sapien
gagcaggtgacatttttagctgata

SEQ ID NO: 3931022 - DNA, 25 bp, Homo sapien
ctgtggagcaggtgacatttttagc

SEQ ID NO: 3931023 - DNA, 25 bp, Homo sapien
cagaatcggcatctgaacaattgaa

SEQ ID NO: 3931024 - DNA, 25 bp, Homo sapien
cccacagaagtatcttcttgagtat

SEQ ID NO: 3931025 - DNA, 25 bp, Homo sapien
ttttgttatcgttttcagaatcggc

SEQ ID NO: 3931026 - DNA, 25 bp, Homo sapien
cagttcctgaactaggagcagtgta

SEQ ID NO: 3931027 - DNA, 25 bp, Homo sapien
agtgggcctgtgttactagcttggg

SEQ ID NO: 3931028 - DNA, 25 bp, Homo sapien
gcccaaggggatcattaggcatccg

SEQ ID NO: 3931029 - DNA, 25 bp, Homo sapien
gggatcattaggcatccgtatcaat

SEQ ID NO: 3931030 - DNA, 25 bp, Homo sapien
tccgtatcaatctacaaatcagtgg

SEQ ID NO: 3931031 - DNA, 25 bp, Homo sapien
gggattggagggaatgctgtggggc

SEQ ID NO: 3931032 - DNA, 25 bp, Homo sapien
gattggagggaatgctgtggggctg

SEQ ID NO: 3931033 - DNA, 25 bp, Homo sapien
agaggtggggattggagggaatgct

SEQ ID NO: 3931034 - DNA, 25 bp, Homo sapien
gtggggattggagggaatgctgtgg

SEQ ID NO: 3931035 - DNA, 25 bp, Homo sapien
gcgtctgatcttcaacagattgctg

SEQ ID NO: 3931036 - DNA, 25 bp, Homo sapien
ccagcacagcgtgctggaaagagag

SEQ ID NO: 3931037 - DNA, 25 bp, Homo sapien
ctccctgtcttagcgtctgatcttc

SEQ ID NO: 3931038 - DNA, 25 bp, Homo sapien
tgtcttagcgtctgatcttcaacag

SEQ ID NO: 3931039 - DNA, 25 bp, Homo sapien
gctgttcatcagtgttgccgcatct

SEQ ID NO: 3931040 - DNA, 25 bp, Homo sapien
catcagtgttgccgcatcttgcttg

SEQ ID NO: 3931041 - DNA, 25 bp, Homo sapien
tgttcatcagtgttgccgcatcttg

SEQ ID NO: 3931042 - DNA, 25 bp, Homo sapien
ttcatcagtgttgccgcatcttgct

SEQ ID NO: 3931043 - DNA, 25 bp, Homo sapien
ccttgcagctcatgttataagcaca

SEQ ID NO: 3931044 - DNA, 25 bp, Homo sapien
atacaagacgctggctgaccccttg

SEQ ID NO: 3931045 - DNA, 25 bp, Homo sapien
ggctgaccccttgcagctcatgtta

SEQ ID NO: 3931046 - DNA, 25 bp, Homo sapien
ttttatgaggccatacaagacgctg

SEQ ID NO: 3931047 - DNA, 25 bp, Homo sapien
ggcatttgttcgttcttctctgaga

SEQ ID NO: 3931048 - DNA, 25 bp, Homo sapien
tcaactgttaccctgatcagtaagc

SEQ ID NO: 3931049 - DNA, 25 bp, Homo sapien
gatcagtaagcatggcatttgttcg

SEQ ID NO: 3931050 - DNA, 25 bp, Homo sapien
ctgatcagtaagcatggcatttgtt

SEQ ID NO: 3931051 - DNA, 25 bp, Homo sapien
cttctgagatgatgtcagttgaggt

SEQ ID NO: 3931052 - DNA, 25 bp, Homo sapien
tctgagatgatgtcagttgaggttc

SEQ ID NO: 3931053 - DNA, 25 bp, Homo sapien
atgatgtcagttgaggttcctttgc

SEQ ID NO: 3931054 - DNA, 25 bp, Homo sapien
tgagatgatgtcagttgaggttcct

SEQ ID NO: 3931055 - DNA, 25 bp, Homo sapien
tgttcttaagattgcttctcacaca

SEQ ID NO: 3931056 - DNA, 25 bp, Homo sapien
tgcaagtgtggccagcccattcggc

SEQ ID NO: 3931057 - DNA, 25 bp, Homo sapien
taacagtctggcatcttttgcagac

SEQ ID NO: 3931058 - DNA, 25 bp, Homo sapien
gcctgcccactgaaactctaaatgt

SEQ ID NO: 3931059 - DNA, 25 bp, Homo sapien
cttccgttggcagctcgtgccattg

SEQ ID NO: 3931060 - DNA, 25 bp, Homo sapien
gcttccgttggcagctcgtgccatt

SEQ ID NO: 3931061 - DNA, 25 bp, Homo sapien
tccgttggcagctcgtgccattgtt

SEQ ID NO: 3931062 - DNA, 25 bp, Homo sapien
aagcttccgttggcagctcgtgcca

SEQ ID NO: 3931063 - DNA, 25 bp, Homo sapien
tatgtatccataaacaatgtatgac

SEQ ID NO: 3931064 - DNA, 25 bp, Homo sapien
cgcactacctacagaggtgtccata

SEQ ID NO: 3931065 - DNA, 25 bp, Homo sapien
tggttttgcatggttttttgcactt

SEQ ID NO: 3931066 - DNA, 25 bp, Homo sapien
ttttccgcactacctacagaggtgt

SEQ ID NO: 3931067 - DNA, 25 bp, Homo sapien
gtcatagaaatggtctttcctaggg

SEQ ID NO: 3931068 - DNA, 25 bp, Homo sapien
aacgtattgcaagtagagtatcatc

SEQ ID NO: 3931069 - DNA, 25 bp, Homo sapien
tcatctggaatactcaagagatcca

SEQ ID NO: 3931070 - DNA, 25 bp, Homo sapien
tttaaaacgtattgcaagtagagta

SEQ ID NO: 3931071 - DNA, 25 bp, Homo sapien
ggcttggttgtttctccaaaggcag

SEQ ID NO: 3931072 - DNA, 25 bp, Homo sapien
tcacccacagagtgtctgtgtttgt

SEQ ID NO: 3931073 - DNA, 25 bp, Homo sapien
ttttcattgggatcaggcttggttg

SEQ ID NO: 3931074 - DNA, 25 bp, Homo sapien
ttgacagccaagacagggagcagga

SEQ ID NO: 3931075 - DNA, 25 bp, Homo sapien
cagagtcaagctactagtctgcaag

SEQ ID NO: 3931076 - DNA, 25 bp, Homo sapien
tttgtcttagccagagtcaagctac

SEQ ID NO: 3931077 - DNA, 25 bp, Homo sapien
ccccttgccttttgtcttagccaga

SEQ ID NO: 3931078 - DNA, 25 bp, Homo sapien
caagctactagtctgcaagttgttc

SEQ ID NO: 3931079 - DNA, 25 bp, Homo sapien
taaccactagtggaatcaaatgaca

SEQ ID NO: 3931080 - DNA, 25 bp, Homo sapien
taccttactagtattcagggttgcc

SEQ ID NO: 3931081 - DNA, 25 bp, Homo sapien
tgaactgaacaactggcacctctgg

SEQ ID NO: 3931082 - DNA, 25 bp, Homo sapien
gacattgctattcaggtcacttcaa

SEQ ID NO: 3931083 - DNA, 25 bp, Homo sapien
tgagccattgcacctggcctaattt

SEQ ID NO: 3931084 - DNA, 25 bp, Homo sapien
gcatgagccattgcacctggcctaa

SEQ ID NO: 3931085 - DNA, 25 bp, Homo sapien
gcaatctgcccaccttgatctccca

SEQ ID NO: 3931086 - DNA, 25 bp, Homo sapien
aagtgttgggattataggcatgagc

SEQ ID NO: 3931087 - DNA, 25 bp, Homo sapien
ctgagccctccccacagaacctgta

SEQ ID NO: 3931088 - DNA, 25 bp, Homo sapien
acctgtaaggtctgctgaactatga

SEQ ID NO: 3931089 - DNA, 25 bp, Homo sapien
agaacctgtaaggtctgctgaacta

SEQ ID NO: 3931090 - DNA, 25 bp, Homo sapien
agccctccccacagaacctgtaagg

SEQ ID NO: 3931091 - DNA, 25 bp, Homo sapien
ccgtcagcggtgacatctgatggca

SEQ ID NO: 3931092 - DNA, 25 bp, Homo sapien
cgtcagcggtgacatctgatggcat

SEQ ID NO: 3931093 - DNA, 25 bp, Homo sapien
tctgcgtttccttgcctggttcact

SEQ ID NO: 3931094 - DNA, 25 bp, Homo sapien
gtttgggtctagctgttccatggtc

SEQ ID NO: 3931095 - DNA, 25 bp, Homo sapien
agtatgtttgggtctagctgttcca

SEQ ID NO: 3931096 - DNA, 25 bp, Homo sapien
agtggcaggcagagattctctgcgt

SEQ ID NO: 3931097 - DNA, 25 bp, Homo sapien
caaggttcaagtctgagccacgggt

SEQ ID NO: 3931098 - DNA, 25 bp, Homo sapien
ggactatccgcttcccaggtgaaga

SEQ ID NO: 3931099 - DNA, 25 bp, Homo sapien
tctgaaaagcgtgcatttgccacct

SEQ ID NO: 3931100 - DNA, 25 bp, Homo sapien
gcattatatggtgggcccaggcacg

SEQ ID NO: 3931101 - DNA, 25 bp, Homo sapien
ggcacagctgaaacaggtcagcaaa

SEQ ID NO: 3931102 - DNA, 25 bp, Homo sapien
cacagctgaaacaggtcagcaaact

SEQ ID NO: 3931103 - DNA, 25 bp, Homo sapien
taggcacagctgaaacaggtcagca

SEQ ID NO: 3931104 - DNA, 25 bp, Homo sapien
ttaggcacagctgaaacaggtcagc

SEQ ID NO: 3931105 - DNA, 25 bp, Homo sapien
cctccttcttatcctttctggtatt

SEQ ID NO: 3931106 - DNA, 25 bp, Homo sapien
tttgatggcgaatacagttaaatgc

SEQ ID NO: 3931107 - DNA, 25 bp, Homo sapien
cctttctggtattcattaagttaat

SEQ ID NO: 3931108 - DNA, 25 bp, Homo sapien
gttgcctgcatggagcaccttcttt

SEQ ID NO: 3931109 - DNA, 25 bp, Homo sapien
tttggtaacctctgacgttgtagca

SEQ ID NO: 3931110 - DNA, 25 bp, Homo sapien
taacctctgacgttgtagcagagaa

SEQ ID NO: 3931111 - DNA, 25 bp, Homo sapien
cctctgacgttgtagcagagaaaaa

SEQ ID NO: 3931112 - DNA, 25 bp, Homo sapien
agactttggtaacctctgacgttgt

SEQ ID NO: 3931113 - DNA, 25 bp, Homo sapien
tgtcttgagtctgcgttgtactggg

SEQ ID NO: 3931114 - DNA, 25 bp, Homo sapien
tcacatttgatgggaaaagcagaag

SEQ ID NO: 3931115 - DNA, 25 bp, Homo sapien
ctgtcttgagtctgcgttgtactgg

SEQ ID NO: 3931116 - DNA, 25 bp, Homo sapien
tctgtcttgagtctgcgttgtactg

SEQ ID NO: 3931117 - DNA, 25 bp, Homo sapien
tgaaacttgcgtttttggcgctggc

SEQ ID NO: 3931118 - DNA, 25 bp, Homo sapien
gctttgtagtctgcgatttatgacg

SEQ ID NO: 3931119 - DNA, 25 bp, Homo sapien
tttatgacggctgcggttgagccag

SEQ ID NO: 3931120 - DNA, 25 bp, Homo sapien
caggagccgcaaaacggcaggacaa

SEQ ID NO: 3931121 - DNA, 25 bp, Homo sapien
ccttttgtatccctggttcttgcca

SEQ ID NO: 3931122 - DNA, 25 bp, Homo sapien
tgaatttcatttgcatgtgaccttt

SEQ ID NO: 3931123 - DNA, 25 bp, Homo sapien
tggatattctatcatgcagggcctt

SEQ ID NO: 3931124 - DNA, 25 bp, Homo sapien
tcagctgcttggatattctatcatg

SEQ ID NO: 3931125 - DNA, 25 bp, Homo sapien
gattttcttgggctgatacttccag

SEQ ID NO: 3931126 - DNA, 25 bp, Homo sapien
ttttcttgggctgatacttccaggt

SEQ ID NO: 3931127 - DNA, 25 bp, Homo sapien
attttcttgggctgatacttccagg

SEQ ID NO: 3931128 - DNA, 25 bp, Homo sapien
tctcagaaactctggcgaggcatgg

SEQ ID NO: 3931129 - DNA, 25 bp, Homo sapien
tgtggctgacacatctcaaatacgt

SEQ ID NO: 3931130 - DNA, 25 bp, Homo sapien
tggcacctgagcaacctgaagattt

SEQ ID NO: 3931131 - DNA, 25 bp, Homo sapien
tcaggaaaccacaggatgacagtta

SEQ ID NO: 3931132 - DNA, 25 bp, Homo sapien
tattccagagctttgacttctctct

SEQ ID NO: 3931133 - DNA, 25 bp, Homo sapien
ccatattccagagctttgacttctc

SEQ ID NO: 3931134 - DNA, 25 bp, Homo sapien
gacaccattccagagtgtaaccata

SEQ ID NO: 3931135 - DNA, 25 bp, Homo sapien
ttccagagtgtaaccatattccaga

SEQ ID NO: 3931136 - DNA, 25 bp, Homo sapien
ctatgtacgtattccggtatttctc

SEQ ID NO: 3931137 - DNA, 25 bp, Homo sapien
tgtacgtattccggtatttctctct

SEQ ID NO: 3931138 - DNA, 25 bp, Homo sapien
tatgtacgtattccggtatttctct

SEQ ID NO: 3931139 - DNA, 25 bp, Homo sapien
attgatgcctgctgcgtttgacatt

SEQ ID NO: 3931140 - DNA, 25 bp, Homo sapien
cttttgttctctcatgggatgtaat

SEQ ID NO: 3931141 - DNA, 25 bp, Homo sapien
ttagtttcagtagcttttgttctct

SEQ ID NO: 3931142 - DNA, 25 bp, Homo sapien
tgttctctcatgggatgtaatttgc

SEQ ID NO: 3931143 - DNA, 25 bp, Homo sapien
ttgttctctcatgggatgtaatttg

SEQ ID NO: 3931144 - DNA, 25 bp, Homo sapien
cactgagatacaaggccagttttca

SEQ ID NO: 3931145 - DNA, 25 bp, Homo sapien
cctcatcacgcggacttcgtttcat

SEQ ID NO: 3931146 - DNA, 25 bp, Homo sapien
ttttttgccccatcaggattctgaa

SEQ ID NO: 3931147 - DNA, 25 bp, Homo sapien
aaaggcaagggttgctgttgtttct

SEQ ID NO: 3931148 - DNA, 25 bp, Homo sapien
aatagatcaacaagggactcataag

SEQ ID NO: 3931149 - DNA, 25 bp, Homo sapien
aagtgtccattgtctcacgtttgag

SEQ ID NO: 3931150 - DNA, 25 bp, Homo sapien
gactcataagtgtccattgtctcac

SEQ ID NO: 3931151 - DNA, 25 bp, Homo sapien
cacgtttgagagtcttttgctgctc

SEQ ID NO: 3931152 - DNA, 25 bp, Homo sapien
ttttaggccttcagaatagacattt

SEQ ID NO: 3931153 - DNA, 25 bp, Homo sapien
cttgcaaatagcctctaatacccct

SEQ ID NO: 3931154 - DNA, 25 bp, Homo sapien
cattttgaaattgggccgctcttgc

SEQ ID NO: 3931155 - DNA, 25 bp, Homo sapien
tctaatacccctccttggtaatggc

SEQ ID NO: 3931156 - DNA, 25 bp, Homo sapien
ctccttggtaatggccctccctttg

SEQ ID NO: 3931157 - DNA, 25 bp, Homo sapien
tggccattgaatttgacatccgcac

SEQ ID NO: 3931158 - DNA, 25 bp, Homo sapien
atctgggctctggtacactgtctgt

SEQ ID NO: 3931159 - DNA, 25 bp, Homo sapien
tgtctgtggccattgaatttgacat

SEQ ID NO: 3931160 - DNA, 25 bp, Homo sapien
tgggctctggtacactgtctgtggc

SEQ ID NO: 3931161 - DNA, 25 bp, Homo sapien
cccacttgagtggtatggaaggcat

SEQ ID NO: 3931162 - DNA, 25 bp, Homo sapien
tattgcccacttgagtggtatggaa

SEQ ID NO: 3931163 - DNA, 25 bp, Homo sapien
tcaagtattgcccacttgagtggta

SEQ ID NO: 3931164 - DNA, 25 bp, Homo sapien
ccatgttcaagtattgcccacttga

SEQ ID NO: 3931165 - DNA, 25 bp, Homo sapien
gaatctggggttgtcctacaaagaa

SEQ ID NO: 3931166 - DNA, 25 bp, Homo sapien
tgtttttggaatcacagctcctagt

SEQ ID NO: 3931167 - DNA, 25 bp, Homo sapien
tgtagcctctaaccagtgaatctgg

SEQ ID NO: 3931168 - DNA, 25 bp, Homo sapien
gaaaattgtttttggaatcacagct

SEQ ID NO: 3931169 - DNA, 25 bp, Homo sapien
tcatctgtagtgagaaagaattgcc

SEQ ID NO: 3931170 - DNA, 25 bp, Homo sapien
tagtgagaaagaattgcccttttac

SEQ ID NO: 3931171 - DNA, 25 bp, Homo sapien
tgtagtgagaaagaattgccctttt

SEQ ID NO: 3931172 - DNA, 25 bp, Homo sapien
tctgtagtgagaaagaattgccctt

SEQ ID NO: 3931173 - DNA, 25 bp, Homo sapien
aaggtgcgtggtgcttccaggcttc

SEQ ID NO: 3931174 - DNA, 25 bp, Homo sapien
ttcctgaaggtgcgtggtgcttcca

SEQ ID NO: 3931175 - DNA, 25 bp, Homo sapien
tcctgaaggtgcgtggtgcttccag

SEQ ID NO: 3931176 - DNA, 25 bp, Homo sapien
tgaaggtgcgtggtgcttccaggct

SEQ ID NO: 3931177 - DNA, 25 bp, Homo sapien
ttcgtacccatatatcatcaattgt

SEQ ID NO: 3931178 - DNA, 25 bp, Homo sapien
tgattcgtacccatatatcatcaat

SEQ ID NO: 3931179 - DNA, 25 bp, Homo sapien
tgttgatcagcaattttgattcgta

SEQ ID NO: 3931180 - DNA, 25 bp, Homo sapien
cagcaattttgattcgtacccatat

SEQ ID NO: 3931181 - DNA, 25 bp, Homo sapien
actaagctggctgatgggagagcca

SEQ ID NO: 3931182 - DNA, 25 bp, Homo sapien
gagaaaactaagctggctgatggga

SEQ ID NO: 3931183 - DNA, 25 bp, Homo sapien
taagctggctgatgggagagccata

SEQ ID NO: 3931184 - DNA, 25 bp, Homo sapien
aaactaagctggctgatgggagagc

SEQ ID NO: 3931185 - DNA, 25 bp, Homo sapien
gtagatttcttactgttgttcttca

SEQ ID NO: 3931186 - DNA, 25 bp, Homo sapien
tagatttcttactgttgttcttcat

SEQ ID NO: 3931187 - DNA, 25 bp, Homo sapien
gacttgactgtcataaacaatgaga

SEQ ID NO: 3931188 - DNA, 25 bp, Homo sapien
attcaaactaagcaactgggaaacg

SEQ ID NO: 3931189 - DNA, 25 bp, Homo sapien
agcaaatgtccacaggagcattcaa

SEQ ID NO: 3931190 - DNA, 25 bp, Homo sapien
tgtccacaggagcattcaaactaag

SEQ ID NO: 3931191 - DNA, 25 bp, Homo sapien
ctccacatcttttactgtaggctcc

SEQ ID NO: 3931192 - DNA, 25 bp, Homo sapien
ttactgtaggctccctcttcttggg

SEQ ID NO: 3931193 - DNA, 25 bp, Homo sapien
ttgggcctgggacctaaacgtagca

SEQ ID NO: 3931194 - DNA, 25 bp, Homo sapien
tgaaggtcaaggtcgagttcagcaa

SEQ ID NO: 3931195 - DNA, 25 bp, Homo sapien
gaattttgatatttccacaaagaat

SEQ ID NO: 3931196 - DNA, 25 bp, Homo sapien
tcgaattttgatatttccacaaaga

SEQ ID NO: 3931197 - DNA, 25 bp, Homo sapien
aattctattgtcagggggcttgtaa

SEQ ID NO: 3931198 - DNA, 25 bp, Homo sapien
aaagaattctattgtcagggggctt

SEQ ID NO: 3931199 - DNA, 25 bp, Homo sapien
tgtctatggcaatgccgaccatctg

SEQ ID NO: 3931200 - DNA, 25 bp, Homo sapien
gctggtctgaaccaggataaaagtg

SEQ ID NO: 3931201 - DNA, 25 bp, Homo sapien
aaagtgaagaattcctctgtgaaga

SEQ ID NO: 3931202 - DNA, 25 bp, Homo sapien
gagcacctggtgctaatatatattc

SEQ ID NO: 3931203 - DNA, 25 bp, Homo sapien
tatcttgattccagattgcagggag

SEQ ID NO: 3931204 - DNA, 25 bp, Homo sapien
acacagggtcgccagcacagcttac

SEQ ID NO: 3931205 - DNA, 25 bp, Homo sapien
cgtgctcctgagaggccgaacacag

SEQ ID NO: 3931206 - DNA, 25 bp, Homo sapien
aggctcctccgtgctcctgagaggc

SEQ ID NO: 3931207 - DNA, 25 bp, Homo sapien
tgtgacagttttgtgggaaacatgt

SEQ ID NO: 3931208 - DNA, 25 bp, Homo sapien
cctgtgtcaatcatgtagactgtat

SEQ ID NO: 3931209 - DNA, 25 bp, Homo sapien
tagactgtatgaattcgaaacaggc

SEQ ID NO: 3931210 - DNA, 25 bp, Homo sapien
gtttgtgacagttttgtgggaaaca

SEQ ID NO: 3931211 - DNA, 25 bp, Homo sapien
ctgggtctgtaggggaatccagttg

SEQ ID NO: 3931212 - DNA, 25 bp, Homo sapien
tctgggtctgtaggggaatccagtt

SEQ ID NO: 3931213 - DNA, 25 bp, Homo sapien
tgggtctgtaggggaatccagttga

SEQ ID NO: 3931214 - DNA, 25 bp, Homo sapien
gggtctgtaggggaatccagttgac

SEQ ID NO: 3931215 - DNA, 25 bp, Homo sapien
gtgcattcttttattgcaatctcca

SEQ ID NO: 3931216 - DNA, 25 bp, Homo sapien
ccatagtgttttgtgcattctttta

SEQ ID NO: 3931217 - DNA, 25 bp, Homo sapien
tgttcccatagtgttttgtgcattc

SEQ ID NO: 3931218 - DNA, 25 bp, Homo sapien
ctgtgttcccatagtgttttgtgca

SEQ ID NO: 3931219 - DNA, 25 bp, Homo sapien
catgaaattttaaagagactggacc

SEQ ID NO: 3931220 - DNA, 25 bp, Homo sapien
ttaaagcttcaatgttgtgaagagc

SEQ ID NO: 3931221 - DNA, 25 bp, Homo sapien
gactggacctttcatctgcacaaca

SEQ ID NO: 3931222 - DNA, 25 bp, Homo sapien
caatgttgtgaagagctctgcatga

SEQ ID NO: 3931223 - DNA, 25 bp, Homo sapien
ttttccatcccagggtctataccca

SEQ ID NO: 3931224 - DNA, 25 bp, Homo sapien
gaagggctgtgttattttccatccc

SEQ ID NO: 3931225 - DNA, 25 bp, Homo sapien
tttccatcccagggtctatacccat

SEQ ID NO: 3931226 - DNA, 25 bp, Homo sapien
tttgaagggctgtgttattttccat

SEQ ID NO: 3931227 - DNA, 25 bp, Homo sapien
ctctccagtgctcagagcatgaaag

SEQ ID NO: 3931228 - DNA, 25 bp, Homo sapien
ttttctgctgtctttggaagcttgt

SEQ ID NO: 3931229 - DNA, 25 bp, Homo sapien
gttttctgctgtctttggaagcttg

SEQ ID NO: 3931230 - DNA, 25 bp, Homo sapien
tgctcagagcatgaaagttttctgc

SEQ ID NO: 3931231 - DNA, 25 bp, Homo sapien
gctggagaccacatgcttttgtcca

SEQ ID NO: 3931232 - DNA, 25 bp, Homo sapien
ggagaccacatgcttttgtccaacc

SEQ ID NO: 3931233 - DNA, 25 bp, Homo sapien
accacatgcttttgtccaaccactg

SEQ ID NO: 3931234 - DNA, 25 bp, Homo sapien
tggagaccacatgcttttgtccaac

SEQ ID NO: 3931235 - DNA, 25 bp, Homo sapien
accttgaagtggtctgagtaggatg

SEQ ID NO: 3931236 - DNA, 25 bp, Homo sapien
cagaaaccttgaagtggtctgagta

SEQ ID NO: 3931237 - DNA, 25 bp, Homo sapien
ggtctgagtaggatggatctcttcc

SEQ ID NO: 3931238 - DNA, 25 bp, Homo sapien
ctgctaacttattgtaaggcagaaa

SEQ ID NO: 3931239 - DNA, 25 bp, Homo sapien
aaatctcttattggcgtgctatcgt

SEQ ID NO: 3931240 - DNA, 25 bp, Homo sapien
gcaaaatctcttattggcgtgctat

SEQ ID NO: 3931241 - DNA, 25 bp, Homo sapien
tctcttattggcgtgctatcgttca

SEQ ID NO: 3931242 - DNA, 25 bp, Homo sapien
ctcttattggcgtgctatcgttcat

SEQ ID NO: 3931243 - DNA, 25 bp, Homo sapien
cttcctggcataggagaggcttgag

SEQ ID NO: 3931244 - DNA, 25 bp, Homo sapien
ggtgtccaacacatctttgcttcct

SEQ ID NO: 3931245 - DNA, 25 bp, Homo sapien
taggagaggcttgagtatcttatag

SEQ ID NO: 3931246 - DNA, 25 bp, Homo sapien
tggcatagagtaggtgtccaacaca

SEQ ID NO: 3931247 - DNA, 25 bp, Homo sapien
ggttgttgaactgtgattagaagtt

SEQ ID NO: 3931248 - DNA, 25 bp, Homo sapien
ttgttgaactgtgattagaagttta

SEQ ID NO: 3931249 - DNA, 25 bp, Homo sapien
gttgttgaactgtgattagaagttt

SEQ ID NO: 3931250 - DNA, 25 bp, Homo sapien
ttatattagcagtatgactgagctg

SEQ ID NO: 3931251 - DNA, 25 bp, Homo sapien
tatattagcagtatgactgagctga

SEQ ID NO: 3931252 - DNA, 25 bp, Homo sapien
tattagcagtatgactgagctgatc

SEQ ID NO: 3931253 - DNA, 25 bp, Homo sapien
ttagcagtatgactgagctgatcag

SEQ ID NO: 3931254 - DNA, 25 bp, Homo sapien
agcagtagcggtcaccggtaccctt

SEQ ID NO: 3931255 - DNA, 25 bp, Homo sapien
acacgcaaacaccggcagcagtagc

SEQ ID NO: 3931256 - DNA, 25 bp, Homo sapien
cctcttcttccggttcgtcagccct

SEQ ID NO: 3931257 - DNA, 25 bp, Homo sapien
ttccggttcgtcagccctcgcgcgg

SEQ ID NO: 3931258 - DNA, 25 bp, Homo sapien
agcaccagggggtggaccaccacct

SEQ ID NO: 3931259 - DNA, 25 bp, Homo sapien
tcgtgaacaagtaagggtcaccagc

SEQ ID NO: 3931260 - DNA, 25 bp, Homo sapien
gacgctggtctggactcgtgaacaa

SEQ ID NO: 3931261 - DNA, 25 bp, Homo sapien
ggatgactccggcatcgtgagccga

SEQ ID NO: 3931262 - DNA, 25 bp, Homo sapien
caaacaggctaaacggaacaggcag

SEQ ID NO: 3931263 - DNA, 25 bp, Homo sapien
acgaagtgacagacacgagcttggg

SEQ ID NO: 3931264 - DNA, 25 bp, Homo sapien
ggtcagggccaactaaagctagccg

SEQ ID NO: 3931265 - DNA, 25 bp, Homo sapien
gcatcatccagatttcggtaaaacg

SEQ ID NO: 3931266 - DNA, 25 bp, Homo sapien
aacgaacttcaaaacgaagtgacag

SEQ ID NO: 3931267 - DNA, 25 bp, Homo sapien
gatttcgataacaggaactcggtca

SEQ ID NO: 3931268 - DNA, 25 bp, Homo sapien
tcagggccaaatgaaggtagccacc

SEQ ID NO: 3931269 - DNA, 25 bp, Homo sapien
tcagagccaaatgaagctagcccgc

SEQ ID NO: 3931270 - DNA, 25 bp, Homo sapien
gagtcaaatgaagatacgaccctgg

SEQ ID NO: 3931271 - DNA, 25 bp, Homo sapien
gaaatagtgcctgcccctagtatcc

SEQ ID NO: 3931272 - DNA, 25 bp, Homo sapien
caacaggtctagcaggatgaacaac

SEQ ID NO: 3931273 - DNA, 25 bp, Homo sapien
tccggatccagctgaattagttgca

SEQ ID NO: 3931274 - DNA, 25 bp, Homo sapien
ttagttgcacacagcaagttgcggg

SEQ ID NO: 3931275 - DNA, 25 bp, Homo sapien
taacattgactgtgaagtaatacat

SEQ ID NO: 3931276 - DNA, 25 bp, Homo sapien
ctaacattgactgtgaagtaataca

SEQ ID NO: 3931277 - DNA, 25 bp, Homo sapien
gcacaccaacaacacgcttctggtt

SEQ ID NO: 3931278 - DNA, 25 bp, Homo sapien
accaacaacacgcttctggtttcca

SEQ ID NO: 3931279 - DNA, 25 bp, Homo sapien
caacaacacgcttctggtttccaac

SEQ ID NO: 3931280 - DNA, 25 bp, Homo sapien
aaagcacaccaacaacacgcttctg

SEQ ID NO: 3931281 - DNA, 25 bp, Homo sapien
tacatcaagtactttcttttgccat

SEQ ID NO: 3931282 - DNA, 25 bp, Homo sapien
gatacatcaagtactttcttttgcc

SEQ ID NO: 3931283 - DNA, 25 bp, Homo sapien
gcaaaactgttcgatacatcaagta

SEQ ID NO: 3931284 - DNA, 25 bp, Homo sapien
ctgcaaaactgttcgatacatcaag

SEQ ID NO: 3931285 - DNA, 25 bp, Homo sapien
atggtctaaaaaccatacagaatcg

SEQ ID NO: 3931286 - DNA, 25 bp, Homo sapien
taaaaaccatacagaatcgtctttg

SEQ ID NO: 3931287 - DNA, 25 bp, Homo sapien
aaaccatacagaatcgtctttgtca

SEQ ID NO: 3931288 - DNA, 25 bp, Homo sapien
catacagaatcgtctttgtcatctt

SEQ ID NO: 3931289 - DNA, 25 bp, Homo sapien
agttcgttgatggcaatgtcattct

SEQ ID NO: 3931290 - DNA, 25 bp, Homo sapien
gagttcgttgatggcaatgtcattc

SEQ ID NO: 3931291 - DNA, 25 bp, Homo sapien
tcatgagttcgttgatggcaatgtc

SEQ ID NO: 3931292 - DNA, 25 bp, Homo sapien
atgagttcgttgatggcaatgtcat

SEQ ID NO: 3931293 - DNA, 25 bp, Homo sapien
cctaggtccttcggcttcacatcaa

SEQ ID NO: 3931294 - DNA, 25 bp, Homo sapien
taggtccttcggcttcacatcaatg

SEQ ID NO: 3931295 - DNA, 25 bp, Homo sapien
ggtccttcggcttcacatcaatgat

SEQ ID NO: 3931296 - DNA, 25 bp, Homo sapien
cagccctaggtccttcggcttcaca

SEQ ID NO: 3931297 - DNA, 25 bp, Homo sapien
tatgtaataggcgagctccaagacc

SEQ ID NO: 3931298 - DNA, 25 bp, Homo sapien
cagtgacatcctgaagggacttcga

SEQ ID NO: 3931299 - DNA, 25 bp, Homo sapien
tggtaagagtacaggctccacagcc

SEQ ID NO: 3931300 - DNA, 25 bp, Homo sapien
cagaagaggctgtacgtctcctgtc

SEQ ID NO: 3931301 - DNA, 25 bp, Homo sapien
tgctccaatttcactggtcacgtgt

SEQ ID NO: 3931302 - DNA, 25 bp, Homo sapien
agtgttcaactccaacttcctcagc

SEQ ID NO: 3931303 - DNA, 25 bp, Homo sapien
ggtcacgtgttcaaatgttttcgag

SEQ ID NO: 3931304 - DNA, 25 bp, Homo sapien
atgttttcgaggttggagttccatc

SEQ ID NO: 3931305 - DNA, 25 bp, Homo sapien
cagacaaggtatgctatccacaaag

SEQ ID NO: 3931306 - DNA, 25 bp, Homo sapien
caggtctccatattcccgacacaga

SEQ ID NO: 3931307 - DNA, 25 bp, Homo sapien
cagacttgttagtggacggccagga

SEQ ID NO: 3931308 - DNA, 25 bp, Homo sapien
gacctctcgggcagtgaatgatttt

SEQ ID NO: 3931309 - DNA, 25 bp, Homo sapien
ttgttgagaaggacacctagtggag

SEQ ID NO: 3931310 - DNA, 25 bp, Homo sapien
tcagggtaccatgttatcaggcaag

SEQ ID NO: 3931311 - DNA, 25 bp, Homo sapien
gaaaattcctagctttgttgggtga

SEQ ID NO: 3931312 - DNA, 25 bp, Homo sapien
tctgggtaaccttgtactgaagctg

SEQ ID NO: 3931313 - DNA, 25 bp, Homo sapien
gcccaccgtcgtgtctttgatatct

SEQ ID NO: 3931314 - DNA, 25 bp, Homo sapien
gtgcccaccgtcgtgtctttgatat

SEQ ID NO: 3931315 - DNA, 25 bp, Homo sapien
tgcccaccgtcgtgtctttgatatc

SEQ ID NO: 3931316 - DNA, 25 bp, Homo sapien
gtaaaaggccttgacgaactcctgc

SEQ ID NO: 3931317 - DNA, 25 bp, Homo sapien
cacggaacggatcagcgaggccaag

SEQ ID NO: 3931318 - DNA, 25 bp, Homo sapien
cggaacggatcagcgaggccaagta

SEQ ID NO: 3931319 - DNA, 25 bp, Homo sapien
gaacggatcagcgaggccaagtaca

SEQ ID NO: 3931320 - DNA, 25 bp, Homo sapien
acggatcagcgaggccaagtacact

SEQ ID NO: 3931321 - DNA, 25 bp, Homo sapien
cccggttggcaatcttgttgttgat

SEQ ID NO: 3931322 - DNA, 25 bp, Homo sapien
tcttctctgcatcccggttggcaat

SEQ ID NO: 3931323 - DNA, 25 bp, Homo sapien
ctgcatcccggttggcaatcttgtt

SEQ ID NO: 3931324 - DNA, 25 bp, Homo sapien
cttgttgttgatgaggttgtgcagg

SEQ ID NO: 3931325 - DNA, 25 bp, Homo sapien
cctctttctttacatcactcttttc

SEQ ID NO: 3931326 - DNA, 25 bp, Homo sapien
tgaggatgccagagctatgggtcca

SEQ ID NO: 3931327 - DNA, 25 bp, Homo sapien
aaaagaaccctctagcagcacactg

SEQ ID NO: 3931328 - DNA, 25 bp, Homo sapien
tccacgtagcaccacagcaagagtg

SEQ ID NO: 3931329 - DNA, 25 bp, Homo sapien
gagctggatcacaacccctgaggat

SEQ ID NO: 3931330 - DNA, 25 bp, Homo sapien
ttaaggcagctccaatcgaagactg

SEQ ID NO: 3931331 - DNA, 25 bp, Homo sapien
cattttactacaggttgagtgcccc

SEQ ID NO: 3931332 - DNA, 25 bp, Homo sapien
tccacgtagtgcatttgagaggttc

SEQ ID NO: 3931333 - DNA, 25 bp, Homo sapien
gaactctgaaatgacccctgatggg

SEQ ID NO: 3931334 - DNA, 25 bp, Homo sapien
tcaagttccttcaaaattttgcctg

SEQ ID NO: 3931335 - DNA, 25 bp, Homo sapien
ttcaaaattttgcctgggtggcttc

SEQ ID NO: 3931336 - DNA, 25 bp, Homo sapien
tccttcaaaattttgcctgggtggc

SEQ ID NO: 3931337 - DNA, 25 bp, Homo sapien
caaaattttgcctgggtggcttcag

SEQ ID NO: 3931338 - DNA, 25 bp, Homo sapien
caaggaaggcaacagacatagatta

SEQ ID NO: 3931339 - DNA, 25 bp, Homo sapien
gactaatacataagggctcagaagg

SEQ ID NO: 3931340 - DNA, 25 bp, Homo sapien
tagtgagagcgactttagtggaatg

SEQ ID NO: 3931341 - DNA, 25 bp, Homo sapien
gggcaaaagccagattgcagatgat

SEQ ID NO: 3931342 - DNA, 25 bp, Homo sapien
gccatgtaactctggcaatggagta

SEQ ID NO: 3931343 - DNA, 25 bp, Homo sapien
gctcctgtgttctgatggcgtgtag

SEQ ID NO: 3931344 - DNA, 25 bp, Homo sapien
gagagcgtccacgtggtaggaccca

SEQ ID NO: 3931345 - DNA, 25 bp, Homo sapien
gattcatgccactctacatttgagg

SEQ ID NO: 3931346 - DNA, 25 bp, Homo sapien
ctaagaaagatcactgcaaaggcag

SEQ ID NO: 3931347 - DNA, 25 bp, Homo sapien
tgtgacccgaggtacacctaagaaa

SEQ ID NO: 3931348 - DNA, 25 bp, Homo sapien
gaacgtccagggttagaagcatcca

SEQ ID NO: 3931349 - DNA, 25 bp, Homo sapien
cccgtgagccccgatgaagagcttg

SEQ ID NO: 3931350 - DNA, 25 bp, Homo sapien
cactgcgcctgatttgaacgtttgg

SEQ ID NO: 3931351 - DNA, 25 bp, Homo sapien
gactctctgtcattggtccacactg

SEQ ID NO: 3931352 - DNA, 25 bp, Homo sapien
tggtactcacccctaagcatcagct

SEQ ID NO: 3931353 - DNA, 25 bp, Homo sapien
tgacctgaaaggtaagaaggagcca

SEQ ID NO: 3931354 - DNA, 25 bp, Homo sapien
gaatctcataggttaacatgtttac

SEQ ID NO: 3931355 - DNA, 25 bp, Homo sapien
gcctcacagggctgtctcctcagtg

SEQ ID NO: 3931356 - DNA, 25 bp, Homo sapien
ttccaggaatagtcaaccacgccag

SEQ ID NO: 3931357 - DNA, 25 bp, Homo sapien
tttgagaatctcataggttaacatg

SEQ ID NO: 3931358 - DNA, 25 bp, Homo sapien
gagtgcttcttaggtgcttgtacca

SEQ ID NO: 3931359 - DNA, 25 bp, Homo sapien
taggtgtttctagcccgtgttacag

SEQ ID NO: 3931360 - DNA, 25 bp, Homo sapien
agcctgcatgacagacctcgtctca

SEQ ID NO: 3931361 - DNA, 25 bp, Homo sapien
tacagatgaggagttcaaagcctag

SEQ ID NO: 3931362 - DNA, 25 bp, Homo sapien
gcagtccactgtgcgcaacgctgca

SEQ ID NO: 3931363 - DNA, 25 bp, Homo sapien
cagtcttccttgtgaccggcagtcc

SEQ ID NO: 3931364 - DNA, 25 bp, Homo sapien
ccttgtgaccggcagtccactgtgc

SEQ ID NO: 3931365 - DNA, 25 bp, Homo sapien
gtgaccggcagtccactgtgcgcaa

SEQ ID NO: 3931366 - DNA, 25 bp, Homo sapien
cgatgtgtgatacctcggatttgaa

SEQ ID NO: 3931367 - DNA, 25 bp, Homo sapien
gggccgatgtgtgatacctcggatt

SEQ ID NO: 3931368 - DNA, 25 bp, Homo sapien
tgtgatacctcggatttgaatcaag

SEQ ID NO: 3931369 - DNA, 25 bp, Homo sapien
gatacctcggatttgaatcaagaat

SEQ ID NO: 3931370 - DNA, 25 bp, Homo sapien
gggcagtaagcttccttcttaatgt

SEQ ID NO: 3931371 - DNA, 25 bp, Homo sapien
cagggcagtaagcttccttcttaat

SEQ ID NO: 3931372 - DNA, 25 bp, Homo sapien
gacagggcagtaagcttccttctta

SEQ ID NO: 3931373 - DNA, 25 bp, Homo sapien
ctgcagagtccggaggaagaagtca

SEQ ID NO: 3931374 - DNA, 25 bp, Homo sapien
ccagcttgtctagcccggtcctcca

SEQ ID NO: 3931375 - DNA, 25 bp, Homo sapien
ggtccgcttgtgctttcagaactag

SEQ ID NO: 3931376 - DNA, 25 bp, Homo sapien
tttcccgcgttgagacgtgcggtcc

SEQ ID NO: 3931377 - DNA, 25 bp, Homo sapien
cctgcagatggaactgttttcccgc

SEQ ID NO: 3931378 - DNA, 25 bp, Homo sapien
gttgtccgctcgtgccttggcttgt

SEQ ID NO: 3931379 - DNA, 25 bp, Homo sapien
ttggcttgtgtcctcggctacccct

SEQ ID NO: 3931380 - DNA, 25 bp, Homo sapien
tggcctctcgcgaagtcgcgtccgg

SEQ ID NO: 3931381 - DNA, 25 bp, Homo sapien
ttccagtgggttccgcctggcctct

SEQ ID NO: 3931382 - DNA, 25 bp, Homo sapien
tccccgtccgcgcgggcctaagcgc

SEQ ID NO: 3931383 - DNA, 25 bp, Homo sapien
gtaaggagatagcttcggggcaact

SEQ ID NO: 3931384 - DNA, 25 bp, Homo sapien
tgggggccggtgaggtaaggagata

SEQ ID NO: 3931385 - DNA, 25 bp, Homo sapien
tagcttcggggcaactctggcctcc

SEQ ID NO: 3931386 - DNA, 25 bp, Homo sapien
tcatctcagatgttccggttccacg

SEQ ID NO: 3931387 - DNA, 25 bp, Homo sapien
gcgaccgccggcaactgttgtggct

SEQ ID NO: 3931388 - DNA, 25 bp, Homo sapien
cccacggcgatgagaagcgttttcc

SEQ ID NO: 3931389 - DNA, 25 bp, Homo sapien
ctctgtgagagcctcgcccaagaaa

SEQ ID NO: 3931390 - DNA, 25 bp, Homo sapien
tttatctagcacaggagcctatggc

SEQ ID NO: 3931391 - DNA, 25 bp, Homo sapien
tttagacaggtaggtgtccccaagc

SEQ ID NO: 3931392 - DNA, 25 bp, Homo sapien
tgtggcccaagatgcaatggtggct

SEQ ID NO: 3931393 - DNA, 25 bp, Homo sapien
caccagtggaaaagacagtcatcaa

SEQ ID NO: 3931394 - DNA, 25 bp, Homo sapien
cctgtgtggtagcaaacacatttac

SEQ ID NO: 3931395 - DNA, 25 bp, Homo sapien
tgacaagcgtaattaaaacgtctgt

SEQ ID NO: 3931396 - DNA, 25 bp, Homo sapien
ttcacaagaggacttgacaagcgta

SEQ ID NO: 3931397 - DNA, 25 bp, Homo sapien
aaacgtctgtttagggcaggacgtg

SEQ ID NO: 3931398 - DNA, 25 bp, Homo sapien
gataaatcccagcaggagccaaatg

SEQ ID NO: 3931399 - DNA, 25 bp, Homo sapien
taaatcccagcaggagccaaatgag

SEQ ID NO: 3931400 - DNA, 25 bp, Homo sapien
tgaggagccaaaagcgcagccgcat

SEQ ID NO: 3931401 - DNA, 25 bp, Homo sapien
aaatgaggagccaaaagcgcagccg

SEQ ID NO: 3931402 - DNA, 25 bp, Homo sapien
tcctggcaggcgatctgcctgcctc

SEQ ID NO: 3931403 - DNA, 25 bp, Homo sapien
tacaggtctctgccaccatgcccga

SEQ ID NO: 3931404 - DNA, 25 bp, Homo sapien
ggcctctgaaagtactgggattaca

SEQ ID NO: 3931405 - DNA, 25 bp, Homo sapien
tgcccgactcatttttgtattttta

SEQ ID NO: 3931406 - DNA, 25 bp, Homo sapien
cagatatcaccgtgggattccactg

SEQ ID NO: 3931407 - DNA, 25 bp, Homo sapien
cacatccctcagatatcaccgtggg

SEQ ID NO: 3931408 - DNA, 25 bp, Homo sapien
tccctcagatatcaccgtgggattc

SEQ ID NO: 3931409 - DNA, 25 bp, Homo sapien
taaccacatccctcagatatcaccg

SEQ ID NO: 3931410 - DNA, 25 bp, Homo sapien
gaccagaagatagtcttcaggaaag

SEQ ID NO: 3931411 - DNA, 25 bp, Homo sapien
ttcgagaccagaagatagtcttcag

SEQ ID NO: 3931412 - DNA, 25 bp, Homo sapien
ccagaagatagtcttcaggaaagac

SEQ ID NO: 3931413 - DNA, 25 bp, Homo sapien
agaagatagtcttcaggaaagacac

SEQ ID NO: 3931414 - DNA, 25 bp, Homo sapien
ctgcggttggacctccaggctctct

SEQ ID NO: 3931415 - DNA, 25 bp, Homo sapien
tctactgcggttggacctccaggct

SEQ ID NO: 3931416 - DNA, 25 bp, Homo sapien
ctttctgtctactgcggttggacct

SEQ ID NO: 3931417 - DNA, 25 bp, Homo sapien
tgtctactgcggttggacctccagg

SEQ ID NO: 3931418 - DNA, 25 bp, Homo sapien
aggagaaggtgagaaacctgaggtc

SEQ ID NO: 3931419 - DNA, 25 bp, Homo sapien
gaggtcaagaagctgttctttccct

SEQ ID NO: 3931420 - DNA, 25 bp, Homo sapien
aaactcatttccacactatggggac

SEQ ID NO: 3931421 - DNA, 25 bp, Homo sapien
cactatggggactccaacagagcca

SEQ ID NO: 3931422 - DNA, 25 bp, Homo sapien
gtaatgacgtctttcaggccaattt

SEQ ID NO: 3931423 - DNA, 25 bp, Homo sapien
gagtaatgacgtctttcaggccaat

SEQ ID NO: 3931424 - DNA, 25 bp, Homo sapien
tgacgtctttcaggccaattttatt

SEQ ID NO: 3931425 - DNA, 25 bp, Homo sapien
tagagtaatgacgtctttcaggcca

SEQ ID NO: 3931426 - DNA, 25 bp, Homo sapien
ccgaggtatgtggatcatgatgtcc

SEQ ID NO: 3931427 - DNA, 25 bp, Homo sapien
tcatgcatcagaatagaggtggaca

SEQ ID NO: 3931428 - DNA, 25 bp, Homo sapien
tgcagcaagataacatgccactagg

SEQ ID NO: 3931429 - DNA, 25 bp, Homo sapien
cgacgacctcaattgcagcctgtat

SEQ ID NO: 3931430 - DNA, 25 bp, Homo sapien
aaacccaggacgaaagtcagcctcg

SEQ ID NO: 3931431 - DNA, 25 bp, Homo sapien
gaaacccaggacgaaagtcagcctc

SEQ ID NO: 3931432 - DNA, 25 bp, Homo sapien
tactgggtctaaacattgtacagag

SEQ ID NO: 3931433 - DNA, 25 bp, Homo sapien
cattgtacagaggttataaacaaca

SEQ ID NO: 3931434 - DNA, 25 bp, Homo sapien
tgggtctaaacattgtacagaggtt

SEQ ID NO: 3931435 - DNA, 25 bp, Homo sapien
ccagttgcaaagaggctttcttgca

SEQ ID NO: 3931436 - DNA, 25 bp, Homo sapien
caaagaggctttcttgcagaagggg

SEQ ID NO: 3931437 - DNA, 25 bp, Homo sapien
gaggctttcttgcagaaggggggat

SEQ ID NO: 3931438 - DNA, 25 bp, Homo sapien
aagaggctttcttgcagaagggggg

SEQ ID NO: 3931439 - DNA, 25 bp, Homo sapien
ttgtccctgtgggtaataagttaca

SEQ ID NO: 3931440 - DNA, 25 bp, Homo sapien
ggtaataagttacattcactcttca

SEQ ID NO: 3931441 - DNA, 25 bp, Homo sapien
tggaattgtccctgtgggtaataag

SEQ ID NO: 3931442 - DNA, 25 bp, Homo sapien
cctgtgggtaataagttacattcac

SEQ ID NO: 3931443 - DNA, 25 bp, Homo sapien
atggacaaaattaccgccaccaaca

SEQ ID NO: 3931444 - DNA, 25 bp, Homo sapien
tggacaaaattaccgccaccaacac

SEQ ID NO: 3931445 - DNA, 25 bp, Homo sapien
ggaagagggaccaggagatactcct

SEQ ID NO: 3931446 - DNA, 25 bp, Homo sapien
tggaagagggaccaggagatactcc

SEQ ID NO: 3931447 - DNA, 25 bp, Homo sapien
gaagagggaccaggagatactcctt

SEQ ID NO: 3931448 - DNA, 25 bp, Homo sapien
cccttgcgtttgtcattcactctgc

SEQ ID NO: 3931449 - DNA, 25 bp, Homo sapien
tctgcagcctcccttgcgtttgtca

SEQ ID NO: 3931450 - DNA, 25 bp, Homo sapien
gcctcccttgcgtttgtcattcact

SEQ ID NO: 3931451 - DNA, 25 bp, Homo sapien
tgcagcctcccttgcgtttgtcatt

SEQ ID NO: 3931452 - DNA, 25 bp, Homo sapien
agtgagtctggctgtcatttattta

SEQ ID NO: 3931453 - DNA, 25 bp, Homo sapien
ctgggagtcaaacccagtgagtctg

SEQ ID NO: 3931454 - DNA, 25 bp, Homo sapien
gggagtcaaacccagtgagtctggc

SEQ ID NO: 3931455 - DNA, 25 bp, Homo sapien
caaacccagtgagtctggctgtcat

SEQ ID NO: 3931456 - DNA, 25 bp, Homo sapien
tgtcctttgccctggttgaataacc

SEQ ID NO: 3931457 - DNA, 25 bp, Homo sapien
gacgtagttggtttgcaaggctgtc

SEQ ID NO: 3931458 - DNA, 25 bp, Homo sapien
agctcactctggtgggatcacgcca

SEQ ID NO: 3931459 - DNA, 25 bp, Homo sapien
caaactccagaaggaggacgtagtt

SEQ ID NO: 3931460 - DNA, 25 bp, Homo sapien
ccgagcaggctccactaaaaagtct

SEQ ID NO: 3931461 - DNA, 25 bp, Homo sapien
agccaccgagcaggctccactaaaa

SEQ ID NO: 3931462 - DNA, 25 bp, Homo sapien
ccaccgagcaggctccactaaaaag

SEQ ID NO: 3931463 - DNA, 25 bp, Homo sapien
ctggggaaagctgccttgcaagaat

SEQ ID NO: 3931464 - DNA, 25 bp, Homo sapien
tacgcctgtcctggacatgtaattt

SEQ ID NO: 3931465 - DNA, 25 bp, Homo sapien
gtgagtgagctactacgcctgtcct

SEQ ID NO: 3931466 - DNA, 25 bp, Homo sapien
cacaactctcctagagttaaatggt

SEQ ID NO: 3931467 - DNA, 25 bp, Homo sapien
gctactacgcctgtcctggacatgt

SEQ ID NO: 3931468 - DNA, 25 bp, Homo sapien
taagggctgtattcgtttgctagga

SEQ ID NO: 3931469 - DNA, 25 bp, Homo sapien
tcttaacttattgcacaaattgcgc

SEQ ID NO: 3931470 - DNA, 25 bp, Homo sapien
gaaagtctttggtctcactgttaag

SEQ ID NO: 3931471 - DNA, 25 bp, Homo sapien
tagtgggaccggtgacaaaagacat

SEQ ID NO: 3931472 - DNA, 25 bp, Homo sapien
cacagcagcagagtgggccagccag

SEQ ID NO: 3931473 - DNA, 25 bp, Homo sapien
agcacagcagcagagtgggccagcc

SEQ ID NO: 3931474 - DNA, 25 bp, Homo sapien
ggagcacagcagcagagtgggccag

SEQ ID NO: 3931475 - DNA, 25 bp, Homo sapien
tggagcacagcagcagagtgggcca

SEQ ID NO: 3931476 - DNA, 25 bp, Homo sapien
gaagactgggcacaaagctttcctg

SEQ ID NO: 3931477 - DNA, 25 bp, Homo sapien
taacccagacgataggtgcagaggt

SEQ ID NO: 3931478 - DNA, 25 bp, Homo sapien
cagaggttgggtgttcaaactggtc

SEQ ID NO: 3931479 - DNA, 25 bp, Homo sapien
cagttggtccccgtgcagatgggct

SEQ ID NO: 3931480 - DNA, 25 bp, Homo sapien
tgtcatggtttctctcggtgtcccc

SEQ ID NO: 3931481 - DNA, 25 bp, Homo sapien
cagccttattgggttggatggtcag

SEQ ID NO: 3931482 - DNA, 25 bp, Homo sapien
gagaactaagttgcccaaggctggg

SEQ ID NO: 3931483 - DNA, 25 bp, Homo sapien
taacctggtcctatgtgagtcagca

SEQ ID NO: 3931484 - DNA, 25 bp, Homo sapien
gtaattttgagatgttactgagata

SEQ ID NO: 3931485 - DNA, 25 bp, Homo sapien
gttactgagatatgttctgaacata

SEQ ID NO: 3931486 - DNA, 25 bp, Homo sapien
tatgtataaaatcgtggtggtccct

SEQ ID NO: 3931487 - DNA, 25 bp, Homo sapien
cttgtttttacatgttcatgctgtg

SEQ ID NO: 3931488 - DNA, 25 bp, Homo sapien
ggtctttggttgctcatccctctaa

SEQ ID NO: 3931489 - DNA, 25 bp, Homo sapien
tctcaggccttgagggacacttcct

SEQ ID NO: 3931490 - DNA, 25 bp, Homo sapien
gggcagcacctaagtggttttgtaa

SEQ ID NO: 3931491 - DNA, 25 bp, Homo sapien
taagtcattagcaaaccagaccgaa

SEQ ID NO: 3931492 - DNA, 25 bp, Homo sapien
tttacgttttatcaaggcacactgg

SEQ ID NO: 3931493 - DNA, 25 bp, Homo sapien
tagacaagcccgttagcaagaagca

SEQ ID NO: 3931494 - DNA, 25 bp, Homo sapien
tgttagtgcatccttcaaagctagg

SEQ ID NO: 3931495 - DNA, 25 bp, Homo sapien
ttgacttgaacacactgcaggcctt

SEQ ID NO: 3931496 - DNA, 25 bp, Homo sapien
gcagggccccgagcaagtttttcta

SEQ ID NO: 3931497 - DNA, 25 bp, Homo sapien
tagaaaagttagctctgccagtatc

SEQ ID NO: 3931498 - DNA, 25 bp, Homo sapien
agtttttctaagtgccaaggccagc

SEQ ID NO: 3931499 - DNA, 25 bp, Homo sapien
aaagtctgaactggccgcactcatt

SEQ ID NO: 3931500 - DNA, 25 bp, Homo sapien
tcaagagccaggaatgtcatgtaca

SEQ ID NO: 3931501 - DNA, 25 bp, Homo sapien
cgctgaggcctaatatcaagagcca

SEQ ID NO: 3931502 - DNA, 25 bp, Homo sapien
tcctaaaactggaaacgcagggtgc

SEQ ID NO: 3931503 - DNA, 25 bp, Homo sapien
cctgccaagtcaccaagggaagctg

SEQ ID NO: 3931504 - DNA, 25 bp, Homo sapien
tgggagccagaggtttgactcactt

SEQ ID NO: 3931505 - DNA, 25 bp, Homo sapien
gatgtgacaggcagtccagcctgac

SEQ ID NO: 3931506 - DNA, 25 bp, Homo sapien
tacaatacaggtcagagacaatggc

SEQ ID NO: 3931507 - DNA, 25 bp, Homo sapien
caggactcagccatgtctggaccgg

SEQ ID NO: 3931508 - DNA, 25 bp, Homo sapien
cttcctagacaagggcagctgggga

SEQ ID NO: 3931509 - DNA, 25 bp, Homo sapien
gaccggaagtttgtgaagttgaaca

SEQ ID NO: 3931510 - DNA, 25 bp, Homo sapien
tgcactgagaggctggatcctgagt

SEQ ID NO: 3931511 - DNA, 25 bp, Homo sapien
tgtgaagttgaacagtccatccatc

SEQ ID NO: 3931512 - DNA, 25 bp, Homo sapien
agtgtgccatgactgaggtgtctcg

SEQ ID NO: 3931513 - DNA, 25 bp, Homo sapien
tcctccaggcttgatttgggcaatg

SEQ ID NO: 3931514 - DNA, 25 bp, Homo sapien
gagacagtgacgctttccagtttcc

SEQ ID NO: 3931515 - DNA, 25 bp, Homo sapien
tatatagtaacgcatctcctccagg

SEQ ID NO: 3931516 - DNA, 25 bp, Homo sapien
ctctcctcgctgtggctgtccagcc

SEQ ID NO: 3931517 - DNA, 25 bp, Homo sapien
taaaatgatacgacatgacatacgg

SEQ ID NO: 3931518 - DNA, 25 bp, Homo sapien
gtaacacagtaattgtatcacacca

SEQ ID NO: 3931519 - DNA, 25 bp, Homo sapien
ttaagatttcacgttttcatatttc

SEQ ID NO: 3931520 - DNA, 25 bp, Homo sapien
cccagtcccgattgagaattttaat

SEQ ID NO: 3931521 - DNA, 25 bp, Homo sapien
catcagcaggattctcccggtcttt

SEQ ID NO: 3931522 - DNA, 25 bp, Homo sapien
cactggctcaggtggagtaccatca

SEQ ID NO: 3931523 - DNA, 25 bp, Homo sapien
tcgtgtggtgatcactggctcaggt

SEQ ID NO: 3931524 - DNA, 25 bp, Homo sapien
aatttgttcaggtcgtgtggtgatc

SEQ ID NO: 3931525 - DNA, 25 bp, Homo sapien
tgttttaaatttagagcttatcacg

SEQ ID NO: 3931526 - DNA, 25 bp, Homo sapien
aaatttagagcttatcacgtttcat

SEQ ID NO: 3931527 - DNA, 25 bp, Homo sapien
ttaaatttagagcttatcacgtttc

SEQ ID NO: 3931528 - DNA, 25 bp, Homo sapien
tatgttttaaatttagagcttatca

SEQ ID NO: 3931529 - DNA, 25 bp, Homo sapien
ttggtggctgcagggcccaggtccg

SEQ ID NO: 3931530 - DNA, 25 bp, Homo sapien
tggtggctgcagggcccaggtccgg

SEQ ID NO: 3931531 - DNA, 25 bp, Homo sapien
gtggctgcagggcccaggtccgggg

SEQ ID NO: 3931532 - DNA, 25 bp, Homo sapien
cttggtggctgcagggcccaggtcc

SEQ ID NO: 3931533 - DNA, 25 bp, Homo sapien
ttctgccaggtctgggtacttagga

SEQ ID NO: 3931534 - DNA, 25 bp, Homo sapien
tgggtacttaggaaggtggacatcc

SEQ ID NO: 3931535 - DNA, 25 bp, Homo sapien
caggtctgggtacttaggaaggtgg

SEQ ID NO: 3931536 - DNA, 25 bp, Homo sapien
cttctgccaggtctgggtacttagg

SEQ ID NO: 3931537 - DNA, 25 bp, Homo sapien
tgctgcaggatcctggcttgctgcc

SEQ ID NO: 3931538 - DNA, 25 bp, Homo sapien
ttgctgcctgttggccccgatcctg

SEQ ID NO: 3931539 - DNA, 25 bp, Homo sapien
cttgctgcctgttggccccgatcct

SEQ ID NO: 3931540 - DNA, 25 bp, Homo sapien
gcttgctgcctgttggccccgatcc

SEQ ID NO: 3931541 - DNA, 25 bp, Homo sapien
ccaaaagtttcactgggtatgtggg

SEQ ID NO: 3931542 - DNA, 25 bp, Homo sapien
aatacctggtagtttgctggtacca

SEQ ID NO: 3931543 - DNA, 25 bp, Homo sapien
gaagtcaggtgtgtgtacaaaagca

SEQ ID NO: 3931544 - DNA, 25 bp, Homo sapien
gctggtaccagtagagagacaaata

SEQ ID NO: 3931545 - DNA, 25 bp, Homo sapien
caaagtttattagacagctggagaa

SEQ ID NO: 3931546 - DNA, 25 bp, Homo sapien
taatagaggtgagatttcaccatct

SEQ ID NO: 3931547 - DNA, 25 bp, Homo sapien
gtgagatttcaccatcttgagcagg

SEQ ID NO: 3931548 - DNA, 25 bp, Homo sapien
agaggtgagatttcaccatcttgag

SEQ ID NO: 3931549 - DNA, 25 bp, Homo sapien
ggtgagatttcaccatcttgagcag

SEQ ID NO: 3931550 - DNA, 25 bp, Homo sapien
agtctttaatagttggtgtggagtt

SEQ ID NO: 3931551 - DNA, 25 bp, Homo sapien
tttatagaaattcacggaatttgtc

SEQ ID NO: 3931552 - DNA, 25 bp, Homo sapien
tgtatgtatgacaccacagacttaa

SEQ ID NO: 3931553 - DNA, 25 bp, Homo sapien
taaaatggtctatgatccatccaaa

SEQ ID NO: 3931554 - DNA, 25 bp, Homo sapien
cactggctccatacacatcttgctg

SEQ ID NO: 3931555 - DNA, 25 bp, Homo sapien
cccgcaaataaatagtgtagtggtg

SEQ ID NO: 3931556 - DNA, 25 bp, Homo sapien
tgcttgcctctgcttcgcactggct

SEQ ID NO: 3931557 - DNA, 25 bp, Homo sapien
ttgctgccccacacccgcaaataaa

SEQ ID NO: 3931558 - DNA, 25 bp, Homo sapien
ttaaatacgcggcgccggcgagtgc

SEQ ID NO: 3931559 - DNA, 25 bp, Homo sapien
agctcgccgcggactcaagatggcg

SEQ ID NO: 3931560 - DNA, 25 bp, Homo sapien
tacggaggatgttccgcttgtcggc

SEQ ID NO: 3931561 - DNA, 25 bp, Homo sapien
aagatggcggcgtgtggacgtgtac

SEQ ID NO: 3931562 - DNA, 25 bp, Homo sapien
tcccctagtgtcagagatcaggaga

SEQ ID NO: 3931563 - DNA, 25 bp, Homo sapien
cattgctttgcgaaaggtaaggaaa

SEQ ID NO: 3931564 - DNA, 25 bp, Homo sapien
gaagaacttgtctcccattttgaga

SEQ ID NO: 3931565 - DNA, 25 bp, Homo sapien
gaacactatctcttgccaggaaaag

SEQ ID NO: 3931566 - DNA, 25 bp, Homo sapien
tgcgcccagccgaccttagctctgt

SEQ ID NO: 3931567 - DNA, 25 bp, Homo sapien
gcgcccagccgaccttagctctgtt

SEQ ID NO: 3931568 - DNA, 25 bp, Homo sapien
cgcccagccgaccttagctctgttt

SEQ ID NO: 3931569 - DNA, 25 bp, Homo sapien
ctgcgcccagccgaccttagctctg

SEQ ID NO: 3931570 - DNA, 25 bp, Homo sapien
caaggcccataggccctttaataat

SEQ ID NO: 3931571 - DNA, 25 bp, Homo sapien
taggccctttaataatggtgtcctg

SEQ ID NO: 3931572 - DNA, 25 bp, Homo sapien
cataggccctttaataatggtgtcc

SEQ ID NO: 3931573 - DNA, 25 bp, Homo sapien
gcccataggccctttaataatggtg

SEQ ID NO: 3931574 - DNA, 25 bp, Homo sapien
tcggggcggcgccagtggtcggggc

SEQ ID NO: 3931575 - DNA, 25 bp, Homo sapien
cagtggtcggggctaaggagcccga

SEQ ID NO: 3931576 - DNA, 25 bp, Homo sapien
gaacccccgcgcgtatctgggttgc

SEQ ID NO: 3931577 - DNA, 25 bp, Homo sapien
gcgtatctgggttgctgggcgtggg

SEQ ID NO: 3931578 - DNA, 25 bp, Homo sapien
ctggattgggattcaggagacaccc

SEQ ID NO: 3931579 - DNA, 25 bp, Homo sapien
gattgggattcaggagacaccccac

SEQ ID NO: 3931580 - DNA, 25 bp, Homo sapien
tgggattcaggagacaccccacgag

SEQ ID NO: 3931581 - DNA, 25 bp, Homo sapien
tgcacgcgggcttggaacccggcgg

SEQ ID NO: 3931582 - DNA, 25 bp, Homo sapien
ggtgttgcttctcctcaggccttgg

SEQ ID NO: 3931583 - DNA, 25 bp, Homo sapien
taactaccgagtcttcggcgggctc

SEQ ID NO: 3931584 - DNA, 25 bp, Homo sapien
tctgtccaataggagcatgcctgcc

SEQ ID NO: 3931585 - DNA, 25 bp, Homo sapien
ccttgggcctctagcttcgggataa

SEQ ID NO: 3931586 - DNA, 25 bp, Homo sapien
gccgagacggctgtgggctcgcgct

SEQ ID NO: 3931587 - DNA, 25 bp, Homo sapien
cccctttcttttggcgctggcggcg

SEQ ID NO: 3931588 - DNA, 25 bp, Homo sapien
ggctcgcgctcctcgtacgtagctg

SEQ ID NO: 3931589 - DNA, 25 bp, Homo sapien
tcgtacgtagctggagaattccggg

SEQ ID NO: 3931590 - DNA, 25 bp, Homo sapien
tgtttagcggttctctcttctcaaa

SEQ ID NO: 3931591 - DNA, 25 bp, Homo sapien
ctgtttagcggttctctcttctcaa

SEQ ID NO: 3931592 - DNA, 25 bp, Homo sapien
caattaaggattcgttgtttgaagc

SEQ ID NO: 3931593 - DNA, 25 bp, Homo sapien
tattctgaagcgtgcacccttttgc

SEQ ID NO: 3931594 - DNA, 25 bp, Homo sapien
tgagggttactggagtctttactcc

SEQ ID NO: 3931595 - DNA, 25 bp, Homo sapien
tatacgaaaatattctgaagcgtgc

SEQ ID NO: 3931596 - DNA, 25 bp, Homo sapien
ctgagttctaatggccggcctgcag

SEQ ID NO: 3931597 - DNA, 25 bp, Homo sapien
actgagttctaatggccggcctgca

SEQ ID NO: 3931598 - DNA, 25 bp, Homo sapien
aaaatacaagaccaagttgaatgtg

SEQ ID NO: 3931599 - DNA, 25 bp, Homo sapien
ttcagttgggttttctagagtcatc

SEQ ID NO: 3931600 - DNA, 25 bp, Homo sapien
tcttggagtcaaaaagcgtacacga

SEQ ID NO: 3931601 - DNA, 25 bp, Homo sapien
gaatgttcttcaacacagttactaa

SEQ ID NO: 3931602 - DNA, 25 bp, Homo sapien
catcttccacggtctagctccggtt

SEQ ID NO: 3931603 - DNA, 25 bp, Homo sapien
ccggtttccacgacagttctgtgct

SEQ ID NO: 3931604 - DNA, 25 bp, Homo sapien
tgtaaacacatcttccacggtctag

SEQ ID NO: 3931605 - DNA, 25 bp, Homo sapien
cacggtctagctccggtttccacga

SEQ ID NO: 3931606 - DNA, 25 bp, Homo sapien
ataaccgtgctgtcgcccatgcagg

SEQ ID NO: 3931607 - DNA, 25 bp, Homo sapien
gcacaaggtgctttggccgaatcca

SEQ ID NO: 3931608 - DNA, 25 bp, Homo sapien
tcattccagagcagtttcgggcata

SEQ ID NO: 3931609 - DNA, 25 bp, Homo sapien
cgttggtcgggtctttgaatcacca

SEQ ID NO: 3931610 - DNA, 25 bp, Homo sapien
ctaaggcagggaccgagcaggctgg

SEQ ID NO: 3931611 - DNA, 25 bp, Homo sapien
tccccctgccgtgctgctgtgggcc

SEQ ID NO: 3931612 - DNA, 25 bp, Homo sapien
tttccccctgccgtgctgctgtggg

SEQ ID NO: 3931613 - DNA, 25 bp, Homo sapien
tctctaaggcagggaccgagcaggc

SEQ ID NO: 3931614 - DNA, 25 bp, Homo sapien
aggaaagcgtcctatgccacctggc

SEQ ID NO: 3931615 - DNA, 25 bp, Homo sapien
ccaggaaagcgtcctatgccacctg

SEQ ID NO: 3931616 - DNA, 25 bp, Homo sapien
ttccccaggaaagcgtcctatgcca

SEQ ID NO: 3931617 - DNA, 25 bp, Homo sapien
ccttccccaggaaagcgtcctatgc

SEQ ID NO: 3931618 - DNA, 25 bp, Homo sapien
gctgtgaggaatcacagccgttgtg

SEQ ID NO: 3931619 - DNA, 25 bp, Homo sapien
caggtgatccggaaccacctctgtg

SEQ ID NO: 3931620 - DNA, 25 bp, Homo sapien
ttcagcttgtcccagttagaccgcg

SEQ ID NO: 3931621 - DNA, 25 bp, Homo sapien
ggtgacgggagggtcatagggctca

SEQ ID NO: 3931622 - DNA, 25 bp, Homo sapien
ctctggcatttttgctccctatcca

SEQ ID NO: 3931623 - DNA, 25 bp, Homo sapien
cagccctaagggcagaggtcatgcc

SEQ ID NO: 3931624 - DNA, 25 bp, Homo sapien
aggctcccttcgctcgtcttcagcc

SEQ ID NO: 3931625 - DNA, 25 bp, Homo sapien
cctatccactctccgctgcctgaat

SEQ ID NO: 3931626 - DNA, 25 bp, Homo sapien
ttgccacttcgccatgtccttttcg

SEQ ID NO: 3931627 - DNA, 25 bp, Homo sapien
atgtccttttcggagccctcccttg

SEQ ID NO: 3931628 - DNA, 25 bp, Homo sapien
ttcgccatgtccttttcggagccct

SEQ ID NO: 3931629 - DNA, 25 bp, Homo sapien
tctttttgccacttcgccatgtcct

SEQ ID NO: 3931630 - DNA, 25 bp, Homo sapien
ctccacatccctccctgtttctaga

SEQ ID NO: 3931631 - DNA, 25 bp, Homo sapien
cctgtttctagaacacagccaggtg

SEQ ID NO: 3931632 - DNA, 25 bp, Homo sapien
atccctccctgtttctagaacacag

SEQ ID NO: 3931633 - DNA, 25 bp, Homo sapien
ttctagaacacagccaggtgaggtg

SEQ ID NO: 3931634 - DNA, 25 bp, Homo sapien
tggctttacctccaagctcagtact

SEQ ID NO: 3931635 - DNA, 25 bp, Homo sapien
cttgctggtgttaactcttctggct

SEQ ID NO: 3931636 - DNA, 25 bp, Homo sapien
gggcttgctggtgttaactcttctg

SEQ ID NO: 3931637 - DNA, 25 bp, Homo sapien
cagtactgtgattgctgccaaagac

SEQ ID NO: 3931638 - DNA, 25 bp, Homo sapien
gaacaaatgtggcagccatcagggt

SEQ ID NO: 3931639 - DNA, 25 bp, Homo sapien
aacaaatgtggcagccatcagggtg

SEQ ID NO: 3931640 - DNA, 25 bp, Homo sapien
tgcctgcagtcttaggataagcctc

SEQ ID NO: 3931641 - DNA, 25 bp, Homo sapien
cctgcagtcttaggataagcctctt

SEQ ID NO: 3931642 - DNA, 25 bp, Homo sapien
tgcagtcttaggataagcctctttt

SEQ ID NO: 3931643 - DNA, 25 bp, Homo sapien
ttggcatcaagaggccagtgccttg

SEQ ID NO: 3931644 - DNA, 25 bp, Homo sapien
ccatgtggaagcgacattggccagt

SEQ ID NO: 3931645 - DNA, 25 bp, Homo sapien
ccattttgaccagggcacaaggtag

SEQ ID NO: 3931646 - DNA, 25 bp, Homo sapien
gaacgagcctgtagcccttgaggaa

SEQ ID NO: 3931647 - DNA, 25 bp, Homo sapien
tgagtccagcaggagacagcgctga

SEQ ID NO: 3931648 - DNA, 25 bp, Homo sapien
tccaaagtacccagcgtccttgatc

SEQ ID NO: 3931649 - DNA, 25 bp, Homo sapien
tttccaaagtacccagcgtccttga

SEQ ID NO: 3931650 - DNA, 25 bp, Homo sapien
ttccaaagtacccagcgtccttgat

SEQ ID NO: 3931651 - DNA, 25 bp, Homo sapien
tgtacaagtcatgacagtagcctct

SEQ ID NO: 3931652 - DNA, 25 bp, Homo sapien
gcctcttggccgccggccaatgccc

SEQ ID NO: 3931653 - DNA, 25 bp, Homo sapien
ttggccgccggccaatgcccagctt

SEQ ID NO: 3931654 - DNA, 25 bp, Homo sapien
tcaggttctcttgggtccgtttgga

SEQ ID NO: 3931655 - DNA, 25 bp, Homo sapien
tactgacaccgcgtgacgctggctc

SEQ ID NO: 3931656 - DNA, 25 bp, Homo sapien
ctaggagtattcctgctactgacac

SEQ ID NO: 3931657 - DNA, 25 bp, Homo sapien
accgcgtgacgctggctctggtttt

SEQ ID NO: 3931658 - DNA, 25 bp, Homo sapien
tattcctgctactgacaccgcgtga

SEQ ID NO: 3931659 - DNA, 25 bp, Homo sapien
ttctctccaagtagacgtgggctat

SEQ ID NO: 3931660 - DNA, 25 bp, Homo sapien
gccattgcttgtgcccatccttttc

SEQ ID NO: 3931661 - DNA, 25 bp, Homo sapien
accttggccattgcttgtgcccatc

SEQ ID NO: 3931662 - DNA, 25 bp, Homo sapien
ctccccacgcatcggtggcctctcc

SEQ ID NO: 3931663 - DNA, 25 bp, Homo sapien
attgcccggcacgtccagtggctct

SEQ ID NO: 3931664 - DNA, 25 bp, Homo sapien
cgtccagtggctcttggctgggaat

SEQ ID NO: 3931665 - DNA, 25 bp, Homo sapien
cggcacgtccagtggctcttggctg

SEQ ID NO: 3931666 - DNA, 25 bp, Homo sapien
ctgggaatgagcagtgcctgctgac

SEQ ID NO: 3931667 - DNA, 25 bp, Homo sapien
tatattcatatgtgttggttcggcc

SEQ ID NO: 3931668 - DNA, 25 bp, Homo sapien
ccctgttctgggaattgacagagag

SEQ ID NO: 3931669 - DNA, 25 bp, Homo sapien
tgccccatgaagctatatagcccag

SEQ ID NO: 3931670 - DNA, 25 bp, Homo sapien
gcttgcctgggagtttcaaactggc

SEQ ID NO: 3931671 - DNA, 25 bp, Homo sapien
cctcggttgtcccctcttctggttg

SEQ ID NO: 3931672 - DNA, 25 bp, Homo sapien
tgaatgcctgtcctatttgaatgcc

SEQ ID NO: 3931673 - DNA, 25 bp, Homo sapien
gagcctggtttctgccgcgtcctca

SEQ ID NO: 3931674 - DNA, 25 bp, Homo sapien
ggcaaggctgtgctgactgaaagag

SEQ ID NO: 3931675 - DNA, 25 bp, Homo sapien
tttcctcttgctcccgtgaatacca

SEQ ID NO: 3931676 - DNA, 25 bp, Homo sapien
tgcagggcccatcgccttgcaatga

SEQ ID NO: 3931677 - DNA, 25 bp, Homo sapien
ccgtgaataccaggacggtggcctg

SEQ ID NO: 3931678 - DNA, 25 bp, Homo sapien
tcttgctcccgtgaataccaggacg

SEQ ID NO: 3931679 - DNA, 25 bp, Homo sapien
tgatgctgctcattggagttgaaac

SEQ ID NO: 3931680 - DNA, 25 bp, Homo sapien
caggattttgtaaggaaagacccag

SEQ ID NO: 3931681 - DNA, 25 bp, Homo sapien
tcagtcttgagagactacggtccag

SEQ ID NO: 3931682 - DNA, 25 bp, Homo sapien
tcagcaagtctgcaaaaggacatgt

SEQ ID NO: 3931683 - DNA, 25 bp, Homo sapien
aaggagcaggtagctgcagcttgtc

SEQ ID NO: 3931684 - DNA, 25 bp, Homo sapien
tggaactcagcattcaggtgggtcc

SEQ ID NO: 3931685 - DNA, 25 bp, Homo sapien
tcaggtgggtcctgcttattcttcc

SEQ ID NO: 3931686 - DNA, 25 bp, Homo sapien
gcaggccagattccacgtgtgcgtg

SEQ ID NO: 3931687 - DNA, 25 bp, Homo sapien
ggtgaaatagggcaggcgaggccct

SEQ ID NO: 3931688 - DNA, 25 bp, Homo sapien
cagacagtatcccataggcagacag

SEQ ID NO: 3931689 - DNA, 25 bp, Homo sapien
gcaagtcctgtccaggtgaaatagg

SEQ ID NO: 3931690 - DNA, 25 bp, Homo sapien
ttctcctgtccaagatgcaagtcct

SEQ ID NO: 3931691 - DNA, 25 bp, Homo sapien
gtcgcagtctcttgggcaggtcttc

SEQ ID NO: 3931692 - DNA, 25 bp, Homo sapien
tattgtcgcagtctcttgggcaggt

SEQ ID NO: 3931693 - DNA, 25 bp, Homo sapien
ccccattgtctctgaacctttctga

SEQ ID NO: 3931694 - DNA, 25 bp, Homo sapien
ctgttccccattgtctctgaacctt

SEQ ID NO: 3931695 - DNA, 25 bp, Homo sapien
ttgtttgagccaacatgctgcctgc

SEQ ID NO: 3931696 - DNA, 25 bp, Homo sapien
agctgcccaccttgagcgagtgaca

SEQ ID NO: 3931697 - DNA, 25 bp, Homo sapien
gccaagctgcccaccttgagcgagt

SEQ ID NO: 3931698 - DNA, 25 bp, Homo sapien
aacaagtccaacttgtttgagccaa

SEQ ID NO: 3931699 - DNA, 25 bp, Homo sapien
cctgtcctgctggtttagcccttgg

SEQ ID NO: 3931700 - DNA, 25 bp, Homo sapien
ctgacacccttgtggttagagcccc

SEQ ID NO: 3931701 - DNA, 25 bp, Homo sapien
ggctcgtttctgaatggtgcccctc

SEQ ID NO: 3931702 - DNA, 25 bp, Homo sapien
taagcccttctagcaagcctcaagc

SEQ ID NO: 3931703 - DNA, 25 bp, Homo sapien
tgtgcagatgggactgccacttggc

SEQ ID NO: 3931704 - DNA, 25 bp, Homo sapien
tatagcagtgtttggctgtgcagat

SEQ ID NO: 3931705 - DNA, 25 bp, Homo sapien
ccagcaagtgggtagatgtcacaaa

SEQ ID NO: 3931706 - DNA, 25 bp, Homo sapien
aaagatgggatgtgggccctgatcc

SEQ ID NO: 3931707 - DNA, 25 bp, Homo sapien
ccaggtgcagagtttaagggtattc

SEQ ID NO: 3931708 - DNA, 25 bp, Homo sapien
taaactgtgagttgcggttgcctct

SEQ ID NO: 3931709 - DNA, 25 bp, Homo sapien
ggttcttaagagacacctgctaaag

SEQ ID NO: 3931710 - DNA, 25 bp, Homo sapien
gaaaaaggttaacaatcatgcaaat

SEQ ID NO: 3931711 - DNA, 25 bp, Homo sapien
ggtcacaggcaaacatcgtatccac

SEQ ID NO: 3931712 - DNA, 25 bp, Homo sapien
tcacaagtctccttgcgtctaacag

SEQ ID NO: 3931713 - DNA, 25 bp, Homo sapien
tccttgcgtctaacagccttctgga

SEQ ID NO: 3931714 - DNA, 25 bp, Homo sapien
tgtgtccacactgtcaggtcttcgg

SEQ ID NO: 3931715 - DNA, 25 bp, Homo sapien
aagtgtctcccctccgcacactaac

SEQ ID NO: 3931716 - DNA, 25 bp, Homo sapien
cagaagttccctcagggatataagg

SEQ ID NO: 3931717 - DNA, 25 bp, Homo sapien
agtcctcttgaaacacatgctgtct

SEQ ID NO: 3931718 - DNA, 25 bp, Homo sapien
ggatataagggcacctctgcccgca

SEQ ID NO: 3931719 - DNA, 25 bp, Homo sapien
ttggtgtgcacgtcacaaccccttg

SEQ ID NO: 3931720 - DNA, 25 bp, Homo sapien
ggtatataccgccttcttggtccac

SEQ ID NO: 3931721 - DNA, 25 bp, Homo sapien
ccctggtactctcaagttatgtagc

SEQ ID NO: 3931722 - DNA, 25 bp, Homo sapien
cctcaggaacacacgattttcggtg

SEQ ID NO: 3931723 - DNA, 25 bp, Homo sapien
cactccacaagttgtcttgagtcta

SEQ ID NO: 3931724 - DNA, 25 bp, Homo sapien
tgttttctgcggcttgaggccaaga

SEQ ID NO: 3931725 - DNA, 25 bp, Homo sapien
ggccaagagttatgactaacatagt

SEQ ID NO: 3931726 - DNA, 25 bp, Homo sapien
gatcattttccaagcccttgacgcc

SEQ ID NO: 3931727 - DNA, 25 bp, Homo sapien
aatagtggttatcttcctgttccct

SEQ ID NO: 3931728 - DNA, 25 bp, Homo sapien
tgtggtggcattggtagtagcatcc

SEQ ID NO: 3931729 - DNA, 25 bp, Homo sapien
ctgtggtggcattggtagtagcatc

SEQ ID NO: 3931730 - DNA, 25 bp, Homo sapien
gtggcattggtagtagcatcctgac

SEQ ID NO: 3931731 - DNA, 25 bp, Homo sapien
tggtggcattggtagtagcatcctg

SEQ ID NO: 3931732 - DNA, 25 bp, Homo sapien
tgaagtatgaaaggataagaaacac

SEQ ID NO: 3931733 - DNA, 25 bp, Homo sapien
ctttccctgtctcaagtgaccaggg

SEQ ID NO: 3931734 - DNA, 25 bp, Homo sapien
gggtcctggcttggccaatcacttt

SEQ ID NO: 3931735 - DNA, 25 bp, Homo sapien
gaacaagtggcacaaagacaaacag

SEQ ID NO: 3931736 - DNA, 25 bp, Homo sapien
tcaaggcaggagacgagctggcaca

SEQ ID NO: 3931737 - DNA, 25 bp, Homo sapien
ggcagctctggccacgcttcacttt

SEQ ID NO: 3931738 - DNA, 25 bp, Homo sapien
aggcagctctggccacgcttcactt

SEQ ID NO: 3931739 - DNA, 25 bp, Homo sapien
cgcaaaggactcaaggcaggagacg

SEQ ID NO: 3931740 - DNA, 25 bp, Homo sapien
cagagttggggagcacaaaccggtt

SEQ ID NO: 3931741 - DNA, 25 bp, Homo sapien
tcacccgtgcaaatgtcagtaaggg

SEQ ID NO: 3931742 - DNA, 25 bp, Homo sapien
agcacaaaccggttgctggaagcgc

SEQ ID NO: 3931743 - DNA, 25 bp, Homo sapien
gtaggccgcggtcacccgtgcaaat

SEQ ID NO: 3931744 - DNA, 25 bp, Homo sapien
catcagtgtcaacaagctggccgtg

SEQ ID NO: 3931745 - DNA, 25 bp, Homo sapien
tgtcaacaagctggccgtgggaaat

SEQ ID NO: 3931746 - DNA, 25 bp, Homo sapien
ggtatcacgtgagccatcagtgtca

SEQ ID NO: 3931747 - DNA, 25 bp, Homo sapien
taaagaaggaggtatcacgtgagcc

SEQ ID NO: 3931748 - DNA, 25 bp, Homo sapien
gaggcaccgcccgatgcatcgtcat

SEQ ID NO: 3931749 - DNA, 25 bp, Homo sapien
tcatgggccttgtgaaatacaccag

SEQ ID NO: 3931750 - DNA, 25 bp, Homo sapien
cgatgcatcgtcatgggccttgtga

SEQ ID NO: 3931751 - DNA, 25 bp, Homo sapien
ggccttgtgaaatacaccaggtaac

SEQ ID NO: 3931752 - DNA, 25 bp, Homo sapien
taaaacgcattgtccaaagacagac

SEQ ID NO: 3931753 - DNA, 25 bp, Homo sapien
acgcattgtccaaagacagactgtg

SEQ ID NO: 3931754 - DNA, 25 bp, Homo sapien
ctaaaacgcattgtccaaagacaga

SEQ ID NO: 3931755 - DNA, 25 bp, Homo sapien
aaacgcattgtccaaagacagactg

SEQ ID NO: 3931756 - DNA, 25 bp, Homo sapien
tgcttttcctataccaatcggctgc

SEQ ID NO: 3931757 - DNA, 25 bp, Homo sapien
gtttaagtgcttgccagtcagctcg

SEQ ID NO: 3931758 - DNA, 25 bp, Homo sapien
ccaccagcaaggtttaagtgcttgc

SEQ ID NO: 3931759 - DNA, 25 bp, Homo sapien
tgtagtgaggccttgggccgcccac

SEQ ID NO: 3931760 - DNA, 25 bp, Homo sapien
aataaccttaatgagcctctttggc

SEQ ID NO: 3931761 - DNA, 25 bp, Homo sapien
taaccttaatgagcctctttggctg

SEQ ID NO: 3931762 - DNA, 25 bp, Homo sapien
gaaataaccttaatgagcctctttg

SEQ ID NO: 3931763 - DNA, 25 bp, Homo sapien
tagggaaataaccttaatgagcctc

SEQ ID NO: 3931764 - DNA, 25 bp, Homo sapien
cggctgcaagagctcggagtgtaat

SEQ ID NO: 3931765 - DNA, 25 bp, Homo sapien
cccttgggtgcttccggattgaaag

SEQ ID NO: 3931766 - DNA, 25 bp, Homo sapien
cctgaattgccattcgggagagcat

SEQ ID NO: 3931767 - DNA, 25 bp, Homo sapien
gaaatcccgtaagagacggctgcaa

SEQ ID NO: 3931768 - DNA, 25 bp, Homo sapien
gccagtgcagagaccagagtcagat

SEQ ID NO: 3931769 - DNA, 25 bp, Homo sapien
caaatggacctatggcatcatggct

SEQ ID NO: 3931770 - DNA, 25 bp, Homo sapien
cgagcagcgttctcttgatgccagt

SEQ ID NO: 3931771 - DNA, 25 bp, Homo sapien
ttagccttaaaccaccgagcagcgt

SEQ ID NO: 3931772 - DNA, 25 bp, Homo sapien
gcaaaacctatcctgtcgtcctgtg

SEQ ID NO: 3931773 - DNA, 25 bp, Homo sapien
tccatagaggtagagatctgctcac

SEQ ID NO: 3931774 - DNA, 25 bp, Homo sapien
tactttgtgcaaggctgggattccc

SEQ ID NO: 3931775 - DNA, 25 bp, Homo sapien
tcattagtttgtccgttaggaccca

SEQ ID NO: 3931776 - DNA, 25 bp, Homo sapien
ggaaatgacttagcccacgctggat

SEQ ID NO: 3931777 - DNA, 25 bp, Homo sapien
catgttgaacagaccacgttctggg

SEQ ID NO: 3931778 - DNA, 25 bp, Homo sapien
tgagaaactgacaatgggacttccc

SEQ ID NO: 3931779 - DNA, 25 bp, Homo sapien
caacactggcggctggaacataggt

SEQ ID NO: 3931780 - DNA, 25 bp, Homo sapien
tataaatgacatgtgtgggaatccc

SEQ ID NO: 3931781 - DNA, 25 bp, Homo sapien
tattggctcgctcagatgtcaggtt

SEQ ID NO: 3931782 - DNA, 25 bp, Homo sapien
gattgcctgctagcatgctgtggcg

SEQ ID NO: 3931783 - DNA, 25 bp, Homo sapien
tagccagaggctttgagatgcgttc

SEQ ID NO: 3931784 - DNA, 25 bp, Homo sapien
cgtttccttgtcactaacacaggga

SEQ ID NO: 3931785 - DNA, 25 bp, Homo sapien
ggagagaaacgctcctgacttcaag

SEQ ID NO: 3931786 - DNA, 25 bp, Homo sapien
gggatgataaggtttactctactta

SEQ ID NO: 3931787 - DNA, 25 bp, Homo sapien
cctgggacacgtgttcgtgcttccg

SEQ ID NO: 3931788 - DNA, 25 bp, Homo sapien
tcccggtactgtgcgctgtgcaaat

SEQ ID NO: 3931789 - DNA, 25 bp, Homo sapien
tgtgcaaatgctctccttaactaat

SEQ ID NO: 3931790 - DNA, 25 bp, Homo sapien
tgtctctacccgaggcccaagaata

SEQ ID NO: 3931791 - DNA, 25 bp, Homo sapien
gcgttggtccatacaagcaattaac

SEQ ID NO: 3931792 - DNA, 25 bp, Homo sapien
catggaaatacctatctgagtggac

SEQ ID NO: 3931793 - DNA, 25 bp, Homo sapien
cagttcgattgcagtagaatgtcca

SEQ ID NO: 3931794 - DNA, 25 bp, Homo sapien
cacttggctagtacagacctccttg

SEQ ID NO: 3931795 - DNA, 25 bp, Homo sapien
tgactaaaatgagtggcagcaactg

SEQ ID NO: 3931796 - DNA, 25 bp, Homo sapien
ggactgaggtcacatactgccaagg

SEQ ID NO: 3931797 - DNA, 25 bp, Homo sapien
tatgcctcctgtcttaagtagccct

SEQ ID NO: 3931798 - DNA, 25 bp, Homo sapien
cagtggccacggctgacatagctga

SEQ ID NO: 3931799 - DNA, 25 bp, Homo sapien
cttatcagtgtggtgccagtggcca

SEQ ID NO: 3931800 - DNA, 25 bp, Homo sapien
tgttgagtatcttattggccacgta

SEQ ID NO: 3931801 - DNA, 25 bp, Homo sapien
tatcttattggccacgtatatgtca

SEQ ID NO: 3931802 - DNA, 25 bp, Homo sapien
tattggccacgtatatgtcattttt

SEQ ID NO: 3931803 - DNA, 25 bp, Homo sapien
ttatattcccccagtgactaaggat

SEQ ID NO: 3931804 - DNA, 25 bp, Homo sapien
ccttggcctcatttcatattctctc

SEQ ID NO: 3931805 - DNA, 25 bp, Homo sapien
caacatgatcttgaatctttatatt

SEQ ID NO: 3931806 - DNA, 25 bp, Homo sapien
gagtgtattcgctgatgtgatctcg

SEQ ID NO: 3931807 - DNA, 25 bp, Homo sapien
tgcccggcttattctcccaaagtcc

SEQ ID NO: 3931808 - DNA, 25 bp, Homo sapien
ctggagtgccgtgattttgaatcag

SEQ ID NO: 3931809 - DNA, 25 bp, Homo sapien
gtgccgtgattttgaatcagtgcaa

SEQ ID NO: 3931810 - DNA, 25 bp, Homo sapien
tagttggaaatgcaggcacacacca

SEQ ID NO: 3931811 - DNA, 25 bp, Homo sapien
cttaagtagttggaaatgcaggcac

SEQ ID NO: 3931812 - DNA, 25 bp, Homo sapien
gaaagctgctataagtagataagta

SEQ ID NO: 3931813 - DNA, 25 bp, Homo sapien
tagataagtatcaaggccaattttt

SEQ ID NO: 3931814 - DNA, 25 bp, Homo sapien
tatagactgcaatttgtgtattcat

SEQ ID NO: 3931815 - DNA, 25 bp, Homo sapien
gtgttccagtatatagactgcaatt

SEQ ID NO: 3931816 - DNA, 25 bp, Homo sapien
ggttgtagagttccgtgactcccag

SEQ ID NO: 3931817 - DNA, 25 bp, Homo sapien
caaaccaagtgacggaagtgagcga

SEQ ID NO: 3931818 - DNA, 25 bp, Homo sapien
cgcggtgtagcaattggaggaccca

SEQ ID NO: 3931819 - DNA, 25 bp, Homo sapien
cggagcctatgcttgggtcaaccaa

SEQ ID NO: 3931820 - DNA, 25 bp, Homo sapien
ctcaaggtccaaagaggcgcagtcc

SEQ ID NO: 3931821 - DNA, 25 bp, Homo sapien
tcaggacgccgcgaccatggacggc

SEQ ID NO: 3931822 - DNA, 25 bp, Homo sapien
tcagaatttcaaacgatccaaggca

SEQ ID NO: 3931823 - DNA, 25 bp, Homo sapien
aaggcaaacgcatgtttcccctcaa

SEQ ID NO: 3931824 - DNA, 25 bp, Homo sapien
cgcccgtccggtagtgcccgaaatg

SEQ ID NO: 3931825 - DNA, 25 bp, Homo sapien
ggcggcacggcgctgtcatcggtgg

SEQ ID NO: 3931826 - DNA, 25 bp, Homo sapien
cggcgctgtcatcggtggagacccc

SEQ ID NO: 3931827 - DNA, 25 bp, Homo sapien
tagtgcccgaaatggggcgcccctc

SEQ ID NO: 3931828 - DNA, 25 bp, Homo sapien
cctggtaaccattgccatgggcata

SEQ ID NO: 3931829 - DNA, 25 bp, Homo sapien
cataggtggagtcggacgcagaccc

SEQ ID NO: 3931830 - DNA, 25 bp, Homo sapien
caggtacagcatcccgtctctatgg

SEQ ID NO: 3931831 - DNA, 25 bp, Homo sapien
aaccacctgggtgcgatgtgcagag

SEQ ID NO: 3931832 - DNA, 25 bp, Homo sapien
tcttctctgaggagggtgatgccaa

SEQ ID NO: 3931833 - DNA, 25 bp, Homo sapien
tatcccttggcatcgggaaccaaag

SEQ ID NO: 3931834 - DNA, 25 bp, Homo sapien
cagaaagcctagtttccagacggta

SEQ ID NO: 3931835 - DNA, 25 bp, Homo sapien
cacaagtgaacacacgccgtgagtc

SEQ ID NO: 3931836 - DNA, 25 bp, Homo sapien
gaaaccatgtgaaggcccattactt

SEQ ID NO: 3931837 - DNA, 25 bp, Homo sapien
catgtgaaggcccattacttctagc

SEQ ID NO: 3931838 - DNA, 25 bp, Homo sapien
tccagaaaccatgtgaaggcccatt

SEQ ID NO: 3931839 - DNA, 25 bp, Homo sapien
tgaaggcccattacttctagcacac

SEQ ID NO: 3931840 - DNA, 25 bp, Homo sapien
gacttgcttatagctttccagggca

SEQ ID NO: 3931841 - DNA, 25 bp, Homo sapien
cagtcatagctaaccagagttgagg

SEQ ID NO: 3931842 - DNA, 25 bp, Homo sapien
tgcaagtcagcccttatcacaggtc

SEQ ID NO: 3931843 - DNA, 25 bp, Homo sapien
gccaacatgactgggctcgtcagat

SEQ ID NO: 3931844 - DNA, 25 bp, Homo sapien
atggattaaggatttaaatacaaag

SEQ ID NO: 3931845 - DNA, 25 bp, Homo sapien
tacccatggattaaggatttaaata

SEQ ID NO: 3931846 - DNA, 25 bp, Homo sapien
cccatggattaaggatttaaataca

SEQ ID NO: 3931847 - DNA, 25 bp, Homo sapien
taattacccatggattaaggattta

SEQ ID NO: 3931848 - DNA, 25 bp, Homo sapien
ataaaagagtattagcggccgggcg

SEQ ID NO: 3931849 - DNA, 25 bp, Homo sapien
tgttaaagcctacctctggaagaag

SEQ ID NO: 3931850 - DNA, 25 bp, Homo sapien
cggacggaaggattagtgtactgaa

SEQ ID NO: 3931851 - DNA, 25 bp, Homo sapien
gagagcaccatgagtaaagacaaga

SEQ ID NO: 3931852 - DNA, 25 bp, Homo sapien
tagcaacaactaattccagggtata

SEQ ID NO: 3931853 - DNA, 25 bp, Homo sapien
aaaccccttcctgtcatcttacaag

SEQ ID NO: 3931854 - DNA, 25 bp, Homo sapien
tgcaaatgctgcctctttctaaacc

SEQ ID NO: 3931855 - DNA, 25 bp, Homo sapien
tgctgcctctttctaaaccccttcc

SEQ ID NO: 3931856 - DNA, 25 bp, Homo sapien
taaaccccttcctgtcatcttacaa

SEQ ID NO: 3931857 - DNA, 25 bp, Homo sapien
ctaatctgctcctgtttctccactt

SEQ ID NO: 3931858 - DNA, 25 bp, Homo sapien
taatctgctcctgtttctccacttt

SEQ ID NO: 3931859 - DNA, 25 bp, Homo sapien
caagattgcagtcaagctggacatg

SEQ ID NO: 3931860 - DNA, 25 bp, Homo sapien
caattgagtgatgagggcaaacacc

SEQ ID NO: 3931861 - DNA, 25 bp, Homo sapien
tgagaactgacaataggctactgga

SEQ ID NO: 3931862 - DNA, 25 bp, Homo sapien
gatttagcagtacaaaggtcctcag

SEQ ID NO: 3931863 - DNA, 25 bp, Homo sapien
agaactgaccgagcaattctactcg

SEQ ID NO: 3931864 - DNA, 25 bp, Homo sapien
ggtagatccggcagaattgactcga

SEQ ID NO: 3931865 - DNA, 25 bp, Homo sapien
tacccagcatttctaccgggtagat

SEQ ID NO: 3931866 - DNA, 25 bp, Homo sapien
ctcgtaggtatatatagccgggtgt

SEQ ID NO: 3931867 - DNA, 25 bp, Homo sapien
caactggacctataaaagtgctgca

SEQ ID NO: 3931868 - DNA, 25 bp, Homo sapien
gtccaagcatcttctcgaatatact

SEQ ID NO: 3931869 - DNA, 25 bp, Homo sapien
taaaagtgctgcatagtccaagcat

SEQ ID NO: 3931870 - DNA, 25 bp, Homo sapien
tcccaaatcaacacaactggaccta

SEQ ID NO: 3931871 - DNA, 25 bp, Homo sapien
ctgaaatacttcattccgggcgtgg

SEQ ID NO: 3931872 - DNA, 25 bp, Homo sapien
tgaaatacttcattccgggcgtggt

SEQ ID NO: 3931873 - DNA, 25 bp, Homo sapien
ggtctatggatggtactaacagcac

SEQ ID NO: 3931874 - DNA, 25 bp, Homo sapien
gatgggtatgactataatgggcagc

SEQ ID NO: 3931875 - DNA, 25 bp, Homo sapien
gatgcatgtacttgtcaaaacccag

SEQ ID NO: 3931876 - DNA, 25 bp, Homo sapien
gatggattaaacaaaccgtggtcca

SEQ ID NO: 3931877 - DNA, 25 bp, Homo sapien
ctcagatctaaacgctcccgcacag

SEQ ID NO: 3931878 - DNA, 25 bp, Homo sapien
taaacgctcccgcacagaaagcaaa

SEQ ID NO: 3931879 - DNA, 25 bp, Homo sapien
cgctcctcagatctaaacgctcccg

SEQ ID NO: 3931880 - DNA, 25 bp, Homo sapien
gatctaaacgctcccgcacagaaag

SEQ ID NO: 3931881 - DNA, 25 bp, Homo sapien
agggcccagcagtcggttcttccga

SEQ ID NO: 3931882 - DNA, 25 bp, Homo sapien
cagcagtcggttcttccgaaaagct

SEQ ID NO: 3931883 - DNA, 25 bp, Homo sapien
tcttccgaaaagctctctctggctt

SEQ ID NO: 3931884 - DNA, 25 bp, Homo sapien
gctttccttgatacaagacacacag

SEQ ID NO: 3931885 - DNA, 25 bp, Homo sapien
tcctgcaggaccaggtttgcaaccc

SEQ ID NO: 3931886 - DNA, 25 bp, Homo sapien
aggggcaaaggacggcacatgcact

SEQ ID NO: 3931887 - DNA, 25 bp, Homo sapien
ggaccaggtttgcaaccccatgcac

SEQ ID NO: 3931888 - DNA, 25 bp, Homo sapien
tggggtgagatacacccattctaca

SEQ ID NO: 3931889 - DNA, 25 bp, Homo sapien
gtcacaggaacacggcctatctctc

SEQ ID NO: 3931890 - DNA, 25 bp, Homo sapien
aagggtcacaggaacacggcctatc

SEQ ID NO: 3931891 - DNA, 25 bp, Homo sapien
gggtcacaggaacacggcctatctc

SEQ ID NO: 3931892 - DNA, 25 bp, Homo sapien
gagttgctgagcaagggtcacagga

SEQ ID NO: 3931893 - DNA, 25 bp, Homo sapien
gcagcggcttccacatacaggactt

SEQ ID NO: 3931894 - DNA, 25 bp, Homo sapien
tctctaaggttaatcgtgatctggc

SEQ ID NO: 3931895 - DNA, 25 bp, Homo sapien
gcttggccaagtccatacactcctg

SEQ ID NO: 3931896 - DNA, 25 bp, Homo sapien
caacaggtgcaggacttggaaaaag

SEQ ID NO: 3931897 - DNA, 25 bp, Homo sapien
taacactcctctatcgagacatggg

SEQ ID NO: 3931898 - DNA, 25 bp, Homo sapien
tacttagtgcagtaacccagaaggc

SEQ ID NO: 3931899 - DNA, 25 bp, Homo sapien
tgtgggagccctgagtcaacctata

SEQ ID NO: 3931900 - DNA, 25 bp, Homo sapien
tctcttttgggacaagcgctgtggg

SEQ ID NO: 3931901 - DNA, 25 bp, Homo sapien
ttcagatttgtagataagagacgta

SEQ ID NO: 3931902 - DNA, 25 bp, Homo sapien
taaaactgcagtgaattataggata

SEQ ID NO: 3931903 - DNA, 25 bp, Homo sapien
taggatattcacattaagcaggata

SEQ ID NO: 3931904 - DNA, 25 bp, Homo sapien
gcctggccctctaatactattttta

SEQ ID NO: 3931905 - DNA, 25 bp, Homo sapien
gggcatcagcttgattccatccatt

SEQ ID NO: 3931906 - DNA, 25 bp, Homo sapien
aagagcagcagaaagtaccattttt

SEQ ID NO: 3931907 - DNA, 25 bp, Homo sapien
agagcagcagaaagtaccatttttc

SEQ ID NO: 3931908 - DNA, 25 bp, Homo sapien
tcttcgggcatcagcttgattccat

SEQ ID NO: 3931909 - DNA, 25 bp, Homo sapien
tcgagcactgtgcactacgactggc

SEQ ID NO: 3931910 - DNA, 25 bp, Homo sapien
catcctcgagaccatggcaagggca

SEQ ID NO: 3931911 - DNA, 25 bp, Homo sapien
gacacctaggaagtctgcgctcttg

SEQ ID NO: 3931912 - DNA, 25 bp, Homo sapien
gatcaagattcgcatggccagaaag

SEQ ID NO: 3931913 - DNA, 25 bp, Homo sapien
aatgagtaagttggtgtctattatg

SEQ ID NO: 3931914 - DNA, 25 bp, Homo sapien
taagttggtgtctattatgcgagtg

SEQ ID NO: 3931915 - DNA, 25 bp, Homo sapien
ctattatgcgagtgggaaatcacat

SEQ ID NO: 3931916 - DNA, 25 bp, Homo sapien
tggtgtctattatgcgagtgggaaa

SEQ ID NO: 3931917 - DNA, 25 bp, Homo sapien
tatcttctttagaccctttctcaga

SEQ ID NO: 3931918 - DNA, 25 bp, Homo sapien
ctgacttgagttttatcttctttag

SEQ ID NO: 3931919 - DNA, 25 bp, Homo sapien
tctggtggacaatggggtagggagg

SEQ ID NO: 3931920 - DNA, 25 bp, Homo sapien
cctttctcagatgggtctggtggac

SEQ ID NO: 3931921 - DNA, 25 bp, Homo sapien
tccagatccagtacatccacagtac

SEQ ID NO: 3931922 - DNA, 25 bp, Homo sapien
agtacatgtggacactctcgaatga

SEQ ID NO: 3931923 - DNA, 25 bp, Homo sapien
ttctccagatccagtacatccacag

SEQ ID NO: 3931924 - DNA, 25 bp, Homo sapien
tacatgtggacactctcgaatgaca

SEQ ID NO: 3931925 - DNA, 25 bp, Homo sapien
ggagaggcgaggtttgctcaaacac

SEQ ID NO: 3931926 - DNA, 25 bp, Homo sapien
catttccatctcgtcagaagccaca

SEQ ID NO: 3931927 - DNA, 25 bp, Homo sapien
atttccatctcgtcagaagccacag

SEQ ID NO: 3931928 - DNA, 25 bp, Homo sapien
ggtgaaaatactgcccagaaccacc

SEQ ID NO: 3931929 - DNA, 25 bp, Homo sapien
cagaaccaccctcgactggaggctc

SEQ ID NO: 3931930 - DNA, 25 bp, Homo sapien
cagagggcagggtgaaaatactgcc

SEQ ID NO: 3931931 - DNA, 25 bp, Homo sapien
ggctcccccgacggatgctctggag

SEQ ID NO: 3931932 - DNA, 25 bp, Homo sapien
ttccttccttgtcccactcctcttc

SEQ ID NO: 3931933 - DNA, 25 bp, Homo sapien
gccttccttccttgtcccactcctc

SEQ ID NO: 3931934 - DNA, 25 bp, Homo sapien
ctgacccctgggccttccttccttg

SEQ ID NO: 3931935 - DNA, 25 bp, Homo sapien
ctgggccttccttccttgtcccact

SEQ ID NO: 3931936 - DNA, 25 bp, Homo sapien
tccacggctgctcttgcaaagttct

SEQ ID NO: 3931937 - DNA, 25 bp, Homo sapien
catgggggcccaagagcactctgtc

SEQ ID NO: 3931938 - DNA, 25 bp, Homo sapien
caggttttctcaggctgagcccctc

SEQ ID NO: 3931939 - DNA, 25 bp, Homo sapien
cttcccggttctccacagggcagtg

SEQ ID NO: 3931940 - DNA, 25 bp, Homo sapien
ggcatcatgacataagaagctgagc

SEQ ID NO: 3931941 - DNA, 25 bp, Homo sapien
gcgcttgccaccatgtcagacaaat

SEQ ID NO: 3931942 - DNA, 25 bp, Homo sapien
ctcaagcaatctcggttccccaaag

SEQ ID NO: 3931943 - DNA, 25 bp, Homo sapien
tgtgacatttagcatctcaagagcc

SEQ ID NO: 3931944 - DNA, 25 bp, Homo sapien
tagtcgctttcgctcctcatacacc

SEQ ID NO: 3931945 - DNA, 25 bp, Homo sapien
tcagtgcagccggtcagcaacagct

SEQ ID NO: 3931946 - DNA, 25 bp, Homo sapien
tgttagggccttgcaggcctcccct

SEQ ID NO: 3931947 - DNA, 25 bp, Homo sapien
cagtctggcagtcagtgcagccggt

SEQ ID NO: 3931948 - DNA, 25 bp, Homo sapien
gggagggaaagcccgtgcagctccg

SEQ ID NO: 3931949 - DNA, 25 bp, Homo sapien
cagctccgaggcagcagctgagcac

SEQ ID NO: 3931950 - DNA, 25 bp, Homo sapien
tgagcacaggaacatgcctctccat

SEQ ID NO: 3931951 - DNA, 25 bp, Homo sapien
agctgagcacaggaacatgcctctc

SEQ ID NO: 3931952 - DNA, 25 bp, Homo sapien
gtttctgccacccagcgacctggcc

SEQ ID NO: 3931953 - DNA, 25 bp, Homo sapien
tcttcggataagctcatgcagctgc

SEQ ID NO: 3931954 - DNA, 25 bp, Homo sapien
agcccctgtggggatcttcggataa

SEQ ID NO: 3931955 - DNA, 25 bp, Homo sapien
gaccaggccataagggtgtcttccc

SEQ ID NO: 3931956 - DNA, 25 bp, Homo sapien
ttcccggcaataggaaggagtcagg

SEQ ID NO: 3931957 - DNA, 25 bp, Homo sapien
gcagggagcacatttcactgggacc

SEQ ID NO: 3931958 - DNA, 25 bp, Homo sapien
ggttcccggcaataggaaggagtca

SEQ ID NO: 3931959 - DNA, 25 bp, Homo sapien
ctggcacacggcagggagcacattt

SEQ ID NO: 3931960 - DNA, 25 bp, Homo sapien
agcagccctgcgtgtgcggatgagg

SEQ ID NO: 3931961 - DNA, 25 bp, Homo sapien
acaacaaggagtgcgcagcagccct

SEQ ID NO: 3931962 - DNA, 25 bp, Homo sapien
gtgtgcggatgagggcagcgggaca

SEQ ID NO: 3931963 - DNA, 25 bp, Homo sapien
tgtctggggccgacaacaaggagtg

SEQ ID NO: 3931964 - DNA, 25 bp, Homo sapien
tttgtgatagatgcacaggcagggc

SEQ ID NO: 3931965 - DNA, 25 bp, Homo sapien
gcagcctggctatcgtgtccccctg

SEQ ID NO: 3931966 - DNA, 25 bp, Homo sapien
aggcagatcacacactcacccgcgt

SEQ ID NO: 3931967 - DNA, 25 bp, Homo sapien
tcacccgcgtctttagtcagcacat

SEQ ID NO: 3931968 - DNA, 25 bp, Homo sapien
tccgtgctgggagctagaccaagaa

SEQ ID NO: 3931969 - DNA, 25 bp, Homo sapien
tgggctcgaggattcaacaggtgct

SEQ ID NO: 3931970 - DNA, 25 bp, Homo sapien
gattgatgttctacccctgtggagc

SEQ ID NO: 3931971 - DNA, 25 bp, Homo sapien
aattggcataattctccccgagggc

SEQ ID NO: 3931972 - DNA, 25 bp, Homo sapien
aaggtgagagcggtggacccctcag

SEQ ID NO: 3931973 - DNA, 25 bp, Homo sapien
tgagaaggtgagagcggtggacccc

SEQ ID NO: 3931974 - DNA, 25 bp, Homo sapien
gacccctcagggcagctagtcagct

SEQ ID NO: 3931975 - DNA, 25 bp, Homo sapien
gcagagtggctttcagaaggaccaa

SEQ ID NO: 3931976 - DNA, 25 bp, Homo sapien
gtggaggcagcagtaccggctcagg

SEQ ID NO: 3931977 - DNA, 25 bp, Homo sapien
caagactagtcttggcccaggtgga

SEQ ID NO: 3931978 - DNA, 25 bp, Homo sapien
agggtgaacaccaagactagtcttg

SEQ ID NO: 3931979 - DNA, 25 bp, Homo sapien
tctgaagcacgaagaagggtgaaca

SEQ ID NO: 3931980 - DNA, 25 bp, Homo sapien
tgagcaggagcttcctaagtctctt

SEQ ID NO: 3931981 - DNA, 25 bp, Homo sapien
gaaacacagtcatgtccccagatat

SEQ ID NO: 3931982 - DNA, 25 bp, Homo sapien
agagggccagattcctgagcaggag

SEQ ID NO: 3931983 - DNA, 25 bp, Homo sapien
agtctcttctgaaaggaccccaggg

SEQ ID NO: 3931984 - DNA, 25 bp, Homo sapien
gggaaaccacgttacctgctgccca

SEQ ID NO: 3931985 - DNA, 25 bp, Homo sapien
aaaccacgttacctgctgcccaggc

SEQ ID NO: 3931986 - DNA, 25 bp, Homo sapien
gaaaccacgttacctgctgcccagg

SEQ ID NO: 3931987 - DNA, 25 bp, Homo sapien
ggaaaccacgttacctgctgcccag

SEQ ID NO: 3931988 - DNA, 25 bp, Homo sapien
cacttcaaaccacgagtctatgcag

SEQ ID NO: 3931989 - DNA, 25 bp, Homo sapien
caagatctgttcacttcaaaccacg

SEQ ID NO: 3931990 - DNA, 25 bp, Homo sapien
gggtgttccggacaagatctgttca

SEQ ID NO: 3931991 - DNA, 25 bp, Homo sapien
tcagtccgcagggtgttccggacaa

SEQ ID NO: 3931992 - DNA, 25 bp, Homo sapien
aggagtcagcaagcaagcccgcagg

SEQ ID NO: 3931993 - DNA, 25 bp, Homo sapien
gaggagtcagcaagcaagcccgcag

SEQ ID NO: 3931994 - DNA, 25 bp, Homo sapien
ataaataagtcgtgctccatcgggc

SEQ ID NO: 3931995 - DNA, 25 bp, Homo sapien
ttctcagtggcataagggcagcccg

SEQ ID NO: 3931996 - DNA, 25 bp, Homo sapien
cagattcatctggaagcggcatggg

SEQ ID NO: 3931997 - DNA, 25 bp, Homo sapien
gagattatccccgttaccatagaag

SEQ ID NO: 3931998 - DNA, 25 bp, Homo sapien
ctgttcccgctggtgtcccaagctc

SEQ ID NO: 3931999 - DNA, 25 bp, Homo sapien
ctccctggagcaggggcgctctgtc

SEQ ID NO: 3932000 - DNA, 25 bp, Homo sapien
gttcccgctggtgtcccaagctcag

SEQ ID NO: 3932001 - DNA, 25 bp, Homo sapien
tgcagaaggggtgccctgttcccgc

SEQ ID NO: 3932002 - DNA, 25 bp, Homo sapien
cacgagggcctaagaataatgttca

SEQ ID NO: 3932003 - DNA, 25 bp, Homo sapien
cagcaagctgtaaacatcacgaggg

SEQ ID NO: 3932004 - DNA, 25 bp, Homo sapien
gagggaaaacaccagtcgacactag

SEQ ID NO: 3932005 - DNA, 25 bp, Homo sapien
tgttaaatcctctgaactgaccgga

SEQ ID NO: 3932006 - DNA, 25 bp, Homo sapien
acacacctggagccccgagtagcag

SEQ ID NO: 3932007 - DNA, 25 bp, Homo sapien
tatctgaggaccaattcacacacct

SEQ ID NO: 3932008 - DNA, 25 bp, Homo sapien
tccacccaggcctgactatctgagg

SEQ ID NO: 3932009 - DNA, 25 bp, Homo sapien
gatgcttaagaggttaggaagcttg

SEQ ID NO: 3932010 - DNA, 25 bp, Homo sapien
atccttgcagcctccggtggctgca

SEQ ID NO: 3932011 - DNA, 25 bp, Homo sapien
cctgcagatcttttcagaggtccag

SEQ ID NO: 3932012 - DNA, 25 bp, Homo sapien
cagcacaatgactccacagagggct

SEQ ID NO: 3932013 - DNA, 25 bp, Homo sapien
ccggtggctgcaacatcttggcccc

SEQ ID NO: 3932014 - DNA, 25 bp, Homo sapien
caaactgaacaacaggcagggcgag

SEQ ID NO: 3932015 - DNA, 25 bp, Homo sapien
tgccaacttttgtgagcctgagcag

SEQ ID NO: 3932016 - DNA, 25 bp, Homo sapien
gaagcatgcccgtgagtcagcactg

SEQ ID NO: 3932017 - DNA, 25 bp, Homo sapien
ttcctgggcctcaatgaagcatgcc

SEQ ID NO: 3932018 - DNA, 25 bp, Homo sapien
gcagggggatggtccagcacatcag

SEQ ID NO: 3932019 - DNA, 25 bp, Homo sapien
catctgatggagggtgactgcggag

SEQ ID NO: 3932020 - DNA, 25 bp, Homo sapien
ttgtgaatgcccttgcacagagtag

SEQ ID NO: 3932021 - DNA, 25 bp, Homo sapien
agggggatggtccagcacatcaggc

SEQ ID NO: 3932022 - DNA, 25 bp, Homo sapien
tttagtgtttctccgctggccctgg

SEQ ID NO: 3932023 - DNA, 25 bp, Homo sapien
aagttcagatgaagtcgtttcccca

SEQ ID NO: 3932024 - DNA, 25 bp, Homo sapien
tctgagctgcatggttttgtccccg

SEQ ID NO: 3932025 - DNA, 25 bp, Homo sapien
gcctgaatgcacagtctagagccca

SEQ ID NO: 3932026 - DNA, 25 bp, Homo sapien
caagagcaggcaacctgggtccaaa

SEQ ID NO: 3932027 - DNA, 25 bp, Homo sapien
tatagcacagggagacacagttgcc

SEQ ID NO: 3932028 - DNA, 25 bp, Homo sapien
catgccaggtaggacggaagtcgct

SEQ ID NO: 3932029 - DNA, 25 bp, Homo sapien
gagagctgtccagatagaggatcac

SEQ ID NO: 3932030 - DNA, 25 bp, Homo sapien
cagccactgcagattcaacaatgaa

SEQ ID NO: 3932031 - DNA, 25 bp, Homo sapien
tgaactgcagtaccgttaaatggct

SEQ ID NO: 3932032 - DNA, 25 bp, Homo sapien
tgtgagggtctcacgtccaggaacc

SEQ ID NO: 3932033 - DNA, 25 bp, Homo sapien
tcatcaaagtgtgctaggcccttag

SEQ ID NO: 3932034 - DNA, 25 bp, Homo sapien
gaggctactcctccgtgacgtttct

SEQ ID NO: 3932035 - DNA, 25 bp, Homo sapien
tggcaactaggaggcgctcagcaaa

SEQ ID NO: 3932036 - DNA, 25 bp, Homo sapien
ggtaggactcttctttgatgcgccc

SEQ ID NO: 3932037 - DNA, 25 bp, Homo sapien
cgtgccaagggctcactggtgacaa

SEQ ID NO: 3932038 - DNA, 25 bp, Homo sapien
aaggtctgtccacccgagggcctgc

SEQ ID NO: 3932039 - DNA, 25 bp, Homo sapien
tcttgagaccttggcagttgttccc

SEQ ID NO: 3932040 - DNA, 25 bp, Homo sapien
gctgttttgccctcaaggtctgtcc

SEQ ID NO: 3932041 - DNA, 25 bp, Homo sapien
gggtgatgtatcgtaccaccagctg

SEQ ID NO: 3932042 - DNA, 25 bp, Homo sapien
tgaaccgggcctctgaacacactga

SEQ ID NO: 3932043 - DNA, 25 bp, Homo sapien
cacactgaatgtgttcctcagcagc

SEQ ID NO: 3932044 - DNA, 25 bp, Homo sapien
ggacctgcccacggcacatgtcact

SEQ ID NO: 3932045 - DNA, 25 bp, Homo sapien
tactccgcctcagagctgaggacct

SEQ ID NO: 3932046 - DNA, 25 bp, Homo sapien
tcttccgggaagcctccctggcttg

SEQ ID NO: 3932047 - DNA, 25 bp, Homo sapien
ggcttgccccactgcccaaccccat

SEQ ID NO: 3932048 - DNA, 25 bp, Homo sapien
catcctcaaatttcctcttccggga

SEQ ID NO: 3932049 - DNA, 25 bp, Homo sapien
tgctgctcatcctcaaatttcctct

SEQ ID NO: 3932050 - DNA, 25 bp, Homo sapien
aagtgtgtaagtcagtagttcttag

SEQ ID NO: 3932051 - DNA, 25 bp, Homo sapien
agtgtgtaagtcagtagttcttaga

SEQ ID NO: 3932052 - DNA, 25 bp, Homo sapien
aattcacctaacataacattcagaa

SEQ ID NO: 3932053 - DNA, 25 bp, Homo sapien
gtgtgtaagtcagtagttcttagaa

SEQ ID NO: 3932054 - DNA, 25 bp, Homo sapien
ctgtcacccactcgccgctggtggt

SEQ ID NO: 3932055 - DNA, 25 bp, Homo sapien
gaagacgcgcggagacgggggctct

SEQ ID NO: 3932056 - DNA, 25 bp, Homo sapien
ctggaggggcgcagcctccactcgt

SEQ ID NO: 3932057 - DNA, 25 bp, Homo sapien
cagggcggcgaagacgcgcggagac

SEQ ID NO: 3932058 - DNA, 25 bp, Homo sapien
gaacagtaaattccacccgagagaa

SEQ ID NO: 3932059 - DNA, 25 bp, Homo sapien
gctcacataaagtaccaccgggttg

SEQ ID NO: 3932060 - DNA, 25 bp, Homo sapien
ggcagagcactactttaacccagga

SEQ ID NO: 3932061 - DNA, 25 bp, Homo sapien
catgaggtccctcgttgacagaaac

SEQ ID NO: 3932062 - DNA, 25 bp, Homo sapien
ttctgcagttttgggcaaaggcaga

SEQ ID NO: 3932063 - DNA, 25 bp, Homo sapien
gggcaaaggcagagaactatgaagg

SEQ ID NO: 3932064 - DNA, 25 bp, Homo sapien
attttctgcagttttgggcaaaggc

SEQ ID NO: 3932065 - DNA, 25 bp, Homo sapien
gcaaaggcagagaactatgaaggca

SEQ ID NO: 3932066 - DNA, 25 bp, Homo sapien
tcagacctaatgtacagaaccaaat

SEQ ID NO: 3932067 - DNA, 25 bp, Homo sapien
gaaagtaatgacagtggtacctgct

SEQ ID NO: 3932068 - DNA, 25 bp, Homo sapien
caaaacaccatctatatgaaggtcc

SEQ ID NO: 3932069 - DNA, 25 bp, Homo sapien
ggcattaggctaatctgactggaaa

SEQ ID NO: 3932070 - DNA, 25 bp, Homo sapien
ttggtgatatagaaaggatagatga

SEQ ID NO: 3932071 - DNA, 25 bp, Homo sapien
tatagaaaggatagatgaaaacttt

SEQ ID NO: 3932072 - DNA, 25 bp, Homo sapien
cctaagatgatcatttggtgatata

SEQ ID NO: 3932073 - DNA, 25 bp, Homo sapien
gatatagaaaggatagatgaaaact

SEQ ID NO: 3932074 - DNA, 25 bp, Homo sapien
tccatgtataggatcctctgagagg

SEQ ID NO: 3932075 - DNA, 25 bp, Homo sapien
ccatgtataggatcctctgagaggg

SEQ ID NO: 3932076 - DNA, 25 bp, Homo sapien
catgtataggatcctctgagagggg

SEQ ID NO: 3932077 - DNA, 25 bp, Homo sapien
atccatgtataggatcctctgagag

SEQ ID NO: 3932078 - DNA, 25 bp, Homo sapien
ttctggtcactgagacaggacataa

SEQ ID NO: 3932079 - DNA, 25 bp, Homo sapien
tttctggtcactgagacaggacata

SEQ ID NO: 3932080 - DNA, 25 bp, Homo sapien
tctggtcactgagacaggacataaa

SEQ ID NO: 3932081 - DNA, 25 bp, Homo sapien
cagatactggcaaggctaagataca

SEQ ID NO: 3932082 - DNA, 25 bp, Homo sapien
gcatcttaaggataaagttacccag

SEQ ID NO: 3932083 - DNA, 25 bp, Homo sapien
aagggatactctcaatattccaggc

SEQ ID NO: 3932084 - DNA, 25 bp, Homo sapien
tacccaggttcattaagtcaaacaa

SEQ ID NO: 3932085 - DNA, 25 bp, Homo sapien
tgctaaactcggactactatggtag

SEQ ID NO: 3932086 - DNA, 25 bp, Homo sapien
tgcagttagcacagagaccgagaaa

SEQ ID NO: 3932087 - DNA, 25 bp, Homo sapien
tatggtagaaccagcaccagtctgc

SEQ ID NO: 3932088 - DNA, 25 bp, Homo sapien
tgttcttaaggacactgcagttagc

SEQ ID NO: 3932089 - DNA, 25 bp, Homo sapien
gcttcaggtagagaagtgcttttcc

SEQ ID NO: 3932090 - DNA, 25 bp, Homo sapien
cattacactcatcagtctgctttcc

SEQ ID NO: 3932091 - DNA, 25 bp, Homo sapien
gtgttcagattaagtgcttttccaa

SEQ ID NO: 3932092 - DNA, 25 bp, Homo sapien
taaaaattgcctcgcctgctcgtct

SEQ ID NO: 3932093 - DNA, 25 bp, Homo sapien
cttatgactaatgaggagtgactta

SEQ ID NO: 3932094 - DNA, 25 bp, Homo sapien
ctcttatgactaatgaggagtgact

SEQ ID NO: 3932095 - DNA, 25 bp, Homo sapien
ttctcttatgactaatgaggagtga

SEQ ID NO: 3932096 - DNA, 25 bp, Homo sapien
gatgaggttggccttatgggagaag

SEQ ID NO: 3932097 - DNA, 25 bp, Homo sapien
gtgtggtgagttcaaacttttgggc

SEQ ID NO: 3932098 - DNA, 25 bp, Homo sapien
agggcttcttctccatatgtgctct

SEQ ID NO: 3932099 - DNA, 25 bp, Homo sapien
tggtgtgtggtgagttcaaactttt

SEQ ID NO: 3932100 - DNA, 25 bp, Homo sapien
ccacattccggacactcgaaaggtt

SEQ ID NO: 3932101 - DNA, 25 bp, Homo sapien
tctctgatggacactgagtcgggac

SEQ ID NO: 3932102 - DNA, 25 bp, Homo sapien
tgtaatctaagagttgacctctggc

SEQ ID NO: 3932103 - DNA, 25 bp, Homo sapien
agttttgccgcactcagtacattca

SEQ ID NO: 3932104 - DNA, 25 bp, Homo sapien
tgtgtggattcgcaagtgtaatcta

SEQ ID NO: 3932105 - DNA, 25 bp, Homo sapien
tactgtcatgaggtttttcacccgc

SEQ ID NO: 3932106 - DNA, 25 bp, Homo sapien
tcacccgcttgaagagttctggcag

SEQ ID NO: 3932107 - DNA, 25 bp, Homo sapien
tcccacgggaaaataagagcatgac

SEQ ID NO: 3932108 - DNA, 25 bp, Homo sapien
tctgtttcctaagaggcagctcaag

SEQ ID NO: 3932109 - DNA, 25 bp, Homo sapien
tgatttgtgattgatagggaaaggc

SEQ ID NO: 3932110 - DNA, 25 bp, Homo sapien
aagtaataacttataactcatgttc

SEQ ID NO: 3932111 - DNA, 25 bp, Homo sapien
ggaaaggctgaacttaagaatttga

SEQ ID NO: 3932112 - DNA, 25 bp, Homo sapien
ttgtgattgatagggaaaggctgaa

SEQ ID NO: 3932113 - DNA, 25 bp, Homo sapien
gctggcgctttttattccttaggga

SEQ ID NO: 3932114 - DNA, 25 bp, Homo sapien
caacttagacaaaagcttattgggc

SEQ ID NO: 3932115 - DNA, 25 bp, Homo sapien
tcacaatgttgtccaaggaggctgt

SEQ ID NO: 3932116 - DNA, 25 bp, Homo sapien
catataatcttaagtgctggcgctt

SEQ ID NO: 3932117 - DNA, 25 bp, Homo sapien
tttggagtttgttcccacacattct

SEQ ID NO: 3932118 - DNA, 25 bp, Homo sapien
tggagtttgttcccacacattcttt

SEQ ID NO: 3932119 - DNA, 25 bp, Homo sapien
ttcctcatttgacctagagaagttt

SEQ ID NO: 3932120 - DNA, 25 bp, Homo sapien
tcctcatttgacctagagaagtttg

SEQ ID NO: 3932121 - DNA, 25 bp, Homo sapien
tttattttataaaaactgctacaca

SEQ ID NO: 3932122 - DNA, 25 bp, Homo sapien
tattttataaaaactgctacacaca

SEQ ID NO: 3932123 - DNA, 25 bp, Homo sapien
tctttattttataaaaactgctaca

SEQ ID NO: 3932124 - DNA, 25 bp, Homo sapien
tttataaaaactgctacacacacac

SEQ ID NO: 3932125 - DNA, 25 bp, Homo sapien
gaaagcagccggatttccagaaaca

SEQ ID NO: 3932126 - DNA, 25 bp, Homo sapien
cagttccgtgagatgagtggccgca

SEQ ID NO: 3932127 - DNA, 25 bp, Homo sapien
cagaacccgaaaactaactgatggg

SEQ ID NO: 3932128 - DNA, 25 bp, Homo sapien
tgctctctgcaacagcgtgggtgaa

SEQ ID NO: 3932129 - DNA, 25 bp, Homo sapien
gggagaagcaggagaggagccagag

SEQ ID NO: 3932130 - DNA, 25 bp, Homo sapien
gaagcaggagaggagccagagggaa

SEQ ID NO: 3932131 - DNA, 25 bp, Homo sapien
aggagaggagccagagggaagccat

SEQ ID NO: 3932132 - DNA, 25 bp, Homo sapien
aggcggcccccacaagggagaagca

SEQ ID NO: 3932133 - DNA, 25 bp, Homo sapien
taataagaccccaggtcgggcatgg

SEQ ID NO: 3932134 - DNA, 25 bp, Homo sapien
gagcagatcactcgagcacaggatt

SEQ ID NO: 3932135 - DNA, 25 bp, Homo sapien
gtattagttacatcagccaggcaca

SEQ ID NO: 3932136 - DNA, 25 bp, Homo sapien
gctgaaactccacgtcaacatgcag

SEQ ID NO: 3932137 - DNA, 25 bp, Homo sapien
ctgcctgcgtgcagctctcccggtt

SEQ ID NO: 3932138 - DNA, 25 bp, Homo sapien
ccggttctaccccagtccactgaag

SEQ ID NO: 3932139 - DNA, 25 bp, Homo sapien
ggttctaccccagtccactgaagcc

SEQ ID NO: 3932140 - DNA, 25 bp, Homo sapien
gcagctctcccggttctaccccagt

SEQ ID NO: 3932141 - DNA, 25 bp, Homo sapien
caggccgctgagcacagggtggatg

SEQ ID NO: 3932142 - DNA, 25 bp, Homo sapien
ctggacaggccgctgagcacagggt

SEQ ID NO: 3932143 - DNA, 25 bp, Homo sapien
gacaggccgctgagcacagggtgga

SEQ ID NO: 3932144 - DNA, 25 bp, Homo sapien
ccgctgagcacagggtggatggcgg

SEQ ID NO: 3932145 - DNA, 25 bp, Homo sapien
ggacggcgtcctccccattcacgat

SEQ ID NO: 3932146 - DNA, 25 bp, Homo sapien
gggacggcgtcctccccattcacga

SEQ ID NO: 3932147 - DNA, 25 bp, Homo sapien
gacggcgtcctccccattcacgatc

SEQ ID NO: 3932148 - DNA, 25 bp, Homo sapien
cagcggtgaccacccagtcctcgct

SEQ ID NO: 3932149 - DNA, 25 bp, Homo sapien
gcggtgaccacccagtcctcgctga

SEQ ID NO: 3932150 - DNA, 25 bp, Homo sapien
ggtgaccacccagtcctcgctgatg

SEQ ID NO: 3932151 - DNA, 25 bp, Homo sapien
ggcagcggtgaccacccagtcctcg

SEQ ID NO: 3932152 - DNA, 25 bp, Homo sapien
ccggtgctggaagcggagcccaagg

SEQ ID NO: 3932153 - DNA, 25 bp, Homo sapien
ccacccgaccggtgctggaagcgga

SEQ ID NO: 3932154 - DNA, 25 bp, Homo sapien
ctgggcagagcgttgtgggtgagag

SEQ ID NO: 3932155 - DNA, 25 bp, Homo sapien
ttgtgggtgagagaacatgccctgc

SEQ ID NO: 3932156 - DNA, 25 bp, Homo sapien
cttcaggacctggatgttctcctcg

SEQ ID NO: 3932157 - DNA, 25 bp, Homo sapien
ttcaggacctggatgttctcctcgt

SEQ ID NO: 3932158 - DNA, 25 bp, Homo sapien
tcaggacctggatgttctcctcgtc

SEQ ID NO: 3932159 - DNA, 25 bp, Homo sapien
acctgcaggcttcgaggacagactc

SEQ ID NO: 3932160 - DNA, 25 bp, Homo sapien
ccgttaaggagcagtccatccccag

SEQ ID NO: 3932161 - DNA, 25 bp, Homo sapien
tccctggtgcccgttaaggagcagt

SEQ ID NO: 3932162 - DNA, 25 bp, Homo sapien
ccatccccagggccggaatgggaat

SEQ ID NO: 3932163 - DNA, 25 bp, Homo sapien
cattgttcacggtcagaatgctgaa

SEQ ID NO: 3932164 - DNA, 25 bp, Homo sapien
tgttcacggtcagaatgctgaactt

SEQ ID NO: 3932165 - DNA, 25 bp, Homo sapien
tgtcattgttcacggtcagaatgct

SEQ ID NO: 3932166 - DNA, 25 bp, Homo sapien
tcacggtcagaatgctgaacttggg

SEQ ID NO: 3932167 - DNA, 25 bp, Homo sapien
tggcacacagtgtccccgcggggaa

SEQ ID NO: 3932168 - DNA, 25 bp, Homo sapien
ccgcggggaagtcgtcgtcggcgct

SEQ ID NO: 3932169 - DNA, 25 bp, Homo sapien
ttaggagcgtgttggaatttagagc

SEQ ID NO: 3932170 - DNA, 25 bp, Homo sapien
gcagttaggagcgtgttggaattta

SEQ ID NO: 3932171 - DNA, 25 bp, Homo sapien
agcgtgttggaatttagagccaaac

SEQ ID NO: 3932172 - DNA, 25 bp, Homo sapien
taggagcgtgttggaatttagagcc

SEQ ID NO: 3932173 - DNA, 25 bp, Homo sapien
caccatcaccacgatgttgggtacg

SEQ ID NO: 3932174 - DNA, 25 bp, Homo sapien
cacgatgttgggtacggcccctgga

SEQ ID NO: 3932175 - DNA, 25 bp, Homo sapien
catcaccacgatgttgggtacggcc

SEQ ID NO: 3932176 - DNA, 25 bp, Homo sapien
ctgcaccatcaccacgatgttgggt

SEQ ID NO: 3932177 - DNA, 25 bp, Homo sapien
atgcaggaggagacgccactggccc

SEQ ID NO: 3932178 - DNA, 25 bp, Homo sapien
atcatcacgtcggtgatcctcctgc

SEQ ID NO: 3932179 - DNA, 25 bp, Homo sapien
cccggcacagatcatcacgtcggtg

SEQ ID NO: 3932180 - DNA, 25 bp, Homo sapien
tcttgcattcggcattggacaggag

SEQ ID NO: 3932181 - DNA, 25 bp, Homo sapien
tgacacgggcgtacacgccagggct

SEQ ID NO: 3932182 - DNA, 25 bp, Homo sapien
agcttggtgacacgggcgtacacgc

SEQ ID NO: 3932183 - DNA, 25 bp, Homo sapien
gggcgtacacgccagggctggaggt

SEQ ID NO: 3932184 - DNA, 25 bp, Homo sapien
ttggtgacacgggcgtacacgccag

SEQ ID NO: 3932185 - DNA, 25 bp, Homo sapien
acagcgccgacgtgtgttccatggg

SEQ ID NO: 3932186 - DNA, 25 bp, Homo sapien
tcaccagtccttgcgttgataacgc

SEQ ID NO: 3932187 - DNA, 25 bp, Homo sapien
gccccaaaacagaagacggacagcg

SEQ ID NO: 3932188 - DNA, 25 bp, Homo sapien
tcatctgcccgtgtgttcctggcca

SEQ ID NO: 3932189 - DNA, 25 bp, Homo sapien
catggcacggcgggctttttgcttc

SEQ ID NO: 3932190 - DNA, 25 bp, Homo sapien
ggtgccttgatgaaacatggcacgg

SEQ ID NO: 3932191 - DNA, 25 bp, Homo sapien
gcctgcctgagcctcgaacttttaa

SEQ ID NO: 3932192 - DNA, 25 bp, Homo sapien
aaacagatgccccaagcacggccga

SEQ ID NO: 3932193 - DNA, 25 bp, Homo sapien
aaacttcaaggccagtcgggccgca

SEQ ID NO: 3932194 - DNA, 25 bp, Homo sapien
acttcaaggccagtcgggccgcata

SEQ ID NO: 3932195 - DNA, 25 bp, Homo sapien
ttcaaggccagtcgggccgcatagt

SEQ ID NO: 3932196 - DNA, 25 bp, Homo sapien
gggcgagggctgtgtaatcctagca

SEQ ID NO: 3932197 - DNA, 25 bp, Homo sapien
cagcggtgaccacccagtcctcgct

SEQ ID NO: 3932198 - DNA, 25 bp, Homo sapien
gcggtgaccacccagtcctcgctga

SEQ ID NO: 3932199 - DNA, 25 bp, Homo sapien
ggtgaccacccagtcctcgctgatg

SEQ ID NO: 3932200 - DNA, 25 bp, Homo sapien
ggcagcggtgaccacccagtcctcg

SEQ ID NO: 3932201 - DNA, 25 bp, Homo sapien
tgcacagtgagggtacgggacctcc

SEQ ID NO: 3932202 - DNA, 25 bp, Homo sapien
gggatgagtgtcattccctgacacc

SEQ ID NO: 3932203 - DNA, 25 bp, Homo sapien
ccaagctgccgtctgggtggcctgc

SEQ ID NO: 3932204 - DNA, 25 bp, Homo sapien
caggtttccccaagctgccgtctgg

SEQ ID NO: 3932205 - DNA, 25 bp, Homo sapien
cttgcccctcaatctcatggtgatc

SEQ ID NO: 3932206 - DNA, 25 bp, Homo sapien
ctgcttgcccctcaatctcatggtg

SEQ ID NO: 3932207 - DNA, 25 bp, Homo sapien
gggaagtgagccagtcagggtgagc

SEQ ID NO: 3932208 - DNA, 25 bp, Homo sapien
tgggaagtgagccagtcagggtgag

SEQ ID NO: 3932209 - DNA, 25 bp, Homo sapien
atcgtggtgtcacgagccacctcct

SEQ ID NO: 3932210 - DNA, 25 bp, Homo sapien
ttagcgttagccatcctcagcacct

SEQ ID NO: 3932211 - DNA, 25 bp, Homo sapien
ctccgggtgagagccaaggtcagac

SEQ ID NO: 3932212 - DNA, 25 bp, Homo sapien
tgggtgtgtcccatcgtggtgtcac

SEQ ID NO: 3932213 - DNA, 25 bp, Homo sapien
catgagctgacgcttccagctcaga

SEQ ID NO: 3932214 - DNA, 25 bp, Homo sapien
ctgcctggttcaggaagctgtgagc

SEQ ID NO: 3932215 - DNA, 25 bp, Homo sapien
tcatcccatgagctgacgcttccag

SEQ ID NO: 3932216 - DNA, 25 bp, Homo sapien
cctgcctggttcaggaagctgtgag

SEQ ID NO: 3932217 - DNA, 25 bp, Homo sapien
atgcgggcatccacgcctggtgaca

SEQ ID NO: 3932218 - DNA, 25 bp, Homo sapien
tgtgttttacacagatgcggggtag

SEQ ID NO: 3932219 - DNA, 25 bp, Homo sapien
tcccaggcatgaatttcatgatgcg

SEQ ID NO: 3932220 - DNA, 25 bp, Homo sapien
gcaggcaagggctgtcggagtcacc

SEQ ID NO: 3932221 - DNA, 25 bp, Homo sapien
ggtcccagccgctgtgcttctcagg

SEQ ID NO: 3932222 - DNA, 25 bp, Homo sapien
tgcagctctccctgacgtgtgtcac

SEQ ID NO: 3932223 - DNA, 25 bp, Homo sapien
gccccggggacacaatgagggccat

SEQ ID NO: 3932224 - DNA, 25 bp, Homo sapien
ccagcccgggtggatatggtgccca

SEQ ID NO: 3932225 - DNA, 25 bp, Homo sapien
acccgcaagagctagagcagggtcg

SEQ ID NO: 3932226 - DNA, 25 bp, Homo sapien
gaggctgatcgctggaccgaggtga

SEQ ID NO: 3932227 - DNA, 25 bp, Homo sapien
agggccgggttctgcagtgtggaca

SEQ ID NO: 3932228 - DNA, 25 bp, Homo sapien
cggagctccctctcgagggtccgag

SEQ ID NO: 3932229 - DNA, 25 bp, Homo sapien
tgcctcgtggcatcccattgctcag

SEQ ID NO: 3932230 - DNA, 25 bp, Homo sapien
tctggtctggaccaggctcggtcct

SEQ ID NO: 3932231 - DNA, 25 bp, Homo sapien
ctatcatctccctgcagattgtgcc

SEQ ID NO: 3932232 - DNA, 25 bp, Homo sapien
cagggctgcctcgtggcatcccatt

SEQ ID NO: 3932233 - DNA, 25 bp, Homo sapien
tagtgtcctggtgtgctgggtccac

SEQ ID NO: 3932234 - DNA, 25 bp, Homo sapien
gaagaggccatctaatagctgcaag

SEQ ID NO: 3932235 - DNA, 25 bp, Homo sapien
gctgcaagctattctactgaggcgc

SEQ ID NO: 3932236 - DNA, 25 bp, Homo sapien
gagcaggaaccctatcccaggctta

SEQ ID NO: 3932237 - DNA, 25 bp, Homo sapien
tgtgtgacagtaggttcacctccgt

SEQ ID NO: 3932238 - DNA, 25 bp, Homo sapien
cacacgcctgggttatgaggtggaa

SEQ ID NO: 3932239 - DNA, 25 bp, Homo sapien
taacagctccagcttgagtcctgag

SEQ ID NO: 3932240 - DNA, 25 bp, Homo sapien
cgtgctatccacaaaggttccgtgc

SEQ ID NO: 3932241 - DNA, 25 bp, Homo sapien
tgcgtgtgtcctccaggtcaagccc

SEQ ID NO: 3932242 - DNA, 25 bp, Homo sapien
gtgtgtcctccaggtcaagccccat

SEQ ID NO: 3932243 - DNA, 25 bp, Homo sapien
gcgtgtgtcctccaggtcaagcccc

SEQ ID NO: 3932244 - DNA, 25 bp, Homo sapien
ctgcgtgtgtcctccaggtcaagcc

SEQ ID NO: 3932245 - DNA, 25 bp, Homo sapien
tctggctggcattggcttgggagtc

SEQ ID NO: 3932246 - DNA, 25 bp, Homo sapien
ggctggcattggcttgggagtccat

SEQ ID NO: 3932247 - DNA, 25 bp, Homo sapien
tcagacctctggctggcattggctt

SEQ ID NO: 3932248 - DNA, 25 bp, Homo sapien
acctctggctggcattggcttggga

SEQ ID NO: 3932249 - DNA, 25 bp, Homo sapien
ggcagtcttttcctagatgggctga

SEQ ID NO: 3932250 - DNA, 25 bp, Homo sapien
tgggctggttgtgcgggtagcgacc

SEQ ID NO: 3932251 - DNA, 25 bp, Homo sapien
tggcccacagaaattataagatgct

SEQ ID NO: 3932252 - DNA, 25 bp, Homo sapien
gatgggctgacgcagcaggcacttt

SEQ ID NO: 3932253 - DNA, 25 bp, Homo sapien
cccaggacggcttggctggatggga

SEQ ID NO: 3932254 - DNA, 25 bp, Homo sapien
tgggaagttttcctctcgctgcgga

SEQ ID NO: 3932255 - DNA, 25 bp, Homo sapien
ctccacggcggatgggctcactttc

SEQ ID NO: 3932256 - DNA, 25 bp, Homo sapien
cccgctggccgtagggagttttctg

SEQ ID NO: 3932257 - DNA, 25 bp, Homo sapien
tctgggttcagaaacacaatgccct

SEQ ID NO: 3932258 - DNA, 25 bp, Homo sapien
tgcttccagcgaagagtgaaattcc

SEQ ID NO: 3932259 - DNA, 25 bp, Homo sapien
gcatacaattcagcgggcagtttca

SEQ ID NO: 3932260 - DNA, 25 bp, Homo sapien
tgagaacatgaaactgctgctctgg

SEQ ID NO: 3932261 - DNA, 25 bp, Homo sapien
tagtaatgcagctttggagtgtcct

SEQ ID NO: 3932262 - DNA, 25 bp, Homo sapien
cattgggccttaccaccctcaaagg

SEQ ID NO: 3932263 - DNA, 25 bp, Homo sapien
ttcagccagggtgactacgtcgggt

SEQ ID NO: 3932264 - DNA, 25 bp, Homo sapien
tcgggtcagcactccattgggcctt

SEQ ID NO: 3932265 - DNA, 25 bp, Homo sapien
gcaggtcagttagcttgtcccagag

SEQ ID NO: 3932266 - DNA, 25 bp, Homo sapien
gctggttgcagtggaacaatagacc

SEQ ID NO: 3932267 - DNA, 25 bp, Homo sapien
caacacgttactctttgtggcaaga

SEQ ID NO: 3932268 - DNA, 25 bp, Homo sapien
gatgttttacgtgcaccaaggaagg

SEQ ID NO: 3932269 - DNA, 25 bp, Homo sapien
gcctacctggtagcacaagttcttt

SEQ ID NO: 3932270 - DNA, 25 bp, Homo sapien
tacctggtagcacaagttcttttac

SEQ ID NO: 3932271 - DNA, 25 bp, Homo sapien
ctggtagcacaagttcttttacatc

SEQ ID NO: 3932272 - DNA, 25 bp, Homo sapien
atgcctacctggtagcacaagttct

SEQ ID NO: 3932273 - DNA, 25 bp, Homo sapien
ccatgttgtagcaggtattggtact

SEQ ID NO: 3932274 - DNA, 25 bp, Homo sapien
taacttatcttactgccattgaagg

SEQ ID NO: 3932275 - DNA, 25 bp, Homo sapien
tactttctgtctgcgtaggtttgtc

SEQ ID NO: 3932276 - DNA, 25 bp, Homo sapien
tcctggcttctctcgcttaacgtaa

SEQ ID NO: 3932277 - DNA, 25 bp, Homo sapien
cagaccatactggaattcttgtaca

SEQ ID NO: 3932278 - DNA, 25 bp, Homo sapien
ggaattcttgtacataacccttctg

SEQ ID NO: 3932279 - DNA, 25 bp, Homo sapien
aattcttgtacataacccttctgag

SEQ ID NO: 3932280 - DNA, 25 bp, Homo sapien
actggaattcttgtacataaccctt

SEQ ID NO: 3932281 - DNA, 25 bp, Homo sapien
gcaccacagggggaacgctgatgat

SEQ ID NO: 3932282 - DNA, 25 bp, Homo sapien
ctgatgatgccatatcccagctttg

SEQ ID NO: 3932283 - DNA, 25 bp, Homo sapien
atgatgccatatcccagctttgtga

SEQ ID NO: 3932284 - DNA, 25 bp, Homo sapien
cagggggaacgctgatgatgccata

SEQ ID NO: 3932285 - DNA, 25 bp, Homo sapien
gctcagaccactgaacgagagagga

SEQ ID NO: 3932286 - DNA, 25 bp, Homo sapien
cgagagaggaagtttgtgtctgcat

SEQ ID NO: 3932287 - DNA, 25 bp, Homo sapien
ccactgaacgagagaggaagtttgt

SEQ ID NO: 3932288 - DNA, 25 bp, Homo sapien
aacgagagaggaagtttgtgtctgc

SEQ ID NO: 3932289 - DNA, 25 bp, Homo sapien
ggactgccgtacagttttatcctca

SEQ ID NO: 3932290 - DNA, 25 bp, Homo sapien
agcacttcgggctggccggattgtc

SEQ ID NO: 3932291 - DNA, 25 bp, Homo sapien
ttatcctcattaccatcgtctttcc

SEQ ID NO: 3932292 - DNA, 25 bp, Homo sapien
tgtctcgacaggtgggactgccgta

SEQ ID NO: 3932293 - DNA, 25 bp, Homo sapien
gctgcttgagtacagcaataaactg

SEQ ID NO: 3932294 - DNA, 25 bp, Homo sapien
ctggctgcttgagtacagcaataaa

SEQ ID NO: 3932295 - DNA, 25 bp, Homo sapien
ataaactgagcacagaaagggagtc

SEQ ID NO: 3932296 - DNA, 25 bp, Homo sapien
cttgagtacagcaataaactgagca

SEQ ID NO: 3932297 - DNA, 25 bp, Homo sapien
tccagtgaccccattggattgaggg

SEQ ID NO: 3932298 - DNA, 25 bp, Homo sapien
gagactgccatcctccatgcagcag

SEQ ID NO: 3932299 - DNA, 25 bp, Homo sapien
gcagatctccagtgaccccattgga

SEQ ID NO: 3932300 - DNA, 25 bp, Homo sapien
cagggagactgccatcctccatgca

SEQ ID NO: 3932301 - DNA, 25 bp, Homo sapien
tgtttctcatctacatgatgtggaa

SEQ ID NO: 3932302 - DNA, 25 bp, Homo sapien
atctacatgatgtggaactaactgc

SEQ ID NO: 3932303 - DNA, 25 bp, Homo sapien
tctcatctacatgatgtggaactaa

SEQ ID NO: 3932304 - DNA, 25 bp, Homo sapien
tcatctacatgatgtggaactaact

SEQ ID NO: 3932305 - DNA, 25 bp, Homo sapien
tttctgttactttcacttcacatgt

SEQ ID NO: 3932306 - DNA, 25 bp, Homo sapien
gattcagcagaatttaagcacagtg

SEQ ID NO: 3932307 - DNA, 25 bp, Homo sapien
tgctagtaaacactgaggattcagc

SEQ ID NO: 3932308 - DNA, 25 bp, Homo sapien
tcatgggagatgcattgggagtact

SEQ ID NO: 3932309 - DNA, 25 bp, Homo sapien
gttctagttctggttcgatttcaga

SEQ ID NO: 3932310 - DNA, 25 bp, Homo sapien
cgatttcagaaccagtctgcaggca

SEQ ID NO: 3932311 - DNA, 25 bp, Homo sapien
tagagaactggacaattccactgat

SEQ ID NO: 3932312 - DNA, 25 bp, Homo sapien
ggcaactctgcattgtctccttaga

SEQ ID NO: 3932313 - DNA, 25 bp, Homo sapien
tgggacttcagggatgtactactct

SEQ ID NO: 3932314 - DNA, 25 bp, Homo sapien
gacttcagggatgtactactctgcc

SEQ ID NO: 3932315 - DNA, 25 bp, Homo sapien
ttcagggatgtactactctgcctgg

SEQ ID NO: 3932316 - DNA, 25 bp, Homo sapien
aactgggacttcagggatgtactac

SEQ ID NO: 3932317 - DNA, 25 bp, Homo sapien
gacaagttcaagtaaattgttggta

SEQ ID NO: 3932318 - DNA, 25 bp, Homo sapien
caagtaaattgttggtaaaagcaga

SEQ ID NO: 3932319 - DNA, 25 bp, Homo sapien
agacaagttcaagtaaattgttggt

SEQ ID NO: 3932320 - DNA, 25 bp, Homo sapien
ttcaagtaaattgttggtaaaagca

SEQ ID NO: 3932321 - DNA, 25 bp, Homo sapien
aggcgtgtgcgcgtggcggttctgt

SEQ ID NO: 3932322 - DNA, 25 bp, Homo sapien
ctcaggcccctcatcctcggccgct

SEQ ID NO: 3932323 - DNA, 25 bp, Homo sapien
tctgtgctcccctcccgttgggcag

SEQ ID NO: 3932324 - DNA, 25 bp, Homo sapien
gggctcctgttctcgagcgtccgct

SEQ ID NO: 3932325 - DNA, 25 bp, Homo sapien
tccgcctgaggcgagaagcgaattg

SEQ ID NO: 3932326 - DNA, 25 bp, Homo sapien
aggaggacgaggactacgtgccgtc

SEQ ID NO: 3932327 - DNA, 25 bp, Homo sapien
gaggcgagaagcgaattgccccgcc

SEQ ID NO: 3932328 - DNA, 25 bp, Homo sapien
tgccgtcgggtgagcgattccgcct

SEQ ID NO: 3932329 - DNA, 25 bp, Homo sapien
tagggcaaccacgtagtactctctg

SEQ ID NO: 3932330 - DNA, 25 bp, Homo sapien
gcaacatggaggaattcgactccga

SEQ ID NO: 3932331 - DNA, 25 bp, Homo sapien
tccctagagctttgccgttggaggc

SEQ ID NO: 3932332 - DNA, 25 bp, Homo sapien
tactctctgcgcatgtgcaaagcgc

SEQ ID NO: 3932333 - DNA, 25 bp, Homo sapien
ttattatattaaggcggcgaggcag

SEQ ID NO: 3932334 - DNA, 25 bp, Homo sapien
aagttccagcatgcaccgcgtccgg

SEQ ID NO: 3932335 - DNA, 25 bp, Homo sapien
cgaggcagcgccgaagactacaagt

SEQ ID NO: 3932336 - DNA, 25 bp, Homo sapien
cagcgccgaagactacaagttccag

SEQ ID NO: 3932337 - DNA, 25 bp, Homo sapien
caacagttattggtagtagcctgac

SEQ ID NO: 3932338 - DNA, 25 bp, Homo sapien
cgttgcatgtagtgaccgacttcca

SEQ ID NO: 3932339 - DNA, 25 bp, Homo sapien
cgctgtgagagggacaattctggaa

SEQ ID NO: 3932340 - DNA, 25 bp, Homo sapien
tcgatcaagcgtagggtcacactct

SEQ ID NO: 3932341 - DNA, 25 bp, Homo sapien
ctgtggccaagtggagagccctgtc

SEQ ID NO: 3932342 - DNA, 25 bp, Homo sapien
gcaccccggaaagatacgtacacag

SEQ ID NO: 3932343 - DNA, 25 bp, Homo sapien
ttattaccgagaaaacagaacagtg

SEQ ID NO: 3932344 - DNA, 25 bp, Homo sapien
gagccctgtccgaaggagtcagcta

SEQ ID NO: 3932345 - DNA, 25 bp, Homo sapien
cctcctgaccataaaagctgatttc

SEQ ID NO: 3932346 - DNA, 25 bp, Homo sapien
gaccatatgcagaaatgtcgtgtac

SEQ ID NO: 3932347 - DNA, 25 bp, Homo sapien
taagttcatacacaagagcatcatg

SEQ ID NO: 3932348 - DNA, 25 bp, Homo sapien
tgtgaagcatcggtgccattagcag

SEQ ID NO: 3932349 - DNA, 25 bp, Homo sapien
ttaaatcaggtgcagctattgctgg

SEQ ID NO: 3932350 - DNA, 25 bp, Homo sapien
caagccaagtcaacagtgtctctgg

SEQ ID NO: 3932351 - DNA, 25 bp, Homo sapien
gataccatttgaagccctcacactg

SEQ ID NO: 3932352 - DNA, 25 bp, Homo sapien
ctggagtttaccgagcagcagggaa

SEQ ID NO: 3932353 - DNA, 25 bp, Homo sapien
gagcgcctcaggttcagagctgcac

SEQ ID NO: 3932354 - DNA, 25 bp, Homo sapien
ttggccttgagcttccgagcgcctc

SEQ ID NO: 3932355 - DNA, 25 bp, Homo sapien
gctcgttcgctgatcgcgggcgcct

SEQ ID NO: 3932356 - DNA, 25 bp, Homo sapien
aggagtcagagctcgcgctcccctt

SEQ ID NO: 3932357 - DNA, 25 bp, Homo sapien
tggtaactccatagcgcggctctgt

SEQ ID NO: 3932358 - DNA, 25 bp, Homo sapien
tggtcccacaccagactttgcatgg

SEQ ID NO: 3932359 - DNA, 25 bp, Homo sapien
gctggagtccagtcataactagaac

SEQ ID NO: 3932360 - DNA, 25 bp, Homo sapien
tattgctctgaaccgaatctctgta

SEQ ID NO: 3932361 - DNA, 25 bp, Homo sapien
tctggtaccacctctgagtcaaggg

SEQ ID NO: 3932362 - DNA, 25 bp, Homo sapien
acatatgagcgaggccagctgagcc

SEQ ID NO: 3932363 - DNA, 25 bp, Homo sapien
acctgaagagaacctgcgtgctgct

SEQ ID NO: 3932364 - DNA, 25 bp, Homo sapien
tatccgagaggaagctgatgcaaca

SEQ ID NO: 3932365 - DNA, 25 bp, Homo sapien
taaattacgccgtgcgggttatgcc

SEQ ID NO: 3932366 - DNA, 25 bp, Homo sapien
gactcccaaggtgtcaggacatgct

SEQ ID NO: 3932367 - DNA, 25 bp, Homo sapien
tgtgagagtgcagtcccaacaggaa

SEQ ID NO: 3932368 - DNA, 25 bp, Homo sapien
tgcgcatgggcagtacagtcaagcc

SEQ ID NO: 3932369 - DNA, 25 bp, Homo sapien
gcctcagctggtctccttgcaaacc

SEQ ID NO: 3932370 - DNA, 25 bp, Homo sapien
agctggtctccttgcaaacccacag

SEQ ID NO: 3932371 - DNA, 25 bp, Homo sapien
acccacagggctccaggacatcctc

SEQ ID NO: 3932372 - DNA, 25 bp, Homo sapien
agctccgcctcagctggtctccttg

SEQ ID NO: 3932373 - DNA, 25 bp, Homo sapien
tgccaggatcgggatcctgagcact

SEQ ID NO: 3932374 - DNA, 25 bp, Homo sapien
aggatcgggatcctgagcactggct

SEQ ID NO: 3932375 - DNA, 25 bp, Homo sapien
caggatcgggatcctgagcactggc

SEQ ID NO: 3932376 - DNA, 25 bp, Homo sapien
ccaggatcgggatcctgagcactgg

SEQ ID NO: 3932377 - DNA, 25 bp, Homo sapien
cgtcacatagccagatgtgtcttca

SEQ ID NO: 3932378 - DNA, 25 bp, Homo sapien
ggacaccatcaggtcccttgaccgt

SEQ ID NO: 3932379 - DNA, 25 bp, Homo sapien
atgtccaggccatccactgggacac

SEQ ID NO: 3932380 - DNA, 25 bp, Homo sapien
tcagtgtccccaacttgattgtcag

SEQ ID NO: 3932381 - DNA, 25 bp, Homo sapien
atgtccccacactcgggtcggctgg

SEQ ID NO: 3932382 - DNA, 25 bp, Homo sapien
agctcgggcagagccgccaagcttt

SEQ ID NO: 3932383 - DNA, 25 bp, Homo sapien
ttttccatcagcaacgtggaaaggg

SEQ ID NO: 3932384 - DNA, 25 bp, Homo sapien
gcatcgccgctgttggcgccggttt

SEQ ID NO: 3932385 - DNA, 25 bp, Homo sapien
tgcggaccctcccagtgaagagaaa

SEQ ID NO: 3932386 - DNA, 25 bp, Homo sapien
cgtttgggagcctttgctgagtcca

SEQ ID NO: 3932387 - DNA, 25 bp, Homo sapien
tggaatttggaagagacgacgtttg

SEQ ID NO: 3932388 - DNA, 25 bp, Homo sapien
gctggctgtgcggtggaatttggaa

SEQ ID NO: 3932389 - DNA, 25 bp, Homo sapien
gagggagctctgcgccgggtccttc

SEQ ID NO: 3932390 - DNA, 25 bp, Homo sapien
gagctctgcgccgggtccttccctg

SEQ ID NO: 3932391 - DNA, 25 bp, Homo sapien
ctctgcgccgggtccttccctgtgg

SEQ ID NO: 3932392 - DNA, 25 bp, Homo sapien
agggagctctgcgccgggtccttcc

SEQ ID NO: 3932393 - DNA, 25 bp, Homo sapien
catggctccggtgatccatgcttca

SEQ ID NO: 3932394 - DNA, 25 bp, Homo sapien
gttgcccctggaaggacatggctcc

SEQ ID NO: 3932395 - DNA, 25 bp, Homo sapien
tgaggatgcgtgcagtctcctccaa

SEQ ID NO: 3932396 - DNA, 25 bp, Homo sapien
cttcctgatcccaagcaggtcgttg

SEQ ID NO: 3932397 - DNA, 25 bp, Homo sapien
acagcctgggcacttggccctcctc

SEQ ID NO: 3932398 - DNA, 25 bp, Homo sapien
caacagcctgggcacttggccctcc

SEQ ID NO: 3932399 - DNA, 25 bp, Homo sapien
aacagcctgggcacttggccctcct

SEQ ID NO: 3932400 - DNA, 25 bp, Homo sapien
ggtgaccaccatccctgtgacagtg

SEQ ID NO: 3932401 - DNA, 25 bp, Homo sapien
accttttgaaagagcccagcggaca

SEQ ID NO: 3932402 - DNA, 25 bp, Homo sapien
gagcacttatcctagaaaggccgtt

SEQ ID NO: 3932403 - DNA, 25 bp, Homo sapien
cgatggtaaagttcgcctgggtgca

SEQ ID NO: 3932404 - DNA, 25 bp, Homo sapien
tccagagttgtgcagagggaccacg

SEQ ID NO: 3932405 - DNA, 25 bp, Homo sapien
cattttagggtcactatgaggtcag

SEQ ID NO: 3932406 - DNA, 25 bp, Homo sapien
taaagatgcacaaggctttcagggc

SEQ ID NO: 3932407 - DNA, 25 bp, Homo sapien
gatgagatgagatccaacgtcaaga

SEQ ID NO: 3932408 - DNA, 25 bp, Homo sapien
ctacagttggtagttcagtgggcat

SEQ ID NO: 3932409 - DNA, 25 bp, Homo sapien
ccgagagaggtggttgactacagtt

SEQ ID NO: 3932410 - DNA, 25 bp, Homo sapien
agcaggcaggcagtatccgagagag

SEQ ID NO: 3932411 - DNA, 25 bp, Homo sapien
gactacagttggtagttcagtgggc

SEQ ID NO: 3932412 - DNA, 25 bp, Homo sapien
ggtgctaggatcacttttgacagtg

SEQ ID NO: 3932413 - DNA, 25 bp, Homo sapien
gataccaaaaaattgatggtattct

SEQ ID NO: 3932414 - DNA, 25 bp, Homo sapien
tggcagctcacgttatttcagaagg

SEQ ID NO: 3932415 - DNA, 25 bp, Homo sapien
gtattctggtgaccctgtgtgaaaa

SEQ ID NO: 3932416 - DNA, 25 bp, Homo sapien
gtgaagtagcgggtaaggtcatcag

SEQ ID NO: 3932417 - DNA, 25 bp, Homo sapien
cagatgcagatgttcgcttgtggtc

SEQ ID NO: 3932418 - DNA, 25 bp, Homo sapien
ttcctggacgggattgtgaagtagc

SEQ ID NO: 3932419 - DNA, 25 bp, Homo sapien
ggacttgcagtgttatgtgcccagg

SEQ ID NO: 3932420 - DNA, 25 bp, Homo sapien
tcataaacaatgagggaccagagca

SEQ ID NO: 3932421 - DNA, 25 bp, Homo sapien
tgtgatttctcatcccctgggcagt

SEQ ID NO: 3932422 - DNA, 25 bp, Homo sapien
gggactgaggtcttcataaacaatg

SEQ ID NO: 3932423 - DNA, 25 bp, Homo sapien
ggaaggaggacgagattccagactc

SEQ ID NO: 3932424 - DNA, 25 bp, Homo sapien
tgaggggaggcacagttatttgtgt

SEQ ID NO: 3932425 - DNA, 25 bp, Homo sapien
gaggggaggcacagttatttgtgtg

SEQ ID NO: 3932426 - DNA, 25 bp, Homo sapien
ttgaggggaggcacagttatttgtg

SEQ ID NO: 3932427 - DNA, 25 bp, Homo sapien
ttccaatgccagaaagaacgctccg

SEQ ID NO: 3932428 - DNA, 25 bp, Homo sapien
gaattccaatgccagaaagaacgct

SEQ ID NO: 3932429 - DNA, 25 bp, Homo sapien
cagaattccaatgccagaaagaacg

SEQ ID NO: 3932430 - DNA, 25 bp, Homo sapien
caatgccagaaagaacgctccgtgc

SEQ ID NO: 3932431 - DNA, 25 bp, Homo sapien
tgcccttcggtagctggtcccttaa

SEQ ID NO: 3932432 - DNA, 25 bp, Homo sapien
cttggcagcgccgttgggattggag

SEQ ID NO: 3932433 - DNA, 25 bp, Homo sapien
tggaggaagagggtctcgggtggag

SEQ ID NO: 3932434 - DNA, 25 bp, Homo sapien
tctcgggtggagtgacgctgaggcg

SEQ ID NO: 3932435 - DNA, 25 bp, Homo sapien
tctctgcctacattttaacgggatc

SEQ ID NO: 3932436 - DNA, 25 bp, Homo sapien
ctctgaagggaggtgagtcaaaagt

SEQ ID NO: 3932437 - DNA, 25 bp, Homo sapien
atttaaaactcggtagcagctgggc

SEQ ID NO: 3932438 - DNA, 25 bp, Homo sapien
tttcaggcacaagttcgagatcagc

SEQ ID NO: 3932439 - DNA, 25 bp, Homo sapien
aactgatcttcttgcaaacccacag

SEQ ID NO: 3932440 - DNA, 25 bp, Homo sapien
ccagctccccatcaactgatcttct

SEQ ID NO: 3932441 - DNA, 25 bp, Homo sapien
cccagctccccatcaactgatcttc

SEQ ID NO: 3932442 - DNA, 25 bp, Homo sapien
caactgatcttcttgcaaacccaca

SEQ ID NO: 3932443 - DNA, 25 bp, Homo sapien
tggtggtgtgacatccgcctaaacc

SEQ ID NO: 3932444 - DNA, 25 bp, Homo sapien
gacatccgcctaaaccgtcatcaag

SEQ ID NO: 3932445 - DNA, 25 bp, Homo sapien
tgtgacatccgcctaaaccgtcatc

SEQ ID NO: 3932446 - DNA, 25 bp, Homo sapien
caaaagggtctctctacgagttatc

SEQ ID NO: 3932447 - DNA, 25 bp, Homo sapien
cagctctggcagacacgccaagctt

SEQ ID NO: 3932448 - DNA, 25 bp, Homo sapien
cagacacgccaagctttgaggtact

SEQ ID NO: 3932449 - DNA, 25 bp, Homo sapien
cttcattctccaccggaggtgtccc

SEQ ID NO: 3932450 - DNA, 25 bp, Homo sapien
ggcccagctgtgacgctcctctgtc

SEQ ID NO: 3932451 - DNA, 25 bp, Homo sapien
ctgtggtagccccaggacaccccca

SEQ ID NO: 3932452 - DNA, 25 bp, Homo sapien
tgtggtagccccaggacacccccat

SEQ ID NO: 3932453 - DNA, 25 bp, Homo sapien
ggccaccctgggaccgcagccacgt

SEQ ID NO: 3932454 - DNA, 25 bp, Homo sapien
accaggcagcgctgaagattgcggg

SEQ ID NO: 3932455 - DNA, 25 bp, Homo sapien
tccccgagacatggcccctcggtcg

SEQ ID NO: 3932456 - DNA, 25 bp, Homo sapien
cacgtctgaaagctcctcaccaggc

SEQ ID NO: 3932457 - DNA, 25 bp, Homo sapien
tgtcatcaaggtgcctgggtcttgg

SEQ ID NO: 3932458 - DNA, 25 bp, Homo sapien
cccaagagcgaggagggccaagatt

SEQ ID NO: 3932459 - DNA, 25 bp, Homo sapien
ggccaagattaagattcgacttcct

SEQ ID NO: 3932460 - DNA, 25 bp, Homo sapien
ggaggcagcacggattcctgtgtca

SEQ ID NO: 3932461 - DNA, 25 bp, Homo sapien
gcaaatcttgtataaagaacccatg

SEQ ID NO: 3932462 - DNA, 25 bp, Homo sapien
tgtcgtttttagtgctcctttaggc

SEQ ID NO: 3932463 - DNA, 25 bp, Homo sapien
gtttaaattcacataaggcaatgag

SEQ ID NO: 3932464 - DNA, 25 bp, Homo sapien
cagtttactttggagatcagttgtc

SEQ ID NO: 3932465 - DNA, 25 bp, Homo sapien
cttgactaaggaacagggtgcccat

SEQ ID NO: 3932466 - DNA, 25 bp, Homo sapien
gcagaataccaagcagtccagtgga

SEQ ID NO: 3932467 - DNA, 25 bp, Homo sapien
gattaccctcgtggctaagcaagtg

SEQ ID NO: 3932468 - DNA, 25 bp, Homo sapien
tggatctttgccgtactgtgactgg

SEQ ID NO: 3932469 - DNA, 25 bp, Homo sapien
ttcactccttaactgtccatactta

SEQ ID NO: 3932470 - DNA, 25 bp, Homo sapien
tccttaactgtccatacttatcagc

SEQ ID NO: 3932471 - DNA, 25 bp, Homo sapien
cttaactgtccatacttatcagcca

SEQ ID NO: 3932472 - DNA, 25 bp, Homo sapien
ggcccttcactccttaactgtccat

SEQ ID NO: 3932473 - DNA, 25 bp, Homo sapien
tgtgattaatgctatcatccgatac

SEQ ID NO: 3932474 - DNA, 25 bp, Homo sapien
ggcagggccgcagatgctccatttg

SEQ ID NO: 3932475 - DNA, 25 bp, Homo sapien
gattgcattgcagttaccaccgtcc

SEQ ID NO: 3932476 - DNA, 25 bp, Homo sapien
tttatagccttcaactgccagagtc

SEQ ID NO: 3932477 - DNA, 25 bp, Homo sapien
cacacctggcgaaaatacggtctgt

SEQ ID NO: 3932478 - DNA, 25 bp, Homo sapien
gatcatcattgactacggccttgaa

SEQ ID NO: 3932479 - DNA, 25 bp, Homo sapien
aacctgtaaaacatggacactgacc

SEQ ID NO: 3932480 - DNA, 25 bp, Homo sapien
gatactgcagtaggccaccaagaac

SEQ ID NO: 3932481 - DNA, 25 bp, Homo sapien
aaagcgacgggttcctcgcctggag

SEQ ID NO: 3932482 - DNA, 25 bp, Homo sapien
tgcgcgtcccgctcgtttcggtgcg

SEQ ID NO: 3932483 - DNA, 25 bp, Homo sapien
cgtttcggtgcgtggttcccgcctg

SEQ ID NO: 3932484 - DNA, 25 bp, Homo sapien
tcaaccggctgcaaggggatcgcct

SEQ ID NO: 3932485 - DNA, 25 bp, Homo sapien
tgttaacacagacaacagccacgac

SEQ ID NO: 3932486 - DNA, 25 bp, Homo sapien
tctcatgaagctttttggcgtggtc

SEQ ID NO: 3932487 - DNA, 25 bp, Homo sapien
tacacagctcgaaaagctaggccga

SEQ ID NO: 3932488 - DNA, 25 bp, Homo sapien
acggaaacgttctatcgccgcccag

SEQ ID NO: 3932489 - DNA, 25 bp, Homo sapien
agccgcggagctcagcgcaccgagc

SEQ ID NO: 3932490 - DNA, 25 bp, Homo sapien
agcgacggcggcgactacacggcag

SEQ ID NO: 3932491 - DNA, 25 bp, Homo sapien
gcggcgactacacggcaggcgggac

SEQ ID NO: 3932492 - DNA, 25 bp, Homo sapien
gcaccgagcacaacaacaacgacgg

SEQ ID NO: 3932493 - DNA, 25 bp, Homo sapien
gagtggtcctccttgaacatccact

SEQ ID NO: 3932494 - DNA, 25 bp, Homo sapien
agcgagtggtcctccttgaacatcc

SEQ ID NO: 3932495 - DNA, 25 bp, Homo sapien
ccagcgagtggtcctccttgaacat

SEQ ID NO: 3932496 - DNA, 25 bp, Homo sapien
gtggtcctccttgaacatccacttc

SEQ ID NO: 3932497 - DNA, 25 bp, Homo sapien
gccgctgcccgaggcaccagggcat

SEQ ID NO: 3932498 - DNA, 25 bp, Homo sapien
agccgggccgacgaccaagtgctta

SEQ ID NO: 3932499 - DNA, 25 bp, Homo sapien
caaggcccgcggagggtgacatggg

SEQ ID NO: 3932500 - DNA, 25 bp, Homo sapien
agggcatgggcgactccagcccgca

SEQ ID NO: 3932501 - DNA, 25 bp, Homo sapien
cggggctgacggccgcgcctgccca

SEQ ID NO: 3932502 - DNA, 25 bp, Homo sapien
aacggggctgacggccgcgcctgcc

SEQ ID NO: 3932503 - DNA, 25 bp, Homo sapien
acaaacggggctgacggccgcgcct

SEQ ID NO: 3932504 - DNA, 25 bp, Homo sapien
aaacggggctgacggccgcgcctgc

SEQ ID NO: 3932505 - DNA, 25 bp, Homo sapien
gggatatttcgctcgaatcttcgcg

SEQ ID NO: 3932506 - DNA, 25 bp, Homo sapien
cctgtcgggatatttcgctcgaatc

SEQ ID NO: 3932507 - DNA, 25 bp, Homo sapien
ttcgctcgaatcttcgcggactcca

SEQ ID NO: 3932508 - DNA, 25 bp, Homo sapien
aatcttcgcggactccacgcatctg

SEQ ID NO: 3932509 - DNA, 25 bp, Homo sapien
taactgggactggaacctcaacttg

SEQ ID NO: 3932510 - DNA, 25 bp, Homo sapien
tcgctggcctagatcgggagattca

SEQ ID NO: 3932511 - DNA, 25 bp, Homo sapien
gagattcagcactgaggcaccctga

SEQ ID NO: 3932512 - DNA, 25 bp, Homo sapien
gtaaaagatgaacgtcctgagactc

SEQ ID NO: 3932513 - DNA, 25 bp, Homo sapien
catggctgaggagctgatgaacaga

SEQ ID NO: 3932514 - DNA, 25 bp, Homo sapien
gagctgatgaacagagtgtgggcaa

SEQ ID NO: 3932515 - DNA, 25 bp, Homo sapien
cacatggctgaggagctgatgaaca

SEQ ID NO: 3932516 - DNA, 25 bp, Homo sapien
tgatgaacagagtgtgggcaaggag

SEQ ID NO: 3932517 - DNA, 25 bp, Homo sapien
tatcagatggaaccaagtacttccg

SEQ ID NO: 3932518 - DNA, 25 bp, Homo sapien
tgatccacatgaactgagccacagt

SEQ ID NO: 3932519 - DNA, 25 bp, Homo sapien
gaagatcgccttttcagaaggaagc

SEQ ID NO: 3932520 - DNA, 25 bp, Homo sapien
ggactgtcttatccacaaacaggaa

SEQ ID NO: 3932521 - DNA, 25 bp, Homo sapien
gaatttggcacaggcctcttctgga

SEQ ID NO: 3932522 - DNA, 25 bp, Homo sapien
cctatttggacaacattgggctagt

SEQ ID NO: 3932523 - DNA, 25 bp, Homo sapien
tctggagtcttcaaggattttcaac

SEQ ID NO: 3932524 - DNA, 25 bp, Homo sapien
cattgggctagttcccagggcttct

SEQ ID NO: 3932525 - DNA, 25 bp, Homo sapien
gcccagggtaaccacggatgcccaa

SEQ ID NO: 3932526 - DNA, 25 bp, Homo sapien
cccagggtaaccacggatgcccaag

SEQ ID NO: 3932527 - DNA, 25 bp, Homo sapien
tgattaggaagtagagtgacaagcc

SEQ ID NO: 3932528 - DNA, 25 bp, Homo sapien
gccaggaagtgaaatgacaagccag

SEQ ID NO: 3932529 - DNA, 25 bp, Homo sapien
catgtagctgagtctcccaagattt

SEQ ID NO: 3932530 - DNA, 25 bp, Homo sapien
gagaatgcccagagagtaaccccat

SEQ ID NO: 3932531 - DNA, 25 bp, Homo sapien
taaggagtccaaggcctcaacctga

SEQ ID NO: 3932532 - DNA, 25 bp, Homo sapien
tgtacaataaaaacggtgctccctg

SEQ ID NO: 3932533 - DNA, 25 bp, Homo sapien
gactgcgcagtggagacctaatcta

SEQ ID NO: 3932534 - DNA, 25 bp, Homo sapien
gagacatctgaggtcactagcccag

SEQ ID NO: 3932535 - DNA, 25 bp, Homo sapien
ttctcgtaaagctgtcccatagtta

SEQ ID NO: 3932536 - DNA, 25 bp, Homo sapien
ccttctcgtaaagctgtcccatagt

SEQ ID NO: 3932537 - DNA, 25 bp, Homo sapien
ctcgtaaagctgtcccatagttagg

SEQ ID NO: 3932538 - DNA, 25 bp, Homo sapien
gccaaaagtgttctctccgctgtag

SEQ ID NO: 3932539 - DNA, 25 bp, Homo sapien
aagcagttacggtgcacctagccca

SEQ ID NO: 3932540 - DNA, 25 bp, Homo sapien
tagctcagtccaacatgattggcag

SEQ ID NO: 3932541 - DNA, 25 bp, Homo sapien
ctagtgaagcaagtgttctgactgc

SEQ ID NO: 3932542 - DNA, 25 bp, Homo sapien
aatggctggctatttacaagataca

SEQ ID NO: 3932543 - DNA, 25 bp, Homo sapien
gtttggtacaccaagcaaggccaga

SEQ ID NO: 3932544 - DNA, 25 bp, Homo sapien
cagacggaaacctcctggaagacag

SEQ ID NO: 3932545 - DNA, 25 bp, Homo sapien
cgtatttgtgccctagtatgcagca

SEQ ID NO: 3932546 - DNA, 25 bp, Homo sapien
gaaacttcactacctatcttatggg

SEQ ID NO: 3932547 - DNA, 25 bp, Homo sapien
acctttttgacctccagtgaatgcc

SEQ ID NO: 3932548 - DNA, 25 bp, Homo sapien
tcaacttccctgtttattgctgcct

SEQ ID NO: 3932549 - DNA, 25 bp, Homo sapien
tgctgcctcttgtgaacctttttga

SEQ ID NO: 3932550 - DNA, 25 bp, Homo sapien
tgtaagtttcgggacgtgcatcccc

SEQ ID NO: 3932551 - DNA, 25 bp, Homo sapien
gccccttgctggtgaaaccaacctg

SEQ ID NO: 3932552 - DNA, 25 bp, Homo sapien
cattgaaactaagcagtgtctccac

SEQ ID NO: 3932553 - DNA, 25 bp, Homo sapien
taagctttacccaacaatagaggca

SEQ ID NO: 3932554 - DNA, 25 bp, Homo sapien
tctctggcaaatgatactgtgggca

SEQ ID NO: 3932555 - DNA, 25 bp, Homo sapien
agaacaagcctgtccggcactgctt

SEQ ID NO: 3932556 - DNA, 25 bp, Homo sapien
atatgctgtgtttggttttaccctt

SEQ ID NO: 3932557 - DNA, 25 bp, Homo sapien
aattttgaaccatgttaattatatt

SEQ ID NO: 3932558 - DNA, 25 bp, Homo sapien
aatatgctgtgtttggttttaccct

SEQ ID NO: 3932559 - DNA, 25 bp, Homo sapien
aaattttgaaccatgttaattatat

SEQ ID NO: 3932560 - DNA, 25 bp, Homo sapien
cttcccatggagatcacaaggctct

SEQ ID NO: 3932561 - DNA, 25 bp, Homo sapien
gccatgccccttttggaatctgtaa

SEQ ID NO: 3932562 - DNA, 25 bp, Homo sapien
tgttgccaattatagaagctcgctg

SEQ ID NO: 3932563 - DNA, 25 bp, Homo sapien
gaaattattcgaactcgccagtctg

SEQ ID NO: 3932564 - DNA, 25 bp, Homo sapien
agtggtgagcaaagatcgtaccgct

SEQ ID NO: 3932565 - DNA, 25 bp, Homo sapien
tagtggtgagcaaagatcgtaccgc

SEQ ID NO: 3932566 - DNA, 25 bp, Homo sapien
gtggtgagcaaagatcgtaccgctg

SEQ ID NO: 3932567 - DNA, 25 bp, Homo sapien
gtagtggtgagcaaagatcgtaccg

SEQ ID NO: 3932568 - DNA, 25 bp, Homo sapien
acataatcatgggactgccggtggc

SEQ ID NO: 3932569 - DNA, 25 bp, Homo sapien
gagaatcaaagatctagtaacactg

SEQ ID NO: 3932570 - DNA, 25 bp, Homo sapien
ttttcctactacctagagaaagcca

SEQ ID NO: 3932571 - DNA, 25 bp, Homo sapien
cttacaattgaaagagttctgtcca

SEQ ID NO: 3932572 - DNA, 25 bp, Homo sapien
cagctaggaggccaagaacgcttac

SEQ ID NO: 3932573 - DNA, 25 bp, Homo sapien
tgatgctcagctcacccttcttggt

SEQ ID NO: 3932574 - DNA, 25 bp, Homo sapien
gctcatcacgtcaggcaaggaactc

SEQ ID NO: 3932575 - DNA, 25 bp, Homo sapien
gatctcatacggaatgatgctcagc

SEQ ID NO: 3932576 - DNA, 25 bp, Homo sapien
tctggcgataccttgtttcctaaac

SEQ ID NO: 3932577 - DNA, 25 bp, Homo sapien
aacgcttaccttgtctttgaggcca

SEQ ID NO: 3932578 - DNA, 25 bp, Homo sapien
tttaggaaacaaggtatcgccagag

SEQ ID NO: 3932579 - DNA, 25 bp, Homo sapien
accaagaagggtgagctgagcatca

SEQ ID NO: 3932580 - DNA, 25 bp, Homo sapien
tcattccgtatgagatcacactgct

SEQ ID NO: 3932581 - DNA, 25 bp, Homo sapien
tttggcctcaaagacaaggtaagcg

SEQ ID NO: 3932582 - DNA, 25 bp, Homo sapien
ggtaagcgttcttggcctcctagct

SEQ ID NO: 3932583 - DNA, 25 bp, Homo sapien
gagttccttgcctgacgtgatgagc

SEQ ID NO: 3932584 - DNA, 25 bp, Homo sapien
ccacctagcagagggcagtattctg

SEQ ID NO: 3932585 - DNA, 25 bp, Homo sapien
taaccaagacctctgcattacagga

SEQ ID NO: 3932586 - DNA, 25 bp, Homo sapien
ggtacaggtggccttgttgtcactt

SEQ ID NO: 3932587 - DNA, 25 bp, Homo sapien
gagtgagatgtctacatggaacttg

SEQ ID NO: 3932588 - DNA, 25 bp, Homo sapien
tgtgggtatgggtcttccccattga

SEQ ID NO: 3932589 - DNA, 25 bp, Homo sapien
cacttaaaatatgcagggcggccag

SEQ ID NO: 3932590 - DNA, 25 bp, Homo sapien
caaaatccgcagtcaagcaattcat

SEQ ID NO: 3932591 - DNA, 25 bp, Homo sapien
taggtgggccccactggtctgacca

SEQ ID NO: 3932592 - DNA, 25 bp, Homo sapien
tcctgtaatgcagaggtcttggtta

SEQ ID NO: 3932593 - DNA, 25 bp, Homo sapien
caaaagtgacaacaaggccacctgt

SEQ ID NO: 3932594 - DNA, 25 bp, Homo sapien
ctggccgccctgcatattttaagtg

SEQ ID NO: 3932595 - DNA, 25 bp, Homo sapien
cagaatactgccctctgctaggtgg

SEQ ID NO: 3932596 - DNA, 25 bp, Homo sapien
cagactctcctaccgcaaaggcttt

SEQ ID NO: 3932597 - DNA, 25 bp, Homo sapien
gacactcacttcttgctcagtttcg

SEQ ID NO: 3932598 - DNA, 25 bp, Homo sapien
ggctttaaagactcgcagcgacact

SEQ ID NO: 3932599 - DNA, 25 bp, Homo sapien
agaaggccccggcacagcagccttg

SEQ ID NO: 3932600 - DNA, 25 bp, Homo sapien
cttgctcagtttcggctcgctgcca

SEQ ID NO: 3932601 - DNA, 25 bp, Homo sapien
cttggtgggaacctcgcggcgcttc

SEQ ID NO: 3932602 - DNA, 25 bp, Homo sapien
gggaagcgccgcgaggttcccacca

SEQ ID NO: 3932603 - DNA, 25 bp, Homo sapien
tggcagcgagccgaaactgagcaag

SEQ ID NO: 3932604 - DNA, 25 bp, Homo sapien
aaagtggatggcagcgagccgaaac

SEQ ID NO: 3932605 - DNA, 25 bp, Homo sapien
aaagcctttgcggtaggagagtctg

SEQ ID NO: 3932606 - DNA, 25 bp, Homo sapien
agtgtcgctgcgagtctttaaagcc

SEQ ID NO: 3932607 - DNA, 25 bp, Homo sapien
cgaaactgagcaagaagtgagtgtc

SEQ ID NO: 3932608 - DNA, 25 bp, Homo sapien
gcagacgcctctgccgcgaagcgca

SEQ ID NO: 3932609 - DNA, 25 bp, Homo sapien
aagcgcagcactgggcctgcgcagc

SEQ ID NO: 3932610 - DNA, 25 bp, Homo sapien
agccgcggcgcatcgagagtgcccg

SEQ ID NO: 3932611 - DNA, 25 bp, Homo sapien
ctctgccgcgaagcgcagcactggg

SEQ ID NO: 3932612 - DNA, 25 bp, Homo sapien
tactagaagagctaccccctcgcga

SEQ ID NO: 3932613 - DNA, 25 bp, Homo sapien
gcctggcacacagagctcaactgac

SEQ ID NO: 3932614 - DNA, 25 bp, Homo sapien
cctcgcgagcgcctggcacacagag

SEQ ID NO: 3932615 - DNA, 25 bp, Homo sapien
actagaagagctaccccctcgcgag

SEQ ID NO: 3932616 - DNA, 25 bp, Homo sapien
gatgagcgtcgacagccgacgcttg

SEQ ID NO: 3932617 - DNA, 25 bp, Homo sapien
gaaggacatggagctgccgtcgtcc

SEQ ID NO: 3932618 - DNA, 25 bp, Homo sapien
ccaggatgtactgcgtggagatgaa

SEQ ID NO: 3932619 - DNA, 25 bp, Homo sapien
ggagatgaaatcacccgaggcctcg

SEQ ID NO: 3932620 - DNA, 25 bp, Homo sapien
agctccagcctctcgttgcgctcca

SEQ ID NO: 3932621 - DNA, 25 bp, Homo sapien
ttccgagccggtgtccgccgccgag

SEQ ID NO: 3932622 - DNA, 25 bp, Homo sapien
gcttccgagccggtgtccgccgccg

SEQ ID NO: 3932623 - DNA, 25 bp, Homo sapien
ctttgcttccgagccggtgtccgcc

SEQ ID NO: 3932624 - DNA, 25 bp, Homo sapien
cgtcgtccgcatccgtgaaggcgat

SEQ ID NO: 3932625 - DNA, 25 bp, Homo sapien
ccttcacgtaggtaaggatggctac

SEQ ID NO: 3932626 - DNA, 25 bp, Homo sapien
tccacaaggcgttaccggtgacgga

SEQ ID NO: 3932627 - DNA, 25 bp, Homo sapien
tagcggtccttcagggactgccacg

SEQ ID NO: 3932628 - DNA, 25 bp, Homo sapien
gggccaagcgctgctaccgaagatg

SEQ ID NO: 3932629 - DNA, 25 bp, Homo sapien
cgctgctaccgaagatgccaagatg

SEQ ID NO: 3932630 - DNA, 25 bp, Homo sapien
cccacccgcgcagatatccgcgagg

SEQ ID NO: 3932631 - DNA, 25 bp, Homo sapien
caagcgctgctaccgaagatgccaa

SEQ ID NO: 3932632 - DNA, 25 bp, Homo sapien
gactacaggaactctccgccacggc

SEQ ID NO: 3932633 - DNA, 25 bp, Homo sapien
ggactacaggaactctccgccacgg

SEQ ID NO: 3932634 - DNA, 25 bp, Homo sapien
actacaggaactctccgccacggcc

SEQ ID NO: 3932635 - DNA, 25 bp, Homo sapien
tgaaccacaaatggttcagagcaac

SEQ ID NO: 3932636 - DNA, 25 bp, Homo sapien
gagcaactcccaccatactgatata

SEQ ID NO: 3932637 - DNA, 25 bp, Homo sapien
tcatatcttctcttactcattttag

SEQ ID NO: 3932638 - DNA, 25 bp, Homo sapien
aatcaggcagcatcctgaaccacaa

SEQ ID NO: 3932639 - DNA, 25 bp, Homo sapien
tagaaacagaaggcggaatggttgt

SEQ ID NO: 3932640 - DNA, 25 bp, Homo sapien
tgtttccaggggctaagaggaggga

SEQ ID NO: 3932641 - DNA, 25 bp, Homo sapien
gaggtatctagaaatattgaattca

SEQ ID NO: 3932642 - DNA, 25 bp, Homo sapien
acagaaggcggaatggttgtttcca

SEQ ID NO: 3932643 - DNA, 25 bp, Homo sapien
gagtttcaacaagacctcagccaaa

SEQ ID NO: 3932644 - DNA, 25 bp, Homo sapien
tcataaattgggttccttgggaagc

SEQ ID NO: 3932645 - DNA, 25 bp, Homo sapien
aaagcctaggacgtgctcattcacc

SEQ ID NO: 3932646 - DNA, 25 bp, Homo sapien
cagccaaaaccatgggcaactctgg

SEQ ID NO: 3932647 - DNA, 25 bp, Homo sapien
tctggagttctcttattctgtggtt

SEQ ID NO: 3932648 - DNA, 25 bp, Homo sapien
ggcaaatctggagttctcttattct

SEQ ID NO: 3932649 - DNA, 25 bp, Homo sapien
gcaaatctggagttctcttattctg

SEQ ID NO: 3932650 - DNA, 25 bp, Homo sapien
aatctggagttctcttattctgtgg

SEQ ID NO: 3932651 - DNA, 25 bp, Homo sapien
tagttcacaagacgctttatcatgg

SEQ ID NO: 3932652 - DNA, 25 bp, Homo sapien
gtatggctcctgtctttctctgtag

SEQ ID NO: 3932653 - DNA, 25 bp, Homo sapien
cctaggtaggtcatgtttgagagct

SEQ ID NO: 3932654 - DNA, 25 bp, Homo sapien
tgctatatgagaagaggcctaggta

SEQ ID NO: 3932655 - DNA, 25 bp, Homo sapien
tacaatatctggtctcttccaacta

SEQ ID NO: 3932656 - DNA, 25 bp, Homo sapien
tctgcattccaatcacactggactt

SEQ ID NO: 3932657 - DNA, 25 bp, Homo sapien
gacagaatgatgagtaaaaccagct

SEQ ID NO: 3932658 - DNA, 25 bp, Homo sapien
accagctcctaatcaccaagtcttg

SEQ ID NO: 3932659 - DNA, 25 bp, Homo sapien
gggtggatcatcatcacacatagtt

SEQ ID NO: 3932660 - DNA, 25 bp, Homo sapien
gtgggtggatcatcatcacacatag

SEQ ID NO: 3932661 - DNA, 25 bp, Homo sapien
tgagtcttcctcaggtgtgggtgga

SEQ ID NO: 3932662 - DNA, 25 bp, Homo sapien
gatcatcatcacacatagttatatg

SEQ ID NO: 3932663 - DNA, 25 bp, Homo sapien
ctctggttgagaaactttttcttct

SEQ ID NO: 3932664 - DNA, 25 bp, Homo sapien
tcatcttgtcgggaccaaatgggat

SEQ ID NO: 3932665 - DNA, 25 bp, Homo sapien
catcttgtcgggaccaaatgggata

SEQ ID NO: 3932666 - DNA, 25 bp, Homo sapien
gaaattcaatcctccgagctacatt

SEQ ID NO: 3932667 - DNA, 25 bp, Homo sapien
ttctttcgaaattcaatcctccgag

SEQ ID NO: 3932668 - DNA, 25 bp, Homo sapien
aacagccaaagagcagggtacccaa

SEQ ID NO: 3932669 - DNA, 25 bp, Homo sapien
tatgtagaccaactcctgtctgatt

SEQ ID NO: 3932670 - DNA, 25 bp, Homo sapien
ggtaaagaaagacatccggcagact

SEQ ID NO: 3932671 - DNA, 25 bp, Homo sapien
cactctctagagttgtgtgcgcgtt

SEQ ID NO: 3932672 - DNA, 25 bp, Homo sapien
ttaagaacatgcctgtgacacagct

SEQ ID NO: 3932673 - DNA, 25 bp, Homo sapien
tgtcaaggttaagaacatgcctgtg

SEQ ID NO: 3932674 - DNA, 25 bp, Homo sapien
taagaacatgcctgtgacacagctt

SEQ ID NO: 3932675 - DNA, 25 bp, Homo sapien
aagttttgtcaaggttaagaacatg

SEQ ID NO: 3932676 - DNA, 25 bp, Homo sapien
ttagactctcatgagcgctgcctcc

SEQ ID NO: 3932677 - DNA, 25 bp, Homo sapien
taatctctgacaaattcttgactct

SEQ ID NO: 3932678 - DNA, 25 bp, Homo sapien
gagcttgtgatatatgaaagcaggc

SEQ ID NO: 3932679 - DNA, 25 bp, Homo sapien
cccactggctctataatctctgaca

SEQ ID NO: 3932680 - DNA, 25 bp, Homo sapien
tgggaactccagctttaggtgcata

SEQ ID NO: 3932681 - DNA, 25 bp, Homo sapien
atttgggaactccagctttaggtgc

SEQ ID NO: 3932682 - DNA, 25 bp, Homo sapien
ttgggaactccagctttaggtgcat

SEQ ID NO: 3932683 - DNA, 25 bp, Homo sapien
tttgggaactccagctttaggtgca

SEQ ID NO: 3932684 - DNA, 25 bp, Homo sapien
gcctcagtctcctgactaactgtga

SEQ ID NO: 3932685 - DNA, 25 bp, Homo sapien
aggcacacgctaccacacctggcta

SEQ ID NO: 3932686 - DNA, 25 bp, Homo sapien
cagtctcctgactaactgtgactac

SEQ ID NO: 3932687 - DNA, 25 bp, Homo sapien
ctcagtctcctgactaactgtgact

SEQ ID NO: 3932688 - DNA, 25 bp, Homo sapien
tctatttacaaaaacgcaactggct

SEQ ID NO: 3932689 - DNA, 25 bp, Homo sapien
ggcctagagttagccaattcctgct

SEQ ID NO: 3932690 - DNA, 25 bp, Homo sapien
taggcctagagttagccaattcctg

SEQ ID NO: 3932691 - DNA, 25 bp, Homo sapien
caaaaacgcaactggctggatctgg

SEQ ID NO: 3932692 - DNA, 25 bp, Homo sapien
agagttggagatcagccttggccaa

SEQ ID NO: 3932693 - DNA, 25 bp, Homo sapien
ataaaattttacgcctggcgtggtg

SEQ ID NO: 3932694 - DNA, 25 bp, Homo sapien
aacatggggaaacctcatttctgct

SEQ ID NO: 3932695 - DNA, 25 bp, Homo sapien
ctcaagagttggagatcagccttgg

SEQ ID NO: 3932696 - DNA, 25 bp, Homo sapien
gcaaagagactgacatagctgcggg

SEQ ID NO: 3932697 - DNA, 25 bp, Homo sapien
gagccggcgcacacagcctgttttt

SEQ ID NO: 3932698 - DNA, 25 bp, Homo sapien
gattcctccaggtgttcaaaggaca

SEQ ID NO: 3932699 - DNA, 25 bp, Homo sapien
tcaagttatctgctggcttcggcct

SEQ ID NO: 3932700 - DNA, 25 bp, Homo sapien
gaatcagccatttactaagaaaact

SEQ ID NO: 3932701 - DNA, 25 bp, Homo sapien
ggaattggtattatcaaactatagt

SEQ ID NO: 3932702 - DNA, 25 bp, Homo sapien
agtttaggccctaggtgtgctggtt

SEQ ID NO: 3932703 - DNA, 25 bp, Homo sapien
cagccatttactaagaaaactccgg

SEQ ID NO: 3932704 - DNA, 25 bp, Homo sapien
tattgttattgatgacccctggatg

SEQ ID NO: 3932705 - DNA, 25 bp, Homo sapien
cccctggatggagcgagaaggtcac

SEQ ID NO: 3932706 - DNA, 25 bp, Homo sapien
gaaactgccataagctatgatcatg

SEQ ID NO: 3932707 - DNA, 25 bp, Homo sapien
ttttcctagctcacaaatatggcag

SEQ ID NO: 3932708 - DNA, 25 bp, Homo sapien
cagtctcaggcaaccacctctactt

SEQ ID NO: 3932709 - DNA, 25 bp, Homo sapien
cagcccttacagtctcaggcaacca

SEQ ID NO: 3932710 - DNA, 25 bp, Homo sapien
tttccaatacaagggatcagatgct

SEQ ID NO: 3932711 - DNA, 25 bp, Homo sapien
gatattaatgtctgatttatagaga

SEQ ID NO: 3932712 - DNA, 25 bp, Homo sapien
aagaactaacaggtgaacacacagg

SEQ ID NO: 3932713 - DNA, 25 bp, Homo sapien
tccctaaagaactaacaggtgaaca

SEQ ID NO: 3932714 - DNA, 25 bp, Homo sapien
taaagaactaacaggtgaacacaca

SEQ ID NO: 3932715 - DNA, 25 bp, Homo sapien
agagagaaggtaaaggttataattg

SEQ ID NO: 3932716 - DNA, 25 bp, Homo sapien
tacaggagaatctcccaaaagtgga

SEQ ID NO: 3932717 - DNA, 25 bp, Homo sapien
ggagaatctcccaaaagtggatgac

SEQ ID NO: 3932718 - DNA, 25 bp, Homo sapien
tctcccaaaagtggatgacaagatc

SEQ ID NO: 3932719 - DNA, 25 bp, Homo sapien
caaaagtggatgacaagatcagcca

SEQ ID NO: 3932720 - DNA, 25 bp, Homo sapien
tacaaaacattagcccgatgcggtg

SEQ ID NO: 3932721 - DNA, 25 bp, Homo sapien
gaacgccagttacatcggatgagga

SEQ ID NO: 3932722 - DNA, 25 bp, Homo sapien
tcttaaggcggctgcaacaaagcac

SEQ ID NO: 3932723 - DNA, 25 bp, Homo sapien
gcagtgactaatgggcaaacagcca

SEQ ID NO: 3932724 - DNA, 25 bp, Homo sapien
gcgctcagagctcggaaatgctgaa

SEQ ID NO: 3932725 - DNA, 25 bp, Homo sapien
ccaaaagcttcttaaatatcagccc

SEQ ID NO: 3932726 - DNA, 25 bp, Homo sapien
gaaagtccttcagtaccagatgcca

SEQ ID NO: 3932727 - DNA, 25 bp, Homo sapien
aatgctgaaagtccttcagtaccag

SEQ ID NO: 3932728 - DNA, 25 bp, Homo sapien
gagctggagtagctatattaatgcc

SEQ ID NO: 3932729 - DNA, 25 bp, Homo sapien
tggaaaagatacaccagcaataacc

SEQ ID NO: 3932730 - DNA, 25 bp, Homo sapien
taagtggatcaaactgtcaaactag

SEQ ID NO: 3932731 - DNA, 25 bp, Homo sapien
agtgtatgtacctaacaacacagcc

SEQ ID NO: 3932732 - DNA, 25 bp, Homo sapien
gctctaaagcttaagagtaatacac

SEQ ID NO: 3932733 - DNA, 25 bp, Homo sapien
attggaaggtattataaaacttgtg

SEQ ID NO: 3932734 - DNA, 25 bp, Homo sapien
aacttgatagtagcagcatgtagat

SEQ ID NO: 3932735 - DNA, 25 bp, Homo sapien
aaacttgtgtaaagtgctctaaagc

SEQ ID NO: 3932736 - DNA, 25 bp, Homo sapien
ttgattttcatttatatatatctcc

SEQ ID NO: 3932737 - DNA, 25 bp, Homo sapien
ccattttctgagaaagctccatact

SEQ ID NO: 3932738 - DNA, 25 bp, Homo sapien
agtgcagatatttcttcaataatat

SEQ ID NO: 3932739 - DNA, 25 bp, Homo sapien
tatatatatctccagtagtggaatt

SEQ ID NO: 3932740 - DNA, 25 bp, Homo sapien
gaaatgtgactaaatacagactgct

SEQ ID NO: 3932741 - DNA, 25 bp, Homo sapien
aaaaagagcccatggtatgttctga

SEQ ID NO: 3932742 - DNA, 25 bp, Homo sapien
ggtggaacgggtcatctctctgtgc

SEQ ID NO: 3932743 - DNA, 25 bp, Homo sapien
tagaatgtggccaccaaaggaagag

SEQ ID NO: 3932744 - DNA, 25 bp, Homo sapien
ctagaggccaaggacaggctgcctg

SEQ ID NO: 3932745 - DNA, 25 bp, Homo sapien
ggctgcctgaagactcccaataaac

SEQ ID NO: 3932746 - DNA, 25 bp, Homo sapien
acaggctgcctgaagactcccaata

SEQ ID NO: 3932747 - DNA, 25 bp, Homo sapien
ggacaggctgcctgaagactcccaa

SEQ ID NO: 3932748 - DNA, 25 bp, Homo sapien
cgtaagggtttcagctggtctggct

SEQ ID NO: 3932749 - DNA, 25 bp, Homo sapien
gagatgacaacatttccaggcagct

SEQ ID NO: 3932750 - DNA, 25 bp, Homo sapien
tccattgtcgtaactcaggcgagat

SEQ ID NO: 3932751 - DNA, 25 bp, Homo sapien
gagattcccagtacaagccctgtag

SEQ ID NO: 3932752 - DNA, 25 bp, Homo sapien
acaatggctcactgaagtgcacaga

SEQ ID NO: 3932753 - DNA, 25 bp, Homo sapien
cagtcctgcagcttctaagaccagt

SEQ ID NO: 3932754 - DNA, 25 bp, Homo sapien
tgcagcttctaagaccagtggagcg

SEQ ID NO: 3932755 - DNA, 25 bp, Homo sapien
ttctaagaccagtggagcgcctatg

SEQ ID NO: 3932756 - DNA, 25 bp, Homo sapien
attcaactgcaagacgttctatatt

SEQ ID NO: 3932757 - DNA, 25 bp, Homo sapien
tgtgtagtaaatagctcttaacaac

SEQ ID NO: 3932758 - DNA, 25 bp, Homo sapien
tcctctgtacagagtagtagagcac

SEQ ID NO: 3932759 - DNA, 25 bp, Homo sapien
taaatagctcttaacaacagcagct

SEQ ID NO: 3932760 - DNA, 25 bp, Homo sapien
tagagcactcataagccaagagcat

SEQ ID NO: 3932761 - DNA, 25 bp, Homo sapien
tcttctcaataggtgccagaaaagc

SEQ ID NO: 3932762 - DNA, 25 bp, Homo sapien
caactaccaaagcatagggactgga

SEQ ID NO: 3932763 - DNA, 25 bp, Homo sapien
cctaagatcaggtgacaaggtactc

SEQ ID NO: 3932764 - DNA, 25 bp, Homo sapien
tagttagtcacagacaacacagttg

SEQ ID NO: 3932765 - DNA, 25 bp, Homo sapien
ctgaactcagggaaagcaattttgc

SEQ ID NO: 3932766 - DNA, 25 bp, Homo sapien
gcagcaggccaagataatatgttcc

SEQ ID NO: 3932767 - DNA, 25 bp, Homo sapien
taagcactgagaacagaacgctgaa

SEQ ID NO: 3932768 - DNA, 25 bp, Homo sapien
tatgttccgaacctgcaatgttctg

SEQ ID NO: 3932769 - DNA, 25 bp, Homo sapien
ttcatccaggtattgtgaattgtcg

SEQ ID NO: 3932770 - DNA, 25 bp, Homo sapien
tccaggtattgtgaattgtcgtagc

SEQ ID NO: 3932771 - DNA, 25 bp, Homo sapien
ggtattgtgaattgtcgtagctcat

SEQ ID NO: 3932772 - DNA, 25 bp, Homo sapien
caggtattgtgaattgtcgtagctc

SEQ ID NO: 3932773 - DNA, 25 bp, Homo sapien
aaaactgaaattgccatcagcgggc

SEQ ID NO: 3932774 - DNA, 25 bp, Homo sapien
gtggacaaccaacagcaagtaaagt

SEQ ID NO: 3932775 - DNA, 25 bp, Homo sapien
tcagcgggcttctctgaacatccat

SEQ ID NO: 3932776 - DNA, 25 bp, Homo sapien
gaagaccgtatgtcaattccgcaat

SEQ ID NO: 3932777 - DNA, 25 bp, Homo sapien
ggtgaaccttcaatggataatttca

SEQ ID NO: 3932778 - DNA, 25 bp, Homo sapien
aagtcttaggtgaaccttcaatgga

SEQ ID NO: 3932779 - DNA, 25 bp, Homo sapien
gtcaaagtcttaggtgaaccttcaa

SEQ ID NO: 3932780 - DNA, 25 bp, Homo sapien
tcttaggtgaaccttcaatggataa

SEQ ID NO: 3932781 - DNA, 25 bp, Homo sapien
aatccccatgtgatgccaaagcacg

SEQ ID NO: 3932782 - DNA, 25 bp, Homo sapien
gatgccaaagcacgtgagaagtgaa

SEQ ID NO: 3932783 - DNA, 25 bp, Homo sapien
catgtgatgccaaagcacgtgagaa

SEQ ID NO: 3932784 - DNA, 25 bp, Homo sapien
agcacgtgagaagtgaaatagtgca

SEQ ID NO: 3932785 - DNA, 25 bp, Homo sapien
ggagagaagcattccaaagtggtcc

SEQ ID NO: 3932786 - DNA, 25 bp, Homo sapien
ggtcctggcacccatctaacgtcag

SEQ ID NO: 3932787 - DNA, 25 bp, Homo sapien
agcattccaaagtggtcctggcacc

SEQ ID NO: 3932788 - DNA, 25 bp, Homo sapien
gtggtggagagaagcattccaaagt

SEQ ID NO: 3932789 - DNA, 25 bp, Homo sapien
gcagcaactgtatatcttcatgata

SEQ ID NO: 3932790 - DNA, 25 bp, Homo sapien
tccctgccttcattatgtagcagca

SEQ ID NO: 3932791 - DNA, 25 bp, Homo sapien
cagggtagtaactttcagtgtcttt

SEQ ID NO: 3932792 - DNA, 25 bp, Homo sapien
gtgtctttgtactcctctgtgagaa

SEQ ID NO: 3932793 - DNA, 25 bp, Homo sapien
cttcattgctttaggccaatcagga

SEQ ID NO: 3932794 - DNA, 25 bp, Homo sapien
tctctccttgtcataccacttctcc

SEQ ID NO: 3932795 - DNA, 25 bp, Homo sapien
tcttcattgctttaggccaatcagg

SEQ ID NO: 3932796 - DNA, 25 bp, Homo sapien
ttattgacagacaggcgcctgccag

SEQ ID NO: 3932797 - DNA, 25 bp, Homo sapien
ctgccagagattcaacagacactct

SEQ ID NO: 3932798 - DNA, 25 bp, Homo sapien
ggtctcagaaccattcctctccata

SEQ ID NO: 3932799 - DNA, 25 bp, Homo sapien
caacagacactctggggtctcagaa

SEQ ID NO: 3932800 - DNA, 25 bp, Homo sapien
attgtaaagaccatcaaggctagga

SEQ ID NO: 3932801 - DNA, 25 bp, Homo sapien
tgacctctccacagaaactctacaa

SEQ ID NO: 3932802 - DNA, 25 bp, Homo sapien
attcaacattcttaaagaaaagaat

SEQ ID NO: 3932803 - DNA, 25 bp, Homo sapien
gccagaagagagaggggaccaatat

SEQ ID NO: 3932804 - DNA, 25 bp, Homo sapien
ccaatgtctgcacagtcactaaggg

SEQ ID NO: 3932805 - DNA, 25 bp, Homo sapien
aatgtctgcacagtcactaagggct

SEQ ID NO: 3932806 - DNA, 25 bp, Homo sapien
ctccaatgtctgcacagtcactaag

SEQ ID NO: 3932807 - DNA, 25 bp, Homo sapien
tgtctgcacagtcactaagggcttc

SEQ ID NO: 3932808 - DNA, 25 bp, Homo sapien
cgtgcatcactagaagtgcaaatct

SEQ ID NO: 3932809 - DNA, 25 bp, Homo sapien
tgcatcactagaagtgcaaatctcc

SEQ ID NO: 3932810 - DNA, 25 bp, Homo sapien
gtgcatcactagaagtgcaaatctc

SEQ ID NO: 3932811 - DNA, 25 bp, Homo sapien
acgtgcatcactagaagtgcaaatc

SEQ ID NO: 3932812 - DNA, 25 bp, Homo sapien
gacaaccagctctgcatgaactctg

SEQ ID NO: 3932813 - DNA, 25 bp, Homo sapien
gcaattgcaatgtgcgttggacaca

SEQ ID NO: 3932814 - DNA, 25 bp, Homo sapien
tgctgacttccccaggagaaccaat

SEQ ID NO: 3932815 - DNA, 25 bp, Homo sapien
tattccagctgctgcggttgacaac

SEQ ID NO: 3932816 - DNA, 25 bp, Homo sapien
aatatctttattcagtggtggactc

SEQ ID NO: 3932817 - DNA, 25 bp, Homo sapien
tcagtggtggactctcagaactctt

SEQ ID NO: 3932818 - DNA, 25 bp, Homo sapien
ctttattcagtggtggactctcaga

SEQ ID NO: 3932819 - DNA, 25 bp, Homo sapien
tctgattcccagtaaagctgtcaat

SEQ ID NO: 3932820 - DNA, 25 bp, Homo sapien
tcctcactgaaaagcactcagcatc

SEQ ID NO: 3932821 - DNA, 25 bp, Homo sapien
gaggctctcagagcgctccagtcct

SEQ ID NO: 3932822 - DNA, 25 bp, Homo sapien
tgggctcccccaaaagatcttgaga

SEQ ID NO: 3932823 - DNA, 25 bp, Homo sapien
ggtcttcagcccctctaggtctctg

SEQ ID NO: 3932824 - DNA, 25 bp, Homo sapien
ttgaggacagctcccgtgacagatc

SEQ ID NO: 3932825 - DNA, 25 bp, Homo sapien
tctgttccaattttgagtagataca

SEQ ID NO: 3932826 - DNA, 25 bp, Homo sapien
tacagaagtagcgtcttgaggacag

SEQ ID NO: 3932827 - DNA, 25 bp, Homo sapien
ggaattcccagcttcgactctgttc

SEQ ID NO: 3932828 - DNA, 25 bp, Homo sapien
taaagatgcaggcagctactggtct

SEQ ID NO: 3932829 - DNA, 25 bp, Homo sapien
gacactttgcctattttgaccagac

SEQ ID NO: 3932830 - DNA, 25 bp, Homo sapien
tgttaaccggtcacattggcaagat

SEQ ID NO: 3932831 - DNA, 25 bp, Homo sapien
tcagaaatctaagccaatgcagcat

SEQ ID NO: 3932832 - DNA, 25 bp, Homo sapien
ttccggagagcgctaagtctcattc

SEQ ID NO: 3932833 - DNA, 25 bp, Homo sapien
tcctttaagcgaaatgtaggaagag

SEQ ID NO: 3932834 - DNA, 25 bp, Homo sapien
tcttagcagcgagggcacagctctt

SEQ ID NO: 3932835 - DNA, 25 bp, Homo sapien
taatactgagactcgcctcagccag

SEQ ID NO: 3932836 - DNA, 25 bp, Homo sapien
cccatttagagaatttaagccaaag

SEQ ID NO: 3932837 - DNA, 25 bp, Homo sapien
agatttcaatcttccctaaataggt

SEQ ID NO: 3932838 - DNA, 25 bp, Homo sapien
ggatgaagggagtctgccaaattat

SEQ ID NO: 3932839 - DNA, 25 bp, Homo sapien
caagcttgtttgtcattaatcagga

SEQ ID NO: 3932840 - DNA, 25 bp, Homo sapien
gataagtacttaacagggccaccaa

SEQ ID NO: 3932841 - DNA, 25 bp, Homo sapien
taaagtgcacctaatccctgagctg

SEQ ID NO: 3932842 - DNA, 25 bp, Homo sapien
caaactggcaaccttgggctgactc

SEQ ID NO: 3932843 - DNA, 25 bp, Homo sapien
tagcaggtcagattcagcccatggg

SEQ ID NO: 3932844 - DNA, 25 bp, Homo sapien
atcgctaacacgacagatgtcacag

SEQ ID NO: 3932845 - DNA, 25 bp, Homo sapien
cctggccatcgctaacacgacagat

SEQ ID NO: 3932846 - DNA, 25 bp, Homo sapien
gccatcgctaacacgacagatgtca

SEQ ID NO: 3932847 - DNA, 25 bp, Homo sapien
tcaaccctggccatcgctaacacga

SEQ ID NO: 3932848 - DNA, 25 bp, Homo sapien
aagattggtaatgccgctgagggct

SEQ ID NO: 3932849 - DNA, 25 bp, Homo sapien
cagagaggaacacatgtagggaaga

SEQ ID NO: 3932850 - DNA, 25 bp, Homo sapien
ggaacacatgtagggaagattggta

SEQ ID NO: 3932851 - DNA, 25 bp, Homo sapien
tagggaagattggtaatgccgctga

SEQ ID NO: 3932852 - DNA, 25 bp, Homo sapien
ctgtcactggacgtatgcgaatcat

SEQ ID NO: 3932853 - DNA, 25 bp, Homo sapien
ttccatactgtttcacgggactgtg

SEQ ID NO: 3932854 - DNA, 25 bp, Homo sapien
tctctccctatgtagtagccatggt

SEQ ID NO: 3932855 - DNA, 25 bp, Homo sapien
gaaggaacttttgtggtgtgacacc

SEQ ID NO: 3932856 - DNA, 25 bp, Homo sapien
gaacacagcccgaaggactgaagga

SEQ ID NO: 3932857 - DNA, 25 bp, Homo sapien
catggcggctgcaagagaaaatgag

SEQ ID NO: 3932858 - DNA, 25 bp, Homo sapien
gaatcatggcggctgcaagagaaaa

SEQ ID NO: 3932859 - DNA, 25 bp, Homo sapien
tcagaatcatggcggctgcaagaga

SEQ ID NO: 3932860 - DNA, 25 bp, Homo sapien
tcatggcggctgcaagagaaaatga

SEQ ID NO: 3932861 - DNA, 25 bp, Homo sapien
ccattatgacagacagttcctgcat

SEQ ID NO: 3932862 - DNA, 25 bp, Homo sapien
cttaaattctttcaccattatgaca

SEQ ID NO: 3932863 - DNA, 25 bp, Homo sapien
ttctttcaccattatgacagacagt

SEQ ID NO: 3932864 - DNA, 25 bp, Homo sapien
tcaccattatgacagacagttcctg

SEQ ID NO: 3932865 - DNA, 25 bp, Homo sapien
gaagtctagtaagttcaatgagaaa

SEQ ID NO: 3932866 - DNA, 25 bp, Homo sapien
ttccagggcttactagaagtctagt

SEQ ID NO: 3932867 - DNA, 25 bp, Homo sapien
aaaatatgcctactacttccagggc

SEQ ID NO: 3932868 - DNA, 25 bp, Homo sapien
caaaaactaggatctaagatctcta

SEQ ID NO: 3932869 - DNA, 25 bp, Homo sapien
gaggctttcgtggaatcaatagaca

SEQ ID NO: 3932870 - DNA, 25 bp, Homo sapien
tagttagtgctgaggctttcgtgga

SEQ ID NO: 3932871 - DNA, 25 bp, Homo sapien
gaatcaatagacaaaacaaccaaca

SEQ ID NO: 3932872 - DNA, 25 bp, Homo sapien
gaggaacaatgccacgttagggtta

SEQ ID NO: 3932873 - DNA, 25 bp, Homo sapien
aatccaggaccatgactgctggaga

SEQ ID NO: 3932874 - DNA, 25 bp, Homo sapien
gcagacacaagaggatcatcacagt

SEQ ID NO: 3932875 - DNA, 25 bp, Homo sapien
aggcagacacaagaggatcatcaca

SEQ ID NO: 3932876 - DNA, 25 bp, Homo sapien
ttctattcagccttgcaaatccagg

SEQ ID NO: 3932877 - DNA, 25 bp, Homo sapien
tggcagggagatcagagaaggtgca

SEQ ID NO: 3932878 - DNA, 25 bp, Homo sapien
ctggcagggagatcagagaaggtgc

SEQ ID NO: 3932879 - DNA, 25 bp, Homo sapien
gagatcagagaaggtgcagcatgtt

SEQ ID NO: 3932880 - DNA, 25 bp, Homo sapien
agggagatcagagaaggtgcagcat

SEQ ID NO: 3932881 - DNA, 25 bp, Homo sapien
caaggacgataaagggtaagatgga

SEQ ID NO: 3932882 - DNA, 25 bp, Homo sapien
gtaagatggaaaacgcaccaagacg

SEQ ID NO: 3932883 - DNA, 25 bp, Homo sapien
gcagacaaggacgataaagggtaag

SEQ ID NO: 3932884 - DNA, 25 bp, Homo sapien
gaagactgtgggccatagagcagac

SEQ ID NO: 3932885 - DNA, 25 bp, Homo sapien
gccttgatggctcctacagtatgag

SEQ ID NO: 3932886 - DNA, 25 bp, Homo sapien
tctggtgtctatcgagtgcttgcct

SEQ ID NO: 3932887 - DNA, 25 bp, Homo sapien
gtttgataaccgtctcccaactctc

SEQ ID NO: 3932888 - DNA, 25 bp, Homo sapien
cagtatgagctatcaaggttaacca

SEQ ID NO: 3932889 - DNA, 25 bp, Homo sapien
ctttcatcggattgtcaggccacct

SEQ ID NO: 3932890 - DNA, 25 bp, Homo sapien
cacagttcatggttcccagtgtata

SEQ ID NO: 3932891 - DNA, 25 bp, Homo sapien
cagtgtatattgatccactgagtca

SEQ ID NO: 3932892 - DNA, 25 bp, Homo sapien
tgagtcataataaagcagtgcttcc

SEQ ID NO: 3932893 - DNA, 25 bp, Homo sapien
ctgcaaccactggtatttgttagac

SEQ ID NO: 3932894 - DNA, 25 bp, Homo sapien
tgcaaccactggtatttgttagaca

SEQ ID NO: 3932895 - DNA, 25 bp, Homo sapien
atctgcaaccactggtatttgttag

SEQ ID NO: 3932896 - DNA, 25 bp, Homo sapien
tctgcaaccactggtatttgttaga

SEQ ID NO: 3932897 - DNA, 25 bp, Homo sapien
tcacccagttggagctaccatatcc

SEQ ID NO: 3932898 - DNA, 25 bp, Homo sapien
ttgagtggccacagcggtgacctcc

SEQ ID NO: 3932899 - DNA, 25 bp, Homo sapien
gcgatattgtttccagttccagcca

SEQ ID NO: 3932900 - DNA, 25 bp, Homo sapien
ccagatgctgtcctcttggcgatat

SEQ ID NO: 3932901 - DNA, 25 bp, Homo sapien
taagcatggattgaatggccaccaa

SEQ ID NO: 3932902 - DNA, 25 bp, Homo sapien
catcaataagcatggattgaatggc

SEQ ID NO: 3932903 - DNA, 25 bp, Homo sapien
tcaatttacatcaataagcatggat

SEQ ID NO: 3932904 - DNA, 25 bp, Homo sapien
catggattgaatggccaccaagagc

SEQ ID NO: 3932905 - DNA, 25 bp, Homo sapien
tgaactctttgggtaaatgtcccag

SEQ ID NO: 3932906 - DNA, 25 bp, Homo sapien
tgaattcctggcactccacgatgct

SEQ ID NO: 3932907 - DNA, 25 bp, Homo sapien
tctgacaccacaagatgctgatctg

SEQ ID NO: 3932908 - DNA, 25 bp, Homo sapien
gctgcctttctgaggatggatgaaa

SEQ ID NO: 3932909 - DNA, 25 bp, Homo sapien
gaagctggaatccttccctgatgcc

SEQ ID NO: 3932910 - DNA, 25 bp, Homo sapien
taaagccttcccttatgtccgtgaa

SEQ ID NO: 3932911 - DNA, 25 bp, Homo sapien
cccaagtgatcgagttccataagtc

SEQ ID NO: 3932912 - DNA, 25 bp, Homo sapien
taggcccctgggtctttgtgcacat

SEQ ID NO: 3932913 - DNA, 25 bp, Homo sapien
catagagttcagaactgatgaccct

SEQ ID NO: 3932914 - DNA, 25 bp, Homo sapien
tgtttcatagagttcagaactgatg

SEQ ID NO: 3932915 - DNA, 25 bp, Homo sapien
ttcatagagttcagaactgatgacc

SEQ ID NO: 3932916 - DNA, 25 bp, Homo sapien
agagttcagaactgatgaccctcat

SEQ ID NO: 3932917 - DNA, 25 bp, Homo sapien
cctctcctccacctctttctttcat

SEQ ID NO: 3932918 - DNA, 25 bp, Homo sapien
cttccttgtcatggtcctccttctc

SEQ ID NO: 3932919 - DNA, 25 bp, Homo sapien
ttctcctctcctccacctctttctt

SEQ ID NO: 3932920 - DNA, 25 bp, Homo sapien
tcctctcctccacctctttctttca

SEQ ID NO: 3932921 - DNA, 25 bp, Homo sapien
tgcagcccccaacatttatgcaact

SEQ ID NO: 3932922 - DNA, 25 bp, Homo sapien
acatactgcagcccccaacatttat

SEQ ID NO: 3932923 - DNA, 25 bp, Homo sapien
gcccccaacatttatgcaacttttg

SEQ ID NO: 3932924 - DNA, 25 bp, Homo sapien
gtaaaacccacatactgcagccccc

SEQ ID NO: 3932925 - DNA, 25 bp, Homo sapien
cattccaaagggatgaagcgcagaa

SEQ ID NO: 3932926 - DNA, 25 bp, Homo sapien
catccgaacacttcgattcgcattc

SEQ ID NO: 3932927 - DNA, 25 bp, Homo sapien
agaaggctggagtctatagtacaca

SEQ ID NO: 3932928 - DNA, 25 bp, Homo sapien
tcgattcgcattccaattctgccct

SEQ ID NO: 3932929 - DNA, 25 bp, Homo sapien
ttctatacatttcttctccagatct

SEQ ID NO: 3932930 - DNA, 25 bp, Homo sapien
ttctccagatctgcaaacaggatca

SEQ ID NO: 3932931 - DNA, 25 bp, Homo sapien
cagtaatttacttctatacatttct

SEQ ID NO: 3932932 - DNA, 25 bp, Homo sapien
tctccagatctgcaaacaggatcac

SEQ ID NO: 3932933 - DNA, 25 bp, Homo sapien
tcttcttaattgcagtgtgatgtga

SEQ ID NO: 3932934 - DNA, 25 bp, Homo sapien
tgtggagtagaatcccatcactctg

SEQ ID NO: 3932935 - DNA, 25 bp, Homo sapien
gggctcagggatttttgatcaaatc

SEQ ID NO: 3932936 - DNA, 25 bp, Homo sapien
tgtgatgtgatctccatttggccct

SEQ ID NO: 3932937 - DNA, 25 bp, Homo sapien
gatgcctgtgttcgtccactgtgaa

SEQ ID NO: 3932938 - DNA, 25 bp, Homo sapien
aatgctgatcatctagcaggctgcc

SEQ ID NO: 3932939 - DNA, 25 bp, Homo sapien
gagattgaattctccccgtgcatgg

SEQ ID NO: 3932940 - DNA, 25 bp, Homo sapien
tgaagttgacttgtttgcccaaacg

SEQ ID NO: 3932941 - DNA, 25 bp, Homo sapien
ttttccaggtgctggaatccctcca

SEQ ID NO: 3932942 - DNA, 25 bp, Homo sapien
attttccaggtgctggaatccctcc

SEQ ID NO: 3932943 - DNA, 25 bp, Homo sapien
gtgctggaatccctccaaagctgat

SEQ ID NO: 3932944 - DNA, 25 bp, Homo sapien
tttccaggtgctggaatccctccaa

SEQ ID NO: 3932945 - DNA, 25 bp, Homo sapien
gctgcttggccaaatcaatgatatc

SEQ ID NO: 3932946 - DNA, 25 bp, Homo sapien
tctgtggtttttgctgcttggccaa

SEQ ID NO: 3932947 - DNA, 25 bp, Homo sapien
catagcaatgatctgtggtttttgc

SEQ ID NO: 3932948 - DNA, 25 bp, Homo sapien
aaatcaatgatatccactccattat

SEQ ID NO: 3932949 - DNA, 25 bp, Homo sapien
agcagaagccctgccttattccaag

SEQ ID NO: 3932950 - DNA, 25 bp, Homo sapien
gcagtgctaaataactcctggagct

SEQ ID NO: 3932951 - DNA, 25 bp, Homo sapien
gccttattccaagttcgaaattgaa

SEQ ID NO: 3932952 - DNA, 25 bp, Homo sapien
acgggcatagattgtggttgtgaac

SEQ ID NO: 3932953 - DNA, 25 bp, Homo sapien
cactcagaaagaggaggataccccc

SEQ ID NO: 3932954 - DNA, 25 bp, Homo sapien
attttcctggctggtagagattcga

SEQ ID NO: 3932955 - DNA, 25 bp, Homo sapien
ggataccccctgaaatcagctgaag

SEQ ID NO: 3932956 - DNA, 25 bp, Homo sapien
gctggtagagattcgacttaagttt

SEQ ID NO: 3932957 - DNA, 25 bp, Homo sapien
ggtgccacccgaataaatctgctca

SEQ ID NO: 3932958 - DNA, 25 bp, Homo sapien
cactgcccatcatttaattcgacac

SEQ ID NO: 3932959 - DNA, 25 bp, Homo sapien
cgtccaccgccacactcaagtgatt

SEQ ID NO: 3932960 - DNA, 25 bp, Homo sapien
ccgaataaatctgctcaggccccag

SEQ ID NO: 3932961 - DNA, 25 bp, Homo sapien
tgaaggtcactgaagttcccaaggg

SEQ ID NO: 3932962 - DNA, 25 bp, Homo sapien
gatgccacatgagtctatctgaagg

SEQ ID NO: 3932963 - DNA, 25 bp, Homo sapien
tgaaatcagatctaccactttgccg

SEQ ID NO: 3932964 - DNA, 25 bp, Homo sapien
cactttgccgctgatagaaatgagc

SEQ ID NO: 3932965 - DNA, 25 bp, Homo sapien
tttcagttctgtactcaccccttcg

SEQ ID NO: 3932966 - DNA, 25 bp, Homo sapien
tgtgaggacttggatagcagctgcc

SEQ ID NO: 3932967 - DNA, 25 bp, Homo sapien
tctccgaagtccctggactgagggc

SEQ ID NO: 3932968 - DNA, 25 bp, Homo sapien
cagatgtgaggacttggatagcagc

SEQ ID NO: 3932969 - DNA, 25 bp, Homo sapien
gtgttcacaatagttgggcaaacac

SEQ ID NO: 3932970 - DNA, 25 bp, Homo sapien
cgtgttcacaatagttgggcaaaca

SEQ ID NO: 3932971 - DNA, 25 bp, Homo sapien
tcctctgtaaccagtgttggtacag

SEQ ID NO: 3932972 - DNA, 25 bp, Homo sapien
ccagtgttggtacagttacaatgaa

SEQ ID NO: 3932973 - DNA, 25 bp, Homo sapien
agtagctcctctgtaaccagtgttg

SEQ ID NO: 3932974 - DNA, 25 bp, Homo sapien
ctgtaaccagtgttggtacagttac

SEQ ID NO: 3932975 - DNA, 25 bp, Homo sapien
ctttgtttaattgtatgaatagtaa

SEQ ID NO: 3932976 - DNA, 25 bp, Homo sapien
gtttaattgtatgaatagtaagaat

SEQ ID NO: 3932977 - DNA, 25 bp, Homo sapien
ttgtttaattgtatgaatagtaaga

SEQ ID NO: 3932978 - DNA, 25 bp, Homo sapien
tgtttaattgtatgaatagtaagaa

SEQ ID NO: 3932979 - DNA, 25 bp, Homo sapien
taatggaatagcatgaaatgaatct

SEQ ID NO: 3932980 - DNA, 25 bp, Homo sapien
catcattaatggaatagcatgaaat

SEQ ID NO: 3932981 - DNA, 25 bp, Homo sapien
aatcatcattaatggaatagcatga

SEQ ID NO: 3932982 - DNA, 25 bp, Homo sapien
aaaatcatcattaatggaatagcat

SEQ ID NO: 3932983 - DNA, 25 bp, Homo sapien
ttccaggggaccacttccatctgaa

SEQ ID NO: 3932984 - DNA, 25 bp, Homo sapien
gcttcacatgactgctcatagatag

SEQ ID NO: 3932985 - DNA, 25 bp, Homo sapien
tagaagaaatggttccaggggacca

SEQ ID NO: 3932986 - DNA, 25 bp, Homo sapien
ttcctctgtgcttataggcttcaca

SEQ ID NO: 3932987 - DNA, 25 bp, Homo sapien
ctgaaggtgatagatgtgataaaga

SEQ ID NO: 3932988 - DNA, 25 bp, Homo sapien
tgaaggtgatagatgtgataaagac

SEQ ID NO: 3932989 - DNA, 25 bp, Homo sapien
gaaggtgatagatgtgataaagacc

SEQ ID NO: 3932990 - DNA, 25 bp, Homo sapien
gcttgtgttgcttcacgctgaatag

SEQ ID NO: 3932991 - DNA, 25 bp, Homo sapien
aaacatgctgtttaagcaatacact

SEQ ID NO: 3932992 - DNA, 25 bp, Homo sapien
acatgctgtttaagcaatacacttg

SEQ ID NO: 3932993 - DNA, 25 bp, Homo sapien
aacatgctgtttaagcaatacactt

SEQ ID NO: 3932994 - DNA, 25 bp, Homo sapien
gagaaagagaggagaccatcactag

SEQ ID NO: 3932995 - DNA, 25 bp, Homo sapien
ggggagaaagagaggagaccatcac

SEQ ID NO: 3932996 - DNA, 25 bp, Homo sapien
cttgtatgcagaaatggggggagaa

SEQ ID NO: 3932997 - DNA, 25 bp, Homo sapien
agaaagagaggagaccatcactagt

SEQ ID NO: 3932998 - DNA, 25 bp, Homo sapien
tattgaccagccgtgacttcttgca

SEQ ID NO: 3932999 - DNA, 25 bp, Homo sapien
catgctggccacatactcgaaaaac

SEQ ID NO: 3933000 - DNA, 25 bp, Homo sapien
tcttgttaagtcagagccgttgtgc

SEQ ID NO: 3933001 - DNA, 25 bp, Homo sapien
tgctctgcacggttaatagtggcct

SEQ ID NO: 3933002 - DNA, 25 bp, Homo sapien
ttttgaagatcaggcgaagaacctc

SEQ ID NO: 3933003 - DNA, 25 bp, Homo sapien
ttcttcctacccaccaactcagagg

SEQ ID NO: 3933004 - DNA, 25 bp, Homo sapien
cagtaggtttgcgtttcattggttc

SEQ ID NO: 3933005 - DNA, 25 bp, Homo sapien
caggcgaagaacctccccagtaggt

SEQ ID NO: 3933006 - DNA, 25 bp, Homo sapien
tcattgcactaacttgttcagtatc

SEQ ID NO: 3933007 - DNA, 25 bp, Homo sapien
ggctagctatacatactttgagtga

SEQ ID NO: 3933008 - DNA, 25 bp, Homo sapien
atctggctagctatacatactttga

SEQ ID NO: 3933009 - DNA, 25 bp, Homo sapien
ttacttcattgcactaacttgttca

SEQ ID NO: 3933010 - DNA, 25 bp, Homo sapien
taatcacgatcttagttactggaag

SEQ ID NO: 3933011 - DNA, 25 bp, Homo sapien
aatgcagtcggcctgtgtctgtaat

SEQ ID NO: 3933012 - DNA, 25 bp, Homo sapien
taagcaagcaatccagtgtcattgg

SEQ ID NO: 3933013 - DNA, 25 bp, Homo sapien
tctttataagcaagcaatccagtgt

SEQ ID NO: 3933014 - DNA, 25 bp, Homo sapien
ctgaagtagcacaaagtctctgtag

SEQ ID NO: 3933015 - DNA, 25 bp, Homo sapien
ttagggagattttgcagataaggga

SEQ ID NO: 3933016 - DNA, 25 bp, Homo sapien
tgacaaggacgtagagccagatgcc

SEQ ID NO: 3933017 - DNA, 25 bp, Homo sapien
gccagatgccatcgtggtccaggaa

SEQ ID NO: 3933018 - DNA, 25 bp, Homo sapien
tatgaagcctcggtatcaaaggaag

SEQ ID NO: 3933019 - DNA, 25 bp, Homo sapien
gaagctctatccgtataaaatcagc

SEQ ID NO: 3933020 - DNA, 25 bp, Homo sapien
aaataccccagatgaagctgttgtc

SEQ ID NO: 3933021 - DNA, 25 bp, Homo sapien
cgcgctaagttctccgtggaaggta

SEQ ID NO: 3933022 - DNA, 25 bp, Homo sapien
cacttctctggaaaaggagacttac

SEQ ID NO: 3933023 - DNA, 25 bp, Homo sapien
tactaaatgatagaatctcatacac

SEQ ID NO: 3933024 - DNA, 25 bp, Homo sapien
gaatctcatacacttctctggaaaa

SEQ ID NO: 3933025 - DNA, 25 bp, Homo sapien
actaaatgatagaatctcatacact

SEQ ID NO: 3933026 - DNA, 25 bp, Homo sapien
tcctatggcgaagtgccgagtctcc

SEQ ID NO: 3933027 - DNA, 25 bp, Homo sapien
gaagtgccgagtctccaatatactt

SEQ ID NO: 3933028 - DNA, 25 bp, Homo sapien
gtgagttcctatggcgaagtgccga

SEQ ID NO: 3933029 - DNA, 25 bp, Homo sapien
agattgttctagtgagttcctatgg

SEQ ID NO: 3933030 - DNA, 25 bp, Homo sapien
tttcaaaaggcccattccccacatc

SEQ ID NO: 3933031 - DNA, 25 bp, Homo sapien
aatgaaaaagtcactactgtcggag

SEQ ID NO: 3933032 - DNA, 25 bp, Homo sapien
caaatgaaaaagtcactactgtcgg

SEQ ID NO: 3933033 - DNA, 25 bp, Homo sapien
ctgagatttcaaaaggcccattccc

SEQ ID NO: 3933034 - DNA, 25 bp, Homo sapien
catggtgccactggttgtcgttgaa

SEQ ID NO: 3933035 - DNA, 25 bp, Homo sapien
accctcacatggtgccactggttgt

SEQ ID NO: 3933036 - DNA, 25 bp, Homo sapien
tttcaaccctcacatggtgccactg

SEQ ID NO: 3933037 - DNA, 25 bp, Homo sapien
tgtcgttgaagtgggtgggtgactg

SEQ ID NO: 3933038 - DNA, 25 bp, Homo sapien
acaggacatgcccatcagcgggggc

SEQ ID NO: 3933039 - DNA, 25 bp, Homo sapien
cagctgatccacttgaagggaggcc

SEQ ID NO: 3933040 - DNA, 25 bp, Homo sapien
agctgatccacttgaagggaggcct

SEQ ID NO: 3933041 - DNA, 25 bp, Homo sapien
agctgactgttgagctgtaacagga

SEQ ID NO: 3933042 - DNA, 25 bp, Homo sapien
taaatcatgtcagcttgctcacagt

SEQ ID NO: 3933043 - DNA, 25 bp, Homo sapien
ctaaatcatgtcagcttgctcacag

SEQ ID NO: 3933044 - DNA, 25 bp, Homo sapien
atcatgtcagcttgctcacagttat

SEQ ID NO: 3933045 - DNA, 25 bp, Homo sapien
aatcatgtcagcttgctcacagtta

SEQ ID NO: 3933046 - DNA, 25 bp, Homo sapien
gattcttttggcgtccttgttggat

SEQ ID NO: 3933047 - DNA, 25 bp, Homo sapien
gctcaaagtctttggccaggattct

SEQ ID NO: 3933048 - DNA, 25 bp, Homo sapien
ctttggcacaggaactttttgcagg

SEQ ID NO: 3933049 - DNA, 25 bp, Homo sapien
tcttccctgggtaaggtccagctca

SEQ ID NO: 3933050 - DNA, 25 bp, Homo sapien
ctgcagagaccgaatgcagcccaga

SEQ ID NO: 3933051 - DNA, 25 bp, Homo sapien
agcctctctgtctggtggccgttcc

SEQ ID NO: 3933052 - DNA, 25 bp, Homo sapien
tgcagagaccgaatgcagcccagaa

SEQ ID NO: 3933053 - DNA, 25 bp, Homo sapien
gcagcccagaaagcctctctgtctg

SEQ ID NO: 3933054 - DNA, 25 bp, Homo sapien
atttccctccattgcggcataactt

SEQ ID NO: 3933055 - DNA, 25 bp, Homo sapien
ctccattgcggcataacttcccata

SEQ ID NO: 3933056 - DNA, 25 bp, Homo sapien
gaaagtgcagtcacaaaagaaccca

SEQ ID NO: 3933057 - DNA, 25 bp, Homo sapien
ccaaatccagggtcatcccattcaa

SEQ ID NO: 3933058 - DNA, 25 bp, Homo sapien
aaagaactgccagacatttaatcca

SEQ ID NO: 3933059 - DNA, 25 bp, Homo sapien
ttacagtcttccatgccacacttac

SEQ ID NO: 3933060 - DNA, 25 bp, Homo sapien
tcttacagtcttccatgccacactt

SEQ ID NO: 3933061 - DNA, 25 bp, Homo sapien
tcaaatagctgcatagaaaagaact

SEQ ID NO: 3933062 - DNA, 25 bp, Homo sapien
ttgtatatcacggatgagccagatc

SEQ ID NO: 3933063 - DNA, 25 bp, Homo sapien
tatatcacggatgagccagatccaa

SEQ ID NO: 3933064 - DNA, 25 bp, Homo sapien
cttgaaaattgtatatcacggatga

SEQ ID NO: 3933065 - DNA, 25 bp, Homo sapien
gaaaattgtatatcacggatgagcc

SEQ ID NO: 3933066 - DNA, 25 bp, Homo sapien
atgaaatgaagcagcgtgggagctg

SEQ ID NO: 3933067 - DNA, 25 bp, Homo sapien
gaagcagcgtgggagctggagtttt

SEQ ID NO: 3933068 - DNA, 25 bp, Homo sapien
atgaagcagcgtgggagctggagtt

SEQ ID NO: 3933069 - DNA, 25 bp, Homo sapien
aaatgaagcagcgtgggagctggag

SEQ ID NO: 3933070 - DNA, 25 bp, Homo sapien
ggcaatgatcacagaaaggtattct

SEQ ID NO: 3933071 - DNA, 25 bp, Homo sapien
cagcaagcttggtgttcgtgttgtt

SEQ ID NO: 3933072 - DNA, 25 bp, Homo sapien
tgttgttcggaaactaaatttgatc

SEQ ID NO: 3933073 - DNA, 25 bp, Homo sapien
ttggcaatgatcacagaaaggtatt

SEQ ID NO: 3933074 - DNA, 25 bp, Homo sapien
tcattatgtggtgaagttgtccatc

SEQ ID NO: 3933075 - DNA, 25 bp, Homo sapien
tctgttaatcattatgtggtgaagt

SEQ ID NO: 3933076 - DNA, 25 bp, Homo sapien
tttatttaacttgtacctgatctgc

SEQ ID NO: 3933077 - DNA, 25 bp, Homo sapien
aaagttaacaacatcaggctcttga

SEQ ID NO: 3933078 - DNA, 25 bp, Homo sapien
taaaatcctgcccaataccagagat

SEQ ID NO: 3933079 - DNA, 25 bp, Homo sapien
tgatgacaggtgaacttgtctcctt

SEQ ID NO: 3933080 - DNA, 25 bp, Homo sapien
ccaataccagagatttgactgcact

SEQ ID NO: 3933081 - DNA, 25 bp, Homo sapien
gaattctgtgcctgatgacaggtga

SEQ ID NO: 3933082 - DNA, 25 bp, Homo sapien
gactgagaccagagtgaccttacca

SEQ ID NO: 3933083 - DNA, 25 bp, Homo sapien
aataggcaagggatttcctttgcca

SEQ ID NO: 3933084 - DNA, 25 bp, Homo sapien
cttaccatcaaaggaagatgcttgc

SEQ ID NO: 3933085 - DNA, 25 bp, Homo sapien
catgcctgcatatgcctctgtcttg

SEQ ID NO: 3933086 - DNA, 25 bp, Homo sapien
catggaataagaccctctaatgtta

SEQ ID NO: 3933087 - DNA, 25 bp, Homo sapien
cgctatgccatagctatacatggaa

SEQ ID NO: 3933088 - DNA, 25 bp, Homo sapien
ggaagtagatgggtcccacagttaa

SEQ ID NO: 3933089 - DNA, 25 bp, Homo sapien
tctctttggcttcctacgctatgcc

SEQ ID NO: 3933090 - DNA, 25 bp, Homo sapien
tataggatgaaaatcagcttcccaa

SEQ ID NO: 3933091 - DNA, 25 bp, Homo sapien
tggttaatacaatcctccttatagg

SEQ ID NO: 3933092 - DNA, 25 bp, Homo sapien
aacaatagttatgtggcaggtaggc

SEQ ID NO: 3933093 - DNA, 25 bp, Homo sapien
caggtaggcttaagtgaggacagaa

SEQ ID NO: 3933094 - DNA, 25 bp, Homo sapien
gaagaaagtcatgctacgcactgaa

SEQ ID NO: 3933095 - DNA, 25 bp, Homo sapien
gaataagcttctaggtatggccagc

SEQ ID NO: 3933096 - DNA, 25 bp, Homo sapien
tcaatacagtatggctaaccctctg

SEQ ID NO: 3933097 - DNA, 25 bp, Homo sapien
taaccctctggaatcgactaaagcc

SEQ ID NO: 3933098 - DNA, 25 bp, Homo sapien
gtatcctggtccacatcactgtgtt

SEQ ID NO: 3933099 - DNA, 25 bp, Homo sapien
cagtgcagtatcctggtccacatca

SEQ ID NO: 3933100 - DNA, 25 bp, Homo sapien
agtatcctggtccacatcactgtgt

SEQ ID NO: 3933101 - DNA, 25 bp, Homo sapien
tgccagtgcagtatcctggtccaca

SEQ ID NO: 3933102 - DNA, 25 bp, Homo sapien
aggcagcctgtgaagccctgcgcac

SEQ ID NO: 3933103 - DNA, 25 bp, Homo sapien
agagaggcagcctgtgaagccctgc

SEQ ID NO: 3933104 - DNA, 25 bp, Homo sapien
agaggcagcctgtgaagccctgcgc

SEQ ID NO: 3933105 - DNA, 25 bp, Homo sapien
cagagaggcagcctgtgaagccctg

SEQ ID NO: 3933106 - DNA, 25 bp, Homo sapien
tacagctggactcagtcacgtgtcc

SEQ ID NO: 3933107 - DNA, 25 bp, Homo sapien
ccttgatgtggcatcagtgccaggc

SEQ ID NO: 3933108 - DNA, 25 bp, Homo sapien
ctgcaaacgagtgtgtcctttccct

SEQ ID NO: 3933109 - DNA, 25 bp, Homo sapien
cgtgtcctgtaacagtgacagggtc

SEQ ID NO: 3933110 - DNA, 25 bp, Homo sapien
tttgattgcattagcaaggggctct

SEQ ID NO: 3933111 - DNA, 25 bp, Homo sapien
tgattgcattagcaaggggctctct

SEQ ID NO: 3933112 - DNA, 25 bp, Homo sapien
cttttgattgcattagcaaggggct

SEQ ID NO: 3933113 - DNA, 25 bp, Homo sapien
tcacttttgattgcattagcaaggg

SEQ ID NO: 3933114 - DNA, 25 bp, Homo sapien
tgaagtctgatcattgtctccagga

SEQ ID NO: 3933115 - DNA, 25 bp, Homo sapien
caggaaaagcacttacgtgaacctt

SEQ ID NO: 3933116 - DNA, 25 bp, Homo sapien
cgccaagagtgtgagagttgcctaa

SEQ ID NO: 3933117 - DNA, 25 bp, Homo sapien
ggtacttagcacaaattaacgcaag

SEQ ID NO: 3933118 - DNA, 25 bp, Homo sapien
gaaactgtgctgacttcattgctta

SEQ ID NO: 3933119 - DNA, 25 bp, Homo sapien
taactatgtcaatggttaccaacgc

SEQ ID NO: 3933120 - DNA, 25 bp, Homo sapien
tcagccttgtgggttcacctacatt

SEQ ID NO: 3933121 - DNA, 25 bp, Homo sapien
atatgtctctaggaccatgtggcca

SEQ ID NO: 3933122 - DNA, 25 bp, Homo sapien
cctcagcactgtctacattctctga

SEQ ID NO: 3933123 - DNA, 25 bp, Homo sapien
cagcactgtctacattctctgacct

SEQ ID NO: 3933124 - DNA, 25 bp, Homo sapien
aatgcgaacagctatggcagtgatg

SEQ ID NO: 3933125 - DNA, 25 bp, Homo sapien
gctgataaatgcgaacagctatggc

SEQ ID NO: 3933126 - DNA, 25 bp, Homo sapien
tgattttcattgactgcattttgta

SEQ ID NO: 3933127 - DNA, 25 bp, Homo sapien
ttgactgcattttgtatattaagct

SEQ ID NO: 3933128 - DNA, 25 bp, Homo sapien
cagaagaagtactctttctgatttt

SEQ ID NO: 3933129 - DNA, 25 bp, Homo sapien
ttcattgactgcattttgtatatta

SEQ ID NO: 3933130 - DNA, 25 bp, Homo sapien
taacaccacgaggagacaaaagcaa

SEQ ID NO: 3933131 - DNA, 25 bp, Homo sapien
tatatcactggacgaggcttcctgg

SEQ ID NO: 3933132 - DNA, 25 bp, Homo sapien
gaaactggcattactcagggtctta

SEQ ID NO: 3933133 - DNA, 25 bp, Homo sapien
tacatggttaagagaccaaggctac

SEQ ID NO: 3933134 - DNA, 25 bp, Homo sapien
gagtataccatctaccaacataggt

SEQ ID NO: 3933135 - DNA, 25 bp, Homo sapien
tccctagagttcagctaccaatgag

SEQ ID NO: 3933136 - DNA, 25 bp, Homo sapien
ccacagaggactgtgaggcttcacc

SEQ ID NO: 3933137 - DNA, 25 bp, Homo sapien
gagtctctagcagtgcagaccacag

SEQ ID NO: 3933138 - DNA, 25 bp, Homo sapien
tggaaaagcgaaagacaaccagaat

SEQ ID NO: 3933139 - DNA, 25 bp, Homo sapien
caaacaattcgcttgaacatgcatt

SEQ ID NO: 3933140 - DNA, 25 bp, Homo sapien
cagtgacatctaattcctattgtgg

SEQ ID NO: 3933141 - DNA, 25 bp, Homo sapien
aatatttgatgattccctcagtgac

SEQ ID NO: 3933142 - DNA, 25 bp, Homo sapien
cagcttctgaactttttcctccacg

SEQ ID NO: 3933143 - DNA, 25 bp, Homo sapien
cccaacacaaagacattcagcttct

SEQ ID NO: 3933144 - DNA, 25 bp, Homo sapien
tttcctccacgttaccactctctcc

SEQ ID NO: 3933145 - DNA, 25 bp, Homo sapien
ccacatccccaacacaaagacattc

SEQ ID NO: 3933146 - DNA, 25 bp, Homo sapien
tattatttgttgcacacacaaatgt

SEQ ID NO: 3933147 - DNA, 25 bp, Homo sapien
tgtaagtacactatgttgttccctt

SEQ ID NO: 3933148 - DNA, 25 bp, Homo sapien
taatcacattgtaagtacactatgt

SEQ ID NO: 3933149 - DNA, 25 bp, Homo sapien
tttcttaatcacattgtaagtacac

SEQ ID NO: 3933150 - DNA, 25 bp, Homo sapien
tcaagattttctgagagggtatgtg

SEQ ID NO: 3933151 - DNA, 25 bp, Homo sapien
tgctgtaatgtggatctttcaccga

SEQ ID NO: 3933152 - DNA, 25 bp, Homo sapien
aatgtggatctttcaccgattcaag

SEQ ID NO: 3933153 - DNA, 25 bp, Homo sapien
tttcaccgattcaagattttctgag

SEQ ID NO: 3933154 - DNA, 25 bp, Homo sapien
ggtttccaccaagagtatgattgtc

SEQ ID NO: 3933155 - DNA, 25 bp, Homo sapien
gagtatgattgtcactgacactagg

SEQ ID NO: 3933156 - DNA, 25 bp, Homo sapien
tatgattgtcactgacactagggca

SEQ ID NO: 3933157 - DNA, 25 bp, Homo sapien
tctgagtagaggtttccaccaagag

SEQ ID NO: 3933158 - DNA, 25 bp, Homo sapien
atttaaaatacgcttattggatacg

SEQ ID NO: 3933159 - DNA, 25 bp, Homo sapien
ttcagatttaaaatacgcttattgg

SEQ ID NO: 3933160 - DNA, 25 bp, Homo sapien
ctctttcgatatccagattcagatt

SEQ ID NO: 3933161 - DNA, 25 bp, Homo sapien
aaaatacgcttattggatacgttca

SEQ ID NO: 3933162 - DNA, 25 bp, Homo sapien
cccttgtttccacgatagtaactgc

SEQ ID NO: 3933163 - DNA, 25 bp, Homo sapien
cttggttattgtacgtggtttcatc

SEQ ID NO: 3933164 - DNA, 25 bp, Homo sapien
gacacactcatcctcttaaatgtgg

SEQ ID NO: 3933165 - DNA, 25 bp, Homo sapien
tagtaactgctagcacattgaaatc

SEQ ID NO: 3933166 - DNA, 25 bp, Homo sapien
tctgatatctgcaaccagcatctca

SEQ ID NO: 3933167 - DNA, 25 bp, Homo sapien
cactcttctactgtcacacaagcaa

SEQ ID NO: 3933168 - DNA, 25 bp, Homo sapien
tcaaactcaggctttacatgtccaa

SEQ ID NO: 3933169 - DNA, 25 bp, Homo sapien
ccttctagagatattacaagtatgc

SEQ ID NO: 3933170 - DNA, 25 bp, Homo sapien
gaaccaacttgatgcatcatgggag

SEQ ID NO: 3933171 - DNA, 25 bp, Homo sapien
tcagggaaccaacttgatgcatcat

SEQ ID NO: 3933172 - DNA, 25 bp, Homo sapien
ccaacttgatgcatcatgggagtaa

SEQ ID NO: 3933173 - DNA, 25 bp, Homo sapien
gcacctcggcatccccgttgtccat

SEQ ID NO: 3933174 - DNA, 25 bp, Homo sapien
tgcaaaaatcaattcaagatgcatt

SEQ ID NO: 3933175 - DNA, 25 bp, Homo sapien
aaataacaccgcatatctacaacta

SEQ ID NO: 3933176 - DNA, 25 bp, Homo sapien
ttatgcaaaaatcaattcaagatgc

SEQ ID NO: 3933177 - DNA, 25 bp, Homo sapien
tctgatctttgacaaacctgagaaa

SEQ ID NO: 3933178 - DNA, 25 bp, Homo sapien
agcagctgataaacatcagcctgaa

SEQ ID NO: 3933179 - DNA, 25 bp, Homo sapien
attttgcagcagctgataaacatca

SEQ ID NO: 3933180 - DNA, 25 bp, Homo sapien
cctattttcaaacgattaagtccat

SEQ ID NO: 3933181 - DNA, 25 bp, Homo sapien
tcctattttcaaacgattaagtcca

SEQ ID NO: 3933182 - DNA, 25 bp, Homo sapien
cagagcctcccgccaggaaaggagc

SEQ ID NO: 3933183 - DNA, 25 bp, Homo sapien
gcgcaccacgtgactctcagcgcgg

SEQ ID NO: 3933184 - DNA, 25 bp, Homo sapien
ggagcggagcgaggcagtgagctct

SEQ ID NO: 3933185 - DNA, 25 bp, Homo sapien
gctctccaagaagctaggcggcttc

SEQ ID NO: 3933186 - DNA, 25 bp, Homo sapien
tccggcagacagactataagatggc

SEQ ID NO: 3933187 - DNA, 25 bp, Homo sapien
ggcagacagactataagatggcccc

SEQ ID NO: 3933188 - DNA, 25 bp, Homo sapien
tttctccggcagacagactataaga

SEQ ID NO: 3933189 - DNA, 25 bp, Homo sapien
atctttctccggcagacagactata

SEQ ID NO: 3933190 - DNA, 25 bp, Homo sapien
aatttatgggctttggctggcctga

SEQ ID NO: 3933191 - DNA, 25 bp, Homo sapien
cattatatttctcctgaacagtatg

SEQ ID NO: 3933192 - DNA, 25 bp, Homo sapien
gctggcctgaattgtagaaggtgaa

SEQ ID NO: 3933193 - DNA, 25 bp, Homo sapien
gaacagtatgcttctagattgctta

SEQ ID NO: 3933194 - DNA, 25 bp, Homo sapien
gaggactctgctcctacattattac

SEQ ID NO: 3933195 - DNA, 25 bp, Homo sapien
tgtataatgggaatgggtgtcacag

SEQ ID NO: 3933196 - DNA, 25 bp, Homo sapien
gcgtgtgttccatgttccatagtca

SEQ ID NO: 3933197 - DNA, 25 bp, Homo sapien
tgctcctacattattacactgcgtg

SEQ ID NO: 3933198 - DNA, 25 bp, Homo sapien
caagcgcggtctgggccttattcaa

SEQ ID NO: 3933199 - DNA, 25 bp, Homo sapien
tatgaaagagtaaccatgggcctgt

SEQ ID NO: 3933200 - DNA, 25 bp, Homo sapien
cctgaaagggttggctacgcgctga

SEQ ID NO: 3933201 - DNA, 25 bp, Homo sapien
ttatctgtggattaggagcctccca

SEQ ID NO: 3933202 - DNA, 25 bp, Homo sapien
tcagtttgccctaacctccaagcta

SEQ ID NO: 3933203 - DNA, 25 bp, Homo sapien
tatgttcctgggacattcctaagtc

SEQ ID NO: 3933204 - DNA, 25 bp, Homo sapien
tccaccagaatatgggaagcagtaa

SEQ ID NO: 3933205 - DNA, 25 bp, Homo sapien
tagccccgaggtaagtttacatata

SEQ ID NO: 3933206 - DNA, 25 bp, Homo sapien
gttctctttcctatcagcgattttc

SEQ ID NO: 3933207 - DNA, 25 bp, Homo sapien
tggaaatctactggccccaaaccac

SEQ ID NO: 3933208 - DNA, 25 bp, Homo sapien
cagcgattttctaacccattctact

SEQ ID NO: 3933209 - DNA, 25 bp, Homo sapien
tttagttgtgttagactagggatgg

SEQ ID NO: 3933210 - DNA, 25 bp, Homo sapien
aaaccacataggatccctgacatac

SEQ ID NO: 3933211 - DNA, 25 bp, Homo sapien
gattcagccaagtccgaatttctgc

SEQ ID NO: 3933212 - DNA, 25 bp, Homo sapien
tattgactagacacaagatatctgt

SEQ ID NO: 3933213 - DNA, 25 bp, Homo sapien
tttcacatctataaagaggaccagc

SEQ ID NO: 3933214 - DNA, 25 bp, Homo sapien
aacaattaatatatccagcagctga

SEQ ID NO: 3933215 - DNA, 25 bp, Homo sapien
cagctgacggataactgccttggcc

SEQ ID NO: 3933216 - DNA, 25 bp, Homo sapien
gtgctgctgtgaaccgccaacaatt

SEQ ID NO: 3933217 - DNA, 25 bp, Homo sapien
cagcagctgacggataactgccttg

SEQ ID NO: 3933218 - DNA, 25 bp, Homo sapien
catgaagatccccagatttaccatt

SEQ ID NO: 3933219 - DNA, 25 bp, Homo sapien
ctctagttcatgaagatccccagat

SEQ ID NO: 3933220 - DNA, 25 bp, Homo sapien
tagttcatgaagatccccagattta

SEQ ID NO: 3933221 - DNA, 25 bp, Homo sapien
gtcctctagttcatgaagatcccca

SEQ ID NO: 3933222 - DNA, 25 bp, Homo sapien
tcgtattcttcaaacaataacacat

SEQ ID NO: 3933223 - DNA, 25 bp, Homo sapien
atcgtattcttcaaacaataacaca

SEQ ID NO: 3933224 - DNA, 25 bp, Homo sapien
catcgtattcttcaaacaataacac

SEQ ID NO: 3933225 - DNA, 25 bp, Homo sapien
tgctcagctatgcagaccaccactt

SEQ ID NO: 3933226 - DNA, 25 bp, Homo sapien
gagcttgaggcccttcattaggcaa

SEQ ID NO: 3933227 - DNA, 25 bp, Homo sapien
ccacttgcttgcattaatgcctacc

SEQ ID NO: 3933228 - DNA, 25 bp, Homo sapien
tatggctcttcacaatttatcagaa

SEQ ID NO: 3933229 - DNA, 25 bp, Homo sapien
aatctatctggaaagcatcgagtag

SEQ ID NO: 3933230 - DNA, 25 bp, Homo sapien
tccaggtgggctgatagaaatgaga

SEQ ID NO: 3933231 - DNA, 25 bp, Homo sapien
ccaggtgggctgatagaaatgagaa

SEQ ID NO: 3933232 - DNA, 25 bp, Homo sapien
gaaagcatcgagtaggtttttctca

SEQ ID NO: 3933233 - DNA, 25 bp, Homo sapien
ctgtttggcagaatcatcagtcaaa

SEQ ID NO: 3933234 - DNA, 25 bp, Homo sapien
cgttatgctctgaccacgccatggg

SEQ ID NO: 3933235 - DNA, 25 bp, Homo sapien
acatcaggaaccctgatgcagtagc

SEQ ID NO: 3933236 - DNA, 25 bp, Homo sapien
aaataaggactcactgttgtagaac

SEQ ID NO: 3933237 - DNA, 25 bp, Homo sapien
tgtgagatagggatagcagcgttat

SEQ ID NO: 3933238 - DNA, 25 bp, Homo sapien
cctgaaattctagattttgtgagca

SEQ ID NO: 3933239 - DNA, 25 bp, Homo sapien
tttatttagagcagatggtattcca

SEQ ID NO: 3933240 - DNA, 25 bp, Homo sapien
ctttcctgaaattctagattttgtg

SEQ ID NO: 3933241 - DNA, 25 bp, Homo sapien
gcagatggtattccatatttctttc

SEQ ID NO: 3933242 - DNA, 25 bp, Homo sapien
tcttcccagactccggtctctttac

SEQ ID NO: 3933243 - DNA, 25 bp, Homo sapien
agagcagggccttcggatgagaggg

SEQ ID NO: 3933244 - DNA, 25 bp, Homo sapien
ggtctctttacccagtcccacatca

SEQ ID NO: 3933245 - DNA, 25 bp, Homo sapien
tcccacatcactctgaacaccaggg

SEQ ID NO: 3933246 - DNA, 25 bp, Homo sapien
tccagagctatcctctgaaccagag

SEQ ID NO: 3933247 - DNA, 25 bp, Homo sapien
tttccagagctatcctctgaaccag

SEQ ID NO: 3933248 - DNA, 25 bp, Homo sapien
ttccagagctatcctctgaaccaga

SEQ ID NO: 3933249 - DNA, 25 bp, Homo sapien
ctgtggagttcacaagattcaaaga

SEQ ID NO: 3933250 - DNA, 25 bp, Homo sapien
tgtggagttcacaagattcaaagac

SEQ ID NO: 3933251 - DNA, 25 bp, Homo sapien
cacgacacgtctctggttcaaggaa

SEQ ID NO: 3933252 - DNA, 25 bp, Homo sapien
atgctgggcaatacacctggtgtcc

SEQ ID NO: 3933253 - DNA, 25 bp, Homo sapien
attgaaaggcccatccacgacacgt

SEQ ID NO: 3933254 - DNA, 25 bp, Homo sapien
cagaggtcctttgagcaccaggcag

SEQ ID NO: 3933255 - DNA, 25 bp, Homo sapien
tgataccatgcggaccagaaaccag

SEQ ID NO: 3933256 - DNA, 25 bp, Homo sapien
atgcggaccagaaaccagtacaccc

SEQ ID NO: 3933257 - DNA, 25 bp, Homo sapien
ctgagttgataccatgcggaccaga

SEQ ID NO: 3933258 - DNA, 25 bp, Homo sapien
taccatgcggaccagaaaccagtac

SEQ ID NO: 3933259 - DNA, 25 bp, Homo sapien
ggatgactgaatacataactgctgt

SEQ ID NO: 3933260 - DNA, 25 bp, Homo sapien
cctaattcttcaagtggatgactga

SEQ ID NO: 3933261 - DNA, 25 bp, Homo sapien
ttgttcctatatgcaccccattgtc

SEQ ID NO: 3933262 - DNA, 25 bp, Homo sapien
cccattgtctctccgaaatcctaat

SEQ ID NO: 3933263 - DNA, 25 bp, Homo sapien
tagaagcatccaactttcatcaggg

SEQ ID NO: 3933264 - DNA, 25 bp, Homo sapien
caggggagtcagacataaaataatt

SEQ ID NO: 3933265 - DNA, 25 bp, Homo sapien
caaagacataaagactgtgccatct

SEQ ID NO: 3933266 - DNA, 25 bp, Homo sapien
ggagtcttcaaagacataaagactg

SEQ ID NO: 3933267 - DNA, 25 bp, Homo sapien
tccatgtgttcccatcactgcacat

SEQ ID NO: 3933268 - DNA, 25 bp, Homo sapien
atccatgtgttcccatcactgcaca

SEQ ID NO: 3933269 - DNA, 25 bp, Homo sapien
catccatgtgttcccatcactgcac

SEQ ID NO: 3933270 - DNA, 25 bp, Homo sapien
ctatgtttcggcagtagcgagtgga

SEQ ID NO: 3933271 - DNA, 25 bp, Homo sapien
agagaacttaagtttctctatgttt

SEQ ID NO: 3933272 - DNA, 25 bp, Homo sapien
ttctctatgtttcggcagtagcgag

SEQ ID NO: 3933273 - DNA, 25 bp, Homo sapien
gtttctctatgtttcggcagtagcg

SEQ ID NO: 3933274 - DNA, 25 bp, Homo sapien
agcaggtcaggaggtacagctgact

SEQ ID NO: 3933275 - DNA, 25 bp, Homo sapien
caggaggtacagctgacttaggaac

SEQ ID NO: 3933276 - DNA, 25 bp, Homo sapien
caggtcaggaggtacagctgactta

SEQ ID NO: 3933277 - DNA, 25 bp, Homo sapien
gtcaggaggtacagctgacttagga

SEQ ID NO: 3933278 - DNA, 25 bp, Homo sapien
gtagtttaggacagcgactctgtct

SEQ ID NO: 3933279 - DNA, 25 bp, Homo sapien
actggtagtttaggacagcgactct

SEQ ID NO: 3933280 - DNA, 25 bp, Homo sapien
tggtagtttaggacagcgactctgt

SEQ ID NO: 3933281 - DNA, 25 bp, Homo sapien
ctggtagtttaggacagcgactctg

SEQ ID NO: 3933282 - DNA, 25 bp, Homo sapien
tcatttgcctccagtgcgaagttcc

SEQ ID NO: 3933283 - DNA, 25 bp, Homo sapien
gaggcctccgcaggtcatgagctgt

SEQ ID NO: 3933284 - DNA, 25 bp, Homo sapien
catgagctgtgcgtacagctgggta

SEQ ID NO: 3933285 - DNA, 25 bp, Homo sapien
gctgtgcgtacagctgggtattctc

SEQ ID NO: 3933286 - DNA, 25 bp, Homo sapien
gcccttcttagaatactggtaacag

SEQ ID NO: 3933287 - DNA, 25 bp, Homo sapien
gtgcttcccacttgaatacagccct

SEQ ID NO: 3933288 - DNA, 25 bp, Homo sapien
cacttgaatacagcccttcttagaa

SEQ ID NO: 3933289 - DNA, 25 bp, Homo sapien
gaatactggtaacagatgtagatgg

SEQ ID NO: 3933290 - DNA, 25 bp, Homo sapien
ggcgtggcaaaacacgcctgtaacc

SEQ ID NO: 3933291 - DNA, 25 bp, Homo sapien
caatgaagggagatgtggaaatcca

SEQ ID NO: 3933292 - DNA, 25 bp, Homo sapien
taacctctattgtatcctccttcga

SEQ ID NO: 3933293 - DNA, 25 bp, Homo sapien
tccttcgacctgataaagctaaaag

SEQ ID NO: 3933294 - DNA, 25 bp, Homo sapien
agctggcaaacattgaaaatgtctt

SEQ ID NO: 3933295 - DNA, 25 bp, Homo sapien
caaaagctggcaaacattgaaaatg

SEQ ID NO: 3933296 - DNA, 25 bp, Homo sapien
aaagctggcaaacattgaaaatgtc

SEQ ID NO: 3933297 - DNA, 25 bp, Homo sapien
tccaaaagctggcaaacattgaaaa

SEQ ID NO: 3933298 - DNA, 25 bp, Homo sapien
ctgcttcttggtaggcgagtttgct

SEQ ID NO: 3933299 - DNA, 25 bp, Homo sapien
cctgtatgatcactgatgaccagca

SEQ ID NO: 3933300 - DNA, 25 bp, Homo sapien
gctatagttactcctagcaggttca

SEQ ID NO: 3933301 - DNA, 25 bp, Homo sapien
ttgatcaggtatccagtcctgtatg

SEQ ID NO: 3933302 - DNA, 25 bp, Homo sapien
gaaaacctacccagctattcatgtg

SEQ ID NO: 3933303 - DNA, 25 bp, Homo sapien
tttgagcaagtattccgcagttctg

SEQ ID NO: 3933304 - DNA, 25 bp, Homo sapien
cagccctatctatgatgtgtgacca

SEQ ID NO: 3933305 - DNA, 25 bp, Homo sapien
gagcaaacctcattggatcagaaag

SEQ ID NO: 3933306 - DNA, 25 bp, Homo sapien
gtcactgttgtcttacagcagtgct

SEQ ID NO: 3933307 - DNA, 25 bp, Homo sapien
ggtacaagatcatattaccatcaaa

SEQ ID NO: 3933308 - DNA, 25 bp, Homo sapien
gctaccgatttgtacacattaattt

SEQ ID NO: 3933309 - DNA, 25 bp, Homo sapien
tctctgttcagtataattttggctg

SEQ ID NO: 3933310 - DNA, 25 bp, Homo sapien
catttagacaccaagatctgccaag

SEQ ID NO: 3933311 - DNA, 25 bp, Homo sapien
tggttaatatcactaacagtcctgg

SEQ ID NO: 3933312 - DNA, 25 bp, Homo sapien
tatagcaaaaacgtaataatggagg

SEQ ID NO: 3933313 - DNA, 25 bp, Homo sapien
gatatgcaggaattacatgaagagg

SEQ ID NO: 3933314 - DNA, 25 bp, Homo sapien
caggactcctacactggcctctgtg

SEQ ID NO: 3933315 - DNA, 25 bp, Homo sapien
gatactgcagccgaagtcacgcagc

SEQ ID NO: 3933316 - DNA, 25 bp, Homo sapien
tctgtggagggctctctcattcttc

SEQ ID NO: 3933317 - DNA, 25 bp, Homo sapien
tcttctcatgggtaaagatactgca

SEQ ID NO: 3933318 - DNA, 25 bp, Homo sapien
catttctgccactgttggaagttgt

SEQ ID NO: 3933319 - DNA, 25 bp, Homo sapien
atgggaagaggaatgacctttttct

SEQ ID NO: 3933320 - DNA, 25 bp, Homo sapien
tagtcgcagaaaactatccaggatg

SEQ ID NO: 3933321 - DNA, 25 bp, Homo sapien
tcttgggcccagagaatagtcgcag

SEQ ID NO: 3933322 - DNA, 25 bp, Homo sapien
tccagggtgatgctcgattttgata

SEQ ID NO: 3933323 - DNA, 25 bp, Homo sapien
cacatccttgatgtttaattcagga

SEQ ID NO: 3933324 - DNA, 25 bp, Homo sapien
taattcaggattgaacacgtcaaat

SEQ ID NO: 3933325 - DNA, 25 bp, Homo sapien
cacgtcaaatcgtaaggtgattcca

SEQ ID NO: 3933326 - DNA, 25 bp, Homo sapien
catcccagggtatttcagagctgac

SEQ ID NO: 3933327 - DNA, 25 bp, Homo sapien
tattttgaggattgatctgtggtaa

SEQ ID NO: 3933328 - DNA, 25 bp, Homo sapien
gatctgtggtaagggtttttgccag

SEQ ID NO: 3933329 - DNA, 25 bp, Homo sapien
gccctttattggagggacacttgaa

SEQ ID NO: 3933330 - DNA, 25 bp, Homo sapien
tttcctaacaatttcccctcatatg

SEQ ID NO: 3933331 - DNA, 25 bp, Homo sapien
ggtcttggtaatgcagcctgttatt

SEQ ID NO: 3933332 - DNA, 25 bp, Homo sapien
tatgttgtaggatggctacacgttc

SEQ ID NO: 3933333 - DNA, 25 bp, Homo sapien
cagcctgttattgacatcttcatag

SEQ ID NO: 3933334 - DNA, 25 bp, Homo sapien
atttgataatattcactcagcttct

SEQ ID NO: 3933335 - DNA, 25 bp, Homo sapien
ccaggagagcaattcacatcccata

SEQ ID NO: 3933336 - DNA, 25 bp, Homo sapien
cacattcagactgtgacttgtaggg

SEQ ID NO: 3933337 - DNA, 25 bp, Homo sapien
tcttcgcattagtcactccaggaga

SEQ ID NO: 3933338 - DNA, 25 bp, Homo sapien
cttgtagggttgtctaaaactgtat

SEQ ID NO: 3933339 - DNA, 25 bp, Homo sapien
gacatttatcttccacgcacagagt

SEQ ID NO: 3933340 - DNA, 25 bp, Homo sapien
cctacagaactacacagtcacagag

SEQ ID NO: 3933341 - DNA, 25 bp, Homo sapien
tgatatcatcatccaattggtctgg

SEQ ID NO: 3933342 - DNA, 25 bp, Homo sapien
gcagaaactggaggacgtggaaacc

SEQ ID NO: 3933343 - DNA, 25 bp, Homo sapien
tgtgtgactcatccttgttatagca

SEQ ID NO: 3933344 - DNA, 25 bp, Homo sapien
ggaagggagcatctggttttattca

SEQ ID NO: 3933345 - DNA, 25 bp, Homo sapien
taatgccacagatcaagtttgcctt

SEQ ID NO: 3933346 - DNA, 25 bp, Homo sapien
ccacgtctggccaccagtatattga

SEQ ID NO: 3933347 - DNA, 25 bp, Homo sapien
tacatgttccgtgacggtttgctgc

SEQ ID NO: 3933348 - DNA, 25 bp, Homo sapien
tggccataaggagaacttagtttac

SEQ ID NO: 3933349 - DNA, 25 bp, Homo sapien
caagttctgtagtcatagcaaccct

SEQ ID NO: 3933350 - DNA, 25 bp, Homo sapien
agcaaccctacaaaacaccagcaag

SEQ ID NO: 3933351 - DNA, 25 bp, Homo sapien
tatgcccataaaagatagaagtcct

SEQ ID NO: 3933352 - DNA, 25 bp, Homo sapien
tgtcgcagcaattggtcctatagca

SEQ ID NO: 3933353 - DNA, 25 bp, Homo sapien
cactggctatggcactggcagaaca

SEQ ID NO: 3933354 - DNA, 25 bp, Homo sapien
gacagactcggctacgtcactggct

SEQ ID NO: 3933355 - DNA, 25 bp, Homo sapien
cactttcactgccaacgagactcag

SEQ ID NO: 3933356 - DNA, 25 bp, Homo sapien
caactaagttcatggccactttcac

SEQ ID NO: 3933357 - DNA, 25 bp, Homo sapien
aacgagactcagaacatatattttg

SEQ ID NO: 3933358 - DNA, 25 bp, Homo sapien
tgtgggaaacaactaagttcatggc

SEQ ID NO: 3933359 - DNA, 25 bp, Homo sapien
ttctgagttgattttctcaacttga

SEQ ID NO: 3933360 - DNA, 25 bp, Homo sapien
tcaaagcctaaatgttctctctttt

SEQ ID NO: 3933361 - DNA, 25 bp, Homo sapien
tttttgtcttctgccaggagccaga

SEQ ID NO: 3933362 - DNA, 25 bp, Homo sapien
tctcaacttgaagctttttgtcttc

SEQ ID NO: 3933363 - DNA, 25 bp, Homo sapien
tggcaaaacggccccatttgtcatc

SEQ ID NO: 3933364 - DNA, 25 bp, Homo sapien
ggcaaaacggccccatttgtcatca

SEQ ID NO: 3933365 - DNA, 25 bp, Homo sapien
acagaagcaggtagaaatttggcaa

SEQ ID NO: 3933366 - DNA, 25 bp, Homo sapien
tttggcaaaacggccccatttgtca

SEQ ID NO: 3933367 - DNA, 25 bp, Homo sapien
cagtccacatatgacctggtcttcc

SEQ ID NO: 3933368 - DNA, 25 bp, Homo sapien
tggccaaggagacagtccacatatg

SEQ ID NO: 3933369 - DNA, 25 bp, Homo sapien
gagacagtccacatatgacctggtc

SEQ ID NO: 3933370 - DNA, 25 bp, Homo sapien
tgccttgtccatggccaaggagaca

SEQ ID NO: 3933371 - DNA, 25 bp, Homo sapien
tcactttcctgaaacgatgaagaac

SEQ ID NO: 3933372 - DNA, 25 bp, Homo sapien
tcctgaaacgatgaagaacttttct

SEQ ID NO: 3933373 - DNA, 25 bp, Homo sapien
tattttgctcttagttatccctgat

SEQ ID NO: 3933374 - DNA, 25 bp, Homo sapien
ctattttgctcttagttatccctga

SEQ ID NO: 3933375 - DNA, 25 bp, Homo sapien
agggcaggttaatattcctggcttt

SEQ ID NO: 3933376 - DNA, 25 bp, Homo sapien
caaaaagttacaatctttgctgatt

SEQ ID NO: 3933377 - DNA, 25 bp, Homo sapien
gtatctgtatgccagagggcaaaaa

SEQ ID NO: 3933378 - DNA, 25 bp, Homo sapien
tatgccagagggcaaaaagttacaa

SEQ ID NO: 3933379 - DNA, 25 bp, Homo sapien
gatgaaacggatcactgccacagca

SEQ ID NO: 3933380 - DNA, 25 bp, Homo sapien
tagggtgccagagtgatgatgaaac

SEQ ID NO: 3933381 - DNA, 25 bp, Homo sapien
attcatccattcctagcagcaggaa

SEQ ID NO: 3933382 - DNA, 25 bp, Homo sapien
cagcaggaagaatatgtgtgccagg

SEQ ID NO: 3933383 - DNA, 25 bp, Homo sapien
gaatgcaatggaagattaactcggt

SEQ ID NO: 3933384 - DNA, 25 bp, Homo sapien
ggcatgtcccgctctccttggtgtg

SEQ ID NO: 3933385 - DNA, 25 bp, Homo sapien
gacacactagctccactgaatggct

SEQ ID NO: 3933386 - DNA, 25 bp, Homo sapien
cacattctgagtattgaggattgca

SEQ ID NO: 3933387 - DNA, 25 bp, Homo sapien
tatttggcagggcacaaactgtcat

SEQ ID NO: 3933388 - DNA, 25 bp, Homo sapien
ctattgtacccttgtctaaaatggc

SEQ ID NO: 3933389 - DNA, 25 bp, Homo sapien
caaacctataatgaattagttttgg

SEQ ID NO: 3933390 - DNA, 25 bp, Homo sapien
tctaatgctgtttgttgaagagtca

SEQ ID NO: 3933391 - DNA, 25 bp, Homo sapien
tccacacagtgaatagctccgagac

SEQ ID NO: 3933392 - DNA, 25 bp, Homo sapien
gaaatggtccacatcaaagggagaa

SEQ ID NO: 3933393 - DNA, 25 bp, Homo sapien
taagctgccataagctgacagacag

SEQ ID NO: 3933394 - DNA, 25 bp, Homo sapien
gacagacagtcatgatggatatcat

SEQ ID NO: 3933395 - DNA, 25 bp, Homo sapien
caaaagctccgcataatctgctccc

SEQ ID NO: 3933396 - DNA, 25 bp, Homo sapien
ctcttcacaaaagctccgcataatc

SEQ ID NO: 3933397 - DNA, 25 bp, Homo sapien
aaaagctccgcataatctgctccca

SEQ ID NO: 3933398 - DNA, 25 bp, Homo sapien
ttcacaaaagctccgcataatctgc

SEQ ID NO: 3933399 - DNA, 25 bp, Homo sapien
tgcccttggaatatagcatagctcc

SEQ ID NO: 3933400 - DNA, 25 bp, Homo sapien
gttggatgaatgagtctgtcccttt

SEQ ID NO: 3933401 - DNA, 25 bp, Homo sapien
tccttttctggaccagggaattcat

SEQ ID NO: 3933402 - DNA, 25 bp, Homo sapien
taaaagactggagtgagtgtctgcc

SEQ ID NO: 3933403 - DNA, 25 bp, Homo sapien
ggaggaggggtagatgagaaaactg

SEQ ID NO: 3933404 - DNA, 25 bp, Homo sapien
taggaggaggggtagatgagaaaac

SEQ ID NO: 3933405 - DNA, 25 bp, Homo sapien
ctaggaggaggggtagatgagaaaa

SEQ ID NO: 3933406 - DNA, 25 bp, Homo sapien
aggaggggtagatgagaaaactgac

SEQ ID NO: 3933407 - DNA, 25 bp, Homo sapien
caatgcttgtcaatataaaagcccg

SEQ ID NO: 3933408 - DNA, 25 bp, Homo sapien
ggcccaatggcaatgcttgtcaata

SEQ ID NO: 3933409 - DNA, 25 bp, Homo sapien
ttgtcaatataaaagcccgagtcat

SEQ ID NO: 3933410 - DNA, 25 bp, Homo sapien
gaatttgcggcccaatggcaatgct

SEQ ID NO: 3933411 - DNA, 25 bp, Homo sapien
ctcccatctgctgggagaatggatc

SEQ ID NO: 3933412 - DNA, 25 bp, Homo sapien
actcccatctgctgggagaatggat

SEQ ID NO: 3933413 - DNA, 25 bp, Homo sapien
catcaaaagggtaaaggaaatctgt

SEQ ID NO: 3933414 - DNA, 25 bp, Homo sapien
ttgttaaaagaaggacagctgagag

SEQ ID NO: 3933415 - DNA, 25 bp, Homo sapien
tctctaatcgtgaaggtagaaatcg

SEQ ID NO: 3933416 - DNA, 25 bp, Homo sapien
agttctcagtacttggaaacaccca

SEQ ID NO: 3933417 - DNA, 25 bp, Homo sapien
gacttgactgtcaactataggacaa

SEQ ID NO: 3933418 - DNA, 25 bp, Homo sapien
caagagctcgtttcctgggacctgc

SEQ ID NO: 3933419 - DNA, 25 bp, Homo sapien
caaatgtcatttaaccagtgggata

SEQ ID NO: 3933420 - DNA, 25 bp, Homo sapien
caacttccatgaataagcgggcaag

SEQ ID NO: 3933421 - DNA, 25 bp, Homo sapien
taatgaaaatcacaccaggagaagg

SEQ ID NO: 3933422 - DNA, 25 bp, Homo sapien
cactgagcaagtgtatgtttcaaac

SEQ ID NO: 3933423 - DNA, 25 bp, Homo sapien
cagaggcagacgcaaatgggctctt

SEQ ID NO: 3933424 - DNA, 25 bp, Homo sapien
tcccacgtaagcaggaagcactgag

SEQ ID NO: 3933425 - DNA, 25 bp, Homo sapien
gctgctgtagcaagacaaaatcttc

SEQ ID NO: 3933426 - DNA, 25 bp, Homo sapien
acccagtggaggtggcacagatatt

SEQ ID NO: 3933427 - DNA, 25 bp, Homo sapien
ttctgccctcgagactgataagaac

SEQ ID NO: 3933428 - DNA, 25 bp, Homo sapien
ctgataagaacccagtggaggtggc

SEQ ID NO: 3933429 - DNA, 25 bp, Homo sapien
agactgataagaacccagtggaggt

SEQ ID NO: 3933430 - DNA, 25 bp, Homo sapien
ccggagtttattaagcagaagcaga

SEQ ID NO: 3933431 - DNA, 25 bp, Homo sapien
agagtgcttggtccctcccttcttc

SEQ ID NO: 3933432 - DNA, 25 bp, Homo sapien
cagaagcagagtgcttggtccctcc

SEQ ID NO: 3933433 - DNA, 25 bp, Homo sapien
caaacattttcagatgcctttccag

SEQ ID NO: 3933434 - DNA, 25 bp, Homo sapien
ttgcagaaaagcaatctggttggaa

SEQ ID NO: 3933435 - DNA, 25 bp, Homo sapien
ttagcatggattttgcagaaaagca

SEQ ID NO: 3933436 - DNA, 25 bp, Homo sapien
gcagaaaagcaatctggttggaaat

SEQ ID NO: 3933437 - DNA, 25 bp, Homo sapien
agaaaagcaatctggttggaaatgt

SEQ ID NO: 3933438 - DNA, 25 bp, Homo sapien
gcccgtttaattcttggtgagcaca

SEQ ID NO: 3933439 - DNA, 25 bp, Homo sapien
tggcaaagtctggaatatacaccct

SEQ ID NO: 3933440 - DNA, 25 bp, Homo sapien
tccaggaaaacgagtcaatgcacgg

SEQ ID NO: 3933441 - DNA, 25 bp, Homo sapien
tctagtctgcccaggatacagggta

SEQ ID NO: 3933442 - DNA, 25 bp, Homo sapien
gaagcctcctatgggactttggtgc

SEQ ID NO: 3933443 - DNA, 25 bp, Homo sapien
tttgtcaaggccactcaggcagcga

SEQ ID NO: 3933444 - DNA, 25 bp, Homo sapien
ttttaacttagtggtgagctcctca

SEQ ID NO: 3933445 - DNA, 25 bp, Homo sapien
caactctatgtgattgggtcaagcc

SEQ ID NO: 3933446 - DNA, 25 bp, Homo sapien
tctgggcccaccaggctatgggaca

SEQ ID NO: 3933447 - DNA, 25 bp, Homo sapien
ggaatgtgtagacccgtgctcacag

SEQ ID NO: 3933448 - DNA, 25 bp, Homo sapien
tagacccgtgctcacagtggcttct

SEQ ID NO: 3933449 - DNA, 25 bp, Homo sapien
tgctgcaggtccctatagagaggga

SEQ ID NO: 3933450 - DNA, 25 bp, Homo sapien
tttcattcccagaggaagcttccat

SEQ ID NO: 3933451 - DNA, 25 bp, Homo sapien
ctttttcattcccagaggaagcttc

SEQ ID NO: 3933452 - DNA, 25 bp, Homo sapien
ttttcattcccagaggaagcttcca

SEQ ID NO: 3933453 - DNA, 25 bp, Homo sapien
tttttcattcccagaggaagcttcc

SEQ ID NO: 3933454 - DNA, 25 bp, Homo sapien
taacttgatgttcaagagcttcctg

SEQ ID NO: 3933455 - DNA, 25 bp, Homo sapien
gggatccaaggctatcctccacccc

SEQ ID NO: 3933456 - DNA, 25 bp, Homo sapien
caagggatccaaggctatcctccac

SEQ ID NO: 3933457 - DNA, 25 bp, Homo sapien
gcttcaagggatccaaggctatcct

SEQ ID NO: 3933458 - DNA, 25 bp, Homo sapien
ttcaagggatccaaggctatcctcc

SEQ ID NO: 3933459 - DNA, 25 bp, Homo sapien
gacagacgtaatcatcaggcccaaa

SEQ ID NO: 3933460 - DNA, 25 bp, Homo sapien
agtggtattccccagtcagataggg

SEQ ID NO: 3933461 - DNA, 25 bp, Homo sapien
cagacaggtcaacgtttgcagctca

SEQ ID NO: 3933462 - DNA, 25 bp, Homo sapien
tgaagatttagagcccacagtccct

SEQ ID NO: 3933463 - DNA, 25 bp, Homo sapien
gtcagtatcatcactcttcaaagaa

SEQ ID NO: 3933464 - DNA, 25 bp, Homo sapien
gtatcatcactcttcaaagaattag

SEQ ID NO: 3933465 - DNA, 25 bp, Homo sapien
taatgaagcccgtcagtatcatcac

SEQ ID NO: 3933466 - DNA, 25 bp, Homo sapien
gtggaagtaatgaagcccgtcagta

SEQ ID NO: 3933467 - DNA, 25 bp, Homo sapien
gtcactgttaagaggtctcatccaa

SEQ ID NO: 3933468 - DNA, 25 bp, Homo sapien
agataatagggaccatgatcataac

SEQ ID NO: 3933469 - DNA, 25 bp, Homo sapien
gaactctaaacgctaaaggtgactg

SEQ ID NO: 3933470 - DNA, 25 bp, Homo sapien
agaagagaggattttaacagtcaaa

SEQ ID NO: 3933471 - DNA, 25 bp, Homo sapien
gcccagggtggagagcagtgccgtg

SEQ ID NO: 3933472 - DNA, 25 bp, Homo sapien
gagtcttattttgttgcccagggtg

SEQ ID NO: 3933473 - DNA, 25 bp, Homo sapien
cggagtcttattttgttgcccaggg

SEQ ID NO: 3933474 - DNA, 25 bp, Homo sapien
caccaccacaccaggctaatttttt

SEQ ID NO: 3933475 - DNA, 25 bp, Homo sapien
atggatacctgtgccggacccacaa

SEQ ID NO: 3933476 - DNA, 25 bp, Homo sapien
tgcagcgtcagtcccgatggatacc

SEQ ID NO: 3933477 - DNA, 25 bp, Homo sapien
catccattgattgacgtctccctcg

SEQ ID NO: 3933478 - DNA, 25 bp, Homo sapien
tcacaagaggacttttgcagcgtca

SEQ ID NO: 3933479 - DNA, 25 bp, Homo sapien
tttcaacggatctggctacggctgc

SEQ ID NO: 3933480 - DNA, 25 bp, Homo sapien
tgttcgggagcgcaatgagacctct

SEQ ID NO: 3933481 - DNA, 25 bp, Homo sapien
gggccacttcggatctacgtcaggt

SEQ ID NO: 3933482 - DNA, 25 bp, Homo sapien
gataccattacttccccgtagcggc

SEQ ID NO: 3933483 - DNA, 25 bp, Homo sapien
ccacggatttcaataggacgagaca

SEQ ID NO: 3933484 - DNA, 25 bp, Homo sapien
cctcaggaaatagagatatacaaac

SEQ ID NO: 3933485 - DNA, 25 bp, Homo sapien
gaaacttctgaaaagcctttataga

SEQ ID NO: 3933486 - DNA, 25 bp, Homo sapien
ggagactctactgggcctcaggaaa

SEQ ID NO: 3933487 - DNA, 25 bp, Homo sapien
ccgggggccggggcagcagtgtctc

SEQ ID NO: 3933488 - DNA, 25 bp, Homo sapien
ggggccggggcagcagtgtctcctc

SEQ ID NO: 3933489 - DNA, 25 bp, Homo sapien
cagcagtgtctcctccgacctccat

SEQ ID NO: 3933490 - DNA, 25 bp, Homo sapien
ggcagcagtgtctcctccgacctcc

SEQ ID NO: 3933491 - DNA, 25 bp, Homo sapien
aggccctcgtcttcgggatccggcg

SEQ ID NO: 3933492 - DNA, 25 bp, Homo sapien
cactggggaactgcgtgtcctccaa

SEQ ID NO: 3933493 - DNA, 25 bp, Homo sapien
caggccctcgtcttcgggatccggc

SEQ ID NO: 3933494 - DNA, 25 bp, Homo sapien
tcactggggaactgcgtgtcctcca

SEQ ID NO: 3933495 - DNA, 25 bp, Homo sapien
ccctttcaatcactgttattccaaa

SEQ ID NO: 3933496 - DNA, 25 bp, Homo sapien
caaagcaccccattgactctggatg

SEQ ID NO: 3933497 - DNA, 25 bp, Homo sapien
aagcaccccattgactctggatgac

SEQ ID NO: 3933498 - DNA, 25 bp, Homo sapien
ttcaaagcaccccattgactctgga

SEQ ID NO: 3933499 - DNA, 25 bp, Homo sapien
tccagagccgagaggtgcttgacag

SEQ ID NO: 3933500 - DNA, 25 bp, Homo sapien
caggactccagagccgagaggtgct

SEQ ID NO: 3933501 - DNA, 25 bp, Homo sapien
acatgtgggactattctcaggggct

SEQ ID NO: 3933502 - DNA, 25 bp, Homo sapien
aggtgcttgacagggcctctgactg

SEQ ID NO: 3933503 - DNA, 25 bp, Homo sapien
tagatggcacggatggcatctcccg

SEQ ID NO: 3933504 - DNA, 25 bp, Homo sapien
tccacactaccataccgcgagtaga

SEQ ID NO: 3933505 - DNA, 25 bp, Homo sapien
gggcggtcattacacccatggtagc

SEQ ID NO: 3933506 - DNA, 25 bp, Homo sapien
taccataccgcgagtagatgggctt

SEQ ID NO: 3933507 - DNA, 25 bp, Homo sapien
gacaagctggaggaatctggacatt

SEQ ID NO: 3933508 - DNA, 25 bp, Homo sapien
gttatcctctcaggtgacacagaag

SEQ ID NO: 3933509 - DNA, 25 bp, Homo sapien
tagagatggtacaagggctgacaca

SEQ ID NO: 3933510 - DNA, 25 bp, Homo sapien
ccctggctggctggatagtgcctga

SEQ ID NO: 3933511 - DNA, 25 bp, Homo sapien
gctgctgttataagtcgaccgccta

SEQ ID NO: 3933512 - DNA, 25 bp, Homo sapien
cttatacaggaagtgccggaggccc

SEQ ID NO: 3933513 - DNA, 25 bp, Homo sapien
tccagaagtcggtccagtgtgcgct

SEQ ID NO: 3933514 - DNA, 25 bp, Homo sapien
cagtgggccctgttgtaggaacacc

SEQ ID NO: 3933515 - DNA, 25 bp, Homo sapien
ctgctgtagggggcctctagctcag

SEQ ID NO: 3933516 - DNA, 25 bp, Homo sapien
tgctgtagggggcctctagctcagg

SEQ ID NO: 3933517 - DNA, 25 bp, Homo sapien
tctgctgtagggggcctctagctca

SEQ ID NO: 3933518 - DNA, 25 bp, Homo sapien
agacgagcatgcaggcggtggtaca

SEQ ID NO: 3933519 - DNA, 25 bp, Homo sapien
tctcagccacgtggtaaatgaggcg

SEQ ID NO: 3933520 - DNA, 25 bp, Homo sapien
gaggtgctgtggagacgagcatgca

SEQ ID NO: 3933521 - DNA, 25 bp, Homo sapien
cagccacgtggtaaatgaggcgcag

SEQ ID NO: 3933522 - DNA, 25 bp, Homo sapien
tgggtaacgaatgaagagccggtcc

SEQ ID NO: 3933523 - DNA, 25 bp, Homo sapien
cattatgggcagcttggtccgtaga

SEQ ID NO: 3933524 - DNA, 25 bp, Homo sapien
tttcttcacccagcgcaggagtttg

SEQ ID NO: 3933525 - DNA, 25 bp, Homo sapien
tcagagtccagtgaacaagccatta

SEQ ID NO: 3933526 - DNA, 25 bp, Homo sapien
agattcaactaggaggcagaccacg

SEQ ID NO: 3933527 - DNA, 25 bp, Homo sapien
aaaacaaaggtggttgctcccagca

SEQ ID NO: 3933528 - DNA, 25 bp, Homo sapien
cctagacaccttggccagatctgga

SEQ ID NO: 3933529 - DNA, 25 bp, Homo sapien
tgcttagggagacaatgactggcca

SEQ ID NO: 3933530 - DNA, 25 bp, Homo sapien
ggctgtaactccacaaacaagggca

SEQ ID NO: 3933531 - DNA, 25 bp, Homo sapien
cgagcctcgcttgatgactggttaa

SEQ ID NO: 3933532 - DNA, 25 bp, Homo sapien
tacgccagcggttaaatcaggagtc

SEQ ID NO: 3933533 - DNA, 25 bp, Homo sapien
gaaaggcttttcagcacgcatgcgt

SEQ ID NO: 3933534 - DNA, 25 bp, Homo sapien
agcttctggcgcctccacattcaga

SEQ ID NO: 3933535 - DNA, 25 bp, Homo sapien
tggcgcctccacattcagaggtttc

SEQ ID NO: 3933536 - DNA, 25 bp, Homo sapien
cctcctcagtagcttctggcgcctc

SEQ ID NO: 3933537 - DNA, 25 bp, Homo sapien
tcagtagcttctggcgcctccacat

SEQ ID NO: 3933538 - DNA, 25 bp, Homo sapien
cctggttggagagaaaggagtgcag

SEQ ID NO: 3933539 - DNA, 25 bp, Homo sapien
attattgtaatgggacgaatcctcc

SEQ ID NO: 3933540 - DNA, 25 bp, Homo sapien
tcattattgtaatgggacgaatcct

SEQ ID NO: 3933541 - DNA, 25 bp, Homo sapien
cattattgtaatgggacgaatcctc

SEQ ID NO: 3933542 - DNA, 25 bp, Homo sapien
tactgataggtacacatgggctttg

SEQ ID NO: 3933543 - DNA, 25 bp, Homo sapien
ggagctcacatcctaggtcaggcaa

SEQ ID NO: 3933544 - DNA, 25 bp, Homo sapien
caatttccaatagtgtctaggccga

SEQ ID NO: 3933545 - DNA, 25 bp, Homo sapien
gattacatcgcatggtcactgccga

SEQ ID NO: 3933546 - DNA, 25 bp, Homo sapien
tatatacaaagggaatctaccaggt

SEQ ID NO: 3933547 - DNA, 25 bp, Homo sapien
gactacttcttgtgttgtgcctaca

SEQ ID NO: 3933548 - DNA, 25 bp, Homo sapien
ctcaggtgccattcaacattttgcc

SEQ ID NO: 3933549 - DNA, 25 bp, Homo sapien
tatgaatataggatcctcaggtgcc

SEQ ID NO: 3933550 - DNA, 25 bp, Homo sapien
ccagcaagtcttcagtcttcaaaga

SEQ ID NO: 3933551 - DNA, 25 bp, Homo sapien
aagtcttcagtcttcaaagacttgg

SEQ ID NO: 3933552 - DNA, 25 bp, Homo sapien
cagcaagtcttcagtcttcaaagac

SEQ ID NO: 3933553 - DNA, 25 bp, Homo sapien
gcaagtcttcagtcttcaaagactt

SEQ ID NO: 3933554 - DNA, 25 bp, Homo sapien
aagcaaggtgcaaaaccaactgcat

SEQ ID NO: 3933555 - DNA, 25 bp, Homo sapien
taatcaggtcctctatctgtggctc

SEQ ID NO: 3933556 - DNA, 25 bp, Homo sapien
ttaatccggctaatcaggtcctcta

SEQ ID NO: 3933557 - DNA, 25 bp, Homo sapien
gtcctctatctgtggctccaggctt

SEQ ID NO: 3933558 - DNA, 25 bp, Homo sapien
cttgctgaagatcattaatccggct

SEQ ID NO: 3933559 - DNA, 25 bp, Homo sapien
aaagacactgtatgagtgtagtctc

SEQ ID NO: 3933560 - DNA, 25 bp, Homo sapien
tcgcaaatatgacattgcacagtca

SEQ ID NO: 3933561 - DNA, 25 bp, Homo sapien
gagtgtagtctctagccttgctgtt

SEQ ID NO: 3933562 - DNA, 25 bp, Homo sapien
ccttgctgttctctcgcaaatatga

SEQ ID NO: 3933563 - DNA, 25 bp, Homo sapien
aggagtctaattccctatgcagggc

SEQ ID NO: 3933564 - DNA, 25 bp, Homo sapien
attccctatgcagggcctcccagag

SEQ ID NO: 3933565 - DNA, 25 bp, Homo sapien
gtctaattccctatgcagggcctcc

SEQ ID NO: 3933566 - DNA, 25 bp, Homo sapien
taattccctatgcagggcctcccag

SEQ ID NO: 3933567 - DNA, 25 bp, Homo sapien
tatgtgagctaagagcattgtaggc

SEQ ID NO: 3933568 - DNA, 25 bp, Homo sapien
gagagggcgggattctattcttaga

SEQ ID NO: 3933569 - DNA, 25 bp, Homo sapien
gcctatcagggtgaaatttgagctg

SEQ ID NO: 3933570 - DNA, 25 bp, Homo sapien
ggccctgaggtatgcacaggaacat

SEQ ID NO: 3933571 - DNA, 25 bp, Homo sapien
agccacacagaaggtgtagtacagc

SEQ ID NO: 3933572 - DNA, 25 bp, Homo sapien
gtgcaacttcatataaggggaaagc

SEQ ID NO: 3933573 - DNA, 25 bp, Homo sapien
gccacacagaaggtgtagtacagcc

SEQ ID NO: 3933574 - DNA, 25 bp, Homo sapien
aacttcatataaggggaaagccaca

SEQ ID NO: 3933575 - DNA, 25 bp, Homo sapien
ctttttgcccaagacctcctctagg

SEQ ID NO: 3933576 - DNA, 25 bp, Homo sapien
tttgcccaagacctcctctaggtgc

SEQ ID NO: 3933577 - DNA, 25 bp, Homo sapien
gctttttgcccaagacctcctctag

SEQ ID NO: 3933578 - DNA, 25 bp, Homo sapien
ttgctttttgcccaagacctcctct

SEQ ID NO: 3933579 - DNA, 25 bp, Homo sapien
gcagtgcatctggaggatcctcagt

SEQ ID NO: 3933580 - DNA, 25 bp, Homo sapien
tccttctcttggcagtgcatctgga

SEQ ID NO: 3933581 - DNA, 25 bp, Homo sapien
ctgagcctcgctttccttctcttgg

SEQ ID NO: 3933582 - DNA, 25 bp, Homo sapien
tgcatctggaggatcctcagtgcct

SEQ ID NO: 3933583 - DNA, 25 bp, Homo sapien
cagaggtccttgtgctggcccatca

SEQ ID NO: 3933584 - DNA, 25 bp, Homo sapien
gaggtccttgtgctggcccatcaga

SEQ ID NO: 3933585 - DNA, 25 bp, Homo sapien
agaggtccttgtgctggcccatcag

SEQ ID NO: 3933586 - DNA, 25 bp, Homo sapien
cttctctccagggcacggatctccc

SEQ ID NO: 3933587 - DNA, 25 bp, Homo sapien
tctctccagggcacggatctcccgg

SEQ ID NO: 3933588 - DNA, 25 bp, Homo sapien
cacggatctcccgggccagtcgctg

SEQ ID NO: 3933589 - DNA, 25 bp, Homo sapien
ttctctccagggcacggatctcccg

SEQ ID NO: 3933590 - DNA, 25 bp, Homo sapien
gtcattcaccgccatggcgccctcg

SEQ ID NO: 3933591 - DNA, 25 bp, Homo sapien
gccatggcgccctcgacctcaggcg

SEQ ID NO: 3933592 - DNA, 25 bp, Homo sapien
cctcgacctcaggcggcgagtgcag

SEQ ID NO: 3933593 - DNA, 25 bp, Homo sapien
ccacctcccgcagcttggcgcgcac

SEQ ID NO: 3933594 - DNA, 25 bp, Homo sapien
ggaggaagagagcgagagtccaggg

SEQ ID NO: 3933595 - DNA, 25 bp, Homo sapien
ctgcggagaaggggccgaggagaca

SEQ ID NO: 3933596 - DNA, 25 bp, Homo sapien
acaggaggaagagagcgagagtcca

SEQ ID NO: 3933597 - DNA, 25 bp, Homo sapien
agaaggggccgaggagacaggagga

SEQ ID NO: 3933598 - DNA, 25 bp, Homo sapien
gggcgctccggacctgctccccgaa

SEQ ID NO: 3933599 - DNA, 25 bp, Homo sapien
gacctgctccccgaatatctccagc

SEQ ID NO: 3933600 - DNA, 25 bp, Homo sapien
tccggacctgctccccgaatatctc

SEQ ID NO: 3933601 - DNA, 25 bp, Homo sapien
tccccgaatatctccagctccgcct

SEQ ID NO: 3933602 - DNA, 25 bp, Homo sapien
aggttcctacgctcctcgcgtccgc

SEQ ID NO: 3933603 - DNA, 25 bp, Homo sapien
gaggctgcggaccaggttcctacgc

SEQ ID NO: 3933604 - DNA, 25 bp, Homo sapien
acagaccccactctcgggggccgct

SEQ ID NO: 3933605 - DNA, 25 bp, Homo sapien
ggctgcggaccaggttcctacgctc

SEQ ID NO: 3933606 - DNA, 25 bp, Homo sapien
ctcgggatcctcctcgtcgcgagcg

SEQ ID NO: 3933607 - DNA, 25 bp, Homo sapien
cgagcgcgggggagctcaggtccgg

SEQ ID NO: 3933608 - DNA, 25 bp, Homo sapien
ggatcctcctcgtcgcgagcgcggg

SEQ ID NO: 3933609 - DNA, 25 bp, Homo sapien
agccaccggcggctcgggatcctcc

SEQ ID NO: 3933610 - DNA, 25 bp, Homo sapien
tggtcggaaatcatcgcctttattt

SEQ ID NO: 3933611 - DNA, 25 bp, Homo sapien
cgcctttatttcttggcgggtctcg

SEQ ID NO: 3933612 - DNA, 25 bp, Homo sapien
tcatcgcctttatttcttggcgggt

SEQ ID NO: 3933613 - DNA, 25 bp, Homo sapien
cttggcgggtctcgagggaaggtcg

SEQ ID NO: 3933614 - DNA, 25 bp, Homo sapien
tacatgctcagtcaatggccgcagc

SEQ ID NO: 3933615 - DNA, 25 bp, Homo sapien
ggtaaatcggcagaatatccaggct

SEQ ID NO: 3933616 - DNA, 25 bp, Homo sapien
cgaatcctaggtgcccagtggtaaa

SEQ ID NO: 3933617 - DNA, 25 bp, Homo sapien
aaactttatgaacggccagtcaggg

SEQ ID NO: 3933618 - DNA, 25 bp, Homo sapien
cccaaggaccactgcagtaaggaca

SEQ ID NO: 3933619 - DNA, 25 bp, Homo sapien
gccaagaagttcacatcctttggaa

SEQ ID NO: 3933620 - DNA, 25 bp, Homo sapien
gagacatccccaaagggccttcaaa

SEQ ID NO: 3933621 - DNA, 25 bp, Homo sapien
tcctttggaagacagtaaattctct

SEQ ID NO: 3933622 - DNA, 25 bp, Homo sapien
aaccgaggggatttcctgctgcttc

SEQ ID NO: 3933623 - DNA, 25 bp, Homo sapien
ggatttcctgctgcttcacaaatac

SEQ ID NO: 3933624 - DNA, 25 bp, Homo sapien
ttaaccgaggggatttcctgctgct

SEQ ID NO: 3933625 - DNA, 25 bp, Homo sapien
ggggatttcctgctgcttcacaaat

SEQ ID NO: 3933626 - DNA, 25 bp, Homo sapien
cacagtgtgacggaggccagacttt

SEQ ID NO: 3933627 - DNA, 25 bp, Homo sapien
ggagcccaggtatcctaggacatgg

SEQ ID NO: 3933628 - DNA, 25 bp, Homo sapien
gccagactttcagcagggtgcagct

SEQ ID NO: 3933629 - DNA, 25 bp, Homo sapien
aaatgctatttgttggagtcaccac

SEQ ID NO: 3933630 - DNA, 25 bp, Homo sapien
cccatccaacgtggctgctgattct

SEQ ID NO: 3933631 - DNA, 25 bp, Homo sapien
ccctgttggattgcctctggttatg

SEQ ID NO: 3933632 - DNA, 25 bp, Homo sapien
tggcacgctcgttacctgctgcttt

SEQ ID NO: 3933633 - DNA, 25 bp, Homo sapien
ggagcttgccccatccaacgtggct

SEQ ID NO: 3933634 - DNA, 25 bp, Homo sapien
cattgggtttggtagcagggacttc

SEQ ID NO: 3933635 - DNA, 25 bp, Homo sapien
aaatatacttttgtggcttctatct

SEQ ID NO: 3933636 - DNA, 25 bp, Homo sapien
tatccaggggggcttgacttggcat

SEQ ID NO: 3933637 - DNA, 25 bp, Homo sapien
tctatctgggttacaacccatgagg

SEQ ID NO: 3933638 - DNA, 25 bp, Homo sapien
tgttcagccacgagggtcaggcctt

SEQ ID NO: 3933639 - DNA, 25 bp, Homo sapien
caaatggttattgcatgtggcctcc

SEQ ID NO: 3933640 - DNA, 25 bp, Homo sapien
caattgaaacggaagacaagccaca

SEQ ID NO: 3933641 - DNA, 25 bp, Homo sapien
gacactgagggcagctttccagcag

SEQ ID NO: 3933642 - DNA, 25 bp, Homo sapien
ccgcaggcttaactggaagcatggc

SEQ ID NO: 3933643 - DNA, 25 bp, Homo sapien
agttccgcaggcttaactggaagca

SEQ ID NO: 3933644 - DNA, 25 bp, Homo sapien
aactggaagcatggctgagaggctt

SEQ ID NO: 3933645 - DNA, 25 bp, Homo sapien
ctggaagcatggctgagaggcttca

SEQ ID NO: 3933646 - DNA, 25 bp, Homo sapien
gccgacgctgccatctcctggtgag

SEQ ID NO: 3933647 - DNA, 25 bp, Homo sapien
tgagagtcgctttcagcaaatctcc

SEQ ID NO: 3933648 - DNA, 25 bp, Homo sapien
ttggagcatctctgagccgacgctg

SEQ ID NO: 3933649 - DNA, 25 bp, Homo sapien
attgcatggcgtcacaaggcggttg

SEQ ID NO: 3933650 - DNA, 25 bp, Homo sapien
tggacagtaacagggcgctcttggt

SEQ ID NO: 3933651 - DNA, 25 bp, Homo sapien
ggtgtgtgtctacgcagagcagtca

SEQ ID NO: 3933652 - DNA, 25 bp, Homo sapien
agacaggaggctccgcaaagaaagc

SEQ ID NO: 3933653 - DNA, 25 bp, Homo sapien
cgctcttggttagtaggtgcacatg

SEQ ID NO: 3933654 - DNA, 25 bp, Homo sapien
tgctccatcagaaacctccggtgct

SEQ ID NO: 3933655 - DNA, 25 bp, Homo sapien
ggtcagtccactgtgttcagcaagg

SEQ ID NO: 3933656 - DNA, 25 bp, Homo sapien
ccggtgctacgagcctgtaatacaa

SEQ ID NO: 3933657 - DNA, 25 bp, Homo sapien
ctctgctgcagtgcacagtcacctg

SEQ ID NO: 3933658 - DNA, 25 bp, Homo sapien
tatggtccctaaagctcagaatgtc

SEQ ID NO: 3933659 - DNA, 25 bp, Homo sapien
tcagttcagaggactcgggtgctcc

SEQ ID NO: 3933660 - DNA, 25 bp, Homo sapien
cacagagtccgggtagaggtatcaa

SEQ ID NO: 3933661 - DNA, 25 bp, Homo sapien
gaatgtcaggcaattcagccaagga

SEQ ID NO: 3933662 - DNA, 25 bp, Homo sapien
cctatttcatgtggatggtgcaacc

SEQ ID NO: 3933663 - DNA, 25 bp, Homo sapien
acttggaagagacctgcaaccgacg

SEQ ID NO: 3933664 - DNA, 25 bp, Homo sapien
tacaggccgattgaggaggtgtcta

SEQ ID NO: 3933665 - DNA, 25 bp, Homo sapien
gataactttcccagagcgaagatgc

SEQ ID NO: 3933666 - DNA, 25 bp, Homo sapien
gtgtaccagtctccccagacctgag

SEQ ID NO: 3933667 - DNA, 25 bp, Homo sapien
gctgtgtgcttggacgatgccccaa

SEQ ID NO: 3933668 - DNA, 25 bp, Homo sapien
acagtgggtcgcttcttcgtggagc

SEQ ID NO: 3933669 - DNA, 25 bp, Homo sapien
aggaagcgtgaactcctctgcaagg

SEQ ID NO: 3933670 - DNA, 25 bp, Homo sapien
caatatccagaatgtgccttgtgaa

SEQ ID NO: 3933671 - DNA, 25 bp, Homo sapien
gcaaatctctcatcacgctggcatc

SEQ ID NO: 3933672 - DNA, 25 bp, Homo sapien
gcatgcacctgtcacggagaggcgt

SEQ ID NO: 3933673 - DNA, 25 bp, Homo sapien
ccaccaataaagaggagcatgcacc

SEQ ID NO: 3933674 - DNA, 25 bp, Homo sapien
tcaagccgccgctttccaaggatgc

SEQ ID NO: 3933675 - DNA, 25 bp, Homo sapien
gagtgttattagcagacccagcagc

SEQ ID NO: 3933676 - DNA, 25 bp, Homo sapien
tccaaggatgctgacgtgtgaagag

SEQ ID NO: 3933677 - DNA, 25 bp, Homo sapien
aaagtctggtttccattaaatcgag

SEQ ID NO: 3933678 - DNA, 25 bp, Homo sapien
gctcaagagattagttgttcatcgc

SEQ ID NO: 3933679 - DNA, 25 bp, Homo sapien
taggagaccactgctaagtctaggc

SEQ ID NO: 3933680 - DNA, 25 bp, Homo sapien
caatacatgaccagactggaatgag

SEQ ID NO: 3933681 - DNA, 25 bp, Homo sapien
caagggagaagagagattgtcaaca

SEQ ID NO: 3933682 - DNA, 25 bp, Homo sapien
gatagagcatgatggtgaatgaccc

SEQ ID NO: 3933683 - DNA, 25 bp, Homo sapien
aaataagaggtagaagatgctagag

SEQ ID NO: 3933684 - DNA, 25 bp, Homo sapien
gacccgttaaaagcgatgctttgga

SEQ ID NO: 3933685 - DNA, 25 bp, Homo sapien
gagaagctactagatgctgcatttg

SEQ ID NO: 3933686 - DNA, 25 bp, Homo sapien
taacttgaaatcgagtagagttgta

SEQ ID NO: 3933687 - DNA, 25 bp, Homo sapien
ttctgtttaacttgaaatcgagtag

SEQ ID NO: 3933688 - DNA, 25 bp, Homo sapien
ctgtttaacttgaaatcgagtagag

SEQ ID NO: 3933689 - DNA, 25 bp, Homo sapien
ttgaaatcgagtagagttgtagttc

SEQ ID NO: 3933690 - DNA, 25 bp, Homo sapien
gcccttctggaatgtatagcttaaa

SEQ ID NO: 3933691 - DNA, 25 bp, Homo sapien
taacagagtccttgacaggctgcag

SEQ ID NO: 3933692 - DNA, 25 bp, Homo sapien
agagtagaaagccaagtaacagagt

SEQ ID NO: 3933693 - DNA, 25 bp, Homo sapien
gaagataccttaactaggcagagag

SEQ ID NO: 3933694 - DNA, 25 bp, Homo sapien
tcaagaaagtttcatcatctctggg

SEQ ID NO: 3933695 - DNA, 25 bp, Homo sapien
tgcctctgtccaacatacacatgct

SEQ ID NO: 3933696 - DNA, 25 bp, Homo sapien
tttggcttctaaatcccctgcaatc

SEQ ID NO: 3933697 - DNA, 25 bp, Homo sapien
catctctggggaataatttggcttc

SEQ ID NO: 3933698 - DNA, 25 bp, Homo sapien
cgatcactatttcaggtcctgccag

SEQ ID NO: 3933699 - DNA, 25 bp, Homo sapien
tgcccgctcgatcactatttcaggt

SEQ ID NO: 3933700 - DNA, 25 bp, Homo sapien
cgctcgatcactatttcaggtcctg

SEQ ID NO: 3933701 - DNA, 25 bp, Homo sapien
tccagctgcccgctcgatcactatt

SEQ ID NO: 3933702 - DNA, 25 bp, Homo sapien
ctcaggtaggatcctgaaagcccct

SEQ ID NO: 3933703 - DNA, 25 bp, Homo sapien
aggtaggatcctgaaagcccctcac

SEQ ID NO: 3933704 - DNA, 25 bp, Homo sapien
agcactcaggtaggatcctgaaagc

SEQ ID NO: 3933705 - DNA, 25 bp, Homo sapien
cactcaggtaggatcctgaaagccc

SEQ ID NO: 3933706 - DNA, 25 bp, Homo sapien
ggttagcggccttggattatctgat

SEQ ID NO: 3933707 - DNA, 25 bp, Homo sapien
tatttgttggctagagggagagact

SEQ ID NO: 3933708 - DNA, 25 bp, Homo sapien
catgttaagagagcttagtctggag

SEQ ID NO: 3933709 - DNA, 25 bp, Homo sapien
agtttcatcattccctaatctactg

SEQ ID NO: 3933710 - DNA, 25 bp, Homo sapien
gagtctccaatgtggggaatacaat

SEQ ID NO: 3933711 - DNA, 25 bp, Homo sapien
ctccaatgtggggaatacaatccat

SEQ ID NO: 3933712 - DNA, 25 bp, Homo sapien
tccaatgtggggaatacaatccatt

SEQ ID NO: 3933713 - DNA, 25 bp, Homo sapien
cagcgctggaagagcccccatggtt

SEQ ID NO: 3933714 - DNA, 25 bp, Homo sapien
gacagcgctggaagagcccccatgg

SEQ ID NO: 3933715 - DNA, 25 bp, Homo sapien
cttagaatcgagacagcgctggaag

SEQ ID NO: 3933716 - DNA, 25 bp, Homo sapien
acagcgctggaagagcccccatggt

SEQ ID NO: 3933717 - DNA, 25 bp, Homo sapien
gcttcaaggatttcaggctatttaa

SEQ ID NO: 3933718 - DNA, 25 bp, Homo sapien
taatgcttcaaggatttcaggctat

SEQ ID NO: 3933719 - DNA, 25 bp, Homo sapien
taaggctgcatctctgccccaattt

SEQ ID NO: 3933720 - DNA, 25 bp, Homo sapien
ccctaaggctgcatctctgccccaa

SEQ ID NO: 3933721 - DNA, 25 bp, Homo sapien
ctgccccaatttccttggctcccac

SEQ ID NO: 3933722 - DNA, 25 bp, Homo sapien
ctccggtccccctaaggctgcatct

SEQ ID NO: 3933723 - DNA, 25 bp, Homo sapien
cagtatggtcaagaccgtatttact

SEQ ID NO: 3933724 - DNA, 25 bp, Homo sapien
agagttcccacgtattcttatgtga

SEQ ID NO: 3933725 - DNA, 25 bp, Homo sapien
tgaaggcagtttaacagtatggtca

SEQ ID NO: 3933726 - DNA, 25 bp, Homo sapien
ttttgtaattccaacaggtgccaca

SEQ ID NO: 3933727 - DNA, 25 bp, Homo sapien
aggggtagatgtgcaaagtaggtca

SEQ ID NO: 3933728 - DNA, 25 bp, Homo sapien
taggggtagatgtgcaaagtaggtc

SEQ ID NO: 3933729 - DNA, 25 bp, Homo sapien
ctaggggtagatgtgcaaagtaggt

SEQ ID NO: 3933730 - DNA, 25 bp, Homo sapien
ggggtagatgtgcaaagtaggtcat

SEQ ID NO: 3933731 - DNA, 25 bp, Homo sapien
gaaatgtcaactctacagctgcaat

SEQ ID NO: 3933732 - DNA, 25 bp, Homo sapien
tttgccaaaggatgtgctaaacaca

SEQ ID NO: 3933733 - DNA, 25 bp, Homo sapien
gctaccatgagagcatttccacttg

SEQ ID NO: 3933734 - DNA, 25 bp, Homo sapien
taaacacagggatcaatgctaccat

SEQ ID NO: 3933735 - DNA, 25 bp, Homo sapien
tgtggcttgttctgagtcctctata

SEQ ID NO: 3933736 - DNA, 25 bp, Homo sapien
gaatctggtggcatgtggcttgttc

SEQ ID NO: 3933737 - DNA, 25 bp, Homo sapien
ctggaaagaatctggtggcatgtgg

SEQ ID NO: 3933738 - DNA, 25 bp, Homo sapien
gaaagaatctggtggcatgtggctt

SEQ ID NO: 3933739 - DNA, 25 bp, Homo sapien
tgcagacaagagagtaccataggct

SEQ ID NO: 3933740 - DNA, 25 bp, Homo sapien
tccacttggcgtttcaaaaggacca

SEQ ID NO: 3933741 - DNA, 25 bp, Homo sapien
tgtctaatcagcaatagcacgcact

SEQ ID NO: 3933742 - DNA, 25 bp, Homo sapien
tgctgcaagtcatattcctgtctaa

SEQ ID NO: 3933743 - DNA, 25 bp, Homo sapien
gcaatgtaccattgtctttcactgc

SEQ ID NO: 3933744 - DNA, 25 bp, Homo sapien
cagtacagagaagacgtctaggtgt

SEQ ID NO: 3933745 - DNA, 25 bp, Homo sapien
tatggttgctactcccatcagcagt

SEQ ID NO: 3933746 - DNA, 25 bp, Homo sapien
tctaggtgtctggagctgacgtgca

SEQ ID NO: 3933747 - DNA, 25 bp, Homo sapien
gactgctgcttactttggctttatc

SEQ ID NO: 3933748 - DNA, 25 bp, Homo sapien
gacatgaaggcaccggctgttgaaa

SEQ ID NO: 3933749 - DNA, 25 bp, Homo sapien
cggctgttgaaagtgggttctcctc

SEQ ID NO: 3933750 - DNA, 25 bp, Homo sapien
tcaatcagcatgatagacatgaagg

SEQ ID NO: 3933751 - DNA, 25 bp, Homo sapien
catggtccccaaggtgatgttgaga

SEQ ID NO: 3933752 - DNA, 25 bp, Homo sapien
ctatggagtaagaaacgtcctcttc

SEQ ID NO: 3933753 - DNA, 25 bp, Homo sapien
agacctctttcaaagctatggagta

SEQ ID NO: 3933754 - DNA, 25 bp, Homo sapien
atcatggtccccaaggtgatgttga

SEQ ID NO: 3933755 - DNA, 25 bp, Homo sapien
tgacagcccttctaattataggacc

SEQ ID NO: 3933756 - DNA, 25 bp, Homo sapien
tcatgcaagcgtctttgaggaactg

SEQ ID NO: 3933757 - DNA, 25 bp, Homo sapien
ccatgctcggcatatagtagaccct

SEQ ID NO: 3933758 - DNA, 25 bp, Homo sapien
tgagtggaagttagagtagagaccc

SEQ ID NO: 3933759 - DNA, 25 bp, Homo sapien
gctttgtcctgtctatagtttgtag

SEQ ID NO: 3933760 - DNA, 25 bp, Homo sapien
tgtcctgtctatagtttgtagagaa

SEQ ID NO: 3933761 - DNA, 25 bp, Homo sapien
tcctgtctatagtttgtagagaaat

SEQ ID NO: 3933762 - DNA, 25 bp, Homo sapien
atggtgtaggtgccatgatggcttg

SEQ ID NO: 3933763 - DNA, 25 bp, Homo sapien
cctgtatggctagagggatatcata

SEQ ID NO: 3933764 - DNA, 25 bp, Homo sapien
tggaccaaccctgtatggctagagg

SEQ ID NO: 3933765 - DNA, 25 bp, Homo sapien
gttccttgtggaccaaccctgtatg

SEQ ID NO: 3933766 - DNA, 25 bp, Homo sapien
tagagggatatcatagctcctgtct

SEQ ID NO: 3933767 - DNA, 25 bp, Homo sapien
tagaaactccaaggtagtcaaatga

SEQ ID NO: 3933768 - DNA, 25 bp, Homo sapien
aactccaaggtagtcaaatgaatgt

SEQ ID NO: 3933769 - DNA, 25 bp, Homo sapien
agaaatagaaactccaaggtagtca

SEQ ID NO: 3933770 - DNA, 25 bp, Homo sapien
aatagaaactccaaggtagtcaaat

SEQ ID NO: 3933771 - DNA, 25 bp, Homo sapien
caaaagtcctgcttaactttctcag

SEQ ID NO: 3933772 - DNA, 25 bp, Homo sapien
taactttctcaggccttctttccat

SEQ ID NO: 3933773 - DNA, 25 bp, Homo sapien
ctgcttaactttctcaggccttctt

SEQ ID NO: 3933774 - DNA, 25 bp, Homo sapien
gcttaactttctcaggccttctttc

SEQ ID NO: 3933775 - DNA, 25 bp, Homo sapien
tcctgggctatagcatgtacccctt

SEQ ID NO: 3933776 - DNA, 25 bp, Homo sapien
tcaaagaagcttccggttgaattgg

SEQ ID NO: 3933777 - DNA, 25 bp, Homo sapien
ttgaattggagacaacagtacatgt

SEQ ID NO: 3933778 - DNA, 25 bp, Homo sapien
gtacaaatgcgtgagccagtgaccc

SEQ ID NO: 3933779 - DNA, 25 bp, Homo sapien
taattcattagcacttaagcagacg

SEQ ID NO: 3933780 - DNA, 25 bp, Homo sapien
attcattagcacttaagcagacgtt

SEQ ID NO: 3933781 - DNA, 25 bp, Homo sapien
ctggtgaccccaatgcatgaaaaag

SEQ ID NO: 3933782 - DNA, 25 bp, Homo sapien
ggtgaccccaatgcatgaaaaagat

SEQ ID NO: 3933783 - DNA, 25 bp, Homo sapien
ggatgtatgcgttcttgtccaagaa

SEQ ID NO: 3933784 - DNA, 25 bp, Homo sapien
gcgttcttgtccaagaacaatattc

SEQ ID NO: 3933785 - DNA, 25 bp, Homo sapien
gagtttcctgaggatgtatgcgttc

SEQ ID NO: 3933786 - DNA, 25 bp, Homo sapien
tcctgaggatgtatgcgttcttgtc

SEQ ID NO: 3933787 - DNA, 25 bp, Homo sapien
acagttgtggcttgagagtcttaaa

SEQ ID NO: 3933788 - DNA, 25 bp, Homo sapien
tgttcccctccagtggatgtacagt

SEQ ID NO: 3933789 - DNA, 25 bp, Homo sapien
tgtggcttgagagtcttaaagccag

SEQ ID NO: 3933790 - DNA, 25 bp, Homo sapien
gttgtggcttgagagtcttaaagcc

SEQ ID NO: 3933791 - DNA, 25 bp, Homo sapien
caggatttccctgggccgtctgagc

SEQ ID NO: 3933792 - DNA, 25 bp, Homo sapien
ttccctgggccgtctgagcaccgtg

SEQ ID NO: 3933793 - DNA, 25 bp, Homo sapien
tccgccgataaggagggagatctgc

SEQ ID NO: 3933794 - DNA, 25 bp, Homo sapien
gaggtcaggcgtgggctgtgtggaa

SEQ ID NO: 3933795 - DNA, 25 bp, Homo sapien
gcctttgtcaggcagctctgatgag

SEQ ID NO: 3933796 - DNA, 25 bp, Homo sapien
tcaccagttggcctttgtcaggcag

SEQ ID NO: 3933797 - DNA, 25 bp, Homo sapien
tctgatgagcctggctgcctggtac

SEQ ID NO: 3933798 - DNA, 25 bp, Homo sapien
cagctctgatgagcctggctgcctg

SEQ ID NO: 3933799 - DNA, 25 bp, Homo sapien
ggatctccaggttggaacttttcac

SEQ ID NO: 3933800 - DNA, 25 bp, Homo sapien
ctctggggtcacaactatcatttcc

SEQ ID NO: 3933801 - DNA, 25 bp, Homo sapien
gaactggaagtttgagtcctagaaa

SEQ ID NO: 3933802 - DNA, 25 bp, Homo sapien
cctagaaacaatgggatctccaggt

SEQ ID NO: 3933803 - DNA, 25 bp, Homo sapien
catgaggatagcactgttaacaatc

SEQ ID NO: 3933804 - DNA, 25 bp, Homo sapien
atgaggatagcactgttaacaatca

SEQ ID NO: 3933805 - DNA, 25 bp, Homo sapien
ttctttacttgagggacttggttgc

SEQ ID NO: 3933806 - DNA, 25 bp, Homo sapien
ttgagggacttggttgccaaatatc

SEQ ID NO: 3933807 - DNA, 25 bp, Homo sapien
aatgctgtttctttacttgagggac

SEQ ID NO: 3933808 - DNA, 25 bp, Homo sapien
tcagcctgtaatgctgtttctttac

SEQ ID NO: 3933809 - DNA, 25 bp, Homo sapien
tgttaggttgtcgaacaaggtggac

SEQ ID NO: 3933810 - DNA, 25 bp, Homo sapien
tcgaacaaggtggacgtgtgaacgc

SEQ ID NO: 3933811 - DNA, 25 bp, Homo sapien
ttaatgacccatgttaggttgtcga

SEQ ID NO: 3933812 - DNA, 25 bp, Homo sapien
cgtgtgaacgccagcttgtgttttc

SEQ ID NO: 3933813 - DNA, 25 bp, Homo sapien
catgcattgtgttggaaactttcac

SEQ ID NO: 3933814 - DNA, 25 bp, Homo sapien
gaggctttgtagttagctttccagc

SEQ ID NO: 3933815 - DNA, 25 bp, Homo sapien
cagctctctcacgttcatttcgtgc

SEQ ID NO: 3933816 - DNA, 25 bp, Homo sapien
catttcgtgctttgactttgatctt

SEQ ID NO: 3933817 - DNA, 25 bp, Homo sapien
ggatatggatcaccctgctgagaga

SEQ ID NO: 3933818 - DNA, 25 bp, Homo sapien
gacagctgtgggcaatctgtggata

SEQ ID NO: 3933819 - DNA, 25 bp, Homo sapien
tttgggagtgtctgggtctttcatg

SEQ ID NO: 3933820 - DNA, 25 bp, Homo sapien
tgggcaatctgtggatatggatcac

SEQ ID NO: 3933821 - DNA, 25 bp, Homo sapien
gatcacatcatgctcggaccaatat

SEQ ID NO: 3933822 - DNA, 25 bp, Homo sapien
tgtgcaagatggctccctaaagtga

SEQ ID NO: 3933823 - DNA, 25 bp, Homo sapien
cgttctttcccctgatcacatcatg

SEQ ID NO: 3933824 - DNA, 25 bp, Homo sapien
gtgcaagatggctccctaaagtgat

SEQ ID NO: 3933825 - DNA, 25 bp, Homo sapien
ttgctctattcaatgggagaggcag

SEQ ID NO: 3933826 - DNA, 25 bp, Homo sapien
caatgggagaggcagaatcgagtgt

SEQ ID NO: 3933827 - DNA, 25 bp, Homo sapien
ggcagaatcgagtgtgtttcttcat

SEQ ID NO: 3933828 - DNA, 25 bp, Homo sapien
tcccccaatctgtgtgctgccattt

SEQ ID NO: 3933829 - DNA, 25 bp, Homo sapien
tatacacggagtccatacgggttcc

SEQ ID NO: 3933830 - DNA, 25 bp, Homo sapien
tacgggttccatgaaggcagtcgcc

SEQ ID NO: 3933831 - DNA, 25 bp, Homo sapien
ggcagtcgcctttcatccagcattc

SEQ ID NO: 3933832 - DNA, 25 bp, Homo sapien
tactgagtcataggaaattacccaa

SEQ ID NO: 3933833 - DNA, 25 bp, Homo sapien
aaatggccgagtggtaggtattaag

SEQ ID NO: 3933834 - DNA, 25 bp, Homo sapien
tgataaatggccgagtggtaggtat

SEQ ID NO: 3933835 - DNA, 25 bp, Homo sapien
gtaggtattaaggagagaggtctca

SEQ ID NO: 3933836 - DNA, 25 bp, Homo sapien
taggtattaaggagagaggtctcat

SEQ ID NO: 3933837 - DNA, 25 bp, Homo sapien
tggacactgttggttggcatccctg

SEQ ID NO: 3933838 - DNA, 25 bp, Homo sapien
ggacactgttggttggcatccctgt

SEQ ID NO: 3933839 - DNA, 25 bp, Homo sapien
gacactgttggttggcatccctgtc

SEQ ID NO: 3933840 - DNA, 25 bp, Homo sapien
tctttctgctgtaggtacctggaag

SEQ ID NO: 3933841 - DNA, 25 bp, Homo sapien
tctctcaagttgtagaaacgtctac

SEQ ID NO: 3933842 - DNA, 25 bp, Homo sapien
tttgatatgattcaggtctctcaag

SEQ ID NO: 3933843 - DNA, 25 bp, Homo sapien
gaaacgtctaccttctttctgctgt

SEQ ID NO: 3933844 - DNA, 25 bp, Homo sapien
ggaacttggaattgggctgaacctg

SEQ ID NO: 3933845 - DNA, 25 bp, Homo sapien
ctggagtgggcttaaacgcttgtct

SEQ ID NO: 3933846 - DNA, 25 bp, Homo sapien
gcatctgccaaggttgatccaagga

SEQ ID NO: 3933847 - DNA, 25 bp, Homo sapien
gatgccttttcttagtatgtggaag

SEQ ID NO: 3933848 - DNA, 25 bp, Homo sapien
tgtaggcttttagctacaatgtata

SEQ ID NO: 3933849 - DNA, 25 bp, Homo sapien
gcttttagctacaatgtataattgg

SEQ ID NO: 3933850 - DNA, 25 bp, Homo sapien
tgatgttctcagtgctaaacctcct

SEQ ID NO: 3933851 - DNA, 25 bp, Homo sapien
aaacctcctaagatgatgtttgcca

SEQ ID NO: 3933852 - DNA, 25 bp, Homo sapien
gaatagctgatgtgcttactcccat

SEQ ID NO: 3933853 - DNA, 25 bp, Homo sapien
taccctctcccggacaccttccaga

SEQ ID NO: 3933854 - DNA, 25 bp, Homo sapien
ttccagaatagctgatgtgcttact

SEQ ID NO: 3933855 - DNA, 25 bp, Homo sapien
gatgtgcttactcccattacagtat

SEQ ID NO: 3933856 - DNA, 25 bp, Homo sapien
agttcgcattgctccttgctccttc

SEQ ID NO: 3933857 - DNA, 25 bp, Homo sapien
tctgaagggcagttcgcattgctcc

SEQ ID NO: 3933858 - DNA, 25 bp, Homo sapien
tgaagggcagttcgcattgctcctt

SEQ ID NO: 3933859 - DNA, 25 bp, Homo sapien
gggcagttcgcattgctccttgctc

SEQ ID NO: 3933860 - DNA, 25 bp, Homo sapien
cttgttgactctcttggtgcattta

SEQ ID NO: 3933861 - DNA, 25 bp, Homo sapien
ttgttgactctcttggtgcatttac

SEQ ID NO: 3933862 - DNA, 25 bp, Homo sapien
tgggtaaaaagatatccatgaatat

SEQ ID NO: 3933863 - DNA, 25 bp, Homo sapien
gggtaaaaagatatccatgaatata

SEQ ID NO: 3933864 - DNA, 25 bp, Homo sapien
ctgggtaaaaagatatccatgaata

SEQ ID NO: 3933865 - DNA, 25 bp, Homo sapien
aatccttgcacggattctttatact

SEQ ID NO: 3933866 - DNA, 25 bp, Homo sapien
acattgtgtgaagccacctgatgac

SEQ ID NO: 3933867 - DNA, 25 bp, Homo sapien
catgggttcaccgtaacagaggtaa

SEQ ID NO: 3933868 - DNA, 25 bp, Homo sapien
cagaggtaactagaaccttgttgca

SEQ ID NO: 3933869 - DNA, 25 bp, Homo sapien
gttgtataatcctgccctctgctgg

SEQ ID NO: 3933870 - DNA, 25 bp, Homo sapien
tgactccaggtctcgggcatattga

SEQ ID NO: 3933871 - DNA, 25 bp, Homo sapien
gaaatccgtcaataaagccagccag

SEQ ID NO: 3933872 - DNA, 25 bp, Homo sapien
tgtcatctcttagcgcacaggcaaa

SEQ ID NO: 3933873 - DNA, 25 bp, Homo sapien
tgggaaaattgcaatccacagttga

SEQ ID NO: 3933874 - DNA, 25 bp, Homo sapien
gaaaattgcaatccacagttgaagt

SEQ ID NO: 3933875 - DNA, 25 bp, Homo sapien
aattgcaatccacagttgaagtgac

SEQ ID NO: 3933876 - DNA, 25 bp, Homo sapien
ggaaaattgcaatccacagttgaag

SEQ ID NO: 3933877 - DNA, 25 bp, Homo sapien
gacctagcagtcgtttccctttcaa

SEQ ID NO: 3933878 - DNA, 25 bp, Homo sapien
tccccaaccatggagcaagaacaag

SEQ ID NO: 3933879 - DNA, 25 bp, Homo sapien
taagagacctagcagtcgtttccct

SEQ ID NO: 3933880 - DNA, 25 bp, Homo sapien
caaggttcgaagcagcttaaaacca

SEQ ID NO: 3933881 - DNA, 25 bp, Homo sapien
ttgcaccgtggcggtttcctttctc

SEQ ID NO: 3933882 - DNA, 25 bp, Homo sapien
ctttctccatctgaggattccacag

SEQ ID NO: 3933883 - DNA, 25 bp, Homo sapien
ttccacagagtgctccagcggagtt

SEQ ID NO: 3933884 - DNA, 25 bp, Homo sapien
agtgctccagcggagtttgttgctt

SEQ ID NO: 3933885 - DNA, 25 bp, Homo sapien
aaggatgtattgcagcctaacaagc

SEQ ID NO: 3933886 - DNA, 25 bp, Homo sapien
tattgcagcctaacaagcccatcat

SEQ ID NO: 3933887 - DNA, 25 bp, Homo sapien
gaggaatcatgctagttaatgcaac

SEQ ID NO: 3933888 - DNA, 25 bp, Homo sapien
gtgtgtgtaacatgtggtgaacgca

SEQ ID NO: 3933889 - DNA, 25 bp, Homo sapien
gacacaaaacgatgccaggggtagg

SEQ ID NO: 3933890 - DNA, 25 bp, Homo sapien
tttgtagacacaaaacgatgccagg

SEQ ID NO: 3933891 - DNA, 25 bp, Homo sapien
tagacacaaaacgatgccaggggta

SEQ ID NO: 3933892 - DNA, 25 bp, Homo sapien
cactgtcagcccagtgctctctgct

SEQ ID NO: 3933893 - DNA, 25 bp, Homo sapien
cactggctttgccacacatttttta

SEQ ID NO: 3933894 - DNA, 25 bp, Homo sapien
actggctttgccacacattttttac

SEQ ID NO: 3933895 - DNA, 25 bp, Homo sapien
taatcactggctttgccacacattt

SEQ ID NO: 3933896 - DNA, 25 bp, Homo sapien
cagtaatcactggctttgccacaca

SEQ ID NO: 3933897 - DNA, 25 bp, Homo sapien
cagctggacttttccgctagagact

SEQ ID NO: 3933898 - DNA, 25 bp, Homo sapien
cagccagcaggtagaatttgaggcg

SEQ ID NO: 3933899 - DNA, 25 bp, Homo sapien
gaggcgctgatctttctctctgcag

SEQ ID NO: 3933900 - DNA, 25 bp, Homo sapien
caggtagaatttgaggcgctgatct

SEQ ID NO: 3933901 - DNA, 25 bp, Homo sapien
ggttttagtgaggaagagcatctga

SEQ ID NO: 3933902 - DNA, 25 bp, Homo sapien
gatttgaacaagcttgtcccatgac

SEQ ID NO: 3933903 - DNA, 25 bp, Homo sapien
cctgaagtcttgagatccatgtggc

SEQ ID NO: 3933904 - DNA, 25 bp, Homo sapien
gctttcaacacggaatagagatttg

SEQ ID NO: 3933905 - DNA, 25 bp, Homo sapien
agggtatggctgatgattgaagaca

SEQ ID NO: 3933906 - DNA, 25 bp, Homo sapien
gtatggctgatgattgaagacagga

SEQ ID NO: 3933907 - DNA, 25 bp, Homo sapien
cccagggtatggctgatgattgaag

SEQ ID NO: 3933908 - DNA, 25 bp, Homo sapien
tatggctgatgattgaagacaggag

SEQ ID NO: 3933909 - DNA, 25 bp, Homo sapien
gagatgagatgggtgggacaattgt

SEQ ID NO: 3933910 - DNA, 25 bp, Homo sapien
gtgggacaattgtgaatggccacac

SEQ ID NO: 3933911 - DNA, 25 bp, Homo sapien
gatgggtgggacaattgtgaatggc

SEQ ID NO: 3933912 - DNA, 25 bp, Homo sapien
gatgagatgggtgggacaattgtga

SEQ ID NO: 3933913 - DNA, 25 bp, Homo sapien
cctgatgaccgagccctgaagacca

SEQ ID NO: 3933914 - DNA, 25 bp, Homo sapien
ggagtagcgtgaggcatattgaaga

SEQ ID NO: 3933915 - DNA, 25 bp, Homo sapien
ccagggacctgatgaccgagccctg

SEQ ID NO: 3933916 - DNA, 25 bp, Homo sapien
aggaccccagggacctgatgaccga

SEQ ID NO: 3933917 - DNA, 25 bp, Homo sapien
ggaggagtcagcaaatgggatagca

SEQ ID NO: 3933918 - DNA, 25 bp, Homo sapien
tcagcaaatgggatagcataggaat

SEQ ID NO: 3933919 - DNA, 25 bp, Homo sapien
gagtcagcaaatgggatagcatagg

SEQ ID NO: 3933920 - DNA, 25 bp, Homo sapien
gaggagtcagcaaatgggatagcat

SEQ ID NO: 3933921 - DNA, 25 bp, Homo sapien
ttgtcagcccgctgagagataatct

SEQ ID NO: 3933922 - DNA, 25 bp, Homo sapien
cagcccgctgagagataatcttgtc

SEQ ID NO: 3933923 - DNA, 25 bp, Homo sapien
tgagagataatcttgtcagcatgac

SEQ ID NO: 3933924 - DNA, 25 bp, Homo sapien
tttctgattgtcagcccgctgagag

SEQ ID NO: 3933925 - DNA, 25 bp, Homo sapien
actccactaccgctacctccacctt

SEQ ID NO: 3933926 - DNA, 25 bp, Homo sapien
cactaccgctacctccaccttgtgt

SEQ ID NO: 3933927 - DNA, 25 bp, Homo sapien
taccgctacctccaccttgtgtcat

SEQ ID NO: 3933928 - DNA, 25 bp, Homo sapien
tccactaccgctacctccaccttgt

SEQ ID NO: 3933929 - DNA, 25 bp, Homo sapien
ggaagaccaagtcgtgacattgccc

SEQ ID NO: 3933930 - DNA, 25 bp, Homo sapien
gactcctcggagctgctcggtcggt

SEQ ID NO: 3933931 - DNA, 25 bp, Homo sapien
aagaccaagtcgtgacattgccctg

SEQ ID NO: 3933932 - DNA, 25 bp, Homo sapien
tcggtcgcgcttgcgcagagcagct

SEQ ID NO: 3933933 - DNA, 25 bp, Homo sapien
tgaccggacggtgaacaacaaatgg

SEQ ID NO: 3933934 - DNA, 25 bp, Homo sapien
ccaatggcaaaaggacggagtattt

SEQ ID NO: 3933935 - DNA, 25 bp, Homo sapien
aatatcatactttcttaagcgggcc

SEQ ID NO: 3933936 - DNA, 25 bp, Homo sapien
taagcgggccttagcatcatctagc

SEQ ID NO: 3933937 - DNA, 25 bp, Homo sapien
tccattttcagacaaaggaacttag

SEQ ID NO: 3933938 - DNA, 25 bp, Homo sapien
cacccagccataagctactcttata

SEQ ID NO: 3933939 - DNA, 25 bp, Homo sapien
gaccaagttcactcagtgagctgga

SEQ ID NO: 3933940 - DNA, 25 bp, Homo sapien
acaaaggaacttaggctcacagagg

SEQ ID NO: 3933941 - DNA, 25 bp, Homo sapien
tctcgcaggccgtacagggagcatg

SEQ ID NO: 3933942 - DNA, 25 bp, Homo sapien
ctcgcaggccgtacagggagcatga

SEQ ID NO: 3933943 - DNA, 25 bp, Homo sapien
gtctcgcaggccgtacagggagcat

SEQ ID NO: 3933944 - DNA, 25 bp, Homo sapien
agtctcgcaggccgtacagggagca

SEQ ID NO: 3933945 - DNA, 25 bp, Homo sapien
gtagggtcacgcttacctccaggga

SEQ ID NO: 3933946 - DNA, 25 bp, Homo sapien
gtctgtagggtcacgcttacctcca

SEQ ID NO: 3933947 - DNA, 25 bp, Homo sapien
tctgtagggtcacgcttacctccag

SEQ ID NO: 3933948 - DNA, 25 bp, Homo sapien
tgtagggtcacgcttacctccaggg

SEQ ID NO: 3933949 - DNA, 25 bp, Homo sapien
gcagcagacaacttccacttggtga

SEQ ID NO: 3933950 - DNA, 25 bp, Homo sapien
tcaataagacatggcaccaggcagc

SEQ ID NO: 3933951 - DNA, 25 bp, Homo sapien
gcagacaacttccacttggtgagga

SEQ ID NO: 3933952 - DNA, 25 bp, Homo sapien
ttggtgaggacggagacccacttcc

SEQ ID NO: 3933953 - DNA, 25 bp, Homo sapien
ctcatgagtgtctcaggaaaccctt

SEQ ID NO: 3933954 - DNA, 25 bp, Homo sapien
gctcatgagtgtctcaggaaaccct

SEQ ID NO: 3933955 - DNA, 25 bp, Homo sapien
tcatgagtgtctcaggaaaccctta

SEQ ID NO: 3933956 - DNA, 25 bp, Homo sapien
catgagtgtctcaggaaacccttac

SEQ ID NO: 3933957 - DNA, 25 bp, Homo sapien
cacttgactcatgaggggcaatgtc

SEQ ID NO: 3933958 - DNA, 25 bp, Homo sapien
ggcaatgtctgtaggagaacctgtt

SEQ ID NO: 3933959 - DNA, 25 bp, Homo sapien
aatgtctgtaggagaacctgttctc

SEQ ID NO: 3933960 - DNA, 25 bp, Homo sapien
tctcttgactttatgtacagtactc

SEQ ID NO: 3933961 - DNA, 25 bp, Homo sapien
aactgaatgttaataattctgaagc

SEQ ID NO: 3933962 - DNA, 25 bp, Homo sapien
ggtatctagcacattggagtgtctg

SEQ ID NO: 3933963 - DNA, 25 bp, Homo sapien
tcaaaaccaatgtatactggagaaa

SEQ ID NO: 3933964 - DNA, 25 bp, Homo sapien
agcatctctctagggttctatggca

SEQ ID NO: 3933965 - DNA, 25 bp, Homo sapien
ccagcctcatcaacatagcgagacc

SEQ ID NO: 3933966 - DNA, 25 bp, Homo sapien
gagaccagcctcatcaacatagcga

SEQ ID NO: 3933967 - DNA, 25 bp, Homo sapien
gctcgagaccagcctcatcaacata

SEQ ID NO: 3933968 - DNA, 25 bp, Homo sapien
ggagctcgagaccagcctcatcaac

SEQ ID NO: 3933969 - DNA, 25 bp, Homo sapien
ctgatactgtgtgatgagagcactt

SEQ ID NO: 3933970 - DNA, 25 bp, Homo sapien
ctctgatactgtgtgatgagagcac

SEQ ID NO: 3933971 - DNA, 25 bp, Homo sapien
tctgatactgtgtgatgagagcact

SEQ ID NO: 3933972 - DNA, 25 bp, Homo sapien
tattacatgggagagggatttctat

SEQ ID NO: 3933973 - DNA, 25 bp, Homo sapien
tgtgaactactttatataacacaca

SEQ ID NO: 3933974 - DNA, 25 bp, Homo sapien
caaatgaacatgagtggccgggtgt

SEQ ID NO: 3933975 - DNA, 25 bp, Homo sapien
acaactgcttgcaaatgaacatgag

SEQ ID NO: 3933976 - DNA, 25 bp, Homo sapien
gtgatataatactagttatgacata

SEQ ID NO: 3933977 - DNA, 25 bp, Homo sapien
aatgtgctatacttatgaacagaaa

SEQ ID NO: 3933978 - DNA, 25 bp, Homo sapien
atataatactagttatgacatattc

SEQ ID NO: 3933979 - DNA, 25 bp, Homo sapien
agtgatataatactagttatgacat

SEQ ID NO: 3933980 - DNA, 25 bp, Homo sapien
agaattagtttcaacaacagcccca

SEQ ID NO: 3933981 - DNA, 25 bp, Homo sapien
aaaatgggagtcatcctgctctacc

SEQ ID NO: 3933982 - DNA, 25 bp, Homo sapien
gagctaagaaaatacaccgaacctg

SEQ ID NO: 3933983 - DNA, 25 bp, Homo sapien
tgttcgctttgacctgggaattgca

SEQ ID NO: 3933984 - DNA, 25 bp, Homo sapien
aataaaacggtgaccaagacgtgtg

SEQ ID NO: 3933985 - DNA, 25 bp, Homo sapien
tgacgtaatgctggtcatggacctg

SEQ ID NO: 3933986 - DNA, 25 bp, Homo sapien
taacttcagcaggattcggctgggc

SEQ ID NO: 3933987 - DNA, 25 bp, Homo sapien
tcccttgatctggtaagtgacaccg

SEQ ID NO: 3933988 - DNA, 25 bp, Homo sapien
tattaagggcctagtatgtgccaga

SEQ ID NO: 3933989 - DNA, 25 bp, Homo sapien
gaggcaaggattctaactacatact

SEQ ID NO: 3933990 - DNA, 25 bp, Homo sapien
gaataagcacacacagaatcctcgt

SEQ ID NO: 3933991 - DNA, 25 bp, Homo sapien
tttcagacaatagaaggcaactgga

SEQ ID NO: 3933992 - DNA, 25 bp, Homo sapien
taacagtaccaagtgaagagcccag

SEQ ID NO: 3933993 - DNA, 25 bp, Homo sapien
ccaaagggactcaagaacactggct

SEQ ID NO: 3933994 - DNA, 25 bp, Homo sapien
cacagagtcattcatcgattcaagc

SEQ ID NO: 3933995 - DNA, 25 bp, Homo sapien
aattgcaagggatccggagtaatgc

SEQ ID NO: 3933996 - DNA, 25 bp, Homo sapien
gattgcattgccaaggaaacagatt

SEQ ID NO: 3933997 - DNA, 25 bp, Homo sapien
catatggcctttgcccgtttgagga

SEQ ID NO: 3933998 - DNA, 25 bp, Homo sapien
gcccgtttgaggattgcattgccaa

SEQ ID NO: 3933999 - DNA, 25 bp, Homo sapien
cccatgttttccatatggcctttgc

SEQ ID NO: 3934000 - DNA, 25 bp, Homo sapien
catttccttgcaagctcccgggtga

SEQ ID NO: 3934001 - DNA, 25 bp, Homo sapien
gagcagtgcttctcgaacttcagta

SEQ ID NO: 3934002 - DNA, 25 bp, Homo sapien
tcactaggtccagggaagaatctga

SEQ ID NO: 3934003 - DNA, 25 bp, Homo sapien
ggacgttgctacttgtccagggaca

SEQ ID NO: 3934004 - DNA, 25 bp, Homo sapien
tcacgagggtacatttgcaaattgc

SEQ ID NO: 3934005 - DNA, 25 bp, Homo sapien
cacgggtacatgaatggttgggaca

SEQ ID NO: 3934006 - DNA, 25 bp, Homo sapien
aatgacctttcggtgggtacagagc

SEQ ID NO: 3934007 - DNA, 25 bp, Homo sapien
gacacactaggactgtatgacagga

SEQ ID NO: 3934008 - DNA, 25 bp, Homo sapien
ctgcggtggctgcggcgctggggga

SEQ ID NO: 3934009 - DNA, 25 bp, Homo sapien
gcgctcgagggcgcggggcgcacgg

SEQ ID NO: 3934010 - DNA, 25 bp, Homo sapien
gcggggcgcacgggctgcggtggct

SEQ ID NO: 3934011 - DNA, 25 bp, Homo sapien
gcgctgggggagtggggctcctctc

SEQ ID NO: 3934012 - DNA, 25 bp, Homo sapien
gtccccgaggcggtgcgagccgtcg

SEQ ID NO: 3934013 - DNA, 25 bp, Homo sapien
tccttgcctgcctccttctcgatca

SEQ ID NO: 3934014 - DNA, 25 bp, Homo sapien
tccttctcgatcatttgctccgtct

SEQ ID NO: 3934015 - DNA, 25 bp, Homo sapien
ctgggcgtccccgaggcggtgcgag

SEQ ID NO: 3934016 - DNA, 25 bp, Homo sapien
tgaagagccgcagcttgttgagccc

SEQ ID NO: 3934017 - DNA, 25 bp, Homo sapien
cctgaagagccgcagcttgttgagc

SEQ ID NO: 3934018 - DNA, 25 bp, Homo sapien
caggctttgacgcggatcttgagct

SEQ ID NO: 3934019 - DNA, 25 bp, Homo sapien
cgcggatcttgagctcgccgtcctg

SEQ ID NO: 3934020 - DNA, 25 bp, Homo sapien
gagaaagcgagaaaggcgcggatac

SEQ ID NO: 3934021 - DNA, 25 bp, Homo sapien
gcgcccagcgcgcaaaaagagagaa

SEQ ID NO: 3934022 - DNA, 25 bp, Homo sapien
gcgcgcaaaaagagagaaagcgaga

SEQ ID NO: 3934023 - DNA, 25 bp, Homo sapien
gcccagcgcgcaaaaagagagaaag

SEQ ID NO: 3934024 - DNA, 25 bp, Homo sapien
ccctctcggagaaacagaggatgga

SEQ ID NO: 3934025 - DNA, 25 bp, Homo sapien
aattccggggagactgatcagggtt

SEQ ID NO: 3934026 - DNA, 25 bp, Homo sapien
tgggtgcaaggtaccgaccctcttc

SEQ ID NO: 3934027 - DNA, 25 bp, Homo sapien
ccaagcctgggtgcaaggtaccgac

SEQ ID NO: 3934028 - DNA, 25 bp, Homo sapien
ttagagagctgagctccttctgaga

SEQ ID NO: 3934029 - DNA, 25 bp, Homo sapien
gagagctgagctccttctgagatgg

SEQ ID NO: 3934030 - DNA, 25 bp, Homo sapien
gagctgagctccttctgagatggga

SEQ ID NO: 3934031 - DNA, 25 bp, Homo sapien
agctgagctccttctgagatgggac

SEQ ID NO: 3934032 - DNA, 25 bp, Homo sapien
agaagcaagcagacctcgtgcgagg

SEQ ID NO: 3934033 - DNA, 25 bp, Homo sapien
tgcctcggaactttaaccagtcctg

SEQ ID NO: 3934034 - DNA, 25 bp, Homo sapien
cagtaagggaaggtgtgctctttgc

SEQ ID NO: 3934035 - DNA, 25 bp, Homo sapien
tgtgccaagcagacgcagtaaggga

SEQ ID NO: 3934036 - DNA, 25 bp, Homo sapien
caccaaggaccagcattcccatgga

SEQ ID NO: 3934037 - DNA, 25 bp, Homo sapien
ccaccaaggaccagcattcccatgg

SEQ ID NO: 3934038 - DNA, 25 bp, Homo sapien
tctccctggagccaccaaggaccag

SEQ ID NO: 3934039 - DNA, 25 bp, Homo sapien
ggaaagagaatgagacctttaaata

SEQ ID NO: 3934040 - DNA, 25 bp, Homo sapien
ggctcctttgcacggcagttcctga

SEQ ID NO: 3934041 - DNA, 25 bp, Homo sapien
agagcagctgtcactgatggtgaat

SEQ ID NO: 3934042 - DNA, 25 bp, Homo sapien
cagctgtcactgatggtgaattttt

SEQ ID NO: 3934043 - DNA, 25 bp, Homo sapien
tgctgagttccctagaatgaggaga

SEQ ID NO: 3934044 - DNA, 25 bp, Homo sapien
gaaaaaacacgaacagcaacagagt

SEQ ID NO: 3934045 - DNA, 25 bp, Homo sapien
aacccaactccctgcaccaggatga

SEQ ID NO: 3934046 - DNA, 25 bp, Homo sapien
ctttgtagacttccattgctgagtt

SEQ ID NO: 3934047 - DNA, 25 bp, Homo sapien
gcaccatcaagtcaatgaagtttaa

SEQ ID NO: 3934048 - DNA, 25 bp, Homo sapien
aatattcccttgtcgcaccatcaag

SEQ ID NO: 3934049 - DNA, 25 bp, Homo sapien
ccttgtcgcaccatcaagtcaatga

SEQ ID NO: 3934050 - DNA, 25 bp, Homo sapien
ggagggttgtcaatattcccttgtc

SEQ ID NO: 3934051 - DNA, 25 bp, Homo sapien
ccaaatgaatattactcttcaattg

SEQ ID NO: 3934052 - DNA, 25 bp, Homo sapien
tattactcttcaattgagagccaaa

SEQ ID NO: 3934053 - DNA, 25 bp, Homo sapien
tactcttcaattgagagccaaacat

SEQ ID NO: 3934054 - DNA, 25 bp, Homo sapien
tgaatattactcttcaattgagagc

SEQ ID NO: 3934055 - DNA, 25 bp, Homo sapien
tcatccgggatcttgtagacaaact

SEQ ID NO: 3934056 - DNA, 25 bp, Homo sapien
cataggctgtgacgaagttcatggg

SEQ ID NO: 3934057 - DNA, 25 bp, Homo sapien
gttggcaacttcaaacagcatcaca

SEQ ID NO: 3934058 - DNA, 25 bp, Homo sapien
tctgcccaggcattgtaattgacaa

SEQ ID NO: 3934059 - DNA, 25 bp, Homo sapien
caaggtgcggaagctaagatgcaaa

SEQ ID NO: 3934060 - DNA, 25 bp, Homo sapien
tgaccatacactcattcagggttga

SEQ ID NO: 3934061 - DNA, 25 bp, Homo sapien
tctcttggagagctaacgattccat

SEQ ID NO: 3934062 - DNA, 25 bp, Homo sapien
gcaaatataggtcagtctcacccca

SEQ ID NO: 3934063 - DNA, 25 bp, Homo sapien
aaaatgacatgttattggtgcatac

SEQ ID NO: 3934064 - DNA, 25 bp, Homo sapien
gcatacaaggccatttgatttaata

SEQ ID NO: 3934065 - DNA, 25 bp, Homo sapien
ttaaatccatgtagcttgcttaagg

SEQ ID NO: 3934066 - DNA, 25 bp, Homo sapien
ttgccttctgaaatccatgctggat

SEQ ID NO: 3934067 - DNA, 25 bp, Homo sapien
ggagatgtaagctcatgtcccctac

SEQ ID NO: 3934068 - DNA, 25 bp, Homo sapien
cagagaagtgtgcatacagccttac

SEQ ID NO: 3934069 - DNA, 25 bp, Homo sapien
tacttgggactatcgtgttcacagc

SEQ ID NO: 3934070 - DNA, 25 bp, Homo sapien
aaactactattgtgtagggtgccca

SEQ ID NO: 3934071 - DNA, 25 bp, Homo sapien
tatatgaccctgatcgacagactgg

SEQ ID NO: 3934072 - DNA, 25 bp, Homo sapien
tcaatccttattgcagagctgctgg

SEQ ID NO: 3934073 - DNA, 25 bp, Homo sapien
taacaagggagctgatttaggtccc

SEQ ID NO: 3934074 - DNA, 25 bp, Homo sapien
catatgggcgaagagattttcaacc

SEQ ID NO: 3934075 - DNA, 25 bp, Homo sapien
tggagtgcaatgtgcagtggtgcga

SEQ ID NO: 3934076 - DNA, 25 bp, Homo sapien
ctggagtgcaatgtgcagtggtgcg

SEQ ID NO: 3934077 - DNA, 25 bp, Homo sapien
caacctctacctcctgtgttctagc

SEQ ID NO: 3934078 - DNA, 25 bp, Homo sapien
cctctacctcctgtgttctagcgat

SEQ ID NO: 3934079 - DNA, 25 bp, Homo sapien
caaagacagtcacgttggggacagt

SEQ ID NO: 3934080 - DNA, 25 bp, Homo sapien
ggtgggtcacagagtctttgattgc

SEQ ID NO: 3934081 - DNA, 25 bp, Homo sapien
ttttaacttcttgcacgtagtctgc

SEQ ID NO: 3934082 - DNA, 25 bp, Homo sapien
tgaaagtagaggctgttccaaagac

SEQ ID NO: 3934083 - DNA, 25 bp, Homo sapien
caaaatcatctaaaaccatgatggc

SEQ ID NO: 3934084 - DNA, 25 bp, Homo sapien
gagcaatagccagagtgagacacac

SEQ ID NO: 3934085 - DNA, 25 bp, Homo sapien
aatcatctaaaaccatgatggcagc

SEQ ID NO: 3934086 - DNA, 25 bp, Homo sapien
gggcccagagcaatagccagagtga

SEQ ID NO: 3934087 - DNA, 25 bp, Homo sapien
tgtacgtaacaattttgtgttggaa

SEQ ID NO: 3934088 - DNA, 25 bp, Homo sapien
tctgagtggcatggaccctgagaac

SEQ ID NO: 3934089 - DNA, 25 bp, Homo sapien
gagaatgccgaaacaatggctctgg

SEQ ID NO: 3934090 - DNA, 25 bp, Homo sapien
ccaaatctgaatcctctcggaagct

SEQ ID NO: 3934091 - DNA, 25 bp, Homo sapien
caacaggcagccttgtacctgtagc

SEQ ID NO: 3934092 - DNA, 25 bp, Homo sapien
ggcagccttgtacctgtagctttgc

SEQ ID NO: 3934093 - DNA, 25 bp, Homo sapien
cagccttgtacctgtagctttgctc

SEQ ID NO: 3934094 - DNA, 25 bp, Homo sapien
acaggcagccttgtacctgtagctt

SEQ ID NO: 3934095 - DNA, 25 bp, Homo sapien
tctgtacttccctatcagctgccaa

SEQ ID NO: 3934096 - DNA, 25 bp, Homo sapien
tgctctgtacttccctatcagctgc

SEQ ID NO: 3934097 - DNA, 25 bp, Homo sapien
cagtgctctgtacttccctatcagc

SEQ ID NO: 3934098 - DNA, 25 bp, Homo sapien
ccccacagtgctctgtacttcccta

SEQ ID NO: 3934099 - DNA, 25 bp, Homo sapien
cgccaccgatagcagaatgatccca

SEQ ID NO: 3934100 - DNA, 25 bp, Homo sapien
cacagtgctgaggttggaagctctg

SEQ ID NO: 3934101 - DNA, 25 bp, Homo sapien
tcagtgtgggtgctagaaagatcac

SEQ ID NO: 3934102 - DNA, 25 bp, Homo sapien
tctgcaatggacaaggcagcgccac

SEQ ID NO: 3934103 - DNA, 25 bp, Homo sapien
agcgctgcagtagcccttttaatga

SEQ ID NO: 3934104 - DNA, 25 bp, Homo sapien
aaatcacaagtggagccggaaggct

SEQ ID NO: 3934105 - DNA, 25 bp, Homo sapien
ttacacccacactgaaaagcgctgc

SEQ ID NO: 3934106 - DNA, 25 bp, Homo sapien
aaggtgtggcagaaggccaaatgca

SEQ ID NO: 3934107 - DNA, 25 bp, Homo sapien
ttgctctgtccgctggactctggtt

SEQ ID NO: 3934108 - DNA, 25 bp, Homo sapien
cttgacctgttgctctgtccgctgg

SEQ ID NO: 3934109 - DNA, 25 bp, Homo sapien
ctgttgctctgtccgctggactctg

SEQ ID NO: 3934110 - DNA, 25 bp, Homo sapien
gacctgttgctctgtccgctggact

SEQ ID NO: 3934111 - DNA, 25 bp, Homo sapien
acaaactgccagtcatatctccttg

SEQ ID NO: 3934112 - DNA, 25 bp, Homo sapien
tctgcattctacttggcgggccaca

SEQ ID NO: 3934113 - DNA, 25 bp, Homo sapien
gccagtcatatctccttgtattagt

SEQ ID NO: 3934114 - DNA, 25 bp, Homo sapien
tgtacccatgatgggtccgcccagc

SEQ ID NO: 3934115 - DNA, 25 bp, Homo sapien
cttcaggttggtggtcaggtcttca

SEQ ID NO: 3934116 - DNA, 25 bp, Homo sapien
agcttcaggttggtggtcaggtctt

SEQ ID NO: 3934117 - DNA, 25 bp, Homo sapien
tcaggttggtggtcaggtcttcacc

SEQ ID NO: 3934118 - DNA, 25 bp, Homo sapien
tgagcttcaggttggtggtcaggtc

SEQ ID NO: 3934119 - DNA, 25 bp, Homo sapien
agaagactgagaccttttccagtgt

SEQ ID NO: 3934120 - DNA, 25 bp, Homo sapien
ccttttccagtgttgtccccacaga

SEQ ID NO: 3934121 - DNA, 25 bp, Homo sapien
cccacagaggcaatccaaaacgatg

SEQ ID NO: 3934122 - DNA, 25 bp, Homo sapien
tccaaaacgatgtccacaccttcag

SEQ ID NO: 3934123 - DNA, 25 bp, Homo sapien
gtccctgctgctgttttgcactcac

SEQ ID NO: 3934124 - DNA, 25 bp, Homo sapien
acgtccctgctgctgttttgcactc

SEQ ID NO: 3934125 - DNA, 25 bp, Homo sapien
ctattgctgaccacgtccctgctgc

SEQ ID NO: 3934126 - DNA, 25 bp, Homo sapien
attgctgaccacgtccctgctgctg

SEQ ID NO: 3934127 - DNA, 25 bp, Homo sapien
tgattttgcaaagctgaagaagctc

SEQ ID NO: 3934128 - DNA, 25 bp, Homo sapien
caaagctgaagaagctcttggtctc

SEQ ID NO: 3934129 - DNA, 25 bp, Homo sapien
ttgcaaagctgaagaagctcttggt

SEQ ID NO: 3934130 - DNA, 25 bp, Homo sapien
gattttgcaaagctgaagaagctct

SEQ ID NO: 3934131 - DNA, 25 bp, Homo sapien
tgttctcctcatacagcttgatggg

SEQ ID NO: 3934132 - DNA, 25 bp, Homo sapien
gttgtagagccctatgagtttttcc

SEQ ID NO: 3934133 - DNA, 25 bp, Homo sapien
cactccccgaatgaggcccgcccgg

SEQ ID NO: 3934134 - DNA, 25 bp, Homo sapien
tcttcttctggttgtagagccctat

SEQ ID NO: 3934135 - DNA, 25 bp, Homo sapien
gtagacattgatcaaaatttggtgg

SEQ ID NO: 3934136 - DNA, 25 bp, Homo sapien
tcaacaatgtacacatgctcttgta

SEQ ID NO: 3934137 - DNA, 25 bp, Homo sapien
cacaccgaattgtagacattgatca

SEQ ID NO: 3934138 - DNA, 25 bp, Homo sapien
cttgtaaccacaccgaattgtagac

SEQ ID NO: 3934139 - DNA, 25 bp, Homo sapien
tccttcctgaccattgagaacccag

SEQ ID NO: 3934140 - DNA, 25 bp, Homo sapien
catggacaagtatatctcttagctt

SEQ ID NO: 3934141 - DNA, 25 bp, Homo sapien
ccttttgggcactgagttcaagtgt

SEQ ID NO: 3934142 - DNA, 25 bp, Homo sapien
gttcaagtgtaagtcaccttctctg

SEQ ID NO: 3934143 - DNA, 25 bp, Homo sapien
tagatattgcagaaagccggcagaa

SEQ ID NO: 3934144 - DNA, 25 bp, Homo sapien
taaacagccacgtttggtccgactg

SEQ ID NO: 3934145 - DNA, 25 bp, Homo sapien
ggaggactatcttgctacaggaacg

SEQ ID NO: 3934146 - DNA, 25 bp, Homo sapien
gactgcagctccaaacagatgtctg

SEQ ID NO: 3934147 - DNA, 25 bp, Homo sapien
tttacagtgatcatacttggggcca

SEQ ID NO: 3934148 - DNA, 25 bp, Homo sapien
ccacagctgtatctaagtgtgaatc

SEQ ID NO: 3934149 - DNA, 25 bp, Homo sapien
ggtgtcatgcttcttaggccccata

SEQ ID NO: 3934150 - DNA, 25 bp, Homo sapien
cccctacccaggatgtaagctcaaa

SEQ ID NO: 3934151 - DNA, 25 bp, Homo sapien
cactgtcaaccccaacatagtggga

SEQ ID NO: 3934152 - DNA, 25 bp, Homo sapien
caaaggagacacaagggcccaccat

SEQ ID NO: 3934153 - DNA, 25 bp, Homo sapien
aaggagacacaagggcccaccatca

SEQ ID NO: 3934154 - DNA, 25 bp, Homo sapien
gcccaccatcaaccgcactgtcaac

SEQ ID NO: 3934155 - DNA, 25 bp, Homo sapien
gggcttagagcacgaaatttttctg

SEQ ID NO: 3934156 - DNA, 25 bp, Homo sapien
cagggcttagagcacgaaatttttc

SEQ ID NO: 3934157 - DNA, 25 bp, Homo sapien
ccagggcttagagcacgaaattttt

SEQ ID NO: 3934158 - DNA, 25 bp, Homo sapien
ggcttagagcacgaaatttttctgc

SEQ ID NO: 3934159 - DNA, 25 bp, Homo sapien
ctagaaaccatttgtgctgggtcca

SEQ ID NO: 3934160 - DNA, 25 bp, Homo sapien
tccagtatttgccatggaacagatg

SEQ ID NO: 3934161 - DNA, 25 bp, Homo sapien
ggtccagtatttgccatggaacaga

SEQ ID NO: 3934162 - DNA, 25 bp, Homo sapien
cagtatttgccatggaacagatgcc

SEQ ID NO: 3934163 - DNA, 25 bp, Homo sapien
cctggacccaaagcactccatggcc

SEQ ID NO: 3934164 - DNA, 25 bp, Homo sapien
caccttgtcaaagaccacatgcttg

SEQ ID NO: 3934165 - DNA, 25 bp, Homo sapien
ccttctttcaccttgtcaaagacca

SEQ ID NO: 3934166 - DNA, 25 bp, Homo sapien
atccaacccctcagtcttggcagta

SEQ ID NO: 3934167 - DNA, 25 bp, Homo sapien
ctgaatgtggttgaggatttgactt

SEQ ID NO: 3934168 - DNA, 25 bp, Homo sapien
tgaatgtggttgaggatttgacttg

SEQ ID NO: 3934169 - DNA, 25 bp, Homo sapien
gaggatttgacttgtctgtggacag

SEQ ID NO: 3934170 - DNA, 25 bp, Homo sapien
taattctgcaacacgctggtctcct

SEQ ID NO: 3934171 - DNA, 25 bp, Homo sapien
gaatgacaggcgtaaaggcaaggac

SEQ ID NO: 3934172 - DNA, 25 bp, Homo sapien
gaatgtattcagagctgagctccca

SEQ ID NO: 3934173 - DNA, 25 bp, Homo sapien
ctcctaacaaggagtgctgagctgt

SEQ ID NO: 3934174 - DNA, 25 bp, Homo sapien
acaccagcatgtgtttatcatttgt

SEQ ID NO: 3934175 - DNA, 25 bp, Homo sapien
catttgtgctgttcagagcttctgt

SEQ ID NO: 3934176 - DNA, 25 bp, Homo sapien
gagcttctgttccataaagcagctc

SEQ ID NO: 3934177 - DNA, 25 bp, Homo sapien
gcagctcccacagttgcctttggaa

SEQ ID NO: 3934178 - DNA, 25 bp, Homo sapien
tgcatttccgtagtttccccaggga

SEQ ID NO: 3934179 - DNA, 25 bp, Homo sapien
gataacccgctattggtcacgatgg

SEQ ID NO: 3934180 - DNA, 25 bp, Homo sapien
cagggccagatccacacagactttg

SEQ ID NO: 3934181 - DNA, 25 bp, Homo sapien
aattggccaatgctacacagcaggg

SEQ ID NO: 3934182 - DNA, 25 bp, Homo sapien
tcttaggaagtgatactgtataatg

SEQ ID NO: 3934183 - DNA, 25 bp, Homo sapien
tctctttcctcaaagcagacatgct

SEQ ID NO: 3934184 - DNA, 25 bp, Homo sapien
ttgtgaaacatatcctgagaggctc

SEQ ID NO: 3934185 - DNA, 25 bp, Homo sapien
tcccttcacgagaaaaagagcagct

SEQ ID NO: 3934186 - DNA, 25 bp, Homo sapien
acttgttagcaatgtgactctggga

SEQ ID NO: 3934187 - DNA, 25 bp, Homo sapien
aacactggtcttactgggtggtaca

SEQ ID NO: 3934188 - DNA, 25 bp, Homo sapien
caacgatattgcacttctgagatgg

SEQ ID NO: 3934189 - DNA, 25 bp, Homo sapien
agcaaggttgcatgggttcagatcc

SEQ ID NO: 3934190 - DNA, 25 bp, Homo sapien
tctagattggtcttcaattaatgaa

SEQ ID NO: 3934191 - DNA, 25 bp, Homo sapien
ccctcttatcgtctctctagattgg

SEQ ID NO: 3934192 - DNA, 25 bp, Homo sapien
aagtgaggctttcatggtgactctg

SEQ ID NO: 3934193 - DNA, 25 bp, Homo sapien
tgctaactgggaagatgagcttaga

SEQ ID NO: 3934194 - DNA, 25 bp, Homo sapien
tcttgagccaattagcaagttcctt

SEQ ID NO: 3934195 - DNA, 25 bp, Homo sapien
attagcaagttccttaatgccttta

SEQ ID NO: 3934196 - DNA, 25 bp, Homo sapien
agtttcttgagccaattagcaagtt

SEQ ID NO: 3934197 - DNA, 25 bp, Homo sapien
gccaattagcaagttccttaatgcc

SEQ ID NO: 3934198 - DNA, 25 bp, Homo sapien
ggtagcaccattaattgggatgtaa

SEQ ID NO: 3934199 - DNA, 25 bp, Homo sapien
tgtttgaatatgtgcctgctgagga

SEQ ID NO: 3934200 - DNA, 25 bp, Homo sapien
ggactagattcaagagacttttggg

SEQ ID NO: 3934201 - DNA, 25 bp, Homo sapien
gtttcctgcacggatggtagcacca

SEQ ID NO: 3934202 - DNA, 25 bp, Homo sapien
gacattctagtgttgatcacagcga

SEQ ID NO: 3934203 - DNA, 25 bp, Homo sapien
ggatcagccaaatgggtcgcaccct

SEQ ID NO: 3934204 - DNA, 25 bp, Homo sapien
tcacagcgacatgaggagagcaagg

SEQ ID NO: 3934205 - DNA, 25 bp, Homo sapien
ccagtgaaggagtctaacggcagga

SEQ ID NO: 3934206 - DNA, 25 bp, Homo sapien
cattgcctttccatattaaacttac

SEQ ID NO: 3934207 - DNA, 25 bp, Homo sapien
ggagggctgatgcattcattgcctt

SEQ ID NO: 3934208 - DNA, 25 bp, Homo sapien
agatttaggaatgatcagcttggga

SEQ ID NO: 3934209 - DNA, 25 bp, Homo sapien
atttaggaatgatcagcttgggagg

SEQ ID NO: 3934210 - DNA, 25 bp, Homo sapien
tcaactaatcagtccagcatccttt

SEQ ID NO: 3934211 - DNA, 25 bp, Homo sapien
atcaaaacagcatcctggtctaggc

SEQ ID NO: 3934212 - DNA, 25 bp, Homo sapien
cagcatcctggtctaggcacaacac

SEQ ID NO: 3934213 - DNA, 25 bp, Homo sapien
gcatcctttccaatcaaaacagcat

SEQ ID NO: 3934214 - DNA, 25 bp, Homo sapien
cctgctgaaggaggaattgagagct

SEQ ID NO: 3934215 - DNA, 25 bp, Homo sapien
cagaattgtcctccagaagccgagg

SEQ ID NO: 3934216 - DNA, 25 bp, Homo sapien
gggagaactctccaaagcccaccac

SEQ ID NO: 3934217 - DNA, 25 bp, Homo sapien
tgtcctccagaagccgaggttcggg

SEQ ID NO: 3934218 - DNA, 25 bp, Homo sapien
ggtgtggtggcatacgtatgtaatc

SEQ ID NO: 3934219 - DNA, 25 bp, Homo sapien
ggcatacgtatgtaatcccaactac

SEQ ID NO: 3934220 - DNA, 25 bp, Homo sapien
ggtggcatacgtatgtaatcccaac

SEQ ID NO: 3934221 - DNA, 25 bp, Homo sapien
tggtggcatacgtatgtaatcccaa

SEQ ID NO: 3934222 - DNA, 25 bp, Homo sapien
tccaagggattagaacagggtcatc

SEQ ID NO: 3934223 - DNA, 25 bp, Homo sapien
cctgtaaaatccttttggtcatgca

SEQ ID NO: 3934224 - DNA, 25 bp, Homo sapien
tctcttttgaacagtcttatccagg

SEQ ID NO: 3934225 - DNA, 25 bp, Homo sapien
tcaatctttacgtccaatctgccaa

SEQ ID NO: 3934226 - DNA, 25 bp, Homo sapien
caaggcttgtgctaattggaaggta

SEQ ID NO: 3934227 - DNA, 25 bp, Homo sapien
gatgctcacctcgtatttcccaaag

SEQ ID NO: 3934228 - DNA, 25 bp, Homo sapien
tatgagttctcttacccgcactacc

SEQ ID NO: 3934229 - DNA, 25 bp, Homo sapien
tctcgtgcccaaagaagatgctcac

SEQ ID NO: 3934230 - DNA, 25 bp, Homo sapien
ctaccaggtctttccccagccagtc

SEQ ID NO: 3934231 - DNA, 25 bp, Homo sapien
atttctcggcagtagttatagtcat

SEQ ID NO: 3934232 - DNA, 25 bp, Homo sapien
tcatttctcggcagtagttatagtc

SEQ ID NO: 3934233 - DNA, 25 bp, Homo sapien
catttctcggcagtagttatagtca

SEQ ID NO: 3934234 - DNA, 25 bp, Homo sapien
ggtcatttctcggcagtagttatag

SEQ ID NO: 3934235 - DNA, 25 bp, Homo sapien
ctgttgtgagtcacagactgatcca

SEQ ID NO: 3934236 - DNA, 25 bp, Homo sapien
cagtcctcgataagaagagggccat

SEQ ID NO: 3934237 - DNA, 25 bp, Homo sapien
tcagagattggaacaggcccaggga

SEQ ID NO: 3934238 - DNA, 25 bp, Homo sapien
catggaaaccttggagaacaatggt

SEQ ID NO: 3934239 - DNA, 25 bp, Homo sapien
atttgcaccacggaaggcccttttg

SEQ ID NO: 3934240 - DNA, 25 bp, Homo sapien
tcctctttgctagtgagacagctcg

SEQ ID NO: 3934241 - DNA, 25 bp, Homo sapien
cgtattgcgaagacgtcctctttgc

SEQ ID NO: 3934242 - DNA, 25 bp, Homo sapien
gacagctcgtctctgattgcttcaa

SEQ ID NO: 3934243 - DNA, 25 bp, Homo sapien
ttcattatagctactgcccaccggg

SEQ ID NO: 3934244 - DNA, 25 bp, Homo sapien
gcccaccgggaatcttcatatattg

SEQ ID NO: 3934245 - DNA, 25 bp, Homo sapien
ctctgattaatagtgtcatatgatt

SEQ ID NO: 3934246 - DNA, 25 bp, Homo sapien
ttgaccctaatacataattcagtag

SEQ ID NO: 3934247 - DNA, 25 bp, Homo sapien
tgcttgtatgaaaaccgaagacttc

SEQ ID NO: 3934248 - DNA, 25 bp, Homo sapien
taactttagcgtcagtctggtaaca

SEQ ID NO: 3934249 - DNA, 25 bp, Homo sapien
gcctagatgctatggttaaacaaaa

SEQ ID NO: 3934250 - DNA, 25 bp, Homo sapien
cgaagacttctacacatttggataa

SEQ ID NO: 3934251 - DNA, 25 bp, Homo sapien
cagaattatgtgctgcagggtggca

SEQ ID NO: 3934252 - DNA, 25 bp, Homo sapien
cacgattctggttattgggaggaaa

SEQ ID NO: 3934253 - DNA, 25 bp, Homo sapien
tcctgggatcctctgaaacggtaag

SEQ ID NO: 3934254 - DNA, 25 bp, Homo sapien
caacatggagcttggtgcttggtac

SEQ ID NO: 3934255 - DNA, 25 bp, Homo sapien
cgctgcggctcaagtttagtggcta

SEQ ID NO: 3934256 - DNA, 25 bp, Homo sapien
catcttctgggtcggaaaagtgagg

SEQ ID NO: 3934257 - DNA, 25 bp, Homo sapien
tgctggttaggcgagatgttcccca

SEQ ID NO: 3934258 - DNA, 25 bp, Homo sapien
gggcctggagaactcaaactgtcaa

SEQ ID NO: 3934259 - DNA, 25 bp, Homo sapien
tgccaatgttccctcggtcgtgaat

SEQ ID NO: 3934260 - DNA, 25 bp, Homo sapien
aatgttccctcggtcgtgaatccgc

SEQ ID NO: 3934261 - DNA, 25 bp, Homo sapien
acttgccaatgttccctcggtcgtg

SEQ ID NO: 3934262 - DNA, 25 bp, Homo sapien
tccctcggtcgtgaatccgctgcat

SEQ ID NO: 3934263 - DNA, 25 bp, Homo sapien
tgattgacccgtggtgctctctcgc

SEQ ID NO: 3934264 - DNA, 25 bp, Homo sapien
cgtgtctgcatctgattgacccgtg

SEQ ID NO: 3934265 - DNA, 25 bp, Homo sapien
acccgtggtgctctctcgcgtggaa

SEQ ID NO: 3934266 - DNA, 25 bp, Homo sapien
gctctctcgcgtggaactgaacaga

SEQ ID NO: 3934267 - DNA, 25 bp, Homo sapien
agagacttggtcatatgtttaaaga

SEQ ID NO: 3934268 - DNA, 25 bp, Homo sapien
ctgaaagagacttggtcatatgttt

SEQ ID NO: 3934269 - DNA, 25 bp, Homo sapien
gaaagagacttggtcatatgtttaa

SEQ ID NO: 3934270 - DNA, 25 bp, Homo sapien
aagagacttggtcatatgtttaaag

SEQ ID NO: 3934271 - DNA, 25 bp, Homo sapien
ccagggtgggaaattggtgccaact

SEQ ID NO: 3934272 - DNA, 25 bp, Homo sapien
atggacacaggagcatcccagggtg

SEQ ID NO: 3934273 - DNA, 25 bp, Homo sapien
ggatgggcctagagcctgtctgcct

SEQ ID NO: 3934274 - DNA, 25 bp, Homo sapien
tcagcccgaggacttgggagcaact

SEQ ID NO: 3934275 - DNA, 25 bp, Homo sapien
tggataaagggcatccgctccttgt

SEQ ID NO: 3934276 - DNA, 25 bp, Homo sapien
tgttctcgctgtctccctcgtggtc

SEQ ID NO: 3934277 - DNA, 25 bp, Homo sapien
ttactggataaagggcatccgctcc

SEQ ID NO: 3934278 - DNA, 25 bp, Homo sapien
ggcatccgctccttgttctcgctgt

SEQ ID NO: 3934279 - DNA, 25 bp, Homo sapien
ttggcaagtgttctcatcagaggca

SEQ ID NO: 3934280 - DNA, 25 bp, Homo sapien
aagagttttctcagccgggtcctca

SEQ ID NO: 3934281 - DNA, 25 bp, Homo sapien
cttggtttccgaagagcagggcgct

SEQ ID NO: 3934282 - DNA, 25 bp, Homo sapien
tgtgcaaacaccagcaatgctcagg

SEQ ID NO: 3934283 - DNA, 25 bp, Homo sapien
gatgcgtatttattttggaaccctg

SEQ ID NO: 3934284 - DNA, 25 bp, Homo sapien
gattcacctgactacattttgcccc

SEQ ID NO: 3934285 - DNA, 25 bp, Homo sapien
catgatattgatgcaacgctgcgct

SEQ ID NO: 3934286 - DNA, 25 bp, Homo sapien
caagtgtgtaattcctaagacgttc

SEQ ID NO: 3934287 - DNA, 25 bp, Homo sapien
tgtccttttaggctggggcttgtca

SEQ ID NO: 3934288 - DNA, 25 bp, Homo sapien
gccttctgggaggagccttgaatgt

SEQ ID NO: 3934289 - DNA, 25 bp, Homo sapien
tctgggaggagccttgaatgtcctt

SEQ ID NO: 3934290 - DNA, 25 bp, Homo sapien
cttctgggaggagccttgaatgtcc

SEQ ID NO: 3934291 - DNA, 25 bp, Homo sapien
gaggctgacgccaagtccaagcttg

SEQ ID NO: 3934292 - DNA, 25 bp, Homo sapien
ggctgacgccaagtccaagcttggt

SEQ ID NO: 3934293 - DNA, 25 bp, Homo sapien
gctgacgccaagtccaagcttggta

SEQ ID NO: 3934294 - DNA, 25 bp, Homo sapien
ctgacgccaagtccaagcttggtac

SEQ ID NO: 3934295 - DNA, 25 bp, Homo sapien
agtgattgggccacatggataagca

SEQ ID NO: 3934296 - DNA, 25 bp, Homo sapien
ctctctgtttctgcaactgaatgga

SEQ ID NO: 3934297 - DNA, 25 bp, Homo sapien
ccacatggataagcagggggagtca

SEQ ID NO: 3934298 - DNA, 25 bp, Homo sapien
tctctgtttctgcaactgaatggat

SEQ ID NO: 3934299 - DNA, 25 bp, Homo sapien
tctaggacccagtgttctcctggct

SEQ ID NO: 3934300 - DNA, 25 bp, Homo sapien
tccctcttctaggacccagtgttct

SEQ ID NO: 3934301 - DNA, 25 bp, Homo sapien
tcttctaggacccagtgttctcctg

SEQ ID NO: 3934302 - DNA, 25 bp, Homo sapien
taggacccagtgttctcctggctcc

SEQ ID NO: 3934303 - DNA, 25 bp, Homo sapien
gatgttccgatcgatttttgcagac

SEQ ID NO: 3934304 - DNA, 25 bp, Homo sapien
gatcgatttttgcagaccgttgagg

SEQ ID NO: 3934305 - DNA, 25 bp, Homo sapien
tttgcagaccgttgaggaagccaga

SEQ ID NO: 3934306 - DNA, 25 bp, Homo sapien
tgaaccttgatgttccgatcgattt

SEQ ID NO: 3934307 - DNA, 25 bp, Homo sapien
agcccccttagagcagctatggaag

SEQ ID NO: 3934308 - DNA, 25 bp, Homo sapien
ccagcccccttagagcagctatgga

SEQ ID NO: 3934309 - DNA, 25 bp, Homo sapien
tgccagcccccttagagcagctatg

SEQ ID NO: 3934310 - DNA, 25 bp, Homo sapien
gttgccagcccccttagagcagcta

SEQ ID NO: 3934311 - DNA, 25 bp, Homo sapien
tctggtccaggagtaaggtgatcac

SEQ ID NO: 3934312 - DNA, 25 bp, Homo sapien
tgcttcctggcttttaatctggatg

SEQ ID NO: 3934313 - DNA, 25 bp, Homo sapien
ggtgatcaccaggatgcaaattaca

SEQ ID NO: 3934314 - DNA, 25 bp, Homo sapien
cactcgacgtttgctgtgcttcctg

SEQ ID NO: 3934315 - DNA, 25 bp, Homo sapien
gcttttcaatttgagtcttcagatc

SEQ ID NO: 3934316 - DNA, 25 bp, Homo sapien
tgagtcttcagatctccatccttgt

SEQ ID NO: 3934317 - DNA, 25 bp, Homo sapien
cttctttgtgcctcattttcctcat

SEQ ID NO: 3934318 - DNA, 25 bp, Homo sapien
cctcattttcctcatctgtaaaatt

SEQ ID NO: 3934319 - DNA, 25 bp, Homo sapien
attttcctcatctgtaaaattagga

SEQ ID NO: 3934320 - DNA, 25 bp, Homo sapien
tcattttcctcatctgtaaaattag

SEQ ID NO: 3934321 - DNA, 25 bp, Homo sapien
gctgtgcacggtcccagttgaggaa

SEQ ID NO: 3934322 - DNA, 25 bp, Homo sapien
gtgaactttagtgcctcggagacag

SEQ ID NO: 3934323 - DNA, 25 bp, Homo sapien
aaagtcattgacacctggcaggctc

SEQ ID NO: 3934324 - DNA, 25 bp, Homo sapien
gacacagttttctcgcttgccaccg

SEQ ID NO: 3934325 - DNA, 25 bp, Homo sapien
atcttgcttggaggacacattggag

SEQ ID NO: 3934326 - DNA, 25 bp, Homo sapien
tcttgcttggaggacacattggaga

SEQ ID NO: 3934327 - DNA, 25 bp, Homo sapien
ttttacttgatcttagagatcatga

SEQ ID NO: 3934328 - DNA, 25 bp, Homo sapien
tcttagagatcatgaacctataagt

SEQ ID NO: 3934329 - DNA, 25 bp, Homo sapien
tacttgatcttagagatcatgaacc

SEQ ID NO: 3934330 - DNA, 25 bp, Homo sapien
gatcttagagatcatgaacctataa

SEQ ID NO: 3934331 - DNA, 25 bp, Homo sapien
ttcaaattgcggctggaaacttcca

SEQ ID NO: 3934332 - DNA, 25 bp, Homo sapien
caaacatacgctaaacttccaaggg

SEQ ID NO: 3934333 - DNA, 25 bp, Homo sapien
tatggcagacaagatacaagtccca

SEQ ID NO: 3934334 - DNA, 25 bp, Homo sapien
caaagattggttgcccataatagac

SEQ ID NO: 3934335 - DNA, 25 bp, Homo sapien
tgtcagttatattcgaagttttatc

SEQ ID NO: 3934336 - DNA, 25 bp, Homo sapien
gatgtcagttatattcgaagtttta

SEQ ID NO: 3934337 - DNA, 25 bp, Homo sapien
tcagttatattcgaagttttatcac

SEQ ID NO: 3934338 - DNA, 25 bp, Homo sapien
gaagatgtcagttatattcgaagtt

SEQ ID NO: 3934339 - DNA, 25 bp, Homo sapien
tgacatctttgggaagacgggaaac

SEQ ID NO: 3934340 - DNA, 25 bp, Homo sapien
gactgtttgggcttcgaatgtaact

SEQ ID NO: 3934341 - DNA, 25 bp, Homo sapien
gcctagactgtttgggcttcgaatg

SEQ ID NO: 3934342 - DNA, 25 bp, Homo sapien
tgggcttcgaatgtaactgacatct

SEQ ID NO: 3934343 - DNA, 25 bp, Homo sapien
gaatactaccacctgctaagtaggg

SEQ ID NO: 3934344 - DNA, 25 bp, Homo sapien
cagcatggctgtaggcaatttaacc

SEQ ID NO: 3934345 - DNA, 25 bp, Homo sapien
tgcatatgtaaagtacaccgcggtt

SEQ ID NO: 3934346 - DNA, 25 bp, Homo sapien
caacttatcttaacgggtgtccctg

SEQ ID NO: 3934347 - DNA, 25 bp, Homo sapien
tctgggagcgttggcccacatttac

SEQ ID NO: 3934348 - DNA, 25 bp, Homo sapien
gcactatgcagtgtggcagcccgtg

SEQ ID NO: 3934349 - DNA, 25 bp, Homo sapien
gcagccaagcttgaccctgttgatt

SEQ ID NO: 3934350 - DNA, 25 bp, Homo sapien
cctgttgggaaatggcaccaccata

SEQ ID NO: 3934351 - DNA, 25 bp, Homo sapien
aagtgcctaagagatcgcgctgccg

SEQ ID NO: 3934352 - DNA, 25 bp, Homo sapien
gaaatccagtctccgcaatatcgcg

SEQ ID NO: 3934353 - DNA, 25 bp, Homo sapien
gccgaccacgaagctgaaatccagt

SEQ ID NO: 3934354 - DNA, 25 bp, Homo sapien
ctagacagcaaagccggagagcgct

SEQ ID NO: 3934355 - DNA, 25 bp, Homo sapien
ctcccagcccggaggcagctcgtcc

SEQ ID NO: 3934356 - DNA, 25 bp, Homo sapien
cccggaggcagctcgtcctcactgt

SEQ ID NO: 3934357 - DNA, 25 bp, Homo sapien
tccagccccgcgtagcgcagcgctg

SEQ ID NO: 3934358 - DNA, 25 bp, Homo sapien
ccgtgtcgtccagccccgcgtagcg

SEQ ID NO: 3934359 - DNA, 25 bp, Homo sapien
gcgctgcgctggagtgcgcgtcctc

SEQ ID NO: 3934360 - DNA, 25 bp, Homo sapien
ggtcccaggtgcgtccgcggcccca

SEQ ID NO: 3934361 - DNA, 25 bp, Homo sapien
tttcactttgcaccgcacgcgctgc

SEQ ID NO: 3934362 - DNA, 25 bp, Homo sapien
cgcgcaggtggcgtccgtgggctgt

SEQ ID NO: 3934363 - DNA, 25 bp, Homo sapien
cgcgccgcgcagtgctgcatcctga

SEQ ID NO: 3934364 - DNA, 25 bp, Homo sapien
gcgcgccgggaagccaccaggtgac

SEQ ID NO: 3934365 - DNA, 25 bp, Homo sapien
ccgctggacccgaggcccaccaagg

SEQ ID NO: 3934366 - DNA, 25 bp, Homo sapien
gggatgaggccgctttgccctcgcc

SEQ ID NO: 3934367 - DNA, 25 bp, Homo sapien
tcacacagttaaagatgaaggctct

SEQ ID NO: 3934368 - DNA, 25 bp, Homo sapien
ttaagagcaatcaaggaacgacagt

SEQ ID NO: 3934369 - DNA, 25 bp, Homo sapien
gacacggtgctatgtgctttacgca

SEQ ID NO: 3934370 - DNA, 25 bp, Homo sapien
gaggcactgtcgtatcttaagagca

SEQ ID NO: 3934371 - DNA, 25 bp, Homo sapien
cacgctgaagacctgagcagcccat

SEQ ID NO: 3934372 - DNA, 25 bp, Homo sapien
agcacgctgaagacctgagcagccc

SEQ ID NO: 3934373 - DNA, 25 bp, Homo sapien
cagcacgctgaagacctgagcagcc

SEQ ID NO: 3934374 - DNA, 25 bp, Homo sapien
tcagcacgctgaagacctgagcagc

SEQ ID NO: 3934375 - DNA, 25 bp, Homo sapien
ccactgagtcttctcctcggtgtga

SEQ ID NO: 3934376 - DNA, 25 bp, Homo sapien
ccagtttttggatgttcccactgag

SEQ ID NO: 3934377 - DNA, 25 bp, Homo sapien
ttccagtttttggatgttcccactg

SEQ ID NO: 3934378 - DNA, 25 bp, Homo sapien
gtttttggatgttcccactgagtct

SEQ ID NO: 3934379 - DNA, 25 bp, Homo sapien
aaaaacacttgtccgttctcatcag

SEQ ID NO: 3934380 - DNA, 25 bp, Homo sapien
acaaaaaacacttgtccgttctcat

SEQ ID NO: 3934381 - DNA, 25 bp, Homo sapien
aaacacttgtccgttctcatcagtt

SEQ ID NO: 3934382 - DNA, 25 bp, Homo sapien
aacacttgtccgttctcatcagttt

SEQ ID NO: 3934383 - DNA, 25 bp, Homo sapien
acgtgattacaggatagagggccct

SEQ ID NO: 3934384 - DNA, 25 bp, Homo sapien
ccgtcgtatctttgccgggtggttg

SEQ ID NO: 3934385 - DNA, 25 bp, Homo sapien
ggttggcttggtcggattatcatcc

SEQ ID NO: 3934386 - DNA, 25 bp, Homo sapien
aatttccatggcagtggtgctgccg

SEQ ID NO: 3934387 - DNA, 25 bp, Homo sapien
tcatccacagtaaacgccagtcttg

SEQ ID NO: 3934388 - DNA, 25 bp, Homo sapien
actcttagacggagcctgttgtctc

SEQ ID NO: 3934389 - DNA, 25 bp, Homo sapien
atcaattttggtttgaataacccag

SEQ ID NO: 3934390 - DNA, 25 bp, Homo sapien
tgcccatacaccatgcagaccaggt

SEQ ID NO: 3934391 - DNA, 25 bp, Homo sapien
ccaggtcaaaaactcttagacggag

SEQ ID NO: 3934392 - DNA, 25 bp, Homo sapien
aatttgccacaacctccaactggac

SEQ ID NO: 3934393 - DNA, 25 bp, Homo sapien
tggaccgcagacacctcctgcagtg

SEQ ID NO: 3934394 - DNA, 25 bp, Homo sapien
tacaatttgccacaacctccaactg

SEQ ID NO: 3934395 - DNA, 25 bp, Homo sapien
cctgcagtgtccacaaaatgaatta

SEQ ID NO: 3934396 - DNA, 25 bp, Homo sapien
agagtttgcttagaggccacttcaa

SEQ ID NO: 3934397 - DNA, 25 bp, Homo sapien
cagagtttgcttagaggccacttca

SEQ ID NO: 3934398 - DNA, 25 bp, Homo sapien
gacagagtttgcttagaggccactt

SEQ ID NO: 3934399 - DNA, 25 bp, Homo sapien
agtttgcttagaggccacttcaaag

SEQ ID NO: 3934400 - DNA, 25 bp, Homo sapien
gcctcttgatctcctagcggaagct

SEQ ID NO: 3934401 - DNA, 25 bp, Homo sapien
agctttgggtgaagagatggcttcc

SEQ ID NO: 3934402 - DNA, 25 bp, Homo sapien
gagatgctgatctccacagagagag

SEQ ID NO: 3934403 - DNA, 25 bp, Homo sapien
gaggtccacaagctacagctttcaa

SEQ ID NO: 3934404 - DNA, 25 bp, Homo sapien
ccttgagcacgtactttttatacct

SEQ ID NO: 3934405 - DNA, 25 bp, Homo sapien
tgaccaataccttgagcacgtactt

SEQ ID NO: 3934406 - DNA, 25 bp, Homo sapien
gaggagtgaccaataccttgagcac

SEQ ID NO: 3934407 - DNA, 25 bp, Homo sapien
aacaaattgaggagtgaccaatacc

SEQ ID NO: 3934408 - DNA, 25 bp, Homo sapien
caggcatttcaagatcccaagtgca

SEQ ID NO: 3934409 - DNA, 25 bp, Homo sapien
aaatgtaagttagctatggccccag

SEQ ID NO: 3934410 - DNA, 25 bp, Homo sapien
tcagaaaggaaactaatcaggcatt

SEQ ID NO: 3934411 - DNA, 25 bp, Homo sapien
gataaatgccaagatcccactagtt

SEQ ID NO: 3934412 - DNA, 25 bp, Homo sapien
tgtactgagcccaaaaggacacgtt

SEQ ID NO: 3934413 - DNA, 25 bp, Homo sapien
tacatggagaacactggctatctgc

SEQ ID NO: 3934414 - DNA, 25 bp, Homo sapien
gaaatatgcgattaatgggctgcct

SEQ ID NO: 3934415 - DNA, 25 bp, Homo sapien
catagggtcaccaaggcgttcaaaa

SEQ ID NO: 3934416 - DNA, 25 bp, Homo sapien
atgttacaacaagtttggcacgcat

SEQ ID NO: 3934417 - DNA, 25 bp, Homo sapien
attgtacacaaatgcctggctagga

SEQ ID NO: 3934418 - DNA, 25 bp, Homo sapien
ttttcccttgtagaatgggccagag

SEQ ID NO: 3934419 - DNA, 25 bp, Homo sapien
tgcacaagacgatgcttttctggca

SEQ ID NO: 3934420 - DNA, 25 bp, Homo sapien
ggaaatcagttagggagcaccatct

SEQ ID NO: 3934421 - DNA, 25 bp, Homo sapien
ttaactataaactacatcctgcctc

SEQ ID NO: 3934422 - DNA, 25 bp, Homo sapien
cattacagtcaagagcattgattcc

SEQ ID NO: 3934423 - DNA, 25 bp, Homo sapien
tgtaagactccatgtcatatgatgc

SEQ ID NO: 3934424 - DNA, 25 bp, Homo sapien
tctgtttccagtccaacaaaatgtg

SEQ ID NO: 3934425 - DNA, 25 bp, Homo sapien
aagttcagaacccatgtggatgaca

SEQ ID NO: 3934426 - DNA, 25 bp, Homo sapien
tttggtccacgtgccacaatctgac

SEQ ID NO: 3934427 - DNA, 25 bp, Homo sapien
tgacccttcgaatagacaatatcct

SEQ ID NO: 3934428 - DNA, 25 bp, Homo sapien
taacattcggttctaaactgacctg

SEQ ID NO: 3934429 - DNA, 25 bp, Homo sapien
gaaggcacgggcaatgctagcttta

SEQ ID NO: 3934430 - DNA, 25 bp, Homo sapien
ttacctcacttctttcacatgccag

SEQ ID NO: 3934431 - DNA, 25 bp, Homo sapien
gtcaaatatccacaacagtcccgcg

SEQ ID NO: 3934432 - DNA, 25 bp, Homo sapien
aggatgcacggaacaaaacacaccg

SEQ ID NO: 3934433 - DNA, 25 bp, Homo sapien
tgggggcaggcaccgaacaaagtct

SEQ ID NO: 3934434 - DNA, 25 bp, Homo sapien
agtgagcaaaagacacctagatcat

SEQ ID NO: 3934435 - DNA, 25 bp, Homo sapien
aaagtcttgctgactgatctgcccc

SEQ ID NO: 3934436 - DNA, 25 bp, Homo sapien
agcaaaagacacctagatcatttgg

SEQ ID NO: 3934437 - DNA, 25 bp, Homo sapien
caccatggagggcaaaagacttggc

SEQ ID NO: 3934438 - DNA, 25 bp, Homo sapien
gttcctgcaggccaagatcacatgt

SEQ ID NO: 3934439 - DNA, 25 bp, Homo sapien
ggccaagatcacatgtgcaccatgg

SEQ ID NO: 3934440 - DNA, 25 bp, Homo sapien
accatggagggcaaaagacttggcg

SEQ ID NO: 3934441 - DNA, 25 bp, Homo sapien
ttcttctaaaatgcgtgacactgct

SEQ ID NO: 3934442 - DNA, 25 bp, Homo sapien
tctaaaatgcgtgacactgcttcac

SEQ ID NO: 3934443 - DNA, 25 bp, Homo sapien
aatgcgtgacactgcttcactcgcc

SEQ ID NO: 3934444 - DNA, 25 bp, Homo sapien
ccattcttctaaaatgcgtgacact

SEQ ID NO: 3934445 - DNA, 25 bp, Homo sapien
tagtgacataccagatgaaatcctt

SEQ ID NO: 3934446 - DNA, 25 bp, Homo sapien
taccagatgaaatccttgcgcagag

SEQ ID NO: 3934447 - DNA, 25 bp, Homo sapien
gacataccagatgaaatccttgcgc

SEQ ID NO: 3934448 - DNA, 25 bp, Homo sapien
tccttgcgcagagatgtgaggtgag

SEQ ID NO: 3934449 - DNA, 25 bp, Homo sapien
agcttgaaaaattggagtctatcaa

SEQ ID NO: 3934450 - DNA, 25 bp, Homo sapien
agcagcttgaaaaattggagtctat

SEQ ID NO: 3934451 - DNA, 25 bp, Homo sapien
cagcttgaaaaattggagtctatca

SEQ ID NO: 3934452 - DNA, 25 bp, Homo sapien
gcagcttgaaaaattggagtctatc

SEQ ID NO: 3934453 - DNA, 25 bp, Homo sapien
ctctgttgctgtttgaacctagaca

SEQ ID NO: 3934454 - DNA, 25 bp, Homo sapien
tagacatccctgtggcatttcatct

SEQ ID NO: 3934455 - DNA, 25 bp, Homo sapien
tcatctctcggctgtttgttcccta

SEQ ID NO: 3934456 - DNA, 25 bp, Homo sapien
tgctgtttgaacctagacatccctg

SEQ ID NO: 3934457 - DNA, 25 bp, Homo sapien
cctcctttgcaaagtattgatattt

SEQ ID NO: 3934458 - DNA, 25 bp, Homo sapien
taaagtcaattaagccacgaattgg

SEQ ID NO: 3934459 - DNA, 25 bp, Homo sapien
gggcttttccagagctcacgaagag

SEQ ID NO: 3934460 - DNA, 25 bp, Homo sapien
cacgaattggaacaatcattcctcc

SEQ ID NO: 3934461 - DNA, 25 bp, Homo sapien
tacctgctgattttacaatgcaggc

SEQ ID NO: 3934462 - DNA, 25 bp, Homo sapien
cctgctgattttacaatgcaggcaa

SEQ ID NO: 3934463 - DNA, 25 bp, Homo sapien
ctttgctacctgctgattttacaat

SEQ ID NO: 3934464 - DNA, 25 bp, Homo sapien
ctacctgctgattttacaatgcagg

SEQ ID NO: 3934465 - DNA, 25 bp, Homo sapien
aggaccaacaactcttccacgtcag

SEQ ID NO: 3934466 - DNA, 25 bp, Homo sapien
tcatggcatgttgcaccaggaccaa

SEQ ID NO: 3934467 - DNA, 25 bp, Homo sapien
tccacgtcagtaatctgagcccagc

SEQ ID NO: 3934468 - DNA, 25 bp, Homo sapien
tctaccagaggcctcatggtcatgg

SEQ ID NO: 3934469 - DNA, 25 bp, Homo sapien
atctcttgatcttgccttcatcttg

SEQ ID NO: 3934470 - DNA, 25 bp, Homo sapien
gacggagatacggtcttcttgtcaa

SEQ ID NO: 3934471 - DNA, 25 bp, Homo sapien
tcatcttgcagacggagatacggtc

SEQ ID NO: 3934472 - DNA, 25 bp, Homo sapien
ttgccttcatcttgcagacggagat

SEQ ID NO: 3934473 - DNA, 25 bp, Homo sapien
ctgacaacgtgtcagtggccacacc

SEQ ID NO: 3934474 - DNA, 25 bp, Homo sapien
ggctgacaacgtgtcagtggccaca

SEQ ID NO: 3934475 - DNA, 25 bp, Homo sapien
gacaacgtgtcagtggccacaccgc

SEQ ID NO: 3934476 - DNA, 25 bp, Homo sapien
gatggctgacaacgtgtcagtggcc

SEQ ID NO: 3934477 - DNA, 25 bp, Homo sapien
gggagataatacttagtgctgacaa

SEQ ID NO: 3934478 - DNA, 25 bp, Homo sapien
caatgcactgttatcctgttaccgg

SEQ ID NO: 3934479 - DNA, 25 bp, Homo sapien
tgttaccggatatagcagatgctac

SEQ ID NO: 3934480 - DNA, 25 bp, Homo sapien
gacaagccctcttagataatgttgg

SEQ ID NO: 3934481 - DNA, 25 bp, Homo sapien
ctcaaaatgaggaatgctagaatag

SEQ ID NO: 3934482 - DNA, 25 bp, Homo sapien
gatgtactttgaatattgaagcaag

SEQ ID NO: 3934483 - DNA, 25 bp, Homo sapien
taagagctcttcaatatacaattta

SEQ ID NO: 3934484 - DNA, 25 bp, Homo sapien
tacagcatggctcaattaagagctc

SEQ ID NO: 3934485 - DNA, 25 bp, Homo sapien
ctagactcgtgggaaattggcagcg

SEQ ID NO: 3934486 - DNA, 25 bp, Homo sapien
ggcagcgtgggaattaaactcacaa

SEQ ID NO: 3934487 - DNA, 25 bp, Homo sapien
tgggaattaaactcacaatgtctgt

SEQ ID NO: 3934488 - DNA, 25 bp, Homo sapien
gaaattggcagcgtgggaattaaac

SEQ ID NO: 3934489 - DNA, 25 bp, Homo sapien
taagaagtctccagcggttctacca

SEQ ID NO: 3934490 - DNA, 25 bp, Homo sapien
gcatgtatttgatgtacaagtgaac

SEQ ID NO: 3934491 - DNA, 25 bp, Homo sapien
gtcccctgccacagccataagaagt

SEQ ID NO: 3934492 - DNA, 25 bp, Homo sapien
tgacaagatcagtgctcagcacaca

SEQ ID NO: 3934493 - DNA, 25 bp, Homo sapien
tcagcaatgaagtcttccccaagaa

SEQ ID NO: 3934494 - DNA, 25 bp, Homo sapien
cagcaatgaagtcttccccaagaac

SEQ ID NO: 3934495 - DNA, 25 bp, Homo sapien
ctcagcaatgaagtcttccccaaga

SEQ ID NO: 3934496 - DNA, 25 bp, Homo sapien
tcctcatgggactttgcagaatcca

SEQ ID NO: 3934497 - DNA, 25 bp, Homo sapien
agatccgggcgtgtttgttacagca

SEQ ID NO: 3934498 - DNA, 25 bp, Homo sapien
catgctaagccactgagatccgggc

SEQ ID NO: 3934499 - DNA, 25 bp, Homo sapien
tgcataccctctttcgtggacctaa

SEQ ID NO: 3934500 - DNA, 25 bp, Homo sapien
tggccccaaagtcgtgctttcccta

SEQ ID NO: 3934501 - DNA, 25 bp, Homo sapien
cagggacattctgaaccagaaaggg

SEQ ID NO: 3934502 - DNA, 25 bp, Homo sapien
atgcgcaccgaagcgtgcttccaca

SEQ ID NO: 3934503 - DNA, 25 bp, Homo sapien
cactggccagggacattctgaacca

SEQ ID NO: 3934504 - DNA, 25 bp, Homo sapien
gcatctaattgcaacgataaatcca

SEQ ID NO: 3934505 - DNA, 25 bp, Homo sapien
aacgataaatccaccttgctttcct

SEQ ID NO: 3934506 - DNA, 25 bp, Homo sapien
taattgcaacgataaatccaccttg

SEQ ID NO: 3934507 - DNA, 25 bp, Homo sapien
attgtgaagcatctaattgcaacga

SEQ ID NO: 3934508 - DNA, 25 bp, Homo sapien
gcggccatcttcacaatcaagcagg

SEQ ID NO: 3934509 - DNA, 25 bp, Homo sapien
gaaggctatagtactcgggtcctgc

SEQ ID NO: 3934510 - DNA, 25 bp, Homo sapien
gatgttttaggagcccacaggcctt

SEQ ID NO: 3934511 - DNA, 25 bp, Homo sapien
tgtataaggaagacaaatagggccc

SEQ ID NO: 3934512 - DNA, 25 bp, Homo sapien
tacaaattcaccatggagaaacgct

SEQ ID NO: 3934513 - DNA, 25 bp, Homo sapien
ttccagctcccaaggtataaactgc

SEQ ID NO: 3934514 - DNA, 25 bp, Homo sapien
tcttgtaacaatgggccagcctcgc

SEQ ID NO: 3934515 - DNA, 25 bp, Homo sapien
cacaatttcctcttgtaacaatggg

SEQ ID NO: 3934516 - DNA, 25 bp, Homo sapien
ctgtaatagtgtgcccatcagcagg

SEQ ID NO: 3934517 - DNA, 25 bp, Homo sapien
cccatcagcaggaaccacagcatag

SEQ ID NO: 3934518 - DNA, 25 bp, Homo sapien
catcagcaggaaccacagcatagcc

SEQ ID NO: 3934519 - DNA, 25 bp, Homo sapien
tcagcaggaaccacagcatagccat

SEQ ID NO: 3934520 - DNA, 25 bp, Homo sapien
cacagtcagtgcgtaaataagggat

SEQ ID NO: 3934521 - DNA, 25 bp, Homo sapien
gcctcaaagcaatcatgggagtttc

SEQ ID NO: 3934522 - DNA, 25 bp, Homo sapien
tggcattgccaataaaatccagaaa

SEQ ID NO: 3934523 - DNA, 25 bp, Homo sapien
taaatgttgtcagttcacgtcccag

SEQ ID NO: 3934524 - DNA, 25 bp, Homo sapien
ccccagaggcatcttttgcacccat

SEQ ID NO: 3934525 - DNA, 25 bp, Homo sapien
agtcctctgggatccccagaggcat

SEQ ID NO: 3934526 - DNA, 25 bp, Homo sapien
gatccccagaggcatcttttgcacc

SEQ ID NO: 3934527 - DNA, 25 bp, Homo sapien
tgggatccccagaggcatcttttgc

SEQ ID NO: 3934528 - DNA, 25 bp, Homo sapien
gctgtaccctccttcaggattagga

SEQ ID NO: 3934529 - DNA, 25 bp, Homo sapien
ctgtaccctccttcaggattaggac

SEQ ID NO: 3934530 - DNA, 25 bp, Homo sapien
ttcaggattaggactgcatccttac

SEQ ID NO: 3934531 - DNA, 25 bp, Homo sapien
gagcttcccggttgcactcaatttg

SEQ ID NO: 3934532 - DNA, 25 bp, Homo sapien
gcactcaatttgtaaggcaaaatga

SEQ ID NO: 3934533 - DNA, 25 bp, Homo sapien
aaatgcctgttgagttgtaccaggg

SEQ ID NO: 3934534 - DNA, 25 bp, Homo sapien
ttctgagtaagcagctatgcgatga

SEQ ID NO: 3934535 - DNA, 25 bp, Homo sapien
catgaagtctcatggtgtggtagac

SEQ ID NO: 3934536 - DNA, 25 bp, Homo sapien
tagaggccagtaggtttagaaacca

SEQ ID NO: 3934537 - DNA, 25 bp, Homo sapien
gactgagctacccagtttattggag

SEQ ID NO: 3934538 - DNA, 25 bp, Homo sapien
gactggaagtctgaagtgtgctcac

SEQ ID NO: 3934539 - DNA, 25 bp, Homo sapien
tgcgaaatgtaaaagacacggcctc

SEQ ID NO: 3934540 - DNA, 25 bp, Homo sapien
tggagatggaaaaaaccgctgcggt

SEQ ID NO: 3934541 - DNA, 25 bp, Homo sapien
cattaagagtagactgccttggcct

SEQ ID NO: 3934542 - DNA, 25 bp, Homo sapien
gggcgtctgaggcaatctactacca

SEQ ID NO: 3934543 - DNA, 25 bp, Homo sapien
gatctggcgtctaatgagggctcca

SEQ ID NO: 3934544 - DNA, 25 bp, Homo sapien
tctgcagtgctgcaagaggaatctc

SEQ ID NO: 3934545 - DNA, 25 bp, Homo sapien
tagaccctgcccgttgaagaatgag

SEQ ID NO: 3934546 - DNA, 25 bp, Homo sapien
catgcgcccgttttgtgaatgtagg

SEQ ID NO: 3934547 - DNA, 25 bp, Homo sapien
gacaggtctggtgttcagcccatgc

SEQ ID NO: 3934548 - DNA, 25 bp, Homo sapien
gggcaagttcttcaacagctctaca

SEQ ID NO: 3934549 - DNA, 25 bp, Homo sapien
cagctctacacctcaattcccacat

SEQ ID NO: 3934550 - DNA, 25 bp, Homo sapien
tgtgaaagagctctgcaaccctggg

SEQ ID NO: 3934551 - DNA, 25 bp, Homo sapien
tcatggcaggaggcaaaggcacttc

SEQ ID NO: 3934552 - DNA, 25 bp, Homo sapien
ctcagaatcatggcaggaggcaaag

SEQ ID NO: 3934553 - DNA, 25 bp, Homo sapien
atcatggcaggaggcaaaggcactt

SEQ ID NO: 3934554 - DNA, 25 bp, Homo sapien
agaatcatggcaggaggcaaaggca

SEQ ID NO: 3934555 - DNA, 25 bp, Homo sapien
gatacaatgcattccaatcagatgg

SEQ ID NO: 3934556 - DNA, 25 bp, Homo sapien
gggctcattcccctcgagtcctggg

SEQ ID NO: 3934557 - DNA, 25 bp, Homo sapien
cctggatttcgctgccaaggactga

SEQ ID NO: 3934558 - DNA, 25 bp, Homo sapien
gaacactcatgaaagctactgacac

SEQ ID NO: 3934559 - DNA, 25 bp, Homo sapien
ttagctggcttcaagctgctcctct

SEQ ID NO: 3934560 - DNA, 25 bp, Homo sapien
tttagctggcttcaagctgctcctc

SEQ ID NO: 3934561 - DNA, 25 bp, Homo sapien
tgaaaacacaagagacccgaggatc

SEQ ID NO: 3934562 - DNA, 25 bp, Homo sapien
ggaaagaaagccatcctgtcctctg

SEQ ID NO: 3934563 - DNA, 25 bp, Homo sapien
caaatctgccaaaccgttgtcctgg

SEQ ID NO: 3934564 - DNA, 25 bp, Homo sapien
tggaacagcccggtagatgccgtgc

SEQ ID NO: 3934565 - DNA, 25 bp, Homo sapien
aatttttattctgcacttttctggc

SEQ ID NO: 3934566 - DNA, 25 bp, Homo sapien
ctagtggaaaatttttattctgcac

SEQ ID NO: 3934567 - DNA, 25 bp, Homo sapien
tttttattctgcacttttctggcgg

SEQ ID NO: 3934568 - DNA, 25 bp, Homo sapien
ttattctgcacttttctggcggagg

SEQ ID NO: 3934569 - DNA, 25 bp, Homo sapien
aaaatataatagttctccatcactg

SEQ ID NO: 3934570 - DNA, 25 bp, Homo sapien
cataattctcgaacagttgttggct

SEQ ID NO: 3934571 - DNA, 25 bp, Homo sapien
acataattctcgaacagttgttggc

SEQ ID NO: 3934572 - DNA, 25 bp, Homo sapien
caaaatataatagttctccatcact

SEQ ID NO: 3934573 - DNA, 25 bp, Homo sapien
catcgttcctccttgcatggatgga

SEQ ID NO: 3934574 - DNA, 25 bp, Homo sapien
tctggtgaaggtaggcacgttgtca

SEQ ID NO: 3934575 - DNA, 25 bp, Homo sapien
taaatactacagtgctggccctcac

SEQ ID NO: 3934576 - DNA, 25 bp, Homo sapien
catggatggagtgatttttgacagc

SEQ ID NO: 3934577 - DNA, 25 bp, Homo sapien
gcatccgagagtccgtcagaatggt

SEQ ID NO: 3934578 - DNA, 25 bp, Homo sapien
aaccaagcatccgagagtccgtcag

SEQ ID NO: 3934579 - DNA, 25 bp, Homo sapien
ccgagagtccgtcagaatggtacca

SEQ ID NO: 3934580 - DNA, 25 bp, Homo sapien
tccgtcagaatggtaccactgtcct

SEQ ID NO: 3934581 - DNA, 25 bp, Homo sapien
gctgatctcctgtaactgggtgcaa

SEQ ID NO: 3934582 - DNA, 25 bp, Homo sapien
aatcaaatttttcgcccactgggca

SEQ ID NO: 3934583 - DNA, 25 bp, Homo sapien
caaccatatggtacagcagcatgtg

SEQ ID NO: 3934584 - DNA, 25 bp, Homo sapien
caattaattacgctggctgcatcca

SEQ ID NO: 3934585 - DNA, 25 bp, Homo sapien
tcccagcaagacttccagccagggc

SEQ ID NO: 3934586 - DNA, 25 bp, Homo sapien
ctcccagcgctccaggttcccagca

SEQ ID NO: 3934587 - DNA, 25 bp, Homo sapien
ccagcaagacttccagccagggctg

SEQ ID NO: 3934588 - DNA, 25 bp, Homo sapien
agcgctccaggttcccagcaagact

SEQ ID NO: 3934589 - DNA, 25 bp, Homo sapien
tagcccatccttgaataccttacaa

SEQ ID NO: 3934590 - DNA, 25 bp, Homo sapien
cattcagctctacaaataagatctg

SEQ ID NO: 3934591 - DNA, 25 bp, Homo sapien
tatttggctcttctacgaagccctc

SEQ ID NO: 3934592 - DNA, 25 bp, Homo sapien
ttttaatgaagtgcacattcagctc

SEQ ID NO: 3934593 - DNA, 25 bp, Homo sapien
ggaatggtccactgagttttctcct

SEQ ID NO: 3934594 - DNA, 25 bp, Homo sapien
tacctgtcaaatttcatggctttgg

SEQ ID NO: 3934595 - DNA, 25 bp, Homo sapien
catcatgtgtggataagacaaaaca

SEQ ID NO: 3934596 - DNA, 25 bp, Homo sapien
tatgaaacctctgaattggcatttc

SEQ ID NO: 3934597 - DNA, 25 bp, Homo sapien
atgccctctactcagcactggccaa

SEQ ID NO: 3934598 - DNA, 25 bp, Homo sapien
tctggtgaccactaagtcttactgt

SEQ ID NO: 3934599 - DNA, 25 bp, Homo sapien
tcctttagatacacagccaaaggca

SEQ ID NO: 3934600 - DNA, 25 bp, Homo sapien
cacttagctgcaatggcacgtcctt

SEQ ID NO: 3934601 - DNA, 25 bp, Homo sapien
tactgtacattcaggtccacttagc

SEQ ID NO: 3934602 - DNA, 25 bp, Homo sapien
ctttgcatgcagaagcaccggggtg

SEQ ID NO: 3934603 - DNA, 25 bp, Homo sapien
tgcatgcagaagcaccggggtggca

SEQ ID NO: 3934604 - DNA, 25 bp, Homo sapien
cctttgcatgcagaagcaccggggt

SEQ ID NO: 3934605 - DNA, 25 bp, Homo sapien
tttgcatgcagaagcaccggggtgg

SEQ ID NO: 3934606 - DNA, 25 bp, Homo sapien
gggtataaatccccgatcccagaga

SEQ ID NO: 3934607 - DNA, 25 bp, Homo sapien
gatgccaaatgtgctgacacgaagc

SEQ ID NO: 3934608 - DNA, 25 bp, Homo sapien
ccagagagatgccaaatgtgctgac

SEQ ID NO: 3934609 - DNA, 25 bp, Homo sapien
tgtgctgacacgaagcatgcctttt

SEQ ID NO: 3934610 - DNA, 25 bp, Homo sapien
tgagtaaaactcctttcttacaagc

SEQ ID NO: 3934611 - DNA, 25 bp, Homo sapien
acatcgtgacaacaagggtgcccct

SEQ ID NO: 3934612 - DNA, 25 bp, Homo sapien
gggctgcgttacagaggctcatttc

SEQ ID NO: 3934613 - DNA, 25 bp, Homo sapien
tcttgctgggaattgaactgggttc

SEQ ID NO: 3934614 - DNA, 25 bp, Homo sapien
taacccacaggatgtctggtatttt

SEQ ID NO: 3934615 - DNA, 25 bp, Homo sapien
tctttaacccacaggatgtctggta

SEQ ID NO: 3934616 - DNA, 25 bp, Homo sapien
tcacaagtcccacatctgtacccca

SEQ ID NO: 3934617 - DNA, 25 bp, Homo sapien
tttctttaacccacaggatgtctgg

SEQ ID NO: 3934618 - DNA, 25 bp, Homo sapien
gagggaagtagctcaaaagcccaac

SEQ ID NO: 3934619 - DNA, 25 bp, Homo sapien
taaggtcacattgcttgctcactgt

SEQ ID NO: 3934620 - DNA, 25 bp, Homo sapien
tgagtctggattctttaggcccact

SEQ ID NO: 3934621 - DNA, 25 bp, Homo sapien
aaacagttaacacgcatctccccag

SEQ ID NO: 3934622 - DNA, 25 bp, Homo sapien
ctaaagtctgcctttggcttttctt

SEQ ID NO: 3934623 - DNA, 25 bp, Homo sapien
tcctactccccatctctcctacagc

SEQ ID NO: 3934624 - DNA, 25 bp, Homo sapien
tcttctcctactccccatctctcct

SEQ ID NO: 3934625 - DNA, 25 bp, Homo sapien
gcttttcttctcctactccccatct

SEQ ID NO: 3934626 - DNA, 25 bp, Homo sapien
gctgaggaagtatcaggacatgtga

SEQ ID NO: 3934627 - DNA, 25 bp, Homo sapien
tctagctgaccacaaaggtgaggga

SEQ ID NO: 3934628 - DNA, 25 bp, Homo sapien
ttcttttacgaaggacattggcaag

SEQ ID NO: 3934629 - DNA, 25 bp, Homo sapien
tcccatgtgttaactgaccttctag

SEQ ID NO: 3934630 - DNA, 25 bp, Homo sapien
taataaatcaaggtgaggacaccgt

SEQ ID NO: 3934631 - DNA, 25 bp, Homo sapien
aatgctctaataaatcaaggtgagg

SEQ ID NO: 3934632 - DNA, 25 bp, Homo sapien
cttggatgtcataaacactgttggg

SEQ ID NO: 3934633 - DNA, 25 bp, Homo sapien
gcacacctgctgagtcgcttactct

SEQ ID NO: 3934634 - DNA, 25 bp, Homo sapien
catccccaccaatggtgtgtgaggg

SEQ ID NO: 3934635 - DNA, 25 bp, Homo sapien
gttgagcagtatctaagaccaggga

SEQ ID NO: 3934636 - DNA, 25 bp, Homo sapien
gctaggtcatatgggaactcttgac

SEQ ID NO: 3934637 - DNA, 25 bp, Homo sapien
tcttgactattggaggaaccgccga

SEQ ID NO: 3934638 - DNA, 25 bp, Homo sapien
aactctgggcttggatggccttcac

SEQ ID NO: 3934639 - DNA, 25 bp, Homo sapien
ctgggcttggatggccttcaccaga

SEQ ID NO: 3934640 - DNA, 25 bp, Homo sapien
gccacttaaatgaactctgggcttg

SEQ ID NO: 3934641 - DNA, 25 bp, Homo sapien
atttggtcccatcgctgccacttaa

SEQ ID NO: 3934642 - DNA, 25 bp, Homo sapien
ctttcccaggaggtttctcctgcat

SEQ ID NO: 3934643 - DNA, 25 bp, Homo sapien
ttatagatgaggaatacgatgtcca

SEQ ID NO: 3934644 - DNA, 25 bp, Homo sapien
tagcttgctggagattgtgcagatg

SEQ ID NO: 3934645 - DNA, 25 bp, Homo sapien
tgtgcagatgttctgcagttctgag

SEQ ID NO: 3934646 - DNA, 25 bp, Homo sapien
gatcgacttgacagtcatactagta

SEQ ID NO: 3934647 - DNA, 25 bp, Homo sapien
ggtgacacctgcactccaagcataa

SEQ ID NO: 3934648 - DNA, 25 bp, Homo sapien
cacctggctgatgaaacgtctggga

SEQ ID NO: 3934649 - DNA, 25 bp, Homo sapien
cactgaatttgtcaccgcaaggcat

SEQ ID NO: 3934650 - DNA, 25 bp, Homo sapien
ggattgtcggaagggtgcaccatta

SEQ ID NO: 3934651 - DNA, 25 bp, Homo sapien
gacgctaactgctgaccttgcagat

SEQ ID NO: 3934652 - DNA, 25 bp, Homo sapien
tttacgagaatcctgacaactcggc

SEQ ID NO: 3934653 - DNA, 25 bp, Homo sapien
caggctgtgcaacttgacgctaact

SEQ ID NO: 3934654 - DNA, 25 bp, Homo sapien
tcggcaccacatcaagggcaagggt

SEQ ID NO: 3934655 - DNA, 25 bp, Homo sapien
gttttgttgattcatatgtctcttc

SEQ ID NO: 3934656 - DNA, 25 bp, Homo sapien
gctgctggtctacgttgtctgccat

SEQ ID NO: 3934657 - DNA, 25 bp, Homo sapien
cacacaaattcgctcctctgggctg

SEQ ID NO: 3934658 - DNA, 25 bp, Homo sapien
agtttgctgctggtctacgttgtct

SEQ ID NO: 3934659 - DNA, 25 bp, Homo sapien
tccaaatgtatgcgggtttctcttt

SEQ ID NO: 3934660 - DNA, 25 bp, Homo sapien
tggaagagcttgagaaaaacgaaaa

SEQ ID NO: 3934661 - DNA, 25 bp, Homo sapien
aaatgccatctccccggagaaagaa

SEQ ID NO: 3934662 - DNA, 25 bp, Homo sapien
tattggaagagcttgagaaaaacga

SEQ ID NO: 3934663 - DNA, 25 bp, Homo sapien
gggaggatcaccagagaagaggagt

SEQ ID NO: 3934664 - DNA, 25 bp, Homo sapien
ggagaagggatagctctttcttcag

SEQ ID NO: 3934665 - DNA, 25 bp, Homo sapien
attgaatcagaaataaacgggggag

SEQ ID NO: 3934666 - DNA, 25 bp, Homo sapien
cacgagttcagtacaattccctaga

SEQ ID NO: 3934667 - DNA, 25 bp, Homo sapien
gcttaagcctgtaatgcctgtcctg

SEQ ID NO: 3934668 - DNA, 25 bp, Homo sapien
tctgatactaacatgctcccacgag

SEQ ID NO: 3934669 - DNA, 25 bp, Homo sapien
ctacaagcaagacggacaaggcaca

SEQ ID NO: 3934670 - DNA, 25 bp, Homo sapien
aatctgcatcctaaaacgctgtaag

SEQ ID NO: 3934671 - DNA, 25 bp, Homo sapien
ggcgcttcgggctaacgttatctcc

SEQ ID NO: 3934672 - DNA, 25 bp, Homo sapien
cgcctcgatcatggaaagatgcaat

SEQ ID NO: 3934673 - DNA, 25 bp, Homo sapien
tgtgctgtgtttcagccgcgcaaaa

SEQ ID NO: 3934674 - DNA, 25 bp, Homo sapien
tcagcaaaatgctgcacgctacgga

SEQ ID NO: 3934675 - DNA, 25 bp, Homo sapien
cagagcgaggtccagggtcattgct

SEQ ID NO: 3934676 - DNA, 25 bp, Homo sapien
ggtcattgcttctaccttggcttta

SEQ ID NO: 3934677 - DNA, 25 bp, Homo sapien
tgctgcacgctacggagcagagcga

SEQ ID NO: 3934678 - DNA, 25 bp, Homo sapien
ggattgcctgccctaaatatgagta

SEQ ID NO: 3934679 - DNA, 25 bp, Homo sapien
cctctatgttcaacgagaaaccagg

SEQ ID NO: 3934680 - DNA, 25 bp, Homo sapien
tatcttatccttcgcacaacctgtg

SEQ ID NO: 3934681 - DNA, 25 bp, Homo sapien
cagtgtttcagggtttgaggcctcc

SEQ ID NO: 3934682 - DNA, 25 bp, Homo sapien
ctaataaagtagagcggctgggcgc

SEQ ID NO: 3934683 - DNA, 25 bp, Homo sapien
taataaagtagagcggctgggcgca

SEQ ID NO: 3934684 - DNA, 25 bp, Homo sapien
aatctaataaagtagagcggctggg

SEQ ID NO: 3934685 - DNA, 25 bp, Homo sapien
tctaataaagtagagcggctgggcg

SEQ ID NO: 3934686 - DNA, 25 bp, Homo sapien
ctcccagcacccgaataaaaagaag

SEQ ID NO: 3934687 - DNA, 25 bp, Homo sapien
cccagcacccgaataaaaagaagag

SEQ ID NO: 3934688 - DNA, 25 bp, Homo sapien
tcccagcacccgaataaaaagaaga

SEQ ID NO: 3934689 - DNA, 25 bp, Homo sapien
tgaggagaactatctggaagcaggc

SEQ ID NO: 3934690 - DNA, 25 bp, Homo sapien
ctgaggagaactatctggaagcagg

SEQ ID NO: 3934691 - DNA, 25 bp, Homo sapien
cactggccgacgaccgctgctaccg

SEQ ID NO: 3934692 - DNA, 25 bp, Homo sapien
atttgacccgagacacactggccga

SEQ ID NO: 3934693 - DNA, 25 bp, Homo sapien
taatgcccaaaataatttgacccga

SEQ ID NO: 3934694 - DNA, 25 bp, Homo sapien
caaaataatttgacccgagacacac

SEQ ID NO: 3934695 - DNA, 25 bp, Homo sapien
tccagaacataagcagcggagcaga

SEQ ID NO: 3934696 - DNA, 25 bp, Homo sapien
ctgacatgatgatggacaagtggga

SEQ ID NO: 3934697 - DNA, 25 bp, Homo sapien
gagtcaggatccagaacataagcag

SEQ ID NO: 3934698 - DNA, 25 bp, Homo sapien
tgggagaggagccacacaagcaaag

SEQ ID NO: 3934699 - DNA, 25 bp, Homo sapien
cgagagttctctgagagtaaccaaa

SEQ ID NO: 3934700 - DNA, 25 bp, Homo sapien
ttatataaatcgagagttctctgag

SEQ ID NO: 3934701 - DNA, 25 bp, Homo sapien
tgagagtaaccaaatgttgaaaccc

SEQ ID NO: 3934702 - DNA, 25 bp, Homo sapien
ctctgagagtaaccaaatgttgaaa

SEQ ID NO: 3934703 - DNA, 25 bp, Homo sapien
ctgcagtgcaagtaagtgaaggtcc

SEQ ID NO: 3934704 - DNA, 25 bp, Homo sapien
caagtaagtgaaggtccatgcagcc

SEQ ID NO: 3934705 - DNA, 25 bp, Homo sapien
gtgaaggtccatgcagccttcaaac

SEQ ID NO: 3934706 - DNA, 25 bp, Homo sapien
cagtgcaagtaagtgaaggtccatg

SEQ ID NO: 3934707 - DNA, 25 bp, Homo sapien
cagggacaggggacttggcttccaa

SEQ ID NO: 3934708 - DNA, 25 bp, Homo sapien
ttggcttccaattttgcttgggata

SEQ ID NO: 3934709 - DNA, 25 bp, Homo sapien
cttccaattttgcttgggatatgtc

SEQ ID NO: 3934710 - DNA, 25 bp, Homo sapien
ggcttccaattttgcttgggatatg

SEQ ID NO: 3934711 - DNA, 25 bp, Homo sapien
gacgacaggcacaacggaatgacac

SEQ ID NO: 3934712 - DNA, 25 bp, Homo sapien
gcacaacggaatgacacaagttcct

SEQ ID NO: 3934713 - DNA, 25 bp, Homo sapien
accttttacaaggtcaagacgacag

SEQ ID NO: 3934714 - DNA, 25 bp, Homo sapien
tacaaggtcaagacgacaggcacaa

SEQ ID NO: 3934715 - DNA, 25 bp, Homo sapien
tggagcatgaactcctccagataac

SEQ ID NO: 3934716 - DNA, 25 bp, Homo sapien
ctctggagcatgaactcctccagat

SEQ ID NO: 3934717 - DNA, 25 bp, Homo sapien
ggagcatgaactcctccagataact

SEQ ID NO: 3934718 - DNA, 25 bp, Homo sapien
tgaactcctccagataactgtccat

SEQ ID NO: 3934719 - DNA, 25 bp, Homo sapien
aggagaccacaatgacacgggcagg

SEQ ID NO: 3934720 - DNA, 25 bp, Homo sapien
cagatgattcacttgaaaggtggtc

SEQ ID NO: 3934721 - DNA, 25 bp, Homo sapien
agctgagcggcacaaaacatcctgg

SEQ ID NO: 3934722 - DNA, 25 bp, Homo sapien
gagctggacaaggtagaagtgcccc

SEQ ID NO: 3934723 - DNA, 25 bp, Homo sapien
ggcaccgggtaatgaagaagcataa

SEQ ID NO: 3934724 - DNA, 25 bp, Homo sapien
tctgggcaccgggtaatgaagaagc

SEQ ID NO: 3934725 - DNA, 25 bp, Homo sapien
attctgggcaccgggtaatgaagaa

SEQ ID NO: 3934726 - DNA, 25 bp, Homo sapien
tcatattctgcttctataagttcat

SEQ ID NO: 3934727 - DNA, 25 bp, Homo sapien
cagctgcgatgaatgttggagtaca

SEQ ID NO: 3934728 - DNA, 25 bp, Homo sapien
gacctgttataagccagcatcgccc

SEQ ID NO: 3934729 - DNA, 25 bp, Homo sapien
tatttccaggatgcactgcgttcga

SEQ ID NO: 3934730 - DNA, 25 bp, Homo sapien
gaaaggcctcgccaaggtaaacagc

SEQ ID NO: 3934731 - DNA, 25 bp, Homo sapien
tgtttgcggcgccagaagctgttct

SEQ ID NO: 3934732 - DNA, 25 bp, Homo sapien
tcaagagccctttatgatgggctgg

SEQ ID NO: 3934733 - DNA, 25 bp, Homo sapien
tcatgcccgcaagaggtaaaaaggt

SEQ ID NO: 3934734 - DNA, 25 bp, Homo sapien
tattactgagaccagactcatgccc

SEQ ID NO: 3934735 - DNA, 25 bp, Homo sapien
tcccatcccgttcctctgattaggg

SEQ ID NO: 3934736 - DNA, 25 bp, Homo sapien
ccatcccgttcctctgattagggac

SEQ ID NO: 3934737 - DNA, 25 bp, Homo sapien
ttcccatcccgttcctctgattagg

SEQ ID NO: 3934738 - DNA, 25 bp, Homo sapien
ctttcccatcccgttcctctgatta

SEQ ID NO: 3934739 - DNA, 25 bp, Homo sapien
gctttacacgggcacaggaaacgta

SEQ ID NO: 3934740 - DNA, 25 bp, Homo sapien
cgttaaaactcagcacgatgactgg

SEQ ID NO: 3934741 - DNA, 25 bp, Homo sapien
ttgccggcccatccattagcagggt

SEQ ID NO: 3934742 - DNA, 25 bp, Homo sapien
cagggtagctgcacatccgttaaaa

SEQ ID NO: 3934743 - DNA, 25 bp, Homo sapien
tggtaatgttaatccagggcaggaa

SEQ ID NO: 3934744 - DNA, 25 bp, Homo sapien
tggtcactggactaagcaagcactg

SEQ ID NO: 3934745 - DNA, 25 bp, Homo sapien
ctcagtggtgtaagaggacaagcca

SEQ ID NO: 3934746 - DNA, 25 bp, Homo sapien
aggaaagcgccagtgtggtccaacc

SEQ ID NO: 3934747 - DNA, 25 bp, Homo sapien
gacgggaagtcaactcaggaggaca

SEQ ID NO: 3934748 - DNA, 25 bp, Homo sapien
caaccagtgggatctgacgggaagt

SEQ ID NO: 3934749 - DNA, 25 bp, Homo sapien
tagtagccaaacacaacccttgctg

SEQ ID NO: 3934750 - DNA, 25 bp, Homo sapien
gccatcttgtaagcatgagggaaaa

SEQ ID NO: 3934751 - DNA, 25 bp, Homo sapien
gagagcttcatataatctgagagac

SEQ ID NO: 3934752 - DNA, 25 bp, Homo sapien
gttcagactgagttttgcaggatgg

SEQ ID NO: 3934753 - DNA, 25 bp, Homo sapien
ccaaaactgcttccttgacgtgtgc

SEQ ID NO: 3934754 - DNA, 25 bp, Homo sapien
gaggagtattctaggctgaagaaca

SEQ ID NO: 3934755 - DNA, 25 bp, Homo sapien
aggcacccacgaccgcgccccacca

SEQ ID NO: 3934756 - DNA, 25 bp, Homo sapien
tacaggcacccacgaccgcgcccca

SEQ ID NO: 3934757 - DNA, 25 bp, Homo sapien
gccaccatgaccagccagccaattt

SEQ ID NO: 3934758 - DNA, 25 bp, Homo sapien
agccaccatgaccagccagccaatt

SEQ ID NO: 3934759 - DNA, 25 bp, Homo sapien
tggcctccaatatctaaactgcgtt

SEQ ID NO: 3934760 - DNA, 25 bp, Homo sapien
gcctccaatatctaaactgcgttgc

SEQ ID NO: 3934761 - DNA, 25 bp, Homo sapien
tccaatatctaaactgcgttgcagc

SEQ ID NO: 3934762 - DNA, 25 bp, Homo sapien
ctccaatatctaaactgcgttgcag

SEQ ID NO: 3934763 - DNA, 25 bp, Homo sapien
ttactgtctacaagcgtccattcgc

SEQ ID NO: 3934764 - DNA, 25 bp, Homo sapien
ttcgcatttctaccgctagctcatg

SEQ ID NO: 3934765 - DNA, 25 bp, Homo sapien
cacgtattgagtccttactgtctac

SEQ ID NO: 3934766 - DNA, 25 bp, Homo sapien
ccacacagggctgaggaataaattt

SEQ ID NO: 3934767 - DNA, 25 bp, Homo sapien
taactttgtccatcgtccttgtccc

SEQ ID NO: 3934768 - DNA, 25 bp, Homo sapien
cataactttgtccatcgtccttgtc

SEQ ID NO: 3934769 - DNA, 25 bp, Homo sapien
cccataactttgtccatcgtccttg

SEQ ID NO: 3934770 - DNA, 25 bp, Homo sapien
tactgaggtttttagcacccccata

SEQ ID NO: 3934771 - DNA, 25 bp, Homo sapien
gaactgttatctgagatcccaggaa

SEQ ID NO: 3934772 - DNA, 25 bp, Homo sapien
ggttggtgcagctctctatctaaag

SEQ ID NO: 3934773 - DNA, 25 bp, Homo sapien
cttagtcattactttgaaggaacca

SEQ ID NO: 3934774 - DNA, 25 bp, Homo sapien
gaatatttgcaggagagcttttgct

SEQ ID NO: 3934775 - DNA, 25 bp, Homo sapien
gagataagaggctgaccacattccc

SEQ ID NO: 3934776 - DNA, 25 bp, Homo sapien
cataggcgcctaagaaaaaatgtgt

SEQ ID NO: 3934777 - DNA, 25 bp, Homo sapien
tctgtctactgcaagcataggcgcc

SEQ ID NO: 3934778 - DNA, 25 bp, Homo sapien
tcacaggaatgcaatatgcagccag

SEQ ID NO: 3934779 - DNA, 25 bp, Homo sapien
tacacaggcaaagtcaaggttggga

SEQ ID NO: 3934780 - DNA, 25 bp, Homo sapien
aaaacgctccatatcagcactggtg

SEQ ID NO: 3934781 - DNA, 25 bp, Homo sapien
gagtaaagagtagggtacacaggca

SEQ ID NO: 3934782 - DNA, 25 bp, Homo sapien
cttgcaaagacctgggagtaaagag

SEQ ID NO: 3934783 - DNA, 25 bp, Homo sapien
aaaatctacattaccaagtttcctg

SEQ ID NO: 3934784 - DNA, 25 bp, Homo sapien
tccaaaatctacattaccaagtttc

SEQ ID NO: 3934785 - DNA, 25 bp, Homo sapien
ggtagcaggaacctttcaagtcctc

SEQ ID NO: 3934786 - DNA, 25 bp, Homo sapien
tccatccccagccaaaggtagcagg

SEQ ID NO: 3934787 - DNA, 25 bp, Homo sapien
agagcttcctctaaacaaagaccca

SEQ ID NO: 3934788 - DNA, 25 bp, Homo sapien
caggataaagagcttcctctaaaca

SEQ ID NO: 3934789 - DNA, 25 bp, Homo sapien
ataaagagcttcctctaaacaaaga

SEQ ID NO: 3934790 - DNA, 25 bp, Homo sapien
gagcttcctctaaacaaagacccat

SEQ ID NO: 3934791 - DNA, 25 bp, Homo sapien
aactgctaagactatgccaacttcc

SEQ ID NO: 3934792 - DNA, 25 bp, Homo sapien
cacatctggactaactgctaagact

SEQ ID NO: 3934793 - DNA, 25 bp, Homo sapien
aagactatgccaacttccagcgtac

SEQ ID NO: 3934794 - DNA, 25 bp, Homo sapien
gaaattcacatctggactaactgct

SEQ ID NO: 3934795 - DNA, 25 bp, Homo sapien
tagagttagaaggttctggaaatag

SEQ ID NO: 3934796 - DNA, 25 bp, Homo sapien
gagttagaaggttctggaaatagaa

SEQ ID NO: 3934797 - DNA, 25 bp, Homo sapien
atcaggtcacaaagaaatagagtta

SEQ ID NO: 3934798 - DNA, 25 bp, Homo sapien
ggtcacaaagaaatagagttagaag

SEQ ID NO: 3934799 - DNA, 25 bp, Homo sapien
ccagccggaactgtggtcccagatt

SEQ ID NO: 3934800 - DNA, 25 bp, Homo sapien
tcagatgacatgttaggagggtttc

SEQ ID NO: 3934801 - DNA, 25 bp, Homo sapien
ttgagccatcccagtgaacccagaa

SEQ ID NO: 3934802 - DNA, 25 bp, Homo sapien
ttagtgacaagtgttccagccggaa

SEQ ID NO: 3934803 - DNA, 25 bp, Homo sapien
gatacaccctttgcttatcagcagc

SEQ ID NO: 3934804 - DNA, 25 bp, Homo sapien
taaacattaaaatcatccggctatc

SEQ ID NO: 3934805 - DNA, 25 bp, Homo sapien
ttgttagagcttaccccagtggaat

SEQ ID NO: 3934806 - DNA, 25 bp, Homo sapien
aaatcatccggctatctgtcagacc

SEQ ID NO: 3934807 - DNA, 25 bp, Homo sapien
ccagagggttaattatgtcgctccg

SEQ ID NO: 3934808 - DNA, 25 bp, Homo sapien
tatgtcgctccgtattttaagaaga

SEQ ID NO: 3934809 - DNA, 25 bp, Homo sapien
taaacagaactagaaattgtctcta

SEQ ID NO: 3934810 - DNA, 25 bp, Homo sapien
taattatgtcgctccgtattttaag

SEQ ID NO: 3934811 - DNA, 25 bp, Homo sapien
tgcttggttgatgatcatgggacca

SEQ ID NO: 3934812 - DNA, 25 bp, Homo sapien
caaaaggcttccgttggtgcttggt

SEQ ID NO: 3934813 - DNA, 25 bp, Homo sapien
tgtgtgttaaacaatactgtgcact

SEQ ID NO: 3934814 - DNA, 25 bp, Homo sapien
tgaaagttactaaacgctgagttat

SEQ ID NO: 3934815 - DNA, 25 bp, Homo sapien
tcgtgacctccttgtgaaaaccgta

SEQ ID NO: 3934816 - DNA, 25 bp, Homo sapien
ccaattacgagcaccaaaggagtcc

SEQ ID NO: 3934817 - DNA, 25 bp, Homo sapien
tctaagtaacggactgctctgcctg

SEQ ID NO: 3934818 - DNA, 25 bp, Homo sapien
caacattcacgtgggtgctttccaa

SEQ ID NO: 3934819 - DNA, 25 bp, Homo sapien
gaaattctccaataaggtcaacacg

SEQ ID NO: 3934820 - DNA, 25 bp, Homo sapien
ggtcatcacagataggaaattctcc

SEQ ID NO: 3934821 - DNA, 25 bp, Homo sapien
agtgatctttctacatgctctgcca

SEQ ID NO: 3934822 - DNA, 25 bp, Homo sapien
cagaagtcgtgtttcaagtagtcag

SEQ ID NO: 3934823 - DNA, 25 bp, Homo sapien
cttccatgcacatggcacagcaaaa

SEQ ID NO: 3934824 - DNA, 25 bp, Homo sapien
gtcctgctgagagtccacattttgg

SEQ ID NO: 3934825 - DNA, 25 bp, Homo sapien
aataatgctagatgttggaagggcc

SEQ ID NO: 3934826 - DNA, 25 bp, Homo sapien
aaaaacagctaagggtgacatctcc

SEQ ID NO: 3934827 - DNA, 25 bp, Homo sapien
ccactgtccctgtaatgtcctgctg

SEQ ID NO: 3934828 - DNA, 25 bp, Homo sapien
tgaataattcatcatagaaaaaagc

SEQ ID NO: 3934829 - DNA, 25 bp, Homo sapien
ctgaataattcatcatagaaaaaag

SEQ ID NO: 3934830 - DNA, 25 bp, Homo sapien
gaataattcatcatagaaaaaagct

SEQ ID NO: 3934831 - DNA, 25 bp, Homo sapien
ataattcatcatagaaaaaagcttt

SEQ ID NO: 3934832 - DNA, 25 bp, Homo sapien
ggtctgtactgatcaatgacaattt

SEQ ID NO: 3934833 - DNA, 25 bp, Homo sapien
ctgggtctgtactgatcaatgacaa

SEQ ID NO: 3934834 - DNA, 25 bp, Homo sapien
tctgtactgatcaatgacaattttg

SEQ ID NO: 3934835 - DNA, 25 bp, Homo sapien
gggtctgtactgatcaatgacaatt

SEQ ID NO: 3934836 - DNA, 25 bp, Homo sapien
ctgcatcacttggccgtccagagaa

SEQ ID NO: 3934837 - DNA, 25 bp, Homo sapien
gaaaatatcgactcctagcaggccc

SEQ ID NO: 3934838 - DNA, 25 bp, Homo sapien
gagccagaaaatatcgactcctagc

SEQ ID NO: 3934839 - DNA, 25 bp, Homo sapien
tttgagccagaaaatatcgactcct

SEQ ID NO: 3934840 - DNA, 25 bp, Homo sapien
gcagtgagggtatttatgttcaaag

SEQ ID NO: 3934841 - DNA, 25 bp, Homo sapien
agcaaagtgaaacatatttccctgg

SEQ ID NO: 3934842 - DNA, 25 bp, Homo sapien
aaatttgtgggcattaactgagacc

SEQ ID NO: 3934843 - DNA, 25 bp, Homo sapien
taaacaccagcagacctaagcgtgg

SEQ ID NO: 3934844 - DNA, 25 bp, Homo sapien
cccttttcgagatctgctggccttg

SEQ ID NO: 3934845 - DNA, 25 bp, Homo sapien
gaaacttgtggacaacacagatgct

SEQ ID NO: 3934846 - DNA, 25 bp, Homo sapien
tcttcacctaaggaggagctcagcc

SEQ ID NO: 3934847 - DNA, 25 bp, Homo sapien
tacgagtcatactgtaagtagagca

SEQ ID NO: 3934848 - DNA, 25 bp, Homo sapien
catcgcttgcgagttaggcctcata

SEQ ID NO: 3934849 - DNA, 25 bp, Homo sapien
aggcaatgttgttagaaggctcaaa

SEQ ID NO: 3934850 - DNA, 25 bp, Homo sapien
tacttataggtagacctgagggtct

SEQ ID NO: 3934851 - DNA, 25 bp, Homo sapien
gagcagattccagattttaccagcg

SEQ ID NO: 3934852 - DNA, 25 bp, Homo sapien
cctggagtcctctccacccactctc

SEQ ID NO: 3934853 - DNA, 25 bp, Homo sapien
ctggagtcctctccacccactctct

SEQ ID NO: 3934854 - DNA, 25 bp, Homo sapien
ggccctggagtcctctccacccact

SEQ ID NO: 3934855 - DNA, 25 bp, Homo sapien
ccctggagtcctctccacccactct

SEQ ID NO: 3934856 - DNA, 25 bp, Homo sapien
aaaacacgcttggactcttggccag

SEQ ID NO: 3934857 - DNA, 25 bp, Homo sapien
ggtgcagtcttttcacgtccacaga

SEQ ID NO: 3934858 - DNA, 25 bp, Homo sapien
cgatatagagtgtcagcacgcgcca

SEQ ID NO: 3934859 - DNA, 25 bp, Homo sapien
gaccaatccgatactcagcagaaga

SEQ ID NO: 3934860 - DNA, 25 bp, Homo sapien
ggctgggaagcattgcacactggca

SEQ ID NO: 3934861 - DNA, 25 bp, Homo sapien
ccaagttggtatccctgaatgcagg

SEQ ID NO: 3934862 - DNA, 25 bp, Homo sapien
gagcgtctgcaaatactccaccgta

SEQ ID NO: 3934863 - DNA, 25 bp, Homo sapien
gaatttgtgagccacacggcttcct

SEQ ID NO: 3934864 - DNA, 25 bp, Homo sapien
tttcaagcagttgtacatgcacaca

SEQ ID NO: 3934865 - DNA, 25 bp, Homo sapien
gcaagtgtgggaggaaagatattaa

SEQ ID NO: 3934866 - DNA, 25 bp, Homo sapien
tcatggacctaatagtgaactcaca

SEQ ID NO: 3934867 - DNA, 25 bp, Homo sapien
caatggcagctgttgcacataatta

SEQ ID NO: 3934868 - DNA, 25 bp, Homo sapien
gccatcttgctacctgatatatgaa

SEQ ID NO: 3934869 - DNA, 25 bp, Homo sapien
gtgagtggcacataatagataattc

SEQ ID NO: 3934870 - DNA, 25 bp, Homo sapien
tgtttatatagccagaaaaccaccc

SEQ ID NO: 3934871 - DNA, 25 bp, Homo sapien
tcccagcactcaaatagtgagtggc

SEQ ID NO: 3934872 - DNA, 25 bp, Homo sapien
tcccttgtatatgaaaagagcacag

SEQ ID NO: 3934873 - DNA, 25 bp, Homo sapien
tttcataggcttagggtcaactgtg

SEQ ID NO: 3934874 - DNA, 25 bp, Homo sapien
gtagacagacgtgggtttgcaacag

SEQ ID NO: 3934875 - DNA, 25 bp, Homo sapien
tacataccagtaaaaatccagacga

SEQ ID NO: 3934876 - DNA, 25 bp, Homo sapien
tggtttagatacgtgcctttaaatg

SEQ ID NO: 3934877 - DNA, 25 bp, Homo sapien
taaatttaggtctgtaagccactgc

SEQ ID NO: 3934878 - DNA, 25 bp, Homo sapien
cctttgataaatttaggtctgtaag

SEQ ID NO: 3934879 - DNA, 25 bp, Homo sapien
cgtgcctttaaatgaagatggtaat

SEQ ID NO: 3934880 - DNA, 25 bp, Homo sapien
gtagcttatggtagattctcggtca

SEQ ID NO: 3934881 - DNA, 25 bp, Homo sapien
aaaatgcagtggatgctaccagaca

SEQ ID NO: 3934882 - DNA, 25 bp, Homo sapien
gtcagtacaaatgggacaaacctgg

SEQ ID NO: 3934883 - DNA, 25 bp, Homo sapien
gaagatgtggccctagtagcttatg

SEQ ID NO: 3934884 - DNA, 25 bp, Homo sapien
ggaccagcagcgcctccaaggtcat

SEQ ID NO: 3934885 - DNA, 25 bp, Homo sapien
ttcactagaattaggcccccacatg

SEQ ID NO: 3934886 - DNA, 25 bp, Homo sapien
aggtcatcagcacggcaacaacaca

SEQ ID NO: 3934887 - DNA, 25 bp, Homo sapien
aagaaaaggtcgcaaggatccagga

SEQ ID NO: 3934888 - DNA, 25 bp, Homo sapien
tttggacacccctatgttagactca

SEQ ID NO: 3934889 - DNA, 25 bp, Homo sapien
tcaggacctctactgacggtggcag

SEQ ID NO: 3934890 - DNA, 25 bp, Homo sapien
actgaggctaggatactcccatctg

SEQ ID NO: 3934891 - DNA, 25 bp, Homo sapien
gttagactcaactgacccaaaagtg

SEQ ID NO: 3934892 - DNA, 25 bp, Homo sapien
gggtaagcctcctatccacagatgc

SEQ ID NO: 3934893 - DNA, 25 bp, Homo sapien
caactgttaacaagatggacacaca

SEQ ID NO: 3934894 - DNA, 25 bp, Homo sapien
ggttactactctgtatctggcactg

SEQ ID NO: 3934895 - DNA, 25 bp, Homo sapien
caatgagcaagtatgctgagggcga

SEQ ID NO: 3934896 - DNA, 25 bp, Homo sapien
tgtggacgtctgaatcaaaattgag

SEQ ID NO: 3934897 - DNA, 25 bp, Homo sapien
gtcttctttcaccatgagcctctca

SEQ ID NO: 3934898 - DNA, 25 bp, Homo sapien
gttggttgtttcagtgatacatgag

SEQ ID NO: 3934899 - DNA, 25 bp, Homo sapien
gcagaaatgagatgctgtggacgtc

SEQ ID NO: 3934900 - DNA, 25 bp, Homo sapien
tgaacctccataggggccatcttcc

SEQ ID NO: 3934901 - DNA, 25 bp, Homo sapien
ttcaccttccaagatttccagaatg

SEQ ID NO: 3934902 - DNA, 25 bp, Homo sapien
agctgatcagggcagtggaatcgct

SEQ ID NO: 3934903 - DNA, 25 bp, Homo sapien
aaggtgggggacaatgaacctccat

SEQ ID NO: 3934904 - DNA, 25 bp, Homo sapien
tctgttcgaagagtacaaggatctc

SEQ ID NO: 3934905 - DNA, 25 bp, Homo sapien
gataaagcagcaagtcattacccat

SEQ ID NO: 3934906 - DNA, 25 bp, Homo sapien
caaggatctccatgcaatgctatct

SEQ ID NO: 3934907 - DNA, 25 bp, Homo sapien
gacagagggcgtttccagagaccta

SEQ ID NO: 3934908 - DNA, 25 bp, Homo sapien
aaaatatttcaaaggtccgtggcat

SEQ ID NO: 3934909 - DNA, 25 bp, Homo sapien
tgaatatatcactctctcaggcaga

SEQ ID NO: 3934910 - DNA, 25 bp, Homo sapien
cagaaattgaacacagatcggagct

SEQ ID NO: 3934911 - DNA, 25 bp, Homo sapien
gatctgatcctatctatgaagagag

SEQ ID NO: 3934912 - DNA, 25 bp, Homo sapien
aatgaacgcattcccagcatcaaag

SEQ ID NO: 3934913 - DNA, 25 bp, Homo sapien
cgcgcccggccgtacgtgtctattt

SEQ ID NO: 3934914 - DNA, 25 bp, Homo sapien
taaatgtcaggtctcaaaatatatt

SEQ ID NO: 3934915 - DNA, 25 bp, Homo sapien
ggttctccgaatattctcaaaagcc

SEQ ID NO: 3934916 - DNA, 25 bp, Homo sapien
aaaatatattaggttctccgaatat

SEQ ID NO: 3934917 - DNA, 25 bp, Homo sapien
tatcctatccagagacaagcactgt

SEQ ID NO: 3934918 - DNA, 25 bp, Homo sapien
tctgttgaaagaaaccctctggtaa

SEQ ID NO: 3934919 - DNA, 25 bp, Homo sapien
cagccaattcatgatagaggcggga

SEQ ID NO: 3934920 - DNA, 25 bp, Homo sapien
cattgacatataaccctgggaggtg

SEQ ID NO: 3934921 - DNA, 25 bp, Homo sapien
gagtctcaggtatccagaagttttg

SEQ ID NO: 3934922 - DNA, 25 bp, Homo sapien
aaataagttcctagctgagtctcag

SEQ ID NO: 3934923 - DNA, 25 bp, Homo sapien
taaacacactgattcctagacccca

SEQ ID NO: 3934924 - DNA, 25 bp, Homo sapien
gcccaggtctggtagttcttaacaa

SEQ ID NO: 3934925 - DNA, 25 bp, Homo sapien
gagtggccacatgtcttgctgctgc

SEQ ID NO: 3934926 - DNA, 25 bp, Homo sapien
ttcgatcaaatggtctggagtggcc

SEQ ID NO: 3934927 - DNA, 25 bp, Homo sapien
aatgaatctattcgtggctggcagg

SEQ ID NO: 3934928 - DNA, 25 bp, Homo sapien
caggttgaacgctccccagaattta

SEQ ID NO: 3934929 - DNA, 25 bp, Homo sapien
aagacgttcatcttacccttaggct

SEQ ID NO: 3934930 - DNA, 25 bp, Homo sapien
tggatatctcagatcatctaagacg

SEQ ID NO: 3934931 - DNA, 25 bp, Homo sapien
acaggtatttggatatctcagatca

SEQ ID NO: 3934932 - DNA, 25 bp, Homo sapien
gatcatctaagacgttcatcttacc

SEQ ID NO: 3934933 - DNA, 25 bp, Homo sapien
caggtaactccctgtggcatgtgga

SEQ ID NO: 3934934 - DNA, 25 bp, Homo sapien
ggcatgtggagtccccatggatctg

SEQ ID NO: 3934935 - DNA, 25 bp, Homo sapien
ggccttaccataccacaataagaat

SEQ ID NO: 3934936 - DNA, 25 bp, Homo sapien
ggatctgtgagtaacaaaccatctt

SEQ ID NO: 3934937 - DNA, 25 bp, Homo sapien
ctcagccaagctctccgggcagcca

SEQ ID NO: 3934938 - DNA, 25 bp, Homo sapien
ccaatactgccaccaggggggtctg

SEQ ID NO: 3934939 - DNA, 25 bp, Homo sapien
cagccaagctctccgggcagccaca

SEQ ID NO: 3934940 - DNA, 25 bp, Homo sapien
tgtgaccaccaatactgccaccagg

SEQ ID NO: 3934941 - DNA, 25 bp, Homo sapien
tctctctgcaccaagctgtgggagt

SEQ ID NO: 3934942 - DNA, 25 bp, Homo sapien
acttttctctctgcaccaagctgtg

SEQ ID NO: 3934943 - DNA, 25 bp, Homo sapien
ggagtttgctctcttaaactcccac

SEQ ID NO: 3934944 - DNA, 25 bp, Homo sapien
ctgtgggagtttgctctcttaaact

SEQ ID NO: 3934945 - DNA, 25 bp, Homo sapien
cttcagcacttttctgcatggtagc

SEQ ID NO: 3934946 - DNA, 25 bp, Homo sapien
caccttcagcacttttctgcatggt

SEQ ID NO: 3934947 - DNA, 25 bp, Homo sapien
ccttcagcacttttctgcatggtag

SEQ ID NO: 3934948 - DNA, 25 bp, Homo sapien
ttcagcacttttctgcatggtagca

SEQ ID NO: 3934949 - DNA, 25 bp, Homo sapien
tgcagcccacgtgactcagaaatag

SEQ ID NO: 3934950 - DNA, 25 bp, Homo sapien
ggaaccaaatctgcgtgccctgaat

SEQ ID NO: 3934951 - DNA, 25 bp, Homo sapien
ctttgtgggagaacaggccgcctat

SEQ ID NO: 3934952 - DNA, 25 bp, Homo sapien
gcttctgacagataggtgcagccca

SEQ ID NO: 3934953 - DNA, 25 bp, Homo sapien
gaaaaagcctgtctgtggtctctaa

SEQ ID NO: 3934954 - DNA, 25 bp, Homo sapien
tataaggagggcctaattgaccctc

SEQ ID NO: 3934955 - DNA, 25 bp, Homo sapien
cgatgattaatagcccgggcctggc

SEQ ID NO: 3934956 - DNA, 25 bp, Homo sapien
taattgaccctctaggtacctatgg

SEQ ID NO: 3934957 - DNA, 25 bp, Homo sapien
ctgatgcacgataggctggcatttg

SEQ ID NO: 3934958 - DNA, 25 bp, Homo sapien
ttgcatctgatgcacgataggctgg

SEQ ID NO: 3934959 - DNA, 25 bp, Homo sapien
caaactcccttgcatctgatgcacg

SEQ ID NO: 3934960 - DNA, 25 bp, Homo sapien
ttatttccaaactcccttgcatctg

SEQ ID NO: 3934961 - DNA, 25 bp, Homo sapien
acctccgggaaggcggtggtggcag

SEQ ID NO: 3934962 - DNA, 25 bp, Homo sapien
cagggatcggaagggcaaaaacact

SEQ ID NO: 3934963 - DNA, 25 bp, Homo sapien
tgacctccgggaaggcggtggtggc

SEQ ID NO: 3934964 - DNA, 25 bp, Homo sapien
gggatcggaagggcaaaaacactga

SEQ ID NO: 3934965 - DNA, 25 bp, Homo sapien
gaaatccagacctagacatcaaagt

SEQ ID NO: 3934966 - DNA, 25 bp, Homo sapien
gatgttcctccagcggacaccttta

SEQ ID NO: 3934967 - DNA, 25 bp, Homo sapien
cacattgtgtctaggcttctgatct

SEQ ID NO: 3934968 - DNA, 25 bp, Homo sapien
catgcatgagagagtttctgagccc

SEQ ID NO: 3934969 - DNA, 25 bp, Homo sapien
tgttgagtgcccagcatatgcctcc

SEQ ID NO: 3934970 - DNA, 25 bp, Homo sapien
ttgcttgcctcccttaactctggta

SEQ ID NO: 3934971 - DNA, 25 bp, Homo sapien
ggcactccaccacgaaacagtttga

SEQ ID NO: 3934972 - DNA, 25 bp, Homo sapien
gtatagtaacacacaacactgcgga

SEQ ID NO: 3934973 - DNA, 25 bp, Homo sapien
cgaacttcacctttggagggcgaga

SEQ ID NO: 3934974 - DNA, 25 bp, Homo sapien
taaaagggttcgtagcacagcaagt

SEQ ID NO: 3934975 - DNA, 25 bp, Homo sapien
gagggcgagatctacaatttcacag

SEQ ID NO: 3934976 - DNA, 25 bp, Homo sapien
ttcaaggagtggacaaacgaacttc

SEQ ID NO: 3934977 - DNA, 25 bp, Homo sapien
aactctccacagccagtggggaaca

SEQ ID NO: 3934978 - DNA, 25 bp, Homo sapien
cggtaatgggcctcctcgagaccac

SEQ ID NO: 3934979 - DNA, 25 bp, Homo sapien
tggtggcccagttgcgggagaaaaa

SEQ ID NO: 3934980 - DNA, 25 bp, Homo sapien
tcctcgagaccaccccggctggagg

SEQ ID NO: 3934981 - DNA, 25 bp, Homo sapien
taataaacctcgcagagccccggtg

SEQ ID NO: 3934982 - DNA, 25 bp, Homo sapien
ttagacacgggacgagctgcaggct

SEQ ID NO: 3934983 - DNA, 25 bp, Homo sapien
cgagctgcaggcttgacacactctg

SEQ ID NO: 3934984 - DNA, 25 bp, Homo sapien
tctgttccattagacacgggacgag

SEQ ID NO: 3934985 - DNA, 25 bp, Homo sapien
tatctcctatgcaggaatgtgccac

SEQ ID NO: 3934986 - DNA, 25 bp, Homo sapien
tgttgatgcacgttctggtatccac

SEQ ID NO: 3934987 - DNA, 25 bp, Homo sapien
gactttcaggttcttgctatcacaa

SEQ ID NO: 3934988 - DNA, 25 bp, Homo sapien
catttcattgtagacggcttttgga

SEQ ID NO: 3934989 - DNA, 25 bp, Homo sapien
tcagttttgatgtgttgtctggccc

SEQ ID NO: 3934990 - DNA, 25 bp, Homo sapien
catcagacaacctggagatagggct

SEQ ID NO: 3934991 - DNA, 25 bp, Homo sapien
aactaggaacagtattagggagatc

SEQ ID NO: 3934992 - DNA, 25 bp, Homo sapien
taatgggtaggtgtaagattaacac

SEQ ID NO: 3934993 - DNA, 25 bp, Homo sapien
cactgcagtattcgtggagctgaat

SEQ ID NO: 3934994 - DNA, 25 bp, Homo sapien
tgcagtattcgtggagctgaatttt

SEQ ID NO: 3934995 - DNA, 25 bp, Homo sapien
ctgcagtattcgtggagctgaattt

SEQ ID NO: 3934996 - DNA, 25 bp, Homo sapien
actgcagtattcgtggagctgaatt

SEQ ID NO: 3934997 - DNA, 25 bp, Homo sapien
cactttggccatgtattgaccactt

SEQ ID NO: 3934998 - DNA, 25 bp, Homo sapien
ggccgtaaatccaatcaataattca

SEQ ID NO: 3934999 - DNA, 25 bp, Homo sapien
gaacattcttctggccgtaaatcca

SEQ ID NO: 3935000 - DNA, 25 bp, Homo sapien
aatccaatcaataattcacttgtgc

SEQ ID NO: 3935001 - DNA, 25 bp, Homo sapien
ttgtccccaaaattagcagagctct

SEQ ID NO: 3935002 - DNA, 25 bp, Homo sapien
cagagctctggttcccataggaggt

SEQ ID NO: 3935003 - DNA, 25 bp, Homo sapien
tgagactgtgatgccccaagaacaa

SEQ ID NO: 3935004 - DNA, 25 bp, Homo sapien
gaggttcccggtacatcactagaag

SEQ ID NO: 3935005 - DNA, 25 bp, Homo sapien
gggaggcccgcttgatttacataac

SEQ ID NO: 3935006 - DNA, 25 bp, Homo sapien
tacataaccataagtaaacatgcag

SEQ ID NO: 3935007 - DNA, 25 bp, Homo sapien
aagtcccttgtaaccactgccatca

SEQ ID NO: 3935008 - DNA, 25 bp, Homo sapien
aatgctgaactgaattgcaggtcac

SEQ ID NO: 3935009 - DNA, 25 bp, Homo sapien
aggcaagggttagggccacaaagca

SEQ ID NO: 3935010 - DNA, 25 bp, Homo sapien
caagggttagggccacaaagcaggg

SEQ ID NO: 3935011 - DNA, 25 bp, Homo sapien
acccagggagcagatacagcttcat

SEQ ID NO: 3935012 - DNA, 25 bp, Homo sapien
cacccagggagcagatacagcttca

SEQ ID NO: 3935013 - DNA, 25 bp, Homo sapien
ttgccaatactaaccccctctctgc

SEQ ID NO: 3935014 - DNA, 25 bp, Homo sapien
agcttgccaatactaaccccctctc

SEQ ID NO: 3935015 - DNA, 25 bp, Homo sapien
cttgccaatactaaccccctctctg

SEQ ID NO: 3935016 - DNA, 25 bp, Homo sapien
ttagcttgccaatactaaccccctc

SEQ ID NO: 3935017 - DNA, 25 bp, Homo sapien
cgctgaagagttgcaggttctgcca

SEQ ID NO: 3935018 - DNA, 25 bp, Homo sapien
tcaagacaacctctgcggataccaa

SEQ ID NO: 3935019 - DNA, 25 bp, Homo sapien
cttgcaaggagttcattagggaggc

SEQ ID NO: 3935020 - DNA, 25 bp, Homo sapien
gaactgccagccacataaagctagt

SEQ ID NO: 3935021 - DNA, 25 bp, Homo sapien
gaggcttacaccatgatctgctaga

SEQ ID NO: 3935022 - DNA, 25 bp, Homo sapien
tattactcctccatacgtgtgcaga

SEQ ID NO: 3935023 - DNA, 25 bp, Homo sapien
gccaccgtgagttgagcgccttgta

SEQ ID NO: 3935024 - DNA, 25 bp, Homo sapien
tgaagcccattagacctggcactga

SEQ ID NO: 3935025 - DNA, 25 bp, Homo sapien
cttgagggataatcaatctggatat

SEQ ID NO: 3935026 - DNA, 25 bp, Homo sapien
tcttgcttcatacacctgattctct

SEQ ID NO: 3935027 - DNA, 25 bp, Homo sapien
acacctgattctctgcgagtccagg

SEQ ID NO: 3935028 - DNA, 25 bp, Homo sapien
ttcctcttgcttcatacacctgatt

SEQ ID NO: 3935029 - DNA, 25 bp, Homo sapien
acctgattctctgcgagtccagggg

SEQ ID NO: 3935030 - DNA, 25 bp, Homo sapien
gaactgtgactggtctgacctgggt

SEQ ID NO: 3935031 - DNA, 25 bp, Homo sapien
tgtcaactgtggcagcaaagtcccc

SEQ ID NO: 3935032 - DNA, 25 bp, Homo sapien
tcctctgttgtacgctgggaagatg

SEQ ID NO: 3935033 - DNA, 25 bp, Homo sapien
catcatgcactgtggccgggaatca

SEQ ID NO: 3935034 - DNA, 25 bp, Homo sapien
tcaggtaacacaaagagaggtcagg

SEQ ID NO: 3935035 - DNA, 25 bp, Homo sapien
ttgctgcagcaaatgcaagaatatg

SEQ ID NO: 3935036 - DNA, 25 bp, Homo sapien
tgcaagaatatgagcggattgggtt

SEQ ID NO: 3935037 - DNA, 25 bp, Homo sapien
cttcttcgtcaagactcaggtaaca

SEQ ID NO: 3935038 - DNA, 25 bp, Homo sapien
tatgtctacccatcctcagaggttg

SEQ ID NO: 3935039 - DNA, 25 bp, Homo sapien
tctgctaacacagcctcatgcgcat

SEQ ID NO: 3935040 - DNA, 25 bp, Homo sapien
ggtccccaagcctcttgacaaagtg

SEQ ID NO: 3935041 - DNA, 25 bp, Homo sapien
agcctcatgcgcatggcagcttcca

SEQ ID NO: 3935042 - DNA, 25 bp, Homo sapien
ccacaaatggaccttgaaatcagca

SEQ ID NO: 3935043 - DNA, 25 bp, Homo sapien
cttccaatgacacagtccgtgttct

SEQ ID NO: 3935044 - DNA, 25 bp, Homo sapien
gcttccaatgacacagtccgtgttc

SEQ ID NO: 3935045 - DNA, 25 bp, Homo sapien
cccacaaatggaccttgaaatcagc

SEQ ID NO: 3935046 - DNA, 25 bp, Homo sapien
tgatatgataaagtatgctgacgag

SEQ ID NO: 3935047 - DNA, 25 bp, Homo sapien
cagtagttttacagtgtctgaaaag

SEQ ID NO: 3935048 - DNA, 25 bp, Homo sapien
tcagtagttttacagtgtctgaaaa

SEQ ID NO: 3935049 - DNA, 25 bp, Homo sapien
gtatgctgacgaggggaataaacac

SEQ ID NO: 3935050 - DNA, 25 bp, Homo sapien
cctattatagatttctccctcagct

SEQ ID NO: 3935051 - DNA, 25 bp, Homo sapien
tccctcagcttgtagaaaatccatg

SEQ ID NO: 3935052 - DNA, 25 bp, Homo sapien
aaatcagttcctcctattatagatt

SEQ ID NO: 3935053 - DNA, 25 bp, Homo sapien
gtagaaaatccatgattccctaaac

SEQ ID NO: 3935054 - DNA, 25 bp, Homo sapien
cctgtcacgataggcagaggattct

SEQ ID NO: 3935055 - DNA, 25 bp, Homo sapien
tgtgcagtcacaagatgggtccttc

SEQ ID NO: 3935056 - DNA, 25 bp, Homo sapien
gattcaaagggttgagcactcccaa

SEQ ID NO: 3935057 - DNA, 25 bp, Homo sapien
tatagtctcagtcatgccacagggt

SEQ ID NO: 3935058 - DNA, 25 bp, Homo sapien
cttatacaccctgagtcctgaaggc

SEQ ID NO: 3935059 - DNA, 25 bp, Homo sapien
acttatacaccctgagtcctgaagg

SEQ ID NO: 3935060 - DNA, 25 bp, Homo sapien
cacttatacaccctgagtcctgaag

SEQ ID NO: 3935061 - DNA, 25 bp, Homo sapien
gtcacttatacaccctgagtcctga

SEQ ID NO: 3935062 - DNA, 25 bp, Homo sapien
cctctccatccctgctgtgcgagga

SEQ ID NO: 3935063 - DNA, 25 bp, Homo sapien
tctccatccctgctgtgcgaggagc

SEQ ID NO: 3935064 - DNA, 25 bp, Homo sapien
tgcctctccatccctgctgtgcgag

SEQ ID NO: 3935065 - DNA, 25 bp, Homo sapien
ggtttgcctctccatccctgctgtg

SEQ ID NO: 3935066 - DNA, 25 bp, Homo sapien
taaaggagttctatatgagtggcag

SEQ ID NO: 3935067 - DNA, 25 bp, Homo sapien
aaaggagttctatatgagtggcaga

SEQ ID NO: 3935068 - DNA, 25 bp, Homo sapien
gataaaggagttctatatgagtggc

SEQ ID NO: 3935069 - DNA, 25 bp, Homo sapien
tgataaaggagttctatatgagtgg

SEQ ID NO: 3935070 - DNA, 25 bp, Homo sapien
ggtgagtaaaataaggcaggtggca

SEQ ID NO: 3935071 - DNA, 25 bp, Homo sapien
ctgggtgagtaaaataaggcaggtg

SEQ ID NO: 3935072 - DNA, 25 bp, Homo sapien
gggtgagtaaaataaggcaggtggc

SEQ ID NO: 3935073 - DNA, 25 bp, Homo sapien
tgggtgagtaaaataaggcaggtgg

SEQ ID NO: 3935074 - DNA, 25 bp, Homo sapien
gtctccaacagtttatagaattcag

SEQ ID NO: 3935075 - DNA, 25 bp, Homo sapien
atctgtctccaacagtttatagaat

SEQ ID NO: 3935076 - DNA, 25 bp, Homo sapien
cacaaacacccaaaggggcaaagag

SEQ ID NO: 3935077 - DNA, 25 bp, Homo sapien
tccaacagtttatagaattcagagt

SEQ ID NO: 3935078 - DNA, 25 bp, Homo sapien
caccagtcaaggaaggcaacacagt

SEQ ID NO: 3935079 - DNA, 25 bp, Homo sapien
tgctggggaattcccatgcaccagt

SEQ ID NO: 3935080 - DNA, 25 bp, Homo sapien
gaaggcaacacagttgccctgaacc

SEQ ID NO: 3935081 - DNA, 25 bp, Homo sapien
tcccatgcaccagtcaaggaaggca

SEQ ID NO: 3935082 - DNA, 25 bp, Homo sapien
ccccaggagttacatttggagtaca

SEQ ID NO: 3935083 - DNA, 25 bp, Homo sapien
tgaaagttttgtcacagacggacct

SEQ ID NO: 3935084 - DNA, 25 bp, Homo sapien
gacaagatgtaagaccatgaaggca

SEQ ID NO: 3935085 - DNA, 25 bp, Homo sapien
tcagcaccgtgcttggtacaagggc

SEQ ID NO: 3935086 - DNA, 25 bp, Homo sapien
gatgctgagtctattacaaatgcgc

SEQ ID NO: 3935087 - DNA, 25 bp, Homo sapien
gggcatccctcgtagcagaatgtgt

SEQ ID NO: 3935088 - DNA, 25 bp, Homo sapien
gacaataggcattcgagaagctgca

SEQ ID NO: 3935089 - DNA, 25 bp, Homo sapien
tgcagtactactccagccaaagctg

SEQ ID NO: 3935090 - DNA, 25 bp, Homo sapien
aaacactgtggccaagtcgcagctt

SEQ ID NO: 3935091 - DNA, 25 bp, Homo sapien
gcagctttataaggcaacttccact

SEQ ID NO: 3935092 - DNA, 25 bp, Homo sapien
agggagaactccggtttccctgctg

SEQ ID NO: 3935093 - DNA, 25 bp, Homo sapien
gggcatttctgcacagagtggctct

SEQ ID NO: 3935094 - DNA, 25 bp, Homo sapien
ggctttagttgtcctgggtccgcag

SEQ ID NO: 3935095 - DNA, 25 bp, Homo sapien
gctgggaactgtaaaggtcccgtca

SEQ ID NO: 3935096 - DNA, 25 bp, Homo sapien
tgggtccgcagtactccaaatgagc

SEQ ID NO: 3935097 - DNA, 25 bp, Homo sapien
gcaggcgaccccggctttagttgtc

SEQ ID NO: 3935098 - DNA, 25 bp, Homo sapien
tgctaaataaaggtcgtttgcgtca

SEQ ID NO: 3935099 - DNA, 25 bp, Homo sapien
caatcggacattcagcggattcgca

SEQ ID NO: 3935100 - DNA, 25 bp, Homo sapien
cggattcgcagagctaccttctgct

SEQ ID NO: 3935101 - DNA, 25 bp, Homo sapien
agcagtctttccagcgagatcgcaa

SEQ ID NO: 3935102 - DNA, 25 bp, Homo sapien
ccaccttcaatattcttacacatga

SEQ ID NO: 3935103 - DNA, 25 bp, Homo sapien
tgagctcctcgttcaaagacagatt

SEQ ID NO: 3935104 - DNA, 25 bp, Homo sapien
aaattaaatgccacatctaaccttc

SEQ ID NO: 3935105 - DNA, 25 bp, Homo sapien
tacacatgaatagtaatgaaattga

SEQ ID NO: 3935106 - DNA, 25 bp, Homo sapien
ataactctctgaaattgagactaag

SEQ ID NO: 3935107 - DNA, 25 bp, Homo sapien
ttgagactaagcttcttggtcttgc

SEQ ID NO: 3935108 - DNA, 25 bp, Homo sapien
tcttgcttagggcagtactggccat

SEQ ID NO: 3935109 - DNA, 25 bp, Homo sapien
caaatatgttgccaaaataactctc

SEQ ID NO: 3935110 - DNA, 25 bp, Homo sapien
caacaacagtagtggtgattgcatc

SEQ ID NO: 3935111 - DNA, 25 bp, Homo sapien
cctatgggctgtgaatttgctgacc

SEQ ID NO: 3935112 - DNA, 25 bp, Homo sapien
gttgaaccagtggagaacacccact

SEQ ID NO: 3935113 - DNA, 25 bp, Homo sapien
cattctcggctggaaagttcgttcc

SEQ ID NO: 3935114 - DNA, 25 bp, Homo sapien
tcttaagtccaccacttgtgctcgg

SEQ ID NO: 3935115 - DNA, 25 bp, Homo sapien
tgtgctcggcaaagtcactgcactg

SEQ ID NO: 3935116 - DNA, 25 bp, Homo sapien
gacgtgggtgcttctttatgtggct

SEQ ID NO: 3935117 - DNA, 25 bp, Homo sapien
acaagcacgtcctcagagaaagacg

SEQ ID NO: 3935118 - DNA, 25 bp, Homo sapien
cgcgtatagcctgtcagctgggtct

SEQ ID NO: 3935119 - DNA, 25 bp, Homo sapien
gtgattggtcactgaccaattcagg

SEQ ID NO: 3935120 - DNA, 25 bp, Homo sapien
atgctgggcacatccaaggtgtccg

SEQ ID NO: 3935121 - DNA, 25 bp, Homo sapien
gggcagcgactccaagcttccttct

SEQ ID NO: 3935122 - DNA, 25 bp, Homo sapien
cttccataggataggagtctgggca

SEQ ID NO: 3935123 - DNA, 25 bp, Homo sapien
tgcagtctctgtctactatccaggg

SEQ ID NO: 3935124 - DNA, 25 bp, Homo sapien
caagctcccttaggttgctagcaga

SEQ ID NO: 3935125 - DNA, 25 bp, Homo sapien
tgtctggccaaagagtacaggtttc

SEQ ID NO: 3935126 - DNA, 25 bp, Homo sapien
tccatgcagaattccaagtagttta

SEQ ID NO: 3935127 - DNA, 25 bp, Homo sapien
tgaccaggtgaatcagagtcaccat

SEQ ID NO: 3935128 - DNA, 25 bp, Homo sapien
gtttatgcagatactctaccctcga

SEQ ID NO: 3935129 - DNA, 25 bp, Homo sapien
tgtccatgagtgtaccgtgatataa

SEQ ID NO: 3935130 - DNA, 25 bp, Homo sapien
caggtaaaactgaatcgcccaagtt

SEQ ID NO: 3935131 - DNA, 25 bp, Homo sapien
cagaatgtcaagattggaagaggcc

SEQ ID NO: 3935132 - DNA, 25 bp, Homo sapien
gaggtatggtagcaaacacacctgg

SEQ ID NO: 3935133 - DNA, 25 bp, Homo sapien
taaaatgtaaagtgggagaactcac

SEQ ID NO: 3935134 - DNA, 25 bp, Homo sapien
gcccagggcttttcataaggacgat

SEQ ID NO: 3935135 - DNA, 25 bp, Homo sapien
tgatatctgcaaggaaacgccaact

SEQ ID NO: 3935136 - DNA, 25 bp, Homo sapien
tattaaccgtgcaattaggccaagg

SEQ ID NO: 3935137 - DNA, 25 bp, Homo sapien
gagatttgggcacgccttccactag

SEQ ID NO: 3935138 - DNA, 25 bp, Homo sapien
agcggtacggagaacccagagagaa

SEQ ID NO: 3935139 - DNA, 25 bp, Homo sapien
gaagtggatgatgtgagcaagcttc

SEQ ID NO: 3935140 - DNA, 25 bp, Homo sapien
aactaagagaagagcttagcttgga

SEQ ID NO: 3935141 - DNA, 25 bp, Homo sapien
cctgatattgggcagttattagaat

SEQ ID NO: 3935142 - DNA, 25 bp, Homo sapien
agaatctcgcgctgtcacccagact

SEQ ID NO: 3935143 - DNA, 25 bp, Homo sapien
actggagtgcagtggcatgatctcg

SEQ ID NO: 3935144 - DNA, 25 bp, Homo sapien
ggcacacactgccacgcccggctaa

SEQ ID NO: 3935145 - DNA, 25 bp, Homo sapien
tacaggcacacactgccacgcccgg

SEQ ID NO: 3935146 - DNA, 25 bp, Homo sapien
ggtcattttgaaatccaaggaagag

SEQ ID NO: 3935147 - DNA, 25 bp, Homo sapien
cagttaggacaatttttgcagctgg

SEQ ID NO: 3935148 - DNA, 25 bp, Homo sapien
taaacacagcgtgaaaggctttgtt

SEQ ID NO: 3935149 - DNA, 25 bp, Homo sapien
tgttacagtaatgctcagttaggac

SEQ ID NO: 3935150 - DNA, 25 bp, Homo sapien
tttgcaacagttacagatcctccag

SEQ ID NO: 3935151 - DNA, 25 bp, Homo sapien
tataagcagattcagcgcgtggctg

SEQ ID NO: 3935152 - DNA, 25 bp, Homo sapien
aaagctggacatgttagaagtcgcc

SEQ ID NO: 3935153 - DNA, 25 bp, Homo sapien
cgcctaattgctactcatgggtgac

SEQ ID NO: 3935154 - DNA, 25 bp, Homo sapien
caacagagtaataccccaccatttt

SEQ ID NO: 3935155 - DNA, 25 bp, Homo sapien
gagcctggggaagtagctcaagcct

SEQ ID NO: 3935156 - DNA, 25 bp, Homo sapien
gcaacagagtaataccccaccattt

SEQ ID NO: 3935157 - DNA, 25 bp, Homo sapien
ctaaggctccgaaagaataaggcat

SEQ ID NO: 3935158 - DNA, 25 bp, Homo sapien
tactgatgcttaacacctgcacagg

SEQ ID NO: 3935159 - DNA, 25 bp, Homo sapien
gcatcaaggatagactctggcctca

SEQ ID NO: 3935160 - DNA, 25 bp, Homo sapien
tcagtttgttagaagccagattccc

SEQ ID NO: 3935161 - DNA, 25 bp, Homo sapien
tacgaccctactgaagaatcactgg

SEQ ID NO: 3935162 - DNA, 25 bp, Homo sapien
actatttatatcacggagaaatcag

SEQ ID NO: 3935163 - DNA, 25 bp, Homo sapien
gaatctgaaaagaacgtgggcctct

SEQ ID NO: 3935164 - DNA, 25 bp, Homo sapien
tgcattgacgggaccttacgaccct

SEQ ID NO: 3935165 - DNA, 25 bp, Homo sapien
catgcatgttggagtgggtgatccc

SEQ ID NO: 3935166 - DNA, 25 bp, Homo sapien
taggcctccctaactgggcttcctg

SEQ ID NO: 3935167 - DNA, 25 bp, Homo sapien
tgatctaccaccgaaggatgatggg

SEQ ID NO: 3935168 - DNA, 25 bp, Homo sapien
caggtagtcctttacatcaatgtga

SEQ ID NO: 3935169 - DNA, 25 bp, Homo sapien
gcttactgcaaaccccaaagtcagg

SEQ ID NO: 3935170 - DNA, 25 bp, Homo sapien
tcttctatgtacagatagcaggagg

SEQ ID NO: 3935171 - DNA, 25 bp, Homo sapien
tgaatcctggtgaccttgccttgcc

SEQ ID NO: 3935172 - DNA, 25 bp, Homo sapien
tagcaggaggttctaagatctggcc

SEQ ID NO: 3935173 - DNA, 25 bp, Homo sapien
tgccggaattcagcccgtgactcca

SEQ ID NO: 3935174 - DNA, 25 bp, Homo sapien
tggaaatctgttgcccgtcatcaca

SEQ ID NO: 3935175 - DNA, 25 bp, Homo sapien
agaagcccgcgtgccaacttggaaa

SEQ ID NO: 3935176 - DNA, 25 bp, Homo sapien
agatgtggcagtgccggaattcagc

SEQ ID NO: 3935177 - DNA, 25 bp, Homo sapien
gttaaaagagacttacagctctgct

SEQ ID NO: 3935178 - DNA, 25 bp, Homo sapien
gcctgtccaagcttgaaaatggtgt

SEQ ID NO: 3935179 - DNA, 25 bp, Homo sapien
gtagatatatattgagataacccat

SEQ ID NO: 3935180 - DNA, 25 bp, Homo sapien
gttgcagacatgttcacccatagag

SEQ ID NO: 3935181 - DNA, 25 bp, Homo sapien
ctgattcaagtgtctaggatgtttc

SEQ ID NO: 3935182 - DNA, 25 bp, Homo sapien
ggtggcacgagccctgttttttgaa

SEQ ID NO: 3935183 - DNA, 25 bp, Homo sapien
actgatgtatagtggcaagatcata

SEQ ID NO: 3935184 - DNA, 25 bp, Homo sapien
acccagactgatgtatagtggcaag

SEQ ID NO: 3935185 - DNA, 25 bp, Homo sapien
tggaaactggaaatcgattttagga

SEQ ID NO: 3935186 - DNA, 25 bp, Homo sapien
tgagtacacctggacagaccgcagg

SEQ ID NO: 3935187 - DNA, 25 bp, Homo sapien
caatcatacatgagccaagggcaaa

SEQ ID NO: 3935188 - DNA, 25 bp, Homo sapien
ggatcgcaagagacagttacccaaa

SEQ ID NO: 3935189 - DNA, 25 bp, Homo sapien
gaagcatgtgcgagccaaaactgtg

SEQ ID NO: 3935190 - DNA, 25 bp, Homo sapien
tgactattaggagaacattcccagg

SEQ ID NO: 3935191 - DNA, 25 bp, Homo sapien
tactgctggcagattgactagattc

SEQ ID NO: 3935192 - DNA, 25 bp, Homo sapien
tatggccttattgtgtcagactctg

SEQ ID NO: 3935193 - DNA, 25 bp, Homo sapien
caacagtgaccgagattacagatac

SEQ ID NO: 3935194 - DNA, 25 bp, Homo sapien
tcagaagtgacctccttctaccagg

SEQ ID NO: 3935195 - DNA, 25 bp, Homo sapien
ctccttctaccaggcagtctgaaac

SEQ ID NO: 3935196 - DNA, 25 bp, Homo sapien
cagaagtgacctccttctaccaggc

SEQ ID NO: 3935197 - DNA, 25 bp, Homo sapien
gacctccttctaccaggcagtctga

SEQ ID NO: 3935198 - DNA, 25 bp, Homo sapien
gctgaactctccttggcagaccata

SEQ ID NO: 3935199 - DNA, 25 bp, Homo sapien
cattgcccctctgatttggaataca

SEQ ID NO: 3935200 - DNA, 25 bp, Homo sapien
tctcttggctgacaacttgatcctt

SEQ ID NO: 3935201 - DNA, 25 bp, Homo sapien
acaaagactccgacttgccagcatg

SEQ ID NO: 3935202 - DNA, 25 bp, Homo sapien
tgaagtcacttaggaccctgcctgg

SEQ ID NO: 3935203 - DNA, 25 bp, Homo sapien
ccaatatgagctgtagaaaatcccg

SEQ ID NO: 3935204 - DNA, 25 bp, Homo sapien
ttgcccggaggaatgtagcccctag

SEQ ID NO: 3935205 - DNA, 25 bp, Homo sapien
tacaggtagcatggcctcaagcaca

SEQ ID NO: 3935206 - DNA, 25 bp, Homo sapien
tcagtggtaaacctaattgaaagta

SEQ ID NO: 3935207 - DNA, 25 bp, Homo sapien
ccttcgtctgcacactgatggggtc

SEQ ID NO: 3935208 - DNA, 25 bp, Homo sapien
tggggtcagtggtaaacctaattga

SEQ ID NO: 3935209 - DNA, 25 bp, Homo sapien
tgtcaccagtgcccgaatccaaact

SEQ ID NO: 3935210 - DNA, 25 bp, Homo sapien
ttaactgagttaggccttccaaagc

SEQ ID NO: 3935211 - DNA, 25 bp, Homo sapien
tagtcacaggtatagtcatagctca

SEQ ID NO: 3935212 - DNA, 25 bp, Homo sapien
caaatgtggcccgtgacctgttttt

SEQ ID NO: 3935213 - DNA, 25 bp, Homo sapien
tcaaaatgtagcgaaacctctgtgc

SEQ ID NO: 3935214 - DNA, 25 bp, Homo sapien
ttttcccttctcactccatagactg

SEQ ID NO: 3935215 - DNA, 25 bp, Homo sapien
actgctttacgctgagagctgcgcc

SEQ ID NO: 3935216 - DNA, 25 bp, Homo sapien
ccatagactgctttacgctgagagc

SEQ ID NO: 3935217 - DNA, 25 bp, Homo sapien
ctttacgctgagagctgcgccatca

SEQ ID NO: 3935218 - DNA, 25 bp, Homo sapien
aagacactggcatggagtacacaca

SEQ ID NO: 3935219 - DNA, 25 bp, Homo sapien
ttgcagttgcggaacccagaagtct

SEQ ID NO: 3935220 - DNA, 25 bp, Homo sapien
gaaccacacgaacttgcctggcagg

SEQ ID NO: 3935221 - DNA, 25 bp, Homo sapien
tgagaggagcgttatcacagaacct

SEQ ID NO: 3935222 - DNA, 25 bp, Homo sapien
tcagtcacatccatgcctttattca

SEQ ID NO: 3935223 - DNA, 25 bp, Homo sapien
ctcctcagtcacatccatgccttta

SEQ ID NO: 3935224 - DNA, 25 bp, Homo sapien
cctcagtcacatccatgcctttatt

SEQ ID NO: 3935225 - DNA, 25 bp, Homo sapien
cagtcacatccatgcctttattcat

SEQ ID NO: 3935226 - DNA, 25 bp, Homo sapien
cacttggctcccctgatgatggaga

SEQ ID NO: 3935227 - DNA, 25 bp, Homo sapien
ttagcgtccacttggctcccctgat

SEQ ID NO: 3935228 - DNA, 25 bp, Homo sapien
tggctcccctgatgatggagaagtg

SEQ ID NO: 3935229 - DNA, 25 bp, Homo sapien
tcccctgatgatggagaagtgctct

SEQ ID NO: 3935230 - DNA, 25 bp, Homo sapien
gatgtgtagtgtgccttctgaaagc

SEQ ID NO: 3935231 - DNA, 25 bp, Homo sapien
tctgctgcgagtgttgggaacgtct

SEQ ID NO: 3935232 - DNA, 25 bp, Homo sapien
tttgaccaagctgaacaagcaccct

SEQ ID NO: 3935233 - DNA, 25 bp, Homo sapien
tccaatcactgttgggtgcctccaa

SEQ ID NO: 3935234 - DNA, 25 bp, Homo sapien
ttcaatgaacgttttatgtttacca

SEQ ID NO: 3935235 - DNA, 25 bp, Homo sapien
tatgtgctgaaaaacagctgtaaaa

SEQ ID NO: 3935236 - DNA, 25 bp, Homo sapien
tgtttaccataaaaaatcctccagc

SEQ ID NO: 3935237 - DNA, 25 bp, Homo sapien
tgttacatttccaaacagatccaca

SEQ ID NO: 3935238 - DNA, 25 bp, Homo sapien
caacactgcgtacacatgggcatga

SEQ ID NO: 3935239 - DNA, 25 bp, Homo sapien
ttacaagtcgaagctcaacactgcg

SEQ ID NO: 3935240 - DNA, 25 bp, Homo sapien
tcgggttcacaactaggagtcctgg

SEQ ID NO: 3935241 - DNA, 25 bp, Homo sapien
gcaacgtggatacagcttgaagcca

SEQ ID NO: 3935242 - DNA, 25 bp, Homo sapien
actgcctctatcctggaagaaccag

SEQ ID NO: 3935243 - DNA, 25 bp, Homo sapien
caggacagatttagatcaggaagcc

SEQ ID NO: 3935244 - DNA, 25 bp, Homo sapien
gacaaacggcctagaattatcccca

SEQ ID NO: 3935245 - DNA, 25 bp, Homo sapien
tatttaagctggagtgtgccgttgc

SEQ ID NO: 3935246 - DNA, 25 bp, Homo sapien
agtaaggcagaagcctcaatatttt

SEQ ID NO: 3935247 - DNA, 25 bp, Homo sapien
atcagtaaggcagaagcctcaatat

SEQ ID NO: 3935248 - DNA, 25 bp, Homo sapien
taaggcagaagcctcaatattttta

SEQ ID NO: 3935249 - DNA, 25 bp, Homo sapien
gtgaatgatccacatcagtaaggca

SEQ ID NO: 3935250 - DNA, 25 bp, Homo sapien
aggctcagttcttctacacgggtat

SEQ ID NO: 3935251 - DNA, 25 bp, Homo sapien
ggctcagttcttctacacgggtatg

SEQ ID NO: 3935252 - DNA, 25 bp, Homo sapien
gaggctcagttcttctacacgggta

SEQ ID NO: 3935253 - DNA, 25 bp, Homo sapien
ctcagttcttctacacgggtatgct

SEQ ID NO: 3935254 - DNA, 25 bp, Homo sapien
acctcaaggcttaactagggctgca

SEQ ID NO: 3935255 - DNA, 25 bp, Homo sapien
gcagaaacttgtgagcagcttagct

SEQ ID NO: 3935256 - DNA, 25 bp, Homo sapien
gcaaaggctgcaatcacctcaaggc

SEQ ID NO: 3935257 - DNA, 25 bp, Homo sapien
gcagaatcaacttcgaacgtggttc

SEQ ID NO: 3935258 - DNA, 25 bp, Homo sapien
taacctccatgctgtagaacgggaa

SEQ ID NO: 3935259 - DNA, 25 bp, Homo sapien
gagaggtcaatcaataacacacagg

SEQ ID NO: 3935260 - DNA, 25 bp, Homo sapien
cacggttgatagtttctgccatgca

SEQ ID NO: 3935261 - DNA, 25 bp, Homo sapien
tagatagtggcgttacgacactggc

SEQ ID NO: 3935262 - DNA, 25 bp, Homo sapien
tttaataaggctagcgacacacagg

SEQ ID NO: 3935263 - DNA, 25 bp, Homo sapien
cacaggagagatgacgaagagcaag

SEQ ID NO: 3935264 - DNA, 25 bp, Homo sapien
gagcaaggctttctaccagcgctag

SEQ ID NO: 3935265 - DNA, 25 bp, Homo sapien
catggaagccacgtaaatttctgcc

SEQ ID NO: 3935266 - DNA, 25 bp, Homo sapien
cactgcagggaggtaacacttcact

SEQ ID NO: 3935267 - DNA, 25 bp, Homo sapien
tagggaaatgggaatcaacactgca

SEQ ID NO: 3935268 - DNA, 25 bp, Homo sapien
tacacaaacggccagtaggcacgtg

SEQ ID NO: 3935269 - DNA, 25 bp, Homo sapien
tagaatcctgatgcactgctggtgg

SEQ ID NO: 3935270 - DNA, 25 bp, Homo sapien
tgattttccactctcagcctggtga

SEQ ID NO: 3935271 - DNA, 25 bp, Homo sapien
agtgattttccactctcagcctggt

SEQ ID NO: 3935272 - DNA, 25 bp, Homo sapien
ctgcaccaagccaggcaactttttt

SEQ ID NO: 3935273 - DNA, 25 bp, Homo sapien
cactgcaccaagccaggcaactttt

SEQ ID NO: 3935274 - DNA, 25 bp, Homo sapien
tacaagttcacgctatgttgtccag

SEQ ID NO: 3935275 - DNA, 25 bp, Homo sapien
taaacatatgcctatgccccagtgg

SEQ ID NO: 3935276 - DNA, 25 bp, Homo sapien
ccctcctgtggaatgagctaaacat

SEQ ID NO: 3935277 - DNA, 25 bp, Homo sapien
gcttgaagcctggaattagctagta

SEQ ID NO: 3935278 - DNA, 25 bp, Homo sapien
tgtcaagaaactgcccgaaaaaatg

SEQ ID NO: 3935279 - DNA, 25 bp, Homo sapien
gacacaccaacgtggattccaacac

SEQ ID NO: 3935280 - DNA, 25 bp, Homo sapien
gattccaacacctatcatcattcag

SEQ ID NO: 3935281 - DNA, 25 bp, Homo sapien
aaatgacatgagacacaccaacgtg

SEQ ID NO: 3935282 - DNA, 25 bp, Homo sapien
tgagaccaggattacagcctgaaca

SEQ ID NO: 3935283 - DNA, 25 bp, Homo sapien
tctgagaagcttggaacactcaccc

SEQ ID NO: 3935284 - DNA, 25 bp, Homo sapien
ctattgcgtcgctcttctgagaagc

SEQ ID NO: 3935285 - DNA, 25 bp, Homo sapien
gcatcaatcatactgaggtccgaca

SEQ ID NO: 3935286 - DNA, 25 bp, Homo sapien
gtttatcattttatttcagcactca

SEQ ID NO: 3935287 - DNA, 25 bp, Homo sapien
tgacttgtttatcattttatttcag

SEQ ID NO: 3935288 - DNA, 25 bp, Homo sapien
tatcattttatttcagcactcagct

SEQ ID NO: 3935289 - DNA, 25 bp, Homo sapien
ttgacttgtttatcattttatttca

SEQ ID NO: 3935290 - DNA, 25 bp, Homo sapien
cgtaacagccaacaagtagaaacac

SEQ ID NO: 3935291 - DNA, 25 bp, Homo sapien
gtagaaacacaatgaccacccactg

SEQ ID NO: 3935292 - DNA, 25 bp, Homo sapien
tgattgtggcacgatattgtgaacg

SEQ ID NO: 3935293 - DNA, 25 bp, Homo sapien
gcatgtattagaaacattcttggca

SEQ ID NO: 3935294 - DNA, 25 bp, Homo sapien
tccatgttaaatagggttgtccacg

SEQ ID NO: 3935295 - DNA, 25 bp, Homo sapien
tggtcttcaaccctaggcttaagtg

SEQ ID NO: 3935296 - DNA, 25 bp, Homo sapien
agatactggtctcttttggctgaac

SEQ ID NO: 3935297 - DNA, 25 bp, Homo sapien
catgtccaaggcatgggtgaagaaa

SEQ ID NO: 3935298 - DNA, 25 bp, Homo sapien
agccagaacagaccgagagagactc

SEQ ID NO: 3935299 - DNA, 25 bp, Homo sapien
cattgtgctgaccacatgaagatgg

SEQ ID NO: 3935300 - DNA, 25 bp, Homo sapien
cagcaacagctataacttaccaagg

SEQ ID NO: 3935301 - DNA, 25 bp, Homo sapien
tatgctcacagcctgaacacatggg

SEQ ID NO: 3935302 - DNA, 25 bp, Homo sapien
cagtgaatcacagtatgggaggcca

SEQ ID NO: 3935303 - DNA, 25 bp, Homo sapien
gctaggtagacattcagagccattc

SEQ ID NO: 3935304 - DNA, 25 bp, Homo sapien
tacttcagcaagcaatcaacgacag

SEQ ID NO: 3935305 - DNA, 25 bp, Homo sapien
caacgacagttctaggagttaacag

SEQ ID NO: 3935306 - DNA, 25 bp, Homo sapien
gactggattccatgggctaagattt

SEQ ID NO: 3935307 - DNA, 25 bp, Homo sapien
gtgccgtggctttggtatcatgacc

SEQ ID NO: 3935308 - DNA, 25 bp, Homo sapien
tgctcacgttgtggcaaaggtgccg

SEQ ID NO: 3935309 - DNA, 25 bp, Homo sapien
tactctttttgacccagattctgga

SEQ ID NO: 3935310 - DNA, 25 bp, Homo sapien
acggctcctgaattaatagaccaag

SEQ ID NO: 3935311 - DNA, 25 bp, Homo sapien
cagcaagtggtgtctcaaactttaa

SEQ ID NO: 3935312 - DNA, 25 bp, Homo sapien
cacattgttgtttacggctcctgaa

SEQ ID NO: 3935313 - DNA, 25 bp, Homo sapien
gccataaaaccactggcagcaagtg

SEQ ID NO: 3935314 - DNA, 25 bp, Homo sapien
gcagcttctgtcaacacagccaaag

SEQ ID NO: 3935315 - DNA, 25 bp, Homo sapien
taactggaactttgactaatatgca

SEQ ID NO: 3935316 - DNA, 25 bp, Homo sapien
ttcctaactagtgcctgagatggag

SEQ ID NO: 3935317 - DNA, 25 bp, Homo sapien
gatggaggacgtatttcagggaaaa

SEQ ID NO: 3935318 - DNA, 25 bp, Homo sapien
tcatctcagagccaacccgaaggat

SEQ ID NO: 3935319 - DNA, 25 bp, Homo sapien
tgtgcttgatgaaacccaagtgttc

SEQ ID NO: 3935320 - DNA, 25 bp, Homo sapien
cccgaaggataacaatgtgcttgat

SEQ ID NO: 3935321 - DNA, 25 bp, Homo sapien
aaaagagttcatcggaacctcagac

SEQ ID NO: 3935322 - DNA, 25 bp, Homo sapien
aagttaaaaacatgtccaggtatgg

SEQ ID NO: 3935323 - DNA, 25 bp, Homo sapien
cagatcccctgtggttttacttcca

SEQ ID NO: 3935324 - DNA, 25 bp, Homo sapien
taaatactctgcgaagccactacaa

SEQ ID NO: 3935325 - DNA, 25 bp, Homo sapien
gatgggtcatgcctaaaatgcctgc

SEQ ID NO: 3935326 - DNA, 25 bp, Homo sapien
gacaggacacatgctatctgaccca

SEQ ID NO: 3935327 - DNA, 25 bp, Homo sapien
taaaaagttgtgacagcgacaggac

SEQ ID NO: 3935328 - DNA, 25 bp, Homo sapien
caagatcatgaagtaccaccaggcc

SEQ ID NO: 3935329 - DNA, 25 bp, Homo sapien
tgttcgctgccgagcaaaagtcaaa

SEQ ID NO: 3935330 - DNA, 25 bp, Homo sapien
caaatgagagccacacgcagaacat

SEQ ID NO: 3935331 - DNA, 25 bp, Homo sapien
caattctgctacactcaaaggctca

SEQ ID NO: 3935332 - DNA, 25 bp, Homo sapien
aacattttgagctacgtgtaagacc

SEQ ID NO: 3935333 - DNA, 25 bp, Homo sapien
caaaggctcattgcttgacatgtaa

SEQ ID NO: 3935334 - DNA, 25 bp, Homo sapien
cctgtgaggccataaaattccgaat

SEQ ID NO: 3935335 - DNA, 25 bp, Homo sapien
cattagctgcagttggtatgaagcc

SEQ ID NO: 3935336 - DNA, 25 bp, Homo sapien
cagtttaggctagtggtcaagatca

SEQ ID NO: 3935337 - DNA, 25 bp, Homo sapien
gacactgggcaaattagaacctacg

SEQ ID NO: 3935338 - DNA, 25 bp, Homo sapien
gaccttggagacacaatggatacgt

SEQ ID NO: 3935339 - DNA, 25 bp, Homo sapien
cagtaagtatcaggtagtagaaaac

SEQ ID NO: 3935340 - DNA, 25 bp, Homo sapien
tgttgctgttgataagaccttggag

SEQ ID NO: 3935341 - DNA, 25 bp, Homo sapien
tgtgattgatctcaaaggaggcctt

SEQ ID NO: 3935342 - DNA, 25 bp, Homo sapien
taagatggaggcacatttttgccaa

SEQ ID NO: 3935343 - DNA, 25 bp, Homo sapien
gatctggccgggttctgtcttctcc

SEQ ID NO: 3935344 - DNA, 25 bp, Homo sapien
cagcagttgccttaaaccagcggag

SEQ ID NO: 3935345 - DNA, 25 bp, Homo sapien
ccagcggagatataatagaacctat

SEQ ID NO: 3935346 - DNA, 25 bp, Homo sapien
tacatcttgaaattggataggttgg

SEQ ID NO: 3935347 - DNA, 25 bp, Homo sapien
atgtaatccacaaaggatacatctt

SEQ ID NO: 3935348 - DNA, 25 bp, Homo sapien
taggttggaaaagtacacaggtgcc

SEQ ID NO: 3935349 - DNA, 25 bp, Homo sapien
tagaaaagaaccaatgtaatccaca

SEQ ID NO: 3935350 - DNA, 25 bp, Homo sapien
attggaaaaccttgaccctggatgt

SEQ ID NO: 3935351 - DNA, 25 bp, Homo sapien
ggaaaaccttgaccctggatgtcac

SEQ ID NO: 3935352 - DNA, 25 bp, Homo sapien
accttgaccctggatgtcacgctgg

SEQ ID NO: 3935353 - DNA, 25 bp, Homo sapien
aaaaccttgaccctggatgtcacgc

SEQ ID NO: 3935354 - DNA, 25 bp, Homo sapien
tctccgaggcttaaggaaatctcct

SEQ ID NO: 3935355 - DNA, 25 bp, Homo sapien
caacttcaaccagaaggccttggct

SEQ ID NO: 3935356 - DNA, 25 bp, Homo sapien
gcctggacgaaaccttctacagagg

SEQ ID NO: 3935357 - DNA, 25 bp, Homo sapien
cacaaaggtagctggtgcacagacc

SEQ ID NO: 3935358 - DNA, 25 bp, Homo sapien
ctgcgtacaactgtccttggcctca

SEQ ID NO: 3935359 - DNA, 25 bp, Homo sapien
gcagagaggtctgcgtacaactgtc

SEQ ID NO: 3935360 - DNA, 25 bp, Homo sapien
gagaggtctgcgtacaactgtcctt

SEQ ID NO: 3935361 - DNA, 25 bp, Homo sapien
cactggcagagaggtctgcgtacaa

SEQ ID NO: 3935362 - DNA, 25 bp, Homo sapien
gcggcttaggccaacagggttcttg

SEQ ID NO: 3935363 - DNA, 25 bp, Homo sapien
cagtgtacaacaggagcagaggtgc

SEQ ID NO: 3935364 - DNA, 25 bp, Homo sapien
caggcgaaccccagaattgcggctt

SEQ ID NO: 3935365 - DNA, 25 bp, Homo sapien
tcactggcgcaaacacgtaagctct

SEQ ID NO: 3935366 - DNA, 25 bp, Homo sapien
tattccacccattaggaacacgtga

SEQ ID NO: 3935367 - DNA, 25 bp, Homo sapien
ccaacctaaatatgctaagcgtctg

SEQ ID NO: 3935368 - DNA, 25 bp, Homo sapien
tagtgaatatctaggctctgaagac

SEQ ID NO: 3935369 - DNA, 25 bp, Homo sapien
gcaatgtaactctcatcatggaaag

SEQ ID NO: 3935370 - DNA, 25 bp, Homo sapien
tcaggacagtgcagtaagaagacgc

SEQ ID NO: 3935371 - DNA, 25 bp, Homo sapien
tctcactagagcaagtcaggacagt

SEQ ID NO: 3935372 - DNA, 25 bp, Homo sapien
gagtgccggcatcctcatttatgaa

SEQ ID NO: 3935373 - DNA, 25 bp, Homo sapien
cacaaagttgcctaggaccctgata

SEQ ID NO: 3935374 - DNA, 25 bp, Homo sapien
tcagagaagcgtctttagccagctc

SEQ ID NO: 3935375 - DNA, 25 bp, Homo sapien
tcttcttggaaattcgcgcggccat

SEQ ID NO: 3935376 - DNA, 25 bp, Homo sapien
gatgccatcagcgaccaacatcctc

SEQ ID NO: 3935377 - DNA, 25 bp, Homo sapien
ggagtaagaaactgattccgttcag

SEQ ID NO: 3935378 - DNA, 25 bp, Homo sapien
agtggtgggcactacctcatctttg

SEQ ID NO: 3935379 - DNA, 25 bp, Homo sapien
gagtggtgggcactacctcatcttt

SEQ ID NO: 3935380 - DNA, 25 bp, Homo sapien
tggggcatagcaggcggctctggct

SEQ ID NO: 3935381 - DNA, 25 bp, Homo sapien
gactggctggggcatagcaggcggc

SEQ ID NO: 3935382 - DNA, 25 bp, Homo sapien
tatggggactggctggggcatagca

SEQ ID NO: 3935383 - DNA, 25 bp, Homo sapien
catagcaggcggctctggcttccca

SEQ ID NO: 3935384 - DNA, 25 bp, Homo sapien
gactccgaatacaactgccaaggac

SEQ ID NO: 3935385 - DNA, 25 bp, Homo sapien
cagactccgaatacaactgccaagg

SEQ ID NO: 3935386 - DNA, 25 bp, Homo sapien
atccagactccgaatacaactgcca

SEQ ID NO: 3935387 - DNA, 25 bp, Homo sapien
aacatccagactccgaatacaactg

SEQ ID NO: 3935388 - DNA, 25 bp, Homo sapien
tccagcccaacctcctattctgcat

SEQ ID NO: 3935389 - DNA, 25 bp, Homo sapien
tctgcatcccccagtttttgcctgg

SEQ ID NO: 3935390 - DNA, 25 bp, Homo sapien
acacccaggtccatcgaaggctctt

SEQ ID NO: 3935391 - DNA, 25 bp, Homo sapien
tttgcctggcccctggattaacacc

SEQ ID NO: 3935392 - DNA, 25 bp, Homo sapien
tacctgtcagccccaatcggtgctg

SEQ ID NO: 3935393 - DNA, 25 bp, Homo sapien
tcctgcttggccaaatcgacctgaa

SEQ ID NO: 3935394 - DNA, 25 bp, Homo sapien
cagaaagctgcacggccgtacctgt

SEQ ID NO: 3935395 - DNA, 25 bp, Homo sapien
tttgttaggaaaatagaggtactga

SEQ ID NO: 3935396 - DNA, 25 bp, Homo sapien
ctgatggctatagagggtaaggatg

SEQ ID NO: 3935397 - DNA, 25 bp, Homo sapien
gctatagagggtaaggatggggctg

SEQ ID NO: 3935398 - DNA, 25 bp, Homo sapien
gatggctatagagggtaaggatggg

SEQ ID NO: 3935399 - DNA, 25 bp, Homo sapien
tatagagggtaaggatggggctgta

SEQ ID NO: 3935400 - DNA, 25 bp, Homo sapien
caggacatggattcacactagcagg

SEQ ID NO: 3935401 - DNA, 25 bp, Homo sapien
cctgagagggccaccacaggacatg

SEQ ID NO: 3935402 - DNA, 25 bp, Homo sapien
tttaatcacaatccctcctgagagg

SEQ ID NO: 3935403 - DNA, 25 bp, Homo sapien
catgacacatgattcccttgggttg

SEQ ID NO: 3935404 - DNA, 25 bp, Homo sapien
tatcaacgtgtggatttaaagcctc

SEQ ID NO: 3935405 - DNA, 25 bp, Homo sapien
catgggcgcttgtaacattgaagga

SEQ ID NO: 3935406 - DNA, 25 bp, Homo sapien
tgctctactaacatgctcatgggcg

SEQ ID NO: 3935407 - DNA, 25 bp, Homo sapien
gctgtcggagcaagatacactggat

SEQ ID NO: 3935408 - DNA, 25 bp, Homo sapien
tcatattttgctgccaacctctgac

SEQ ID NO: 3935409 - DNA, 25 bp, Homo sapien
tttccattgtgtgggatgaagaagc

SEQ ID NO: 3935410 - DNA, 25 bp, Homo sapien
tcttgttaatataatctgggctctg

SEQ ID NO: 3935411 - DNA, 25 bp, Homo sapien
tgttctagagaacaacctccactct

SEQ ID NO: 3935412 - DNA, 25 bp, Homo sapien
ttttgacgctcgctttgcttcctgg

SEQ ID NO: 3935413 - DNA, 25 bp, Homo sapien
acgtaccctgctttgcatccctctg

SEQ ID NO: 3935414 - DNA, 25 bp, Homo sapien
catgcagcctgacagagttgaagga

SEQ ID NO: 3935415 - DNA, 25 bp, Homo sapien
caccacaacctgaaaagctaccttc

SEQ ID NO: 3935416 - DNA, 25 bp, Homo sapien
ctcaacattttaagatgcaactgtg

SEQ ID NO: 3935417 - DNA, 25 bp, Homo sapien
caacatgcaggagcgcctaaagcct

SEQ ID NO: 3935418 - DNA, 25 bp, Homo sapien
agaatcaacatgcaggagcgcctaa

SEQ ID NO: 3935419 - DNA, 25 bp, Homo sapien
aggagcgcctaaagcctcctctgaa

SEQ ID NO: 3935420 - DNA, 25 bp, Homo sapien
taggaggtgggttcttcaagccttc

SEQ ID NO: 3935421 - DNA, 25 bp, Homo sapien
cctgaaggcttcgctagttcctggg

SEQ ID NO: 3935422 - DNA, 25 bp, Homo sapien
cccaatttagcatcaccaaccaagc

SEQ ID NO: 3935423 - DNA, 25 bp, Homo sapien
tctagacgatgatgagacggtttta

SEQ ID NO: 3935424 - DNA, 25 bp, Homo sapien
gctctgccattaggaaccgagtgga

SEQ ID NO: 3935425 - DNA, 25 bp, Homo sapien
taggaaccgagtggacagctgaaac

SEQ ID NO: 3935426 - DNA, 25 bp, Homo sapien
gcttttcggtgttgctctgccatta

SEQ ID NO: 3935427 - DNA, 25 bp, Homo sapien
tcggtgttgctctgccattaggaac

SEQ ID NO: 3935428 - DNA, 25 bp, Homo sapien
ggcatatggtagataagaggatgta

SEQ ID NO: 3935429 - DNA, 25 bp, Homo sapien
tcccaggcatatggtagataagagg

SEQ ID NO: 3935430 - DNA, 25 bp, Homo sapien
ccaggcatatggtagataagaggat

SEQ ID NO: 3935431 - DNA, 25 bp, Homo sapien
ccatcccaggcatatggtagataag

SEQ ID NO: 3935432 - DNA, 25 bp, Homo sapien
cctgattgatgttcgggctcgggat

SEQ ID NO: 3935433 - DNA, 25 bp, Homo sapien
aaggcttccctattatcttcagtga

SEQ ID NO: 3935434 - DNA, 25 bp, Homo sapien
gagactgcccaaattattcatcgta

SEQ ID NO: 3935435 - DNA, 25 bp, Homo sapien
gctcgggatgttttccattatgaga

SEQ ID NO: 3935436 - DNA, 25 bp, Homo sapien
gctggtctagtccaaaagccaagtt

SEQ ID NO: 3935437 - DNA, 25 bp, Homo sapien
catttagttagactgtctgggaagg

SEQ ID NO: 3935438 - DNA, 25 bp, Homo sapien
taacagtggttctttctcgaggtgc

SEQ ID NO: 3935439 - DNA, 25 bp, Homo sapien
ttccttggtgtgagctgataaacac

SEQ ID NO: 3935440 - DNA, 25 bp, Homo sapien
caaatgattttcagcacctttaccc

SEQ ID NO: 3935441 - DNA, 25 bp, Homo sapien
gcaaatgattttcagcacctttacc

SEQ ID NO: 3935442 - DNA, 25 bp, Homo sapien
cagcaaatgattttcagcaccttta

SEQ ID NO: 3935443 - DNA, 25 bp, Homo sapien
cgcagcaaatgattttcagcacctt

SEQ ID NO: 3935444 - DNA, 25 bp, Homo sapien
gctgctcatggtaactatgtctttg

SEQ ID NO: 3935445 - DNA, 25 bp, Homo sapien
tggtaactatgtctttgcgagtcat

SEQ ID NO: 3935446 - DNA, 25 bp, Homo sapien
tactgctgctcatggtaactatgtc

SEQ ID NO: 3935447 - DNA, 25 bp, Homo sapien
gctcatggtaactatgtctttgcga

SEQ ID NO: 3935448 - DNA, 25 bp, Homo sapien
cgtgggacaccaagtagaccctggg

SEQ ID NO: 3935449 - DNA, 25 bp, Homo sapien
tatagactgtcctccgtgggacacc

SEQ ID NO: 3935450 - DNA, 25 bp, Homo sapien
ttaatgttgagttactgtatagact

SEQ ID NO: 3935451 - DNA, 25 bp, Homo sapien
gggagctgtggcaagattgtcaaca

SEQ ID NO: 3935452 - DNA, 25 bp, Homo sapien
caatatgctctacctagcctaggag

SEQ ID NO: 3935453 - DNA, 25 bp, Homo sapien
tgtacatgtttgctgccagggagca

SEQ ID NO: 3935454 - DNA, 25 bp, Homo sapien
tgctcaccaacatggaagttatctg

SEQ ID NO: 3935455 - DNA, 25 bp, Homo sapien
ggttctattccagaccagattcagg

SEQ ID NO: 3935456 - DNA, 25 bp, Homo sapien
acagaatgggtgatgaagtaagaca

SEQ ID NO: 3935457 - DNA, 25 bp, Homo sapien
tcctaagccacactccgtgctggtg

SEQ ID NO: 3935458 - DNA, 25 bp, Homo sapien
gacatgttgatggaacacaattcaa

SEQ ID NO: 3935459 - DNA, 25 bp, Homo sapien
ggtgatagaagttatctaccactat

SEQ ID NO: 3935460 - DNA, 25 bp, Homo sapien
cagaacagacgttatatccaaaggg

SEQ ID NO: 3935461 - DNA, 25 bp, Homo sapien
cgatggaataaggatgggagctact

SEQ ID NO: 3935462 - DNA, 25 bp, Homo sapien
tgaatgggaggtgctcagaacagac

SEQ ID NO: 3935463 - DNA, 25 bp, Homo sapien
caatctacattttaggatatgggcg

SEQ ID NO: 3935464 - DNA, 25 bp, Homo sapien
ggtggcacagcgaggcattcatgaa

SEQ ID NO: 3935465 - DNA, 25 bp, Homo sapien
caactagaatctgcaccttggagca

SEQ ID NO: 3935466 - DNA, 25 bp, Homo sapien
cctttctgcgtagtatgtgatcacc

SEQ ID NO: 3935467 - DNA, 25 bp, Homo sapien
cacttgaaatctgaccgtggctccc

SEQ ID NO: 3935468 - DNA, 25 bp, Homo sapien
tccaattgtgaatacttcctcaagc

SEQ ID NO: 3935469 - DNA, 25 bp, Homo sapien
agaacataacagaaggcgcccttct

SEQ ID NO: 3935470 - DNA, 25 bp, Homo sapien
aaagtcaagaaggactagacccagc

SEQ ID NO: 3935471 - DNA, 25 bp, Homo sapien
cacttttcttgtcattgacccaccc

SEQ ID NO: 3935472 - DNA, 25 bp, Homo sapien
gatgcactgtaagtaggccaccact

SEQ ID NO: 3935473 - DNA, 25 bp, Homo sapien
gctaagaggctatctgcgagcaaga

SEQ ID NO: 3935474 - DNA, 25 bp, Homo sapien
tctaaattgttaccggatgagctgg

SEQ ID NO: 3935475 - DNA, 25 bp, Homo sapien
aattccggttatccccatgatggca

SEQ ID NO: 3935476 - DNA, 25 bp, Homo sapien
ctccagttggcccttgttgagtggc

SEQ ID NO: 3935477 - DNA, 25 bp, Homo sapien
cccttgttgagtggcatctgagagg

SEQ ID NO: 3935478 - DNA, 25 bp, Homo sapien
gttggcccttgttgagtggcatctg

SEQ ID NO: 3935479 - DNA, 25 bp, Homo sapien
gccacagccaagctctccctagggc

SEQ ID NO: 3935480 - DNA, 25 bp, Homo sapien
tcagcctgaaatgggatataaagtc

SEQ ID NO: 3935481 - DNA, 25 bp, Homo sapien
agggtttggtgtcctactgtgacga

SEQ ID NO: 3935482 - DNA, 25 bp, Homo sapien
cttcctcgtctgactaaattaacag

SEQ ID NO: 3935483 - DNA, 25 bp, Homo sapien
ctggcagggcttgtaaggaaaagaa

SEQ ID NO: 3935484 - DNA, 25 bp, Homo sapien
cagtggatacttactgagccagtac

SEQ ID NO: 3935485 - DNA, 25 bp, Homo sapien
ggtctgtcctcctgaatagcatgca

SEQ ID NO: 3935486 - DNA, 25 bp, Homo sapien
gaggcagggcagttgtattccgaac

SEQ ID NO: 3935487 - DNA, 25 bp, Homo sapien
tctggtgacgcaaagagaagggacc

SEQ ID NO: 3935488 - DNA, 25 bp, Homo sapien
cactaacattgtcaggatagaagcc

SEQ ID NO: 3935489 - DNA, 25 bp, Homo sapien
cataagcctggcctggtaaatttca

SEQ ID NO: 3935490 - DNA, 25 bp, Homo sapien
tcacatgcaccaaacagtgtgctag

SEQ ID NO: 3935491 - DNA, 25 bp, Homo sapien
tcagagattaaaccaagccttttat

SEQ ID NO: 3935492 - DNA, 25 bp, Homo sapien
tacattgtcacaaaagcctgcccgg

SEQ ID NO: 3935493 - DNA, 25 bp, Homo sapien
tgcccttatggcatgaagaaactaa

SEQ ID NO: 3935494 - DNA, 25 bp, Homo sapien
tctatgaccgtgaaagatgagctcc

SEQ ID NO: 3935495 - DNA, 25 bp, Homo sapien
aagctcttacggtgtctcatactga

SEQ ID NO: 3935496 - DNA, 25 bp, Homo sapien
tctctgacaagtccaatgtgggatg

SEQ ID NO: 3935497 - DNA, 25 bp, Homo sapien
tcctctctgacaagtccaatgtggg

SEQ ID NO: 3935498 - DNA, 25 bp, Homo sapien
ctgtcctctctgacaagtccaatgt

SEQ ID NO: 3935499 - DNA, 25 bp, Homo sapien
tgacaagtccaatgtgggatgtcat

SEQ ID NO: 3935500 - DNA, 25 bp, Homo sapien
ccagctttttgttgtaaatggcact

SEQ ID NO: 3935501 - DNA, 25 bp, Homo sapien
agctttttgttgtaaatggcactga

SEQ ID NO: 3935502 - DNA, 25 bp, Homo sapien
ctttttgttgtaaatggcactgaca

SEQ ID NO: 3935503 - DNA, 25 bp, Homo sapien
taaaaggagccagctttttgttgta

SEQ ID NO: 3935504 - DNA, 25 bp, Homo sapien
agcagggacacatttaagtcctcat

SEQ ID NO: 3935505 - DNA, 25 bp, Homo sapien
cagcagggacacatttaagtcctca

SEQ ID NO: 3935506 - DNA, 25 bp, Homo sapien
gcagggacacatttaagtcctcatt

SEQ ID NO: 3935507 - DNA, 25 bp, Homo sapien
tcttagaagaatacccagcagtgga

SEQ ID NO: 3935508 - DNA, 25 bp, Homo sapien
tgttcccctggcaaaaagagagcaa

SEQ ID NO: 3935509 - DNA, 25 bp, Homo sapien
tataggtggcccatagacaaggcac

SEQ ID NO: 3935510 - DNA, 25 bp, Homo sapien
cagtcacttctacaggtccagcagg

SEQ ID NO: 3935511 - DNA, 25 bp, Homo sapien
ttatgatttctcaagctagggaaga

SEQ ID NO: 3935512 - DNA, 25 bp, Homo sapien
tcttagattccgctggtctcactgc

SEQ ID NO: 3935513 - DNA, 25 bp, Homo sapien
caagtgacaatgtttagcgagaaac

SEQ ID NO: 3935514 - DNA, 25 bp, Homo sapien
ctagggttgctaatggttgacttcc

SEQ ID NO: 3935515 - DNA, 25 bp, Homo sapien
tcttgacatgtgttctggacagcgg

SEQ ID NO: 3935516 - DNA, 25 bp, Homo sapien
acaagaatgttgtcgtccagctccc

SEQ ID NO: 3935517 - DNA, 25 bp, Homo sapien
tagaacgtctcttgcaccaacatga

SEQ ID NO: 3935518 - DNA, 25 bp, Homo sapien
gaccaccgttccaactagaggtaga

SEQ ID NO: 3935519 - DNA, 25 bp, Homo sapien
taactacagtttactcagcagggtg

SEQ ID NO: 3935520 - DNA, 25 bp, Homo sapien
tctttgtgaccctgtcagcctggag

SEQ ID NO: 3935521 - DNA, 25 bp, Homo sapien
aattggatcagcagcccttggccta

SEQ ID NO: 3935522 - DNA, 25 bp, Homo sapien
gtgggatgccatcaacaggacaccg

SEQ ID NO: 3935523 - DNA, 25 bp, Homo sapien
tcaggcacttgttctagcctggaga

SEQ ID NO: 3935524 - DNA, 25 bp, Homo sapien
cttgttctagcctggagatggtttc

SEQ ID NO: 3935525 - DNA, 25 bp, Homo sapien
tctatttcaggcacttgttctagcc

SEQ ID NO: 3935526 - DNA, 25 bp, Homo sapien
ccttctctatttcaggcacttgttc

SEQ ID NO: 3935527 - DNA, 25 bp, Homo sapien
catggaaacattgaaggcagaaacc

SEQ ID NO: 3935528 - DNA, 25 bp, Homo sapien
tgcccggcggcatgatgggatctcc

SEQ ID NO: 3935529 - DNA, 25 bp, Homo sapien
catagagttctcgtaaaccggtgcc

SEQ ID NO: 3935530 - DNA, 25 bp, Homo sapien
aataagaattagtcccgtcatcaga

SEQ ID NO: 3935531 - DNA, 25 bp, Homo sapien
tggaagctaggccatcgtcaccact

SEQ ID NO: 3935532 - DNA, 25 bp, Homo sapien
caaatacagggttgatagactggtg

SEQ ID NO: 3935533 - DNA, 25 bp, Homo sapien
gcctgtggacagtgtaaatttgaca

SEQ ID NO: 3935534 - DNA, 25 bp, Homo sapien
cacaagaagctacgggatggaagct

SEQ ID NO: 3935535 - DNA, 25 bp, Homo sapien
gcattgccaagctgctcagggtttc

SEQ ID NO: 3935536 - DNA, 25 bp, Homo sapien
tttggggtcagcattgccaagctgc

SEQ ID NO: 3935537 - DNA, 25 bp, Homo sapien
ggtcagcattgccaagctgctcagg

SEQ ID NO: 3935538 - DNA, 25 bp, Homo sapien
tcagcattgccaagctgctcagggt

SEQ ID NO: 3935539 - DNA, 25 bp, Homo sapien
tcagaatttgccagagccatattac

SEQ ID NO: 3935540 - DNA, 25 bp, Homo sapien
cctggcatgagagcactcgacttta

SEQ ID NO: 3935541 - DNA, 25 bp, Homo sapien
taatagtagtagaaggaaaacacca

SEQ ID NO: 3935542 - DNA, 25 bp, Homo sapien
gatgttaagtcagcgtcaagaccaa

SEQ ID NO: 3935543 - DNA, 25 bp, Homo sapien
caagttaatgatcagcctcagacgg

SEQ ID NO: 3935544 - DNA, 25 bp, Homo sapien
aacgctggcctcacaagtttgcggt

SEQ ID NO: 3935545 - DNA, 25 bp, Homo sapien
gatagcgtttctcacccacaaaaag

SEQ ID NO: 3935546 - DNA, 25 bp, Homo sapien
gagatacttaccgacgtgatgggaa

SEQ ID NO: 3935547 - DNA, 25 bp, Homo sapien
gctggcccggagaaaatgacttatc

SEQ ID NO: 3935548 - DNA, 25 bp, Homo sapien
taatcaacataggtgggaaggagcc

SEQ ID NO: 3935549 - DNA, 25 bp, Homo sapien
gaaaagacatttatggccaggccgg

SEQ ID NO: 3935550 - DNA, 25 bp, Homo sapien
tacccatggtaaaagcgttgcagcc

SEQ ID NO: 3935551 - DNA, 25 bp, Homo sapien
catagctttacagctgtcgaacgag

SEQ ID NO: 3935552 - DNA, 25 bp, Homo sapien
gggtctccatccatcataccccctg

SEQ ID NO: 3935553 - DNA, 25 bp, Homo sapien
cagtagaaagcgctgattaaaactt

SEQ ID NO: 3935554 - DNA, 25 bp, Homo sapien
gctgtcgaacgagcttcttgaaagc

SEQ ID NO: 3935555 - DNA, 25 bp, Homo sapien
aaaacaagatctcacttaggatatc

SEQ ID NO: 3935556 - DNA, 25 bp, Homo sapien
acgcccagcctatatgacaatttct

SEQ ID NO: 3935557 - DNA, 25 bp, Homo sapien
tgcccaatcgcattcatggtctgaa

SEQ ID NO: 3935558 - DNA, 25 bp, Homo sapien
gtctttctgcccaatcgcattcatg

SEQ ID NO: 3935559 - DNA, 25 bp, Homo sapien
tttctgcccaatcgcattcatggtc

SEQ ID NO: 3935560 - DNA, 25 bp, Homo sapien
tcacagtctttctgcccaatcgcat

SEQ ID NO: 3935561 - DNA, 25 bp, Homo sapien
taaggtcaccaggataaacagtgga

SEQ ID NO: 3935562 - DNA, 25 bp, Homo sapien
tctcgcagtcaagaatggtgcctgg

SEQ ID NO: 3935563 - DNA, 25 bp, Homo sapien
ccctgaagctcggactaaatggata

SEQ ID NO: 3935564 - DNA, 25 bp, Homo sapien
gaacagttattgatggtctgctcca

SEQ ID NO: 3935565 - DNA, 25 bp, Homo sapien
acttaagcaaaaggaatggctagga

SEQ ID NO: 3935566 - DNA, 25 bp, Homo sapien
tcaaggatacacaggcaaattcccc

SEQ ID NO: 3935567 - DNA, 25 bp, Homo sapien
gagaaatccctacttaatctgcctt

SEQ ID NO: 3935568 - DNA, 25 bp, Homo sapien
ccacgctggagcaatgaaacgaaac

SEQ ID NO: 3935569 - DNA, 25 bp, Homo sapien
gtccacgcgggtctttagtcgccat

SEQ ID NO: 3935570 - DNA, 25 bp, Homo sapien
cttcctaaacgctcttcctgaaatc

SEQ ID NO: 3935571 - DNA, 25 bp, Homo sapien
ttcaaagctgccttcctaaacgctc

SEQ ID NO: 3935572 - DNA, 25 bp, Homo sapien
gctgcagcatgcagtccacgcgggt

SEQ ID NO: 3935573 - DNA, 25 bp, Homo sapien
gcgcttggtcggcacctcttgaaaa

SEQ ID NO: 3935574 - DNA, 25 bp, Homo sapien
ggaggtcagcaattccagcgcttgg

SEQ ID NO: 3935575 - DNA, 25 bp, Homo sapien
ccaggaacatttcgaggacagcatt

SEQ ID NO: 3935576 - DNA, 25 bp, Homo sapien
ctcttgaaaacggtgccaggaacat

SEQ ID NO: 3935577 - DNA, 25 bp, Homo sapien
gggcttgggaccagcctgagtcatc

SEQ ID NO: 3935578 - DNA, 25 bp, Homo sapien
gggaccagcctgagtcatctctctt

SEQ ID NO: 3935579 - DNA, 25 bp, Homo sapien
cttgtctgtttgttctacaggaggg

SEQ ID NO: 3935580 - DNA, 25 bp, Homo sapien
catctctcttctgggaaggtccctc

SEQ ID NO: 3935581 - DNA, 25 bp, Homo sapien
tcctgaccttgtgatctgcccacct

SEQ ID NO: 3935582 - DNA, 25 bp, Homo sapien
accatgtcaggctaatttctttttc

SEQ ID NO: 3935583 - DNA, 25 bp, Homo sapien
tgtcaggctaatttctttttctatt

SEQ ID NO: 3935584 - DNA, 25 bp, Homo sapien
catgtcaggctaatttctttttcta

SEQ ID NO: 3935585 - DNA, 25 bp, Homo sapien
tccaagggttgaaggcccaggtcaa

SEQ ID NO: 3935586 - DNA, 25 bp, Homo sapien
ccaggtcaaaggtacagagggcata

SEQ ID NO: 3935587 - DNA, 25 bp, Homo sapien
gtccatggaccaccattctccggtt

SEQ ID NO: 3935588 - DNA, 25 bp, Homo sapien
ccactgtgttggcagaacttcagca

SEQ ID NO: 3935589 - DNA, 25 bp, Homo sapien
caaaaggttcagagtcattccagat

SEQ ID NO: 3935590 - DNA, 25 bp, Homo sapien
gagatcatgcaaagcttgggttagt

SEQ ID NO: 3935591 - DNA, 25 bp, Homo sapien
tccagataagtccagggaaaactcg

SEQ ID NO: 3935592 - DNA, 25 bp, Homo sapien
gaaaactcgcttgggatggaccact

SEQ ID NO: 3935593 - DNA, 25 bp, Homo sapien
agagctctagagagtaagaagtctt

SEQ ID NO: 3935594 - DNA, 25 bp, Homo sapien
aagagctctagagagtaagaagtct

SEQ ID NO: 3935595 - DNA, 25 bp, Homo sapien
gagctctagagagtaagaagtctta

SEQ ID NO: 3935596 - DNA, 25 bp, Homo sapien
agctctagagagtaagaagtcttac

SEQ ID NO: 3935597 - DNA, 25 bp, Homo sapien
ccagggtgtaccagccagaaatttg

SEQ ID NO: 3935598 - DNA, 25 bp, Homo sapien
tacgttgctttccaaaccaagagga

SEQ ID NO: 3935599 - DNA, 25 bp, Homo sapien
aatttgagacgtcctggaattctga

SEQ ID NO: 3935600 - DNA, 25 bp, Homo sapien
gttttaataggttgcctcagctgct

SEQ ID NO: 3935601 - DNA, 25 bp, Homo sapien
gtggtgatcttagccctgctgctgg

SEQ ID NO: 3935602 - DNA, 25 bp, Homo sapien
ggtctgagtggtgatcttagccctg

SEQ ID NO: 3935603 - DNA, 25 bp, Homo sapien
cttgggaaagtgacctatctcccca

SEQ ID NO: 3935604 - DNA, 25 bp, Homo sapien
tctccccataggacggtgaggacag

SEQ ID NO: 3935605 - DNA, 25 bp, Homo sapien
tccaggccattgacggggccacaca

SEQ ID NO: 3935606 - DNA, 25 bp, Homo sapien
gagtggagccatcgccctctatttt

SEQ ID NO: 3935607 - DNA, 25 bp, Homo sapien
cctgcaatcgcacaccctgctactt

SEQ ID NO: 3935608 - DNA, 25 bp, Homo sapien
gattttttcagctgcgtccaggcca

SEQ ID NO: 3935609 - DNA, 25 bp, Homo sapien
ctctttcgggacatcggggagccat

SEQ ID NO: 3935610 - DNA, 25 bp, Homo sapien
gtgctctttcgggacatcggggagc

SEQ ID NO: 3935611 - DNA, 25 bp, Homo sapien
aagctgtgctctttcgggacatcgg

SEQ ID NO: 3935612 - DNA, 25 bp, Homo sapien
agctgtgctctttcgggacatcggg

SEQ ID NO: 3935613 - DNA, 25 bp, Homo sapien
cacatgctcgaatctccgcaaaagc

SEQ ID NO: 3935614 - DNA, 25 bp, Homo sapien
aaagcaattggatgggtgacccgcc

SEQ ID NO: 3935615 - DNA, 25 bp, Homo sapien
attgtgacttgcattccccacatgc

SEQ ID NO: 3935616 - DNA, 25 bp, Homo sapien
cagcagtgcagtcctaggaggtctc

SEQ ID NO: 3935617 - DNA, 25 bp, Homo sapien
ataagcggaaagactggtttggtca

SEQ ID NO: 3935618 - DNA, 25 bp, Homo sapien
ttgtgtaaataagcggaaagactgg

SEQ ID NO: 3935619 - DNA, 25 bp, Homo sapien
cggaaagactggtttggtcattttg

SEQ ID NO: 3935620 - DNA, 25 bp, Homo sapien
tcattgtgtaaataagcggaaagac

SEQ ID NO: 3935621 - DNA, 25 bp, Homo sapien
caggcctgcaacatgtctgcagagt

SEQ ID NO: 3935622 - DNA, 25 bp, Homo sapien
cagagtggagacatgccatcactgc

SEQ ID NO: 3935623 - DNA, 25 bp, Homo sapien
tttccaggcctgcaacatgtctgca

SEQ ID NO: 3935624 - DNA, 25 bp, Homo sapien
tggagacatgccatcactgcatctc

SEQ ID NO: 3935625 - DNA, 25 bp, Homo sapien
gaatcttgtcttgcactgagctccc

SEQ ID NO: 3935626 - DNA, 25 bp, Homo sapien
atatggcccgcatgactctcaacgc

SEQ ID NO: 3935627 - DNA, 25 bp, Homo sapien
tgctaccgcagttcttacgccagaa

SEQ ID NO: 3935628 - DNA, 25 bp, Homo sapien
ggctcactgccaattctgtggacca

SEQ ID NO: 3935629 - DNA, 25 bp, Homo sapien
cttgcactataataagaagagacaa

SEQ ID NO: 3935630 - DNA, 25 bp, Homo sapien
cggtactgggtagaaccgcagtcct

SEQ ID NO: 3935631 - DNA, 25 bp, Homo sapien
tactgggtagaaccgcagtcctgaa

SEQ ID NO: 3935632 - DNA, 25 bp, Homo sapien
tgggtagaaccgcagtcctgaattc

SEQ ID NO: 3935633 - DNA, 25 bp, Homo sapien
tagaaccgcagtcctgaattccact

SEQ ID NO: 3935634 - DNA, 25 bp, Homo sapien
ttccatgggcccaggcctcttaacc

SEQ ID NO: 3935635 - DNA, 25 bp, Homo sapien
cccttccatgggcccaggcctctta

SEQ ID NO: 3935636 - DNA, 25 bp, Homo sapien
cttccatgggcccaggcctcttaac

SEQ ID NO: 3935637 - DNA, 25 bp, Homo sapien
tccatgggcccaggcctcttaaccc

SEQ ID NO: 3935638 - DNA, 25 bp, Homo sapien
tggacctcaataagaggttttgaag

SEQ ID NO: 3935639 - DNA, 25 bp, Homo sapien
gggacacactctctgccgtcaatga

SEQ ID NO: 3935640 - DNA, 25 bp, Homo sapien
tgagctgggcattgaggcaacagtg

SEQ ID NO: 3935641 - DNA, 25 bp, Homo sapien
gcttggcacagaggtggacctcaat

SEQ ID NO: 3935642 - DNA, 25 bp, Homo sapien
gctctagcatatggccctgatctct

SEQ ID NO: 3935643 - DNA, 25 bp, Homo sapien
tcaatatagtcttcaactgtcactt

SEQ ID NO: 3935644 - DNA, 25 bp, Homo sapien
tcctgtgggccaaaattcaatatag

SEQ ID NO: 3935645 - DNA, 25 bp, Homo sapien
attgcagctctagcatatggccctg

SEQ ID NO: 3935646 - DNA, 25 bp, Homo sapien
aatgctcctctcaacggatttcact

SEQ ID NO: 3935647 - DNA, 25 bp, Homo sapien
ttcactgacgttgttgtatgtgcag

SEQ ID NO: 3935648 - DNA, 25 bp, Homo sapien
tgcctcaagtctgacctgagtgctg

SEQ ID NO: 3935649 - DNA, 25 bp, Homo sapien
gacctgagtgctgcggcacacctga

SEQ ID NO: 3935650 - DNA, 25 bp, Homo sapien
ctgaagcattcacatttgtgggtgt

SEQ ID NO: 3935651 - DNA, 25 bp, Homo sapien
ccaaacacaggcgacatccctatgt

SEQ ID NO: 3935652 - DNA, 25 bp, Homo sapien
tatgtctacaatgagccactggctg

SEQ ID NO: 3935653 - DNA, 25 bp, Homo sapien
ccactggctgttgacaagttcaggc

SEQ ID NO: 3935654 - DNA, 25 bp, Homo sapien
gagtcaatactacgggttctcacaa

SEQ ID NO: 3935655 - DNA, 25 bp, Homo sapien
tgagcctgcagtctatccgacaaat

SEQ ID NO: 3935656 - DNA, 25 bp, Homo sapien
ttggtcatggaaaggctcctaggcc

SEQ ID NO: 3935657 - DNA, 25 bp, Homo sapien
agacactggccttcctatcacactg

SEQ ID NO: 3935658 - DNA, 25 bp, Homo sapien
catgcggaccatgcactgtgccata

SEQ ID NO: 3935659 - DNA, 25 bp, Homo sapien
tgcagaccacgcactgtgccacgca

SEQ ID NO: 3935660 - DNA, 25 bp, Homo sapien
tgcatgtatgaatcatgtccatgtg

SEQ ID NO: 3935661 - DNA, 25 bp, Homo sapien
catgtccatgtgctgtgccatgcag

SEQ ID NO: 3935662 - DNA, 25 bp, Homo sapien
tgaacctctcaacagggtccttggg

SEQ ID NO: 3935663 - DNA, 25 bp, Homo sapien
tatacgccaggtctctaatggagga

SEQ ID NO: 3935664 - DNA, 25 bp, Homo sapien
gaaacaatctgtgctatctccaata

SEQ ID NO: 3935665 - DNA, 25 bp, Homo sapien
tgcactttgcaaatggctcggatcc

SEQ ID NO: 3935666 - DNA, 25 bp, Homo sapien
gaataaagcatatggctcacactgg

SEQ ID NO: 3935667 - DNA, 25 bp, Homo sapien
caagacttcctggtacatgaaccaa

SEQ ID NO: 3935668 - DNA, 25 bp, Homo sapien
taagcaaaacagagaccaccatagc

SEQ ID NO: 3935669 - DNA, 25 bp, Homo sapien
gaccacagcgattgctcaggaataa

SEQ ID NO: 3935670 - DNA, 25 bp, Homo sapien
caatcacaccctttggataaatgca

SEQ ID NO: 3935671 - DNA, 25 bp, Homo sapien
ggaccactggggacctttatcttca

SEQ ID NO: 3935672 - DNA, 25 bp, Homo sapien
caccctttggataaatgcagtgcag

SEQ ID NO: 3935673 - DNA, 25 bp, Homo sapien
tcacaccctttggataaatgcagtg

SEQ ID NO: 3935674 - DNA, 25 bp, Homo sapien
ggcacctggcaaagtggacacagga

SEQ ID NO: 3935675 - DNA, 25 bp, Homo sapien
ttcagtgtaactcagggaaatgacc

SEQ ID NO: 3935676 - DNA, 25 bp, Homo sapien
cagttgtagcatccaaatcttcagg

SEQ ID NO: 3935677 - DNA, 25 bp, Homo sapien
tcctcgtccttggaaacggagctgg

SEQ ID NO: 3935678 - DNA, 25 bp, Homo sapien
taagtgcactgtacctcctgaccat

SEQ ID NO: 3935679 - DNA, 25 bp, Homo sapien
tctgctccgtgtgggtaagtgcact

SEQ ID NO: 3935680 - DNA, 25 bp, Homo sapien
cttgcagtcaaaaggagtctcttgc

SEQ ID NO: 3935681 - DNA, 25 bp, Homo sapien
tgtacttaaataaccatggcgctgt

SEQ ID NO: 3935682 - DNA, 25 bp, Homo sapien
ccactgggactaccatggatacaga

SEQ ID NO: 3935683 - DNA, 25 bp, Homo sapien
caccggaatcatgttgtaagcagca

SEQ ID NO: 3935684 - DNA, 25 bp, Homo sapien
gatacagaagggacatgacgagacc

SEQ ID NO: 3935685 - DNA, 25 bp, Homo sapien
cccacagggctgattcactgtttaa

SEQ ID NO: 3935686 - DNA, 25 bp, Homo sapien
ctgggacctggatttaacatggact

SEQ ID NO: 3935687 - DNA, 25 bp, Homo sapien
gcttgctgtctcattgccaaaagtg

SEQ ID NO: 3935688 - DNA, 25 bp, Homo sapien
tagttcagggtgactcctaagcaca

SEQ ID NO: 3935689 - DNA, 25 bp, Homo sapien
gatttaacatggactccaaattcca

SEQ ID NO: 3935690 - DNA, 25 bp, Homo sapien
taaatggtactccaatgccaccctt

SEQ ID NO: 3935691 - DNA, 25 bp, Homo sapien
atggtactccaatgccacccttcag

SEQ ID NO: 3935692 - DNA, 25 bp, Homo sapien
tttaaatggtactccaatgccaccc

SEQ ID NO: 3935693 - DNA, 25 bp, Homo sapien
tctttaaatggtactccaatgccac

SEQ ID NO: 3935694 - DNA, 25 bp, Homo sapien
tctatcttctgtcacggtagaaaaa

SEQ ID NO: 3935695 - DNA, 25 bp, Homo sapien
cacaaggcaagatccatcttccagg

SEQ ID NO: 3935696 - DNA, 25 bp, Homo sapien
tgtcacggtagaaaaacatccacaa

SEQ ID NO: 3935697 - DNA, 25 bp, Homo sapien
acaaggcaagatccatcttccaggg

SEQ ID NO: 3935698 - DNA, 25 bp, Homo sapien
cagcaaagctggttgacacggccaa

SEQ ID NO: 3935699 - DNA, 25 bp, Homo sapien
tctctttggaggaagtagcattcac

SEQ ID NO: 3935700 - DNA, 25 bp, Homo sapien
gccatgcggtactgccaagcgtttt

SEQ ID NO: 3935701 - DNA, 25 bp, Homo sapien
tagcattcacgggtactggctcgcc

SEQ ID NO: 3935702 - DNA, 25 bp, Homo sapien
ccgtgaaacgcccagaatctgagca

SEQ ID NO: 3935703 - DNA, 25 bp, Homo sapien
gcaggcatcacttcgcaccagtata

SEQ ID NO: 3935704 - DNA, 25 bp, Homo sapien
ggatcgcaatgctgacctgagctca

SEQ ID NO: 3935705 - DNA, 25 bp, Homo sapien
tataaacaggagttggcgtggaccg

SEQ ID NO: 3935706 - DNA, 25 bp, Homo sapien
gcccccatgataggtacagtcttgt

SEQ ID NO: 3935707 - DNA, 25 bp, Homo sapien
ggtcgaagcccccatgataggtaca

SEQ ID NO: 3935708 - DNA, 25 bp, Homo sapien
ccttcccagatgaggtcgaagcccc

SEQ ID NO: 3935709 - DNA, 25 bp, Homo sapien
agatgaggtcgaagcccccatgata

SEQ ID NO: 3935710 - DNA, 25 bp, Homo sapien
agcagcccagtctgccacgggccat

SEQ ID NO: 3935711 - DNA, 25 bp, Homo sapien
aacagcagcccagtctgccacgggc

SEQ ID NO: 3935712 - DNA, 25 bp, Homo sapien
acagcagcccagtctgccacgggcc

SEQ ID NO: 3935713 - DNA, 25 bp, Homo sapien
aaacagcagcccagtctgccacggg

SEQ ID NO: 3935714 - DNA, 25 bp, Homo sapien
gaggacaggcgtatgcattttattt

SEQ ID NO: 3935715 - DNA, 25 bp, Homo sapien
tcagagcgcatgaggacaggcgtat

SEQ ID NO: 3935716 - DNA, 25 bp, Homo sapien
cagcctgctggcagatcagagcgca

SEQ ID NO: 3935717 - DNA, 25 bp, Homo sapien
tggcagatcagagcgcatgaggaca

SEQ ID NO: 3935718 - DNA, 25 bp, Homo sapien
gcacaggacctaacccttggtgagt

SEQ ID NO: 3935719 - DNA, 25 bp, Homo sapien
tgtcccggtggaagacagtacactg

SEQ ID NO: 3935720 - DNA, 25 bp, Homo sapien
ttgctgtccctgttgcacacgcctg

SEQ ID NO: 3935721 - DNA, 25 bp, Homo sapien
cacgcctgagctttgagtgacttca

SEQ ID NO: 3935722 - DNA, 25 bp, Homo sapien
ggtgttcttgtcgctggacccggaa

SEQ ID NO: 3935723 - DNA, 25 bp, Homo sapien
tgttcttgtcgctggacccggaaac

SEQ ID NO: 3935724 - DNA, 25 bp, Homo sapien
tcgctggacccggaaaccaaatgaa

SEQ ID NO: 3935725 - DNA, 25 bp, Homo sapien
tcttgtcgctggacccggaaaccaa

SEQ ID NO: 3935726 - DNA, 25 bp, Homo sapien
gctgccagtagatcctttctttctg

SEQ ID NO: 3935727 - DNA, 25 bp, Homo sapien
taagcagcagtttcattccaaagga

SEQ ID NO: 3935728 - DNA, 25 bp, Homo sapien
gaaagaacccctaatgatttcattg

SEQ ID NO: 3935729 - DNA, 25 bp, Homo sapien
accgcatctcatcagtgggagaaaa

SEQ ID NO: 3935730 - DNA, 25 bp, Homo sapien
tcttgaaggccatgatacctctgcc

SEQ ID NO: 3935731 - DNA, 25 bp, Homo sapien
ttttatcagaacacggccatgcaca

SEQ ID NO: 3935732 - DNA, 25 bp, Homo sapien
tgtgacagacgtcatagggcctgca

SEQ ID NO: 3935733 - DNA, 25 bp, Homo sapien
aaatccttttgctcataggtccgag

SEQ ID NO: 3935734 - DNA, 25 bp, Homo sapien
tgtgtgtgtagtagacggcaccatc

SEQ ID NO: 3935735 - DNA, 25 bp, Homo sapien
taggctaagaccaagaggctagacc

SEQ ID NO: 3935736 - DNA, 25 bp, Homo sapien
cacacgttgcatagctttgtaggct

SEQ ID NO: 3935737 - DNA, 25 bp, Homo sapien
agtacgcagcccaatcacacgttgc

SEQ ID NO: 3935738 - DNA, 25 bp, Homo sapien
gaaccgcattcccttgctcaacaag

SEQ ID NO: 3935739 - DNA, 25 bp, Homo sapien
ctggcggtgcttcatttacatcagc

SEQ ID NO: 3935740 - DNA, 25 bp, Homo sapien
gagccaccactaaatcgaacccaaa

SEQ ID NO: 3935741 - DNA, 25 bp, Homo sapien
cttaactcaggcctttatggacagc

SEQ ID NO: 3935742 - DNA, 25 bp, Homo sapien
cgcgtgaaaactcaaagacgtggaa

SEQ ID NO: 3935743 - DNA, 25 bp, Homo sapien
gaaacatccagtttccgcgtgaaaa

SEQ ID NO: 3935744 - DNA, 25 bp, Homo sapien
ccagtttccgcgtgaaaactcaaag

SEQ ID NO: 3935745 - DNA, 25 bp, Homo sapien
ggatgtaagaaacatccagtttccg

SEQ ID NO: 3935746 - DNA, 25 bp, Homo sapien
aatggctgatgtgcgtctcttcccc

SEQ ID NO: 3935747 - DNA, 25 bp, Homo sapien
tcttaatggctgatgtgcgtctctt

SEQ ID NO: 3935748 - DNA, 25 bp, Homo sapien
ttaatggctgatgtgcgtctcttcc

SEQ ID NO: 3935749 - DNA, 25 bp, Homo sapien
ttttcttaatggctgatgtgcgtct

SEQ ID NO: 3935750 - DNA, 25 bp, Homo sapien
tctaatgcgtttcactttgcaaacc

SEQ ID NO: 3935751 - DNA, 25 bp, Homo sapien
gaagatgtctaatgcgtttcacttt

SEQ ID NO: 3935752 - DNA, 25 bp, Homo sapien
gatgtctaatgcgtttcactttgca

SEQ ID NO: 3935753 - DNA, 25 bp, Homo sapien
acttgaagatgtctaatgcgtttca

SEQ ID NO: 3935754 - DNA, 25 bp, Homo sapien
tgggaataaccacgtgcatgaggaa

SEQ ID NO: 3935755 - DNA, 25 bp, Homo sapien
tatcttcaggagacaattcactgga

SEQ ID NO: 3935756 - DNA, 25 bp, Homo sapien
gaactggcagatattggagcctggt

SEQ ID NO: 3935757 - DNA, 25 bp, Homo sapien
aattaattgttgaggagggaagccg

SEQ ID NO: 3935758 - DNA, 25 bp, Homo sapien
tccagggacacatgaatagaagcaa

SEQ ID NO: 3935759 - DNA, 25 bp, Homo sapien
tgacgcatcacttaaaatccaggga

SEQ ID NO: 3935760 - DNA, 25 bp, Homo sapien
gagagcctgtcccattacatcactg

SEQ ID NO: 3935761 - DNA, 25 bp, Homo sapien
ttcagctgcaagtaggcaaagtcag

SEQ ID NO: 3935762 - DNA, 25 bp, Homo sapien
tagggcctcaaatgggatgacttcc

SEQ ID NO: 3935763 - DNA, 25 bp, Homo sapien
gcttccttcaacatggcagtctcag

SEQ ID NO: 3935764 - DNA, 25 bp, Homo sapien
gcagtctcagggtagtcaggcattt

SEQ ID NO: 3935765 - DNA, 25 bp, Homo sapien
tcaagcaaacgaataagtgcagcct

SEQ ID NO: 3935766 - DNA, 25 bp, Homo sapien
ttttacaagctgagctgtgctaagc

SEQ ID NO: 3935767 - DNA, 25 bp, Homo sapien
tagaagattaggcaacagatcagag

SEQ ID NO: 3935768 - DNA, 25 bp, Homo sapien
gagcaaagcttagtcctcaacatct

SEQ ID NO: 3935769 - DNA, 25 bp, Homo sapien
taaagccttctatttcatggaaagt

SEQ ID NO: 3935770 - DNA, 25 bp, Homo sapien
cctgtttgatcttattactttggca

SEQ ID NO: 3935771 - DNA, 25 bp, Homo sapien
ttcggatgtttgtcaaaacgcaggg

SEQ ID NO: 3935772 - DNA, 25 bp, Homo sapien
tccatgccctgttccacgctgaaat

SEQ ID NO: 3935773 - DNA, 25 bp, Homo sapien
ttaatccacacattgtcgggaccgg

SEQ ID NO: 3935774 - DNA, 25 bp, Homo sapien
tctagtgcaccaattcgaagaagtc

SEQ ID NO: 3935775 - DNA, 25 bp, Homo sapien
gcttaggcgactggaaaacatttct

SEQ ID NO: 3935776 - DNA, 25 bp, Homo sapien
ctatgaagttttgcaaggtctgggc

SEQ ID NO: 3935777 - DNA, 25 bp, Homo sapien
taaagattgccaccttagcagggcg

SEQ ID NO: 3935778 - DNA, 25 bp, Homo sapien
aagtgtatctgggttattacctgcc

SEQ ID NO: 3935779 - DNA, 25 bp, Homo sapien
catttatgttgacctgcctagtaga

SEQ ID NO: 3935780 - DNA, 25 bp, Homo sapien
gaagcagaaatgcactctaggagaa

SEQ ID NO: 3935781 - DNA, 25 bp, Homo sapien
aggagaaaataccacccactgggag

SEQ ID NO: 3935782 - DNA, 25 bp, Homo sapien
tgttgcgtcttctggaaagcacggc

SEQ ID NO: 3935783 - DNA, 25 bp, Homo sapien
aaagcacggcgtgttctgtggacat

SEQ ID NO: 3935784 - DNA, 25 bp, Homo sapien
gataagaagcaaattcccaggaccc

SEQ ID NO: 3935785 - DNA, 25 bp, Homo sapien
taaatccttctataacctgcgaacg

SEQ ID NO: 3935786 - DNA, 25 bp, Homo sapien
gtcacacagtggagctatgatcctg

SEQ ID NO: 3935787 - DNA, 25 bp, Homo sapien
ccaagagtttgaggtcacacagtgg

SEQ ID NO: 3935788 - DNA, 25 bp, Homo sapien
ggctggagagttgcttgaggcagga

SEQ ID NO: 3935789 - DNA, 25 bp, Homo sapien
gaggctggagagttgcttgaggcag

SEQ ID NO: 3935790 - DNA, 25 bp, Homo sapien
caacacccagctgataaaaggcaga

SEQ ID NO: 3935791 - DNA, 25 bp, Homo sapien
tcacaaaagtcagctaacttgccca

SEQ ID NO: 3935792 - DNA, 25 bp, Homo sapien
tcaaactgggtactggcagactcca

SEQ ID NO: 3935793 - DNA, 25 bp, Homo sapien
catcccgaagcaaaacatcccatat

SEQ ID NO: 3935794 - DNA, 25 bp, Homo sapien
aaatacttgctgagaacctactatg

SEQ ID NO: 3935795 - DNA, 25 bp, Homo sapien
gggtgttaagggtacaaatgatctc

SEQ ID NO: 3935796 - DNA, 25 bp, Homo sapien
gaagaagaattaaggccttgtgcca

SEQ ID NO: 3935797 - DNA, 25 bp, Homo sapien
tctgctggtcgattacatctacaaa

SEQ ID NO: 3935798 - DNA, 25 bp, Homo sapien
cttttaagaccatttgccgagcgct

SEQ ID NO: 3935799 - DNA, 25 bp, Homo sapien
gaattgacaacaggaagcttcaccc

SEQ ID NO: 3935800 - DNA, 25 bp, Homo sapien
tgcatttccatgcaagcgcggatgc

SEQ ID NO: 3935801 - DNA, 25 bp, Homo sapien
tctgcaccgtttgaccagttctggg

SEQ ID NO: 3935802 - DNA, 25 bp, Homo sapien
tgctcctgtggatagcatatcttta

SEQ ID NO: 3935803 - DNA, 25 bp, Homo sapien
tgccacatctggtgagtccctactg

SEQ ID NO: 3935804 - DNA, 25 bp, Homo sapien
ggtgagtccctactgtgggcctgca

SEQ ID NO: 3935805 - DNA, 25 bp, Homo sapien
gcatatctttaaggcatctatggac

SEQ ID NO: 3935806 - DNA, 25 bp, Homo sapien
tgtgatccaccaaacccatactgca

SEQ ID NO: 3935807 - DNA, 25 bp, Homo sapien
tcttatctgaatccctgtgtgatcc

SEQ ID NO: 3935808 - DNA, 25 bp, Homo sapien
ggatagaaggatctgaaccctctta

SEQ ID NO: 3935809 - DNA, 25 bp, Homo sapien
tggtcatcggcatctgagagtccct

SEQ ID NO: 3935810 - DNA, 25 bp, Homo sapien
taaaagactatccatgatgcatcca

SEQ ID NO: 3935811 - DNA, 25 bp, Homo sapien
gatgcatccactcagcatgttagaa

SEQ ID NO: 3935812 - DNA, 25 bp, Homo sapien
actcagctggaaacaaaaggctttg

SEQ ID NO: 3935813 - DNA, 25 bp, Homo sapien
tgtagtggcatgacccaagttgcct

SEQ ID NO: 3935814 - DNA, 25 bp, Homo sapien
caagggccagttcttcagggtatct

SEQ ID NO: 3935815 - DNA, 25 bp, Homo sapien
actgtgagagctaagagtgaagccc

SEQ ID NO: 3935816 - DNA, 25 bp, Homo sapien
caaaatgtctaaaggaatggccagg

SEQ ID NO: 3935817 - DNA, 25 bp, Homo sapien
gccattcttctacaacaagggccag

SEQ ID NO: 3935818 - DNA, 25 bp, Homo sapien
aataaaactagattgagcatgcgtt

SEQ ID NO: 3935819 - DNA, 25 bp, Homo sapien
ttaatactgcctgctatctttcccc

SEQ ID NO: 3935820 - DNA, 25 bp, Homo sapien
tagcatgaggagaattcgcactcca

SEQ ID NO: 3935821 - DNA, 25 bp, Homo sapien
tccacaaatttttctcgactgagta

SEQ ID NO: 3935822 - DNA, 25 bp, Homo sapien
gtcctgataacagcgctgatgcctg

SEQ ID NO: 3935823 - DNA, 25 bp, Homo sapien
tttggtgtcagccggaggtctccac

SEQ ID NO: 3935824 - DNA, 25 bp, Homo sapien
cattcttgctctggacgcctgtcac

SEQ ID NO: 3935825 - DNA, 25 bp, Homo sapien
ctgtcacttggcctgatagaaggtc

SEQ ID NO: 3935826 - DNA, 25 bp, Homo sapien
atgctttgactagccgagcttggcc

SEQ ID NO: 3935827 - DNA, 25 bp, Homo sapien
ctgtgacaaagtaatgctttgacta

SEQ ID NO: 3935828 - DNA, 25 bp, Homo sapien
gtgacaaagtaatgctttgactagc

SEQ ID NO: 3935829 - DNA, 25 bp, Homo sapien
gactagccgagcttggcctgtgctt

SEQ ID NO: 3935830 - DNA, 25 bp, Homo sapien
ctgttcccggttcggcgaccgagtg

SEQ ID NO: 3935831 - DNA, 25 bp, Homo sapien
agactgagttataaccctgttcccg

SEQ ID NO: 3935832 - DNA, 25 bp, Homo sapien
gaccgagtgagggatgtaatttgtt

SEQ ID NO: 3935833 - DNA, 25 bp, Homo sapien
gtaatttgttcaggctgactcggag

SEQ ID NO: 3935834 - DNA, 25 bp, Homo sapien
ttggttatgaaggtaatagaagagg

SEQ ID NO: 3935835 - DNA, 25 bp, Homo sapien
tgaaaatgtctgagagggctggtaa

SEQ ID NO: 3935836 - DNA, 25 bp, Homo sapien
gttgattagtatgaccttggttatg

SEQ ID NO: 3935837 - DNA, 25 bp, Homo sapien
ttgagttgattagtatgaccttggt

SEQ ID NO: 3935838 - DNA, 25 bp, Homo sapien
gatatgtcctataattgaaagccat

SEQ ID NO: 3935839 - DNA, 25 bp, Homo sapien
cactattaagagagtatgtaatcat

SEQ ID NO: 3935840 - DNA, 25 bp, Homo sapien
aatggagagagctaataatggaaag

SEQ ID NO: 3935841 - DNA, 25 bp, Homo sapien
taaataacaactatagtgctacact

SEQ ID NO: 3935842 - DNA, 25 bp, Homo sapien
ccttgggtggctggactcaacactg

SEQ ID NO: 3935843 - DNA, 25 bp, Homo sapien
gagcatttgtaagcccactgtgaaa

SEQ ID NO: 3935844 - DNA, 25 bp, Homo sapien
tgtgaaatcagcacccactgttagg

SEQ ID NO: 3935845 - DNA, 25 bp, Homo sapien
aacactgagatactcttgaagagca

SEQ ID NO: 3935846 - DNA, 25 bp, Homo sapien
gcttcctgcacgaaagcagctgcat

SEQ ID NO: 3935847 - DNA, 25 bp, Homo sapien
taatacattcctacgtgccaagtgc

SEQ ID NO: 3935848 - DNA, 25 bp, Homo sapien
tgagatcaccagattccgagggagg

SEQ ID NO: 3935849 - DNA, 25 bp, Homo sapien
tgccaagtgccatgcaaagctgtgg

SEQ ID NO: 3935850 - DNA, 25 bp, Homo sapien
ttcctctgtgagttcataaccagaa

SEQ ID NO: 3935851 - DNA, 25 bp, Homo sapien
tgtgagttcataaccagaacctttc

SEQ ID NO: 3935852 - DNA, 25 bp, Homo sapien
tgagttcataaccagaacctttctt

SEQ ID NO: 3935853 - DNA, 25 bp, Homo sapien
tctgtgagttcataaccagaacctt

SEQ ID NO: 3935854 - DNA, 25 bp, Homo sapien
gctgaaggtccctcggttcaaactg

SEQ ID NO: 3935855 - DNA, 25 bp, Homo sapien
ctgaaggtccctcggttcaaactgg

SEQ ID NO: 3935856 - DNA, 25 bp, Homo sapien
gtgagcagagataaccctggggcct

SEQ ID NO: 3935857 - DNA, 25 bp, Homo sapien
agctgaaggtccctcggttcaaact

SEQ ID NO: 3935858 - DNA, 25 bp, Homo sapien
caaattgctcttcgtgcaaaggagg

SEQ ID NO: 3935859 - DNA, 25 bp, Homo sapien
cagttgcaattggaactctctgccc

SEQ ID NO: 3935860 - DNA, 25 bp, Homo sapien
ggcatttgtggatcatctggcagca

SEQ ID NO: 3935861 - DNA, 25 bp, Homo sapien
ggcagtctcacaacaagccagttgc

SEQ ID NO: 3935862 - DNA, 25 bp, Homo sapien
acctgagaggctgtctcattagaac

SEQ ID NO: 3935863 - DNA, 25 bp, Homo sapien
cattagaactaagagaaggtattgt

SEQ ID NO: 3935864 - DNA, 25 bp, Homo sapien
atccatggaagaattccctgggcat

SEQ ID NO: 3935865 - DNA, 25 bp, Homo sapien
tgatgatgtcttatatccatggaag

SEQ ID NO: 3935866 - DNA, 25 bp, Homo sapien
ttttccatgaaacgagtgaagccct

SEQ ID NO: 3935867 - DNA, 25 bp, Homo sapien
tacctccttcgtgttccagaattct

SEQ ID NO: 3935868 - DNA, 25 bp, Homo sapien
gaattcttgccatcgatgttccaaa

SEQ ID NO: 3935869 - DNA, 25 bp, Homo sapien
agggcctgtgtttccaagtcgacaa

SEQ ID NO: 3935870 - DNA, 25 bp, Homo sapien
ggaggtgtctatcccgcagcaatgg

SEQ ID NO: 3935871 - DNA, 25 bp, Homo sapien
taatcatgcccgaatgccatttccg

SEQ ID NO: 3935872 - DNA, 25 bp, Homo sapien
caatgagttaggttgttgacgacac

SEQ ID NO: 3935873 - DNA, 25 bp, Homo sapien
gactgagaatttctgggaagcccag

SEQ ID NO: 3935874 - DNA, 25 bp, Homo sapien
caagtgacttgccattaactcccga

SEQ ID NO: 3935875 - DNA, 25 bp, Homo sapien
aacgaccagagtggccaagtgactt

SEQ ID NO: 3935876 - DNA, 25 bp, Homo sapien
cccgagtggtgggagaatccagctc

SEQ ID NO: 3935877 - DNA, 25 bp, Homo sapien
aaaacgaccagagtggccaagtgac

SEQ ID NO: 3935878 - DNA, 25 bp, Homo sapien
attaaaaataataggctgctgttca

SEQ ID NO: 3935879 - DNA, 25 bp, Homo sapien
aaaaataataggctgctgttcagag

SEQ ID NO: 3935880 - DNA, 25 bp, Homo sapien
aaaataataggctgctgttcagagg

SEQ ID NO: 3935881 - DNA, 25 bp, Homo sapien
tttgctttgcaagccataattaaaa

SEQ ID NO: 3935882 - DNA, 25 bp, Homo sapien
cttctccatgtataatgtaattcga

SEQ ID NO: 3935883 - DNA, 25 bp, Homo sapien
catatcaatacgtcgtggcaggcgc

SEQ ID NO: 3935884 - DNA, 25 bp, Homo sapien
tgtaattcgataccaaatcgtttgt

SEQ ID NO: 3935885 - DNA, 25 bp, Homo sapien
gaaaaagatggtatccttctgaacg

SEQ ID NO: 3935886 - DNA, 25 bp, Homo sapien
tgtgactatcctggaaaaacgagtt

SEQ ID NO: 3935887 - DNA, 25 bp, Homo sapien
cataaactccgcttgtaaagctggt

SEQ ID NO: 3935888 - DNA, 25 bp, Homo sapien
taaagctggtgtaacttttgacacc

SEQ ID NO: 3935889 - DNA, 25 bp, Homo sapien
ttggcatagcaaagggtactgggct

SEQ ID NO: 3935890 - DNA, 25 bp, Homo sapien
gagatggcgtcatttcgactgcctg

SEQ ID NO: 3935891 - DNA, 25 bp, Homo sapien
ttaagaaaaggagtgatgagatggc

SEQ ID NO: 3935892 - DNA, 25 bp, Homo sapien
cgtcatttcgactgcctgggcatta

SEQ ID NO: 3935893 - DNA, 25 bp, Homo sapien
gagtgatgagatggcgtcatttcga

SEQ ID NO: 3935894 - DNA, 25 bp, Homo sapien
acagtacacggtggtggcagctccc

SEQ ID NO: 3935895 - DNA, 25 bp, Homo sapien
gttgttgaagtacatccctcccaga

SEQ ID NO: 3935896 - DNA, 25 bp, Homo sapien
ctggtgagggcatgcagcggcagca

SEQ ID NO: 3935897 - DNA, 25 bp, Homo sapien
cgtctcttcgctctgagcttctggt

SEQ ID NO: 3935898 - DNA, 25 bp, Homo sapien
gccggactggctgccaagccgttct

SEQ ID NO: 3935899 - DNA, 25 bp, Homo sapien
gactggctgccaagccgttcttgga

SEQ ID NO: 3935900 - DNA, 25 bp, Homo sapien
cggactggctgccaagccgttcttg

SEQ ID NO: 3935901 - DNA, 25 bp, Homo sapien
tagccggactggctgccaagccgtt

SEQ ID NO: 3935902 - DNA, 25 bp, Homo sapien
ggaattccctgcttcccattggtac

SEQ ID NO: 3935903 - DNA, 25 bp, Homo sapien
tacggaacctacacaccaagcaggt

SEQ ID NO: 3935904 - DNA, 25 bp, Homo sapien
tactcttgcggatctgtgttggagg

SEQ ID NO: 3935905 - DNA, 25 bp, Homo sapien
tgtgtgtgcccatccgctctgagct

SEQ ID NO: 3935906 - DNA, 25 bp, Homo sapien
gcagttgctaagctggctcagtctt

SEQ ID NO: 3935907 - DNA, 25 bp, Homo sapien
taagtatatacgcttcccttcctgc

SEQ ID NO: 3935908 - DNA, 25 bp, Homo sapien
tgccacctggtagttctgcgtattc

SEQ ID NO: 3935909 - DNA, 25 bp, Homo sapien
ttgacagacaaagggattaactaac

SEQ ID NO: 3935910 - DNA, 25 bp, Homo sapien
ttaagcataggatgcgaggcacagc

SEQ ID NO: 3935911 - DNA, 25 bp, Homo sapien
taagcataggatgcgaggcacagca

SEQ ID NO: 3935912 - DNA, 25 bp, Homo sapien
tattaagcataggatgcgaggcaca

SEQ ID NO: 3935913 - DNA, 25 bp, Homo sapien
gcataggatgcgaggcacagcagga

SEQ ID NO: 3935914 - DNA, 25 bp, Homo sapien
cagaagcattttctccgtcttgcca

SEQ ID NO: 3935915 - DNA, 25 bp, Homo sapien
tggactttctcatgtgcttgctgga

SEQ ID NO: 3935916 - DNA, 25 bp, Homo sapien
cgtcttgccagagtggactttctca

SEQ ID NO: 3935917 - DNA, 25 bp, Homo sapien
tgcttgctggaacgggctggaaatc

SEQ ID NO: 3935918 - DNA, 25 bp, Homo sapien
gtgaaccctgcaggatccacagagg

SEQ ID NO: 3935919 - DNA, 25 bp, Homo sapien
tctctttgacattttgcacagcacc

SEQ ID NO: 3935920 - DNA, 25 bp, Homo sapien
tggctgatgatacgccaatatcttc

SEQ ID NO: 3935921 - DNA, 25 bp, Homo sapien
atagaggccctagacacggccagga

SEQ ID NO: 3935922 - DNA, 25 bp, Homo sapien
cagaagagatagggcacattcagaa

SEQ ID NO: 3935923 - DNA, 25 bp, Homo sapien
aagagatagggcacattcagaatgg

SEQ ID NO: 3935924 - DNA, 25 bp, Homo sapien
tgcttagcttcacaagatcagaaga

SEQ ID NO: 3935925 - DNA, 25 bp, Homo sapien
cacaagatcagaagagatagggcac

SEQ ID NO: 3935926 - DNA, 25 bp, Homo sapien
attcagaaagaaaaggcttcttcat

SEQ ID NO: 3935927 - DNA, 25 bp, Homo sapien
tgaacccaaagggtattcagaaaga

SEQ ID NO: 3935928 - DNA, 25 bp, Homo sapien
tattcagaaagaaaaggcttcttca

SEQ ID NO: 3935929 - DNA, 25 bp, Homo sapien
gtattcagaaagaaaaggcttcttc

SEQ ID NO: 3935930 - DNA, 25 bp, Homo sapien
ggtgaactctttggagcttcactga

SEQ ID NO: 3935931 - DNA, 25 bp, Homo sapien
gcttcactgattaaggcatcagcca

SEQ ID NO: 3935932 - DNA, 25 bp, Homo sapien
tgcctgcaaccaggcaacttgattt

SEQ ID NO: 3935933 - DNA, 25 bp, Homo sapien
ggtgcttggaagaagaagcgttttc

SEQ ID NO: 3935934 - DNA, 25 bp, Homo sapien
aaggtcttctagagcgcctgcaggg

SEQ ID NO: 3935935 - DNA, 25 bp, Homo sapien
gatgactgtcgccaaggtccaggtt

SEQ ID NO: 3935936 - DNA, 25 bp, Homo sapien
ttaacttcaaaatcaatcaattctt

SEQ ID NO: 3935937 - DNA, 25 bp, Homo sapien
tttcctgagtatggataaaaggtct

SEQ ID NO: 3935938 - DNA, 25 bp, Homo sapien
tctcatttgacaacagcttgtcttc

SEQ ID NO: 3935939 - DNA, 25 bp, Homo sapien
atttctcatttgacaacagcttgtc

SEQ ID NO: 3935940 - DNA, 25 bp, Homo sapien
catttgacaacagcttgtcttcatt

SEQ ID NO: 3935941 - DNA, 25 bp, Homo sapien
ttgcatttctcatttgacaacagct

SEQ ID NO: 3935942 - DNA, 25 bp, Homo sapien
caagtaatagaaacagttcacctgc

SEQ ID NO: 3935943 - DNA, 25 bp, Homo sapien
cactgagcccaagtaatagaaacag

SEQ ID NO: 3935944 - DNA, 25 bp, Homo sapien
ggatgactctcccttcccctgcaat

SEQ ID NO: 3935945 - DNA, 25 bp, Homo sapien
aatagaaacagttcacctgccccgg

SEQ ID NO: 3935946 - DNA, 25 bp, Homo sapien
ctggtgggaaccgtcagggccttat

SEQ ID NO: 3935947 - DNA, 25 bp, Homo sapien
cggtaaccgagcaactgcagcttgg

SEQ ID NO: 3935948 - DNA, 25 bp, Homo sapien
gcacaggcgggtcggtagtggatat

SEQ ID NO: 3935949 - DNA, 25 bp, Homo sapien
gtagtggatatgctcggtaaccgag

SEQ ID NO: 3935950 - DNA, 25 bp, Homo sapien
ccttcggatggcaggaacgggattt

SEQ ID NO: 3935951 - DNA, 25 bp, Homo sapien
gaacgggatttgagtgatgtgcaga

SEQ ID NO: 3935952 - DNA, 25 bp, Homo sapien
caggaacgggatttgagtgatgtgc

SEQ ID NO: 3935953 - DNA, 25 bp, Homo sapien
ggcaggaacgggatttgagtgatgt

SEQ ID NO: 3935954 - DNA, 25 bp, Homo sapien
ccaaagggtcgcagaaaaggctgct

SEQ ID NO: 3935955 - DNA, 25 bp, Homo sapien
gtaggaaagggccaatacctgcgtg

SEQ ID NO: 3935956 - DNA, 25 bp, Homo sapien
cccaaagggtcgcagaaaaggctgc

SEQ ID NO: 3935957 - DNA, 25 bp, Homo sapien
agggccaatacctgcgtgacactct

SEQ ID NO: 3935958 - DNA, 25 bp, Homo sapien
gagacaggaaaagtgggctaaagca

SEQ ID NO: 3935959 - DNA, 25 bp, Homo sapien
cagggtgttgcagtactcagtggcc

SEQ ID NO: 3935960 - DNA, 25 bp, Homo sapien
ggctctgctgaggtccgtgtgccca

SEQ ID NO: 3935961 - DNA, 25 bp, Homo sapien
cattttgttctcagggatgcgttca

SEQ ID NO: 3935962 - DNA, 25 bp, Homo sapien
gaagtgccgaccactttcagggtgt

SEQ ID NO: 3935963 - DNA, 25 bp, Homo sapien
ttgactgggaaaatgtagggacctg

SEQ ID NO: 3935964 - DNA, 25 bp, Homo sapien
gggacctgccatccccttaggaagc

SEQ ID NO: 3935965 - DNA, 25 bp, Homo sapien
gtagggacctgccatccccttagga

SEQ ID NO: 3935966 - DNA, 25 bp, Homo sapien
tgactgggaaaatgtagggacctgc

SEQ ID NO: 3935967 - DNA, 25 bp, Homo sapien
ctcagggaggctcatgtccctctgc

SEQ ID NO: 3935968 - DNA, 25 bp, Homo sapien
ggctcagggaggctcatgtccctct

SEQ ID NO: 3935969 - DNA, 25 bp, Homo sapien
ctctgagtttccctgaggaggctca

SEQ ID NO: 3935970 - DNA, 25 bp, Homo sapien
cgggacttgctctgagtttccctga

SEQ ID NO: 3935971 - DNA, 25 bp, Homo sapien
tccttcggagatctgcaggtgctgc

SEQ ID NO: 3935972 - DNA, 25 bp, Homo sapien
tctgcctcatgaagcagcagcgtgt

SEQ ID NO: 3935973 - DNA, 25 bp, Homo sapien
gaactcatgggctgaccaacggcat

SEQ ID NO: 3935974 - DNA, 25 bp, Homo sapien
gggcctacatttccactgaactcat

SEQ ID NO: 3935975 - DNA, 25 bp, Homo sapien
gagtaaacaaacggacagtaatgac

SEQ ID NO: 3935976 - DNA, 25 bp, Homo sapien
ctgagtaaacaaacggacagtaatg

SEQ ID NO: 3935977 - DNA, 25 bp, Homo sapien
tgagtaaacaaacggacagtaatga

SEQ ID NO: 3935978 - DNA, 25 bp, Homo sapien
gaatcactgtatgtagatgctgcca

SEQ ID NO: 3935979 - DNA, 25 bp, Homo sapien
agaattctggtagggcaggcatcga

SEQ ID NO: 3935980 - DNA, 25 bp, Homo sapien
tgtggaatttccctggtggagaatt

SEQ ID NO: 3935981 - DNA, 25 bp, Homo sapien
cctcccaagactgcgctgtggaatt

SEQ ID NO: 3935982 - DNA, 25 bp, Homo sapien
cttgtggtgtgatggattccattcc

SEQ ID NO: 3935983 - DNA, 25 bp, Homo sapien
ttgtggtgtgatggattccattccc

SEQ ID NO: 3935984 - DNA, 25 bp, Homo sapien
ggtgtgatggattccattcccctac

SEQ ID NO: 3935985 - DNA, 25 bp, Homo sapien
gggttttgaagatcactcaactctg

SEQ ID NO: 3935986 - DNA, 25 bp, Homo sapien
gttttgaagatcactcaactctgag

SEQ ID NO: 3935987 - DNA, 25 bp, Homo sapien
gaagatcactcaactctgagagctc

SEQ ID NO: 3935988 - DNA, 25 bp, Homo sapien
ttgaagatcactcaactctgagagc

SEQ ID NO: 3935989 - DNA, 25 bp, Homo sapien
cccaagtgatacagcagcaaagttc

SEQ ID NO: 3935990 - DNA, 25 bp, Homo sapien
tcacccgctgagatgggaaatccag

SEQ ID NO: 3935991 - DNA, 25 bp, Homo sapien
tctggtccagcgagccaaagagaca

SEQ ID NO: 3935992 - DNA, 25 bp, Homo sapien
aaagagacaacgcagtccagagcca

SEQ ID NO: 3935993 - DNA, 25 bp, Homo sapien
tttagcaagagacccctcgttttca

SEQ ID NO: 3935994 - DNA, 25 bp, Homo sapien
gctgttgctatcctgaaagtcctaa

SEQ ID NO: 3935995 - DNA, 25 bp, Homo sapien
ggtatgggctctgtacaacaatgca

SEQ ID NO: 3935996 - DNA, 25 bp, Homo sapien
ccccacacttagaagggcctgcttt

SEQ ID NO: 3935997 - DNA, 25 bp, Homo sapien
ctggcaggtccaacctcaccgggct

SEQ ID NO: 3935998 - DNA, 25 bp, Homo sapien
ctcaccgggctgtctcttcgcccct

SEQ ID NO: 3935999 - DNA, 25 bp, Homo sapien
ggtccaacctcaccgggctgtctct

SEQ ID NO: 3936000 - DNA, 25 bp, Homo sapien
ttccctggcaggtccaacctcaccg

SEQ ID NO: 3936001 - DNA, 25 bp, Homo sapien
tagtgacacagactggatttccacg

SEQ ID NO: 3936002 - DNA, 25 bp, Homo sapien
tccacgctgcagtccatcaaaacta

SEQ ID NO: 3936003 - DNA, 25 bp, Homo sapien
ggttaattggatgaacaggcacttt

SEQ ID NO: 3936004 - DNA, 25 bp, Homo sapien
gaacagccgtccactaagtattgca

SEQ ID NO: 3936005 - DNA, 25 bp, Homo sapien
atttagggccacctcttggaatcct

SEQ ID NO: 3936006 - DNA, 25 bp, Homo sapien
ggccacctcttggaatccttacaaa

SEQ ID NO: 3936007 - DNA, 25 bp, Homo sapien
ctgcccaggaaatttagggccacct

SEQ ID NO: 3936008 - DNA, 25 bp, Homo sapien
ccaggaaatttagggccacctcttg

SEQ ID NO: 3936009 - DNA, 25 bp, Homo sapien
tccagcaagaatccttctttctcat

SEQ ID NO: 3936010 - DNA, 25 bp, Homo sapien
aacggaaagttctattcctccagca

SEQ ID NO: 3936011 - DNA, 25 bp, Homo sapien
agttctattcctccagcaagaatcc

SEQ ID NO: 3936012 - DNA, 25 bp, Homo sapien
ctgcagtcaaaacggaaagttctat

SEQ ID NO: 3936013 - DNA, 25 bp, Homo sapien
tctcacatctgcacgcccacacgtg

SEQ ID NO: 3936014 - DNA, 25 bp, Homo sapien
tgagctggttggaaggcaagagccc

SEQ ID NO: 3936015 - DNA, 25 bp, Homo sapien
caagagccctgcatagagggaggcc

SEQ ID NO: 3936016 - DNA, 25 bp, Homo sapien
tgggtctgcacacctctcactctca

SEQ ID NO: 3936017 - DNA, 25 bp, Homo sapien
ctatgcaaatggtatgaccgagact

SEQ ID NO: 3936018 - DNA, 25 bp, Homo sapien
tatgaccgagactcctggctcgctg

SEQ ID NO: 3936019 - DNA, 25 bp, Homo sapien
tggctcgctgctactcgcatgctgc

SEQ ID NO: 3936020 - DNA, 25 bp, Homo sapien
gctgctactcgcatgctgctgtctg

SEQ ID NO: 3936021 - DNA, 25 bp, Homo sapien
cagcttcgctttgggtttggagccg

SEQ ID NO: 3936022 - DNA, 25 bp, Homo sapien
ctgaggacaaaagtcgcagatgccc

SEQ ID NO: 3936023 - DNA, 25 bp, Homo sapien
gcagatgcccattaaaacagatcca

SEQ ID NO: 3936024 - DNA, 25 bp, Homo sapien
gctttgggtttggagccgatgctcc

SEQ ID NO: 3936025 - DNA, 25 bp, Homo sapien
cgctcggtgcatgcgaagcgcaaga

SEQ ID NO: 3936026 - DNA, 25 bp, Homo sapien
agaacttttctcgataatagggagg

SEQ ID NO: 3936027 - DNA, 25 bp, Homo sapien
tgccgcttttgttccccgctcggtg

SEQ ID NO: 3936028 - DNA, 25 bp, Homo sapien
ggctgggagccgtgtcagagaagat

SEQ ID NO: 3936029 - DNA, 25 bp, Homo sapien
ggccgtatgttcctgagcagaccca

SEQ ID NO: 3936030 - DNA, 25 bp, Homo sapien
tccagagtgaaacccgaatgggttg

SEQ ID NO: 3936031 - DNA, 25 bp, Homo sapien
tgctggtggttagttccagagtgaa

SEQ ID NO: 3936032 - DNA, 25 bp, Homo sapien
tgataggatgtacaagagagaaggg

SEQ ID NO: 3936033 - DNA, 25 bp, Homo sapien
ctgttggcctacctcaatctcagac

SEQ ID NO: 3936034 - DNA, 25 bp, Homo sapien
gcagcatcctgttggcctacctcaa

SEQ ID NO: 3936035 - DNA, 25 bp, Homo sapien
ggaaatttccctcccatcggagcag

SEQ ID NO: 3936036 - DNA, 25 bp, Homo sapien
aggaaatttccctcccatcggagca

SEQ ID NO: 3936037 - DNA, 25 bp, Homo sapien
tcattccggcactctaaatctgtgg

SEQ ID NO: 3936038 - DNA, 25 bp, Homo sapien
taccgaagggcctcatcacagcact

SEQ ID NO: 3936039 - DNA, 25 bp, Homo sapien
gtggcctgtaccgaagggcctcatc

SEQ ID NO: 3936040 - DNA, 25 bp, Homo sapien
ggcactctaaatctgtggccttccc

SEQ ID NO: 3936041 - DNA, 25 bp, Homo sapien
gagtttgtgatgacgtagagcatcc

SEQ ID NO: 3936042 - DNA, 25 bp, Homo sapien
gacgcgatgaaaactagcctggccc

SEQ ID NO: 3936043 - DNA, 25 bp, Homo sapien
gattggtctggtctagtgtctggcc

SEQ ID NO: 3936044 - DNA, 25 bp, Homo sapien
cattctggagccaaagatcctctct

SEQ ID NO: 3936045 - DNA, 25 bp, Homo sapien
cacaggcagccttctagccccagtg

SEQ ID NO: 3936046 - DNA, 25 bp, Homo sapien
tgtctcccctgggagaccacaggca

SEQ ID NO: 3936047 - DNA, 25 bp, Homo sapien
ggcagccttctagccccagtgcctt

SEQ ID NO: 3936048 - DNA, 25 bp, Homo sapien
acaggcagccttctagccccagtgc

SEQ ID NO: 3936049 - DNA, 25 bp, Homo sapien
aaggcaacctccgtctttgtcaaag

SEQ ID NO: 3936050 - DNA, 25 bp, Homo sapien
caatcagggccaatgtgttctccaa

SEQ ID NO: 3936051 - DNA, 25 bp, Homo sapien
tgtggagtaacaagccaatcagggc

SEQ ID NO: 3936052 - DNA, 25 bp, Homo sapien
gaagactgccgttagcaaccacgtg

SEQ ID NO: 3936053 - DNA, 25 bp, Homo sapien
ttctcctttagtagtggatgttggg

SEQ ID NO: 3936054 - DNA, 25 bp, Homo sapien
cctttagtagtggatgttgggatcc

SEQ ID NO: 3936055 - DNA, 25 bp, Homo sapien
tcatgcattgacctggtggtttttg

SEQ ID NO: 3936056 - DNA, 25 bp, Homo sapien
ttagtagtggatgttgggatcctga

SEQ ID NO: 3936057 - DNA, 25 bp, Homo sapien
ctgcagcagattggataatgcaccc

SEQ ID NO: 3936058 - DNA, 25 bp, Homo sapien
gcagcagattggataatgcacccat

SEQ ID NO: 3936059 - DNA, 25 bp, Homo sapien
tctgcagcagattggataatgcacc

SEQ ID NO: 3936060 - DNA, 25 bp, Homo sapien
tgcagcagattggataatgcaccca

SEQ ID NO: 3936061 - DNA, 25 bp, Homo sapien
tgtgggcctgaactctctgagagca

SEQ ID NO: 3936062 - DNA, 25 bp, Homo sapien
gttttccaggaatgcgccctgtggc

SEQ ID NO: 3936063 - DNA, 25 bp, Homo sapien
tgagaggcccctggaagaatgcttg

SEQ ID NO: 3936064 - DNA, 25 bp, Homo sapien
ctaggtgtgggcctgaactctctga

SEQ ID NO: 3936065 - DNA, 25 bp, Homo sapien
agggagtgagtgaatttgtaagtgt

SEQ ID NO: 3936066 - DNA, 25 bp, Homo sapien
aatgagggagtgagtgaatttgtaa

SEQ ID NO: 3936067 - DNA, 25 bp, Homo sapien
tgagggagtgagtgaatttgtaagt

SEQ ID NO: 3936068 - DNA, 25 bp, Homo sapien
gaatgagggagtgagtgaatttgta

SEQ ID NO: 3936069 - DNA, 25 bp, Homo sapien
tcggtactaaccaacagcatctgta

SEQ ID NO: 3936070 - DNA, 25 bp, Homo sapien
tccagtacccggtgacacagtgaca

SEQ ID NO: 3936071 - DNA, 25 bp, Homo sapien
taatctgtaaacaccccataagtac

SEQ ID NO: 3936072 - DNA, 25 bp, Homo sapien
gtgacacctgtgtggttcggtacta

SEQ ID NO: 3936073 - DNA, 25 bp, Homo sapien
gggcggctcgactggatctctgttt

SEQ ID NO: 3936074 - DNA, 25 bp, Homo sapien
aagccgcgagcaacctggcttcgtg

SEQ ID NO: 3936075 - DNA, 25 bp, Homo sapien
taaattcaacttgtgtcaggacgga

SEQ ID NO: 3936076 - DNA, 25 bp, Homo sapien
cgactggatctctgtttaaattcaa

SEQ ID NO: 3936077 - DNA, 25 bp, Homo sapien
ttgaggaagacaacctgaagatcag

SEQ ID NO: 3936078 - DNA, 25 bp, Homo sapien
catctaactctctggtgaccctact

SEQ ID NO: 3936079 - DNA, 25 bp, Homo sapien
catatgtttttaaagggtgcagagg

SEQ ID NO: 3936080 - DNA, 25 bp, Homo sapien
acagaaatgagtgccgaggttgcct

SEQ ID NO: 3936081 - DNA, 25 bp, Homo sapien
tatcgtggtactggtaacaacagca

SEQ ID NO: 3936082 - DNA, 25 bp, Homo sapien
caacactactgccacttatggagct

SEQ ID NO: 3936083 - DNA, 25 bp, Homo sapien
gcaaggtgtcgcacaaagtgagtca

SEQ ID NO: 3936084 - DNA, 25 bp, Homo sapien
tctgcctgacgtgtactaagtgctc

SEQ ID NO: 3936085 - DNA, 25 bp, Homo sapien
cttcaccctggcagaaatgtccatt

SEQ ID NO: 3936086 - DNA, 25 bp, Homo sapien
cacaccttcaccctggcagaaatgt

SEQ ID NO: 3936087 - DNA, 25 bp, Homo sapien
ccagcacaccttcaccctggcagaa

SEQ ID NO: 3936088 - DNA, 25 bp, Homo sapien
ccttcaccctggcagaaatgtccat

SEQ ID NO: 3936089 - DNA, 25 bp, Homo sapien
cactgtgttcagaaacgtgactgtg

SEQ ID NO: 3936090 - DNA, 25 bp, Homo sapien
gtgttcacgcgttgttttgtctgcc

SEQ ID NO: 3936091 - DNA, 25 bp, Homo sapien
gaaacgtgactgtgttcacgcgttg

SEQ ID NO: 3936092 - DNA, 25 bp, Homo sapien
tcaacatgcggccactgtgttcaga

SEQ ID NO: 3936093 - DNA, 25 bp, Homo sapien
ctccaatcggcatttaaagacatcc

SEQ ID NO: 3936094 - DNA, 25 bp, Homo sapien
ggcatttaaagacatccgcattgct

SEQ ID NO: 3936095 - DNA, 25 bp, Homo sapien
agacatccgcattgcttacagcaca

SEQ ID NO: 3936096 - DNA, 25 bp, Homo sapien
gacatccgcattgcttacagcacat

SEQ ID NO: 3936097 - DNA, 25 bp, Homo sapien
aagcaaattgcttaatcttgtggca

SEQ ID NO: 3936098 - DNA, 25 bp, Homo sapien
ggtctgaattcaccgtgcacagcga

SEQ ID NO: 3936099 - DNA, 25 bp, Homo sapien
tcaactgtaaagagccagcctgcct

SEQ ID NO: 3936100 - DNA, 25 bp, Homo sapien
gaaaccagggacaaggagctcaact

SEQ ID NO: 3936101 - DNA, 25 bp, Homo sapien
gtcgcagaccattaacaaatcgttg

SEQ ID NO: 3936102 - DNA, 25 bp, Homo sapien
gaatccattccatggctaatgaagc

SEQ ID NO: 3936103 - DNA, 25 bp, Homo sapien
ttgcctccctggaatccattccatg

SEQ ID NO: 3936104 - DNA, 25 bp, Homo sapien
aagcatccagtacctcgatatgggt

SEQ ID NO: 3936105 - DNA, 25 bp, Homo sapien
tcatgctttttagctacgaagtatg

SEQ ID NO: 3936106 - DNA, 25 bp, Homo sapien
aagttcatgctttttagctacgaag

SEQ ID NO: 3936107 - DNA, 25 bp, Homo sapien
aaggccaagctttcctcacatgctt

SEQ ID NO: 3936108 - DNA, 25 bp, Homo sapien
gcctttgttcgagttcaagttcatg

SEQ ID NO: 3936109 - DNA, 25 bp, Homo sapien
ctgtgaatatggtgtgtgcttcaag

SEQ ID NO: 3936110 - DNA, 25 bp, Homo sapien
tggctggtgtaccaatgcctcctga

SEQ ID NO: 3936111 - DNA, 25 bp, Homo sapien
tgtctgagtacccattacagccagg

SEQ ID NO: 3936112 - DNA, 25 bp, Homo sapien
cagtgtggattaagtctgcagctcc

SEQ ID NO: 3936113 - DNA, 25 bp, Homo sapien
tacagccaggactagatttccccag

SEQ ID NO: 3936114 - DNA, 25 bp, Homo sapien
taaacatgctgatgctaaaactggc

SEQ ID NO: 3936115 - DNA, 25 bp, Homo sapien
tgcacccagaaacagtgttgtagct

SEQ ID NO: 3936116 - DNA, 25 bp, Homo sapien
tcagcatttctcgtggtgcactaaa

SEQ ID NO: 3936117 - DNA, 25 bp, Homo sapien
ttcggtgtccaagggacgaggcctc

SEQ ID NO: 3936118 - DNA, 25 bp, Homo sapien
acattgaaagagcttaggcagagcc

SEQ ID NO: 3936119 - DNA, 25 bp, Homo sapien
tcaggattgtagcttgaaccgcaaa

SEQ ID NO: 3936120 - DNA, 25 bp, Homo sapien
tgggtccctttgtatagccctctgc

SEQ ID NO: 3936121 - DNA, 25 bp, Homo sapien
tgagtccctttgtggtcttgggtcc

SEQ ID NO: 3936122 - DNA, 25 bp, Homo sapien
attcacttgtgaccgacctatccag

SEQ ID NO: 3936123 - DNA, 25 bp, Homo sapien
gtgaccgacctatccagaaatcctt

SEQ ID NO: 3936124 - DNA, 25 bp, Homo sapien
gctacttaattcacttgtgaccgac

SEQ ID NO: 3936125 - DNA, 25 bp, Homo sapien
cacttgtgaccgacctatccagaaa

SEQ ID NO: 3936126 - DNA, 25 bp, Homo sapien
gacgggccaaacaagagcaggtctc

SEQ ID NO: 3936127 - DNA, 25 bp, Homo sapien
ttcttgaggcaagagcagacgggcc

SEQ ID NO: 3936128 - DNA, 25 bp, Homo sapien
gcaccatcctggcagactctgactg

SEQ ID NO: 3936129 - DNA, 25 bp, Homo sapien
cagcaggtgcagtcgttcactgaca

SEQ ID NO: 3936130 - DNA, 25 bp, Homo sapien
tgaacgaccagatggccatcgacac

SEQ ID NO: 3936131 - DNA, 25 bp, Homo sapien
gatggccatcgacaccatcaaaaaa

SEQ ID NO: 3936132 - DNA, 25 bp, Homo sapien
gggtgtgaacgaccagatggccatc

SEQ ID NO: 3936133 - DNA, 25 bp, Homo sapien
gaccagatggccatcgacaccatca

SEQ ID NO: 3936134 - DNA, 25 bp, Homo sapien
cttttgtgggcatgcagacatctgg

SEQ ID NO: 3936135 - DNA, 25 bp, Homo sapien
cacgatgtgtctggactatccctac

SEQ ID NO: 3936136 - DNA, 25 bp, Homo sapien
ctgtggctgttcctcccacgatgtg

SEQ ID NO: 3936137 - DNA, 25 bp, Homo sapien
tccttttgtgggcatgcagacatct

SEQ ID NO: 3936138 - DNA, 25 bp, Homo sapien
aatccatttcagtcggcagagcttg

SEQ ID NO: 3936139 - DNA, 25 bp, Homo sapien
tcagtcggcagagcttgcgatacgg

SEQ ID NO: 3936140 - DNA, 25 bp, Homo sapien
gcagagcttgcgatacggttaagta

SEQ ID NO: 3936141 - DNA, 25 bp, Homo sapien
gcttgcgatacggttaagtacttat

SEQ ID NO: 3936142 - DNA, 25 bp, Homo sapien
taaaatgatccagtggcaccttttc

SEQ ID NO: 3936143 - DNA, 25 bp, Homo sapien
ttcagcaaatctgtgcccatcctca

SEQ ID NO: 3936144 - DNA, 25 bp, Homo sapien
atgatccagtggcaccttttcccca

SEQ ID NO: 3936145 - DNA, 25 bp, Homo sapien
tcattaaaatgatccagtggcacct

SEQ ID NO: 3936146 - DNA, 25 bp, Homo sapien
tgggatgctacacaaagatgcaggc

SEQ ID NO: 3936147 - DNA, 25 bp, Homo sapien
tacaaaggtatgacacaggtaggct

SEQ ID NO: 3936148 - DNA, 25 bp, Homo sapien
tgcactggtgcactagaatgaaccc

SEQ ID NO: 3936149 - DNA, 25 bp, Homo sapien
cacaggtgcactaggatgctataca

SEQ ID NO: 3936150 - DNA, 25 bp, Homo sapien
gcctgggtcacttgagccctctggt

SEQ ID NO: 3936151 - DNA, 25 bp, Homo sapien
ctgggtcacttgagccctctggttc

SEQ ID NO: 3936152 - DNA, 25 bp, Homo sapien
cctgggtcacttgagccctctggtt

SEQ ID NO: 3936153 - DNA, 25 bp, Homo sapien
ggcctgggtcacttgagccctctgg

SEQ ID NO: 3936154 - DNA, 25 bp, Homo sapien
aggtcatctgcagatacactggctc

SEQ ID NO: 3936155 - DNA, 25 bp, Homo sapien
gaggtcatctgcagatacactggct

SEQ ID NO: 3936156 - DNA, 25 bp, Homo sapien
ggactcagccctgtgattgcccggt

SEQ ID NO: 3936157 - DNA, 25 bp, Homo sapien
cggtggacgtgtctgtggccagaaa

SEQ ID NO: 3936158 - DNA, 25 bp, Homo sapien
agccctgtgattgcccggtggacgt

SEQ ID NO: 3936159 - DNA, 25 bp, Homo sapien
actcagccctgtgattgcccggtgg

SEQ ID NO: 3936160 - DNA, 25 bp, Homo sapien
ccaccctggcccttttgtgagaact

SEQ ID NO: 3936161 - DNA, 25 bp, Homo sapien
gctccaccggctctagctgtggagt

SEQ ID NO: 3936162 - DNA, 25 bp, Homo sapien
tggcccttttgtgagaactgagccc

SEQ ID NO: 3936163 - DNA, 25 bp, Homo sapien
ccggctctagctgtggagtatcatc

SEQ ID NO: 3936164 - DNA, 25 bp, Homo sapien
gactatctgtgacttgtttccattt

SEQ ID NO: 3936165 - DNA, 25 bp, Homo sapien
tatcctttcggaattcagactatct

SEQ ID NO: 3936166 - DNA, 25 bp, Homo sapien
tccgttctatcctttcggaattcag

SEQ ID NO: 3936167 - DNA, 25 bp, Homo sapien
ttcggaattcagactatctgtgact

SEQ ID NO: 3936168 - DNA, 25 bp, Homo sapien
ctgctgttttcagccgtcaggcctg

SEQ ID NO: 3936169 - DNA, 25 bp, Homo sapien
gatgtgcctttgagtctggtcctca

SEQ ID NO: 3936170 - DNA, 25 bp, Homo sapien
ctcggttcctctaactgcccactca

SEQ ID NO: 3936171 - DNA, 25 bp, Homo sapien
ctcccaatctctcggttcctctaac

SEQ ID NO: 3936172 - DNA, 25 bp, Homo sapien
cttcatcagcacaagggaagctgga

SEQ ID NO: 3936173 - DNA, 25 bp, Homo sapien
tgtgtttgaaaacgtagctgaagac

SEQ ID NO: 3936174 - DNA, 25 bp, Homo sapien
caaggctgttctcagtcatcctcag

SEQ ID NO: 3936175 - DNA, 25 bp, Homo sapien
acgtagctgaagacaaggctgttct

SEQ ID NO: 3936176 - DNA, 25 bp, Homo sapien
cttgtaggtaagatctgtgtttgaa

SEQ ID NO: 3936177 - DNA, 25 bp, Homo sapien
taacagccctggtttaccgtcaggc

SEQ ID NO: 3936178 - DNA, 25 bp, Homo sapien
gagaccagtcgtggctccctcagtg

SEQ ID NO: 3936179 - DNA, 25 bp, Homo sapien
ttatttgtcttgctggccacctggg

SEQ ID NO: 3936180 - DNA, 25 bp, Homo sapien
ctgggcaacacttaacagccctggt

SEQ ID NO: 3936181 - DNA, 25 bp, Homo sapien
ggcattgataagaagaggctcatca

SEQ ID NO: 3936182 - DNA, 25 bp, Homo sapien
gaggcattgataagaagaggctcat

SEQ ID NO: 3936183 - DNA, 25 bp, Homo sapien
ttgataagaagaggctcatcagagc

SEQ ID NO: 3936184 - DNA, 25 bp, Homo sapien
agaagaggcattgataagaagaggc

SEQ ID NO: 3936185 - DNA, 25 bp, Homo sapien
tttcggccccagaatcgaatagagg

SEQ ID NO: 3936186 - DNA, 25 bp, Homo sapien
aaatcccgatgctggaccctcagtg

SEQ ID NO: 3936187 - DNA, 25 bp, Homo sapien
ggtcttacttctatgcgcttctcag

SEQ ID NO: 3936188 - DNA, 25 bp, Homo sapien
taggagccacttgagccaggagctt

SEQ ID NO: 3936189 - DNA, 25 bp, Homo sapien
gctgtatctgtgtgcgtgttggcca

SEQ ID NO: 3936190 - DNA, 25 bp, Homo sapien
tatctgtgtgcgtgttggccacatt

SEQ ID NO: 3936191 - DNA, 25 bp, Homo sapien
tgtgtgcgtgttggccacattgtct

SEQ ID NO: 3936192 - DNA, 25 bp, Homo sapien
gtggctgtatctgtgtgcgtgttgg

SEQ ID NO: 3936193 - DNA, 25 bp, Homo sapien
tgagcattgttgaccatgagcaggg

SEQ ID NO: 3936194 - DNA, 25 bp, Homo sapien
tgagtcttttggtgcgtggatgccc

SEQ ID NO: 3936195 - DNA, 25 bp, Homo sapien
gttcctagccagttgaccatgccaa

SEQ ID NO: 3936196 - DNA, 25 bp, Homo sapien
cagagtaactgatctcgctgggagg

SEQ ID NO: 3936197 - DNA, 25 bp, Homo sapien
ccacgtggcatggtccaaaaataac

SEQ ID NO: 3936198 - DNA, 25 bp, Homo sapien
cactggctgagaaccgctttcctgt

SEQ ID NO: 3936199 - DNA, 25 bp, Homo sapien
gacaccagacctagctagcgagagg

SEQ ID NO: 3936200 - DNA, 25 bp, Homo sapien
ttcctgtttgcgttcctgcccggag

SEQ ID NO: 3936201 - DNA, 25 bp, Homo sapien
taaggtcatcagatctggccactgt

SEQ ID NO: 3936202 - DNA, 25 bp, Homo sapien
gtgcacgagccccagaaagtccaag

SEQ ID NO: 3936203 - DNA, 25 bp, Homo sapien
caagagcggctttgctaaggtcatc

SEQ ID NO: 3936204 - DNA, 25 bp, Homo sapien
gattctccaggccaagagcggcttt

SEQ ID NO: 3936205 - DNA, 25 bp, Homo sapien
cccagagctgttgccgaggcagagc

SEQ ID NO: 3936206 - DNA, 25 bp, Homo sapien
agctgttgccgaggcagagcatcag

SEQ ID NO: 3936207 - DNA, 25 bp, Homo sapien
acccagagctgttgccgaggcagag

SEQ ID NO: 3936208 - DNA, 25 bp, Homo sapien
gacccagagctgttgccgaggcaga

SEQ ID NO: 3936209 - DNA, 25 bp, Homo sapien
ctgtgccttgaggaacggctgccat

SEQ ID NO: 3936210 - DNA, 25 bp, Homo sapien
gctccattggaagccactcagccaa

SEQ ID NO: 3936211 - DNA, 25 bp, Homo sapien
aatggccaaggccttccctggagtt

SEQ ID NO: 3936212 - DNA, 25 bp, Homo sapien
cagcccctcctctatgggtctctgt

SEQ ID NO: 3936213 - DNA, 25 bp, Homo sapien
caggctccgggtgagatgacagact

SEQ ID NO: 3936214 - DNA, 25 bp, Homo sapien
tctgagcacaaactgactccacgct

SEQ ID NO: 3936215 - DNA, 25 bp, Homo sapien
atgacagactgtgttgtggaggcaa

SEQ ID NO: 3936216 - DNA, 25 bp, Homo sapien
ctgtgttgtggaggcaatatgctga

SEQ ID NO: 3936217 - DNA, 25 bp, Homo sapien
caatactgagttggagccctggaca

SEQ ID NO: 3936218 - DNA, 25 bp, Homo sapien
tttcctaggagtgagtacaatactg

SEQ ID NO: 3936219 - DNA, 25 bp, Homo sapien
ctggacaacagctttgtggtgagtg

SEQ ID NO: 3936220 - DNA, 25 bp, Homo sapien
caggcaggcaagtatgacggtctca

SEQ ID NO: 3936221 - DNA, 25 bp, Homo sapien
tgaggcctgaaggatttttgctttt

SEQ ID NO: 3936222 - DNA, 25 bp, Homo sapien
tgaatttgaaattgaggcctgaagg

SEQ ID NO: 3936223 - DNA, 25 bp, Homo sapien
cagtagacacatttgaatttgaaat

SEQ ID NO: 3936224 - DNA, 25 bp, Homo sapien
tttgaatttgaaattgaggcctgaa

SEQ ID NO: 3936225 - DNA, 25 bp, Homo sapien
aacggatgaatggacaggaggaggc

SEQ ID NO: 3936226 - DNA, 25 bp, Homo sapien
gaacggatgaatggacaggaggagg

SEQ ID NO: 3936227 - DNA, 25 bp, Homo sapien
tgaacggatgaatggacaggaggag

SEQ ID NO: 3936228 - DNA, 25 bp, Homo sapien
tgcaagcctagatgtaacactgact

SEQ ID NO: 3936229 - DNA, 25 bp, Homo sapien
tatgggtacagccttcagcccgtac

SEQ ID NO: 3936230 - DNA, 25 bp, Homo sapien
tagtataaccacctagtgcaagcct

SEQ ID NO: 3936231 - DNA, 25 bp, Homo sapien
agcccgtacgataaatcctcctgag

SEQ ID NO: 3936232 - DNA, 25 bp, Homo sapien
gtcacatggacaaaagaaggcgctg

SEQ ID NO: 3936233 - DNA, 25 bp, Homo sapien
aataggctgcaattgtcaggcgtcc

SEQ ID NO: 3936234 - DNA, 25 bp, Homo sapien
gcttccccacatagttaataggctg

SEQ ID NO: 3936235 - DNA, 25 bp, Homo sapien
tggactggtcaaggttcaccccaca

SEQ ID NO: 3936236 - DNA, 25 bp, Homo sapien
ctgtgagttggttgggttttgtttg

SEQ ID NO: 3936237 - DNA, 25 bp, Homo sapien
tgcgtttgtttgtttttaatacaca

SEQ ID NO: 3936238 - DNA, 25 bp, Homo sapien
catttgaaaacatattgtcctcttt

SEQ ID NO: 3936239 - DNA, 25 bp, Homo sapien
ttgaaaacatattgtcctctttact

SEQ ID NO: 3936240 - DNA, 25 bp, Homo sapien
tgaaaacatattgtcctctttactg

SEQ ID NO: 3936241 - DNA, 25 bp, Homo sapien
tttgaaaacatattgtcctctttac

SEQ ID NO: 3936242 - DNA, 25 bp, Homo sapien
cctgtggtgttgctaccagactccc

SEQ ID NO: 3936243 - DNA, 25 bp, Homo sapien
cccctccaccgatacaggatttggg

SEQ ID NO: 3936244 - DNA, 25 bp, Homo sapien
gactcccctccaccgatacaggatt

SEQ ID NO: 3936245 - DNA, 25 bp, Homo sapien
gtggtgttgctaccagactcccctc

SEQ ID NO: 3936246 - DNA, 25 bp, Homo sapien
caagggtgggccttcatggtcagct

SEQ ID NO: 3936247 - DNA, 25 bp, Homo sapien
cttgtactgagattcatgtgcaccc

SEQ ID NO: 3936248 - DNA, 25 bp, Homo sapien
cttttctgataatggggtcatggca

SEQ ID NO: 3936249 - DNA, 25 bp, Homo sapien
tgggtaaggcttgggcaatgaccac

SEQ ID NO: 3936250 - DNA, 25 bp, Homo sapien
tctgtactcagagggccctaaagct

SEQ ID NO: 3936251 - DNA, 25 bp, Homo sapien
tttctgtactcagagggccctaaag

SEQ ID NO: 3936252 - DNA, 25 bp, Homo sapien
actcagagggccctaaagctccaaa

SEQ ID NO: 3936253 - DNA, 25 bp, Homo sapien
agagggccctaaagctccaaacaca

SEQ ID NO: 3936254 - DNA, 25 bp, Homo sapien
gctttatccaacgtgagtctactga

SEQ ID NO: 3936255 - DNA, 25 bp, Homo sapien
ccaaagaggagggatacatgcgata

SEQ ID NO: 3936256 - DNA, 25 bp, Homo sapien
gtgaaactagtatccatcgcccttg

SEQ ID NO: 3936257 - DNA, 25 bp, Homo sapien
tgtaaatggtgacactaggtgccaa

SEQ ID NO: 3936258 - DNA, 25 bp, Homo sapien
cagagtcctagaaacaacagtgacg

SEQ ID NO: 3936259 - DNA, 25 bp, Homo sapien
aacagtgacgtccttagcaccaggg

SEQ ID NO: 3936260 - DNA, 25 bp, Homo sapien
ggtgactgacaagccgctgacaggt

SEQ ID NO: 3936261 - DNA, 25 bp, Homo sapien
gctgacaggttgtgagctctccaca

SEQ ID NO: 3936262 - DNA, 25 bp, Homo sapien
gtcagctccaggtcattctcagagt

SEQ ID NO: 3936263 - DNA, 25 bp, Homo sapien
tcagctccaggtcattctcagagtc

SEQ ID NO: 3936264 - DNA, 25 bp, Homo sapien
caggggtcagctccaggtcattctc

SEQ ID NO: 3936265 - DNA, 25 bp, Homo sapien
gggtcagctccaggtcattctcaga

SEQ ID NO: 3936266 - DNA, 25 bp, Homo sapien
gccttgaccgtttccaagctgagat

SEQ ID NO: 3936267 - DNA, 25 bp, Homo sapien
cagccttgaccgtttccaagctgag

SEQ ID NO: 3936268 - DNA, 25 bp, Homo sapien
ggagaagcgatgaaaccttatagaa

SEQ ID NO: 3936269 - DNA, 25 bp, Homo sapien
gaccgtttccaagctgagattccaa

SEQ ID NO: 3936270 - DNA, 25 bp, Homo sapien
gatgggaaatgctgtttattactga

SEQ ID NO: 3936271 - DNA, 25 bp, Homo sapien
tgggagtctttcaacacagacccct

SEQ ID NO: 3936272 - DNA, 25 bp, Homo sapien
ttttacttagcaacaccaattctag

SEQ ID NO: 3936273 - DNA, 25 bp, Homo sapien
tattactgaatgcaggatgctcacg

SEQ ID NO: 3936274 - DNA, 25 bp, Homo sapien
gtttcccggaatgcaacaattagca

SEQ ID NO: 3936275 - DNA, 25 bp, Homo sapien
tcatagagaccggtaggaaagcgca

SEQ ID NO: 3936276 - DNA, 25 bp, Homo sapien
tatcagtgatgtcaaacgtgctcat

SEQ ID NO: 3936277 - DNA, 25 bp, Homo sapien
tcgtaggccctagacggtgttgcat

SEQ ID NO: 3936278 - DNA, 25 bp, Homo sapien
cccctgacttctgtttagtctcctt

SEQ ID NO: 3936279 - DNA, 25 bp, Homo sapien
tattatttgcagtcatggagaacca

SEQ ID NO: 3936280 - DNA, 25 bp, Homo sapien
tatttgcagtcatggagaaccacct

SEQ ID NO: 3936281 - DNA, 25 bp, Homo sapien
atggagaaccacctacccctgactt

SEQ ID NO: 3936282 - DNA, 25 bp, Homo sapien
cccactcgcaagttggagccatcag

SEQ ID NO: 3936283 - DNA, 25 bp, Homo sapien
ttacagaactgagcccactcgcaag

SEQ ID NO: 3936284 - DNA, 25 bp, Homo sapien
ccagcatcgtgtacttaccagtgtg

SEQ ID NO: 3936285 - DNA, 25 bp, Homo sapien
agtgggatacgccacattttggaag

SEQ ID NO: 3936286 - DNA, 25 bp, Homo sapien
tccttgtcaaagataccagaatggg

SEQ ID NO: 3936287 - DNA, 25 bp, Homo sapien
gaacaaaacagtgcaaccgtagagc

SEQ ID NO: 3936288 - DNA, 25 bp, Homo sapien
aacgttgatcacctttgaagcctgc

SEQ ID NO: 3936289 - DNA, 25 bp, Homo sapien
aatgttatagacttgcagcgtgccg

SEQ ID NO: 3936290 - DNA, 25 bp, Homo sapien
cggaccctgaaaaaccgcggctatg

SEQ ID NO: 3936291 - DNA, 25 bp, Homo sapien
aagtcgaccacctcaagcaggagat

SEQ ID NO: 3936292 - DNA, 25 bp, Homo sapien
tgagcagcggcttccgagaaaacgg

SEQ ID NO: 3936293 - DNA, 25 bp, Homo sapien
cagagacacgtcctggagtcggaga

SEQ ID NO: 3936294 - DNA, 25 bp, Homo sapien
gcggcctgcacttcgacgaccgctt

SEQ ID NO: 3936295 - DNA, 25 bp, Homo sapien
cggcggcctgcacttcgacgaccgc

SEQ ID NO: 3936296 - DNA, 25 bp, Homo sapien
gccgccggcggcctgcacttcgacg

SEQ ID NO: 3936297 - DNA, 25 bp, Homo sapien
cgccggcggcctgcacttcgacgac

SEQ ID NO: 3936298 - DNA, 25 bp, Homo sapien
aggaaccggtggagaccgaccgcat

SEQ ID NO: 3936299 - DNA, 25 bp, Homo sapien
gaatatgttaatgacttcgatctga

SEQ ID NO: 3936300 - DNA, 25 bp, Homo sapien
atcatcagccagtgcggccgtctca

SEQ ID NO: 3936301 - DNA, 25 bp, Homo sapien
cagtcccctggccatggaatatgtt

SEQ ID NO: 3936302 - DNA, 25 bp, Homo sapien
ttatctcgcataggcgctcgctctg

SEQ ID NO: 3936303 - DNA, 25 bp, Homo sapien
tgagcttccccggagttatctcgca

SEQ ID NO: 3936304 - DNA, 25 bp, Homo sapien
tgtaaagagagggataaaatgggct

SEQ ID NO: 3936305 - DNA, 25 bp, Homo sapien
cagccggtctccgtgaagaatggcc

SEQ ID NO: 3936306 - DNA, 25 bp, Homo sapien
cctgccacgatcaagtccgaaataa

SEQ ID NO: 3936307 - DNA, 25 bp, Homo sapien
acgtaaaagtgcaaagggcgcgcct

SEQ ID NO: 3936308 - DNA, 25 bp, Homo sapien
ttaacccttcgagggtagctggtga

SEQ ID NO: 3936309 - DNA, 25 bp, Homo sapien
cgatcaagtccgaaataattaaagg

SEQ ID NO: 3936310 - DNA, 25 bp, Homo sapien
ttaattgaaggaatcaacagtccca

SEQ ID NO: 3936311 - DNA, 25 bp, Homo sapien
gtcccaacttctaagcagacgggct

SEQ ID NO: 3936312 - DNA, 25 bp, Homo sapien
cagacgggctggtcttccaaaggct

SEQ ID NO: 3936313 - DNA, 25 bp, Homo sapien
tccaaaggctgggtcggtttcagga

SEQ ID NO: 3936314 - DNA, 25 bp, Homo sapien
gaagtctaaagacatgtggcccact

SEQ ID NO: 3936315 - DNA, 25 bp, Homo sapien
taaaaataccatgtcttcacagcag

SEQ ID NO: 3936316 - DNA, 25 bp, Homo sapien
tgtaaatgtttagacacccctgtga

SEQ ID NO: 3936317 - DNA, 25 bp, Homo sapien
aatgggcgactataaaagaccttgc

SEQ ID NO: 3936318 - DNA, 25 bp, Homo sapien
gaagaaacccaggaaatctattgac

SEQ ID NO: 3936319 - DNA, 25 bp, Homo sapien
gaaacccaggaaatctattgactta

SEQ ID NO: 3936320 - DNA, 25 bp, Homo sapien
aagaaacccaggaaatctattgact

SEQ ID NO: 3936321 - DNA, 25 bp, Homo sapien
ggatgacagcagaagaacgaatcat

SEQ ID NO: 3936322 - DNA, 25 bp, Homo sapien
acaaaaatctaaggagatgcctatc

SEQ ID NO: 3936323 - DNA, 25 bp, Homo sapien
gaatcataaagctgaccctaagtga

SEQ ID NO: 3936324 - DNA, 25 bp, Homo sapien
aaaaatctaaggagatgcctatccc

SEQ ID NO: 3936325 - DNA, 25 bp, Homo sapien
agagttagcactaccgcactaccga

SEQ ID NO: 3936326 - DNA, 25 bp, Homo sapien
tgagagacacaacccgcatcaagat

SEQ ID NO: 3936327 - DNA, 25 bp, Homo sapien
agggacccctttccttaggcatcag

SEQ ID NO: 3936328 - DNA, 25 bp, Homo sapien
taatcacaggcgtctctacatttgg

SEQ ID NO: 3936329 - DNA, 25 bp, Homo sapien
cactgcacaacagttggagaaaaag

SEQ ID NO: 3936330 - DNA, 25 bp, Homo sapien
ctgcacaacagttggagaaaaaggt

SEQ ID NO: 3936331 - DNA, 25 bp, Homo sapien
gtgcactgcacaacagttggagaaa

SEQ ID NO: 3936332 - DNA, 25 bp, Homo sapien
tgcactgcacaacagttggagaaaa

SEQ ID NO: 3936333 - DNA, 25 bp, Homo sapien
gatggaatataagacactatccctg

SEQ ID NO: 3936334 - DNA, 25 bp, Homo sapien
ccatcctcacgagagttttcaaggc

SEQ ID NO: 3936335 - DNA, 25 bp, Homo sapien
ggaacacataattcatcagcactag

SEQ ID NO: 3936336 - DNA, 25 bp, Homo sapien
aattctgggacaaggaaatctccct

SEQ ID NO: 3936337 - DNA, 25 bp, Homo sapien
ttcatacaagtgatattcaattaaa

SEQ ID NO: 3936338 - DNA, 25 bp, Homo sapien
tttttcatacaagtgatattcaatt

SEQ ID NO: 3936339 - DNA, 25 bp, Homo sapien
gtgatattcaattaaagactgaggc

SEQ ID NO: 3936340 - DNA, 25 bp, Homo sapien
acaagtgatattcaattaaagactg

SEQ ID NO: 3936341 - DNA, 25 bp, Homo sapien
gcgctagactaagaggaggcctgca

SEQ ID NO: 3936342 - DNA, 25 bp, Homo sapien
ggtcacacacgtgcttcctcctagg

SEQ ID NO: 3936343 - DNA, 25 bp, Homo sapien
tgcaaaagggtagagcgctagacta

SEQ ID NO: 3936344 - DNA, 25 bp, Homo sapien
ggcaagacctggtatagctcctttc

SEQ ID NO: 3936345 - DNA, 25 bp, Homo sapien
ggtccaaatggagtagacgctcttt

SEQ ID NO: 3936346 - DNA, 25 bp, Homo sapien
ttggacccatgtaccgaacaacgtg

SEQ ID NO: 3936347 - DNA, 25 bp, Homo sapien
ccttgggcgccctggaggtccaaat

SEQ ID NO: 3936348 - DNA, 25 bp, Homo sapien
gaacaacgtggatgaccttcatact

SEQ ID NO: 3936349 - DNA, 25 bp, Homo sapien
actttctcacattcaggtccaggaa

SEQ ID NO: 3936350 - DNA, 25 bp, Homo sapien
ctttctcacattcaggtccaggaag

SEQ ID NO: 3936351 - DNA, 25 bp, Homo sapien
taactccgtatatcttggtgaaatg

SEQ ID NO: 3936352 - DNA, 25 bp, Homo sapien
gaagcaggaataatagcccatagtg

SEQ ID NO: 3936353 - DNA, 25 bp, Homo sapien
ggccaaccagagtcccagtgtgcat

SEQ ID NO: 3936354 - DNA, 25 bp, Homo sapien
gcacctgtcactgcagttgaggcca

SEQ ID NO: 3936355 - DNA, 25 bp, Homo sapien
tctttcagtagtggtgactgttccg

SEQ ID NO: 3936356 - DNA, 25 bp, Homo sapien
agacacgtctttcagtagtggtgac

SEQ ID NO: 3936357 - DNA, 25 bp, Homo sapien
gagtctgggtaaagttcatattgtg

SEQ ID NO: 3936358 - DNA, 25 bp, Homo sapien
gttcatattgtgagacacgtctttc

SEQ ID NO: 3936359 - DNA, 25 bp, Homo sapien
aatccacagcggacagaacaaagag

SEQ ID NO: 3936360 - DNA, 25 bp, Homo sapien
aaattcagcaaaaccccagcatggg

SEQ ID NO: 3936361 - DNA, 25 bp, Homo sapien
ccagcatgggataaacagagcccag

SEQ ID NO: 3936362 - DNA, 25 bp, Homo sapien
aacaaagagcgtggcgattgtcagg

SEQ ID NO: 3936363 - DNA, 25 bp, Homo sapien
caaggaccataagctcttcacagag

SEQ ID NO: 3936364 - DNA, 25 bp, Homo sapien
tgtgaagacccatttcccgcaccag

SEQ ID NO: 3936365 - DNA, 25 bp, Homo sapien
ctgaaatctgattccgcgtccttga

SEQ ID NO: 3936366 - DNA, 25 bp, Homo sapien
gccttccaaggctgtccactgtatt

SEQ ID NO: 3936367 - DNA, 25 bp, Homo sapien
taaagagacgaactccgagcttgac

SEQ ID NO: 3936368 - DNA, 25 bp, Homo sapien
gaactccgagcttgacgtgacaagt

SEQ ID NO: 3936369 - DNA, 25 bp, Homo sapien
cgagcttgacgtgacaagttttcca

SEQ ID NO: 3936370 - DNA, 25 bp, Homo sapien
ttataggtaaagagacgaactccga

SEQ ID NO: 3936371 - DNA, 25 bp, Homo sapien
gacaagatccagtggcttccagaga

SEQ ID NO: 3936372 - DNA, 25 bp, Homo sapien
gcagcattaatcaggacatcattcc

SEQ ID NO: 3936373 - DNA, 25 bp, Homo sapien
tacctaattagaagggattccagac

SEQ ID NO: 3936374 - DNA, 25 bp, Homo sapien
tgctatgaacatgtatgcgatccgt

SEQ ID NO: 3936375 - DNA, 25 bp, Homo sapien
tgccattattttgtggctccctttg

SEQ ID NO: 3936376 - DNA, 25 bp, Homo sapien
gggttgtgcaccacaagtctaatat

SEQ ID NO: 3936377 - DNA, 25 bp, Homo sapien
tggttgataagtgaacgttgcacgt

SEQ ID NO: 3936378 - DNA, 25 bp, Homo sapien
cctttgcgtgggcatgtttgtaagc

SEQ ID NO: 3936379 - DNA, 25 bp, Homo sapien
cagagaatcttcatcacaccccaaa

SEQ ID NO: 3936380 - DNA, 25 bp, Homo sapien
tctcagccgctggaaccacgaattt

SEQ ID NO: 3936381 - DNA, 25 bp, Homo sapien
tcctgttcccattaagtagtaactc

SEQ ID NO: 3936382 - DNA, 25 bp, Homo sapien
gacagaatggtgtagccacatcagg

SEQ ID NO: 3936383 - DNA, 25 bp, Homo sapien
caagcatcaccaaatcaatattgaa

SEQ ID NO: 3936384 - DNA, 25 bp, Homo sapien
aaccaagcatcaccaaatcaatatt

SEQ ID NO: 3936385 - DNA, 25 bp, Homo sapien
ccaagcatcaccaaatcaatattga

SEQ ID NO: 3936386 - DNA, 25 bp, Homo sapien
gcatcaccaaatcaatattgaaaca

SEQ ID NO: 3936387 - DNA, 25 bp, Homo sapien
aatgagagctggcttggtgcacacc

SEQ ID NO: 3936388 - DNA, 25 bp, Homo sapien
ctaaccctgtaccaacccagataat

SEQ ID NO: 3936389 - DNA, 25 bp, Homo sapien
ggtgagtccaaactttgcacaaaag

SEQ ID NO: 3936390 - DNA, 25 bp, Homo sapien
aacttctaatagaatatctttgccc

SEQ ID NO: 3936391 - DNA, 25 bp, Homo sapien
ccagtgctatattgggaaagttatc

SEQ ID NO: 3936392 - DNA, 25 bp, Homo sapien
catagactgagtttccaaccctgaa

SEQ ID NO: 3936393 - DNA, 25 bp, Homo sapien
tgcaatttgaatggcccaagacctt

SEQ ID NO: 3936394 - DNA, 25 bp, Homo sapien
cagacccagaagattcacagttttg

SEQ ID NO: 3936395 - DNA, 25 bp, Homo sapien
agaattactactggctctgcattga

SEQ ID NO: 3936396 - DNA, 25 bp, Homo sapien
cattgaggggcttatcgtactgaag

SEQ ID NO: 3936397 - DNA, 25 bp, Homo sapien
ccttgtgagcataaagaattactac

SEQ ID NO: 3936398 - DNA, 25 bp, Homo sapien
gagaacatgtgataaaccttgtgag

SEQ ID NO: 3936399 - DNA, 25 bp, Homo sapien
gcagcacacgaagaataagcaggaa

SEQ ID NO: 3936400 - DNA, 25 bp, Homo sapien
tcacggagtagtggagtaagcctct

SEQ ID NO: 3936401 - DNA, 25 bp, Homo sapien
gagtaagcctcttcagcaacccagg

SEQ ID NO: 3936402 - DNA, 25 bp, Homo sapien
gaagtggcagcacacgaagaataag

SEQ ID NO: 3936403 - DNA, 25 bp, Homo sapien
caagcacagtcaaatagctgttggc

SEQ ID NO: 3936404 - DNA, 25 bp, Homo sapien
tggctgttgactggaaggcactccc

SEQ ID NO: 3936405 - DNA, 25 bp, Homo sapien
gcattgttcagtcctttgtggaggc

SEQ ID NO: 3936406 - DNA, 25 bp, Homo sapien
catctgaagggttaactaaacggag

SEQ ID NO: 3936407 - DNA, 25 bp, Homo sapien
ataaggtagaggccatttcactata

SEQ ID NO: 3936408 - DNA, 25 bp, Homo sapien
caaacatgttatcactgaagaactt

SEQ ID NO: 3936409 - DNA, 25 bp, Homo sapien
attcaaaataaggtagaggccattt

SEQ ID NO: 3936410 - DNA, 25 bp, Homo sapien
aacatgttatcactgaagaacttta

SEQ ID NO: 3936411 - DNA, 25 bp, Homo sapien
ctgctccttggagagttgaagcctc

SEQ ID NO: 3936412 - DNA, 25 bp, Homo sapien
atttccttgtggttaggatgctgaa

SEQ ID NO: 3936413 - DNA, 25 bp, Homo sapien
ggatgctgaaaaggcctagtgtggc

SEQ ID NO: 3936414 - DNA, 25 bp, Homo sapien
tccttggagagttgaagcctccaga

SEQ ID NO: 3936415 - DNA, 25 bp, Homo sapien
gtggacacacagttggcgctgttag

SEQ ID NO: 3936416 - DNA, 25 bp, Homo sapien
taggatgtcctcagggtaaggactg

SEQ ID NO: 3936417 - DNA, 25 bp, Homo sapien
ggcgctgttagtgctgaatgaatca

SEQ ID NO: 3936418 - DNA, 25 bp, Homo sapien
tgaatcagcacctatggtaggaggg

SEQ ID NO: 3936419 - DNA, 25 bp, Homo sapien
gttaggccacccacaacaagtataa

SEQ ID NO: 3936420 - DNA, 25 bp, Homo sapien
ggtatgagttggacacccagatgtt

SEQ ID NO: 3936421 - DNA, 25 bp, Homo sapien
tcagagtagagataaacagggacgt

SEQ ID NO: 3936422 - DNA, 25 bp, Homo sapien
tgtcaggctaaagagaatcccttct

SEQ ID NO: 3936423 - DNA, 25 bp, Homo sapien
gcttcctgcatcatgtttaaggcca

SEQ ID NO: 3936424 - DNA, 25 bp, Homo sapien
cagctttctatctctcctagtattg

SEQ ID NO: 3936425 - DNA, 25 bp, Homo sapien
tgcatcatgtttaaggccagctttc

SEQ ID NO: 3936426 - DNA, 25 bp, Homo sapien
tatctctcctagtattgacgtcaat

SEQ ID NO: 3936427 - DNA, 25 bp, Homo sapien
tcccatcgccctccagcgttgcgca

SEQ ID NO: 3936428 - DNA, 25 bp, Homo sapien
tgtgtggagctcccatcgccctcca

SEQ ID NO: 3936429 - DNA, 25 bp, Homo sapien
ccatcgccctccagcgttgcgcagc

SEQ ID NO: 3936430 - DNA, 25 bp, Homo sapien
gagctcccatcgccctccagcgttg

SEQ ID NO: 3936431 - DNA, 25 bp, Homo sapien
atcaaatcttgcaccactgagttgg

SEQ ID NO: 3936432 - DNA, 25 bp, Homo sapien
atggctggggctcgtcagctgcttc

SEQ ID NO: 3936433 - DNA, 25 bp, Homo sapien
ttccaatcaaatcttgcaccactga

SEQ ID NO: 3936434 - DNA, 25 bp, Homo sapien
ggctggggctcgtcagctgcttcca

SEQ ID NO: 3936435 - DNA, 25 bp, Homo sapien
gcaagtgcctcgcttcagggagctt

SEQ ID NO: 3936436 - DNA, 25 bp, Homo sapien
aaatatgtattaactggtaaccctg

SEQ ID NO: 3936437 - DNA, 25 bp, Homo sapien
tgtgtcagtctctgatcagagcaag

SEQ ID NO: 3936438 - DNA, 25 bp, Homo sapien
tatgcattgaagtatcctaaaaata

SEQ ID NO: 3936439 - DNA, 25 bp, Homo sapien
gagcaaatcttggtaccttctgagg

SEQ ID NO: 3936440 - DNA, 25 bp, Homo sapien
tgaggaaggcggtcctttaaggaca

SEQ ID NO: 3936441 - DNA, 25 bp, Homo sapien
tgacttccaaaatcaagtctgtgtc

SEQ ID NO: 3936442 - DNA, 25 bp, Homo sapien
gacatagtgaatccatgacttccaa

SEQ ID NO: 3936443 - DNA, 25 bp, Homo sapien
catggtcttcggatgtgctaggatg

SEQ ID NO: 3936444 - DNA, 25 bp, Homo sapien
cagctttaaagtcatggtcttcgga

SEQ ID NO: 3936445 - DNA, 25 bp, Homo sapien
ttaaagtcatggtcttcggatgtgc

SEQ ID NO: 3936446 - DNA, 25 bp, Homo sapien
tcttcggatgtgctaggatgttctt

SEQ ID NO: 3936447 - DNA, 25 bp, Homo sapien
tctccgtgggccctactggccattt

SEQ ID NO: 3936448 - DNA, 25 bp, Homo sapien
catgaccaaattggccatagcgcat

SEQ ID NO: 3936449 - DNA, 25 bp, Homo sapien
gatataatcgaataatggctgaaat

SEQ ID NO: 3936450 - DNA, 25 bp, Homo sapien
ccactgatcagatataatcgaataa

SEQ ID NO: 3936451 - DNA, 25 bp, Homo sapien
taaaaggatgaacaagatagtgcat

SEQ ID NO: 3936452 - DNA, 25 bp, Homo sapien
gattttacaatgcagcgaggcactg

SEQ ID NO: 3936453 - DNA, 25 bp, Homo sapien
ggccctgccttggagagcttagcgt

SEQ ID NO: 3936454 - DNA, 25 bp, Homo sapien
cggtctacaaggctgggtagtactg

SEQ ID NO: 3936455 - DNA, 25 bp, Homo sapien
ttttacaatgcagcgaggcactgga

SEQ ID NO: 3936456 - DNA, 25 bp, Homo sapien
aacagaactcttttcacgtcgttcg

SEQ ID NO: 3936457 - DNA, 25 bp, Homo sapien
actcttttcacgtcgttcgctctga

SEQ ID NO: 3936458 - DNA, 25 bp, Homo sapien
cagaactcttttcacgtcgttcgct

SEQ ID NO: 3936459 - DNA, 25 bp, Homo sapien
tttcacgtcgttcgctctgatttgt

SEQ ID NO: 3936460 - DNA, 25 bp, Homo sapien
gtggatcctgaggtcttcaggtggg

SEQ ID NO: 3936461 - DNA, 25 bp, Homo sapien
gcaaggcagccacagttgagttggt

SEQ ID NO: 3936462 - DNA, 25 bp, Homo sapien
tcagcttgcagatttggtaaagagc

SEQ ID NO: 3936463 - DNA, 25 bp, Homo sapien
cttgaaacagcttccgaggtgtctt

SEQ ID NO: 3936464 - DNA, 25 bp, Homo sapien
catgttcccatttgtgctgacgtgt

SEQ ID NO: 3936465 - DNA, 25 bp, Homo sapien
tgttcccatttgtgctgacgtgtgc

SEQ ID NO: 3936466 - DNA, 25 bp, Homo sapien
atgttcccatttgtgctgacgtgtg

SEQ ID NO: 3936467 - DNA, 25 bp, Homo sapien
cccatttgtgctgacgtgtgcaggc

SEQ ID NO: 3936468 - DNA, 25 bp, Homo sapien
ccgaagtgtcgggagctcgtgctcc

SEQ ID NO: 3936469 - DNA, 25 bp, Homo sapien
tgctcagagtccacgaggggtgctc

SEQ ID NO: 3936470 - DNA, 25 bp, Homo sapien
gggttttccatggtgctgtaacaaa

SEQ ID NO: 3936471 - DNA, 25 bp, Homo sapien
actgaagcctccaggcgagaatcca

SEQ ID NO: 3936472 - DNA, 25 bp, Homo sapien
gattctcatgtggataaaaggaggc

SEQ ID NO: 3936473 - DNA, 25 bp, Homo sapien
gctgcaagacttggagttggtgatg

SEQ ID NO: 3936474 - DNA, 25 bp, Homo sapien
tttttccagggcaatgaagaaggtg

SEQ ID NO: 3936475 - DNA, 25 bp, Homo sapien
tattaggacaattggccatttgtgt

SEQ ID NO: 3936476 - DNA, 25 bp, Homo sapien
cctccccatcctgatctttaaaatg

SEQ ID NO: 3936477 - DNA, 25 bp, Homo sapien
cagtgtaacttctaacaacttcctt

SEQ ID NO: 3936478 - DNA, 25 bp, Homo sapien
ttcagtgtaacttctaacaacttcc

SEQ ID NO: 3936479 - DNA, 25 bp, Homo sapien
aatacagtaataccagcagcaccta

SEQ ID NO: 3936480 - DNA, 25 bp, Homo sapien
taatgaggctcattttattacaagg

SEQ ID NO: 3936481 - DNA, 25 bp, Homo sapien
tattacaaggtagccatatcaaact

SEQ ID NO: 3936482 - DNA, 25 bp, Homo sapien
tctcggaaaggaagtcaaaactcca

SEQ ID NO: 3936483 - DNA, 25 bp, Homo sapien
caaactatcatatcttaccttatac

SEQ ID NO: 3936484 - DNA, 25 bp, Homo sapien
ctggctggtgtagggatattctcca

SEQ ID NO: 3936485 - DNA, 25 bp, Homo sapien
gcatgcatacagagggtgctatggt

SEQ ID NO: 3936486 - DNA, 25 bp, Homo sapien
ggtggcctgagattgtagcaactgt

SEQ ID NO: 3936487 - DNA, 25 bp, Homo sapien
gtgtagggatattctccaccaagcc

SEQ ID NO: 3936488 - DNA, 25 bp, Homo sapien
tccaaccagaggatagaatcaagct

SEQ ID NO: 3936489 - DNA, 25 bp, Homo sapien
tctacagaatcatgggagcaatgtg

SEQ ID NO: 3936490 - DNA, 25 bp, Homo sapien
tagattccacctttgcccatgggca

SEQ ID NO: 3936491 - DNA, 25 bp, Homo sapien
gttgaaacccacttcttctacagaa

SEQ ID NO: 3936492 - DNA, 25 bp, Homo sapien
atcttcaggaaaacgcagattcaga

SEQ ID NO: 3936493 - DNA, 25 bp, Homo sapien
gcagattcagaataactcagctttt

SEQ ID NO: 3936494 - DNA, 25 bp, Homo sapien
tattcatgcagggttgtaagttgat

SEQ ID NO: 3936495 - DNA, 25 bp, Homo sapien
caggaaaacgcagattcagaataac

SEQ ID NO: 3936496 - DNA, 25 bp, Homo sapien
tcattaaccctgcaaaacaagcctg

SEQ ID NO: 3936497 - DNA, 25 bp, Homo sapien
tctaaaccagagagtgccttcaagg

SEQ ID NO: 3936498 - DNA, 25 bp, Homo sapien
tctgggtggagtgcctatcaataca

SEQ ID NO: 3936499 - DNA, 25 bp, Homo sapien
ttttagaggagacgaaccaggatgg

SEQ ID NO: 3936500 - DNA, 25 bp, Homo sapien
agaacatgtgctcctattgctgctt

SEQ ID NO: 3936501 - DNA, 25 bp, Homo sapien
gctcctattgctgcttgggtaggaa

SEQ ID NO: 3936502 - DNA, 25 bp, Homo sapien
aaagaggatgtcagataacactctc

SEQ ID NO: 3936503 - DNA, 25 bp, Homo sapien
cttgggtaggaagagttgaagtgga

SEQ ID NO: 3936504 - DNA, 25 bp, Homo sapien
ctctgcagcgatgatactttgcaat

SEQ ID NO: 3936505 - DNA, 25 bp, Homo sapien
gcagcgatgatactttgcaatcaca

SEQ ID NO: 3936506 - DNA, 25 bp, Homo sapien
tctgcagcgatgatactttgcaatc

SEQ ID NO: 3936507 - DNA, 25 bp, Homo sapien
tgcagcgatgatactttgcaatcac

SEQ ID NO: 3936508 - DNA, 25 bp, Homo sapien
gctgtaaccttcttactgacagctg

SEQ ID NO: 3936509 - DNA, 25 bp, Homo sapien
tgcttttatgacgtcctttgttggg

SEQ ID NO: 3936510 - DNA, 25 bp, Homo sapien
gggatgcttttatgacgtcctttgt

SEQ ID NO: 3936511 - DNA, 25 bp, Homo sapien
gacagctgaaggtgggacacagcct

SEQ ID NO: 3936512 - DNA, 25 bp, Homo sapien
actgccctcagagtattttacagag

SEQ ID NO: 3936513 - DNA, 25 bp, Homo sapien
gaaaagaaatggtcgatattcagac

SEQ ID NO: 3936514 - DNA, 25 bp, Homo sapien
aatggtcgatattcagactgccctc

SEQ ID NO: 3936515 - DNA, 25 bp, Homo sapien
cctcagagtattttacagaggctac

SEQ ID NO: 3936516 - DNA, 25 bp, Homo sapien
tacgtttctcttgaatttgcgtggg

SEQ ID NO: 3936517 - DNA, 25 bp, Homo sapien
cccgtctgcttgtctttcagggctg

SEQ ID NO: 3936518 - DNA, 25 bp, Homo sapien
aagaggttgtactgggcaggcccag

SEQ ID NO: 3936519 - DNA, 25 bp, Homo sapien
cctgtagcccatcattacgtttctc

SEQ ID NO: 3936520 - DNA, 25 bp, Homo sapien
tacagctttgaagaactgccaaaga

SEQ ID NO: 3936521 - DNA, 25 bp, Homo sapien
ctacagctttgaagaactgccaaag

SEQ ID NO: 3936522 - DNA, 25 bp, Homo sapien
aactgccaaagatagggaggtagag

SEQ ID NO: 3936523 - DNA, 25 bp, Homo sapien
gaagaactgccaaagatagggaggt

SEQ ID NO: 3936524 - DNA, 25 bp, Homo sapien
tggtttgctgatcctacccagatta

SEQ ID NO: 3936525 - DNA, 25 bp, Homo sapien
gctgatcctacccagattagaatga

SEQ ID NO: 3936526 - DNA, 25 bp, Homo sapien
ttgctgatcctacccagattagaat

SEQ ID NO: 3936527 - DNA, 25 bp, Homo sapien
gtttgctgatcctacccagattaga

SEQ ID NO: 3936528 - DNA, 25 bp, Homo sapien
tgctcccggacacctctgtacccta

SEQ ID NO: 3936529 - DNA, 25 bp, Homo sapien
ggacacctctgtaccctagctcgaa

SEQ ID NO: 3936530 - DNA, 25 bp, Homo sapien
tgagaggtgataccacctgtcatca

SEQ ID NO: 3936531 - DNA, 25 bp, Homo sapien
tgtaccctagctcgaagctttgtct

SEQ ID NO: 3936532 - DNA, 25 bp, Homo sapien
caggataagttggtggtgaaagggc

SEQ ID NO: 3936533 - DNA, 25 bp, Homo sapien
aaccgtgtgaatggcagacagccgc

SEQ ID NO: 3936534 - DNA, 25 bp, Homo sapien
gtcctgggagcagacaagtgggagt

SEQ ID NO: 3936535 - DNA, 25 bp, Homo sapien
tttggagggaggtccacactgcatc

SEQ ID NO: 3936536 - DNA, 25 bp, Homo sapien
gacttctatgttgccaagcgtcacc

SEQ ID NO: 3936537 - DNA, 25 bp, Homo sapien
tcaaggatgtttacaagagacttcc

SEQ ID NO: 3936538 - DNA, 25 bp, Homo sapien
aagttgagacttgcctcagagggac

SEQ ID NO: 3936539 - DNA, 25 bp, Homo sapien
taatgggtggcataaggcttcccag

SEQ ID NO: 3936540 - DNA, 25 bp, Homo sapien
tagcctctatttcaattgttatcac

SEQ ID NO: 3936541 - DNA, 25 bp, Homo sapien
cacttgtgacatgtttccggtgtca

SEQ ID NO: 3936542 - DNA, 25 bp, Homo sapien
ccggtgtcaaggaatagataatgtc

SEQ ID NO: 3936543 - DNA, 25 bp, Homo sapien
tatcaccctaggtccagaggaactg

SEQ ID NO: 3936544 - DNA, 25 bp, Homo sapien
gatttgggcttttgcatcaacaagc

SEQ ID NO: 3936545 - DNA, 25 bp, Homo sapien
cagcggtcgcagacagttctggaaa

SEQ ID NO: 3936546 - DNA, 25 bp, Homo sapien
tcaacaagcccaataagttggagga

SEQ ID NO: 3936547 - DNA, 25 bp, Homo sapien
agacaagcttcccattaaaacagcg

SEQ ID NO: 3936548 - DNA, 25 bp, Homo sapien
tcttcacctggaagtctcttctcca

SEQ ID NO: 3936549 - DNA, 25 bp, Homo sapien
gtctcctctgcgcacgttttctgga

SEQ ID NO: 3936550 - DNA, 25 bp, Homo sapien
gtttccactcaattgttcaggtctc

SEQ ID NO: 3936551 - DNA, 25 bp, Homo sapien
taggaagtccttacacccttcttca

SEQ ID NO: 3936552 - DNA, 25 bp, Homo sapien
cctaaaaccacacttgacagatgct

SEQ ID NO: 3936553 - DNA, 25 bp, Homo sapien
ctaaaaccacacttgacagatgctg

SEQ ID NO: 3936554 - DNA, 25 bp, Homo sapien
taaaaccacacttgacagatgctga

SEQ ID NO: 3936555 - DNA, 25 bp, Homo sapien
cttctcccatggtcttgggatccca

SEQ ID NO: 3936556 - DNA, 25 bp, Homo sapien
agccttctcccatggtcttgggatc

SEQ ID NO: 3936557 - DNA, 25 bp, Homo sapien
gccttctcccatggtcttgggatcc

SEQ ID NO: 3936558 - DNA, 25 bp, Homo sapien
cagccttctcccatggtcttgggat

SEQ ID NO: 3936559 - DNA, 25 bp, Homo sapien
tctgcttccagaggcgtcgcttgac

SEQ ID NO: 3936560 - DNA, 25 bp, Homo sapien
taatgtggtgctgaccccgaggaat

SEQ ID NO: 3936561 - DNA, 25 bp, Homo sapien
gacatcagcactacttctccaaggt

SEQ ID NO: 3936562 - DNA, 25 bp, Homo sapien
tcaggcactgcttgtgggttctgca

SEQ ID NO: 3936563 - DNA, 25 bp, Homo sapien
tggagacagtagcatttactgtctt

SEQ ID NO: 3936564 - DNA, 25 bp, Homo sapien
tgcattttcgctaactttccaggaa

SEQ ID NO: 3936565 - DNA, 25 bp, Homo sapien
gaaagctccccgatctccaagataa

SEQ ID NO: 3936566 - DNA, 25 bp, Homo sapien
aatgtttggaaagctccccgatctc

SEQ ID NO: 3936567 - DNA, 25 bp, Homo sapien
cctctgagtgtgatctggaaggcat

SEQ ID NO: 3936568 - DNA, 25 bp, Homo sapien
aatgtgcctctgagtgtgatctgga

SEQ ID NO: 3936569 - DNA, 25 bp, Homo sapien
tggctggcatgtgaatgtgcctctg

SEQ ID NO: 3936570 - DNA, 25 bp, Homo sapien
ggcatgtgaatgtgcctctgagtgt

SEQ ID NO: 3936571 - DNA, 25 bp, Homo sapien
caatgtaaaccagccaggtgcctgg

SEQ ID NO: 3936572 - DNA, 25 bp, Homo sapien
tgggaagccacaatgtaaaccagcc

SEQ ID NO: 3936573 - DNA, 25 bp, Homo sapien
gccacaatgtaaaccagccaggtgc

SEQ ID NO: 3936574 - DNA, 25 bp, Homo sapien
cacaatgtaaaccagccaggtgcct

SEQ ID NO: 3936575 - DNA, 25 bp, Homo sapien
tcatgtggtctcttctatctgctcc

SEQ ID NO: 3936576 - DNA, 25 bp, Homo sapien
gctaaaagctttcatgtggtctctt

SEQ ID NO: 3936577 - DNA, 25 bp, Homo sapien
tctggggatatgaacggcaagcttt

SEQ ID NO: 3936578 - DNA, 25 bp, Homo sapien
gctttgaagaacagaggatgctaaa

SEQ ID NO: 3936579 - DNA, 25 bp, Homo sapien
cttccagcaagcagataaaagcacg

SEQ ID NO: 3936580 - DNA, 25 bp, Homo sapien
ttccagcaagcagataaaagcacgt

SEQ ID NO: 3936581 - DNA, 25 bp, Homo sapien
tccagcaagcagataaaagcacgtg

SEQ ID NO: 3936582 - DNA, 25 bp, Homo sapien
ggggcaagggtcaggactgataatc

SEQ ID NO: 3936583 - DNA, 25 bp, Homo sapien
ctactggggcaagggtcaggactga

SEQ ID NO: 3936584 - DNA, 25 bp, Homo sapien
ctggggcaagggtcaggactgataa

SEQ ID NO: 3936585 - DNA, 25 bp, Homo sapien
gcaagggtcaggactgataatcggg

SEQ ID NO: 3936586 - DNA, 25 bp, Homo sapien
tcttctatgggaataggtccttggg

SEQ ID NO: 3936587 - DNA, 25 bp, Homo sapien
ctcggaaaaccactgggtagatcct

SEQ ID NO: 3936588 - DNA, 25 bp, Homo sapien
ccacagaagctcttctatgggaata

SEQ ID NO: 3936589 - DNA, 25 bp, Homo sapien
tgggtagatcctctctaacacccct

SEQ ID NO: 3936590 - DNA, 25 bp, Homo sapien
ctgtgacacggacaataggtgatgg

SEQ ID NO: 3936591 - DNA, 25 bp, Homo sapien
catggcattcgaacagcaggaaagg

SEQ ID NO: 3936592 - DNA, 25 bp, Homo sapien
gcaggaaaggctcatgccgctcggc

SEQ ID NO: 3936593 - DNA, 25 bp, Homo sapien
caacttcaaaattccgctgggccca

SEQ ID NO: 3936594 - DNA, 25 bp, Homo sapien
tgccgctcggcacttctagacttga

SEQ ID NO: 3936595 - DNA, 25 bp, Homo sapien
gaaattgtcgccttcatatggttgt

SEQ ID NO: 3936596 - DNA, 25 bp, Homo sapien
tgaaattgtcgccttcatatggttg

SEQ ID NO: 3936597 - DNA, 25 bp, Homo sapien
gaaccctttgcagctagggtcacaa

SEQ ID NO: 3936598 - DNA, 25 bp, Homo sapien
ccagaaccctttgcagctagggtca

SEQ ID NO: 3936599 - DNA, 25 bp, Homo sapien
acaggattgtcggtgaagtttaagg

SEQ ID NO: 3936600 - DNA, 25 bp, Homo sapien
gcacaggattgtcggtgaagtttaa

SEQ ID NO: 3936601 - DNA, 25 bp, Homo sapien
gctcttttgtagcagcccacatgga

SEQ ID NO: 3936602 - DNA, 25 bp, Homo sapien
aatattcgcattcttcagatgccag

SEQ ID NO: 3936603 - DNA, 25 bp, Homo sapien
tccgagaacagaagcaactgcaagg

SEQ ID NO: 3936604 - DNA, 25 bp, Homo sapien
tctgggaaaacgtggaggccagccc

SEQ ID NO: 3936605 - DNA, 25 bp, Homo sapien
ttgttggcggttcccctgtctcagg

SEQ ID NO: 3936606 - DNA, 25 bp, Homo sapien
gtaacaatggctggtgggatcttcc

SEQ ID NO: 3936607 - DNA, 25 bp, Homo sapien
cctcttgactgaagggtggttcaac

SEQ ID NO: 3936608 - DNA, 25 bp, Homo sapien
gggatcttcctatcacgttgaccag

SEQ ID NO: 3936609 - DNA, 25 bp, Homo sapien
gaagaacagggaggacggtgggcat

SEQ ID NO: 3936610 - DNA, 25 bp, Homo sapien
cggatgtggctgtaacaataatgat

SEQ ID NO: 3936611 - DNA, 25 bp, Homo sapien
gtgtgaagaacagggaggacggtgg

SEQ ID NO: 3936612 - DNA, 25 bp, Homo sapien
taatgattttcggagtaggagtgat

SEQ ID NO: 3936613 - DNA, 25 bp, Homo sapien
ttgggtctcgaggaataggctcctt

SEQ ID NO: 3936614 - DNA, 25 bp, Homo sapien
tcctcgagttggaaaattgggtctc

SEQ ID NO: 3936615 - DNA, 25 bp, Homo sapien
ttggaaaattgggtctcgaggaata

SEQ ID NO: 3936616 - DNA, 25 bp, Homo sapien
tgcttggcttttcctcgagttggaa

SEQ ID NO: 3936617 - DNA, 25 bp, Homo sapien
gagattgagagtcttataatcatga

SEQ ID NO: 3936618 - DNA, 25 bp, Homo sapien
tcacaacaaccccacgagggaagta

SEQ ID NO: 3936619 - DNA, 25 bp, Homo sapien
gaattcacatgtattgagcatttgc

SEQ ID NO: 3936620 - DNA, 25 bp, Homo sapien
gacattatgctagttgattctcaca

SEQ ID NO: 3936621 - DNA, 25 bp, Homo sapien
tctgccacttctctaatctttgccc

SEQ ID NO: 3936622 - DNA, 25 bp, Homo sapien
cagagatatcagccagttatctgcc

SEQ ID NO: 3936623 - DNA, 25 bp, Homo sapien
atctgccacttctctaatctttgcc

SEQ ID NO: 3936624 - DNA, 25 bp, Homo sapien
ctgccacttctctaatctttgccct

SEQ ID NO: 3936625 - DNA, 25 bp, Homo sapien
cttggagaagccgtactctatagtg

SEQ ID NO: 3936626 - DNA, 25 bp, Homo sapien
gccgtactctatagtgaaagagact

SEQ ID NO: 3936627 - DNA, 25 bp, Homo sapien
tgtttcagcaatgctgattaactct

SEQ ID NO: 3936628 - DNA, 25 bp, Homo sapien
ctctatagtgaaagagacttagaac

SEQ ID NO: 3936629 - DNA, 25 bp, Homo sapien
ggaaggaagttgactatgtccacac

SEQ ID NO: 3936630 - DNA, 25 bp, Homo sapien
aggaagttgactatgtccacactgg

SEQ ID NO: 3936631 - DNA, 25 bp, Homo sapien
aagttgactatgtccacactggtct

SEQ ID NO: 3936632 - DNA, 25 bp, Homo sapien
tcttcccatcgggaaggaagttgac

SEQ ID NO: 3936633 - DNA, 25 bp, Homo sapien
ggatcccggctgttgacacagtact

SEQ ID NO: 3936634 - DNA, 25 bp, Homo sapien
tggatcccggctgttgacacagtac

SEQ ID NO: 3936635 - DNA, 25 bp, Homo sapien
ccagacattgtctagatctacgact

SEQ ID NO: 3936636 - DNA, 25 bp, Homo sapien
ttcggatccattggctgtttgggca

SEQ ID NO: 3936637 - DNA, 25 bp, Homo sapien
gctttttgtgggcaatttcggatcc

SEQ ID NO: 3936638 - DNA, 25 bp, Homo sapien
ttctttgcataaccgagcatcgtgc

SEQ ID NO: 3936639 - DNA, 25 bp, Homo sapien
tccttgctgaacatgctccctgctt

SEQ ID NO: 3936640 - DNA, 25 bp, Homo sapien
ccttgctgaacatgctccctgcttt

SEQ ID NO: 3936641 - DNA, 25 bp, Homo sapien
ctccttgctgaacatgctccctgct

SEQ ID NO: 3936642 - DNA, 25 bp, Homo sapien
ttgtaagagctatttcaatgccccg

SEQ ID NO: 3936643 - DNA, 25 bp, Homo sapien
atgagctgaattgctaagggtcgtt

SEQ ID NO: 3936644 - DNA, 25 bp, Homo sapien
ccccgtgcaaacatttcatgagctg

SEQ ID NO: 3936645 - DNA, 25 bp, Homo sapien
caatgccccgtgcaaacatttcatg

SEQ ID NO: 3936646 - DNA, 25 bp, Homo sapien
tgtaggaagctcacactgataactt

SEQ ID NO: 3936647 - DNA, 25 bp, Homo sapien
gccagtgttgcgaaatgttttgtag

SEQ ID NO: 3936648 - DNA, 25 bp, Homo sapien
tgataacttcttgtactcaggccag

SEQ ID NO: 3936649 - DNA, 25 bp, Homo sapien
tttgtagggtagtttctgggctgcc

SEQ ID NO: 3936650 - DNA, 25 bp, Homo sapien
agaagacatcccaactacgaagccc

SEQ ID NO: 3936651 - DNA, 25 bp, Homo sapien
gtagaagacatcccaactacgaagc

SEQ ID NO: 3936652 - DNA, 25 bp, Homo sapien
tagaagacatcccaactacgaagcc

SEQ ID NO: 3936653 - DNA, 25 bp, Homo sapien
aagacatcccaactacgaagcccat

SEQ ID NO: 3936654 - DNA, 25 bp, Homo sapien
tcaagggcaagaagacctggacgct

SEQ ID NO: 3936655 - DNA, 25 bp, Homo sapien
agggcaagaagacctggacgctctt

SEQ ID NO: 3936656 - DNA, 25 bp, Homo sapien
ggcaagaagacctggacgctcttgg

SEQ ID NO: 3936657 - DNA, 25 bp, Homo sapien
caagggcaagaagacctggacgctc

SEQ ID NO: 3936658 - DNA, 25 bp, Homo sapien
catagagcaggctccatgtgcatca

SEQ ID NO: 3936659 - DNA, 25 bp, Homo sapien
agagcaggctccatgtgcatcacgt

SEQ ID NO: 3936660 - DNA, 25 bp, Homo sapien
tcacatagagcaggctccatgtgca

SEQ ID NO: 3936661 - DNA, 25 bp, Homo sapien
tagagcaggctccatgtgcatcacg

SEQ ID NO: 3936662 - DNA, 25 bp, Homo sapien
ggctgacagtattctccagaatgac

SEQ ID NO: 3936663 - DNA, 25 bp, Homo sapien
gctgacagtattctccagaatgacc

SEQ ID NO: 3936664 - DNA, 25 bp, Homo sapien
gacagtattctccagaatgacccct

SEQ ID NO: 3936665 - DNA, 25 bp, Homo sapien
agtattctccagaatgacccctttc

SEQ ID NO: 3936666 - DNA, 25 bp, Homo sapien
aggagtataagggttaacttctgca

SEQ ID NO: 3936667 - DNA, 25 bp, Homo sapien
tgcaggcagagggtggttcctcttt

SEQ ID NO: 3936668 - DNA, 25 bp, Homo sapien
caggcagagggtggttcctctttct

SEQ ID NO: 3936669 - DNA, 25 bp, Homo sapien
gtataagggttaacttctgcaggca

SEQ ID NO: 3936670 - DNA, 25 bp, Homo sapien
gcacctgataaactcaggcttgggc

SEQ ID NO: 3936671 - DNA, 25 bp, Homo sapien
agtgaaaggacagcattccccttgc

SEQ ID NO: 3936672 - DNA, 25 bp, Homo sapien
ggtgtcttgcatggagcacctgata

SEQ ID NO: 3936673 - DNA, 25 bp, Homo sapien
gacttggcacgagctgttccctgag

SEQ ID NO: 3936674 - DNA, 25 bp, Homo sapien
tctagcctccctgtgtcggagccta

SEQ ID NO: 3936675 - DNA, 25 bp, Homo sapien
ctgggtggcccagtctgctcttttc

SEQ ID NO: 3936676 - DNA, 25 bp, Homo sapien
tgtggtctgggttcttttctactgg

SEQ ID NO: 3936677 - DNA, 25 bp, Homo sapien
gtcggagcctacagagcctttgaga

SEQ ID NO: 3936678 - DNA, 25 bp, Homo sapien
cttgtgtacccttcattttggtgaa

SEQ ID NO: 3936679 - DNA, 25 bp, Homo sapien
gcttgtgtacccttcattttggtga

SEQ ID NO: 3936680 - DNA, 25 bp, Homo sapien
cagggatttcgtattggtgatgtca

SEQ ID NO: 3936681 - DNA, 25 bp, Homo sapien
tggacatggccctagaatatatgct

SEQ ID NO: 3936682 - DNA, 25 bp, Homo sapien
accaacaactctcccattggatggg

SEQ ID NO: 3936683 - DNA, 25 bp, Homo sapien
taacctgttctttttcacgttgagc

SEQ ID NO: 3936684 - DNA, 25 bp, Homo sapien
tctctctgctgtcatgccgcaagcc

SEQ ID NO: 3936685 - DNA, 25 bp, Homo sapien
ggcactgctgacgtgagcagcgtgg

SEQ ID NO: 3936686 - DNA, 25 bp, Homo sapien
cactgctgacgtgagcagcgtggcc

SEQ ID NO: 3936687 - DNA, 25 bp, Homo sapien
ctcttcctgcatcgggccccctcag

SEQ ID NO: 3936688 - DNA, 25 bp, Homo sapien
aattttggaggctccctattgcctg

SEQ ID NO: 3936689 - DNA, 25 bp, Homo sapien
tttccaggtcactccataattttgg

SEQ ID NO: 3936690 - DNA, 25 bp, Homo sapien
ttggaggctccctattgcctgtggg

SEQ ID NO: 3936691 - DNA, 25 bp, Homo sapien
tccataattttggaggctccctatt

SEQ ID NO: 3936692 - DNA, 25 bp, Homo sapien
tttctttcttctcgaacaagcacgc

SEQ ID NO: 3936693 - DNA, 25 bp, Homo sapien
ctttcttctcgaacaagcacgccat

SEQ ID NO: 3936694 - DNA, 25 bp, Homo sapien
tctttgctctcaacaagataagctg

SEQ ID NO: 3936695 - DNA, 25 bp, Homo sapien
acaagataagctgttgttatttctt

SEQ ID NO: 3936696 - DNA, 25 bp, Homo sapien
ttactccaaagctgccttgtggttt

SEQ ID NO: 3936697 - DNA, 25 bp, Homo sapien
acagccacctctgattgcctggtct

SEQ ID NO: 3936698 - DNA, 25 bp, Homo sapien
tctaattgtgggaaaggtcatgtgg

SEQ ID NO: 3936699 - DNA, 25 bp, Homo sapien
gaatttctacgaccactgactctta

SEQ ID NO: 3936700 - DNA, 25 bp, Homo sapien
gctttatgttacttgaaggtggcaa

SEQ ID NO: 3936701 - DNA, 25 bp, Homo sapien
gggtgaagctttatgttacttgaag

SEQ ID NO: 3936702 - DNA, 25 bp, Homo sapien
caatctctgttggttggtacgaaga

SEQ ID NO: 3936703 - DNA, 25 bp, Homo sapien
gatatgttcgtagcaactgggctgg

SEQ ID NO: 3936704 - DNA, 25 bp, Homo sapien
gatatgcagggtcgtttcttctcga

SEQ ID NO: 3936705 - DNA, 25 bp, Homo sapien
tcttctcgagggcaacagatctttc

SEQ ID NO: 3936706 - DNA, 25 bp, Homo sapien
aaaagataccttgctgatatgcagg

SEQ ID NO: 3936707 - DNA, 25 bp, Homo sapien
gaagaccggcttcaggaaaagatac

SEQ ID NO: 3936708 - DNA, 25 bp, Homo sapien
cagacattaggtgtaactcattcag

SEQ ID NO: 3936709 - DNA, 25 bp, Homo sapien
tcatgaaaacgaagtgagaccaatt

SEQ ID NO: 3936710 - DNA, 25 bp, Homo sapien
tatgtcttttcgtgatcccttttcc

SEQ ID NO: 3936711 - DNA, 25 bp, Homo sapien
gagaccaattccttcaccatcattc

SEQ ID NO: 3936712 - DNA, 25 bp, Homo sapien
aattgcaatgtggaattaagctgct

SEQ ID NO: 3936713 - DNA, 25 bp, Homo sapien
ggaattaagctgctgctgactgtag

SEQ ID NO: 3936714 - DNA, 25 bp, Homo sapien
ctaattgcaatgtggaattaagctg

SEQ ID NO: 3936715 - DNA, 25 bp, Homo sapien
ctgctgactgtagcattttcagttt

SEQ ID NO: 3936716 - DNA, 25 bp, Homo sapien
caactcgcagagttaatttaatgaa

SEQ ID NO: 3936717 - DNA, 25 bp, Homo sapien
gaaactatcaaagccgtctgacatg

SEQ ID NO: 3936718 - DNA, 25 bp, Homo sapien
actagtcttgtgatgacctgaaggg

SEQ ID NO: 3936719 - DNA, 25 bp, Homo sapien
ttccaccttgcaactcgcagagtta

SEQ ID NO: 3936720 - DNA, 25 bp, Homo sapien
gctggcaaccaatttggtgtgaaca

SEQ ID NO: 3936721 - DNA, 25 bp, Homo sapien
ccatcttgctggcaaccaatttggt

SEQ ID NO: 3936722 - DNA, 25 bp, Homo sapien
aaccaatttggtgtgaacagttatg

SEQ ID NO: 3936723 - DNA, 25 bp, Homo sapien
tcttgctggcaaccaatttggtgtg

SEQ ID NO: 3936724 - DNA, 25 bp, Homo sapien
ttcaccattcccgatgggagctcgg

SEQ ID NO: 3936725 - DNA, 25 bp, Homo sapien
gggtgtggaatccatcagacatcaa

SEQ ID NO: 3936726 - DNA, 25 bp, Homo sapien
gagagcatcttacaactggcacatg

SEQ ID NO: 3936727 - DNA, 25 bp, Homo sapien
gacatcaaacaaatggctttgggtg

SEQ ID NO: 3936728 - DNA, 25 bp, Homo sapien
ctagcttgggtctgacactctagat

SEQ ID NO: 3936729 - DNA, 25 bp, Homo sapien
gatgcagaagtggcccaagtgattt

SEQ ID NO: 3936730 - DNA, 25 bp, Homo sapien
tagcttgggtctgacactctagatg

SEQ ID NO: 3936731 - DNA, 25 bp, Homo sapien
agaagtggcccaagtgatttctcca

SEQ ID NO: 3936732 - DNA, 25 bp, Homo sapien
agtgaggcagagatcaaaggtgact

SEQ ID NO: 3936733 - DNA, 25 bp, Homo sapien
tccaatcaagggggtccgagggcca

SEQ ID NO: 3936734 - DNA, 25 bp, Homo sapien
tgcagggctggagtgtcatgtgctg

SEQ ID NO: 3936735 - DNA, 25 bp, Homo sapien
gtccgagggccaatggcttttacca

SEQ ID NO: 3936736 - DNA, 25 bp, Homo sapien
ccctcctggattaattgcggtcctg

SEQ ID NO: 3936737 - DNA, 25 bp, Homo sapien
ggtcctgttgctgacggtttttgca

SEQ ID NO: 3936738 - DNA, 25 bp, Homo sapien
tgttgctgacggtttttgcattaaa

SEQ ID NO: 3936739 - DNA, 25 bp, Homo sapien
taattgcggtcctgttgctgacggt

SEQ ID NO: 3936740 - DNA, 25 bp, Homo sapien
ctttctctctgatatcagctctgct

SEQ ID NO: 3936741 - DNA, 25 bp, Homo sapien
tgtggttgcttttggtacttgttga

SEQ ID NO: 3936742 - DNA, 25 bp, Homo sapien
gctctgctacagtttgaggcaaggg

SEQ ID NO: 3936743 - DNA, 25 bp, Homo sapien
caagggttgggactagaattgtagt

SEQ ID NO: 3936744 - DNA, 25 bp, Homo sapien
tgtaagcagattccagtgttcttga

SEQ ID NO: 3936745 - DNA, 25 bp, Homo sapien
agcttgaccagagataaatcctggt

SEQ ID NO: 3936746 - DNA, 25 bp, Homo sapien
aatcctggtgggtctcagagcgcag

SEQ ID NO: 3936747 - DNA, 25 bp, Homo sapien
ggctgtaagcagattccagtgttct

SEQ ID NO: 3936748 - DNA, 25 bp, Homo sapien
tgatagccactgataaccaggctgt

SEQ ID NO: 3936749 - DNA, 25 bp, Homo sapien
gagcaggtcgttcaaaaggcaaagc

SEQ ID NO: 3936750 - DNA, 25 bp, Homo sapien
gctgttaattgctctgcttatcaga

SEQ ID NO: 3936751 - DNA, 25 bp, Homo sapien
gaagacggtctttcattgccatgtg

SEQ ID NO: 3936752 - DNA, 25 bp, Homo sapien
tgttgcgatgaagctgggctgtggt

SEQ ID NO: 3936753 - DNA, 25 bp, Homo sapien
gctgggctgtggttggggctctggg

SEQ ID NO: 3936754 - DNA, 25 bp, Homo sapien
ctgttgcgatgaagctgggctgtgg

SEQ ID NO: 3936755 - DNA, 25 bp, Homo sapien
gggctgtggttggggctctgggcat

SEQ ID NO: 3936756 - DNA, 25 bp, Homo sapien
gtctgcaaatgggaccaggcagcca

SEQ ID NO: 3936757 - DNA, 25 bp, Homo sapien
cagctcaatgtctgcaaatgggacc

SEQ ID NO: 3936758 - DNA, 25 bp, Homo sapien
aggcagccatggaagttttctgagc

SEQ ID NO: 3936759 - DNA, 25 bp, Homo sapien
cgggaacagaggactttctcagttt

SEQ ID NO: 3936760 - DNA, 25 bp, Homo sapien
tcagtgacatgaactcttaagactt

SEQ ID NO: 3936761 - DNA, 25 bp, Homo sapien
gacaaactatctaatggtaagttga

SEQ ID NO: 3936762 - DNA, 25 bp, Homo sapien
tgctgtccttatactgagaatattc

SEQ ID NO: 3936763 - DNA, 25 bp, Homo sapien
agtttaacttaagctccgcaaccat

SEQ ID NO: 3936764 - DNA, 25 bp, Homo sapien
gttagtgtgcggtcattccagattg

SEQ ID NO: 3936765 - DNA, 25 bp, Homo sapien
gattgaacgggtaatggcacctctg

SEQ ID NO: 3936766 - DNA, 25 bp, Homo sapien
cacctctgtttggtacacctttggg

SEQ ID NO: 3936767 - DNA, 25 bp, Homo sapien
tctcttctgtgttagtgtgcggtca

SEQ ID NO: 3936768 - DNA, 25 bp, Homo sapien
cggtcagtatttccaggataggttt

SEQ ID NO: 3936769 - DNA, 25 bp, Homo sapien
ctgcggtcagtatttccaggatagg

SEQ ID NO: 3936770 - DNA, 25 bp, Homo sapien
cagtatttccaggataggtttgctg

SEQ ID NO: 3936771 - DNA, 25 bp, Homo sapien
tatttccaggataggtttgctgggt

SEQ ID NO: 3936772 - DNA, 25 bp, Homo sapien
ggaaatatattgatctcccagagca

SEQ ID NO: 3936773 - DNA, 25 bp, Homo sapien
gaggatccttttctatcaacgttgg

SEQ ID NO: 3936774 - DNA, 25 bp, Homo sapien
gcaaaatccagattgtccagattcg

SEQ ID NO: 3936775 - DNA, 25 bp, Homo sapien
catccatggacgctgggaaatcctg

SEQ ID NO: 3936776 - DNA, 25 bp, Homo sapien
gagttgttactggcaaattcagctg

SEQ ID NO: 3936777 - DNA, 25 bp, Homo sapien
ctccaacacatggagttgttactgg

SEQ ID NO: 3936778 - DNA, 25 bp, Homo sapien
tccaacacatggagttgttactggc

SEQ ID NO: 3936779 - DNA, 25 bp, Homo sapien
gcagagtctctgactcatggtagtc

SEQ ID NO: 3936780 - DNA, 25 bp, Homo sapien
catggtagtccttgatatatattgc

SEQ ID NO: 3936781 - DNA, 25 bp, Homo sapien
gactttaagcaccatgatgtcccag

SEQ ID NO: 3936782 - DNA, 25 bp, Homo sapien
ccttctttgcccagtgctggcagag

SEQ ID NO: 3936783 - DNA, 25 bp, Homo sapien
tcttggagagattgtgattcagtca

SEQ ID NO: 3936784 - DNA, 25 bp, Homo sapien
catattgtgagtgccccagtggctt

SEQ ID NO: 3936785 - DNA, 25 bp, Homo sapien
tttccccatattgtgagtgccccag

SEQ ID NO: 3936786 - DNA, 25 bp, Homo sapien
catatgcagatggagggttcttttc

SEQ ID NO: 3936787 - DNA, 25 bp, Homo sapien
atgtacatatgcaattggcaaaagt

SEQ ID NO: 3936788 - DNA, 25 bp, Homo sapien
catatgcaattggcaaaagtctgac

SEQ ID NO: 3936789 - DNA, 25 bp, Homo sapien
gactctttggcccaattccaagcaa

SEQ ID NO: 3936790 - DNA, 25 bp, Homo sapien
tgactctttggcccaattccaagca

SEQ ID NO: 3936791 - DNA, 25 bp, Homo sapien
taggttcatattcattcaattggaa

SEQ ID NO: 3936792 - DNA, 25 bp, Homo sapien
ttggctgatccattatgaataaagc

SEQ ID NO: 3936793 - DNA, 25 bp, Homo sapien
tctttgcccggttcatactttcctc

SEQ ID NO: 3936794 - DNA, 25 bp, Homo sapien
gtaaaatgattaggttcatattcat

SEQ ID NO: 3936795 - DNA, 25 bp, Homo sapien
ctgtctttgccaattccgcagtagc

SEQ ID NO: 3936796 - DNA, 25 bp, Homo sapien
ctagagagggtgtaagcatggtgca

SEQ ID NO: 3936797 - DNA, 25 bp, Homo sapien
caattccgcagtagcatacatgtgg

SEQ ID NO: 3936798 - DNA, 25 bp, Homo sapien
tgtggctagagagggtgtaagcatg

SEQ ID NO: 3936799 - DNA, 25 bp, Homo sapien
ggttttctggtgcaattcctgaaaa

SEQ ID NO: 3936800 - DNA, 25 bp, Homo sapien
aggttttctggtgcaattcctgaaa

SEQ ID NO: 3936801 - DNA, 25 bp, Homo sapien
gaggccatacttctgcgtatttttc

SEQ ID NO: 3936802 - DNA, 25 bp, Homo sapien
ggccatacttctgcgtatttttctt

SEQ ID NO: 3936803 - DNA, 25 bp, Homo sapien
ttctaaacagaagcagaatccattt

SEQ ID NO: 3936804 - DNA, 25 bp, Homo sapien
cttctaaacagaagcagaatccatt

SEQ ID NO: 3936805 - DNA, 25 bp, Homo sapien
cacttctaaacagaagcagaatcca

SEQ ID NO: 3936806 - DNA, 25 bp, Homo sapien
tctaaacagaagcagaatccatttt

SEQ ID NO: 3936807 - DNA, 25 bp, Homo sapien
tttccttcccatgccgaccccatgc

SEQ ID NO: 3936808 - DNA, 25 bp, Homo sapien
ctttttcagcgtttccttcccatgc

SEQ ID NO: 3936809 - DNA, 25 bp, Homo sapien
cctttttcagcgtttccttcccatg

SEQ ID NO: 3936810 - DNA, 25 bp, Homo sapien
ccttcccatgccgaccccatgctct

SEQ ID NO: 3936811 - DNA, 25 bp, Homo sapien
aagttgctgagcactttggagcccg

SEQ ID NO: 3936812 - DNA, 25 bp, Homo sapien
taagctacgggaatgtgcagagaag

SEQ ID NO: 3936813 - DNA, 25 bp, Homo sapien
tacaggtatcctgtggttcagggag

SEQ ID NO: 3936814 - DNA, 25 bp, Homo sapien
aaagcaggccataaggacagcagga

SEQ ID NO: 3936815 - DNA, 25 bp, Homo sapien
aagcattgcattcagcaaaacccaa

SEQ ID NO: 3936816 - DNA, 25 bp, Homo sapien
agtgcctgatggcttttccgcttca

SEQ ID NO: 3936817 - DNA, 25 bp, Homo sapien
atggcttttccgcttcaacatgcat

SEQ ID NO: 3936818 - DNA, 25 bp, Homo sapien
gcctgatggcttttccgcttcaaca

SEQ ID NO: 3936819 - DNA, 25 bp, Homo sapien
gaactgttcactagtactgcctgta

SEQ ID NO: 3936820 - DNA, 25 bp, Homo sapien
tttgctcctaacatgaactgttcac

SEQ ID NO: 3936821 - DNA, 25 bp, Homo sapien
tactaaaacagtgacctggtggctg

SEQ ID NO: 3936822 - DNA, 25 bp, Homo sapien
taacccagacaattcacaggccatg

SEQ ID NO: 3936823 - DNA, 25 bp, Homo sapien
gtctgacaacggttgatgtagcagc

SEQ ID NO: 3936824 - DNA, 25 bp, Homo sapien
tgaattttgtctacacctttctcca

SEQ ID NO: 3936825 - DNA, 25 bp, Homo sapien
ttcctctggtcgaaccagggtccca

SEQ ID NO: 3936826 - DNA, 25 bp, Homo sapien
cgaggaacatgggagtctgacaacg

SEQ ID NO: 3936827 - DNA, 25 bp, Homo sapien
ctggcataaatatcatgagggtgtc

SEQ ID NO: 3936828 - DNA, 25 bp, Homo sapien
tggcataaatatcatgagggtgtca

SEQ ID NO: 3936829 - DNA, 25 bp, Homo sapien
ctgttaccaggaagataattaactg

SEQ ID NO: 3936830 - DNA, 25 bp, Homo sapien
ccaggaagataattaactggtaagg

SEQ ID NO: 3936831 - DNA, 25 bp, Homo sapien
caggaagataattaactggtaaggc

SEQ ID NO: 3936832 - DNA, 25 bp, Homo sapien
cattctgttaccaggaagataatta

SEQ ID NO: 3936833 - DNA, 25 bp, Homo sapien
tcctggaaattaacaaccatgaggg

SEQ ID NO: 3936834 - DNA, 25 bp, Homo sapien
ccatgagggcaaaggtgtatttgga

SEQ ID NO: 3936835 - DNA, 25 bp, Homo sapien
tgggctgggcgcaaaacaaggcttt

SEQ ID NO: 3936836 - DNA, 25 bp, Homo sapien
cactcacaaatctattcctcaggct

SEQ ID NO: 3936837 - DNA, 25 bp, Homo sapien
tcttgcttctacacaggttactgag

SEQ ID NO: 3936838 - DNA, 25 bp, Homo sapien
gcctctgtggccacacggcatagag

SEQ ID NO: 3936839 - DNA, 25 bp, Homo sapien
tccatccctttcactgccggaatgg

SEQ ID NO: 3936840 - DNA, 25 bp, Homo sapien
atggcgggataagggcagacctcct

SEQ ID NO: 3936841 - DNA, 25 bp, Homo sapien
caaagtatttctgctgcctgtaggg

SEQ ID NO: 3936842 - DNA, 25 bp, Homo sapien
ttgatacaagggctgagttggctga

SEQ ID NO: 3936843 - DNA, 25 bp, Homo sapien
cagaattaagggtgggttttgtgat

SEQ ID NO: 3936844 - DNA, 25 bp, Homo sapien
gcctgtagggtcttattctttgata

SEQ ID NO: 3936845 - DNA, 25 bp, Homo sapien
actcttgtaggtcacactcattggg

SEQ ID NO: 3936846 - DNA, 25 bp, Homo sapien
agactcttgtaggtcacactcattg

SEQ ID NO: 3936847 - DNA, 25 bp, Homo sapien
ggaagactcttgtaggtcacactca

SEQ ID NO: 3936848 - DNA, 25 bp, Homo sapien
ggtcacactcattgggggtctttct

SEQ ID NO: 3936849 - DNA, 25 bp, Homo sapien
gaggccaagttggttagtctcctta

SEQ ID NO: 3936850 - DNA, 25 bp, Homo sapien
cattctatcgtggaggtatcatacg

SEQ ID NO: 3936851 - DNA, 25 bp, Homo sapien
gctgcagacaataacatcagtggtg

SEQ ID NO: 3936852 - DNA, 25 bp, Homo sapien
taggaggcatttacggctgcagaca

SEQ ID NO: 3936853 - DNA, 25 bp, Homo sapien
tggacctcggcacccgctgggcctc

SEQ ID NO: 3936854 - DNA, 25 bp, Homo sapien
cctggacctcggcacccgctgggcc

SEQ ID NO: 3936855 - DNA, 25 bp, Homo sapien
agacctggacctcggcacccgctgg

SEQ ID NO: 3936856 - DNA, 25 bp, Homo sapien
gacctggacctcggcacccgctggg

SEQ ID NO: 3936857 - DNA, 25 bp, Homo sapien
gatgcattcagtggtcctcactgaa

SEQ ID NO: 3936858 - DNA, 25 bp, Homo sapien
agcttctgagtggttgcgatgcgta

SEQ ID NO: 3936859 - DNA, 25 bp, Homo sapien
gatgcgtaaccccacatgggttctt

SEQ ID NO: 3936860 - DNA, 25 bp, Homo sapien
gagtggttgcgatgcgtaaccccac

SEQ ID NO: 3936861 - DNA, 25 bp, Homo sapien
tgtagcatttacctgcacacacggg

SEQ ID NO: 3936862 - DNA, 25 bp, Homo sapien
tatggtagtagttctcctcccaggg

SEQ ID NO: 3936863 - DNA, 25 bp, Homo sapien
tgtcgaggctgtttaagatgacgcc

SEQ ID NO: 3936864 - DNA, 25 bp, Homo sapien
tttgcctctccagcaaatccagggt

SEQ ID NO: 3936865 - DNA, 25 bp, Homo sapien
tctcttatggctccttggcaaccca

SEQ ID NO: 3936866 - DNA, 25 bp, Homo sapien
cacatctcttatggctccttggcaa

SEQ ID NO: 3936867 - DNA, 25 bp, Homo sapien
ctcaaacacatctcttatggctcct

SEQ ID NO: 3936868 - DNA, 25 bp, Homo sapien
tggctccttggcaacccatttttgc

SEQ ID NO: 3936869 - DNA, 25 bp, Homo sapien
tctgttttgcctgttgccagtgacc

SEQ ID NO: 3936870 - DNA, 25 bp, Homo sapien
ttttgttgtgttgctcatgcccgga

SEQ ID NO: 3936871 - DNA, 25 bp, Homo sapien
cggatgagcatagtgcatgaagcct

SEQ ID NO: 3936872 - DNA, 25 bp, Homo sapien
tgaagcctggtgatgttctgttttg

SEQ ID NO: 3936873 - DNA, 25 bp, Homo sapien
tttgtctctattgataacgccaccg

SEQ ID NO: 3936874 - DNA, 25 bp, Homo sapien
tattgataacgccaccgggcttggg

SEQ ID NO: 3936875 - DNA, 25 bp, Homo sapien
ttgataacgccaccgggcttgggca

SEQ ID NO: 3936876 - DNA, 25 bp, Homo sapien
ctctattgataacgccaccgggctt

SEQ ID NO: 3936877 - DNA, 25 bp, Homo sapien
gccttgccacactggaccacactca

SEQ ID NO: 3936878 - DNA, 25 bp, Homo sapien
gtcatttttctgggccttgccacac

SEQ ID NO: 3936879 - DNA, 25 bp, Homo sapien
ctgggccttgccacactggaccaca

SEQ ID NO: 3936880 - DNA, 25 bp, Homo sapien
ctgtcatttttctgggccttgccac

SEQ ID NO: 3936881 - DNA, 25 bp, Homo sapien
acattgtttacagcgacaggtgtca

SEQ ID NO: 3936882 - DNA, 25 bp, Homo sapien
tagacattgtttacagcgacaggtg

SEQ ID NO: 3936883 - DNA, 25 bp, Homo sapien
gcctttgaggtagacattgtttaca

SEQ ID NO: 3936884 - DNA, 25 bp, Homo sapien
tgaggtagacattgtttacagcgac

SEQ ID NO: 3936885 - DNA, 25 bp, Homo sapien
tgagctggcatctgaaagtgatgat

SEQ ID NO: 3936886 - DNA, 25 bp, Homo sapien
ttctaagcagcaggctagggaactg

SEQ ID NO: 3936887 - DNA, 25 bp, Homo sapien
gttctctggcggtggctgttcctga

SEQ ID NO: 3936888 - DNA, 25 bp, Homo sapien
aaggaggcagcatcggataatggat

SEQ ID NO: 3936889 - DNA, 25 bp, Homo sapien
ccagtcctgttttcccgtagatgca

SEQ ID NO: 3936890 - DNA, 25 bp, Homo sapien
cctgttttcccgtagatgcattgtg

SEQ ID NO: 3936891 - DNA, 25 bp, Homo sapien
cattgtgtgggccatctctgagctt

SEQ ID NO: 3936892 - DNA, 25 bp, Homo sapien
ccgtagatgcattgtgtgggccatc

SEQ ID NO: 3936893 - DNA, 25 bp, Homo sapien
cattggttcttagttgggtgcaaac

SEQ ID NO: 3936894 - DNA, 25 bp, Homo sapien
ttcttagttgggtgcaaacttctag

SEQ ID NO: 3936895 - DNA, 25 bp, Homo sapien
tcacccttggattcccatgaccagt

SEQ ID NO: 3936896 - DNA, 25 bp, Homo sapien
gttgggtcacccttggattcccatg

SEQ ID NO: 3936897 - DNA, 25 bp, Homo sapien
ttgaagtcgatcgtgcaggacctga

SEQ ID NO: 3936898 - DNA, 25 bp, Homo sapien
tgagctgttgccagttgaagtcgat

SEQ ID NO: 3936899 - DNA, 25 bp, Homo sapien
gaagttgagtcaatacacatgctca

SEQ ID NO: 3936900 - DNA, 25 bp, Homo sapien
acctgagacctgaagttgagtcaat

SEQ ID NO: 3936901 - DNA, 25 bp, Homo sapien
gatgtgctctgctctatggaactgc

SEQ ID NO: 3936902 - DNA, 25 bp, Homo sapien
tagttctcactagatgtgctctgct

SEQ ID NO: 3936903 - DNA, 25 bp, Homo sapien
ctagttctcactagatgtgctctgc

SEQ ID NO: 3936904 - DNA, 25 bp, Homo sapien
agtgacatcactggagttgtttctg

SEQ ID NO: 3936905 - DNA, 25 bp, Homo sapien
aagtgacatcactggagttgtttct

SEQ ID NO: 3936906 - DNA, 25 bp, Homo sapien
tcttgttactagaaccgaaatcgat

SEQ ID NO: 3936907 - DNA, 25 bp, Homo sapien
gaaatcgattgaggtagaagaaaac

SEQ ID NO: 3936908 - DNA, 25 bp, Homo sapien
taaaagggccatatcgattagaacc

SEQ ID NO: 3936909 - DNA, 25 bp, Homo sapien
gccatatcgattagaaccaagaagc

SEQ ID NO: 3936910 - DNA, 25 bp, Homo sapien
actgggcttgtaaccaagatccatg

SEQ ID NO: 3936911 - DNA, 25 bp, Homo sapien
tgtaaccaagatccatggtccagtg

SEQ ID NO: 3936912 - DNA, 25 bp, Homo sapien
tctattggaggccagcaatgtgtgt

SEQ ID NO: 3936913 - DNA, 25 bp, Homo sapien
aagccactgggcttgtaaccaagat

SEQ ID NO: 3936914 - DNA, 25 bp, Homo sapien
gccaggaggctgtccgtacctccac

SEQ ID NO: 3936915 - DNA, 25 bp, Homo sapien
gctgagaatcccttgtgtggaaaca

SEQ ID NO: 3936916 - DNA, 25 bp, Homo sapien
gtccgtacctccaccaagccctgct

SEQ ID NO: 3936917 - DNA, 25 bp, Homo sapien
agctgagaatcccttgtgtggaaac

SEQ ID NO: 3936918 - DNA, 25 bp, Homo sapien
tgggcacccgtgtttccacttggta

SEQ ID NO: 3936919 - DNA, 25 bp, Homo sapien
tggtacgtccccagggcctagtaca

SEQ ID NO: 3936920 - DNA, 25 bp, Homo sapien
ccccagggcctagtacaattttcag

SEQ ID NO: 3936921 - DNA, 25 bp, Homo sapien
ctctggagtagtggagttctaatct

SEQ ID NO: 3936922 - DNA, 25 bp, Homo sapien
gaagtttacagagaattggggcttc

SEQ ID NO: 3936923 - DNA, 25 bp, Homo sapien
gacaagtaggcagctcctgggtaac

SEQ ID NO: 3936924 - DNA, 25 bp, Homo sapien
cagctcagggcggaatgaagacaag

SEQ ID NO: 3936925 - DNA, 25 bp, Homo sapien
taggcagctcctgggtaacagaatt

SEQ ID NO: 3936926 - DNA, 25 bp, Homo sapien
tgtgctaaaccccttgctgaatgtc

SEQ ID NO: 3936927 - DNA, 25 bp, Homo sapien
ccttgctgaatgtcccgctgtggct

SEQ ID NO: 3936928 - DNA, 25 bp, Homo sapien
taatgggtgttccaccttacagatg

SEQ ID NO: 3936929 - DNA, 25 bp, Homo sapien
ccagggcaccatttgtctctattac

SEQ ID NO: 3936930 - DNA, 25 bp, Homo sapien
ctctttatcacaccagggcgcttgg

SEQ ID NO: 3936931 - DNA, 25 bp, Homo sapien
tttatcacaccagggcgcttgggag

SEQ ID NO: 3936932 - DNA, 25 bp, Homo sapien
tctttatcacaccagggcgcttggg

SEQ ID NO: 3936933 - DNA, 25 bp, Homo sapien
atcacaccagggcgcttgggaggcc

SEQ ID NO: 3936934 - DNA, 25 bp, Homo sapien
gacttgattctctcaactggaatag

SEQ ID NO: 3936935 - DNA, 25 bp, Homo sapien
cttgattctctcaactggaatagtc

SEQ ID NO: 3936936 - DNA, 25 bp, Homo sapien
ctgaggacttgattctctcaactgg

SEQ ID NO: 3936937 - DNA, 25 bp, Homo sapien
gaggacttgattctctcaactggaa

SEQ ID NO: 3936938 - DNA, 25 bp, Homo sapien
tctccatgccccaccagagttctgg

SEQ ID NO: 3936939 - DNA, 25 bp, Homo sapien
ttctgggctgtagtgatagtctttc

SEQ ID NO: 3936940 - DNA, 25 bp, Homo sapien
catgccccaccagagttctgggctg

SEQ ID NO: 3936941 - DNA, 25 bp, Homo sapien
ggctgtagtgatagtctttccacag

SEQ ID NO: 3936942 - DNA, 25 bp, Homo sapien
aaacagagctagggtatcctctctc

SEQ ID NO: 3936943 - DNA, 25 bp, Homo sapien
ggcagaggccctggtttaacagaca

SEQ ID NO: 3936944 - DNA, 25 bp, Homo sapien
tggcagaggccctggtttaacagac

SEQ ID NO: 3936945 - DNA, 25 bp, Homo sapien
gcataatcagggttgaccaaaggaa

SEQ ID NO: 3936946 - DNA, 25 bp, Homo sapien
cataatcagggttgaccaaaggaaa

SEQ ID NO: 3936947 - DNA, 25 bp, Homo sapien
cggtctgtttttggagaactgtgcc

SEQ ID NO: 3936948 - DNA, 25 bp, Homo sapien
agttcggtctgtttttggagaactg

SEQ ID NO: 3936949 - DNA, 25 bp, Homo sapien
ctgtgatgtcgttttctgggtctcc

SEQ ID NO: 3936950 - DNA, 25 bp, Homo sapien
gtcctgtgatgtcgttttctgggtc

SEQ ID NO: 3936951 - DNA, 25 bp, Homo sapien
cctgtgatgtcgttttctgggtctc

SEQ ID NO: 3936952 - DNA, 25 bp, Homo sapien
tcctgtgatgtcgttttctgggtct

SEQ ID NO: 3936953 - DNA, 25 bp, Homo sapien
cctaattcctgggttggattcctgg

SEQ ID NO: 3936954 - DNA, 25 bp, Homo sapien
tagataatgttttttactccagttg

SEQ ID NO: 3936955 - DNA, 25 bp, Homo sapien
ctggttgttgtcttgaaattgtcat

SEQ ID NO: 3936956 - DNA, 25 bp, Homo sapien
tcttgaaattgtcatctagttccag

SEQ ID NO: 3936957 - DNA, 25 bp, Homo sapien
aattgtaggcagaactaagctccag

SEQ ID NO: 3936958 - DNA, 25 bp, Homo sapien
attttatggtggctgtaaggggatc

SEQ ID NO: 3936959 - DNA, 25 bp, Homo sapien
ctctgcattgtgagtgataaaagca

SEQ ID NO: 3936960 - DNA, 25 bp, Homo sapien
ctgtaaggggatcctgggaattgta

SEQ ID NO: 3936961 - DNA, 25 bp, Homo sapien
caagagaggcttaactgcaccaacg

SEQ ID NO: 3936962 - DNA, 25 bp, Homo sapien
cgagtgctgcacgtacacaggtgac

SEQ ID NO: 3936963 - DNA, 25 bp, Homo sapien
ggatcttcacccagacgaggaggct

SEQ ID NO: 3936964 - DNA, 25 bp, Homo sapien
tgcaccaacggaggtttttccagga

SEQ ID NO: 3936965 - DNA, 25 bp, Homo sapien
taaacttcaaatttgtatctgtggc

SEQ ID NO: 3936966 - DNA, 25 bp, Homo sapien
ctaaacttcaaatttgtatctgtgg

SEQ ID NO: 3936967 - DNA, 25 bp, Homo sapien
ttaaccacactacctctttctcctc

SEQ ID NO: 3936968 - DNA, 25 bp, Homo sapien
gatttctgtactaccatttcacaat

SEQ ID NO: 3936969 - DNA, 25 bp, Homo sapien
gaagatttctgtactaccatttcac

SEQ ID NO: 3936970 - DNA, 25 bp, Homo sapien
tacttaaccacactacctctttctc

SEQ ID NO: 3936971 - DNA, 25 bp, Homo sapien
tgtttaggcctacagttattggtgg

SEQ ID NO: 3936972 - DNA, 25 bp, Homo sapien
ttaggcctacagttattggtggaat

SEQ ID NO: 3936973 - DNA, 25 bp, Homo sapien
ttgtttaggcctacagttattggtg

SEQ ID NO: 3936974 - DNA, 25 bp, Homo sapien
gtttaggcctacagttattggtgga

SEQ ID NO: 3936975 - DNA, 25 bp, Homo sapien
tctgttggcgtctttctaacaatcc

SEQ ID NO: 3936976 - DNA, 25 bp, Homo sapien
ctcttgttggagcattctgtgttag

SEQ ID NO: 3936977 - DNA, 25 bp, Homo sapien
ttttctaattgtgtctgttggcgtc

SEQ ID NO: 3936978 - DNA, 25 bp, Homo sapien
aatttctttaatcttagtcatcacc

SEQ ID NO: 3936979 - DNA, 25 bp, Homo sapien
tggtccttagcatactcctttgata

SEQ ID NO: 3936980 - DNA, 25 bp, Homo sapien
tccttagcatactcctttgataaat

SEQ ID NO: 3936981 - DNA, 25 bp, Homo sapien
ggtccttagcatactcctttgataa

SEQ ID NO: 3936982 - DNA, 25 bp, Homo sapien
ttttatctggtccttagcatactcc

SEQ ID NO: 3936983 - DNA, 25 bp, Homo sapien
gagaatgccttgaccatcaggagac

SEQ ID NO: 3936984 - DNA, 25 bp, Homo sapien
cctggacatggtgaagagaatgcct

SEQ ID NO: 3936985 - DNA, 25 bp, Homo sapien
tgtctgtggatcctgtaaggagcct

SEQ ID NO: 3936986 - DNA, 25 bp, Homo sapien
gaaattggaatgagttgtctgtgga

SEQ ID NO: 3936987 - DNA, 25 bp, Homo sapien
cctgtcatggacacgataagtggcc

SEQ ID NO: 3936988 - DNA, 25 bp, Homo sapien
aaatatagcctgtcatggacacgat

SEQ ID NO: 3936989 - DNA, 25 bp, Homo sapien
taagtggccgagcaagaaacaaggc

SEQ ID NO: 3936990 - DNA, 25 bp, Homo sapien
gagcaagaaacaaggctgagctccc

SEQ ID NO: 3936991 - DNA, 25 bp, Homo sapien
gaggttcgcccaatcctggagcagt

SEQ ID NO: 3936992 - DNA, 25 bp, Homo sapien
ggttcgcccaatcctggagcagtgg

SEQ ID NO: 3936993 - DNA, 25 bp, Homo sapien
ttcgcccaatcctggagcagtgggt

SEQ ID NO: 3936994 - DNA, 25 bp, Homo sapien
ctgaggttcgcccaatcctggagca

SEQ ID NO: 3936995 - DNA, 25 bp, Homo sapien
tacccgccgttgctaggagacaaaa

SEQ ID NO: 3936996 - DNA, 25 bp, Homo sapien
atgtcaacaacgctacccgccgttg

SEQ ID NO: 3936997 - DNA, 25 bp, Homo sapien
gcggcacagcctcccgggatgtcaa

SEQ ID NO: 3936998 - DNA, 25 bp, Homo sapien
aggaagtggccccacggaagcgtca

SEQ ID NO: 3936999 - DNA, 25 bp, Homo sapien
caataacccctttatgactctggat

SEQ ID NO: 3937000 - DNA, 25 bp, Homo sapien
cttctgcatttacaaccatagttcc

SEQ ID NO: 3937001 - DNA, 25 bp, Homo sapien
catagttccaataacccctttatga

SEQ ID NO: 3937002 - DNA, 25 bp, Homo sapien
atgactctggatcctctttaaggtt

SEQ ID NO: 3937003 - DNA, 25 bp, Homo sapien
gtaaggaatggtcctcccacagagt

SEQ ID NO: 3937004 - DNA, 25 bp, Homo sapien
taaggaatggtcctcccacagagtc

SEQ ID NO: 3937005 - DNA, 25 bp, Homo sapien
aaggaatggtcctcccacagagtct

SEQ ID NO: 3937006 - DNA, 25 bp, Homo sapien
tttattgtgatttgttggccacttt

SEQ ID NO: 3937007 - DNA, 25 bp, Homo sapien
tacttgaaggtcacaaagcgtggat

SEQ ID NO: 3937008 - DNA, 25 bp, Homo sapien
cagtcagctgtcttgcatacttgaa

SEQ ID NO: 3937009 - DNA, 25 bp, Homo sapien
attgtgatttgttggccactttttc

SEQ ID NO: 3937010 - DNA, 25 bp, Homo sapien
gaagttcttgctctgtgacatggtg

SEQ ID NO: 3937011 - DNA, 25 bp, Homo sapien
gaaaaaagtgatggcttatccctct

SEQ ID NO: 3937012 - DNA, 25 bp, Homo sapien
tcaaatccttttgtcgctacgtaga

SEQ ID NO: 3937013 - DNA, 25 bp, Homo sapien
catcttgtctatagtgagtctgctc

SEQ ID NO: 3937014 - DNA, 25 bp, Homo sapien
cattgtcaggtgatgaagaaggcct

SEQ ID NO: 3937015 - DNA, 25 bp, Homo sapien
cctaagaaaagtcaggtcgttctga

SEQ ID NO: 3937016 - DNA, 25 bp, Homo sapien
tctgaggatcaatatcacgaactgt

SEQ ID NO: 3937017 - DNA, 25 bp, Homo sapien
tccaaggttgttcggatgggaatac

SEQ ID NO: 3937018 - DNA, 25 bp, Homo sapien
tggtttcccaccctatctgcacgta

SEQ ID NO: 3937019 - DNA, 25 bp, Homo sapien
ttgtgcagacagatggtttcccacc

SEQ ID NO: 3937020 - DNA, 25 bp, Homo sapien
tctgcacgtatgaattacctgttca

SEQ ID NO: 3937021 - DNA, 25 bp, Homo sapien
aaatacccatttcctagggcctcag

SEQ ID NO: 3937022 - DNA, 25 bp, Homo sapien
gaatgacgatcagaagatattcctt

SEQ ID NO: 3937023 - DNA, 25 bp, Homo sapien
atgacgatcagaagatattccttat

SEQ ID NO: 3937024 - DNA, 25 bp, Homo sapien
tgaatgacgatcagaagatattcct

SEQ ID NO: 3937025 - DNA, 25 bp, Homo sapien
aatgacgatcagaagatattcctta

SEQ ID NO: 3937026 - DNA, 25 bp, Homo sapien
agccaagtgtttccaacccagtgtc

SEQ ID NO: 3937027 - DNA, 25 bp, Homo sapien
gtgtttccaacccagtgtcgcttaa

SEQ ID NO: 3937028 - DNA, 25 bp, Homo sapien
agtgtcgcttaaacagccttggcca

SEQ ID NO: 3937029 - DNA, 25 bp, Homo sapien
tccaacccagtgtcgcttaaacagc

SEQ ID NO: 3937030 - DNA, 25 bp, Homo sapien
tgtatcactaaagtacaacttcaca

SEQ ID NO: 3937031 - DNA, 25 bp, Homo sapien
tagaaaagaatgtttgaagggtcag

SEQ ID NO: 3937032 - DNA, 25 bp, Homo sapien
taatcaaaagggactaaatgagaca

SEQ ID NO: 3937033 - DNA, 25 bp, Homo sapien
aatgagacatgcagaacagtttaga

SEQ ID NO: 3937034 - DNA, 25 bp, Homo sapien
tacttggcttcatgtggagctgtgg

SEQ ID NO: 3937035 - DNA, 25 bp, Homo sapien
cttgcattgggtaacctgtgcctcc

SEQ ID NO: 3937036 - DNA, 25 bp, Homo sapien
cattctcatacttggcttcatgtgg

SEQ ID NO: 3937037 - DNA, 25 bp, Homo sapien
gaaacttaggtgaaagtgcctgtgg

SEQ ID NO: 3937038 - DNA, 25 bp, Homo sapien
gtcattacagacagtgcctgggccc

SEQ ID NO: 3937039 - DNA, 25 bp, Homo sapien
cagacagtgcctgggcccaatcagg

SEQ ID NO: 3937040 - DNA, 25 bp, Homo sapien
agtgcctgggcccaatcaggagggg

SEQ ID NO: 3937041 - DNA, 25 bp, Homo sapien
ctgtcattacagacagtgcctgggc

SEQ ID NO: 3937042 - DNA, 25 bp, Homo sapien
tgaagacccactctgcagcttcatt

SEQ ID NO: 3937043 - DNA, 25 bp, Homo sapien
ctgtgatgaagacccactctgcagc

SEQ ID NO: 3937044 - DNA, 25 bp, Homo sapien
gtgatgaagacccactctgcagctt

SEQ ID NO: 3937045 - DNA, 25 bp, Homo sapien
aagacccactctgcagcttcatttc

SEQ ID NO: 3937046 - DNA, 25 bp, Homo sapien
ccagccttagtctgtagtaattttg

SEQ ID NO: 3937047 - DNA, 25 bp, Homo sapien
tagaagagaataggtaatgtatttc

SEQ ID NO: 3937048 - DNA, 25 bp, Homo sapien
ctgtagtaattttggctttagaaga

SEQ ID NO: 3937049 - DNA, 25 bp, Homo sapien
gaccaagaggggagacaaagtgtcc

SEQ ID NO: 3937050 - DNA, 25 bp, Homo sapien
tagtaagtcatagagtcaggcccca

SEQ ID NO: 3937051 - DNA, 25 bp, Homo sapien
tatgtagtccaaactgctcagggaa

SEQ ID NO: 3937052 - DNA, 25 bp, Homo sapien
tatgttaagggagccttctagccct

SEQ ID NO: 3937053 - DNA, 25 bp, Homo sapien
aatggctgggtgcacggctaaccct

SEQ ID NO: 3937054 - DNA, 25 bp, Homo sapien
tttttgcaaccaatcttgtgatcca

SEQ ID NO: 3937055 - DNA, 25 bp, Homo sapien
gcaaccaatcttgtgatccagggag

SEQ ID NO: 3937056 - DNA, 25 bp, Homo sapien
tggaccttttttgcaaccaatcttg

SEQ ID NO: 3937057 - DNA, 25 bp, Homo sapien
gaccttttttgcaaccaatcttgtg

SEQ ID NO: 3937058 - DNA, 25 bp, Homo sapien
ggtggaaagggataggtccaagaga

SEQ ID NO: 3937059 - DNA, 25 bp, Homo sapien
cttgtcttctgtattgacaggaata

SEQ ID NO: 3937060 - DNA, 25 bp, Homo sapien
tgtcttctgtattgacaggaataga

SEQ ID NO: 3937061 - DNA, 25 bp, Homo sapien
tgacaggaatagaaagtacaccagg

SEQ ID NO: 3937062 - DNA, 25 bp, Homo sapien
tagaaagtacaccagggtcagtggt

SEQ ID NO: 3937063 - DNA, 25 bp, Homo sapien
aagtgcatgcagtgggaacgtgcag

SEQ ID NO: 3937064 - DNA, 25 bp, Homo sapien
tgcatgcagtgggaacgtgcagcca

SEQ ID NO: 3937065 - DNA, 25 bp, Homo sapien
atgcagtgggaacgtgcagccatga

SEQ ID NO: 3937066 - DNA, 25 bp, Homo sapien
gcattttagagaggacgggttggag

SEQ ID NO: 3937067 - DNA, 25 bp, Homo sapien
catttcagccagcaattatctgaac

SEQ ID NO: 3937068 - DNA, 25 bp, Homo sapien
ttcagccagcaattatctgaacaga

SEQ ID NO: 3937069 - DNA, 25 bp, Homo sapien
aattgcctgaggatcgggtttcctc

SEQ ID NO: 3937070 - DNA, 25 bp, Homo sapien
ctgaacagaagtgctctaattgcct

SEQ ID NO: 3937071 - DNA, 25 bp, Homo sapien
tcattttgaggtcttcatagacctc

SEQ ID NO: 3937072 - DNA, 25 bp, Homo sapien
gggaaccacggactagaagttctca

SEQ ID NO: 3937073 - DNA, 25 bp, Homo sapien
ccacggactagaagttctcattttg

SEQ ID NO: 3937074 - DNA, 25 bp, Homo sapien
tcgggctcagtttcctagggaacca

SEQ ID NO: 3937075 - DNA, 25 bp, Homo sapien
ttggagctcttggttggcaaatcag

SEQ ID NO: 3937076 - DNA, 25 bp, Homo sapien
ctgaagcacacgtagggcatgcaca

SEQ ID NO: 3937077 - DNA, 25 bp, Homo sapien
gcatgcacatctggctttggagctc

SEQ ID NO: 3937078 - DNA, 25 bp, Homo sapien
ggagctcttggttggcaaatcagca

SEQ ID NO: 3937079 - DNA, 25 bp, Homo sapien
cacaagaatggttcatcagctggtt

SEQ ID NO: 3937080 - DNA, 25 bp, Homo sapien
tgtttgctcttctccggcccagaca

SEQ ID NO: 3937081 - DNA, 25 bp, Homo sapien
caagtggctggggttgtttcccaca

SEQ ID NO: 3937082 - DNA, 25 bp, Homo sapien
catttccgaaggtccacactgaggt

SEQ ID NO: 3937083 - DNA, 25 bp, Homo sapien
ctcctggattaagggccttaacaat

SEQ ID NO: 3937084 - DNA, 25 bp, Homo sapien
taagggccttaacaatgattggtgg

SEQ ID NO: 3937085 - DNA, 25 bp, Homo sapien
gattaagggccttaacaatgattgg

SEQ ID NO: 3937086 - DNA, 25 bp, Homo sapien
taacaatgattggtggctgtaggat

SEQ ID NO: 3937087 - DNA, 25 bp, Homo sapien
ataaagcagtcccattggaagctct

SEQ ID NO: 3937088 - DNA, 25 bp, Homo sapien
aaagcagtcccattggaagctcttg

SEQ ID NO: 3937089 - DNA, 25 bp, Homo sapien
ccataaagcagtcccattggaagct

SEQ ID NO: 3937090 - DNA, 25 bp, Homo sapien
tccataaagcagtcccattggaagc

SEQ ID NO: 3937091 - DNA, 25 bp, Homo sapien
catttgcttgtgttccccgttttgc

SEQ ID NO: 3937092 - DNA, 25 bp, Homo sapien
taaaaaggttgaaacttcgtctgca

SEQ ID NO: 3937093 - DNA, 25 bp, Homo sapien
tctctttgtgaatggtcctgtaacg

SEQ ID NO: 3937094 - DNA, 25 bp, Homo sapien
tagagcaaattgtacactctctttg

SEQ ID NO: 3937095 - DNA, 25 bp, Homo sapien
ccttgtcgatgacttggaaacgtcc

SEQ ID NO: 3937096 - DNA, 25 bp, Homo sapien
gacttggaaacgtccattctgggta

SEQ ID NO: 3937097 - DNA, 25 bp, Homo sapien
ccattctgggtaaggtcagcactcc

SEQ ID NO: 3937098 - DNA, 25 bp, Homo sapien
cccagattccttgtcgatgacttgg

SEQ ID NO: 3937099 - DNA, 25 bp, Homo sapien
gaaaaggaggttgaatagattcact

SEQ ID NO: 3937100 - DNA, 25 bp, Homo sapien
ggaaaccctattgttctcacgctgc

SEQ ID NO: 3937101 - DNA, 25 bp, Homo sapien
taatgactagggtcaccaatttgcc

SEQ ID NO: 3937102 - DNA, 25 bp, Homo sapien
gggccacgagcatttctgatctctt

SEQ ID NO: 3937103 - DNA, 25 bp, Homo sapien
tcgctctgtgcttgagaaacaggga

SEQ ID NO: 3937104 - DNA, 25 bp, Homo sapien
cctgtgggaaggtggagacaaggcc

SEQ ID NO: 3937105 - DNA, 25 bp, Homo sapien
cggctgtcatgcttctcatccctga

SEQ ID NO: 3937106 - DNA, 25 bp, Homo sapien
ggagattgaggctctaggactcgct

SEQ ID NO: 3937107 - DNA, 25 bp, Homo sapien
taaaatggactaactagaatggcaa

SEQ ID NO: 3937108 - DNA, 25 bp, Homo sapien
gactaactagaatggcaaatgtata

SEQ ID NO: 3937109 - DNA, 25 bp, Homo sapien
tgtaaaatggactaactagaatggc

SEQ ID NO: 3937110 - DNA, 25 bp, Homo sapien
aatggactaactagaatggcaaatg

SEQ ID NO: 3937111 - DNA, 25 bp, Homo sapien
ggtttgaaatgttcttggtggagaa

SEQ ID NO: 3937112 - DNA, 25 bp, Homo sapien
aaatgttcttggtggagaacttgga

SEQ ID NO: 3937113 - DNA, 25 bp, Homo sapien
tgttcttggtggagaacttggacat

SEQ ID NO: 3937114 - DNA, 25 bp, Homo sapien
ctggggtttgaaatgttcttggtgg

SEQ ID NO: 3937115 - DNA, 25 bp, Homo sapien
tgcagaagagatatccctggagctc

SEQ ID NO: 3937116 - DNA, 25 bp, Homo sapien
cactgctctggaagaatgtgcagaa

SEQ ID NO: 3937117 - DNA, 25 bp, Homo sapien
gtataccccaggtgctaagcatctg

SEQ ID NO: 3937118 - DNA, 25 bp, Homo sapien
caaccagaagagagatgcactgctc

SEQ ID NO: 3937119 - DNA, 25 bp, Homo sapien
ctcgtgtcattaagacgttgccgtc

SEQ ID NO: 3937120 - DNA, 25 bp, Homo sapien
tgagaagccagatgggtggactcca

SEQ ID NO: 3937121 - DNA, 25 bp, Homo sapien
cattaagacgttgccgtccacggag

SEQ ID NO: 3937122 - DNA, 25 bp, Homo sapien
tgggtggactccagcgctcccttct

SEQ ID NO: 3937123 - DNA, 25 bp, Homo sapien
ctgcatgctcaagtactctttgtaa

SEQ ID NO: 3937124 - DNA, 25 bp, Homo sapien
tctgcatgctcaagtactctttgta

SEQ ID NO: 3937125 - DNA, 25 bp, Homo sapien
tgcatgctcaagtactctttgtaac

SEQ ID NO: 3937126 - DNA, 25 bp, Homo sapien
gcatgctcaagtactctttgtaact

SEQ ID NO: 3937127 - DNA, 25 bp, Homo sapien
gacagcccccatttctacactggaa

SEQ ID NO: 3937128 - DNA, 25 bp, Homo sapien
tgcattgaatttcctcgacagcccc

SEQ ID NO: 3937129 - DNA, 25 bp, Homo sapien
taaatgctctccaagaagctgtgca

SEQ ID NO: 3937130 - DNA, 25 bp, Homo sapien
tccaagaagctgtgcattgaatttc

SEQ ID NO: 3937131 - DNA, 25 bp, Homo sapien
aaccaggctgaaaggaggtgttagc

SEQ ID NO: 3937132 - DNA, 25 bp, Homo sapien
ccaggctgaaaggaggtgttagcag

SEQ ID NO: 3937133 - DNA, 25 bp, Homo sapien
accaggctgaaaggaggtgttagca

SEQ ID NO: 3937134 - DNA, 25 bp, Homo sapien
ggaatgtagataggtaattgcctca

SEQ ID NO: 3937135 - DNA, 25 bp, Homo sapien
gcttctgttcaatttgcaaacagga

SEQ ID NO: 3937136 - DNA, 25 bp, Homo sapien
tttattttcggaatgtagataggta

SEQ ID NO: 3937137 - DNA, 25 bp, Homo sapien
ttcggaatgtagataggtaattgcc

SEQ ID NO: 3937138 - DNA, 25 bp, Homo sapien
cacatggccattgttagatccatgg

SEQ ID NO: 3937139 - DNA, 25 bp, Homo sapien
tcgaagttctgcttgtgtaccgtac

SEQ ID NO: 3937140 - DNA, 25 bp, Homo sapien
tagatccatggcttgggtcgaagtt

SEQ ID NO: 3937141 - DNA, 25 bp, Homo sapien
cgtactgcagttacacttactttga

SEQ ID NO: 3937142 - DNA, 25 bp, Homo sapien
ccatagtggccaattctagctcctg

SEQ ID NO: 3937143 - DNA, 25 bp, Homo sapien
catagtggccaattctagctcctga

SEQ ID NO: 3937144 - DNA, 25 bp, Homo sapien
ttccatagtggccaattctagctcc

SEQ ID NO: 3937145 - DNA, 25 bp, Homo sapien
tagtggccaattctagctcctgagc

SEQ ID NO: 3937146 - DNA, 25 bp, Homo sapien
agtgtcaggttacacttgccagact

SEQ ID NO: 3937147 - DNA, 25 bp, Homo sapien
gtgtcaggttacacttgccagactg

SEQ ID NO: 3937148 - DNA, 25 bp, Homo sapien
gagtgtcaggttacacttgccagac

SEQ ID NO: 3937149 - DNA, 25 bp, Homo sapien
tgtcaggttacacttgccagactgg

SEQ ID NO: 3937150 - DNA, 25 bp, Homo sapien
atgtctttggtaccctcttgggctg

SEQ ID NO: 3937151 - DNA, 25 bp, Homo sapien
ttggtaccctcttgggctgattctg

SEQ ID NO: 3937152 - DNA, 25 bp, Homo sapien
ggccagggttggacagcaggtagcc

SEQ ID NO: 3937153 - DNA, 25 bp, Homo sapien
tggacagcaggtagccaaggcaggt

SEQ ID NO: 3937154 - DNA, 25 bp, Homo sapien
gatgactttgccgttgttggctcga

SEQ ID NO: 3937155 - DNA, 25 bp, Homo sapien
tacatgcagcttgtgtgcccattcc

SEQ ID NO: 3937156 - DNA, 25 bp, Homo sapien
cattccgttgttgatgactttgccg

SEQ ID NO: 3937157 - DNA, 25 bp, Homo sapien
cgataaggtgtctcatccagaggag

SEQ ID NO: 3937158 - DNA, 25 bp, Homo sapien
gacagtgttgcaaactaaactcacg

SEQ ID NO: 3937159 - DNA, 25 bp, Homo sapien
gaacatgttcgttaaagggctctga

SEQ ID NO: 3937160 - DNA, 25 bp, Homo sapien
taaactcacgcaaggagtcacttgt

SEQ ID NO: 3937161 - DNA, 25 bp, Homo sapien
tgtcatgttgcacataagggcttcg

SEQ ID NO: 3937162 - DNA, 25 bp, Homo sapien
accacagttaattgtagcatatttt

SEQ ID NO: 3937163 - DNA, 25 bp, Homo sapien
tcaccacagttaattgtagcatatt

SEQ ID NO: 3937164 - DNA, 25 bp, Homo sapien
caccacagttaattgtagcatattt

SEQ ID NO: 3937165 - DNA, 25 bp, Homo sapien
ccacagttaattgtagcatattttt

SEQ ID NO: 3937166 - DNA, 25 bp, Homo sapien
tgcttctttagtgacatcttagtgg

SEQ ID NO: 3937167 - DNA, 25 bp, Homo sapien
cccacctcgtattgtgtgaccttgg

SEQ ID NO: 3937168 - DNA, 25 bp, Homo sapien
ggtttgcattctgaccccacctcgt

SEQ ID NO: 3937169 - DNA, 25 bp, Homo sapien
taagagtctgggctaggtaggcaca

SEQ ID NO: 3937170 - DNA, 25 bp, Homo sapien
tgtgttcaggcactttatcagcacc

SEQ ID NO: 3937171 - DNA, 25 bp, Homo sapien
aagcctgtgttcaggcactttatca

SEQ ID NO: 3937172 - DNA, 25 bp, Homo sapien
agcctgtgttcaggcactttatcag

SEQ ID NO: 3937173 - DNA, 25 bp, Homo sapien
cctgtgttcaggcactttatcagca

SEQ ID NO: 3937174 - DNA, 25 bp, Homo sapien
gaggattgaattgactccaaatttc

SEQ ID NO: 3937175 - DNA, 25 bp, Homo sapien
tccaagctgtcctggtcatagggag

SEQ ID NO: 3937176 - DNA, 25 bp, Homo sapien
taagtggaaggtcgctggagaaacc

SEQ ID NO: 3937177 - DNA, 25 bp, Homo sapien
agaggcatcacagagcaatgctatc

SEQ ID NO: 3937178 - DNA, 25 bp, Homo sapien
ggtgaaccagtggtgtcactggtac

SEQ ID NO: 3937179 - DNA, 25 bp, Homo sapien
agtggtgtcactggtaccccctgcc

SEQ ID NO: 3937180 - DNA, 25 bp, Homo sapien
ttgtgggtgaaccagtggtgtcact

SEQ ID NO: 3937181 - DNA, 25 bp, Homo sapien
gaaccagtggtgtcactggtacccc

SEQ ID NO: 3937182 - DNA, 25 bp, Homo sapien
tgattgatagcaggagggggtatcc

SEQ ID NO: 3937183 - DNA, 25 bp, Homo sapien
agttgggtcgcggccacgtgttact

SEQ ID NO: 3937184 - DNA, 25 bp, Homo sapien
aggagggggtatcctgacagtcaca

SEQ ID NO: 3937185 - DNA, 25 bp, Homo sapien
ctgtgtagttgggtcgcggccacgt

SEQ ID NO: 3937186 - DNA, 25 bp, Homo sapien
cacgctttggcctgaaatgacttga

SEQ ID NO: 3937187 - DNA, 25 bp, Homo sapien
tttgctcccgttgaagcctggctca

SEQ ID NO: 3937188 - DNA, 25 bp, Homo sapien
tggctcacctctttgcacagtcgtg

SEQ ID NO: 3937189 - DNA, 25 bp, Homo sapien
gacttgatgccatctgacgctttgg

SEQ ID NO: 3937190 - DNA, 25 bp, Homo sapien
gcatgtttttcacctctatattctt

SEQ ID NO: 3937191 - DNA, 25 bp, Homo sapien
ttttcacctctatattctttcccat

SEQ ID NO: 3937192 - DNA, 25 bp, Homo sapien
gagcatgtttttcacctctatattc

SEQ ID NO: 3937193 - DNA, 25 bp, Homo sapien
ctgagcatgtttttcacctctatat

SEQ ID NO: 3937194 - DNA, 25 bp, Homo sapien
taggtgaaaaatggattatcatttc

SEQ ID NO: 3937195 - DNA, 25 bp, Homo sapien
cgtaatcagttttggaacagtggtc

SEQ ID NO: 3937196 - DNA, 25 bp, Homo sapien
catactgtacaatttatccctttaa

SEQ ID NO: 3937197 - DNA, 25 bp, Homo sapien
attcggtagtttttagtgcattcac

SEQ ID NO: 3937198 - DNA, 25 bp, Homo sapien
aatggcagaactcttggatgttgga

SEQ ID NO: 3937199 - DNA, 25 bp, Homo sapien
gttggatgagagttttgaagtcgtc

SEQ ID NO: 3937200 - DNA, 25 bp, Homo sapien
tgaagtcgtctgtttagtctttcac

SEQ ID NO: 3937201 - DNA, 25 bp, Homo sapien
gaggattgctgaatcttggaaatgg

SEQ ID NO: 3937202 - DNA, 25 bp, Homo sapien
tggttgttggtgcttcccttgaaaa

SEQ ID NO: 3937203 - DNA, 25 bp, Homo sapien
gaaaatgttatcagttggattggat

SEQ ID NO: 3937204 - DNA, 25 bp, Homo sapien
gattggattgattcttgggcacgta

SEQ ID NO: 3937205 - DNA, 25 bp, Homo sapien
cagtatttgaagaggcagctatctt

SEQ ID NO: 3937206 - DNA, 25 bp, Homo sapien
aactgatggtctgtggtacagcttc

SEQ ID NO: 3937207 - DNA, 25 bp, Homo sapien
gtggcgaaggaagacattagtctgg

SEQ ID NO: 3937208 - DNA, 25 bp, Homo sapien
agtggcgaaggaagacattagtctg

SEQ ID NO: 3937209 - DNA, 25 bp, Homo sapien
tggcgaaggaagacattagtctggc

SEQ ID NO: 3937210 - DNA, 25 bp, Homo sapien
ggaagacattagtctggcatctttc

SEQ ID NO: 3937211 - DNA, 25 bp, Homo sapien
tccaggtcctaatgagtagtggcca

SEQ ID NO: 3937212 - DNA, 25 bp, Homo sapien
tagtggccagcgttggatactctca

SEQ ID NO: 3937213 - DNA, 25 bp, Homo sapien
ctggctccaggtcctaatgagtagt

SEQ ID NO: 3937214 - DNA, 25 bp, Homo sapien
ctaatgagtagtggccagcgttgga

SEQ ID NO: 3937215 - DNA, 25 bp, Homo sapien
cccgcaccagctcggacgccctccg

SEQ ID NO: 3937216 - DNA, 25 bp, Homo sapien
ggggtggcccttgcgggtgtcgtgc

SEQ ID NO: 3937217 - DNA, 25 bp, Homo sapien
gtggcccttgcgggtgtcgtgctcc

SEQ ID NO: 3937218 - DNA, 25 bp, Homo sapien
tgcccccgcaccagctcggacgccc

SEQ ID NO: 3937219 - DNA, 25 bp, Homo sapien
tctctagctcctccagctccgcagc

SEQ ID NO: 3937220 - DNA, 25 bp, Homo sapien
cggatttgggttttggagagcttct

SEQ ID NO: 3937221 - DNA, 25 bp, Homo sapien
agagcttctctagctcctccagctc

SEQ ID NO: 3937222 - DNA, 25 bp, Homo sapien
ggatttgggttttggagagcttctc

SEQ ID NO: 3937223 - DNA, 25 bp, Homo sapien
tgaacatctcgcaaatcccattttt

SEQ ID NO: 3937224 - DNA, 25 bp, Homo sapien
tgaaagttagcctggttcttccttc

SEQ ID NO: 3937225 - DNA, 25 bp, Homo sapien
gaagtaggtggagtaaccataatga

SEQ ID NO: 3937226 - DNA, 25 bp, Homo sapien
acatcctgttagtcatcaagtcctg

SEQ ID NO: 3937227 - DNA, 25 bp, Homo sapien
tcatggccagccaaccaatagcttt

SEQ ID NO: 3937228 - DNA, 25 bp, Homo sapien
cagccaaccaatagctttcactatg

SEQ ID NO: 3937229 - DNA, 25 bp, Homo sapien
gaaattcagtgtagttgcacgtgtg

SEQ ID NO: 3937230 - DNA, 25 bp, Homo sapien
tgcacgtgtgcactttcatggccag

SEQ ID NO: 3937231 - DNA, 25 bp, Homo sapien
caagggtgtttcaatgcagctgttg

SEQ ID NO: 3937232 - DNA, 25 bp, Homo sapien
atgcagctgttggaatagtaatgtt

SEQ ID NO: 3937233 - DNA, 25 bp, Homo sapien
tgcagctgttggaatagtaatgttt

SEQ ID NO: 3937234 - DNA, 25 bp, Homo sapien
gcagctgttggaatagtaatgtttg

SEQ ID NO: 3937235 - DNA, 25 bp, Homo sapien
aaggggctggagtctaatctcttct

SEQ ID NO: 3937236 - DNA, 25 bp, Homo sapien
tcaaggtcttttggtgacacatgca

SEQ ID NO: 3937237 - DNA, 25 bp, Homo sapien
ggggctggagtctaatctcttcttg

SEQ ID NO: 3937238 - DNA, 25 bp, Homo sapien
gggctggagtctaatctcttcttgc

SEQ ID NO: 3937239 - DNA, 25 bp, Homo sapien
tgttcggtgtctttgtggcctctaa

SEQ ID NO: 3937240 - DNA, 25 bp, Homo sapien
ttcggtgtctttgtggcctctaaga

SEQ ID NO: 3937241 - DNA, 25 bp, Homo sapien
ctgttcggtgtctttgtggcctcta

SEQ ID NO: 3937242 - DNA, 25 bp, Homo sapien
cggtgtctttgtggcctctaagagc

SEQ ID NO: 3937243 - DNA, 25 bp, Homo sapien
gtgcatcatcatatacagaacctca

SEQ ID NO: 3937244 - DNA, 25 bp, Homo sapien
ttttggtcttgatccatgtggccca

SEQ ID NO: 3937245 - DNA, 25 bp, Homo sapien
tcttcccatcttaggaggatatact

SEQ ID NO: 3937246 - DNA, 25 bp, Homo sapien
gatatatcaagatcgagtgttggag

SEQ ID NO: 3937247 - DNA, 25 bp, Homo sapien
tcagatgtagaagctggaaaagaaa

SEQ ID NO: 3937248 - DNA, 25 bp, Homo sapien
cagatgtagaagctggaaaagaaac

SEQ ID NO: 3937249 - DNA, 25 bp, Homo sapien
tgaattccttgaccccggacttctc

SEQ ID NO: 3937250 - DNA, 25 bp, Homo sapien
ggtaattaaataactggttgtgcaa

SEQ ID NO: 3937251 - DNA, 25 bp, Homo sapien
tctctggcattatcacaaaggtaat

SEQ ID NO: 3937252 - DNA, 25 bp, Homo sapien
ttgtatgaattccttgaccccggac

SEQ ID NO: 3937253 - DNA, 25 bp, Homo sapien
tatgcgccccccttcatggacacca

SEQ ID NO: 3937254 - DNA, 25 bp, Homo sapien
gcgccccccttcatggacaccaacc

SEQ ID NO: 3937255 - DNA, 25 bp, Homo sapien
atgcgccccccttcatggacaccaa

SEQ ID NO: 3937256 - DNA, 25 bp, Homo sapien
ctatgcgccccccttcatggacacc

SEQ ID NO: 3937257 - DNA, 25 bp, Homo sapien
cacagccgcgtgttctacttaccta

SEQ ID NO: 3937258 - DNA, 25 bp, Homo sapien
gagggtactggtgcgatcgatctca

SEQ ID NO: 3937259 - DNA, 25 bp, Homo sapien
aaattttcgtgctgtcaaacaagga

SEQ ID NO: 3937260 - DNA, 25 bp, Homo sapien
taaatgatggattctgtggggcaga

SEQ ID NO: 3937261 - DNA, 25 bp, Homo sapien
agccccatcggaatgcagagctgct

SEQ ID NO: 3937262 - DNA, 25 bp, Homo sapien
ttcctgagccccatcggaatgcaga

SEQ ID NO: 3937263 - DNA, 25 bp, Homo sapien
ggcagtgtgacttcctgagccccat

SEQ ID NO: 3937264 - DNA, 25 bp, Homo sapien
tgctgaagtgggccccgcgatagtt

SEQ ID NO: 3937265 - DNA, 25 bp, Homo sapien
accgatggccatagcccggtcacga

SEQ ID NO: 3937266 - DNA, 25 bp, Homo sapien
gatgacacaaatcgcttatgaccag

SEQ ID NO: 3937267 - DNA, 25 bp, Homo sapien
ttatgaccagcgttcaccgatggcc

SEQ ID NO: 3937268 - DNA, 25 bp, Homo sapien
cgatcatagagcacggttggccggc

SEQ ID NO: 3937269 - DNA, 25 bp, Homo sapien
tcattctttagttagtgggcgtggg

SEQ ID NO: 3937270 - DNA, 25 bp, Homo sapien
agcctcattctttagttagtgggcg

SEQ ID NO: 3937271 - DNA, 25 bp, Homo sapien
cctcattctttagttagtgggcgtg

SEQ ID NO: 3937272 - DNA, 25 bp, Homo sapien
ggccaaactatttcataggaaatgt

SEQ ID NO: 3937273 - DNA, 25 bp, Homo sapien
tgctttcgtgggccttgccaactct

SEQ ID NO: 3937274 - DNA, 25 bp, Homo sapien
atgaccctcttttgtgcaggcactc

SEQ ID NO: 3937275 - DNA, 25 bp, Homo sapien
tgaccctcttttgtgcaggcactca

SEQ ID NO: 3937276 - DNA, 25 bp, Homo sapien
tctcatcagtgtgaggtttggcatg

SEQ ID NO: 3937277 - DNA, 25 bp, Homo sapien
tccagggaggacacatatacttttc

SEQ ID NO: 3937278 - DNA, 25 bp, Homo sapien
ctttggtgcgtcatcggacatgcaa

SEQ ID NO: 3937279 - DNA, 25 bp, Homo sapien
ctgctgccccatgctgttttcggct

SEQ ID NO: 3937280 - DNA, 25 bp, Homo sapien
gacccaatagtcatgcaggaacata

SEQ ID NO: 3937281 - DNA, 25 bp, Homo sapien
gacttctcttgggatcccacgagga

SEQ ID NO: 3937282 - DNA, 25 bp, Homo sapien
cagttatatgcatcaaaggagacca

SEQ ID NO: 3937283 - DNA, 25 bp, Homo sapien
cccatcagaacaggccaggagtggc

SEQ ID NO: 3937284 - DNA, 25 bp, Homo sapien
ttgggcagggcgtttagtactgtct

SEQ ID NO: 3937285 - DNA, 25 bp, Homo sapien
ggagaaatatgaaaaccctggattc

SEQ ID NO: 3937286 - DNA, 25 bp, Homo sapien
ctgtgagagattgaaccatggagaa

SEQ ID NO: 3937287 - DNA, 25 bp, Homo sapien
gcagggcgtttagtactgtctcccc

SEQ ID NO: 3937288 - DNA, 25 bp, Homo sapien
tgattttagggcacaacttggactt

SEQ ID NO: 3937289 - DNA, 25 bp, Homo sapien
taagccacagggatctaatttgact

SEQ ID NO: 3937290 - DNA, 25 bp, Homo sapien
gggcaaatagccacagtacacagtt

SEQ ID NO: 3937291 - DNA, 25 bp, Homo sapien
tgtagttatggtttgtgtaagccac

SEQ ID NO: 3937292 - DNA, 25 bp, Homo sapien
ttacacatttatgccgtatctttct

SEQ ID NO: 3937293 - DNA, 25 bp, Homo sapien
atgttttacacatttatgccgtatc

SEQ ID NO: 3937294 - DNA, 25 bp, Homo sapien
tttacacatttatgccgtatctttc

SEQ ID NO: 3937295 - DNA, 25 bp, Homo sapien
gttttacacatttatgccgtatctt
